United States Patent Application Publication US 2020/0163878 A1 - sequence listing, part 21

SEQ ID NO: 74430 - RNA, 1701 nt, Artificial Sequence
  derived and/or modified CDS sequence (opt1) from hemagglutinin__InfluenzaA__AGT18721
augaaggccauccuggugguccuccuguacaccuucgccaccgcgaacgccgacacgcugugcaucggcuaccacgccaacaacagcaccgacaccguggacaccgugcucgagaagaacgucacggugacccacuccgugaaccugcuggaggacaagcacaacgggaagcucugcaagcugcgcggcgucgcgccccugcaccucgggaagugcaacaucgccggcuggauccuggggaacccggagugcgagagccuguccaccgcgagcuccuggagcuacaucguggagaccuccagcuccgacaacggcacgugcuaccccggcgacuucaucaacuacgaggagcuccgggagcagcugagcuccgugagcuccauccagcgcagcgagaucugcaccaagaccuccagcuggcccaaccacgacuccaacaagggggucaccgccgccugcccccacgccggcgccaagagcuucuacaagaaccugaucuggcucgugaagaaggggaacuccuacccgaagcugagcaagagcuacaucaacgacaagggcaaggaggugcugguccucugggggauccaccaccagaacucccggggccaccagcagagccuguaccagaacgccgacgccuacguguucgugggcacgucccgcuacagcaagaaguucaagcccgagaucgccauccggcccaaggucaaggagcaggacgggcgcauggacuacuacuggacccugaucgagcccggcgacaagaucaccuucgaggccaccgggaaccucguggugccgcgguacgcguucgccauggagcgcaacgccggcuccggcaucaucaucagcgacacgcccguccacgacugcaacacgaccugccagacccccgagggggccaucaacaccucccugcccuuccagaacauccacccgaucaccaucggcaagugccccaaguacgucaagagcaccaagcugcggcucgccaccgggcugcgcaacgugcccuccauccagagccggggccuguucggggcgaucgccggcuucaucgagggcggguggacgggcaugguggacgggugguacggcuaccaccaccagaacgagcagggguccggcuacgccgccgaccucaagagcacccagaacgccaucgacaagaucaccaacaaggugaacuccgugaucgagaagaugaacacccaguucacggcggucggcaaggaguucaaccaccuggagaagcgcaucgagaaccugaacaagaagguggacgacggguuccucgacaucuggaccuacaacgccgagcugcugguccuccuggagaacgagcggacccuggacuaccacgacagcaacgugaagaaccucuacgagaaggugcgcaaccagcugaagaacaacgccaaggagaucggcaacgggugcuucgaguucuaccacaagugcgacaacacgugcauggaguccgucaagaacggcaccuacgacuaccccaaguacagcgaggaggccaagcugaaccgggagaagaucgacggggugaagcucgaguccacccgcaucuaccagauccuggccaucuacagcaccguggcguccagccugguccucguggugagccugggcgccaucuccuucuggaugugcagcaacggcucccugcagugccggaucugcaucuga

SEQ ID NO: 74431 - RNA, 1701 nt, Artificial Sequence
  derived and/or modified CDS sequence (opt1) from hemagglutinin__InfluenzaA__AGT18722
augaaggccauccuggugguccuccuguacaccuucgccaccgcgaacgccgacacgcugugcaucggcuaccacgccaacaacagcaccgacaccguggacaccgugcucgagaagaacgucacggugacccacuccgugaaccugcuggaggacaagcacaacgggaagcucugcaagcugcgcggcgucgcgccccugcaccucgggaagugcaacaucgccggcuggauccuggggaacccggagugcgagagccuguccaccgcgagcuccuggagcuacaucguggagaccuccaagagcaacaaccggacgugcuaccccggcgacuucaucaacuacgaggagcuccgcgagcagcuguccagcguguccagcuucgagcgguucgagaucuuccccaagaccuccagcuggcccaaccacgacuccaacaagggcgucaccgccgccugcccgcacgccggggccaagagcuucuacaagaaccugaucuggcucgugaagaagggcaacuccuaccccaagcugagcaaguccuacaucaacgacaaggggaaggaggugcugguccucuggggcauccaccaccccagcaccacggccgaccagcagagccuguaccagaacgccgacgccuacguguucguggggaccucccgcuacagcaagaaguucaagcccgagaucgccauccggccgaagguccgcgaccaggagggccggaugaacuacuacuggacccugaucgagcccggcgacaagaucaccuucgaggcgacggggaaccucguggugccccgcuacgccuucgccauggagcggaacgccggcuccgggaucaucaucagcgacacccccguccacgacugcaacacgaccugccagaccccggagggcgccaucaacaccucccugcccuuccagaacauccaccccaucaccaucggcaagugccccaaguacgucaagagcaccaagcugcgccucgcgacggggcugcggaacgugccguccauccagagccgcggccuguucggggccaucgccggcuucaucgagggcggguggaccggcaugguggacgggugguacggcuaccaccaccagaacgagcagggguccggcuacgccgccgaccucaagagcacccagaacgcgaucgacaagaucaccaacaaggugaacuccgugaucgagaagaugaacacgcaguucaccgccgucgggaaggaguucaaccaccuggagaagcggaucgagaaccugaacaagaagguggacgacggcuuccucgacaucuggaccuacaacgccgagcugcugguccuccuggagaacgagcgcacccuggacuaccacgacagcaacgugaagaaccucuacgagaaggugcggaaccagcugaagaacaacgccaaggagaucggcaacgggugcuucgaguucuaccacaagugcgacaacacgugcauggaguccgucaagaacggcaccuacgacuaccccaaguacagcgaggaggccaagcugaaccgcgagaagaucgacggggugaagcucgaguccacccggaucuaccagauccuggcgaucuacagcaccguggccuccagccugguccucguggugucccugggcgccaucagcuucuggaugugcagcaacgggucccugcagugccgcaucugcaucuga

SEQ ID NO: 74432 - RNA, 1701 nt, Artificial Sequence
  derived and/or modified CDS sequence (opt1) from hemagglutinin__InfluenzaA__AGT18723
augaaggccauccuggugguccuccuguacaccuucgccaccgcgaacgccgacacgcugugcaucggcuaccacgccaacaacagcaccgacaccguggacaccgugcucgagaagaacgucacggugacccacuccgugaaccugcuggaggacaagcacaacgggaagcucugcaagcugcgcggcgucgcgccccugcaccucgggaagugcaacaucgccggcuggauccuggggaacccggagugcgagagccuguccaccgccagcuccuggagcuacaucguggagaccuccaagacgaacaaccggaccugcuaccccggcgacuucaucaacuacgaggagcuccgcgagcagcugagcuccgugagcuccuucgagcgguucgagaucuuccccaagaccagcuccuggcccaaccacgacagcaacaagggcgucaccgccgccugcccgcacgccggggcgaaguccuucuacaagaaccugaucuggcucgugaagaagggcaacagcuaccccaagcuguccaagagcuacaucaacgacaaggggaaggaggugcugguccucuggggcauccaccaccagaacaagaaggccgagcagcagacgcccuaccagaacgccgacgccuacguguucguggggaccucccgcuacagcaagaaguucaagcccgagaucgccauccggccgaagguccgcgaccaggagggccggauggacuacuacuggacccugaucgagcccggcgacaagaucaccuucgaggcgacggggaaccugguggugccccgcuacgccuucgccauggagcggaacgccggcagcgggaucaucaucuccgacacccccguccacgacugcaacacgaccugccagaccccggagggcgccaucaacaccagccuccccuuccagaacauccaccccaucaccaucggcaagugccccaaguacgugaaguccaccaagcugcgccuggcgacggggcuccggaacgugccgagcauccagucccgcggccuguucggggccaucgccggcuucaucgagggcggguggaccggcauggucgacgggugguacggcuaccaccaccagaacgagcaggggagcggcuacgccgccgaccugaaguccacccagaacgcgaucgacaagaucaccaacaaggugaacagcgugaucgagaagaugaacacgcaguucaccgccgucgggaaggaguucaaccaccucgagaagcggaucgagaaccugaacaagaagguggacgacggcuuccuggacaucuggaccuacaacgccgagcuccugguccugcucgagaacgagcgcacccuggacuaccacgacuccaacgugaagaaccuguacgagaaggugcggaaccagcucaagaacaacgccaaggagaucggcaacgggugcuucgaguucuaccacaagugcgacaacacgugcauggagagcgucaagaacggcaccuacgacuaccccaaguacuccgaggaggccaagcugaaccgcgagaagaucgacggggugaagcuggagagcacccggaucuaccagauccucgcgaucuacuccaccguggccagcucccugguccugguggugagccucggcgccaucuccuucuggaugugcagcaacgggucccugcagugccgcaucugcaucuga

SEQ ID NO: 74433 - RNA, 1701 nt, Artificial Sequence
  derived and/or modified CDS sequence (opt1) from hemagglutinin__InfluenzaA__AGT18724
augaaggccauccuggugguccuccuguacaccuucgccaccgcgaacgccgacacgcugugcaucggcuaccacgccaacaacagcaccgacaccguggacaccgugcucgagaagaacgucacggugacccacuccgugaaccugcuggaggacaagcacaacgggaagcucugcaagcugcgcggcgucgugccccugcaccucgggaagugcaacaucgccggcuggauccuggggaacccggagugcgagagccuguccaccgccagcuccuggagcuacaucguggagaccuccaagacgaacaaccggaccugcuaccccggcgacuucaucaacuacgaggagcuccgcgagcagcugagcuccgucagcuccuucgagcgguucgagaucuuccccaagaccagcuccuggcccaaccacgacagcaacaagggcgugaccgcggccugcccgcacgccggggccaaguccuucuacaagaaccugaucuggcucgugaagaagggcaacagcuaccccaagcuguccaagagcuacaucaacgacaaggggaaggagguccuggugcucuggggcauccaccaccccuccacgaccgcggaccagcagacccuguaccagaacgccgacgccuacguguucgucgggaccagccgcuacagcaagaaguucaagcccgagaucgccauccggccgaaggugcgcgaccaggagggccggaugaacuacuaccgcacgcugaucgagcccgagaacaagaucaccuucgaggccaccggcaaccucguggucccccgguacgcguucgccauggagcgcaacgccggguccggcaucaucaucagcgacacccccgugcacgacugcaacacgaccugccagaccccggagggggccaucaacaccucccugcccuuccagaacauccaccccaucacgaucggcaagugccccaaguacgucaagagcaccaagcugcggcucgccaccggccugcgcaacgugccguccauccagagccgggggcuguucggcgcgaucgccggguucaucgagggcggguggaccggcaugguggacggcugguacggguaccaccaccagaacgagcagggcuccggguacgccgccgaccucaagagcacgcagaacgccaucgacaagaucaccaacaaggugaacuccgucaucgagaagaugaacacccaguucaccgcggugggcaaggaguucaaccaccuggagaagcgcaucgagaaccugaacaagaaggucgacgacggguuccucgacaucuggacguacaacgccgagcugcuggugcuccuggagaacgagcggacccuggacuaccacgacagcaacgugaagaaccucuacgagaagguccgcaaccagcugaagaacaacgccaaggagaucggcaacggcugcuucgaguucuaccacaagugcgacaacacgugcauggaguccgugaagaacgggaccuacgacuaccccaaguacagcgaggaggccaagcugaaccgggagaagaucgacggcgugaagcucgaguccacccgcaucuaccagauccuggccaucuacagcaccgucgcguccagccuggugcucguggucucccugggggccaucagcuucuggaugugcuccaacggcagccugcagugccggaucugcaucuga

SEQ ID NO: 74434 - RNA, 1701 nt, Artificial Sequence
  derived and/or modified CDS sequence (opt1) from hemagglutinin__InfluenzaA__AGT18725
augaaggugauccuggucgugcuccuguacaccuucgccaccgccaacgcggacacgcugugcaucggcuaccacgccaacaacagcaccgacaccguggacaccguccucgagaagaacgugacggugacccacuccgucaaccugcuggaggacaagcacaacgggaagcucugcaagcugcgcggcguggcgccccugcaccucgggaagugcaacaucgccggcuggauccuggggaacccggagugcgagagccuguccaccgccagcuccuggagcuacaucguggagaccuccagcuccgacaacggcacgugcuaccccggcgacuucaucaacuacgaggagcuccgggagcagcugagcuccgucagcuccuucgagcgcuucgagaucuuccccaagaccagcuccuggcccaaccacgacagcaacaagggggugaccgccgccugcccgcacgccggcgccaaguccuucuacaagaaccugaucuggcucgugaagaaggggaacagcuaccccaagcuguccaagagcuacaucaacgacaagggcaaggagguccuggugcucugggggauccaccaccccagcaccuccgcggaccagcagagccuguaccagaacgccgacgccuacguguucgucggcacgucccgguacagcaagaaguucaagcccgagaucgccauccgcccgaaggugcgggaccaggagggccgcaugaacuacuacuggacccugguggagcccggggacaagaucaccuucgaggccaccggcaaccucgucgugccccgguacgcguucgccauggagcgcaacgccggguccggcaucaucaucagcgacacgcccgugcacgacugcaacacgaccugccagaccccggagggcgccaucaacaccucccugcccuuccagaacauccaccccaucaccaucgggaagugccccaaguacgucaagagcaccaagcugcggcucgccaccggccugcgcaacgugccguccauccagagccgggggcuguucggcgcgaucgccggguucaucgagggcggcuggacggggaugguggacggcugguacggguaccaccaccagaacgagcagggcuccggguacgccgccgaccucaagagcacccagaacgccaucgacaagaucaccaacaaggucaacuccgugaucgagaagaugaacacccaguucacggcggucggcaaggaguucaaccaccuggagaagcgcaucgagaaccugaacaagaagguggacgacggcuuccucgacaucuggaccuacaacgccgagcugcuggugcuccuggagaacgagcggacccuggacuaccacgacagcaacgucaagaaccucuacgagaaggugcgcacccagcugaagaacaacgccaaggagaucgggaacggcugcuucgaguucuaccacaagugcgacaacacgugcauggaguccgugaagaacgggaccuacgacuaccccaaguacagcgaggaggccaagcugaaccgggagaagaucgacggcgucaagcucgaguccacccgcaucuaccagauccuggccaucuacagcaccguggcguccagccuggugcucgucgugagccugggggccaucuccuucuggaugugcagcaacggcucccugcagugccggaucugcaucuga

SEQ ID NO: 74435 - RNA, 1701 nt, Artificial Sequence
  derived and/or modified CDS sequence (opt1) from hemagglutinin__InfluenzaA__AGT18734
augaaggccauccuggugguccuccuguacaccuucgccaccgcgaacgccgacacgcugugcaucggcuaccacgccaacaacagcaccgacaccguggacaccgugcucgagaagaacgucacggugacccacuccgugaaccugcuggaggacaagcacaacgggaagcucugcaagcugcgcggcgucgcgccccugcaccucgggaagugcaacaucgccggcuggauccuggggaacccggagugcgagagccuguccaccgccagcuccuggagcuacaucguggagaccuccagcuccgacaacggcacgugcuaccccggcgacuucaucaacuacgaggagcuccgggagcagcugagcuccgugagcuccuucgagcgcuucgagaucuuccccaagaccagcuccuggcccaaccacgacagcaacaagggggucaccgccgccugcccgcacgccggcgcgaaguccuucuacaagaaccugaucuggcucgugaagaaggggaacagcuaccccaagcuguccaagagcuacaucaacgacaagggcaaggaggugcugguccucugggggauccaccaccccagcaccacggccgaccagcagucccuguaccagaacgccgacgccuacguguucgugggcaccagccgguacuccaagaaguucaagcccgagaucgccauccgcccgaagguccgggaccaggagggccgcaucaacuacuacuggacccugaucgagcccggggacaagaucaccuucgaggcgacgggcaaccucguggugccccgguacgccuucgccauggagcgcaacgccgggagcggcaucaucaucuccgacacccccguccacgacugcaacacgaccugccagaccccggagggcgccaucaacaccagccugcccuuccagaacauccaccccaucaccaucgggaagugccccaaguacgugaaguccaccaagcugcggcucgcgacgggccugcgcaacgugccgagcauccagucccgggggcuguucggcgccaucgccggguucaucgagggcggcuggaccgggauggucgacggcugguacggguaccaccaccagaacgagcagggcagcggguacgccgccgaccucaaguccacccagaacgcgaucgacaagaucaccaacaaggugaacagcgugaucgagaagaugaacacgcaguucaccgccgucggcaaggaguucaaccaccuggagaagcgcaucgagaaccugaacaagaagguggacgacggcuuccucgacaucuggaccuacaacgccgagcugcugguccuccuggagaacgagcggacccuggacuaccacgacuccaacgugaagaaccucuacgagaaggugcgcaaccagcugaagaacaacgccaaggagaucgggaacggcugcuucgaguucuaccacaagugcgacaacacgugcauggagagcgucaagaacgggaccuacgacuaccccaaguacuccgaggaggccaagcugaaccgggagaagaucgacggcgugaagcucgagagcacccgcaucuaccagauccuggcgaucuacuccaccguggccagcucccugguccucguggugagccugggggccaucagcuucuggaugugcuccaacggcagccugcagugccggaucugcaucuga

SEQ ID NO: 74436 - RNA, 1701 nt, Artificial Sequence; identical to SEQ ID NO: 74147
  derived and/or modified CDS sequence (opt1) from hemagglutinin__InfluenzaA__AGT18735

SEQ ID NO: 74437 - RNA, 1701 nt, Artificial Sequence
  derived and/or modified CDS sequence (opt1) from hemagglutinin__InfluenzaA__AGT18748
augaagaccaucaucgcccugagcuacauccucugccugguguucgcccagaagcugcccggcaacgacaacuccaccgcgacgcucugccuggggcaccacgccgucccgaacggcaccaucgugaagaccaucaccaacgaccgcaucgaggugacgaacgccaccgagcugguccagaacagcuccaucggggagaucugcgacagcccccaccagauccucgacgaggagaacugcacccugaucgacgcccugcucggcgacccccagugcgacgacuuccagaacaagaagugggaccuguucguggagcgguccaaggccuacagcaacugcuaccccuacgacgugccggacuacgcgucccugcgcagccucgucgccuccagcgggacccuggaguucaacaacgaguccuucaacugggccggcgugacgcagaacggcaccagcuccgccugccggcgcgggagcaacuccagcuucuucucccggcugaacuggcucacccaccugaacuucaaguaccccgcgcugaacgugaccaugcccaacaacgagcaguucgacaagcucuacaucuggggcguccaccaccccagcacggacaaggaccagaucuuccuguacgcccaguccagcgggcgcaucaccgugagcaccaagcggucccagcaggccgugaucccgaacaucggcagccgcccccggauccgcaacauccccucccggaucagcaucuacuggaccaucgucaagcccggggacauccugcucaucaacuccacgggcaaccugaucgccccgcgcggcuacuucaagauccggagcgggaaguccagcaucaugcgcuccgacgcccccaucggcaagugcaagagcgagugcaucacccccaacggguccauccccaacgacaagccguuccagaacgugaaccggaucaccuacggcgcgugcccccgcuacgugaagcagagcacccugaagcucgccacgggcaugcggaacguccccgagaagcagacccgcgggaucuucggcgccaucgccggguucaucgagaacggcugggaggggaugguggacggcugguacggcuuccggcaccagaacuccgaggggcgcggccaggccgcggaccucaagagcacccaggccgccaucgaccagaucaacgggaagcugaaccggcugaucggcaagaccaacgagaaguuccaccagaucgagaaggaguucuccgagguggaggggcgcauccaggaccuggagaaguacgucgaggacacgaagaucgaccuguggagcuacaacgccgagcuccugguggcccuggagaaccagcacaccaucgaccucaccgacuccgagaugaacaagcuguucgagaagaccaagaagcagcugcgcgagaacgcggaggacaugggcaacggcugcuucaagaucuaccacaagugcgacaacgccugcaucgggagcauccggaacggcacguacgaccacgacguguaccgcgacgaggcccucaacaaccgguuccagaucaagggggucgagcugaaguccggcuacaaggacuggauccuguggaucagcuucgccaucagcugcuuccuccugugcguggcccugcucggguucaucaugugggcgugccagaagggcaacauccgcugcaacaucugcaucuga

SEQ ID NO: 74438 - RNA, 1701 nt, Artificial Sequence
  derived and/or modified CDS sequence (opt1) from hemagglutinin__InfluenzaA__AGT18749
augaagaccaucaucgcccugagcuacauccucugccugguguucgcccagaagcugcccgagaacgacaacuccaccgcgacgcucugccugggccaccacgccgucccgaacgggaccaucgugaagaccaucaccgacgaccagaucgaggugacgaacgccaccgagcugguccagaacagcuccaccggcgagaucugcgacagcccccaccagauccucgacggggagaacugcacccugaucgacgcccugcucggcgacccccagugcgacggguuccagaacaagaagugggaccuguucguggagcgcuccaaggccuacagcaacugcuaccccuacgacgugccggacuacgcgucccugcggagccucgucgccuccagcggcacgcuggaguucaacaacgaguccuucaacuggaccggcgugacccagaacgggaccagcuccgccugcauccgccggagcaacaacuccuucuucagccgccugaacuggcucacgcaccugaacuucaaguaccccgcccugaacgugaccaugcccaacaacgagcaguucgacaagcucuacaucuggggcguccaccaccccgggaccgacaaggaccagaucuuccuguacgcgcaggccuccggccggaucaccgugagcacgaagcgcucccagcaggccgugaucccgaacaucgggagccggccccgcguccggaacauccccagccgcaucuccaucuacuggaccaucgugaagcccggcgacauccugcucaucaacagcaccggcaaccugaucgccccgcggggguacuuccgcauccgguccggccgcagcuccaucaugcggagcgacgcccccaucgggaagugcaacuccgagugcaucacccccaacggcagcauccccaacgacaagccguuccagaacgugaaccgcaucacguacggcgcgugcccccgguacgucaagcagaacacccugaagcucgccaccgggaugcgcaacgugcccgagaagcagacccggggcaucuucggggccaucgccggcuucaucgagaacgggugggagggcaugguggacggcugguacggguuccgccaccagaacuccgagggccgggggcaggccgcggaccucaagagcacgcaggccgccaucgaccagaucaacggcaagcugaaccgccugaucgggaagaccaacgagaaguuccaccagaucgagaaggaguucuccgaggucgagggccgcauccaggaccuggagaaguacguggaggacaccaagaucgaccuguggagcuacaacgccgagcuccugguggcccuggagaaccagcacaccaucgaccucacggacuccgagaugaacaagcuguucgagaagaccaagaagcagcugcgggagaacgcggaggacaugggcaacgggugcuucaagaucuaccacaagugcgacaacgccugcaucggcagcauccgcaacgggaccuacgaccacgacgucuaccgggacgaggcccucaacaaccgcuuccagaucaagggcguggagcugaaguccggguacaaggacuggauccuguggaucagcuucgccaucuccugcuuccuccugugcguggcccugcucggcuucaucaugugggcgugccagaagggcaacauccggugcaacaucugcaucuga

SEQ ID NO: 74439 - RNA, 1701 nt, Artificial Sequence
  derived and/or modified CDS sequence (opt1) from hemagglutinin__InfluenzaA__AGT18751
augaagaccgugaucgcccugagcuacauccucugccuggucuucgcccagaagcugcccggcaacgacaacuccaccgcgacgcucugccuggggcaccacgccgugccgaacggcaccaucgugaagaccaucaccaacgaccagaucgaggucacgaacgccaccgagcuggugcagaacagcuccaccggggagaucugcgacagcccccaccagauccucgacggcgagaacugcacccugaucgacgcccugcucggggacccccagugcgacggcuuccagaacaagaagugggaccuguucguggagcgcuccaaggccuacagcaacugcuaccccuacgacgucccggacuacgcgucccugcggagccucguggccuccagcggcacgcuggaguucaacaacgaguccuucaacuggaccggggugacccagaacggcaccagcuccgccugcauccgccggagcaacaacuccuucuucagccgccugaacuggcucacgcaccugaacuucaaguaccccgcccugaacgucaccaugcccaacaacgagcaguucgacaagcucuacaucuggggcgugcaccaccccgggaccgacaaggaccagaucuuccuguacgcgcaggccuccgggcggaucaccgugagcacgaagcgcucccagcaggccgucaucccgaacaucggcagccggccccgcgugcggaacauccccagccgcaucuccaucuacuggaccaucgugaagcccggcgacauccugcucaucaacagcaccgggaaccugaucgccccgcggggcuacuucaagauccgcuccgggcggagcuccaucaugcgcagcgacgcccccaucggcaagugcaacuccgagugcaucacccccaacggcagcauccccaacgacaagccguuccagaacgucaaccggaucacguacggggcgugcccccgcuacgugaagcagaacacccugaagcucgccaccggcaugcggaacgugcccgagaagcagacccgcgggaucuucggcgccaucgccggguucaucgagaacggcugggagggcauggucgacgggugguacggcuuccggcaccagaacuccgaggggcgcggccaggccgcggaccucaagagcacgcaggccgccaucgaccagaucaacgggaagcugaaccggcugaucggcaagaccaacgagaaguuccaccagaucgagaaggaguucuccgagguggagggccgcauccaggaccuggagaaguacguggaggacaccaagaucgaccuguggagcuacaaguccgagcuccuggucgcccuggagaaccagcacaccaucgaccucacggacagcgagaugaacaagcuguucgagaagaccaagaagcagcugcgcgagaacgccgaggacauggggaacggcugcuucaagaucuaccacaagugcgacaacgcgugcaucggguccauccggaacggcaccuacgaccacgacguguaccgcgacgaggcccucaacaaccgguuccagaucaaggggguggagcucaagagcggcuacaaggacuggauccuguggaucuccuucgccaucagcugcuuccugcugugcgucgcccugcucggcuucaucaugugggccugccagaaggggaacauccgcugcaacaucugcaucuga

SEQ ID NO: 74440 - RNA, 1701 nt, Artificial Sequence
  derived and/or modified CDS sequence (opt1) from hemagglutinin__InfluenzaA__AGT18752
augaagaccaucaucgcccugagcuacaucaucugccucguguucgcccagaagcugcccggcaacgacaacuccaccgcgacgcugugccucgggcaccacgccgucccgaacggcaccaucgugaagaccaucaccaacgaccagaucgaggugacgaacgccaccgagcugguccagaacagcuccaccggggagaucugcaacagcccccaccagauccuggacggcgagaacugcacccucaucgacgcccugcugggggacccccagugcgacggcuuccagaacaagaagugggaccucuucguggagcgcuccaaggccuacagcaacugcuaccccuacgacgugccggacuacgcgucccugcggagccuggucgccuccagcggcacgcucgaguucaacaacgaguccuucaacuggaccggggugacccagaacggcaccagcuccgccugcauccgccggagcaacaacuccuucuucagccgccugaacuggcugacgcaccucaacuucaaguaccccgcccugaacgugaccaugcccaacaacgagcaguucgacaagcuguacaucuggggcguccaccaccccgggaccgacaaggaccagaucuuccucuacgcgcaggccuccgggcggaucaccgugagcacgaagcgcucccagcaggccgugaucccgaacaucggcagccggccccgcguccggaacauccccagccgcaucuccaucuacuggaccaucgugaagcccggcgacauccugcugaucaacagcaccgggaaccucaucgccccgcggggcuacuucaagauccgcuccgggcggagcuccaucaugcgcagcgacgcccccaucggcaagugcaacuccgagugcaucacccccaacggcagcauccccaacgacaagccguuccagaacgugaaccggaucacguacggggcgugcccccgcuacgucaagcagaacacccugaagcuggccaccggcaugcggaacgugcccgagaagcagacccgcgggaucuucggcgccaucgccggguucaucgagaacggcugggagggcaugguggacgggugguacggcuuccggcaccagaacuccgaggggcgcggccaggccgcggaccucaagagcacgcaggccgccaucgaccagaucaacgggaagcugaaccggcugaucggcaagaccaacgagaaguuccaccagaucgagaaggaguucuccgaggucgagggccgcauccaggaccucgagaaguacguggaggacaccaagaucgaccuguggagcuacuccagcgagcugcucguggcccuggagaaccagcacaccaucgaccugacggacuccgagaugaacaagcuguucgagaagaccaagaagcagcuccgcgagaacgccgaggacauggggaacggcugcuucaagaucuaccacaagugcgacaacgcgugcaucgggagcauccggaacggcaccuacgaccacgacgucuaccgcgacgaggcccugaacaaccgguuccagaucaaggggguggagcucaaguccggcuacaaggacuggauccuguggaucagcuucgccaucuccugcuuccugcucugcguggcccugcugggcuucaucaugugggccugccagaaggggaacauccgcugcaacaucugcaucuga

SEQ ID NO: 74441 - RNA, 1701 nt, Artificial Sequence
  derived and/or modified CDS sequence (opt1) from hemagglutinin__InfluenzaA__AGT18753
augaagaccaucaucgcccugagcuacauccucugccugguguucgcccagaagcugcccggcaacgacaacuccaccgcgacgcucugccuggggcaccacgccgucccgaacggcaccaucgugaagaccaucaccaacgaccagaucgaggugacgaacgccaccgagcugguccagaacagcuccaccggggagaucugcaacagcccccaccagauccucgacggcgagaacugcacccugaucgacgcccugcucggggacccccagugcgacggcuuccagaacaagaagugggaccuguucguggagcgcuccaaggccuacagcaacugcuaccccuacgacgugccggacuacgcgucccugcggagccucgucgccuccagcggcacgcuggaguucaacaacgaguccuucaacuggaccggggugacccagaacggcaccagcuccgccugcauccgccggagcaacaacuccuucuucagccgccugaacuggcucacgcaccugaacuucaaguaccccgcccugaacgugaccaugcccaacaacgagcaguucgacaagcucuacaucuggggcguccaccaccccgggaccgacaaggaccagaucuuccuguacgcgcaggccuccgggcggaucaccgugagcacgaagcgcucccagcaggccgugaucccgaacaucggcagccggccccgcguccggaacauccccagccgcaucuccaucuacuggaccaucgugaagcccggcgacauccugcucaucaacagcaccgggaaccugaucgccccgcggggcuacuucaagauccgcuccgggcggagcuccaucaugcgcagcgacgcccccaucggcaagugcaacuccgagugcaucacccccaacggcagcauccccaacgacaagccguuccagaacgugaaccggaucacguacggggcgugcccccgcuacgucaagcagaacacccugaagcucgccaccggcaugcggaacgugcccgagaagcagacccgcgggaucuucggcgccaucgccggguucaucgagaacggcugggagggcaugguggacgggugguacggcuuccggcaccagaacuccgaggggcgcggccaggccgcggaccucaagagcacgcaggccgccaucgaccagaucaacgggaagcugaaccggcugaucggcaagaccaacgagaaguuccaccagaucgagaaggaguucuccgaggucgagggccgcauccaggaccuggagaaguacguggaggacaccaagaucgaccuguggagcuacaaguccgagcuccugguggcccuggagaaccagcacaccaucgaccucacggacagcgagaugaacaagcuguucgagaagaccaagaagcagcugcgcgagaacgccgaggacauggggaacggcugcuucaagaucuaccacaagugcgacaacgcgugcaucggguccauccggaacggcaccuacgaccacgacgucuaccgcgacgaggcccucaacaaccgguuccagaucaaggggguggagcucaagagcggcuacaaggacuggauccuguggaucuccuucgccaucagcugcuuccugcugugcguggcccugcucggcuucaucaugugggccugccagaaggggaacauccgcugcaacaucugcaucuga

SEQ ID NO: 74442 - RNA, 1701 nt, Artificial Sequence
  derived and/or modified CDS sequence (opt1) from hemagglutinin__InfluenzaA__AGT18754
augaagaccaucaucgcccugagcuacauccucugccugguguucgcccagaagcugcccgagaacgacaacuccaccgcgacgcucugccugggccaccacgccgucccgaacgggaccaucgugaagaccaucaccgacgaccagaucgaggugacgaacgccaccgagcugguccagaacagcuccaccggcgagaucugcgacagcccccaccagauccucgacggggagaacugcacccugaucgacgcccugcucggcgacccccagugcgacggguuccagaacaagaagugggaccuguucguggagcgcggcaaggccuacuccaacugcuaccccuacgacgugccggacuacgcgagccugcggucccucgucgccacgagcggcacccuggaguucaacaacgaguccuucaacuggaccggggugacccagaacggcacgagcuccgccugcauccgccggagcaacaacuccuucuucagccgccugaacuggcucacccaccugaacuucaaguaccccgcccugaacgugaccaugcccaacaacgagcaguucgacaagcucuacaucuggggcguccaccaccccgggaccgacaaggaccagaucuuccuguacgcgcaggccuccgggcggaucacggugagcaccaagcgcucccagcaggccgugaucccgaacaucggcagccggccccgcguccggaacauccccucccgcaucagcaucuacuggaccaucgugaagcccggcgacauccugcucaucaacagcaccgggaaccugaucgccccgcggggcuacuucaagauccgcuccgggcggagcuccaucaugcgcagcgacgcccccaucggcaagugcaacuccgagugcaucacgcccaacggcagcauccccaacgacaagccguuccagaacgugaaccggaucaccuacggggcgugcccccgcuacgucaagcagaacacccugaagcucgccaccggcaugcggaacgugcccgagaagcagacgcgcgggaucuucggcgccaucgccggguucaucgagaacggcugggagggcaugguggacgggugguacggcuuccggcaccagaacuccgaggggcgcggccaggccgcggaccucaagagcacccaggccgccaucgaccagaucaacgggaagcugaaccggcugaucggcaagaccaacgagaaguuccaccagaucgagaaggaguucuccgaggucgagggccgcauccaggaccuggagaaguacguggaggacaccaagaucgaccuguggagcuacaacgccgagcuccugguggcccuggagaaccagcacacgaucgaccucaccgacuccgagaugaacaagcuguucgagaagaccaagaagcagcugcgcgagaacgcggaggacauggggaacggcugcuucaagaucuaccacaagugcgacaacgccugcaucgggagcauccggaacggcaccuacgaccacgacgucuaccgcgacgaggcccucaacaaccgguuccagaucaaggggguggagcugaaguccggcuacaaggacuggauccuguggaucagcuucgccaucuccugcuuccuccugugcguggcccugcucggcuucaucaugugggcgugccagaaggggaacauccgcugcaacaucugcaucuga

SEQ ID NO: 74443 - RNA, 1701 nt, Artificial Sequence
  derived and/or modified CDS sequence (opt1) from hemagglutinin__InfluenzaA__AGT18756
augaagaccaucaucgcccugagcuacgugcucugccuggucuucgcccagaagcugcccggcaacgacaacuccaccgcgacgcucugccuggggcaccacgccgugccgaacggcaccaucgugaagaccaucaccaacgaccgcaucgaggucacgaacgccaccgagcuggugcagaacagcuccaucggggagaucugcgacagcccccaccagauccucgacggcgagaacugcacccugaucgacgcccugcucggggacccccagugcgacgacuuccagaacaagaagugggaccuguucguggagcgguccaaggccuacagcaacugcuaccccuacgacgucccggacuacgcgucccugcgcagccucguggccuccagcggcacccuggaguucaacaacgaguccuucaacugggccggcgugacgcagaacgggaccagcuccgccugccggcgcggcagcaacuccagcuucuucucccggcugaacuggcucacccaccugaacuucaaguaccccgcgcugaacgucaccaugcccaacaacgagcaguucgacaagcucuacaucuggggcgugcaccaccccgggacggacaaggaccagaucuuccuguacgcccagagcuccgggcgcaucaccgugagcaccaagcggagccagcaggccgucaucccgaacaucggcucccgcccccggauccgcaacauccccagccggaucuccaucuacuggaccaucgugaagcccggcgacauccugcucaucaacagcacggggaaccugaucgccccgcgcggcuacuucaagauccgguccggcaagagcuccaucaugcgcagcgacgcccccaucgggaagugcaaguccgagugcaucacccccaacggcagcauccccaacgacaagccguuccagaacgugaaccggaucaccuacggggcgugcccccgcuacgucaagcaguccacccugaagcucgccacgggcaugcggaacgugcccgagaagcagacccgcgggaucuucggcgccaucgccggguucaucgagaacggcugggagggcaugguggacgggugguacggcuuccggcaccagaacagcgaggggcgcggccaggccgcggaccugaaguccacccaggccgccaucgaccagaucaacgggaagcugaaccggcucaucggcaagaccaacgagaaguuccaccagaucgagaaggaguucagcgaggucgagggccgcauccaggaccuggagaaguacguggaggacacgaagaucgaccugugguccuacaagagcgagcuccugguggcccuggagaaccagcacaccaucgaccucaccgacuccgagaugaacaagcuguucgagaagaccaagaagcagcugcgcgagaacgccgaggacauggggaacggcugcuucaagaucuaccacaagugcgacaacgcgugcaucgggagcauccggaacggcacguacgaccacgacgucuaccgcgacgaggcccucaacaaccgguuccagaucaaggggguggagcugaaguccggcuacaaggacuggauccuguggaucagcuucgccaucagcugcuuccuccugugcguggcccugcucggcuucaucaugugggccugccagaaggggaacauccgcugcaacaucugcaucuga

SEQ ID NO: 74444 - RNA, 1701 nt, Artificial Sequence
  derived and/or modified CDS sequence (opt1) from hemagglutinin__InfluenzaA__AGT18757
augaagaccaucaucgcccugagcuacauccucugccugguguucgcccagaagcugcccggcaacgacaacuccaccgcgacgcucugccuggggcaccacgccgucccgaacggcaccaucgugaagaccaucaccaacgaccgcaucgaggugacgaacgccaccgagcugguccagaacagcuccaucggggagaucugcgacagcccccaccagauccucgacggcgagaacugcacccugaucgacgcccugcucggggacccccagugcgacgacuuccagaacaagaagugggaccuguucguggagcgguccaaggccuacagcaacugcuaccccuacgacgugccggacuacgcgucccugcgcagccucgucgccuccagcggcacccuggaguucaacaacgaguccuucaacugggccggcgugacgcagaacgggaccagcuccgccugccggcgcggcagcaacuccagcuucuucucccggcugaacuggcucacccaccugaacuucaaguaccccgcgcugaacgugaccaugcccaacaacgagcaguucgacaagcucuacaucuggggcguccaccaccccgggacggacaaggaccagaucuuccuguacgcccagagcuccgggcgcaucaccgugagcaccaagcggagccagcaggccgugaucccgaacaucggcucccgcccccggauccgcaacauccccagccggaucuccaucuacuggaccaucgucaagcccggcgacauccugcucaucaacagcacggggaaccugaucgccccgcgcggcuacuucaagauccgguccggcaagagcuccaucaugcgcagcgacgcccccaucgggaagugcaaguccgagugcaucacccccaacggcagcauccccaacgacaagccguuccagaacgugaaccggaucaccuacggggcgugcccccgcuacgugaagcaguccacccugaagcucgccacgggcaugcggaacguccccgagaagcagacccgcgggaucuucggcgccaucgccggguucaucgagaacggcugggagggcaugguggacgggugguacggcuuccggcaccagaacagcgaggggcgcggccaggccgcggaccugaaguccacccaggccgccaucgaccagaucaacgggaagcugaaccggcucaucggcaagaccaacgagaaguuccaccagaucgagaaggaguucagcgagguggagggccgcauccaggaccuggagaaguacgucgaggacacgaagaucgaccugugguccuacaacgccgagcuccugguggcccuggagaaccagcacaccaucgaccucaccgacagcgagaugaacaagcuguucgagaagaccaagaagcagcugcgcgagaacgcggaggacauggggaacggcugcuucaagaucuaccacaagugcgacaacgccugcaucggguccauccggaacggcacguacgaccacgacguguaccgcgacgaggcccucaacaaccgguuccagaucaagggggucgagcucaagagcggcuacaaggacuggauccuguggaucuccuucgccaucagcugcuuccugcugugcguggcccugcucggcuucaucaugugggcgugccagaaggggaacauccgcugcaacaucugcaucuga

SEQ ID NO: 74445 - RNA, 1701 nt, Artificial Sequence
  derived and/or modified CDS sequence (opt1) from hemagglutinin__InfluenzaA__AGT18758
augaagaccaucaucgcccugagcuacauccucugccugguguucgcccagaagcugcccggcaacgacaacuccaccgcgacgcucugccuggggcaccacgccgucccgaacggcaccaucgugaagaccaucaccaacgaccgcaucgaggugacgaacgccaccgagcugguccagaacagcuccaucggggagaucugcgacagcccccaccagauccucgacggcgagaacugcacccugaucgacgcccugcucggggacccccagugcgacgacuuccagaacaagaagugggaccuguucguggagcgguccaaggccuacagcaacugcuaccccuacgacgugccggacuacgcgucccugcgcagccucgucgccuccagcggcacccuggaguucaacaacgaguccuucaacugggccggcgugacgcagaacgggaccagcuccgccugccggcgcggcagcaacuccagcuucuucucccggcugaacuggcucacccaccugaacuucaaguaccccgcgcugaacgugaccaugcccaacaacgagcaguucgacaagcucuacaucuggggcguccaccaccccgggacggacaaggaccagaucuuccuguacgcccagagcuccgggcgcaucaccgugagcaccaagcggagccagcaggccgugaucccgaacaucggcucccgcccccggauccgcaacauccccagccggaucuccaucuacuggaccaucgucaagcccggcgacauccugcucaucaacagcacggggaaccugaucgccccgcgcggcuacuucaagauccgguccggcaagagcuccaucaugcgcagcgacgcccccaucgggaagugcaaguccgagugcaucacccccaacggcagcauccccaacgacaagccguuccagaacgugaaccggaucaccuacggggcgugcccccgcuacgugaagcaguccacccugaagcucgccacgggcaugcggaacguccccgagaagcagacccgcgggaucuucggcgccaucgccggguucaucgagaacggcugggagggcaugguggacgggugguacggcuuccggcaccagaacagcgaggggcgcggccaggccgcggaccugaaguccacccaggccgccaucgaccagaucaacgggaagcugaaccggcucaucggcaagaccaacgagaaguuccaccagaucgagaaggaguucagcgagguggagggccgcauccaggaccuggagaaguacgucgaggacacgaagaucgaccugugguccuacagcuccgagcuccugguggcccuggagaaccagcacaccaucgaccucaccgacagcgagaugaacaagcuguucgagaagaccaagaagcagcugcgcgagaacgccgaggacauggggaacggcugcuucaagaucuaccacaagugcgacaacacgugcaucggguccauccggaacggcaccuacgaccacgacguguaccgcgacgaggcgcucaacaaccgguuccagaucaagggggucgagcucaagagcggcuacaaggacuggauccuguggaucagcuucgccaucuccugcuuccuggugugcguggcccugcugggcuucaucaugugggccugccagaaggggaacauccgcugcaacaucugcaucuga

SEQ ID NO: 74446 - RNA, 1701 nt, Artificial Sequence
  derived and/or modified CDS sequence (opt1) from hemagglutinin__InfluenzaA__AGT18759
augaagaccaucaucgcccugagcuacauccucugccugguguucgcccagaagcugcccggcaacgacaacuccaccgcgacgcucugccuggggcaccacgccgucccgaacggcaccaucgugaagaccaucaccaacgaccgcaucgaggugacgaacgccaccgagcugguccagaacagcuccaucggggagaucugcgacagcccccaccagauccucgacggcgagaacugcacccugaucgacgcccugcucggggacccccagugcgacgacuuccagaacaagaagugggaccuguucguggagcgguccaaggccuacagcaacugcuaccccuacgacgugccggacuacgcgucccugcgcagccucgucgccuccagcggcacccuggaguucaacaacgaguccuucaacugggccggcgugacgcagaacgggaccagcuccgccugccggcgcggcagcaacuccagcuucuucucccggcugaacuggcucacccaccugaacuucaaguaccccgcgcugaacgugaccaugcccaacaacgagcaguucgacaagcucuacaucuggggcguccaccaccccgggacggacaaggaccagaucuuccuguacgcccagagcuccgggcgcaucaccgugagcaccaagcggagccagcaggccgugaucccgaacaucggcucccgcccccggauccgcaacauccccagccggaucuccaucuacuggaccaucgucaagcccggcgacauccugcucaucaacagcacggggaaccugaucgccccgcgcggcuacuucaagauccgguccggcaagagcuccaucaugcgcagcgacgcccccaucgggaagugcaaguccgagugcaucacccccaacggcagcauccccaacgacaagccguuccagaacgugaaccggaucaccuacggggcgugcccccgcuacgugaagcaguccacccugaagcucgccacgggcaugcggaacguccccgagaagcagacccgcgggaucuucggcgccaucgccggguucaucgagaacggcugggagggcaugguggacgggugguacggcuuccggcaccagaacagcgaggggcgcggccaggccgcggaccugaaguccacccaggccgccaucgaccagaucaacgggaagcugaaccggcucaucggcaagaccaacgagaaguuccaccagaucgagaaggaguucagcgagguggagggccgcauccaggaccuggagaaguacgucgaggacacgaagaucgaccugugguccuacagcuccgagcuccugguggcccuggagaaccagcacaccaucgaccucaccgacagcgagaugaacaagcuguucgagaagaccaagaagcagcugcgcgagaacgccgaggacauggggaacggcugcuucaagaucuaccacaagugcgacaacgcgugcaucggguccauccggaacggcacguacgaccacgacguguaccgcgacgaggcccucaacaaccgguuccagaucaagggggucgagcucaagagcggcuacaaggacuggauccuguggaucagcuucgccaucuccugcuuccuggugugcguggcccugcugggcuucaucaugugggccugccagaaggggaacauccgcugcaacaucugcaucuga

SEQ ID NO: 74447 - RNA, 1701 nt, Artificial Sequence
  derived and/or modified CDS sequence (opt1) from hemagglutinin__InfluenzaA__AGT18760
augaagaccaucaucgcccugagcuacauccucugccugguguucgcccagaagcugcccggcaacgacaacuccaccgcgacgcucugccuggggcaccacgccgucccgaacggcaccaucgugaagaccaucaccaacgaccgcaucgaggugacgaacgccaccgagcugguccagaacagcuccaucggggagaucugcgacagcccccaccagauccucgacggcgagaacugcacccugaucgacgcccugcucggggacccccagugcgacgacuuccagaacaagaagugggaccuguucguggagcggaacaaggccuacuccaacugcuaccccuacgacgugccggacuacgcgagccugcgcucccucgucgccagcuccggcacccuggaguucaacaacgagagcuucaacugggccggcgugacgcagaacgggaccuccagcgccugccggcgcggcuccaacagcuccuucuucagccggcugaacuggcucacccaccugaacuucaaguaccccgcgcugaacgugaccaugcccaacaacgagcaguucgacaagcucuacaucuggggcguccaccaccccgggacggacaaggaccagaucuuccuguacgcccaguccagcgggcgcaucaccguguccaccaagcggagccagcaggccgugaucccgaacaucggcagccgcccccggauccgcaacauccccucccggaucagcaucuacuggaccaucgucaagcccggcgacauccugcucaucaacuccacggggaaccugaucgccccgcgcggcuacuucaagauccggagcgggaaguccagcaucaugcgcuccgacgcccccaucggcaagugcaagagcgagugcaucacccccaacggcuccauccccaacgacaagccguuccagaacgugaaccggaucaccuacggggcgugcccccgcuacgugaagcagagcacccugaagcucgccacgggcaugcggaacguccccgagaagcagacccgcgggaucuucggcgccaucgccggguucaucgagaacggcugggagggcaugguggacgggugguacggcuuccggcaccagaacuccgaggggcgcggccaggccgcggaccucaagagcacccaggccgccaucgaccagaucaacgggaagcugaaccggcugaucggcaagaccaacgagaaguuccaccagaucgagaaggaguucuccgagguggagggccgcauccaggaccuggagaaguacgucgaggacacgaagaucgaccuguggagcuacaaguccgagcuccugguggcccuggagaaccagcacaccaucgaccucaccgacagcgagaugaacaagcuguucgagaagaccaagaagcagcugcgcgagaacgccgaggacauggggaacggcugcuucaagaucuaccacaagugcgacaacgcgugcaucggguccauccggaacggcacguacgaccacgacguguaccgcgacgaggcccucaacaaccgguuccagaucaagggggucgagcucaagagcggcuacaaggacuggauccuguggaucuccuucgccaucagcugcuuccuggugugcguggcccugcugggcuucaucaugugggccugccagaaggggaacauccgcugcaacaucugcaucuga

SEQ ID NO: 74448 - RNA, 1701 nt, Artificial Sequence
  derived and/or modified CDS sequence (opt1) from hemagglutinin__InfluenzaA__AGT18761
augaagaccaucaucgcccugagcuacauccucugccugguguucgcccagaagcugcccggcaacgacaacuccaccgcgacgcucugccuggggcaccacgccgucccgaacggcaccaucgugaagaccaucaccaacgaccgcaucgaggugacgaacgccaccgagcugguccagaacagcuccaucggggagaucugcgacagcccccaccagauccucgacggcgagaacugcacccugaucgacgcccugcucggggacccccagugcgacgacuuccagaacaagaagugggaccuguucguggagcgguccaaggccuacagcaacugcuaccccuacgacgugccggacuacgcgucccugcgcagccucgucgccuccagcggcacccuggaguucaacaacgaguccuucaacugggccggcgugacgcagaacgggaccagcuccgccugccggcgcggcagcaacuccagcuucuucucccggcugaacuggcucacccaccugaacuucaaguaccccgcgcugaacgugaccaugcccaacaacgagcaguucgacaagcucuacaucuggggcguccaccaccccgggacggacaaggaccagaucuuccuguacgcccagagcuccgggcgcaucaccgugagcaccaagcggagccagcaggccgugaucccgaacaucggcucccgcccccggauccgcaacauccccagccggaucuccaucuacuggaccaucgucaagcccggcgacauccugcucaucaacagcacggggaaccugaucgccccgcgcggcuacuucaagauccgguccggcaagagcuccaucaugcgcagcgacgcccccaucgggaagugcaaguccgagugcaucacccccaacggcagcauccccaacgacaagccguuccagaacgugaaccggaucaccuacggggcgugcccccgcuacgugaagcaguccacccugaagcucgccacgggcaugcggaacguccccgagaagcagacccgcgggaucuucggcgccaucgccggguucaucgagaacggcugggagggcaugguggacgggugguacggcuuccggcaccagaacagcgaggggcgcggccaggccgcggaccugaaguccacccaggccgccaucgaccagaucaacgggaagcugaaccggcucaucggcaagaccaacgagaaguuccaccagaucgagaaggaguucagcgagguggagggccgcauccaggaccuggagaaguacgucgaggacacgaagaucgaccugugguccuacagcuccgaguuccucguggcccuggagaaccagcacaccaucgaccugaccgacagcgagaugaacaagcuguucgagaagaccaagaagcagcuccgcgagaacgccgaggacauggggaacggcugcuucaagaucuaccacaagugcgacaacgcgugcaucggguccauccggaacggcacguacgaccacgacguguaccgcgacgaggcccugaacaaccgguuccagaucaagggggucgagcucaagagcggcuacaaggacuggauccuguggaucagcuucgccaucuccugcuuccuggugugcguggcccuccugggcuucaucaugugggccugccagaaggggaacauccgcugcaacaucugcaucuga

SEQ ID NO: 74449 - RNA, 1701 nt, Artificial Sequence
  derived and/or modified CDS sequence (opt1) from hemagglutinin__InfluenzaA__AGT37102
auggaggccaagcuggugguccucuucugcgccuucaccacccugaaggcggacaucaucugcgugggcuaccacgccaacaacagcacggacaccguggacaccaucauggagaagaacgucaccgugacgcacuccgugaaccugcucgagaacagccacaacgggaagcugugcucccugaacggcaaggcgccccuccagcuggggaacugcaacgucgccggcuggauccuggggaacccggagugcgaccuccugcugaccgccaacagcugguccuacaucaucgagaccagcuccagcaagaacgggaccugcuaccccggcgaguucuccgacuacgaggagcuccgcgagcugcugagcacgguguccagcuucgagcgguucgagaucuuccccaaggccaccuccuggcccaaccacgagaccaccaagggggccacgaucgccugcagccacuccggcgccagcuccuucuaccgcaaccuccuguggaucgugaagaaggggaacagcuacccgaagaucuccaagagcuacaccaacaaccggggcaaggagguccuggugaucuggggcgugcaccacccgcccaccgacagcucccagcaggcgcucuaccagaacacccacacguacaucagcgucggcuccagcaaguacuaccagcgcuucacccccgugguggccgcccggcccaagauccgcgagcaggagggccggaugaacuacuacuggacccugcuggagcagggggacaccaucacguucgaggccaccggcaaccucaucgcccccugguacgcguucgcccuggacaugggguccagcuccggcaucauggucagcgacgcccccgugcacaacugcaccaccaagugccagacgccccacggcgcccugaaguccaaccucccguuccagaacgugcaccccaucaccaucggggagugccccaaguacgucaagagcacccagcugcgcauggccaccggccugcggaacauccccuccauccagagccgcggccucuucggggcgaucgccggguucaucgagggcggcuggacggggaugaucgacggcugguacggguaccaccaccagaacgagcagggcuccggguacgccgccgaccagaaguccacccagaucgccaucgacggcaucagcaacaaggugaacagcaucaucgagaagaugaacgugcaguucaccuccgucggcaaggaguucaacgaccuggagaagcggaucgagaaccugaacaagaagguggacgacggguuccucgacguguggaccuacaacgcggagcugcugguccuccuggagaacgagcgcacgcuggacuuccacgacuucaacgugaagaaccucuacgagaaggucaagagccagcugcggaacaacgccaaggagaucggcaacgggugcuucgaguucuaccacaagugcgacaacgagugcauggagaacgugaagaacggcaccuacaacuacccgaaguacuccgaggagagcaagcugaaccgcgagaagaucgacggggugaagcucgagagcaucggcguccaccagauccuggccaucuacuccaccguggccagcucccuggugcuccuggucagccugggcgccaucuccuucuggaugugcagcaacgggucccuccagugccggaucugcaucuga

SEQ ID NO: 74450 - RNA, 1701 nt, Artificial Sequence
  derived and/or modified CDS sequence (opt1) from hemagglutinin__InfluenzaA__AGU01877
augaaggccauccuggugguccuccuguacaccuucgccaccgcgaacgccgacacgcugugcaucggcuaccacgccaacaacagcaccgacaccguggacaccgugcucgagaagaacgucacggugacccacuccgugaaccugcuggaggacaagcacaacgggaagcucugcaagcugcgcggcgucgcgccccugcaccucgggaagugcaacaucgccggcuggauccuggggaacccggagugcgagagccuguccaccgccagcuccuggagcuacaucguggagaccuccagcuccgacaacggcacgugcuaccccggcgacuucaucaacuacgaggagcuccgggagcagcugagcuccgugagcuccuucgagcgcuucgagaucuuccccaagaccagcuccuggcccaaccacgacagcaacaagggggucaccgccgccugcccgcacgccggcgcgaaguccuucuacaagaaccugaucuggcucgugaagaaggggaacagcuaccccaagcuguccaagagcuacaucaacgacaagggcaaggaggugcugguccucugggggauccaccaccccagcaccacgaccgaccagcagucccuguaccagaacgccgacgccuacguguucgugggcaccagccgguacuccaagaaguucaagcccgagaucgccauccgcccgaagguccgggaccaggagggccgcaugaacuacuacuggacccugaucgagcccggggacaagaucacguucgaggccaccggcaaccucguggugccccgguacgcguucgccauggagcgcaacgccgggagcggcaucaucaucuccgacacccccguccacgacugcaacaccacgugccagaccccggagggcgccaucaacaccagccugcccuuccagaacauccaccccaucaccaucgggaagugccccaaguacgugaaguccacgaagcugcggcucgccaccggccugcgcaacgugccgagcauccagucccgggggcuguucggcgcgaucgccggguucaucgagggcggcuggaccgggauggucgacggcugguacggguaccaccaccagaacgagcagggcagcggguacgccgccgaccucaaguccacccagaacgccaucgacaagaucacgaacaaggugaacagcgugaucgagaagaugaacacccaguucaccgcggucggcaaggaguucaaccaccuggagaagcgcaucgagaaccugaacaagaagguggacgacggcuuccucgacaucuggaccuacaacgccgagcugcugguccuccuggagaacgagcggacgcuggacuaccacgacuccaacgugaagaaccucuacgagaaggugcgcaaccagcugaagaacaacgccaaggagaucgggaacggcugcuucgaguucuaccacaagugcgacaacacgugcauggagagcgucaagaacgggaccuacgacuaccccaaguacuccgaggaggccaagcugaaccgggagaagaucgacggcgugaagcucgagagcacccgcaucuaccagauccuggccaucuacuccaccguggcgagcucccugguccucguggugagccugggggccaucagcuucuggaugugcuccaacggcagccugcagugccggaucugcaucuga

SEQ ID NO: 74451 - RNA, 1701 nt, Artificial Sequence
  derived and/or modified CDS sequence (opt1) from hemagglutinin__InfluenzaA__AGU01878
augaaggccauccugguggucaugcucuacacccuggccaccgcgaacgccgacacgcugugcaucggcuaccacgccaacaacagcaccgacaccguggacaccgugcucgagaagaacgucacggugacccacuccgugaaccugcuggaggacaagcacgacgggaagcucugcaagcugcgcggcgucgcgccccugcaccucgggaagugcaacaucgccggcuggauccuggggaacccggagugcgagagccuguccaccgccagcuccuggagcuacaucguggagaccuccggcagcgacaacggcacgugcuaccccggggacuucaucgacuacgaggagcuccgggagcagcuguccagcguguccagcuucgagcgcuucgagaucuuccccaagaccuccagcuggcccaaccacgacuccaacaagggcgucaccgccgccugcccgcacgccggggcgaagggcuucuacaagaaccugaucuggcucgugaagaaggggaacagcuaccccaagcuguccaucagcuacaucaacgacaagggcaaggaggugcugguccucuggggcauccaccaccccuccaccacggccgaccagcagagccuguaccagaacgccgacaccuacguguucguggggaccagccgguacuccaagaaguucaagcccgagaucgccauccgcccgaagguccgggaccaggagggccgcaugaacuacuacuggacccugguggagcccggggacaagaucacguucgaggccaccggcaaccucguggucccccgguacgcguucgccauggagcgcaacgccggcagcgggaucaucaucuccgacacccccgugcacgacugcaacaccacgugccagaccccgaagggcgccaucaacaccagccugcccuuccagaacauccaccccaucaccaucgggaagugccccaaguacgugaaguccacgaagcugcggcucgccaccggccugcgcaacgucccgagcauccagucccgggggcuguucggcgcgaucgccggcuucaucgagggcggguggaccgggaugguggacggcugguacggguaccaccaccagaacgagcagggcagcggcuacgccgccgaccucaaguccacccagaacgccaucgacaagaucacgaacaaggugaacagcgucaucgagaagaugaacacccaguucaccgcgguggggaaggaguucaaccaccuggagaagcgcaucgagaaccugaacaagaaggucgacgacggcuuccucgacaucuggaccuacaacgccgagcugcuggugcuccuggagaacgagcggacgcuggacuaccacgacuccaacgugaagaaccucuacgagaagguccgcaaccagcugaagaacaacgccaaggagaucgggaacggcugcuucgaguucuaccacaagugcgacaacacgugcauggagagcgugaagaacgggaccuacgacuaccccaaguacuccgaggaggccaagcugaaccgggaggagaucgacggcgugaagcucgagagcacccgcaucuaccagauccuggccaucuacuccaccgcggccagcucccugguccucguggugagccugggcgccaucuccuucuggaugugcagcaacgggagccugcagugccggaucugcaucuga

SEQ ID NO: 74452 - RNA, 1701 nt, Artificial Sequence
  derived and/or modified CDS sequence (opt1) from hemagglutinin__InfluenzaA__AGU01879
augaaggccauccugguggucaugcucuacaccuucgccaccgcgaacgccgacacgcugugcaucggcuaccacgccaacaacagcaccgacaccguggacaccgugcuggagaagaacgucacggugacccacuccgugaaccuccuggaggacaagcacaacgagaagcugugcaagcuccgcggggucgcgccccugcaccugggcaagugcaacaucgccggguggauccucggcaacccggagugcgagagccuguccaccgccagcuccuggagcuacaucguggagaccuccgggagcgacaacggcacgugcuaccccggcgacuucaucgacuacgaggagcugcgggagcagcucuccagcguguccagcuucgagcgcuucgagaucuuccccaagaccuccagcuggcccaaccacgacuccaacaagggggucaccgccgccugcccgcaggccggcgcgaagggguucuacaagaaccugaucuggcuggugaagaagggcaacagcuaccccaagcucuccaagagcuacaucaacgacaaggggaaggaggugcugguccuguggggcauccaccaccccuccaccacggccgaccagcagagccucuaccagaacgccgacaccuacguguucgugggcaccagccgguacuccaagaaguucaagcccgagaucgccauccgcccgaagguccgggaccaggaggggcgcaugaacuacuacuggacccugguggagcccggcgacaagaucacguucgaggccaccgggaaccugguggucccccgguacgcguucgccauggagcgcaacgccggcagcggcaucaucaucuccgacacccccgugcacgacugcaacaccacgugccagaccccgaagggggccaucaacaccagccuccccuuccagaacauccaccccaucaccaucggcaagugccccaaguacgugaaguccacgaagcugcggcuggccaccgggcuccgcaacgucccgagcauccagucccggggccuguucggggcgaucgccggcuucaucgagggcggguggaccggcaugguggacgggugguacggcuaccaccaccagaacgagcaggggagcggcuacgccgccgaccugaaguccacccagaacgccaucgacaagaucacgaacaaggugaacagcgucaucgagaagaugaacacccaguucaccgcggugggcaaggaguucaaccaccucgagaagcgcaucgagaaccugaacaagaaggucgacgacggguuccuggacaucuggaccuacaacgccgagcuccuggugcugcucgagaacgagcggacgcuggacuaccacgacuccaacgugaagaaccuguacgagaagguccgcaaccagcucaagaacaacgccaaggagaucggcaacgggugcuucgaguucuaccacaagugcgacaacacgugcauggagagcgugaagaacggcaccuacgacuaccccaaguacuccgaggaggccaagcugaaccgggaggagaucgacggggugaagcuggagagcacccgcaucuaccagauccucgccaucuacuccaccgucgcgagcucccuggugcugguggucagccucggcgccaucuccuucuggaugugcagcaacggcagccugcagugccggaucugcaucuga

SEQ ID NO: 74453 - RNA, 1701 nt, Artificial Sequence
  derived and/or modified CDS sequence (opt1) from hemagglutinin__InfluenzaA__AGU01881
augaaggccauccuggugguccuccuguacaccuucgccaccgcgaacgccgacacgcugugcaucggcuaccacgccaacaacagcaccgacaccguggacaccgugcucgagaagaacgucacggugacccacuccgugaaccugcuggaggacaagcacaacgggaagcucugcaagcugcgcggcgucacgccccugcaccucgggaagugcaacaucgccggcuggauccuggggaacccggagugcgagagccuguccaccgccagcuccuggagcuacaucguggagaccuccagcuccgacaacgggaccugcuaccccggcgacuucaucaacuacgaggagcuccgggagcagcugagcuccgugagcuccuucgagcgcuucgagauguuccccaagaccagcuccuggcccaaccacgacagcaacaagggcgucaccgcggccugcccgcaggccggcgccaaguccuucuacaagaaccugaucuggcucgugaagaaggggaacagcuaccccaagcuguccaagagcuacaucaacgacaagggcaaggaggugcugguccucugggggauccaccaccccagcacgaccgcggaccagcagucccuguaccagaacgccgacgccuacguguucgugggcaccagccgguacuccaagaaguucaagcccgagaucgccauccgcccgaagguccgggaccaggagggccgcaugaacuacuacuggacccugaucgagcccggggacaagaucacguucgaggccaccggcaaccucguggugccccgguacgcguucgccauggagcgcaacgccgggagcggcaucaucaucuccgacacccccguccacgacugcaacaccacgugccagaccccggagggcgccaucaacaccagccugcccuuccagaacauccaccccaucaccaucgggaagugccccaaguacgugaaguccacgaagcugcggcucgccaccggccugcgcaacgugccgagcauccagucccgggggcuguucggcgcgaucgccggguucaucgagggcggcuggaccgggauggucgacggcugguacggguaccaccaccagaacgagcagggcagcggguacgccgccgaccucaaguccacccagaacgccaucgacaagaucacgaacaaggugaacagcgugaucgagaagaugaacacccaguucaccgcggucggcaaggaguucaaccaccuggagaagcgcaucgagaaccugaacaagaagguggacgacggcuuccucgacaucuggaccuacaacgccgagcugcugguccuccuggagaacgagcggacgcuggacuaccacgacuccaacgugaagaaccucuacgagaaggugcgcaaccagcugaagaacaacgccaaggagaucgggaacggcugcuucgaguucuaccacaagugcgacaacacgugcauggagagcgucaagaacgggaccuacgacuaccccaaguacuccgaggaggccaagcugaaccgggagaagaucgacggcgugaagcucgagagcacccgcaucuaccagauccuggccaucuacuccaccguggcgagcucccugguccucguggugagccugggggccaucagcuucuggaugugcuccaacggcagccugcagugccggaucugcaucuga

SEQ ID NO: 74454 - RNA, 1701 nt, Artificial Sequence
  derived and/or modified CDS sequence (opt1) from hemagglutinin__InfluenzaA__AGU01883
augaaggccauccugguggucaugcucuacaccuucgccaccgcgaacgccgacacgcugugcaucggcuaccacgccaacaacagcaccgacaccguggacaccgugcuggagaagaacgucacggugacccacuccgugaaccuccuggaggacaagcacaacgggaagcugugcaagcuccgcggcgucgcgccccugcaccuggggaagugcaacaucgccggcuggauccucgggaacccggagugcgagagccuguccaccgccagcuccuggagcuacaucguggagaccuccggcagcgacaacggcacgugcuaccccggggacuucaucgacuacgaggagcugcgggagcagcucuccagcguguccagcuucgagcgcuucgagaucuuccccaagaccuccagcuggcccaaccacgacuccaacaagggcgucaccgccgccugcccgcacgccggggcgaagggcuucuacaagaaccugaucuggcuggugaagaaggggaacagcuaccccaagcucuccaucagcuacaucaacaacaaggagaaggaggugcugguccuguggggcauccaccaccccuccaccacggccgaccagcagagccucuaccagaacgccgacaccuacguguucgugggcaccagccgguacuccaagaaguucaagcccgagaucgccauccgcccgaagguccgggaccaggaggggcgcaugaacuacuacuggacccugguggagcccggcgacaagaucacguucgaggccaccgggaaccugguggucccccgguacgcguucgccauggagcgcaacgccggcagcggcaucaucaucuccgacacccccgugcacgacugcaacaccacgugccagaccccgaagggggccaucaacaccagccuccccuuccagaacauccaccccaucaccaucggcaagugccccaaguacgugaaguccacgaagcugcggcuggccaccgggcuccgcaacgucccgagcauccagucccggggccuguucggggcgaucgccggcuucaucgagggcggguggaccggcaugguggacgggugguacggcuaccaccaccagaacgagcaggggagcggcuacgccgccgaccugaaguccacccagaacgccaucgacaagaucacgaacaaggugaacagcgucaucgagaagaugaacacccaguucaccgcggugggcaaggaguucaaccaccucgagaagcgcaucgagaaccugaacaagaaggucgacgacggguuccuggacaucuggaccuacaacgccgagcuccuggugcugcucgagaacgagcggacgcuggacuaccacgacuccaacgugaagaaccuguacgagaagguccgcaaccagcucaagaacaacgccaaggagaucggcaacgggugcuucgaguucuaccacaagugcgacaacacgugcauggagagcgugaagaacggcaccuacgacuaccccaaguacuccgaggaggccaagcugaaccgggaggagaucgacggggugaagcuggagagcacccgcaucuaccagauccucgccaucuacuccaccgcggccagcucccugguccugguggugagccucggcgccaucuccuucuggaugugcagcaacggcagccugcagugccggaucugcaucuga

SEQ ID NO: 74455 - RNA, 1701 nt, Artificial Sequence; identical to SEQ ID NO: 74084
  derived and/or modified CDS sequence (opt1) from hemagglutinin__InfluenzaA__AGU01884

SEQ ID NO: 74456 - RNA, 1701 nt, Artificial Sequence
  derived and/or modified CDS sequence (opt1) from hemagglutinin__InfluenzaA__AGU01885
augaaggccauccugguggucaugcucuacaccuucgccaccgcgaacgccgacacgcugugcaucggcuaccacgccaacaacagcaccgacaccguggacaccgugcuggagaagaacgucacggugacccacuccgugaaccuccuggaggacaagcacaacgagaagcugugcaagcuccgcggggucgcgccccugcaccugggcaagugcaacaucgccggguggauccucggcaacccggagugcgagagccuguccaccgccagcuccuggagcuacaucguggagaccuccgggagcgacaacggcacgugcuaccccggcgacuucaucgacuacgaggagcugcgggagcagcucuccagcguguccagcuucgagcgcuucgagaucuuccccaagaccuccagcuggcccaaccacgacuccaacaagggggucaccgccgccugcccgcaggccggcgcgaagggguucuacaagaaccugaucuggcuggugaagaagggcaacagcuaccccaagcucuccaagagcuacaucaacgacaaggggaaggaggugcugguccuguggggcauccaccaccccuccaccacggccgaccagcagagccucuaccagaacgccgacaccuacguguucgugggcaccagccgguacuccaagaaguucaagcccgagaucgccauccgcccgaagguccgggaccaggaggggcgcaugaacuacuacuggacccugguggagcccggcgacaagaucacguucgaggccaccgggaaccugguggucccccgguacgcguucgccauggagcgcaacgccggcagcggcaucaucaucuccgacacccccgugcacgacugcaacaccacgugccagaccccgaagggggccaucaacaccagccuccccuuccagaacgugcaccccaucaccaucggcaagugccccaaguacgucaaguccacgaagcugcggcuggccaccgggcuccgcaacgugccgagcauccagucccggggccuguucggggcgaucgccggcuucaucgagggcggguggaccggcaugguggacgggugguacggcuaccaccaccagaacgagcaggggagcggcuacgccgccgaccugaaguccacccagaacgccaucgacaagaucacgaacaaggucaacagcgugaucgagaagaugaacacccaguucaccgcggucggcaaggaguucaaccaccucgagaagcgcaucgagaaccugaacaagaagguggacgacggguuccuggacaucuggaccuacaacgccgagcuccuggugcugcucgagaacgagcggacgcuggacuaccacgacuccaacgucaagaaccuguacgagaaggugcgcaaccagcucaagaacaacgccaaggagaucggcaacgggugcuucgaguucuaccacaagugcgacaacacgugcauggagagcgugaagaacggcaccuacgacuaccccaaguacuccgaggaggccaagcugaaccgggaggagaucgacggggucaagcuggagagcacccgcaucuaccagauccucgccaucuacuccaccguggcgagcucccuggugcuggucgugagccucggcgccaucuccuucuggaugugcagcaacggcagccugcagugccggaucugcaucuga

SEQ ID NO: 74457 - RNA, 1701 nt, Artificial Sequence
  derived and/or modified CDS sequence (opt1) from hemagglutinin__InfluenzaA__AGU01887
augaaggccauccuggugguccuccuguacaccuucgccaccgcgaacgccgacacgcugugcaucggcuaccacgccaacaacagcaccgacaccguggacaccgugcucgagaagaacgucacggugacccacuccgugaaccugcuggaggacaagcacaacgggaagcucugcaagcugcgcggcgucgcgccccugcaccucgggaagugcaacaucgccggcuggauccuggggaacccggagugcgagagccuguccaccgccagcuccuggagcuacaucguggagaccuccagcuccgacaacggcacgugcuaccccggcgacuucaucaacuacgaggagcuccgggagcagcugagcuccgugagcuccuucgagcgcuucgagaucuuccccaagaccagcuccuggcccaaccacgacagcaacaagggggucaccgccgccugcccgcacgccggcgcgaaguccuucuacaagaaccugaucuggcucgugaagaaggggaacagcuaccccaagcuguccaagagcuacaucaacgacaagggcaaggaggugcugguccucugggggauccaccaccccagcaccacggccgaccagcagucccuguaccagaacgccgacgccuacguguucgugggcaccagccgguacuccaagaaguucaagcccgagaucgccauccgcccgaagguccgggaccaggagggccgcaugaacuacuacuggacccugaucgagcccggggacaagaucaccuucgaggcgacgggcaaccucguggugccccgguacgccuucgccgucgagcgcaacgccgggagcggcaucaucaucuccgacacccccgugcacaacugcaacacgaccugccagaccccggagggcgccaucaacaccagccugcccuuccagaacauccaccccaucaccaucgggaagugccccaaguacgugaaguccaccaagcugcggcucgcgacgggccugcgcaacgucccgagcauccagucccgggggcuguucggcgccaucgccggguucaucgagggcggcuggaccgggaugguggacggcugguacggguaccaccaccagaacgagcagggcagcggguacgccgccgaccucaaguccacccagaacgcgaucgacaagaucaccaacaaggugaacagcgucaucgagaagaugaacacgcaguucaccgccgugggcaaggaguucaaccaccuggagaagcgcaucgagaaccugaacaagaaggucgacgacggcuuccucgacaucuggaccuacaacgccgagcugcuggugcuccuggagaacgagcggacccuggacuaccacgacuccaacgugaagaaccucuacgagaagguccgcaaccagcugaagaacaacgccaaggagaucgggaacggcugcuucgaguucuaccacaagugcgacaacacgugcauggagagcgugaagaacgggaccuacgacuaccccaaguacuccgaggaggccaagcugaaccgggagaagaucgacggcgugaagcucgagagcacccgcaucuaccagauccuggcgaucuacuccaccgucgccagcucccuggugcucguggucagccugggggccaucagcuucuggaugugcuccaacggcagccugcagugccggaucugcaucuga

SEQ ID NO: 74458 - RNA, 1701 nt, Artificial Sequence
  derived and/or modified CDS sequence (opt1) from hemagglutinin__InfluenzaA__AGU01888
augaaggccauccugguggucaugcucuacaccuucgccaccgcgaacgccgacacgcugugcaucggcuaccacgccaacaacagcaccgacaccguggacaccgugcuggagaagaacgucacggugacccacuccgugaaccuccuggaggacaagcacaacgggaagcugugcaagcuccgcggcgucgcgccccugcaccuggggaagugcaacaucgccggcuggauccucgggaacccggagugcgagagccuguccaccgccagcuccuggagcuacaucguggagaccuccggcagcgacaacggcacgugcuaccccggggacuucaucgacuacgaggagcugcgggagcagcucuccagcguguccagcuucgagcgcuucgagaucuuccccaagaccuccagcuggcccaaccacgacuccaacaagggcgucaccgccgccugcccgcaggccggggcgaagggcuucuacaagaaccugaucuggcuggugaagaaggggaacagcuaccccaagcucuccaagagcuacaucaacgacaagggcaaggaggugcugguccuguggggcauccaccaccccuccaccacggccgaccagcagagccucuaccagaacgccgacaccuacguguucguggggaccagccgguacuccaagaaguucaagcccgagaucgccauccgcccgaagguccgggaccaggagggccgcaugaacuacuacuggacccugguggagcccggggacaagaucacguucgaggccaccggcaaccugguggucccccgguacgcguucgccauggagcgcaacgccggcagcgggaucaucaucuccgacacccccgugcacgacugcaacaccacgugccagaccccgaagggcgccaucaacaccagccuccccuuccagaacauccaccccaucaccaucgggaagugccccaaguacgugaaguccacgaagcugcggcuggccaccggccuccgcaacgucccgagcauccagucccgggggcuguucggcgcgaucgccggcuucaucgagggcggguggaccgggaugguggacggcugguacggguaccaccaccagaacgagcagggcagcggcuacgccgccgaccugaaguccacccagaacgccaucgacaagaucacgaacaaggugaacagcgucaucgagaagaugaacacccgcuucaccgcgguggggaaggaguucaaccaccucgagaagcggaucgagaaccugaacaagaaggucgacgacggcuuccuggacaucuggaccuacaacgccgagcuccuggugcugcucgagaacgagcgcacgcuggacuaccacgacuccaacgugaagaaccuguacgagaagguccggaaccagcucaagaacaacgccaaggagaucgggaacggcugcuucgaguucuaccacaagugcgacaacacgugcauggagagcgugaagaacgggaccuacgacuaccccaaguacuccgaggaggccaagcugaaccgcgaggagaucgacggcgugaagcuggagagcacccggaucuaccagauccucgccaucuacuccaccgucgcgagcucccuggugcugguggucagccucggcgccaucuccuucuggaugugcagcaacgggagccugcagugccgcaucugcaucuga

SEQ ID NO: 74459 - RNA, 1701 nt, Artificial Sequence; identical to SEQ ID NO: 74450
  derived and/or modified CDS sequence (opt1) from hemagglutinin__InfluenzaA__AGU01889

SEQ ID NO: 74460 - RNA, 1701 nt, Artificial Sequence
  derived and/or modified CDS sequence (opt1) from hemagglutinin__InfluenzaA__AGU01890
augaaggccauccugguggucaugcucuacaccuucgccaccgcgaacgccgacacgcugugcaucggcuaccacgccaacaacagcaccgacaccguggacaccgugcuggagaagaacgucacggugacccacuccgugaaccuccuggaggacaagcacaacgggaagcugugcaagcuccgcggcgucgcgccccugcaccuggggaagugcaacaucgccggcuggauccucgggaacccggagugcgagagccuguccaccgccagcuccuggagcuacaucguggagaccuccggcagcgacaacggcacgugcuaccccggggacuucaucgacuacgaggagcugcgggagcagcucuccagcguguccagcuucgagcgcuucgagaucuuccccaagaccuccagcuggcccaaccacgacuccaacaagggcgucaccgccgccugcccgcaggccggggcgaagggcuucuacaagaaccugaucuggcuggugaagaaggggaacagcuaccccaagcucuccaagagcuacaucaacgacaagggcaaggaggugcugguccuguggggcauccaccaccccuccaccacggccgaccagcagagccucuaccagaacgccgacaccuacguguucguggggaccagccgguacuccaagaaguucaagcccgagaucgccauccgcccgaagguccgggaccaggagggccgcaugaacuacuacuggacccugguggagcccggggacaagaucacguucgaggccaccggcaaccugguggucccccgguacgcguucgccauggagcgcaacgccggcagcgggaucaucaucuccgacacccccgugcacgacugcaacaccacgugccagaccccgaagggcgccaucaacaccagccuccccuuccagaacauccaccccaucaccaucgggaagugccccaaguacgugaaguccacgaagcugcggcuggccaccggccuccgcaacgucccgagcauccagucccgggggcuguucggcgcgaucgccggcuucaucgagggcggguggaccgggaugguggacggcugguacggguaccaccaccagaacgagcagggcagcggcuacgccgccgaccugaaguccacccagaacgccaucgacaagaucacgaacaaggugaacagcgucaucgagaagaugaacacccaguucaccgcgguggggaaggaguucaaccaccucgagaagcgcaucgagaaccugaacaagaaggucgacgacggcuuccuggacaucuggaccuacaacgccgagcuccuggugcugcucgagaacgagcggacgcuggacuaccacgacuccaacgugaagaaccuguacgagaagguccgcaaccagcucaagaacaacgccaaggagaucgggaacggcugcuucgaguucuaccacaagugcgacaacacgugcauggagagcgugaagaacgggaccuacgacuaccccaaguacuccgaggaggccaagcugaaccgggaggagaucgacggcgugaagcuggagagcacccgcaucuaccagauccucgccaucuacuccaccgucgcgagcucccuggugcugguggucagccucggcgccaucuccuucuggaugugcagcaacgggagccugcagugccggaucugcaucuga

SEQ ID NO: 74461 - RNA, 1701 nt, Artificial Sequence
  derived and/or modified CDS sequence (opt1) from hemagglutinin__InfluenzaA__AGU92645
augaaggccauccuggugguccuccuguacaccuucgccaccgcgaacgccgacacgcugugcaucggcuaccacgccaacaacagcaccgacaccguggacaccgugcucgagaagaacgucacggugacccacuccgugaaccugcuggaggacaagcacaacgggaagcucugcaagcugcgcggcgucgcgccccugcaccucgggaagugcaacaucgccggcuggauccuggggaacccggagugcgagacccugagcaccgccuccagcugguccuacaucguggagacgagcuccagcgacaacgggaccugcuaccccggcgacuucaucgacuacgaggagcuccgggagcagcuguccagcguguccagcuucgagcgcuucgagaucuuccccaagaccuccagcuggcccaaccacgacuccaacaagggcgucaccgccgccugcccgcacgccggcgcgaagggguucuacaagaaccugaucuggcucgugaagaagggcaacagcuaccccaagcuguccaagagcuacaucaacgacaaggggaaggaggugcugguccucuggggcauccaccaccccuccacgaccgccgaccagcagagccuguaccagaacgccgacaccuacguguucgugggcaccagccgguacuccaagaaguucaagcccgagaucgagacgcgcccgaagguccgggaccaggaggggcgcaugaacuacuacuggacccugguggagcccggcgacaagaucaccuucgaggccaccgggaaccucguggucccccgguacgccuucgcgauggagcgcgacgccggcagcggcaucaucaucuccgacacgcccgugcacgacugcaacacgaccugccagaccccgaagggggccaucaacaccagccugcccuuccagaacauccaccccaucaccaucggcaagugccccaaguacgugaaguccaccaagcugcggcucgccaccgggcugcgcaacgucccgagcauccagucccggggccuguucggggccaucgcgggcuucaucgagggcggguggacgggcaugguggacgggugguacggcuaccaccaccagaacgagcaggggagcggcuacgccgccgaccucaaguccacccagaacgccaucgacaagaucaccaacaaggugaacagcgucaucgagaagaugaacacccaguucacggccgugggcaaggaguucaaccaccuggagaagcgcaucgagaaccugaacaagaaggucgacgacggguuccucgacaucuggaccuacaacgcggagcugcuggugcuccuggagaacgagcggacccuggacuaccacgacuccaacgugaagaaccucuacgagaagguccgcaaccagcugaagaacaacgccaaggagaucggcaacgggugcuucgaguucuaccacaagugcgacaacacgugcauggagagcgugaagaacggcaccuacgacuaccccaaguacuccgaggaggccaagcugaaccgggaggagaucgacggggugaagcucgagagcacccgcaucuaccagauccuggccaucuacuccaccgccgcgagcucccugguccucguggugagccugggcgccaucuccuucuggaugugcagcaacggcagccugcagugccggaucugcaucuga

SEQ ID NO: 74462 - RNA, 1701 nt, Artificial Sequence
  derived and/or modified CDS sequence (opt1) from hemagglutinin__InfluenzaA__AGU92667
augaaggccauccuggugguccuccuguacaccuucgccaccgcgaacgccgacacgcugugcaucggcuaccacgccaacaacagcaccgacaccguggacaccgugcucgagaagaacgucacggugacccacuccgugaaccugcuggaggacaagcacaacgggaagcucugcaagcugcgcggcgucgcgccccugcaccucgggaagugcaacaucgccggcuggauccuggggaacccggagugcgagacccugagcaccgccuccagcugguccuacaucguggagacgagcuccagcgacaacgggaccugcuaccccggcgacuucaucgacuacgaggagcuccgggagcagcuguccagcguguccagcuucgagcgcuucgagaucuuccccaagaccuccagcuggcccaaccacgacuccaacaagggcgucaccgccgccugcccgcacgccggcgcgaagggguucuacaagaaccugaucuggcucgugaagaagggcaacagcuaccccaagcuguccaagagcuacaucaacgacaaggggaaggaggugcugguccucuggggcauccaccaccccuccacgaccgccgaccagcagagccuguaccagaacgccgacaccuacguguucgugggcaccagccgguacuccaagaaguucaagcccgagaucgccacgcgcccgaagguccgggaccaggaggggcgcaugaacuacuacuggacccugguggagcccggcgacaagaucaccuucgaggccaccgggaaccucguggucccccgguacgcguucgccauggagcgcgacgccggcagcggcaucaucaucuccgacacgcccgugcacgacugcaacacgaccugccagaccccgaagggggccaucaacaccagccugcccuuccagaacauccaccccaucaccaucggcaagugccccaaguacgugaaguccaccaagcugcggcucgccaccgggcugcgcaacgucccgagcauccagucccggggccuguucggggcgaucgccggcuucaucgagggcggguggacgggcaugguggacgggugguacggcuaccaccaccagaacgagcaggggagcggcuacgccgccgaccucaaguccacccagaacgccaucgacaagaucaccaacaaggugaacagcgucaucgagaagaugaacacccaguucacggcggugggcaaggaguucaaccaccuggagaagcgcaucgagaaccugaacaagaaggucgacgacggguuccucgacaucuggaccuacaacgccgagcugcuggugcuccuggagaacgagcgggcccuggacuaccacgacuccaacgugaagaaccucuacgagaagguccgcaaccagcugaagaacaacgccaaggagaucggcaacgggugcuucgaguucuaccacaagugcgacaacacgugcauggagagcgugaagaacggcaccuacgacuaccccaaguacuccgaggaggccaagcugaaccgggaggagaucgacggggugaagcucgagagcacccgcaucuaccagauccuggcgaucuacuccaccgccgccagcucccugguccucguggugagccugggcgccaucuccuucuggaugugcagcaacggcagccugcagugccggaucugcaucuga

SEQ ID NO: 74463 - RNA, 1701 nt, Artificial Sequence
  derived and/or modified CDS sequence (opt1) from hemagglutinin__InfluenzaA__AGU92678
augaaggccauccuggugguccuccuguacaccuucgccaccgcgaacgccgacacgcugugcaucggccaccacgccaacaacagcaccgacaccguggacaccgugcucgagaagaacgucacggugacccacuccgugaaccugcuggaggacaagcacaacgggaagcucugcaagcugcgcggcgucgcgccccugcaccucgggaagugcaacaucgccggcuggauccuggggaacccggagugcgagacccugagcaccgccuccagcugguccuacaucguggagacgagcuccagcgacaacgggaccugcuaccccggcgacuucaucgacuacgaggagcuccgggagcagcuguccagcguguccagcuucgagcgcuucgagaucuuccccaagaccuccagcuggcccaaccacgacuccaacaagggcgucaccgccgccugcccgcacgccggcgcgaagggguucuacaagaaccugaucuggcucgugaagaagggcaacagcuaccccaagcuguccaagagcuacaucaacgacaaggggaaggaggugcugguccucuggggcauccaccaccccuccacgaccgccgaccagcagagccuguaccagaacgccgacaccuacguguucgugggcaccagccgguacuccaagaaguucaagcccgagaucgccacgcgcccgaagguccgggaccaggaggggcgcaugaacuacuacuggacccugguggagcccggcgacaagaucaccuucgaggccaccgggaaccucguggucccccgguacgcguucgccauggagcgcgacgccggcagcggcaucaucaucuccgacacgcccgugcacgacugcaacacgaccugccagaccccgaagggggccaucaacaccagccugcccuuccagaacauccaccccaucaccaucggcaagugccccaaguacgugaaguccaccaagcugcggcucgccaccgggcugcgcaacgucccgagcauccagucccggggccuguucggggcgaucgccggcuucaucgagggcggguggacgggcaugguggacgggugguacggcuaccaccaccagaacgagcaggggagcggcuacgccgccgaccucaaguccacccagaacgccaucgacaagaucaccaacaaggugaacagcgucaucgagaagaugaacacccaguucacggcggugggcaaggaguucaaccaccuggagaagcgcaucgagaaccugaacaagaaggucgacgacggguuccucgacaucuggaccuacaacgccgagcugcuggugcuccuggagaacgagcggacccuggacuaccacgacuccaacgugaagaaccucuacgagaagguccgcaaccagcugaagaacaacgccaaggagaucggcaacgggugcuucgaguucuaccacaagugcgacaacacgugcauggagagcgugaagaacggcaccuacgacuaccccaaguacuccgaggaggccaagcugaaccgggaggagaucgacggggugaagcucgagagcacccgcaucuaccagauccuggccaucuacuccaccgcggccagcucccugguccucguggugagccugggcgccaucuccuucuggaugugcagcaacggcagccugcagugccggaucugcaucuga

SEQ ID NO: 74464 - RNA, 1701 nt, Artificial Sequence
  derived and/or modified CDS sequence (opt1) from hemagglutinin__InfluenzaA__AGU92711
augaaggccauccuggugguccuccuguacaccuucgccaccgcgaacgccgacacgcugugcaucggcuaccacgccaacaacagcaccgacaccguggacaccgugcucgagaagaacgucacggugacccacuccgugaaccugcuggaggacaagcacaacgggaagcucugcaagcugcgcggcgucgcgccccugcaccucgggaagugcaacaucgccggcuggauccuggggaacccggagugcgagagccuguccaccgccagcuccuggagcuacaucguggagaccuccagcuccgacaacggcacgugcuaccccggcgacuucaucgacuacgaggagcuccgggagcagcugagcuccgugagcuccuucgagcgcuucgagaucuuccccaagaccagcuccuggcccaaccacgacagcaacaagggggucaccgccgccugcccgcacgccggcgcgaaguccuucuacaagaaccugaucuggcucgugaagcaggggaacagcuaccccaagcuguccaagagcuacaucaacgacaagggcaaggaggugcugguccucugggggauccaccaccccagcaccuccgccgaccagcagagccuguaccagaacgccgacgccuacguguucgugggcuccagccgguacuccaagaaguucaagcccgagaucgccauccgcccgaagguccgggaccaggagggccgcaugaacuacuacuggacgcugguggagcccggggacaagaucaccuucgaggcgaccggcaaccucguggucccccgguacgccuucgccauggagcgcaacgccgggagcggcaucaucaucuccgacacccccgugcacgacugcaacacgaccugccagaccccgaagggcgccaucaacaccagccugcccuuccagaacauccaccccaucacgaucgggaagugccccaaguacgugaaguccaccaagcugcggcucgcgaccggccugcgcaacgucccgagcauccagucccgggggcuguucggcgccaucgccggguucaucgagggcggcuggaccgggaugguggacggcugguacggguaccaccaccagaacgagcagggcagcggguacgccgccgaccucaaguccacgcagaacgcgaucgacgagaucaccaacaaggugaacagcgucaucgagaagaugaacacccaguucaccgccgugggcaaggaguucaaccaccuggagaagcgcaucgagaaccugaacaagaaggucgacgacggcuuccucgacaucuggacguacaacgccgagcugcuggugcuccuggagaacgagcggacccuggacuaccacgacuccaacgugaagaaccucuacgagaagguccgcagccagcugaagaacaacgccaaggagaucgggaacggcugcuucgaguucuaccacaagugcgacaacacgugcauggaguccgugaagaacgggaccuacgacuaccccaaguacagcgaggaggccaagcugaaccgggaggagaucgacggcgugaagcucgaguccacccgcaucuaccagauccuggcgaucuacagcaccgucgccagcucccuggugcucguggucagccugggggccaucuccuucuggaugugcagcaacggcucccugcagugccggaucugcaucuga

SEQ ID NO: 74465 - RNA, 1701 nt, Artificial Sequence
  derived and/or modified CDS sequence (opt1) from hemagglutinin__InfluenzaA__AGU92722
augaaggccauccuggugguccuccuguacaccuucgccaccgcgaacgccgacacgcugugcaucggcuaccacgccaacaacagcaccgacaccguggacaccgugcucgagaagaacgucacggugacccacuccgugaaccugcuggaggacaagcacaacgggaagcucugcaagcugcgcggcgucgcgccccugcaccucgggaagugcaacaucgccggcuggauccuggggaacccggagugcgagagccuguccaccgccagcuccuggagcuacaucguggagaccuccagcuccgacaacggcacgugcuaccccggcgacuucaucgacuacgaggagcuccgggagcagcugagcuccgugagcuccuucgagcgcuucgagaucuuccccaagaccagcuccuggcccaaccacgacagcgacaagggggucaccgccgccugcccgcacgccggcgcgaaguccuucuacaagaaccugaucuggcucgugaagaaggggaacagcuaccccaagcuguccaagagcuacaucaacgacaagggcaaggaggugcugguccucugggggauccaccaccccagcaccuccgccgaccagcagagccuguaccagaacgccgacgccuacguguucgugggcuccagccgguacuccaagaaguucaagcccgagaucgccauccgcccgaagguccgggaccaggagggccgcaugaacuacuacuggacgcugguggagcccggggacaagaucaccuucgaggcgaccggcaaccucguggucccccgguacgccuucgccauggagcgcaacgccgggagcggcaucaucaucuccgacacccccgugcacgacugcaacacgaccugccagaccccgaagggcgccaucaacaccagccugcccuuccagaacauccaccccaucacgaucgggaagugccccaaguacgugaaguccaccaagcugcggcucgcgaccggccugcgcaacgucccgagcauccagucccgggggcuguucggcgccaucgccggguucaucgagggcggcuggaccgggaugguggacggcugguacggguaccaccaccagaacgagcagggcagcggguacgccgccgaccucaaguccacgcagaacgcgaucgacgagaucaccaacaaggugaacagcgucaucgagaagaugaacacccaguucaccgccgugggcaaggaguucaaccaccuggagaagcgcaucgagaaccugaacaagaaggucgacgacggcuuccucgacaucuggacguacaacgccgagcugcuggugcuccuggagaacgagcggacccuggacuaccacgacuccaacgugaagaaccucuacgagaagguccgcagccagcugaagaacaacgccaaggagaucgggaacggcugcuucgaguucuaccacaagugcgacaacacgugcauggaguccgugaagaacgggaccuacgacuaccccaaguacagcgaggaggccaagcugaaccgggaggagaucgacggcgugaagcucgaguccacccgcaucuaccagauccuggcgaucuacagcaccgucgccagcucccuggugcucguggucagccugggggccaucuccuucuggaugugcagcaacggcucccugcagugccggaucugcaucuga

SEQ ID NO: 74466 - RNA, 1701 nt, Artificial Sequence; identical to SEQ ID NO: 74465
  derived and/or modified CDS sequence (opt1) from hemagglutinin__InfluenzaA__AGU92733

SEQ ID NO: 74467 - RNA, 1701 nt, Artificial Sequence
  derived and/or modified CDS sequence (opt1) from hemagglutinin__InfluenzaA__AGU92744
augaaggccauccuggugguccuccuguacaccuucgccaccgcgaacgccgacacgcugugcaucggcuaccacgccaacaacagcaccgacaccguggacaccgugcucgagaagaacgucacggugacccacuccgugaaccugcuggaggacaagcacaacgggaagcucugcaagcugcgcggcgucgcgccccugcaccucgggaagugcaacaucgccggcuggauccuggggaacccggagugcgagagccuguccaccgccagcuccuggagcuacaucguggagaccuccagcuccgacaacggcacgugcuaccccggcgacuucaucgacuacgaggagcuccgggagcagcugagcuccgugagcuccuucgagcgcuucgagaucuuccccaagaccagcuccuggcccaaccacgacagcgacaagggggucaccgccgccugcccgcacgccggcgcgaaguccuucuacaagaaccugaucuggcucgugaagaaggggaacagcuaccccaagcuguccaagagcuacaucaacgacaagggcaaggaggugcugguccucugggggauccaccaccccagcaccuccgccgaccagcagagccuguaccagaacgccgacgccuacguguucgugggcuccagccgguacuccaagaaguucaagcccgagaucgccauccgcccgaagguccgggaccaggagggccgcaugaacuacuacuggacgcugguggagcccggggacaagaucaccuucgaggcgaccggcaaccucguggucccccgguacgccuucgccauggagcgcaacgccgggagcggcaucaucaucuccgacacccccgugcacgacugcaacacgaccugccagaccccgaagggcgccaucaacaccagccugcccuuccagaacauccaccccaucacgaucgggaagugccccaaguacgugaaguccaccaagcugcggcucgcgaccggccugcgcaacgucccgagcauccagucccgggggcuguucggcgccaucgccggguucaucgagggcggcuggaccgggaugguggacggcugguacggguaccaccaccagaacgagcagggcagcggguacgccgccgaccucaaguccacgcagaacgcgaucgacgagaucaccaacaaggugaacagcgucaucgagaagaugaacacccaguucaccgccgugggcaaggaguucaaccaccuggagaagcgcaucgagaaccugaacaagaaggucgacgacggcuuccucgacaucuggacguacaacgccgagcugcuggugcuccuggagaacgagcggacccuggacuaccacgacuccaacgugaagaaccucuacgagaagguccgcagccagcugaagaacaacgccaaggagaucgggaacggcugcuucgaguucuaccacaagugcgacaacacgugcauggaguccgugaagaacggggccuacgacuaccccaaguacagcgaggaggcgaagcugaaccgggaggagaucgacggcgugaagcucgaguccacccgcaucuaccagauccuggccaucuacagcaccgucgccagcucccuggugcucguggucagccugggggccaucuccuucuggaugugcagcaacggcucccugcagugccggaucugcaucuga

SEQ ID NO: 74468 - RNA, 1701 nt, Artificial Sequence
  derived and/or modified CDS sequence (opt1) from hemagglutinin__InfluenzaA__AGU92755
augaaggccauccuggugguccuccuguacaccuucgccaccgcgaacgccgacacgcugugcaucggcuaccacgccaacaacagcaccgacaccguggacaccgugcucgagaagaacgucacggugacccacuccgugaaccugcuggaggacaagcacaacgggaagcucugcaagcugcgcggcgucgcgccccugcaccucgggaagugcaacaucgccggcuggauccuggggaacccggagugcgagagccuguccaccgccagcuccuggagcuacaucguggagaccuccagcuccgacaacggcacgugcuaccccggcgacuucaucgacuacgaggagcuccgggagcagcugagcuccgugagcuccuucgagcgcuucgagaucuuccccaagaccagcuccuggcccaaccacgacagcaacaagggggucaccgccgccugcccgcacgccggcgcgaaguccuucuacaagaaccugaucuggcucgugaagaaggggaacagcuaccccaagcuguccaagagcuacaucaacgacaagggcaaggaggugcugguccucugggggauccaccaccccagcaccuccgccgaccagcagagccuguaccagaacgccgacgccuacguguucgugggcuccagccgguacuccaaggaguucaagcccgagaucgccauccgcccgaagguccgggaccaggagggccgcaugaacuacuacuggacgcugguggagcccggggacaagaucaccuucgaggcgaccggcaaccucguggucccccgguacgccuucgccauggagcgcaacgccgggagcggcaucaucaucuccgacacccccgugcacgacugcaacacgaccugccagaccccgaagggcgccaucaacaccagccugcccuuccagaacauccaccccaucacgaucgggaagugccccaaguacgugaaguccaccaagcugcggcucgcgaccggccugcgcaacgucccgagcauccagucccgggggcuguucggcgccaucgccggguucaucgagggcggcuggaccgggaugguggacggcugguacggguaccaccaccagaacgagcagggcagcggguacgccgccgaccucaaguccacgcagaacgcgaucgacgagaucaccaacaaggugaacagcgucaucgagaagaugaacacccaguucaccgccgugggcaaggaguucaaccaccuggagaagcgcaucgagaaccugaacaagaaggucgacgacggcuuccucgacaucuggacguacaacgccgagcugcuggugcuccuggagaacgagcggacccuggacuaccacgacuccaacgugaagaaccucuacgagaagguccgcagccagcugaagaacaacgccaaggagaucgggaacggcugcuucgaguucuaccacaagugcgacaacacgugcauggaguccgugaagaacgggaccuacgacuaccccaaguacagcgaggaggccaagcugaaccgggaggagaucgacggcgugaagcucgaguccacccgcaucuaccagauccuggcgaucuacagcaccgucgccagcucccuggugcucguggucagccugggggccaucuccuucuggaugugcagcaacggcucccugcagugccggaucugcaucuga

SEQ ID NO: 74469 - RNA, 1701 nt, Artificial Sequence
  derived and/or modified CDS sequence (opt1) from hemagglutinin__InfluenzaA__AGU92766
augaaggccauccuggugguccuccuguacaccuucgccaccgcgaacgccgacacgcugugcaucggcuaccacgccaacaacagcaccgacaccguggacaccgugcucgagaagaacgucacggugacccacuccgugaaccugcuggaggacaagcacaacgggaagcucugcaagcugcgcggcgucgcgccccugcaccucgggaagugcaacaucgccggcuggauccuggggaacccggagugcgagacccugagcaccgccuccagcugguccuacaucguggagacgagcuccagcgacaacgggaccugcuaccccggcgacuucaucgacuacgaggagcuccgggagcagcuguccagcguguccagcuucgagcgcuucgagaucuuccccaagaccuccagcuggcccaaccacgaguccaacaagggcgucaccgccgccugcccgcacgccggcgcgaagggguucuacaagaaccugaucuggcucgugaagaagggcaacagcuaccccaagcuguccaagagcuacaucaacgacaaggggaaggaggugcugguccucuggggcauccaccaccccuccacgaccgccgaccagcagagccuguaccagaacgccgacgccuacguguucgugggcaccagccgguacuccaagaaguucaagcccgagaucgccacccgcccgaagguccgggaccaggaggggcgcaugaacuacuacuggacgcugguggagcccggcgacaagaucaccuucgaggcgaccgggaaccucguggucccccgguacgccuucgccauggagcgcgacgccggcagcggcaucaucaucuccgacacccccgugcacgacugcaacacgaccugccagaccccgaagggggccaucaacaccagccugcccuuccagaacauccaccccaucacgaucggcaagugccccaaguacgugaaguccaccaagcugcggcucgcgaccgggcugcgcaacgucccgagcauccagucccggggccuguucggggccaucgccggcuucaucgagggcggguggaccggcaugguggacgggugguacggcuaccaccaccagaacgagcaggggagcggcuacgccgccgaccucaaguccacgcagaacgcgaucgacaagaucaccaacaaggugaacagcgucaucgagaagaugaacacccaguucaccgccgugggcaaggaguucaaccaccuggagaagcgcaucgagaaccugaacaagaaggucgacgacggguuccucgacaucuggacguacaacgccgagcugcuggugcuccuggagaacgagcggacccuggacuaccacgacuccaacgugaagaaccucuacgagaagguccgcaaccagcugaagaacaacgccaaggagaucggcaacgggugcuucgaguucuaccacaagugcgacaacacgugcauggagagcgugaagaacggcaccuacgacuaccccaaguacuccgaggaggccaagcugaaccgggaggagaucgacggggugaagcucgagagcacccgcaucuaccagauccuggcgaucuacuccaccgccgccagcucccugguccucguggugagccugggcgccaucuccuucuggaugugcagcaacggcagccugcagugccggaucugcaucuga

SEQ ID NO: 74470 - RNA, 1701 nt, Artificial Sequence
  derived and/or modified CDS sequence (opt1) from hemagglutinin__InfluenzaA__AGU92777
augaaggccauccuggugguccuccuguacaccuucgccaccgcgaacgccgacacgcugugcaucggcuaccacgccaacaacagcaccgacaccguggacaccgugcucgagaagaacgucacggugacccacuccgugaaccugcuggaggacaagcacaacgggaagcucugcaagcugcgcggcgucgcgccccugcaccucgggaagugcaacaucgccggcuggauccuggggaacccggagugcgagacccugagcaccgccuccagcugguccuacaucguggagacgagcuccagcgacaacgggaccugcuaccccggcgacuucaucgacuacgaggagcuccgggagcagcuguccagcguguccagcuucgagcgcuucgagaucuuccccaagaccuccagcuggcccaaccacgaguccaacaagggcgucaccgccgccugcccgcacgccggcgcgaagggguucuacaagaaccugaucuggcucgugaagaagggcaacagcuaccccaagcuguccaagagcuacaucaacgacaaggggaaggaggugcugguccucuggggcauccaccaccccuccacgaccgccgaccagcagagcaucuaccagaacgccgacaccuacguguucgugggcaccagccgguacuccaagaaguucaagcccgagaucgccacgcgcccgaagguccgggaccaggaggggcgcaugaacuacuacuggacccugguggagcccggcgacaagaucaccuucgaggccaccgggaaccugguggucccccgguacgcguucgccauggagcgcgacgccggcagcggcaucaucaucuccgacacgcccgugcacgacugcaacacgaccugccagaccccgaagggggccaucaacaccagccuccccuuccagaacauccaccccaucaccaucggcaagugccccaaguacgugaaguccaccaagcugcggcuggccaccgggcuccgcaacgucccgagcauccagucccggggccuguucggggcgaucgccggcuucaucgagggcggguggacgggcaugguggacgggugguacggcuaccaccaccagaacgagcaggggagcggcuacgccgccgaccugaaguccacccagaacgccaucgacaagaucaccaacaaggugaacagcgucaucgagaagaugaacacccaguucacggcggugggcaaggaguucaaccaccucgagaagcgcaucgagaaccugaacaagaaggucgacgacggguuccuggacaucuggaccuacaacgccgagcuccuggugcugcucgagaacgagcggacccuggacuaccacgacuccaacgugaagaaccuguacgagaagguccgcaaccagcucaagaacaacgccaaggagaucggcaacgggugcuucgaguucuaccacaagugcgacaacacgugcauggagagcgugaagaacggcaccuacgacuaccccaaguacuccgaggaggccaagcugaaccgggaggagaucgacggggugaagcuggagagcacccgcaucuaccagauccucgccaucuacuccaccgcggccagcucccugguccugguggugagccucggcgccaucuccuucuggaugugcagcaacggcagccugcagugccggaucugcaucuga

SEQ ID NO: 74471 - RNA, 1701 nt, Artificial Sequence
  derived and/or modified CDS sequence (opt1) from hemagglutinin__InfluenzaA__AGU92788
augaaggccauccuggugguccuccuguacaccuucgccaccgcgaacgccgacacgcugugcaucggcuaccacgccaacaacagcaccgacaccguggacaccgugcucgagaagaacgucacggugacccacuccgugaaccugcuggaggacaagcacaacgggaagcucugcaagcugcgcggcgucgcgccccugcaccucgggaagugcaacaucgccggcuggauccuggggaacccggagugcgagacccugagcaccgccuccagcugguccuacaucguggagacgagcuccagcgacaacgggaccugcuaccccggcgacuucaucgacuacgaggagcuccgggagcagcuguccagcguguccagcuucgagcgcuucgagaucuuccccaagaccuccagcuggcccaaccacgacuccgacaagggcgucaccgccgccugcccgcacgccggcgcgaagggguucuacaagaaccugaucuggcucgugaagaagggcaacagcuaccccaagcuguccaagagcuacaucaacgacaaggggaaggaggugcugguccucuggggcauccaccaccccuccacgaccgccgaccagcagagccuguaccagaacgccgacgccuacguguucgugggcaccagccgguacuccaagaaguucaagcccgagaucgccacccgcccgaagguccgggaccgcgaggggcggaugaacuacuacuggacgcugguggagcccggcgacaagaucaccuucgaggcgaccgggaaccucguggucccccgcuacgccuucgccauggagcgggacgccggcagcggcaucaucaucuccgacacccccgugcacgacugcaacacgaccugccagaccccgaagggggccaucaacaccagccugcccuuccagaacauccaccccaucacgaucggcaagugccccaaguacgugaaguccaccaagcugcgccucgcgaccgggcugcggaacgucccgagcauccagucccgcggccuguucggggccaucgccggcuucaucgagggcggguggaccggcaugcucgacgggugguacggcuaccaccaccagaacgagcaggggagcggcuacgccgccgaccugaaguccacgcagaacgcgaucgacaagaucaccaacaaggugaacagcgugaucgagaagaugaacacccaguucaccgccgucggcaaggaguucaaccaccuggagaagcggaucgagaaccucaacaagaagguggacgacggguuccuggacaucuggacguacaacgccgagcugcucguccugcuggagaacgagcgcacccucgacuaccacgacuccaacgugaagaaccuguacgagaaggugcggaaccagcugaagaacaacgccaaggagaucggcaacgggugcuucgaguucuaccacaagugcgacaacacgugcauggagagcgucaagaacggcaccuacgacuaccccaaguacuccgaggaggccaagcucaaccgcgaggagaucgacggggugaagcuggagagcacccggaucuaccagauccuggcgaucuacuccaccgccgccagcucccucgugcuggucgugagccugggcgccaucuccuucuggaugugcagcaacggcagccuccagugccgcaucugcaucuga

SEQ ID NO: 74472 - RNA, 1701 nt, Artificial Sequence
  derived and/or modified CDS sequence (opt1) from hemagglutinin__InfluenzaA__AGU92799
augaaggccauccuggugguccuccuguacaccuucgccaccgcgaacgccgacacgcugugcaucggcuaccacgccaacaacagcaccgacaccguggacaccgugcucgagaagaacgucacggugacccacuccgugaaccugcuggaggacaagcacaacgggaagcucugcaagcugcgcggcgucgcgccccugcaccucgggaagugcaacaucgccggcuggauccuggggaacccggagugcgagacccugagcaccgccuccagcugguccuacaucguggagacgagcuccagcgacaacgggaccugcuaccccggcgacuucaucgacuacgaggagcuccgggagcagcuguccagcguguccagcuucgagcgcuucgagaucuuccccaagaccuccagcuggcccgaccacgacuccaacaagggcgucaccgccgccugcccgcacgccggcgcgaagggguucuacaagaaccugaucuggcucgugaagaagggcaacagcuaccccaagcuguccaagagcuacaucaacgacaaggggaaggaggugcugguccucuggggcauccaccaccccuccacgaccgccgaccagcagagccuguaccagaacgccgacgccuacguguucgugggcaccagccgguacuccaagaaguucaagcccgagaucgccacccgcccgaagguccgggaccgcgaggggcggaugaacuacuacuggacgcugguggagcccggcgacaagaucaccuucgaggcgaccgggaaccucguggucccccgcuacgccuucgccauggagcgggacgccggcagcggcaucaucaucuccgacacccccgugcacgacugcaacacgaccugccagaccccgaagggggccaucaacaccagccugcccuuccagaacauccaccccaucacgaucggcaagugccccaaguacgugaaguccaccaagcugcgccucgcgaccgggcugcggaacgucccgagcauccagucccgcggccuguucggggccaucgccggcuucaucgagggcggguggaccggcaugguggacgggugguacggcuaccaccaccagaacgagcaggggagcggcuacgccgccgaccucaaguccacgcagaacgcgaucgacaagaucaccaacaaggugaacagcgucaucgagaagaugaacacccaguucaccgccgugggcaaggaguucaaccaccuggagaagcggaucgagaaccugaacaagaaggucgacgacggguuccucgacaucuggacguacaacgccgagcugcuggugcuccuggagaacgagcgcacccuggacuaccacgacuccaacgugaagaaccucuacgagaagguccggaaccagcugaagaacaacgccaaggagaucggcaacgggugcuucgaguucuaccacaagugcgacaacacgugcauggagagcgugaagaacggcaccuacgacuaccccaaguacuccgaggaggccaagcugaaccgcgaggagaucgacggggugaagcucgagagcacccggaucuaccagauccuggcgaucuacuccaccgccgccagcucccugguccucguggugagccugggcgccaucuccuucuggaugugcagcaacggcagccugcagugccgcaucugcaucuga

SEQ ID NO: 74473 - RNA, 1701 nt, Artificial Sequence
  derived and/or modified CDS sequence (opt1) from hemagglutinin__InfluenzaA__AGU92821
augaaggccauccuggugguccuccuguacaccuucgccaccgcgaacgccgacacgcugugcaucggcuaccacgccaacaacagcaccgacaccguggacaccgugcucgagaagaacgucacggugacccacuccgugaaccugcuggaggacaagcacaacgggaagcucugcaagcugcgcggcgucgcgccccugcaccucgggaagugcaacaucgccggcuggauccuggggaacccggagugcgagacccugagcaccgccuccagcugguccuacaucguggagacgagcuccagcgacaacgggaccugcuaccccggcgacuucaucgacuacgaggagcuccgggagcagcuguccagcguguccagcuucgagcgcuucgagaucuuccccaagaccuccagcuggcccaaccacgacuccaacaagggcgucaccgccgccugcccgcacgccggcgcgaagggguucuacaagaaccugaucuggcucgugaagaagggcaacagcuaccccaagcuguccaagagcuacaucaacgacaaggggaaggaggugcugguccucuggggcauccaccaccccuccacgaccgccgaccagcagagccuguaccagaacgccgacaccuacguguucgugggcaccagccgguacuccaagauguucaagcccgagaucgccacgcgcccgaagguccgggaccgcgaggggcggaugaacuacuacuggacccugguggagcccggcgacaagaucaccuucgaggccaccgggaaccucguggucccccgcuacgcguucgccauggagcgggacgccggcagcggcaucaucaucuccgacacgcccgugcacgacugcaacacgaccugccagaccccgaagggggccaucaacaccagccugcccuuccagaacauccaccccaucaccaucggcaagugccccaaguacgugaaguccaccaagcugcgccucgccaccgggcugcggaacgucccgagcauccagucccgcggccuguucggggcgaucgccggcuucaucgagggcggguggacgggcaugguggacgggugguacggcuaccaccaccagaacgagcaggggagcggcuacgccgccgaccucaaguccacccagaacgccaucgacaagaucaccaacaaggugaacagcgucaucgagaagaugaacacccaguucacggcggugggcaaggaguucaaccaccuggagaagcggaucgagaaccugaacaagaaggucgacgacggguuccucgacaucuggaccuacaacgccgagcugcuggugcuccuggagaacgagcgcacccuggacuaccacgacuccaacgugaagaaccucuacgagaagguccggaaccagcugaagaacaacgccaaggagaucggcaacgggugcuucgaguucuaccacaagugcgacaacacgugcauggagagcgugaagaacggcaccuacgacuaccccaaguacuccgaggaggccaagcugaaccgcgaggagaucgacggggugaagcucgagagcacccggaucuaccagauccuggccaucuacuccaccgcggccagcucccugguccucguggugagccugggcgccaucuccuucuggaugugcagcaacggcagccugcagugccgcaucugcaucuga

SEQ ID NO: 74474 - RNA, 1701 nt, Artificial Sequence
  derived and/or modified CDS sequence (opt1) from hemagglutinin__InfluenzaA__AGU92843
augaaggccauccuggugguccuccuguacaccuucgccaccgcgaacgccgacacgcugugcaucggcuaccacgccaacaacagcaccgacaccguggacaccgugcucgagaagaacgucacggugacccacuccgugaaccugcuggaggacaagcacaacgggaagcucugcaagcugcgcggcgucgcgccccugcaccucgggaagugcaacaucgccggcuggauccuggggaacccggagugcgagagccuguccaccgccagcuccuggagcuacaucguggagaccuccagcuccgacaacggcacgugcuaccccggcgacuucaucgacuacgaggagcuccgggagcagcugagcuccgugagcuccuucgagcgcuucgagaucuuccccaagaccagcuccuggcccaaccacgacagcaacaagggggucaccgccgccugcccgcacgccggcgcgaaguccuucuacaagaaccugaucuggcucgugaagaagggggacagcuaccccaagcuguccaagagcuacaucaacgacaagggcaaggaggugcugguccucugggggauccaccaccccagcaccuccgccgaccagcagagccuguaccagaacgccgacgccuacguguucgugggcuccagccgguacuccaagaaguucaagcccgagaucgccauccgcccgaagguccgggaccgcgagggccggaugaacuacuacuggacgcugguggagcccggggacaagaucaccuucgaggcgaccggcaaccucguggucccccgcuacgccuucgccauggagcggaacgccgggagcggcaucaucaucuccgacacccccgugcacgacugcaacacgaccugccagaccccgaagggcgccaucaacaccagccugcccuuccagaacauccaccccaucacgaucgggaagugccccaaguacgugaaguccaccaagcugcgccucgcgaccggccugcggaacgucccgagcauccagucccgcgggcuguucggcgccaucgccggguucaucgagggcggcuggaccgggaugguggacggcugguacggguaccaccaccagaacgagcagggcagcggguacgccgccgaccucaaguccacgcagaacgcgaucgacgagaucaccaacaaggugaacagcgucaucgagaagaugaacacccaguucaccgccgugggcaaggaguucaaccaccuggagaagcggaucgagaaccugaacaagaaggucgacgacggcuuccucgacaucuggacguacaacgccgagcugcuggugcuccuggagaacgagcgcacccuggacuaccacgacuccaacgugaagaaccucuacgagaagguccggagccagcugaagaacaacgccaaggagaucgggaacggcugcuucgaguucuaccacaagugcgacaacacgugcauggaguccgugaagaacgggaccuacgacuaccccaaguacagcgaggaggccaagcugaaccgcgaggagaucgacggcgugaagcucgaguccacccggaucuaccagauccuggcgaucuacagcaccgucgccagcucccuggugcucguggucagccugggggccaucuccuucuggaugugcagcaacggcucccugcagugccgcaucugcaucuga

SEQ ID NO: 74475 - RNA, 1710 nt, Artificial Sequence
  derived and/or modified CDS sequence (opt1) from hemagglutinin__InfluenzaA__AGU92854
augaaggccauccuggugguccuccuguacaccuucgccaccgcgaacgccgacacgcugugcaucggcuaccacgccaacaacagcaccgacaccguggacaccgugcucgagaagaacgucacggugacccacuccgugaaccugcuggaggacaagcacaacgggaagcucugcaagcugcgcggcgucgcgccccugcaccucgggaagugcaacaucgccggcuggauccuggggaacccggagugcgagagccuguccaccgccagcuccuggagcuacaucguggagaccuccagcuccgacaacggcacgugcuaccccggcgacuucaucgacuacgaggagcuccgggagcagcugagcuccgugagcuccuucgagcgcuucgagaucuuccccaagaccagcuccuggcccaaccacgacagcgacaagggggucaccgccgccugcccgcacgccggcgcgaaguccuucuacaagaaccugaucuggcucgugaagaaggggaacagcuaccccaagcuguccaagagcuacaucaacgacaagggcaaggaggugcugguccucugggggauccaccaccccagcaccuccgccgaccagcagagccuguaccagaacgccgacgccuacguguucgugggcuccagccgguacuccaagaaguucaagcccgagaucgccauccgcccgaagguccgggaccgcgagggccggaugaacuacuacuggacgcugguggagcccggggacaagaucaccuucgaggcgaccggcaaccucguggucccccgcuacgccuucgccauggagcggaacgccgggagcggcaucaucaucuccgacacccccgugcacgacugcaacacgaccugccagaccccgaagggcgccaucaacaccagccugacgucccugcccuuccagaacauccaccccaucaccaucgggaagugccccaaguacgucaagagcaccaagcuccgccuggcgaccggccugcggaacgugccguccauccagagccgcgggcuguucggcgccaucgccggguucaucgagggcggcuggacggggaugguggacggcugguacggguaccaccaccagaacgagcagggcuccggguacgccgccgaccucaagagcacccagaacgcgaucgacgagaucaccaacaaggugaacuccgucaucgagaagaugaacacccaguucacggccgugggcaaggaguucaaccaccuggagaagcggaucgagaaccucaacaagaaggucgacgacggcuuccuggacaucuggaccuacaacgccgagcugcucgugcugcuggagaacgagcgcacccucgacuaccacgacagcaacgugaagaaccuguacgagaagguccggucccagcugaagaacaacgccaaggagaucgggaacggcugcuucgaguucuaccacaagugcgacaacacgugcauggagagcgugaagaacgggaccuacgacuaccccaaguacuccgaggaggccaagcucaaccgcgaggagaucgacggcgugaagcuggagagcacccggaucuaccagauccuggcgaucuacagcaccgucgccuccagccucgugcugguggucucccugggggccaucagcuucuggaugugcuccaacggcagccuccagugccgcaucugcaucuga

SEQ ID NO: 74476 - RNA, 1701 nt, Artificial Sequence
  derived and/or modified CDS sequence (opt1) from hemagglutinin__InfluenzaA__AGU92887
augaaggccauccuggugguccuccuguacaccuucgccaccgcgaacgccgacacgcugugcaucggcuaccacgccaacaacagcaccgacaccguggacaccgugcucgagaagaacgucacggugacccacuccgugaaccugcuggaggacaagcacaacgggaagcucugcaagcugcgcggcgucgcgccccugcaccucgggaagugcaacaucgccggcuggauccuggggaacccggagugcgagagccuguccaccgccagcuccuggagcuacaucguggagaccuccagcuccgacaacggcacgugcuaccccggcgacuucaucgacuacgaggagcuccgggagcagcugagcuccgugagcuccuucgagcgcuucgagaucuuccccaagaccagcuccuggcccaaccacgacagcaacaagggggucaccgccgccugcccgcacgccggcgcgaaguccuucuacaagaaccugaucuggcucgugaagaaggggaacagcuaccccaagcuguccaagagcuacaucaacgacaagggcaaggaggugcugguccucugggggauccaccaccccagcaccuccgacgaccagcagagccuguaccagaacgccgacgccuacguguucgugggcuccagccgguacuccaagaaguucaagcccgagaucgccauccgcccgaagguccgggaccgcgagggccggaugaacuacuacuggacgcugguggagcccggggacaagaucaccuucgaggccaccggcaaccucguggucccccgcuacgcguucgccauggagcggaacgccgggagcggcaucaucaucuccgacacccccgugcacgacugcaacacgaccugccagaccccgaagggcgccaucaacaccagccugcccuuccagaacauccaccccaucacgaucgggaagugccccaaguacgugaaguccaccaagcugcgccucgccaccggccugcggaacgucccgagcauccagucccgcgggcuguucggcgcgaucgccggguucaucgagggcggcuggaccgggaugguggacggcugguacggguaccaccaccagaacgagcagggcagcggguacgccgccgaccucaaguccacgcagaacgccaucgacgagaucaccaacaaggugaacagcgucaucgagaagaugaacacccaguucaccgcggugggcaaggaguucaaccaccuggagaagcggaucgagaaccugaacaagaaggucgacgacggcuuccucgacaucuggacguacaacgccgagcugcuggugcuccuggagaacgagcgcacccuggacuaccacgacuccaacgugaagaaccucuacgagaagguccggagccagcugaagaacaacgccaaggagaucgggaacggcugcuucgaguucuaccacaagugcgacaacacgugcauggaguccgugaagaacgggaccuacgacuaccccaaguacagcgaggaggccaagcugaaccgcgaggagaucgacggcgugaagcucgaguccacccggaucuaccagauccuggccaucuacagcaccgucgcgagcucccuggugcucguggucagccugggggccaucuccuucuggaugugcagcaacggcucccugcagugccgcaucugcaucuga

SEQ ID NO: 74477 - RNA, 1701 nt, Artificial Sequence; identical to SEQ ID NO: 74461
  derived and/or modified CDS sequence (opt1) from hemagglutinin__InfluenzaA__AGU92898

SEQ ID NO: 74478 - RNA, 1701 nt, Artificial Sequence; identical to SEQ ID NO: 74462
  derived and/or modified CDS sequence (opt1) from hemagglutinin__InfluenzaA__AGU92909

SEQ ID NO: 74479 - RNA, 1701 nt, Artificial Sequence; identical to SEQ ID NO: 74464
  derived and/or modified CDS sequence (opt1) from hemagglutinin__InfluenzaA__AGU92931

SEQ ID NO: 74480 - RNA, 1701 nt, Artificial Sequence; identical to SEQ ID NO: 74465
  derived and/or modified CDS sequence (opt1) from hemagglutinin__InfluenzaA__AGU92942

SEQ ID NO: 74481 - RNA, 1701 nt, Artificial Sequence; identical to SEQ ID NO: 74465
  derived and/or modified CDS sequence (opt1) from hemagglutinin__InfluenzaA__AGU92953

SEQ ID NO: 74482 - RNA, 1701 nt, Artificial Sequence
  derived and/or modified CDS sequence (opt1) from hemagglutinin__InfluenzaA__AGU92964
augaaggccauccuggugguccuccuguacaccuucgccaccgcgaacgccgacacgcugugcaucggcuaccacgccaacaacagcaccgacaccguggacaccgugcucgagaagaacgucacggugacccacuccgugaaccugcuggaggacaagcacaacgggaagcucugcaagcugcgcggcgucgcgccccugcaccucgggaagugcaacaucgccggcuggauccuggggaacccggagugcgagacccugagcaccgccuccagcugguccuacaucguggagacgagcuccagcgacaacgggaccugcuaccccggcgacuucaucgacuacgaggagcuccgggagcagcuguccagcguguccagcuucgagcgcuucgagaucuuccccaagaccuccagcuggcccaaccacgacuccaacaagggcgucaccgccgccugcccgcacgccggcgcgaagggguucuacaagaaccugaucuggcucgugaagaagggcaacagcuaccccaagcuguccaagagcuacaucaacgacaaggggaaggaggugcugguccucuggggcauccaccaccccuccacgaccgccgaccagcagagccuguaccagaacgccgacgccuacguguucgugggcaccagccgguacuccaagaaguucaagcccgagaucgccacccgcccgaagguccgggaccgcgaggggcggaugaacuacuacuggacgcugguggagcccggcgacaagaucaccuucgaggcgaccgggaaccucguggucccccgcuacgccuucgccauggagcgggacgccggcagcggcaucaucaucuccgacacccccgugcacgacugcaacacgaccugccagaccccgaagggggccaucaacaccagccugcccuuccagaacauccaccccaucacgaucggcaagugccccaaguacgugaaguccaccaagcugcgccucgcgaccgggcugcggaacgucccgagcauccagucccgcggccuguucggggccaucgccggcuucaucgagggcggguggaccggcaugcucgacgggugguacggcuaccaccaccagaacgagcaggggagcggcuacgccgccgaccugaaguccacgcagaacgcgaucgacaagaucaccaacaaggugaacagcgugaucgagaagaugaacacccaguucaccgccgucggcaaggaguucaaccaccuggagaagcggaucgagaaccucaacaagaagguggacgacggguuccuggacaucuggacguacaacgccgagcugcucguccugcuggagaacgagcgcacccucgacuaccacgacuccaacgugaagaaccuguacgagaaggugcggaaccagcugaagaacaacgccaaggagaucggcaacgggugcuucgaguucuaccacaagugcgacaacacgugcauggagagcgucaagaacggcaccuacgacuaccccaaguacuccgaggaggccaagcucaaccgcgaggagaucgacggggugaagcuggagagcacccggaucuaccagauccuggcgaucuacuccaccgccgccagcucccucgugcuggucgugagccugggcgccaucuccuucuggaugugcagcaacggcagccuccagugccgcaucugcaucuga

SEQ ID NO: 74483 - RNA, 1701 nt, Artificial Sequence
  derived and/or modified CDS sequence (opt1) from hemagglutinin__InfluenzaA__AGU92975
augaaggccauccuggugguccuccuguacaccuucgccaccgcgaacgccgacacgcugugcaucggcuaccacgccaacaacagcaccgacaccguggacaccgugcucgagaagaacgucacggugacccacuccgugaaccugcuggaggacaagcacaacgggaagcucugcaagcugcgcggcgucgcgccccugcaccucgggaagugcaacaucgccggcuggauccuggggaacccggagugcgagacccugagcaccgccuccagcugguccuacaucguggagacgagcuccagcgacaacgggaccugcuaccccggcgacuucaucgacuacgaggagcuccgggagcagcuguccagcguguccagcuucgagcgcuucgagaucuuccccaagaccuccagcuggcccaaccacgacuccaacaagggcgucaccgccgccugcccgcacgccggcgcgaagggguucuacaagaaccugaucuggcucgugaagaaggagaacagcuaccccaagcuguccaagagcuacaucaacgacaagggcaaggaggugcugguccucugggggauccaccaccccuccacgaccgccgaccagcagagccuguaccagaacgccgacaccuacguguucgugggcaccagccgguacuccaagaaguucaagcccgagaucgccacgcgcccgaagguccgggaccgcgagggccggaugaacuacuacuggacccugguggagcccggggacaagaucaccuucgaggccaccggcaaccucguggucccccgcuacgcguucgccauggagcgggacgccgggagcggcaucaucaucuccgacacgcccgugcacgacugcaacacgaccugccagaccccgaagggcgccaucaacaccagccugcccuuccagaacauccaccccaucaccaucgggaagugccccaaguacgugaaguccaccaagcugcgccucgccaccggccugcggaacgucccgagcauccagucccgcgggcuguucggcgcgaucgccggguucaucgagggcggcuggacggggaugguggacggcugguacggguaccaccaccagaacgagcagggcagcggguacgccgccgaccucaaguccacccagaacgccaucgacaagaucaccaacaaggugaacagcgucaucgagaagaugaacacccaguucacggcggugggcaaggaguucaaccaccuggagaagcggaucgagaaccugaacaagaaggucgacgacggcuuccucgacaucuggaccuacaacgccgagcugcuggugcuccuggagaacgagcgcacccuggacuaccacgacuccaacgugaagaaccucuacgagaagguccggaaccagcugaagaacaacgccaaggagaucgggaacggcugcuucgaguucuaccacaagugcgacaacacgugcauggagagcgugaagaacgggaccuacgacuaccccaaguacuccgaggaggccaagcugaaccgcgaggagaucgacggcgugaagcucgagagcacccggaucuaccagauccuggccaucuacuccaccgcggccagcucccugguccucguggugagccugggggccaucuccuucuggaugugcagcaacggcagccugcagugccgcaucugcaucuga

SEQ ID NO: 74484 - RNA, 1701 nt, Artificial Sequence; identical to SEQ ID NO: 74474
  derived and/or modified CDS sequence (opt1) from hemagglutinin__InfluenzaA__AGU92986

SEQ ID NO: 74485 - RNA, 1701 nt, Artificial Sequence
  derived and/or modified CDS sequence (opt1) from hemagglutinin__InfluenzaA__AGU92997
augaaggccauccuggugguccuccuguacaccuucgccaccgcgaacgccgacacgcugugcaucggcuaccacgccaacaacagcaccgacaccguggacaccgugcucgagaagaacgucacggugacccacuccgugaaccugcuggaggacaagcacaacgggaagcucugcaagcugcgcggcgucgcgccccugcaccucgggaagugcaacaucgccggcuggauccuggggaacccggagugcgagagccuguccaccgccagcuccuggagcuacaucguggagaccuccagcuccgacaacggcacgugcuaccccggcgacuucaucgacuacgaggagcuccgggagcagcugagcuccgugagcuccuucgagcgcuucgagaucuuccccaagaccagcuccuggcccaaccacgacagcaacaagggggucaccgccgccugcccgcacgccggcgcgaaguccuucuacaagaaccugaucuggcucgugaagaaggggaacagcuaccccaagcuguccaagagcuacaucaacgacaagggcaaggaggugcugguccucugggggauccaccaccccagcaccuccgccgaccagcagagccuguaccagaacgccgacgccuacguguucgugggcuccagccgguacuccaagauguucaagcccgagaucgccauccgcccgaagguccgggaccgcgagggccggaugaacuacuacuggacgcugguggagcccggggacaagaucaccuucgaggcgaccggcaaccucguggucccccgcuacgccuucgccauggagcggaacgccgggagcggcaucaucaucuccgacacccccgugcacgacugcaacacgaccugccagaccccgaagggcgccaucaacaccagccugcccuuccagaacauccaccccaucacgaucgggaagugccccaaguacgugaaguccaccaagcugcgccucgcgaccggccugcggaacgucccgagcauccagucccgcgggcuguucggcgccaucgccggguucaucgagggcggcuggaccgggaugguggacggcugguacggguaccaccaccagaacgagcagggcagcggguacgccgccgaccucaaguccacgcagaacgcgaucgacgagaucaccaacaaggugaacagcgucaucgagaagaugaacacccaguucaccgccgugggcaaggaguucaaccaccuggagaagcggaucgagaaccugaacaagaaggucgacgacggcuuccucgacaucuggacguacaacgccgagcugcuggugcuccuggagaacgagcgcacccuggacuaccacgacuccaacgugaagaaccucuacgagaagguccggagccagcugaagaacaacgccaaggagaucgggaacggcugcuucgaguucuaccacaagugcgacaacacgugcauggaguccgugaagaacgggaccuacgacuaccccaaguacagcgaggaggccaagcugaaccgcgaggagaucgacggcgugaagcucgaguccacccggaucuaccagauccuggcgaucuacagcaccgucgccagcucccuggugcucguggucagccugggggccaucuccuucuggaugugcagcaacggcucccugcagugccgcaucugcaucuga

SEQ ID NO: 74486 - RNA, 1701 nt, Artificial Sequence; identical to SEQ ID NO: 74476
  derived and/or modified CDS sequence (opt1) from hemagglutinin__InfluenzaA__AGU93008

SEQ ID NO: 74487 - RNA, 1698 nt, Artificial Sequence; identical to SEQ ID NO: 70578
  derived and/or modified CDS sequence (opt1) from hemagglutinin__InfluenzaA__AGU93019

SEQ ID NO: 74488 - RNA, 1701 nt, Artificial Sequence; identical to SEQ ID NO: 71074
  derived and/or modified CDS sequence (opt1) from hemagglutinin__InfluenzaA__AGU93031

SEQ ID NO: 74489 - RNA, 1701 nt, Artificial Sequence
  derived and/or modified CDS sequence (opt1) from hemagglutinin__InfluenzaA__AGU93042
augaaggccauccuggugguccuccuguacaccuucgccaccgcgaacgccgacacgcugugcaucggcuaccacgccaacaacagcaccgacaccguggacaccgugcucgagaagaacgucacggugacccacuccgugaaccugcuggaggacaagcacaacgggaagcucugcaagcugcgcggcgucgcgccccugcaccucgggaagugcaacaucgccggcuggauccuggggaacccggagugcgagacccugagcaccgccaacuccuggagcuacaucguggagacguccagcuccgacaacgggaccugcuaccccggcgacuucaucgacuacgaggagcuccgggagcagcugagcuccgugagcuccuucgagcgcuucgagaucuuccccaagaccagcuccuggcccaaccacgacagcaacaagggcgucaccgccgccugcccgcacgccggcgcgaagggguucuacaagaaccugaucuggcucgugaagaagggcaacuccuaccccaagcugagcaaguccuacaucaacgacaaggggaaggaggugcugguccucuggggcauccaccaccccagcacgaccgccgaccagcagucccuguaccagaacgccgacaccuacguguucgugggcaccagccgguacagcaagaaguucaagcccgagaucgccauccgcccgaagguccgggaccaggaggggcgcaugaacuacuacuggacgcugguggagcccggcgacaagaucaccuucgaggccaccgggaaccucguggucccccgguacgcguucgccauggagcgcgacgccggcuccggcaucaucaucagcgacacccccgugcacgacugcaacacgaccugccagaccccgaagggggccaucaacaccucccugcccuuccagaacauccaccccaucacgaucggcaagugccccaaguacgucaagagcaccaagcugcggcucgccaccgggcugcgcaacgugccguccauccagagccggggccuguucggggcgaucgccggcuucaucgagggcggguggaccggcaugguggacgggugguacggcuaccaccaccagaacgagcagggguccggcuacgccgccgaccucaagagcacgcagaacgccaucgacaagaucaccaacaaggugaacuccgucaucgagaagaugaacauccaguucaccgcggugggcaaggaguucaaccaccuggagaagcgcaucgagaaccugaacaagaaggucgacgacggguuccucgacaucuggaccuacaacgccgagcugcuggugcuccuggagaacgagcggacgcuggacuaccacgacagcaacgugaagaaccucuacgagaagguccgcaaccagcugaagaacaacgccaaggagaucggcaacgggugcuucgaguucuaccacaagugcgacaacacgugcauggaguccgugaagaacggcaccuacgacuaccccaaguacagcgaggaggccaagcugaaccgggaggagaucgacggggugaagcucgaguccacccgcaucuaccagauccuggccaucuacagcaccgcggccuccagccugguccucguggugucccugggcgccaucagcuucuggaugugcuccaacggcagccugcagugccggaucugcaucuga

SEQ ID NO: 74490 - RNA, 1701 nt, Artificial Sequence
  derived and/or modified CDS sequence (opt1) from hemagglutinin__InfluenzaA__AGU93053
augaaggccauccuggugguccuccuguacaccuucgccaccgcgaacgccgacacgcugugcaucggcuaccacgccaacaacagcaccgacaccguggacaccgugcucgagaagaacgucacggugacccacuccgugaaccugcuggaggacaagcacaacgggaagcucugcaagcugcgcggcgucgcgccccugcaccucgggaagugcaacaucgccggcuggauccuggggaacccggagugcgagacccugagcaccgccuccagcugguccuacaucguggagacgagcuccagcgacaacgggaccugcuaccccggcgacuucaucgacuacgaggagcuccgggagcagcuguccagcguguccagcuucgagcgcuucgagaucuuccccaagaccuccagcuggcccaaccacgacuccaacaagggcgucaccgccgccugcccgcacgccggcgcgaagggguucuacaagaaccugaucuggcucgugaagaagggcaacagcuaccccaagcuguccaagagcuacaucaacgacaaggggaaggaggugcugguccucuggggcauccaccaccccuccacgaccgccgaccagcagagccuguaccagaacgccgacaccuacguguucgugggcaccagccgguacuccaagaaguucaagcccgagaucgccacgcgcccgaagguccgggaccaggaggggcgcaugaacuacuacuggacccugguggagcccggcgacaagaucaccuucgaggccaccgggaaccucguggucccccgguacgcguucgccauggagcgcgacgccggcagcggcaucaucaucuccgacacgcccgugcacgacugcaacacgaccugccagaccccgaagggggccaucaacaccagccugcccuuccagaacauccaccccaucaccaucggcaagugccccaaguacgugaaguccaccaagcugcggcucgccaccgggcugcgcaacgucccgagcauccagucccggggccuguucggggcgaucgccggcuucaucgagggcggguggacgggcaugguggacgggugguacggcuaccaccaccagaacgagcaggggagcggcuacgccgccgaccucaaguccacccagaacgccaucgacaagaucaccaacaaggugaacagcgucaucgagaagaugaacacccaguucacggcggugggcaaggaguucaaccaccuggagaagcgcaucgagaaccugaacaagaaggucgacgacggguuccucgacaucuggaccuacaacgccgagcugcuggugcuccuggagaacgagcggacccuggacuaccacgacuccaacgugaagaaccucuacgagaagguccgcaaccagcugaagaacaacgccaaggagaucggcaacgggugcuucgaguucuaccacaagugcgacaacacgugcauggagagcgugaagaacggcaccuacgacuaccccaaguacuccgaggaggccaagcugaaccgggaggagaucgacggggugaagcucgagagcacccgcaucuaccagauccuggccaucuacuccaccgcggccagcucccugguccucguggugagccugggcgccaucuccuucuggaugugcagcaacggcagccugcagugccggaucugcaucuga

SEQ ID NO: 74491 - RNA, 1701 nt, Artificial Sequence
  derived and/or modified CDS sequence (opt1) from hemagglutinin__InfluenzaA__AGV99014
augaagaccaucaucgcccugagcuacauccucugccugguguucgcccagaagcugcccggcaacgacaacuccaccgcgacgcucugccuggggcaccacgccgucccgaacggcaccaucgugaagaccaucaccaacgaccgcaucgaggugacgaacgccaccgagcugguccagaacagcuccaucggggagaucugcgacagcccccaccagauccucgacggcgagaacugcacccugaucgacgcccugcucggggacccccagugcgacggcuuccagaacaagaagugggaccuguucguggagcgguccaaggccuacagcaacugcuaccccuacgacgugccggacuacgcgucccugcgcagccucgucgccuccagcggcacccuggaguucaacaacgaguccuucaacuggacgggggugacccagaacggcaccagcuccgccugcauccggcgcagcaacaacuccuucuucagccggcugaacuggcucacccacuccaacuucaaguaccccgcccugaacgugacgaugcccaacaacgagcaguucgacaagcuguacaucuggggcguccaccaccccgggaccgacaaggaccagaucuuccucuacgcgcagagcuccgggcgcaucaccgugagcaccaagcggagccagcaggccgugaucccgaacaucggcucccgcccccggauccgcaacauccccagccggaucuccaucuacuggacgaucgucaagcccggcgacauccugcugaucaacagcaccgggaaccucaucgccccgcgcggcuacuucaagauccgguccggcaagagcuccaucaugcgcagcgacgcccccaucgggaagugcaaguccgagugcaucacccccaacggcagcauccccaacgacaagccguuccagaacgugaaccggaucaccuacggggccugcccccgcuacgugaagcaguccacgcugaagcuggcgaccggcaugcggaacguccccgagaagcagacccgcgggaucuucggcgccaucgccggguucaucgagaacggcugggagggcaugauggacgggugguacggcuuccggcaccagaacagcgaggggcgcggccaggccgccgaccucaaguccacccaggcggccaucgaccagaucaacgggaagcugaaccggcugaucggcaagacgaacgagaaguuccaccagaucgagaaggaguucagcgagguggagggccgcauccaggaccucgagaaguacguggaggacaccaagaucgaccugugguccuacaacgccgagcugcucgucgcccuggagaaccagcacaccaucgaccugaccgacagcgagaugaacaagcuguucgagaagacgaagaagcagcuccgcgagaacgccgaggacauggggaacggcugcuucaagaucuaccacaagugcgacaacgcgugcaucggguccauccggaacggcaccuacgaccacgacguguaccgcgacgaggcccugaacaaccgguuccagaucaaggggguggagcucaagagcggcuacaaggacuggauccuguggaucuccuucgccaucagcugcuuccugcucugcgucgcccugcugggcuucaucaugugggccugccagaaggggaacauccgcugcaacaucugcaucuga

SEQ ID NO: 74492 - RNA, 1701 nt, Artificial Sequence; identical to SEQ ID NO: 74018
  derived and/or modified CDS sequence (opt1) from hemagglutinin__InfluenzaA__AGV99037

SEQ ID NO: 74493 - RNA, 1701 nt, Artificial Sequence
  derived and/or modified CDS sequence (opt1) from hemagglutinin__InfluenzaA__AGV99049
augaagaccaucaucgcccugagcuacauccucugccugguguucgcccagaagcugcccggcaacgacaacuccaccgcgacgcucugccuggggcaccacgccgucccgaacggcaccguggugaagaccaucaccaacgaccgcaucgaggucacgaacgccaccgagcuggugcagaacagcuccaucggggagaucugcgacagcccccaccagauccucgacggcgagaacugcacccugaucgacgcccugcucggggacccccagugcgacggcuuccagaacaagaagugggaccuguucguggagcgguccaaggccuacagcaacugcuaccccuacgacgucccggacuacgcgucccugcgcagccucguggccuccagcggcacccuggaguucaacaacgaguccuucaacuggacgggggugacccagaacggcaccagcuccgccugcauccggcgcagcaacaacuccuucuucagccggcugaacuggcucacccaccugaacuucaaguaccccgcccugaacgucacgaugcccaacaacgagcaguucgacaagcucuacaucuggggcgugcaccaccccgggaccgacaaggaccagaucuuccuguacgcgcaguccagcgggcgcaucaccguguccaccaagcggagccagcaggccgucaucccgaacaucggcagccgcccccggauccgcaacauccccucccggaucagcaucuacuggacgaucgugaagcccggcgacauccugcucaucaacuccaccgggaaccugaucgccccgcgcggcuacuucaagauccggagcgggaaguccagcaucaugcgcuccgacgcccccaucggcaagugcaagagcgagugcaucacccccaacggcuccauccccaacgacaagccguuccagaacgugaaccggaucaccuacggggccugcccccgcuacgucaagcagagcacgcugaagcucgcgaccggcaugcggaacgugcccgagaagcagacccgcgggaucuucggcgccaucgccggguucaucgagaacggcugggagggcaugguggacgggugguacggcuuccggcaccagaacuccgaggggcgcggccaggccgccgaccucaagagcacccaggcggccaucgaccagaucaacgggaagcugaaccggcugaucggcaagacgaacggcaaguuccaccagaucgagaaggaguucuccgaggucgaggggcgcauccaggaccuggagaaguacguggaggacaccaagaucgaccuguggagcuacaacgccgagcuccugguggcccuggagaaccagcacaccaucgaccucaccgacuccgagaugaacaagcuguucgagaagacgaagaagcagcugcgcgagaacgccgaggacaugggcaacgggugcuucaagaucuaccacaagugcgacaacgcgugcaucggcagcauccggaacgggaccuacgaccacgacgucuaccgcgacgaggcccucaacaaccgguuccagaucaagggcguggagcugaaguccggcuacaaggacuggauccuguggaucagcuucgccaucuccugcuuccuccugugcgugguccugcucggguucaucaugugggccugccagaagggcaacauccgcugcaacaucugcaucuga

SEQ ID NO: 74494 - RNA, 1701 nt, Artificial Sequence
  derived and/or modified CDS sequence (opt1) from hemagglutinin__InfluenzaA__AGV99073
augaagaccaucaucgcccugagcuacauccucugccugguguucgcccagaagauccccggcaacgacaacuccaccgcgacgcugugccucgggcaccacgccgucccgaacggcaccaucgugaagaccaucaccaacgaccgcaucgaggugacgaacgccaccgagcugguccagaacagcuccaucggggagaucugcgacagcccccaccagauccuggacggcgagaacugcacccucaucgacgcccugcugggggacccccagugcgacggcuuccagaacaagaagugggaccucuucguggagcgguccaaggccuacagcaacugcuaccccuacgacgugccggacuacgcgucccugcgcagccuggucgccuccagcggcacccucgaguucaacaacgaguccuucaacuggacgggggugacccagaacggcaccagcuccgccugcauccgggggagcaacuccagcuucuucucccgccugaacuggcugacccaccucaacuucaaguaccccgcccugaacgugacgaugcccaacaacgagcaguucgacaagcuguacaucuggggcguccaccaccccgggaccgacaaggaccagaucuuccucuacgcgcagagcuccggccggaucaccgugagcaccaagcgcagccagcaggccgugaucccgaacaucggcucccggccccgcauccggaacauccccagccgcaucuccaucuacuggacgaucgucaagcccggggacauccugcugaucaacagcaccggcaaccucaucgccccgcggggguacuucaagauccgcuccggcaagagcuccaucaugcggagcgacgcccccaucggcaagugcaaguccgagugcaucacccccaacgggagcauccccaacgacaagccguuccagaacgugaaccgcaucaccuacggcgccugcccccgguacgugaagcaguccacgcugaagcuggcgaccgggaugcgcaacguccccgagaagcagacccggggcaucuucggggccaucgccggcuucaucgagaacggcugggaggggaugguggacggcugguacggguuccgccaccagaacagcgagggccgggggcaggccgccgaccucaaguccacccaggcggccaucgaccagaucaacggcaagcugaaccgccugaucggcaagacgaacgagaaguuccaccagaucgagaaggaguucagcgagguggaggggcggauccaggaccucgagaaguacgucgaggacaccaagaucgaccugugguccuacaacgccgagcugcucguggcccuggagaaccagcacaccaucgaccugaccgacagcgagaugaacaagcuguucgagaagacgaagaagcagcuccgcgagaacgccgaggacaugggcaacgggugcuucaagaucuaccacaagugcgacaacgcgugcaucggcuccauccgcaacgggaccuacgaccacgacguguaccgggacgaggcccugaacaaccgcuuccagaucaagggcgucgagcucaagcccggcuacaaggacuggauccuguggaucagcuucgccaucuccugcuuccugcucugcguggcccugcugggguucaucaugugggccugccagaagggcaacauccggugcaacaucugcaucuga

SEQ ID NO: 74495 - RNA, 1701 nt, Artificial Sequence; identical to SEQ ID NO: 73882
  derived and/or modified CDS sequence (opt1) from hemagglutinin__InfluenzaA__AGV99085

SEQ ID NO: 74496 - RNA, 1701 nt, Artificial Sequence
  derived and/or modified CDS sequence (opt1) from hemagglutinin__InfluenzaA__AGV99097
augaagaccaucaucgcccugagcuacauccucugccugguguucgcccagaagcugcccggcaacgacaacuccaccgcgacgcucugccuggggcaccacgccgucccgaacggcaccaucgugaagaccaucaccaacgaccgcaucgaggugacgaacgccaccgagcugguccagaacagcuccaucggggagaucugcgacagcccccaccagauccucgacggcgagaacugcacccugaucgacgcccugcucggggacccccagugcgacggcuuccagaacaagaagugggaccuguucguggagcgguccaaggccuacagcaacugcuaccccuacgacgugccggacuacgcgucccugcgcagccucgucgccuccagcggcacccuggaguucaacaacgaguccuucaacuggacgggggugacccagaacggcaccagcuccgccugcauccggcgcagcaacuccagcuucuucucccggcugaacuggcucacccaccugaacuucaaguaccccgcccugaacgugacgaugcccaacaacgagcaguucgacaagcucuacaucuggggcguccaccaccccgggaccgacaaggaccagaucuuccuguacgcgcagagcuccgggcgcaucaccgugagcaccaagcggagccagcaggccgugaucccgaacaucggcucccgcccccggauccgcaacauccccagccggaucuccaucuacuggacgaucgucaagcccggcgacauccugcucaucaacagcaccgggaaccugaucgccccgcgcggcuacuucaagauccgguccggcaagagcuccaucaugcgcagcgacgcccccaucgggaagugcaaguccgagugcaucacccccaacggcagcauccccaacgacaagccguuccagaacgugaaccggaucaccuacggggccugcccccgcuacgugaagcaguccacgcugaagcucgcgaccggcaugcggaacguccccgagaagcagacccgcgggaucuucggcgccaucgccggguucaucgagaacggcugggagggcaugguggacgggugguacggcuuccggcaccagaacagcgaggggcgcggccaggccgccgaccugaaguccacccaggcggccaucgaccagaucaacgggaagcugaaccggcucaucggcaagacgaacgagaaguuccaccagaucgagaaggaguucagcgagguggagggccgcauccaggaccuggagaaguacgucgaggacaccaagaucgaccugugguccuacaacgccgagauccucguggcccuggagaaccagcacaccaucgaccugaccgacagcgagaugaacaagcuguucgagaagacgaagaagcagcuccgcgagaacgccgaggacauggggaacggcugcuucaagaucuaccacaagugcgacaacgcgugcaucggguccauccggaacggcaccuacgaccacgacguguaccgcgacgaggcccugaacaaccgguuccagaucaagggggucgagcucaagagcggcuacaaggacuggauccuguggaucuccuucgccaucagcugcuuccugcucugcguggcccugcugggcuucaucaugugggccugccagaaggggaacauccgcugcaacaucugcaucuga

SEQ ID NO: 74497 - RNA, 1701 nt, Artificial Sequence
  derived and/or modified CDS sequence (opt1) from hemagglutinin__InfluenzaA__AGV99121
augaagaccaucaucgcccugagcuacauccucugccugguguucgcccagaagcugcccggcaacgacaacuccaccgcgacgcucugccuggggcaccacgccgucccgaacggcaccaucgugaagaccaucaccaacgaccgcaucgaggugacgaacgccaccgagcugguccagaacagcuccaucggggagaucugcgacagcccccaccagauccucgacggcgagaacugcacccugaucgacgcccugcucggggacccccagugcgacgacuuccagaacaagaagugggaccuguucguggagcgguccaaggccuacagcaacugcuaccccuacgacgugccggacuacgcgucccugcgcagccucgucgccuccagcggcacccuggaguucaacaacgaguccuucaacugggccggcgugacgcagaacgggaccagcuccgccugcauccggggcagcaacuccagcuucuucucccgccugaacuggcucacccaccugaacuucaaguaccccgcgcugaacgugaccaugcccaacaacgagcaguucgacaagcucuacaucuggggcguccaccaccccgggacggacaaggaccagaucuuccuguacgcccagagcuccgggcggaucaccgugagcaccaagcgcagccagcaggccgugaucccgaacaucggcucccggccccgcauccggaacauccccagccgcaucuccaucuacuggaccaucgucaagcccggcgacauccugcucaucaacagcacggggaaccugaucgccccgcggggcuacuucaagauccgcuccggcaagagcuccaucaugcggagcgacgcccccaucgggaagugcaaguccgagugcaucacccccaacggcagcauccccaacgacaagccguuccagaacgugaaccgcaucaccuacggggcgugcccccgguacgugaagcaguccacccugaagcucgccacgggcaugcgcaacguccccgagaagcagacccgggggaucuucggcgccaucgccggguucaucgagaacggcugggagggcaugguggacgggugguacggcuuccgccaccagaacagcgaggggcggggccaggccgcggaccugaaguccacccaggccgccaucgaccagaucaacgggaagcugaaccgccucaucggcaagaccaacgagaaguuccaccagaucgagaaggaguucagcgagguggagggccggauccaggaccuggagaaguacgucgaggacacgaagaucgaccugugguccuacaacgccgagcuccugguggcccuggagaaccagcacaccaucgaccucaccgacagcgagaugaacaagcuguucgagaagaccaagaagcagcugcgcgagaacgcggaggacauggggaacggcugcuucaagaucuaccacaagugcgacaacgccugcaucggguccauccgcaacggcacguacgaccacgacguguaccgggacgaggcccucaacaaccgcuuccagaucaagggggucgagcucaagagcggcuacaaggacuggauccuguggaucuccuucgccaucagcugcuuccugcugugcguggcccugcucggcuucaucaugugggcgugccagaaggggaacauccggugcaacaucugcaucuga

SEQ ID NO: 74498 - RNA, 1701 nt, Artificial Sequence; identical to SEQ ID NO: 74497
  derived and/or modified CDS sequence (opt1) from hemagglutinin__InfluenzaA__AGV99133

SEQ ID NO: 74499 - RNA, 1701 nt, Artificial Sequence; identical to SEQ ID NO: 74491
  derived and/or modified CDS sequence (opt1) from hemagglutinin__InfluenzaA__AGV99145

SEQ ID NO: 74500 - RNA, 1701 nt, Artificial Sequence
  derived and/or modified CDS sequence (opt1) from hemagglutinin__InfluenzaA__AGV99157
augaagaccaucaucgcccugagcuacauccucugccugguguucgcccagaagcugcccggcaacgacaacuccaccgcgacgcucugccuggggcaccacgccgucccgaacggcaccaucgugaagaccaucaccaacgaccgcaucgaggugacgaacgccaccgagcugguccagaacagcuccaucggggagaucugcgacagcccccaccagauccucgacggcgagaacugcacccugaucgacgcccugcucggggacccccagugcgacggcuuccagaacaagaagugggaccuguucaucgagcgguccaaggccuacagcaacugcuaccccuacgacgugccggacuacgcgucccugcgcagccucguggccuccagcggcacccuggaguucaacaacgaguccuucaacuggacgggggucacccagaacggcaccagcuccgccugcauccggcgcagcaacaacuccuucuucagccggcugaacuggcucacccacuccaacuucaaguaccccgcccugaacgugacgaugcccaacaacgagcaguucgacaagcuguacaucuggggcgugcaccaccccgggaccgacaaggaccagaucuuccucuacgcgcagagcuccgggcgcaucaccgucagcaccaagcggagccagcaggccgugaucccgaacaucggcucccgcccccggauccgcaacauccccagccggaucuccaucuacuggacgaucgugaagcccggcgacauccugcugaucaacagcaccgggaaccucaucgccccgcgcggcuacuucaagauccgguccggcaagagcuccaucaugcgcagcgacacccccaucgggaagugcaaguccgagugcaucacccccaacggcagcauccccaacgacaagccguuccagaacgucaaccggaucacguacggggccugcccccgcuacgugaagcaguccacccugaagcuggccaccggcaugcggaacgugcccgagaagcagacccgcgggaucuucggcgcgaucgccggguucaucgagaacggcugggagggcaugauggacgggugguacggcuuccggcaccagaacagcgaggggcgcggccaggccgccgaccucaaguccacgcaggccgcgaucgaccagaucaacgggaagcugaaccggcugaucggcaagaccaacgagaaguuccaccagaucgagaaggaguucagcgaggucgagggccgcauccaggaccucgagaaguacguggaggacaccaagaucgaccugugguccuacaacgccgagcugcucguggcccuggagaaccagcacaccaucgaccugacggacagcgagaugaacaagcuguucgagaagaccaagaagcagcuccgcgagaacgccgaggacauggggaacggcugcuucaagaucuaccacaagugcgacaacgccugcaucggguccauccggaacggcaccuacgaccacgacgucuaccgcgacgaggcgcugaacaaccgguuccagaucaaggggguggagcucaagagcggcuacaaggacuggauccuguggaucuccuucgccaucagcugcuuccugcucugcguggcccugcugggcuucaucaugugggccugccagaaggggaacauccgcugcaacaucugcaucuga

SEQ ID NO: 74501 - RNA, 1701 nt, Artificial Sequence; identical to SEQ ID NO: 74018
  derived and/or modified CDS sequence (opt1) from hemagglutinin__InfluenzaA__AGV99169

SEQ ID NO: 74502 - RNA, 1701 nt, Artificial Sequence; identical to SEQ ID NO: 74491
  derived and/or modified CDS sequence (opt1) from hemagglutinin__InfluenzaA__AGV99181

SEQ ID NO: 74503 - RNA, 1701 nt, Artificial Sequence
  derived and/or modified CDS sequence (opt1) from hemagglutinin__InfluenzaA__AGV99193
augaagaccaucaucgcccugagcuacauccucugccugguguucgcccagaagcugcccggcaacgacaacuccaccgcgacgcucugccuggggcaccacgccgucccgaacggcaccaucgugaagaccaucaccaacgaccgcaucgaggugacgaacgccaccgagcugguccagaacagcuccaucggggagaucugcgacagcccccaccagauccucgacggcgagaacugcacccugaucgacgcccugcucggggacccccagugcgacggcuuccagaacaagaagugggaccuguucguggagcgguccaaggccuacagcaacugcuaccccuacgacgugccggacuacgcgucccugcgcagccucgucgccuccagcggcacccuggaguucaacaacgaguccuucaacuggacgggggugacccagaacggcaccagcuccgccugcauccggcgcagcaacaacuccuucuucagccggcugaacuggcucacccacuccaacuucaaguaccccgcccugaacgugacgaugcccaacaacgagcaguucgacaagcuguacaucuggggcguccaccaccccgggaccgacaaggaccagaucuuccucuacgcgcagagcuccgggcgcaucaccgugagcaccaagcggagccagcaggccgugaucccgaacaucggcucccgcccccggauccgcaacauccccagccggaucuccaucuacuggacgaucgucaagcccggcgacauccugcugaucaacagcaccgggaaccucaucgccccgcgcggcuacuucaagauccgguccggcaagagcuccaucaugcgcagcgacacccccaucgggaagugcaaguccgagugcaucacccccaacggcagcauccccaacgacaagccguuccagaacgugaaccggaucacguacggggccugcccccgcuacgugaagcaguccacccugaagcuggccaccggcaugcggaacguccccgagaagcagacccgcgggaucuucggcgcgaucgccggguucaucgagaacggcugggagggcaugauggacgggugguacggcuuccggcaccagaacagcgaggggcgcggccaggccgccgaccucaaguccacgcaggccgcgaucgaccagaucaacgggaagcugaaccggcugaucggcaagaccaacgagaaguuccaccagaucgagaaggaguucagcgagguggagggccgcauccaggaccucgagaaguacguggaggacaccaagaucgaccugugguccuacaacgccgagcugcucgucgcccuggagaaccagcacaccaucgaccugacggacagcgagaugaacaagcuguucgagaagaccaagaagcagcuccgcgagaacgccgaggacauggggaacggcugcuucaagaucuaccacaagugcgacaacgccugcaucggguccauccggaacggcaccuacgaccacgacguguaccgcgacgaggcgcugaacaaccgguuccagaucaaggggguggagcucaagagcggcuacaaggacuggauccuguggaucuccuucgccaucagcugcuuccugcucugcgucgcccugcugggcuucaucaugugggccugccagaaggggaacauccgcugcaacaucugcaucuga

SEQ ID NO: 74504 - RNA, 1701 nt, Artificial Sequence; identical to SEQ ID NO: 73892
  derived and/or modified CDS sequence (opt1) from hemagglutinin__InfluenzaA__AGV99956

SEQ ID NO: 74505 - RNA, 1701 nt, Artificial Sequence
  derived and/or modified CDS sequence (opt1) from hemagglutinin__InfluenzaA__AGV99986
augaagaccaucaucgcccugagcuacauccucugccugguguucgcccagaagcugcccggcaacgacaacuccaccgcgacgcucugccuggggcaccacgccgucccgaacggcaccaucgugaagaccaucaccaacgaccgcaucgaggugacgaacgccaccgagcugguccagaacagcuccaucggggagaucugcgacagcccccaccagauccucgacggcgagaacugcacccugaucgacgcccugcucggggacccccagugcgacggcuuccagaacaagaagugggaccuguucguggagcgguccaaggccuacagcaacugcuaccccuacgacgugccggacuacgcgucccugcgcagccucaucgccuccagcggcacccuggaguucaacaacgaguccuucaacuggacgggggucacccagaacggcaccagcuccgccugcauccggcgcagcaacaacuccuucuucagccggcugaacuggcucacccacuccaacuucaaguaccccgcccugaacgugacgaugcccaacaacgagcaguucgacaagcuguacaucuggggcgugcaccaccccgggaccgacaaggaccagaucuuccucuacgcgcagagcuccgggcgcaucaccgucagcaccaagcggagccagcaggccgugaucccgaacaucggcucccgcccccggauccgcaacauccccagccggaucuccaucuacuggacgaucgugaagcccggcgacauccugcugaucaacagcaccgggaaccucaucgccccgcgcggcuacuucaagauccgguccggcaagagcuccaucaugcgcagcgacgcccccaucgggaagugcaaguccgagugcaucacccccaacggcagcauccccaacgacaagccguuccagaacgucaaccggaucaccuacggggccugcccccgcuacgugaagcaguccacgcugaagcuggcgaccggcaugcggaacgugcccgagaagcagacccgcgggaucuucggcgccaucgccggguucaucgagaacggcugggagggcaugauggacgggugguacggcuuccggcaccagaacagcgaggggcgcggccaggccgccgaccucaaguccacccaggcggccaucgaccagaucaacgggaagcugaaccggcugaucggcaagacgaacgagaaguuccaccagaucgagaaggaguucagcgaggucgagggccgcauccaggaccucgagaaguacguggaggacaccaagaucgaccugugguccuacaacgccgagcugcucguggcccuggagaaccagcacaccaucgaccugaccgacagcgagaugaacaagcuguucgagaagacgaagaagcagcuccgcgagaacgccgaggacauggggaacggcugcuucaagaucuaccacaagugcgacaacgcgugcaucggguccauccggaacggcaccuacgaccacgacgucuaccgcgacgaggcccugaacaaccgguuccagaucaaggggguggagcucaagagcggcuacaaggacuggauccuguggaucuccuucgccaucagcugcuuccugcucugcguggcccugcugggcuucaucaugugggccugccagaaggggaacauccgcugcaacaucugcaucuga

SEQ ID NO: 74506 - RNA, 1701 nt, Artificial Sequence
  derived and/or modified CDS sequence (opt1) from hemagglutinin__InfluenzaA__AGW00065
augaagaccaucaucgcccugagcuacauccucugccugguguucgcccagaagcugcccggcaacgacaacuccaccgcgacgcucugccuggggcaccacgccgucccgaacggcaccaucgugaagaccaucaccaacgaccgcaucgaggugacgaacgccaccgagcugguccagaacagcuccaucggggagaucugcgacagcccccaccagauccucgacggcgagaacugcacccugaucgacgcccugcucggggacccccagugcgacggcuuccagaacaagaagugggaccuguucguggagcgguccaaggccuacagcaacugcuaccccuacgacgugccggacuacaccucccugcgcagccucgucgcguccagcggcacgcuggaguucaacaacgaguccuucaacuggaccggggugacccagaacggcaccagcuccgccugcauccggcgcagcaacuccagcuucuucucccggcugaacuggcucacgcaccugaacuucaaguaccccgcccugaacgugaccaugcccaacaacgagcaguucgacaagcucuacaucuggggcguccaccaccccgggaccgacaaggaccagaucuuccuguacgcccagagcuccgggcgcaucaccgugagcacgaagcggagccagcaggcggugaucccgaacaucggcucccgcccccggauccgcaacauccccagccggaucuccaucuacuggaccaucgucaagcccggcgacauccugcucaucaacagcaccgggaaccugaucgccccgcgcggcuacuucaagauccgguccggcaagagcuccaucaugcgcagcgacgcccccaucgggaagugcaaguccgagugcaucacccccaacggcagcauccccaacgacaagccguuccagaacgugaaccggaucacguacggggccugcccccgcuacgugaagcaguccacccugaagcucgccaccggcaugcggaacguccccgagaagcagacccgcgggaucuucggcgcgaucgccggguucaucgagaacggcugggagggcaugguggacgggugguacggcuuccggcaccagaacagcgaggggcgcggccaggccgccgaccugaaguccacgcaggccgcgaucgaccagaucaacgggaagcugaaccggcucaucggcaagaccaacgagaaguuccaccagaucgagaaggaguucagcgagguggagggccgcauccaggaccuggagaaguacgucgaggacaccaagaucgaccugugguccuacaacgccgagcuccugguggcccuggagaaccagcacaccaucgaccucacggacagcgagaugaacaagcuguucgagaagaccaagaagcagcugcgcgagaacgccgaggacauggggaacggcugcuucaagaucuaccacaagugcgacaacgccugcaucggguccauccggaacggcaccuacgaccacgacguguaccgcgacgaggcgcucaacaaccgguuccagaucaagggggucgagcucaagagcggcuacaaggacuggauccuguggaucuccuucgccaucagcugcuuccugcugugcguggcccugcucggcuucaucaugugggccugccagaaggggaacauccgcugcaacaucugcaucuga

SEQ ID NO: 74507 - RNA, 1701 nt, Artificial Sequence; identical to SEQ ID NO: 74018
  derived and/or modified CDS sequence (opt1) from hemagglutinin__InfluenzaA__AGW00077

SEQ ID NO: 74508 - RNA, 1701 nt, Artificial Sequence; identical to SEQ ID NO: 73882
  derived and/or modified CDS sequence (opt1) from hemagglutinin__InfluenzaA__AGW00089

SEQ ID NO: 74509 - RNA, 1701 nt, Artificial Sequence; identical to SEQ ID NO: 74018
  derived and/or modified CDS sequence (opt1) from hemagglutinin__InfluenzaA__AGW00101

SEQ ID NO: 74510 - RNA, 1701 nt, Artificial Sequence
  derived and/or modified CDS sequence (opt1) from hemagglutinin__InfluenzaA__AGW00113
augaagaccaucaucgcccugagcuacauccucugccugguguucgcccagaagcugcccggcaacgacaacuccaccgcgacgcucugccuggggcaccacgccgucccgaacggcaccaucgugaagaccaucaccaacgaccgcaucgaggugacgaacgccaccgagcugguccagaacagcuccaucggggagaucugcgacagcccccaccagauccucgacggcgagaacugcacccugaucgacgcccugcucggggacccccagugcgacggcuuccagaacaagaagugggaccuguucguggagcgguccaaggccuacagcaacugcuaccccuacgacgugccggacuacgcgucccugcgcagccucgucgccuccagcggcacccuggaguucaacaacgaguccuucaacugggccggggugacgcagaacggcaccagcuccgccugcauccgggggagcaacuccagcuucuucucccgccugaacuggcucacccaccugaacuucaaguaccccgcgcugaacgugaccaugcccaacaacgagcaguucgacaagcucuacaucuggggcguccaccaccccgggacggacaaggaccagaccuuccuguacgcccagagcuccggccggaucaccgugagcaccaagcgcagccagcaggccgugaucccgaacaucggcucccggccccgcauccggaacauccccagccgcaucuccaucuacuggacgaucgucaagcccggggacauccugcucaucaacagcaccggcaaccugaucgccccgcggggguacuucaagauccgcuccggcaagagcuccaucaugcggagcgacgcccccaucggcaagugcaaguccgagugcaucacccccaacgggagcauccccaacgacaagccguuccagaacgugaaccgcaucaccuacggcgcgugcccccgguacgugaagcaguccacgcugaagcucgccaccgggaugcgcaacguccccgagaagcagacccggggcaucuucggggccaucgccggcuucaucgagaacggcugggaggggaugguggacggcugguacggguuccgccaccagaacagcgagggccgggggcaggccgcggaccugaaguccacccaggccgccaucgaccagaucaacggcaagcugaaccgccucaucggcaagacgaacgagaaguuccaccagaucgagaaggaguucagcgagguggaggggcggauccaggaccuggagaaguacgucgaggacaccaagaucgaccugugguccuacaacgccgagcuccugguggcccuggagaaccagcacaccaucgaccucaccgacagcgagaugaacaagcuguucgagaagacgaagaagcagcugcgcgagaacgcggaggacaugggcaacgggugcuucaagaucuaccacaagugcgacaacgccugcaucggcuccauccgcaacgggaccuacgaccacgacguguaccgggacgaggcccucaacaaccgcuuccagaucaagggcgucgagcucaagagcggcuacaaggacuggauccuguggaucuccuucgccaucagcugcuuccugcugugcguggcccugcucggguucaucaugugggcgugccagaagggcaacauccggugcaacaucugcaucuga

SEQ ID NO: 74511 - RNA, 1701 nt, Artificial Sequence; identical to SEQ ID NO: 74018
  derived and/or modified CDS sequence (opt1) from hemagglutinin__InfluenzaA__AGW00125

SEQ ID NO: 74512 - RNA, 1701 nt, Artificial Sequence; identical to SEQ ID NO: 74018
  derived and/or modified CDS sequence (opt1) from hemagglutinin__InfluenzaA__AGW00137

SEQ ID NO: 74513 - RNA, 1701 nt, Artificial Sequence; identical to SEQ ID NO: 74018
  derived and/or modified CDS sequence (opt1) from hemagglutinin__InfluenzaA__AGW00149

SEQ ID NO: 74514 - RNA, 1701 nt, Artificial Sequence; identical to SEQ ID NO: 74018
  derived and/or modified CDS sequence (opt1) from hemagglutinin__InfluenzaA__AGW00161

SEQ ID NO: 74515 - RNA, 1701 nt, Artificial Sequence; identical to SEQ ID NO: 74018
  derived and/or modified CDS sequence (opt1) from hemagglutinin__InfluenzaA__AGW00173

SEQ ID NO: 74516 - RNA, 1701 nt, Artificial Sequence
  derived and/or modified CDS sequence (opt1) from hemagglutinin__InfluenzaA__AGW00185
augaagaccaucaucgcccugagcuacauccucugccugguguucgcccagaagcugcccggcaacgacaacuccaccgcgacgcucugccuggggcaccacgccgucccgaacggcaccaucgugaagaccaucaccaacgaccgcaucgaggugacgaacgccaccgagcugguccagaacagcuccaucggggagaucugcgacagcccccaccagauccucgacggcgagaacugcacccugaucgacgcccugcucggggacccccagugcgacggcuuccagaacaagaagugggaccuguucaucgagcgguccaaggccuacagcaacugcuaccccuacgacgugccggacuacgcgucccugcgcagccucguggccuccagcggcacccuggaguucaacaacgaguccuucaacuggacgggggucacccagaacggcaccagcuccgccugcauccggcgcagcaacaacuccuucuucagccggcugaacuggcucacccacuccaacuucaaguaccccgcccugaacgugacgaugcccaacaacgagcaguucgacaagcuguacaucuggggcgugcaccaccccgggaccgacaaggaccagaucuuccucuacgcgcagagcuccgggcgcaucaccgucagcaccaagcggagccagcaggccgugaucccgaacaucggcucccgcccccggauccgcaacauccccagccggaucuccaucuacuggacgaucgugaagcccggcgacauccugcugaucaacagcaccgggaaccucaucgccccgcgcggcuacuucaagauccgguccggcaagagcuccaucaugcgcagcgacgcccccaucgggaagugcaaguccgagugcaucacccccaacggcagcauccccaacgacaagccguuccagaacgucaaccggaucaccuacggggccugcccccgcuacgugaagcaguccacgcugaagcuggcgaccggcaugcggaacgugcccgagaagcagacccgcgggaucuucggcgccaucgccggguucaucgagaacggcugggagggcaugauggacgggugguacggcuuccggcaccagaacagcgaggggcgcggccaggccgccgaccucaaguccacccaggcggccaucgaccagaucaacgggaagcugaaccggcugaucggcaagacgaacgagaaguuccaccagaucgagaaggaguucagcgaggucgagggccgcauccaggaccucgagaaguacguggaggacaccaagaucgaccugugguccuacaacgccgagcugcucguggcccuggagaaccagcacaccaucgaccugaccgacagcgagaugaacaagcuguucgagaagacgaagaagcagcuccgcgagaacgccgaggacauggggaacggcugcuucaagaucuaccacaagugcgacaacgcgugcaucggguccauccggaacggcaccuacgaccacgacgucuaccgcgacgaggcccugaacaaccgguuccagaucaaggggguggagcucaagagcggcuacaaggacuggauccuguggaucuccuucgccaucagcugcuuccugcucugcguggcccugcugggcuucaucaugugggccugccagaaggggaacauccgcugcaacaucugcaucuga

SEQ ID NO: 74517 - RNA, 1701 nt, Artificial Sequence; identical to SEQ ID NO: 74018
  derived and/or modified CDS sequence (opt1) from hemagglutinin__InfluenzaA__AGW00709

SEQ ID NO: 74518 - RNA, 1701 nt, Artificial Sequence; identical to SEQ ID NO: 74018
  derived and/or modified CDS sequence (opt1) from hemagglutinin__InfluenzaA__AGW00721

SEQ ID NO: 74519 - RNA, 1701 nt, Artificial Sequence; identical to SEQ ID NO: 74018
  derived and/or modified CDS sequence (opt1) from hemagglutinin__InfluenzaA__AGW00733

SEQ ID NO: 74520 - RNA, 1701 nt, Artificial Sequence; identical to SEQ ID NO: 74018
  derived and/or modified CDS sequence (opt1) from hemagglutinin__InfluenzaA__AGW00745

SEQ ID NO: 74521 - RNA, 1701 nt, Artificial Sequence
  derived and/or modified CDS sequence (opt1) from hemagglutinin__InfluenzaA__AGW00757
augaagaccaucaucgcccugagcuacauccucugccugguguucgcccagaagcugcccggcaacgacaacuccaccgcgacgcucugccuggggcaccacgccgucccgaacggcaccaucgugaagaccaucaccaacgaccgcaucgaggugacgaacgccaccgagcugguccagaacagcuccaucggggagaucugcgacagcccccaccagauccucgacggcgagaacugcacccugaucgacgcccugcucggggacccccagugcgacggcuuccagaacaagaagugggaccuguucguggagcgguccaaggccuacagcaacugcuaccccuacgacgugccggacuacgcgucccugcgcagccucgucgccuccagcggcacccuggaguucaacaacgaguccuucaacugggccggggugacgcagaacggcaccagcuccgccugcauccgggggagcaacuccagcuucuucucccgccugaacuggcucacccaccugaacuucaaguaccccgcgcugaacgugaccaugcccaacaacgagcaguucgacaagcucuacaucuggggcguccaccaccccgggacggacaaggaccagaucuuccuguacgcccagagcuccggccggaucaccgugagcaccaagcgcagccagcaggccgugaucccgaacaucggcucccggccccgcauccggaacauccccagccgcaucuccaucuacuggaccaucgucaagcccggggacauccugcucaucaacagcacgggcaaccugaucgccccgcggggguacuucaagauccgcuccggcaagagcuccaucaugcggagcgacgcccccaucggcaagugcaaguccgagugcaucacccccaacgggagcauccccaacgacaagccguuccagaaccugaaccgcaucaccuacggcgcgugcccccgguacgugaagcaguccacccucaagcuggccacggggaugcgcaacgugcccgagaagcagacccggggcaucuucggggccaucgccggcuucaucgagaacggcugggaggggauggucgacggcugguacggguuccgccaccagaacagcgagggccgggggcaggccgcggaccugaaguccacccaggccgccaucgaccagaucaacggcaagcucaaccgccugaucggcaagaccaacgagaaguuccaccagaucgagaaggaguucagcgagguggaggggcggauccaggaccuggagaaguacguggaggacacgaagaucgaccucugguccuacaacgccgagcugcuggucgcccucgagaaccagcacaccaucgaccugaccgacagcgagaugaacaagcuguucgagaagaccaagaagcagcuccgcgagaacgcggaggacaugggcaacgggugcuucaagaucuaccacaagugcgacaacgccugcaucggcuccauccgcaacgggacguacgaccacgacguguaccgggacgaggcccugaacaaccgcuuccagaucaagggcguggagcucaagagcggcuacaaggacuggauccuguggaucuccuucgccaucagcugcuuccugcugugcgucgcccuccugggguucaucaugugggcgugccagaagggcaacauccggugcaacaucugcaucuga

SEQ ID NO: 74522 - RNA, 1701 nt, Artificial Sequence; identical to SEQ ID NO: 74021
  derived and/or modified CDS sequence (opt1) from hemagglutinin__InfluenzaA__AGW00769

SEQ ID NO: 74523 - RNA, 1701 nt, Artificial Sequence; identical to SEQ ID NO: 73907
  derived and/or modified CDS sequence (opt1) from hemagglutinin__InfluenzaA__AGW00781

SEQ ID NO: 74524 - RNA, 1701 nt, Artificial Sequence; identical to SEQ ID NO: 74506
  derived and/or modified CDS sequence (opt1) from hemagglutinin__InfluenzaA__AGW00793

SEQ ID NO: 74525 - RNA, 1701 nt, Artificial Sequence; identical to SEQ ID NO: 74018
  derived and/or modified CDS sequence (opt1) from hemagglutinin__InfluenzaA__AGW00805

SEQ ID NO: 74526 - RNA, 1701 nt, Artificial Sequence; identical to SEQ ID NO: 73859
  derived and/or modified CDS sequence (opt1) from hemagglutinin__InfluenzaA__AGW00817

SEQ ID NO: 74527 - RNA, 1701 nt, Artificial Sequence; identical to SEQ ID NO: 74505
  derived and/or modified CDS sequence (opt1) from hemagglutinin__InfluenzaA__AGW00829

SEQ ID NO: 74528 - RNA, 1701 nt, Artificial Sequence
  derived and/or modified CDS sequence (opt1) from hemagglutinin__InfluenzaA__AGW00841
augaagaccaucaucgcccugagcuacauccucugccugguguucgcccagaagcugcccggcaacgacaacuccaccgcgacgcucugccuggggcaccacgccgucccgaacggcaccaucgugaagaccaucaccaacgggcgcaucgaggugacgaacgccaccgagcugguccagaacagcuccaucggcgagaucugcgacagcccccaccagauccucgacggggagaacugcacccugaucgacgcccugcucggcgacccccagugcgacggcuuccagaacaagaagugggaccuguucguggagcgguccaaggccuacagcaacugcuaccccuacgacgugccggacuacgcgucccugcgcagccucgucgccuccagcgggacccuggaguucaacaacgaguccuucaacugggccggcgugacgcagaacgggaccagcuccgccugcauccggggcagcaacuccagcuucuucucccgccugaacuggcucacccaccugaacuucaaguaccccgcgcugaacgugaccaugcccaacaacgagcaguucgacaagcucuacaucuggggcguccaccaccccgggacggacaaggaccagaucuuccuguacgcccagagcuccggccggaucaccgugagcaccaagcgcagccagcaggccgugaucccgaacaucgggucccggccccgcauccggaacauccccagccgcaucuccaucuacuggaccaucgucaagcccggcgacauccugcucaucaacagcacggggaaccugaucgccccgcggggcuacuucaagauccgcuccggcaagagcuccaucaugcggagcgacgcccccaucgggaagugcaaguccgagugcaucacccccaacggcagcauccccaacgacaagccguuccagaacgugaaccgcaucaccuacggggcgugcccccgguacgugaagcaguccacccugaagcucgccacgggcaugcgcaacguccccgagaagcagacccgggggaucuucggcgccaucgccggcuucaucgagaacgggugggagggcaugguggacgggugguacggcuuccgccaccagaacagcgaggggcggggccaggccgcggaccugaaguccacccaggccgccaucgaccagaucaacggcaagcugaaccgccucaucgggaagaccaacgagaaguuccaccagaucgagaaggaguucagcgagguggagggccggauccaggaccuggagaaguacgucgaggacacgaagaucgaccugugguccuacaacgccgagcuccugguggcccuggagaaccagcacaccaucgaccucaccgacagcgagaugaacaagcuguucgagaagaccaagaagcagcugcgcgagaacgcggaggacauggggaacggcugcuucaagaucuaccacaagugcgacaacgccugcaucggguccauccgcaacggcacguacgaccacgacguguaccgggacgaggcccucaacaaccgcuuccagaucaagggcgucgagcucaagagcggguacaaggacuggauccuguggaucuccuucgccaucagcugcuuccugcugugcguggcccugcucggcuucaucaugugggcgugccagaaggggaacauccggugcaacaucugcaucuga

SEQ ID NO: 74529 - RNA, 1701 nt, Artificial Sequence
  derived and/or modified CDS sequence (opt1) from hemagglutinin__InfluenzaA__AGW00853
augaagaccaucaucgcccugagcuacauccucugccugguguucgcccagaagcugcccggcaacgacaacuccaccgcgacgcucugccuggggcaccacgccgucccgaacggcaccaucgugaagaccaucaccaacgaccgcaucgaggugacgaacgccaccgagcugguccagaacagcuccaucggggagaucugcgacagcccccaccagauccucgacggcgagaacugcacccugaucgacgcccugcucggggacccccagugcgacggcuuccagaacaagaagugggaccuguucguggagcgguccaaggccuacagcaacugcuaccccuacgacgugccggacuacgcgucccugcgcagccucgucgccuccagcggcacccuggaguucaacaacgaguccuucaacuggacgggggugacccagaacggcaccagcuccgccugcauccggcgcagcaacuccagcuucuucucccggcugaacuggcucacccaccugaacuucaaguaccccgcccugaacgugacgaugcccaacaacgagcaguucgacaagcucuacaucuggggcguccaccaccccgggaccgacaaggaccagaucuuccuguacgcgcagccgagcgggcgcaucaccguguccaccaagcggagccagcaggccgugauccccaacaucggcagccgcccccggauccgcaacauccccucccggaucagcaucuacuggacgaucgucaagccgggcgacauccugcucaucaacuccaccgggaaccugaucgcgccccgcggcuacuucaagauccggagcgggaaguccagcaucaugcgcuccgacgcccccaucggcaagugcaagagcgagugcaucacccccaacggcuccaucccgaacgacaagcccuuccagaacgugaaccggaucaccuacggggccugcccccgcuacgugaagcagagcacgcugaagcucgccaccggcaugcggaacguccccgagaagcagacccgcgggaucuucggcgccaucgccggguucaucgagaacggcugggagggcaugguggacgggugguacggcuuccggcaccagaacuccgaggggcgcggccaggccgccgaccucaagagcacccaggcggccaucgaccagaucaacgggaagcugaaccggcugaucggcaagacgaacgagaaguuccaccagaucgagaaggaguucuccgagguggagggccgcauccaggaccuggagaaguacgucgaggacaccaagaucgaccuguggagcuacaacgccgagcuccugguggcccuggagaaccagcacaccaucgaccucaccgacuccgagaugaacaagcuguucgagaagacgaagaagcagcugcgcgagaacgccgaggacauggggaacggcugcuucaagaucuaccacaagugcgacaacgcgugcaucgggagcauccggaacggcaccuacgaccacaacguguaccgcgacgaggcccucaacaaccgguuccagaucaagggggucgagcugaaguccggcuacaaggacuggauccuguggaucagcuucgccaucuccugcuuccuccugugcguggcccugcucggcuucaucaugugggccugccagaaggggaacauccgcugcaacaucugcaucuga

SEQ ID NO: 74530 - RNA, 1701 nt, Artificial Sequence; identical to SEQ ID NO: 73882
  derived and/or modified CDS sequence (opt1) from hemagglutinin__InfluenzaA__AGW00865

SEQ ID NO: 74531 - RNA, 1701 nt, Artificial Sequence
  derived and/or modified CDS sequence (opt1) from hemagglutinin__InfluenzaA__AGW00877
augaagaccaucaucgcccugagcuacauccucugccugguguucgcccaggagcugcccggcaacgacgacuccaccgcgacgcucugccuggggcaccacgccgucccgaacggcaccaucgugaagaccaucaccaacgaccagaucgaggugacgaacgccaccgagcugguccagagcuccagcaccggggagaucugcaacagcccccaccagauccucgacggcgagaacugcacccugaucgacgcccugcucggggacccccagugcgacggcuuccagaacaagaagugggaccuguucguggagcgcagcaaggcccacuccaacugcuaccccuacgacgugccggacuacgcgagccugcggucccucgucgccagcuccggcacgcuggaguucaacaacgagagcuucaacuggaccggggugacccagaacggcaccuccagcgccugcauccgccgguccaacaacagcuucuucucccgccugaacuggcucacgcaccugaacuucaaguaccccgcccugaacgugaccaugcccaacaacgagcaguucgacaagcucuacaucuggggcguccaccaccccgggaccgacaaggaccagaucuuccuguacgcgcaggccagcgggcggaucaccguguccacgaagcgcagccagcaggccgugaucccgaacaucggcuuccggccccgcguccggaacauccccagccgcguguccaucuacuggaccaucgugaagcccggcgacauccugcucaucaacagcaccgggaaccugaucgccccgcggggcuacuucaagauccgcuccgggaaguccuccaucaugcggagcgacgcccccaucggcaagugcaacuccgcgugcaucacccccaacggcagcauccccaacgacaagccguuccagaacgucaaccgcaucacguacggggccugcccccgguacgugaagcagaacacccugaagcucgccaccggcaugcgcaacgugcccgagaagcagacccgggggaucuucggcgccaucgccggguucaucgagaacggcugggagggcauggucgacgggugguacggcuuccgccaccagaacuccgaggggcggggccaggcggccgaccucaagagcacgcaggccgccaucgaccagaucaacgggaagcugaaccgccugaucggcaagaccaacgagaaguuccaccagaucgagaaggaguucuccgagguggagggccggauccaggaccuggagaaguacguggaggacaccaagaucgaccuguggagcuacaacgccgagcuccuggucgcgcuggagaaccagcacaccaucgaccucacggacuccgagaugaacaagcuguucgagaagaccaagaagcagcugcgcgagaacgccgaggacauggggaacggcugcuucaagaucuaccacaagugcgacaacgccugcaucgggagcauccgcaacggcaccuacgaccacgacguguaccgggacgaggcccucaacaaccgcuuccagaucaaggggguggagcugaaguccggcuacaaggacuggauccuguggaucagcuucgccaucuccugcuuccuccugugcgucgcgcugcucggcuucaucaugugggccugccagaaggggaacauccggugcaacaucugcaucuga

SEQ ID NO: 74532 - RNA, 1701 nt, Artificial Sequence
  derived and/or modified CDS sequence (opt1) from hemagglutinin__InfluenzaA__AGW00889
augaagaccaucaucgcccugagcuacauccucugccugguguucgcccagaagcugcccggcaacgacaacuccaccgcgacgcucugccuggggcaccacgccgucccgaacggcaccaucgugaagaccaucaccaacgaccgcaucgaggugacgaacgccaccgagcugguccagaacagcuccaucggggagaucugcgacagcccccaccagauccucgacggcgagaacugcacccugaucgacgcccugcucggggacccccagugcgacggcuuccagaacaagaagugggaccuguucguggagcgguccaaggccuacagcaacugcuaccccuacgacgugccggacuacgcgucccugcgcagccucgucgccuccagcggcacccuggaguucaacaacgaguccuucaacuggacgggggugacccagaacggcaccagcuccgccugcauccggcgcagcaacuccagcuucuucucccggcugaacuggcucacccaccugaacuucaaguaccccgcccugaacgugacgaugcccaacaacgagcaguucgacaagcucuacaucuggggcguccaccaccccgggaccgacaaggaccagaucuuccuguacgcgcagagcuccgggcgcaucaccgugagcaccaagcggagccagcaggccgugaucccgaacaucggcucccgcccccggauccgcaacauccccagccggaucuccaucuacuggacgaucgucaagcccggcgacauccugcucaucaacagcaccgggaaccugaucgccccgcgcggcuacuucaagauccgguccggcaagagcuccaucaugcgcagcgacgcccccaucgggaagugcaaguccgagugcaucacccccaacggcagcauccccaacgacaagccguuccagaacgugaaccggaucaccuacggggccugcccccgcuacgugaagcaguccacgcugaagcucgcgaccggcaugcggaacguccccgagaagcagacccgcgggaucuucggcgccaucgccggguucaucgagaacggcugggagggcaugguggacgggugguacggcuuccggcaccagaacagcgaggggcgcggccaggccgccgaccugaaguccacccaggcggccaucgaccagaucaacgggaagcugaaccggcucaucggcaagacgaacgagaaguuccaccagaucgagaaggaguucagcgagguggagggccgcauccaggaccuggagaaguacgucgaggacaccaagaucgaccugugguccuacaacgccgagcuccugguggcccuggagaaccagcacaccaucgaccucaccgacagcgagaugaacaagcuguucgagaagacgaagaagcagcugcgcgagaacgccgaggacauggggaacggcugcuucaagaucuaccacaagugcgacaacgcgugcaucggguccauccggaacggcaccuacgaccacaacguguaccgcgacgaggcccucaacaaccgguuccagaucaagggggucgagcucaagagcggcuacaaggacugggugcuguggaucuccuucgccaucagcugcuuccugcugugcguggcccugcucggcuucaucaugugggccugccagaaggggaacauccgcugcaacaucugcaucuga

SEQ ID NO: 74533 - RNA, 1701 nt, Artificial Sequence; identical to SEQ ID NO: 73882
  derived and/or modified CDS sequence (opt1) from hemagglutinin__InfluenzaA__AGW00901

SEQ ID NO: 74534 - RNA, 1701 nt, Artificial Sequence; identical to SEQ ID NO: 73882
  derived and/or modified CDS sequence (opt1) from hemagglutinin__InfluenzaA__AGW00913

SEQ ID NO: 74535 - RNA, 1701 nt, Artificial Sequence; identical to SEQ ID NO: 74018
  derived and/or modified CDS sequence (opt1) from hemagglutinin__InfluenzaA__AGW00931

SEQ ID NO: 74536 - RNA, 1701 nt, Artificial Sequence; identical to SEQ ID NO: 74018
  derived and/or modified CDS sequence (opt1) from hemagglutinin__InfluenzaA__AGW01244

SEQ ID NO: 74537 - RNA, 1701 nt, Artificial Sequence; identical to SEQ ID NO: 73892
  derived and/or modified CDS sequence (opt1) from hemagglutinin__InfluenzaA__AGW01256

SEQ ID NO: 74538 - RNA, 1701 nt, Artificial Sequence
  derived and/or modified CDS sequence (opt1) from hemagglutinin__InfluenzaA__AGW01295
augaagaccaucaucgcccugagcuacauccucugccugguguucgcccagaagcugcccggcaacgacaacuccaccgcgacgcucugccuggggcaccacgccgucccgaacggcaccaucgugaagaccaucaccaacgaccgcaucgaggugacgaacgccaccgagcugguccagaacagcuccaucggggagaucugcgacagcccccaccagauccucgacggcgagaacugcacccugaucgacgcccugcucggggacccccagugcgacggcuuccagaacaagaagugggaccuguucguggagcgguccaaggccuacagcaacugcuaccccuacgacgugccggacuacgcgucccugcgcagccucgucgccuccagcggcacccuggaguucaacaacgaguccuucaacuggacgggggugacccagaacggcaccagcuccgccugcauccggcgcagcaacuccagcuucuucucccggcugaacuggcucacccaccugaacuucaaguaccccgcccugaacgugacgaugcccaacaacgagcaguucgacaagcucuacaucuggggcguccaccaccccgggaccgacaaggaccagaucuuccuguacgcgcagagcuccgggcgcaucaccgugagcaccaagcggagccagcaggccgugaucccgaacaucggcucccgcccccggauccgcaacauccccagccggaucuccaucuacuggacgaucgucaagcccggcgacauccugcucaucaacagcaccgggaaccugaucgccccgcgcggcuacuucaagauccgguccggcaagagcuccaucaugcgcagcgacgcccccaucgggaagugcaaguccgagugcaucacccccaacggcagcauccccaacgacaagccguuccagaacgugaaccggaucaccuacggggccugcccccgcuacgugaagcaguccacgcugaagcucgcgaccggcaugcggaacguccccgagaagcagacccgcgggaucuucggcgccaucgccggguucaucgagaacggcugggagggcaugguggacgggugguacggcuuccggcaccagaacagcgaggggcgcggccaggccgccgaccugaaguccacccaggcggccaucgaccagaucaacgggaagcugaaccggcucaucggcaagacgaacgagaaguuccaccagaucgagaaggaguucagcgagguggagggccgcauccaggaccuggagaaguacgucgaggacaccaagaucgaccugugguccuacaacgccgagauccucguggcccuggagaaccagcacaccaucgaccugaccgacagcgagaugaacaagcuguucgagaagacgaagaagcagcuccgcgagaacgccgaggacauggggaacggcugcuucaagaucuaccacaagugcgacaacgcgugcaucggguccauccggaacggcaccuacgaccacaacguguaccgcgacgaggcccugaacaaccgguuccagaucaagggggucgagcucaagagcggcuacaaggacuggauccuguggaucuccuucgccaucagcugcuuccugcucugcguggcccugcugggcuucaucaugugggccugccagaaggggaacauccgcugcaacaucugcaucuga

SEQ ID NO: 74539 - RNA, 1701 nt, Artificial Sequence; identical to SEQ ID NO: 73882
  derived and/or modified CDS sequence (opt1) from hemagglutinin__InfluenzaA__AGW01307

SEQ ID NO: 74540 - RNA, 1701 nt, Artificial Sequence
  derived and/or modified CDS sequence (opt1) from hemagglutinin__InfluenzaA__AGW01319
augaagaccaucaucgcccugagcuacauccucugccugguguucgcccaggagcugcccggcaacgacgacuccaccgcgacgcucugccuggggcaccacgccgucccgaacggcaccaucgugaagaccaucaccaacgaccagaucgaggugacgaacgccaccgagcugguccagagcuccagcaccggggagaucugcaacagcccccaccagauccucgacggcgagaacugcacccugaucgacgcccugcucggggacccccagugcgacggcuuccagaacaagaagugggaccuguucguggagcgcagcaaggcccacuccaacugcuaccccuacgacgugccggacuacgcgagccugcggucccucgucgccagcuccggcacgcuggaguucaacaacgagagcuucaacuggaccggggugacccaggacggcaccuccagcgccugcauccgccgguccaacaacagcuucuucucccgccugaacuggcucacgcaccugaacuucaaguaccccgcccugaacgugaccaugcccaacaacgagcaguucgacaagcucuacaucuggggcguccaccaccccgggaccgacaaggaccagaucuuccuguacgcgcaggccagcgggcggaucaccguguccacgaagcgcagccagcaggccgugaucccgaacaucggcagccggccccgcguccggaacauccccucccgcgugagcaucuacuggaccaucgugaagcccggcgacauccugcucaucaacuccaccgggaaccugaucgccccgcggggcuacuucaagauccgcagcgggaaguccagcaucaugcgguccgacgcccccaucggcaagugcaacagcgcgugcaucacccccaacggcuccauccccaacgacaagccguuccagaacgucaaccgcaucacguacggggccugcccccgguacgugaagcagaacacccugaagcucgccaccggcaugcgcaacgugcccgagaagcagacccgggggaucuucggcgccaucgccggguucaucgagaacggcugggagggcauggucgacgggugguacggcuuccgccaccagaacagcgaggggcggggccaggcggccgaccugaaguccacgcaggccgccaucgaccagaucaacgggaagcugaacaagcucaucggcaagaccaacgagaaguuccaccagaucgagaaggaguucagcgagguggagggccgcauccaggaccuggagaaguacguggaggacaccaagaucgaccugugguccuacaacgccgagcuccuggucgcgcuggagaaccagcacaccaucgaccucacggacagcgagaugaacaagcuguucgagaagaccaagaagcagcugcgggagaacgccgaggacauggggaacggcugcuucaagaucuaccacaagugcgacaacgccugcaucggguccauccgcaacggcaccuacgaccacgacguguaccgcgacgaggcccucaacaaccgguuccagaucaaggggguggagcugaaguccggcuacaaggacuggauccuguggaucuccuucgccaucagcugcuuccuccugugcgucgcgcugcucggcuucaucaugugggccugccagaaggggaacauccgcugcaacaucugcaucuga

SEQ ID NO: 74541 - RNA, 1701 nt, Artificial Sequence
  derived and/or modified CDS sequence (opt1) from hemagglutinin__InfluenzaA__AGW01331
augaagaccaucaucgcccugagcuacauccucugccugguguucgcccagaagcugcccggcaacgacaacuccaccgcgacgcucugccuggggcaccacgccgucccgaacggcaccaucgugaagaccaucaccaacgaccgcaucgaggugacgaacgccaccgagcugguccagaacagcuccaucggggagaucugcgacagcccccaccagauccucgacggcgagaacugcacccugaucgacgcccugcucggggacccccagugcgacggcuuccagaacaagaagugggaccuguucguggagcgguccaaggccuacagcaacugcuaccccuacgacgugccggacuacgcgucccugcgcagccucgucgccuccagcggcacccuggaguucaacaacgaguccuucaacugggccggggugacgcagaacggcaccagcuccgccugcauccgggggagcaacuccagcuucuucucccgccugaacuggcucacccaccugaacuucaaguaccccgcgcugaacgugaccaugcccaacaacgagcaguucgacaagcucuacaucuggggcguccaccaccccgggacggacaaggaccagaucuuccuguacgcccagagcuccggccggaucaccgugagcaccaagcgcagccagcaggccgugaucccgaacaucggcucccggccccgcauccggaacauccccagccgcaucuccaucuacuggaccaucgucaagcccggggacauccugcucaucaacagcacgggcaaccugaucgccccgcggggguacuucaagauccgcuccggcaagagcuccaucaugcggagcgacgcccccaucggcaagugcaaguccgagugcaucacccccaacgggagcauccccaacgacaagccguuccagaacgugaaccgcaucaccuacggcgcgugcccccgguacgugaagcaguccacccugaagcucgccacggggaugcgcaacguccccgagaagcagacccggggcaucuucggggccaucgccggcuucaucgagaacggcugggaggggaugguggacggcugguacggguuccgccaccagaacagcgagggccgggggcaggccgcggaccugaaguccacccaggccgccaucgaccagaucaacggcaagcugaaccgccucaucggcaagaccaacgagaaguuccaccagaucgagaaggaguucagcgagguggaggggcggauccaggaccuggagaaguacgucgaggacacgaagaucgaccugugguccuacaacgccgagcuccugguggcccuggagaaccagcacaccaucgaccucaccgacagcgagaugaacaagcuguucgagaagaccaagaagcagcugcgcgagaacgcggaggacaugggcaacgggugcuucaagaucuaccacaagugcgacaacgccugcaucggcuccauccgcaacgggacguacgagcacgacguguaccgggacgaggcccucaacaaccgcuuccagaucaagggcgucgagcucaagagcggcuacaaggacuggauccuguggaucuccuucgccaucagcugcuuccugcugugcguggcccugcucggguucaucaugugggcgugccagaagggcaacauccggugcaacaucugcaucuga

SEQ ID NO: 74542 - RNA, 1701 nt, Artificial Sequence; identical to SEQ ID NO: 74018
  derived and/or modified CDS sequence (opt1) from hemagglutinin__InfluenzaA__AGW01343

SEQ ID NO: 74543 - RNA, 1701 nt, Artificial Sequence; identical to SEQ ID NO: 74021
  derived and/or modified CDS sequence (opt1) from hemagglutinin__InfluenzaA__AGW01355

SEQ ID NO: 74544 - RNA, 1701 nt, Artificial Sequence; identical to SEQ ID NO: 73892
  derived and/or modified CDS sequence (opt1) from hemagglutinin__InfluenzaA__AGW01367

SEQ ID NO: 74545 - RNA, 1701 nt, Artificial Sequence; identical to SEQ ID NO: 74018
  derived and/or modified CDS sequence (opt1) from hemagglutinin__InfluenzaA__AGW01391

SEQ ID NO: 74546 - RNA, 1701 nt, Artificial Sequence
  derived and/or modified CDS sequence (opt1) from hemagglutinin__InfluenzaA__AGW01403
augaagaccaucaucgcccugagcuacauccucugccugaucuucgcccagaagcugcccggcaacgacaacuccaccgcgacgcucugccuggggcaccacgccgugccgaacggcaccaucgucaagaccaucaccaacgaccagaucgaggugacgaacgccaccgagcuggugcagagcuccagcaccggggagaucugcaacagcccccaccagauccucgacggcgagaacugcacccugaucgacgcccugcucggggacccccagugcgacggcuuccagaacaagaagugggaccuguucgucgagcgcagcaaggcccacuccaacugcuaccccuacgacgugccggacuacgcgagccugcggucccucguggccagcuccggcacgcuggaguucaacaacgagagcuucaacuggaccggggucacccagaacggcaccuccagcgccugcauccgccgguccaacaacagcuucuucucccgccugaacuggcucacgcaccugaacuucaaguaccccgcccugaacgugaccaugcccaacaacgagcaguucgacaagcucuacaucuggggcgugcaccaccccgggaccgacaaggaccagaucuuccuguacgcgcaggccgccgggcggaucaccgucagcacgaagcgcucccagcaggccgugaucccgaacaucggcagccggccccgcgugcggaacauccccagccgcgucuccaucuacuggaccaucgugaagcccggcgacauccugcucaucaacagcaccgggaaccugaucgccccgcggggcuacuucaagauccgcuccgggaaguccuccaucaugcggagcgacgcgcccaucggcaagugcaacuccgccugcaucacccccaacggcagcauccccaacgacaagccguuccagaacgugaaccgcaucacguacggggccugcccccgguacgucaagcagaacacccugaagcucgccaccggcaugcgcaacgugcccgagaagcagacccgggggaucuucggcgccaucgcgggguucaucgagaacggcugggagggcaugguggacgggugguacggcuuccgccaccagaacuccgaggggcggggccaggccgccgaccucaagagcacgcaggccgccaucgaccagaucaacgggaagcugaaccgccugaucggcaagaccaacgagaaguuccaccagaucgagaaggaguucuccgaggucgagggccggauccaggaccuggagaaguacguggaggacaccaagaucgaccuguggagcuacaacgcggagcuccugguggcccuggagaaccagcacaccaucgaccucacggacuccgagaugaacaagcuguucgagaagaccaagaagcagcugcgcgagaacgccgaggacauggggaacggcugcuucaagaucuaccacaagugcgacaacgccugcaucgggagcauccgcaacggcaccuacgaccacuacgucuaccgggacgaggcccucaacaaccgcuuccagaucaaggggguggagcugaaguccggcuacaaggacuggauccuguggaucagcuucgcgaccuccugcuuccuccugugcguggcccugcucggcuucaucaugugggccugccagaaggggaacauccggugcaacaucugcaucuga

SEQ ID NO: 74547 - RNA, 1701 nt, Artificial Sequence; identical to SEQ ID NO: 73882
  derived and/or modified CDS sequence (opt1) from hemagglutinin__InfluenzaA__AGW01415

SEQ ID NO: 74548 - RNA, 1701 nt, Artificial Sequence; identical to SEQ ID NO: 73882
  derived and/or modified CDS sequence (opt1) from hemagglutinin__InfluenzaA__AGW01427

SEQ ID NO: 74549 - RNA, 1701 nt, Artificial Sequence; identical to SEQ ID NO: 73882
  derived and/or modified CDS sequence (opt1) from hemagglutinin__InfluenzaA__AGW01439

SEQ ID NO: 74550 - RNA, 1701 nt, Artificial Sequence
  derived and/or modified CDS sequence (opt1) from hemagglutinin__InfluenzaA__AGW01451
augaagaccaucaucgcccugagcuacauccucugccugguguucgcccagaagcugcccggcaacgacaacuccaccgcgacgcucugccuggggcaccacgccgucccgaacggcaccaucgugaagaccaucaccaacgaccgcaucgaggugacgaacgccaccgagcugguccagaacagcuccaucggggagaucugcgacagcccccaccagauccucgacggcgagaacugcacccugaucgacgcccugcucggggacccccagugcgacggcuuccagaacaagaagugggaccuguucguggagcgguccaaggccuacagcaacugcuaccccuacgacgugccggacuacgcgucccugcgcagccucgucgccuccagcggcacccuggaguucaacaacgaguccuucaacugggccggggugacgcagaacggcaccagcuccgccugcauccgggggagcaacuccagcuucuucucccgccugaacuggcucacccaccugaacuucaaguaccccgcgcugaacgugaccaugcccaacaacgagcaguucgacaagcucuacaucuggggcguccaccaccccgggacggacaaggaccagaucuuccuguacgcccagagcuccggccggaucaccgugagcaccaagcgcagccagcaggccgugaucccgaacaucggcucccggccccgcauccggaacauccccagccgcaucuccaucuacuggaccaucgucaagcccggggacauccugcucaucaacagcacgggcaaccugaucgccccgcggggguacuucaagauccgcuccggcaagagcuccaucaugcggagcgacgcccccaucggcaagugcaaguccgagugcaucacccccaacgggagcauccccaacgacaagccguuccagaacgugaaccgcaucaccuacggcgcgugcccccgguacgugaagcaguccacccugaagcucgccacggggaugcgcaacguccccgagaagcagacccggggcaucuucggggccaucgccggcuucaucgagaacggcugggaggggaugauggacggcugguacggguuccgccaccagaacagcgagggccgggggcaggccgcggaccugaaguccacccaggccgccaucgaccagaucaacggcaagcugaaccgccucaucggcaagaccaacgagaaguuccaccagaucgagaaggaguucagcgagguggaggggcggauccaggaccuggagaaguacguggucgacacgaagaucgaccugugguccuacaacgccgagcuccugguggcccuggagaaccagcacaccaucgaccucaccgacagcgagaugaacaagcuguucgagaagaccaagaagcagcugcgcgagaacgcggaggacaugggcaacgggugcuucaagaucuaccacaagugcgacaacgccugcaucggcuccauccgcaacgggacguacgaccacgacguguaccgggacgaggcccucaacaaccgcuuccagaucaagggcgucgagcucaagagcggcuacaaggacuggauccuguggaucuccuucgccaucagcugcuuccugcugugcguggcccugcucggguucaucaugugggcgugccagaagggcaacauccggugcaacaucugcaucuga

SEQ ID NO: 74551 - RNA, 1701 nt, Artificial Sequence; identical to SEQ ID NO: 74018
  derived and/or modified CDS sequence (opt1) from hemagglutinin__InfluenzaA__AGW01463

SEQ ID NO: 74552 - RNA, 1701 nt, Artificial Sequence; identical to SEQ ID NO: 74018
  derived and/or modified CDS sequence (opt1) from hemagglutinin__InfluenzaA__AGW01475

SEQ ID NO: 74553 - RNA, 1701 nt, Artificial Sequence
  derived and/or modified CDS sequence (opt1) from hemagglutinin__InfluenzaA__AGW01487
augaagaccaucaucgcccugagcuacauccucugccugguguucgcccagaagcugcccggcaacgacaacuccaccgcgacgcucugccuggggcaccacgccgucccgaacggcaccaucgugaagaccaucaccaacgaccgcaucgaggugacgaacgccaccgagcugguccagaacagcuccaucggggagaucugcgacagcccccaccagauccucgacggcgagaacugcacccugaucgacgcccugcucggggacccccagugcgacggcuuccagaacaagaagugggaccuguucguggagcgguccaaggccuacagcaacugcuaccccuacgacgugccggacuacgcgucccugcgcagccucgucgccuccagcggcacccuggaguucaacaacgaguccuucaacuggacgggggugacccagaacggcaccagcuccgccugcauccggcgcagcaacaacuccuucuucagccggcugaacuggcucacccacuccaacuucaaguaccccgcccugaacgugacgaugcccaacaacgagcaguucgacaagcuguacaucuggggcguccaccaccccgggaccgggaaggaccagaucuuccucuacgcgcagagcuccggccgcaucaccgugagcaccaagcggagccagcaggccgugaucccgaacaucggcucccgcccccggauccgcaacauccccagccggaucuccaucuacuggacgaucgucaagcccggggacauccugcugaucaacagcaccggcaaccucaucgccccgcgcggguacuucaagauccgguccggcaagagcuccaucaugcgcagcgacgcccccaucggcaagugcaaguccgagugcaucacccccaacgggagcauccccaacgacaagccguuccagaacgugaaccggaucaccuacggcgccugcccccgcuacgugaagcaguccacgcugaagcuggcgaccgggaugcggaacguccccgagaagcagacccgcggcaucuucggggccaucgccggcuucaucgagaacggcugggaggggaugauggacggcugguacggguuccggcaccagaacagcgagggccgcgggcaggccgccgaccucaaguccacccaggcggccaucgaccagaucaacggcaagcugaaccggcugaucggcaagacgaacgagaaguuccaccagaucgagaaggaguucagcgagguggaggggcgcauccaggaccucgagaaguacguggaggacaccaagaucgaccugugguccuacaacgccgagcugcucgucgcccuggagaaccagcacaccaucgaccugaccgacagcgagaugaacaagcuguucgagaagacgaagaagcagcuccgcgagaacgccgaggacaugggcaacgggugcuucaagaucuaccacaagugcgacaacgcgugcaucggcuccauccggaacgggaccuacgaccacgacguguaccgcgacgaggcccugaacaaccgguuccagaucaagggcguggagcucaagagcggcuacaaggacuggauccuguggaucuccuucgccaucagcugcuuccugcucugcgucgcccugcugggguucaucaugugggccugccagaagggcaacauccgcugcaacaucugcaucuga

SEQ ID NO: 74554 - RNA, 1701 nt, Artificial Sequence; identical to SEQ ID NO: 73882
  derived and/or modified CDS sequence (opt1) from hemagglutinin__InfluenzaA__AGW01499

SEQ ID NO: 74555 - RNA, 1701 nt, Artificial Sequence
  derived and/or modified CDS sequence (opt1) from hemagglutinin__InfluenzaA__AGW01511
augaagaccaucaucgcccugagcuacauccucugccugguguucgcccagaagcugcccggcaacgacaacuccaccgcgacgcucugccuggggcaccacgccgucccgaacggcaccaucgugaagaccaucaccaacgaccgcaucgaggugacgaacgccaccgagcugguccagaacagcuccaucggggagaucugcgacagcccccaccagauccucgacggcgagaacugcacccugaucgacgcccugcucggggacccccagugcgacggcuuccagaacaagaagugggaccuguucguggagcgguccaaggccuacagcaacugcuaccccuacgacgugccggacuacgcgucccugcgcagccucgucgccuccagcggcacccuggaguucaacaacgaguccuucaacugggccggggugacgcagaacggcaccagcuccgccugcauccgggggagcaacuccagcuucuucucccgccugaacuggcucacccaccugaacuucaaguaccccgcgcugaacgugaccaugcccaacaacgagcaguucgacaagcucuacaucuggggcguccaccaccccgggacggacaaggaccagaucuuccuguacgcccagagcuccggccggaucaccgugagcaccaagcgcagccagcaggccgugaucccgaacaucggcucccggccccgcauccggaacauccccagccgcaucuccaucuacuggaccaucgucaagcccggggacauccugcucaucaacagcacgggcaaccugaucgccccgcggggguacuucaagauccgcuccggcaagagcuccaucaugcggagcgacgcccccaucggcaagugcaaguccgagugcaucacccccaacgggagcauccccaacgacaagccguuccagaacgugaaccgcaucaccuacggcgcgugcccccgguacgugaagcaguccacccugaagcucgccacggggaugcgcaacguccccgagaagcagacccggggcaucuucggggccaucgccggcuucaucgagaacggcugggaggggaugguggacggcugguacggguuccgccaccagaacagcgagggccgggggcaggccgcggaccugaaguccacccaggccgccaucgaccagaucaacggcaagcugaaccgccucaucggcaagaccaacgagaaguuccaccagaucgagaaggaguucagcgagguggaggggcggauccaggaccuggagaaguacgucgaggacacgaagaucgaccugugguccuacaacgccgagcuccugguggcccuggagaaccagcacaccaucgaccucaccgacagcgagaugaacaagcuguucgagaagaccaagaagcagcugcgcgagaacgcggaggacaugggcaacgggugcuucaagaucuaccacaagugcgacaacgccugcaucggcuccauccgcaacgggacguacgaccacgacguguaccgggacgaggcccucaacaaccgcuuccagaucaagggcgucgagcucaagagcggcuacaaggacuggauccuguggaucuccuucgccaucagcugcuuccugcugugcgccgcgcugcucggguucaucaugugggccugccagaagggcaacauccggugcaacaucugcaucuga

SEQ ID NO: 74556 - RNA, 1701 nt, Artificial Sequence
  derived and/or modified CDS sequence (opt1) from hemagglutinin__InfluenzaA__AGW01535
augaagaccaucaucgcccugagcuacauccucugccugguguucgcccagaagcugcccggcaacgacaacuccaccgcgacgcucugccuggggcaccacgccgucccgaacggcaccaucgugaagaccaucaccaacgaccgcaucgaggugacgaacgccaccgagcugguccagaacagcuccaucggggagaucugcgacagcccccaccagauccucgacggcgagaacugcacccugaucgacgcccugcucggggacccccagugcgacggcuuccagaacaagaagugggaccuguucguggagcgguccaaggccuacagcaacugcuaccccuacgacgugccggacuacgcgucccugcgcagccucgucgccuccagcggcacccuggaguucaacaaggaguccuucaacugggccggggugacgcagaacggcaccagcuccgccugcauccgggggagcaacuccagcuucuucucccgccugaacuggcucacccaccugaacuucaaguaccccgcgcugaacgugaccaugcccaacaacgagcaguucgacaagcucuacaucuggggcguccaccaccccgggacggacaaggaccagaucuuccuguacgcccagagcuccggccggaucaccgugagcaccaagcgcagccagcaggccgugaucccgaacaucggcucccggccccgcauccggaacauccccagccgcaucuccaucuacuggaccaucgucaagcccggggacauccugcucaucaacagcacgggcaaccugaucgccccgcggggguacuucaagauccgcuccggcaagagcuccaucaugcggagcgacgcccccaucggcaagugcaaguccgagugcaucacccccaacgggagcauccccaacgacaagccguuccagaacgugaaccgcaucaccuacggcgcgugcccccgguacgugaagcaguccacccugaagcucgccacggggaugcgcaacguccccgagaagcagacccggggcaucuucggggccaucgccggcuucaucgagaacggcugggaggggaugguggacggcugguacggguuccgccaccagaacagcgagggccgggggcaggccgcggaccugaaguccacccaggccgccaucgaccagaucaacggcaagcugaaccgccucaucggcaagaccaacgagaaguuccaccagaucgagaaggaguucagcgagguggaggggcggauccaggaccuggagaaguacgucgaggacacgaagaucgaccugugguccuacaacgccgagcuccugguggcccuggagaaccagcacaccaucgaccucaccgacagcgagaugaacaagcuguucgagaagaccaagaagcagcugcgcgagaacgcggaggacaugggcaacgggugcuucaagaucuaccacaagugcgacaacgccugcaucggcuccauccgcaacgggacguacgaccacgacguguaccgggacgaggcccucaacaaccgcuuccagaucaagggcgucgagcucaagagcggcuacaaggacuggauccuguggaucuccuucgccaucagcugcuuccugcugugcguggcccugcucggguucaucaugugggcgugccagaagggcaacauccggugcaacaucugcaucuga

SEQ ID NO: 74557 - RNA, 1701 nt, Artificial Sequence; identical to SEQ ID NO: 73882
  derived and/or modified CDS sequence (opt1) from hemagglutinin__InfluenzaA__AGW01547

SEQ ID NO: 74558 - RNA, 1701 nt, Artificial Sequence; identical to SEQ ID NO: 74018
  derived and/or modified CDS sequence (opt1) from hemagglutinin__InfluenzaA__AGW01559

SEQ ID NO: 74559 - RNA, 1701 nt, Artificial Sequence; identical to SEQ ID NO: 74018
  derived and/or modified CDS sequence (opt1) from hemagglutinin__InfluenzaA__AGW01571

SEQ ID NO: 74560 - RNA, 1701 nt, Artificial Sequence; identical to SEQ ID NO: 74018
  derived and/or modified CDS sequence (opt1) from hemagglutinin__InfluenzaA__AGW01583

SEQ ID NO: 74561 - RNA, 1701 nt, Artificial Sequence; identical to SEQ ID NO: 74018
  derived and/or modified CDS sequence (opt1) from hemagglutinin__InfluenzaA__AGW01595

SEQ ID NO: 74562 - RNA, 1701 nt, Artificial Sequence
  derived and/or modified CDS sequence (opt1) from hemagglutinin__InfluenzaA__AGW01607
augaagaccaucaucgcccugagcuacauccucugccuggugcuggcccagaagcuccccggcaacgacaacuccaccgcgacgcugugccuggggcaccacgccgucccgaacggcaccaucgugaagaccaucaccaacgaccgcaucgaggugacgaacgccaccgagcucguccagaacagcuccaucggggagaucugcgacagcccccaccagauccuggacggcgagaacugcacccugaucgacgcccuccugggggacccccagugcgacggcuuccagaacaagaagugggaccuguucguggagcgguccaaggccuacagcaacugcuaccccuacgacgugccggacuacgcgucccuccgcagccuggucgccuccagcggcacccuggaguucaacaacgaguccuucaacugggccggggugacgcagaacggcaccagcuccgccugcauccgggggagcaacuccagcuucuucucccgccucaacuggcugacccaccugaacuucaaguaccccgcgcucaacgugaccaugcccaacaacgagcaguucgacaagcuguacaucuggggcguccaccaccccgggacggacaaggaccagaucuuccuguacgcccagagcuccggccggaucaccgugagcaccaagcgcagccagcaggccgugaucccgaacaucggcucccggccccgcauccggaacauccccagccgcaucuccaucuacuggaccaucgucaagcccggggacauccuccugaucaacagcacgggcaaccugaucgccccgcggggguacuucaagauccgcuccggcaagagcuccaucaugcggagcgacgcccccaucggcaagugcaaguccgagugcaucacccccaacgggagcauccccaacgacaagccguuccagaacgugaaccgcaucaccuacggcgcgugcccccgguacgugaagcaguccacccucaagcuggccacggggaugcgcaacguccccgagaagcagacccggggcaucuucggggccaucgccggcuucaucgagaacggcugggaggggaugguggacggcugguacggguuccgccaccagaacagcgagggccgggggcaggccgcggaccugaaguccacccaggccgccaucgaccagaucaacggcaagcucaaccgccugaucggcaagaccaacgagaaguuccaccagaucgagaaggaguucagcgagguggaggggcggauccaggaccuggagaaguacgucgaggacacgaagaucgaccucugguccuacaacgccgagcugcugguggcccucgagaaccagcacaccaucgaccugaccgacagcgagaugaacaagcuguucgagaagaccaagaagcagcuccgcgagaacgcggaggacaugggcaacgggugcuucaagaucuaccacaagugcgacaacgccugcaucggcuccauccgcaacgggacguacgaccacgacguguaccgggacgaggcccugaacaaccgcuuccagaucaagggcgucgagcucaagagcggcuacaaggacuggauccuguggaucuccuucgccaucagcugcuuccugcugugcguggcccuccugggguucaucaugugggcgugccagaagggcaacauccggugcaacaucugcaucuga

SEQ ID NO: 74563 - RNA, 1701 nt, Artificial Sequence; identical to SEQ ID NO: 74021
  derived and/or modified CDS sequence (opt1) from hemagglutinin__InfluenzaA__AGW01619

SEQ ID NO: 74564 - RNA, 1701 nt, Artificial Sequence; identical to SEQ ID NO: 74018
  derived and/or modified CDS sequence (opt1) from hemagglutinin__InfluenzaA__AGW01631

SEQ ID NO: 74565 - RNA, 1701 nt, Artificial Sequence
  derived and/or modified CDS sequence (opt1) from hemagglutinin__InfluenzaA__AGW01643
augaagaccaucaucgcccugagcuacauccucugccugguguucgcccagaagcugcccggcaacgacaacuccaccgcgacgcucugccuggggcaccacgccgucccgaacggcaccaucgugaagaccaucaccaacgaccgcaucgaggugacgaacgccaccgagcugguccagaacagcuccaucggggagaucugcgacagcccccaccagauccucgacggcgagaacugcacccugaucgacgcccugcucggggacccccagugcgacggcuuccagaacaagaagugggaccuguucguggagcgguccaaggccuacagcaacugcuaccccuacgacgugccggacuacgcgucccugcgcagccucgucgccuccagcggcacccuggaguucaacaacgaguccuucaacuggacgggggugacccagaacggcaccagcuccgccugcauccgggggagcaacuccagcuucuucucccgccugaacuggcucacccaccugaacuucaaguaccccgcccugaacgugacgaugcccaacaacgagcaguucgacaagcucuacaucuggggcguccaccaccccgggaccgacaaggaccagaucuuccuguacgcgcagagcuccggccggaucaccgugagcaccaagcgcagccagcaggccgugaucccgaacaucggcucccggccccgcauccggaacauccccagccgcaucuccaucuacuggacgaucgucaagcccggggacauccugcucaucaacagcaccggcaaccugaucgccccgcggggguacuucaagauccgcuccggcaagagcuccaucaugcggagcgacgcccccaucggcaagugcaaguccgagugcaucacccccaacgggagcauccccaacgacaagccguuccagaacgugaaccgcaucaccuacggcgccugcccccgguacgugaagcaguccacgcugaagcucgcgaccgggaugcgcaacguccccgagaagcagacccggggcaucuucggggccaucgccggcuucaucgagaacggcugggaggggaugauggacggcugguacggguuccgccaccagaacagcgagggccgggggcaggccgccgaccugaaguccacccaggcggccaucgaccagaucaacggcaagcugaaccgccucaucggcaagacgaacgagaaguuccaccagaucgagaaggaguucagcgagguggaggggcggauccaggaccuggagaaguacguggaggacaccaagaucgaccugugguccuacaacgccgagcuccuggucgcccuggagaaccagcacaccaucgaccucaccgacagcgagaugaacaagcuguucgagaagacgaagaagcagcugcgcgagaacgccgaggacaugggcaacgggugcuucaagaucuaccacaagugcgacaacgcgugcaucggcuccauccgcaacgggaccuacgaccacgacguguaccgggacgaggcccucaacaaccgcuuccagaucaagggcguggagcucaagagcggcuacaaggacuggauccuguggaucuccuucgccaucagcugcuuccugcugugcgucgcccugcucggguucaucaugugggccugccagaagggcaacauccggugcaacaucugcaucuga

SEQ ID NO: 74566 - RNA, 1701 nt, Artificial Sequence; identical to SEQ ID NO: 74018
  derived and/or modified CDS sequence (opt1) from hemagglutinin__InfluenzaA__AGW01655

SEQ ID NO: 74567 - RNA, 1701 nt, Artificial Sequence
  derived and/or modified CDS sequence (opt1) from hemagglutinin__InfluenzaA__AGW01667
augaagaccaucaucgcccugagcuacauccucugccugguguucgcccagaagcugcccggcaacgacaacuccaccgcgacgcucugccuggggcaccacgccgucccgaacggcaccaucgugaagaccaucaccaacgaccgcaucgaggugacgaacgccaccgagcugguccagaacagcuccaucggggagaucugcgacagcccccaccagauccucgacggcgagaacugcacccugaucgacgcccugcucggggacccccagugcgacggcuuccagaacaagaagugggaccuguucguggagcgguccaaggccuacagcaacugcuaccccuacgacgugccggacuacgcgucccugcgcagccucgucgccuccagcggcacccuggaguucaacaacgaguccuucaacugggccggggugacgcagaacggcaccagcuccgccugcauccgggggagcaacuccagcuucuucucccgccugaacuggcucacccaccugaacuucaaguaccccgcgcugaacgugaccaugcccaacaacgagcaguucgacaagcucuacaucuggggcguccaccaccccgggacggacaaggaccagaucuuccuguacgcccagagcuccggccggaucaccgugagcaccaagcgcagccagcaggccgugaucccgaacaucggcucccggccccgcauccggaacauccccagccgcaucuccaucuacuggaccaucgucaagcccggggacauccugcucaucaacagcacgggcaaccugaucgccccgcggggguacuucaagauccgcuccggcaagagcuccaucaugcggagcgacgcccccaucggcaagugcaaguccgagugcaucacccccaacgggagcauccccaacgacaagccguuccagaacgugaaccgcaucaccuacggcgcgugcccccgguacgugaagcaguccacccugaagcucgccacggggaugcgcaacguccccgagaagcagacccggggcaucuucggggccaucgccggcuucaucgagaacggcugggaggggaugguggacggcugguacggguuccgccaccagaacagcgagggccgggggcaggccgcggaccugaaguccacccaggccgccaucgaccagaucaacggcaagcugaaccgccucaucggcaagaccaacgagaaguuccaccagaucgagaaggaguucagcgagguggaggggcggauccaggaccuggagaaguacgucgaggacacgaagaucgaccugugguccuacaacgccgagcuccugguggcccuggagaaccagcacaccaucgaccucaccgacagcgagaugaacaagcuguucgagaagaccaagaagcagcugcgcgagaacgcggaggacaugggcaacgggugcuucaagaucuaccacaagugcgacaacgccugcaucggcuccauccgcaacgagacguacgaccacgacguguaccgggacgaggcccucaacaaccgcuuccagaucaagggggucgagcucaagagcggcuacaaggacuggauccuguggaucuccuucgccaucagcugcuuccugcugugcguggcccugcucggcuucaucaugugggcgugccagaaggggaacauccggugcaacaucugcaucuga

SEQ ID NO: 74568 - RNA, 1701 nt, Artificial Sequence; identical to SEQ ID NO: 74018
  derived and/or modified CDS sequence (opt1) from hemagglutinin__InfluenzaA__AGW01679

SEQ ID NO: 74569 - RNA, 1701 nt, Artificial Sequence
  derived and/or modified CDS sequence (opt1) from hemagglutinin__InfluenzaA__AGW01691
augaagaccaucaucgcccugagcuacauccucugccugguguucgcccagaagcugcccggcaacgacaacuccaccgcgacgcucugccuggggcaccacgccgucccgaacggcaccaucgugaagaccaucaccaacgaccgcaucgaggugacgaacgccaccgagcugguccagaacagcuccaucggggagaucugcgacagcccccaccagauccucgacggcgagaacugcacccugaucgacgcccugcucggggacccccagugcgacggcuuccagaacaagaagugggaccuguucguggagcgguccaaggccuacagcaacugcuaccccuacgacgugccggacuacgcgucccugcgcagccucgucgccuccagcggcacccuggaguucaacaacgaguccuucaacuggacgggggugacccagaacggcaccagcuccgccugcauccggcgcagcaacuccagcuucuucucccggcugaacuggcucacccaccugaacuucaaguaccccgcccugaacgugacgaugcccaacaacgagcaguucgacaagcucuacaucuggggcguccaccaccccgggaccgacaaggaccagaucuuccuguacgcgcagagcuccgggcgcaucaccgugagcaccaagcggagccagcaggccgugaucccgaacaucggcucccgcccccggauccgcaacauccccagccggaucuccaucuacuggacgaucgucaagcccggcgacauccugcucaucaacagcaccgggaaccugaucgccccgcgcggcuacuucaagauccgguccggcaagagcuccaucaugcgcagcgacgcccccaucgggaagugcaaguccgagugcaucacccccaacggcagcauccccaacgacaagccguuccagaacgugaaccggaucaccuacggggccugcccccgcuacgugaagcaguccacgcugaagcucgcgaccggcaugcggaacguccccgagaagcagacccgcgggaucuucggcgccaucgccggguucaucgagaacggcugggagggcaugguggacgggugguacggcuuccggcaccagaacagcgaggggcgcggccaggccgccgaccugaaguccacccaggcggccaucgaccagaucaacgggaagcugaaccggcucaucggcaagacgaacgagaaguuccaccagaucgagaaggaguucagcgagguggagggccgcauccaggaccuggagaaguacgucgaggacaccaagaucgaccugugguccuacaacgccgagcuccugguggcccuggagaaccagcacaccaucgaccucaccgacagcgagaugaacaagcuguucgagaagacgaagaagcagcugcgcgagaacgccgaggacauggggaacggcugcuucaagaucuaccacaagugcgacaacgcgugcaucggguccauccggaacggcaccuacgaccacgacguguaccgcgacgaggcccucaacaaccgguuccagaucaagggggucgagcucaagagcggcuacaaggacuggauccuguggaucuccuucgccaucagcugcuuccugcugugcguggcccugcucggcuucgugaugugggccugccagaaggggaacauccgcugcaacaucugcaucuga

SEQ ID NO: 74570 - RNA, 1701 nt, Artificial Sequence; identical to SEQ ID NO: 73882
  derived and/or modified CDS sequence (opt1) from hemagglutinin__InfluenzaA__AGW01701

SEQ ID NO: 74571 - RNA, 1701 nt, Artificial Sequence; identical to SEQ ID NO: 73882
  derived and/or modified CDS sequence (opt1) from hemagglutinin__InfluenzaA__AGW01713

SEQ ID NO: 74572 - RNA, 1701 nt, Artificial Sequence
  derived and/or modified CDS sequence (opt1) from hemagglutinin__InfluenzaA__AGW01725
augaagaccaucaucgcccugagcuacauccucugccugguguucgcccagaagcugcccggcaacgacaacuccaccgcgacgcucugccuggggcaccacgccgucccgaacggcaccaucgugaagaccaucaccaacgaccgcaucgaggugacgaacgccaccgagcugguccagaacagcuccaucggggagaucugcgacagcccccaccagauccucgacggcgagaacugcacccugaucgacgcccugcucggggacccccagugcgacggcuuccagaacaagaagugggaccuguucguggagcgguccaaggccuacagcaacugcuaccccuacgacgugccggacuacgcgucccugcgcagccucgucgccuccagcggcacccuggaguucaacaacgaguccuucaacuggacgggggugacccagaacggcaccagcuccgccugcauccggcgcagcaacuccagcuucuucucccggcugaacuggcucacccaccugaacuucaaguaccccgcccugaacgugacgaugcccaacaacgagcaguucgacaagcucuacaucuggggcguccaccaccccgggaccgacaaggaccagaucuuccuguacgcgcagagcuccgggcgcaucaccgugagcaccaagcggagccagcaggccgugaucccgaacaucggcucccgcccccggauccgcaacauccccagccggaucuccaucuacuggacgaucgucaagcccggcgacauccugcucaucaacagcaccgggaaccugaucgccccgcgcggcuacuucaagauccgguccggcaagagcuccaucaugcgcagcgacgcccccaucgggaagugcaaguccgagugcaucacccccaacggcagcauccccaacgacaagccguuccagaacgugaaccggaucaccuacggggccugcccccgcuacgugaagcaguccacgcugaagcucgcgaccggcaugcggaacguccccgagaagcagacccgcgggaucuucggcgccaucgccggguucaucgagaacggcugggagggcaugguggacgggugguacggcuuccggcaccagaacagcgaggggcgcggccaggccgccgaccugaaguccacccaggcggccaucgaccagaucaacgggaagcugaaccggcucaucggcaagacgaacgagaaguuccaccagaucgagaaggaguucagcgagguggagggccgcauccaggaccuggagaaguacgucgaggacaccaagaucgaccugugguccuacaacgccgagcuccugguggcccuggagaaccagcacaccaucgaccucaccgacagcgagaugaacaagcuguucgagaagacgaagaagcagcugcgcgagaacgccgaggacauggggaacggcugcuucaagaucuaccacaagugcgacaacgcgugcaucggguccauccggaacggcaccuacgaccacaacguguaccgcgacgaggcccucaacaaccgguuccagaucaagggggucgagcucaagagcggcuacaaggacuggauccuguggaucuccuucgccaucagcugcuuccugaucugcguggcccugcugggcuucaucaugugggccugccagaaggggaacauccgcugcaacaucugcaucuga

SEQ ID NO: 74573 - RNA, 1701 nt, Artificial Sequence; identical to SEQ ID NO: 73882
  derived and/or modified CDS sequence (opt1) from hemagglutinin__InfluenzaA__AGW01737

SEQ ID NO: 74574 - RNA, 1701 nt, Artificial Sequence; identical to SEQ ID NO: 74018
  derived and/or modified CDS sequence (opt1) from hemagglutinin__InfluenzaA__AGW01749

SEQ ID NO: 74575 - RNA, 1701 nt, Artificial Sequence; identical to SEQ ID NO: 74018
  derived and/or modified CDS sequence (opt1) from hemagglutinin__InfluenzaA__AGW01761

SEQ ID NO: 74576 - RNA, 1701 nt, Artificial Sequence; identical to SEQ ID NO: 73882
  derived and/or modified CDS sequence (opt1) from hemagglutinin__InfluenzaA__AGW01773

SEQ ID NO: 74577 - RNA, 1701 nt, Artificial Sequence; identical to SEQ ID NO: 74018
  derived and/or modified CDS sequence (opt1) from hemagglutinin__InfluenzaA__AGW01785

SEQ ID NO: 74578 - RNA, 1701 nt, Artificial Sequence; identical to SEQ ID NO: 73882
  derived and/or modified CDS sequence (opt1) from hemagglutinin__InfluenzaA__AGW01797

SEQ ID NO: 74579 - RNA, 1701 nt, Artificial Sequence; identical to SEQ ID NO: 74018
  derived and/or modified CDS sequence (opt1) from hemagglutinin__InfluenzaA__AGW01809

SEQ ID NO: 74580 - RNA, 1701 nt, Artificial Sequence; identical to SEQ ID NO: 74018
  derived and/or modified CDS sequence (opt1) from hemagglutinin__InfluenzaA__AGW01821

SEQ ID NO: 74581 - RNA, 1701 nt, Artificial Sequence; identical to SEQ ID NO: 74017
  derived and/or modified CDS sequence (opt1) from hemagglutinin__InfluenzaA__AGW01833

SEQ ID NO: 74582 - RNA, 1701 nt, Artificial Sequence
  derived and/or modified CDS sequence (opt1) from hemagglutinin__InfluenzaA__AGW01845
augaagaccaucaucgcccugagcuacauccucugccugguguucgcccagaagcugcccggcaacgacaacuccaccgcgacgcucugccuggggcaccacgccgucccgaacggcaccaucgugaagaccaucaccaacgaccgcaucgaggugacgaacgccaccgagcugguccagaacagcuccaucggggagaucugcgacagcccccaccagauccucgacggcgagaacugcacccugaucgacgcccugcucggggacccccagugcgacggcuuccagaacaagaagugggaccuguucguggagcgguccaaggccuacagcaacugcuaccccuacgacgugccggacuacgcgucccugcgcagccucgucgccuccagcggcacccuggaguucacgaacgaguccuucaacuggaccggggugacccagaacggcaccagcuccgccugcauccggcgcagcaacuccagcuucuucucccggcugaacuggcucacgcaccugaacuucaaguaccccgcccugaacgugaccaugcccaacaacgagcaguucgacaagcucuacaucuggggcguccaccaccccgggaccgacaaggaccagaucuuccuguacgcgcagagcuccgggcgcaucaccgugagcacgaagcggagccagcaggccgugaucccgaacaucggcucccgcccccggauccgcaacauccccagccggaucuccaucuacuggaccaucgucaagcccggcgacauccugcucaucaacagcaccgggaaccugaucgccccgcgcggcuacuucaagauccgguccggcaagagcuccaucaugcgcagcgacgcccccaucgggaagugcaaguccgagugcaucacccccaacggcagcauccccaacgacaagccguuccagaacgugaaccggaucacguacggggccugcccccgcuacgugaagcaguccacccugaagcucgcgaccggcaugcggaacguccccgagaagcagacccgcgggaucuucggcgccaucgccggguucaucgagaacggcugggagggcaugguggacgggugguacggcuuccggcaccagaacagcgaggggcgcggccaggccgccgaccugaaguccacgcaggcggccaucgaccagaucaacgggaagcugaaccggcucaucggcaagaccaacgagaaguuccaccagaucgagaaggaguucagcgagguggagggccgcauccaggaccuggagaaguacgucgaggacaccaagaucgaccugugguccuacaacgccgagcuccugguggcccuggagaaccagcacaccaucgaccucacggacagcgagaugaacaagcuguucgagaagaccaagaagcagcugcgcgagaacgccgaggacauggggaacggcugcuucaagaucuaccacaagugcgacaacgcgugcaucggguccauccggaacggcaccuacgaccacaacguguaccgcgacgaggcccucaacaaccgguuccagaucaagggggucgagcucaagagcggcuacaaggacuggauccuguggaucuccuucgccaucagcugcuuccugcugugcguggcccugcucggcuucaucaugugggccugccagaaggggaacauccgcugcaacaucugcaucuga

SEQ ID NO: 74583 - RNA, 1701 nt, Artificial Sequence; identical to SEQ ID NO: 74018
  derived and/or modified CDS sequence (opt1) from hemagglutinin__InfluenzaA__AGW01857

SEQ ID NO: 74584 - RNA, 1701 nt, Artificial Sequence; identical to SEQ ID NO: 74018
  derived and/or modified CDS sequence (opt1) from hemagglutinin__InfluenzaA__AGW01869

SEQ ID NO: 74585 - RNA, 1701 nt, Artificial Sequence; identical to SEQ ID NO: 74569
  derived and/or modified CDS sequence (opt1) from hemagglutinin__InfluenzaA__AGW01881

SEQ ID NO: 74586 - RNA, 1701 nt, Artificial Sequence; identical to SEQ ID NO: 73892
  derived and/or modified CDS sequence (opt1) from hemagglutinin__InfluenzaA__AGW01893

SEQ ID NO: 74587 - RNA, 1701 nt, Artificial Sequence; identical to SEQ ID NO: 73907
  derived and/or modified CDS sequence (opt1) from hemagglutinin__InfluenzaA__AGW01905

SEQ ID NO: 74588 - RNA, 1701 nt, Artificial Sequence; identical to SEQ ID NO: 74018
  derived and/or modified CDS sequence (opt1) from hemagglutinin__InfluenzaA__AGW01917

SEQ ID NO: 74589 - RNA, 1701 nt, Artificial Sequence; identical to SEQ ID NO: 73882
  derived and/or modified CDS sequence (opt1) from hemagglutinin__InfluenzaA__AGW01929

SEQ ID NO: 74590 - RNA, 1701 nt, Artificial Sequence; identical to SEQ ID NO: 74018
  derived and/or modified CDS sequence (opt1) from hemagglutinin__InfluenzaA__AGW01941

SEQ ID NO: 74591 - RNA, 1701 nt, Artificial Sequence; identical to SEQ ID NO: 73882
  derived and/or modified CDS sequence (opt1) from hemagglutinin__InfluenzaA__AGW01953

SEQ ID NO: 74592 - RNA, 1701 nt, Artificial Sequence
  derived and/or modified CDS sequence (opt1) from hemagglutinin__InfluenzaA__AGW01965
augaagaccaucaucgcccugagcuacauccucugccugguguucgcccaggagcugcccggcaacgacgacuccauggcgacccucugccuggggcaccacgccgucccgaacggcacgaucgugaagaccaucaccaacgaccagaucgaggugaccaacgccacggagcugguccagagcuccagcaccggggagaucugcaacagcccccaccagauccucgacggcgagaacugcacccugaucgacgcccugcucggggacccccagugcgacggcuuccagaacaagaagugggaccuguucguggagcgcagcaaggcccacuccaacugcuaccccuacgacgugccggacuacgcgagccugcggucccucgucgccagcuccggcacccuggaguucaacaacgagagcuucaacuggacgggggugacccagaacggcaccuccagcgccugcauccgccgguccaacaacagcuucuucucccgccugaacuggcucacccaccugaacuucaaguaccccgcccugaacgugacgaugcccaacaacgagcaguucgacaagcucuacaucuggggcguccaccaccccgggaccgacaaggaccagaucuuccuguacgcgcaggccagcgggcggaucaccguguccaccaagcgcagccagcaggccgugaucccgaacaucggcagccggccccgcguccggaacauccccucccgcgugagcaucuacuggacgaucgugaagcccggcgacauccugcucaucaacuccaccgggaaccugaucgccccgcggggcuacuucaagauccgcagcgggaaguccagcaucaugcgguccgacgcccccaucggcaagugcaacagcgcgugcaucacccccaacggcuccauccccaacgacaagccguuccagaacgucaaccgcaucaccuacggggccugcccccgguacgugaagcagaacacgcugaagcucgccaccggcaugcgcaacgugcccgagaagcagacccgggggaucuucggcgccaucgccggguucaucgagaacggcugggagggcauggucgacgggugguacggcuuccgccaccagaacagcgaggggcggggccaggcggccgaccugaaguccacccaggccgccaucgaccagaucaacgggaagcugaaccgccucaucggcaagacgaacgagaaguuccaccagaucgagaaggaguucagcgagguggagggccggauccaggaccuggagaaguacguggaggacaccaagaucgaccugugguccuacaacgccgagcuccuggucgcgcuggagaaccagcacaccaucgaccucaccgacagcgagaugaacaagcuguucgagaagacgaagaagcagcugcgcgagaacgccgaggacauggggaacggcugcuucaagaucuaccacaagugcgacaacgacugcaucggguccauccgcaacggcaccuacgaccacaacguguaccgggacgaggcccucaacaaccgcuuccagaucaaggggaucgagcugaaguccggcuacaaggacuggauccuguggaucuccuucgccaucagcugcuuccuccugugcguggcccugcucggcuucaucaugugggcgugccagaaggggaacauccggugcaacaucugcaucuga

SEQ ID NO: 74593 - RNA, 1701 nt, Artificial Sequence; identical to SEQ ID NO: 74018
  derived and/or modified CDS sequence (opt1) from hemagglutinin__InfluenzaA__AGW01977

SEQ ID NO: 74594 - RNA, 1701 nt, Artificial Sequence; identical to SEQ ID NO: 74018
  derived and/or modified CDS sequence (opt1) from hemagglutinin__InfluenzaA__AGW01989

SEQ ID NO: 74595 - RNA, 1701 nt, Artificial Sequence; identical to SEQ ID NO: 74018
  derived and/or modified CDS sequence (opt1) from hemagglutinin__InfluenzaA__AGW02001

SEQ ID NO: 74596 - RNA, 1701 nt, Artificial Sequence; identical to SEQ ID NO: 74018
  derived and/or modified CDS sequence (opt1) from hemagglutinin__InfluenzaA__AGW02013

SEQ ID NO: 74597 - RNA, 1701 nt, Artificial Sequence; identical to SEQ ID NO: 73882
  derived and/or modified CDS sequence (opt1) from hemagglutinin__InfluenzaA__AGW02025

SEQ ID NO: 74598 - RNA, 1701 nt, Artificial Sequence; identical to SEQ ID NO: 74018
  derived and/or modified CDS sequence (opt1) from hemagglutinin__InfluenzaA__AGW02037

SEQ ID NO: 74599 - RNA, 1701 nt, Artificial Sequence; identical to SEQ ID NO: 74018
  derived and/or modified CDS sequence (opt1) from hemagglutinin__InfluenzaA__AGW02061

SEQ ID NO: 74600 - RNA, 1701 nt, Artificial Sequence; identical to SEQ ID NO: 74018
  derived and/or modified CDS sequence (opt1) from hemagglutinin__InfluenzaA__AGW02073

SEQ ID NO: 74601 - RNA, 1701 nt, Artificial Sequence; identical to SEQ ID NO: 74018
  derived and/or modified CDS sequence (opt1) from hemagglutinin__InfluenzaA__AGW02085

SEQ ID NO: 74602 - RNA, 1701 nt, Artificial Sequence; identical to SEQ ID NO: 73907
  derived and/or modified CDS sequence (opt1) from hemagglutinin__InfluenzaA__AGW02097

SEQ ID NO: 74603 - RNA, 1701 nt, Artificial Sequence; identical to SEQ ID NO: 73882
  derived and/or modified CDS sequence (opt1) from hemagglutinin__InfluenzaA__AGW02109

SEQ ID NO: 74604 - RNA, 1701 nt, Artificial Sequence; identical to SEQ ID NO: 74018
  derived and/or modified CDS sequence (opt1) from hemagglutinin__InfluenzaA__AGW02133

SEQ ID NO: 74605 - RNA, 1701 nt, Artificial Sequence; identical to SEQ ID NO: 74018
  derived and/or modified CDS sequence (opt1) from hemagglutinin__InfluenzaA__AGW02157

SEQ ID NO: 74606 - RNA, 1701 nt, Artificial Sequence; identical to SEQ ID NO: 73882
  derived and/or modified CDS sequence (opt1) from hemagglutinin__InfluenzaA__AGW02169

SEQ ID NO: 74607 - RNA, 1701 nt, Artificial Sequence; identical to SEQ ID NO: 74018
  derived and/or modified CDS sequence (opt1) from hemagglutinin__InfluenzaA__AGW02181

SEQ ID NO: 74608 - RNA, 1701 nt, Artificial Sequence; identical to SEQ ID NO: 73892
  derived and/or modified CDS sequence (opt1) from hemagglutinin__InfluenzaA__AGW02193

SEQ ID NO: 74609 - RNA, 1701 nt, Artificial Sequence; identical to SEQ ID NO: 73859
  derived and/or modified CDS sequence (opt1) from hemagglutinin__InfluenzaA__AGW04171

SEQ ID NO: 74610 - RNA, 1707 nt, Artificial Sequence
  derived and/or modified CDS sequence (opt1) from hemagglutinin__InfluenzaA__AGW27061
auggagaagaucgugcugcuguucgccaucgucaaccuggucaagagcgaccacaucugcaucggcuaccacgccaacaacuccaccgagcaggucgacaccaucauggagaagaacgugacggugacccacgcgcaggacauccuggagaagacccacaacgggaagcucugcgaccugaacggcgugaagccccugauccucaaggacugcagcguggccggguggcugcugggcaacccgaugugcgacgaguucaucgacgugcccgagugguccuacaucguggagaaggccaaccccgccaacgaccucugcuaccccgggaacuucaacgacuacgaggagcugaagcaccuccucagccgcaucaaccacuucgagaagauccggaucaucccgaaggacuccuggcccgaccacgaggccagccugggcgucuccgcggccugcagcuaccagggcaacuccagcuucuuccgcaacgugguguggcugcucaagaagaacgacgccuaccccaucaucaagaaguccuacaacaacaccaacaaggaggaccugcugguccucugggggauccaccaccccaacgacgaggccgagcagauccggcuguaccagaacccgacgaccuacgugagcaccggcaccuccacgcugaaccagcgccucgugccccggaucgcgacccgcagcaaggucaacgggcaguccggccggaucgacuucuucuggaccauccugaagcccaacgacgccaucaacuucgagagcaacgggaacuucaucgcccccgaguacgccuacaagaucgugaagaagggcgacuccaccaucaugcgcagcgagguggaguacggcaacugcuccacgcggugccagaccccgaugggggccaucaacagcagcaugcccuuccacaacauccacccccugaccaucggcgagugccccaaguacgucaaguccaacaagcucgugcuggcgaccgggcugcgcaacagcccgcagaucgagcggcgccggcgcaagcggggccucuucggcgccaucgccggguucaucgagggcggguggcagggcaugguggacgggugguacggcuaccaccacuccaacgagcagggcagcggguacgccgccgacaaggaguccacgcagaaggcgaucgacggcgucaccaacaaggugaacagcaucaucgacaagaugaacacccaguucgaggccguggggcgcgaguucaacaaccuggagcggcgcaucgagaaccugaacaagaagauggaggacggcuuccucgacgucuggaccuacaacgccgagcugcuggugcucauggagaacgagcggacgcuggacuuccacgacuccaacgucaagaaccuguacgacaaggugcgccuccagcugcgggacaacgccaaggagcuggggaacggcugcuucgaguucuaccacaagugcgacaacgagugcauggagagcgugcgcaacggcaccuacgacuacccccaguacuccgaggaggcccgccucaagcgggaggagaucagcggggucaagcuggaguccaucggcaccuaccagauccugagcaucuacuccaccguggcgagcucccucgugcugagcaucauggucgccgggcugucccucuggaugugcagcaacggcucccugcagugccgcaugugcaucuga

SEQ ID NO: 74611 - RNA, 1698 nt, Artificial Sequence
  derived and/or modified CDS sequence (opt1) from hemagglutinin__InfluenzaA__AGY14471
augaaggugaagcugcucauccugcugugcaccuucaccgccacguacgccgacaccaucugcaucggcuaccacgcgaacaacagcaccgacaccgucgacacgauccucgagaagaacgugaccgugacccacuccgucaaccugcuggaggacagccacaacgggaagcucugccugcugaagggcaucgcgccccuccagcuggggaacugcuccguggccggcuggauccuggggaacccggagugcggccuccugauccccaaggagagcugguccuacaucguggagacccccaaccccgagaacggcacgugcuacccgggguacuucgacgacuacgaggagcugcgcgagcagcucagcuccgucagcuccuucgagcgguucgagaucuuccccaaggagagcuccuggcccaaccacaccgugaccggcgugagcgccuccugcagccacaacgggaaguccagcuucuaccgcaaccugcuguggcucaccggcaagaacgggcuguaccccaaccuguccaagagcuacgccaacaacaaggagaaggagguccucauccuguggggcgugcaccacccguccaacaucggcaaccagcggacgcuguaccacaccgagaacaccuacgugagcgucgugagcucccacuacagccgccgguucacccccgagaucacgaagcgccccaaggugcgggaccaggaggggcgcaucaacuacuacuggacccuccuggagcccggcgacaccaucaucuucgaggccaacgggaaccugaucgccccgugguacgccuucgcccucuccaagggcuucggcagcgggaucaucaccuccaacgcgcccauggacgagugcgacgccaagugccagacgccccagggcgccaucaacagcaaccugcccuuccagaacguccacccggugaccaucggggagugccccaaguacgugcgguccaccaagcugcgcauggucaccggccuccggaacauccccagcauccagucccgcgggcuguucggcgccaucgccggcuucaucgagggcggguggacggggaugguggacggcugguacggguaccaccaccagaacgagcagggcagcggcuacgcggccgaccaggaguccacccagaacgccaucaacgggaucaccaacaaggugaacagcgucaucgagaagaugaacacccaguucacgguggugggcaaggaguucaacaagcuggagcggcgcauggagaaccucaacaagaaggucgacgacggguuccuggacaucuggaccuacaacgccgagcugcucgugcugcuggagaacgagcggacccucgacuuccacgacuccaacgucaugaaccuguacgagaaggugaagggccagcugaagaacaacgccaaggagaucgggaacggcugcuucgaguucuaccacaagugcaacaacgagugcauggagagcgugaagaacggcaccuacgacuaccccaaguacuccgaggagagcaagcucaaccgcgagaagaucgacggggucaagcuggaguccaugggcguguaccagauccuggcgaucuacagcacgguggccuccagccucguccugcuggugagccucggggccaucuccuucuggaugugcagcaacggcucccugcagugccggaucugcaucuga

SEQ ID NO: 74612 - RNA, 1698 nt, Artificial Sequence; identical to SEQ ID NO: 74611
  derived and/or modified CDS sequence (opt1) from hemagglutinin__InfluenzaA__AGY14477

SEQ ID NO: 74613 - RNA, 1701 nt, Artificial Sequence
  derived and/or modified CDS sequence (opt1) from hemagglutinin__InfluenzaA__AHC57459
augaagaccaucaucgcccugagcuacauccucugccugguguucgcccagaagcugcccggcaacgacaacuccaccgcgacgcucugccuggggcaccacgccgucccgaacggcaccaucgugaagaccaucaccaacgaccagaucgaggugacgaacgccaccgagcugguccagagcuccagcaccggggagaucugcaacagcccccaccagauccucgacggcgagaacugcacccugaucgacgcccugcucggggacccccagugcgacggcuuccagaacaagaagugggaccuguucguggagcgcagcaaggcccacuccaacugcuaccccuacgacgugccggacuacgcgagccugcggucccucgucgccagcuccggcacgcuggaguucaacaacgagagcuucaacuggaccggggugacccagaacggcaccuccagcgccugcauccgccgguccaacaacagcuucuucucccgccugaacuggcucacgcaccugaacuucaaguaccccgcccugaacgugaccaugcccaacaacgagcaguucgacaagcucuacaucuggggcguccaccaccccgggaccgacaaggaccagaucuuccuguacgcgcaggccgccgggcggaucaccgugagcacgaagcgcucccagcaggccgugaucccgaacaucggcagccggccccgcauccggaacauccccagccgcgucuccaucuacuggaccaucgugaagcccggcgacauccugcucaucaacagcaccgggaaccugaucgccccgcggggcuacuucaagauccgcuccgggaaguccuccaucaugcggagcgacgcgcccaucggcaagugcaacuccgccugcaucacccccaacggcagcauccccaacgacaagccguuccagaacgugaaccgcaucacguacggggccugcccccgguacgucaagcagaacacccugaagcucgccaccggcaugcgcaacgugcccgagaagcagacccgggggaucuucggcgccaucgcgggguucaucgagaacggcugggagggcaugguggacgggugguacggcuuccgccaccagaacuccgaggggcggggccaggccgccgaccucaagagcacgcaggccgccaucgaccagaucaacgggaagcugaaccgccugaucggcaagaccaacgagaaguuccaccagaucgagaaggaguucuccgaggucgagggccggauccaggaccuggagaaguacguggaggacaccaagaucgaccuguggagcuacaacgcggagcuccugguggcccuggagaaccagcacaccaucgaccucacggacuccgagaugaacaagcuguucgagaagaccaagaagcagcugcgcgagaacgccgaggacauggggaacggcugcuucaagaucuaccacaagugcgacaacgccugcaucgggagcauccgcaacggcaccuacgaccacgacgucuaccgggacgaggcccucaacaaccgcuuccagaucaaggggguggagcugaaguccggcuacaaggacuggauccuguggaucagcuucgcgaucuccugcuuccuccugugcguggcccugcucggcuucaucaugugggccugccagaaggggaacauccggugcaacaucugcaucuga

SEQ ID NO: 74614 - RNA, 1701 nt, Artificial Sequence; identical to SEQ ID NO: 71006
  derived and/or modified CDS sequence (opt1) from hemagglutinin__InfluenzaA__AHC57465

SEQ ID NO: 74615 - RNA, 1701 nt, Artificial Sequence; identical to SEQ ID NO: 70879
  derived and/or modified CDS sequence (opt1) from hemagglutinin__InfluenzaA__AHC57487

SEQ ID NO: 74616 - RNA, 1701 nt, Artificial Sequence; identical to SEQ ID NO: 71806
  derived and/or modified CDS sequence (opt1) from hemagglutinin__InfluenzaA__AHC57499

SEQ ID NO: 74617 - RNA, 1701 nt, Artificial Sequence; identical to SEQ ID NO: 71806
  derived and/or modified CDS sequence (opt1) from hemagglutinin__InfluenzaA__AHC57511

SEQ ID NO: 74618 - RNA, 1701 nt, Artificial Sequence; identical to SEQ ID NO: 71806
  derived and/or modified CDS sequence (opt1) from hemagglutinin__InfluenzaA__AHC57523

SEQ ID NO: 74619 - RNA, 1701 nt, Artificial Sequence; identical to SEQ ID NO: 71006
  derived and/or modified CDS sequence (opt1) from hemagglutinin__InfluenzaA__AHC57675

SEQ ID NO: 74620 - RNA, 1701 nt, Artificial Sequence; identical to SEQ ID NO: 71006
  derived and/or modified CDS sequence (opt1) from hemagglutinin__InfluenzaA__AHC57827

SEQ ID NO: 74621 - RNA, 1701 nt, Artificial Sequence; identical to SEQ ID NO: 70879
  derived and/or modified CDS sequence (opt1) from hemagglutinin__InfluenzaA__AHC57956

SEQ ID NO: 74622 - RNA, 1701 nt, Artificial Sequence
  derived and/or modified CDS sequence (opt1) from hemagglutinin__InfluenzaA__AHC57981
augaagaccaucaucgcccugagcuacauccucugccugguguucgcccagaagauccccggcaacgacaacuccaccgcgacgcugugccucgggcaccacgccgucccgaacggcaccaucgugaagaccaucaccaacgaccagaucgaggugacgaacgccaccgagcugguccagaacagcuccaccggggagaucugcgacagcccccaccagauccuggacggcgagaacugcacccucaucgacgcccugcugggggacccccagugcgacggcuuccagaacaagaagugggaccucuucguggagcgcuccaaggccuacagcaacugcuaccccuacgacgugccggacuacgcgucccugcggagccugaucgccuccagcggcacgcucgaguucaacaacgaguccuucaacuggaccggggucacccagaacggcaccagcuccgccugcauccgccggagcaacaacuccuucuucagccgccugaacuggcugacgcaccucaacuucaaguaccccgcccugaacgugaccaugcccaacaacgagcaguucgacaagcuguacaucuggggcgugcaccaccccgggaccgacaaggaccagaucuuccucuacgcgcaggccuccgggcggaucaccgucagcacgaagcgcucccagcaggccgugaucccgaacaucggcagccggccccgcgugcggaacauccccagccgcaucuccaucuacuggaccaucgucaagcccggcgacauccugcugaucaacagcaccgggaaccucaucgccccgcggggcuacuucaagauccgcuccggcaagagcuccaucaugcggagcgacgcccccaucgggaagugcaacuccgagugcaucacccccaacggcagcauccccaacgacaagccguuccagaacgugaaccgcaucacguacggggcgugcccccgguacgugaagcagaacacccugaagcuggccaccggcaugcgcaacguccccgagaagcagacccgggggaucuucggcgccaucgccggguucaucgagaacggcugggagggcaugguggacgggugguacggcuuccgccaccagaacuccgaggggcggggccaggccgcggaccucaagagcacgcaggccgccaucgaccagaucaacgggaaccugaaccgccugaucggcaagaccaacgagaaguuccaccagaucgagaaggaguucuccgagguggagggccggauccaggaccucgagaaguacgucgaggacaccaagaucgaccuguggagcuacaacgccgagcugcucguggcccuggagaaccagcacaccaucgaccugacggacuccgagaugaacaagcuguucgagaagaccaagaagcagcuccgcgagaacgcggaggacauggggaacggcugcuucaagaucuaccacaagugcgacaacgccugcaucgggagcauccgcaacggcaccuacgaccacgacguguaccgggacgaggcccugaacaaccgcuuccagaucaagggggucgagcucaaguccggcuacaaggacuggauccuguggaucagcuucgccaucuccugcuuccugcucugcguggcccugcugggcuucaucaugugggcgugccagaaggggaacauccggugcaacaucugcaucuga

SEQ ID NO: 74623 - RNA, 1701 nt, Artificial Sequence; identical to SEQ ID NO: 71806
  derived and/or modified CDS sequence (opt1) from hemagglutinin__InfluenzaA__AHC57993

SEQ ID NO: 74624 - RNA, 1701 nt, Artificial Sequence; identical to SEQ ID NO: 73098
  derived and/or modified CDS sequence (opt1) from hemagglutinin__InfluenzaA__AHC58005

SEQ ID NO: 74625 - RNA, 1701 nt, Artificial Sequence
  derived and/or modified CDS sequence (opt1) from hemagglutinin__InfluenzaA__AHC58017
augaagaccaucaucgcccugagcuacauccucugccugguguucgcccagaagcugcccggcaacgacaacuccaccgcgacgcucugccuggggcaccacgccgucccgaacggcaccaucgugaagaccaucaccaacgaccagaucgaggugacgaacgccaccgagcugguccagagcuccagcaccggggagaucugcaacagcccccaccagauccucgacggcgagaacugcacccugaucgacgcccugcucggggacccccagugcgacggcuuccagaacaagaagugggaccuguucguggagcgcagcaaggcccacuccaacugcuaccccuacgacgugccggacuacgcgagccugcggucccucgucgccagcuccggcacgcuggaguucaacaacgagagcuucaacuggaccggggugacccagaacggcaccuccagcgccugcauccgccgguccaacaacagcuucuucucccgccugaacuggcucacgcaccugaacuucaaguaccccgcccugaacgugaccaugcccaacaacgagcaguucgacaagcucuacaucuggggcguccaccaccccgggaccgacaaggaccagaucuuccuguacgcgcaggccgccgggcggaucaccgugagcacgaagcgcucccagcaggccgugaucccgaacaucggcagccggccccgcguccggaacauccccagccgcguguccaucuacuggaccaucgugaagcccggcgacauccugcucaucaacagcaccgggaaccugaucgccccgcggggcuacuucaagauccgcuccgggaaguccuccaucaugcggagcgacgcgcccaucggcaagugcaacuccgccugcaucacccccaacggcagcauccccaacgacaagccguuccagaacgucaaccgcaucacguacggggccugcccccgguacgugaagcagaacacccugaagcucgccaccggcaugcgcaacgugcccgagaagcagacccgggggaucuucggcgccaucgcgggguucaucgagaacggcugggagggcauggucgacgggugguacggcuuccgccaccagaacuccgaggggcggggccaggccgccgaccucaagagcacgcaggccgccaucgaccagaucaacgggaagcugaaccgccugaucggcaagaccaacgagaaguuccaccagaucgagaaggaguucuccgagguggagggccggauccaggaccuggagaaguacguggaggacaccaagaucgaccuguggagcuacaacgcggagcuccuggucgcccuggagaaccagcacaccaucgaccucacggacuccgagaugaacaagcuguucgagaagaccaagaagcagcugcgcgagaacgccgaggacauggggaacggcugcuucaagaucuaccacaagugcgacaacgccugcaucgugagcauccgcaacgggaccuacgaccacgacguguaccgggacgaggcccucaacaaccgcuuccagaucaagggcgucgagcugaaguccggguacaaggacuggauccuguggaucagcuucgcgaucuccugcuuccuccugugcguggcccugcucggcuucaucaugugggccugccagaagggcaacauccggugcaacaucugcaucuga

SEQ ID NO: 74626 - RNA, 1701 nt, Artificial Sequence
  derived and/or modified CDS sequence (opt1) from hemagglutinin__InfluenzaA__AHC58029
augaagaccaucaucgcccugagcuacauccucugccugguguucgcccagaagcugcccggcaacgacaacuccaccgcgacgcucugccuggggcaccacgccgucccgaacggcaccaucgugaagaccaucaccaacgaccagaucgaggugacgaacgccaccgagcugguccagagcuccagcaccggggagaucugcaacagcccccaccagauccucgacggcgagaacugcacccugaucgacgcccugcucggggacccccagugcgacggcuuccagaacaagaagugggaccuguucguggagcgcagcaaggcccacuccaacugcuaccccuacgacgugccggacuacgcgagccugcggucccucgucgccagcuccggcacgcuggaguucaacaacgagagcuucaacuggaccggggugacccagaacggcaccuccagcgccugcauccgcggguccaacaacagcuucuucucccggcugaacuggcucacgcagcugaacuucaaguaccccgcccugaacgugaccaugcccaacaacgagcaguucgacaagcucuacaucuggggcguccaccaccccgggaccgacaaggaccagaucuuccuguacgcgcaggccagcggccgcaucaccguguccacgaagcggagccagcaggccgugaucccgaacaucggcagccgcccccggguccgcaacauccccucccgggugagcaucuacuggaccaucgugaagcccggggacauccugcucaucaacuccaccggcaaccugaucgccccgcgcggguacuucaagauccggagcggcaaguccagcaucaugcgcuccgacgcccccaucggcaagugcaacagcgcgugcaucacccccaacggguccauccccaacgacaagccguuccagaacgucaaccggaucacguacggcgccugcccccgcuacgugaagcagaacacccugaagcucgccaccgggaugcggaacgugcccgagaagcagacccgcggcaucuucggggccaucgccggcuucaucgagaacggcugggaggggauggucgacggcugguacggguuccggcaccagaacagcgagggccgcgggcaggcggccgaccugaaguccacgcaggccgccaucgaccagaucaacggcaagcugaaccggcucaucggcaagaccaacgagaaguuccaccagaucgagaaggaguucagcgagguggaggggcgcauccaggaccuggagaaguacguggaggacaccaagaucgaccugugguccuacaacgccgagcuccuggucgcgcuggagaaccagcacaccaucgaccucacggacagcgagaugaacaagcuguucgagaagaccaagaagcagcugcgggagaacgccgaggacaugggcaacgggugcuucaagaucuaccacaagugcgacaacgccugcaucggcuccauccgcaacgggaccuacgaccacgacguguaccgcgacgaggcccucaacaaccgguuccagaucaagggcguggagcugaaguccggcuacaaggacuggauccuguggaucuccuucgccaucagcugcuuccuccugugcgucgcgcugcucggguucaucaugugggccugccagaagggcaacauccgcugcaacaucugcaucuga

SEQ ID NO: 74627 - RNA, 1701 nt, Artificial Sequence
  derived and/or modified CDS sequence (opt1) from hemagglutinin__InfluenzaA__AHC58050
augaagaccaucaucgcccugagcuacauccucugccugguguucgcccagaagcugcccggcaacgacaacuccaccgcgacgcucugccuggggcaccacgccgucccgaacggcaccaucgugaagaccaucaccaacgaccagaucgaggugacgaacgccaccgagcugguccagagcuccagcaccggggagaucugcgacagcccccaccagauccucgacggcgagaacugcacccugaucgacgcccugcucggggacccccagugcgacggcuuccagaacaagaagugggaccuguucguggagcgcagcaaggccuacuccaacugcuaccccuacgacgugccggacuacgcgagccugcggucccucgucgccagcuccggcacgcuggaguucaacaacgagagcuucaacuggaccggggugacccagaacggcaccuccagcgccugcauccgccgguccaacagcuccuucuucagccgccugaacuggcucacgcaccugaacuucaaguaccccgcccugaacgugaccaugcccaacaacgagcaguucgacaagcucuacaucuggggcguccaccaccccgggaccgacaaggaccagaucuuccuguacgcgcaguccagcgggcggaucaccgugagcacgcgccggucccagcaggccgugaucccgaacaucggcagccgcccccggauccgcaacauccccucccggaucagcaucuacuggaccaucgucaagcccggcgacauccugcucaucaacuccaccgggaaccugaucgccccgcgcggcuacuucaagauccggagcgggaaguccagcaucaugcgcuccgacgcccccaucggcaagugcaacagcgagugcaucacccccaacggcuccauccccaacgacaagccguuccagaacgugaaccggaucacguacggggccugcccccgcuacgugaagcagagcacccugaagcucgcgaccggcaugcggaacguccccgagaagcagacccgcgggaucuucggcgccaucgccggguucaucgagaacggcugggagggcaugguggacgggugguacggcuuccggcaccagaacuccgaggggcgcggccaggccgccgaccugaaguccacgcaggcggccaucgaccagaucaacgggaagcugaaccggcucaucggcaagaccaacgagaaguuccaccagaucgagaaggaguucuccgagguggagggccgcauccaggaccuggagaaguacgucgaggacaccaagaucgaccuguggagcuacaacgccgagcuccugguggcccuggagaaccagcacaccaucgaccucacggacuccgagaugaacaagcuguucgagaagaccaagaagcagcugcgcgagaacgccgaggacauggggaacggcugcuucaagaucuaccacaagugcgacaacgcgugcaucgggagcauccggaacggcaccuacaaccacgacguguaccgcgacgaggcccucaacaaccgguuccagaucaagggggucgagcugaaguccggcuacaaggacuggauccuguggaucagcuucgccaucagcugcuuccuccugugcguggcccugcucggcuucaucaugugggccugccagaaggggaacauccgcugcaacaucugcaucuga

SEQ ID NO: 74628 - RNA, 1701 nt, Artificial Sequence; identical to SEQ ID NO: 71806
  derived and/or modified CDS sequence (opt1) from hemagglutinin__InfluenzaA__AHC58074

SEQ ID NO: 74629 - RNA, 1701 nt, Artificial Sequence; identical to SEQ ID NO: 71806
  derived and/or modified CDS sequence (opt1) from hemagglutinin__InfluenzaA__AHC58098

SEQ ID NO: 74630 - RNA, 1701 nt, Artificial Sequence; identical to SEQ ID NO: 71806
  derived and/or modified CDS sequence (opt1) from hemagglutinin__InfluenzaA__AHC58110

SEQ ID NO: 74631 - RNA, 1701 nt, Artificial Sequence; identical to SEQ ID NO: 71806
  derived and/or modified CDS sequence (opt1) from hemagglutinin__InfluenzaA__AHC58126

SEQ ID NO: 74632 - RNA, 1701 nt, Artificial Sequence; identical to SEQ ID NO: 71806
  derived and/or modified CDS sequence (opt1) from hemagglutinin__InfluenzaA__AHC58138

SEQ ID NO: 74633 - RNA, 1701 nt, Artificial Sequence; identical to SEQ ID NO: 71806
  derived and/or modified CDS sequence (opt1) from hemagglutinin__InfluenzaA__AHC58162

SEQ ID NO: 74634 - RNA, 1701 nt, Artificial Sequence; identical to SEQ ID NO: 73098
  derived and/or modified CDS sequence (opt1) from hemagglutinin__InfluenzaA__AHC58186

SEQ ID NO: 74635 - RNA, 1701 nt, Artificial Sequence
  derived and/or modified CDS sequence (opt1) from hemagglutinin__InfluenzaA__AHC58198
augaagaccaucaucgcccugagcuacauccucugccugguguucgcccagaagcugcccggcaacgacaacuccaccgcgacgcucugccuggggcaccacgccgucccgaacggcaccaucgugaagaccaucaccaacgaccagaucgaggugacgaacgccaccgagcugguccagaacagcuccaccggggagaucugcgacagcccccaccagauccucgacggcgagaacugcacccugaucgacgcccugcucggggacccccagugcgacggcuuccagaacaagaagugggaccuguucguggagcgcuccaaggccuacagcaacugcuaccccuacgacgugccggacuacgcgucccugcggagccucgucgccuccagcggcacgcuggaguucaacaacgaguccuucaacuggaccggggugacccagaacggcaccagcuccgccugcauccgccggagcaacaacuccuucuucagccgccugaacuggcucacgcaccugaacuucaaguaccccgcccugaacgugaccaugcccaacaacgagcaguucgacaagcucuacaucuggggcguccaccaccccgggaccgacaaggaccagaucuuccuguacgcgcaggccuccgggcggaucaccgugagcacgaagcgcucccagcaggccgugaucccgaacaucggcagccggccccgcguccggaacauccccagccgcaucuccaucuacuggaccaucgugaagcccggcgacauccugcucaucaacagcaccgggaaccugaucgccccgcggggcuacuucaagauccgcuccggcaagagcuccaucaugcggagcgacgcccccaucgggaagugcaacuccgagugcaucacccccaacggcagcauccccaacgacaagccguuccagaacgugaaccgcaucacguacggggcgugcccccgguacgucaagcagaacacccugaagcucgccaccggcaugcgcaacgugcccgagaagcagacccgggggaucuucggcgccaucgccggguucaucgagaacggcugggagggcaugguggacgggugguacggcuuccgccaccagaacuccgaggggcggggccaggccgcggaccucaagagcacgcaggccgccaucgaccagaucaacgggaagcugaaccgccugaucggcaagaccaacgagaaguuccaccagaucgagaaggaguucuccgaggucgagggccggauccagaaccuggagaaguacguggaggacaccaagaucgaccuguggagcuacaacgccgagcuccugguggcccuggagaaccagcacaccaucgaccucacggacuccgagaugaacaagcuguucgagaagaccaagaagcagcugcgcgagaacgcggaggacauggggaacggcugcuucaagaucuaccacaagugcgacaacgccugcaucgggagcauccgcaacggcaccuacgaccacgacgucuaccgggacgaggcccucaacaaccgcuuccagaucaaggggguggagcugaaguccggcuacaaggacuggauccuguggaucagcuucgccaucuccugcuuccuccugugcguggcccugcucggcuucaucaugugggacugccagaaggggaacauccggugcaacaucugcaucuga

SEQ ID NO: 74636 - RNA, 1701 nt, Artificial Sequence
  derived and/or modified CDS sequence (opt1) from hemagglutinin__InfluenzaA__AHC58210
augaagaccaucaucgcccugagcuacauccucugccugguguucgcccagaagcugcccggcaacgacaacuccaccgcgacgcucugccuggggcaccacgccgucccgaacggcaccaucgugaagaccaucaccaacgaccagaucgaggugacgaacgccaccgagcugguccagaacagcuccaccggggagaucugcgacagcccccaccagauccucgacggcgagaacugcacccugaucgacgcccugcucggggacccccagugcgacggcuuccagaacaagaagugggaccuguucguggagcgcuccaaggccuacagcaacugcuaccccuacgacgugccggacuacgcgucccugcggagccucgucgccuccagcggcacgcuggaguucaacaacgaguccuucaacugggccggggugacccagaacggcaccagcuccgccugcauccgccggagcaacaacuccuucuucagccgccugaacuggcucacccaccugaacuucaaguaccccgcgcugaacgugacgaugcccaacaacgagcaguucgacaagcucuacaucuggggcguccaccaccccgggaccgacaaggaccagaucuuccuguacgcccaggccuccgggcggaucaccgugagcaccaagcgcucccagcaggccgugaucccgaacaucggcagccggccccgcguccggaacauccccagccgcaucuccaucuacuggacgaucgugaagcccggcgacauccugcucaucaacagcaccgggaaccugaucgccccgcggggcuacuucaagauccgcuccggcaagagcuccaucaugcggagcgacgcgcccaucgggaagugcaacuccgagugcaucacccccaacggcagcauccccaacgacaagccguuccagaacgugaaccgcaucaccuacggggccugcccccgguacgucaagcagaacacgcugaagcucgccaccggcaugcgcaacgugcccgagaagcagacccgggggaucuucggcgccaucgccggguucaucgagaacggcugggagggcaugguggacgggugguacggcuuccgccaccagaacuccgaggggcggggccaggcggccgaccucaagagcacccaggccgccaucgaccagaucaacgggaagcugaaccgccugaucggcaagacgaacgagaaguuccaccagaucgagaaggaguucuccgaggucgagggccggauccaggaccuggagaaguacguggaggacaccaagaucgaccuguggagcuacaacgccgagcuccugguggcgcuggagaaccagcacaccaucgaccucaccgacuccgagaugaacaagcuguucgagaagacgaagaagcagcugcgcgagaacgccgaggacauggggaacggcugcuucaagaucuaccacaagugcgacaacgccugcaucgggagcauccgcaacggcaccuacgaccacgacgucuaccgggacgaggcccucaacaaccgcuuccagaucaaggggguggagcugaaguccggcuacaaggacuggauccuguggaucagcuucgccaucuccugcuuccuccugugcguggcgcugcucggcuucaucaugugggccugccagaaggggaacauccggugcaacaucugcaucuga

SEQ ID NO: 74637 - RNA, 1701 nt, Artificial Sequence; identical to SEQ ID NO: 71006
  derived and/or modified CDS sequence (opt1) from hemagglutinin__InfluenzaA__AHC58234

SEQ ID NO: 74638 - RNA, 1701 nt, Artificial Sequence; identical to SEQ ID NO: 71806
  derived and/or modified CDS sequence (opt1) from hemagglutinin__InfluenzaA__AHC58246

SEQ ID NO: 74639 - RNA, 1701 nt, Artificial Sequence; identical to SEQ ID NO: 71006
  derived and/or modified CDS sequence (opt1) from hemagglutinin__InfluenzaA__AHC58258

SEQ ID NO: 74640 - RNA, 1701 nt, Artificial Sequence; identical to SEQ ID NO: 70879
  derived and/or modified CDS sequence (opt1) from hemagglutinin__InfluenzaA__AHC58270

SEQ ID NO: 74641 - RNA, 1701 nt, Artificial Sequence
  derived and/or modified CDS sequence (opt1) from hemagglutinin__InfluenzaA__AHC58372
augaagaccaucaucgcccugagcuacauccucugccugguguucgcccagaagcugcccggcaacgacaacuccaccgcgacgcucugccuggggcaccacgccgucccgaacggcaccaucgugaagaccaucaccaacgaccagaucgaggugacgaacgccaccgagcugguccagagcuccagcaccggggagaucugcgacagcccccaccagauccucgacggcgagaacugcacccugaucgacgcccugcucggggacccccagugcgacggcuuccagaacaagaagugggaccuguucguggagcgcagcaaggccuacuccaacugcuaccccuacgacgugccggacuacgcgagccugcggucccucgucgccagcuccggcacgcuggaguucaacaacgagagcuucaacuggaccggggugacccagaacggcaccuccagcgccugcauccgccgguccaacagcuccuucuucagccgccugaacuggcucacgcaccugaacuucaaguaccccgcccugaacgugaccaugcccaacaacgagcaguucgacaagcucuacaucuggggcguccaccaccccgggaccgacaaggaccagaucuuccuguacgcgcaguccagcgggcggaucaccgugagcacgaagcgcucccagcaggccgugaccccgaacaucggcagccggccccgcauccggaacauccccucccgcaucagcaucuacuggaccaucgucaagcccggcgacauccugcucaucaacuccaccgggaaccugaucgccccgcggggcuacuucaagauccgcagcgggaaguccagcaucaugcgguccgacgcccccaucggcaagugcaacagcgagugcaucacgcccaacggcuccauccccaacgacaagccguuccagaacgugaaccgcaucaccuacggggccugcccccgguacgugaagcagagcacccugaagcucgcgaccggcaugcgcaacguccccgagaagcagacgcgggggaucuucggcgccaucgccggguucaucgagaacggcugggagggcaugguggacgggugguacggcuuccgccaccagaacuccgaggggcggggccaggccgccgaccugaaguccacccaggcggccaucgaccagaucaacgggaagcugaaccgccucaucggcaagaccaacgagaaguuccaccagaucgagaaggaguucuccgagguggagggccggauccaggaccuggagaaguacgucgaggacaccaagaucgaccuguggagcuacaacgccgagcuccugguggcccuggagaaccagcacacgaucgaccucaccgacuccgagaugaacaagcuguucgagaagaccaagaagcagcugcgcgagaacgccgaggacauggggaacggcugcuucaagaucuaccacaagugcgacaacgcgugcaucgggagcauccgcaacggcaccuacaaccacgacguguaccgggacgaggcccucaacaaccgcuuccagaucaagggggucgagcugaaguccggcuacaaggacuggauccuguggaucagcuucgccaucagcugcuuccuccugugcguggcccugcucggcuucaucaugugggccugccagaaggggaacauccggugcaacaucugcaucuga

SEQ ID NO: 74642 - RNA, 1701 nt, Artificial Sequence
  derived and/or modified CDS sequence (opt1) from hemagglutinin__InfluenzaA__AHC58396
augaagaccaucaucgcccugagcuacauccucugccugguguucgcccagaagcugcccggcaacgacaacuccaccgcgacgcucugccuggggcaccacgccgucccgaacggcaccaucgugaagaccaucaccaacgaccagaucgaggugacgaacgccaccgagcugguccagagcuccagcaccggggagaucugcaacagcccccaccagauccucgacggcgagaacugcacccugaucgacgcccugcucggggacccccagugcgacggcuuccagaacaagaagugggaccuguucguggagcgcagcaaggcccacuccaacugcuaccccuacgacgugccggacuacgcgagccugcggucccucgucgccagcuccggcacgcuggaguucaacaacgagagcuucaacuggaccggggugacccagaacggcaccuccagcgccugcauccgcggguccaacaacagcuucuucucccggcugaacuggcucacgcaccugaacuucaaguaccccgcccugaacgugaccaugcccaacaacgagcaguucgacaagcucuacaucuggggcguccaccaccccgggaccgacaaggaccagaucuuccuguacgcgcaggccagcggccgcaucaccguguccacgaagcggagccagcaggccgugaucccgaacaucggcagccgcccccggguccgcaacauccccucccgggugagcaucuacuggaccaucgugaagcccggggacauccugcucaucaacuccaccggcaaccugaucgccccgcgcggguacuucaagauccggagcggcaaguccagcaucaugcgcuccgacgcccccaucggcaagugcaacagcgcgugcaucacccccaacggguccauccccaacgacaagccguuccagaacgucaaccggaucacguacggcgccugcccccgcuacgugaagcagaacacccugaagcucgccaccgggaugcggaacgugcccgagaagcagacccgcggcaucuucggggccaucgccggcuucaucgagaacggcugggaggggauggucgacggcugguacggguuccggcaccagaacagcgagggccgcgggcaggcggccgaccugaaguccacgcaggccgccaucgaccagaucaacggcaagcugaaccggcucaucggcaagaccaacgagaaguuccaccagaucgagaaggaguucagcgagguggaggggcgcauccaggaccuggagaaguacguggaggacaccaagaucgaccugugguccuacaacgccgagcuccuggucgcgcuggagaaccagcacaccaucgaccucacggacagcgagaugaacaagcuguucgagaagaccaagaagcagcugcgggagaacgccgaggacaugggcaacgggugcuucaagaucuaccacaagugcgacaacgccugcaucggcuccauccgcaacgggaccuacgaccacgacguguaccgcgacgaggcccucaacaaccgguuccagaucaagggcguggagcugaaguccggcuacaaggacuggauccuguggaucuccuucgccaucagcugcuuccuccugugcgucgcgcugcucggguucaucaugugggccugccagaagggcaacauccgcugcaacaucugcaucuga

SEQ ID NO: 74643 - RNA, 1701 nt, Artificial Sequence; identical to SEQ ID NO: 71806
  derived and/or modified CDS sequence (opt1) from hemagglutinin__InfluenzaA__AHC58408

SEQ ID NO: 74644 - RNA, 1701 nt, Artificial Sequence; identical to SEQ ID NO: 73098
  derived and/or modified CDS sequence (opt1) from hemagglutinin__InfluenzaA__AHC58420

SEQ ID NO: 74645 - RNA, 1701 nt, Artificial Sequence; identical to SEQ ID NO: 73098
  derived and/or modified CDS sequence (opt1) from hemagglutinin__InfluenzaA__AHC58432

SEQ ID NO: 74646 - RNA, 1701 nt, Artificial Sequence; identical to SEQ ID NO: 71006
  derived and/or modified CDS sequence (opt1) from hemagglutinin__InfluenzaA__AHC58444

SEQ ID NO: 74647 - RNA, 1701 nt, Artificial Sequence; identical to SEQ ID NO: 74642
  derived and/or modified CDS sequence (opt1) from hemagglutinin__InfluenzaA__AHC58456

SEQ ID NO: 74648 - RNA, 1701 nt, Artificial Sequence
  derived and/or modified CDS sequence (opt1) from hemagglutinin__InfluenzaA__AHC58468
augaaggccauccuggugguccuccuguacaccuucgccaccgcgaacgccgacacgcugugcaucggcuaccacgccaacaacagcaccgacaccguggacaccgugcucgagaagaacgucacggugacccacuccgugaaccugcuggaggacaagcacaacgggaagcucugcaagcugcgcggcgucgcgccccugcaccucgggaagugcaacaucgccggcuggauccuggggaacccggagugcgagagccuguccaccgccagcuccuggagcuacaucguggagaccuccagcuccgacaacggcacgugcuaccccggcgacuucaucaacuacgaggagcuccgggagcagcugagcuccgugagcuccuucgagcgcuucgagaucuuccccaagaccagcuccuggcccaaccacgacagcaacaagggggucaccgccgccugcccgcaggccggcgcgaaguccuucuacaagaaccugaucuggcucgugaagaaggggaacagcuaccccaagcuguccaagagcuacaucaacgacaagggcaaggaggugcugguccucugggggauccaccaccccagcaccuccgccgaccagcagagccuguaccagaacgccgacgccuacguguucgugggcacguccaaguacagcaagaaguucaagcccgagaucgccguccggccgaaggugcgcgaccaggagggccggaugaacuacuacuggacccugguggagcccggggacaagaucaccuucgaggcgaccggcaaccuccuggucccccgcuacgccuucgccauggagcggaacgccggguccggcaucaucaucagcgacacgcccgugcacgacugcaacacgaccugccagaccccgaagggcgccaucaacaccucccugcccuuccagaacauccaccccaucaccaucgggaagugccccaaguacgucaagagcaccaagcuccgccuggcgaccggccugcggaacgugccguccauccagagccgcgggcuguucggcgccaucgccggguucaucgagggcggcuggacggggaugguggacggcugguacggguaccaccaccagaacgcccagggcuccggguacgccgcggaccucaagagcacccagaacgccaucgacaagaucaccaacaaggugaacuccgucaucgagaagaugaacacccaguucacggccgugggcaaggaguucaaccaccuggagcggcgcaucgagaaccucaacaagaaggucgacgacggcuuccuggacaucuggaccuacaacgccgagcugcucgugcugcuggagaacgagcggacccucgacuaccacgacagcaacgugaagaaccuguacgagaagguccgcucccagcugaagaacaacgccaaggagaucgggaacggcugcuucgaguucuaccacaagugcgacaacacgugcauggagagcgugaagaacgggaccuacgacuaccccaaguacuccgaggaggcgaagcucaaccgggaggagaucgacggcgugaagcuggagagcacccgcaucuaccagauccuggccaucuacuccaccgucgccagcagccucgugcugguggucucccugggggccaucagcuucuggaugugcuccaacggcagccuccagugccggaucugcaucuga

SEQ ID NO: 74649 - RNA, 1701 nt, Artificial Sequence
  derived and/or modified CDS sequence (opt1) from hemagglutinin__InfluenzaA__AHC58479
augaagaccaucaucgcccugagcuacauccucugccugguguucgcccagaagcugcccggcaacgacaacuccaccgcgacgcucugccuggggcaccacgccgucccgaacggcaccaucgugaagaccaucaccaacgaccagaucgaggugacgaacgccaccgagcugguccagaacagcuccaccggggagaucugcgacagcccccaccagaucaucgacggcgagaacugcacccucaucgacgcccugcugggggacccccagugcgacggcuuccagaacaagaagugggaccucuucguggagcgcuccaaggccuacagcaacugcuaccccuacgacgugccggacuacgcgucccugcggagccuggucgccuccagcggcacgcucgaguucaacaacgaguccuucaacuggaccggggugacccagaacggcaccagcuccgccugcauccgccggagcaacaacuccuucuucagccgccugaacuggcugacgcaccucaacuucaaguaccccgcccugaacgugaccaugcccaacaacgagcaguucgacaagcuguacaucuggggcguccaccaccccgggaccgacaaggaccagaucuuccucuacgcgcaggccuccgggcggaucaccgugagcacgaagcgcucccagcaggccgugaucccgaacaucggcagccggccccgcguccggaacauccccagccgcaucuccaucuacuggaccaucgugaagcccggcgacauccugcugaucaacagcaccgggaaccucaucgccccgcggggcuacuucaagauccgcuccggcaagagcuccaucaugcggagcgacgcccccaucgggaagugcaacuccgagugcaucacccccaacggcagcauccccaacgacaagccguuccagaacgugaaccgcaucacguacggggcgugcccccgguacgucaagcagaacacccugaagcuggccaccggcaugcgcaacgugcccgagaagcagacccgggggaucuucggcgccaucgccggguucaucgagaacggcugggagggcaugguggacgggugguacggcuuccgccaccagaacuccgaggggcggggccaggccgcggaccucaagagcacgcaggccgccaucaaccagaucaacgggaagcugaaccgccugaucggcaagaccaacgagaaguuccaccagaucgagaaggaguucuccgaggucgagggccggauccaggaccucgagaaguacguggaggacaccaagaucgaccuguggagcuacaacgccgagcugcucguggcccuggagaaccagcacaccaucgaccugacggacuccgagaugaacaagcuguucgagaagaccaagaagcagcuccgcgagaacgcggaggacauggggaacggcugcuucaagaucuaccacaagugcgacaacgccugcaucgggagcauccgcaacggcaccuacgaccacgacgucuaccgggacgaggcccugaacaaccgcuucaagaucaaggggguggagcucaaguccggcuacaaggacuggauccuguggaucagcuucgccaucuccugcuuccugcucugcguggcccugcugggcuucaucaugugggcgugccagaaggggaacauccggugcaacaucugcaucuga

SEQ ID NO: 74650 - RNA, 1701 nt, Artificial Sequence; identical to SEQ ID NO: 74642
  derived and/or modified CDS sequence (opt1) from hemagglutinin__InfluenzaA__AHC58491

SEQ ID NO: 74651 - RNA, 1701 nt, Artificial Sequence; identical to SEQ ID NO: 71006
  derived and/or modified CDS sequence (opt1) from hemagglutinin__InfluenzaA__AHC58515

SEQ ID NO: 74652 - RNA, 1701 nt, Artificial Sequence; identical to SEQ ID NO: 71806
  derived and/or modified CDS sequence (opt1) from hemagglutinin__InfluenzaA__AHC58527

SEQ ID NO: 74653 - RNA, 1701 nt, Artificial Sequence
  derived and/or modified CDS sequence (opt1) from hemagglutinin__InfluenzaA__AHC58563
augaagaccaucaucgcccugagcuacauccucugccugguguucgcccagaagcugcccggcaacgacaacuccaccgcgacgcucugccuggggcaccacgccgucccgaacggcaccaucgugaagaccaucaccaacgaccagaucgaggugacgaacgccaccgagcugguccagaacagcuccaccggggagaucugcgacagcccccaccagaucaucgacggcgagaacugcacccucaucgacgcccugcugggggacccccagugcgacggcuuccagaacaagaagugggaccucuucguggagcgcuccaaggccuacagcaacugcuaccccuacgacgugccggacuacgcgucccugcggagccuggucgccuccagcggcacgcucgaguucaacaacgaguccuucaacuggaccggggugacccagaacggcaccagcuccgccugcauccgccggagcaacaacuccuucuucagccgccugaacuggcugacgcaccucaacuucaaguaccccgcccugaacgugaccaugcccaacaacgagcaguucgacaagcuguacaucuggggcguccaccaccccgggaccgacaaggaccagaucuuccucuacgcgcaggccuccgggcggaucaccgugagcacgaagcgcucccagcaggccgugaucccgaacaucggcagccggccccgcguccggaacauccccagccgcaucuccaucuacuggaccaucgugaagcccggcgacauccugcugaucaacagcaccgggaaccucaucgccccgcggggcuacuucaagauccgcuccggcaagagcuccaucaugcggagcgacgcccccaucgggaagugcaacuccgagugcaucacccccaacggcagcauccccaacgacaagccguuccagaacgugaaccgcaucacguacggggcgugcccccgguacgucaagcagaacacccugaagcuggccaccggcaugcgcaacgugcccgagaagcagacccgggggaucuucggcgccaucgccggguucaucgagaacggcugggagggcaugguggacgggugguacggcuuccgccaccagaacuccgaggggcggggccaggccgcggaccucaagagcacgcaggccgccaucgaccagaucaacgggaagcugaaccgccugaucggcaagaccaacgagaaguuccaccagaucgagaaggaguucuccgaggucgagggccggauccaggaccucgagaaguacguggaggacaccaagaucgaccuguggagcuacaacgccgagcugcucguggcccuggagaaccagcacaccaucgaccugacggacuccgagaugaacaagcuguucgagaagaccaagaagcagcuccgcgagaacgcggaggacauggggaacggcugcuucaagaucuaccacaagugcgacaacgccugcaucgggagcauccgcaacggcaccuacgaccacgacgucuaccgggacgaggcccugaacaaccgcuuccagaucaaggggguggagcucaaguccggcuacaaggacuggauccuguggaucagcuucgccaucuccugcuuccugcucugcguggcccugcugggcuucaucaugugggcgugccagaaggggaacauccggugcaacaucugcaucuga

SEQ ID NO: 74654 - RNA, 1701 nt, Artificial Sequence; identical to SEQ ID NO: 71806
  derived and/or modified CDS sequence (opt1) from hemagglutinin__InfluenzaA__AHC58575

SEQ ID NO: 74655 - RNA, 1701 nt, Artificial Sequence; identical to SEQ ID NO: 70879
  derived and/or modified CDS sequence (opt1) from hemagglutinin__InfluenzaA__AHC58587

SEQ ID NO: 74656 - RNA, 1701 nt, Artificial Sequence; identical to SEQ ID NO: 71006
  derived and/or modified CDS sequence (opt1) from hemagglutinin__InfluenzaA__AHC58599

SEQ ID NO: 74657 - RNA, 1701 nt, Artificial Sequence; identical to SEQ ID NO: 71806
  derived and/or modified CDS sequence (opt1) from hemagglutinin__InfluenzaA__AHC58611

SEQ ID NO: 74658 - RNA, 1701 nt, Artificial Sequence; identical to SEQ ID NO: 71806
  derived and/or modified CDS sequence (opt1) from hemagglutinin__InfluenzaA__AHC58623

SEQ ID NO: 74659 - RNA, 1701 nt, Artificial Sequence; identical to SEQ ID NO: 71806
  derived and/or modified CDS sequence (opt1) from hemagglutinin__InfluenzaA__AHC58647

SEQ ID NO: 74660 - RNA, 1701 nt, Artificial Sequence; identical to SEQ ID NO: 71006
  derived and/or modified CDS sequence (opt1) from hemagglutinin__InfluenzaA__AHC58659

SEQ ID NO: 74661 - RNA, 1701 nt, Artificial Sequence; identical to SEQ ID NO: 70879
  derived and/or modified CDS sequence (opt1) from hemagglutinin__InfluenzaA__AHC58671

SEQ ID NO: 74662 - RNA, 1701 nt, Artificial Sequence; identical to SEQ ID NO: 73098
  derived and/or modified CDS sequence (opt1) from hemagglutinin__InfluenzaA__AHC58683

SEQ ID NO: 74663 - RNA, 1701 nt, Artificial Sequence; identical to SEQ ID NO: 70879
  derived and/or modified CDS sequence (opt1) from hemagglutinin__InfluenzaA__AHC58695

SEQ ID NO: 74664 - RNA, 1701 nt, Artificial Sequence; identical to SEQ ID NO: 73098
  derived and/or modified CDS sequence (opt1) from hemagglutinin__InfluenzaA__AHC58707

SEQ ID NO: 74665 - RNA, 1701 nt, Artificial Sequence; identical to SEQ ID NO: 73098
  derived and/or modified CDS sequence (opt1) from hemagglutinin__InfluenzaA__AHC58719

SEQ ID NO: 74666 - RNA, 1701 nt, Artificial Sequence; identical to SEQ ID NO: 74642
  derived and/or modified CDS sequence (opt1) from hemagglutinin__InfluenzaA__AHC58731

SEQ ID NO: 74667 - RNA, 1701 nt, Artificial Sequence
  derived and/or modified CDS sequence (opt1) from hemagglutinin__InfluenzaA__AHC58743
augaagaccaucaucgccuggagcuacauccugugccucguguucgcccagaagcugcccggcaacgacaacuccaccgcgacgcugugccucgggcaccacgccgucccgaacggcaccaucgugaagaccaucaccaacgaccagaucgaggugacgaacgccaccgagcugguccagaacagcuccaccggggagaucugcgacagcccccaccagauccuggacggcgagaacugcacccucaucgacgcccugcugggggacccccagugcgacggcuuccagaacaagaagugggaccucuucguggagcgcuccaaggccuacagcaacugcuaccccuacgacgugccggacuacgcgucccugcggagccuggucgccuccagcggcacgcucgaguucaacaacgaguccuucaacuggaccggggugacccagaacggcaccagcuccgccugcauccgccggagcaacaacuccuucuucagccgccugaacuggcugacgcaccucaacuucaaguaccccgcccugaacgugaccaugcccaacaacgagcaguucgacaagcuguacaucuggggcguccaccaccccgggaccgacaaggaccagaucuuccucuacgcgcaggccuccgggcggaucaccgugagcacgaagcgcucccagcaggccgugaucccgaacaucggcagccggccccgcguccggaacauccccagccgcaucuccaucuacuggaccaucgugaagcccggcgacauccugcugaucaacagcaccgggaaccucaucgccccgcggggcuacuucaagauccgcuccggcaagagcuccaucaugcggagcgacgcccccaucgggaagugcaacuccgagugcaucacccccaacggcagcauccccaacgacaagccguuccagaacgugaaccgcaucacguacggggcgugcccccgguacgucaagcagaacacccugaagcuggccaccggcaugcgcaacgugcccgagaagcagacccgggggaucuucggcgccaucgccggguucaucgagaacggcugggagggcaugguggacgggugguacggcuuccgccaccagaacuccgaggggcggggccaggccgcggaccucaagagcacgcaggccgccaucgaccagaucaacgggaagcugaaccgccugaucggcaagaccaacgagaaguuccaccagaucgagaaggaguucuccgaggucgagggccggauccaggaccucgagaaguacguggaggacaccaagaucgaccuguggagcuacaacgccgagcugcucguggcccuggagaaccagcacaccaucgaccugacggacuccgagaugaacaagcuguucgagaagaccaagaagcagcuccgcgagaacgcggaggacauggggaacggcugcuucaagaucuaccacaagugcgacaacgccugcaucgggagcauccgcaacggcaccuacgaccacgacgucuaccgggacgaggcccugaacaaccgcuuccagaucaaggggguggagcucaaguccggcuacaaggacuggauccuguggaucagcuucgccaucuccugcuuccugcucugcguggcccugcugggcuucaucaugugggcgugccagaaggggaacauccggugcaacaucugcaucuga

SEQ ID NO: 74668 - RNA, 1701 nt, Artificial Sequence; identical to SEQ ID NO: 74642
  derived and/or modified CDS sequence (opt1) from hemagglutinin__InfluenzaA__AHC58755

SEQ ID NO: 74669 - RNA, 1701 nt, Artificial Sequence; identical to SEQ ID NO: 70879
  derived and/or modified CDS sequence (opt1) from hemagglutinin__InfluenzaA__AHC58779

SEQ ID NO: 74670 - RNA, 1701 nt, Artificial Sequence; identical to SEQ ID NO: 74641
  derived and/or modified CDS sequence (opt1) from hemagglutinin__InfluenzaA__AHC58791

SEQ ID NO: 74671 - RNA, 1701 nt, Artificial Sequence
  derived and/or modified CDS sequence (opt1) from hemagglutinin__InfluenzaA__AHC58803
augaagaccaucaucgcccugagcuacauccucugccugguguucgcccagaagcugcccggcaacgacaacuccaccgcgacgcucugccuggggcaccacgccgucccgaacggcaccaucgugaagaccaucaccaacgaccagaucgaggugacgaacgccaccgagcugguccagaacagcuccaccggggagaucugcgacagcccccaccagaucaucgacggcgagaacugcacccucaucgacgcccugcugggggacccccagugcgacggcuuccagaacaagaagugggaccucuucguggagcgcuccaaggccuacagcaacugcuaccccuacgacgugccggacuacgcgucccugcggagccuggucgccuccagcggcacgcucgaguucaacaacgaguccuucaacuggaccggggugacccagaacggcaccagcuccgccugcauccgccggagcaacaacuccuucuucagccgccugaacuggcugacgcaccucaacuucaaguaccccgcccugaacgugaccaugcccaacaacgagcaguucgacaagcuguacaucuggggcguccaccaccccgggaccgacaaggaccagaucuuccucuacgcgcaggccuccgggcggaucaccgugagcacgaagcgcucccagcaggccgugaucccgaacaucggcagccggccccgcguccggaacauccccagccgcaucuccaucuacuggaccaucgugaagcccggcgacauccugcugaucaacagcaccgggaaccucaucgccccgcggggcuacuucaagauccgcuccggcaagagcuccaucaugaaguccgacgcccccaucgggaagugcaacagcgagugcaucacccccaacggcagcauccccaacgacaagccguuccagaacgugaaccggaucacguacggggcgugcccccgcuacgucaagcagaacacccugaagcuggccaccggcaugcggaacgugcccgagaagcagacccgcgggaucuucggcgccaucgccggguucaucgagaacggcugggagggcaugguggacgggugguacggcuuccggcaccagaacuccgaggggcgcggccaggccgcggaccucaagagcacgcaggccgccaucgaccagaucaacgggaagcugaaccggcugaucggcaagaccaacgagaaguuccaccagaucgagaaggaguucuccgaggucgagggccgcauccaggaccucgagaaguacguggaggacaccaagaucgaccuguggagcuacaacgccgagcugcucguggcccuggagaaccagcacaccaucgaccugacggacuccgagaugaacaagcuguucgagaagaccaagaagcagcuccgggagaacgcggaggacauggggaacggcugcuucaagaucuaccacaagugcgacaacgccugcaucgggagcauccgcaacggcaccuacgaccacgacgucuaccgcgacgaggcccugaacaaccgguucaagaucaaggggguggagcucaaguccggcuacaaggacuggauccuguggaucagcuucgccaucuccugcuuccugcucugcguggcccugcugggcuucaucaugugggcgugccagaaggggaacauccgcugcaacaucugcaucuga

SEQ ID NO: 74672 - RNA, 1701 nt, Artificial Sequence
  derived and/or modified CDS sequence (opt1) from hemagglutinin__InfluenzaA__AHC58815
augaagaccaucaucgcccugagcuacauccucugccugguguucgcccagaagcugcccggcaacgacaacuccaccgcgacgcucugccuggggcaccacgccgucccgaacggcaccaucgugaagaccaucaccaacgaccagaucgaggugacgaacgccaccgagcugguccagagcuccagcaccggggagaucugcaacagcccccaccagauccucgacggcgggaacugcacccugaucgacgcccugcucggcgacccccagugcgacggcuuccagaacaagaagugggaccuguucguggagcgcagcaaggccuacuccaacugcuaccccuacgacgugccggacuacgcgagccugcggucccucgucgccagcuccgggacgcuggaguucaacaacgagagcuucaacuggaccggcgugacccagaacgggaccuccagcgccugcauccgccgguccaacaacagcuucuucucccgccugaacuggcucacgcaccugaacuucaaguaccccgcccugaacgugaccaugcccaacaacgagcaguucgacaagcucuacaucuggggcguccaccaccccgggaccgacaaggaccagaucuuccuguacgcgcaggccagcggccggaucaccguguccacgaagcgcagccagcaggccgugaucccgaacaucggcagccggccccgcguccggaacauccccucccgcaucagcaucuacuggaccaucgugaagcccggggacauccugcucaucaacuccaccggcaaccugaucgccccgcggggguacuucaagauccgcagcggcaaguccagcaucaugcgguccgacgcccccaucggcaagugcaacagcgagugcaucacccccaacggguccauccccaacgacaagccguuccagaacgugaaccgcaucacguacggcgcgugcccccgguacgucaagcagaacacccugaagcucgccaccgggaugcgcaacgugcccgagaagcagacccggggcaucuucggggccaucgccggcuucaucgagaacggcugggaggggaugguggacggcugguacggguuccgccaccagaacagcgagggccgggggcaggccgcggaccugaaguccacgcaggccgccaucgaccagaucaacggcaagcugaaccgccucaucggcaagaccaacgagaaguuccaccagaucgagaaggaguucagcgaggucgaggggcggauccaggaccuggagaaguacguggaggacaccaagaucgaccugugguccuacaacgccgagcuccugguggcccuggagaaccagcacaccaucgaccucacggacagcgagaugaacaagcuguucgagaagaccaagaagcagcugcgcgagaacgcggaggacaugggcaacgggugcuucaagaucuaccacaagugcgacaacgccugcaucggcuccauccgcaacgggaccuacgaccacaacgucuaccgggacgaggcccucaacaaccgcuuccagaucaagggcguggagcugaaguccggcuacaaggacuggauccuguggaucuccuucgccaucagcugcuuccuccugugcguggcccugcucggguucaucaugugggcgugccagaagggcaacauccggugcaacaucugcaucuga

SEQ ID NO: 74673 - RNA, 1701 nt, Artificial Sequence; identical to SEQ ID NO: 70879
  derived and/or modified CDS sequence (opt1) from hemagglutinin__InfluenzaA__AHC58827

SEQ ID NO: 74674 - RNA, 1701 nt, Artificial Sequence; identical to SEQ ID NO: 71806
  derived and/or modified CDS sequence (opt1) from hemagglutinin__InfluenzaA__AHC58839

SEQ ID NO: 74675 - RNA, 1701 nt, Artificial Sequence
  derived and/or modified CDS sequence (opt1) from hemagglutinin__InfluenzaA__AHC58863
augaagaccaucaucgcccugagcuacauccucugccugguguucgcccagaagcugcccggcaacgacaacuccaccgcgacgcucugccuggggcaccacgccgucagcaacggcaccaucgugaagaccaucaccaacgaccagaucgaggugacgaacgccaccgagcugguccaguccagcuccaccggggagaucugcaacagcccgcaccagauccucgacggcgagaacugcacccugaucgacgcccugcucggggacccccagugcgacggcuuccagaacaagaagugggaccuguucguggagcgcuccaaggcccacagcaacugcuaccccuacgacgugcccgacuacgcgucccugcggagccucgucgccuccagcggcacgcuggaguucaacaacgaguccuucaacuggaccggggugacccagaacggcaccagcuccgccugcauccgcgggagcaacaacuccuucuucagccggcugaacuggcucacgcaccugaacuucaaguacccggcccugaacgugaccaugcccaacaacgagcaguucgacaagcucuacaucuggggcguccaccaccccgggaccgacaaggaccagaucuuccuguacgcgcaggccuccggccgcaucaccgugagcacgaagcggagccagcaggccgugauccccaacaucggcucccgcccgcggguccgcaacauccccagccggguguccaucuacuggaccaucgugaagcccggggacauccugcucaucaacagcaccggcaaccugaucgcgccccgcggguacuucaagauccgguccggcaagagcuccaucaugcgcagcgacgccccgaucggcaagugcaacuccgccugcaucacccccaacgggagcauccccaacgacaagcccuuccagaacgucaaccggaucacguacggcgccugcccgcgcuacgugaagcagaacacccugaagcucgccaccgggaugcggaacgugcccgagaagcagacccgcggcaucuucggggccaucgccggcuucaucgagaacggcugggaggggaugauggacggcugguacggguuccggcaccagaacuccgagggccgcgggcaggcggccgaccucaagagcacgcaggccgccaucgaccagaucaacggcaagcugaaccggcugaucggcaagaccaacgagaaguuccaccagaucgagaaggaguucuccgaggucgaggggcgcauccaggaccuggagaaguacguggaggacaccaagaucgaccuguggagcuacaacgccgagcuccugguggcgcuggagaaccagcacaccaucgaccucacggacuccgagaugaacaagcuguucgagaagaccaagaagcagcugcgggagaacgccgaggacaugggcaacgggugcuucaagaucuaccacaagugcgacaacgccugcaucggcagcauccgcaacgggaccuacgaccacgacgucuaccgcgacgaggcccucaacaaccgguuccagaucaagggcguggagcugaaguccggcuacaaggacuggauccuguggaucagcuucgccaucuccugcuuccuccugugcguggcgcugcucggguucaucaugugggccugccagaagggcaacauccgcugcaacaucugcaucuga

SEQ ID NO: 74676 - RNA, 1701 nt, Artificial Sequence; identical to SEQ ID NO: 70879
  derived and/or modified CDS sequence (opt1) from hemagglutinin__InfluenzaA__AHC58875

SEQ ID NO: 74677 - RNA, 1701 nt, Artificial Sequence; identical to SEQ ID NO: 71806
  derived and/or modified CDS sequence (opt1) from hemagglutinin__InfluenzaA__AHC58887

SEQ ID NO: 74678 - RNA, 1701 nt, Artificial Sequence; identical to SEQ ID NO: 74642
  derived and/or modified CDS sequence (opt1) from hemagglutinin__InfluenzaA__AHC58899

SEQ ID NO: 74679 - RNA, 1701 nt, Artificial Sequence; identical to SEQ ID NO: 71806
  derived and/or modified CDS sequence (opt1) from hemagglutinin__InfluenzaA__AHC58981

SEQ ID NO: 74680 - RNA, 1701 nt, Artificial Sequence; identical to SEQ ID NO: 71806
  derived and/or modified CDS sequence (opt1) from hemagglutinin__InfluenzaA__AHC58993

SEQ ID NO: 74681 - RNA, 1701 nt, Artificial Sequence; identical to SEQ ID NO: 71806
  derived and/or modified CDS sequence (opt1) from hemagglutinin__InfluenzaA__AHC59005

SEQ ID NO: 74682 - RNA, 1701 nt, Artificial Sequence
  derived and/or modified CDS sequence (opt1) from hemagglutinin__InfluenzaA__AHC59017
augaagaccaucaucgcccugagcuacauccucugccugguguucgcccagaagcugcccggcaacgacaacuccaccgcgacgcucugccuggggcaccacgccgucccgaacggcaccaucgugaagaccaucaccaacgaccagaucgaggugacgaacgccaccgagcugguccagagcuccagcaccggggagaucugcaacagcccccaccagauccucgacggcgagaacugcacccugaucgacgcccugcucggggacccccagugcgacggcuuccagaacaagaagugggaccuguucguggagcgcuccaaggcccacuccaacugcuaccccuacgacgugccggacuacgcgagccugcggucccucgucgccagcuccggcacgcuggaguucaacaacgagagcuucaacuggaccggggugacccagaacggcaccuccagcgccugcauccgcggguccaacaacagcuucuucucccggcugaacuggcucacgcaccugaacuucaaguaccccgcccugaacgugaccaugcccaacaacgagcaguucgacaagcucuacaucuggggcguccaccaccccgggaccgacaaggaccagaucuuccuguacgcgcaggccagcggccgcaucaccguguccacgaagcggagccagcaggccgugaucccgaacaucggcagccgcccccggguccgcaacauccccucccgggugagcaucuacuggaccaucgugaagcccggggacauccugcucaucaacuccaccggcaaccugaucgccccgcgcggguacuucaagauccggagcggcaaguccagcaucaugcgcuccgacgcccccaucggcaagugcaacagcgcgugcaucacccccaacggguccauccccaacgacaagccguuccagaacgucaaccggaucacguacggcgccugcccccgcuacgugaagcagaacacccugaagcucgccaccgggaugcggaacgugcccgagaagcagacccgcggcaucuucggggccaucgccggcuucaucgagaacggcugggaggggauggucgacggcugguacggguuccggcaccagaacagcgagggccgcgggcaggcggccgaccugaaguccacgcaggccgccaucgaccagaucaacggcaagcugaaccggcucaucggcaagaccaacgagaaguuccaccagaucgagaaggaguucagcgagguggaggggcgcauccaggaccuggagaaguacguggaggacaccaagaucgaccugugguccuacaacgccgagcuccuggucgcgcuggagaaccagcacaccaucgaccucacggacagcgagauguccaagcuguucgagaagaccaagaagcagcugcgggagaacgccgaggacaugggcaacgggugcuucaagaucuaccacaagugcgacaacgccugcaucggcagcauccgcaacgggaccuacgaccacgacguguaccgcgacgaggcccucaacaaccgguuccagaucaagggcguggagcugaaguccggcuacaaggacuggauccuguggaucagcuucgccaucuccugcuuccuccugugcgucgcgcugcucggguucaucaugugggccugccagaagggcaacauccgcugcaacaucugcaucuga

SEQ ID NO: 74683 - RNA, 1701 nt, Artificial Sequence; identical to SEQ ID NO: 74642
  derived and/or modified CDS sequence (opt1) from hemagglutinin__InfluenzaA__AHC59029

SEQ ID NO: 74684 - RNA, 1701 nt, Artificial Sequence; identical to SEQ ID NO: 71006
  derived and/or modified CDS sequence (opt1) from hemagglutinin__InfluenzaA__AHC59041

SEQ ID NO: 74685 - RNA, 1701 nt, Artificial Sequence
  derived and/or modified CDS sequence (opt1) from hemagglutinin__InfluenzaA__AHC59053
augaagaccaucaucgcccugagcuacauccucugccugguguucgcccagaagcugcccggcaacgacaacuccaccgcgacgcucugccuggggcaccacgccgucccgaacggcaccaucgugaagaccaucaccaacgaccagaucgaggugacgaacgccaccgagcugguccagagcuccagcaccggggagaucugcaacagcccccaccagauccucgacggcgagaacugcacccugaucgacgcccugcucggggacccccagugcgacggcuuccagaacaagaagugggaccuguucguggagcgcagcaaggcccacuccaacugcuaccccuacgacgugccggacuacgcgagccugcggucccucgucgccagcuccggcacgcuggaguucaacaacgagagcuucaacuggaccggggugacccagaacggcaccuccagcgccugcauccgccgguccaacaacagcuucuucucccgccugaacuggcucacgcaccugaacuucaaguaccccgcccugaacgugaccaugcccaacaacgagcaguucgacaagcucuacaucuggggcguccaccaccccgggaccgacaaggaccagaucuuccuguacgcgcaggccgccgggcggaucaccgugagcacgaagcgcucccagcaggccgugaucccgaacaucggcagccggccccgcguccggaacauccccagccgcguguccaucuacuggaccaucgugaagcccggcgacauccugcucaucaacagcaccgggaaccugaucgccccgcggggcuacuucaagauccaguccgggaaguccuccaucaugcgcagcgacgcgcccaucggcaagugcaacuccgccugcaucacccccaacggcagcauccccaacgacaagccguuccagaacgucaaccggaucacguacggggccugcccccgcuacgugaagcagaacacccugaagcucgccaccggcaugcggaacgugcccgagaagcagacccgcgggaucuucggcgccaucgcgggguucaucgagaacggcugggagggcauggucgacgggugguacggcuuccggcaccagaacuccgaggggcgcggccaggccgccgaccucaagagcacgcaggccgccaucgaccagaucaacgggaagcugaaccggcugaucggcaagaccaacgagaaguuccaccagaucgagaaggaguucuccgagguggagggccgcauccaggaccuggagaaguacguggaggacaccaagaucgaccuguggagcuacaacgcggagcuccuggucgcccuggagaaccagcacaccaucgaccucacggacuccgagaugaacaagcuguucgagaagaccaagaagcagcugcgggagaacgccgaggacauggggaacggcugcuucaagaucuaccacaagugcgacaacgccugcaucgggagcauccgcaacggcaccuacgaccacgacguguaccgcgacgaggcccucaacaaccgguuccagaucaaggggguggagcugaaguccggcuacaaggacuggauccuguggaucagcuucgcgaucuccugcuuccuccugugcgucgcccugcucggcuucaucauguggaccugccagaaggggaacauccgcugcaacaucugcaucuga

SEQ ID NO: 74686 - RNA, 1701 nt, Artificial Sequence
  derived and/or modified CDS sequence (opt1) from hemagglutinin__InfluenzaA__AHC59077
augaagaccaucaucgcccugagcuacauccucugccugguguucgcccagaagcugcccggcaacgacaacuccaccgcgacgcucugccuggggcaccacgccgucccgaacggcaccaucgugaagaccaucaccaacgaccagaucgaggugacgaacgccaccgagcugguccagaacagcuccaccggggagaucugcgacagcccccaccagauccucgacggcgagaacugcacccugaucgacgcccugcucggggacccccagugcgacggcuuccagaacaagaagugggaccuguucguggagcgcuccaaggccuacagcaacugcuaccccuacgacgugccggacuacgcgucccugcggagccucgucgccuccagcggcacgcuggaguucaacaacgaguccuucaacuggaccggggugacccagaacggcaccagcuccgccugcauccgccggagcaacaacuccuucuucagccgccugaacuggcucacgcaccugaacuucaaguaccccgcccugaacgugaccaugcccaacaacgagcaguucgacaagcucuacaucuggggcguccaccaccccgggaccgacaaggaccagaucuuccuguacgcgcaggccuccgggcggaucaccgugagcacgaagcgcucccagcaggccgugaucccgaacaucggcagccggccccgcguccggaacauccccagccgcaucuccaucuacuggaccaucgugaagcccggcgacauccugcucaucaacagcaccgggaaccugaucgccccgcggggcuacuucaagauccgcuccggcaagagcuccaucaugcggagcgacgcccccaucgggaagugcaacuccgagugcaucacccccaacggcagcauccccaacgacaagccguuccagaacgugaaccgcaucacguacggggcgugcccccgguacgucaagcagaacacccugaagcucgccaccggcaugcgcaacgugcccgagaagcagacccgggggaucuucggcgccaucgccggguucaucgagaacggcugggagggcaugguggacgggugguacggcuuccgccaccagaacuccgaggggcggggccaggccgcggaccucaagagcacgcaggccgccaucgaccagaucaacgggaagcugaaccgccugaucggcaagaccaacgagaaguuccaccagaucgagaaggaguucuccgaggucgagggccggauccaggaccuggagaaguacguggaggacaccaagaucgaccuguggagcuacaacgccgagcuccugguggcccuggagaaccagcacaccaucgaccucacggacuccgagaugaacaagcuguucgagaagaccaagaagcagcugcgcgagaacgcggaggacauggggaacggcugcuucaagaucuaccacaagugcgacaacgccugcaucgggagcauccgcaacggcaccuacgaccacgacgucuaccgggacgaggcccucaacaaccgcuuccagaucaaggggguggagcugaaguccggcuacaaggacuggauccuguggaucagcuucgccaucuccugcuuccuccugugcgugguccugcucggcuucaucaugugggccugccagaaggggaacauccggugcaacaucugcaucuga

SEQ ID NO: 74687 - RNA, 1701 nt, Artificial Sequence; identical to SEQ ID NO: 73098
  derived and/or modified CDS sequence (opt1) from hemagglutinin__InfluenzaA__AHC59089

SEQ ID NO: 74688 - RNA, 1701 nt, Artificial Sequence; identical to SEQ ID NO: 71806
  derived and/or modified CDS sequence (opt1) from hemagglutinin__InfluenzaA__AHC59101

SEQ ID NO: 74689 - RNA, 1701 nt, Artificial Sequence; identical to SEQ ID NO: 71006
  derived and/or modified CDS sequence (opt1) from hemagglutinin__InfluenzaA__AHC59113

SEQ ID NO: 74690 - RNA, 1701 nt, Artificial Sequence; identical to SEQ ID NO: 71806
  derived and/or modified CDS sequence (opt1) from hemagglutinin__InfluenzaA__AHC59125

SEQ ID NO: 74691 - RNA, 1701 nt, Artificial Sequence
  derived and/or modified CDS sequence (opt1) from hemagglutinin__InfluenzaA__AHC59137
augaagaccaucaucgcccugagcuacauccucugccugguguucgcccagaagauccccggcaacgacaacuccaccgcgacgcugugccucgggcaccacgccgucagcaacggcaccaucgugaagaccaucaccaacgaccagaucgaggugacgaacgccaccgagcugguccaguccagcuccaccggggagaucugcaacagcccgcaccagauccuggacggcgagaacugcacccucaucgacgcccugcugggggacccccagugcgacggcuuccagaacaagaagugggaccucuucguggagcgcuccaaggcccacagcaacugcuaccccuacgacgugcccgacuacgcgucccugcggagccuggucgccuccagcggcacgcucgaguucaacaacgaguccuucaacuggaccggggugacccagaacggcaccagcuccgccugcauccgcgggagcaacaacuccuucuucagccggcugaacuggcugacgcaccucaacuucaaguacccggcccugaacgugaccaugcccaacaacgagcaguucgacaagcuguacaucuggggcguccaccaccccgggaccgacaaggaccagaucuuccucuacgcgcaggccuccggccgcaucaccgugagcacgaagcggagccagcaggccgugauccccaacaucggcucccgcccgcggguccgcaacauccccagccggguguccaucuacuggaccaucgugaagcccggggacauccugcugaucaacagcaccggcaaccucaucgcgccccgcggguacuucaagauccgguccggcaagagcuccaucaugcgcagcgacgccccgaucggcaagugcaacuccgccugcaucacccccaacgggagcauccccaacgacaagcccuuccagaacgucaaccggaucacguacggcgccugcccgcgcuacgugaagcagaacacccugaagcuggccaccgggaugcggaacgugcccgagaagcagacccgcggcaucuucggggccaucgccggcuucaucgagaacggcugggaggggaugauggacggcugguacggguuccggcaccagaacuccgagggccgcgggcaggcggccgaccucaagagcacgcaggccgccaucgaccagaucaacggcaagcugaaccggcugaucggcaagaccaacgagaaguuccaccagaucgagaaggaguucuccgaggucgaggggcgcauccaggaccucgagaaguacguggaggacaccaagaucgaccuguggagcuacaacgccgagcugcucguggcgcuggagaaccagcacaccaucgaccugacggacuccgagaugaacaagcuguucgagaagaccaagaagcagcuccgggagaacgccgaggacaugggcaacgggugcuucaagaucuaccacaagugcgacaacgccugcaucggcagcauccgcaacgggaccuacgaccacgacgucuaccgcgacgaggcccugaacaaccgguuccagaucaagggcguggagcucaaguccggcuacaaggacuggauccuguggaucagcuucgccaucuccugcuuccugcucugcguggcgcugcugggguucaucaugugggccugccagaagggcaacauccgcugcaacaucugcaucuga

SEQ ID NO: 74692 - RNA, 1701 nt, Artificial Sequence; identical to SEQ ID NO: 71006
  derived and/or modified CDS sequence (opt1) from hemagglutinin__InfluenzaA__AHC59149

SEQ ID NO: 74693 - RNA, 1701 nt, Artificial Sequence
  derived and/or modified CDS sequence (opt1) from hemagglutinin__InfluenzaA__AHC59185
augaagaccaucaucgcccugagcuacauccucugccugguguucgcccagaagcugcccggcaacgacaacuccaccgcgacgcucugccuggggcaccacgccgucccgaacggcaccaucgugaagaccaucaccaacgaccagaucgaggugacgaacgccaccgagcugguccagagcuccagcaccggggagaucugcgacagcccccaccagauccucgacggcgagaacugcacccugaucgacgcccugcucggggacccccagugcgacggcuuccagaacaagaagugggaccuguucguggagcgcagcaaggccuacuccaacugcuaccccuacgacgugccggacuacgcgagccugcggucccucgucgccagcuccggcacgcuggaguucaacaacgagagcuucaacuggaccggggugacccagaacggcaccuccagcgccugcauccgccgguccaacagcuccuucuucagccgccugaacuggcucacgcaccugaacuucaaguaccccgcccugaacgugaccaugcccaacaacgagcaguucgacaagcucuacaucuggggcguccaccaccccgggaccgacaaggaccagaucuuccuguacgcgcaguccagcgggcggaucaccgugagcacgaagcgcucccagcaggccgugaucccgaacaucggcagccggccccgcauccggaacauccccucccgcaucagcaucuacuggaccaucgucaagcccggcgacauccugcucaucaacuccaccgggaaccugaucgccccgcggggcuacuucaagauccgcagcgggaaguccagcaucaugcgguccgacgcccccaucggcaagugcaacagcgagugcaucacccccaacggcuccauccccaacgacaagccguuccagaacgugaaccgcaucacguacggggccugcccccgguacgugaagcagagcacccugaagcucgcgaccggcaugcgcaacguccccgagaagcagacccgggggaucuucggcgccaucgccggguucaucgagaacggcugggagggcaugguggacgggugguacggcuuccgccaccagaacuccgaggggcggggccaggccgccgaccugaaguccacgcaggcggccaucgaccagaucaacgggaagcugaaccgccucaucggcaagaccaacgagaaguuccaccagaucgagaaggaguucuccgagguggagggccggauccaggaccuggagaaguacgucgaggacaccaagaucgaccuguggagcuacaacgccgagcuccugguggcccuggagaaccagcacaccaucgaccucacggacuccgagaugaacaagcuguucgagaagaccaagaagcagcugcgcgagaacgccgaggacauggggaacggcugcuucaagaucuaccacaagugcgacaacgcgugcaucgggagcauccgcaacggcaccuacgaccacaacguguaccgggacgaggcccucaacaaccgcuuccagaucaagggggucgagcugaaguccggcuacaaggacuggauccuguggaucagcuucgccaucagcugcuuccuccugugcguggcccugcucggcuucaucaugugggccugccagaaggggaacauccggugcaacaucugcaucuga

SEQ ID NO: 74694 - RNA, 1701 nt, Artificial Sequence; identical to SEQ ID NO: 70879
  derived and/or modified CDS sequence (opt1) from hemagglutinin__InfluenzaA__AHC59197

SEQ ID NO: 74695 - RNA, 1701 nt, Artificial Sequence
  derived and/or modified CDS sequence (opt1) from hemagglutinin__InfluenzaA__AHC59209
augaagaccaucaucgcccugagcuacauccucugccugguguucgcccaggagauccccggcaacgacaacuccaccgcgacgcugugccucgggcaccacgccgucccgaacggcaccaucgugaagaccaucaccaacgaccagaucgaggugacgaacgccaccgagcugguccagagcuccagcaccggggagaucugcaacagcccccaccagauccuggacggcgagaacugcacccucaucgacgcccugcugggggacccccagugcgacgacuuccagaacaagaagugggaccucuucguggagcgcuccaaggcccacuccaacugcuaccccuacgacgugccggacuacgcgagccugcggucccuggucgccagcuccggcacgcucgaguucaacaacgagagcuucaacuggaccggcgugacccagaacgggaccuccagcgccugcauccgccgguccaacaacagcuucuucucccgccugaacuggcugacgcaccucaacuucaaguaccccgcccugaacgugaccaugcccaacaacgagcaguucgacaagcuguacaucuggggcguccaccaccccgggaccgacaaggaccagaucuuccucuacgcgcaggccagcggccggaucaccguguccacgaagcgcagccagcaggccgugaucccgaacaucgggagccggccccgcguccggaacauccccucccgcgugagcaucuacuggaccaucgugaagcccggcgacauccugcugaucaacuccaccggcaaccucaucgccccgcggggguacuucaagauccgcagcggcaaguccagcaucaugcgguccgacgcccccaucggggagugcaacagcgcgugcaucacccccaacggcuccauccccaacgacaagccguuccagaacgucaaccgcaucacguacggcgccugcccccgguacgugaagcagaacacccugaagcuggccaccgggaugcgcaacgugcccgagaagcagacccggggcaucuucggggccaucgccggcuucaucgagaacgggugggagggcauggucgacggcugguacggguuccgccaccagaacagcgagggccgggggcaggcggccgaccucaaguccacgcaggccgccaucgaccagaucaacggcaagcugaaccgccugaucgggaagaccaacgagaaguuccaccagaucgagaaggaguucagcgagguggagggccggauccaggaccucgagaaguacguggaggacaccaagaucgaccugugguccuacaacgccgagcugcucgucgcgcuggagaaccagcacaccaucgaccugacggacagcgagaugaacaagcuguucgagaagaccaagaagcagcuccgcgagaacgccgaggacaugggcaacgggugcuucaagaucuaccacaagugcgacaacgccugcaucggcuccauccgcaacgggaccuacgaccacgccguguaccgggacgaggcccugaacaaccgcuuccagaucaagggcguggagcucaagagcggguacaaggacuggauccuguggaucuccuucgcgaucagcugcuuccugcucugcgucgcccugcugggcuucaucaugugggccugccagaagggcaacauccggugcaacaucugcaucuga

SEQ ID NO: 74696 - RNA, 1701 nt, Artificial Sequence; identical to SEQ ID NO: 71006
  derived and/or modified CDS sequence (opt1) from hemagglutinin__InfluenzaA__AHC59221

SEQ ID NO: 74697 - RNA, 1701 nt, Artificial Sequence; identical to SEQ ID NO: 74675
  derived and/or modified CDS sequence (opt1) from hemagglutinin__InfluenzaA__AHC59245

SEQ ID NO: 74698 - RNA, 1701 nt, Artificial Sequence; identical to SEQ ID NO: 74642
  derived and/or modified CDS sequence (opt1) from hemagglutinin__InfluenzaA__AHC59257

SEQ ID NO: 74699 - RNA, 1701 nt, Artificial Sequence; identical to SEQ ID NO: 71806
  derived and/or modified CDS sequence (opt1) from hemagglutinin__InfluenzaA__AHC59269

SEQ ID NO: 74700 - RNA, 1701 nt, Artificial Sequence; identical to SEQ ID NO: 74642
  derived and/or modified CDS sequence (opt1) from hemagglutinin__InfluenzaA__AHC59281

SEQ ID NO: 74701 - RNA, 1701 nt, Artificial Sequence; identical to SEQ ID NO: 71006
  derived and/or modified CDS sequence (opt1) from hemagglutinin__InfluenzaA__AHC59293

SEQ ID NO: 74702 - RNA, 1701 nt, Artificial Sequence
  derived and/or modified CDS sequence (opt1) from hemagglutinin__InfluenzaA__AHC59305
augaagaccaucaucgcccugagcuacauccucugccugguguucgcccagaagcugcccggcaacgacaacuccaccgcgacgcucugccuggggcaccacgccgucccgaacggcaccaucgugaagaccaucaccaacgaccagaucgaggugacgaacgccaccgagcugguccagagcuccagcaccggggagaucugcuccagcccccaccagauccucgacggcgagaacugcacccugaucgacgcccugcucggggacccccagugcgacggcuuccagaacaagaagugggaccuguucguggagcgcuccaaggcccacagcaacugcuaccccuacgacgugccggacuacgcgucccugcggagccucgucgccuccagcggcacgcuggaguucaacaacgaguccuucaacuggaccggggugacccagaacggcaccagcuccgccugcauccgccggagcaacaacuccuucuucagccgccugaacuggcucacgcaccugaacuucaaguaccccgcccugaacgugaccaugcccaacaacgagcaguucgacaagcucuacaucuggggcguccaccaccccgggaccgacaaggaccagaucuuccuguacgcgcaggccuccgggcggaucaccgugagcacgaagcgcagccagcaggccgugaucccgaacaucggcucccggccccgcguccggaacauccccagccgcguguccaucuacuggaccaucgugaagcccggcgacauccugcucaucaacagcaccgggaaccugaucgccccgcggggcuacuucaagauccgcuccggcaagagcuccaucaugcggagcgacgcccccaucgggaagugcaacuccgcgugcaucacccccaacggcagcauccccaacgacaagccguuccagaacgucaaccgcaucacguacggggccugcccccgguacgugaagcagaacacccugaagcucgccaccggcaugcgcaacgugcccgagaagcagacccgggggaucuucggcgccaucgccggguucaucgagaacggcugggagggcauggucgacgggugguacggcuuccgccaccagaacuccgaggggcggggccaggcggccgaccucaagagcacgcaggccgccaucgaccagaucaacgggaagcugaaccgccugaucggcaagaccaacgagaaguuccaccagaucgagaaggaguucuccgagguggagggccggauccaggaccuggagaaguacguggaggacaccaagaucgaccuguggagcuacaacgccgagcuccuggucgcgcuggagaaccagcacaccaucgaccucacggacuccgagaugaacaagcuguucgagaagaccaagaagcagcugcgcgagaacgccgaggacauggggaacggcugcuucaagaucuaccacaagugcgacaacgccugcaucgggagcauccgcaacggcaccuacgaccacgacguguaccgggacgaggcccucaacaaccgcuuccagaucaaggggguggagcugaaguccggcuacaaggacuggauccuguggaucagcuucgccaucuccugcuuccuccugugcgucgcgcugcucggcuucaucaugugggccugccagaaggggaacauccggugcaacaucugcaucuga

SEQ ID NO: 74703 - RNA, 1701 nt, Artificial Sequence
  derived and/or modified CDS sequence (opt1) from hemagglutinin__InfluenzaA__AHC59329
augaagaccaucaucgcccugagcuacauccucugccugguguucgcccagaagcugcccggcaacgacaacuccaccgcgacgcucugccuggggcaccacgccgucccgaacggcaccaucgugaagaccaucaccaacgaccgcaucgaggugacgaacgccaccgagcugguccagaacagcuccaucggggagaucugcgacagcccccaccagauccucgacggcgagaacugcacccugaucgacgcccugcucggggacccccagugcgacggcuuccagaacaagaagugggaccuguucguggagcgguccaaggccuacagcaacugcuaccccuacgacgugccggacuacgcgucccugcgcagccucgucgccuccagcggcacccuggaguucaacaacgaguccuucaacuggacgggggugacccagaacggcaccagcuccgccugcauccggcgcagcaacaacuccuucuucagccggcugaacuggcucacccaccugaacuucaaguaccccgcccugaacgugacgaugcccaacaacgagcaguucgacaagcucuacaucuggggcguccaccaccccgggaccgagaaggaccagaucuuccuguacgcgcaguccagcgggcgcaucaccguguccaccaagcggagccagcaggccgugaucccgaacaucggcagccgcccccggauccgcaacauccccucccggaucagcaucuacuggacgaucgucaagcccggcgacauccugcucaucaacuccaccgggaaccugaucgccccgcgcggcuacuucaagauccggagcgggaaguccagcaucaugcgcuccgacgcccccaucggcaagugcaagagcgagugcaucacccccaacggcuccauccccaacgacaagccguuccagaacgugaaccggaucaccuacggggccugcccccgcuacgugaagcagagcacgcugaagcucgcgaccggcaugcggaacguccccgagaagcagacccgcgggaucuucggcgccaucgccggguucaucgagaacggcugggagggcaugguggacgggugguacggcuuccggcaccagaacuccgaggggcgcggccaggccgccgaccucaagagcacccaggcggccaucgaccagaucaacgggaagcugaaccggcugaucggcaagacgaacgagaaguuccaccagaucgagaaggaguucuccgagguggagggccgcauccaggaccuggagaaguacgucgaggacaccaagaucgaccuguggagcuacaacgccgagcuccugguggcccuggagaaccagcacaccaucgaccucaccgacuccgagaugaacaagcuguucgagaagacgaagaagcagcugcgcgagaacgccgaggacauggggaacggcugcuucaagaucuaccacaagugcgacaacgcgugcaucgggagcauccggaacggcaccuacgaccacgacguguaccgcgacgaggcccucaacaaccgguuccagaucaagggggucgagcugaaguccggcuacaaggacuggauccuguggaucagcuucgccaucuccugcuuccuccugugcguggcccugcucggcuucaucaugugggccugccagaaggggaacauccgcugcaacaucugcaucuga

SEQ ID NO: 74704 - RNA, 1701 nt, Artificial Sequence; identical to SEQ ID NO: 73098
  derived and/or modified CDS sequence (opt1) from hemagglutinin__InfluenzaA__AHC59341

SEQ ID NO: 74705 - RNA, 1701 nt, Artificial Sequence; identical to SEQ ID NO: 74642
  derived and/or modified CDS sequence (opt1) from hemagglutinin__InfluenzaA__AHC59365

SEQ ID NO: 74706 - RNA, 1701 nt, Artificial Sequence
  derived and/or modified CDS sequence (opt1) from hemagglutinin__InfluenzaA__AHC59377
augaagaccaucaucgcccugagcuacauccucugccugguguucgcccagaagcugcccggcaacgacaacuccaccgcgacgcucugccuggggcaccacgccgucccgaacggcaccguggugaagaccaucaccaacgaccagaucgaggucacgaacgccaccgagcuggugcagaacagcuccaccggggagaucugcgacagcccccaccagauccucgacggcgagaacugcacccugaucgacgcccugcucggggacccccagugcgacggcuuccagaacaagaagugggaccuguucguggagcgcuccaaggccuacagcaacugcuaccccuacgacgucccggacuacgcgucccugcggagccucguggccuccagcggcacgcuggaguucaacaacgaguccuucaacuggaccggggugacccagaacggcaccagcuccgccugcauccgccggagcaacaacuccuucuucagccgccugaacuggcucacgcaccugaacuucaaguaccccgcccugaacgucaccaugcccaacaacgagcaguucgacaagcucuacaucuggggcgugcaccaccccgggaccgacaaggaccagaucuuccuguacgcgcaggccuccgggcggaucaccgugagcacgaagcgcucccagcaggccgucaucccgaacaucggcagccggccccgcgugcggaacauccccagccgcaucuccaucuacuggaccaucgugaagcccggcgacauccugcucaucaacagcaccgggaaccugaucgccccgcggggcuacuucaagauccgcuccggcaagagcuccaucaugcggagcgacgcccccaucgggaagugcaacuccgagugcaucacccccaacggcagcauccccaacgacaagccguuccagaacgucaaccgcaucacguacggggcgugcccccgguacgugaagcagaacacccugaagcucgccaccggcaugcgcaacgugcccgagaagcagacccgggggaucuucggcgccaucgccggguucaucgagaacggcugggagggcauggucgacgggugguacggcuuccgccaccagaacuccgaggggcggggccaggccgcggaccucaagagcacgcaggccgccaucgaccagaucaacgggaagcugaaccgccugaucggcaagaccaacgagaaguuccaccagaucgagaaggaguucuccgagguggagggccggauccagaaccuggagaaguacguggaggacaccaagaucgaccuguggagcuacaacgccgagcuccuggucgcccuggagaaccagcacaccaucgaccucacggacuccgagaugaacaagcuguucgagaagaccaagaagcagcugcgcgagaacgcggaggacauggggaacggcugcuucaagaucuaccacaagugcgacaacgccugcaucgggagcauccgcaacggcaccuacgaccacgacguguaccgggacgaggcccucaacaaccgcuuccagaucaaggggguggagcugaaguccggcuacaaggacuggauccuguggaucagcuucgccaucuccugcuuccuccugugcgucgcccugcucggcuucaucaugugggcgugccagaaggggaacauccggugcaacaucugcaucuga

SEQ ID NO: 74707 - RNA, 1701 nt, Artificial Sequence; identical to SEQ ID NO: 71006
  derived and/or modified CDS sequence (opt1) from hemagglutinin__InfluenzaA__AHC59413

SEQ ID NO: 74708 - RNA, 1701 nt, Artificial Sequence; identical to SEQ ID NO: 71806
  derived and/or modified CDS sequence (opt1) from hemagglutinin__InfluenzaA__AHC59425

SEQ ID NO: 74709 - RNA, 1701 nt, Artificial Sequence; identical to SEQ ID NO: 73098
  derived and/or modified CDS sequence (opt1) from hemagglutinin__InfluenzaA__AHC59437

SEQ ID NO: 74710 - RNA, 1701 nt, Artificial Sequence
  derived and/or modified CDS sequence (opt1) from hemagglutinin__InfluenzaA__AHC59449
augaagaccaucaucgcccugagcuacauccucugccugguguucgcccagaagcugcccggcaacgacaacuccaccgcgacgcucugccuggggcaccacgccgucccgaacggcaccaucgugaagaccaucaccaacgaccagaucgaggugacgaacgccaccgagcugguccagagcuccagcaccggggagaucugcaacagcccccaccagauccucgacggcgagaacugcacccugaucgacgcccugcucggggacccccagugcgacggcuuccagaacaagaagugggaccuguucguggagcgcagcaaggcccacuccaacugcuaccccuacgacgugccggacuacgcgagccugcggucccucgucgccagcuccggcacgcuggaguucaacaacgagagcuucaacuggaccggggugacccagaacggcaccuccagcgccugcauccgcggguccaacaacagcuucuucucccggcugaacuggcucacgcaccugaacuucaaguaccccgcccugaacgugaccaugcccaacaacgagcaguucgacaagcucuacaucuggggcguccaccaccccgggaccgacaaggaccagaucuuccuguacgcgcaggccagcggccgcaucaccguguccacgaagcggagccagcaggccgugaucccgaacaucggcagccgcccccggguccgcaacauccccucccgggugagcaucuacuggaccaucgugaagcccggggacauccugcucaucaacuccaccggcaaccugaucgccccgcgcggguacuucaagauccggagcggcaaguccagcaucaugcgcuccgacgcccccaucggcaagugcaacagcgcgugcaucacccccaacggguccauccccaacgacaagccguuccagaacgucaaccggaucacguacggcgccugcccccgcuacgugaagcagaacacccugaagcucgccaccgggaugcggaacgugcccgagaagcagacccgcggcaucuucggggccaucgccggcuucaucgagaacggcugggaggggauggucgacggcugguacggguuccggcaccagaacagcgagggccgcgggcaggcggccgaccugaaguccacgcaggccgccaucgaccagaucaacggcaagcugaaccggcucaucggccgcaccaacgagaaguuccaccagaucgagaaggaguucagcgagguggaggggcggauccaggaccuggagaaguacguggaggacaccaagaucgaccugugguccuacaacgccgagcuccuggucgcgcuggagaaccagcacaccaucgaccucacggacagcgagaugaacaagcuguucgagaagaccaagaagcagcugcgcgagaacgccgaggacaugggcaacgggugcuucaagaucuaccacaagugcgacaacgccugcaucggcuccauccgcaacgggaccuacgaccacgacguguaccgggacgaggcccucaacaaccgcuuccagaucaagggcguggagcugaaguccggcuacaaggacuggauccuguggaucuccuucgccaucagcugcuuccuccugugcgucgcgcugcucggguucaucaugugggccugccagaagggcaacauccggugcaacaucugcaucuga

SEQ ID NO: 74711 - RNA, 1701 nt, Artificial Sequence; identical to SEQ ID NO: 70879
  derived and/or modified CDS sequence (opt1) from hemagglutinin__InfluenzaA__AHC59461

SEQ ID NO: 74712 - RNA, 1701 nt, Artificial Sequence; identical to SEQ ID NO: 74703
  derived and/or modified CDS sequence (opt1) from hemagglutinin__InfluenzaA__AHC59473

SEQ ID NO: 74713 - RNA, 1701 nt, Artificial Sequence; identical to SEQ ID NO: 71006
  derived and/or modified CDS sequence (opt1) from hemagglutinin__InfluenzaA__AHC59485

SEQ ID NO: 74714 - RNA, 1701 nt, Artificial Sequence; identical to SEQ ID NO: 71006
  derived and/or modified CDS sequence (opt1) from hemagglutinin__InfluenzaA__AHC59497

SEQ ID NO: 74715 - RNA, 1701 nt, Artificial Sequence; identical to SEQ ID NO: 70879
  derived and/or modified CDS sequence (opt1) from hemagglutinin__InfluenzaA__AHC59509

SEQ ID NO: 74716 - RNA, 1701 nt, Artificial Sequence; identical to SEQ ID NO: 70879
  derived and/or modified CDS sequence (opt1) from hemagglutinin__InfluenzaA__AHC59521

SEQ ID NO: 74717 - RNA, 1701 nt, Artificial Sequence
  derived and/or modified CDS sequence (opt1) from hemagglutinin__InfluenzaA__AHC59533
augaagaccaucaucgcccugagcuacauccucugccugguguucgcccagaagcugcccggcaacgacaacuccaccgcgacgcucugccuggggcaccacgccgucccgaacggcaccaucgugaagaccaucaccaacgaccagaucgaggugacgaacgccaccgagcugguccagagcuccagcaccggggagaucugcaacagcccccaccagauccucgacggcgagaacugcacccugaucgacgcccugcucggggacccccagugcgacggcuuccagaacaagaagugggaccuguucguggagcgcagcaaggcccacuccaacugcuaccccuacgacgugccggacuacgcgagccugcggucccucgucgccagcuccggcacgcuggaguucaagaacgagagcuucaacuggaccggggugacccagaacggcaccuccagcgccugcauccgccgguccaacaacagcuucuucucccgccugaacuggcucacgcaccugaacuucaaguaccccgcccugaacgugaccaugcccaacaacgagcaguucgacaagcucuacaucuggggcguccaccaccccgggaccgacaaggaccagaucuuccuguacgcgcaggccagcgggcggaucaccguguccacgaagcgcagccagcaggccgugaucccgaacaucggcagccggccccgcguccggaacauccccucccgcgugagcaucuacuggaccaucgugaagcccggcgacauccugcucaucaacuccaccgggaaccugaucgccccgcggggcuacuucaagauccgcagcgggaaguccagcaucaugcgguccgacgcccccaucggcaagugcaacagcgcgugcaucacccccaacggcuccauccccaacgacaagccguuccagaacgucaaccgcaucacguacggggccugcccccgguacgugaagcagaacacccugaagcucgccaccggcaugcgcaacgugcccgagaagcagacccgggggaucuucggcgccaucgccggguucaucgagaacggcugggagggcauggucgacgggugguacggcuuccgccaccagaacagcgaggggcggggccaggcggccgaccugaaguccacgcaggccgccaucgaccagaucaacgggaagcugaaccgccucaucggcaagaccaacgagaaguuccaccagaucgagaaggaguucagcgagguggagggccggauccaggaccuggagaaguacguggaggacaccaagaucgaccugugguccuacaacgccgagcuccuggucgcgcuggagaaccagcacaccaucgaccucacggacagcgagaugaacaagcuguucgagaagaccaagaagcagcugcgcgagaacgccgaggacauggggaacggcugcuucaagaucuaccacaagugcgacaacgccugcaucggguccauccgcaacggcaccuacgaccacgacguguaccgggacgaggcccucaacaaccgcuuccagaucaaggggguggagcugaaguccggcuacaaggacuggauccuguggaucuccuucgccaucagcugcuuccuccugugcgucgcgcugcucggcuucaucaugugggccugccagaaggggaacauccggugcaacaucugcaucuga

SEQ ID NO: 74718 - RNA, 1701 nt, Artificial Sequence; identical to SEQ ID NO: 71006
  derived and/or modified CDS sequence (opt1) from hemagglutinin__InfluenzaA__AHC59545

SEQ ID NO: 74719 - RNA, 1701 nt, Artificial Sequence; identical to SEQ ID NO: 74642
  derived and/or modified CDS sequence (opt1) from hemagglutinin__InfluenzaA__AHC59557

SEQ ID NO: 74720 - RNA, 1701 nt, Artificial Sequence
  derived and/or modified CDS sequence (opt1) from hemagglutinin__InfluenzaA__AHC59569
augaagaccaucaucgcccugagcuacauccucugccugguguucgcccagaagcugcccggcaacgacaacuccaccgcgacgcucugccuggggcaccacgccgucccgaacggcaccaucgugaagaccaucaccaacgaccagaucgaggugacgaacgccaccgagcugguccagaacagcuccaccggggagaucugcgacagcccccaccagauccucgacggcgagaacugcacccugaucgacgcccugcucggggacccccagugcgacggcuuccagaacaagaagugggaccuguucguggagcgcuccaaggccuacagcaacugcuaccccuacgacgugccggacuacgcgucccugcggagccucgucgccuccagcggcacgcuggaguucaacaacgaguccuucaacuggaccggggugacccagaacggcaccagcuccgccugcauccgccggagcaacaacuccuucuucagccgccugaacuggcucacgcaccugaacuucaaguaccccgcccugaacgugaccaugcccaacaacgagcaguucgacaagcucuacaucuggggcguccaccaccccgggaccgacaaggaccagaucuuccuguacgcgcaggccuccgggcggaucaccgugagcacgaagcgcucccagcaggccgugaucccgaacaucggcagccggccccgcguccggaacauccccagccgcaucuccaucuacuggaccaucgugaagcccggcgacauccugcucaucaacagcaccgggaaccugaucgccccgcggggcuacuucaagauccgcuccggcaagagcuccaucaugcggagcgacgcccccaucgggaagugcaacuccgagugcaucacccccaacggcagcauccccaacgacaagccguuccagaacgugaaccgcaucacguacggggcgugcccccgguacgucaagcagaacacccugaagcucgccaccggcaugcgcaacgugcccgagaagcagacccgggggaucuucggcgccaucgccggguucaucgagaacggcugggagggcaugauggacgggugguacggcuuccgccaccagaacuccgaggggcggggccaggccgcggaccucaagagcacgcaggccgccaucgaccagaucaacgggaagcugaaccgccugaucggcaagaccaacgagaaguuccaccagaucgagaaggaguucuccgagguggagggccggauccaggaccuggagaaguacgucgaggacaccaagaucgaccuguggagcuacaacgccgagcuccugguggcccuggagaaccagcacaccaucgaccucacggacuccgagaugaacaagcuguucgagaagaccaagaagcagcugcgcgagaacgcggaggacauggggaacggcugcuucaagaucuaccacaagugcgacaacgccugcaucgggagcauccgcaacggcaccuacgaccacgacguguaccgggacgaggcccucaacaaccgcuuccagaucaagggggucgagcugaaguccggcuacaaggacuggauccuguggaucagcuucgccaucuccugcuuccuccugugcguggcccugcucggcuucaucaugugggcgugccagaaggggaacauccggugcaacaucugcaucuga

SEQ ID NO: 74721 - RNA, 1701 nt, Artificial Sequence; identical to SEQ ID NO: 71006
  derived and/or modified CDS sequence (opt1) from hemagglutinin__InfluenzaA__AHC59581

SEQ ID NO: 74722 - RNA, 1701 nt, Artificial Sequence; identical to SEQ ID NO: 70879
  derived and/or modified CDS sequence (opt1) from hemagglutinin__InfluenzaA__AHC59593

SEQ ID NO: 74723 - RNA, 1701 nt, Artificial Sequence; identical to SEQ ID NO: 73098
  derived and/or modified CDS sequence (opt1) from hemagglutinin__InfluenzaA__AHC59605

SEQ ID NO: 74724 - RNA, 1701 nt, Artificial Sequence; identical to SEQ ID NO: 71006
  derived and/or modified CDS sequence (opt1) from hemagglutinin__InfluenzaA__AHC59617

SEQ ID NO: 74725 - RNA, 1701 nt, Artificial Sequence; identical to SEQ ID NO: 71006
  derived and/or modified CDS sequence (opt1) from hemagglutinin__InfluenzaA__AHC59629

SEQ ID NO: 74726 - RNA, 1701 nt, Artificial Sequence; identical to SEQ ID NO: 74642
  derived and/or modified CDS sequence (opt1) from hemagglutinin__InfluenzaA__AHC59641

SEQ ID NO: 74727 - RNA, 1701 nt, Artificial Sequence
  derived and/or modified CDS sequence (opt1) from hemagglutinin__InfluenzaA__AHC59653
augaagaccaucaucgcccugagcuacauccucugccugguguucgcccagaagcugcccggcaacgacaacuccaccgcgacgcucugccuggggcaccacgccgucccgaacggcaccaucgugaagaccaucaccaacgaccagaucgaggugacgaacgccaccgagcugguccagagcuccagcaccggggagaucugcaacagcccccaccagauccucgacggcgagaacugcacccugaucgacgcccugcucggggacccccagugcgacggcuuccagaacaagaagugggaccuguucguggagcgcagcaaggcccacuccaacugcuaccccuacgacgugccggacuacgcgagccugcggucccucgucgccagcuccggcacgcuggaguucaacaacgagagcuucaacuggaccggggugacccagaacggcaccuccagcgccugcauccgccgguccaacaacagcuucuucucccgccugaacuggcucacgcaccugaacuucaaguaccccgcccugaacgugaccaugcccaacaacgagcaguucgacaagcucuacaucuggggcguccaccaccccgggaccgacaaggaccagaucuuccuguacgcgcaggccagcgggcggaucaccguguccacgcagcgcagccagcaggccgugaucccgaacaucggcagccggccccgcguccggaacauccccucccgcgugagcaucuacuggaccaucgugaagcccggcgacauccugcucaucaacuccaccgggaaccugaucgccccgcggggcuacuucaagauccgcagcgggaaguccagcaucaugcgguccgacgcccccaucggcaagugcaacagcgcgugcaucacccccaacggcuccauccccaacgacaagccguuccagaacgucaaccgcaucacguacggggccugcccccgguacgugaagcagaacacccugaagcucgccaccggcaugcgcaacgugcccgagaagcagacccgggggaucuucggcgccaucgccggguucaucgagaacggcugggagggcauggucgacgggugguacggcuuccgccaccagaacagcgaggggcggggccaggcggccgaccugaaguccacgcaggccgccaucgaccagaucaacgggaagcugaaccgccucaucggcaagaccaacgagaaguuccaccagaucgagaaggaguucagcgagguggagggccggauccaggaccuggagaaguacguggaggacaccaagaucgaccugugguccuacaacgccgagcuccuggucgcgcuggagaaccagcacaccaucgaccucacggacagcgagaugaacaagcuguucgagaagaccaagaagcagcugcgcgagaacgccgaggacauggggaacggcugcuucaagaucuaccacaagugcgacaacgccugcaucggguccauccgcaacggcaccuacgaccacgacguguaccgggacgaggcccucaacaaccgcuuccagaucaaggggguggagcugaaguccggcuacaaggacuggauccuguggaucuccuucgccaucagcugcuuccuccugugcgucgcgcugcucggcuucaucaugugggccugccagaaggggaacauccggugcaacaucugcaucuga

SEQ ID NO: 74728 - RNA, 1701 nt, Artificial Sequence; identical to SEQ ID NO: 70879
  derived and/or modified CDS sequence (opt1) from hemagglutinin__InfluenzaA__AHC59665

SEQ ID NO: 74729 - RNA, 1701 nt, Artificial Sequence; identical to SEQ ID NO: 71006
  derived and/or modified CDS sequence (opt1) from hemagglutinin__InfluenzaA__AHC59677

SEQ ID NO: 74730 - RNA, 1701 nt, Artificial Sequence; identical to SEQ ID NO: 74727
  derived and/or modified CDS sequence (opt1) from hemagglutinin__InfluenzaA__AHC59689

SEQ ID NO: 74731 - RNA, 1701 nt, Artificial Sequence; identical to SEQ ID NO: 74642
  derived and/or modified CDS sequence (opt1) from hemagglutinin__InfluenzaA__AHC59701

SEQ ID NO: 74732 - RNA, 1701 nt, Artificial Sequence; identical to SEQ ID NO: 70879
  derived and/or modified CDS sequence (opt1) from hemagglutinin__InfluenzaA__AHC59713

SEQ ID NO: 74733 - RNA, 1701 nt, Artificial Sequence; identical to SEQ ID NO: 74653
  derived and/or modified CDS sequence (opt1) from hemagglutinin__InfluenzaA__AHC59737

SEQ ID NO: 74734 - RNA, 1701 nt, Artificial Sequence; identical to SEQ ID NO: 70879
  derived and/or modified CDS sequence (opt1) from hemagglutinin__InfluenzaA__AHC59749

SEQ ID NO: 74735 - RNA, 1701 nt, Artificial Sequence; identical to SEQ ID NO: 71006
  derived and/or modified CDS sequence (opt1) from hemagglutinin__InfluenzaA__AHC59761

SEQ ID NO: 74736 - RNA, 1701 nt, Artificial Sequence; identical to SEQ ID NO: 71006
  derived and/or modified CDS sequence (opt1) from hemagglutinin__InfluenzaA__AHC59773

SEQ ID NO: 74737 - RNA, 1701 nt, Artificial Sequence; identical to SEQ ID NO: 71806
  derived and/or modified CDS sequence (opt1) from hemagglutinin__InfluenzaA__AHC59785

SEQ ID NO: 74738 - RNA, 1701 nt, Artificial Sequence; identical to SEQ ID NO: 71006
  derived and/or modified CDS sequence (opt1) from hemagglutinin__InfluenzaA__AHC59797

SEQ ID NO: 74739 - RNA, 1701 nt, Artificial Sequence; identical to SEQ ID NO: 73098
  derived and/or modified CDS sequence (opt1) from hemagglutinin__InfluenzaA__AHC59809

SEQ ID NO: 74740 - RNA, 1701 nt, Artificial Sequence
  derived and/or modified CDS sequence (opt1) from hemagglutinin__InfluenzaA__AHC59821
augaagaccaucaucgcccugagcuacauccucugccugguguucgcccagaagcugcccggcaacgacaacuccaccgcgacgcucugccuggggcaccacgccgucccgaacggcaccaucgugaagaccaucaccaacgaccagaucgaggugacgaacgccaccgagcugguccagaacagcuccaccggggagaucugcgacagcccccaccagauccucgacggcgagaacugcacccugaucgacgcccugcucggggacccccagugcgacggccugcagaacaagaagugggaccuguucguggagcgcuccaaggccuacagcaacugcuaccccuacgacgugccggacuacgcgucccuccggagccuggucgccuccagcggcacgcuggaguucaacaacgaguccuucaacuggaccggggugacccagaacggcaccagcuccgccugcauccgccggagcaacaacuccuucuucagccgccucaacuggcugacgcaccugaacuucaaguaccccgcccucaacgugaccaugcccaacaacgagcaguucgacaagcuguacaucuggggcguccaccaccccgggaccgacaaggaccagaucuuccuguacgcgcaggccuccgggcggaucaccgugagcacgaagcgcucccagcaggccgugaucccgaacaucggcagccggccccgcguccggaacauccccagccgcaucuccaucuacuggaccaucgugaagcccggcgacauccuccugaucaacagcaccgggaaccugaucgccccgcggggcuacuucaagauccgcuccggcaagagcuccaucaugcggagcgacgcccccaucgggaagugcaacuccgagugcaucacccccaacggcagcauccccaacgacaagccguuccagaacgugaaccgcaucacguacggggcgugcccccgguacgucaagcagaacacccucaagcuggccaccggcaugcgcaacgugcccgagaagcagacccgggggaucuucggcgccaucgccggguucaucgagaacggcugggagggcaugguggacgggugguacggcuuccgccaccagaacuccgaggggcggggccaggccgcggaccucaagagcacgcaggccgccaucgaccagaucaacgggaagcugaaccgccugaucggcaagaccaacgagaaguuccaccagaucgagaaggaguucuccgaggucgagggccggauccaggaccuggagaaguacguggaggacaccaagaucgaccucuggagcuacaacgccgagcugcugguggcccucgagaaccagcacaccaucgaccugacggacuccgagaugaacaagcuggucgagaagaccaagaagcagcuccgcgagaacgcggaggacauggggaacggcugcuucaagaucuaccacaagugcgacaacgccugcaucgggagcauccgcaacggcaccuacgaccacgacguguaccgggacgaggcccugaacaaccgcuuccagaucaaggggguggagcugaaguccggcuacaaggacuggauccucuggaucagcuucgccaucuccugcuuccugcugugcgucgcccuccugggcuucaucaugugggcgugccagaaggggaacauccggugcaacaucugcaucuga

SEQ ID NO: 74741 - RNA, 1701 nt, Artificial Sequence; identical to SEQ ID NO: 74642
  derived and/or modified CDS sequence (opt1) from hemagglutinin__InfluenzaA__AHC59833

SEQ ID NO: 74742 - RNA, 1701 nt, Artificial Sequence; identical to SEQ ID NO: 74641
  derived and/or modified CDS sequence (opt1) from hemagglutinin__InfluenzaA__AHC59845

SEQ ID NO: 74743 - RNA, 1701 nt, Artificial Sequence; identical to SEQ ID NO: 71806
  derived and/or modified CDS sequence (opt1) from hemagglutinin__InfluenzaA__AHC59857

SEQ ID NO: 74744 - RNA, 1701 nt, Artificial Sequence; identical to SEQ ID NO: 71006
  derived and/or modified CDS sequence (opt1) from hemagglutinin__InfluenzaA__AHC59869

SEQ ID NO: 74745 - RNA, 1701 nt, Artificial Sequence; identical to SEQ ID NO: 71006
  derived and/or modified CDS sequence (opt1) from hemagglutinin__InfluenzaA__AHC59881

SEQ ID NO: 74746 - RNA, 1701 nt, Artificial Sequence; identical to SEQ ID NO: 70879
  derived and/or modified CDS sequence (opt1) from hemagglutinin__InfluenzaA__AHC59892

SEQ ID NO: 74747 - RNA, 1701 nt, Artificial Sequence
  derived and/or modified CDS sequence (opt1) from hemagglutinin__InfluenzaA__AHC59904
augaagaccaucaucgcccugagcuacauccucugccugguguucgcccagaagcugcccggcaacgacaacuccaccgcgacgcucugccuggggcaccacgccgucccgaacggcaccaucgugaagaccaucaccaacgaccagaucgaggugacgaacgccaccgagcugguccagagcuccagcaccggggagaucugcaacagcccccaccagauccucgacggcgagaacugcacccugaucgacgcccugcucggggacccccagugcgacggcuuccagaacaagaagugggaccuguucguggagcgcagcaaggcccacuccaacugcuaccccuacgacgugccggacuacgcgagccugcggucccucgucgccagcuccggcacgcuggaguucaacaacgagagcuucaacuggaccggggugacccagaacggcaccuccagcgccugcauccgcggguccaacaacagcuucuucucccggcugaacuggcucacgcaccugaacuucaaguaccccgcccugaacgugaccaugcccaacaacgagcaguucgacaagcucuacaucuggggcguccaccaccccgggaccgacaaggaccagaucuuccuguacgcgcaggccagcggccgcaucaccguguccacgaagcggagccagcaggccgugaucccgaacaucggcagccgcccccggguccgcaacauccccucccgggugagcaucuacuggaccaucgugaagcccggggacauccugcucaucaacuccaccggcaaccugaucgccccgcgcggguacuucaagauccggagcggcaaguccagcaucaugcgcuccgacgcccccaucggcaagugcaacagcgcgugcaucacccccaacggguccauccccaacgacaagccguuccagaacgucaaccggaucacguacggcgccugcccccgcuacgugaagcagaacacccugaagcucgccaccgggaugcggaacgugcccgagaagcagacccgcggcaucuucggggccaucgccggcuucaucgagaacggcugggaggggaugauggacggcugguacggguuccggcaccagaacagcgagggccgcgggcaggcggccgaccugaaguccacgcaggccgccaucgaccagaucaacggcaagcugaaccggcucaucggcaagaccaacgagaaguuccaccagaucgagaaggaguucagcgaggucgaggggcgcauccaggaccuggagaaguacguggaggacaccaagaucgaccugugguccuacaacgccgagcuccugguggcgcuggagaaccagcacaccaucgaccucacggacagcgagaugaacaagcuguucgagaagaccaagaagcagcugcgggagaacgccgaggacaugggcaacgggugcuucaagaucuaccacaagugcgacaacgccugcaucggcuccauccgcaacgggaccuacgaccacgacgucuaccgcgacgaggcccucaacaaccgguuccagaucaagggcguggagcugaaguccggcuacaaggacuggauccuguggaucuccuucgccaucagcugcuuccuccugugcguggcgcugcucggguucaucaugugggccugccagaagggcaacauccgcugcaacaucugcaucuga

SEQ ID NO: 74748 - RNA, 1701 nt, Artificial Sequence
  derived and/or modified CDS sequence (opt1) from hemagglutinin__InfluenzaA__AHC59915
augaagaccgugaucgcccugagcuacauccucugccuggccuucgcgcagaagcugcccggcaacgacaacuccaccgccacgcucugccuggggcaccacgccgucccgaacggcaccaucgugaagaccaucaccaacgaccagaucgaggugacgaacgccaccgagcugguccagagcuccagcaccggggagaucugcgacagcccccaccagauccucgacggcgagaacugcacccugaucgacgcccugcucggggacccccagugcgacggcuuccagaacaagaagugggaccuguucguggagcgcagcaaggcguacuccaacugcuaccccuacgacgugccggacuacgccagccugcggucccucgucgccagcuccggcacgcuggaguucaacaacgagagcuucaacuggaccggggugacccagaacggcaccuccagcgccugcauccgccgguccaacaacagcuucuucucccgccugaacuggcucacgcaccugaacuucaaguaccccgcgcugaacgugaccaugcccaacaacgagcaguucgacaagcucuacaucuggggcguccaccaccccgggaccgacaaggaccagaucuuccuguacgcccaggccagcgggcggaucaccguguccacgaagcgcagccagcaggccgugaucccgaacaucggcagccggccccgcguccggaacauccccucccgcaucagcaucuacuggaccaucgugaagcccggcgacauccugcucaucaacuccaccgggaaccugaucgccccgcggggcuacuucaagauccgcagcgggaaguccagcaucaugcgguccgacgcgcccaucggcaagugcaacagcgagugcaucacccccaacggcuccauccccaacgacaagccguuccagaacgugaaccgcaucacguacggggccugcccccgguacgucaagcagaacacccugaagcucgccaccggcaugcgcaacgugcccgagaagcagacccgggggaucuucggcgccaucgccggguucaucgagaacggcugggagggcaugguggacgggugguacggcuuccgccaccagaacagcgaggggcggggccaggcggccgaccugaaguccacgcaggccgccaucgaccagaucaacgggaagcugaaccgccucaucggcaagaccaacgagaaguuccaccagaucgagaaggaguucagcgaggucgagggccggauccaggaccuggagaaguacguggaggacaccaagaucgaccugugguccuacaacgccgagcuccugguggcgcuggagaaccagcacaccaucgaccucacggacagcgagaugaacaagcuguucgagaagaccaagaagcagcugcgcgagaacgccgaggacauggggaacggcugcuucaagaucuaccacaagugcgacaacgccugcaucggguccauccgcaacggcaccuacgaccacgacgucuaccgggacgaggcccucaacaaccgcuuccagaucaaggggguggagcugaaguccggcuacaaggacuggauccuguggaucuccuucgccaucagcugcuuccuccugugcguggcgcugcucggcuucaucaugugggccugccagaaggggaacauccggugcaacaucugcaucuga

SEQ ID NO: 74749 - RNA, 1701 nt, Artificial Sequence; identical to SEQ ID NO: 71006
  derived and/or modified CDS sequence (opt1) from hemagglutinin__InfluenzaA__AHC59939

SEQ ID NO: 74750 - RNA, 1701 nt, Artificial Sequence
  derived and/or modified CDS sequence (opt1) from hemagglutinin__InfluenzaA__AHC59963
augaagaccaucaucgcccugagcuacauccucugccugguguucgcccagaagcugcccggcaacgacaacuccaccgcgacgcucugccuggggcaccacgccgucccgaacggcaccaucgugaagaccaucaccaacgaccagaucgaggugacgaacgccaccgagcugguccagagcuccagcaccggggagaucugcgacagcccccaccagauccucgacggcgagaacugcacccugaucgacgcccugcucggggacccccagugcgacggcuuccagaacaagaagugggaccuguucguggagcgcagcaaggccuacuccaacugcuaccccuacgacgugccggacuacgcgagccugcggucccucgucgccagcuccggcacgcuggaguucaacaacgagagcuucaacuggaccggggugacccagaacggcaccuccagcgccugcauccgccgguccaacagcuccuucuucagccgccugaacuggcucacgcaccugaacuucaaguaccccgcccugaacgugaccaugcccaacaacgagcaguucgacaagcucuacaucuggggcguccaccaccccgggaccgacaaggaccagaucuuccuguacgcgcaguccagcgggcggaucaccgugagcacgaagcgcucccagcaggccgugaucccgaacaucggcagccggccccgcauccggaacauccccucccgcaucagcaucuacuggaccaucgucaagcccggcgacauccugcucaucaacuccaccgggaaccugaucgccccgcggggcuacuucaagauccgcagcgggaaguccagcaucaugcgguccgacgcccccaucggcaagugcaacagcgagugcaucacccccaacggcuccauccccaacgacaagccguuccagaacgugaaccgcaucacguacggggccugcccccgguacaucaagcagagcacccugaagcucgcgaccggcaugcgcaacgugcccgagaagcagacccgggggaucuucggcgccaucgccggguucaucgagaacggcugggagggcauggucgacgggugguacggcuuccgccaccagaacuccgaggggcggggccaggccgccgaccugaaguccacgcaggcggccaucgaccagaucaacgggaagcugaaccgccucaucggcaagaccaacgagaaguuccaccagaucgagaaggaguucuccgagguggagggccggauccaggaccuggagaaguacguggaggacaccaagaucgaccuguggagcuacaacgccgagcuccuggucgcccuggagaaccagcacaccaucgaccucacggacuccgagaugaacaagcuguucgagaagaccaagaagcagcugcgcgagaacgccgaggacauggggaacggcugcuucaagaucuaccacaagugcgacaacgcgugcaucgggagcauccgcaacggcaccuacaaccacgacguguaccgggacgaggcccucaacaaccgcuuccagaucaaggggguggagcugaaguccggcuacaaggacuggauccuguggaucagcuucgccaucagcugcuuccuccugugcgucgcccugcucggcuucaucaugugggccugccagaaggggaacauccggugcaacaucugcaucuga

SEQ ID NO: 74751 - RNA, 1701 nt, Artificial Sequence; identical to SEQ ID NO: 70879
  derived and/or modified CDS sequence (opt1) from hemagglutinin__InfluenzaA__AHC59987

SEQ ID NO: 74752 - RNA, 1701 nt, Artificial Sequence; identical to SEQ ID NO: 70879
  derived and/or modified CDS sequence (opt1) from hemagglutinin__InfluenzaA__AHC59999

SEQ ID NO: 74753 - RNA, 1701 nt, Artificial Sequence; identical to SEQ ID NO: 71006
  derived and/or modified CDS sequence (opt1) from hemagglutinin__InfluenzaA__AHC60011

SEQ ID NO: 74754 - RNA, 1701 nt, Artificial Sequence; identical to SEQ ID NO: 70879
  derived and/or modified CDS sequence (opt1) from hemagglutinin__InfluenzaA__AHC60023

SEQ ID NO: 74755 - RNA, 1701 nt, Artificial Sequence; identical to SEQ ID NO: 71806
  derived and/or modified CDS sequence (opt1) from hemagglutinin__InfluenzaA__AHC60035

SEQ ID NO: 74756 - RNA, 1701 nt, Artificial Sequence; identical to SEQ ID NO: 71806
  derived and/or modified CDS sequence (opt1) from hemagglutinin__InfluenzaA__AHC60047

SEQ ID NO: 74757 - RNA, 1701 nt, Artificial Sequence
  derived and/or modified CDS sequence (opt1) from hemagglutinin__InfluenzaA__AHC60059
augaagaccaucaucgcccugagcuacauccucugccugguguucgcccagaagcugcccggcaacgacaacuccaccgcgacgcucugccuggggcaccacgccgucccgaacggcaccaucgugaagaccaucaccaacgaccagaucgaggugacgaacgccaccgagcugguccagaacagcuccaccggggagaucugcgacagcccccaccagauccucgacggcgagaacugcacccugaucgacgcccugcucggggacccccagugcgacggcuuccagaacaagaagugggaccuguucguggagcgcuccaaggccuacagcaacugcuaccccuacgacgugccggacuacgcgucccugcggagccucgucgccuccagcggcacgcuggaguucaacaacgaguccuucaacuggaccggggugacccagaacggcaccagcuccgccugcauccgccggagcaacaacuccuucuucagccgccugaacuggcucacgcaccugaacuucaaguaccccgcccugaacgugaccaugcccaacaacgagcaguucgacaagcucuacaucuggggcguccaccaccccgggaccgacaaggaccagaucuuccuguacgcgcaggccuccgggcggaucaccgugagcacgaagcgcucccagcaggccgugaucccgaacaucggcagccggccccgcguccggaacauccccagccgcaucuccaucuacuggaccaucgugaagcccggcgacauccugcucaucaacagcaccgggaaccugaucgccccgcggggcuacuucaagauccgcuccggcaagagcuccaucaugcggagcgacgcccccaucgggaagugcaacuccgcgugcaucacccccaacggcagcauccccaacgacaagccguuccagaacgugaaccgcaucacguacggggccugcccccgguacgucaagcagaacacccugaagcucgccaccggcaugcgcaacgugcccgagaagcagacccgggggaucuucggcgccaucgccggguucaucgagaacggcugggagggcaugguggacgggugguacggcuuccgccaccagaacuccgaggggcggggccaggcggccgaccucaagagcacgcaggccgccaucgaccagaucaacgggaagcugaaccgccugaucggcaagaccaacgagaaguuccaccagaucgagaaggaguucuccgaggucgagggccggauccaggaccuggagaaguacguggaggacaccaagaucgaccuguggagcuacaacgccgagcuccugguggcgcuggagaaccagcacaccaucgaccucacggacuccgagaugaacaagcuguucgagaagaccaagaagcagcugcgcgagaacgccgaggacauggggaacggcugcuucaagaucuaccacaagugcgacaacgccugcaucgggagcauccgcaacggcaccuacaaccacgacgucuaccgggacgaggcccucaacaaccgcuuccagaucaaggggguggagcugaaguccggcuacaaggacuggauccuguggaucagcuucgccaucuccugcuuccuccugugcguggcgcugcucggcuucaucaugugggccugccagaaggggaacauccggugcaacaucugcaucuga

SEQ ID NO: 74758 - RNA, 1701 nt, Artificial Sequence; identical to SEQ ID NO: 73098
  derived and/or modified CDS sequence (opt1) from hemagglutinin__InfluenzaA__AHC60071

SEQ ID NO: 74759 - RNA, 1701 nt, Artificial Sequence; identical to SEQ ID NO: 74642
  derived and/or modified CDS sequence (opt1) from hemagglutinin__InfluenzaA__AHC60083

SEQ ID NO: 74760 - RNA, 1701 nt, Artificial Sequence; identical to SEQ ID NO: 71806
  derived and/or modified CDS sequence (opt1) from hemagglutinin__InfluenzaA__AHC60095

SEQ ID NO: 74761 - RNA, 1701 nt, Artificial Sequence
  derived and/or modified CDS sequence (opt1) from hemagglutinin__InfluenzaA__AHC60107
augaagaccaucaucgcccugagcuacauccucugccugguguucgcccagaagcugcccggcaacgacaacuccaccgcgacgcucugccuggggcaccacgccgucccgaacggcaccaucgugaagaccaucaccaacgaccagaucgaggugacgaacgccaccgagcugguccagaacagcuccaccggggagaucugcgacagcccccaccagaucaucgacggcgagaacugcacccucaucgacgcccugcugggggacccccagugcgacggcuuccagaacaagaagugggaccucuucguggagcgcuccaaggccuacagcaacugcuaccccuacgacgugccggacuacgcgucccugcggagccuggucgccuccagcggcacgcucgaguucaacaacgaguccuucaacuggaccggggugacccagaacggcaccagcuccgccugcauccgccggagcaacaacuccuucuucagccgccugaacuggcugacgcaccucaacuucaaguaccccgcccugaacgugaccaugcccaacaacgagcaguucgacaagcuguacaucuggggcguccaccaccccgggaccgacaaggaccagaucuuccucuacgcgcaggccuccgggcggaucaccgugagcacgaagcgcucccagcaggccgugaucccgaacaucggcagccggccccgcguccggaacauccccagccgcaucuccaucuacuggaccaucgugaagcccggcgacauccugcugaucaacagcaccgggaaccucaucgccccgcggggcuacuucaagauccgcuccggcaagagcuccaucaugcggagcgacgcccccaucgggaagugcaacuccgagugcaucacccccaacggcagcauccccaacgacaagccguuccagaacgugaaccgcaucacguacggggcgugcccccgguacgucaagcagaacacccugaagcuggccaccggcaugcgcaacgugcccgagaagcagacccgggggaucuucggcgccaucgccggguucaucgagaacggcugggagggcaugguggacgggugguacggcuuccgccaccagaacuccgaggggcggggccaggccgcggaccucaagagcacgcaggccgccaucgaccagaucaacgggaagcugaaccgccugaucggcaagaccaacgagaaguuccaccagaucgagaaggaguucuccgaggucgagggccggauccaggaccucgagaaguacguggaggacaccaagaucgaccuguggagcuacaacgccgagcugcucguggcccuggagaaccagcacaccaucgaccugacggacuccgagaugaacaagcuguucgagaagaccaagaagcagcuccgcgagaacgcggaggacauggggaacggcugcuucaagaucuaccacaagugcgacaacgccugcaucgggagcauccgcaacggcaccuacgaccacgacgucuaccgggacgaggcccugaacaaccgcuucaagaucaaggggguggagcucaaguccggcuacaaggacuggauccuguggaucagcuucgccaucuccugcuuccugcucugcguggcccugcugggcuucaucaugugggcgugccagaaggggaacauccggugcaacaucugcaucuga

SEQ ID NO: 74762 - RNA, 1701 nt, Artificial Sequence; identical to SEQ ID NO: 71006
  derived and/or modified CDS sequence (opt1) from hemagglutinin__InfluenzaA__AHC60119

SEQ ID NO: 74763 - RNA, 1701 nt, Artificial Sequence; identical to SEQ ID NO: 71006
  derived and/or modified CDS sequence (opt1) from hemagglutinin__InfluenzaA__AHC60131

SEQ ID NO: 74764 - RNA, 1701 nt, Artificial Sequence; identical to SEQ ID NO: 74672
  derived and/or modified CDS sequence (opt1) from hemagglutinin__InfluenzaA__AHC60143

SEQ ID NO: 74765 - RNA, 1701 nt, Artificial Sequence
  derived and/or modified CDS sequence (opt1) from hemagglutinin__InfluenzaA__AHC60155
augaagaccgugaucgcccugagcuacauccucugccuggccuucgcgcagaagcugcccggcaacgacaacuccaccgccacgcucugccuggggcaccacgccgucccgaacggcaccaucgugaagaccaucaccaacgaccagaucgaggugacgaacgccaccgagcugguccagagcucccccaccggggagaucugcgacagcccccaccagauccucgacggcgagaacugcacccugaucgacgcccugcucggggacccccagugcgacggcuuccagaacaagaagugggaccuguucguggagcgcuccaaggcguacagcaacugcuacccguacgacgugcccgacuacgccucccugcggagccucgucgccuccagcggcacgcuggaguucaacaacgaguccuucaacuggaccggggugacccagaacggcaccagcuccgccugcauccgccggagcaacaacuccuucuucagccgccugaacuggcucacgcaccugaacuucaaguaccccgcgcugaacgugaccaugcccaacaacgagcaguucgacaagcucuacaucuggggcguccaccacccggggaccgacaaggaccagaucuuccuguacgcccaggccuccgggcggaucaccgugagcacgaagcgcucccagcaggccgugauccccaacaucggcagccggccccgcguccggaacauccccagccgcaucuccaucuacuggaccaucgugaagccgggcgacauccugcucaucaacagcaccgggaaccugaucgcgccccggggcuacuucaagauccgcuccggcaagagcuccaucaugcggagcgacgcccccaucgggaagugcaacuccgagugcaucacccccaacggcagcaucccgaacgacaagcccuuccagaacgugaaccgcaucacguacggggccugcccccgguacgucaagcagaacacccugaagcucgccaccggcaugcgcaacgugcccgagaagcagacccgggggaucuucggcgccaucgccggguucaucgagaacggcugggagggcaugguggacgggugguacggcuuccgccaccagaacuccgaggggcggggccaggcggccgaccucaagagcacgcaggccgccaucgaccagaucaacgggaagcugaaccgccugaucggcaagaccaacgagaaguuccaccagaucgagaaggaguucuccgaggucgagggccggauccaggaccuggagaaguacguggaggacaccaagaucgaccuguggagcuacaacgccgagcuccugguggcgcuggagaaccagcacaccaucgaccucacggacuccgagaugaacaagcuguucgagaagaccaagaagcagcugcgcgagaacgccgaggacauggggaacggcugcuucaagaucuaccacaagugcgacaacgccugcaucgggagcauccgcaacggcaccuacgaccacgacgucuaccgggacgaggcccucaacaaccgcuuccagaucaaggggguggagcugaaguccggcuacaaggacuggauccuguggaucagcuucgccaucuccugcuuccuccugugcguggcgcugcucggcuucaucaugugggccugccagaaggggaacauccggugcaacaucugcaucuga

SEQ ID NO: 74766 - RNA, 1701 nt, Artificial Sequence; identical to SEQ ID NO: 70879
  derived and/or modified CDS sequence (opt1) from hemagglutinin__InfluenzaA__AHC60167

SEQ ID NO: 74767 - RNA, 1701 nt, Artificial Sequence; identical to SEQ ID NO: 71806
  derived and/or modified CDS sequence (opt1) from hemagglutinin__InfluenzaA__AHC60179

SEQ ID NO: 74768 - RNA, 1701 nt, Artificial Sequence; identical to SEQ ID NO: 74717
  derived and/or modified CDS sequence (opt1) from hemagglutinin__InfluenzaA__AHC60191

SEQ ID NO: 74769 - RNA, 1701 nt, Artificial Sequence; identical to SEQ ID NO: 74717
  derived and/or modified CDS sequence (opt1) from hemagglutinin__InfluenzaA__AHC60203

SEQ ID NO: 74770 - RNA, 1701 nt, Artificial Sequence; identical to SEQ ID NO: 73098
  derived and/or modified CDS sequence (opt1) from hemagglutinin__InfluenzaA__AHC60215

SEQ ID NO: 74771 - RNA, 1701 nt, Artificial Sequence; identical to SEQ ID NO: 71806
  derived and/or modified CDS sequence (opt1) from hemagglutinin__InfluenzaA__AHC60239

SEQ ID NO: 74772 - RNA, 1701 nt, Artificial Sequence; identical to SEQ ID NO: 71806
  derived and/or modified CDS sequence (opt1) from hemagglutinin__InfluenzaA__AHC60251

SEQ ID NO: 74773 - RNA, 1701 nt, Artificial Sequence
  derived and/or modified CDS sequence (opt1) from hemagglutinin__InfluenzaA__AHC60263
augaagaccaucaucgcccugagcuacauccucugccugguguucgcccagaagcugcccggcaacgagaacuccaccgcgacgcucugccuggggcaccacgccgucccgaacggcaccaucgugaagaccaucaccaacgaccagaucgaggugacgaacgccaccgagcugguccagaacagcuccaccggggagaucugcgacagcccccaccagauccucgacggcgagaacugcacccugaucgacgcccugcucggggacccccagugcgacggcuuccagaacaagaagugggaccuguucguggagcgcuccaaggccuacagcaacugcuaccccuacgacgugccggacuacgcgucccugcggagccucgucgccuccagcggcacgcuggaguucaacaacgaguccuucaacuggaccggggugacccagaacggcaccagcuccgccugcauccgccggagcaacaacuccuucuucagccgccugaacuggcucacgcaccugaacuucaaguaccccgcccugaacgugaccaugcccaacaacgagcaguucgacaagcucuacaucuggggcguccaccaccccgggaccgacaaggaccagaucuuccuguacgcgcaggccuccgggcggaucaccgugagcacgaagcgcucccagcaggccgugaucccgaacaucggcagccggccccgcguccggaacauccccagccgcaucuccaucuacuggaccaucgugaagcccggcgacauccugcucaucaacagcaccgggaaccugaucgccccgcggggcuacuucaagauccgcuccggcaagagcuccaucaugcggagcgacgcccccaucgggaagugcaacuccgagugcaucacccccaacggcagcauccccaacgacaagccguuccagaacgugaaccgcaucacguacggggcgugcccccgguacgucaagcagaacacccugaagcucgccaccggcaugcgcaacgugcccgagaagcagacccgggggaucuucggcgccaucgccggguucaucgagaacggcugggagggcaugguggacgggugguacggcuuccgccaccagaacuccgaggggcggggccaggccgcggaccucaagagcacgcaggccgccaucgaccagaucaacgggaagcugaaccgccugaucggcaagaccaacgagaaguuccaccagaucgagaaggaguucuccgaggucgagggccggauccaggaccuggagaaguacguggaggacaccaagaucgaccuguggagcuacaacgccgagcuccugguggcccuggagaaccagcacaccaucgaccucacggacuccgagaugaacaagcuguucgagaagaccaagaagcagcugcgcgagaacgcggaggacauggggaacggcugcuucaagaucuaccacaagugcgacaacgccugcaucgggagcauccgcaacggcaccuacgaccacgacgucuaccgggacgaggcccucaacaaccgcuuccagaucaaggggguggagcugaaguccggcuacaaggacuggauccuguggaucagcuucgccaucuccugcuuccuccugugcguggcccugcucggcuucaucaugugggcgugccagaaggggaacauccggugcaacaucugcaucuga

SEQ ID NO: 74774 - RNA, 1701 nt, Artificial Sequence; identical to SEQ ID NO: 70879
  derived and/or modified CDS sequence (opt1) from hemagglutinin__InfluenzaA__AHC60275

SEQ ID NO: 74775 - RNA, 1701 nt, Artificial Sequence; identical to SEQ ID NO: 74761
  derived and/or modified CDS sequence (opt1) from hemagglutinin__InfluenzaA__AHC60287

SEQ ID NO: 74776 - RNA, 1701 nt, Artificial Sequence; identical to SEQ ID NO: 74642
  derived and/or modified CDS sequence (opt1) from hemagglutinin__InfluenzaA__AHC60299

SEQ ID NO: 74777 - RNA, 1701 nt, Artificial Sequence
  derived and/or modified CDS sequence (opt1) from hemagglutinin__InfluenzaA__AHC60311
augaagaccaucaucgcccugagcuacauccucugccugguguucgcccagaagcugcccggcaacgacaacuccaccgcgacgcucugccuggggcaccacgccgucccgaacggcaccaucgugaagaccaucaccaacgaccagaucgaggugacgaacgccaccgagcugguccagaacagcuccaccggggagaucugcgacagcccccaccagauccucgacggcgagaacugcacccugaucgacgcccugcucggggacccccagugcgacggcuuccagaacaagaagugggaccuguucguggagcgcuccaaggccuacagcaacugcuaccccuacgacgugccggacuacgcgucccugcggagccucgucgccuccagcggcacgcuggaguucgacaacgaguccuucaacuggaccggggugacccagaacggcaccagcuccgccugcauccgccggagcaacaacuccuucuucagccgccugaacuggcucacgcaccugaacuucaaguaccccgcccugaacgugaccaugcccaacaacgagcaguucgacaagcucuacaucuggggcguccaccaccccgggaccgacaaggaccagaucuuccuguacgcgcaggccuccgggcggaucaccgugagcacgaagcgcucccagcaggccgugaucccgaacaucggcagccggccccgcguccggaacauccccagccgcaucuccaucuacuggaccaucgugaagcccggcgacauccugcucaucaacagcaccgggaaccugaucgccccgcggggcuacuucaagauccgcuccggcaagagcuccaucaugcggagcgacgcccccaucgggaagugcaacuccgagugcaucacccccaacggcagcauccccaacgacaagccguuccagaacgugaaccgcaucacguacggggcgugcccccgguacgucaagcagaacacccugaagcucgccaccggcaugcgcaacgugcccgagaagcagacccgggggaucuucggcgccaucgccggguucaucgagaacggcugggagggcaugguggacgggugguacggcuuccgccaccagaacuccgaggggcggggccaggccgcggaccucaagagcacgcaggccgccaucgaccagaucaacgggaagcugaaccgccugaucggcaagaccaacgagaaguuccaccagaucgagaaggaguucuccgaggucgagggccggauccaggaccuggagaaguacguggaggacaccaagaucgaccuguggagcuacaacgccgagcuccugguggcccuggagaaccagcacaccaucgaccucacggacuccgagaugaacaagcuguucgagaagaccaagaagcagcugcgcgagaacgcggaggacauggggaacggcugcuucaagaucuaccacaagugcgacaacgccugcaucgggagcauccgcaacggcaccuacgaccacgacgucuaccgggacgaggcccucaacaaccgcuuccagaucaaggggguggagcugaaguccggcuacaaggacuggauccuguggaucagcuucgccaucuccugcuuccuccugugcguggcccugcucggcuucaucaugugggcgugccagaaggggaacauccggugcaacaucugcaucuga

SEQ ID NO: 74778 - RNA, 1701 nt, Artificial Sequence; identical to SEQ ID NO: 71806
  derived and/or modified CDS sequence (opt1) from hemagglutinin__InfluenzaA__AHC60323

SEQ ID NO: 74779 - RNA, 1701 nt, Artificial Sequence; identical to SEQ ID NO: 73098
  derived and/or modified CDS sequence (opt1) from hemagglutinin__InfluenzaA__AHC60335

SEQ ID NO: 74780 - RNA, 1701 nt, Artificial Sequence; identical to SEQ ID NO: 70879
  derived and/or modified CDS sequence (opt1) from hemagglutinin__InfluenzaA__AHC60347

SEQ ID NO: 74781 - RNA, 1701 nt, Artificial Sequence; identical to SEQ ID NO: 71006
  derived and/or modified CDS sequence (opt1) from hemagglutinin__InfluenzaA__AHC60359

SEQ ID NO: 74782 - RNA, 1701 nt, Artificial Sequence; identical to SEQ ID NO: 74703
  derived and/or modified CDS sequence (opt1) from hemagglutinin__InfluenzaA__AHC60371

SEQ ID NO: 74783 - RNA, 1701 nt, Artificial Sequence; identical to SEQ ID NO: 70879
  derived and/or modified CDS sequence (opt1) from hemagglutinin__InfluenzaA__AHC60383

SEQ ID NO: 74784 - RNA, 1701 nt, Artificial Sequence; identical to SEQ ID NO: 71006
  derived and/or modified CDS sequence (opt1) from hemagglutinin__InfluenzaA__AHC60395

SEQ ID NO: 74785 - RNA, 1701 nt, Artificial Sequence; identical to SEQ ID NO: 74717
  derived and/or modified CDS sequence (opt1) from hemagglutinin__InfluenzaA__AHC60407

SEQ ID NO: 74786 - RNA, 1701 nt, Artificial Sequence; identical to SEQ ID NO: 70879
  derived and/or modified CDS sequence (opt1) from hemagglutinin__InfluenzaA__AHC60419

SEQ ID NO: 74787 - RNA, 1701 nt, Artificial Sequence; identical to SEQ ID NO: 71006
  derived and/or modified CDS sequence (opt1) from hemagglutinin__InfluenzaA__AHC60431

SEQ ID NO: 74788 - RNA, 1701 nt, Artificial Sequence; identical to SEQ ID NO: 70879
  derived and/or modified CDS sequence (opt1) from hemagglutinin__InfluenzaA__AHC60455

SEQ ID NO: 74789 - RNA, 1701 nt, Artificial Sequence; identical to SEQ ID NO: 70879
  derived and/or modified CDS sequence (opt1) from hemagglutinin__InfluenzaA__AHC60467

SEQ ID NO: 74790 - RNA, 1701 nt, Artificial Sequence; identical to SEQ ID NO: 74641
  derived and/or modified CDS sequence (opt1) from hemagglutinin__InfluenzaA__AHC60479

SEQ ID NO: 74791 - RNA, 1701 nt, Artificial Sequence; identical to SEQ ID NO: 71806
  derived and/or modified CDS sequence (opt1) from hemagglutinin__InfluenzaA__AHC60491

SEQ ID NO: 74792 - RNA, 1701 nt, Artificial Sequence
  derived and/or modified CDS sequence (opt1) from hemagglutinin__InfluenzaA__AHC60503
augaagaccaucaucgcccugagcuacauccucugccugguguucgcccagaagcugcccggcaacgacaacuccaccgcgacgcucugccuggggcaccacgccgucccgaacggcaccaucgugaagaccaucaccaacgaccagaucgaggugacgaacgccaccgagcugguccagagcuccagcaccggggagaucugcaacagcccccaccagauccucgacggcgagaacugcacccugaucgacgcccugcucggggacccccagugcgacggcuuccagaacaagaagugggaccuguucguggagcgcagcaaggccuacuccaacugcuaccccuacgacgugccggacuacgcgagccugcggucccucgucgccagcuccggcacgcuggaguucaacaacgagagcuucaacuggaccggggugacccagaacggcaccuccagcgccugcauccgccgguccaacaacagcuucuucucccgccugaacuggcucacgcaccugaacuucaaguaccccgcccugaacgugaccaugcccaacaacgagcaguucgacaagcucuacaucuggggcguccaccaccccgggaccgacaaggaccagaucuuccuguacgcgcaggccagcgggcggaucaccguguccacgaagcgcagccagcaggccgugaucccgaacaucggcagccggccccgcguccggaacauccccucccgcaucagcaucuacuggaccaucgugaagcccggcgacauccugcucaucaacuccaccgggaaccugaucgccccgcggggcuacuucaagauccgcagcgggaaguccagcaucaugcgguccgacgcccccaucggcaagugcaacagcgcgugcaucacccccaacggcuccauccccaacgacaagccguuccagaacgugaaccgcaucacguacggggccugcccccgguacgucaagcagaacacccugaagcucgccaccggcaugcgcaacgugcccgagaagcagacccgggggaucuucggcgccaucgccggguucaucgagaacggcugggagggcaugguggacgggugguacggcuuccgccaccagaacagcgaggggcggggccaggcggccgaccugaaguccacgcaggccgccaucgaccagaucaacgggaagcugaaccgccucaucggcaagaccaacgagaaguuccaccagaucgagaaggaguucagcgaggucgagggccggauccaggaccuggagaaguacguggaggacaccaagaucgaccugugguccuacaacgccgagcuccugguggcgcuggagaaccagcacaccaucgaccucacggacagcgagaugaacaagcuguucgagaagaccaagaagcagcugcgcgagaacgccgaggacauggggaacggcugcuucaagaucuaccacaagugcgacaacgccugcaucggguccauccgcaacggcaccuacgaccacgacgucuaccgggacgaggcccucaacaaccgcuuccagaucaaggggguggagcugaaguccggcuacaaggacuggauccuguggaucuccuucgccaucagcugcuuccuccugugcgugguccugcucggcuucaucaugugggcgugccagaaggggaacauccggugcaacaucugcaucuga

SEQ ID NO: 74793 - RNA, 1701 nt, Artificial Sequence; identical to SEQ ID NO: 71006
  derived and/or modified CDS sequence (opt1) from hemagglutinin__InfluenzaA__AHC60515

SEQ ID NO: 74794 - RNA, 1701 nt, Artificial Sequence; identical to SEQ ID NO: 71806
  derived and/or modified CDS sequence (opt1) from hemagglutinin__InfluenzaA__AHC60527

SEQ ID NO: 74795 - RNA, 1701 nt, Artificial Sequence; identical to SEQ ID NO: 71006
  derived and/or modified CDS sequence (opt1) from hemagglutinin__InfluenzaA__AHC60539

SEQ ID NO: 74796 - RNA, 1701 nt, Artificial Sequence; identical to SEQ ID NO: 74653
  derived and/or modified CDS sequence (opt1) from hemagglutinin__InfluenzaA__AHC60551

SEQ ID NO: 74797 - RNA, 1701 nt, Artificial Sequence; identical to SEQ ID NO: 73098
  derived and/or modified CDS sequence (opt1) from hemagglutinin__InfluenzaA__AHC60563

SEQ ID NO: 74798 - RNA, 1701 nt, Artificial Sequence; identical to SEQ ID NO: 73098
  derived and/or modified CDS sequence (opt1) from hemagglutinin__InfluenzaA__AHC60575

SEQ ID NO: 74799 - RNA, 1701 nt, Artificial Sequence
  derived and/or modified CDS sequence (opt1) from hemagglutinin__InfluenzaA__AHC60587
augaagaccaucaucgcccugagcuacauccucugccugguguucgcccagaagcugcccggcaacgacaacuccaccgcgacgcucugccuggggcaccacgccgucccgaacggcaccaucgugaagaccaucaccaacgaccagaucgaggugacgaacgccaccgagcugguccagaacagcuccaccggggagaucugcgacagcccccaccagauccucgacggcgagaacugcacccugaucgacgcccugcucggggacccccagugcgacggcuuccagaacaagaagugggaccuguucguggagcgcuccaaggccuacagcaacugcuaccccuacgacgugccggacuacgcgucccugcggagccucgucgccuccagcggcacgcuggaguucaacaacgaguccuucaacuggaccggggugacccagaacggcaccagcuccgccugcauccgccggagcaacaacuccuucuucagccgccugaacuggcucacgcaccugaacuucaaguaccccgcccugaacgugaccaugcccaacaacgagcaguucgacaagcucuacaucuggggcguccaccaccccgggaccgacaaggaccagaucuuccuguacgcgcaggccuccgggcggaucaccgugagcacgaagcgcucccagcaggccgugaucccgaacaucggcagccggccccgcguccggaacauccccagccgcaucuccaucuacuggaccaucgugaagcccggcgacauccugcucaucaacagcaccgggaaccugaucgccccgcggggcuacuucaagauccgcuccggcaagagcuccaucaugcggagcgacgcccccaucgggaagugcaacuccgagugcaucacccccaacggcagcauccccaacgacaagccguuccagaacgugaaccgcaucacguacggggcgugcccccgguacgucaagcagaacacccugaagcucgccaccggcaugcgcaacgugcccgagaagcagacccgggggaucuucggcgccaucgccggguucaucgagaacggcugggagggcaugguggacgggugguacggcuuccgccaccagaacuccgaggggcggggccaggccgcggaccucaagagcacgcaggccgccaucgaccagaucaacgggaagcugaaccgccugaucggcaagaccaacgagaaguuccaccagaucgagaaggaguucuccgaggucgagggccggauccagaaccuggagaaguacguggaggacaccaagaucgaccuguggagcuacaacgccgagcuccugguggcccuggagaaccagcacaccaucgaccucacggacuccgagaugaacaagcuguucgagaagaccaagaagcagcugcgcgagaacgcggaggacauggggaacggcugcuucaagaucuaccacaagugcgacaacgccugcaucgggagcauccgcaacggcaccuacgaccacgacgucuaccgggacgaggcccucaacaaccgcuuccagaucaaggggguggagcugaaguccggcuacaaggacuggauccuguggaucagcuucgccaucuccugcuuccuccugugcguggcccugcucggcuucaucaugugggcgugccagaaggggaacauccggugcaacaucugcaucuga

SEQ ID NO: 74800 - RNA, 1701 nt, Artificial Sequence; identical to SEQ ID NO: 73098
  derived and/or modified CDS sequence (opt1) from hemagglutinin__InfluenzaA__AHC60599

SEQ ID NO: 74801 - RNA, 1701 nt, Artificial Sequence; identical to SEQ ID NO: 70879
  derived and/or modified CDS sequence (opt1) from hemagglutinin__InfluenzaA__AHC60611

SEQ ID NO: 74802 - RNA, 1701 nt, Artificial Sequence
  derived and/or modified CDS sequence (opt1) from hemagglutinin__InfluenzaA__AHC60623
augaagaccaucaucgcccugagcuacauccucugccugguguucgcccagaagcugcccggcaacgacaacuccaccgcgacgcucugccuggggcaccacgccgucccgaacggcaccaucgugaagaccaucaccaacgaccagaucgaggugacgaacgccaccgagcugguccagagcuccagcaccggggagaucugcgacagcccccaccagauccucgacggcgagaacugcacccugaucgacgcccugcucggggacccccagugcgacggcuuccagaacaagaagugggaccuguucguggagcgcagcaaggccuacuccaacugcuaccccuacgacgugccggacuacgcgagccugcggucccucgucgccagcuccggcacgcuggaguucaacaacgagagcuucaacuggaccggggugacccagaacggcaccuccagcgccugcauccgccgguccaacagcuccuucuucagccgccugaacuggcucacgcaccugaacuucaaguaccccgcccugaacgugaccaugcccaacaacgagcaguucgacaagcucuacaucuggggcguccaccaccccgggaccgacaaggaccagaucuuccuguacgcgcaguccagcgggcggaucaccgugagcacgaagcgcucccagcaggccgugaucccgaacaucggcagccggccccgcauccggaacauccccucccgcaucagcaucuacuggaccaucgucaagcccggcgacauccugcucaucaacuccaccgggaaccugaucgccccgcggggcuacuucaagauccgcaacgggaaguccuccaucaugcggagcgacgcccccaucggcaagugcaacuccgagugcaucacccccaacggcagcauccccaacgacaagccguuccagaacgugaaccgcaucacguacggggccugcccccgguacgugaagcaguccacccugaagcucgcgaccggcaugcgcaacguccccgagaagcagacccgggggaucuucggcgccaucgccggguucaucgagaacggcugggagggcaugguggacgggugguacggcuuccgccaccagaacagcgaggggcggggccaggccgccgaccugaaguccacgcaggcggccaucgaccagaucaacgggaagcugaaccgccucaucggcaagaccaacgagaaguuccaccagaucgagaaggaguucagcgagguggagggccggauccaggaccuggagaaguacgucgaggacaccaagaucgaccugugguccuacaacgccgagcuccugguggcccuggagaaccagcacaccaucgaccucacggacagcgagaugaacaagcuguucgagaagaccaagaagcagcugcgcgagaacgccgaggacauggggaacggcugcuucaagaucuaccacaagugcgacaacgcgugcaucggguccauccgcaacggcaccuacaaccacgacguguaccgggacgaggcccucaacaaccgcuuccagaucaagggggucgagcucaagagcggcuacaaggacuggauccuguggaucuccuucgccaucagcugcuuccugcugugcguggcccugcucggcuucaucaugugggccugccagaaggggaacauccggugcaacaucugcaucuga

SEQ ID NO: 74803 - RNA, 1701 nt, Artificial Sequence; identical to SEQ ID NO: 73098
  derived and/or modified CDS sequence (opt1) from hemagglutinin__InfluenzaA__AHC60635

SEQ ID NO: 74804 - RNA, 1701 nt, Artificial Sequence
  derived and/or modified CDS sequence (opt1) from hemagglutinin__InfluenzaA__AHC60647
augaagaccaucaucgcccugagcuacauccucugccugguguucacccagaagcugcccggcaacgacaacuccacggccacccucugccuggggcaccacgcggucccgaacggcaccaucgugaagaccaucacgaacgaccagaucgaggugaccaacgccaccgagcugguccagaacagcuccaccggggagaucugcgacagcccccaccagauccucgacggcgagaacugcacgcugaucgacgcccugcucggggacccccagugcgacggcuuccagaacaagaagugggaccuguucguggagcgcuccaaggccuacagcaacugcuaccccuacgacgugccggacuacgccucccugcggagccucgucgcguccagcggcacccuggaguucaacaacgaguccuucaacuggaccggggugacccagaacggcacgagcuccgccugcauccgccggagcaacaacuccuucuucagccgccugaacuggcucacccaccugaacuucaaguaccccgcccugaacgugaccaugcccaacaacgagcaguucgacaagcucuacaucuggggcguccaccaccccgggaccgacaaggaccagaucuuccuguacgcccaggcguccgggcggaucacggugagcaccaagcgcucccagcaggccgugaucccgaacaucggcagccggccccgcguccggaacauccccagccgcaucuccaucuacuggaccaucgugaagcccggcgacauccugcucaucaacagcaccgggaaccugaucgccccgcggggcuacuucaagauccgcuccggcaagagcuccaucaugcggagcgacgcccccaucgggaagugcaacuccgagugcaucacgcccaacggcagcauccccaacgacaagccguuccagaacgugaaccgcaucaccuacggggccugcccccgguacgucaagcagaacacccugaagcucgcgaccggcaugcgcaacgugcccgagaagcagacgcgggggaucuucggcgccaucgccggguucaucgagaacggcugggagggcaugguggacgggugguacggcuuccgccaccagaacuccgaggggcggggccaggccgccgaccucaagagcacccaggcggccaucgaccagaucaacgggaagcugaaccgccugaucggcaagaccaacgagaaguuccaccagaucgagaaggaguucuccgaggucgagggccggauccaggaccuggagaaguacguggaggacaccaagaucgaccuguggagcuacaacgccgagcuccugguggcccuggagaaccagcacacgaucgaccucaccgacuccgagaugaacaagcuguucgagaagaccaagaagcagcugcgcgagaacgccgaggacauggggaacggcugcuucaagaucuaccacaagugcgacaacgcgugcaucgggagcauccgcaacggcaccuacgaccacgacgucuaccgggacgaggcccucaacaaccgcuuccagaucaaggggguggagcugaaguccggcuacaaggacuggauccuguggaucagcuucgccaucuccugcuuccuccugugcguggcccugcucggcuucaucaugugggccugccagaaggggaacauccggugcaacaucugcaucuga

SEQ ID NO: 74805 - RNA, 1701 nt, Artificial Sequence
  derived and/or modified CDS sequence (opt1) from hemagglutinin__InfluenzaA__AHC60659
augaagaccaucaucgcccugagcuacauccucugccugguguucacccagaagcugcccggcaacgacaacuccacggccacccucugccuggggcaccacgcggucccgaacggcaccaucgugaagaccaucacgaacgaccagaucgaggugaccaacgccaccgagcugguccagagcuccagcaccggggagaucugcaacagcccccaccagauccucgacggcgagaacugcacgcugaucgacgcccugcucggggacccccagugcgacggcuuccagaacaagaagugggaccuguucguggagcgcagcaaggcccacuccaacugcuaccccuacgacgugccggacuacgccagccugcggucccucgucgcgagcuccggcacccuggaguucaacaacgagagcuucaacuggaccggggugacccagaacggcacguccagcgccugcauccgccgguccaacaacagcuucuucucccgccugaacuggcucacccaccugaacuucaaguaccccgcccugaacgugaccaugcccaacaacgagcaguucgacaagcucuacaucuggggcguccaccaccccgggaccgacaaggaccagaucuuccuguacgcccaggcggccgggcggaucacggugagcaccaagcgcucccagcaggccgugaucccgaacaucggcagccggccccgcguccggaacauccccagccgcguguccaucuacuggaccaucgugaagcccggcgacauccugcucaucaacagcaccgggaaccugaucgccccgcggggcuacuucaagauccgcuccgggaaguccuccaucaugcggagcgacgcccccaucggcaagugcaacuccgcgugcaucacgcccaacggcagcauccccaacgacaagccguuccagaacgucaaccgcaucaccuacggggccugcccccgguacgugaagcagaacacccugaagcucgccaccggcaugcgcaacgugcccgagaagcagacgcgggggaucuucggcgccaucgccggguucaucgagaacggcugggagggcauggucgacgggugguacggcuuccgccaccagaacuccgaggggcggggccaggcggccgaccucaagagcacccaggccgccaucgaccagaucaacgggaagcugaaccgccugaucggcaagaccaacgagaaguuccaccagaucgagaaggaguucuccgagguggagggccggauccaggaccuggagaaguacguggaggacaccaagaucgaccuguggagcuacaacgccgagcuccuggucgcgcuggagaaccagcacacgaucgaccucaccgacuccgagaugaacaagcuguucgagaagaccaagaagcagcugcgcgagaacgccgaggacauggggaacggcugcuucaagaucuaccacaagugcgacaacgccugcaucgggagcauccgcaacggcaccuacgaccacgacguguaccgggacgaggcccucaacaaccgcuuccagaucaaggggguggagcugaaguccggcuacaaggacuggauccuguggaucagcuucgccaucuccugcuuccuccugugcgucgcgcugcucggcuucaucaugugggccugccagaaggggaacauccggugcaacaucugcaucuga

SEQ ID NO: 74806 - RNA, 1701 nt, Artificial Sequence
  derived and/or modified CDS sequence (opt1) from hemagglutinin__InfluenzaA__AHC60671
augaagaccaucaucgcccugagcuacauccucugccugguguucgcccagaagcugcccggcaacgacaacuccaccgcgacgcucugccuggggcaccacgccgucccgaacggcaccaucgugaagaccaucaccaacgaccagaucgaggugacgaacgccaccgagcugguccagagcuccagcaccggggagaucugcaacagcccccaccagauccucgacggcgagaacugcacccugaucgacgcccugcucggggacccccagugcgacggcuuccagaacaaggagugggaccuguucguggagcgcagcaaggcccacuccaacugcuaccccuacgacgugccggacuacgcgagccugcggucccucgucgccagcuccggcacgcuggaguucaacaacgagagcuucaacuggaccggggugacccagaacggcaccuccagcgccugcauccgccgguccaacaacagcuucuucucccgccugaacuggcucacgcaccugaacuucaaguaccccgcccugaacgugaccaugcccaacaacgagcaguucgacaagcucuacaucuggggcguccaccaccccgggaccgacaaggaccagaucuuccuguacgcgcaggccagcgggcggaucaccguguccacgaagcgcagccagcaggccgugaucccgaacaucggcagccggccccgcguccggaacauccccucccgcgugagcaucuacuggaccaucgugaagcccggcgacauccugcucaucaacuccaccgggaaccugaucgccccgcggggcuacuucaagauccgcagcgggaaguccagcaucaugcgguccgacgcccccaucggcaagugcaacagcgcgugcaucacccccaacggcuccauccccaacgacaagccguuccagaacgucaaccgcaucacguacggggccugcccccgguacgugaagcagaacacccugaagcucgccaccggcaugcgcaacgugcccgagaagcagacccgggggaucuucggcgccaucgccggguucaucgagaacggcugggagggcauggucgacgggugguacggcuuccgccaccagaacagcgaggggcggggccaggcggccgaccugaaguccacgcaggccgccaucgaccagaucaacgggaagcugaaccgccucaucggcaagaccaacgagaaguuccaccagaucgagaaggaguucagcgagguggagggccggauccaggaccuggagaaguacguggaggacaccaagaucgaccugugguccuacaacgccgagcuccuggucgcgcuggagaaccagcacaccaucgaccucacggacagcgagaugaacaagcuguucgagaagaccaagaagcagcugcgcgagaacgccgaggacauggggaacggcugcuucaagaucuaccacaagugcgacaacgccugcaucggguccauccgcaacggcaccuacgaccacgacguguaccgggacgaggcccucaacaaccgcuuccagaucaaggggguggagcugaaguccggcuacaaggacuggauccuguggaucuccuucgccaucagcugcuuccuccugugcgucgcgcugcucggcuucaucaugugggccugccagaaggggaacauccggugcaacaucugcaucuga

SEQ ID NO: 74807 - RNA, 1701 nt, Artificial Sequence
  derived and/or modified CDS sequence (opt1) from hemagglutinin__InfluenzaA__AHC60683
augaagaccaucaucgcccugagcuacauccucugccugguguucgcccagaagcugcccggcaacgacaacuccaccgcgacgcucugccuggggcaccacgccgucccgaacggcaccaucgugaagaccaucaccaacgaccagaucgaggugacgaacgccaccgagcugguccagagcuccagcaccggggagaucugcaacagcccccaccagauccucgacggcgagaacugcacccugaucgacgcccugcucggggacccccagugcgacggcuuccagaacaagaagugggaccuguucguggagcgcagcaaggcccacuccaacugcuaccccuacgacgugccggacuacgcgagccugcggucccucgucgccagcuccggcacgcuggaguucaacaacgagagcuucaacuggaccggggugacccagaacggcaccuccagcgccugcauccgccgguccaacaacagcuucuucucccgccugaacuggcucacgcaccugaacuucaaguaccccgcccugaacgugaccaugcccaacaacgagcaguucgacaagcucuacaucuggggcguccaccaccccgggaccgacaaggaccagaucuuccuguacgcgcaggccgccgggcggaucaccgugagcacgaagcgcucccagcaggccgugaucccgaacaucggcagccggccccgcguccggaacauccccagccgcguguccaucuacuggaccaucgugaagcccggcgacauccugcucaucaacagcaccgggaaccugaucgccccgcggggcuacuucaagauccgcuccgggaaguccuccaucauccggagcgacgcgcccaucggcaagugcaacuccgccugcaucacccccaacggcagcauccccaacgacaagccguuccagaacgucaaccgcaucacguacggggccugcccccgguacgugaagcagaacacccugaagcucgccaccggcaugcgcaacgugcccgagaagcagacccgggggaucuucggcgccaucgcgggguucaucgagaacggcugggagggcauggucgacgggugguacggcuuccgccaccagaacuccgaggggcggggccaggccgccgaccucaagagcacgcaggccgccaucgaccagaucaacgggaagcugaaccgccugaucggcaagaccaacgagaaguuccaccagaucgagaaggaguucuccgagguggagggccggauccaggaccuggagaaguacguggaggacaccaagaucgaccuguggagcuacaacgcggagcuccuggucgcccuggagaaccagcacaccaucgaccucacggacuccgagaugaacaagcuguucgagaagaccaagaagcagcugcgcgagaacgccgaggacauggggaacggcugcuucaagaucuaccacaagugcgacaacgccugcaucgggagcauccgcaacggcaccuacgaccacgacguguaccgggacgaggcccucaacaaccgcuuccagaucaaggggguggagcugaaguccggcuacaaggacuggauccuguggaucagcuucgcgaucuccugcuuccuccugugcgucgcccugcucggcuucaucaugugggccugccagaaggggaacauccggugcaacaucugcaucuga

SEQ ID NO: 74808 - RNA, 1701 nt, Artificial Sequence
  derived and/or modified CDS sequence (opt1) from hemagglutinin__InfluenzaA__AHC60695
augaagaccaucaucgcccugagcuacauccucugccugguguucgcccagaagcugcccggcaacgacaacuccaccgcgacgcucugccuggggcaccacgccgucccgaacggcaccaucgugaagaccaucaccaacgaccagaucgaggugacgaacgccaccgagcugguccagagcuccagcaccggggagaucugcaacagcccccaccagauccucgacggcgagaacugcacccugaucgacgcccugcucggggacccccagugcgacggcuuccagaacaagaagugggaccuguucguggagcgcagcaaggcccacuccaacugcuaccccuacgacgugccggacuacgcgagccugcggucccucgucgccagcuccggcacgcuggaguucaacaacgagagcuucaacuggaccggggugacccagaacggcaccuccagcgccugcaugcgcggguccaacaacagcuucuucucccggcugaacuggcucacgcaccugaacuucaaguaccccgcccugaacgugaccaugcccaacaacgagcaguucgacaagcucuacaucuggggcguccaccaccccgggaccgacaaggaccagaucuuccuguacgcgcaggccagcggccgcaucaccguguccacgaagcggagccagcaggccgugaucccgaacaucggcagccgcccccggguccgcaacauccccucccgggugagcaucuacuggaccaucgugaagcccggggacauccugcucaucaacuccaccggcaaccugaucgccccgcgcggguacuucaagauccggagcggcaaguccagcaucaugcgcuccgacgcccccaucggcaagugcaacagcgcgugcaucacccccaacggguccauccccaacgacaagccguuccagaacgucaaccggaucacguacggcgccugcccccgcuacgugaagcagaacacccugaagcucgccaccgggaugcggaacgugcccgagaagcagacccgcggcaucuucggggccaucgccggcuucaucgagaacggcugggaggggauggucgacggcugguacggguuccggcaccagaacagcgagggccgcgggcaggcggccgaccugaaguccacgcaggccgccaucgaccagaucaacggcaagcugaaccggcucaucggcaagaccaacgagaaguuccaccagaucgagaaggaguucagcgagguggaggggcgcauccaggaccuggagaaguacguggaggacaccaagaucgaccugugguccuacaacgccgagcuccuggucgcgcuggagaaccagcacaccaucgaccucacggacagcgagaugaacaagcuguucgagaagaccaagaagcagcugcgggagaacgccgaggacaugggcaacgggugcuucaagaucuaccacaagugcgacaacgccugcaucggcuccauccgcaacgggaccuacgaccacgacguguaccgcgacgaggcccucaacaaccgguuccagaucaagggcguggagcugaaguccggcuacaaggacuggauccuguggaucuccuucgccaucagcugcuuccuccugugcgucgcgcugcucggguucaucaugugggccugccagaagggcaacauccgcugcaacaucugcaucuga

SEQ ID NO: 74809 - RNA, 1701 nt, Artificial Sequence
  derived and/or modified CDS sequence (opt1) from hemagglutinin__InfluenzaA__AHC60707
augaagaccaucaucgcccugagcuacauccucugccugguguucgcccagaagcugcccggcaacgacaacuccaccgcgacgcucugccuggggcaccacgccgucccgaacggcaccaucgugaagaccaucaccgacgaccagaucgaggugacgaacgccaccgagcugguccagaacagcuccaccggggagaucugcgacagcccccaccagauccucgacggcgagaacugcacccugaucgacgcccugcucggggacccccagugcgacggcuuccagaacaagaagugggaccuguucguggagcgcuccaaggccuacagcaacugcuaccccuacgacgugccggacuacgcgucccugcggagccucgucgccuccagcggcacgcuggaguucaacaacgaguccuucaacuggaccggggugacccagaacggcaccagcuccgccugcauccgccggagcaacaacuccuucuucagccgccugaacuggcucacgcaccugaacuucaaguaccccgcccugaacgugaccaugcccaacaacgagcaguucgacaagcucuacaucuggggcguccaccaccccgggaccgacaaggaccagaucuuccuguacgcgcaggccuccgggcggaucaccgugagcacgaagcgcucccagcaggccgugaucccgaacaucggcagccggccccgcguccggaacauccccagccgcaucuccaucuacuggaccaucgugaagcccggcgacauccugcucaucaacagcaccgggaaccugaucgccccgcggggcuacuucaagauccgcuccggcaagagcuccaucaugcggagcgacgcccccaucgggaagugcaacuccgagugcaucacccccaacggcagcauccccaacgacaagccguuccagaacgugaaccgcaucacguacggggcgugcccccgguacgucaagcagaacacccugaagcucgccaccggcaugcgcaacgugcccgagaagcagacccgggggaucuucggcgccaucgccggguucaucgagaacggcugggagggcaugguggacgggugguacggcuuccgccaccagaacuccgaggggcggggccaggccgcggaccucaagagcacgcaggccgccaucgaccagaucaacgggaagcugaaccgccugaucggcaagaccaacgagaaguuccaccagaucgagaaggaguucuccgaggucgagggccggauccaggaccuggagaaguacguggaggacaccaagaucgaccuguggagcuacaacgccgagcuccugguggcccuggagaaccagcacaccaucgaccucacggacuccgagaugaacaagcuguucgagaagaccaagaagcagcugcgcgagaacgcggaggacauggggaacggcugcuucaagaucuaccacaagugcgacaacgccugcaucgggagcauccgcaacggcaccuacgaccacgacgucuaccgggacgaggcccucaacaaccgcuuccagaucaaggggguggagcugaaguccggcuacaaggacuggaucaucuggaucagcuucgccaucuccugcuuccugcucugcguggcccugcugggcuucaucaugugggcgugccagaaggggaacauccggugcaacaucugcaucuga

SEQ ID NO: 74810 - RNA, 1701 nt, Artificial Sequence; identical to SEQ ID NO: 70879
  derived and/or modified CDS sequence (opt1) from hemagglutinin__InfluenzaA__AHC60719

SEQ ID NO: 74811 - RNA, 1701 nt, Artificial Sequence; identical to SEQ ID NO: 71006
  derived and/or modified CDS sequence (opt1) from hemagglutinin__InfluenzaA__AHC60731

SEQ ID NO: 74812 - RNA, 1701 nt, Artificial Sequence; identical to SEQ ID NO: 74717
  derived and/or modified CDS sequence (opt1) from hemagglutinin__InfluenzaA__AHC60743

SEQ ID NO: 74813 - RNA, 1701 nt, Artificial Sequence; identical to SEQ ID NO: 67435
  derived and/or modified CDS sequence (opt1) from hemagglutinin__InfluenzaA__AHC60767

SEQ ID NO: 74814 - RNA, 1701 nt, Artificial Sequence
  derived and/or modified CDS sequence (opt1) from hemagglutinin__InfluenzaA__AHC60779
augaagaccaucaucgcccugagcuacauccucugccugguguucgcccagaagcugcccggcaacgacaacuccaccgcgacgcucugccuggggcaccacgccgucccgaacggcaccaucgugaagaccaucaccaacgaccagaucgaggugacgaacgccaccgagcugguccagagcuccagcaccggggagaucugcaacagcccccaccagauccucgacggcgagaacugcacccugaucgacgcccugcucggggacccccagugcgacggcuuccagaacaagaagugggaccuguucguggagcgcagcaaggcccacuccaacugcuaccccuacgacgugccggacuacgcgagccugcggucccucgucgccagcuccggcacgcuggaguucaacaacgagcgcuucaacuggaccggggugacccagaacggcaccagcuccgccugcauccggcgcagcaacaacuccuucuucagccggcugaacuggcucacgcaccugaacuucaaguaccccgcccugaacgugaccaugcccaacaacgagcaguucgacaagcucuacaucuggggcguccaccaccccgggaccgacaaggaccagaucuuccuguacgcgcaggccgccgggcgcaucaccguguccacgaagcggagccagcaggccgugaucccgaacaucggcucccgcccccggguccgcaacauccccagccgggugagcaucuacuggaccaucgugaagcccggcgacauccugcucaucaacuccaccgggaaccugaucgccccgcgcggcuacuucaagauccggagcgggaaguccagcaucaugcgcuccgacgcgcccaucggcaagugcaacagcgccugcaucacccccaacggcuccauccccaacgacaagccguuccagaacgucaaccggaucacguacggggccugcccccgcuacgugaagcagaacacccugaagcucgccaccggcaugcggaacgugcccgagaagcagacccgcgggaucuucggcgccaucgcgggguucaucgagaacggcugggagggcauggucgacgggugguacggcuuccggcaccagaacagcgaggggcgcggccaggccgccgaccugaaguccacgcaggccgccaucgaccagaucaacgggaagcugaaccggcucaucggcaagaccaacgagaaguuccaccagaucgagaaggaguucagcgagguggagggccgcauccaggaccuggagaaguacguggaggacaccaagaucgaccugugguccuacaacgcggagcuccuggucgcccuggagaaccagcacaccaucgaccucacggacagcgagaugaacaagcuguucgagaagaccaagaagcagcugcgcgagaacgccgaggacauggggaacggcugcuucaagaucuaccacaagugcgacaacgccugcaucggguccauccggaacggcaccuacgaccacgacguguaccgcgacgaggcccucaacaaccgguuccagaucaaggggguggagcugaaguccggcuacaaggacuggauccuguggaucuccuucgcgaucagcugcuuccuccugugcgucgcccugcucggcuucaucaugugggccugccagaaggggaacauccgcugcaacaucugcaucuga

SEQ ID NO: 74815 - RNA, 1701 nt, Artificial Sequence; identical to SEQ ID NO: 71006
  derived and/or modified CDS sequence (opt1) from hemagglutinin__InfluenzaA__AHC60791

SEQ ID NO: 74816 - RNA, 1701 nt, Artificial Sequence; identical to SEQ ID NO: 74675
  derived and/or modified CDS sequence (opt1) from hemagglutinin__InfluenzaA__AHC60803

SEQ ID NO: 74817 - RNA, 1701 nt, Artificial Sequence; identical to SEQ ID NO: 70879
  derived and/or modified CDS sequence (opt1) from hemagglutinin__InfluenzaA__AHC60815

SEQ ID NO: 74818 - RNA, 1701 nt, Artificial Sequence
  derived and/or modified CDS sequence (opt1) from hemagglutinin__InfluenzaA__AHC60827
augaagaccaucaucgcccugagcuacauccucugccugguguucgcccagaagcugcccggcaacgacaacuccaccgcgacgcucugccuggggcaccacgccgucccgaacggcaccaucgugaagaccaucaccaacgaccagaucgaggugacgaacgccaccgagcugguccagagcuccagcaccgacgagaucugcaacagcccccaccagauccucgacggggagaacugcacccugaucgacgcccugcucggcgacccccagugcgacggguuccagaacaagaagugggaccuguucguggagcgcagcaaggcccacuccaacugcuaccccuacgacgugccggacuacgcgagccugcggucccucgucgccagcuccggcacgcuggaguucaacaacgagagcuucaacuggaccggcgugacccagaacgggaccuccagcgccugcauccgcggcuccaacaacagcuucuucucccggcugaacuggcucacgcaccugaacuucaaguaccccgcccugaacgugaccaugcccaacaacgagcaguucgacaagcucuacaucuggggcguccaccaccccgggaccgacaaggaccagaucuuccuguacgcgcaggccagcgggcgcaucaccguguccacgaagcggagccagcaggccgugaucccgaacaucggcagccgcccccggguccgcaacauccccucccgggugagcaucuacuggaccaucgugaagcccggcgacauccugcucaucaacuccaccgggaaccugaucgccccgcgcggcuacuucaagauccggagcgggaaguccagcaucaugcgcuccgacgcccccaucggcaagugcaacagcgcgugcaucacccccaacggcuccauccccaacgacaagccguuccagaacgucaaccggaucacguacggggccugcccccgcuacgugaagcagaacacccugaagcucgccaccggcaugcggaacgugcccgagaagcagacccgcgggaucuucggcgccaucgccggguucaucgagaacggcugggagggcauggucgacgggugguacggcuuccggcaccagaacagcgaggggcgcggccaggcggccgaccugaaguccacgcaggccgccaucgaccagaucaacgggaagcugaaccggcucaucggcaagaccaacgagaaguuccaccagaucgagaaggaguucagcgagguggagggccgcauccaggaccuggagaaguacguggaggacaccaagaucgaccugugguccuacaacgccgagcuccuggucgcgcuggagaaccagcacaccaucgaccucacggacagcgagaugaacaagcuguucgagaagaccaagaagcagcugcgggagaacgccgaggacauggggaacggcugcuucaagaucuaccacaagugcgacaacgccugcaucggguccauccgcaacggcaccuacgaccacgacguguaccgcgacgaggcccucaacaaccgguuccagaucaaggggguggagcugaaguccggcuacaaggacuggauccuguggaucuccuucgccaucagcugcuuccuccugugcgucgcgcugcucggcuucaucaugugggccugccagaaggggaacauccgcugcaacaucugcaucuga

SEQ ID NO: 74819 - RNA, 1701 nt, Artificial Sequence; identical to SEQ ID NO: 74653
  derived and/or modified CDS sequence (opt1) from hemagglutinin__InfluenzaA__AHC60839

SEQ ID NO: 74820 - RNA, 1701 nt, Artificial Sequence; identical to SEQ ID NO: 71006
  derived and/or modified CDS sequence (opt1) from hemagglutinin__InfluenzaA__AHC60851

SEQ ID NO: 74821 - RNA, 1701 nt, Artificial Sequence
  derived and/or modified CDS sequence (opt1) from hemagglutinin__InfluenzaA__AHC60863
augaagaccaucaucgcccugagcuacauccucugccugguguucgcccagaagcugcccggcaacgacaacuccaccgcgacgcucugccuggggcaccacgccgucccgaacggcaccaucgugaagaccaucaccaacgaccagaucgaggugacgaacgccaccgagcugguccagagcuccagcaccggggagaucugcaacagcccccaccagauccucgacggcgagaacugcacccugaucgacgcccugcucggggacccccagugcgacggcuuccagaacaagaagugggaccuguucguggagcgcagcaaggcccacuccaacugcuaccccuacgacgugccggacuacgcgagccugcggucccucgucgccagcuccggcacgcuggaguucaacaacgagagcuucaacuggaccggggugacccagaacggcaccuccagcgccugcauccgccgguccaacaacagcuucuucucccgccugaacuggcucacgcaccugaacuucaaguaccccgcccugaacgugaccaugcccaacaacgagcaguucgacaagcucuacaucuggggcguccaccaccccgggaccgacaaggaccagaucuuccuguacgcgcaggccgccgggcggaucaccgugagcacgaagcgcucccagcaggccgugaucccgaacaucggcagccggccccgcguccggaacauccccagccgcguguccaucuacuggaccaucgugaagcccggcgacauccugcucaucaacagcaccgggaaccugaucgccccgcggggcuacuucaagauccgcuccgggaaguccuccaucaugcggagcgacgcgcccaucggcaagugcaacuccgccugcaucacccccaacggcagcauccccaacgacaagccguuccagaacgucaaccgcaucacguacggggccugcccccgguacgugaagcagaacacccugaagcucgccaccggcaugcgcaacgugcccgagaagcagacccgggggaucuucggcgccaucgcgggguucaucgagaacggcugggagggcauggucgacgggugguacggcuuccgccaccagaacuccgaggggcggggccaggccgccgaccucaagagcacgcaggccgccaucgaccagaucaacgggaagcugaaccgccugaucggcaagaccaacgagaaguuccaccagaucgagaaggaguucuccgagguggagggccggauccaggaccuggagaaguacguggaggacaccaagaucgaccuguggagcuacaacgcggagcuccuggucgcccuggagaaccagcacaccaucgaccucacggacuccgagaugaacaagcuguucgagaagaccaagaagcagcugcgcgagaacgccgaggacauggggaacggcugcuucaagaucuaccacaagugcgacaacgccugcaucgggagcauccgcaacggcaccuacgaccacgacguguaccgggacgaggcccucaacaaccgcuuccagaucaaggggguggagcugaaggcgggcuacaaggacuggauccuguggaucuccuucgccaucagcugcuuccuccugugcgucgcccugcucggcuucaucaugugggccugccagaaggggaacauccggugcaacaucugcaucuga

SEQ ID NO: 74822 - RNA, 1701 nt, Artificial Sequence; identical to SEQ ID NO: 71006
  derived and/or modified CDS sequence (opt1) from hemagglutinin__InfluenzaA__AHC60875

SEQ ID NO: 74823 - RNA, 1701 nt, Artificial Sequence; identical to SEQ ID NO: 71006
  derived and/or modified CDS sequence (opt1) from hemagglutinin__InfluenzaA__AHC60887

SEQ ID NO: 74824 - RNA, 1701 nt, Artificial Sequence; identical to SEQ ID NO: 67435
  derived and/or modified CDS sequence (opt1) from hemagglutinin__InfluenzaA__AHC60899

SEQ ID NO: 74825 - RNA, 1701 nt, Artificial Sequence; identical to SEQ ID NO: 71806
  derived and/or modified CDS sequence (opt1) from hemagglutinin__InfluenzaA__AHC60911

SEQ ID NO: 74826 - RNA, 1701 nt, Artificial Sequence; identical to SEQ ID NO: 74642
  derived and/or modified CDS sequence (opt1) from hemagglutinin__InfluenzaA__AHC60923

SEQ ID NO: 74827 - RNA, 1701 nt, Artificial Sequence; identical to SEQ ID NO: 71806
  derived and/or modified CDS sequence (opt1) from hemagglutinin__InfluenzaA__AHC60935

SEQ ID NO: 74828 - RNA, 1701 nt, Artificial Sequence; identical to SEQ ID NO: 71006
  derived and/or modified CDS sequence (opt1) from hemagglutinin__InfluenzaA__AHC60947

SEQ ID NO: 74829 - RNA, 1701 nt, Artificial Sequence; identical to SEQ ID NO: 71806
  derived and/or modified CDS sequence (opt1) from hemagglutinin__InfluenzaA__AHC60959

SEQ ID NO: 74830 - RNA, 1701 nt, Artificial Sequence; identical to SEQ ID NO: 70879
  derived and/or modified CDS sequence (opt1) from hemagglutinin__InfluenzaA__AHC60971

SEQ ID NO: 74831 - RNA, 1701 nt, Artificial Sequence; identical to SEQ ID NO: 71806
  derived and/or modified CDS sequence (opt1) from hemagglutinin__InfluenzaA__AHC60983

SEQ ID NO: 74832 - RNA, 1701 nt, Artificial Sequence; identical to SEQ ID NO: 71006
  derived and/or modified CDS sequence (opt1) from hemagglutinin__InfluenzaA__AHC61007

SEQ ID NO: 74833 - RNA, 1701 nt, Artificial Sequence; identical to SEQ ID NO: 70879
  derived and/or modified CDS sequence (opt1) from hemagglutinin__InfluenzaA__AHC61019

SEQ ID NO: 74834 - RNA, 1701 nt, Artificial Sequence
  derived and/or modified CDS sequence (opt1) from hemagglutinin__InfluenzaA__AHC61031
augaagaccaucaucgcccugagcuacauccucugccugguguucgcccagaagcugcccggcaacgacaacuccaccgcgacgcucugccuggggcaccacgccgucccgaacggcaccaucgugaagaccaucaccaacgaccagaucgaggugacgaacgccaccgagcugguccagagcuccagcaccggggagaucugcaacagcccccaccagauccucgacggcgagaacugcacccugaucgacgcccugcucggggacccccagugcgacggcuuccagaacaagaagugggaccuguucguggagcgcagcaaggcccacuccaacugcuaccccuacgacgugccggacuacgcgagccugcggucccucgucgccagcuccggcacgcuggaguucaacaacgagagcuucaacuggaccggggugacccagaacggcaccuccagcgccugcauccgccgguccaacaacagcuucuucucccgccugaacuggcucacgcaccugaacuucaaguaccccgcccugaacgugaccaugcccaacaacgagcaguucgacaagcucuacaucuggggcguccaccaccccgggaccgacaaggaccagaucuuccuguacgcgcaggccgccgggcggaucaccgugagcacgaagcgcucccagcaggccgugaucccgaacaucggcagccggccccgcguccggaacauccccagccgcguguccaucuacuggaccaucgugaagcccggcgacauccugcucaucaacagcaccgggaaccugaucgccccgcggggcuacuucaagauccgcuccgggaaguccuccaucaugcggagcgacgcgcccaucggcaagugcaacuccgccugcaucacccccaacggcagcauccccaacgacaagccguuccagaacgucaaccgcaucacguacggggccugcccccgguacgugaagcagaacacccugaagcucgccaccggcaugcgcaacgugcccgagaagcagacccgggggaucuucggcgccaucgcgggguucaucgagaacggcugggagggcauggucgacgggugguacggcuuccgccaccagaacuccgaggggcggggccaggccgccgaccucaagagcacgcaggccgccaucgaccagaucaacgggaagcugaaccgccugaucggcaagaccaacgagaaguuccaccagaucgagaaggaguucuccgagguggagggccggauccaggaccuggagaaguacguggaggacaccaagaucgaccuguggagcuacaacgcggagcuccuggucgcccuggagaaccagcacaccaucgaccucacggacuccgagaugaacaagcuguucgagaagaccaagaagcagcugcgcgagaacgccgaggacauggggaacggcugcuucaagaucuaccacaagugcgacaacgccugcaucgggagcauccgcaacggcaccuacgaccacgacguguaccgggacgaggcccucaacaaccgcuuccagaucaaggggguggagcugaaguccggcuacaaggacuggauccuguggaucagcuucgcgaucuccugcuuccuccugugcgucgugcugcucggcuucaucaugugggccugccagaaggggaacauccggugcaacaucugcaucuga

SEQ ID NO: 74835 - RNA, 1701 nt, Artificial Sequence; identical to SEQ ID NO: 71806
  derived and/or modified CDS sequence (opt1) from hemagglutinin__InfluenzaA__AHC61043

SEQ ID NO: 74836 - RNA, 1701 nt, Artificial Sequence
  derived and/or modified CDS sequence (opt1) from hemagglutinin__InfluenzaA__AHC61055
augaagaccaucaucgcccugagcuacauccucugccugguguucgcccagaagcugcccggcaacgacaacuccaccgcgacgcucugccuggggcaccacgccgucccgaacggcaccaucgugaagaccaucaccaacgaccagaucgaggugacgaacgccaccgagcugguccagagcuccagcaccggggagaucugcaacagcccccaccagauccucgacggcgagaacugcacccugaucgacgcccugcucggggacccccagugcgacggcuuccagaacaagaagugggaccuguucguggagcgcagcaaggcccacuccaacugcuaccccuacgacgugccggacuacgcgagccugcggucccucgucgccagcuccggcacgcuggaguucaacaacgagagcuucaacuggaccggggugacccagaacggcaccuccagcgccugcauccgccgguccaacaacagcuucuucucccgccugaacuggcucacgcaccugaacuucaaguaccccgcccugaacgugaccaugcccaacaacgagcaguucgacaagcucuacaucuggggcguccaccaccccgggaccgacaaggaccagaucuuccuguacgcgcaggccgccgggcggaucaccgugagcacgaagcgcucccagcaggccgugaucccgaacaucggcagccggccccgcguccggaacauccccagccgcguguccaucuacuggaccaucgugaagcccggcgacauccugcucaucaacagcaccgggaaccugaucgccccgcggggcuacuucaagauccgcuccgggaaguccuccaucaugcggagcgacgcgcccaucggcaagugcaacuccgccugcaucacccccaacggcagcauccccaacgacaagccguuccagaacgucaaccgcaucacguacggggccugcccccgguacgugaagcagaacacccugaagcucgccaccggcaugcgcaacgugcccgagaagcagacccgggggaucuucggcgccaucgcgggguucaucgagaacggcugggagggcauggucgacgggugguacggcuuccgccaccagaacuccgaggggcggggccaggccgccgaccucaagagcacgcaggccgccaucgaccagaucaacgggaagcugaaccgccugaucggcaagaccaacgagaaguuccaccagaucgagaaggaguucuccgagguggagggccggauccagaaccuggagaaguacguggaggacaccaagaucgaccuguggagcuacaacgcggagcuccuggucgcccuggagaaccagcacaccaucgaccucacggacuccgagaugaacaagcuguucgagaagaccaagaagcagcugcgcgagaacgccgaggacauggggaacggcugcuucaagaucuaccacaagugcgacaacgccugcaucgggagcauccgcaacggcaccuacgaccacgacguguaccgggacgaggcccucaacaaccgcuuccagaucaaggggguggagcugaaguccggcuacaaggacuggauccuguggaucagcuucgcgaucuccugcuuccuccugugcgucgcccugcucggcuucaucaugugggccugccagaaggggaacauccggugcaacaucugcaucuga

SEQ ID NO: 74837 - RNA, 1701 nt, Artificial Sequence; identical to SEQ ID NO: 74703
  derived and/or modified CDS sequence (opt1) from hemagglutinin__InfluenzaA__AHC61067

SEQ ID NO: 74838 - RNA, 1701 nt, Artificial Sequence; identical to SEQ ID NO: 73098
  derived and/or modified CDS sequence (opt1) from hemagglutinin__InfluenzaA__AHC61079

SEQ ID NO: 74839 - RNA, 1701 nt, Artificial Sequence; identical to SEQ ID NO: 71006
  derived and/or modified CDS sequence (opt1) from hemagglutinin__InfluenzaA__AHC61103

SEQ ID NO: 74840 - RNA, 1701 nt, Artificial Sequence; identical to SEQ ID NO: 71006
  derived and/or modified CDS sequence (opt1) from hemagglutinin__InfluenzaA__AHC61115

SEQ ID NO: 74841 - RNA, 1701 nt, Artificial Sequence; identical to SEQ ID NO: 71806
  derived and/or modified CDS sequence (opt1) from hemagglutinin__InfluenzaA__AHC61127

SEQ ID NO: 74842 - RNA, 1701 nt, Artificial Sequence
  derived and/or modified CDS sequence (opt1) from hemagglutinin__InfluenzaA__AHC61139
augaagaccaucaucgcccugagcuacauccucugccugguguucgcccagaagcugcccggcaacgacaacuccaccgcgacgcucugccuggggcaccacgccgucccgaacggcaccaucgugaagaccaucaccaacgaccagaucgaggugacgaacgccaccgagcugguccagagcuccagcaccggggagaucugcaacagcccccaccagauccucgacggcgagaacugcacccugaucgacgcccugcucggggacccccagugcgacggcuuccagaacaagaagugggaccuguucguggagcgcagcaaggcccacuccaacugcuaccccuacgacgugccggacuacgcgagccugcggucccucgucgccagcuccggcacgcuggaguucaacaacgagagcuucaacuggaccggggugacccagaacggcaccuccagcgccugcauccgccgguccaacaacagcuucuucucccgccugaacuggcucacgcaccugaacuucaaguaccccgcccugaacgugaccaugcccaacaacgagcaguucgacaagcucuacaucuggggcguccaccaccccgggaccgacaaggaccagaucuuccuguacgcgcaggccagcgggcggaucaccguguccacgcagcgcagccagcaggccgugaucccgaacaucggcagccggccccgcguccggaacauccccucccgcgugagcaucuacuggaccaucgugaagcccggcgacauccugcucaucaacuccaccgggaaccugaucgccccgcggggcuacuucaagauccgcagcgggaaguccagcaucaugcgguccgacgcccccaucggcaagugcaacagcgcgugcaucacccccaacggcuccauccccaacgacaagccguuccagaacgucaaccgcaucacguacggggccugcccccgguacgugaagcagaacacccugaagcucgccaccggcaugcgcaacgugcccgagaagcagacccgggggaucuucggcgccaucgccggguucaucgagaacggcugggagggcauggucgacgggugguacggcuuccgccaccagaacagcgaggggcggggccaggcggccgaccugaaguccacgcaggccgccaucgaccagaucaacgggaagcugaaccgccucaucggcaagaccaacgagaaguuccaccagaucgagaaggaguucagcgagguggagggccggauccaggaccuggagaaguacguggaggacaccaagaucgaccugugguccuacaacgccgagcuccuggucgcgcuggagaaccagcacaccaucgaccucacggacagcgagaugaacaagcuguucgagaagaccaagaagcagcugcgcgagaacgccgaggacauggggaacggcugcuucaagaucuaccacaagugcgacaacgccugcaucggguccauccgcaacggcaccuacaaccacgacguguaccgggacgaggcccucaacaaccgcuuccagaucaaggggguggagcugaaguccggcuacaaggacuggauccuguggaucuccuucgccaucagcugcuuccuccugugcgucgcgcugcucggcuucaucaugugggccugccagaaggggaacauccggugcaacaucugcaucuga

SEQ ID NO: 74843 - RNA, 1701 nt, Artificial Sequence; identical to SEQ ID NO: 71006
  derived and/or modified CDS sequence (opt1) from hemagglutinin__InfluenzaA__AHC61151

SEQ ID NO: 74844 - RNA, 1701 nt, Artificial Sequence
  derived and/or modified CDS sequence (opt1) from hemagglutinin__InfluenzaA__AHC61163
augaagaccaucaucgcccugagcuacauccucugccugguguucgcccagaagcugcccggcaacgacaacuccaccgcgacgcucugccuggggcaccacgccgucccgaacggcaccaucgugaagaccaucaccaacgaccagaucgaggugacgaacgccaccgagcugguccagagcuccagcaccggggagaucugcaacagcccccaccagauccucgacggcgagaacugcacccugaucgacgcccugcucggggacccccagugcgacggcuuccagaacaagaagugggaccuguucguggagcgcagcaaggcccacuccaacugcuaccccuacgacgugccggacuacgcgagccugcggucccucgucgccagcuccggcacgcuggaguucaagaacgagagcuucaacuggaccggggugacccagaacggcaccuccagcgccugcauccgccgguccaacaacagcuucuucucccgccugaacuggcucacgcaccugaacuucaaguaccccgcccugaacgugaccaugcccaacaacgagcaguucgacaagcucuacaucuggggcguccaccaccccgggaccgacaaggaccagaucuuccuguacgcgcaggccagcgggcggaucaccguguccacgaagcgcagccagcaggccguggucccgaacaucggcagccggccccgcgugcggaacauccccucccgcgugagcaucuacuggaccaucgucaagcccggcgacauccugcucaucaacuccaccgggaaccugaucgccccgcggggcuacuucaagauccgcagcgggaaguccagcaucaugcgguccgacgcccccaucggcaagugcaacagcgcgugcaucacccccaacggcuccauccccaacgacaagccguuccagaacgugaaccgcaucacguacggggccugcccccgguacgugaagcagaacacccugaagcucgccaccggcaugcgcaacguccccgagaagcagacccgggggaucuucggcgccaucgccggguucaucgagaacggcugggagggcaugguggacgggugguacggcuuccgccaccagaacagcgaggggcggggccaggcggccgaccugaaguccacgcaggccgccaucgaccagaucaacgggaagcugaaccgccucaucggcaagaccaacgagaaguuccaccagaucgagaaggaguucagcgagguggagggccggauccaggaccuggagaaguacgucgaggacaccaagaucgaccugugguccuacaacgccgagcuccugguggcgcuggagaaccagcacaccaucgaccucacggacagcgagaugaacaagcuguucgagaagaccaagaagcagcugcgcgagaacgccgaggacauggggaacggcugcuucaagaucuaccacaagugcgacaacgccugcaucggguccauccgcaacggcaccuacgaccacgacguguaccgggacgaggcccucaacaaccgcuuccagaucaagggggucgagcugaaguccggcuacaaggacuggauccuguggaucuccuucgccaucagcugcuuccuccugugcguggcgcugcucggcuucaucaugugggccugccagaaggggaacauccggugcaacaucugcaucuga

SEQ ID NO: 74845 - RNA, 1701 nt, Artificial Sequence; identical to SEQ ID NO: 71806
  derived and/or modified CDS sequence (opt1) from hemagglutinin__InfluenzaA__AHC61175

SEQ ID NO: 74846 - RNA, 1701 nt, Artificial Sequence; identical to SEQ ID NO: 71006
  derived and/or modified CDS sequence (opt1) from hemagglutinin__InfluenzaA__AHC61187

SEQ ID NO: 74847 - RNA, 1701 nt, Artificial Sequence; identical to SEQ ID NO: 70879
  derived and/or modified CDS sequence (opt1) from hemagglutinin__InfluenzaA__AHC61199

SEQ ID NO: 74848 - RNA, 1701 nt, Artificial Sequence; identical to SEQ ID NO: 74642
  derived and/or modified CDS sequence (opt1) from hemagglutinin__InfluenzaA__AHC61211

SEQ ID NO: 74849 - RNA, 1701 nt, Artificial Sequence; identical to SEQ ID NO: 70879
  derived and/or modified CDS sequence (opt1) from hemagglutinin__InfluenzaA__AHC61223

SEQ ID NO: 74850 - RNA, 1701 nt, Artificial Sequence; identical to SEQ ID NO: 71006
  derived and/or modified CDS sequence (opt1) from hemagglutinin__InfluenzaA__AHC61235

SEQ ID NO: 74851 - RNA, 1701 nt, Artificial Sequence; identical to SEQ ID NO: 71806
  derived and/or modified CDS sequence (opt1) from hemagglutinin__InfluenzaA__AHC61247

SEQ ID NO: 74852 - RNA, 1701 nt, Artificial Sequence; identical to SEQ ID NO: 71806
  derived and/or modified CDS sequence (opt1) from hemagglutinin__InfluenzaA__AHC61259

SEQ ID NO: 74853 - RNA, 1701 nt, Artificial Sequence; identical to SEQ ID NO: 71006
  derived and/or modified CDS sequence (opt1) from hemagglutinin__InfluenzaA__AHC61271

SEQ ID NO: 74854 - RNA, 1701 nt, Artificial Sequence; identical to SEQ ID NO: 70879
  derived and/or modified CDS sequence (opt1) from hemagglutinin__InfluenzaA__AHC61283

SEQ ID NO: 74855 - RNA, 1701 nt, Artificial Sequence; identical to SEQ ID NO: 73098
  derived and/or modified CDS sequence (opt1) from hemagglutinin__InfluenzaA__AHC61295

SEQ ID NO: 74856 - RNA, 1701 nt, Artificial Sequence; identical to SEQ ID NO: 74710
  derived and/or modified CDS sequence (opt1) from hemagglutinin__InfluenzaA__AHC61307

SEQ ID NO: 74857 - RNA, 1701 nt, Artificial Sequence; identical to SEQ ID NO: 71006
  derived and/or modified CDS sequence (opt1) from hemagglutinin__InfluenzaA__AHC61319

SEQ ID NO: 74858 - RNA, 1701 nt, Artificial Sequence; identical to SEQ ID NO: 74642
  derived and/or modified CDS sequence (opt1) from hemagglutinin__InfluenzaA__AHC61331

SEQ ID NO: 74859 - RNA, 1701 nt, Artificial Sequence
  derived and/or modified CDS sequence (opt1) from hemagglutinin__InfluenzaA__AHC61343
augaagaccaucaucgcccugagcuacauccucugccugguguucgcccagaagcugcccggcaacgacaacuccaccgcgacgcucugccuggggcaccacgccgucccgaacggcaccaucgugaagaccaucaccaacgaccagaucgaggugacgaacgccaccgagcugguccagagcuccagcaccggggagaucugcaacagcccccaccagauccucgacggcgagaacugcacccugaucgacgcccugcucggggacccccagugcgacggcuuccagaacaagaagugggaccuguucguggagcgcagcaaggcccacuccaacugcuaccccuacgacgugccggacuacgcgagccugcggucccucgucgccagcuccggcacgcuggaguucaacaacgagagcuucaacuggaccggggugacccagaacggcaccuccagcgccugcauccgcggguccaacaacagcuucuucucccggcugaacuggcucacgcaccugaacuucaaguaccccgcccugaacgugaccaugcccaacaacgagcaguucgacaagcucuacaucuggggcguccaccaccccgggaccgacaaggaccagaucuuccuguacgcgcaggccagcggccgcaucaccguguccacgaagcggagccagcaggccgugaucccgaacaucggcagccgcccccggguccgcaacauccccucccggaucagcaucuacuggaccaucgugaagcccggggacauccugcucaucaacuccaccggcaaccugaucgccccgcgcggguacuucaagauccggagcggcaaguccagcaucaugcgcuccgacgcccccaucggcaagugcaacagcgcgugcaucacccccaacggguccauccccaacgacaagccguuccagaacgugaaccggaucacguacggcgccugcccccgcuacgucaagcagaacacccugaagcucgccaccgggaugcggaacgugcccgagaagcagacccgcggcaucuucggggccaucgccggcuucaucgagaacggcugggaggggaugguggacggcugguacggguuccggcaccagaacagcgagggccgcgggcaggcggccgaccugaaguccacgcaggccgccaucgaccagaucaacggcaagcugaaccggcucaucggcaagaccaacgagaaguuccaccagaucgagaaggaguucagcgaggucgaggggcgcauccaggaccuggagaaguacguggaggacaccaagaucgaccugugguccuacaacgccgagcuccugguggcgcuggagaaccagcacaccaucgaccucacggacagcgagaugaacaagcuguucgagaagaccaagaagcagcugcgggagaacgccgaggacaugggcaacgggugcuucaagaucuaccacaagugcgacaacgccugcaucggcuccauccgcaacgggaccuacgaccacgacgucuaccgcgacgaggcccucaacaaccgguuccagaucaagggcguggagcugaaguccggcuacaaggacuggauccuguggaucuccuucgccaucagcugcuuccuccugugcguggcgcugcucggguucaucaugugggccugccagaagggcaacauccgcugcaacaucugcaucuga

SEQ ID NO: 74860 - RNA, 1701 nt, Artificial Sequence; identical to SEQ ID NO: 70879
  derived and/or modified CDS sequence (opt1) from hemagglutinin__InfluenzaA__AHC61355

SEQ ID NO: 74861 - RNA, 1701 nt, Artificial Sequence; identical to SEQ ID NO: 70879
  derived and/or modified CDS sequence (opt1) from hemagglutinin__InfluenzaA__AHC61367

SEQ ID NO: 74862 - RNA, 1701 nt, Artificial Sequence; identical to SEQ ID NO: 71006
  derived and/or modified CDS sequence (opt1) from hemagglutinin__InfluenzaA__AHC61379

SEQ ID NO: 74863 - RNA, 1701 nt, Artificial Sequence; identical to SEQ ID NO: 70879
  derived and/or modified CDS sequence (opt1) from hemagglutinin__InfluenzaA__AHC61391

SEQ ID NO: 74864 - RNA, 1701 nt, Artificial Sequence
  derived and/or modified CDS sequence (opt1) from hemagglutinin__InfluenzaA__AHC61403
augaagaccaucaucgcccugagcuacauccucugccugguguucgcccagaagcugcccggcaacgacaacuccaccgcgacgcucugccuggggcaccacgccgucccgaacggcaccaucgugaagaccaucaccaacgaccagaucgaggugacgaacgccaccgagcugguccagagcuccagcaccggggagaucugcaacagcccccaccagauccucgacggcgagaacugcacccugaucgacgcccugcucggggacccccagugcgacggcuuccagaacaagaagugggaccuguucguggagcgcagcaaggcccacuccaacugcuaccccuacgacgugccggacuacgcgagccugcggucccucgucgccagcuccggcacgcuggaguucaacaacgagagcuucaacuggaccggggugacccagaacggcaccuccagcgccugcauccgccgguccaacaacagcuucuucucccgccugaacuggcucacgcaccugaacuucaaguaccccgcccugaacgugaccaugcccaacaacgagcaguucgacaagcucuacaucuggggcguccaccaccccgggaccgacaaggaccagaucuuccuguacgcgcaggccagcgggcggaucaccguguccacgaagcgcagccagcaggccgugaucccgaacaucggcagccggccccgcguccggaacauccccucccgcgugagcaucuacuggaccaucgugaagcccggcgacauccugcucaucaacuccaccgggaaccugaucgccccgcggggcuacuucaagauccgcagcgggaaguccagcaucaugcgguccgacgcccccaucggcaagugcaacagcgcgugcaucacccccaacggcuccauccccaacgacaagccguuccagaacgucaaccgcaucacguacggggccugcagccgguacgugaagcagaacacccugaagcucgccaccggcaugcgcaacgugcccgagaagcagacccgggggaucuucggcgccaucgccggguucaucgagaacggcugggagggcauggucgacgggugguacggcuuccgccaccagaacuccgaggggcggggccaggcggccgaccugaaguccacgcaggccgccaucgaccagaucaacgggaagcugaaccgccucaucggcaagaccaacgagaaguuccaccagaucgagaaggaguucuccgagguggagggccggauccaggaccuggagaaguacguggaggacaccaagaucgaccuguggagcuacaacgccgagcuccuggucgcgcuggagaaccagcacaccaucgaccucacggacuccgagaugaacaagcuguucgagaagaccaagaagcagcugcgcgagaacgccgaggacauggggaacggcugcuucaagaucuaccacaagugcgacaacgccugcaucgggagcauccgcaacggcaccuacgaccacgacguguaccgggacgaggcccucaacaaccgcuuccagaucaaggggguggagcugaaguccggcuacaaggacuggauccuguggaucagcuucgccaucuccugcuuccuccugugcgucgcgcugcucggcuucaucaugugggccugccagaaggggaacauccggugcaacaucugcaucuga

SEQ ID NO: 74865 - RNA, 1701 nt, Artificial Sequence; identical to SEQ ID NO: 71006
  derived and/or modified CDS sequence (opt1) from hemagglutinin__InfluenzaA__AHC61415

SEQ ID NO: 74866 - RNA, 1701 nt, Artificial Sequence
  derived and/or modified CDS sequence (opt1) from hemagglutinin__InfluenzaA__AHC61427
augaagaccaucaucgcccugagcuacauccucugccugguguucgcccagaagcugcccggcaacgacaacuccaccgcgacgcucugccuggggcaccacgccgucccgaacggcaccaucgugaagaccaucaccaacgaccagaucgaggugacgaacgccaccgagcugguccagagcuccagcaccggggagaucugcaacagcccccaccagauccucgacggcgagaacugcacccugaucgacgcccugcucggggacccccagugcgacggcuuccagaacaacaagugggaccuguucguggagcgcagcaaggcccacuccaacugcuaccccuacgacgugccggacuacgcgagccugcggucccucgucgccagcuccggcacgcuggaguucaacaacgagagcuucaacuggaccggggugacccagaacggcaccuccagcgccugcauccgccgguccaacaacagcuucuucucccgccugaacuggcucacgcaccugaacuucaaguaccccgcccugaacgugaccaugcccaacaacgagcaguucgacaagcucuacaucuggggcguccaccaccccgggaccgacaaggaccagaucuuccuguacgcgcaggccgccgggcggaucaccgugagcacgaagcgcucccagcaggccgugaucccgaacaucggcagccggccccgcguccggaacauccccagccgcguguccaucuacuggaccaucgugaagcccggcgacauccugcucaucaacagcaccgggaaccugaucgccccgcggggcuacuucaagauccgcuccgggaaguccuccaucauccggagcgacgcgcccaucggcaagugcaacuccgccugcaucacccccaacggcagcauccccaacgacaagccguuccagaacgucaaccgcaucacguacggggccugcccccgguacgugaagcagaacacccugaagcucgccaccggcaugcgcaacgugcccgagaagcagacccgggggaucuucggcgccaucgcgggguucaucgagaacggcugggagggcauggucgacgggugguacggcuuccgccaccagaacuccgaggggcggggccaggccgccgaccucaagagcacgcaggccgccaucgaccagaucaacgggaagcugaaccgccugaucggcaagaccaacgagaaguuccaccagaucgagaaggaguucuccgagguggagggccggauccaggaccuggagaaguacguggaggacaccaagaucgaccuguggagcuacaacgcggagcuccuggucgcccuggagaaccagcacaccaucgaccucacggacuccgagaugaacaagcuguucgagaagaccaagaagcagcugcgcgagaacgccgaggacauggggaacggcugcuucaagaucuaccacaagugcgacaacgccugcaucgggagcauccgcaacggcaccuacgaccacgacguguaccgggacgaggcccucaacaaccgcuuccagaucaaggggguggagcugaaguccggcuacaaggacuggauccuguggaucagcuucgcgaucuccugcuuccuccugugcgucgcccugcucggcuucaucaugugggccugccagaaggggaacauccggugcaacaucugcaucuga

SEQ ID NO: 74867 - RNA, 1701 nt, Artificial Sequence
  derived and/or modified CDS sequence (opt1) from hemagglutinin__InfluenzaA__AHC61439
augaagaccaucaucgcccugagcuacauccucugccugguguucgcccagaagcugcccggcaacgacaacuccaccgcgacgcucugccuggggcaccacgccgucccgaacggcaccaucgugaagaccaucaccaacgaccagaucgaggugacgaacgccaccgagcugguccagagcuccagcaccggggagaucugcaacagcccccaccagauccucgacggcgagaacugcacccugaucgacgcccugcucggggacccccagugcgacggcuuccagaacaagaagugggaccuguucguggagcgcagcaaggcccacuccaacugcuaccccuacgacgugccggacuacgcgagccugcggucccucgucgccagcuccggcacgcuggaguucaacaacgagagcuucaacuggaccggggugacccagaacggcaccuccagcgccugcauccgccgguccaacaacagcuucuucucccgccugaacuggcucacgcaccugaacuucaaguaccccgcccugaacgugaccaugcccaacaacgagcaguucgacaagcucuacaucuggggcguccaccaccccgggaccgacaaggaccagaucuuccuguacgcgcaggccgccgggcggaucaccgugagcacgaagcgcucccagcaggccgugaucccgaacaucggcagccggccccgcguccggaacauccccagccgcguguccaucuacuggaccaucgugaagcccggcgacauccugcucaucaacagcaccgggaaccugaucgccccgcggggcuacuucaagauccgcuccgggaaguccuccaucaugcggagcgacgcgcccaucggcaagugcaacuccacgugcaucacccccaacggcagcauccccaacgacaagccguuccagaacgucaaccgcaucaccuacggggccugcccccgguacgugaagcagaacacccugaagcucgccaccggcaugcgcaacgugcccgagaagcagacgcgggggaucuucggcgccaucgccggguucaucgagaacggcugggagggcauggucgacgggugguacggcuuccgccaccagaacuccgaggggcggggccaggcggccgaccucaagagcacccaggccgccaucgaccagaucaacgggaagcugaaccgccugaucggcaagaccaacgagaaguuccaccagaucgagaaggaguucuccgagguggagggccggauccaggaccuggagaaguacguggaggacaccaagaucgaccuguggagcuacaacgccgagcuccuggucgcgcuggagaaccagcacacgaucgaccucaccgacuccgagaugaacaagcuguucgagaagaccaagaagcagcugcgcgagaacgccgaggacauggggaacggcugcuucaagaucuaccacaagugcgacaacgccugcaucgggagcauccgcaacggcaccuacgaccacgacguguaccgggacgaggcccucaacaaccgcuuccagaucaaggggguggagcugaaguccggcuacaaggacuggauccuguggaucagcuucgccaucuccugcuuccuccugugcgucgcgcugcucggcuucaucaugugggccugccagaaggggaacauccggugcaacaucugcaucuga

SEQ ID NO: 74868 - RNA, 1701 nt, Artificial Sequence; identical to SEQ ID NO: 70879
  derived and/or modified CDS sequence (opt1) from hemagglutinin__InfluenzaA__AHC61451

SEQ ID NO: 74869 - RNA, 1701 nt, Artificial Sequence; identical to SEQ ID NO: 70879
  derived and/or modified CDS sequence (opt1) from hemagglutinin__InfluenzaA__AHC61463

SEQ ID NO: 74870 - RNA, 1701 nt, Artificial Sequence; identical to SEQ ID NO: 71806
  derived and/or modified CDS sequence (opt1) from hemagglutinin__InfluenzaA__AHC61475

SEQ ID NO: 74871 - RNA, 1701 nt, Artificial Sequence; identical to SEQ ID NO: 71006
  derived and/or modified CDS sequence (opt1) from hemagglutinin__InfluenzaA__AHC61487

SEQ ID NO: 74872 - RNA, 1701 nt, Artificial Sequence; identical to SEQ ID NO: 71806
  derived and/or modified CDS sequence (opt1) from hemagglutinin__InfluenzaA__AHC61499

SEQ ID NO: 74873 - RNA, 1701 nt, Artificial Sequence; identical to SEQ ID NO: 70879
  derived and/or modified CDS sequence (opt1) from hemagglutinin__InfluenzaA__AHC61511

SEQ ID NO: 74874 - RNA, 1701 nt, Artificial Sequence; identical to SEQ ID NO: 73098
  derived and/or modified CDS sequence (opt1) from hemagglutinin__InfluenzaA__AHC61523

SEQ ID NO: 74875 - RNA, 1701 nt, Artificial Sequence
  derived and/or modified CDS sequence (opt1) from hemagglutinin__InfluenzaA__AHC61535
augaagaccaucaucgcccugagcuacauccucugccugguguucgcccagaagcugcccggcaacgacaacuccaccgcgacgcucugccuggggcaccacgccgucccgaacggcaccaucgugaagaccaucaccaacgaccagaucgaggugacgaacgccaccgagcugguccagagcuccagcaccggggagaucugcaacagcccccaccagauccucgacggcgagaacugcacccugaucgacgcccugcucggggacccccagugcgacggcuuccagaacaagaagugggaccuguucguggagcgcagcaaggcccacuccaacugcuaccccuacgacgugccggacuacgcgagccugcggucccucgucgccagcuccggcacgcuggaguucaacaacgagagcuucaacuggaccggggugacccagaacggcaccuccagcgccugcauccgccgguccaacaacagcuucuucucccgccugaacuggcucacgcaccugaacuucaaguaccccgcccugaacgugaccaugcccaacaacgagcaguucgacaagcucuacaucuggggcguccaccaccccgggaccgacaaggaccagaucuuccuguacgcgcaggccagcgggcggaucaccguguccacgaagcgcagccagcaggccgugaucccgaacaucggcagccggccccgcguccggaacauccccucccgcgugagcaucuacuggaccaucgugaagcccggcgacauccugcucaucaacuccaccgggaaccugaucgccccgcggggcuacuucaagauccgcagcgggaaguccagcaucaugcgguccgacgcccccaucggcaagugcaacagcgcgugcaucacccccaacggcuccauccccaacgacaagccguuccagaacgucaaccgcaucacguacggggccugcccccgguacgugaagcagaacacccugaagcucgccaccggcaugcgcaacgugcccgagaagcagacccgggggaucuucggcgccaucgccggguucaucgagaacggcugggagggcauggucgacgggugguacggcuuccgccaccagaacagcgaggggcggggccaggcggccgaccugaaguccacgcaggccgccaucgaccagaucaacgggaagcugaaccgccucaucggcaagaccaacgagaaguuccaccagaucgagaaggaguucagcgagguggagggccggauccaggaccuggagaaguacguggaggacaccaagaucgaccugugguccuacaacgccgagcuccuggucgcgcuggagaaccagcacaccaucgaccucacggacagcgagaugaccaagcuguucgagaagaccaagaagcagcugcgcgagaacgccgaggacauggggaacggcugcuucaagaucuaccacaagugcgacaacgccugcaucggguccauccgcaacggcaccuacgaccacgacguguaccgggacgaggcccucaacaaccgcuuccagaucaaggggguggagcugaaguccggcuacaaggacuggauccuguggaucuccuucgccaucagcugcuuccuccugugcgucgcgcugcucggcuucaucaugugggccugccagaaggggaacauccggugcaacaucugcaucuga

SEQ ID NO: 74876 - RNA, 1701 nt, Artificial Sequence; identical to SEQ ID NO: 70879
  derived and/or modified CDS sequence (opt1) from hemagglutinin__InfluenzaA__AHC61547

SEQ ID NO: 74877 - RNA, 1701 nt, Artificial Sequence
  derived and/or modified CDS sequence (opt1) from hemagglutinin__InfluenzaA__AHC61559
augaagaccaucaucgcccugagcuacauccucugccugguguucgcccagaagcugcccggcaacgacaacuccaccgcgacgcucugccuggggcaccacgccgucccgaacggcaccaucgugaagaccaucaccaacgaccagaucgaggugacgaacgccaccgagcugguccagaacagcuccaccggggagaucugcgacagcccccaccagaucaucgacggcgagaacugcacccucaucgacgcccugcugggggacccccagugcgacggcuuccagaacaagaagugggaccucuucguggagcgcuccaaggccuacagcaacugcuaccccuacgacgugccggacuacgcgucccugcggagccuggucgccuccagcggcacgcucgaguucaacaacgaguccuucaacuggaccggggugacccagaacggcaccagcuccgccugcauccgccggagcaacaacuccuucuucagccgccugaacuggcugacgcaccucaacuucaaguaccccgcccugaacgugaccaugcccaacaacgagcaguucgacaagcuguacaucuggggcguccaccaccccgggaccgacaaggaccagaucuuccucuacgcgcaggccuccgggcggaucaccgugagcacgaagcgcucccagcaggccgugaucccgaacaucggcagccggccccgcguccggaacauccccagccgcaucuccaucuacuggaccaucgugaagcccggcgacauccugcugaucaacagcaccgggaaccucaucgccccgcggggcuacuucaagauccgcuccggcaagagcuccaucaugcggagcgacgcccccaucgggaagugcaacuccgagugcaucacccccaacggcagcauccccaacgacaagccguuccagaacgugaaccgcaucacguacggggcgugcccccgguacgucaagcagaacacccugaagcuggccaccggcaugcgcaacgugcccgagaagcagacccgggggaucuucggcgccaucgccggguucaucgagaacggcugggagggcaugguggacgggugguacggcuuccgccaccagaacuccgaggggcggggccaggccgcggaccucaagagcacgcaggccgccaucgaccagaucaacgggaagcugaaccgccugauccggaagaccaacgagaaguuccaccagaucgagaaggaguucuccgaggucgagggccgcauccaggaccucgagaaguacguggaggacaccaagaucgaccuguggagcuacaacgccgagcugcucguggcccuggagaaccagcacaccaucgaccugacggacuccgagaugaacaagcuguucgagaagaccaagaagcagcuccgcgagaacgcggaggacaugggcaacgggugcuucaagaucuaccacaagugcgacaacgccugcaucggcagcauccggaacgggaccuacgaccacgacgucuaccgcgacgaggcccugaacaaccgguuccagaucaagggcguggagcucaaguccgggcacaaggacuggauccuguggaucagcuucgccaucuccugcuuccugcucugcguggcccugcugggcuucaucaugugggcgugccagaagggcaacauccgcugcaacaucugcaucuga

SEQ ID NO: 74878 - RNA, 1701 nt, Artificial Sequence; identical to SEQ ID NO: 73098
  derived and/or modified CDS sequence (opt1) from hemagglutinin__InfluenzaA__AHC61571

SEQ ID NO: 74879 - RNA, 1701 nt, Artificial Sequence; identical to SEQ ID NO: 70879
  derived and/or modified CDS sequence (opt1) from hemagglutinin__InfluenzaA__AHC61583

SEQ ID NO: 74880 - RNA, 1701 nt, Artificial Sequence; identical to SEQ ID NO: 73098
  derived and/or modified CDS sequence (opt1) from hemagglutinin__InfluenzaA__AHC61595

SEQ ID NO: 74881 - RNA, 1701 nt, Artificial Sequence
  derived and/or modified CDS sequence (opt1) from hemagglutinin__InfluenzaA__AHC61607
augaagaccaucaucgcccugagcuacauccucugccugguguucgcccagaagcugcccggcaacgacaacuccaccgcgacgcucugccuggggcaccacgccgucccgaacggcaccaucgugaagaccaucaccaacgaccagaucgaggugacgaacgccaccgagcugguccagaacagcuccaccggggagaucugcgacagcccccaccagauccucgacggcgagaacugcacccugaucgacgcccugcucggggacccccagugcgacggcuuccagaacaagaagugggaccuguucguggagcgcuccaaggccuacagcaacugcuaccccuacgacgugccggacuacgcgucccugcggagccucgucgccuccagcggcacgcuggaguucaacaacgaguccuucaacuggaccggggugacccagaacggcaccagcuccgccugcauccgccggagcaacaacuccuucuucagccgccugaacuggcucacgcaccugaacuucaaguaccccgcccugaacgugaccaugcccaacaacgagcaguucgacaagcucuacaucuggggcguccaccaccccgggaccgacaaggaccagaucuuccuguacgcgcaggccuccgggcggaucaccgugagcacgaagcgcucccagcaggccgugaucccgaacaucggcagccggccccgcguccggaacauccccagccgcaucuccaucuacuggaccaucgugaagcccggcgacauccugcucaucaacagcaccgggaaccugaucgccccgcggggcuacuucaagauccgcuccggcaagagcuccaucaugcggagcgacgcccccaucgggaagugcaacuccgagugcaucacccccaacggcagcauccccaacgacaagccguuccagaacgugaaccgcaucacguacggggcgugcccccgguacgucaagcagcacacccugaagcucgccaccggcaugcgcaacgugcccgagaagcagacccgggggaucuucggcgccaucgccggguucaucgagaacggcugggagggcaugguggacgggugguacggcuuccgccaccagaacuccgaggggcggggccaggccgcggaccucaagagcacgcaggccgccaucgaccagaucaacgggaagcugaaccgccugaucggcaagaccaacgagaaguuccaccagaucgagaaggaguucuccgaggucgagggccggauccaggaccuggagaaguacguggaggacaccaagaucgaccuguggagcuacaacgccgagcuccugguggcccuggagaaccagcacaccaucgaccucacggacuccgagaugaacaagcuguucgagaagaccaagaagcagcugcgcgagaacgcggaggacauggggaacggcugcuucaagaucuaccacaagugcgacaacgccugcaucgggagcauccgcaacggcaccuacgaccacgacgucuaccgggacgaggcccucaacaaccgcuuccagaucaaggggguggagcugaaguccggcuacaaggacuggauccuguggaucagcuucgccaucuccugcuuccuccugugcguggcccugcucggcuucaucaugugggcgugccagaaggggaacauccggugcaacaucugcaucuga

SEQ ID NO: 74882 - RNA, 1701 nt, Artificial Sequence; identical to SEQ ID NO: 73098
  derived and/or modified CDS sequence (opt1) from hemagglutinin__InfluenzaA__AHC61619

SEQ ID NO: 74883 - RNA, 1701 nt, Artificial Sequence
  derived and/or modified CDS sequence (opt1) from hemagglutinin__InfluenzaA__AHC61631
augaagaccaucaucgcccugagcuacauccucugccugguguucgcccagaagcugcccggcaacgacaacuccaccgcgacgcucugccuggggcaccacgccgucccgaacggcaccaucgugaagaccaucaccaacgaccagaucgaggugacgaacgccaccgagcugguccagagcuccagcaccggggagaucugcaacagcccccaccagauccucgacggcgagaacugcaccaucaucgacgcccugcugggggacccccagugcgacggcuuccagaacaagaagugggaccucuucguggagcgcagcaaggcccacuccaacugcuaccccuacgacgugccggacuacgcgagccugcggucccuggucgccagcuccggcacgcucgaguucaacaacgagagcuucaacuggaccggggugacccagaacggcaccuccagcgccugcauccgccgguccaacaacagcuucuucucccgccugaacuggcugacgcaccucaacuucaaguaccccgcccugaacgugaccaugcccaacaacgagcaguucgacaagcuguacaucuggggcguccaccaccccgggaccgacaaggaccagaucuuccucuacgcgcaggccgccgggcggaucaccgugagcacgaagcgcucccagcaggccgugaucccgaacaucggcagccggccccgcguccggaacauccccagccgcguguccaucuacuggaccaucgugaagcccggcgacauccugcugaucaacagcaccgggaaccucaucgccccgcggggcuacuucaagauccgcuccgggaaguccuccaucaugcggagcgacgcgcccaucggcaagugcaacuccgccugcaucacccccaacggcagcauccccaacgacaagccguuccagaacgucaaccgcaucacguacggggccugcccccgguacgugaagcagaacacccugaagcuggccaccggcaugcgcaacgugcccgagaagcagacccgggggaucuucggcgccaucgcgggguucaucgagaacggcugggagggcauggucgacgggugguacggcuuccgccaccagaacuccgaggggcggggccaggccgccgaccucaagagcacgcaggccgccaucgaccagaucaacgggaagcugaaccgccugaucggcaagaccaacgagaaguuccaccagaucgagaaggaguucuccgagguggagggccggauccaggaccucgagaaguacguggaggacaccaagaucgaccuguggagcuacaacgcggagcugcucgucgcccuggagaaccagcacaccaucgaccugacggacuccgagaugaacaagcuguucgagaagaccaagaagcagcuccgcgagaacgccgaggacauggggaacggcugcuucaagaucuaccacaagugcgacaacgccugcaucgggagcauccgcaacggcaccuacgaccacgacguguaccgggacgaggcccugaacaaccgcuuccagaucaaggggguggagcucaaguccggcuacaaggacuggauccuguggaucagcuucgcgaucuccugcuuccugcucugcgucgcccugcugggcuucaucaugugggccugccagaaggggaacauccggugcaacaucugcaucuga

SEQ ID NO: 74884 - RNA, 1701 nt, Artificial Sequence
  derived and/or modified CDS sequence (opt1) from hemagglutinin__InfluenzaA__AHC61643
augaagaccaucaucgcccugagcuacgugcucugccuggucuucgcccagaagcugcccggcaacgacaacuccaccgcgacgcucugccuggggcaccacgccgugccgaacggcaccaucgugaagaccaucaccaacgaccagaucgaggucacgaacgccaccgagcuggugcagagcuccagcaccggggagaucugcaacagcccccaccagauccucgacggcgagaacugcacccugaucgacgcccugcucggggacccccagugcgacggcuuccagaacaagaagugggaccuguucguggagcgcagcaaggcccacuccaacugcuaccccuacgacgucccggacuacgcgagccugcggucccucguggccagcuccggcacgcuggaguucaacaacgagagcuucaacuggaccggggugacccagaacggcaccuccagcgccugcauccgccgguccaacaacagcuucuucucccgccugaacuggcucacgcaccugaacuucaaguaccccgcccugaacgucaccaugcccaacaacgagcaguucgacaagcucuacaucuggggcgugcaccaccccgggaccgacaaggaccagaucuuccuguacgcgcaggccgccgggcggaucaccgugagcacgaagcgcucccagcaggccgucaucccgaacaucggcagccggccccgcgugcggaacauccccagccgcguguccaucuacuggaccaucgucaagcccggcgacauccugcucaucaacagcaccgggaaccugaucgccccgcggggcuacuucaagauccgcuccgggaaguccuccaucaugcggagcgacgcgcccaucggcaagugcaacuccgccugcaucacccccaacggcagcauccccaacgacaagccguuccagaacgugaaccgcaucacguacggggccugcccccgguacgugaagcagaacacccugaagcucgccaccggcaugcgcaacguccccgagaagcagacccgggggaucuucggcgccaucgcgggguucaucgagaacggcugggagggcaugguggacgggugguacggcuuccgccaccagaacuccgaggggcggggccaggccgccgaccucaagagcacgcaggccgccaucgaccagaucaacgggaagcugaaccgccugaucggcaagaccaacgagaaguuccaccagaucgagaaggaguucuccgagguggagggccggauccaggaccuggagaaguacgucgaggacaccaagaucgaccuguggagcuacaacgcggagcuccugguggcccuggagaaccagcacaccaucgaccucacggacuccgagaugaacaagcuguucgagaagaccaagaagcagcugcgcgagaacgccgaggacauggggaacggcugcuucaagaucuaccacaagugcgacaacgccugcaucgggagcauccgcaacggcaccuacgaccacgacguguaccgggacgaggcccucaacaaccgcuuccagaucaagggggucgagcugaaguccggcuacaaggacuggauccuguggaucagcuucgcgaucuccugcuuccuccugugcguggcccugcucggcuucaucaugugggccugccagaaggggaacauccggugcaacaucugcaucuga

SEQ ID NO: 74885 - RNA, 1701 nt, Artificial Sequence
  derived and/or modified CDS sequence (opt1) from hemagglutinin__InfluenzaA__AHC61655
augaagaccaucaucgcccugagcuacauccucugccugguguucacccagaagcugcccggcaacgacaacuccacggccacccucugccuggggcaccacgcggucccgaacggcaccaucgugaagaccaucacgaacgaccagaucgaggugaccaacgccaccgagcugguccagagcuccagcaccggggagaucugcaacagcccccaccagauccucgacggcgagaacugcacgcugaucgacgcccugcucggggacccccagugcgacggcuuccagaacaacaagugggaccuguucguggagcgcagcaaggcccacuccaacugcuaccccuacgacgugccggacuacgccagccugcggucccucgucgcgagcuccggcacccuggaguucaacaacgagagcuucaacuggaccggggugacccagaacggcacguccagcgccugcauccgccgguccaacaacagcuucuucucccgccugaacuggcucacccaccugaacuucaaguaccccgcccugaacgugaccaugcccaacaacgagcaguucgacaagcucuacaucuggggcguccaccaccccgggaccgacaaggaccagaucuuccuguacgcccaggcggccgggcggaucacggugagcaccaagcgcucccagcaggccgugaucccgaacaucggcagccggccccgcguccggaacauccccagccgcguguccaucuacuggaccaucgugaagcccggcgacauccugcucaucaacagcaccgggaaccugaucgccccgcggggcuacuucaagauccgcuccgggaaguccuccaucauccggagcgacgcccccaucggcaagugcaacuccgcgugcaucacgcccaacggcagcauccccaacgacaagccguuccagaacgucaaccgcaucaccuacggggccugcccccgguacgugaagcagaacacccugaagcucgccaccggcaugcgcaacgugcccgagaagcagacgcgggggaucuucggcgccaucgccggguucaucgagaacggcugggagggcauggucgacgggugguacggcuuccgccaccagaacuccgaggggcggggccaggcggccgaccucaagagcacccaggccgccaucgaccagaucaacgggaagcugaaccgccugaucggcaagaccaacgagaaguuccaccagaucgagaaggaguucuccgagguggagggccggauccaggaccuggagaaguacguggaggacaccaagaucgaccuguggagcuacaacgccgagcuccuggucgcgcuggagaaccagcacacgaucgaccucaccgacuccgagaugaacaagcuguucgagaagaccaagaagcagcugcgcgagaacgccgaggacauggggaacggcugcuucaagaucuaccacaagugcgacaacgccugcaucgggagcauccgcaacggcaccuacgaccacgacguguaccgggacgaggcccucaacaaccgcuuccagaucaaggggguggagcugaaguccggcuacaaggacuggauccuguggaucagcuucgccaucuccugcuuccuccugugcgucgcgcugcucggcuucaucaugugggccugccagaaggggaacauccggugcaacaucugcaucuga

SEQ ID NO: 74886 - RNA, 1701 nt, Artificial Sequence
  derived and/or modified CDS sequence (opt1) from hemagglutinin__InfluenzaA__AHC61667
augaagaccaucaucgcccugagcuacauccucugccugguguucgcccagaagcugcccggcaacgacaacuccaccgcgacgcucugccuggggcaccacgccgucccgaacggcaccaucgugaagaccaucaccaacgaccagaucgaggugacgaacgccaccgagcugguccagagcuccagcaccggggagaucugcgacagcccccaccagauccucgacggcgagaacugcacccugaucgacgcccugcucggggacccccagugcgacggcuuccagaacaagaagugggaccuguucguggagcgcagcaaggccuacuccaacugcuaccccuacgacgugccggacuacgcgagccugcggucccucgucgccagcuccggcacgcuggaguucaacaacgagagcuucaacuggaccggggugacccagaacggcaccuccagcgccugcauccgccgguccaacaacagcuucuucucccgccugaacuggcucacgcaccugaacuucaaguaccccgcccugaacgugaccaugcccaacaacgagcaguucgacaagcucuacaucuggggcguccaccaccccgggaccgacaaggaccagaucuuccuguacgcgcagagcuccgggcggaucaccgugagcacgaagcgcagccagcaggccgugaucccgaacaucggcucccggccccgcauccggaacauccccagccgcaucuccaucuacuggaccaucgucaagcccggcgacauccugcucaucaacagcaccgggaaccugaucgccccgcggggcuacuucaagauccgcuccgggaaguccuccaucaugcggagcgacgcccccaucggcaagugcaacuccgagugcaucacccccaacggcagcauccccaacgacaagccguuccagaacgugaaccgcaucacguacggggccugcccccgguacgugaagcaguccacccugaagcucgcgaccggcaugcgcaacguccccgagaagcagacccgggggaucuucggcgccaucgccggguucaucgagaacggcugggagggcaugguggacgggugguacggcuuccgccaccagaacagcgaggggcggggccaggccgccgaccugaaguccacgcaggcggccaucgaccagaucaacgggaagcugaaccgccucaucggcaagaccaacgagaaguuccaccagaucgagaaggaguucagcgagguggagggccggauccaggaccuggagaaguacgucgaggacaccaagaucgaccugugguccuacaacgccgagcuccugguggcccuggagaaccagcacaccaucgaccucacggacagcgagaugaacaagcuguucgagaagaccaagaagcagcugcgcgagaacgccgaggacauggggaacggcugcuucaagaucuaccacaagugcgacaacgcgugcaucggguccauccgcaacggcaccuacaaccacgacguguaccgggacgaggcccucaacaaccgcuuccagaucaagggggucgagcucaagagcggcuacaaggacuggauccuguggaucuccuucgccaucagcugcuuccugcugugcguggcccugcucggcuucaucaugugggccugccagaaggggaacauccggugcaacaucugcaucuga

SEQ ID NO: 74887 - RNA, 1701 nt, Artificial Sequence; identical to SEQ ID NO: 74642
  derived and/or modified CDS sequence (opt1) from hemagglutinin__InfluenzaA__AHC61679

SEQ ID NO: 74888 - RNA, 1701 nt, Artificial Sequence; identical to SEQ ID NO: 73098
  derived and/or modified CDS sequence (opt1) from hemagglutinin__InfluenzaA__AHC61691

SEQ ID NO: 74889 - RNA, 1701 nt, Artificial Sequence; identical to SEQ ID NO: 70879
  derived and/or modified CDS sequence (opt1) from hemagglutinin__InfluenzaA__AHC61703

SEQ ID NO: 74890 - RNA, 1701 nt, Artificial Sequence; identical to SEQ ID NO: 74675
  derived and/or modified CDS sequence (opt1) from hemagglutinin__InfluenzaA__AHC61715

SEQ ID NO: 74891 - RNA, 1701 nt, Artificial Sequence; identical to SEQ ID NO: 71806
  derived and/or modified CDS sequence (opt1) from hemagglutinin__InfluenzaA__AHC61727

SEQ ID NO: 74892 - RNA, 1701 nt, Artificial Sequence; identical to SEQ ID NO: 70879
  derived and/or modified CDS sequence (opt1) from hemagglutinin__InfluenzaA__AHC61739

SEQ ID NO: 74893 - RNA, 1701 nt, Artificial Sequence
  derived and/or modified CDS sequence (opt1) from hemagglutinin__InfluenzaA__AHC61751
augaagaccaucaucgcccugagcuacauccucugccugguguucgcccagaagcugcccggcaacgacaacuccaccgcgacgcucugccuggggcaccacgccgucccgaacggcaccaucgugaagaccaucaccaacgaccagaucgaggugacgaacgccaccgagcugguccagaacagcuccaccggggagaucugcgacagcccccaccagauccucgacggcgagaacugcacccugaucgacgcccugcucggggacccccagugcgacggcuuccagaacaagaagugggaccuguucguggagcgcuccaaggccuacagcaacugcuaccccuacgacgugccggacuacgcgucccugcggagccucgucgccuccagcggcacgcuggaguucaacaacgaguccuucaacuggaccggggugacccagaacggcaccagcuccgccugcauccgccggagcaacaacuccuucuucagccgccugaacuggcucacgcaccugaacuucaaguaccccgcccugaacgugaccaugcccaacaacgagcaguucgacaagcucuacaucuggggcguccaccaccccgggaccgacaaggaccagaucuuccuguacgcgcaggccuccgggcggaucaccgugagcacgaagcgcucccagcaggccgugaucccgaacgucggcagccggccccgcgugcggaacauccccagccgcaucuccaucuacuggaccaucgugaagcccggcgacauccugcucaucaacagcaccgggaaccugaucgccccgcggggcuacuucaagauccgcuccggcaagagcuccaucaugcggagcgacgcccccaucgggaagugcaacuccgagugcaucacccccaacggcagcauccccaacgacaagccguuccagaacgucaaccgcaucacguacggggcgugcccccgguacgugaagcagaacacccugaagcucgccaccggcaugcgcaacgugcccgagaagcagacccgggggaucuucggcgccaucgccggguucaucgagaacggcugggagggcauggucgacgggugguacggcuuccgccaccagaacuccgaggggcggggccaggccgcggaccucaagagcacgcaggccgccaucgaccagaucaacgggaagcugaaccgccugaucggcaagaccaacgagaaguuccaccagaucgagaaggaguucuccgagguggagggccggauccaggaccuggagaaguacguggaggacaccaagaucgaccuguggagcuacaacgccgagcuccuggucgcccuggagaaccagcacaccaucgaccucacggacuccgagaugaacaagcuguucgagaagaccaagaagcagcugcgcgagaacgcggaggacauggggaacggcugcuucaagaucuaccacaagugcgacaacgccugcaucgggagcauccgcaacggcaccuacgaccacgacguguaccgggacgaggcccucaacaaccgcuuccagaucaaggggguggagcugaaguccggcuacaaggacuggauccuguggaucagcuucgccaucuccugcuuccuccugugcgucgcccugcucggcuucaucaugugggcgugccagaaggggaacauccggugcaacaucugcaucuga

SEQ ID NO: 74894 - RNA, 1701 nt, Artificial Sequence
  derived and/or modified CDS sequence (opt1) from hemagglutinin__InfluenzaA__AHC61763
augaagaccaucaucgcccugagcuacauccucugccugguguucgcccagaagcugcccggcaacgacaacuccaccgcgacgcucugccuggggcaccacgccgucccgaacggcaccaucgugaagaccaucaccaacgaccagaucgaggugacgaacgccaccgagcugguccagagcuccagcaccggggagaucugcaacagcccccaccagauccucgacggcgagaacugcacccugaucgacgcccugcucggggacccccagugcgacggcuuccagaacaagaagugggaccuguucguggagcgcagcaaggcccacuccaacugcuaccccuacgacgugccggacuacgcgagccugcggucccucgucgccagcuccggcacgcuggaguucaacaacgagagcuucaacuggaccggggugacccagaacggcaccuccagcgccugcauccgccgguccaacaacagcuucuucucccgccugaacuggcucacgcaccugaacuucaaguaccccgcccugaacgugaccaugcccaacaacgagcaguucgacaagcucuacaucuggggcguccaccaccccgggaccgacaaggaccagaucuuccuguacgcgcaggccgccgggcggaucaccgugagcacgaagcgcucccagcagaccgugaucccgaacaucggcagccggccccgcguccggaacauccccagccgcguguccaucuacuggaccaucgugaagcccggcgacauccugcucaucaacagcaccgggaaccugaucgccccgcggggcuacuucaagauccgcuccgggaaguccuccaucaugcggagcgacgcccccaucggcaagugcaacuccgcgugcaucacgcccaacggcagcauccccaacgacaagccguuccagaacgucaaccgcaucaccuacggggccugcccccgguacgugaagcagaacacccugaagcucgccaccggcaugcgcaacgugcccgagaagcagacgcgggggaucuucggcgccaucgccggguucaucgagaacggcugggagggcauggucgacgggugguacggcuuccgccaccagaacuccgaggggcggggccaggcggccgaccucaagagcacccaggccgccaucgaccagaucaacgggaagcugaaccgccugaucggcaagaccaacgagaaguuccaccagaucgagaaggaguucuccgagguggagggccggauccaggaccuggagaaguacguggaggacaccaagaucgaccuguggagcuacaacgccgagcuccuggucgcgcuggagaaccagcacacgaucgaccucaccgacuccgagaugaacaagcuguucgagaagaccaagaagcagcugcgcgagaacgccgaggacauggggaacggcugcuucaagaucuaccacaagugcgacaacgccugcaucgggagcauccgcaacggcaccuacgaccacgacguguaccgggacgaggcccucaacaaccgcuuccagaucaaggggguggagcugaaguccggcuacaaggacuggauccuguggaucagcuucgccaucuccugcuuccuccugugcgucgcgcugcucggcuucaucaugugggccugccagaaggggaacauccggugcaacaucugcaucuga

SEQ ID NO: 74895 - RNA, 1701 nt, Artificial Sequence; identical to SEQ ID NO: 71006
  derived and/or modified CDS sequence (opt1) from hemagglutinin__InfluenzaA__AHC61775

SEQ ID NO: 74896 - RNA, 1701 nt, Artificial Sequence; identical to SEQ ID NO: 71806
  derived and/or modified CDS sequence (opt1) from hemagglutinin__InfluenzaA__AHC61787

SEQ ID NO: 74897 - RNA, 1701 nt, Artificial Sequence; identical to SEQ ID NO: 74642
  derived and/or modified CDS sequence (opt1) from hemagglutinin__InfluenzaA__AHC61799

SEQ ID NO: 74898 - RNA, 1701 nt, Artificial Sequence
  derived and/or modified CDS sequence (opt1) from hemagglutinin__InfluenzaA__AHC61823
augaagaccaucaucgcccugagcuacauccucugccugguguucgcccagaagcugcccggcaacgacaacuccaccgcgacgcucugccuggggcaccacgccgucccgaacggcaccaucgugaagaccaucaccaacgaccagaucgaggugacgaacgccaccgagcugguccagagcuccagcaccggggagaucugcgacagcccccaccagauccucgacggcgagaacugcacccugaucgacgcccugcucggggacccccagugcgacggcuuccagaacaagaagugggaccuguucguggagcgcagcaaggccuacuccaacugcuaccccuacgacgugccggacuacgcgagccugcggucccucgucgccagcuccggcacgcuggaguucaacaacgagagcuucaacuggaccggggugacccagaacggcaccuccagcgccugcauccgccgguccaacagcuccuucuucagccgccugaacuggcucacgcaccugaacuucaaguaccccgcccugaacgugaccaugcccaacaacgagcaguucgacaagcucuacaucuggggcguccaccaccccgggaccgacaaggaccagaucuuccuguacgcgcaguccagcgggcggaucaccgugagcacgaagcgcucccagcaggccgugaucccgaacaucggcagccggccccgcauccggaacauccccucccgcaucagcaucuacuggaccaucgucaagcccggcgacauccugcucaucaacuccaccgggaaccugaucgccccgcggggcuacuucaagauccgcagcgggaaguccagcaucaugaaguccgacgcccccaucgacaagugcaacagcgagugcaucacccccaacggcuccauccccaacgacaagccguuccagaacgugaaccggaucacguacggcgccugcccccgcuacgugaagcagagcacccugaagcucgcgaccgggaugcggaacguccccgagaagcagacccgcggcaucuucggggccaucgccggcuucaucgagaacgggugggagggcaugguggacggcugguacggguuccggcaccagaacuccgagggccgcgggcaggccgccgaccugaaguccacgcaggcggccaucgaccagaucaacggcaagcugaaccggcucaucgggaagaccaacgagaaguuccaccagaucgagaaggaguucuccgagguggagggccgcauccaggaccuggagaaguacgucgaggacaccaagaucgaccuguggagcuacaacgccgagcuccugguggcccuggagaaccagcacaccaucgaccucacggacuccgagaugaacaagcuguucgagaagaccaagaagcagcugcgggagaacgccgaggacaugggcaacgggugcuucaagaucuaccacaagugcgacaacgcgugcaucggcagcauccgcaacgggaccuacaaccacgacguguaccgcgacgaggcccucaacaaccgguuccagaucaagggcgucgagcugaaguccggguacaaggacuggauccuguggaucagcuucgccaucagcugcuuccuccugugcguggcccugcucggcuucaucaugugggccugccagaagggcaacauccgcugcaacaucugcaucuga

SEQ ID NO: 74899 - RNA, 1701 nt, Artificial Sequence; identical to SEQ ID NO: 71806
  derived and/or modified CDS sequence (opt1) from hemagglutinin__InfluenzaA__AHC61835

SEQ ID NO: 74900 - RNA, 1701 nt, Artificial Sequence; identical to SEQ ID NO: 71006
  derived and/or modified CDS sequence (opt1) from hemagglutinin__InfluenzaA__AHC61847

SEQ ID NO: 74901 - RNA, 1701 nt, Artificial Sequence; identical to SEQ ID NO: 70879
  derived and/or modified CDS sequence (opt1) from hemagglutinin__InfluenzaA__AHC61859

SEQ ID NO: 74902 - RNA, 1701 nt, Artificial Sequence; identical to SEQ ID NO: 71806
  derived and/or modified CDS sequence (opt1) from hemagglutinin__InfluenzaA__AHC61871

SEQ ID NO: 74903 - RNA, 1701 nt, Artificial Sequence
  derived and/or modified CDS sequence (opt1) from hemagglutinin__InfluenzaA__AHC61883
augaagaccaucaucgcccugagcuacauccucugccugguguucgcccagaagcugcccggcaacgacaacuccaccgcgacgcucugccuggggcaccacgccgucccgaacggcaccaucgugaagaccaucaccaacgaccagaucgaggugacgaacgccaccgagcugguccagagcuccagcaccggggagaucugcgacagcccccaccagauccucgacggcgagaacugcacccugaucgacgcccugcucggggacccccagugcgacggcuuccagaacaagaagugggaccuguucguggagcgcagcaaggccuacuccaacugcuaccccuacgacgugccggacuacgcgagccugcggucccucgucgccagcuccggcacgcuggaguucaacaacgagagcuucaacuggaccggggugacccagaacggcaccuccagcgccugcauccgccgguccaacagcuccuucuucagccgccugaacuggcucacgcaccugaacuucaaguaccccgcccugaacgugaccaugcccaacaacgagcaguucgacaagcucuacaucuggggcguccaccaccccgggaccgacaaggaccagaucuuccuguacgcgcaguccagcgggcggaucaccgugagcacgaagcgcucccagcaggccgugaucccgaacaucggcagccggccccgcauccggaacauccccucccgcaucagcaucuacuggaccaucgucaagcccggcgacauccugcucaucaacuccaccgggaaccugaucgccccgcggggcuacuucaagauccgcagcgggaaguccagcaucaugcgguccgacgcccccaucggcaagugcaacagcgagugcaucacccccaacggcuccauccccaacgacaagccguuccagaacgugaaccgcaucacguacggggccugcccccgguacgugaagcagagcacccugaagcucgcgaccggcaugcgcaacguccccgagaagcagacccgggggaucuucggcgccaucgccggguucaucgagaacggcugggagggcaugguggacgggugguacggcuuccgccaccagaacuccgaggggcggggccaggccgccgaccugaaguccacgcaggcggccaucgaccagaucaacgggaagcugaaccgccucaucggcaagaccaacgagaaguuccaccagaucgagaaggaguucuccgagguggagggccggauccaggaccuggagaaguacgucgaggacaccaagaucgaccuguggagcuacaacgccgagcuccugguggcccuggagaaccagcacaccaucgaccucgccgacuccgagaugaacaagcuguucgagaagacgaagaagcagcugcgcgagaacgcggaggacauggggaacggcugcuucaagaucuaccacaagugcgacaacgccugcaucgggagcauccgcaacggcaccuacaaccacgacguguaccgggacgaggcccucaacaaccgcuuccagaucaagggggucgagcugaaguccggcuacaaggacuggauccuguggaucagcuucgccaucagcugcuuccuccugugcguggcccugcucggcuucaucaugugggcgugccagaaggggaacauccggugcaacaucugcaucuga

SEQ ID NO: 74904 - RNA, 1701 nt, Artificial Sequence; identical to SEQ ID NO: 71006
  derived and/or modified CDS sequence (opt1) from hemagglutinin__InfluenzaA__AHC61895

SEQ ID NO: 74905 - RNA, 1701 nt, Artificial Sequence; identical to SEQ ID NO: 71006
  derived and/or modified CDS sequence (opt1) from hemagglutinin__InfluenzaA__AHC61907

SEQ ID NO: 74906 - RNA, 1701 nt, Artificial Sequence
  derived and/or modified CDS sequence (opt1) from hemagglutinin__InfluenzaA__AHC61931
augaagaccaucaucgcccugagcuacauccucugccugguguucgcccagaagcugcccggcaacgacaacuccaccgcgacgcucugccuggggcaccacgccgucccgaacggcaccaucgugaagaccaucaccaacgaccagaucgaggugacgaacgccaccgagcugguccagagcuccagcaccggggagaucugcaacagcccccaccagauccucgacggcgagaacugcacccugaucgacgcccugcucggggacccccagugcgacggcuuccagaacaagaagugggaccuguucguggagcgcagcaaggcccacuccaacugcuaccccuacgacgugccggacuacgcgagccugcggucccucgucgccagcuccggcacgcuggaguucaacaacgagagcuucaacuggaccggggugacccagaacggcaccuccagcgccugcauccgccgguccaacaacagcuucuucucccgccugaacuggcucacgcaccugaacuucaaguaccccgcccugaacgugaccaugcccaacaacgagcaguucgacaagcucuacaucuggggcguccaccaccccgggaccgacaaggaccagaucuuccuguacgcgcaggccgccgggcggaucaccgugagcacgaagcgcucccagcaggccgugaucccgaacaucggcagccggccccgcguccggaacauccccagccgcguguccaucuacuggaccaucgugaagcccggcgacauccugcucaucaacagcaccgggaaccugaucgccccgcggggcuacuucaagauccgcuccgggaaguccuccaucaugcggagcgacgcgcccaucggcaagugcaacuccgccugcaucacccccaacggcagcauccccaacgacaagccguuccagaacgucaaccgcaucacguacggggccugcccccgguacgugaagcagaacacccugaagcucgccaccggcaugcgcaacgugcccgagaagcagacccgggggaucuucggcgccaucgcgggguucaucgagaacggcugggagggcauggucgacgggugguacggcuuccgccaccagaacuccgaggggcggggccaggccgccgaccucaagagcacgcaggccgccaucgaccagaucaacgggaagcugaaccgccugaucggcaagaccaacgagaaguuccaccagaucgagaaggaguucuccgagguggagggccggauccaggaccuggagaaguacguggaggacaccaagaucgaccuguggagcuacaacgcggagcuccuggucgcccuggagaaccagcacaccaucgaccucacggacuccgagaugaacaagcuguucgagaagaccaagaagcagcugcgcgagaacgccgaggacauggggaacggcugcuucaagaucuaccacaagugcgacaacgccugcaucgggagcauccgcaacggcaccuacgaccacgacguguaccgggacgaggcccucaacaaccgcuuccagaucaaggggguggagcugaaguccggcuacaagggcuggauccuguggaucagcuucgcgaucuccugcuuccuccugugcgucgcccugcucggguucaucaugugggccugccagaagggcaacauccggugcaacaucugcaucuga

SEQ ID NO: 74907 - RNA, 1701 nt, Artificial Sequence; identical to SEQ ID NO: 71806
  derived and/or modified CDS sequence (opt1) from hemagglutinin__InfluenzaA__AHC61943

SEQ ID NO: 74908 - RNA, 1701 nt, Artificial Sequence; identical to SEQ ID NO: 73098
  derived and/or modified CDS sequence (opt1) from hemagglutinin__InfluenzaA__AHC61955

SEQ ID NO: 74909 - RNA, 1701 nt, Artificial Sequence; identical to SEQ ID NO: 71806
  derived and/or modified CDS sequence (opt1) from hemagglutinin__InfluenzaA__AHC61967

SEQ ID NO: 74910 - RNA, 1701 nt, Artificial Sequence; identical to SEQ ID NO: 70879
  derived and/or modified CDS sequence (opt1) from hemagglutinin__InfluenzaA__AHC61979

SEQ ID NO: 74911 - RNA, 1701 nt, Artificial Sequence; identical to SEQ ID NO: 71006
  derived and/or modified CDS sequence (opt1) from hemagglutinin__InfluenzaA__AHC61991

SEQ ID NO: 74912 - RNA, 1701 nt, Artificial Sequence; identical to SEQ ID NO: 74717
  derived and/or modified CDS sequence (opt1) from hemagglutinin__InfluenzaA__AHC62003

SEQ ID NO: 74913 - RNA, 1701 nt, Artificial Sequence; identical to SEQ ID NO: 71806
  derived and/or modified CDS sequence (opt1) from hemagglutinin__InfluenzaA__AHC62015

SEQ ID NO: 74914 - RNA, 1701 nt, Artificial Sequence; identical to SEQ ID NO: 73098
  derived and/or modified CDS sequence (opt1) from hemagglutinin__InfluenzaA__AHC62027

SEQ ID NO: 74915 - RNA, 1701 nt, Artificial Sequence
  derived and/or modified CDS sequence (opt1) from hemagglutinin__InfluenzaA__AHC62039
augaagaccaucaucgcccugagcuacauccucugccugguguucgcccagaagcugcccggcaacgacaacuccaccgcgacgcucugccuggggcaccacgccgucccgaacggcaccaucgugaagaccaucaccaacgaccagaucgaggugacgaacgccaccgagcugguccagagcuccagcaccggggagaucugcaacagcccccaccagauccucgacggcgagaacugcacccugaucgacgcccugcucggggacccccagugcgacggcuuccagaacaagaagugggaccuguucguggagcgcagcaaggcccacuccaacugcuaccccuacgacgugccggacuacgcgagccugcggucccucgucgccagcuccggcacgcuggaguucaacaacgagagcuucaacuggaccggggugacccagaacggcaccuccagcgccugcauccgcggguccaacaacagcuucuucucccggcugaacuggcucacgcaccugaacuucaaguaccccgcccugaacgugaccaugcccaacaacgagcaguucgacaagcucuacaucuggggcguccaccaccccgggaccgacaaggaccagaucuuccuguacgcgcaggccagcggccgcaucaccguguccacgaagcggagccagcaggccgugaucccgaacaucggcagccgcccccggguccgcaacauccccucccgggugagcaucuacuggaccaucgugaagcccggggacauccugcucaucaacuccaccggcaaccugaucgccccgcgcggguacuucaagauccggagcggcaaguccagcaucaugaaguccgacgcccccaucggcaagugcaacagcgcgugcaucacccccaacggguccauccccaacgacaagccguuccagaacgucaaccgcaucacguacggcgccugcccccgguacgugaagcagaacacccugaagcucgccaccgggaugcgcaacgugcccgagaagcagacccggggcaucuucggggccaucgccggcuucaucgagaacggcugggaggggaugauggacggcugguacggguuccgccaccagaacagcgagggccgggggcaggcggccgaccugaaguccacgcaggccgccaucgaccagaucaacggcaagcugaaccgccucaucggcaagaccaacgagaaguuccaccagaucgagaaggaguucagcgaggucgaggggcggauccaggaccuggagaaguacguggaggacaccaagaucgaccugugguccuacaacgccgagcuccugguggcgcuggagaaccagcacaccaucgaccucacggacagcgagaugaacaagcuguucgagaagaccaagaagcagcugcgcgagaacgccgaggacaugggcaacgggugcuucaagaucuaccacaagugcgacaacgccugcaucggcuccauccggaacgggaccuacgaccacgacgucuaccgcgacgaggcccucaacaaccgcuuccagaucaagggcguggagcugaaguccggcuacaaggacuggauccuguggaucuccuucgccaucagcugcuuccuccugugcguggcgcugcucggguucaucaugugggccugccagaagggcaacauccggugcaacaucugcaucuga

SEQ ID NO: 74916 - RNA, 1701 nt, Artificial Sequence
  derived and/or modified CDS sequence (opt1) from hemagglutinin__InfluenzaA__AHC62050
augaagaccaucaucgcccugagcuacauccucugccugguguucgcccagaagcugcccggcaacgacaacuccaccgcgacgcucugccuggggcaccacgccgucccgaacggcaccaucgugaagaccaucaccaacgaccagaucgaggugacgaacgccaccgagcugguccagagcuccagcaccggggagaucugcaacagcccccaccagauccucgacggcgagaacugcacccugaucgacgcccugcucggggacccccagugcgacggcuuccagaacaagaagugggaccuguucguggagcgcagcaaggcccacuccaacugcuaccccuacgacgugccggacuacgcgagccugcggucccucgucgccagcuccggcacgcuggaguucaacaacgagagcuucaacuggaccggggugacccagaacggcaccuccagcgccugcauccgccgguccaacaacagcuucuucucccgccugaacuggcucacgcaccugaacuucaaguaccccgcccugaacgugaccaugcccaacaacgagcaguucgacaagcucuacaucuggggcguccaccaccccgggaccgacaaggaccagaucuuccuguacgcgcaggccagcgggcggaucaccguguccacgaagcgcagccagcaggccgugaucccgaacaucggcagccggccccgcguccggaacgugcccucccgcgugagcaucuacuggaccaucgucaagcccggcgacauccugcucaucaacuccaccgggaaccugaucgccccgcggggcuacuucaagauccgcagcgggaaguccagcaucaugcgguccgacgcccccaucggcaagugcaacagcgcgugcaucacccccaacggcuccauccccaacgacaagccguuccagaacgugaaccgcaucacguacggggccugcccccgguacgugaagcagaacacccugaagcucgccaccggcaugcgcaacguccccgagaagcagacccgggggaucuucggcgccaucgccggguucaucgagaacggcugggagggcaugguggacgggugguacggcuuccgccaccagaacagcgaggggcggggccaggcggccgaccugaaguccacgcaggccgccaucgaccagaucaacgggaagcugaaccgccucaucggcaagaccaacgagaaguuccaccagaucgagaaggaguucagcgagguggagggccggauccaggaccuggagaaguacgucgaggacaccaagaucgaccugugguccuacaacgccgagcuccugguggcgcuggagaaccagcacaccaucgaccucacggacagcgagaugaacaagcuguucgagaagaccaagaagcagcugcgcgagaacgccgaggacauggggaacggcugcuucaagaucuaccacaagugcgacaacgccugcaucggguccauccgcaacggcaccuacgaccacgacguguaccgggacgaggcccucaacaaccgcuuccagaucaagggggucgagcugaaguccggcuacaaggacuggauccuguggaucuccuucgccaucagcugcuuccuccugugcguggcgcugcucggcuucaucaugugggccugccagaaggggaacauccggugcaacaucugcaucuga

SEQ ID NO: 74917 - RNA, 1701 nt, Artificial Sequence; identical to SEQ ID NO: 73098
  derived and/or modified CDS sequence (opt1) from hemagglutinin__InfluenzaA__AHC62062

SEQ ID NO: 74918 - RNA, 1701 nt, Artificial Sequence
  derived and/or modified CDS sequence (opt1) from hemagglutinin__InfluenzaA__AHC62074
augaagaccaucaucgcccugagcuacauccucugccugguguucgcccagaagcugcccggcaacgacaacuccaccgcgacgcucugccuggggcaccacgccgucccgaacggcaccaucgugaagaccaucaccaacgaccagaucgaggugacgaacgccaccgagcugguccagagcuccagcaccggggagaucugcgacagcccccaccagauccucgacggcgagaacugcacccugaucgacgcccugcucggggacccccagugcgacggcuuccagaacaagaagugggaccuguucguggagcgcagcaaggccuacuccaacugcuaccccuacgacgugccggacuacgcgagccugcggucccucgucgccagcuccggcacgcuggaguucaacaacgagagcuucaacuggaccggggugacccagaacggcaccuccagcgccugcauccgccgguccaacaacagcuucuucucccgccugaacuggcucacgcaccugaacuucaaguaccccgcccugaacgugaccaugcccaacaacgagcaguucgacaagcucuacaucuggggcguccaccaccccgggaccgacaaggaccagaucuuccuguacgcgcaggccagcgggcggaucaccguguccacgaagcgcaaccagcaggccgugaucccgaacaucggcagccggccccgcguccggaacauccccagccgcaucuccaucuacuggaccaucgugaagcccggcgacauccugcucaucaacagcaccgggaaccugaucgccccgcggggcuacuucaagauccgcuccgggaaguccuccaucaugcggagcgacgcccccaucggcaagugcaacuccgagugcaucacccccaacggcagcauccccaacgacaagccguuccagaacgugaaccgcaucacguacggggcgugcccccgguacgucaagcagaacacccugaagcucgccaccggcaugcgcaacgugcccgagaagcagacccgggggaucuucggcgccaucgccggguucaucgagaacggcugggagggcaugguggacgggugguacggcuuccgccaccagaacuccgaggggcggggccaggccgcggaccucaagagcacgcaggccgccaucgaccagaucaacgggaagcugaaccgccugaucggcaagaccaacgagaaguuccaccagaucgagaaggaguucuccgaggucgagggccggauccaggaccuggagaaguacguggaggacaccaagaucgaccuguggagcuacaacgccgagcuccugguggcccuggagaaccagcacaccaucgaccucacggacuccgagaugaacaagcuguucgagaagaccaagaagcagcugcgcgagaacgcggaggacauggggaacggcugcuucaagaucuaccacaagugcgacaacgccugcaucgggagcauccgcaacggcaccuacaaccacgacgucuaccgggacgaggcccucaacaaccgcuuccagaucaaggggguggagcugaaguccggcuacaaggacuggauccuguggaucagcuucgccaucuccugcuuccuccugugcguggcccugcucggcuucaucaugugggcgugccagaaggggaacauccggugcaacaucugcaucuga

SEQ ID NO: 74919 - RNA, 1701 nt, Artificial Sequence; identical to SEQ ID NO: 70879
  derived and/or modified CDS sequence (opt1) from hemagglutinin__InfluenzaA__AHC62086

SEQ ID NO: 74920 - RNA, 1701 nt, Artificial Sequence; identical to SEQ ID NO: 71806
  derived and/or modified CDS sequence (opt1) from hemagglutinin__InfluenzaA__AHC62098

SEQ ID NO: 74921 - RNA, 1701 nt, Artificial Sequence; identical to SEQ ID NO: 70879
  derived and/or modified CDS sequence (opt1) from hemagglutinin__InfluenzaA__AHC62110

SEQ ID NO: 74922 - RNA, 1701 nt, Artificial Sequence
  derived and/or modified CDS sequence (opt1) from hemagglutinin__InfluenzaA__AHC62122
augaagaccaucaucgcccugagcuacauccucugccugguguucgcccagaagcugcccggcaacgacaacuccaccgcgacgcucugccuggggcaccacgccgucccgaacggcaccaucgugaagaccaucaccaacgaccagaucgaggugacgaacgccaccgagaugguccagagcuccagcaccggggagaucugcaacagcccccaccagauccuggacggcgagaacugcacccucaucgacgcccugcugggggacccccagugcgacggcuuccagaacaagaagugggaccucuucguggagcgcagcaaggcccacuccaacugcuaccccuacgacgugccggacuacgcgagccugcggucccuggucgccagcuccggcacgcucgaguucaacaacgagagcuucaacuggaccggggugacccagaacggcaccuccagcgccugcauccgcggguccaacaacagcuucuucucccggcugaacuggcugacgcacagcaacuucaaguaccccgcccucaacgugaccaugcccaacaacgagcaguucgacaagcuguacaucuggggcguccaccaccccgggaccgacaaggaccagaucuuccuguacgcgcaggccuccggccgcaucaccgugagcacgaagcggagccagcaggccgugaucccgaacaucggcucccgcccccggguccgcaacauccccagccggguguccaucuacuggaccaucgugaagcccggggacauccuccugaucaacagcaccggcaaccugaucgccccgcgcggguacuucaagauccgguccggcaagagcuccaucaugcgcagcgacgcccccaucggcaagugcaacuccgcgugcaucacccccaacgggagcauccccaacgacaagccguuccagaacgucaaccggaucacguacggcgccugcccccgcuacgugaagcagaacacccucaagcuggccaccgggaugcggaacgugcccgagaagcagacccgcggcaucuucggggccaucgccggcuucaucgagaacggcugggaggggauggucgacggcugguacggguuccggcaccagaacuccgagggccgcgggcaggcggccgaccugaaguccacgcaggccgccaucgaccagaucaacggcaagcucaaccggcugaucggcaagaccaacgagaaguuccaccagaucgagaaggaguucuccgagguggaggggcgcauccaggaccuggagaaguacguggaggacaccaagaucgaccucuggagcuacaacgccgagcugcuggucgcgcucgagaaccagcacaccaucgaccugacggacuccgagaugaacaagcuguucgagaagaccaagaagcagcuccgggagaacgccgaggacaugggcaacgggugcuucaagaucuaccacaagugcgacaacgccugcaucggcagcauccgcaacgggaccuacgaccacgacguguaccgcgacgaggcccugaacaaccgguuccgcaucaagggcguggagcugaaguccggcuacaaggacuggauccucuggaucagcuucgccaucuccugcuuccugcugugcgucgcgcuccugggguucaucaugugggccugccagaagggcaacauccggugcaacaucugcaucuga

SEQ ID NO: 74923 - RNA, 1701 nt, Artificial Sequence; identical to SEQ ID NO: 70879
  derived and/or modified CDS sequence (opt1) from hemagglutinin__InfluenzaA__AHC62134

SEQ ID NO: 74924 - RNA, 1701 nt, Artificial Sequence
  derived and/or modified CDS sequence (opt1) from hemagglutinin__InfluenzaA__AHC62146
augaagaccaucaucgcccugagcuacauccucugccugguguucgcccagaagcugcccggcaacgacaacuccaccgcgacgcucugccuggggcaccacgccgucccgaacggcaccaucgugaagaccaucaccaacgaccagaucgaggugacgaacgccaccgagcugguccagagcuccagcaccggggagaucugcaacagcccccaccagauccucgacggcgagaacugcacccugaucgacgcccugcucggggacccccagugcgacggcuuccagaacaagaagugggaccuguucguggagcgcagcaaggccuacuccaacugcuaccccuacgacgugccggacuacgcgagccugcggucccucgucgccagcuccggcacgcuggaguucaacaacgagagcuucaacuggaccggggugacccagaacggcaccuccagcgccugcauccgccgguccaacagcuccuucuucagccgccugaacuggcucacgcaccugaacuucaaguaccccgcccugaacgugaccaugcccaacaacgagcaguucgacaagcucuacaucuggggcguccaccaccccgggaccgacaaggaccagaucuuccuguacgcgcaguccagcgggcggaucaccgugagcacgaagcgcucccagcaggccgugaucccgaacaucggcagccggccccgcauccggaacauccccucccgcaucagcaucuacuggaccaucgucaagcccggcgacauccugcucaucaacuccaccgggaaccugaucgccccgcggggcuacuucaagauccgcagcgggaaguccagcaucaugcgguccgacgcccccaucggcaagugcaacagcgagugcaucacccccaacggcuccauccccaacgacaagccguuccagaacgugaaccgcaucacguacggggccugcccccgguacgugaagcagagcacccugaagcucgcgaccggcaugcgcaacguccccgagaagcagacccgggggaucuucggcgccaucgccggguucaucgagaacggcugggagggcaugguggacgggugguacggcuuccgccaccagaacuacgaggggcggggccaggccgccgaccugaaguccacgcaggcggccaucgaccagaucaacgggaagcugaaccgccucaucggcaagaccaacgagaaguuccaccagaucgagaaggaguucagcgagguggagggccggauccaggaccuggagaaguacgucgaggacaccaagaucgaccugugguccuacaacgccgagcuccugguggcccuggagaaccagcacaccaucgaccucacggacagcgagaugaacaagcuguucgagaagaccaagaagcagcugcgcgagaacgccgaggacauggggaacggcugcuucaagaucuaccacaagugcgacaacgcgugcaucggguccauccgcaacggcaccuacaaccacgacguguaccgggacgaggcccucaacaaccgcuuccagaucaagggggucgagcugaaguccggcuacaaggacuggauccuguggaucuccuucgccaucagcugcuuccuccugugcguggcccugcucggcuucaucaugugggccugccagaaggggaacauccggugcaacaucugcaucuga

SEQ ID NO: 74925 - RNA, 1701 nt, Artificial Sequence; identical to SEQ ID NO: 71006
  derived and/or modified CDS sequence (opt1) from hemagglutinin__InfluenzaA__AHC62158

SEQ ID NO: 74926 - RNA, 1701 nt, Artificial Sequence
  derived and/or modified CDS sequence (opt1) from hemagglutinin__InfluenzaA__AHC62170
augaagaccaucaucgcccugagcuacauccucugccugguguucgcccagaagcugcccggcaacgacaacuccaccgcgacgcucugccuggggcaccacgccgucccgaacggcaccaucgugaagaccaucaccaacgaccagaucgaggugacgaacgccaccgagcugguccagagcuccagcaccggggagaucugcaacagcccccaccagauccucgacggcgagaacugcacccugaucgacgcccugcucggggacccccagugcgacggcuuccagaacaagaagugggaccuguucguggagcgcagcaaggcccacuccaacugcuaccccuacgacgugccggacuacgcgagccugcggucccucgucgccagcuccggcacgcuggaguucaacaacgagagcuucaacuggaccggggugacccagaacggcaccuccagcgccugcauccgcggguccaacaacagcuucuucucccggcugaacuggcucacgcaccugaacuucaaguaccccgcccugaacgugaccaugcccaacaacgagcaguucgacaagcucuacaucuggggcguccaccaccccgggaccgacaaggaccagaucuuccuguacgcgcaggccagcggccgcaucaccguguccacgaagcggagccagcaggccgugaucccgaacaucggcagccgcccccggguccgcaacauccccucccgggugagcaucuacuggaccaucgugaagcccggggacauccugcucaucaacuccaccggcaaccugaucgccccgcgcggguacuucaagauccggagcggcaaguccagcaucaugcgcuccgacgcccccaucggcaagugcaacagcgcgugcaucacccccaacggguccauccccaacgacaagccguuccagaacgucaaccggaucacguacggcgccugcccccgcuacgugaagcagaacacccugaagcucgccaccgggaugcggaacgugcccgagaagcagacccgcggcaucuucggggccaucgccggcuucaucgagaacggcugggaggggaugauggacggcugguacggguuccggcaccagaacagcgagggccgcgggcaggcggccgaccugaaguccacgcaggccgccaucgaccagaucaacggcaagcugaaccggcucaucggcaagaccaacgagaaguuccaccagaucgagaaggaguucagcgaggucgaggggcgcauccaggaccuggagaaguacguggaggacaccaagaucgaccugugguccuacaacgccgagcuccugguggcgcuggagaaccagcacaccaucgaccucacggacagcgagaugaacaagcuguucgagaagaccaagaagcagcugcgggagaacgccgaggacaugggcaacgggugcuucaagaucuaccacaagugcgacaacgccugcaucggcuccauccgcaacgggaccuacgaccacaacgucuaccgcgacgaggcccucaacaaccgguuccagaucaagggcguggagcugaaguccggcuacaaggacuggauccuguggaucuccuucgccaucagcugcuuccuccugugcguggcgcugcucggguucaucaugugggccugccagaagggcaacauccgcugcaacaucugcaucuga

SEQ ID NO: 74927 - RNA, 1701 nt, Artificial Sequence; identical to SEQ ID NO: 70879
  derived and/or modified CDS sequence (opt1) from hemagglutinin__InfluenzaA__AHC62182

SEQ ID NO: 74928 - RNA, 1701 nt, Artificial Sequence; identical to SEQ ID NO: 73098
  derived and/or modified CDS sequence (opt1) from hemagglutinin__InfluenzaA__AHC62194

SEQ ID NO: 74929 - RNA, 1701 nt, Artificial Sequence
  derived and/or modified CDS sequence (opt1) from hemagglutinin__InfluenzaA__AHC62206
augaagaccaucaucgcccugagcuacauccucugccugguguucgcccagaagcugcccggcaacgacaacuccaccgcgacgcucugccuggggcaccacgccgucccgaacggcaccaucgugaagaccaucaccaacgaccagaucgaggugacgaacgccaccgagcugguccagagcuccagcaccggggagaucugcgacagcccccaccagauccucgacggcgagaacugcacccugaucgacgcccugcucggggacccccagugcgacggcuuccagaacaagaagugggaccuguucguggagcgcagcaaggccuacuccaacugcuaccccuacgacgugccggacuacgcgagccugcggucccucgucgccagcuccggcacgcuggaguucaacaacgagagcuucaucuggaccggggugacccagaacggcaccuccagcgccugcauccgccgguccaacagcuccuucuucagccgccugaacuggcucacgcaccugaacuucaaguaccccgcccugaacgugaccaugcccaacaacgagcaguucgacaagcucuacaucuggggcguccaccaccccgggaccgacaaggaccagaucuuccuguacgcgcaguccagcgggcggaucaccgugagcacgaagcgcucccagcaggccgugaucccgaacaucggcagccggccccgcauccggaacauccccucccgcaucagcaucuacuggaccaucgucaagcccggcgacauccugcucaucaacuccaccgggaaccugaucgccccgcggggcuacuucaagauccgcagcgggaaguccagcaucaugcgguccgacgcccccaucggcaagugcaacagcgagugcaucacccccaacggcuccauccccaacgacaagccguuccagaacgugaaccgcaucacguacggggccugcccccgguacgugaagcagagcacccugaagcucgcgaccggcaugcgcaacguccccgagaagcagacccgggggaucuucggcgccaucgccggguucaucgagaacggcugggagggcaugguggacgggugguacggcuuccgccaccagaacuccgaggggcggggccaggccgccgaccugaaguccacgcaggcggccaucgaccagaucaacgggaagcugaaccgccucaucggcaagaccaacgagaaguuccaccagaucgagaaggaguucuccgagguggagggccggauccaggaccuggagaaguacgucgaggacaccaagaucgaccuguggagcuacaacgccgagcuccugguggcccuggagaaccagcacaccaucgaccucacggacuccgagaugaacaagcuguucgagaagaccaagaagcagcugcgcgagaacgccgaggacauggggaacggcugcuucaagaucuaccacaagugcgacaacgcgugcaucgggagcauccgcaacggcaccuacaaccacgacguguaccgggacgaggcccucaacaaccgcuuccagaucaagggggucgagcugaaguccggcuacaaggacuggauccuguggaucagcuucgccaucagcugcuuccuccugugcguggcccugcucggcuucaucaugugggccugccagaaggggaacauccggugcaacaucugcaucuga

SEQ ID NO: 74930 - RNA, 1701 nt, Artificial Sequence; identical to SEQ ID NO: 71006
  derived and/or modified CDS sequence (opt1) from hemagglutinin__InfluenzaA__AHC62218

SEQ ID NO: 74931 - RNA, 1701 nt, Artificial Sequence
  derived and/or modified CDS sequence (opt1) from hemagglutinin__InfluenzaA__AHC62242
augaagaccaucaucgcccugagcuacauccucugccugguguucgcccagaagauccccggcaacgacaacuccaccgcgacgcugugccucgggcaccacgccgucccgaacggcaccaucgugaagaccaucaccaacgaccagaucgaggugacgaacgccaccgagcugguccagaacagcuccaccggggagaucugcgacagcccccaccagauccuggacggcgagaacugcacccucaucgacgcccugcugggggacccccagugcgacggcuuccagaacaagaagugggaccucuucguggagcgcuccaaggccuacagcaacugcuaccccuacgacgugccggacuacgcgucccugcggagccuggucgccuccagcggcacgcucgaguucaacaacgaguccuucaacuggaccggggugacccagaacggcaccagcuccgccugcauccgccggagcaacaacuccuucuucagccgccugaacuggcugacgcaccucaacuucaaguaccccgcccugaacgugaccaugcccaacaacgagcaguucgacaagcuguacaucuggggcguccaccaccccgggaccgacaaggaccagaucuuccucuacgcgcaggccuccgggcggaucaccgugagcacgaagcgcucccagcaggccgugaucccgaacaucggcagccggccccgcguccggaacauccccagccgcaucuccaucuacuggaccaucgugaagcccggcgacauccugcugaucaacagcaccgggaaccucaucgccccgcggggcuacuucaagauccgcuccggcaagagcuccaucaugcggagcgacgcccccaucgggaagugcaacuccgagugcaucacccccaacggcagcauccccaacgacaagccguuccagaacgugaaccgcaucacguacggggcgugcccccgguacgucaagcagaacacccugaagcuggccaccggcaugcgcaacgugcccgagaagcagacccgggggaucuucggcgccaucgccggguucaucgagaacggcugggagggcaugguggacgggugguacggcuuccgccaccagaacuccgaggggcggggccaggccgcggaccucaagagcacgcaggccgccaucgaccagaucaacgggaagcugaaccgccugaucggcaagaccaacgagaaguuccaccagaucgagaaggaguucuccgaggucgagggccggauccaggaccucgagaaguacguggaggacaccaagaucgaccuguggagcuacaacgccgagcugcucaucgcccuggagaaccagcacaccaucgaccugacggacuccgagaugaacaagcuguucgagaagaccaagaagcagcuccgcgagaacgcggaggacauggggaacggcugcuucaagaucuaccacaagugcgacaacgccugcaucgggagcauccgcaacggcaccuacgaccacgacguguaccgggacgaggcccugaacaaccgcuuccagaucaagggggucgagcucaaguccggcuacaaggacuggauccuguggaucagcuucgccaucuccugcuuccugcucugcguggcccugcugggcuucaucaugugggcgugccagaaggggaacauccggugcaacaucugcaucuga

SEQ ID NO: 74932 - RNA, 1701 nt, Artificial Sequence; identical to SEQ ID NO: 74641
  derived and/or modified CDS sequence (opt1) from hemagglutinin__InfluenzaA__AHC62254

SEQ ID NO: 74933 - RNA, 1701 nt, Artificial Sequence; identical to SEQ ID NO: 71006
  derived and/or modified CDS sequence (opt1) from hemagglutinin__InfluenzaA__AHC62266

SEQ ID NO: 74934 - RNA, 1701 nt, Artificial Sequence; identical to SEQ ID NO: 74805
  derived and/or modified CDS sequence (opt1) from hemagglutinin__InfluenzaA__AHC62278

SEQ ID NO: 74935 - RNA, 1701 nt, Artificial Sequence
  derived and/or modified CDS sequence (opt1) from hemagglutinin__InfluenzaA__AHC62290
augaagaccaucaucgcccugagcuacauccucugccugaucuucgcccagaagcugcccggcaacgacaacuccaccgcgacgcucugccuggggcaccacgccgugccgaacggcaccaucgucaagaccaucaccaacgaccagaucgaggugacgaacgccaccgagcuggugcagagcuccagcaccggggagaucugcaacagcccccaccagauccucgacggcgagaacugcacccugaucgacgcccugcucggggacccccagugcgacggcuuccagaacaagaagugggaccuguucgucgagcgcagcaaggcccacuccaacugcuaccccuacgacgugccggacuacgcgagccugcggucccucguggccagcuccggcacgcuggaguucaacaacgagagcuucaacuggaccggggucacccagaacggcaccuccagcgccugcauccgccgguccaacaacagcuucuucucccgccugaacuggcucacgcaccugaacuucaaguaccccgcccugaacgugaccaugcccaacaacgagcaguucgacaagcucuacaucuggggcgugcaccaccccgggaccgacaaggaccagaucuuccuguacgcgcaggccagcgggcggaucaccgucuccacgaagcgcagccagcaggccgugaucccgaacaucggcagccggccccgcgugcggaacauccccucccgcgucagcaucuacuggaccaucgugaagcccggcgacauccugcucaucaacuccaccgggaaccugaucgccccgcggggcuacuucaagauccgcagcgggaaguccagcaucaugcgguccgacgcccccaucggcaagugcaacagcgcgugcaucacccccaacggcuccauccccaacgacaagccguuccagaacgugaaccgcaucacguacggggccugcccccgguacgucaagcagaacacccugaagcucgccaccggcaugcgcaacgugcccgagaagcagacccgggggaucuucggcgccaucgccggguucaucgagaacggcugggagggcaugguggacgggugguacggcuuccgccaccagaacagcgaggggcggggccaggcggccgaccugaaguccacgcaggccgccaucgaccagaucaacgggaagcugaaccgccucaucggcaagaccaacgagaaguuccaccagaucgagaaggaguucagcgaggucgagggccggauccaggaccuggagaaguacguggaggacaccaagaucgaccugugguccuacaacgccgagcuccugguggcgcuggagaaccagcacaccaucgaccucacggacagcgagaugaacaagcuguucgagaagaccaagaagcagcugcgcgagaacgccgaggacauggggaacggcugcuucaagaucuaccacaagugcgacaacgccugcaucggguccauccgcaacggcaccuacgaccacgacgucuaccgggacgaggcccucaacaaccgcuuccagaucaaggggguggagcugaaguccggcuacaaggacuggauccuguggaucuccuucgccaucagcugcuuccuccugugcguggcgcugcucggcuucaucaugugggccugccagaaggggaacauccggugcaacaucugcaucuga

SEQ ID NO: 74936 - RNA, 1701 nt, Artificial Sequence
  derived and/or modified CDS sequence (opt1) from hemagglutinin__InfluenzaA__AHC62302
augaagaccaucaucgcccugagcuacauccucugccugguguucgcccagaagcugcccggcaacgacaacuccaccgcgacgcucugccuggggcaccacgccgucccgaacggcaccaucgugaagaccaucaccaacgaccagaucgaggugacgaacgccaccgagcugguccagagcuccagcaccggggagaucugcaacagcccccaccagauccucgacggcgagaacugcacccugaucgacgcccugcucggggacccccagugcgacggcuuccagaacaagaagugggaccuguucguggagcgcagcaaggcccacuccaacugcuaccccuacgacgugccggacuacgcgagccugcggucccucgucgccagcuccggcacgcuggaguucaacaacgagagcuucaacuggaccggggugacccagaacggcaccuccagcgccugcauccgccgguccaacaacagcuucuucucccgccugaacuggcucacgcaccugaacuucaaguaccccgcccugaacgugaccaugcccaacaacgagcaguucgacaagcucuacaucuggggcguccaccaccccgggaccgacaaggaccagaucuuccuguacgcgcaggccgccgggcggaucaccgugagcacgaagcgcucccagcaggccgugaucccgaacaucggcagccggccccgcguccggaacauccccagccgcguguccaucuacuggaccaucgugaagcccggcgacauccugcucaucaacagcaccgggaaccugaucgccccgcggggcuacuucaagauccgcaacgggaaguccagcaucaugcgguccgacgcgcccaucggcaagugcaacagcgccugcaucacccccaacggcuccauccccaacgacaagccguuccagaacgucaaccgcaucacguacggggccugcccccgguacgugaagcagaacacccugaagcucgccaccggcaugcgcaacgugcccgagaagcagacccgggggaucuucggcgccaucgcgggguucaucgagaacggcugggagggcauggucgacgggugguacggcuuccgccaccagaacagcgaggggcggggccaggccgccgaccugaaguccacgcaggccgccaucgaccagaucaacgggaagcugaaccgccucaucggcaagaccaacgagaaguuccaccagaucgagaaggaguucagcgagguggagggccggauccaggaccuggagaaguacguggaggacaccaagaucgaccugugguccuacaacgcggagcuccuggucgcccuggagaaccagcacaccaucgaccucacggacagcgagaugaacaagcuguucgagaagaccaagaagcagcugcgcgagaacgccgaggacauggggaacggcugcuucaagaucuaccacaagugcgacaacgccugcaucggguccauccgcaacggcaccuacgaccacgacguguaccgggacgaggcccucaacaaccgcuuccagaucaaggggguggagcugaaguccggcuacaaggacuggauccuguggaucuccuucgcgaucagcugcuuccuccugugcgucgcccugcucggcuucaucaugugggccugccagaaggggaacauccggugcaacaucugcaucuga

SEQ ID NO: 74937 - RNA, 1701 nt, Artificial Sequence
  derived and/or modified CDS sequence (opt1) from hemagglutinin__InfluenzaA__AHC62314
augaagaccaucaucgcccugagcuacauccucugccugguguucgcccagaagcugcccggcaacgacaacuccaccgcgacgcucugccuggggcaccacgccgucccgaacggcaccaucgugaagaccaucaccaacgaccagaucgaggugacgaacgccaccgagcugguccagaacagcuccaccggggagaucugcgacagcccccaccagauccucgacggcgagaacugcacccugaucgacgcccugcucggggacccccagugcgacggcuuccagaacaagaagugggaccuguucguggagcgcuccaaggccuacagcaacugcuaccccuacgacgugccggacuacgcgucccugcggagccucgucgccuccagcggcacgcuggaguucaacaacgaguccuucaacuggaccggggugacccagaacggcaccagcuccgccugcauccgccggagcaacaacuccuucuucagccgccugaacuggcucacgcaccugaacuucaaguaccccgcccugaacgugaccaugcccaacaacgagcaguucgacaagcucuacaucuggggcguccaccaccccgggaccgacaaggaccagaucuuccuguacgcgcaggccuccgggcggaucaccgugagcacgaagcgcucccagcaggccgugaucccgaacaucggcagccggccccgcguccggaacauccccagccgcaucuccaucuacuggaccaucgugaagcccggcgacauccugcucaucaacagcaccgggaaccugaucgccccgcggggcuacuucaagauccgcuccggcaagagcuccaucaugcggagcgacgcccccaucgggaagugcaacuccgagugcaucacccccaacggcagcauccccaacgacaagccguuccagaacgugaaccgcaucacguacggggcgugcccccgguacgucaagcagaacacccugaagcucgccaccggcaugcgcaacgugcccgagaagcagacccgggggaucuucggcgccaucgccggguucaucgagaacggcugggagggcaugguggacgggugguacggcuuccgccaccagaacuccgaggggcggggccaggccgcggaccucaagagcacgcaggccgccaucgaccagaucaacgggaagcugaaccgccugaucggcaagaccaacgagaaguuccaccagaucgagaaggaguucuccgaggucgagggccggauccaggaccuggagaaguacguggaggacaccaagaucgaccuguggagcuacaacgccgagcuccugguggcccuggagaaccagcacaccaucgaccucacggacuccgagaugaacaagcuguucgagaagaccaagaagcagcugcgcgagaacgcggaggacauggggaacggcugcuucaagaucuaccacaagugcgacaacgccugcaucgggagcauccgcaacggcaccuacgaccacgacgucuaccgggacgaggcccucaacaaccgcuuccagauccgcgggguggagcugaaguccggcuacaaggacuggauccuguggaucagcuucgccaucuccugcuuccuccugugcguggcccugcucggcuucaucaugugggcgugccagaaggggaacauccggugcaacaucugcaucuga

SEQ ID NO: 74938 - RNA, 1701 nt, Artificial Sequence; identical to SEQ ID NO: 74802
  derived and/or modified CDS sequence (opt1) from hemagglutinin__InfluenzaA__AHC62326

SEQ ID NO: 74939 - RNA, 1701 nt, Artificial Sequence; identical to SEQ ID NO: 71806
  derived and/or modified CDS sequence (opt1) from hemagglutinin__InfluenzaA__AHC62338

SEQ ID NO: 74940 - RNA, 1701 nt, Artificial Sequence; identical to SEQ ID NO: 70879
  derived and/or modified CDS sequence (opt1) from hemagglutinin__InfluenzaA__AHC62350

SEQ ID NO: 74941 - RNA, 1701 nt, Artificial Sequence; identical to SEQ ID NO: 71806
  derived and/or modified CDS sequence (opt1) from hemagglutinin__InfluenzaA__AHC62362

SEQ ID NO: 74942 - RNA, 1701 nt, Artificial Sequence; identical to SEQ ID NO: 71806
  derived and/or modified CDS sequence (opt1) from hemagglutinin__InfluenzaA__AHC62374

SEQ ID NO: 74943 - RNA, 1701 nt, Artificial Sequence; identical to SEQ ID NO: 74805
  derived and/or modified CDS sequence (opt1) from hemagglutinin__InfluenzaA__AHC62386

SEQ ID NO: 74944 - RNA, 1701 nt, Artificial Sequence; identical to SEQ ID NO: 70879
  derived and/or modified CDS sequence (opt1) from hemagglutinin__InfluenzaA__AHC62398

SEQ ID NO: 74945 - RNA, 1701 nt, Artificial Sequence
  derived and/or modified CDS sequence (opt1) from hemagglutinin__InfluenzaA__AHC62410
augaagaccaucaucgcccugagcuacauccucugccugguguucgcccagaagcugcccggcaacgacaacuccaccgcgacgcucugccuggggcaccacgccgucccgaacggcaccaucgugaagaccaucaccaacgaccagaucgaggugacgaacgccaccgagcugguccagagcuccagcaccggggagaucugcaacagcccccaccagauccucgacggcgagaacugcacccugaucgacgcccugcucggggacccccagugcgacggcuuccagaacaagaagugggaccuguucguggagcgcagcaaggcccacuccaacugcuaccccuacgacgugccggacuacgcgagccugcggucccucgucgccagcuccggcacgcuggaguucaacaacgagagcuucaacuggaccggggugacccagaacggcaccuccagcgccugcauccgccgguccaacaacagcuucuucucccgccugaacuggcucacgcaccugaacuucaaguaccccgcccugaacgugaccaugcccaacaacgagcaguucgacaagcucuacaucuggggcguccaccaccccgggaccgacaaggaccagaucuuccuguacgcgcaggccagcgggcggaucaccguguccacgaagcgcagccagcaggccgugaucccgaacaucggcagccggccccgcguccggaacauccccucccgcgugagcaucuacuggaccaucgugaagcccggcgacauccugcucaucaacuccaccgggaaccugaucgccccgcggggcuacuucaagauccgcagcgggaaguccagcaucauccgguccgacgcccccaucggcaagugcaacagcgcgugcaucacccccaacggcuccauccccaacgacaagccguuccagaacgucaaccgcaucacguacggggccugcccccgguacgugaagcagaacacccugaagcucgccaccggcaugcgcaacgugcccgagaagcagacccgggggaucuucggcgccaucgccggguucaucgagaacggcugggagggcauggucgacgggugguacggcuuccgccaccagaacagcgaggggcggggccaggcggccgaccugaaguccacgcaggccgccaucgaccagaucaacgggaagcugaaccgccucaucggcaagaccaacgagaaguuccaccagaucgagaaggaguucagcgagguggagggccggauccaggaccuggagaaguacguggaggacaccaagaucgaccugugguccuacaacgccgagcuccuggucgcgcuggagaaccagcacaccaucgaccucacggacagcgagaugaacaagcuguucgagaagaccaagaagcagcugcgcgagaacgccgaggacauggggaacggcugcuucaagaucuaccacaagugcgacaacgccugcaucggguccauccgcaacggcaccuacgaccacgacguguaccgggacgaggcccucaacaaccgcuuccagaucaaggggguggagcugaaguccggcuacaaggacuggauccuguggaucuccuucgccaucagcugcuuccuccugugcgucgcgcugcucggcuucaucaugugggccugccagaaggggaacauccggugcaacaucugcaucuga

SEQ ID NO: 74946 - RNA, 1701 nt, Artificial Sequence; identical to SEQ ID NO: 74748
  derived and/or modified CDS sequence (opt1) from hemagglutinin__InfluenzaA__AHC62422

SEQ ID NO: 74947 - RNA, 1701 nt, Artificial Sequence
  derived and/or modified CDS sequence (opt1) from hemagglutinin__InfluenzaA__AHC62434
augaagaccaucaucgcccugagcuacauccucugccugguguucgcccagaagcugcccggcaacgacaacuccaccgcgacgcucugccuggggcaccacgccgucccgaacggcaccaucgugaagaccaucaccaacgaccagaucgaggugacgaacgccaccgagcugguccagagcuccagcaccggggagaucugcaacagcccccaccagauccucgacggcgagaacugcacccugaucgacgcccugcucggggacccccagugcgacggcuuccagaacaagaagugggaccuguucguggagcgcagcaaggcccacuccaacugcuaccccuacgacgugccggacuacgcgagccugcggucccucgucgccagcuccggcacgcuggaguucaacaacgagagcuucaacuggaccggggugacccagaacggcaccuccagcgccugcauccgccgguccaacaacagcuucuucucccgccugaacuggcucacgcaccugaacuucaaguaccccgcccugaacgugaccaugcccaacaacgagcaguucgacaagcucuacaucuggggcguccaccaccccgggaccgacaaggaccagaucuuccuguacgcgcaggccgccgggcggaucaccgugagcacgaagcgcucccagcaggccgugaucccgaacaucggcagccggccccgcguccggaacauccccagccgcguguccaucuacuggaccaucgugaagcccggcgacauccugcucaucaacagcaccgggaaccugaucgccccgcggggcuacuucaagauccaguccgggaaguccuccaucaugcgcagcgacgcgcccaucggcaagugcaacuccgccugcaucacccccaacggcagcauccccaacgacaagccguuccagaacgucaaccggaucacguacggggccugcccccgcuacgugaagcagaacacccugaagcucgccaccggcaugcggaacgugcccgagaagcagacccgcgggaucuucggcgccaucgcgggguucaucgagaacggcugggagggcauggucgacgggugguacggcuuccggcaccagaacuccgaggggcgcggccaggccgccgaccucaagagcacgcaggccgccaucgaccagaucaacgggaagcugaaccggcugaucggcaagaccaacgagaaguuccaccagaucgagaaggaguucuccgagguggagggccgcauccaggaccuggagaaguacguggaggacaccaagaucgaccuguggagcuacaacgcggagcuccuggucgcccuggagaaccagcacaccaucgaccucacggacuccgagaugaacaagcuguucgagaagaccaagaagcagcugcgggagaacgccgaggacauggggaacggcugcuucaagaucuaccacaagugcgacaacgccugcaucgggagcauccgcaacggcaccuacgaccacgacguguaccgcgacgaggcccucaacaaccgguuccagaucaaggggguggagcugaaguccggcuacaaggacuggauccuguggaucagcuucgcgaucuccugcuuccuccugugcgucgcccugcucggcuucaucaugugggccugccagaaggggaacauccgcugcaacaucugcaucuga

SEQ ID NO: 74948 - RNA, 1701 nt, Artificial Sequence; identical to SEQ ID NO: 70879
  derived and/or modified CDS sequence (opt1) from hemagglutinin__InfluenzaA__AHC62446

SEQ ID NO: 74949 - RNA, 1701 nt, Artificial Sequence; identical to SEQ ID NO: 71006
  derived and/or modified CDS sequence (opt1) from hemagglutinin__InfluenzaA__AHC62458

SEQ ID NO: 74950 - RNA, 1701 nt, Artificial Sequence
  derived and/or modified CDS sequence (opt1) from hemagglutinin__InfluenzaA__AHC62470
augaagaccaucaucgcccugagcuacauccucugccugguguucgcccagaagcugcccggcaacgacaacuccaccgcgacgcucugccuggggcaccacgccgucccgaacggcaccaucgugaagaccaucaccaacgaccagaucgaggugacgaacgccaccgagcugguccagaacagcuccaccggggagaucugcgacagcccccaccagauccucgacggcgagaacugcacccugaucgacgcccugcucggggacccccagugcgacggcuuccagaacaagaagugggaccuguucguggagcgcuccaaggccuacagcaacugcuaccccuacgacgugccggacuacgcgucccugcggagccucgucgccuccagcggcacgcuggaguucaacaacgaguccuucaacuggaccggggugacccagaacggcaccagcuccgccugcauccgccggagcaacaacuccuucuucagccgccugaacuggcucacgcaccugaacuucaaguaccccgcccugaacgugaccaugcccaacaacgagcaguucgacaagcucuacaucuggggcguccaccaccccgggaccgacaaggaccagaucuuccuguacgcgcaggccuccgggcggaucaccgugagcacgaagcgcucccagcaggccgugaucccgaacaucggcagccggccccgcguccggaacauccccagccgcaucuccaucuacuggaccaucgugaagcccggcgacauccugcucaucaacagcaccgggaaccugaucgccccgcggggcuacuucaagauccgcuccggcaagagcuccaucaugcggagcgacgcccccaucgggaagugcaacuccgagugcaucacccccaacggcagcauccccaacgggaagccguuccagaacgugaaccgcaucacguacggcgcgugcccccgguacgucaagcagaacacccugaagcucgccaccgggaugcgcaacgugcccgagaagcagacccggggcaucuucggggccaucgccggcuucaucgagaacggcugggaggggaugguggacggcugguacggguuccgccaccagaacuccgagggccgggggcaggccgcggaccucaagagcacgcaggccgccaucgaccagaucaacggcaagcugaaccgccugaucggcaagaccaacgagaaguuccaccagaucgagaaggaguucuccgaggucgaggggcggauccaggaccuggagaaguacguggaggacaccaagaucgaccuguggagcuacaacgccgagcuccugguggcccuggagaaccagcacaccaucgaccucacggacuccgagaugaacaagcuguucgagaagaccaagaagcagcugcgcgagaacgcggaggacaugggcaacgggugcuucaagaucuaccacaagugcgacaacgccugcaucggcagcauccgcaacgggaccuacgaccacgacgucuaccgggacgaggcccucaacaaccgcuuccagaucaagggcguggagcugaaguccggcuacaaggacuggauccuguggaucagcuucgccaucuccugcuuccuccugugcguggcccugcucggguucaucaugugggcgugccagaagggcaacauccggugcaacaucugcaucuga

SEQ ID NO: 74951 - RNA, 1701 nt, Artificial Sequence; identical to SEQ ID NO: 74703
  derived and/or modified CDS sequence (opt1) from hemagglutinin__InfluenzaA__AHC62482

SEQ ID NO: 74952 - RNA, 1701 nt, Artificial Sequence; identical to SEQ ID NO: 70879
  derived and/or modified CDS sequence (opt1) from hemagglutinin__InfluenzaA__AHC62506

SEQ ID NO: 74953 - RNA, 1701 nt, Artificial Sequence; identical to SEQ ID NO: 71006
  derived and/or modified CDS sequence (opt1) from hemagglutinin__InfluenzaA__AHC62518

SEQ ID NO: 74954 - RNA, 1701 nt, Artificial Sequence
  derived and/or modified CDS sequence (opt1) from hemagglutinin__InfluenzaA__AHC62530
augaagaccaucaucgcccugagcuacauccucugccugguguucgcccagaagauccccggcaacgacaacuccaccgcgacgcugugccucgggcaccacgccgucccgaacggcaccaucgugaagaccaucaccaacgaccagaucgaggugacgaacgccaccgagcugguccagagcuccagcaccggggagaucugcaacagcccccaccagauccuggacggcgagaacugcacccucaucgacgcccugcugggggacccccagugcgacggcuuccagaacaagaagugggaccucuucguggagcgcuccaaggcccacuccaacugcuaccccuacgacgugccggacuacgcgagccugcggucccuggucgccagcuccggcacgcucgaguucaacaacgagagcuucaacuggaccggggugacccagaacggcaccuccagcgccugcauccgccgguccaacaacagcuucuucucccgccugaacuggcugacgcaccucaacuucaaguaccccgcccugaacgugaccaugcccaacaacgagcaguucgacaagcuguacaucuggggcguccaccaccccgggaccgacaaggaccagaucuuccucuacgcgcaggccagcgggcggaucaccguguccacgaagcgcagccagcaggccgugaucccgaacaucggcagccggccccgcguccggaacauccccucccgcgugagcaucuacuggaccaucgugaagcccggcgacauccugcugaucaacuccaccgggaaccucaucgccccgcggggcuacuucaagauccgcagcgggaaguccagcaucaugcgguccgacgcccccaucggcaagugcaacagcgcgugcaucacccccaacggcuccauccccaacgacaagccguuccagaacgucaaccgcaucacguacggggccugcccccgguacgugaagcagaacacccugaagcuggccaccggcaugcgcaacgugcccgagaagcagacccgggggaucuucggcgccaucgccggguucaucgagaacggcugggagggcauggucgacgggugguacggcuuccgccaccagaacagcgaggggcggggccaggcggccgaccucaaguccacgcaggccgccaucgaccagaucaacgggaagcugaaccgccugaucggcaagaccaacgagaaguuccaccagaucgagaaggaguucagcgagguggagggccggauccaggaccucgagaaguacguggaggacaccaagaucgaccugugguccuacaacgccgagcugcucgucgcgcuggagaaccagcacaccaucgaccugacggacagcgagaugaacaagcuguucgagaagaccaagaagcagcuccgcgagaacgccgaggacauggggaacggcugcuucaagaucuaccacaagugcgacaacgccugcaucggguccauccgcaacggcaccuacgaccacgacguguaccgggacgaggcccugaacaaccgcuuccagaucaaggggguggagcucaagagcggcuacaaggacuggauccuguggaucuccuucgccaucagcugcuuccugcucugcgucgcgcugcugggcuucaucaugugggccugccagaaggggaacauccggugcaacaucugcaucuga

SEQ ID NO: 74955 - RNA, 1701 nt, Artificial Sequence; identical to SEQ ID NO: 74675
  derived and/or modified CDS sequence (opt1) from hemagglutinin__InfluenzaA__AHC62542

SEQ ID NO: 74956 - RNA, 1701 nt, Artificial Sequence; identical to SEQ ID NO: 70879
  derived and/or modified CDS sequence (opt1) from hemagglutinin__InfluenzaA__AHC62554

SEQ ID NO: 74957 - RNA, 1701 nt, Artificial Sequence
  derived and/or modified CDS sequence (opt1) from hemagglutinin__InfluenzaA__AHC62566
augaagaccaucaucgcccugagcuacauccucugccugguguucgcccagaagcugcccggcaacgacaacuccaccgcgacgcucugccuggggcaccacgccgucccgaacggcaccauggugaagaccaucaccaacgaccagaucgaggugacgaacgccaccgagcugguccagaacagcuccaccggggagaucugcgacagcccccaccagauccucgacggcgagaacugcacccugaucgacgcccugcucggggacccccagugcgacggcuuccagaacaagaagugggaccuguucguggagcgcuccaaggccuacagcaacugcuaccccuacgacgugccggacuacgcgucccugcggagccucgucgccuccagcggcacgcuggaguucaacaacgaguccuucaacuggaccggggugacccagaacggcaccagcuccgccugcauccgccggagcaacaacuccuucuucagccgccugaacuggcucacgcaccugaacuucaaguaccccgcccugaacgugaccaugcccaacaacgagcaguucgacaagcucuacaucuggggcguccaccaccccgggaccgacaaggaccagaucuuccuguacgcgcaggccuccgggcggaucaccgugagcacgaagcgcucccagcaggccgugaucccgaacaucggcagccggccccgcguccggaacauccccagccgcaucuccaucuacuggaccaucgugaagcccggcgacauccugcucaucaacagcaccgggaaccugaucgccccgcggggcuacuucaagauccgcuccggcaagagcuccaucaugcggagcgacgcccccaucgggaagugcaacuccgagugcaucacccccaacggcagcauccccaacgacaagccguuccagaacgugaaccgcaucacguacggggcgugcccccgguacgucaagcagaacacccugaagcucgccaccggcaugcgcaacgugcccgagaagcagacccgggggaucuucggcgccaucgccggguucaucgagaacggcugggagggcaugguggacgggugguacggcuuccgccaccagaacuccgaggggcggggccaggccgcggaccucaagagcacgcaggccgccaucgaccagaucaacgggaagcugaaccgccugaucggcaagaccaacgagaaguuccaccagaucgagaaggaguucuccgaggucgagggccggauccaggaccuggagaaguacguggaggacaccaagaucgaccuguggagcuacaacgccgagcuccugguggcccuggagaaccagcacaccaucgaccucacggacuccgagaugaacaagcuguucgagaagaccaagaagcagcugcgcgagaacgcggaggacauggggaacggcugcuucaagaucuaccacaagugcgacaacgccugcaucgggagcauccgcaacggcaccuacgaccacgacgucuaccgggacgaggcccucaacaaccgcuuccagaucaaggggguggagcugaaguccggcuacaaggacuggauccuguggaucagcuucgccaucuccugcuuccuccugugcguggcccugcucggcuucaucaugugggcgugccagaaggggaacauccggugcaacaucugcaucuga

SEQ ID NO: 74958 - RNA, 1701 nt, Artificial Sequence; identical to SEQ ID NO: 70879
  derived and/or modified CDS sequence (opt1) from hemagglutinin__InfluenzaA__AHC62578

SEQ ID NO: 74959 - RNA, 1701 nt, Artificial Sequence; identical to SEQ ID NO: 70879
  derived and/or modified CDS sequence (opt1) from hemagglutinin__InfluenzaA__AHC62590

SEQ ID NO: 74960 - RNA, 1701 nt, Artificial Sequence; identical to SEQ ID NO: 71006
  derived and/or modified CDS sequence (opt1) from hemagglutinin__InfluenzaA__AHC62602

SEQ ID NO: 74961 - RNA, 1701 nt, Artificial Sequence
  derived and/or modified CDS sequence (opt1) from hemagglutinin__InfluenzaA__AHC62614
augaagaccaucaucgcccugagcuacauccucugccugguguucgcccagaagcugcccggcaacgacaacuccaccgcgacgcucugccuggggcaccacgccgucccgaacggcaccaucgugaagaccaucaccaacgaccagaucgaggugacgaacgccaccgagcugguccagagcuccagcaccggggagaucugcaacagcccccaccagaucaucgacggcgagaacugcacccucaucgacgcccugcugggggacccccagugcgacggcuuccagaacaagaagugggaccucuucguggagcgcuccaaggcccacuccaacugcuaccccuacgacgugccggacuacgcgagccugcggucccuggucgccagcuccggcacgcucgaguucaacaacgagagcuucaacuggaccggggugacccagaacggcaccuccagcgccugcauccgcggguccaacaacagcuucuucucccggcugaacuggcugacgcaccucaacuucaaguaccccgcccugaacgugaccaugcccaacaacgagcaguucgacaagcuguacaucuggggcguccaccaccccgggaccgacaaggaccagaucuuccucuacgcgcaggccagcggccgcaucaccguguccacgaagcggagccagcaggccgugaucccgaacaucggcagccgcccccggguccgcaacauccccucccgggugagcaucuacuggaccaucgugaagcccggggacauccugcugaucaacuccaccggcaaccucaucgccccgcgcggguacuucaagauccggagcggcaaguccagcaucaugcgcuccgacgcccccaucggcaagugcaacagcgcgugcaucacccccaacggguccauccccaacgacaagccguuccagaacgucaaccggaucacguacggcgccugcccccgcuacgugaagcagaacacccugaagcuggccaccgggaugcggaacgugcccgagaagcagacccgcggcaucuucggggccaucgccggcuucaucgagaacggcugggaggggauggucgacggcugguacggguuccggcaccagaacagcgagggccgcgggcaggcggccgaccucaaguccacgcaggccgccaucgaccagaucaacggcaagcugaaccggcugaucggcaagaccaacgagaaguuccaccagaucgagaaggaguucagcgagguggaggggcgcauccaggaccucgagaaguacguggaggacaccaagaucgaccugugguccuacaacgccgagcugcucgucgcgcuggagaaccagcacaccaucgaccugacggacagcgagaugaacaagcuguucgagaagaccaagaagcagcuccgggagaacgccgaggacaugggcaacgggugcuucaagaucuaccacaagugcgacaacgccugcaucggcuccauccgcaacgggaccuacgaccacgacguguaccgcgacgaggcccugaacaaccgguuccagaucaagggcguggagcucaagagcggcuacaaggacuggauccuguggaucuccuucgccaucagcugcuuccugcucugcgucgcgcugcugggguucaucaugugggccugccagaagggcaacauccgcugcaacaucugcaucuga

SEQ ID NO: 74962 - RNA, 1701 nt, Artificial Sequence; identical to SEQ ID NO: 74642
  derived and/or modified CDS sequence (opt1) from hemagglutinin__InfluenzaA__AHC62626

SEQ ID NO: 74963 - RNA, 1701 nt, Artificial Sequence; identical to SEQ ID NO: 71006
  derived and/or modified CDS sequence (opt1) from hemagglutinin__InfluenzaA__AHC62638

SEQ ID NO: 74964 - RNA, 1701 nt, Artificial Sequence; identical to SEQ ID NO: 74806
  derived and/or modified CDS sequence (opt1) from hemagglutinin__InfluenzaA__AHC62650

SEQ ID NO: 74965 - RNA, 1701 nt, Artificial Sequence
  derived and/or modified CDS sequence (opt1) from hemagglutinin__InfluenzaA__AHC62662
augaagaccaucaucgcccugagcuacauccucugccugguguucgcccagaagcugcccggcaacgacaacuccaccgcgacgcucugccuggggcaccacgccgucccgaacggcaccaucgugaagaccaucaccaacgaccagaucgaggugacgaacgccaccgagcugguccagagcuccagcaccggggagaucugcaacagcccccaccagauccucgacggcgagaacugcacccugaucgacgcccugcucggggacccccagugcgacggcuuccagaacaagaagugggaccuguucguggagcgcagcaaggcccacuccagcugcuaccccuacgacgugccggacuacgcgucccugcggagccucgucgccuccagcggcacgcuggaguucaacaacgaguccuucaacuggaccggggugacccagaacggcaccagcuccgccugcauccgcgggagcaacaacuccuucuucagccggcugaacuggcucacgcaccugaacuucaaguaccccgcccugaacgugaccaugcccaacaacgagcaguucgacaagcucuacaucuggggcguccaccaccccgggaccgacaaggaccagaucuuccuguacgcgcaggccuccggccgcaucaccgugagcacgaagcggagccagcaggccgugaucccgaacaucggcucccgcccccggguccgcaacauccccagccggguguccaucuacuggaccaucgugaagcccggggacauccugcucaucaacagcaccggcaaccugaucgccccgcgcggguacuucaagauccgguccggcaagagcuccaucaugcgcagcgacgcccccaucggcaagugcaacuccgcgugcaucacccccaacgggagcauccccaacgacaagccguuccagaacgucaaccggaucacguacggcgccugcccccgcuacgugaagcagaacacccugaagcucgccaccgggaugcggaacgugcccgagaagcagacccgcggcaucuucggggccaucgccggcuucaucgagaacggcugggaggggauggucgacggcugguacggguuccggcaccagaacuccgagggccgcgggcaggcggccgaccugaaguccacgcaggccgccaucgaccagaucaacggcaagcugaaccggcucaucggcaagaccaacgagaaguuccaccagaucgagaaggaguucuccgagguggaggggcgcauccaggaccuggagaaguacguggaggacaccaagaucgaccuguggagcuacaacgccgagcuccuggucgcgcuggagaaccagcacaccaucgaccucacggacuccgagaugaacaagcuguucgagaagaccaagaagcagcugcgggagaacgccgaggacaugggcaacgggugcuucaagaucuaccacaagugcgacaacgccugcaucggcagcauccgcaacgggaccuacgaccacgacguguaccgcgacgaggcccucaacaaccgguuccagaucaagggcguggagcugaaguccggcuacaaggacuggauccuguggaucagcuucgccaucuccugcuuccuccugugcgucgcgcugcucggguucaucaugugggccugccagaagggcaacauccgcugcaacaucugcaucuga

SEQ ID NO: 74966 - RNA, 1701 nt, Artificial Sequence
  derived and/or modified CDS sequence (opt1) from hemagglutinin__InfluenzaA__AHC62674
augaagaccaucaucgcccugagcuacauccucugccugguguucgcccagaagcugcccggcaacgacaacuccaccgcgacccucugccuggggcaccacgccgucccgaacggcaccaucgugaagaccaucaccaacgaccagaucgaggugacgaacgccaccgagcugguccagagcuccagcaccggggagaucugcaacagcccccaccagauccucgacggcgagaacugcacccugaucgacgcccugcucggggacccccagugcgacggcuuccagaacaagaagugggaccuguucguggagcgcagcaaggcccacuccaacugcuaccccuacgacgugccggacuacgcgagccugcggucccucaucgccagcuccggcacgcuggaguucaacaacgagagcuucaacuggaccggggucacccagaacggcaccuccagcgccugcauccgcggguccaacaacagcuucuucucccggcugaacuggcucacgcaccugaacuucaaguaccccgcccugaacgugaccaugcccaacaacgagcaguucgacaagcucuacaucuggggcgugcaccaccccgggaccgacaaggaccagaucuuccuguacgcgcaggccagcggccgcaucaccgucuccacgaagcggagccagcaggccgugaucccgaacaucggcagccgcccccgggugcgcaacauccccucccgggucagcaucuacuggaccaucgugaagcccggggacauccugcucaucaacuccaccggcaaccugaucgccccgcgcggguacuucaagauccggagcggcaaguccagcaucaugcgcuccgacgcccccaucggcaagugcaacagcgcgugcaucacccccaacggguccauccccaacgacaagccguuccagaacgugaaccggaucacguacggcgccugcccccgcuacgucaagcagaacacccugaagcucgccaccgggaugcggaacgugcccgagaagcagacccgcggcaucuucggggccaucgccggcuucaucgagaacggcugggaggggaugguggacggcugguacggguuccggcaccagaacagcgagggccgcgggcaggcggccgaccugaaguccacgcaggccgccaucgaccagaucaacggcaagcugaaccggcucaucggcaagaccaacgagaaguuccaccagaucgagaaggaguucagcgaggucgaggggcgcauccaggaccuggagaaguacguggaggacaccaagaucgaccugugguccuacaacgccgagcuccugguggcgcuggagaaccagcacaccaucgaccucacggacagcgagaugaacaagcuguucgagaagaccaagaagcagcugcgggagaacgccgaggacaugggcaacgggugcuucaagaucuaccacaagugcgacaacacgugcaucgaguccauccgcaacggcaccuacgaccacgacgucuaccgcgacgaggcccucaacaaccgguuccagaucaaggggguggagcugaaguccggcuacaaggacuggauccuguggaucuccuucgccaucagcugcuuccuccugugcguggcccugcucggcuucaucaugugggcgugccagaaggggaacauccgcugcaacaucugcaucuga

SEQ ID NO: 74967 - RNA, 1701 nt, Artificial Sequence; identical to SEQ ID NO: 74084
  derived and/or modified CDS sequence (opt1) from hemagglutinin__InfluenzaA__AHE37972

SEQ ID NO: 74968 - RNA, 1701 nt, Artificial Sequence
  derived and/or modified CDS sequence (opt1) from hemagglutinin__InfluenzaA__AHE37973
augaaggccauccuggugguccuccuguacaccuucgccaccgcgaacgccgacacgcugugcaucggcuaccacgccaacaacagcaccgacaccguggacaccgugcucgagaagaacgucacggugacccacuccgugaaccugcuggaggacaagcacaacgggaagcucugcaagcugcgcggcgucgcgccccugcaccucgggaagugcaacaucgccggcuggauccuggggaacccggagugcgagagccuguccaccgccagcuccuggagcuacaucguggagaccuccagcuccgacaacggcacgugcuaccccggcgacuucaucaacuacgaggagcuccgggagcagcugagcuccgugagcuccuucgagcgcuucgagaucuuccccaagaccagcuccuggcccaaccacgacagcaacaagggggucaccgccgccugcccgcacgccggcaccaaguccuucuacaagaaccugaucuggcucgugaagaaggggaacagcuaccccaagcuguccaagagcuacaucaacgacaagggcaaggaggugcugguccucugggggauccaccaccccagcacgaccgcggaccagcagucccuguaccagaacgccgacgccuacguguucgugggcaccagccgguacuccaagaaguucaagcccgagaucgccauccgcccgaagguccgggaccaggagggccgcaucaacuacuacuggacccugaucgagcccggggacaagaucacguucgaggccaccggcaaccucguggugccccgguacgcguucgccauggagcgcaacgccgggagcggcaucaucaucuccgacacccccguccacgacugcaacaccacgugccagaccccggagggcgccaucaacaccagccugcccuuccagaacauccaccccaucaccaucgggaagugccccaaguacgugaaguccacgaagcugcggcucgccaccggccugcgcaacgugccgagcauccagucccgggggcuguucggcgcgaucgccggguucaucgagggcggcuggaccgggauggucgacggcugguacggguaccaccaccagaacgagcagggcagcggguacgccgccgaccucaaguccacccagaacgccaucgacaagaucacgaacaaggugaacagcgugaucgagaagaugaacacccaguucaccgcggucggcaaggaguucaaccaccuggagaagcgcaucgagaaccugaacaagaagguggacgacggcuuccucgacaucuggaccuacaacgccgagcugcugguccuccuggagaacgagcggacgcuggacuaccacgacuccaacgugaagaaccucuacgagaaggugcgcaaccagcugaagaacaacgccaaggagaucgggaacggcugcuucgaguucuaccacaagugcgacaacacgugcauggagagcgucaagaacgggaccuacgacuaccccaaguacuccgaggaggccaagcugaaccgggagaagaucgacggcgugaagcucgagagcacccgcaucuaccagauccuggccaucuacuccaccguggcgagcucccugguccucguggugagccugggggccaucagcuucuggaugugcuccaacggcagccugcagugccggaucugcaucuga

SEQ ID NO: 74969 - RNA, 1701 nt, Artificial Sequence
  derived and/or modified CDS sequence (opt1) from hemagglutinin__InfluenzaA__AHE37974
augaaggccauccuggugguccuccuguacaccuucgccaccgcgaacgccgacacgcugugcaucggcuaccacgccaacaacagcaccgacaccguggacaccgugcucgagaagaacgucacggugacccacuccgugaaccugcuggaggacaagcacaacgggaagcucugcaagcugcgcggcgucgcgccccugcaccucgggaagugcaacaucgccggcuggauccuggggaacccggagugcgagagccuguccaccgccagcuccuggagcuacaucguggagaccuccagcuccgacaacggcacgugcuaccccggcgacuucaucaacuacgaggagcuccgggagcagcugagcuccgugagcuccuucgagcgcuucgagauguuccccaagaccagcuccuggcccaaccacgacagcaacaagggggucaccgccgccugcccgcacgccggcgcgaaguccuucuacaagaaccugaucuggcucgugaagaaggggaacagcuaccccaagcuguccaagagcuacaucaacgacaagggcaaggaggugcugguccucugggggauccaccaccccagcaccacggccgaccagcagucccuguaccagaacgccgacgccuacguguucgugggcaccagcaaguacuccaagaaguucaagcccgagaucgccauccggccgaagguccgcgaccaggagggccggaugaacuacuacuggacccugaucgagcccggggacaagaucaccuucgaggcgacgggcaaccucguggugccccgcuacgccuucgccauggagcggaacgccgggagcggcaucaucaucuccgacacccccguccacgacugcaacacgaccugccagaccccggagggcgccaucaacaccagccugcccuuccagaacauccaccccaucaccaucgggaagugccccaaguacgugaaguccaccaagcugcgccucgcgacgggccugcggaacgugccgagcauccagucccgcgggcuguucggcgccaucgccggguucaucgagggcggcuggaccgggauggucgacggcugguacggguaccaccaccagaacgagcagggcagcggguacgccgccgaccucaaguccacccagaacgcgaucgacaagaucaccaacaaggugaacagcgugaucgagaagaugaacacgcaguucaccgccgucggcaaggaguucaaccaccuggagaagcggaucgagaaccugaacaagaagguggacgacggcuuccucgacaucuggaccuacaacgccgagcugcugguccuccuggagaacgagcgcacccuggacuaccacgacuccaacgugaagaaccucuacgagaaggugcggaaccagcugaagaacaacgccaaggagaucgggaacggcugcuucgaguucuaccacaagugcgacaacacgugcauggagagcgucaagaacgggaccuacgacuaccccaaguacuccgaggaggccaagcugaaccgcgagaagaucgacggcgugaagcucgagagcacccggaucuaccagauccuggcgaucuacuccaccguggccagcucccugguccucguggugagccugggggccaucagcuucuggaugugcuccaacggcagccugcagugccgcaucugcaucuga

SEQ ID NO: 74970 - RNA, 1701 nt, Artificial Sequence; identical to SEQ ID NO: 74064
  derived and/or modified CDS sequence (opt1) from hemagglutinin__InfluenzaA__AHE37975

SEQ ID NO: 74971 - RNA, 1701 nt, Artificial Sequence
  derived and/or modified CDS sequence (opt1) from hemagglutinin__InfluenzaA__AHE37976
augaaggccauccuggugguccuccuguacaccuucgccaccgcgaacgccgacacgcugugcaucggcuaccacgccaacaacagcaccgacaccguggacaccgugcucgagaagaacgucacggugacccacuccgugaaccugcuggaggacaagcacaacgggaagcucugcaagcugcgcggcgucgcgccccugcaccucgggaagugcaacaucgccggcuggauccuggggaacccggagugcgagagccuguccgccgccagcuccuggagcuacaucguggagaccuccagcuccaacaacgggaccugcuaccccggcgacuucaucaacuacgaggagcuccgggagcagcugagcuccgugagcuccuucgagcgcuucgagaucuuccccaagacgagcuccuggcccaaccacgacagcaacaagggcgucaccgccgccugcccgcacgcgggcgccaaguccuucuacaagaaccugaucuggcucgugaagaaggggaacagcuaccccaagcuguccaagagcuacaucaacgacaagggcaaggagauccuggugcucugggggauccaccaccccagcaccaccacggaccagcagucccuguaccagaacgccgacgccuacgucuucgugggcaccagccgguacuccaagaaguucaagcccgagaucgccauccgcccgaaggugcgggaccaggagggccgcaugaacuacuacuggacccugaucgagcccggggacaagaucaccuucgaggcgacgggcaaccucgucgugccccgguacgccuucgccauggagcgcaacgccgggagcggcaucaucaucuccgacacccccgugcacgacugcaacacgaccugccagaccccggagggcgccaucaacaccagccugcccuuccagaacauccaccccaucaccaucgggaagugccccaaguacgucaaguccaccaagcugcggcucgcgacgggccugcgcaacgugccgagcauccagucccgggggcuguucggcgccaucgccggguucaucgagggcggcuggaccgggaugguggacggcugguacggguaccaccaccagaacgagcagggcagcggguacgccgccgaccucaaguccacccagaacgcgaucgacaagaucaccaacaaggucaacagcgugaucgagaagaugaacacgcaguucaccgccgugggcaaggaguucaaccaccuggagaagcgcaucgagaaccugaacaagaaggucgacgacggcuuccucgacaucuggaccuacaacgccgagcugcuggugcuccuggagaacgagcggacccuggacuaccacgacuccaacgucaagaaccucuacgagaaggugcgcaaccagcugaagaacaacgccaaggagaucgggaacggcugcuucgaguucuaccacaagugcgacaacacgugcauggagagcgugaagaacgggaccuacgacuaccccaaguacuccgaggaggccaagcugaaccggggcaagaucgacggggucaagcucgagagcacccgcaucuaccagauccuggcgaucuacuccaccguggccagcucccuggugcucgucgugagccugggcgccaucagcuucuggaugugcuccaacggcagccugcagugccggaucugcaucuga

SEQ ID NO: 74972 - RNA, 1701 nt, Artificial Sequence; identical to SEQ ID NO: 74064
  derived and/or modified CDS sequence (opt1) from hemagglutinin__InfluenzaA__AHE37977

SEQ ID NO: 74973 - RNA, 1701 nt, Artificial Sequence; identical to SEQ ID NO: 74084
  derived and/or modified CDS sequence (opt1) from hemagglutinin__InfluenzaA__AHE37978

SEQ ID NO: 74974 - RNA, 1701 nt, Artificial Sequence; identical to SEQ ID NO: 74064
  derived and/or modified CDS sequence (opt1) from hemagglutinin__InfluenzaA__AHE37979

SEQ ID NO: 74975 - RNA, 1701 nt, Artificial Sequence
  derived and/or modified CDS sequence (opt1) from hemagglutinin__InfluenzaA__AHE37980
augaaggccauccuggugguccuccuguacaccuucgccaccgcgaacgccgacacgcugugcaucggcuaccacgccaacaacagcaccgacaccguggacaccgugcucgagaagaacgucacggugacccacuccgugaaccugcuggaggacaagcacaacgggaagcucugcaagcugcgcggcgucacgccccugcaccucgggaagugcaacaucgccggcuggauccuggggaacccggagugcgagagccuguccaccgccagcuccuggagcuacaucguggagaccuccagcuccgacaacgggaccugcuaccccggcgacuucaucaacuacgaggagcuccgggagcagcugagcuccgugagcuccuucgagcgcuucgagaucuuccccaagaccagcuccuggcccaaccacgacagcaacaagggcgucaccgcggccugcccgcacgccggcgccaaguccuucuacaagaaccugaucuggcucgugaagaaggggaacagcuaccccaagcuguccaagagcuacaucaacgacaagggcaaggaggugcugguccucugggggauccaccaccccagcacgaccgcggaccagcagucccuguaccagaacgccgacgccuacguguucgugggcaccagccgguacuccaagaaguucaagcccgagaucgccauccgcccgaagguccgggaccaggagggccgcaugaacuacuacuggacccugaucgagcccggggacaagaucacguucgaggccaccggcaaccucguggugccccgguacgcguucgccauggagcgcaacgccgggagcggcaucaucaucuccgacacccccguccacgacugcaacaccacgugccagaccccggagggcgccaucaacaccagccugcccuuccagaacauccaccccaucaccaucgggaagugccccaaguacgugaaguccacgaagcugcggcucgccaccggccugcgcaacgugccgagcauccagucccgggggcuguucggcgcgaucgccggguucaucgagggcggcuggaccgggauggucgacggcugguacggguaccaccaccagaacgagcagggcagcggguacgccgccgaccucaaguccacccagaacgccaucgacaagaucacgaacaaggugaacagcgugaucgagaagaugaacacccaguucaccgcggucggcaaggaguucaaccaccuggagaagcgcaucgagaaccugaacaagaagguggacgacggcuuccucgacaucuggaccuacaacgccgagcugcugguccuccuggagaacgagcggacgcuggacuaccacgacuccaacgugaagaaccucuacgagaaggugcgcaaccagcugaagaacaacgccaaggagaucgggaacggcugcuucgaguucuaccacaagugcgacaacacgugcauggagagcgucaagaacgggaccuacgacuaccccaaguacuccgaggaggccaagcugaaccgggagaagaucgacggcgugaagcucgagagcacccgcaucuaccagauccuggccaucuacuccaccguggcgagcucccugguccucguggugagccugggggccaucagcuucuggaugugcuccaacggcagccugcagugccggaucugcaucuga

SEQ ID NO: 74976 - RNA, 1701 nt, Artificial Sequence
  derived and/or modified CDS sequence (opt1) from hemagglutinin__InfluenzaA__AHE37981
augaaggccauccuggugguccuccuguacaccuucgccaccgcgaacgccgacacgcugugcaucggcuaccacgccaacaacagcaccgacaccguggacaccgugcucgagaagaacgucacggugacccacuccgugaaccugcuggaggacaagcacaacgggaagcucugcaagcugcgcggcgucgcgccccugcaccucgggaagugcaacaucgccggcuggauccuggggaacccggagugcgagagccuguccaccgccagcuccuggagcuacaucguggagaccuccagcuccgacaacggcacgugcuaccccggcgacuucaucaacuacgaggagcuccgggagcagcugagcuccgugagcuccuucgagcgcuucgagauguuccccaagaccagcuccuggcccaaccacgacagcaacaagggggucaccgccgccugcccgcacgccggcgcgaaguccuucuacaagaaccugaucuggcucgugaagaaggggaacagcuaccccaagcuguccaagagcuacaucaacgacaagggcaaggaggugcugguccucugggggauccaccaccccagcaccacggccgaccagcagucccuguaccagaacgccgacgccuacguguucgugggcaccagcaaguacuccaagaaguucaagcccgagaucgccauccggccgaagguccgcgaccaggagggccggaugaacuacuacuggacccugaucgagcccggggacaagaucaccuucgaggcgacgggcaaccucguggugccccgcuacgccuucgccauggagcggaacgccgggagcggcaucaucaucuccgacacccccguccacgacugcaacacgaccugccagaccccggagggcgccaucaacaccagccugcccuuccagaacauccaccccaucaccaucgggaagugccccaaguacgugaaguccaccaagcugcgccucgcgacgggccugcggaacgugccgagcauccagucccgcgggcuguucggcgccaucgccggguucaucgagggcggcuggaccgggauggucgacggcugguacggguaccaccaccagaacgagcagggcagcggguacgccgccgaccucaaguccacccagaacgcgaucgacaagaucaccaacaaggugaacagcgugaucgagaagaugaacauccaguucacggccgucggcaaggaguucaaccaccuggagaagcggaucgagaaccugaacaagaagguggacgacggcuuccucgacaucuggaccuacaacgccgagcugcugguccuccuggagaacgagcgcacccuggacuaccacgacuccaacgugaagaaccucuacgagaaggugcggaaccagcugaagaacaacgccaaggagaucgggaacggcugcuucgaguucuaccacaagugcgacaacacgugcauggagagcgucaagaacgggaccuacgacuaccccaaguacuccgaggaggccaagcugaaccgcgagaagaucgacggcgugaagcucgagagcacccggaucuaccagauccuggcgaucuacuccaccguggccagcucccugguccucguggugagccugggggccaucagcuucuggaugugcuccaacggcagccugcagugccgcaucugcaucuga

SEQ ID NO: 74977 - RNA, 1701 nt, Artificial Sequence; identical to SEQ ID NO: 74064
  derived and/or modified CDS sequence (opt1) from hemagglutinin__InfluenzaA__AHE37982

SEQ ID NO: 74978 - RNA, 1701 nt, Artificial Sequence
  derived and/or modified CDS sequence (opt1) from hemagglutinin__InfluenzaA__AHE37983
augaaggccauccuggugguccuccuguacaccuucgccaccgcgaacgccgacacgcugugcaucggcuaccacgccaacaacagcaccgacaccguggacaccgugcucgagaagaacgucacggugacccacuccgugaaccugcuggaggacaagcacaacgggaagcucugcaagcugcgcggcgucgcgccccugcaccucgggaagugcaacaucgccggcuggauccuggggaacccggagugcgagagccuguccaccgccagcuccuggagcuacaucguggagaccuccagcuccgacaacggcacgugcuaccccggcgacuucaucaacuacgaggagcuccgggagcagcugagcuccgugagcuccuucgagcgcuucgagaucuuccccaagaccagcuccuggcccaaccacgacagcaacaagggggucaccgccgccugcccgcacgccggcgcgaaguccuucuacaagaaccugaucuggcucgugaagaaggggaacagcuaccccaagcuguccgagagcuacaucaacgacaagggcaaggaggugcugguccucugggggauccaccaccccagcaccacggccgaccagcagucccuguaccagaacgccgacgccuacguguucgugggcaccagccgguacuccaagaaguucaagcccgagaucgccauccgcccgaagguccgggaccaggagggccgcaugaacuacuacuggacccugaucgagcccggggacaagaucaccuucgaggcgacgggcaaccucguggugccccgguacgccuucgccauggagcgcaacgccgggagcggcaucaucaucuccgacacccccguccacgacugcaacacgaccugccagaccccggagggcgccaucaacaccagccugcccuuccagaacauccaccccaucaccaucgggaagugccccaaguacgugaaguccaccaagcugcggcucgcgacgggccugcgcaacgugccgagcauccagucccgggggcuguucggcgccaucgccggguucaucgagggcggcuggaccgggauggucgacggcugguacggguaccaccaccagaacgagcagggcagcggguacgccgccgaccucaaguccacccagaacgcgaucgacaagaucaccaacaaggugaacagcgugaucgagaagaugaacacgcaguucaccgccgucggcaaggaguucaaccaccuggagaagcgcaucgagaaccugaacaagaagguggacgacggcuuccucgacaucuggaccuacaacgccgagcugcugguccuccuggagaacgagcggacccuggacuaccacgacuccaacgugaagaaccucuacgagaaggugcgcaaccagcugaagaacaacgccaaggagaucgggaacggcugcuucgaguucuaccacaagugcgacaacacgugcauggagagcgucaagaacgggaccuacgacuaccccaaguacuccgaggaggccaagcugaaccgggagaagaucgacggcgugaagcucgagagcacccgcaucuaccagauccuggcgaucuacuccaccguggccagcucccugguccucguggugagccugggggccaucagcuucuggaugugcuccaacggcagccugcagugccggaucugcaucuga

SEQ ID NO: 74979 - RNA, 1701 nt, Artificial Sequence
  derived and/or modified CDS sequence (opt1) from hemagglutinin__InfluenzaA__AHE37984
auggaggccauccuggugguccuccuguacaccuucgccaccgcgaacgccgacacgcugugcaucggcuaccacgccaacaacagcaccgacaccguggacaccgugcucgagaagaacgucacggugacccacuccgugaaccugcuggaggacaagcacaacgggaagcucugcaagcugcgcggcgucgcgccccugcaccucgggaagugcaacaucgccggcuggauccuggggaacccggagugcgagagccuguccaccgccagcuccuggagcuacaucguggagaccuccagcuccgacaacggcacgugcuaccccggcgacuucaucaacuacgaggagcuccgggagcagcugagcuccgugagcuccuucgagcgcuucgagaucuuccccaagaccagcuccuggcccaaccacgacagcaacaagggggucaccgccgccugcccgcacgccggcgcgaaguccuucuacaagaaccugaucuggcucgugaagaaggggaacagcuaccccaagcuguccaagagcuacaucaacgacaagggcaaggaggugcugguccucugggggauccaccaccccagcaccacggccgaccagcagucccuguaccagaacgccgacgccuacguguucgugggcaccagccgguacuccaagaaguucaagcccgagaucgccauccgcccgaagguccgggaccaggagggccgcaugaacuacuacuggacccugaucgagcccggggacaagaucaccuucgaggcgacgggcaaccucguggugccccgguacgccuucgccauggagcgcaacgccgggagcggcaucaucaucuccgacacccccguccacgacugcaacacgaccugccagaccccggagggcgccaucaacaccagccugcccuuccagaacauccaccccaucaccaucgggaagugccccaaguacgugaaguccaccaagcugcggcucgcgacgggccugcgcaacgugccgagcauccagucccgggggcuguucggcgccaucgccggguucaucgagggcggcuggaccgggauggucgacggcugguacggguaccaccaccagaacgagcagggcagcggguacgccgccgaccucaaguccacccagaacgcgaucgacaagaucaccaacaaggugaacagcgugaucgagaagaugaacacgcaguucaccgccgucggcaaggaguucaaccaccuggagaagcgcaucgagaaccugaacaagaagguggacgacggcuuccucgacaucuggaccuacaacgccgagcugcugguccuccuggagaacgagcggacccuggacuaccacgacuccaacgugaagaaccucuacgagaaggugcgcaaccagcugaagaacaacgccaaggagaucgggaacggcugcuucgaguucuaccacaagugcgacaacacgugcauggagagcgucaagaacgggaccuacgacuaccccaaguacuccgaggaggccaagcugaaccgggagaagaucgacggcgugaagcucgagagcacccgcaucuaccagauccuggcgaucuacuccaccguggccagcucccugguccucguggugagccugggggccaucagcuucuggaugugcuccaacggcagccugcagugccggaucugcaucuga

SEQ ID NO: 74980 - RNA, 1701 nt, Artificial Sequence
  derived and/or modified CDS sequence (opt1) from hemagglutinin__InfluenzaA__AHE37985
augaagaccaucaucgcccugagcuacauccucugccugguguucgcccaggagcugcccggcaacgacgacuccaccgcgacgcucugccuggggcaccacgccgucccgaacggcaccaucgugaagaccaucaccaacgaccagaucgaggugacgaacgccaccgagcugguccagagcuccagcaccggggagaucugcaacagcccccaccagauccucgacggcgagaacugcacccugaucgacgcccugcucggggacccccagugcgacggcuuccagaacaagaagugggaccuguucguggagcgcagcaaggcccacuccaacugcuaccccuacgacgugccggacuacgcgagccugcggucccucgucgccagcuccggcacgcuggaguucaacaacgagagcuucaacuggaccggggugacccagaacggcaccuccagcgccugcauccgccgguccaacaacagcuucuucucccgccugaacuggcucacgcaccugaacuucaaguaccccgcccugaacgugaccaugcccaacaacgagcaguucgacaagcucuacaucuggggcguccaccaccccgggaccgacaaggaccagaucuuccuguacgcgcaggccagcgggcggaucaccguguccacgaagcgcagccagcaggccgugaucccgaacaucggcagccggccccgcguccggaacauccccucccgcgugagcaucuacuggaccaucgugaagcccggcgacauccugcucaucaacuccaccgggaaccugaucgccccgcggggcuacuucaagauccgcagcgggaaguccagcaucaugaaguccgacgcccccaucggcaagugcaacagcgcgugcaucacccccaacggcuccauccccaacgacaagccguuccagaacgucaaccggaucacguacggggccugcccccgcuacgugaagcagaacacccugaagcucgccaccggcaugcggaacgugcccgagaagcagacccgcgggaucuucggcgccaucgccggguucaucgagaacggcugggagggcauggucgacgggugguacggcuuccggcaccagaacagcgaggggcgcggccaggcggccgaccugaaguccacgcaggccgccaucgaccagaucaacgggaagcugaaccggcucaucggcaagaccaacgagaaguuccaccagaucgagaaggaguucagcgagguggagggccgcauccaggaccuggagaaguacguggaggacaccaagaucgaccugugguccuacaacgccgagcuccuggucgcgcuggagaaccagcacaccaucgaccucacggacagcgagaugaacaagcuguucgagaagaccaagaagcagcugcgggagaacgccgaggacauggggaacggcugcuucaagaucuaccacaagugcgacaacgccugcaucggguccauccgcaacggcaccuacgaccacgacguguaccgcgacgaggcccucaacaaccgguuccagaucaaggggguggagcugaaguccggcuacaaggacuggauccuguggaucuccuucgccaucagcugcuuccuccugugcgucgcgcugcucggcuucaucaugugggccugccagaaggggaacauccgcugcaacaucugcaucuga

SEQ ID NO: 74981 - RNA, 1701 nt, Artificial Sequence; identical to SEQ ID NO: 73946
  derived and/or modified CDS sequence (opt1) from hemagglutinin__InfluenzaA__AHE37986

SEQ ID NO: 74982 - RNA, 1701 nt, Artificial Sequence; identical to SEQ ID NO: 73882
  derived and/or modified CDS sequence (opt1) from hemagglutinin__InfluenzaA__AHE37987

SEQ ID NO: 74983 - RNA, 1701 nt, Artificial Sequence
  derived and/or modified CDS sequence (opt1) from hemagglutinin__InfluenzaA__AHE37988
augaagaccaucaucgcccugagcuacauccucugccugguguucgcccagaagcugcccggcaacgacaacuccaccgcgacgcucugccuggggcaccacgccgucccgaacggcaccaucgugaagaccaucaccaacgaccgcaucgaggugacgaacgccaccgagcugguccagaacagcuccaucggggagaucugcgacagcccccaccagauccucgacggcgagaacugcacccugaucgacgcccugcucggggacccccagugcgacggcuuccagaacaagaagugggaccuguucguggagcgguccaaggccuacagcaacugcuaccccuacgacgugccggacuacgcgucccugcgcagccucgucgccuccagcggcacccuggaguucaacaacgaguccuucaacuggacgggggugacccagaacggcaccagcuccgccugcauccggcgcagcaacuccagcuucuucucccggcugaacuggcucacccaccugaacuucaaguaccccgcccugaacgugacgaugcccaacaacgagcaguucgacaagcucuacaucuggggcguccaccaccccgggaccgacaaggaccagaucuuccuguacgcgcagagcuccgggcgcaucaccgugagcaccaagcggagccagcaggccgugaucccgaacaucggcucccgcccccggauccgcaacauccccagccggaucuccaucuacuggacgaucgucaagcccggcgacauccugcucaucaacagcaccgggaaccugaucgccccgcgcggcuacuucaagauccgguccggcaagagcuccaucaugcgcagcgacgcccccaucgggaagugcaaguccgagugcaucacccccaacggcagcauccccaacgacaagccguuccagaacgugaaccggaucaccuacggggccugcccccgcuacgugaagcaguccacgcugaagcucgcgaccggcaugcggaacguccccgagaagcagacccgcgggaucuucggcgccaucgccggguucaucgagaacggcugggagggcaugauggacgggugguacggcuuccggcaccagaacagcgaggggcgcggccaggccgccgaccugaaguccacccaggcggccaucgaccagaucaacgggaagcugaaccggcucaucggcaagacgaacgagaaguuccaccagaucgagaaggaguucagcgagguggagggccgcauccagaaccuggagaaguacguggaggacaccaagaucgaccugugguccuacaacgccgagcuccuggucgcccuggagaaccagcacaccaucgaccucaccgacagcgagaugaacaagcuguucgagaagacgaagaagcagcugcgcgagaacgccgaggacauggggaacggcugcuucaagaucuaccacaagugcgacaacgcgugcaucggguccauccggaacggcaccuacgaccacaacguguaccgcgacgaggcccucaacaaccgguuccagaucaaggggguggagcucaagagcggcuacaaggacuggauccuguggaucuccuucgccaucagcugcuuccugcugugcgucgcccugcucggcuucaucaugugggccugccagaaggggaacauccgcugcaacaucugcaucuga

SEQ ID NO: 74984 - RNA, 1701 nt, Artificial Sequence; identical to SEQ ID NO: 74018
  derived and/or modified CDS sequence (opt1) from hemagglutinin__InfluenzaA__AHE37989

SEQ ID NO: 74985 - RNA, 1701 nt, Artificial Sequence; identical to SEQ ID NO: 73882
  derived and/or modified CDS sequence (opt1) from hemagglutinin__InfluenzaA__AHE37990

SEQ ID NO: 74986 - RNA, 1701 nt, Artificial Sequence; identical to SEQ ID NO: 73882
  derived and/or modified CDS sequence (opt1) from hemagglutinin__InfluenzaA__AHE37991

SEQ ID NO: 74987 - RNA, 1701 nt, Artificial Sequence
  derived and/or modified CDS sequence (opt1) from hemagglutinin__InfluenzaA__AHE37992
augaagaccaucaucgcccugagcuacauccucugccugguguucgcccaggagcugcccggcaacgacgacuccaccgcgacgcucugccuggggcaccacgccgucccgaacggcaccaucgugaagaccaucaccaacgaccagaucgaggugacgaacgccaccgagcugguccagagcuccagcaccggggagaucugcaacagcccccaccagauccucgacggcgagaacugcacccugaucgacgcccugcucggggacccccagugcgacggcuuccagaacaagaagugggaccuguucguggagcgcagcaaggcccacuccaacugcuaccccuacgacgugccggacuacgcgagccugcggucccucgucgccagcuccggcacgcuggaguucgacaacgagagcuucaacuggaccggggugacccagaacggcaccuccagcgccugcauccgccgguccaacaacagcuucuucucccgccugaacuggcucacgcaccugaacuucaaguaccccgcccugaacgugaccaugcccaacaacgagcaguucgacaagcucuacaucuggggcguccaccaccccgggaccgacaaggaccagaucuuccuguacgcgcaggccagcgggcggaucaccguguccacgaagcgcagccagcaggccgugaucccgaacaucggcagccggccccgcguccggaacauccccucccgcgugagcaucuacuggaccaucgugaagcccggcgacauccugcucaucaacuccaccgggaaccugaucgccccgcggggcuacuucaagauccgcagcgggaaguccagcaucaugcgguccgacgcccccaucggcaagugcaacagcgcgugcaucacccccaacggcuccauccccaacgacaagccguuccagaacgucaaccgcaucacguacggggccugcccccgguacgugaagcagaacacccugaagcucgccaccggcaugcgcaacgugcccgagaagcagacccgggggaucuucggcgccaucgccggguucaucgagaacggcugggagggcauggucgacgggugguacggcuuccgccaccagaacagcgaggggcggggccaggcggccgaccugaaguccacgcaggccgccaucgaccagaucaacgggaagcugaaccgccucaucggcaagaccaacgagaaguuccaccagaucgagaaggaguucagcgagguggagggccggauccaggaccuggagaaguacguggaggacaccaagaucgaccugugguccuacaacgccgagcuccuggucgcgcuggagaaccagcacaccaucgaccucacggacagcgagaugaacaagcuguucgagaagaccaagaagcagcugcgcgagaacgccgaggacauggggaacggcugcuucaagaucuaccacaagugcgacaacgccugcaucggguccauccgcaacggcaccuacgaccacgacguguaccgggacgaggcccucaacaaccgcuuccagaucaaggggguggagcugaaguccggcuacaaggacuggauccuguggaucuccuucgccaucagcugcuuccuccugugcgucgcgcugcucggcuucaucaugugggccugccagaaggggaacauccggugcaacaucugcaucuga

SEQ ID NO: 74988 - RNA, 1701 nt, Artificial Sequence; identical to SEQ ID NO: 74064
  derived and/or modified CDS sequence (opt1) from hemagglutinin__InfluenzaA__AHE38023

SEQ ID NO: 74989 - RNA, 1701 nt, Artificial Sequence
  derived and/or modified CDS sequence (opt1) from hemagglutinin__InfluenzaA__AHE38024
augaaggccauccuggugguccuccuguacaccuucgccaccgcgaacgccgacacgcugugcaucggcuaccacgccaacaacagcaccgacaccguggacaccgugcucgagaagaacgucacggugacccacuccgugaaccugcuggaggacaagcacaacgggaagcucugcaagcugcgcggcgucgcgccccugcaccucgggaagugcaacaucgccggcuggauccuggggaacccggagugcgagagccuguccaccgccagcuccuggagcuacaucguggagaccuccagcuccgacaacggcacgugcuaccccggcgacuucaucaacuacgaggagcuccgggagcagcugagcuccgugagcuccuucgagcgcuucgagaucuuccccaagaccagcuccuggcccaaccacgacagcaacaagggggucaccgccgccugcccgcacgccggcgcgaaguccuucuacaagaaccugaucuggcucgugaagaaggggaacagcuaccccaagcugucccagagcuacaucaacgacaagggcaaggaggugcugguccucugggggauccaccaccccagcaccacggccgaccagcagucccuguaccagaacgccgacgccuacguguucgugggcaccagccgguacuccaagaaguucaagcccgagaucgccacccgcccgaagguccgggaccaggagggccgcaugaacuacuacuggacccugguggagcccggggacaagaucacguucgaggcgaccggcaaccucguggucccccgguacgccuucaccauggagcgcaacgccgggagcggcaucaucaucuccgacacccccgugcacgacugcaacacgaccugccagaccccggagggcgccaucaacaccagccugcccuuccagaacauccaccccaucacgaucgggaagugccccaaguacgugaaguccaccaagcugcggcucgccaccggccugcgcaacgucccgagcauccagucccgggggcuguucggcgcgaucgccggguucaucgagggcggcuggaccgggaugguggacggcugguacggguaccaccaccagaacgagcagggcagcggguacgccgccgaccucaaguccacgcagaacgccaucgacaagaucaccaacaaggugaacagcgucaucgagaagaugaacacccaguucaccgcggugggcaaggaguucaaccaccuggagaagcgcaucgagaaccugaacaagaaggucgacgacggcuuccucgacaucuggacguacaacgccgagcugcuggugcuccuggagaacgagcggacccuggacuaccacgacuccaacgugaagaaccucuacgagaagguccgcaaccagcugaagaacaacgccaaggagaucgggaacggcugcuucgaguucuaccacaagugcgacaacacgugcauggagagcgugaagaacgggaccuacgacuaccccaaguacuccgaggaggccaagcugaaccgggagaagaucgacggcgugaagcucgagagcacccgcaucuaccagauccuggccaucuacuccaccgucgcgagcucccuggugcucguggucagccugggggccaucagcuucuggaugugcuccaacggcagccugcagugccggaucugcaucuga

SEQ ID NO: 74990 - RNA, 1701 nt, Artificial Sequence
  derived and/or modified CDS sequence (opt1) from hemagglutinin__InfluenzaA__AHE38026
augaaggccauccuggugguccuccuguacaccuucgccaccgcgaacgccgacacgcugugcaucggcuaccacgccaacaacagcaccgacaccguggacaccgugcucgagaagaacgucacggugacccacuccgugaaccugcuggaggacaagcacaacgggaagcucugcaagcugcgcggcgucgcgccccugcaccucgggaagugcaacaucgccggcuggauccuggggaacccggagugcgagagccuguccaccgccagcuccuggagcuacaucguggagaccuccagcuccgacaacggcacgugcuaccccggcgacuucaucaacuacgaggagcuccgggagcagcugagcuccgugagcuccuucgagcgcuucgagaucuuccccaagaccagcuccuggcccaaccacgacagcaacaagggggucaccgccgccugcccgcacgccggcgcgaaguccuucuacaagaaccugaucuggcucgugaagaaggggaacagcuaccccaagcugucccagagcuacaucaacgagaagggcaaggaggugcugguccucugggggauccaccaccccagcaccacggccgaccagcagucccuguaccagaacgccgacgccuacguguucgugggcaccagccgguacuccaagaaguucaagcccgagaucgccauccgcccgaagguccgggaccaggagggccgcaugaacuacuacuggacccugguggagcccggggacaagaucaccuucgaggcgacgggcaaccucguggucccccgguacgccuucaccauggagcgcaacgccgggagcggcaucaucaucuccgacacccccgugcacgacugcaacaccacgugccagaccccggagggcgccaucaacaccagccugcccuuccagaacauccaccccaucaccaucgggaagugccccaaguacgugaaguccacgaagcugcggcucgccaccggccugcgcaacgucccgagcauccagucccgggggcuguucggcgcgaucgccggguucaucgagggcggcuggaccgggaugguggacggcugguacggguaccaccaccagaacgagcagggcagcggguacgccgccgaccucaaguccacccagaacgccaucgacaagaucacgaacaaggugaacagcgucaucgagaagaugaacacccaguucaccgcggugggcaaggaguucaaccaccuggagaagcgcaucgagaaccugaacaagaaggucgacgacggcuuccucgacaucuggaccuacaacgccgagcugcuggugcuccuggagaacgagcggacgcuggacuaccacgacuccaacgugaagaaccucuacgagaagguccgcaaccagcugaagaacaacgccaaggagaucgggaacggcugcuucgaguucuaccacaagugcgacaacacgugcauggagagcgugaagaacgggaccuacgacuaccccaaguacuccgaggaggccaagcugaaccgggagaagaucgacggcgugaagcucgagagcacccgcaucuaccagauccuggccaucuacuccaccgucgcgagcucccuggugcucguggucagccugggggccaucagcuucuggaugugcuccaacggcagccugcagugccggaucugcaucuga

SEQ ID NO: 74991 - RNA, 1701 nt, Artificial Sequence; identical to SEQ ID NO: 73907
  derived and/or modified CDS sequence (opt1) from hemagglutinin__InfluenzaA__AHE38027

SEQ ID NO: 74992 - RNA, 1683 nt, Artificial Sequence
  derived and/or modified CDS sequence (opt1) from hemagglutinin__InfluenzaA__AHF20558
augaacacccagauccugguguucgcccucaucgccaucauccccaccaacgcggacaagaucugccugggccaccacgccgucagcaacgggacgaaggugaacacccugaccgagcgcggcguggaggucgugaacgccaccgagacgguggagcggaccaacaucccgcgcaucugcuccaaggggaagcggaccgucgaccucggccagugcgggcugcugggcaccaucacgggcccgccccagugcgaccaguuccucgaguucagcgccgaccugaucaucgagcgccgggagggguccgacgugugcuaccccggcaaguucgugaacgaggaggcccugcgccagauccuccgggagagcgggggcaucgacaaggaggcgaugggguucaccuacuccggcauccgcaccaacggcgccaccagcgccugccggcgcuccgggagcuccuucuacgccgagaugaaguggcugcugagcaacacggacaacgcggccuucccgcagaugaccaaguccuacaagaacacccgcaagagccccgcccucaucgucuggggcauccaccacuccgugagcaccgccgagcagacgaagcuguacggguccggcaacaagcuggugaccgucggcagcuccaacuaccagcagagcuucgugcccucccccggggcccggccccaggugaacggccucagcgggcggaucgacuuccacuggcugaugcugaaccccaacgacaccgucaccuucagcuucaacggcgcguucaucgcccccgaccgcgccuccuuccuccggggcaagagcauggggauccaguccggcguccagguggacgccaacugcgagggggacugcuaccacagcggcgggacgaucaucuccaaccugcccuuccagaacaucgacagccgcgccgugggcaagugcccgcgguacgugaagcagcgcucccugcuccuggcgaccgggaugaagaacgugcccgagauccccaagggccggggccuguucggggccaucgccggcuucaucgagaacgggugggagggccucaucgacgggugguacggcuuccgccaccagaacgcccagggcgaggggaccgccgcggacuacaagagcacccaguccgccaucgaccagaucacgggcaagcugaaccggcugaucgagaagaccaaccagcaguucgagcucaucgacaacgaguucaacgaggucgagaagcagaucgggaacgugaucaacuggacccgcgacagcaucaccgaggugugguccuacaacgccgagcugcuggucgccauggagaaccagcacacgaucgaccucgccgacagcgagauggacaagcuguacgagcgcgugaagcggcagcugcgcgagaacgcggaggaggacggcaccggcugcuucgagaucuuccacaagugcgacgacgacugcauggccuccauccggaacaacaccuacgaccacagcaaguaccgcgaggaggccaugcagaaccggauccagaucgaccccgucaagcucuccagcggguacaaggacgugauccugugguucuccuucggcgccagcugcuucauccugcucgcgaucgugauggggcuggucuucaucugcgugcagaacggcaacaugcgcugcaccaucgggaucuga

SEQ ID NO: 74993 - RNA, 1683 nt, Artificial Sequence
  derived and/or modified CDS sequence (opt1) from hemagglutinin__InfluenzaA__AHF20568
augaacacccagauccugguguucgcccucaucgccaucauccccaccaacgcggacaagaucugccugggccaccacgccgucagcaacgggacgaaggugaacacccugaccgagcgcggcguggaggucgugaacgccaccgagacgguggagcggaccaacaucccgcgcaucugcuccaaggggaagcggaccgucgaccucggccagugcgggcugcugggcaccaucacgggcccgccccagugcgaccaguuccucgaguucagcgccgaccugaucaucgagcgccgggagggguccgacgugugcuaccccggcaaguucgugaacgaggaggcccugcgccagauccuccgggagagcgggggcaucgacaaggaggcgaugggguucaccuacuccggcauccgcaccaacggcgccaccagcgccugccggcgcuccgggagcuccuucuacgccgagaugaaguggcugcugagcaacacggacaacgcggccuucccgcagaugaccaaguccuacaagaacacccgcaagagccccgcccucaucgucuggggcauccaccacuccgugagcaccgccgagcagacgaagcuguacggguccggcaacaagcuggugaccgucggcagcuccaacuaccagcagagcuucgugcccucccccggggcccggccccaggugaacggccucagcgggcggaucgacuuccacuggcugaugcugaaccccaacgacaccgucaccuucagcuucaacggcgcguucaucgcccccgaccgcgccuccuuccuccggggcaagagcauggggauccaguccggcguccagguggacgccaacugcgagggggacugcuaccacagcggcgggacgaucauguccaaccugcccuuccagaacaucgacagccgcgccgugggcaagugcccgcgguacgugaagcagcgcucccugcuccuggcgaccgggaugaagaacgugcccgagauccccaagggccggggccuguucggggccaucgccggcuucaucgagaacgggugggagggccucaucgacgggugguacggcuuccgccaccagaacgcccagggcgaggggaccgccgcggacuacaagagcacccaguccgccaucgaccagaucacgggcaagcugaaccggcugaucgagaagaccaaccagcaguucgagcucaucgacaacgaguucaacgaggucgagaagcagaucgggaacgugaucaacuggacccgcgacagcaucaccgaggugugguccuacaacgccgagcugcuggucgccauggagaaccagcacacgaucgaccucgccgacagcgagauggacaagcuguacgagcgcgugaagcggcagcugcgcgagaacgcggaggaggacggcaccggcugcuucgagaucuuccacaagugcgacgacgacugcauggccuccauccggaacaacaccuacgaccacagcaaguaccgcgaggaggccaugcagaaccggauccagaucgaccccgucaagcucuccagcggguacaaggacgugauccugugguucuccuucggcgccagcugcuucauccugcucgcgaucgugauggggcuggucuucaucugcgugaagaacggcaacaugcgcugcaccaucugcaucuga

SEQ ID NO: 74994 - RNA, 1698 nt, Artificial Sequence; identical to SEQ ID NO: 71817
  derived and/or modified CDS sequence (opt1) from hemagglutinin__InfluenzaA__AHG96108

SEQ ID NO: 74995 - RNA, 1698 nt, Artificial Sequence; identical to SEQ ID NO: 71817
  derived and/or modified CDS sequence (opt1) from hemagglutinin__InfluenzaA__AHG96120

SEQ ID NO: 74996 - RNA, 1698 nt, Artificial Sequence; identical to SEQ ID NO: 71817
  derived and/or modified CDS sequence (opt1) from hemagglutinin__InfluenzaA__AHG96132

SEQ ID NO: 74997 - RNA, 1698 nt, Artificial Sequence
  derived and/or modified CDS sequence (opt1) from hemagglutinin__InfluenzaA__AHG96144
augaaggugaagcugcucguccugcugugcaccuucaccgccacguacgccgacaccaucugcaucggcuaccacgcgaacaacagcaccgacaccguggacacggugcucgagaagaacgucaccgugacccacuccgugaaccugcuggagaacagccacaacgggaagcucugccugcugaagggcaucgcgccccuccagcuggggaacugcuccgucgccggcuggauccuggggaacccggagugcgagcuccugaucagcaaggaguccuggagcuacaucguggagaagcccaaccccgagaacgggaccugcuaccccggccacuucgccgacuacgaggagcugcgcgagcagcucuccagcguguccagcuucgagcgguucgagaucuucccgaaggaguccagcuggcccaaccacacggucaccgggguguccgccagcugcucccacaacggcgagagcuccuucuaccgcaaccugcuguggcucaccgggaagaacggccuguaccccaaccugagcaaguccuacgccaacaacaaggagaaggaggugcucguccuguggggcgugcaccacccgcccaacaucggcgugcagaaggcccuguaccacaccgagaacgccuacgucagcguggugagcucccacuacagccggaaguucacgcccgagaucgccaagcgccccaagguccgggaccaggagggccgcaucaacuacuacuggacccuccuggagcccggggacaccaucaucuucgaggcgaacggcaaccugaucgccccgcgguacgccuucgcccucucccgcggguucggcagcggcaucaucaacuccaacgcccccauggacaagugcgacgcgaagugccagacgccccagggggccaucaacagcucccugcccuuccagaacgugcacccggugaccaucggcgagugccccaaguacguccggagcgccaagcugcgcauggugaccgggcuccggaacauccccuccauccagagccgcggccuguucggggccaucgccggcuucaucgagggcggguggaccggcaugguggacgggugguacggcuaccaccaccagaacgagcagggguccggcuacgcggccgaccagaaguccacccagaacgccaucaacggcaucacgaacaaggucaacagcgugaucgagaagaugaacacccaguucaccgccgucgggaaggaguucaacaagcuggagcggcgcauggagaaccucaacaagaagguggacgacggcuucaucgacaucuggaccuacaacgccgagcugcuggugcuccuggagaacgagcggacgcuggacuuccacgacagcaacgucaagaaccucuacgagaaggugaagucccagcugaagaacaacgcgaaggagaucgggaacggcugcuucgaguucuaccacaagugcaacgacgagugcauggagagcgugaagaacgggaccuacgacuaccccaaguacuccgaggagagcaagcugaaccgcgagaagaucgacggcgucaagcucgaguccaugggcguguaccagauccuggccaucuacagcaccguggccagcucccugguccuccuggugagccugggggccaucuccuucuggaugugcagcaacggcucccuccagugccggaucugcaucuga

SEQ ID NO: 74998 - RNA, 1698 nt, Artificial Sequence; identical to SEQ ID NO: 71817
  derived and/or modified CDS sequence (opt1) from hemagglutinin__InfluenzaA__AHG96156

SEQ ID NO: 74999 - RNA, 1698 nt, Artificial Sequence; identical to SEQ ID NO: 71817
  derived and/or modified CDS sequence (opt1) from hemagglutinin__InfluenzaA__AHG96168

SEQ ID NO: 75000 - RNA, 1698 nt, Artificial Sequence; identical to SEQ ID NO: 71817
  derived and/or modified CDS sequence (opt1) from hemagglutinin__InfluenzaA__AHG96180

SEQ ID NO: 75001 - RNA, 1698 nt, Artificial Sequence; identical to SEQ ID NO: 71817
  derived and/or modified CDS sequence (opt1) from hemagglutinin__InfluenzaA__AHG96192

SEQ ID NO: 75002 - RNA, 1698 nt, Artificial Sequence; identical to SEQ ID NO: 71817
  derived and/or modified CDS sequence (opt1) from hemagglutinin__InfluenzaA__AHG96204

SEQ ID NO: 75003 - RNA, 1698 nt, Artificial Sequence; identical to SEQ ID NO: 71817
  derived and/or modified CDS sequence (opt1) from hemagglutinin__InfluenzaA__AHG96216

SEQ ID NO: 75004 - RNA, 1698 nt, Artificial Sequence; identical to SEQ ID NO: 71817
  derived and/or modified CDS sequence (opt1) from hemagglutinin__InfluenzaA__AHG96228

SEQ ID NO: 75005 - RNA, 1698 nt, Artificial Sequence; identical to SEQ ID NO: 74997
  derived and/or modified CDS sequence (opt1) from hemagglutinin__InfluenzaA__AHG96240

SEQ ID NO: 75006 - RNA, 1698 nt, Artificial Sequence; identical to SEQ ID NO: 71817
  derived and/or modified CDS sequence (opt1) from hemagglutinin__InfluenzaA__AHG96252

SEQ ID NO: 75007 - RNA, 1698 nt, Artificial Sequence; identical to SEQ ID NO: 71817
  derived and/or modified CDS sequence (opt1) from hemagglutinin__InfluenzaA__AHG96264

SEQ ID NO: 75008 - RNA, 1698 nt, Artificial Sequence; identical to SEQ ID NO: 71817
  derived and/or modified CDS sequence (opt1) from hemagglutinin__InfluenzaA__AHG96276

SEQ ID NO: 75009 - RNA, 1698 nt, Artificial Sequence; identical to SEQ ID NO: 71817
  derived and/or modified CDS sequence (opt1) from hemagglutinin__InfluenzaA__AHG96288

SEQ ID NO: 75010 - RNA, 1698 nt, Artificial Sequence; identical to SEQ ID NO: 71817
  derived and/or modified CDS sequence (opt1) from hemagglutinin__InfluenzaA__AHG96300

SEQ ID NO: 75011 - RNA, 1701 nt, Artificial Sequence
  derived and/or modified CDS sequence (opt1) from hemagglutinin__InfluenzaA__AHG96312
augaaggccauccuggugguccuccuguacaccuucgccaccgcgaacgccgacacgcugugcaucggcuaccacgccaacaacagcaccgacaccguggacaccgugcucgagaagaacgucacggugacccacuccgugaaccugcuggaggacaagcacaacgggaagcucugcaagcugcgcggcgucgugccccugcaccucgggaagugcaacaucgccggcuggauccuggggaacccggagugcgagagccuguccaccgccagcuccuggagcuacaucguggagaccuccagcuccgacaacggcacgugcuaccccggcgacuucaucaacuacgaggagcuccgggagcagcugagcuccgucagcuccuucgagcgcuucgagaucuuccccaagaccagcuccuggcccaaccacgacagcaacaagggggugaccgcggccugcccgcacgccggcgccaaguccuucuacaagaaccugaucuggcucgugaagaaggggaacagcuaccccaagcugucccagagcuacaucaacgacaagggcaaggagguccuggugcucugggggauccaccaccccagcaccacggcggaccagcagucccuguaccagaacgccgacgccuacguguucgucggcaccagccgguacuccaagaaguucaagcccgagaucgccauccgcccgaaggugcgggaccaggagggccgcaugaacuacuacuggacccugguggagcccggggacaagaucaccuucgaggccacgggcaaccucgucgugccccgguacgcguucaccauggagcgcaacgccgggagcggcaucaucaucuccgacacccccgugcacgacugcaacaccacgugccagaccccggagggcgccaucaacaccagccugcccuuccagaacauccaccccaucaccaucgggaagugccccaaguacgucaaguccacgaagcugcggcucgccaccggccugcgcaacgugccgagcauccagucccgggggcuguucggcgccaucgcgggguucaucgagggcggcuggaccgggaugguggacggcugguacggguaccaccaccagaacgagcagggcagcggguacgccgccgaccucaaguccacccagaacgccaucgacaagaucacgaacaaggucaacagcgugaucgagaagaugaacacccaguucaccgccgucggcaaggaguucaaccaccuggagaagcgcaucgagaaccugaacaagaagguggacgacggcuuccucgacaucuggaccuacaacgcggagcugcuggugcuccuggagaacgagcggacgcuggacuaccacgacuccaacgucaagaaccucuacgagaaggugcgcaaccagcugaagaacaacgccaaggagaucgggaacggcugcuucgaguucuaccacaagugcgacaacacgugcauggagagcgugaagaacgggaccuacgacuaccccaaguacuccgaggaggccaagcugaaccgggagaagaucgacggcgucaagcucgagagcacccgcaucuaccagauccuggccaucuacuccaccguggccagcucccuggugcucgucgugagccugggggcgaucagcuucuggaugugcuccaacggcagccugcagugccggaucugcaucuga

SEQ ID NO: 75012 - RNA, 1701 nt, Artificial Sequence; identical to SEQ ID NO: 74064
  derived and/or modified CDS sequence (opt1) from hemagglutinin__InfluenzaA__AHG96313

SEQ ID NO: 75013 - RNA, 1701 nt, Artificial Sequence
  derived and/or modified CDS sequence (opt1) from hemagglutinin__InfluenzaA__AHG96314
augaaggccauccuggugguccuccuguacaccuucgccaccgcgaacgccgacacgcugugcaucggcuaccacgccaacaacagcaccgacaccguggacaccgugcucgagaagaacgucacggugacccacuccgugaaccugcuggaggacaagcacaacgggaagcucugcaagcugcgcggcgucgcgccccugcaccucgggaagugcaacaucgccggcuggauccuggggaacccggagugcgagagccuguccaccgccagcuccuggagcuacaucguggagaccuccagcuccgacaacggcacgugcuaccccggcgacuucaucaacuacgaggagcuccgggagcagcugagcuccgugagcuccuucgagcgcuucgagaucuuccccaagaccagcuccuggcccaaccacgacagcaacaagggggucaccgccgccugcccgcacgccggcgcgaaguccuucuacaagaaccugaucuggcucgugaagaaggggaacagcuaccccaagcugucccagagcuacaucaacgacaagggcaaggaggugcugguccucugggggauccaccaccccagcaccacggccgaccagcagucccuguaccagaacgccgacgccuacguguucgugggcaccagccgguacuccaagaaguucaagcccgagaucgccauccgcccgaagguccgggaccaggagggccgcaugaacuacuacuggacccugguggagcccggggacaagaucaccuucgaggcgacgggcaaccucguggucccccgguacgccuucaccauggagcgcaacgccgggagcggcaucaucaucuccgacacccccgugcacgacugcaacaccacgugccagaccccggagggcgccaucaacaccagccugcccuuccagaacauccaccccaucaccaucgggaagugccccaaguacgugaaguccacgaagcugcggcucgccaccggccugcgcaacgucccgagcauccagucccgggggcuguucggcgcgaucgccggguucaucgagggcggcuggaccgggaugguggacggcugguacggguaccaccaccagaacgagcagggcagcggguacgccgccgaccucaaguccacccagaacgccaucgacaagaucacgaacaaggugaacagcgucaucgagaagaugaacacccaguacaccgcggugggcaaggaguucaaccaccuggagaagcgcaucgagaaccugaacaagaaggucgacgacggcuuccucgacaucuggaccuacaacgccgagcugcuggugcuccuggagaacgagcggacgcuggacuaccacgacuccaacgugaagaaccucuacgagaagguccgcaaccagcugaagaacaacgccaaggagaucgggaacggcugcuucgaguucuaccacaagugcgacaacacgugcauggagagcgugaagaacgggaccuacgacuaccccaaguacuccgaggaggccaagcugaaccgggagaagaucgacggcgugaagcucgagagcacccgcaucuaccagauccuggccaucuacuccaccgucgcgagcucccuggugcucguggucagccugggggccaucagcuucuggaugugcuccaacggcagccugcagugccggaucugcaucuga

SEQ ID NO: 75014 - RNA, 1701 nt, Artificial Sequence; identical to SEQ ID NO: 74064
  derived and/or modified CDS sequence (opt1) from hemagglutinin__InfluenzaA__AHG96315

SEQ ID NO: 75015 - RNA, 1701 nt, Artificial Sequence; identical to SEQ ID NO: 74064
  derived and/or modified CDS sequence (opt1) from hemagglutinin__InfluenzaA__AHG96316

SEQ ID NO: 75016 - RNA, 1701 nt, Artificial Sequence; identical to SEQ ID NO: 74064
  derived and/or modified CDS sequence (opt1) from hemagglutinin__InfluenzaA__AHG96317

SEQ ID NO: 75017 - RNA, 1701 nt, Artificial Sequence; identical to SEQ ID NO: 74064
  derived and/or modified CDS sequence (opt1) from hemagglutinin__InfluenzaA__AHG96320

SEQ ID NO: 75018 - RNA, 1701 nt, Artificial Sequence; identical to SEQ ID NO: 74064
  derived and/or modified CDS sequence (opt1) from hemagglutinin__InfluenzaA__AHG96321

SEQ ID NO: 75019 - RNA, 1701 nt, Artificial Sequence; identical to SEQ ID NO: 74064
  derived and/or modified CDS sequence (opt1) from hemagglutinin__InfluenzaA__AHG96322

SEQ ID NO: 75020 - RNA, 1701 nt, Artificial Sequence; identical to SEQ ID NO: 74064
  derived and/or modified CDS sequence (opt1) from hemagglutinin__InfluenzaA__AHG96324

SEQ ID NO: 75021 - RNA, 1701 nt, Artificial Sequence; identical to SEQ ID NO: 74064
  derived and/or modified CDS sequence (opt1) from hemagglutinin__InfluenzaA__AHG96325

SEQ ID NO: 75022 - RNA, 1701 nt, Artificial Sequence
  derived and/or modified CDS sequence (opt1) from hemagglutinin__InfluenzaA__AHG96326
augaaggccauccuggugguccuccuguacaccuucgccaccgcgaacgccgacacgcugugcaucggcuaccacgccaacaacagcaccgacaccguggacaccgugcucgagaagaacgucacggugacccacuccgugaaccugcuggaggacaagcacaacgggaagcucugcaagcugcgcggcgucgcgccccugcaccucgggaagugcaacaucgccggcuggauccuggggaacccggagugcgagagccuguccaccgcgagcuccuggagcuacaucguggagaccuccaacagcgacaacggcacgugcuaccccggcgacuucaucaacuacgaggagcuccgggagcagcuguccagcguguccagcuucgagcgcuucgagaucuuccccaagaccuccagcuggcccaaccacgacuccaacaagggggucaccgccgccugcccgcacgccggcgccaagagcuucuacaagaaccugaucuggcucgugaagaaggggaacuccuaccccaagcugagccaguccuacaucaacgacaagggcaaggaggugcugguccucugggggauccaccaccccagcaccacggccgaccagcagagccuguaccagaacgccgacgccuacguguucgugggcaccucccgguacagcaagaaguucaagcccgagaucgccauccgcccgaagguccgggaccaggagggccgcaugaacuacuacuggacccugguggagcccggggacaagaucaccuucgaggcgacgggcaaccucguggucccccgguacgccuucaccauggagcgcaacgccggguccggcaucaucaucagcgacacccccgugcacgacugcaacaccacgugccagaccccggagggcgccaucaacaccucccugcccuuccagaacauccaccccaucaccaucgggaagugccccaaguacgucaagagcacgaagcugcggcucgccaccggccugcgcaacgugccguccauccagagccgggggcuguucggcgcgaucgccggguucaucgagggcggcuggaccgggaugguggacggcugguacggguaccaccaccagaacgagcagggcuccggguacgccgccgaccucaagagcacccagaacgccaucgacaagaucacgaacaaggugaacuccgucaucgagaagaugaacacccaguucaccgcggugggcaaggaguucaaccaccuggagaagcgcaucgagaaccugaacaagaaggucgacgacggcuuccucgacaucuggaccuacaacgccgagcugcuggugcuccuggagaacgagcggacgcuggacuaccacgacagcaacgugaagaaccucuacgagaagguccgcaaccagcugaagaacaacgccaaggagaucgggaacggcugcuucgaguucuaccacaagugcgacaacacgugcauggaguccgugaagaacgggaccuacgacuaccccaaguacagcgaggaggccaagcugaaccgggagaagaucgacggcgugaagcucgaguccacccgcaucuaccagauccuggccaucuacagcaccgucgcguccagccuggugcucguggucucccugggggccaucagcuucuggaugugcagcaacggcucccugcagugccggaucugcaucuga

SEQ ID NO: 75023 - RNA, 1701 nt, Artificial Sequence; identical to SEQ ID NO: 74064
  derived and/or modified CDS sequence (opt1) from hemagglutinin__InfluenzaA__AHG96327

SEQ ID NO: 75024 - RNA, 1701 nt, Artificial Sequence
  derived and/or modified CDS sequence (opt1) from hemagglutinin__InfluenzaA__AHG96329
augaaggccauccuggugguccuccuguacaccuucaccacggccaacgcggacacccugugcaucggcuaccacgccaacaacagcaccgacaccguggacacggugcucgagaagaacgucaccgugacccacuccgugaaccugcuggaggacaagcacaacgggaagcucugcaagcugcgcggcgucgcgccccugcaccucgggaagugcaacaucgccggcuggauccuggggaacccggagugcgagagccuguccaccgccagcuccuggagcuacaucguggagacguccagcuccgacaacgggaccugcuaccccggcgacuucaucaacuacgaggagcuccgggagcagcugagcuccgugagcuccuucgagcgcuucgagaucuuccccaagaccagcuccuggcccaaccacgacagcaacaagggcgucaccgccgccugcccgcacgccggcgccaaguccuucuacaagaaccugaucuggcucgugaagaaggggaacagcuaccccaagcugucccagagcuacaucaacgacaagggcaaggaggugcugguccucugggggauccaccaccccagcacgaccgcggaccagcagucccuguaccagaacgccgacgccuacguguucgugggcaccagccgguacuccaagaaguucaagcccgagaucgccauccgcccgaagguccgggaccaggagggccgcaugaacuacuacuggacccugguggagcccggggacaagaucacguucgaggccaccggcaaccucguggucccccgguacgcguucaccauggagcgcaacgccgggagcggcaucaucaucuccgacacccccgugcacgacugcaacacgaccugccagaccccggagggcgccaucaacaccagccugcccuuccagaacauccaccccaucacgaucgggaagugccccaaguacgugaaguccaccaagcugcggcucgccaccggccugcgcaacgucccgagcauccagucccgggggcuguucggcgccaucgcgggguucaucgagggcggcuggaccgggaugguggacggcugguacggguaccaccaccagaacgagcagggcagcggguacgccgccgaccucaaguccacgcagaacgccaucgacaagaucaccaacaaggugaacagcgucaucgagaagaugaacacccaguucaccgccgugggcaaggaguucaaccaccuggagaagcgcaucgagaaccugaacaagaaggucgacgacggcuuccucgacaucuggacguacaacgcggagcugcuggugcuccuggagaacgagcggacccuggacuaccacgacuccaacgugaagaaccucuacgagaagauccgcaaccagcugaagaacaacgccaaggagaucgggaacggcugcuucgaguucuaccacaagugcgacaacacgugcauggagagcgucaagaacgggaccuacgaguaccccaaguacuccgaggaggccaagcugaaccgggagaagaucgacggcgugaagcucgagagcaccaagaucuaccagauccuggccaucuacuccaccguggccagcucccugguccucguggugagccugggggcgaucagcuucuggaugugcuccaacggcagccugcagugccgcaucugcaucuga

SEQ ID NO: 75025 - RNA, 1701 nt, Artificial Sequence
  derived and/or modified CDS sequence (opt1) from hemagglutinin__InfluenzaA__AHG96330
augaaggccauccuggugguccuccuguacaccuucgccaccgcgacggccgacacccugugcaucggcuaccacgccaacaacagcaccgacaccguggacacggugcucgagaagaacgucaccgugacccacuccgugaaccugcuggaggacaagcacaacgggaagcucugcaagcugcgcggcgucgcgccccugcaccucgggaagugcaacaucgccggcuggauccuggggaacccggagugcgagagccuguccaccgccagcuccuggagcuacaucguggagacguccagcuccgacaacgggaccugcuaccccggcgacuucaucaacuacgaggagcuccgggagcagcugagcuccgugagcuccuucgagcgcuucgagaucuuccccaagaccagcuccuggcccaaccacgacagcaacaagggcgucaccgccgccugcccgcacgccggcgcgaaguccuucuacaagaaccugaucuggcucgugaagaaggggaacagcuaccccaagcugucccagagcuacaucaacgacaagggcaaggaggugcugguccucugggggauccaccaccccagcacgaccgccgaccagcagucccuguaccagaacgccgacgccuacguguucgugggcaccagccgguacuccaagaaguucaagcccgagaucgccauccgcccgaagguccgggaccaggagggccgcaugaacuacuacuggacccugguggagcccggggacaagaucacguucgaggcgaccggcaaccucguggucccccgguacgccuucaccauggagcgcaacgccgggagcggcaucaucaucuccgacacccccgugcacgacugcaacacgaccugccagaccccggagggcgccaucaacaccagccugcccuuccagaacauccaccccaucacgaucgggaagugccccaaguacgugaaguccaccaagcugagccucgccaccggccugcggaacgucccguccauccagagccgcgggcuguucggcgcgaucgccggguucaucgagggcggcuggaccgggaugguggacggcugguacggguaccaccaccagaacgagcagggcuccggguacgccgccgaccucaagagcacgcagaacgccaucgacaagaucaccaacaaggugaacuccgucaucgagaagaugaacacccaguucaccgcggugggcaaggaguucaaccaccuggagaagcggaucgagaaccugaacaagaaggucgacgacggcuuccucgacaucuggacguacaacgccgagcugcuggugcuccuggagaacgagcgcacccuggacuaccacgacagcaacgugaagaaccucuacgagaagauccggaaccagcugaagaacaacgccaaggagaucgggaacggcugcuucgaguucuaccacaagugcgacaacacgugcauggaguccgucaagaacgggaccuacgacuaccccaaguacagcgaggaggccaagcugaaccgcgagaagaucgacggcgugaagcucgaguccacccggaucuaccagauccuggccaucuacagcaccguggcguccagccugguccucguggugagccugggggccaucuccuucuggaugugcagcaacggcucccugcagugccgcaucugcaucuga

SEQ ID NO: 75026 - RNA, 1701 nt, Artificial Sequence; identical to SEQ ID NO: 74064
  derived and/or modified CDS sequence (opt1) from hemagglutinin__InfluenzaA__AHG96332

SEQ ID NO: 75027 - RNA, 1701 nt, Artificial Sequence
  derived and/or modified CDS sequence (opt1) from hemagglutinin__InfluenzaA__AHG96334
augaaggccauccuggugguccuccuguacacccuggccaccgcgaacgccgacacgcucugcaucggcuaccacgccaacaacagcaccgacaccguggacaccgugcuggagaagaacgucacggugacccacuccgugaaccugcucgaggacaagcacaacgggaagcugugcaagcugcgcggcgucgcgccccuccaccuggggaagugcaacaucgccggcuggauccuggggaacccggagugcgagagccucuccaccgccagcuccuggagcuacaucguggagaccuccagcuccgacaacggcacgugcuaccccggcgacuucaucaacuacgaggagcugcgggagcagcugagcuccgugagcuccuucgagcgcuucgagaucuuccccaagaccagcuccuggcccaaccacgacagcaacaagggggucaccgccgccugcccgcacgccggcgcgaaguccuucuacaagaaccucaucuggcuggugaagaaggggaacagcuaccccaagcugucccagagcuacaucaacgacaagggcaaggaggugcucguccugugggggauccaccaccccagcaccacggccgaccagcagucccuguaccagaacgccgacgccuacguguucgugggcaccagccgguacuccaagaaguucaagcccgagaucgccauccgcccgaagguccgggaccaggagggccgcaugaacuacuacuggacccucguggagcccggggacaagaucaccuucgaggcgacgggcaaccugguggucccccgguacgccuucaccauggagcgcaacgccgggagcggcaucaucaucuccgacacccccgugcacgacugcaacaccacgugccagaccccggagggcgccaucaacaccagccugcccuuccagaacauccaccccaucaccaucgggaagugccccaaguacgugaaguccacgaagcuccggcuggccaccggccugcgcaacgucccgagcauccagucccggggccucuucggggcgaucgccggguucaucgagggcggcuggaccgggaugguggacggcugguacggguaccaccaccagaacgagcagggcagcggguacgccgccgaccugaaguccacccagaacgccaucgacaagaucacgaacaaggugaacagcgucaucgagaagaugaacacccaguucaccgcggugggcaaggaguucaaccaccuggagaagcgcaucgagaaccucaacaagaaggucgacgacggcuuccuggacaucuggaccuacaacgccgagcugcucgugcugcuggagaacgagcggacgcucgacuaccacgacuccaacgugaagaaccuguacgagaagguccgcaaccagcugaagaacaacgccaaggagaucgggaacggcugcuucgaguucuaccacaagugcgacaacacgugcauggagagcgugaagaacgggaccuacgacuaccccaaguacuccgaggaggccaagcucaaccgggagaagaucgacggcgugaagcuggagagcacccgcaucuaccagauccuggccaucuacuccaccgucgcgagcucccucgugcugguggucagccugggggccaucagcuucuggaugugcuccaacggcagccuccagugccggaucugcaucuga

SEQ ID NO: 75028 - RNA, 1701 nt, Artificial Sequence
  derived and/or modified CDS sequence (opt1) from hemagglutinin__InfluenzaA__AHG96335
augaaggccauccuggugguccuccuguacaccuucgagaccgccaacgcggacacgcugugcaucggcuaccacgccaacaacagcaccgacaccguggacaccgugcucgagaagaacgucacggugacccacuccgugaaccugcuggaggacaagcacaacgggaagcucugcaagcugaagggcgucgcgccccugcaccucgggaagugcaacaucgccggcuggauccuggggaacccggagugcgagagccuguccaccgccagcuccuggagcuacaucguggagaccuccagcuccgacaacggcacgugcuaccccggcgacuucaucaacuacgaggagcuccgcgagcagcugagcuccgugagcuccuucgagcgguucgagaucuuccccaagaccagcuccuggcccaaccacgacagcaacaagggggucaccgccgccugcccgcacgccggcgccaaguccuucuacaagaaccugaucuggcucgugaagaaggggaacagcuaccccaagcugucccagagcuacaucaacgacaagggcaaggaggugcugguccucugggggauccaccaccccagcaccacggcggaccagcagucccuguaccagaacgccgacgccuacguguucgugggcaccagccgcuacuccaagaaguucaagcccgagaucgccauccggccgaagguccgcgaccaggagggccggaugaacuacuacuggacccugguggagcccggggacaagaucaccuucgaggccacgggcaaccucguggucccccgcuacgcguucaccauggagcggaacgccgggagcggcaucaucaucuccgacacccccgugcacgacugcaacaccacgugccagaccccggagggcgccaucaacaccagccugcccuuccagaacauccaccccaucaccaucgggaagugccccaaguacgugaaguccacgaagcugcgccucgccaccggccugcggaacgucccgagcauccagucccgcgggcuguucggcgccaucgcgggguucaucgagggcggcuggaccgggaugguggacggcugguacggguaccaccaccagaacgagcagggcagcggguacgccgccgaccucaaguccacccagaacgccaucgacaagaucacgaacaaggugaacagcgucaucgagaagaugaacacccaguucaccgccgugggcaaggaguucaaccaccuggagaagcggaucgagaaccugaacaagaaggucgacgacggcuuccucgacaucuggaccuacaacgcggagcugcuggugcuccuggagaacgagcgcacgcuggacuaccacgacuccaacgugaagaaccucuacgagaagguccggaaccagcugaagaacaacgccaaggagaucgggaacggcugcuucgaguucuaccacaagugcgacaacacgugcauggagagcgugaagaacgggaccuacgacuaccccaaguacuccgaggaggccaagcugaaccgcgagaagaucgacggcgugaagcucgagagcacccggaucuaccagauccuggccaucuacuccaccgucgccagcucccuggugcucguggucagccugggggcgaucagcuucuggaugugcuccaacggcagccugcagugccgcaucugcaucuga

SEQ ID NO: 75029 - RNA, 1701 nt, Artificial Sequence
  derived and/or modified CDS sequence (opt1) from hemagglutinin__InfluenzaA__AHG96336
augaaggccauccuggugguccuccuguacaccuucgccaccgcgaacgccgacacgcugugcaucggcuaccacgccaacaacagcaccgacaccguggacaccgugcucgagaagaacgucacggugacccacuccgugaaccugcuggaggacaagcacaacgggaagcucugcaagcugcgcggcgucgcgccccugcaccucgggaagugcaacaucgccggcuggauccuggggaacccggagugcgagagccuguccaccgccagcuccuggagcuacaucguggagaccuccagcuccgacaacggcacgugcuaccccggcgacuucaucaacuacgaggagcuccgggagcagcugagcuccgugagcuccuucgagcgcuucgagaucuuccccaagaccagcuccuggcccaaccacgacagcaacaagggggucaccgccgccugcccgcacgccggcgcgaaguccuucuacaagaaccugaucuggcucgugaagaaggggaacagcuaccccaagcugucccagagcuacaucaacgacaagggcaaggaggugcugguccucugggggauccaccaccccagcaccacggccgaccagcagucccuguaccagaacgccgacgccuacguguucgugggcaccagccgguacuccaagaaguucaagcccgagaucgccauccgcccgaagguccgggaccaggagggccgcaugaacuacuacuggacccugguggagcccggggacaagaucaccuucgaggcgacgggcaaccucguggucccccgguacgccuucaccauggagcgcaacgccgggagcggcaucaucaucuccgacacccccgugcgggacugcaacaccacgugccagaccccggagggcgccaucaacaccagccugcccuuccagaacauccaccccaucaccaucgggaagugccccaaguacgugaaguccacgaagcugcgccucgccaccggccugcggaacgucccgagcauccagucccgcgggcuguucggcgcgaucgccggguucaucgagggcggcuggaccgggaugguggacggcugguacggguaccaccaccagaacgagcagggcagcggguacgccgccgaccucaaguccacccagaacgccaucgacaagaucacgaacaaggugaacagcgucaucgagaagaugaacacccaguucaccgcggugggcaaggaguucaaccaccuggagaagcggaucgagaaccugaacaagaaggucgacgacggcuuccucgacaucuggaccuacaacgccgagcugcuggugcuccuggagaacgagcgcacgcuggacuaccacgacuccaacgugaagaaccucuacgagaagguccggaaccagcugaagaacaacgccaaggagaucgggaacggcugcuucgaguucuaccacaagugcgacaacacgugcauggagagcgugaagaacgggaccuacgacuaccccaaguacuccgaggaggccaagcugaaccgcgagaagaucgacggcgugaagcucgagagcacccggaucuaccagauccuggccaucuacuccaccgucgcgagcucccuggugcucguggucagccugggggccaucagcuucuggaugugcuccaacggcagccugcagugccgcaucugcaucuga

SEQ ID NO: 75030 - RNA, 1701 nt, Artificial Sequence
  derived and/or modified CDS sequence (opt1) from hemagglutinin__InfluenzaA__AHG96338
augaaggccauccuggugguccuccuguacaccuucgccaccgcgaacgccgacacgcugugcaucggcuaccacgccaacaacagcaccgacaccguggacaccgugcucgagaagaacgucacggugacccacuccgugaaccugcuggaggacaagcacaacgggaagcucugcaagcugcgcggcgucgcgccccugcaccucgggaagugcaacaucgccggcuggauccuggggaacccggagugcgagagccuguccaccgcgagcuccuggagcuacaucguggagaccuccagcuccgacaacggcacgugcuaccccggcgacuucaucaacuacgaggagcuccgggagcagcugagcuccgugagcuccuucgagcgcuucgagaucuuccccaagaccagcuccuggcccaaccacgacagcaacaagggggucaccgccgccugcucccacgccggcgccaagagcuucuacaagaaccugaucuggcucgugaagaaggggaacuccuacccgaagcugagccagagcuacaucaacgacaagggcaaggaggugcugguccucugggggauccaccaccccuccaccacggccgaccagcagagccuguaccagaacgccgacgccuacguguucgugggcaccucccgguacagcaagaaguucaagcccgagaucgccauccgccccaagguccgggaccaggagggccgcaugaacuacuacuggacccugguggagccgggggacaagaucaccuucgaggcgacgggcaaccucguggucccccgguacgccuucaccauggagcgcaacgccggguccggcaucaucaucagcgacacccccgugcacgacugcaacaccacgugccagacccccgagggcgccaucaacaccucccugccguuccagaacauccaccccaucaccaucgggaagugccccaaguacgucaagagcacgaagcugcggcucgccaccggccugcgcaacgugcccuccauccagagccgggggcuguucggcgcgaucgccggguucaucgagggcggcuggaccgggaugguggacggcugguacggguaccaccaccagaacgagcagggcuccggguacgccgccgaccucaagagcacccagaacgccaucgacaagaucacgaacaaggugaacuccgucaucgagaagaugaacacccaguucaccgcggugggcaaggaguucaaccaccuggagaagcgcaucgagaaccugaacaagaaggucgacgacggcuuccucgacaucuggaccuacaacgccgagcugcuggugcuccuggagaacgagcggacgcuggacuaccacgacagcaacgugaagaaccucuacgagaagguccgcaaccagcugaagaacaacgccaaggagaucgggaacggcugcuucgaguucuaccacaagugcgacaacacgugcauggaguccgugaagaacgggaccuacgacuacccgaaguacagcgaggaggccaagcugaaccgggagaagaucgacggcgugaagcucgaguccacccgcaucuaccagauccuggccaucuacagcaccgucgcguccagccuggugcucguggucagccugggggccaucuccuucuggaugugcagcaacggcucccugcagugccggaucugcaucuga

SEQ ID NO: 75031 - RNA, 1701 nt, Artificial Sequence
  derived and/or modified CDS sequence (opt1) from hemagglutinin__InfluenzaA__AHG96339
augaaggccauccuggugguccuccuguacaccuucgccaccgcgaacgccgacacgcugugcaucggcuaccacgccaacaacagcaccgacaccguggacaccgugcucgagaagaacgucacggugacccacuccgugaaccugcuggaggacaagcacaacgggaagcucugcaagcugcgcggcgucgcgccccugcaccucgggaagugcaacaucgccggcuggauccuggggaacccggagugcgagagccuguccaccgccagcuccuggagcuacaucguggagaccuccagcuccgacaacggcacgugcuaccccggcgacuucaucaacuacgaggagcuccgggagcagcugagcuccgugagcuccuucgagcgcuucgagaucuuccccaagaccagcuccuggcccaaccacgacagcaacaagggggucaccgccgccugcccgcacgccggcgcgaaguccuucuacaagaaccugaucuggcucgugaagaaggggaacagcuaccccaagcugucccagagcuacaucaacgacaagggcaaggagauccuggugcucugggggauccaccaccccagcaccacggccgaccagcagucccuguaccagaacgccgacgccuacgucuucgugggcaccagccgguacuccaagaaguucaagcccgagaucgccauccgcccgaaggugcgggaccaggagggccgcaugaacuacuacuggacccuggucgagcccggggacaagaucaccuucgaggcgacgggcaaccucguggugccccgguacgccuucaccauggagcgcaacgccgggagcggcaucaucaucuccgacacccccguccacgacugcaacaccacgugccagaccccggagggcgccaucaacaccagccugcccuuccagaacauccaccccaucaccaucgggaagugccccaaguacgugaaguccacgaagcugcggcucgccaccggccugcgcaacgugccgagcauccagucccgggggcuguucggcgcgaucgccggguucaucgagggcggcuggaccgggauggucgacggcugguacggguaccaccaccagaacgagcagggcagcggguacgccgccgaccucaaguccacccagaacgccaucgacaagaucacgaacaaggugaacagcgugaucgagaagaugaacacccaguucaccgcggucggcaaggaguucaaccaccuggagaagcgcaucgagaaccugaacaagaagguggacgacggcuuccucgacaucuggaccuacaacgccgagcugcugguccuccuggagaacgagcggacgcuggacuaccacgacuccaacgugaagaaccucuacgagaaggugcgcaaccagcugaagaacaacgccaaggagaucgggaacggcugcuucgaguucuaccacaagugcgacaacacgugcauggagagcgucaagaacgggaccuacgacuaccccaaguacuccgaggaggccaagcugaaccgggagaagaucgacggcgugaagcucgagagcacccgcaucuaccagauccuggccaucuacuccaccguggcgagcucccugguccucguggugagccugggggccaucagcuucuggaugugcuccaacggcagccugcagugccggaucugcaucuga

SEQ ID NO: 75032 - RNA, 1701 nt, Artificial Sequence; identical to SEQ ID NO: 74064
  derived and/or modified CDS sequence (opt1) from hemagglutinin__InfluenzaA__AHG96340

SEQ ID NO: 75033 - RNA, 1701 nt, Artificial Sequence
  derived and/or modified CDS sequence (opt1) from hemagglutinin__InfluenzaA__AHG96341
augaaggccauccuggugguccuccuguacaccuucgccaccgcgaacgccgacacgcugugcaucggcuaccacgccaacaacagcaccgacaccguggacaccgugcucgagaagaacgucacggugacccacuccgugaaccugcuggaggacaagcacaacgggaagcucugcaagcugcgcggcgucgcgccccugcaccucgggaagugcaacaucgccggcuggauccuggggaacccggagugcgagagccuguccaccgccagcuccuggagcuacaucguggagaccuccagcuccgacaacggcacgugcuaccccggcgacuucaucaacuacgaggagcuccgggagcagcugagcuccgugagcuccuucgagcgcuucgagaucuuccccaagaccagcuccuggcccaaccacgacagcaacaagggggucaccgccgccugcccgcacgccggcgcgaaguccuucuacaagaaccugaucuggcucgugaagaaggggaacagcuaccccaagcugucccagagcuacaucaacgacaagggcaaggaggugcugguccucugggggauccaccaccccagcaccacggccgaccagcagucccuguaccagaacgccgacgccuacguguucgugggcaccagcaaguacuccaagaaguucaagcccgagaucgccauccggccgaagguccgcgaccaggagggccggaugaacuacuacuggacccugguggagcccggggacaagaucaccuucgaggcgacgggcaaccucguggucccccgcuacgccuucaccauggagcggaacgccgggagcggcaucaucaucuccgacacccccgugcacgacugcaacaccacgugccagaccccggagggcgccaucaacaccagccugcccuuccagaacauccaccccaucaccaucgggaagugccccaaguacgugaaguccacgaagcugcgccucgccaccggccugcggaacaucccgagcauccagucccgcgggcuguucggcgcgaucgccggguucaucgagggcggcuggaccgggauggucgacggcugguacggguaccaccaccagaacgagcagggcagcggguacgccgccgaccucaaguccacccagaacgccaucgacaagaucacgaacaaggugaacagcgugaucgagaagaugaacacccaguucaccgcggucggcaaggaguucaaccaccuggagaagcggaucgagaaccugaacaagaagguggacgacggcuuccucgacaucuggaccuacaacgccgagcugcugguccuccuggagaacgagcgcacgcuggacuaccacgacuccaacgugaagaaccucuacgagaaggugcggaaccagcugaagaacaacgccaaggagaucgggaacggcugcuucgaguucuaccacaagugcgacaacacgugcauggagagcgucaagaacgggaccuacgacuaccccaaguacuccgaggaggccaagcugaaccgcgagaagaucgacggcgugaagcucgagagcacccggaucuaccagauccuggccaucuacuccaccguggcgagcucccugguccucguggugagccugggggccaucagcuucuggaugugcuccaacggcagccugcagugccgcaucugcaucuga

SEQ ID NO: 75034 - RNA, 1701 nt, Artificial Sequence
  derived and/or modified CDS sequence (opt1) from hemagglutinin__InfluenzaA__AHG96342
augaaggccauccuggugguccuccuguacaccuucgccaccgcgaacgccgacacgcugugcaucggcuaccacgccaacaacagcaccgacaccguggacaccgugcucgagaagaacgucacggugacccacuccgugaaccugcuggaggacaagcacaacgggaagcucugcaagcugcgcggcgucgcgccccugcaccucgggaagugcaacaucgccggcuggauccuggggaacccggagugcgagagccuguccaccgccagcuccuggagcuacaucguggagaccuccagcuccgacaacggcacgugcuaccccggcgacuucaucaacuacgaggagcuccgggagcagcugagcuccgugagcuccuucgagcgcuucgagaucuuccccaagaccagcuccuggcccaaccacgacagcaacaagggggucaccgccgccugcccgcacgccggcgcgaaguccuucuacaagaaccugaucuggcucgugaagaaggggaacagcuaccccaagcugucccagagcuacaucaacgacaagggcaaggaggugcugguccucugggggauccaccaccccagcaccacggccgaccagcagucccuguaccagaacgccgacgccuacguguucgugggcaccagccgguacuccaagaaguucaagcccgagaucgccauccgcccgaagguccgggaccaggagggccgcaugaacuacuacuggacccugguggagcccggggacaagaucaccuucgaggcgacgggcaaccucguggucccccgguacgccuucaccauggagcgcaacgccgggagcggcaucaucaucuccgacacccccgugcacgacugcaacaccacgugccagaccccggagggcgccaucaacaccagccugcccuuccagaacauccaccccaucaccaucgggaagugccccaaguacgugaaguccacgaagcugcggcucgccaccggccugcgcaacaucccgagcauccagucccgggggcuguucggcgcgaucgccggguucaucgagggcggcuggaccgggauggucgacggcugguacggguaccaccaccagaacgagcagggcagcggguacgccgccgaccucaaguccacccagaacgccaucgacaagaucacgaacaaggugaacagcgugaucgagaagaugaacacccaguucaccgcggucggcaaggaguucaaccaccuggagaagcgcaucgagaaccugaacaagaagguggacgacggcuuccucgacaucuggaccuacaacgccgagcugcugguccuccuggagaacgagcggacgcuggacuaccacgacuccaacgugaagaaccucuacgagaaggugcgcaaccagcugaagaacaacgccaaggagaucgggaacggcugcuucgaguucuaccacaagugcgacaacaugugcauggagagcgucaagaacgggaccuacgacuaccccaaguacuccgaggaggccaagcugaaccgggagaagaucgacggcgugaagcucgagagcacccgcaucuaccagauccuggccaucuacuccaccguggcgagcucccugguccucguggugagccugggggccaucagcuucuggaugugcuccaacggcagccugcagugccggaucugcaucuga

SEQ ID NO: 75035 - RNA, 1701 nt, Artificial Sequence
  derived and/or modified CDS sequence (opt1) from hemagglutinin__InfluenzaA__AHG96343
augaaggccauccuggugguccuccuguacaccuucgccaccgcgacggccgacacccugugcaucggcuaccacgccaacaacagcaccgacaccguggacacggugcucgagaagaacgucaccgugacccacuccgugaaccugcuggaggacaagcacaacgggaagcucugcaagcugcgcggcgucgcgccccugcaccucgggaagugcaacaucgccggcuggauccuggggaacccggagugcgagagccuguccaccgcgagcuccuggagcuacaucguggagacguccaacagcgacaacgggaccugcuaccccggcgacuucaucaacuacgaggagcuccgggagcagcuguccagcguguccagcuucgagcgcuucgagaucuuccccaagaccuccagcuggcccaaccacgacuccaacaagggcgucaccgccgccugcccgcacgccggcgccaagagcuucuacaagaaccugaucuggcucgugaagaaggggaacuccuaccccaagcugagccaguccuacaucaacgacaagggcaaggaggugcugguccucugggggauccaccaccccagcacgaccgccgaccagcagagccuguaccagaacgccgacgccuacguguucgugggcaccucccgguacagcaagaaguucaagcccgagaucgccauccgcccgaagguccgggaccaggagggccgcaugaacuacuacuggacccugguggagcccggggacaagaucacguucgaggcgaccggcaaccucguggucccccgguacgccuucaccauggagcgcaacgccggguccggcaucaucaucagcgacacccccgugcacgacugcaacacgaccugccagaccccggagggcgccaucaacaccucccugcccuuccagaacauccaccccaucacgaucgggaagugccccaaguacgucaagagcaccaagcugcggcucgccaccggccugcgcaacgugccguccauccagagccgggggcuguucggcgcgaucgccggguucaucgagggcggcuggaccgggaugguggacggcugguacggguaccaccaccagaacgagcagggcuccggguacgccgccgaccucaagagcacgcagaacgccaucgacaagaucaccaacaaggugaacuccgucaucgagaagaugaacacccaguucaccgcggugggcaaggaguucaaccaccuggagaagcgcaucgagaaccugaacaagaaggucgacgacggcuuccucgacaucuggacguacaacgccgagcugcuggugcuccuggagaacgagcggacccuggacuaccacgacagcaacgugaagaaccucuacgagaagguccgcaaccagcugaagaacaacgccaaggagaucgggaacggcugcuucgaguucuaccacaagugcgacaacacgugcauggaguccgugaagaacgggaccuacgacuaccccaaguacagcgaggaggccaagcugaaccgggagaagaucgacggcgugaagcucgaguccacccgcaucuaccagauccuggccaucuacagcaccgucgcguccagccuggugcucguggucucccugggggccaucagcuucuggaugugcagcaacggcucccugcagugccggaucugcaucuga

SEQ ID NO: 75036 - RNA, 1701 nt, Artificial Sequence; identical to SEQ ID NO: 74064
  derived and/or modified CDS sequence (opt1) from hemagglutinin__InfluenzaA__AHG96344

SEQ ID NO: 75037 - RNA, 1701 nt, Artificial Sequence; identical to SEQ ID NO: 75027
  derived and/or modified CDS sequence (opt1) from hemagglutinin__InfluenzaA__AHG96345

SEQ ID NO: 75038 - RNA, 1701 nt, Artificial Sequence; identical to SEQ ID NO: 74064
  derived and/or modified CDS sequence (opt1) from hemagglutinin__InfluenzaA__AHG96346

SEQ ID NO: 75039 - RNA, 1701 nt, Artificial Sequence; identical to SEQ ID NO: 74064
  derived and/or modified CDS sequence (opt1) from hemagglutinin__InfluenzaA__AHG96347

SEQ ID NO: 75040 - RNA, 1701 nt, Artificial Sequence; identical to SEQ ID NO: 74064
  derived and/or modified CDS sequence (opt1) from hemagglutinin__InfluenzaA__AHG96348

SEQ ID NO: 75041 - RNA, 1701 nt, Artificial Sequence; identical to SEQ ID NO: 74064
  derived and/or modified CDS sequence (opt1) from hemagglutinin__InfluenzaA__AHG96349

SEQ ID NO: 75042 - RNA, 1701 nt, Artificial Sequence; identical to SEQ ID NO: 74064
  derived and/or modified CDS sequence (opt1) from hemagglutinin__InfluenzaA__AHG96350

SEQ ID NO: 75043 - RNA, 1701 nt, Artificial Sequence; identical to SEQ ID NO: 74064
  derived and/or modified CDS sequence (opt1) from hemagglutinin__InfluenzaA__AHG96351

SEQ ID NO: 75044 - RNA, 1701 nt, Artificial Sequence; identical to SEQ ID NO: 74064
  derived and/or modified CDS sequence (opt1) from hemagglutinin__InfluenzaA__AHG96352

SEQ ID NO: 75045 - RNA, 1701 nt, Artificial Sequence
  derived and/or modified CDS sequence (opt1) from hemagglutinin__InfluenzaA__AHG96353
augaaggccauccuggugguccuccuguacaccuucgccaccacgaacgcggacacccugugcaucggcuaccacgccaacaacagcaccgacaccguggacacggugcucgagaagaacgucaccgugacccacuccgugaaccugcuggaggacaagcacaacgggaagcucugcaagcugcgcggcgucgcgccccugcaccucgggaagugcaacaucgccggcuggauccuggggaacccggagugcgagagccuguccaccgccagcuccuggagcuacaucguggagacguccagcuccgacaacgggaccugcuaccccggcgacuucaucaacuacgaggagcuccgggagcagcugagcuccgugagcuccuucgagcgcuucgagaucuuccccaagaccagcuccuggcccaaccacgacagcaacaagggcgucaccgccgccugcccgcacgccggcgccaaguccuucuacaagaaccugaucuggcucgugaagaaggggaacagcuaccccaagcugucccagagcuacaucaacgacaagggcaaggaggugcugguccucugggggauccaccaccccagcacgaccgcggaccagcagucccuguaccagaacgccgacgccuacguguucgugggcaccagccgguacuccaagaaguucaagcccgagaucgccauccgcccgaagguccgggaccaggagggccgcaugaacuacuacuggacccugguggagcccggggacaagaucacguucgaggccaccggcaaccucguggucccccgguacgcguucaccauggagcgcaacgccgggagcggcaucaucaucuccgacacccccgugcacgacugcaacacgaccugccagaccccggagggcgccaucaacaccagccugcccuuccagaacauccaccccaucacgaucgggaagugccccaaguacgugaaguccaccaagcugcggcucgccaccggccugcgcaacgucccgagcauccagucccgggggcuguucggcgccaucgcgggguucaucgagggcggcuggaccgggaugguggacggcugguacggguaccaccaccagaacgagcagggcagcggguacgccgccgaccucaaguccacgcagaacgccaucgacaagaucaccaacaaggugaacagcgucaucgagaagaugaacacccaguucaccgccgugggcaaggaguucaaccaccuggagaagcgcaucgagaaccugaacaagaaggucgacgacggcuuccucgacaucuggacguacaacgcggagcugcuggugcuccuggagaacgagcggacccuggacuaccacgacuccaacgugaagaaccucuacgagaagguccgcaaccagcugaagaacaacgccaaggagaucgggaacggcugcuucgaguucuaccacaagugcgacaacacgugcauggagagcgugaagaacgggaccuacgacuaccccaaguacuccgaggaggccaagcugaaccgggagaagaucgacggcgugaagcucgagagcacccgcaucuaccagauccuggccaucuacuccaccgucgccagcucccuggugcucguggucagccugggggcgaucagcuucuggaugugcuccaacggcagccugcagugccggaucugcaucuga

SEQ ID NO: 75046 - RNA, 1701 nt, Artificial Sequence; identical to SEQ ID NO: 74064
  derived and/or modified CDS sequence (opt1) from hemagglutinin__InfluenzaA__AHG96354

SEQ ID NO: 75047 - RNA, 1701 nt, Artificial Sequence
  derived and/or modified CDS sequence (opt1) from hemagglutinin__InfluenzaA__AHG96355
augaaggccauccuggugguccuccuguacacccuggccaccgcgaacgccgacacgcucugcaucggcuaccacgccaacaacagcaccgacaccguggacaccgugcuggagaagaacgucacggugacccacuccgugaaccugcucgaggacaagcacaacgggaagcugugcaagcugcgcggcgucgcgccccuccaccuggggaagugcaacaucgccggcuggauccuggggaacccggagugcgagagccucuccaccgccagcuccuggagcuacaucguggagaccuccagcuccgacaacggcacgugcuaccccggcgacuucaucaacuacgaggagcugcgggagcagcugagcuccgugagcuccuucgagcgcuucgagaucuuccccaagaccagcuccuggcccaaccacgacagcaacaagggggucaccgccgccugcccgcacgccggcgcgaaguccuucuacaagaaccucaucuggcuggugaagaaggggaacagcuaccccaagcugucccagagcuacaucaacgacaagggcaaggaggugcucguccugugggggauccaccaccccagcaccacggccgaccagcagucccuguaccagaacgccgacgccuacguguucgugggcaccagccgguacuccaagaaguucaagcccgagaucgccauccgcccgaagguccgggaccaggagggccgcaugaacuacuacuggacccucguggagcccggggacaagaucaccuucgaggcgacgggcaaccugguggucccccgguacgccuucaccauggagcgcaacgccgggagcggcaucaucaucuccgacacccccgugcacgacugcaacaccacgugccagaccccggagggcgccaucaacaccagccugcccuuccagaacauccaccccaucaccaucgggaagugccccaaguacgugaaguccacgaagcuccggcuggccaccggccugcgcaacgucccgagcauccagucccggggccucuucggggcgaucgccggguucaucgagggcggcuggaccgggaugguggacggcugguacggguaccaccaccagaacgagcagggcagcggguacgccgccgaccugaaguccacccagaacgccaucgacaagaucacgaacaaggugaacagcgucaucgagaagaugaacacccaguucaccgcggugggcaaggaguucaaccagcuggagaagcgcaucgagaaccucaacaagaaggucgacgacggcuuccuggacaucuggaccuacaacgccgagcugcucgugcugcuggagaacgagcggacgcucgacuaccacgacuccaacgugaagaaccuguacgagaagguccgcaaccagcugaagaacaacgccaaggagaucgggaacggcugcuucgaguucuaccacaagugcgacaacacgugcauggagagcgugaagaacgggaccuacgacuaccccaaguacuccgaggaggccaagcucaaccgggagaagaucgacggcgugaagcuggagagcacccgcaucuaccagauccuggccaucuacuccaccgucgcgagcucccucgugcugguggucagccugggggccaucagcuucuggaugugcuccaacggcagccuccagugccggaucugcaucuga

SEQ ID NO: 75048 - RNA, 1701 nt, Artificial Sequence; identical to SEQ ID NO: 73882
  derived and/or modified CDS sequence (opt1) from hemagglutinin__InfluenzaA__AHG96356

SEQ ID NO: 75049 - RNA, 1701 nt, Artificial Sequence
  derived and/or modified CDS sequence (opt1) from hemagglutinin__InfluenzaA__AHG96359
augaagaccaucaucgcccugagcuacauccucugccugguguucgcccagaagcugcccggcaacgacaacuccaccgcgacgcucugccuggggcaccacgccgucccgaacggcaccaucgugaagaccaucaccaacgaccagaucgaggugacgaacgccaccgagcugguccagagcuccagcaccgggggcaucugcgacagcccccaccagauccucgacggggagaacugcacccugaucgacgcccugcucggcgacccccagugcgacggcuuccagaacaagaagugggaccuguucguggagcgcagcaaggccuacuccaacugcuaccccuacgacgugccggacuacgcgagccugcggucccucgucgccagcuccgggacgcuggaguucaacgacgagagcuucaacuggaccggcgugacccagaacgggaccuccagcuccugcaagcgccggagcaacaacuccuucuucagccgccugaacuggcucacgcaccugaaguucaaguaccccgcccugaacgugaccaugcccaacaacgagaaguucgacaagcucuacaucuggggcguccaccaccccgugaccgacaacgaccagaucuuccuguacgcccaggcguccgggcggaucaccgugagcacgaagcgcagccagcagaccgucaucccgaacaucggcucccggccccgcauccggaacauccccagccgcaucuccaucuacuggaccaucgugaagcccggcgacauccugcucaucaacagcaccgggaaccugaucgccccgcggggcuacuucaagauccgcuccgggaaguccuccaucaugcggagcgacgcccccaucggcaagugcaacuccgagugcaucacgcccaacggcagcauccccaacgacaagccguuccagaacgugaaccgcaucaccuacggggccugcccccgguacgucaagcagaacacccugaagcucgccaccggcaugcgcaacgugcccgagaagcagacgcgggggaucuucggcgcgaucgccggguucaucgagaacggcugggagggcaugguggacgggugguacggcuuccgccaccagaacuccgaggggaucggccaggccgccgaccucaagagcacccaggccgcgaucaaccagaucaacgggaagcugaaccggcugaucggcaagaccaacgagaaguuccaccagaucgagaaggaguucuccgaggucgagggccgcauccaggaccuggagaaguacguggaggacaccaagaucgaccuguggagcuacaacgccgagcuccugguggcccuggagaaccagcacacgaucgaccucaccgacuccgagaugaacaagcuguucgagcggaccaagaagcagcugcgcgagaacgccgaggacauggggaacggcugcuucaagaucuaccacaagugcgacaacgccugcaucgggagcauccgcaacggcaccuacgaccacgacgucuaccgggacgaggcgcucaacaaccgcuuccagaucaaggggguggagcugaaguccggcuacaaggacuggauccuguggaucagcuucgccaucuccugcuuccuccugugcguggcccugcucggcuucaucaugugggccugccagaaggggaacauccggugcaacaucugcaucuga

SEQ ID NO: 75050 - RNA, 1701 nt, Artificial Sequence; identical to SEQ ID NO: 75049
  derived and/or modified CDS sequence (opt1) from hemagglutinin__InfluenzaA__AHG96371

SEQ ID NO: 75051 - RNA, 1701 nt, Artificial Sequence; identical to SEQ ID NO: 75049
  derived and/or modified CDS sequence (opt1) from hemagglutinin__InfluenzaA__AHG96383

SEQ ID NO: 75052 - RNA, 1698 nt, Artificial Sequence; identical to SEQ ID NO: 71817
  derived and/or modified CDS sequence (opt1) from hemagglutinin__InfluenzaA__AHG96395

SEQ ID NO: 75053 - RNA, 1701 nt, Artificial Sequence; identical to SEQ ID NO: 75049
  derived and/or modified CDS sequence (opt1) from hemagglutinin__InfluenzaA__AHG96407

SEQ ID NO: 75054 - RNA, 1701 nt, Artificial Sequence; identical to SEQ ID NO: 75049
  derived and/or modified CDS sequence (opt1) from hemagglutinin__InfluenzaA__AHG96419

SEQ ID NO: 75055 - RNA, 1701 nt, Artificial Sequence; identical to SEQ ID NO: 75049
  derived and/or modified CDS sequence (opt1) from hemagglutinin__InfluenzaA__AHG96431

SEQ ID NO: 75056 - RNA, 1701 nt, Artificial Sequence; identical to SEQ ID NO: 75049
  derived and/or modified CDS sequence (opt1) from hemagglutinin__InfluenzaA__AHG96443

SEQ ID NO: 75057 - RNA, 1701 nt, Artificial Sequence; identical to SEQ ID NO: 75049
  derived and/or modified CDS sequence (opt1) from hemagglutinin__InfluenzaA__AHG96455

SEQ ID NO: 75058 - RNA, 1701 nt, Artificial Sequence; identical to SEQ ID NO: 75049
  derived and/or modified CDS sequence (opt1) from hemagglutinin__InfluenzaA__AHG96467

SEQ ID NO: 75059 - RNA, 1701 nt, Artificial Sequence; identical to SEQ ID NO: 75049
  derived and/or modified CDS sequence (opt1) from hemagglutinin__InfluenzaA__AHG96479

SEQ ID NO: 75060 - RNA, 1701 nt, Artificial Sequence; identical to SEQ ID NO: 75049
  derived and/or modified CDS sequence (opt1) from hemagglutinin__InfluenzaA__AHG96491

SEQ ID NO: 75061 - RNA, 1701 nt, Artificial Sequence; identical to SEQ ID NO: 66380
  derived and/or modified CDS sequence (opt1) from hemagglutinin__InfluenzaA__AHG96503

SEQ ID NO: 75062 - RNA, 1698 nt, Artificial Sequence; identical to SEQ ID NO: 71817
  derived and/or modified CDS sequence (opt1) from hemagglutinin__InfluenzaA__AHG96515

SEQ ID NO: 75063 - RNA, 1698 nt, Artificial Sequence; identical to SEQ ID NO: 71817
  derived and/or modified CDS sequence (opt1) from hemagglutinin__InfluenzaA__AHG96527

SEQ ID NO: 75064 - RNA, 1698 nt, Artificial Sequence; identical to SEQ ID NO: 71817
  derived and/or modified CDS sequence (opt1) from hemagglutinin__InfluenzaA__AHG96539

SEQ ID NO: 75065 - RNA, 1698 nt, Artificial Sequence; identical to SEQ ID NO: 71817
  derived and/or modified CDS sequence (opt1) from hemagglutinin__InfluenzaA__AHG96551

SEQ ID NO: 75066 - RNA, 1698 nt, Artificial Sequence; identical to SEQ ID NO: 74997
  derived and/or modified CDS sequence (opt1) from hemagglutinin__InfluenzaA__AHG96563

SEQ ID NO: 75067 - RNA, 1698 nt, Artificial Sequence; identical to SEQ ID NO: 71817
  derived and/or modified CDS sequence (opt1) from hemagglutinin__InfluenzaA__AHG96575

SEQ ID NO: 75068 - RNA, 1698 nt, Artificial Sequence; identical to SEQ ID NO: 71817
  derived and/or modified CDS sequence (opt1) from hemagglutinin__InfluenzaA__AHG96587

SEQ ID NO: 75069 - RNA, 1698 nt, Artificial Sequence; identical to SEQ ID NO: 71817
  derived and/or modified CDS sequence (opt1) from hemagglutinin__InfluenzaA__AHG96599

SEQ ID NO: 75070 - RNA, 1698 nt, Artificial Sequence; identical to SEQ ID NO: 71817
  derived and/or modified CDS sequence (opt1) from hemagglutinin__InfluenzaA__AHG96611

SEQ ID NO: 75071 - RNA, 1698 nt, Artificial Sequence; identical to SEQ ID NO: 71817
  derived and/or modified CDS sequence (opt1) from hemagglutinin__InfluenzaA__AHG96623

SEQ ID NO: 75072 - RNA, 1698 nt, Artificial Sequence; identical to SEQ ID NO: 71817
  derived and/or modified CDS sequence (opt1) from hemagglutinin__InfluenzaA__AHG96635

SEQ ID NO: 75073 - RNA, 1698 nt, Artificial Sequence; identical to SEQ ID NO: 71817
  derived and/or modified CDS sequence (opt1) from hemagglutinin__InfluenzaA__AHG96647

SEQ ID NO: 75074 - RNA, 1698 nt, Artificial Sequence; identical to SEQ ID NO: 71817
  derived and/or modified CDS sequence (opt1) from hemagglutinin__InfluenzaA__AHG96659

SEQ ID NO: 75075 - RNA, 1698 nt, Artificial Sequence; identical to SEQ ID NO: 71817
  derived and/or modified CDS sequence (opt1) from hemagglutinin__InfluenzaA__AHG96671

SEQ ID NO: 75076 - RNA, 1698 nt, Artificial Sequence; identical to SEQ ID NO: 71817
  derived and/or modified CDS sequence (opt1) from hemagglutinin__InfluenzaA__AHG96683

SEQ ID NO: 75077 - RNA, 1701 nt, Artificial Sequence; identical to SEQ ID NO: 75049
  derived and/or modified CDS sequence (opt1) from hemagglutinin__InfluenzaA__AHG96695

SEQ ID NO: 75078 - RNA, 1701 nt, Artificial Sequence; identical to SEQ ID NO: 75049
  derived and/or modified CDS sequence (opt1) from hemagglutinin__InfluenzaA__AHG96707

SEQ ID NO: 75079 - RNA, 1701 nt, Artificial Sequence; identical to SEQ ID NO: 75049
  derived and/or modified CDS sequence (opt1) from hemagglutinin__InfluenzaA__AHG96719

SEQ ID NO: 75080 - RNA, 1701 nt, Artificial Sequence; identical to SEQ ID NO: 75049
  derived and/or modified CDS sequence (opt1) from hemagglutinin__InfluenzaA__AHG96731

SEQ ID NO: 75081 - RNA, 1701 nt, Artificial Sequence; identical to SEQ ID NO: 75049
  derived and/or modified CDS sequence (opt1) from hemagglutinin__InfluenzaA__AHG96743

SEQ ID NO: 75082 - RNA, 1701 nt, Artificial Sequence; identical to SEQ ID NO: 75049
  derived and/or modified CDS sequence (opt1) from hemagglutinin__InfluenzaA__AHG96755

SEQ ID NO: 75083 - RNA, 1701 nt, Artificial Sequence; identical to SEQ ID NO: 75049
  derived and/or modified CDS sequence (opt1) from hemagglutinin__InfluenzaA__AHG96767

SEQ ID NO: 75084 - RNA, 1701 nt, Artificial Sequence; identical to SEQ ID NO: 75049
  derived and/or modified CDS sequence (opt1) from hemagglutinin__InfluenzaA__AHG96779

SEQ ID NO: 75085 - RNA, 1701 nt, Artificial Sequence
  derived and/or modified CDS sequence (opt1) from hemagglutinin__InfluenzaA__AHG96791
augaagaccaucaucgcccugagcuacauccucugccugguguucgcccagaagcugcccggcaacgacaacuccaccgcgacgcucugccuggggcaccacgccgucccgaacggcaccaucgugaagaccaucaccaacgaccagaucgaggugacgaacgccaccgagcugguccagagcuccagcaccgggggcaucugcgacagcccccaccagauccucgacggggagaacugcacccugaucgacgcccugcucggcgacccccagugcgacggcuuccagaacaagaagugggaccuguucguggagcgcagcaaggccuacuccaacugcuaccccuacgacgugccggacuacgcgagccugcggucccucgucgccagcuccgggacgcuggaguucaacgacgagagcuucaacuggaccggcgugacccagaacgggaccuccagcuccugcaagcgccggagcaacaacuccuucuucagccgccugaacuggcucacgcagcugaaguucaaguaccccgcccugaacgugaccaugcccaacaacgagaaguucgacaagcucuacaucuggggcguccaccaccccgugaccgacaacgaccagaucuuccuguacgcccaggcguccgggcggaucaccgugagcacgaagcgcagccagcagaccgucaucccgaacaucggcucccggccccgcauccggaacauccccagccgcaucuccaucuacuggaccaucgugaagcccggcgacauccugcucaucaacagcaccgggaaccugaucgccccgcggggcuacuucaagauccgcuccgggaaguccuccaucaugcggagcgacgcccccaucggcaagugcaacuccgagugcaucacgcccaacggcagcauccccaacgacaagccguuccagaacgugaaccgcaucaccuacggggccugcccccgguacgucaagcagaacacccugaagcucgccaccggcaugcgcaacgugcccgagaagcagacgcgggggaucuucggcgcgaucgccggguucaucgagaacggcugggagggcaugguggacgggugguacggcuuccgccaccagaacuccgaggggaucggccaggccgccgaccucaagagcacccaggccgcgaucaaccagaucaacgggaagcugaaccggcugaucggcaagaccaacgagaaguuccaccagaucgagaaggaguucuccgaggucgagcgccggauccaggaccuggagaaguacguggaggacaccaagaucgaccuguggagcuacaacgccgagcuccugguggcccuggagaaccagcacacgaucgaccucaccgacuccgagaugaacaagcuguucgagcgcaccaagaagcagcugcgcgagaacgccgaggacaugggcaacgggugcuucaagaucuaccacaagugcgacaacgccugcaucggcagcauccggaacgggaccuacgaccacgacgucuaccgcgacgaggcgcucaacaaccgguuccagaucaagggcguggagcugaaguccggguacaaggacuggauccuguggaucagcuucgccaucuccugcuuccuccugugcguggcccugcucggcuucaucaugugggccugccagaagggcaacauccgcugcaacaucugcaucuga

SEQ ID NO: 75086 - RNA, 1701 nt, Artificial Sequence; identical to SEQ ID NO: 75049
  derived and/or modified CDS sequence (opt1) from hemagglutinin__InfluenzaA__AHG96803

SEQ ID NO: 75087 - RNA, 1701 nt, Artificial Sequence; identical to SEQ ID NO: 75049
  derived and/or modified CDS sequence (opt1) from hemagglutinin__InfluenzaA__AHG96815

SEQ ID NO: 75088 - RNA, 1701 nt, Artificial Sequence; identical to SEQ ID NO: 75049
  derived and/or modified CDS sequence (opt1) from hemagglutinin__InfluenzaA__AHG96827

SEQ ID NO: 75089 - RNA, 1701 nt, Artificial Sequence; identical to SEQ ID NO: 75049
  derived and/or modified CDS sequence (opt1) from hemagglutinin__InfluenzaA__AHG96839

SEQ ID NO: 75090 - RNA, 1701 nt, Artificial Sequence; identical to SEQ ID NO: 75049
  derived and/or modified CDS sequence (opt1) from hemagglutinin__InfluenzaA__AHG96851

SEQ ID NO: 75091 - RNA, 1701 nt, Artificial Sequence; identical to SEQ ID NO: 75049
  derived and/or modified CDS sequence (opt1) from hemagglutinin__InfluenzaA__AHG96863

SEQ ID NO: 75092 - RNA, 1701 nt, Artificial Sequence; identical to SEQ ID NO: 75049
  derived and/or modified CDS sequence (opt1) from hemagglutinin__InfluenzaA__AHG96875

SEQ ID NO: 75093 - RNA, 1701 nt, Artificial Sequence; identical to SEQ ID NO: 75049
  derived and/or modified CDS sequence (opt1) from hemagglutinin__InfluenzaA__AHG96887

SEQ ID NO: 75094 - RNA, 1701 nt, Artificial Sequence; identical to SEQ ID NO: 75049
  derived and/or modified CDS sequence (opt1) from hemagglutinin__InfluenzaA__AHG96899

SEQ ID NO: 75095 - RNA, 1701 nt, Artificial Sequence; identical to SEQ ID NO: 75049
  derived and/or modified CDS sequence (opt1) from hemagglutinin__InfluenzaA__AHG96911

SEQ ID NO: 75096 - RNA, 1701 nt, Artificial Sequence; identical to SEQ ID NO: 75049
  derived and/or modified CDS sequence (opt1) from hemagglutinin__InfluenzaA__AHG96923

SEQ ID NO: 75097 - RNA, 1701 nt, Artificial Sequence; identical to SEQ ID NO: 75049
  derived and/or modified CDS sequence (opt1) from hemagglutinin__InfluenzaA__AHG96935

SEQ ID NO: 75098 - RNA, 1701 nt, Artificial Sequence; identical to SEQ ID NO: 75049
  derived and/or modified CDS sequence (opt1) from hemagglutinin__InfluenzaA__AHG96947

SEQ ID NO: 75099 - RNA, 1701 nt, Artificial Sequence; identical to SEQ ID NO: 75049
  derived and/or modified CDS sequence (opt1) from hemagglutinin__InfluenzaA__AHG96959

SEQ ID NO: 75100 - RNA, 1701 nt, Artificial Sequence; identical to SEQ ID NO: 75049
  derived and/or modified CDS sequence (opt1) from hemagglutinin__InfluenzaA__AHG96971

SEQ ID NO: 75101 - RNA, 1701 nt, Artificial Sequence; identical to SEQ ID NO: 75049
  derived and/or modified CDS sequence (opt1) from hemagglutinin__InfluenzaA__AHG96983

SEQ ID NO: 75102 - RNA, 1701 nt, Artificial Sequence; identical to SEQ ID NO: 75049
  derived and/or modified CDS sequence (opt1) from hemagglutinin__InfluenzaA__AHG96995

SEQ ID NO: 75103 - RNA, 1701 nt, Artificial Sequence; identical to SEQ ID NO: 75049
  derived and/or modified CDS sequence (opt1) from hemagglutinin__InfluenzaA__AHG97007

SEQ ID NO: 75104 - RNA, 1701 nt, Artificial Sequence; identical to SEQ ID NO: 75049
  derived and/or modified CDS sequence (opt1) from hemagglutinin__InfluenzaA__AHG97019

SEQ ID NO: 75105 - RNA, 1701 nt, Artificial Sequence; identical to SEQ ID NO: 75049
  derived and/or modified CDS sequence (opt1) from hemagglutinin__InfluenzaA__AHG97031

SEQ ID NO: 75106 - RNA, 1701 nt, Artificial Sequence; identical to SEQ ID NO: 75049
  derived and/or modified CDS sequence (opt1) from hemagglutinin__InfluenzaA__AHG97043

SEQ ID NO: 75107 - RNA, 1701 nt, Artificial Sequence
  derived and/or modified CDS sequence (opt1) from hemagglutinin__InfluenzaA__AHH00866
augaagaccaucaucgcccugagcuacauccucugccuggccuucgcgcagaagcugcccggcaacgacaacuccaccgccacgcucugccuggggcaccacgccgugccgaacggcacccuggucaagaccaucaccaacgaccagaucgaggugacgaacgccaccgagcucgugcagagcuccagcaccgggcgcaucugcgacagcccccaccagauccuggacggcgagaacugcacccugaucgacgcccuccugggggacccccacugcgacggcuuccagaacaaggagugggaccuguucgucgagcggagcaaggcguacuccaacugcuaccccuacgacgugccggacuacgccagccuccgcucccugguggccagcuccggcacgcuggaguucaacaacgagagcuucaacuggaccggggucgcccagaacggcaccuccagcgcgugcaagcggcgcuccaucaagagcuucuucucccggcucaacuggcugcaccagcuggagaaccgcuaccccgcccucaacgugaccaugcccaacaacgacaaguucgacaagcuguacaucuggggcgugcaccaccccagcacggacuccgaccagaucagcgucuacgcccaggccagcgggcgggugaccguguccaccaagcgcagccagcagaccgucaucccgaacaucgggucccggcccugggugcgcggcaucagcucccggaucagcaucuacuggacgaucgugaaccccggcgacauccugcucaucaacuccaccgggaaccugaucgcgccccgcggcuacuucaagauccggagcgggaaguccagcaucaugcgcuccgacgccccgaucggcaagugcaacagcgagugcaucacccccaacggcuccauccccaacgacaagcccuuccagaacgucaaccggaucaccuacggggccugcccgcgcuacgugaagcagaacacgcugaagcucgccaccggcaugcggaacgugcccgagaagcagacccgcgggaucuucggcgccaucgccggguucaucgagaacggcugggagggcaugauggacgggugguacggcuuccggcaccagaacagcgaggggaccggccaggcggccgaccugaaguccacgcaggccgccaucaaccagaucaacgggaagcugaacaagcucaucgagaagaccaacgagaaguuccaccagaucgagaaggaguucagcgaggucgagggccgcauccaggaccuggagaaguacguggaggacaccaagaucgaccugugguccuacaacgccgagcuccugguggcgcuggagaaccagcacaccaucgaccucacggacagcgagaugaacaagcuguucgagcggacccgcaagcagcugcgcgagaacgccgaggacaugggcaacgggugcuucaagaucuaccacaagugcgacaacgccugcaucggcuccauccggaacgggaccuacgaccacgacgucuaccgcgacgaggcccucaacaaccgguuccagaucaagggcguggagcugaaguccggguacaaggacuggauccuguggaucagcuucgccaucuccugcuuccuccugugcgugguccugcucggcuucaucaugugggcgugccagaagggcaacauccgcugcaacaucugcaucuga

SEQ ID NO: 75108 - RNA, 1701 nt, Artificial Sequence
  derived and/or modified CDS sequence (opt1) from hemagglutinin__InfluenzaA__AHH00870
augaagaccaucaucgcccugagcuacauccucugccuggccuucgcgcagaagcugcccggcaacgacaacuccaccgccacgcucugccuggggcaccacgccgugccgaacggcacccuggucaagaccaucaccaacgaccagaucgaggugacgaacgccaccgagcucgugcagagcuccagcaccgggcgcaucugcgacagcccccaccagauccuggacggcgagaacugcacccugaucgacgcccuccugggggacccccacugcgacggcuuccagaacaaggagugggaccuguucgucgagcggagcaaggcguacuccaacugcuaccccuacgacgugccggacuacgccagccuccgcucccugguggccagcuccggcacgcuggaguucaacaacgagagcuucaacuggaccggggucgcccagaacggcaccuccagcgcgugcaagcggcgcuccaucaagagcuucuucucccggcucaacuggcugcaccagcuggagaaccgcuaccccgcccucaacgugaccaugcccaacaacgacaaguucgacaagcuguacaucuggggcgugcaccaccccagcacggacuccgaccagaucagcgucuacgcccaggccagcgggcgggugaccguguccaccaagcgcagccagcagaccgucaucccgaacaucgggucccggcccugggugcgcggcaucagcucccggaucagcaucuacuggacgaucgugaagcccggcgacauccugcucaucaacuccaccgggaaccugaucgcgccccgcggcuacuucaagauccggagcgggaaguccagcaucaugcgcuccgacgccccgaucggcaagugcaacagcgagugcaucacccccaacggcuccauccccaacgacaagcccuuccagaacgucaaccggaucaccuacggggccugcccgcgcuacgugaagcagaacacgcugaagcucgccaccggcaugcggaacgugcccgagaagcagacccgcgggaucuucggcgccaucgccggguucaucgagaacggcugggagggcaugauggacgggugguacggcuuccggcaccagaacagcgaggggaccggccaggcggccgaccugaaguccacgcaggccgccaucaaccagaucaacgggaagcugaacaagcucaucgagaagaccaacgagaaguuccaccagaucgagaaggaguucagcgaggucgagggccgcauccaggaccuggagaaguacguggaggacaccaagaucgaccugugguccuacaacgccgagcuccugguggcgcuggagaaccagcacaccaucgaccucacggacagcgagaugaacaagcuguucgagcggacccgcaagcagcugcgcgagaacgccgaggacaugggcaacgggugcuucaagaucuaccacaagugcgacaacgccugcaucggcuccauccggaacgggaccuacgaccacgacgucuaccgcgacgaggcccucaacaaccgguuccagaucaagggcguggagcugaaguccggguacaaggacuggauccuguggaucagcuucgccaucuccugcuuccuccugugcgugguccugcucggcuucaucaugugggcgugccagaagggcaacauccgcugcaacaucugcaucuga

SEQ ID NO: 75109 - RNA, 1701 nt, Artificial Sequence
  derived and/or modified CDS sequence (opt1) from hemagglutinin__InfluenzaA__AHJ57430
augaaggccauccuggugguccuccuguacaccuucgccaccgcgaacgccgacacgcugugcaucggcuaccacgccaacaacagcaccgacaccguggacaccgugcucgagaagaacgucacggugacccacuccgugaaccugcuggaggacaagcacaacgggaagcucugccgccugcggggcgucgcgccccugcaccucgggaagugcaacaucgccggcuggauccuggggaacccggagugcgagagccuguccaccgcgagcuccuggagcuacaucguggagaccuccagcuccgacaacggcacgugcuaccccggcgacuucaucaacuacgaggagcuccgcgagcagcugagcuccgugagcuccuucgagcgguucgagaucagccccaagaccuccagcuggcccaaccacgacuccaacaaggggguccgcgccgccugcccgcacgccggcgccaagagcuucuacaagaaccugaucuggcucgugaagaaggggaacuccuaccccaagcugagcaagagcuacaucaacgacaagggcaaggaggugcugguccucugggggauccaccaccccuccaccagcgccgaccagcagucccuguaccagaacgccgacgccuacguguucgugggcaccagccgguacuccaagaaguucaagcccgagaucgccauccgcccgaagguccggggccaggaggggcgcaugaacuacuacuggacgcugguggagcccggcgacaagaucaccuucgaggcgaccgggaaccucguggucccccgguacgccuucgccauggagcgcaacgccgccagcggcaucaucaucuccgacacccccgugcacgacugcaacacgaccugccagaccccgaagggcgcggugaacaccagccugcccuuccagaacauccaccccaucacgaucgggaagugccccaaguacgucaaguccaccaagcugcggcucgccaccggccugcgcaacaucccgagcauccagucccgggggcuguucggcgccaucgccggguucaucgagggcggcuggaccgggaugguggacggcugguacggguaccaccaccagaacgagcagggcagcggguacgccgcggaccucaaguccacgcagaacgccaucgacgagaucaccaacaaggugaacagcgucaucgagaagaugaacacccaguucaccgccgugggcaaggaguucaaccaccuggagaagcgcaucgagaaccugaacaagaaggucgacgacggcuuccucgacaucuggacguacaacgccgagcugcuggugcuccuggagaacgagcggacccuggacuaccacgacuccaacgugaagaaccucuacgagaagguccgcagccagcugaagaacaacgccaaggagaucgggaacggcugcuucgaguucuaccacaagugcaacaacacgugcauggaguccgugaagaacgggaccuacgacuaccccaaguacagcgaggaggcgaagcugaaccgggagaagaucgacggcgugaagcucgaguccacccgcaucuaccagauccuggccaucuacagcaccgucgccagcucccuggugcucguggucagccugggggccaucuccuucuggaugugcagcaacggcucccugcagugccggaucugcaucuga

SEQ ID NO: 75110 - RNA, 1701 nt, Artificial Sequence
  derived and/or modified CDS sequence (opt1) from hemagglutinin__InfluenzaA__AHJ57431
augaaggccauccuggugguccuccuguacaccuucgccaccgcgaacgccgacacgcugugcaucggcuaccacgccaacaacagcaccgacaccguggacaccgugcucgagaagaacgucacggugacccacuccgugaaccugcuggaggacaagcacaacgggaagcucugcaagcugcgcggcgucgcgccccugcaccucgggaagugcaacaucgccggcuggauccuggggaacccggagugcgagagccuguccaccgccagcuccuggagcuacaucguggagaccuccagcuccgacaacggcacgugcuaccccggcgacuucaucgacuacgaggagcuccgggagcagcugagcuccgugagcuccuucgagcgcuucgagaucuuccccaagaccagcuccuggcccaaccacgacagcaacaaggggguccgggccgccugcccgcacgccggcgcgaaguccuucuacaagaaccugaucuggcucgugaagaaggggaacagcuaccccaagcugucccagagcuacaucaacgacaagggcaaggaggugcugguccucugggggauccaccaccccagcaccuccgccgaccagcagagccuguaccagaacgccgacgccuacguguucgugggcaccucccgcuacagcaagaaguucaagcccgagaucgccauccggccgaagguccgcgaccaggagggccggaugaacuacuacuggacgcugguggagcccggggacaagaucaccuucgaggcgaccggcaaccucguggucccccgcuacgccuucgccauggagcggaacgccggguccggcaucaucaucagcgacacccccgugcacgacugcaacacgaccugccagaccccgaagggcgccaucaacaccucccugcccuuccagaacauccaccccaucacgaucgggaagugccccaaguacgucaagagcaccaagcugcgccucgcgaccggccugcggaacaucccguccauccagagccgcgggcuguucggcgccaucgccggguucaucgagggcggcuggaccgggaugguggacggcugguacggguaccaccaccagaacgagcagggcuccggguacgccgccgaccucaagagcacgcagaacgcgaucgacaagaucaccaacaaggugaacuccgugaucgagaagaugaacacccaguucaccgccgucggcaaggaguucaaccaccuggagaagcggaucgagaaccugaacaagaagguggacgacggcuuccucgacaucuggacguacaacgccgagcugcugguccuccuggagaacgagcgcacccuggacuaccacgacagcaacgugaagaaccucuacgagaaggugcggaaccagcugaagaacaacgccaaggagaucgggaacggcugcuucgaguucuaccacaagugcgacaacacgugcauggaguccgucaagaacgggaccuacgacuaccccaaguacagcgaggaggccaagcugaaccgcgagaagaucgacggcgugaagcucgaguccacccggaucuaccagauccuggcgaucuacagcaccguggccuccagccugguccucguggugagccugggggccaucuccuucuggaugugcagcaacggcucccugcagugccgcaucugcaucuga

SEQ ID NO: 75111 - RNA, 1701 nt, Artificial Sequence
  derived and/or modified CDS sequence (opt1) from hemagglutinin__InfluenzaA__AHJ57432
augaaggccauccuggugguccuccuguacaccuucgccaccgcgaacgccgacacgcugugcaucggcuaccacgccaacaacagcaccgacaccguggacaccgugcucgagaagaacgucacggugacccacuccgugaaccugcuggaggacaagcacaacgggaagcucugcaagcugcgcggcgucgcgccccugcaccucgggaagugcaacaucgccggcuggauccuggggaacccggagugcgagagccuguccaccgccagcuccuggagcuacaucguggagaccuccagcuccgacaacggcacgugcuaccccggcgacuucaucgacuacgaggagcuccgggagcagcugagcuccgugagcuccuucgagcgcuucgagaucuuccccaagaccagcuccuggcccaaccacgacagcaacaagggggucaccgccgccugcccgcacgccggcgcgaaguccuucuacaagaaccugaucuggcucgugaagaaggggaacagcuaccccaagcuguccaagagcuacaucaacgacaagggcaaggaggugcugguccucugggggauccaccaccccagcaccacggccgaccagcagucccuguaccagaacgccgacgccuacguguucgugggcaccagccgguacuccaagaaguucaagccccagaucgccauccgcccgaagguccgggaccaggagggccgcaugaacuacuacuggacccugguggagcccggggacaagaucaccuucgaggcgacgggcaaccucguggucccccgguacgccuucgcccuggagcgcaacgccgggagcggcaucaucaucuccgacacccccgugcacgacugcaacacgaccugccagaccccgaagggcgccaucaacaccagccugcccuuccagaacauccaccccaucaccaucgggaagugccccaaguacgugaaguccaccaagcuccggcuggcgacgggccugcgcaacgucccgagcauccagucccggggccucuucggggccaucgccggguucaucgagggcggcuggaccgggaugguggagggcugguacggguaccaccaccagaacgagcagggcagcggguacgccgccgaccugaaguccacccagaacgcgaucgacaagaucaccaacaaggugaacagcgucaucgagaagaugaacacgcaguucaccgccgugggcaaggaguucaaccaccuggagaagcgcaucgagaaccucaacaagaaggucgacgacggcuuccuggacaucuggaccuacaacgccgagcugcucgugcugcuggagaacgagcggacccucgacuaccacgacuccaacgugaagaaccuguacgagaagguccgcaaccagcugaagaacaacgccaaggagaucgggaacggcugcuucgaguucuaccacaagugcgacaacacgugcauggagagcgugaagaacgggaccuacgacuaccccaaguacuccgaggaggccaagcucaaccgggagaagaucgacggcgugaagcuggagagcacccgcaucuaccagauccuggcgaucuacuccaccgucgccagcucccucgugcugguggucagccugggggccaucagcuucuggaugugcuccaacggcagccuccagugccggaucugcaucuga

SEQ ID NO: 75112 - RNA, 1701 nt, Artificial Sequence
  derived and/or modified CDS sequence (opt1) from hemagglutinin__InfluenzaA__AHJ57433
augaaggccauccuggugguccuccuguacaccuucgccaccgcgaacgccgacacgcugugcaucggcuaccacgccaacaacagcaccgacaccguggacaccgugcucgagaagaacgucacggugacccacuccgugaaccugcuggaggacaagcacaacgggaagcucugcaagcugcgcggcgucgcgccccugcaccucgggaagugcaacaucgccggcuggauccuggggaacccggagugcgagagccuguccaccgccagcuccuggagcuacaucguggagaccuccagcuccgacaacggcacgugcuaccccggcgacuucaucaacuacgaggagcuccgggagcagcugagcuccgugagcuccuucgagcgcuucgagaucuuccccaagaccagcuccuggcccaaccacgacagcaacaagggggucaccgccgccugcccgcacgccggcgcgaaguccuucuacaagaaccugaucuggcucgugaaggaggggaacagcuaccccaagcuguccaagagcuacaucaacgacaagggcaaggaggugcugguccucugggggauccaccaccccagcaccacggccgaccagcagucccuguaccagaacgccgacgccuacguguucgugggcaccagccgguacuccaagaaguucaagcccgagaucgccauccgcccgaagguccgggaccaggagggccgcaugaacuacuacuggacccugaucgagcccggggacaagaucaccuucgaggcgacgggcaaccucguggugccccgguacgccuucgccauggagcgcaacgccgggagcggcaucaucaucuccgacacccccguccacgacugcaacacgaccugccagaccccggagggcgccaucaacaccagccugcccuuccagaacauccaccccaucaccaucgggaagugccccaaguacgugaaguccaccaagcugcggcucgcgacgggccugcgcaacgugccgagcauccagucccgggggcuguucggcgccaucgccggguucaucgagggcggcuggaccgggauggucgacggcugguacggguaccaccaccagaacgagcagggcagcggguacgccgccgaccucaaguccacccagaacgcgaucgacaagaucaccaacaaggugaacagcgugaucgagaagaugaacacgcaguucaccgccgucggcaaggaguucaaccaccuggagaagcgcaucgagaaccugaacaagaagguggacgacggcuuccucgacaucuggaccuacaacgccgagcugcugguccuccuggagaacgagcggacccuggacuaccacgacuccaacgugaagaaccucuacgagaaggugcgcaaccagcugaagaacaacgccaaggagaucgggaacggcugcuucgaguucuaccacaagugcgacaacacgugcauggagagcgucaagaacgggaccuacgacuaccccaaguacuccgaggaggccaagcugaaccgggagaagaucgacggcgugaagcucgagagcacccgcaucuaccagauccuggcgaucuacuccaccguggccagcucccugguccucguggugagccugggggccaucagcuucuggaugugcuccaacggcagccugcagugccggaucugcaucuga

SEQ ID NO: 75113 - RNA, 1701 nt, Artificial Sequence
  derived and/or modified CDS sequence (opt1) from hemagglutinin__InfluenzaA__AHJ57434
augaaggccauccuggugguccuccuguacaccuucgccaccgcgaacgccgacacgcugugcaucggcuaccacgccaacaacagcaccgacaccguggacaccgugcucgagaagaacgucacggugacccacuccgugaacccccuggaggacaagcacaacgggaagcugugcaagcuccgcggcgucgccccgcugcaccuggggaagugcaacaucgccggcuggauccucgggaaccccgagugcgagagccuguccaccgcgagcuccuggagcuacaucguggagaccuccagcuccgacaacggcacgugcuaccccggcgacuucaucgacuacgaggagcugcgggagcagcucagcuccgugagcuccuucgagcgcuucgagaucuuccccaagaccagcuccuggccgaaccacgacagcaacaagggggucaccgccgccugcccccacgccggcgcgaaguccuucuacaagaaccugaucuggcuggugaaggaggggaacagcuaccccaagcucuccaagagcuacaucaacgacaagggcaaggaggugcugguccugugggggauccaccaccccagcaccacggccgaccagcagucccucuaccagaacgccgacgccuacguguucgugggcaccagccgguacuccaagaaguucaagccggagaucgccauccgccccaagguccgggaccaggagggccgcaugaacuacuacuggacccugguggagcccggggacaagaucaccuucgaggcgacgggcaaccugguggucccccgguacgccuucgccauggagcgcaacgccgggagcggcaucaucaucuccgacaccccggugcacgacugcaacacgaccugccagacccccgagggcgccaucaacaccagccuccccuuccagaacauccaccccaucaccaucgggaagugcccgaaguacgugaaguccaccaagcugcggcuggcgacgggccuccgcaacguccccagcauccagucccgggggcuguucggcgccaucgccggguucaucgagggcggcuggaccgggaugguggacggcugguacggguaccaccaccagaacgagcagggcagcggguacgccgccgaccugaaguccacccagaacgcgaucgacaagaucaccaacaaggugaacagcgucaucgagaagaugaacacgcaguucaccgccgugggcaaggaguucaaccaccucgagaagcgcaucgagaaccugaacaagaaggucgacgacggcuuccuggacaucuggaccuacaacgccgagcuccuggugcugcucgagaacgagcggacccuggacuaccacgacuccaacgugaagaaccuguacgagaagguccgcaaccagcucaagaacaacgccaaggagaucgggaacggcugcuucgaguucuaccacaagugcgacaacacgugcauggagagcgugaagaacgggaccuacgacuaccccaaguacuccgaggaggccaagcugaaccgggagaagaucgacggcgugaagcuggagagcacccgcaucuaccagauccucgcgaucuacuccaccgucgccagcucccuggugcugguggucagccucggggccaucagcuucuggaugugcuccaacggcagccugcagugccggaucugcaucuga

SEQ ID NO: 75114 - RNA, 1701 nt, Artificial Sequence
  derived and/or modified CDS sequence (opt1) from hemagglutinin__InfluenzaA__AHJ57435
augaaggccauccuggugguccuccuguacaccuucgccaccgcgaacgccgacacgcugugcaucggcuaccacgccaacaacagcaccgacaccguggacaccgugcucgagaagaacgucacggugacccacuccgugaaccugcuggaggacaagcacaacgggaagcucugcaagcugcgcggcgucgcgccccugcaccucgggaagugcaacaucgccggcuggauccuggggaacccggagugcgagagccuguccaccgccagcuccuggagcuacaucguggagaccuccagcuccgacaacggcacgugcuaccccggcgacuucaucaacuacgaggagcuccgggagcagcugagcuccgugagcuccuucgagcgcuucgagaucuuccccaagaccagcuccuggcccaaccacgacagcaaccgcggggucaccgccgccugcccgcacgccggcgcgaaguccuucuacaagaaccugaucuggcucgugaagaaggggaacagcuaccccaagcugucccagagcuacaucaacgacaagggcaaggaggugcugguccucugggggauccaccaccccagcaccacggccgaccagcagucccuguaccagaacgccgacgccuacguguucgugggcaccagccgguacuccaagaaguucaagcccgagaucgccauccggccgaagguccgcgaccaggagggccggaugaacuacuacuggacccugguggagcccggggacaagaucaccuucgaggcgacgggcaaccucguggucccccgcuacgccuucgccauggagcggaacgccgggagcggcaucaucaucuccgacacccccgugcacgacugcaacacgaccugccagaccccggagggcgccaucaacaccagccugcccuuccagaacauccaccccaucaccaucgggaagugccccaaguacgugaaguccaccaagcugcgccucgcgacgggccugcggaacgucccgagcauccagucccgcgggcuguucggcgccaucgccggguucaucgagggcggcuggaccgggaugguggacggcugguacggguaccaccaccagaacgagcagggcagcggguacgccgccgaccucaaguccacccagaacgcgaucgacaagaucaccaacaaggugaacagcgucaucgagaagaugaacacgcaguucaccgccgugggcaaggaguucaaccaccuggagaagcggaucgagaaccugaacaagaaggucgacgacggcuuccucgacaucuggaccuacaacgccgagcugcuggugcuccuggagaacgagcgcacccuggacuaccacgacuccaacgugaagaaccucuacgagaagguccggaaccagcugaagaacaacgccaaggagaucgggaacggcugcuucgaguucuaccacaagugcgacaacacgugcauggagagcgugaagaacgggaccuacgacuaccccaaguacuccgaggaggccaagcugaaccgcgagaagaucgacggcgugaagcucgagagcacccggaucuaccagauccuggcgaucuacuccaccgucgccagcucccuggugcucguggucagccugggggccaucagcuucuggaugugcuccaacggcagccugcagugccgcaucugcaucuga

SEQ ID NO: 75115 - RNA, 1701 nt, Artificial Sequence
  derived and/or modified CDS sequence (opt1) from hemagglutinin__InfluenzaA__AHJ57436
augaagaccaucaucgcccugagcuacauccucugccugguguucgcccagaagcugcccggcaacgacaacuccaccgcgacgcucugccuggggcaccacgccgucccgaacggcaccaucgugaagaccaucaccaacgaccagaucgaggugacgaacgccaccgagcugguccagagcuccagcaccggggagaucugcgacagcccccaccagauccucgacggcgagaacugcacccugaucgacgcccugcucggggacccccagugcgacggcuuccagaacaagaagugggaccuguucguggagcgcagcaaggccuacuccaacugcuaccccuacgacgugccggacuacgcgagccugcggucccucgucgccagcuccggcacgcuggaguucaacaacgagagcuucaacuggaccggggugacccagaacggcaccuccagcgccugcauccgccgguccaacagcuccuucuucagccgccugaacuggcucacgcaccugaacuucaaguaccccgcccugaacgugaccauccccaacaacgagcaguucgacaagcucuacaucuggggcguccaccaccccgggaccgacaaggaccagaucuuccuguacgcgcaggccuccgggcggaucaccgugagcacgaagcgcagccagcagaccgugaucccgaacaucggcucccggccccgcguccggaacauccccagccgcaucuccaucuacuggaccaucgugaagcccggcgacauccugcucaucaacagcaccgggaaccugaucgccccgcggggcuacuucaagauccgcuccgggaaguccuccaucaugcggagcgacgcccccaucggcaagugcaacuccgagugcaucacgcccaacggcagcauccccaacgacaagccguuccagaacgugaaccgcaucaccuacggggccugcccccgguacgucaagcagaacacccugaagcucgcgaccggcaugcgcaacgugcccgagaagcagacgcgggggaucuucggcgccaucgccggguucaucgagaacggcugggagggcaugguggacgggugguacggcuuccgccaccagaacuccgaggggcggggccaggccgccgaccucaagagcacccaggcggccaucgaccagaucaacgggaagcugaaccgccugaucggcaagaccaacgagaaguuccaccagaucgagaaggaguucuccgaggucgagggccggauccaggaccuggagaaguacguggaggacaccaagaucgaccuguggagcuacaacgccgagcuccugguggcccuggagaaccagcacacgaucgaccucaccgacuccgagcugaacaagcuguucgagaagaccaagaagcagcuccgcgagaacgccgaggacauggggaacggcugcuucaagaucuaccacaagugcgacaacgcgugcaucgggagcauccgcaacggcaccuacgaccacgacgucuaccgggacgaggcccugaacaaccgcuuccagaucaaggggguggagcugaaguccggcuacaaggacuggauccucuggaucagcuucgccaucuccugcuuccugcugugcguggcccuccugggcuucaucaugugggccugccagaaggggaacauccggugcaacaucugcaucuga

SEQ ID NO: 75116 - RNA, 1701 nt, Artificial Sequence
  derived and/or modified CDS sequence (opt1) from hemagglutinin__InfluenzaA__AHJ57437
augaagaccaucaucgcccugagcuacauccucugccugguguucgcccagaagcugcccggcaacgacaacuccaccgcgacgcucugccuggggcaccacgccgucccgaacggcaccaucgugaagaccaucaccaacgaccagaucgaggugacgaacgccaccgagcugguccagaacagcuccaccggggagaucugcgacagcccccaccagauccucgacggcgagaacugcacccugaucgacgcccugcucggggacccccagugcgacggcuuccagaacaagaagugggaccuguucguggagcgcuccaaggccuacagcaacugcuaccccuacgacgugccggacuacgcgucccugcggagccucgucgccuccagcggcacgcuggaguucaacaacgaguccuucaacuggaccggggugacccagaacggcaccagcuccgccugcauccgccggagcaacuccagcuucuucucccgccugaacuggcucacgcaccugaacuucaaguaccccgcccugaacgugaccaugcccaacaacgagcaguucgacaagcucuacaucuggggcguccaccaccccgggaccgacaaggaccagaucuuccuguacgcgcagagcuccgggcggaucaccgugagcacgaagcgcagccagcagaccgugaucccgaacaucggcucccggccccgcguccggaacauccccagccgcaucuccaucuacuggaccaucgugaagcccggcgacauccugcucaucaacagcaccgggaaccugaucgccccgcggggcuacuucaagauccgcuccggcaagagcuccaucaugcggagcgacgcccccaucgggaagugcaacuccgagugcaucacgcccaacggcagcauccccaacgacaagccguuccagaacgugaaccgcaucaccuacggggccugcccccgguacgucaagcaguccacccugaagcucgccaccggcaugcgcaacgugcccgagaagcagacgcgggggaucuucggcgcgaucgccggguucaucgagaacggcugggagggcaugguggacgggugguacggcuuccgccaccagaacagcgaggggcggggccaggccgccgaccugaaguccacccaggccgcgaucgaccagaucaacgggaagcugaaccgccucaucggcaagaccaacgagaaguuccaccagaucgagaaggaguucagcgaggucgagggccggauccaggaccuggagaaguacguggaggacaccaagaucgaccugugguccuacaacgccgagcuccugguggcccuggagaaccagcacacgaucgaccucaccgacagcgagaugaacaagcuguucgagaagaccaagaagcagcugaaggagaacgccgaggacauggggaacggcugcuucaagaucuaccacaagugcgacaacgccugcaucggguccauccgcaacggcaccuacgaccacgacgucuaccgcgacgaggcgcucaacaaccgguuccagaucaaggggguggagcucaagagcggcuacaaggacuggauccuguggaucuccuucgccaucagcugcuuccugcugugcguggcccugcucggcuucaucaugugggccugccagaaggggaacauccgcugcaacaucugcaucuga

SEQ ID NO: 75117 - RNA, 1701 nt, Artificial Sequence
  derived and/or modified CDS sequence (opt1) from hemagglutinin__InfluenzaA__AHJ57438
augaagaccaucaucgcccugagcuacauccucugccugguguucgcccagaagcugcccggcaacgacaacuccaccgcgacgcucugccuggggcaccacgccgucccgaacggcaccaucgugaagaccaucaccaacgaccagaucgaggugacgaacgccaccgagcugguccagaacagcuccaccggggagaucugcgacagcccccaccagauccucgacggcgagaacugcacccugaucgacgcccugcucggggacccccagugcgacggcuuccagaacaagaagugggaccuguucguggagcgcuccaaggccuacagcaacugcuaccccuacgacgugccggacuacgcgucccugcggagccucgucgccuccagcggcacgcuggaguucaacaacgaguccuucaacuggaccggggugacccagaacggcaccagcuccgccugcauccgccggagcaacuccagcuucuucucccgccugaaguggcucacgcaccugaacuucaaguaccccgcccugaacgugaccaugcccaacaacgagcaguucgacaagcucuacaucuggggcguccaccaccccgggaccgacaaggaccagaucuuccuguacgcgcaggccagcgggcggaucaccguguccacgaagcgcagccagcaggccgugaucccgaacaucggcagccggccccgcauccggaacauccccucccgcaucagcaucuacuggaccaucgucaagcccggcgacauccugcucaucaacuccaccgggaaccugaucgccccgcggggcuacuucaagauccgcagcgggaaguccagcaucaugcgguccgacgcccccaucggcaagugcaacagcgagugcaucacccccaacggcuccauccccaacgacaagccguuccagaacgugaaccgcaucacguacggggacugcccccgguacgugaagcagagcacccugaagcucgcgaccggcaugcgcaacguccccgagaagcagacccgggggaucuucggcgccaucgccggguucaucgagaacggcugggagggcaugguggacgggugguacggcuuccgccaccagaacuccgaggggcggggccaggccgccgaccucaagagcacgcaggcggccaucgaccagaucaacgggaagcugaaccgccugaucggcaagaccaacgagaaguuccaccagaucgagaaggaguucuccgagguggagggccggauccaggaccuggagaaguacgucgaggacaccaagaucgaccuguggagcuacaacgccgagcuccugguggcccuggagaaccagcacaccaucgaccucacggacuccgagaugaacaagcuguucgagaagaccaagaagcagcugcgcgagaacgccgaggacauggggaacggcugcuucaagaucuaccacaagugcgacaacgcgugcaccgggagcauccgcaacggcaccuacgaccacgacguguaccgggacgaggcccucaacaaccgcuuccagaucaagggggucgaggugaaguccggcuacaaggacuggauccuguggaucagcuucgccaucuccugcuuccugcucugcguggcccugcugggcuucaucaugugggccugccagaaggggaacauccggugcaacaucugcaucuga

SEQ ID NO: 75118 - RNA, 1701 nt, Artificial Sequence
  derived and/or modified CDS sequence (opt1) from hemagglutinin__InfluenzaA__AHJ57651
augaucgccuucaucgugaucgccauccuggcggccaccggcaagagcgacaagaucugcaucggguaccacgccaacaacuccaccacgaaggucgacaccauccucgagaagaacgugaccgugacccacagcgucgagcugcuggagaaccagaaggaggagcgcuucugcaagaucuccaacaaggcgccccucgaccugcgggacugcacgcuggagggcuggauccucgggaacccgcgcugcggcauccugcuggccgaccagagcugguccuacaucguggagcggcccaacgcccgcaacgggaucugcuaccccggcacccucaacgagguggaggagcugaaggcccugaucggcagcggggagcgggucgagcgcuucgagauguuccccaaguccaccugggccggcguggacaccgacagcgggguguccagcgccugcccgcucggcaacgggcccuccuucuaccggaaccugcuguggaucaucaagcucaagagcuccgaguaccccgucauccgcggcacguucaacaacaccggcgacaagagcauccuguacuucuggggcgugcaccacccgcccgugaccaccgagcaggaggcgcuguacggguccggggaccgguacguccgcaugggcacggagagcaugaacuucgcccggucccccgagaucgccgcccgccccgccgugaacggccagcgggggcgcaucgacuacuucuggagcauccucaagcccggcgagacccugaacguggaguccaacgggaaccugaucgcgccgugguacgccuaccgguucgucaacaaggacagcaagggcgccaucuuccgcagcacccuccccaucgagaacugcgacgcgaccugccagacgaccgagggggugauccggaccaacaagaccuuccagaacgugagcccccuguggaucggcgagugccccaaguacgucaaguccaagucccugcgccucgccacgggccugcggaacgugccgcagaucgagacccgcgggcuguucggcgccaucgccggguucaucgagggcggguggaccggcaugaucgacggcugguacggguaccaccacgagaacagccagggcuccggguacgccgccgaccgggagagcacccagaaggccaucgacggcaucacgaacaaggugaacuccaucaucgacaagaugaacacccaguucgaggcggucgggcacgaguucagcaaccucgagcgccgcaucgacaaccugaacaagcggauggaggacggcuuccuggacguguggaccuacaacgccgagcuccuggugcugcucgagaacgagcgcacccuggacaugcacgacgccaacgucaagauccuguacgagaaggugcggucccagcuccgcgacaacgccaaggaccugggcaacgggugcuucgaguucuggcacaagugcgacaacgagugcaucgagagcgucaagaacggcacguacaacuaccccaaguaccaguccgagagccggcugaaccgccagaccaucgaguccgugaagcucgagaaccuggggguguaccagauccuggccaucuacagcaccgucuccagcucccucgugcuggugggccugauccucgcgaugggccuguggaugugcagcaacggguccaugcagugccggaucugcaucuga

SEQ ID NO: 75119 - RNA, 1701 nt, Artificial Sequence
  derived and/or modified CDS sequence (opt1) from hemagglutinin__InfluenzaA__AHJ57663
augaucgccuucaucgugaucgccacccuggucgcgaccggcaagagcgacaagaucugcaucggguaccacgccaacaacuccacgaccaagguggacaccauccucgagaagaacgugaccgucacgcacagcguggagcugcuggagaaccagaaggaggagcgcuucugcaagaucuccaacaaggcgccccucgaccugcgggacugcacccuggagggcuggauccucgggaacccgcgcugcggcauccugcuggccgaccagagcugguccuacaucguggagcggcccaacgcccgcaacgggaucugcuaccccggcacccucaacgaggccgaggagcugaaggcccugaucggcagcggggagcgggucgagcgcuucgagauguuccccaaguccaccuggacgggcguggacaccgagagcgggguguccagcgccugcccgcucggcaacgggcccuccuucuaccggaaccugcuguggaucaucaagcucaagagcuccgaguaccccgucauccgcggcaccuucaacaacaccggcgacaagagcauccuguacuucuggggcgugcaccacccgcccgugacgaccgagcagaacgcccuguacggguccggggaccgguacguccgcaugggcaccgagagcaugaacuucgcgcggucccccgagaucgccgcccgccccgccgugaacggccagcgggggcgcaucgacuacuucuggagcauccucaagcccggcgagacccugaacguggaguccaacgggaaccugaucgccccgugguacgcguaccgguucgucaacaaggacagcaagggcgccaucuuccgcagcaaccuccccaucgagaacugcgacgccacgugccagaccaccgagggggugauccggaccaacaagacguuccagaacgugagcccccuguggaucggcgagugccccaaguacgucaaguccaagucccugcgccucgccaccggccugcggaacgugccgcagaucgagacccgcgggcuguucggcgccaucgcgggguucaucgagggcggguggaccggcaugaucgacggcugguacggguaccaccacgagaacagccagggcuccggguacgccgccgacaaggagagcacgcagaaggccaucgacggcaucaccaacaaggugaacuccaucaucgacaagaugaacacccaguucgaggccgucgggcacgaguucagcaaccucgagcggcgcaucgacaaccugaacaagcgcauggaggacggcuuccuggacguguggaccuacaacgcggagcuccuggugcugcucgagaacgagcggacgcuggaccugcacgacgccaacgucaagaaccuccacgagcgcgugaagucccagcugcgggacaacgccaacgaccugggcaacgggugcuucgaguucuggcacaagugcgacaacgagugcauggagagcgucaagaacggcaccuacaacuaccccaaguaccaggccgagucccgccucaacaagcagaagaucgagagcgugaagcuggaggaguucgggguguaccagauccuggccaucuacuccaccgucagcuccagccucgugcuggugggccugaucauggcgaugggccucuggaugugccccaacggguccaugcagugccggaucugcaucuga

SEQ ID NO: 75120 - RNA, 1701 nt, Artificial Sequence
  derived and/or modified CDS sequence (opt1) from hemagglutinin__InfluenzaA__AHJ57674
augaucgccuucaucgugaucgccauccuggucaccaccggcaagagcgacaagaucugcaucggguaccacgcgaacaacuccacgaccaagguggacaccauccucgagaagaacgugaccgucacgcacagcguggagcugcuggagaaccagaaggaggagcgcuucugcaagaucuccaacaaggcgccccucgaccugcgggacugcacccuggagggcuggauccucgggaacccgcgcugcggcauccugcuggccgaccagagcugguccuacaucguggagcggcccaacgcccgcaacgggaucugcuaccccggcacccucaacgaggucgaggagcugaaggcccugaucggcagcggggagcggguggagcgcuucgagauguuccccaaguccaccugggccggcguggacacgaacagcggggucuccagcgccugcccgcucggcgaggggcccuccuucuaccggaaccugcuguggaucaucaagcacaccaccagcggcuaccccgugaucaagggcaccuaccgcaacacgggggacaaguccgugcucuacuucuggggcguccaccacccgcccgacaccaccgagcagaacgugcuguacgggagcggcaaccgguacgugcgcaugggcaccgaguccaugaacuucgcccggagccccgagaucgccgcgcgccccgccgucaacgggcagcggggccgcaucgacuacuucugguccauccugaagcccggggagacgcucaacguggagagcaacggcaaccugaucgccccgugguacgccuaccgguucgugaacaaggacuccaagggggccaucuuccgcagcaaccugcccaucgagaacugcgacgcgaccugccagaccaccgagggcgucauccggacgaacaagaccuuccagaacgugagcccccucuggaucggcgagugccccaaguacgugaaguccaagagccugcgccuggccaccgggcuccggaacgucccgcagaucgagacccgcggccuguucggggccaucgccggcuucaucgagggcggguggacgggcaugaucgacgggugguacggcuaccaccacgagaacucccaggggagcggcuacgccgcggaccgggaguccacccagaaggccaucgacgggaucaccaacaaggugaacagcaucaucgacaagaugaacacccaguucgaggccgugggccacgaguucuccaaccuggagcgccgcaucgacaaccucaacaagcggauggaggacggcuuccuggacgucuggacguacaacgccgagcugcucgugcugcuggagaacgagcgcacccucgaccugcacgacgccaacgucaagaaccugcacgagcgggugcgcagccagcuccgggacaacgcgaacgaccuggggaacggcugcuucgaguucuggcacaagugcgacaacgagugcauggaguccgugaagaacgggaccuacaacuaccccaaguaccaggccgagagccgccugaaccggcagaagaucgaguccgucaagcucgaggaguucggcguguaccagauccuggccaucuacagcaccguguccagcucccugguccucgugggccugaucauggccauggggcuguggaugugcagcaacggcuccaugcagugccgcaucugcaucuga

SEQ ID NO: 75121 - RNA, 1701 nt, Artificial Sequence
  derived and/or modified CDS sequence (opt1) from hemagglutinin__InfluenzaA__AHJ57686
augaucgccuucaucgugaucgccauccuggcggccaccggcaagagcgacaagaucugcaucggguaccacgccaacaacuccaccacgaaggucgacaccauccucgagaagaacgugaccgugacccacagcgucgagcugcuggagaaccagaaggagggccgcuucugcaagaucuccaacaaggcgccccucgaccugcgggacugcacgcuggagggguggauccucggcaacccgcgcugcgggauccugcuggccgaccagagcugguccuacaucguggagcggcccaacgcccgcaacggcaucugcuaccccggcauccucaacgaggccgaggagcugaaggcccugaucgggagcggcgagcggguggagcgcuucgagauguuccccaaguccaccugggccggggucgacaccaacagcggcguguccagcgcgugcccgcucgggaacggccccuccuucuaccggaaccugcuguggaucaucaagcucaagagcuccgccuaccccgugauccgcggcaccuucaacaacacgggggacaagagcauccuguacuucuggggcguccaccacccgcccguggccaccgagcaggaggcccuguacggguccggcaaccgguacgugcgcaugggcaccgagagcaugaacuucgcccggaaccccgagaucgcggcccgccccgccgucaacgggcagcggggccgcaucgacuacuucugguccauccucaagcccggggagacccugaacguggagagcaacggcaaccugaucgccccgugguacgccuaccgguucgugaacaaggacuccaagggggcgaucuuccgcagcaaccuccccaucgagaacugcgaggccacgugccagaccaccgagggcgucauccggaccaacaagacguuccagaacgugagcccccuguggaucggcgagugccccaaguacgugaaguccaagagccugcgccucgccaccgggcugcggaacgucccgcagaucgagacccgcggccuguucggggccaucgccggcuucaucgagggcggguggaccggcaugaucgacgggugguacggcuaccaccacgagaacucccaggggagcggcuacgcggccgaccgggaguccacgcagaaggccaucgacgggaucaccaacaaggugaacagcaucaucgacaagaugaacacccaguucgaggccgugggccacgaguucuccaaccucgagcgccgcaucgacaaccugaacaagcggauggaggacggcuuccuggacgucuggaccuacaacgccgagcuccuggugcugcucgagaacgagcgcacgcuggaccugcacgacgcgaacgugaagaaccuccacgagaagguccggagccagcugcgcgacaacgccaacgaccuggggaacggcugcuucgaguucuggcacaagugcgacaacgagugcauggaguccgugaagaacgggaccuacgacuaccccaaguaccaggccgagagccggcucaaccgccagaagaucgaguccgucaagcuggagaacuucgacguguaccagauccuggccaucuacagcaccguguccagcucccucguccuggugggccugaucauggcgaugggccucuggaugugcagcaacggguccaugcagugccggaucugcaucuga

SEQ ID NO: 75122 - RNA, 1701 nt, Artificial Sequence
  derived and/or modified CDS sequence (opt1) from hemagglutinin__InfluenzaA__AHJ57697
augaucgccuucaucgugaucgccauccuggcggccaccggcaagagcgacaagaucugcaucggguaccacgccaacaacuccaccacgaaggucgacaccauccucgagaagaacgugaccgugacccacagcgucgagcugcuggagaaccagaaggaggagcgcuucugcaagaucuccaacaaggcgccccucgaccugcgggacugcacgcuggagggcuggauccucgggaacccgcgcugcggcauccugcuggccgaccagagcugguccuacaucguggagcggcccaacgcccgcaacgggaucugcuaccccggcacccucaacgagguggaggagcugaaggcccugaucggcagcggggagcgggucgagcgcuucgagauguuccccaaguccaccugggccggcguggacaccaacagcgggguguccagcgccugcccgcucggcaacgggcccuccuucuaccggaaccugcuguggaucaucaagcucaagagcuccgaguaccccgucauccgcggcacguucaacaacaccggcgacaagagcauccuguacuucuggggcgugcaccacccgcccgugaccaccgagcaggaggcgcuguacggguccggggaccgguacguccgcaugggcacggagagcaugaacuucgcccggucccccgagaucgccgcccgccccgccgugaacggccagcgggggcgcaucgacuacuucuggagcauccucaagcccggcgagacccugaacguggaguccaacgggaaccugaucgcgccgugguacgccuaccgguucgucaacaaggacagcaagggcgccaucuuccgcagcaaccuccccaucgagaacugcgacgcgaccugccagaccacggagggggugauccggaccaacaagaccuuccagaacgugagcccccuguggaucggcgagugccccaaguacgucaaguccaagucccugcgccucgccaccggccugcggaacgugccgcagaucgagacgcgcgggcuguucggcgccaucgccggguucaucgagggcggguggaccggcaugaucgacggcugguacggguaccaccacgagaacagccagggcuccggguacgccgccgaccgggagagcacccagaaggccaucgacggcaucaccaacaaggugaacuccaucaucgacaagaugaacacgcaguucgaggcggucgggcacgaguucagcaaccucgagcgccgcaucgacaaccugaacaagcggauggaggacggcuuccuggacguguggaccuacaacgccgagcuccuggugcugcucgagaacgagcgcacccuggaccugcacgacgccaacgucaagaaccuccacgagaaggugaagucccagcugcgggacaacgccaacgaccugggcaacgggugcuucgaguucuggcacaagugcgacaacgagugcauggagagcgucaagaacggcaccuacgacuaccccaaguaccaggccgagucccgccucaaccggcagaagaucgagagcgugaagcuggagaacuucgacguguaccagauccuggcgaucuacuccacggucagcuccagccucgugcugguggggcugaucauggccaugggccucuggaugugcuccaacggcagcaugcagugccgcaucugcaucuga

SEQ ID NO: 75123 - RNA, 1701 nt, Artificial Sequence
  derived and/or modified CDS sequence (opt1) from hemagglutinin__InfluenzaA__AHJ57707
augaucgccuucaucgugaucgccauccuggucaccaccggcaagagcgacaagaucugcgugggguaccacgcgaacaacuccacgaccaagguggacaccauccucgagaagaacgucaccgugacgcacagcguggagcugcuggagaaccagaaggaggagcgcuucugcaagaucuccaacaaggcgccccucgaccugcgggacugcacccuggagggcuggauccucgggaacccgcgcugcggcauccugcuggccgaccagagcugguccuacaucgucgagcggcccaacgcccgcaacgggaucugcuaccccggcacccucaacgagguggaggagcugaaggcccugaucggcagcggggagcggguggagcgcuucgagauguuccccaaguccaccuggacgggcgucgacaccaacagcgggguguccagcgccugcccgcucggcgaggggcccuccuucuaccggaaccugcuguggaucaucaagcacaccaccagcggcuaccccgugaucaagggcacguaccgcaacaccggggacaaguccguccucuacuucuggggcgugcaccacccgcccgacaccaccgagcagaacgugcuguacgggagcggcaaccgguacguccgcaugggcacggaguccaugaacuucgcccggagccccgagaucgccgcccgccccgcggugaacgggcagcggggccgcaucgacuacuucugguccauccugaagcccggggagacccucaacguggagagcaacggcaaccugaucgccccgugguacgccuaccgguucgucaacaaggacuccaagggggccaucuuccgcagcaaccugcccaucgagaacugcgacgcgaccugccagaccacggagggcgugauccggaccaacaagaccuuccagaacgugagcccccucuggaucggcgagugccccaaguacgucaaguccaagagccugcgccuggccaccgggcuccggaacgugccgcagaucgagacgcgcggccuguucggggccaucgccggcuucaucgagggcggguggaccggcaugaucgacgggugguacggcuaccaccacgagaacucccaggggagcggcuacgccgccgaccgggaguccacccagaaggcgaucgacgggaucaccaacaaggugaacagcaucaucgacaagaugaacacgcaguucgaggccgucggccacgaguucuccaaccuggagcgccgcaucgacaaccucaacaagcggauggaggacggcuuccuggacguguggaccuacaacgccgagcugcucguccugcuggagaacgagcgcacccucgaccugcacgacgccaacgugaagaaccugcacgagcgggugcgcagccagcuccgggacaacgccaacgaccuggggaacggcugcuucgaguucuggcacaagugcgacaacgagugcauggaguccgucaagaacgggaccuacaacuaccccaaguaccaggcggagagccgccugaacaagcagaagaucgaguccgugaagcucgaggaguucggcguguaccagauccuggccaucuacagcacggucuccagcucccuggugcucgugggccugaucauggccauggggcuguggaugugcagcaacggcuccaugcagugccggaucugcaucuga

SEQ ID NO: 75124 - RNA, 1701 nt, Artificial Sequence
  derived and/or modified CDS sequence (opt1) from hemagglutinin__InfluenzaA__AHJ57719
augaucgccuucaucgugaucgccauccuggcggccaccggcaagagcgacaagaucugcaucggguaccacgccaacaacuccaccacgaaggucgacaccauccucgagaagaacgugaccgugacccacagcgucgagcugcuggagaaccagaaggaggagcgcuucugcaagaucuccaacaaggcgccccucgaccugcgggacugcacgcuggagggcuggauccucgggaacccgcgcugcggcauccugcugagcgaccaguccuggagcuacaucguggagcggcccaacgcccgcaacgggaucugcuaccccggcauccucaacgaggccgaggagcugaaggcccugaucggcuccggggagcggguggagcgcuucgagauguuccccaagagcaccugggccggcgucgacaccaacuccggggugagcuccgccugcccgcucggcaacgggcccagcuucuuccggaaccugcuguggaucaucaagcucaaguccagcaccuaccccgugauccgcggcacguucaacaacaccggcgacaaguccauccuguacuucuggggcguccaccaccccagcgugaccaccgagcaggaggcgcuguacggguccgggaaccgguacgugcgcaugggcacggagagcaugaacuucgcccgguccccggagaucgccgcccgccccgccgucaacggccagcgggggcgcaucgacuacuucuggagcauccucaagcccggcgagacccugaacguggagagcaacgggaaccugaucgcgcccugguacgccuaccgguucgugaacaaggacuccaagggcgccaucuuccgcagcaaccucccgaucgagaacugcgacgcgaccugccagaccaucgagggggucauccggacgaacaagaccuuccagaacgugagcccccuguggaucggcgagugccccaaguacgugaaguccaagucccugcgccucgccaccggccugcggaacgucccccagaucgagacccgcgggcuguucggcgccaucgccggguucaucgagggcggguggacgggcaugaucgacggcugguacggguaccaccacgagaacagccagggcuccggguacgccgacgacaaggagagcacccagaaggccaucgacggcaucaccaacaaggugaacuccaucaucgacaagaugaacacccaguucgaggccguggggcacgaguucagcaaccucgagcggcgcaucgacaaccugaacaagcgcauggaggacggcuuccuggacgucuggacguacaacgcggagcuccuggugcugcucgagaacgagcggacccuggaccugcacgacgccaacgugaagaaccuccacgagaagguccgcucccagcugcgggacaacgccaacgaccugggcaacgggugcuucgaguucuggcacaagugcgacaacgagugcauggagagcgugaagaacggcaccuacgacuacccgaaguaccaggccgagucccgccucaaccggcagaagaucgagagcgucaagcuggagaacuucgacguguaccagauccuggccaucuacuccaccgugagcuccagccucguccugguggggcugaucauggcgaugggccucuggaugugcuccaacggcagcaugcagugccgcaucugcaucuga

SEQ ID NO: 75125 - RNA, 1701 nt, Artificial Sequence
  derived and/or modified CDS sequence (opt1) from hemagglutinin__InfluenzaA__AHJ57731
augaucgccuucaucgugaucgccauccuggcggccaccggcaagagcgacaagaucugcaucggguaccacgccaacaacuccaccacgaaggucgacaccauccucgagaagaacgugaccgugacccacagcgucgagcugcuggagaaccagaaggaggagcgcuucugcaagaucuccaacaaggcgccccucgaccugcgggacugcacgcuggagggcuggauccucgggaacccgcgcugcggcauccugcuggccgaccagagcugguccuacaucguggagcggcccaacgcccgcaacgggaucugcuaccccggcauccucaacgaggccgaggagcugaaggcccugaucggcagcggggagcggguggagcgcuucgagauguuccccaaguccaccugggccggcgucgacaccgacagcgggguguccagcgcgugcccgcucggcaacgggcccuccuucuaccggaaccugcuguggaucaucaagcucaagagcuccgaguaccccgugauccgcggcaccuucaacaacacgggcgacaagagcauccuguacuucuggggcguccaccacccgcccgugaccaccgagcaggaggcccuguacggguccgggaaccgguacgugcgcaugggcaccgagagcaugaacuucgcccggucccccgagaucgccgcccgccccgcggucaacggccagcgggggcgcaucgacuacuucuggagcauccucaagcccggcgagacgcugaacguggaguccaacgggaaccugaucgccccgugguacgccuaccgguucgugaacaaggacagcaagggcgccaucuuccgcagcaaccuccccaucgagaacugcgacgcgaccugccagaccaccgagggggucauccggacgaacaagaccuuccagaacgugagcccccuguggaucggcgagugccccaaguacgugaaguccaagucccugcgccucgccaccggccugcggaacgucccgcagaucgagacccgcgggcuguucggcgccaucgccggguucaucgagggcggguggacgggcaugaucgacggcugguacggguaccaccacgagaacagccagggcuccggguacgccgccgaccgggagagcacccagaaggcgaucgacggcaucaccaacaaggugaacuccaucaucgacaagaugaacacccaguucgaggccguggggcacgaguucagcaaccucgagcgccgcaucgacaaccugaacaagcggauggaggacggcuuccuggacgucuggacguacaacgccgagcuccuggugcugcucgagaacgagcgcacccuggaccugcacgacgccaacgugaagaaccuccacgagaagguccggucccagcugcgcgacaacgccaacgaccugggcaacgggugcuucgaguucuggcacaagugcgacaacgagugcauggagagcgugaagaacggcaccuacgacuaccccaaguaccagaccgagucccggcucaaccgccagaagaucgagagcgucaagcuggagaacuucgacguguaccagauccuggcgaucuacuccacggugagcuccagccucguccugguggggcugaucauggccaugggccucuggaugugcuccaacggcagcaugcagugccggaucugcaucuga

SEQ ID NO: 75126 - RNA, 1701 nt, Artificial Sequence
  derived and/or modified CDS sequence (opt1) from hemagglutinin__InfluenzaA__AHJ57743
augaucgccuucaucgugaucgccauccuggucgcgaccggcaagagcgacaagaucugcaucggguaccacgccaacaacuccaccacgaagguggacaccauccucgagaagaacgugaccgucacccacagcguggagcugcuggagaaccagaaggaggagcgcuucugcaagaucuccaacaaggcgccccucgaccugcgggacugcacgaucgagggcuggauccuggggaacccgcgcugcggcauccuccuggccgaccagagcugguccuacaucguggagcggcccgacgcccgcaacgggaucugcuaccccggcacccugaacgaggccgaggagcucaaggcccugaucggcagcggggagaaggucgagcgguucgagauguuccccaaguccaccugggccggcguggacaccagcuccggggugagcuccgccugcccgcugggcaacgggcccagcuucuaccgcaaccuccuguggaucaucaagcugaaguccagcgaguaccccgucauccggggcacguucaacaacaccggcgacaaguccgugcucuacuucuggggcgugcaccacccgcccgucaccaccgagcagaacgcgcuguacgggagcgggaaccgcuacgugcggaugggcacggaguccaugaacuucgcccgcagccccgagaucgccgcccggcccgccgugaacggccagcgcgggcggaucgacuacuucugguccauccugaagcccggcgagacccucaacgucgagagcaacgggaaccugaucgcgccgugguacgccuaccgcuucgugaacaaggacagcaagggcgccaucuuccgguccaaccugcccaucgagaacugcgacgcgaccugccagaccaucgagggggugauccgcacgaacaagaccuuccagaacgucagcccccucuggaucggcgagugccccaaguacgugaaguccaagagccugcggcuggccaccggccuccgcaacgugccgcagaucgagacccgggggcuguucggcgccaucgccggguucaucgagggcggguggacgggcaugaucgacggcugguacggguaccaccacgagaacucccagggcagcggguacgccgccgaccgcgaguccacccagaaggccaucgacggcaucaccaacaaggucaacagcaucaucgacaagaugaacacccaguucgaggcggccgggcacgaguucuccaaccuggagcggcgcaucgacaaccucaacaagcgcauggaggacggcuuccuggacguguggacguacaacgccgagcugcucgugcugcuggagaacgagcggacccucgaccugcacgacgccaacgucaagaaccugcacgagaaggucaagagccagcuccgcgacaacgccaacgaccugggcaacgggugcuucgaguucuggcacaagugcgacaacgagugcauggaguccgugaagaacggcaccuacgacuaccccaaguaccagaaggagagccggcugaaccgccagaagaucgaguccgugaagcucgagaacuucgacguguaccagauccuggcgaucuacagcaccgucuccagcucccuggugcucguggggcugaucauggccaugggccuguggaugugcagcaacggcuccaugcagugccggaucugcaucuga

SEQ ID NO: 75127 - RNA, 1701 nt, Artificial Sequence
  derived and/or modified CDS sequence (opt1) from hemagglutinin__InfluenzaA__AHJ57755
augaucgccuucaucgugaucgccauccuggucgcgaccggcaagagcgacaagaucugcaucggguaccacgccaacaacuccaccacgaagguggacaccauccucgagaagaacgugaccgucacccacagcguggagcugcuggagaaccagaaggaggagcgcuucugcaagaucuccaacaaggcgccccucgaccugcgggacugcacgaucgagggcuggauccuggggaacccgcgcugcgacauccuccuggccgaccagagcugguccuacaucguggagcggcccaacgcccgcaacggcaucugcuaccccgggacccugaacgaggccgaggagcucaaggcccugaucggcagcggcgagggggucgagcgguucgagauguuccccaaguccaccugggugggcguggacaccagcuccggggucagcuccgccugcccgcugggcaacgggcccagcuucuaccgcaaccuccuguggaucaucaagcugaaguccagcgaguaccccgugauccggggcacguucaacaacaccggcgacaaguccgugcucuacuucuggggcguccaccacccgcccgugaccaccgagcagaacgcccuguacgggagcgggaaccgcuacgugcggaugggcacggaguccaugaacuucgcgcgcagccccgagaucgccgcccggcccgccgucaacggccagcgcgggcggaucgacuacuucugguccauccugaagcccggcgagacccucaacguggagagcaacgggaaccugaucgccccgugguacgcguaccgcuucgugaacaaggacaacaagggcgccaucuuccggagcaaccugcccaucgagaacugcgacgcgaccugccagaccacggagggggucauccgcaccaacaagaccuuccagaacgugagcccccucuggaucggcgagugccccaaguacgugaaguccaagucccugcggcuggccaccggccuccgcaacgucccgcagaucgagacgcgggggcuguucggcgccaucgccggguucaucgagggcggguggaccggcaugaucgacggcugguacggguaccaccacgagaacagccagggcuccggguacgccgccgaccgcgagagcacccagaaggccaucgacggcaucaccaacaaggugaacuccaucaucgacaagaugaacacgcaguucgaggccgcggggcacgaguucagcaaccuggagcggcgcaucgacaaccucaacaagcgcauggaggacggcuuccuggacguguggaccuacaacgccgagcugcucguccugcuggagaacgagcggacccucgaccugcacgacgccaacgugaagaaccugcacgagaaggucaagucccagcuccgcgacaacgccaacgaccugggcaacgggugcuucgaguucuggcacaagugcgacaacgagugcauggagagcgugaagaacggcaccuacgacuaccccaaguaccagaaggagucccggcugaaccgccagaagaucgagagcgugaagcucgagaacuucgacgucuaccagauccuggccaucuacuccacggugagcuccagccugguggucguggggcucaucauggcgaugggccuguggaugugcuccaacggcagcaugcagugccggaucugcaucuga

SEQ ID NO: 75128 - RNA, 1701 nt, Artificial Sequence
  derived and/or modified CDS sequence (opt1) from hemagglutinin__InfluenzaA__AHJ57767
augaucgccuucaucgugaucgccauccuggcggccaccggcaagagcgacaagaucugcaucggguaccacgccaacaacuccaccacgaaggucgacaccauccucgagaagaacgugaccgugacccacagcgucgagcugcuggagaaccagaaggaggagcgcuucugcaagaucuccaacaaggcgccccucgaccugcgggacugcacgcuggagggcuggauccucgggaacccgcgcugcggcauccugcuggccgaccagagcugguccuacaucguggagcggcccaacgcccgcaacgggaucugcuaccccggcacccucaacgagguggaggagcugaaggcccugaucggcagcggggagcgggucgagcgcuucgagauguuccccaaguccaccugggccggcguggacaccaacagcgggguguccagcgccugcccgcucggcaacgggcccuccuucuaccggaaccugcuguggaucaucaagcucaagagcuccgaguaccccgucauccgcggcacguucaacaacaccggcgacaagagcauccuguacuucuggggcgugcaccacccgcccgugaccaccgagcaggaggcgcuguacggguccggggaccgguacguccgcaugggcacggagagcaugaacuucgcccggucccccgagaucgccgcccgccccgccgugaacggccagcgggggcgcaucgacuacuucuggagcauccucaagcccggcgagacccugaacguggaguccaacgggaaccugaucgcgccgugguacgccuaccgguucgucaacaaggacagcaagggcgccaucuuccgcagcaaccuccccaucgagaacugcgacgcgaccugccagaccacggagggggugauccggaccaacaagaccuuccagaacgugagcccccuguggaucggcgagugccccaaguacgucaaguccaagucccugcgccucgccaccggccugcggaacgugccgcagaucgagacgcgcgggcuguucggcgccaucgccggguucaucgagggcggguggaccggcaugaucgacggcugguacggguaccaccacgagagcucccagggcagcggguacgccgccgacaaggaguccacccagaaggccaucgacggcaucaccaacaaggugaacagcaucaucgacaagaugaacacgcaguucgaggcggucgggcacgaguucuccaaccucgagcggcgcaucgacaaccugaacaagcgcauggaggacggcuuccuggacguguggaccuacaacgccgagcuccuggugcugcucgagaacgagcggacccuggaccugcacgacgccaacgucaagaaccuccacgagaaggugcgcagccagcugcgggacaacgccaacgaccugggcaacgggugcuucgaguucuggcacaagugcaacaacgagugcauggaguccgucaagaacggcaccuacgacuaccccaaguaccagaaggagagccgccucaaccggcagaagaucgaguccgugaagcuggagaacuucgacguguaccagauccuggccaucuacagcacggucuccagcucccucgugcugguggggcugauccucgcgaugggccuguggaugugcagcaacggcuccaugcagugccgcaucugcaucuga

SEQ ID NO: 75129 - RNA, 1701 nt, Artificial Sequence
  derived and/or modified CDS sequence (opt1) from hemagglutinin__InfluenzaA__AHJ57779
augaucgccaucaucaucaucgccauccugguggcgaccggcaagagcgacaagaucugcaucggguaccacgccaacaacuccaccacgaaggucgacaccauccucgagaagaacgugaccgugacccacagcgucgagcugcuggaggaccagaaggaggagcgcuucugcaagaucuccaacaaggcgccccucgaccugcgggacugcacgaucgagggcuggauccuggggaacccgcgcugcggcauccuccuggccgaccagagcugguccuacaucguggagcggcccaacgcccgcaacgggaucugcuaccccggcacccugaacgaggccgaggagcucaaggcccugaucggcagcggggagggcguggagcgguucgagauguuccccaaguccaccugggccggggucgacaccaacagcggcguguccagcgccugcccgcuggggaacggccccuccuucuaccgcaaccuccuguggaucaucaagcugaaguccuccgaguaccccgugauccggggcacguucaacaacaccggggacaagagcguccucuacuucuggggcgugcaccacccgcccgugaccaccgagcagaacgcgcuguacggguccggcaaccgcuacguccggaugggcacggagagcaugaacuucgcccgcucccccgagaucgccgcccggcccgccgugaacgggcagcgcggccggaucgacuacuucuggagcauccugaagcccggggagacccucaacguggaguccaacggcaaccugaucgcgccgugguacgccuaccgcuucgucaacaaggacagcaagggggccaucuuccggagcaaccugcccaucgagaacugcgacgcgaccugccagaccacggagggcgugauccgcaccaacaagaccuuccagaacgugagcccccucuggaucggcgagugccccaaguacgucaagagcaagucccugcggcuggccaccgggcuccgcaacgugccgcagaucgagacgcggggccuguucggggccaucgccggcuucaucgagggcggguggaccggcaugaucgacgggugguacggcuaccaccacgagaacagccagggguccggcuacgccgccgaccgcgagagcacccagaaggccaucgacgggaucaccaacaaggugaacuccaucaucgacaagaugaacacgcaguucgaggcggccggccacgaguucagcaaccuggagcggcgcaucgacaaccucaacaagcgcauggaggacggcuuccuggacgucuggaccuacaacgccgagcugcucgugcugcuggagaacgagcggacccucgaccugcacgacgccaacgugaagaaccugcacgagaaggucaagucccagcuccgcgacaacgccaacgaccuggggaacggcugcuucgaguucuggcacaagugcgacaacgagugcauggagagcgugaagaacgggaccuacgacuaccccaaguaccagaaggagucccggcugaaccgccagaagaucgagagcgucaagcucgagaacuucgacguguaccagauccuggcgaucuacuccacggugagcuccagccugguccucgugggccugaucauggccaugggccuguggaugugcuccaacgggagcaugcagugcaugaucugcaucuga

SEQ ID NO: 75130 - RNA, 1701 nt, Artificial Sequence
  derived and/or modified CDS sequence (opt1) from hemagglutinin__InfluenzaA__AHJ57791
augaucgccaucaucaucaucgccauccuggugaccaccggcaagagcgacaagaucugcaucggguaccacgcgaacaacuccacgaccaaggucgacaccauccucgagaagaacgugaccgugacgcacagcgucgagcugcuggagaacaagaaggaggagcgcuucugcaagaucuccaacaaggcgccccucgaccugcgggacugcacccuggagggcuggauccucgggaacccgcgcugcggcauccugcuggccgaccagagcugguccuacaucguggagcggcccaacgcccgcaacgggaucugcuaccccggcacccucaacgaggugaaggagcugaaggcccugaucggcagcggggagcgggucaagcgcuucgagauguuccccaaguccaccugggccggcguggacacgaacagcgggguguccagcuccugcccgcucggcaacgggcccagcuucuaccggaaccugcuguggaucaucaagcacaccaccuccggcuaccccgucaucaagggcaccuacacgaacaccggggacaagagcgugcucuacuucuggggcauccaccacccgcccgacaccaccgagcagaacgugcuguacggguccggcaaccgcuacguccggaugggcacggagagcaugaacuucgcccgcucccccgagaucgccgcccggcccgcggugaacgggcagcgcggccggaucgacuacuucuggagcauccugaagcccggggagacccucaacguggaguccaacggcaaccugaucgccccgugguacgccuaccgcuucgucaacaaggacagcaagggggccaucuuccggagcaaccugcccaucgaggacugcgacgcgaccugccagaccacggagggcgugauccgcaccaacaagaccuuccagaacgugagcccccucuggaucggcgagugccccaaguacgucaaguccaagucccugcggcuggccaccgggcuccgcaacgugccgcagaucgagacgcggggccuguucggggccaucgccggcuucaucgagggcggguggaccggcaugaucgacgggugguacggcuaccaccacgagaacagccagggguccggcuacgccgccgaccgcgagagcacccagaaggcgaucgacgggaucaccaacaaggugaacuccaucaucgacaagaugaacacgcaguucgaggccgucggccacgaguucagcaaccuggagcggcgcaucgacacccucaacaagcgcauggaggacggcuuccuggacguguggaccuacaacgccgagcugcucgugcugcuggagaacgagcggacccucgaccugcacgacgccaacgucaagaaccugcacgagcgcgugaagucccagcuccgggacaacgccaacgaccuggggaacggcugcuucgaguucuggcacaagugcgacaacgagugcauggagagcgucaagaacgggacguacaacuaccccaaguaccaggcggagucccgccugaacaagcagaagaucgagagcgugaagcucgaggaguucggcguguaccagauccuggccaucuacuccaccgucagcuccagccuggugcucgugggccugaucauggccaugguccuguggaugugcuccaacgggagcaugcagugccgggugugcaucuga

SEQ ID NO: 75131 - RNA, 1701 nt, Artificial Sequence
  derived and/or modified CDS sequence (opt1) from hemagglutinin__InfluenzaA__AHJ57815
augaucgccuucaucaucaucaccauccuggugaccacgggcaagagcgacaagaucugcaucggguaccacgccaacaacuccaccaccaaggucgacaccauccucgagaagaacgugacggugacccacagcgucgagcugcuggagaaccagaaggaggagcgcuucugccggaucuccaacaaggcgccccucgaccugaaggagugcacccuggagggcuggauccucgggaacccgcagugcgaccugcugcucggcgaccagagcugguccuacaucguggagcgccccaacgcccggaacgggaucugcuaccccggcacccugaacgagguggaggagcugcgcgcccucaucggcagcggggagggcgucgagcgguucgagauguuccccaaguccacgugggccgggguggacaccaaccgcggcgugaccagcuccugcccguucgggagcggcuccagcuucuaccggaaccugcuguggaucgucaagcacaccacguccagcuaccccgugaucaagggcaccuuccgcaacaccggggacaaguccgugcucuacuucuggggcguccaccaccccuucgacaccaacgagcagaacgugcuguacgggagcggcaaccgguacgugcgcaugggcacggaguccaugaacuucgcccgggggcccgaggucgcggcccgcccgguggugaacggccagcgggggcgcaucgacuacuucuggagcauccugaagcccggcgagacccucaacaucgaguccaacgggaaccugaucgcccccugguacgccuaccgguucgucaacaaggacagcaagggcgcgaucuuccgcagcaaccugcccaucgaggacugcgacgcgaccugccagaccaucgagggcgugauccggacgaacaagaccuuccagaacguguccccgcucuggaucggggagugccccaaguacgucaagagcgagucccugcgccuggccaccggccuccggaacgugccccagaucgagacccgcgggcuguucggcgccaucgccggguucaucgagggcggcuggacggggaugaucgacggcugguacggguaccaccacgagaacagccagggcuccggguacgccgccgaccgggagagcacccagaaggccaucgacggcaucaccaccaaggugaacuccaucaucgacaagaugaacacgcaguucgaggccgucggccacgaguucagcaaccuggagcgccgcaucgacaaccucaacaagcggcuggaggacggguuccuggacguguggaccuacaacgccgagcuccugguccugcucgagaacgagcgcacccuggaccugcacgacgcgaacgugaagaaccuccacgagcgggugcgcucccagcugcgggacaacgccaacgaccugggcaacgggugcuucgaguucuggcacaagugcgacaacgagugcauggagagcgucaagaacggcaccuacaacuaccccaaguaccaggccgagucccgccucaacaagcagcggaucgagagcgugaagcuggagaacuucgacguguaccagauccuggccaucuacuccacggucagcuccagccucgugcuggugggccugauccucgccauggggcuguggaugugcuccaacggcagcaugcagugccgcaucugcaucuga

SEQ ID NO: 75132 - RNA, 1701 nt, Artificial Sequence
  derived and/or modified CDS sequence (opt1) from hemagglutinin__InfluenzaA__AHJ57827
augaucgccuucaucgugaucgccauccuggucgcgaccggcaagagcgacaagaucugcaucggguaccacgccaacaacuccaccacgaagguggacaccauccucgagaagaacgugaccgucacccacagcguggagcugcuggagaaccagaaggaggagcgcuucugcaagaucuccaacaaggcgccccucgaccugcgggacugcacgaucgagggcuggauccuggggaacccgcgcugcggcauccuccuggccgaccagagcugguccuacaucguggagcggcccaacgcccgcaacgggaucugcuaccccggcacccugaacgaggucgaggagcucaaggcccugaucggcagcggggagcggguggagcgcuucgagauguuccccaaguccaccugggccggcguggacaccaacagcggggucuccagcgccugcccgcugggcaacgggcccuccuucuaccggaaccuccuguggaucaucaagaccaagagcuccgaguaccccgugaucaagggcaccuucaacaacaccggcgacaagagcgugcuguacuucuggggcguccaccacccgcccucccgcaacgagcagaacgugcucuacgggagcggggaccgguacgugcgcaugggcaccgaguccaugaacuucgcccggagccccgagaucgcggcccgccccgccgucaacggccagcgggggcgcaucgacuacuucugguccauccugaagcccggcgagacgcugaacguggagagcaacgggaaccucaucgccccgugguacgccuaccgguucgugaacaaggacagccgcggcgcgaucuuccgguccaaccugcccaucgagaacugcgacgccacgugccagaccgccgagggggucauccgcaccaacaagacguuccagaacgugagcccccuguggaucggcgagugccccaaguacgugaaguccaagagccuccggcuggccaccggccugcgcaacgucccgcagaucgagacccggggccucuucggggccaucgcgggguucaucgagggcggguggaccggcaugaucgacggcugguacggguaccaccacgagaacucccagggcagcggguacgccgccgaccgcgaguccacgcagaaggccaucgacggcaucaccaacaaggugaacagcaucaucgacaagaugaacacccaguucgaggccguggggcacgaguucuccaaccuggagcgccggaucgacaaccugaacaagcgcauggaggacggcuuccucgacgucuggaccuacaacgcggagcugcuggugcuccuggagaacgagcggacgcuggaccuccacgacgccaacgucaagaaccugcacgagcgcgucaagagccagcugcgggacaacgccaacgaccucggcaacgggugcuucgaguucuggcacaagugcgacaacgagugcauggaguccgugaagaacggcaccuacgacuaccccaaguaccagaaggagagccgccugaaccggcagaagaucgaguccgugaagcuggagaacuucgacguguaccagauccucgccaucuacagcaccguguccagcucccugguccugguggggcucaucauggccaugggccuguggaugugcagcaacggcuccaugcagugccgcaucugcaucuga

SEQ ID NO: 75133 - RNA, 1701 nt, Artificial Sequence
  derived and/or modified CDS sequence (opt1) from hemagglutinin__InfluenzaA__AHJ57850
augaucgccuucaucgugaucgccauccuggcgaccaccggcaagagcgacaagaucugcaucggguaccacgccaacaacuccacgaccaaggucgacaccauccucgagaagaacgugaccgugacgcacagcgucgagcugcuggagaaccagaaggaggagcgcuucugcaagaucuccaacaaggcgccccucgaccugcgggacugcacccuggagggcuggauccucgggaacccgcgcugcggcauccugcuggccgaccagagcugguccuacaucguggagcggcccaacgcccgcaacgggaucugcuaccccggcauccucaacgaggccgaggagcugaaggcccugaucggcagcggggagcggguggagcgcuucgagauguuccccaaguccaccugggccggcgucgacaccgacagcgggguguccagcgccugcccgcucggcaacgggcccuccuucuaccggaaccugcuguggaucaucaagcucaagagcuccgaguaccccgugauccgcggcacguucaacaacaccggcgacaagagcauccuguacuucuggggcguccaccacccgcccgugaccaccgagcaggaggcgcuguacggguccgggaaccgguacgugcgcaugggcacggagagcaugaacuucgcccggacccccgagaucgccgcccgccccgccgucaacggccagcgggggcgcaucgacuacuucugguccauccucaagcccggcgagacccugaacguggagagcaacgggaaccugaucgcgccgugguacgccuaccgguucgugaacaaggacuccaagggcgccaucuuccgcagcaaccuccccaucgagaacugcgacgcgaccugccagacgaccgagggggucauccggaccaacaagaccuuccagaacgugagcccccuguggaucggcgagugccccaaguacgugaaguccaagagccugcgccucgccacgggccugcggaacgucccgcagaucgagacccgcgggcuguucggcgccaucgccggguucaucgagggcggguggaccggcaugaucgacggcugguacggguaccaccacgagaacucccagggcagcggguacgccgccgaccgggaguccacccagaaggccaucgacggcaucacgaacaaggugaacagcaucaucgacaagaugaacacccaguucgaggcgguggggcacgaguucuccaaccucgagcgccgcaucgacaaccugaacaagcggauggaggacggcuuccuggacgucuggaccuacaacgccgagcuccuggugcugcucgagaacgagcgcacccuggaccugcacgacgccaacgugaagaaccuccacgagaagguccggagccagcugcgcgacaacgccaacgaccugggcaacgggugcuucgaguucuggcacaagugcgacaacgagugcauggaguccgugaagaacggcacguacgacuaccccaaguaccaggccgagagccggcucaaccgccagaagaucgaguccgucaagcuggagaacuucgacguguaccagauccuggcgaucuacagcaccguguccagcucccucguccugguggggcugaucauggccaugggccucuggaugugcagcaacggcuccaugcagugccggaucugcaucuga

SEQ ID NO: 75134 - RNA, 1701 nt, Artificial Sequence
  derived and/or modified CDS sequence (opt1) from hemagglutinin__InfluenzaA__AHJ57862
augaucgccuucaucgugaucgccauccuggcggccaccggcaagagcgacaagaucugcaucggguaccacgccaacaacuccaccacgaaggucgacaccauccucgagaagaacgugaccgugacccacagcgucgagcugcuggagaaccagaaggaggagcgcuucugcaagaucuccaacaaggcgccccucgaccugcgggacugcacgcuggagggcuggauccucgggaacccgcgcugcggcauccugcuggccgaccagagcugguccuacaucguggagcggcccaacgcccgcaacgggaucugcuaccccggcauccucaacgaggccgaggagcugaaggcccugaucggcagcggggagcggguggagcgcuucgagauguuccccaaguccaccugggccggcgucgacaccaacagcgggguguccagcgcgugcccgcucggcaacgggcccuccuucuaccggaaccugcuguggaucaucaagcucaagagcuccgaguaccccgugauccgcggcaccuucaacaacacgggcgacaagagcauccuguacuucuggggcguccaccacccgcccgugaccaccgagcaggaggcccuguacggguccgggaaccgguacgugcgcaugggcaccgagagcaugaacuucgcccggucccccgagaucgccgcccgccccgcggucaacggccagcgggggcgcaucgacuacuucuggagcauccucaagcccggcgagacgcugaacguggaguccaacgggaaccugaucgccccgugguacgccuaccgguucgugaacaaggacagcaagggcgccaucuuccgcagcaaccuccccaucgagaacugcgacgcgaccugccagaccaccgagggggucauccggacgaacaagaccuuccagaacgugagcccccuguggaucggcgagugccccaaguacgugaaguccaagucccugcgccucgccaccggccugcggaacgucccgcagaucgagacccgcgggcuguucggcgccaucgccggguucaucgagggcggguggacgggcaugaucgacggcugguacggguaccaccacgagaacagccagggcuccggguacgccgccgaccgggagagcacccagaaggcgaucgacggcaucaccaacaaggugaacuccaucaucgacaagaugaacacccaguucgaggccguggggcacgaguucagcaaccucgagcgccgcaucgacaaccugaacaagcggauggaggacggcuuccuggacgucuggacguacaacgccgagcuccuggugcugcucgagaacgagcgcacccuggaccugcacgacgccaacgugaagaaccuccacgagaagguccggucccagcugcgcgacaacgccaacgaccugggcaacgggugcuucgaguucuggcacaagugcgacaacgagugcauggagagcgugaagaacggcaccuacgacuaccccaaguaccaggcggagucccggcucaaccgccagaagaucgagagcgucaagcuggagaacuucgacguguaccagauccuggccaucuacuccaccgugagcuccagccucguccugguggggcugaucauggccaugggccucuggaugugcuccaacggcagcaugcagugccggaucugcaucuga

SEQ ID NO: 75135 - RNA, 1701 nt, Artificial Sequence
  derived and/or modified CDS sequence (opt1) from hemagglutinin__InfluenzaA__AHJ57873
augaucgccuucaucgugaucgccacccuggucgcgaccggcaagagcgacaagaucugcaugggguaccacgccaacaacuccacgaccaagguggacaccauccucgagaagaacgugaccgucacgcacagcguggagcugcuggagaaccagaaggaggagcgcuucugcaagaucuccaacaaggcgccccucgaccugcgggacugcacccuggagggcuggauccucgggaacccgcgcugcggcauccugcuggccgaccagagcugguccuacaucguggagcggcccaacgcccgcaacgggaucugcuaccccggcacccucaacgaggccgaggagcugaaggcccugaucggcagcggggagcgggucgagcgcuucgagauguuccccaaguccaccuggacgggcguggacaccgagagcgggguguccagcgccugcccgcucggcaacgggcccuccuucuaccggaaccugcuguggaucaucaagcucaagagcuccgaguaccccgucauccgcggcaccuucaacaacaccggcgacaagagcauccuguacuucuggggcgugcaccacccgcccgugacgaccgagcagaacgcccuguacggguccggggaccgguacguccgcaugggcaccgagagcaugaacuucgcgcggucccccgagaucgccgcccgccccgccgugaacggccagcgggggcgcaucgacuacuucuggagcauccucacccccggcgagacgcugaacguggaguccaacgggaaccugaucgccccgugguacgcguaccgguucgucaacaaggacagcaagggcgccaucuuccgcagcaaccuccccaucgagaacugcgacgcgaccugccagaccaccgagggggugauccggacgaacaagaccuuccagaacgugagcccccuguggaucggcgagugccccaaguacgucaaguccaagucccugcgccucgccaccggccugcggaacgugccgcagaucgagacccgcgggcuguucggcgccaucgccggguucaucgagggcggguggacgggcaugaucgacggcugguacggguaccaccacgagaacagccagggcuccggguacgccgccgacaaggagagcacccagaaggccaucgacggcaucaccaacaaggugaacuccaucaucgacaagaugaacacccaguucgaggccgucgggcacgaguucagcaaccucgagcggcgcaucgacaaccugaacaagcgcauggaggacggcuuccuggacguguggacguacaacgcggagcuccuggugcugcucgagaacgagcggacccuggaccugcacgacgccaacgucaagaaccuccacgagaaggugcgcucccagcugcgggacaacgccaacgaccugggcaacgggugcuucgaguucuggcacaagugcgacaacgagugcauggagagcgucaagaacggcaccuacgacuaccccaaguaccagaaggagucccgccucaaccggcagaagaucgagagcgugaagcuggagaacuucgacguguaccagauccuggccaucuacuccaccgucagcuccagccucgugcugguggggcugauccucgccaugggccuguggaugugcuccaacggcagcaugcacugccgcaucugcaucuga

SEQ ID NO: 75136 - RNA, 1701 nt, Artificial Sequence
  derived and/or modified CDS sequence (opt1) from hemagglutinin__InfluenzaA__AHJ57885
augaucgccuucaucgugauggccauccuggcggccaccggcaagagcgacaagaucugcaucggguaccacgccaacaacuccaccacgaaggucgacaccauccucgagaagaacgugaccgugacccacagcgucgagcugcuggagaaccagaaggaggagcgcuucugcaagaucuccaacaaggcgccccucgaccugcgggacugcacgcuggagggcuggauccucgggaacccgcgcugcggcauccugcuggccgaccagagcugguccuacaucguggagcggcccaacgcccgcaacgggaucugcuaccccggcauccucaacgaggccgaggagcugaaggcccugaucggcagcggggagcggguggagcgcuucgagauguuccccaaguccaccugggccggcgucgacaccgacagcgggguguccagcgcgugcccgcucggcaacgggcccuccuucuaccggaaccugcuguggaucaucaagcgcaagagcuccgccuaccccgugauccggggcaccuucaacaacacgggcgacaagagcauccucuacuucuggggcguccaccacccgcccgugaccaccgagcaggaggcccuguacggguccgggaaccgcuacgugcggaugggcaccgagagcaugaacuucgcccgcaaccccgagaucgccgcgcggcccgccgucaacggccagcgcgggcggaucgacuacuucugguccauccugaagcccggcgagacgcucaacaucgagagcaacgggaaccugaucgccccgugguacgccuaccgcuucgugaacaaggacuccaagggcgccaucuuccggagcaaccugcccaucgaggacugcgacgcgagcugccagaccaccgagggggugauccgcaccaacaagacguuccagaacgucagcccccucuggaucggcgagugccccaaguacgugaaguccaagucccugcggcuggccaccggccuccgcaacgugccgcagaucgagacccgggggcuguucggcgccaucgccggguucaucgagggcggguggaccggcaugaucgacggcugguacggguaccaccacgagaacagccagggcuccggguacgccgcggaccgcgagagcacgcagaaggccaucgacggcaucaccaacaaggucaacuccaucaucgacaagaugaacacccaguucgaggccguggggcacgaguucagcaaccuggagcgccggaucgacaaccucgacaagcgcauggaggacggcuuccuggacguguggaccuacaacgccgagcugcucguccugcuggagaacgagcggacgcucgaccugcacgacgccaacgugaagaaccugcacgagaaggugcgcucccagcuccgggacaacgcgaacgaccugggcaacgggugcuucgaguucuggcacaagugcgacaacgagugcauggagagcgucaagaacggcaccuacgacuaccccaaguaccaggccgagucccgccugaaccggcagaagaucgagagcgugaagcucgagaacuucgacgucuaccagauccuggccaucuacuccaccgugagcuccagccuggugcucgucgggcugaucauggccaugggccuguggaugugcuccaacggcagcaugcagugccgcaucugcaucuga

SEQ ID NO: 75137 - RNA, 1701 nt, Artificial Sequence
  derived and/or modified CDS sequence (opt1) from hemagglutinin__InfluenzaA__AHJ57897
augaucgccuucaucgugaucgccauccuggcggccaccggcaagagcgacaagaucugcaucggguaccacgccaacaacuccaccacgaaggucgacaccauccucgagaagaacgugaccgugacccacagcgucgagcugcuggagaaccagaaggaggagcgcuucugcaagaucuccaacaaggcgccccucgaccugcgggacugcacgcuggagggcuggauccucgggaacccgcgcugcggcauccugcuggccgaccagagcugguccuacaucguggagcggcccaacgcccgcaacgggaucugcuaccccggcauccucaacgaggccgaggagcugaaggcccugaucggcagcggggagcggguggagcgcuucgagauguuccccaaguccaccugggccggcgucgacaccgacagcgggguguccagcgcgugcccgcucggcaacgggcccuccuucuaccggaaccugcuguggaucaucaagcgcaagagcuccgccuaccccgugauccggggcaccuucaacaacacgggcgacaagagcauccucuacuucuggggcguccaccacccgcccgugaccaccgagcaggaggcccuguacggguccgggaaccgcuacgugcggaugggcaccgagagcaugaacuucgcccgcaaccccgagaucgccgcgcggcccgccgucaacggccagcgcgggcggaucgacuacuucugguccauccugaagcccggcgagacgcucaacaucgagagcaacgggaaccugaucgccccgugguacgccuaccgcuucgugaacaaggacuccaagggcgccaucuuccggagcaaccugcccaucgaggacugcgacgcgagcugccagaccaccgagggggugauccgcaccaacaagacguuccagaacgucagcccccucuggaucggcgagugccccaaguacgugaaguccaagucccugcggcuggccaccggccuccgcaacgugccgcagaucgagacccgggggcuguucggcgccaucgccggguucaucgagggcggguggaccggcaugaucgacggcugguacggguaccaccacgagaacagccagggcuccggguacgccgcggaccgcgagagcacgcagaaggccaucgacggcaucaccaacaaggucaacuccaucaucgacaagaugaacacccaguucgaggccguggggcacgaguucagcaaccuggagcgccggaucgacaaccucaacaagcgcauggaggacggcuuccuggacguguggaccuacaacgccgagcugcucguccugcuggagaacgagcggacgcucgaccugcacgacgccaacgugaagaaccugcacgagaaggugcgcucccagcuccgggacaacgcgaacgaccugggcaacgggugcuucgaguucuggcacaagugcgacaacgagugcauggagagcgucaagaacggcaccuacgacuaccccaaguaccaggccgagucccgccugaaccggcagaagaucgagagcgugaagcucgagaacuucgacgucuaccagauccuggccaucuacuccaccgugagcuccagccuggugcucgucgggcugaucauggccaugggccuguggaugugcuccaacggcagcaugcagugccgcaucugcaucuga

SEQ ID NO: 75138 - RNA, 1701 nt, Artificial Sequence
  derived and/or modified CDS sequence (opt1) from hemagglutinin__InfluenzaA__AHJ57908
augaucgccuucaucgugaucgccauccuggucgcgaccggcaagagcgacaagaucugcaucggguaccacgccaacaacuccaccacgaagguggacaccauccucgagaagaacgugaccgucacccacagcguggagcugcuggagaaccagaaggaggagcgcuucugcaagaucuccaacaaggcgccccucgaccugcgggacugcacgguggagggcuggauccuggggaacccgcgcugcggcauccucaucgccgaccagagcugguccuacaucgucgagcggcccaacgcccgcaacgggaucugcuaccccggcacccugaacgaggccgaggagcugaaggcccucaucggcagcggggagggcguggagcgguucgagauguuccccaaguccaccugggccgggguggacaccagcuccggcgucagcuccgccugcccgcuggggaacggccccagcuucuaccgcaaccugcucuggaucaucaagcugaaguccagcgaguaccccgugauccggggcacguucaacaacaccggggacaaguccgugcuguacuucuggggcguccaccacccgcccgugaccaccgagcaggacgcgcucuacgggagcggcaaccgcuacgugcggaugggcacggaguccaugaacuucgcccgcagccccgagaucgccgcccggcccgccgucaacgggcagcgcggccggaucgacuacuucugguccgugcugaagcccggggagacccugaacguggagagcaacggcaaccucaucgcgccgugguacgccuaccgcuucgucaacaaggacaacaagggggccaucuuccggagcaaccugcccaucgagaacugcgacgcgaccugccagaccacggagggcgugauccgcaccaacaagaccuuccagaacgugagcccccuguggaucggcgagugccccaaguacgucaaguccaagucccuccggcuggccaccgggcugcgcaacgugccgcagaucgagacgcggggccucuucggggccaucgccggcuucaucgagggcggguggaccggcaugaucgacgggugguacggcuaccaccacgagaacagccagggguccggcuacgccgccgaccgcgagagcacccagaaggccaucgacgggaucaccaacaaggugaacuccaucaucgacaagaugaacacgcaguucgaggcggccggccacgaguucagcaaccuggagcggcgcaucgacaaccugaacaagcgcauggaggacggcuuccucgacgucuggaccuacaacgccgagcugcuggugcuccuggagaacgagcggacccuggaccuccacgacgccaacgucaagaaccugcacgagaaggugaagucccagcugcgcgacaacgccaacgaccucgggaacggcugcuucgaguucuggcacaagugcgacaacgagugcauggagagcgugaagaacgggaccuacgacuaccccaaguaccagaaggagucccggcugaaccgccagcggaucgagagcgucaagcuggagaacuucgacguguaccagauccucgcgaucuacuccacggugagcuccagccuggucguggugggccugaucauggccaugggccucuggaugugcuccaacgggagcaugcagugcaugaucugcaucuga

SEQ ID NO: 75139 - RNA, 1701 nt, Artificial Sequence
  derived and/or modified CDS sequence (opt1) from hemagglutinin__InfluenzaA__AHJ57920
augaucgccaucaucaucaucgccauccugguggcgaccggcaagagcgacaagaucugcaucggguaccacgccaacaacuccaccacgaaggucgacaccauccucgagaagaacgugaccgugacccacagcgucgagcugcuggagaaccagaaggaggagcgcuucugcaagaucuccaacaaggcgccccucgaccugcgggacugcacgaucgagggcuggauccuggggaacccguggugcggcauccuccuggccgaccagagcugguccuacaucguggagcgccccaacgcccggaacgggaucugcuaccccggcacccugaacgagguggaggagcucaaggcccugaucggcagcggggagcgcgucgagcgguucgagauguuccccaaguccaccugggccggcguggacaccaacagcgggguguccagcgccugcccgcugggcaacgggcccuccuucuaccgcaaccuccuguggaucaucaagaccaagagcuccgaguaccccgucaucaagggcaccuucaacaacaccggcgacaagagcgugcuguacuucuggggcgugcaccacccgcccucccggaacgagcagaacguccucuacgggagcggggaccgcuacgugcggaugggcaccgaguccaugaacuucgcccgcagccccgagaucgcggcccggcccgccgugaacggccagcgcgggcggaucgacuacuucugguccauccugaagcccggcgagacgcugaacgucgagagcaacgggaaccucaucgccccgugguacgccuaccgcuucgugaacaaggacagccggggcgcgaucuuccgcuccaaccugcccaucgagaacugcgacgccacgugccagaccgccgagggggugauccggaccaacaagacguuccagaacgucagcccccuguggaucggcgagugccccaaguacgugaaguccaagagccuccgccuggccaccggccugcggaacgugccgcagaucgagacccgcggccucuucggggccaucgcgggguucaucgagggcggguggaccggcaugaucgacggcugguacggguaccaccacgagaacucccagggcagcggguacgccgccgaccgggaguccacgcagaaggccaccgacggcaucaccaacaaggucaacagcaucaucgacaagaugaacacccaguucgaggccguggggcacgaguucuccaaccuggagcgccgcaucgacaaccugaacaagcggauggaggacggcuuccucgacguguggacguacaacgcggagcugcugguccuccuggagaacgagcgcacccuggaccuccacgacgccaacgugaagaaccugcacgagcgggucaagagccagcugcgcgacaacgccaacgaccucggcaacgggugcuucgaguucuggcacaagugcgacaacgagugcauggaguccgugaagaacgacaccuacgacuaccccaaguaccagaaggagagccggcugaaccgccagaagaucgaguccgugcggcuggagaacuucgacgucuaccagauccucgccaucuacagcaccguguccagcucccuggugcuggucggccucaucauggccauggggcuguggaugugcagcaacggcuccaugcagugccgcaucugcaucuga

SEQ ID NO: 75140 - RNA, 1701 nt, Artificial Sequence
  derived and/or modified CDS sequence (opt1) from hemagglutinin__InfluenzaA__AHJ57932
augaucgcccugaucaucaucaccauccucgugaccacgggcaagagcgacaagaucugcaucggguaccacgccaacaacuccaccaccaaggucgacaccauccuggagaagaacgugacggugacccacagcgucgagcugcucgagaaccagaaggaggagcgcuucugccggaucuccaacaaggcgccccuggaccugaaggagugcacccucgagggcuggauccuggggaacccgcagugcgaccugcuccugggcgaccagagcugguccuacaucguggagcgccccaacgcccggaacgggaucugcuaccccggcacccugaacgagguggaggagcuccgcgcccugaucggcagcggggagggcgucgagcgguucgagauguuccccaaguccacgugggccgggguggacaccaaccgcggcgugaccagcuccugcccguucgggagcggcuccagcuucuaccggaaccugcucuggaucgucaagcacaccacguccagcuaccccgugaucaagggcaccuuccgcaacaccggggacaaguccgugcuguacuucuggggcguccaccaccccuucgacaccaacgagcagaacgugcuguacgggagcggcaaccgguacgugcgcaugggcacggaguccaugaacuucgcccgggggcccgaggucgcggcccgcccgguggugaacggccagcgggggcgcaucgacuacuucuggagcauccucaagcccggcgagacccugaacaucgaguccaacgggaaccugaucgcccccugguacgccuaccgguucgucaacaaggacagcaagggcgcgaucuuccgcagcaaccuccccaucgaggacugcgacgcgaccugccagaccaucgagggcgugauccggacgaacaagaccuuccagaacguguccccgcuguggaucggggagugccccaaguacgucaagagcgagucccugcgccucgccaccggccugcggaacgugccccagaucgagacccgcgggcuguucggcgccaucgccggguucaucgagggcggcuggacggggaugaucgacggcugguacggguaccaccacgagaacagccagggcuccggguacgccgccgaccgggagagcacccagaaggccaucgacggcaucaccaccaaggugaacuccaucaucgacaagaugaacacgcaguucgaggccgucggccacgaguucagcaaccucgagcgccgcaucgacaaccugaacaagcggcuggaggacggguuccucgacguguggaccuacaacgccgagcugcugguccuccuggagaacgagcgcacccuggaccuccacgacgcgaacgugaagaaccugcacgagcgggugcgcucccagcugcgggacaacgccaacgaccucggcaacgggugcuucgaguucuggcacaagugcgacaacgagugcauggagagcguccgcaacggcaccuacaacuaccccaaguaccaggccgagucccggcugaacaagcagcgcaucgagagcgugaagcuggagaacuucgacguguaccagauccucgccaucuacuccacggucagcuccagccuggugcuggugggccucauccuggccauggggcuguggaugugcuccaacggcagcaugcagugccggaucugcaucuga

SEQ ID NO: 75141 - RNA, 1701 nt, Artificial Sequence
  derived and/or modified CDS sequence (opt1) from hemagglutinin__InfluenzaA__AHJ57943
augaucgccuucaucgugaucgccacccuggucgcgaccggcaagagcgacaagaucugcaucggguaccacgccaacaacuccacgaccaagguggacaccauccucgagaagaacgugaccgucacgcacagcguggagcugcuggagaaccagaaggaggagcgcuucugcaagaucuccaacaaggcgccccucgaccugcgggacugcacccuggagggcuggauccucgggaacccgcgcugcggcauccugcuggccgaccagagcugguccuacaucguggagcggcccaacgcccgcaacgggaucugcuaccccggcacccucaacgaggccgaggagcugaaggcccugaucggcagcggggagcgggucgagcgcuucgagauguuccccaaguccaccuggacgggcguggacaccgagagcgggguguccagcgccugcccgcucggcaacgggcccuccuucuaccggaaccugcuguggaucaucaagcucaagagcuccgaguaccccgucauccgcggcaccuucaacaacaccggcgacaagagcauccuguacuucuggggcgugcaccacccgcccgugacgaccgagcagaacgcccuguacggguccggggaccgguacguccgcaugggcaccgagagcaugaacuucgcgcggucccccgagaucgccgcccgccccgccgugaacggccagcgggggcgcaucgacuacuucuggagcauccucaagcccggcgagacccugaacguggaguccaacgggaaccugaucgccccgugguacgcguaccgguucgucaacaaggacagcaagggcgccaucuuccgcagcaaccuccccaucgagaacugcgacgccacgugccagaccaccgagggggugauccggaccaacaagacguuccagaacgugagcccccuguggaucggcgagugccccaaguacgucaaguccaagucccugcgccucgccaccggccugcggaacgugccgcagaucgagacccgcgggcuguucggcgccaucgcgggguucaucgagggcggguggaccggcaugaucgacggcugguacggguaccaccacgagaacagccagggcuccggguacgccgccgacaaggagagcacgcagaaggccaucgacggcaucaccaacaaggugaacuccaucaucgacaagaugaacacccaguucgagaccgucgggcacgaguucagcaaccucgagcggcgcaucgacaaccugaacaagcgcauggaggacggcuuccuggacguguggacguacaacgccgagcuccuggugcugcucgagaacgagcggacccuggaccugcacgacgcgaacgucaagaaccuccacgagaaggugcgcucccagcugcgggacaacgccaacgaccugggcaacgggugcuucgaguucuggcacaagugcaacaacgagugcauggagagcgucaagaacggcaccuacgacuaccccaaguaccagaaggagucccgccucaaccggcagaagaucgagagcgugaagcuggagaacuucgacguguaccagauccuggccaucuacuccaccgucagcuccagccucgugcugguggggcugauccucgccaugggccuguggaugugcuccaacggcagcaugcagugccgcaucugcaucuga

SEQ ID NO: 75142 - RNA, 1701 nt, Artificial Sequence
  derived and/or modified CDS sequence (opt1) from hemagglutinin__InfluenzaA__AHJ57954
augaucgccuucaucgugaucgccauccuggcggccaccggcaagagcgacaagaucugcaucggguaccacgccaacaacuccaccacgaaggucgacaccauccucgagaagaacgugaccgugacccacagcgucgagcugcuggagaaccagaaggaggagcgcuucugcaagaucuccaacaaggcgccccucgaccugcgggacugcacgcuggagggcuggauccucgggaacccgcgcugcggcauccugcuggccgaccagagcugguccuacaucguggagcggcccaacgcccgcaacgggaucugcuaccccggcauccucaacgaggccgaggagcugaaggcccugaucggcagcggggagcggguggagcgcuucgagauguuccccaaguccaccugggccggcgucgacaccaacagcgggguguccagcgcgugcccgcucggcaacgggcccuccuucuaccggaaccugcuguggaucaucaagcagaaguccagcgccuaccccgugauccgcggcaccuucaacaacacgggcgacaagagcauccucuacuucuggggcguccaccacccgcccgugaccaccgagcaggaggcccuguacggguccgggaaccgguacgugcgcaugggcaccgagagcaugaacuucgcccggaaccccgagaucgccgcgcgccccgccgucaacggccagcgggggcgcaucgacuacuucugguccauccugaagcccggcgagacgcucaacguggagagcaacgggaaccugaucgccccgugguacgccuaccgguucgugaacaaggacuccaagggcgccaucuuccgcagcaaccugcccaucgagaacugcgacgcgaccugccagaccaccgagggggucauccggacgaacaagaccuuccagaacgugagcccccucuggaucggcgagugccccaaguacgugaaguccaagagccugcgccuggccaccggccuccggaacgucccgcagaucgagacccgcgggcuguucggcgccaucgccggguucaucgagggcggguggacgggcaugaucgacggcugguacggguaccaccacgagaacucccagggcagcggguacgccgcggaccgggaguccacccagaaggccaucgacggcaucaccaacaaggugaacagcaucaucgacaagaugaacacccaguucgaggccguggggcacgaguucuccaaccuggagcgccgcaucgacaaccucaacaagcggauggaggacggcuuccuggacgucuggacguacaacgccgagcugcucgugcugcuggagaacgagcgcacccucgaccugcacgacgccaacgugaagaaccugcacgagaagguccggagccagcuccgcgacaacgcgaacgaccugggcaacgggugcuucgaguucuggcacaagugcgacaacgagugcauggaguccgugaagaacggcaccuacgacuaccccaaguaccaggccgagagccggcugaaccgccagaagaucgaguccgucaagcucgagaacuucgacguguaccagauccuggccaucuacagcaccguguccagcucccugguccucguggggcugaucauggccaugggccuguggaugugcagcaacggcuccaugcagugccggaucugcaucuga

SEQ ID NO: 75143 - RNA, 1701 nt, Artificial Sequence
  derived and/or modified CDS sequence (opt1) from hemagglutinin__InfluenzaA__AHJ57965
augaucgccuucaucaucaucaccauccuggugaccacgggcaagagcgacaagaucugcaucggguaccacgccaacaacuccaccaccaaggucgacaccauccucgagaagaacgugacggugacccacagcgucgagcugcuggagaaccagaaggaggagcgcuucugcaagaucuccaacaaggcgccccucgaccugaaggagugcacccuggagggcuggauccucgggaacccgcagugcgaccugcugcucggcgaccagagcugguccuacaucguggagcggcccaacgcccgcaacgggaucugcuaccccggcacccugaacgagguggaggagcugaaggcccucaucggcagcggggagcgggucgagcgcuucgagauguuccccaaguccacgugggccggcguggacaccaacagcggggugaccuccagcugcuccuucggcagcggguccagcuucuaccggaaccugcuguggaucaucaagcacaccacguccagcuacccggucaucaagggcaccuuccgcaacaccggcgacaaguccgugcucuacuucuggggcgugcaccaccccaucgacaccacggagcagaacguccuguacgggagcgggaaccgguacgugcgcaugggcaccgaguccaugaacuucgcccggagccccgagaucgcggcccgccccguggucaacggccagcgggggcgcaucgacuacuucuggagcauccugaagccgggcgagacccucaacaucgaguccaacgggaaccugaucgcccccugguacgccuaccgguucgugaacaaggacagcaagggcgcgaucuuccgcuccaaccugcccaucgagaacugcgacgcgaccugccagacgaucgagggggugauccggaccaacaagaccuuccagaacgucagcccccucuggaucggcgagugcccgaaguacgugaaguccgagagccugcgccuggccaccggccuccggaacgugccccagaucgagacgcgcgggcuguucggcgccaucgccggguucaucgagggcggguggaccggcaugaucgacggcugguacggguaccaccacgagaacucccagggcagcggguacgccgccgaccgggaguccacccagcgcgccaucgacggcaucaccacgaaggucaacagcaucaucgacaagaugaacacccaguucgaggccguggggcacgaguucuccaaccuggagcggcgcaucgacaaccucaacaagcgcauggaggacggcuuccuggacguguggaccuacaacgccgagcugcucguccugcuggagaacgagcggacccucgaccugcacgacgcgaacgugaagaaccugcacgagcgcguccggagccagcuccgcgacaacgccaacgacggcgggaacggcugcuucgaguucuggcacaagugcgacaacgagugcauggaguccgugaagaacgggacguacgacuaccccaaguaccaggccgagagccgguccaaccgccagcggaucgagagcgugaagcuggagaacuucgacgucuaccagauccuggccaucuacuccaccgugagcuccagccucguggucguguggcugauccuggccaugggccucuggaugugcgcgaacggcagcaugcagugccgcaucugcaucuga

SEQ ID NO: 75144 - RNA, 1701 nt, Artificial Sequence
  derived and/or modified CDS sequence (opt1) from hemagglutinin__InfluenzaA__AHJ57977
augaucgccuucaucgugaucgccauccuggcggccaccggcaagagcgacaagaucugcaucggguaccacgccaacaacuccaccacgaaggucgacaccauccucgagaagaacgugaccgugacccacagcgucgagcugcuggagaaccagaaggaggagcgcuucugcaagaucuccaacaaggcgccccucgaccugcgggacugcacgaucgagggcuggauccuggggaacccgcgcugcggcauccuccuggccgaccagagcugguccuacaucguggagcggcccaacgcccgcaacgggaucugcuaccccggcacccugaacgagguggaggagcucaaggcccugaucggcagcggggagcgggucgagcgcuucgagauguuccccaaguccaccugggccggcguggacaccaacagcgggguguccagcgccugcccgcugggcaacgggcccuccuucuaccggaaccuccuguggaucaucaagcugaaguccuccgaguaccccgucauccgcggcacguucaacaacaccggcgacaagagcauccucuacuucuggggcgugcaccacccgcccgugaccaccgagcaggaggcgcuguacggguccggggaccgguacguccgcaugggcacggagagcaugaacuucgcccggucccccgagaucgccgcccgccccgccgugaacggccagcgggggcgcaucgacuacuucuggagcauccugaagcccggcgagacccucaacguggaguccaacgggaaccugaucgcgccgugguacgccuaccgguucgucaacaaggacagcaagggcgccaucuuccgcagcaaccugcccaucgagaacugcgacgcgaccugccagaccacggagggggugauccggaccaacaagaccuuccagaacgugagcccccucuggaucggcgagugccccaaguacgucaagagcaagucccugcgccuggccaccggccuccggaacgugccgcagaucgagacgcgcgggcuguucggcgccaucgccggguucaucgagggcggguggaccggcaugaucgacggcugguacggguaccaccacgagaacagccagggcuccggguacgccgccgacaaggagagcacccagaaggccaucgacggcaucaccaacaaggugaacuccaucaucgacaagaugaacacgcaguucgaggcggucgggcacgaguucagcaaccuggagcggcgcaucgacaaccucaacaagcgcauggaggacggcuuccuggacguguggaccuacaacgccgagcugcucgugcugcuggagaacgagcggacccucgaccugcacgacgccaacgucaagaaccugcacgagaaggugcgcucccagcuccgggacaacgccaacgaccugggcaacgggugcuucgaguucuggcacaagugcaacaacgagugcauggagagcgucaagaacggcaccuacgacuaccccaaguaccagaaggagucccgccugaaccggcagaagaucgagagcgugaagcucgagaacuucgacguguaccagauccuggccaucuacuccacggucagcuccagccuggugcucguggggcugauccuggcgaugggccucuggaugugcuccaacggcagcaugcagugccgcaucugcaucuga

SEQ ID NO: 75145 - RNA, 1701 nt, Artificial Sequence
  derived and/or modified CDS sequence (opt1) from hemagglutinin__InfluenzaA__AHJ57989
augaucgccuucaucgugaucgccauccuggucaccaccggcaagagcgacaagaucugcaucggguaccacgcgaacaacuccacgaccaagguggacaccauccucgagaagaacgugaccgucacgcacagcguggagcugcuggagaaccagaaggaggagcgcuucugcaagaucuccaacaaggcgccccucgaccugcgggacugcacccuggagggcuggauccucgggaacccgcgcugcggcauccugcuggccgaccagagcugguccuacaucguggagcggcccaacgcccgcaacgggaucugcuaccccggcacccucaacgaggucgaggagcugaaggcccugaucggcagcggggagcggguggagcgcuucgagauguuccccaaguccaccugggcccggguggacacggaccgcggcgucagcuccgccugcccgcucgggaacggccccagcuucuaccggaaccugcuguggaucgugaagcacaccaccuccgaguaccccgugaucaaggggaccuacacgaacaccggcgacaagagcguccucuacuucuggggcgugcaccacccgcccgacaccaccgagcagaacgugcuguacggguccggcaaccgcuacguccggauggggacggagagcaugaacuucgcccgcucccccgagaucgccgcgcggcccgccgugaacggccagcgcggccggaucgacuacuucuggagcauccugaagcccggggagacccucaacguggaguccaacggcaaccugaucgccccgugguacgccuaccgcuucgucaacaaggacagcaagggggccaucuuccgguccaaccugcccaucgagaacugcgacgcgaccugccagaccacggagggcgugauccgcaccaacaagaccuuccagaacgugagccccauguggaucggggagugccccaaguacgucaagagcaagucccuccggcuggccaccggccugcgcaacgugccgcagaucgagacgcggggccucuucggggccaucgccggcuucaucgagggcggguggaccgggaugaucgacggcugguacggcuaccaccacgagaacagccagggguccggcuacgccgcggaccgcgagagcacccagaaggccaucgacgggaucaccaacaaggugaacuccaucaucgacaagaugaacacgcaguucgaggccgucggccacgaguucagcaaccuggagcgccggaucgacaaccugaacaagcgcauggaggacggguuccucgacguguggaccuacaacgccgagcugcugguccuccuggagaacgagcggacccuggaccuccacgacuccaacgugaagaaccugcacgagcgcgucaagagccagcugcgggacaacgccaacgaccucggcaacggcugcuucgaguucuggcacaagugcgacaacgagugcauggaguccgugaagaacgggaccuacaacuaccccaaguaccaggcggagagccgccugaaccggcagaagaucgaguccgugaagcuggaggaguucggcguguaccagauccucgccaucuacagcacggucuccagcucccuggugcugguggggcucaucauggccaugggccuguggaugugcagcaacggcuccaugcagugccgcaucugcaucuga

SEQ ID NO: 75146 - RNA, 1701 nt, Artificial Sequence
  derived and/or modified CDS sequence (opt1) from hemagglutinin__InfluenzaA__AHJ58001
augaucgccuucaucgugaucgccauccuggcggccaccggcaagagcgacaagaucugcaucggguaccacgccaacaacuccaccacgaaggucgacaccauccucgagaagaacgugaccgugacccacagcgucgagcugcuggagaaccagaaggaggagcgcuucugcaagaucuccaacaaggcgccccucgaccugcgggacugcacgcuggagggcuggauccucgggaacccgcgcugcggcauccugcuggccgaccagagcugguccuacaucguggagcggcccaacgcccgcaacgggaucugcuaccccggcauccucaacgaggccgaggagcugaaggcccugaucggcagcggggagcggguggagcgcuucgagauguuccccaaguccaccugggccggcgucgacaccgacagcgggguguccagcgcgugcccgcucggcaacgggcccuccuucuaccggaaccugcuguggaucaucaagcucaagagcuccgaguaccccgugauccgcggcaccuucaacaacacgggcgacaagagcauccuguacuucuggggcguccaccacccgcccgugaccaccgagcaggaggcccuguacggguccgggaaccgguacgugcgcaugggcaccgagagcaugaacuucgcccggucccccgagaucgccgcccgccccgcggucaacggccagcgggggcgcaucgacuacuucuggagcauccucaagcccggcgagacgcugaacguggaguccaacgggaaccugaucgccccgugguacgccuaccgguucgugaacaaggacagcaagggcgccaucuuccgcagcaaccuccccaucgagaacugcgacgcgaccugccagaccaccgagggggucauccggacgaacaagaccuuccagaacgugucccccauguggaucggcgagugccccaaguacgucaagagcaagucccugcgccuggccaccggccuccggaacgugccgcagaucgagacccgcgggcuguucggcgccaucgccggguucaucgagggcggguggacgggcaugaucgacggcugguacggguaccaccacgagaacagccagggcuccggguacgccgccgaccgggagagcacccagaaggcgaucgacggcaucaccaacaaggugaacuccaucaucgacaagaugaacacccaguucgaggccguggggcacgaguucagcaaccuggagcgccgcaucgacaaccucaacaagcggauggaggacggcuuccuggacgucuggacguacaacgccgagcugcucgugcugcuggagaacgagcgcacccucgaccugcacgacgccaacgugaagaaccugcacgagaagguccggucccagcuccgcgacaacgccaacgaccugggcaacgggugcuucgaguucuggcacaagugcgacaacgagugcauggagagcgugaagaacggcaccuacgacuaccccaaguaccagaccgagucccggcugaaccgccagaagaucgagagcgucaagcucgagaacuucgacguguaccagauccuggcgaucuacuccacggugagcuccagccugguccucguggggcugaucauggccaugggccuguggaugugcuccaacggcagcaugcagugccggaucugcaucuga

SEQ ID NO: 75147 - RNA, 1701 nt, Artificial Sequence
  derived and/or modified CDS sequence (opt1) from hemagglutinin__InfluenzaA__AHJ58013
augaucgccuucaucgugaucgccauccuggucaccaccggcaagagcgacaagaucugcaucggguaccacgcgaacaacuccacgaccaagguggacaccauccucgagaagaacgugaccgucacgcacagcguggagcugcuggagaaccagaaggaggagcgcuucugcaagaucuccagcaaggcgccccucgaccugcgggacugcucccuggagggcuggauccucgggaacccgcgcugcggcauccugcuggccgaccagagcugguccuacaucguggagcggcccaacgcccgcaacgggaucugcuaccccggcacccucaacgaggucgaggagcugaaggcccugaucggcagcggggagcggguggagcgcuucgagauguuccccaaguccaccugggccggcguggacaccaacagcggggucuccagcgccugcccgcucggcgaggggcccuccuucuaccggaaccugcuguggaucaucaagcgcacgaccagcgaguaccccgugaucaagggcaccuaccggaacaccggcgacaaguccgugcucuacuucuggggcguccaccacccgcccgacacgaccgagcagaacgugcuguacgggagcgggaaccgcuacgugcggaugggcaccgaguccaugaacuucgcccgcagccccgagaucgccgcgcggcccgccgucaacggccagcgcgggcggaucgacuacuucugguccauccugaagcccggcgagacccucgacguggagagcaacgggaaccugaucgccccgugguacgccuaccgcuucgugaacaaggagagcaagggcgccaucuuccgguccaaccugcccaucgagaacugcgacgcgacgugccagaccaccgagggggucauccgcaccaacaagacguuccagaacgugagcccccucuggaucggcgagugccccaaguacgugaaguccaagagccugcggcuggccaccggccuccgcaacgucccgcagaucgagacccgggggcuguucggcgccaucgccggguucaucgagggcggguggaccggcaugaucgacggcugguacggguaccaccacgagaacucccagggcagcggguacgccgcggacaaggaguccacgcagaaggccaucgacggcaucaccaacaaggugaacagcaucaucgacaagaugaacacccaguucgaggccguggggcacgaguucuccacccuggagcgccgcaucgacaaccucaacaagcggauggaggacggcuuccuggacgucuggacguacaacgccgagcugcucgugcugcuggagaacgagcgcacccucgaccugcacgacgccaacgucaagaaccugcacgagcgggugcgcagccagcuccgggacaacgcgaacgaccugggcaacgggugcuucgaguucuggcacaagugcgacaacgagugcauggaguccgugaagaacggcaccuacaacuaccccaaguaccaggccgagagccgccugaacaagcagaagaucgaguccgucaagcucgaggaguucgggguguaccagauccuggccaucuacagcaccguguccagcucccugguccucgugggccugaucauggccaugggccuguggaugugcagcaacggguccaugcagugccggaucugcaucuga

SEQ ID NO: 75148 - RNA, 1701 nt, Artificial Sequence
  derived and/or modified CDS sequence (opt1) from hemagglutinin__InfluenzaA__AHJ58025
augaucgccuucaucgugaucgccauccuggucaccaccggcgagagcgacaagaucugcaucggguaccacgcgaacaacuccacgaccaagguggacaccauccucgagaagaacgugaccgucacgcacagcguggagcugcuggagaaccagaaggaggagcgcuucugcaagaucuccaacaaggcgccccucgaccugcgggacugcaccaucgagggcuggauccuggggaacccgcgcugcggcauccuccuggccgaccagagcugguccuacaucguggagcggcccaacgcccgcaacgggaucugcuaccccggcacccugaacgaggccgaggagcucaaggcccugaucggcagcggggagggcgucgagcgguucgagauguuccccaaguccaccugggccgggguggacacgaacagcggcguguccagcgccugcccgcuggggaacggccccuccuucuaccgcaaccuccuguggaucaucaagcugaaguccuccgaguaccccgucauccggggcaccuucaacaacaccggggacaagagcgugcucuacuucuggggcgugcaccacccgcccgucaccacggagcagaacgaccuguacggguccggcaaccgcuacgugcggaugggcaccgagagcaugaacuucgcccgcaaccccgagaucgcgcugcggcccgccgugaacgggcagcgcggccggaucgacuacuucugguccauccucaagcccggggagacccugaacgucgagagcaacggcaaccugaucgccccgugguacgccuaccgcuucgugaacaaggacuccaagggggccaucuuccggagcagccuccccaucgagaacugcgacgcgaccugccagacggccgagggcgugauccgcaccaacaagaccuuccagaacgucagcccccuguggaucggcgagugccccaaguacgucaagagcaagucccugcggcucgccaccgggcugcgcaacgugccgcagaucgagacgcggggccuguucggggccaucgccggcuucaucgagggcggguggaccggcaugguggacgggugguacggcuaccaccacgagaacagccagggguccggcuacgcggccgaccgcgagagcacccagaaggccaucgacgggaucaccaacaaggugaacuccaucaucgacaagaugaacacgcaguucgaggccguggaccacgaguucagcaaccucgagcggcgcaucgacaaccugaacaagcgcauggaggacggcuuccuggacgucuggaccuacaacgccgagcuccuggugcugcucgagaacgagcggacccuggaccugcacgacgcgaacgucaagaaccuccacgagaaggugaagucccagcugcgcgacaacgccaacgaccugggcaacgggugcuucgaguucuggcacaagugcgacaacgagugcauggagagcgugaagaacggcaccuacaacuaccccaaguaccagaaggagucccggcucaaccgccagaagaucgagagcgucaagcuggagaacuucgacguguaccagauccuggccaucuacuccacggugagcuccagccucguccugguggggcugaucauggccaugggccucuggaugugcuccaacggcagcaugcagugccggaucugcaucuga

SEQ ID NO: 75149 - RNA, 1701 nt, Artificial Sequence
  derived and/or modified CDS sequence (opt1) from hemagglutinin__InfluenzaA__AHJ58037
augaucgccuucaucaucaucaccauccuggugaccacgggcgagagcgacaagaucugcaucggguaccacgccaacaacuccaccaccaaggucgacaccauccucgagaagaacgugacggugacccacagcgucgagcugcuggagaaccagaaggaggagcgcuucugcaagaucuccaacaaggcgccccucgaccugaaggagugcacccuggagggcuggauccucgggaacccgcagugcgaccugcugcucggcgaccagagcugguccuacaucguggagcggcccaacgcccgcaacgggaucugcuaccccggcacccugaacgagguggaggagcugaaggcccucaucggcagcggggagcgggucgagcgcuucgagauguuccccaaguccacgugggccggcguggacaccaacagcggggugacccgguccugcccguucggcagcggguccagcuucuaccgcaaccugcuguggaucaucaagcacaccacguccagcuaccccgucaucaagggcaccuuccggaacaccggcgacaaguccgugcucuacuucuggggcgugcaccaccccaucgacaccacggagcagaacguccuguacgggagcgggaaccgcuacgugcggaugggcaccgaguccaugaacuucgcccgcagccccgagaucgcggcccggccgguggucaacggccagcgcgggcggaucgacuacuucugguccauccugaagcccggcgagacccucaacaucgagagcaacgggaaccugaucgcccccugguacgccuaccgcuucgugaacaaggacagcaagggcgcgaucuuccgguccaaccugcccaucgagaacugcgacgcgaccugccagacgaucgagggggugauccgcaccaacaagaccuuccagaacgucagcccgcucuggaucggcgagugccccaaguacgugaaguccgagagccugcggcuggccaccggccuccgcaacgugccccagaucgagacgcgggggcuguucggcgccaucgccggguucaucgagggcggguggaccggcaugaucgacggcugguacggguaccaccacgagaacucccagggcagcggguacgccgccgaccgcgaguccacccagcgggccaucgacggcaucaccacgaaggucaacagcaucaucgacaagaugaacacccaguucgaggccguggggcacgaguucuccaaccuggagcgccgcaucgacaaccucaacaagcggauggaggacggcuuccuggacguguggaccuacaacgccgagcugcucguccugcuggagaacgagcgcacccucgaccugcacgacgcgaacgugaagaaccugcacgagcgggucaagagccagcuccgcgacaacgccaacgaccugggcaacgggugcuucgaguucuggcacaagugcgacaacgagugcauggaguccgugaagaacggcacguacgacuaccccaaguaccaggccgagagccggcugaacaagcagcgcaucgaguccgugaagcucgagaacuucgacgucuaccagauccuggccaucuacagcaccguguccagcucccuggugcucgucgggcugaucauggccaucggccuguggaugugcagcaacggcuccaugcagugccggaucugcaucuga

SEQ ID NO: 75150 - RNA, 1701 nt, Artificial Sequence
  derived and/or modified CDS sequence (opt1) from hemagglutinin__InfluenzaA__AHJ58049
augaucgccuucaucgugaucgccauccuggcggccaccggcaagagcgacaagaucugcaucggguaccacgccaacaacuccaccacgaaggucgacaccauccucgagaagaacgugaccgugacccacagcgucgagcugcuggagaaccagaaggaggagcgcuucugcaagaucuccaacaaggcgccccucgaccugcgggacugcacgcuggagggcuggauccucgggaacccgcgcugcggcauccugcuggccgaccagagcugguccuacaucguggagcggcccaacgcccgcaacgggaucugcuaccccggcauccucaacgaggccgaggagcugaaggcccugaucggcagcggggagcggguggagcgcuucgagauguuccccaaguccaccugggccggcgucgacaccgacagcgggguguccagcgcgugcccgcucggcaacgggcccuccuucuaccggaaccugcuguggaucaucaagcucaagagcuccgaguaccccgugauccgcggcaccuucaacaacacgggcgacaagagcauccuguacuucuggggcguccaccacccgcccgugaccaccgagcaggaggcccuguacggguccgggaaccgguacgugcgcaugggcaccgagagcaugaacuucgcccggacgcccgagaucgccgcccgccccgcggucaacggccagcgggggcgcaucgacuacuucugguccauccucaagcccggcgagacccugaacguggagagcaacgggaaccugaucgccccgugguacgccuaccgguucgugaacaaggacuccaagggcgccaucuuccgcagcaaccuccccaucgagaacugcgacgcgaccugccagaccacggagggggucauccggaccaacaagaccuuccagaacgugagcccccuguggaucggcgagugccccaaguacgugaaguccaagagccugcgccucgccaccggccugcggaacgucccgcagaucgagacgcgcgggcuguucggcgccaucgccggguucaucgagggcggguggaccggcaugaucgacggcugguacggguaccaccacgagaacucccagggcagcggguacgccgccgaccgggaguccacccagaaggcgaucgacggcaucaccaacaaggugaacagcaucaucgacaagaugaacacgcaguucgaggccguggggcacgaguucuccaaccucgagcgccgcaucgacaaccugaacaagcggauggaggacggcuuccuggacgucuggaccuacaacgccgagcuccuggugcugcucgagaacgagcgcacccuggaccugcacgacgccaacgugaagaaccuccacgagaagguccggagccagcugcgcgacaacgccaacgaccugggcaacgggugcuucgaguucuggcacaagugcgacaacgagugcauggaguccgugaagaacggcaccuacgacuaccccaaguaccaggcggagagccggcucaaccgccagaagaucgaguccgucaagcuggagaacuucgacguguaccagauccuggccaucuacagcacgguguccagcucccucguccugguggggcugaucauggccaugggccucuggaugugcagcaacggcuccaugcagugccggaucugcaucuga

SEQ ID NO: 75151 - RNA, 1701 nt, Artificial Sequence
  derived and/or modified CDS sequence (opt1) from hemagglutinin__InfluenzaA__AHJ58061
augaucgccuucaucgugaucgccacccuggucgcgaccggcaagagcgacaagaucugcaucggguaccacgccaacaacuccacgaccaagguggacaccauccucgagaagaacgugaccgucacgcacagcguggagcugcuggagaaccagaaggaggagcgcuucugcaagaucuccaacaaggcgccccucgaccugcgggacugcacccuggagggcuggauccucgggaacccgcgcugcggcauccugcuggccgaccagagcugguccuacaucguggagcggcccaacgcccgcaacgggaucugcuaccccggcacccucaacgaggccgaggagcugaaggcccugaucggcagcggggagcgggucgagcgcuucgagauguuccccaaguccaccuggacgggcguggacaccgagagcgggguguccagcgccugcccgcucggcaacgggcccuccuucuaccggaaccugcuguggaucaucaagcucaagagcuccgaguaccccgucauccgcggcaccuucaacaacaccggcgacaagagcauccuguacuucuggggcgugcaccacccgcccgugacgaccgagcagaacgcccuguacggguccggggaccgguacguccgcaugggcaccgagagcaugaacuucgcgcggucccccgagaucgccgcccgccccgccgugaacggccagcgggggcgcaucgacuacuucuggagcauccucaagcccggcgagacccugaacguggaguccaacgggaaccugaucgccccgugguacgcguaccgguucgucaacaaggacagcaagggcgccaucuuccgcagcaaccuccccaucgagaacugcgacgccacgugccagaccaccgagggggugauccggaccaacaagacguuccagaacgugagcccccuguggaucggcgagugccccaaguacgucaaguccaagucccugcgccucgccaccggccugcggaacgugccgcagaucgagacccgcgggcuguucggcgccaucgcgggguucaucgagggcggguggaccggcaugaucgacggcugguacggguaccaccacgagaacagccagggcuccggguacgccgccgacaaggagagcacgcagaaggccaucgacggcaucaccaacaaggugaacuccaucaucgacaagaugaacacccaguucgaggccgucgggcacgaguucagcaaccucgagcggcgcaucgacaaccugaacaagcgcauggaggacggcuuccuggacguguggaccuacaacgcggagcuccuggugcugcucgagaacgagcggacgcuggaccugcacgacgccaacgucaagaaccuccacgagaaggugcgcucccagcugcgggacaacgccaacgaccugggcaacgggugcuucgaguucuggcacaagugcaacaacgagugcauggagagcgucaagaacggcaccuacgacuaccccaaguaccagaaggagucccgccucaaccggcagaagaucgagagcgugaagcuggagaacuucgacguguaccagauccuggccaucuacuccaccgucagcuccagccucgugcugguggggcugauccucgccaugggccuguggaugugcuccaacggcagcaugcagugccgcaucugcaucuga

SEQ ID NO: 75152 - RNA, 1701 nt, Artificial Sequence
  derived and/or modified CDS sequence (opt1) from hemagglutinin__InfluenzaA__AHJ58084
augaucgccuucaucgugaucgccacccuggucgcgaccggcaagagcgacaagaucugcaucggguaccacgccaacaacuccacgaccaagguggacaccauccucgagaagaacgugaccgucacgcacagcguggagcugcuggagaaccagaaggaggagcgcuucugcaagaucuccaacaaggcgccccucgaccugcgggacugcacccuggagggcuggauccucgggaacccgcgcugcggcauccugcuggccgaccagagcugguccuacaucguggagcggcccaacgcccgcaacgggaucugcuaccccggcacccucaacgaggccgaggagcugaaggcccugaucggcagcggggagcgggucgagcgcuucgagauguuccccaaguccaccuggacgggcgugaacaccgagagcgggguguccagcgccugcccgcucggcaacgggcccuccuucuaccggaaccugcuguggaucaucaagcucaagagcuccgaguaccccgucauccgcggcaccuucaacaacaccggcgacaagagcauccuguacuucuggggcgugcaccacccgcccgugacgaccgagcagaacgcccuguacggguccggggaccgguacguccgcaugggcaccgagagcaugaacuucgcgcggucccccgagaucgccgcccgccccgccgugaacggccagcgggggcgcaucgacuacuucuggagcauccucaagcccggcgagacccugaacguggaguccaacgggaaccugaucgccccgugguacgcguaccgguucgucaacaaggacagcaagggcgccaucuuccgcagcaaccuccccaucgagaacugcgacgccacgugccagaccaccgagggggugauccggaccaacaagacguuccagaacgugagcccccuguggaucggcgagugccccaaguacgucaaguccaagucccugcgccucgccaccggccugcggaacgugccgcagaucgagacccgcgggcuguucggcgccaucgcgggguucaucgagggcggguggaccggcaugaucgacggcugguacggguaccaccacgagaacagccagggcuccggguacgccgccgacaaggagagcacgcagaaggccaucgacggcaucaccaacaaggugaacuccaucaucgacaagaugaacacccaguucgaggccgucgggcacgaguucagcaaccucgagcggcgcaucgacaaccugaacaagcgcauggaggacggcuuccuggacguguggaccuacaacgcggagcuccuggugcugcucgagaacgagcggacgcuggaccugcacgacgccaacgucaagaaccuccacgagaaggugcgcucccagcugcgggacaacgccaacgaccugggcaacgggugcuucgaguucuggcacaagugcaacaacgagugcauggagagcgucaagaacggcaccuacgacuaccccaaguaccagaaggagucccgccucaaccggcagaagaucgagagcgugaagcuggagaacuucgacguguaccagauccuggccaucuacuccaccgucagcuccagccucgugcugguggggcugauccucgccaugggccuguggaugugcuccaacggcagcaugcagugccgcaucugcaucuga

SEQ ID NO: 75153 - RNA, 1701 nt, Artificial Sequence; identical to SEQ ID NO: 70879
  derived and/or modified CDS sequence (opt1) from hemagglutinin__InfluenzaA__AHL80708

SEQ ID NO: 75154 - RNA, 1701 nt, Artificial Sequence
  derived and/or modified CDS sequence (opt1) from hemagglutinin__InfluenzaA__AHL80718
augaaggccauccuggugguccuccuguacaccuucgccaccgcgaacgccgacacgcugugcaucggcuaccacgccaacaacagcaccgacaccguggacaccgugcucgagaagaacgucacggugacccacuccgugaaccugcuggaggacaagcacaacgggaagcucugcaagcugcgcggcgucgcgccccugcaccucgggaagugcaacaucgccggcuggauccuggggaacccggagugcgagagccuguccaccgccagcuccuggagcuacaucguggagaccuccagcuccgacaacggcacgugcuaccccggcgacuucaucaacuacgaggagcuccgggagcagcugagcuccgugagcuccuucgagcgcuucgagaucuuccccaagaucagcuccuggcccaaccacgacagcaacaagggggucaccgccgccugcccgcacgccggcgcgaaguccuucuacaagaaccugaucuggcucgugaagaaggggaacagcuaccccaagcuguccaagagcuacaucaacgacaagggcaaggaggugcugguccucugggggauccaccaccccagcaccaccgccgaccagcagucccuguaccagaacgccgacgccuacguguucgugggcacgagccgguacuccaagaaguucaagcccgagaucgccauccgcccgaagguccgggaccaggagggccgcaugaacuacuacuggacccugguggagcccggggacaagaucaccuucgaggcgaccggcaaccucguggucccccgguacgccuucgccauggagcgcaacgccgggagcggcaucaucaucuccgacacgagcgugcacgacugcaacacgaccugccagacccccaagggcgccaucaacaccucccugccguuccagaacauccaccccaucaccaucgggaagugccccaaguacgucaagagcaccaagcugcggcucgcgaccggccugcgcaacgugcccuccauccagagccgggggcuguucggcgccaucgccggguucaucgagggcggcuggacggggaugguggacggcugguacggguaccaccaccagaacgagcagggcuccggguacgccgccgaccucaagagcacccagaacgcgaucgacaagaucaccaacaaggugaacuccgucaucgagaagaugaacacccaguucacggccgugggcaaggaguucaaccaccuggagaagcgcaucgagaaccugaacaagaaggucgacgacggcuuccucgacaucuggaccuacaacgccgagcugcuggugcuccuggagaacgagcggacccuggacuaccacgacagcaacgugaagaaccucuacgagaagguccgcucccagcugaagaacaacgccaaggagaucgggaacggcugcuucgaguucuaccacaagugcgacaacacgugcauggagagcgugaagaacgggaccuacgacuacccgaaguacuccgaggaggccaagcugaaccgggaggagaucgacggcgugaagcucgagagcacccgcaucuaccagauccuggcgaucuacuccaccgucgccagcagccuggugcucguggucucccugggggccaucagcuucuggaugugcuccaacggcagccugcagugccggaucugcaucuga

SEQ ID NO: 75155 - RNA, 1710 nt, Artificial Sequence
  derived and/or modified CDS sequence (opt1) from hemagglutinin__InfluenzaA__AHL80729
augaaggccauccuggugguccuccuguacaccuucgccaccgcgaacgccgacacgcugugcaucggcuaccacgccaacaacagcaccgacaccguggacaccgugcucgagaagaacgucacggugacccacuccgugaaccugcuggaggacaagcacaacgggaagcucugcaagcugcgcggcgucgcgccccugcaccucggggagugcaacaucgccggcuggauccuggggaacccggagugcgagagccuguccaccgccagcuccuggagcuacaucguggagaccuccagcuccgacaacggcacgugcuaccccggcgacuucaucgacuacgaggagcuccgggagcagcugagcuccgugagcuccuucgagcgcuucgagaucuuccccaagaccagcuccuggcccaaccacgacagcaacaagggggucaccgccgccugcccgcacgccggcgcgaaguccuucuacaagaaccugaucuggcucgugaagaaggggaacagcuaccccaagcuguccaagagcuacaucaacgacaagggcaaggaggugcugguccucugggggauccaccaccccagcaccuccgccgaccagcagagccuguaccagaacgccgacgccuacguguucgugggcacgucccgguacagcaagaaguucaagcccgagaucgccauccgcccgaagguccgggaccaggagggccgcaugaacuacuacuggacccugguggagcccggggacaagaucaccuucgaggcgaccggcaaccucguggucccccgguacgccuucgccauggagcgcaacgccggguccggcaucaucaucagcgacacgcccgugcacgacugcaacacgaccugccagaccccgaagggcgccaucaacaccucccugaccagccugcccuuccagaacgugcaccccaucaccaucgggaagugccccaaguacgucaaguccaccaagcuccggcuggcgacgggccugcgcaacgugccgagcauccagucccggggccucuucggggccaucgccggguucaucgagggcggcuggaccgggaugguggacggcugguacggguaccaccaccagaacgagcagggcagcggguacgccgccgaccugaaguccacccagaacgcgaucgacgagaucaccaacaaggucaacagcgugaucgagaagaugaacacgcaguucaccgccgucggcaaggaguucaaccaccuggagaagcgcaucgagaaccucaacaagaagguggacgacggcuuccuggacaucuggaccuacaacgccgagcugcucgugcugcuggagaacgagcggacccucgacuaccacgacuccaacgucaagaaccuguacgagaaggugcgcagccagcugaagaacaacgccaaggagaucgggaacggcugcuucgaguucuaccacaagugcgacaacacgugcauggaguccgugaagaacgggaccuacgacuaccccaaguacagcgaggaggccaagcucaaccgggaggagaucgacggcgucaagcuggaguccacccgcaucuaccagauccuggcgaucuacagcaccguggccagcucccucgugcuggucgugagccugggggccaucuccuucuggaugugcagcaacggcucccuccagugccggaucugcaucuga

SEQ ID NO: 75156 - RNA, 1701 nt, Artificial Sequence
  derived and/or modified CDS sequence (opt1) from hemagglutinin__InfluenzaA__AHL80740
augaaggccauccuggugguccuccuguacaccuucgccaccgcgaacgccgacacgcugugcaucggcuaccacgccaacaacagcaccgacaccguggacaccgugcucgagaagaacgucacggugacccacuccgugaaccugcuggaggacaagcacaacgggaagcucugcaagcugcgcggcgucgcgccccugcaccucgggaagugcaacaucgccggcuggauccuggggaacccggagugcgagcugcucagcaccgcguccagcugguccuacaucguggagaccagcuccagcgacaacggcacgugcuaccccggcgacuucaucaacuacgaggagcugcgggagcagcuguccagcguguccagcuucgagcgcuucgagaucuuccccaagaccuccagcuggcccaaccacgacuccaacaagggggucaccgccgccugcccgcacgccggcgccaagagcuucuacaagaaccucaucuggcuggugaagaaggggaacuccuaccccaagcugagcaaguccuacaucaacgacaagggcaaggaggugcucguccuguggggcgugcaccaccccagcaccagcgccgaccagcagucccuguaccagaacgccgacgccuacguguucgucgggacgagccgguacuccaagaaguucaagcccgagaucgccauccgcccgaaggugcgggaccaggagggccgcaugaacuacuacuggacccucguggagcccggggacaagaucaccuucgaggcgaccggcaaccuggucgugccccgguacgccuucgccauggagcgcaacgccgggagcggcaucaucaucuccgacacgcccgugcacgacugcaacacgaccugccagaccccgaagggcgccaucaacaccagccugcccuuccagaacauccaccccaucaccaucgggaagugccccaaguacgucaaguccaccaagcuccggcuggcgaccggccugcgcaacgugccgagcauccagucccggggccucuucggggccaucgccggguucaucgagggcggcuggacggggaugguggacggcugguacggguaccaccaccagaacgagcagggcagcggguacgccgccgaccugaaguccacccagaacgcgaucgacaagaucaccaacaaggucaacagcgugaucgagaagaugaacacccaguucacggccgucggcaaggaguucaaccaccuggagaagcgcaucgagaaccucaacaagaagguggacgacggcuuccuggacaucuggaccuacaacgccgagcugcucgugcugcuggagaacgagcggacccucgacuaccacgacuccaacgucaagaaccuguacgagaaggugcgcagccagcugaagaacaacgccaaggagaucgggaacggcugcuucgaguucuaccacaagugcgacaacacgugcauggaguccgugaagaacgggaccuacgacuaccccaaguacagcgaggaggccaagcucaaccgggagaagaucgacggcgucaagcuggaguccacccgcaucuaccagauccuggcgaucuacagcaccguggccuccagccucgugcuggucgugagccugggggccaucuccuucuggaugugcagcaacggcucccuccagugccggaucugcaucuga

SEQ ID NO: 75157 - RNA, 1701 nt, Artificial Sequence
  derived and/or modified CDS sequence (opt1) from hemagglutinin__InfluenzaA__AHL80751
augaaggccauccuggugguccuccuguacaccuucgccaccgcgaacgccgacacgcugugcaucggcuaccacgccaacaacagcaccgacaccguggacaccauccucgagaagaacgugacggucacccacuccgugaaccugcuggaggacaagcacaacgggaagcucugcaagcugcgcggcguggcgccccugcaccucgggaagugcaacaucgccggcuggauccuggggaacccggagugcgagagccuguccaccgccagcuccuggagcuacaucgucgagaccuccagcuccgacaacggcacgugcuaccccggcgacuucaucgacuacgaggagcuccgggagcagcugagcuccgugagcuccuucgagcgcuucgagaucuuccccaagaccagcuccuggcccaaccacgacagcaacaagggggugaccgccgccugcccgcacgccggcgcgaaguccuucuacaagaaccugaucuggcucgucaagaaggggaacagcuaccccaagcuguccaagagcuacaucaacgacaagggcaaggagauccuggugcucugggggauccaccaccccagcaccuccgccgaccagcagagccuguaccagaacgccgacgccuacguguucgucggcacgucccgguacagcaagaaguucaagcccgagaucgccauccgcccgaaggugcgggaccaggagggccgcaugaacuacuacuggacccugguggagcccggggacaagaucaccuucgaggcgaccggcaaccucgucgugccccgguacgccuucgccauggagaagaacgccggguccggcaucaucaucagcgacacgcccgugcacgacugcaacacgaccugccagaccccgaagggcgccaucaacaccucccugcccuuccagaacauccaccccaucaccaucgggaagugccccaaguacgucaagagcaccaagcugcgccucgcgaccggccugcggaacgugccguccauccagagccgcgggcuguucggcgccaucgccggguucaucgagggcggcuggacggggaugguggacggcugguacggguaccaccaccagaacgagcagggcuccggguacgccgccgaccucaagagcacccagaacgcgaucgacgagaucaccaacaaggucaacuccgugaucgagaagaugaacacccaguucacggccgugggcaaggaguucaaccaccuggagaagcggaucgagaaccugaacaagaaggucgacgacggcuuccucgacaucuggaccuacaacgccgagcugcuggugcuccuggagaacgagcgcacccuggacuaccacgacagcaacgucaagaaccucuacgagaaggugcggucccagcugaagaacaacgccaaggagguggggaacggcugcuucgaguucuaccacaagugcgacaacacgugcauggagagcgucaagaacgggaccuacgacuaccccaaguacuccgaggaggccaagcugaaccgcgaggagaucgacggcgugaagcucgagagcacccggaucuaccagauccuggcgaucuacuccaccguggccagcagccugguccucguggugucccugggggccaucagcuucuggaugugcuccaacggcagccugcagugccgcaucugcaucuga

SEQ ID NO: 75158 - RNA, 1701 nt, Artificial Sequence
  derived and/or modified CDS sequence (opt1) from hemagglutinin__InfluenzaA__AHL80762
augaaggccauccuggugguccuccuguacaccuucgccaccgcgaacgccgacacgcugugcaucggcuaccacgccaacaacagcaccgacaccguggacaccgugcucgagaagaacgucacggugacccacuccgugaaccugcuggaggacaagcacaacgggaagcucugcaagcugcgcggcgucgcgccccugcaccucgggaagugcaacaucgccggcuggauccuggggaacccggagugcgagagccuguccaccgccagcuccuggagcuacaucguggagaccuccagcuccgacaacggcacgugcuaccccggcgacuucaucaacuacgaggagcuccgggagcagcugagcuccgugagcuccuucgagcgcuucgagaucuuccccaagaccagcuccuggcccaaccacgacagcaacaagggggucaccgccgccugcccgcacgccggcgcgaaguccuucuacaagaaccugaucuggcucgugaagaaggggaacagcuaccccaagcuguccaagagcuacaucaacgacaagggcaaggaggugcugguccucugggggauccaccaccccagcaccuccgccgaccagcagagccuguaccagaacgccgacgccuacguguucgugggcacgucccgguacagcaagaaguucaagcccgagaucgccauccgcccgaagguccgggaccaggagggccgcaugaacuacuacuggauccugguggagcccggggacaagaucaccuucgaggcgaccggcaaccucguggucccccgguacgccuucgccauggagcgcaacgccggguccggcaucaucaucagcgacacccccgugcacgacugcaacacgaccugccagaccccgaagggcgccaucaacaccucccugcccuuccagaacauccaccccaucacgaucgggaagugccccaaguacgucaagagcaccaagcugcggcucgcgaccggccugcgcaacgugccguccauccagagccgggggcuguucggcgccaucgccggguucaucgagggcggcuggaccgggaugguggacggcugguacggguaccaccaccagaacgagcagggcuccggguacgccgccgaccucaagagcacgcagaacgcgaucgacaagaucaccaacaaggugaacuccgucaucgagaagaugaacacccaguucaccgccgugggcaaggaguucaaccaccuggagaagcgcaucgagaaccugaacaagaaggucgacgacggcuuccucgacaucuggacguacaacgccgagcugcuggugcuccuggagaacgagcggacccuggacuaccacgacagcaacgugaagaaccucuacgagaagguccgcucccagcugaaggacaacgccaaggagaucgggaacggcugcuucgaguucuaccacaagugcgacaacacgugcauggagagcgugaagaacgggaccuacgacuaccccaaguacuccgaggaggccaagcugaaccgggaggagaucgacggcgugaagcucgagagcacccgcaucuaccagauccuggcgaucuacuccaccgucgccagcagccuggugcucguggucucccugggggccaucagcuucuggaugugcuccaacggcagccugcagugccggaucugcaucuga

SEQ ID NO: 75159 - RNA, 1701 nt, Artificial Sequence
  derived and/or modified CDS sequence (opt1) from hemagglutinin__InfluenzaA__AHL80784
augaaggccauccuggugguccuccuguacaccuucgccaccgcgaacgccgacacgcugugcaucggcuaccacgccaacaacagcaccgacaccguggacaccgugcucgagaagaacgucacggugacccacuccgugaaccugcuggaggacaagcacaacgggaagcucugcaagcugcgcggcgucgcgccccugcaccucgggaagugcaacaucgccggcuggauccuggggaacccggagugcgagagccuguccaccgccagcuccuggagcuacaucguggagaccuccagcuccgacaacggcacgugcuaccccggcgacuucaucgacuacgaggagcuccgggagcagcugagcuccgugagcuccuucgagcgcuucgagaucuuccccaagaccagcuccuggcccaaccacgacagcaacaaggggaucaccgccgccugcccgcacgccggcgcgaaguccuucuacaagaaccugaucuggcucgucaagaaggggaacagcuaccccaagcuguccaagagcuacaucaacgacaagggcaaggaggugcuggugcucugggggauccaccaccccagcaccuccgccgaccagcagagccuguaccagaacgccgacgccuacgucuucgugggcacgucccgguacagcaagaaguucaagcccgagaucgccauccgcccgaaggugcgggaccaggagggccgcaugaacuacuacuggacccuggucgagcccggggacaagaucaccuucgaggcgaccggcaaccucguggugccccgguacgccuucgccauggagcgcaacgccggguccggcaucaucaucagcgacacgcccguccacgacugcaacacgaccugccagaccccgaagggcgccaucaacaccucccugcccuuccagaacauccaccccaucaccaucgggaagugccccaaguacgucaagagcaccaagcugcggcucgcgaccggccugcgcaacgugccguccauccagagccgggggcuguucggcgccaucgccggguucaucgagggcggcuggacggggaugguggacggcugguacggguaccaccaccagaacgagcagggcuccggguacgccgccgaccucaagagcacccagaacgcgaucgacaagaucaccaacaaggugaacuccgugaucgagaagaugaacacccaguucacggccgucggcaaggaguucaaccaccuggagaagcgcaucgagaaccugaacaagaagguggacgacggcuuccucgacaucuggaccuacaacgccgagcugcugguccuccuggagaacgagcggacccuggacuaccacgacagcaacgugaagaaccucuacgagaaggugcgcucccagcugaagaacaacgccaaggagaucgggaacggcugcuucgaguucuaccacaagugcgacaacacgugcauggagagcgucaagaacgggaccuacgacuaccccaaguacuccgaggaggccaagcugaaccgggaggagaucgacggcgugaagcucgagagcacccgcaucuaccagauccuggcgaucuacuccaccguggccagcagccugguccucguggugucccugggggccaucagcuucuggaugugcuccaacggcagccugcagugccggaucugcaucuga

SEQ ID NO: 75160 - RNA, 1701 nt, Artificial Sequence; identical to SEQ ID NO: 67857
  derived and/or modified CDS sequence (opt1) from hemagglutinin__InfluenzaA__AHL80795

SEQ ID NO: 75161 - RNA, 1701 nt, Artificial Sequence
  derived and/or modified CDS sequence (opt1) from hemagglutinin__InfluenzaA__AHL80817
augaaggccauccuggugguccuccuguacaccuucgccaccgcgaacgccgacacgcugugcaucggcuaccacgccaacaacagcaccgacaccguggacaccgugcucgagaagaacgucacggugacccacuccgugaaccugcuggaggacaagcacaacgggaagcucugcaagcugcgcggcgucgcgccccugcaccucgggaacugcaacaucgccggcuggauccuggggaacccggagugcgagagccuguccaccgccagcuccuggagcuacaucguggaggccuccagcuccgacaacgggaccugcuaccccggcgacuucaucgacuacgaggagcuccgggagcagcugagcuccgugagcuccuucgagcgcuucgagaucuuccccaagacgagcuccuggcccaaccacgacagcaacaagggcgucaccgccgccugcccgcacgcgggcgccaaguccuucuacaagaaccugaucuggcucgugaagaaggggaacagcuaccccaagcuguccaagagcuacaucaacgacaagggcaaggaggugcugguccucugggggauccaccaccccagcaccuccgccgaccagcagagccuguaccagaacgccgacgccuacguguucgugggcaccucccgguacagcaagaaguucaagcccgagaucgcgauccgcccgaagguccgggaccaggagggccgcaugaacuacuacuggacgcugguggagcccggggacaagaucaccuucgaggccaccggcaaccucguggucccccgguacgccuucgccauggagcgcaacgccggguccggcaucaucaucagcgacacccccgugcacgacugcaacacgaccugccagaccccgaagggcgcgaucaacaccucccugcccuuccagaacauccaccccaucacgaucgggaagugccccaaguacgucaagagcaccaagcugcggcucgccaccggccugcgcaacgugccguccauccagagccgggggcuguucggcgccaucgccggguucaucgagggcggcuggaccgggaugguggacggcugguacggguaccaccaccagaacgagcagggcuccggguacgccgcggaccucaagagcacgcagaacgccaucgacaagaucaccaacaaggugaacuccgucaucgagaagaugaacacccaguucaccgccgugggcaaggaguucaaccaccuggagaagcgcaucgagaaccugaacaagaaggucgacgacggcuuccucgacaucuggacguacaacgccgagcugcuggugcuccuggagaacgagcggacccuggacuaccacgacagcaacgugaagaaccucuacgagaagguccgcucccagcugaagaacaacgccaaggagaucgggaacggcugcuucgaguucuaccacaagugcgacaacacgugcauggagagcgugaagaacgggaccuacgacuaccccaaguacuccgaggaggcgaagcugaaccgggaggagaucgacggcgugaagcucgagagcacccgcaucuaccagauccuggccaucuacuccaccgucgccagcagccuggugcucguggucucccugggggccaucagcuucuggaugugcuccaacggcagccugcagugccggaucugcaucuga

SEQ ID NO: 75162 - RNA, 1701 nt, Artificial Sequence; identical to SEQ ID NO: 75161
  derived and/or modified CDS sequence (opt1) from hemagglutinin__InfluenzaA__AHL80828

SEQ ID NO: 75163 - RNA, 1701 nt, Artificial Sequence
  derived and/or modified CDS sequence (opt1) from hemagglutinin__InfluenzaA__AHL80839
augaaggccauccuggugguccuccuguacaccuucgccaccgcgaacgccgacacgcugugcaucggcuaccacgccaacaacagcaccgacaccguggacaccgugcucgagaagaacgucacggugacccacuccgugaaccugcuggaggacaagcacaacgggaagcucugcaagcugcgcggcgucgcgccccugcaccucgggaagugcaacaucgccggcuggauccuggggaacccggagugcgagagccuguccaccgccagcuccuggagcuacaucguggagaccuccagcuccgacaacggcacgugcuaccccggcgacuucaucgacuacgaggagcuccgggagcagcugagcuccgugagcuccuucgagcgcuucgagaucuuccccaagaccagcuccuggcccaaccacgacagcaacaaggggaucaccgccgccugcccgcacgccggcgcgaaguccuucuacaagaaccugaucuggcucgucaagaaggggaacagcuaccccaagcugucccggagcuacaucaacgacaagggcaaggaggugcuggugcucugggggauccaccaccccagcaccuccgccgaccagcagagccuguaccagaacgccgacgccuacgucuucgugggcacgucccgcuacagcaagaaguucaagcccgagaucgccauccggccgaaggugcgcgaccaggagggccggaugaacuacuacuggacccuggucgagcccggggacaagaucaccuucgaggcgaccggcaaccucguggugccccgcuacgccuucgccauggagcggaacgccggguccggcaucaucaucagcgacacgcccguccacgacugcaacacgaccugccagaccccgaagggcgccaucaacaccucccugcccuuccagaacauccaccccaucaccaucgggaagugccccaaguacgucaagagcaccaagcugcgccucgcgaccggccugcggaacgugccguccauccagagccgcgggcuguucggcgccaucgccggguucaucgagggcggcuggacggggaugguggacggcugguacggguaccaccaccagaacgagcagggcuccggguacgccgccgaccucaagagcacccagaacgcgaucgacaagaucaccaacaaggugaacuccgugaucgagaagaugaacacccaguucacggccgucggcaaggaguucaaccaccuggagaagcggaucgagaaccugaacaagaagguggacgacggcuuccucgacaucuggaccuacaacgccgagcugcugguccuccuggagaacgagcgcacccuggacuaccacgacagcaacgugaagaaccucuacgagaaggugcggucccagcugaagaacaacgccaaggagaucgggaacggcugcuucgaguucuaccacaagugcgacaacacgugcauggagagcgucaagaacgggaccuacgacuaccccaaguacuccgaggaggccaagcugaaccgcgaggagaucgacggcgugaagcucgagagcacccggaucuaccagauccuggcgaucuacuccaccguggccagcagccugguccucguggugucccugggggccaucagcuucuggaugugcuccaacggcagccugcagugccgcaucugcaucuga

SEQ ID NO: 75164 - RNA, 1701 nt, Artificial Sequence
  derived and/or modified CDS sequence (opt1) from hemagglutinin__InfluenzaA__AHL80861
augaaggccauccuggugguccuccuguacaccuucgccaccgcgaacgccgacacgcugugcaucggcuaccacgccaacaacagcaccgacaccguggacaccgugcucgagaagaacgucacggugacccacuccgugaaccugcuggaggacaagcacaacgggaagcucugcaagcugcgcggcgucgcgccccugcaccucgggaagugcaacaucgccggcuggauccuggggaacccggagugcgagagccuguccaccgccagcuccuggagcuacaucguggagaccuccagcuccgacaacggcacgugcuaccccggcgacuucaucgacuacgaggagcuccgggagcagcugagcuccgugagcuccuucgagcgcuucgagaucuuccccaagaccagcuccuggcccaaccacgacagcaacaagggggucaccgccgccugcccgcacgccggcgcgaaguccuucuacaagaaccugaucuggcucgugaagaaggggaacagcuaccccaagcuguccaagagcuacaucaacgacaagggcaaggaggugcugguccucugggggauccaccaccccagcaccuccgccgaccagcagagccuguaccagaacgccgacgccuacguguucgugggcacgucccgguacagcaagaaguucaagcccgagaucgccauccgcccgaagguccgggaccaggagggccgcaugaacuacuacuggacccugguggagcccggggacaagaucaccuucgaggcgaccggcaaccucguggucccccgguacgccuucgccauggagcgcaacgccggguccggcaucaucaucagcgacacgcccgugcacgacugcaacacgaccugccagaccccgaagggcgccaucaacaccucccugcccuuccagaacauccaccccaucaccaucgggaagugccccaaguacgucaagagcaccaagcugcggcucgcgaccggccugcgcaacgugccguccauccagagccgggggcuguucggcgccaucgccggguucaucgagggcggcuggacggggaugguggacggcugguacggguaccaccaccagaacgagcagggcuccggguacgccgccgaccucaagagcacccagaacgcgaucgacaagaucaccaacaaggugaacuccgucaucgagaagaugaacacccaguucacggccgugggcaaggaguucaaccaccuggagaagcgcaucggcaaccugaacaagaaggucgacgacggguuccucgacaucuggaccuacaacgccgagcugcuggugcuccuggagaacgagcggacccuggacuaccacgacagcaacgugaagaaccucuacgagaagguccgcucccagcugaagaacaacgccaaggagaucggcaacgggugcuucgaguucuaccacaagugcgacaacacgugcauggagagcgugaagaacggcaccuacgacuaccccaaguacuccgaggaggccaagcugaaccgggaggagaucgacggggugaagcucgagagcacccgcaucuaccagauccuggcgaucuacuccaccgucgccagcagccuggugcucguggucucccugggcgccaucagcuucuggaugugcuccaacggcagccugcagugccggaucugcaucuga

SEQ ID NO: 75165 - RNA, 1701 nt, Artificial Sequence
  derived and/or modified CDS sequence (opt1) from hemagglutinin__InfluenzaA__AHL80872
augaaggccauccuggugguccuccuguacaccuucgccaccgcgaacgccgacacgcugugcaucggcuaccacgccaacaacagcaccgacaccguggacaccgugcucgagaagaacgucacggugacccacuccgugaaccugcuggaggacaagcacaacgggaagcucugcaagcugcgcggcgucgcgccccugcaccucgggaagugcaacaucgccggcuggauccuggggaacccggagugcgagagccuguccaccgccagcuccuggagcuacaucguggagaccuccagcuccgacaacggcacgugcuaccccggcgacuucaucgacuacgaggagcuccgggagcagcugagcuccgugagcuccuucgagcgcuucgagaucuuccccaagaccagcuccuggcccaaccacgacagcaacaagggggucaccgccgccugcccgcacgccggcgcgaaguccuucuacaagaaccugaucuggcucgugaagaaggggaacagcuaccccaagcuguccaagagcuacaucaacgacaagggcaaggaggugcugguccucugggggauccaccaccccagcaccaacgccgaccagcagucccuguaccagaacgccgacgccuacguguucgugggcacgagccgguacuccaagaaguucaagcccgagaucgccauccgcccgaagguccgggaccaggagggccgcaugaacuacuacuggacccugguggagcccggggacaagaucaccuucgaggcgaccggcaaccucguggucccccgguacgccuucgccauggagcgcaacgccgggagcggcaucaucaucuccgacacgcccgugcacgacugcaacacgaccugccagaccccgaagggcgccaucaacaccagccugcccuuccagaacauccaccccaucaccaucgggaagugccccaaguacgugaaguccaccaagcugcggcucgcgaccggccugcgcaacgucccgagcauccagucccgggggcuguucggcgccaucgccggguucaucgagggcggcuggacggggaugguggacggcugguacggguaccaccaccagaacgagcagggcagcggguacgccgccgaccucaaguccacccagaacgcgaucgacaagaucaccaacaaggugaacagcgucaucgagaagaugaacacccaguucacggccgugggcaaggaguucaaccaccuggagaagcgcaucgagaaccugaacaagaaggucgacgacggcuuccucgacaucuggaccuacaacgccgagcugcuggugcuccuggagaacgagcggacccuggacuaccacgacuccaacgugaagaaccucuacgagaagguccgcagccagcugaagaacaacgccaaggagaucgggaacggcugcuucgaguucuaccacaagugcgacaacacgugcauggaguccgugaagaacgggaccuacgacuaccccaaguacagcgaggaggccaagcugaaccgggaggagaucgacggcgugaagcucgaguccacccgcaucuaccagauccuggcgaucuacagcaccgucgccuccagccuggugcucguggucagccugggggccaucuccuucuggaugugcagcaacggcucccugcagugccggaucugcaucuga

SEQ ID NO: 75166 - RNA, 1701 nt, Artificial Sequence; identical to SEQ ID NO: 67857
  derived and/or modified CDS sequence (opt1) from hemagglutinin__InfluenzaA__AHL80883

SEQ ID NO: 75167 - RNA, 1701 nt, Artificial Sequence; identical to SEQ ID NO: 67857
  derived and/or modified CDS sequence (opt1) from hemagglutinin__InfluenzaA__AHL80894

SEQ ID NO: 75168 - RNA, 1701 nt, Artificial Sequence; identical to SEQ ID NO: 67857
  derived and/or modified CDS sequence (opt1) from hemagglutinin__InfluenzaA__AHL80905

SEQ ID NO: 75169 - RNA, 1701 nt, Artificial Sequence; identical to SEQ ID NO: 70478
  derived and/or modified CDS sequence (opt1) from hemagglutinin__InfluenzaA__AHL80916

SEQ ID NO: 75170 - RNA, 1701 nt, Artificial Sequence; identical to SEQ ID NO: 70879
  derived and/or modified CDS sequence (opt1) from hemagglutinin__InfluenzaA__AHL80927

SEQ ID NO: 75171 - RNA, 1701 nt, Artificial Sequence; identical to SEQ ID NO: 70879
  derived and/or modified CDS sequence (opt1) from hemagglutinin__InfluenzaA__AHL80946

SEQ ID NO: 75172 - RNA, 1701 nt, Artificial Sequence
  derived and/or modified CDS sequence (opt1) from hemagglutinin__InfluenzaA__AHL80958
augaaggccauccuggugguccuccuguacaccuucgccaccgcgaacgccgacacgcugugcaucggcuaccacgccaacaacagcaccgacaccguggacaccgugcucgagaagaacgucacggugacccacuccgugaaccugcuggaggacaagcacaacgggaagcucugcaagcugcgcggcgucgcgccccugcaccucgggaagugcaacaucgccggcuggauccuggggaacccggagugcgagagccuguccaccgccagcuccuggagcuacaucguggagaccuccagcuccgacaacggcacgugcuaccccggcgacuucaucaacuacgaggagcuccgggagcagcugagcuccgugagcuccuucgagcgcuucgagaucuuccccaagaucagcuccuggcccaaccacgacagcaacaagggggucaccgccgccugcccgcacgccggcgcgaaguccuucuacaagaaccugaucuggcucgugaagaaggggaacagcuaccccaagcuguccaagagcuacaucaacgacaagggcaaggaggugcugguccucugggggauccaccaccccagcaccaccgccgaccagcagucccuguaccagaacgccgacgccuacguguucgugggcacgagccgguacuccaagaaguucaagcccgagaucgccauccgcccgaagguccgggaccaggagggccgcaugaacuacuacuggacccugguggagcccggggacaagaucaccuucgaggcgaccggcaaccucguggucccccgguacgccuucgccauggagcgcaacgccgggagcggcaucaucaucuccgacacgagcgugcacgacugcaacacgaccugccagacccccaagggcgccaucaacaccucccugccguuccagaacauccaccccaucaccaucgggaagugccccaaguacgucaagagcaccaagcugcggcucgcgaccggccugcgcaacgugcccuccauccagagccgggggcuguucggcgccaucgccggguucaucgagggcggcuggacggggaugguggacggcugguacggguaccaccaccagaacgagcagggcuccggguacgccgccgaccucaagagcacccagaacgcgaucgacaagaucaccaacaaggugaacuccgucaucgagaagaugaacacccaguucacggccgugggcaaggaguucaaccaccuggagaagcgcaucgagaaccugaacaagaaggucgacgacggcuuccucgacaucuggaccuacaacgccgagcugcuggugcuccuggagaacgagcggacccuggacuaccacgacagcaacgugaagaaccucuacgagaagguccgcaaccagcugaagaacaacgccaaggagaucgggaacggcugcuucgaguucuaccacaagugcgacaacacgugcauggaguccgugaagaacgggaccuacgacuacccgaaguacagcgaggaggccaagcugaaccgggaggagaucgacggcgugaagcucgaguccacccgcaucuaccagauccuggcgaucuacagcaccgucgccuccagccuggugcucguggucagccugggggccaucuccuucuggaugugcagcaacggcucccugcagugccggaucugcaucuga

SEQ ID NO: 75173 - RNA, 1701 nt, Artificial Sequence
  derived and/or modified CDS sequence (opt1) from hemagglutinin__InfluenzaA__AHL81001
augaagaccaucaucgcccugagcuacauccucugccugaucuucgcccagaagcugcccggcaacgacaacuccaccgcgacgcucugccuggggcaccacgccgugccgaacggcaccaucgucaagaccaucaccaacgaccagaucgaggugacgaacgccaccgagcuggugcagagcuccagcaccggggagaucugcaacagcccccaccagauccucgacggcgagaacugcacccugaucgacgcccugcucggggacccccagugcgacggcuuccagaacaagaagugggaccuguucgucgagcgcagcaaggcccacuccaacugcuaccccuacgacgugccggacuacgcgagccugcggucccucguggccagcuccggcacgcuggaguucaacaacgagagcuucaacuggaccggggucacccagaacggcaccuccagcgccugcauccgccgguccaacaacagcuucuucucccgccugaacuggcucacgcaccugaacuucaaguaccccgcccugaacgugaccaugcccaacaacgagcaguucgacaagcucuacaucuggggcgugcaccaccccgggaccgacaaggaccagaucuuccuguacgcgcaggccgccgggcggaucaccgucagcacgaagcgcucccagcaggccgugaucccgaacaucggcagccggccccgcgugcggaacauccccagccgcgucuccaucuacuggaccaucgugaagcccggcgacauccugcucaucaacagcaccgggaaccugaucgccccgcggggcuacuucaagauccgcuccgggaaguccuccaucaugcggagcgacgcgcccaucggcaagugcaacuccgccugcaucacccccaacggcagcauccccaacgacaagccguuccagaacgugaaccgcaucacguacggggccugcccccgguacgucaagcagaacacccugaagcucgccaccggcaugcgcaacgugcccgagaagcagacccgggggaucuucggcgccaucgcgggguucaucgagaacggcugggagggcaugguggacgggugguacggcuuccgccaccagaacuccgaggggcggggccaggccgccgaccucaagagcacgcaggccgccaucgaccagaucaacgggaagcugaaccgccugaucggcaagaccaacgagaaguuccaccagaucgagaaggaguucuccgaggucgagggccggauccaggaccuggagaaguacguggaggacaccaagaucgaccuguggagcuacaacgcggagcuccugguggcccuggagaaccagcacaccaucgaccucacggacuccgagaugaacaagcuguucgagaagaccaagaagcagcugcgcgagaacgccgaggacauggggaacggcugcuucaagaucuaccacaagugcgacaacgccugcaucgggagcauccgcaacggcaccuacgaccacgacgucuaccgggacgaggcccucaacaaccgcuuccagaucaaggggguggagcugaaguccggcuacaaggacuggauccuguggaucagcuucgcgaucuccugcuuccuccugugcguggcccugcucggcuucaucaugugggccugccagaaggggaacauccggugcaacaucugcaucuga

SEQ ID NO: 75174 - RNA, 1701 nt, Artificial Sequence; identical to SEQ ID NO: 70879
  derived and/or modified CDS sequence (opt1) from hemagglutinin__InfluenzaA__AHL81013

SEQ ID NO: 75175 - RNA, 1701 nt, Artificial Sequence; identical to SEQ ID NO: 70879
  derived and/or modified CDS sequence (opt1) from hemagglutinin__InfluenzaA__AHL81025

SEQ ID NO: 75176 - RNA, 1701 nt, Artificial Sequence; identical to SEQ ID NO: 70879
  derived and/or modified CDS sequence (opt1) from hemagglutinin__InfluenzaA__AHL81037

SEQ ID NO: 75177 - RNA, 1701 nt, Artificial Sequence; identical to SEQ ID NO: 70879
  derived and/or modified CDS sequence (opt1) from hemagglutinin__InfluenzaA__AHL81049

SEQ ID NO: 75178 - RNA, 1701 nt, Artificial Sequence; identical to SEQ ID NO: 75172
  derived and/or modified CDS sequence (opt1) from hemagglutinin__InfluenzaA__AHL81061

SEQ ID NO: 75179 - RNA, 1701 nt, Artificial Sequence; identical to SEQ ID NO: 75172
  derived and/or modified CDS sequence (opt1) from hemagglutinin__InfluenzaA__AHL81072

SEQ ID NO: 75180 - RNA, 1701 nt, Artificial Sequence; identical to SEQ ID NO: 72385
  derived and/or modified CDS sequence (opt1) from hemagglutinin__InfluenzaA__AHL81083

SEQ ID NO: 75181 - RNA, 1701 nt, Artificial Sequence; identical to SEQ ID NO: 70879
  derived and/or modified CDS sequence (opt1) from hemagglutinin__InfluenzaA__AHL81095

SEQ ID NO: 75182 - RNA, 1701 nt, Artificial Sequence
  derived and/or modified CDS sequence (opt1) from hemagglutinin__InfluenzaA__AHL81118
augaaggccauccuggugguccuccuguacaccuucgccaccgcgaacgccgacacgcugugcaucggcuaccacgccaacaacagcaccgacaccguggacaccgugcucgagaagaacgucacggugacccacuccgugaaccugcuggaggacaagcacaacgggaagcucugcaagcugcgcggcgucgcgccccugcaccucgggaagugcaacaucgccggcuggauccuggggaacccggagugcgagagccuguccaccgcgagcuccuggagcuacaucguggagaccuccagcuccgacaacggcacgugcuaccccggcgacuucaucaacuacgaggagcuccgggagcagcugagcuccgugagcuccuucgagcgcuucgagaucuuccccaagaccaacagcuggcccaaccacgacuccaacaagggggucaccgccgccugcccgcacgccggcgccaagagcuucuacaagaaccugaucuggcucgugaagaaggggaacuccuaccccaagcugagcaaguccuacaucaacgacaagggcaaggaggugcugguccucugggggauccaccaccccagcaccacggccgaccagcagagccuguaccagaacgccgacgccuacguguucgugggcaccucccgguacagcaagaaguucaagcccgagaucgccauccgcccgaagguccgggaccaggagggccgcaugaacuacuacuggacccugguggagcccggggacaagaucaccuucgaggcgacgggcaaccucguggucccccgguacgccuucgccauggagcgcaacgccggguccggcaucaucaucagcgacacccccgugcacgacugcaacacgaccugccagaccccgaagggcgccaucaacaccucccugcccuuccagaacauccaccccaucaccaucgggaagugccccaaguacgucaagagcaccaagcugcggcucgcgacgggccugcgcaacgugccguccauccagagccgggggcuguucggcgccaucgccggguucaucgagggcggcuggaccgggaugguggacggcugguacggguaccaccaccagaacgagcagggcuccggguacgccgccgaccucaagagcacccagaacgcgaucgacaagaucaccaacaaggugaacuccgucaucgagaagaugaacacgcaguucaccgccgugggcaaggaguucaaccaccuggagaagcgcaucgagaaccugaacaagaaggucgacgacggcuuccucgacaucuggaccuacaacgccgagcugcuggugcuccuggagaacgagcggacccuggacuaccacgacagcaacgugaagaaccucuacgagaagguccgcaaccagcugaagaacaacgccaaggagaucgggaacggcugcuucgaguucuaccacaagugcgacaacacgugcauggaguccgugaagaacgggaccuacgacuaccccaaguacagcgaggaggccaagcugaaccgggaggagaucgacggcgugaagcucgaguccacccgcaucuaccagauccuggcgaucuacagcaccgucgccuccagccuggugcucguggucucccugggggccaucagcuucuggaugugcagcaacggcucccugcagugccggaucugcaucuga

SEQ ID NO: 75183 - RNA, 1701 nt, Artificial Sequence; identical to SEQ ID NO: 70879
  derived and/or modified CDS sequence (opt1) from hemagglutinin__InfluenzaA__AHL81129

SEQ ID NO: 75184 - RNA, 1701 nt, Artificial Sequence; identical to SEQ ID NO: 70879
  derived and/or modified CDS sequence (opt1) from hemagglutinin__InfluenzaA__AHL81141

SEQ ID NO: 75185 - RNA, 1701 nt, Artificial Sequence; identical to SEQ ID NO: 70879
  derived and/or modified CDS sequence (opt1) from hemagglutinin__InfluenzaA__AHL81153

SEQ ID NO: 75186 - RNA, 1701 nt, Artificial Sequence
  derived and/or modified CDS sequence (opt1) from hemagglutinin__InfluenzaA__AHL81165
augaagaccaucaucgcccugagcuacauccucugccugguguucgcccagaagcugcccggcaacgacaacuccaccgcgacgcucugccuggggcaccacgccgucccgaacggcaccaucgugaagaccaucaccaacgaccagaucgaggugacgaacgccaccgagcugguccagagcuccagcgccggggagaucugcgacagcccccaccagauccucgacggcgagaacugcacccugaucgacgcccugcucggggacccccagugcgacggcuuccagaacaagaagugggaccuguucguggagcgcagccgggcguacuccaacugcuaccccuacgacgugccggacuacgccagccugcgcucccucgucgccagcuccggcacccuggaguucaacaacgagagcuucaacuggacgggggugacccagaacggcaccuccagcgccugcauccggcgcuccaacaacagcuucuucucccggcugaacuggcucacccaccugaacuucaaguaccccgcgcugaacgugacgaugcccaacaacgagcaguucgacaagcucuacaucuggggcguccaccaccccgggaccgacaaggaccagaucuuccuguacgcccaggccagcgggcgcaucaccguguccaccaagcggagccagcaggccgugaucccgaacaucggcagccgcccccggguccgcaacauccccucccggaucagcaucuacuggacgaucgugaagcccggcgacauccugcucaucaacuccaccgggaaccugaucgccccgcgcggcuacuucaagauccggagcgggaaguccagcaucaugcgcuccgacgcgcccaucggcaagugcaacagcgagugcaucacccccaacggcuccauccccaacgacaagccguuccagaacgugaaccggaucaccuacggggccugcccccgcuacgucaagcagagcacgcugaagcucgccaccggcaugcggaacgugcccgagaagcagacccgcgggaucuucggcgccaucgccggguucaucgagaacggcugggagggcaugauggacgggugguacggcuuccggcaccagaacuccgaggggcgcggccaggcggccgaccugaaguccacccaggccgccaucgaccagaucaacgggaagcugaaccggcucaucggcaagacgaacgagaaguuccaccagaucgagaaggaguucuccgagguggagggccgcauccaggaccuggagaaguacgucgaggacaccaagaucgaccuguggagcuacaacgccgagcuccugguggcgcuggagaaccagcacaccaucgaccucaccgacuccgagaugaacaagcuguucgagaagacgaagaagcagcugcgcgagaacgccgaggacauggggaacggcugcuucaagaucuaccacaagugcgacaacgccugcaucgggagcauccggaacggcaccuacgaccacgacguguaccgcgacgaggcccucaacaaccgguuccagaucaagggggucgagcugaaguccggcuacaaggacuggauccuguggaucagcuucgccaucuccugcuuccuccugugcguggcgcugcucggcuucaucaugugggccugccagaaggggaacauccgcugcaacaucugcaucuga

SEQ ID NO: 75187 - RNA, 1701 nt, Artificial Sequence; identical to SEQ ID NO: 75186
  derived and/or modified CDS sequence (opt1) from hemagglutinin__InfluenzaA__AHL81177

SEQ ID NO: 75188 - RNA, 1701 nt, Artificial Sequence; identical to SEQ ID NO: 75173
  derived and/or modified CDS sequence (opt1) from hemagglutinin__InfluenzaA__AHL81189

SEQ ID NO: 75189 - RNA, 1701 nt, Artificial Sequence
  derived and/or modified CDS sequence (opt1) from hemagglutinin__InfluenzaA__AHL81212
augaagaccaucaucgcccugagcuacauccucugccugguguucgcccagaagcugcccggcaacgacaacuccaccgcgacgcucugccuggggcaccacgccgucccgaacggcaccaucgugaagaccaucaccaacgaccagaucgaggugacgaacgccaccgagcugguccagagcuccagcaccggggagaucugcaacagcccccaccagauccucgacggcgagaacugcacccugaucgacgcccugcucggggacccccagugcgacggcuuccagaacaagaagugggaccuguucguggagcgcagcaaggcccacuccaacugcuaccccuacgacgugccggacuacgcgagccugcggucccucgucgccagcuccggcacgcuggaguucaagaacgagagcuucaacuggaccggggugacccagaacggcaccuccagcgccugcauccgccgguccaacaacagcuucuucucccgccugaacuggcucacgcaccugaacuucaaguaccccgcccugaacgugaccaugcccaacaacgagcaguucgacaagcucuacaucuggggcguccaccaccccgggaccgacaaggaccagaucuuccuguacgcgcaggccgccgggcggaucaccgugagcacgaagcgcucccagcaggccgugaucccgaacaucggcagccggccccgcguccggaacauccccagccgcguguccaucuacuggaccaucgugaagcccggcgacauccugcucaucaacagcaccgggaaccugaucgccccgcggggcuacuucaagauccgcuccgggaaguccuccaucaugcggagcgacgcgcccaucggcaagugcaacuccgccugcaucacccccaacggcagcauccccaacgacaagccguuccagaacgucaaccgcaucacguacggggccugcccccgguacgugaagcagaacacccugaagcucgccaccggcaugcgcaacgugcccgagaagcagacccgggggaucuucggcgccaucgcgggguucaucgagaacggcugggagggcauggucgacgggugguacggcuuccgccaccagaacuccgaggggcggggccaggccgccgaccucaagagcacgcaggccgccaucgaccagaucaacgggaagcugaaccgccugaucggcaagaccaacgagaaguuccaccagaucgagaaggaguucuccgagguggagggccggauccaggaccuggagaaguacguggaggacaccaagaucgaccuguggagcuacaacgcggagcuccuggucgcccuggagaaccagcacaccaucgaccucacggacuccgagaugaacaagcuguucgagaagaccaagaagcagcugcgcgagaacgccgaggacauggggaacggcugcuucaagaucuaccacaagugcgacaacgccugcaucgggagcauccgcaacggcaccuacgaccacgacguguaccgggacgaggcccucaacaaccgcuuccagaucaaggggguggagcugaaguccggcuacaaggacuggauccuguggaucagcuucgcgaucuccugcuuccuccugugcgucgcccugcucggcuucaucaugugggccugccagaaggggaacauccggugcaacaucugcaucuga

SEQ ID NO: 75190 - RNA, 1701 nt, Artificial Sequence
  derived and/or modified CDS sequence (opt1) from hemagglutinin__InfluenzaA__AHL81224
augaaggccauccuggugguccuccuguacaccuucgccaccgcgaacgccgacacgcugugcaucggcuaccacgccaacaacagcaccgacaccguggacaccgugcucgagaagaacgucacggugacccacuccgugaaccugcuggaggacaagcacaacgggaagcucugcaagcugcgcggcgucgcgccccugcaccucgggaagugcaacaucgccggcuggauccuggggaacccggagugcgagagccuguccaccgccagcuccuggagcuacaucguggagaccuccagcuccgacaacggcacgugcuaccccggcgacuucaucgacuacgaggagcuccgggagcagcugagcuccgugagcuccuucgagcgcuucgagaucuuccccaagaccagcuccuggcccaaccacgacagcaacaagggggucaccgccgccugcccgcacgccggcgcgaagggguucuacaagaaccugaucuggcucgugaagaagggcaacuccuaccccaagcugagcaaguccuacaucaacgacaaggggaaggaggugcugguccucuggggcauccaccaccccagcaccacggccgaccagcagagccuguaccagaacgccgacaccuacguguucgugggcaccucccgguacagcaagaaguucaagcccgagaucgccauccgcccgaagguccgggaccaggaggggcgcaugaacuacuacuggacccugguggagcccggcgacaagaucacguucgaggccaccgggaaccucguggucccccgguacgcguucgccauggagcgcaccgccggcuccggcaucaucaucagcgacacccccgugcacgacugcaacacgaccugccagaccccgaagggggccaucaacaccucccugcccuuccagaacauccaccccaucacgaucggcaagugccccaaguacgucaagagcaccaagcugcggcucgccaccgggcugcgcaacgugccguccauccagagccggggccuguucggggcgaucgccggcuucaucgagggcggguggaccggcaugguggacgggugguacggcuaccaccaccagaacgagcagggguccggcuacgccgccgaccucaagagcacgcagaacgccaucgacaagaucaccaacaaggugaacuccgucaucgagaagaugaacacccaguucaccgcggugggcaaggaguucaaccaccuggagaagcgcaucgagaaccugaacaagaaggucgacgacggguuccucgacaucuggacguacaacgccgagcugcuggugcuccuggagaacgagcggacccuggacuaccacgacagcaacgugaagaaccucuacgagaagguccgcaaccagcugaagaacaacgccaaggagaucggcaacgggugcuucgaguucuaccacaagugcgacaacacgugcauggaguccgugaagaacggcaccuacgacuaccccaaguacagcgaggaggccaagcugaaccgggaggagaucgacggggugaagcucgaguccacccgcaucuaccagauccuggccaucuacagcaccgucgcguccagccuggugcucguggucucccugggcgccaucagcuucuggaugugcagcaacggcucccugcagugccggaucugcaucuga

SEQ ID NO: 75191 - RNA, 1701 nt, Artificial Sequence; identical to SEQ ID NO: 70879
  derived and/or modified CDS sequence (opt1) from hemagglutinin__InfluenzaA__AHL81235

SEQ ID NO: 75192 - RNA, 1701 nt, Artificial Sequence; identical to SEQ ID NO: 70879
  derived and/or modified CDS sequence (opt1) from hemagglutinin__InfluenzaA__AHL81247

SEQ ID NO: 75193 - RNA, 1701 nt, Artificial Sequence; identical to SEQ ID NO: 70879
  derived and/or modified CDS sequence (opt1) from hemagglutinin__InfluenzaA__AHL81259

SEQ ID NO: 75194 - RNA, 1701 nt, Artificial Sequence; identical to SEQ ID NO: 70879
  derived and/or modified CDS sequence (opt1) from hemagglutinin__InfluenzaA__AHL81271

SEQ ID NO: 75195 - RNA, 1701 nt, Artificial Sequence; identical to SEQ ID NO: 70879
  derived and/or modified CDS sequence (opt1) from hemagglutinin__InfluenzaA__AHL81283

SEQ ID NO: 75196 - RNA, 1701 nt, Artificial Sequence; identical to SEQ ID NO: 70879
  derived and/or modified CDS sequence (opt1) from hemagglutinin__InfluenzaA__AHL81295

SEQ ID NO: 75197 - RNA, 1701 nt, Artificial Sequence; identical to SEQ ID NO: 75172
  derived and/or modified CDS sequence (opt1) from hemagglutinin__InfluenzaA__AHL81307

SEQ ID NO: 75198 - RNA, 1701 nt, Artificial Sequence; identical to SEQ ID NO: 70891
  derived and/or modified CDS sequence (opt1) from hemagglutinin__InfluenzaA__AHL81329

SEQ ID NO: 75199 - RNA, 1701 nt, Artificial Sequence
  derived and/or modified CDS sequence (opt1) from hemagglutinin__InfluenzaA__AHL81340
augaagaccaucaucgcccugagcuacauccucugccugguguucgcccagaagcugcccggcaacgacaacuccaccgcgacgcucugccuggggcaccacgccgucccgaacggcaccaucgugaagaccaucaccaacgaccagaucgaggugacgaacgccaccgagcugguccagagcuccagcaccggggagaucugcgacagcccccaccagauccucgacggcaagaacugcacccugaucgacgcccugcucggggacccccagugcgacggcuuccagaacaagaagugggaccuguucguggagcgcagcaaggccuacuccaacugcuaccccuacgacgugccggacuacgcgagccugcggucccucgucgccagcuccggcacgcuggaguucaacaacgagagcuucaacuggaccggggugacccaggacggcaccuccagcgccugcauccgcggguccaagaacagcuucuucucccggcugaacuggcucacgcaccugaacuucaaguaccccgcccugaacgugaccaugcccaacaacgagcaguucgacaagcucuacaucuggggcguccaccaccccgggaccgacaaggaccagaucuuccuguacgcgcaggccagcggccgcaucaccguguccacgaagcggagccagcaggccgccaucccgaacaucggcagccgcccccgggugcgcaacauccccucccggaucagcaucuacuggaccaucgucaagcccggggacauccugcucaucaacuccaccggcaaccugaucgccccgcgcggguacuucaagauccggagcggcaaguccagcaucaugcgcuccgacgcgcccaucggcaagugcaacagcgagugcaucacccccaacggguccauccccaacgacaagccguuccagaacgugaaccggaucacguacggcgccugcccccgcuacgugaagcagaacacccugaagcucgccaccgggaugcggaacguccccgagaagcagacccgcggcaucuucggggccaucgccggcuucaucgagaacggcugggaggggaugguggacggcugguacggguuccggcaccagaacagcgagggccgcgggcaggcggccgaccugaaguccacgcaggccgccaucgaccagaucaacggcaagcugaaccggcucaucggcaagaccaacgagaaguuccaccagaucgagaaggaguucagcgagguggaggggcgcauccaggaccuggagaaguacgucgaggacaccaagaucgaccugugguccuacaacgccgagcuccugguggcgcuggagaaccagcacaccaucgaccucacggacagcgagaugaacaagcuguucgagaagaccaagaagcagcugcgggagaacgccgaggacaugggcaacgggugcuucaagaucuaccacaagugcgacaacgccugcaucggcuccauccgcaacgggaccuacaaccacgacguguaccgcgacgaggcccucaacaagcgguuccagaucaagggcaucgagcugaaguccggcuacaaggacuggauccuguggaucuccuucgccaucagcugcuuccuccugugcgucgcgcugcucggguucaucaugugggccugccagaagggcaacauccgcugcaacaucugcaucuga

SEQ ID NO: 75200 - RNA, 1701 nt, Artificial Sequence; identical to SEQ ID NO: 70879
  derived and/or modified CDS sequence (opt1) from hemagglutinin__InfluenzaA__AHL81352

SEQ ID NO: 75201 - RNA, 1701 nt, Artificial Sequence
  derived and/or modified CDS sequence (opt1) from hemagglutinin__InfluenzaA__AHL81364
augaaggccauccuggugguccuccuguacaccuucgccaccgcgaacgccgacacgcugugcaucggcuaccacgccaacaacagcaccgacaccguggacaccgugcucgagaagaacgucacggugacccacuccgugaaccugcuggaggacaagcacaacgggaagcucugcaagcugcgcggcgucgcgccccugcaccucgggaagugcaacaucgccggcuggauccuggggaacccggagugcgagagccuguccaccgccagcuccuggagcuacaucguggagaccuccagcuccgacaacggcgccugcuaccccggcgacuucaucaacuacgaggagcuccgggagcagcugagcuccgugagcuccuucgagcgcuucgagaucuuccccaagacgaacagcuggcccaaccacgacuccaacaagggggucaccgccgccugcccgcacgcgggcgccaagagcuucuacaagaaccugaucuggcucgugaagaaggggaacuccuaccccaagcugagcaaguccuacaucaacgacaagggcaaggaggugcugguccucugggggauccaccaccccagcaccaccgccgaccagcagagccuguaccagaacgccgacgccuacguguucgugggcacgucccgguacagcaagaaguucaagcccgagaucgcgauccgcccgaagguccgggaccaggagggccgcaugaacuacuacuggacccugguggagcccggggacaagaucaccuucgaggccaccggcaaccucguggucccccgguacgccuucgccauggagcgcaacgccggguccggcaucaucaucagcgacacgcccgugcacgacugcaacacgaccugccagaccccgaagggcgcgaucaacaccucccugcccuuccagaacauccaccccaucaccaucgggaagugccccaaguacgucaagagcaccaagcugcggcucgccaccggccugcgcaacgugccguccauccagagccgggggcuguucggcgccaucgccggguucaucgagggcggcuggacggggaugguggacggcugguacggguaccaccaccagaacgagcagggcuccggguacgccgcggaccucaagagcacccagaacgccaucgacaagaucaccaacaaggugaacuccgucaucgagaagaugaacacccaguucacggccgugggcaaggaguucaaccaccuggagaagcgcaucgagaaccugaacaagaaggucgacgacggcuuccucgacaucuggaccuacaacgccgagcugcuggugcuccuggagaacgagcggacccuggacuaccacgacagcaacgugaagaaccucuacgagaagguccgcaaccagcugaagaacaacgccaaggagaucgggaacggcugcuucgaguucuaccacaagugcgacaacacgugcauggaguccgugaagaacgggaccuacgacuaccccaaguacagcgaggaggcgaagcugaaccgggaggagaucgacggcgugaagcucgaguccacccgcaucuaccagauccuggccaucuacagcaccgucgccuccagccuggugcucguggucucccugggggccaucagcuucuggaugugcagcaacggcucccugcagugccggaucugcaucuga

SEQ ID NO: 75202 - RNA, 1701 nt, Artificial Sequence
  derived and/or modified CDS sequence (opt1) from hemagglutinin__InfluenzaA__AHL81386
augaaggccauccuggugguccuccuguacaccuucgccaccgcgaacgccgacacgcugugcaucggcuaccacgccaacaacagcaccgacaccguggacaccgugcucgagaagaacgucacggugacccacuccgugaaccugcuggaggacaagcacaacgggaagcucugcaagcugcgcggcgucgcgccccugcaccucgggaagugcaacaucgccggcuggauccuggggaacccggagugcgagagccuguccaccgccagcuccuggagcuacaucguggagaccuccagcuccgacaacggcacgugcuaccccggcgacuucaucaacuacgaggagcuccgggagcagcugagcuccgugagcuccuucgagcgcuucgagaucuuccccaagaccaacagcuggcccaaccacgacuccaacaagggggucaccgccgccugcccgcacgccggcgucaagagcuucuacaagaaccugaucuggcucgugaagaaggggaacuccuaccccaagcugagcaaguccuacaucaacgacaagggcaaggaggugcuggugcucugggggauccaccaccccagcaccacggcggaccagcagagccuguaccagaacgccgacgccuacguguucgucggcaccucccgguacagcaagaaguucaagcccgagaucgccauccgcccgaaggugcgggaccaggagggccgcaugaacuacuacuggacccugguggagcccggggacaagaucaccuucgaggccacgggcaaccucgucgugccccgguacgcguucgccauggagcgcaacgccggguccggcaucaucaucagcgacacccccgugcacgacugcaacacgaccugccagaccccgaagggcgccaucaacaccucccugcccuuccagaacauccaccccaucaccaucgggaagugccccaaguacgucaagagcaccaagcugcggcucgccacgggccugcgcaacgugccguccauccagagccgggggcuguucggcgcgaucgccggguucaucgagggcggcuggaccgggaugguggacggcugguacggguaccaccaccagaacgagcagggcuccggguacgccgccgaccucaagagcacccagaacgccaucgacaagaucaccaacaaggucaacuccgugaucgagaagaugaacacgcaguucaccgcggucggcaaggaguucaaccaccuggagaagcgcaucgagaaccugaacaagaagguggacgacggcuuccucgacaucuggaccuacaacgccgagcugcuggugcuccuggagaacgagcggacccuggacuaccacgacagcaacgucaagaaccucuacgagaaggugcgcaaccagcugaagaacaacgccaaggagaucgggaacggcugcuucgaguucuaccacaagugcgacaacacgugcauggaguccgugaagaacgggaccuacgacuaccccaaguacagcgaggaggccaagcugaaccgggaggagaucgacggcgucaagcucgaguccacccgcaucuaccagauccuggccaucuacagcaccguggcguccagccuggugcucgucgugucccugggggccaucagcuucuggaugugcagcaacggcucccugcagugccggaucugcaucuga

SEQ ID NO: 75203 - RNA, 1701 nt, Artificial Sequence; identical to SEQ ID NO: 70879
  derived and/or modified CDS sequence (opt1) from hemagglutinin__InfluenzaA__AHL81397

SEQ ID NO: 75204 - RNA, 1701 nt, Artificial Sequence; identical to SEQ ID NO: 75189
  derived and/or modified CDS sequence (opt1) from hemagglutinin__InfluenzaA__AHL81409

SEQ ID NO: 75205 - RNA, 1701 nt, Artificial Sequence; identical to SEQ ID NO: 75159
  derived and/or modified CDS sequence (opt1) from hemagglutinin__InfluenzaA__AHL81419

SEQ ID NO: 75206 - RNA, 1701 nt, Artificial Sequence; identical to SEQ ID NO: 67857
  derived and/or modified CDS sequence (opt1) from hemagglutinin__InfluenzaA__AHL81430

SEQ ID NO: 75207 - RNA, 1701 nt, Artificial Sequence; identical to SEQ ID NO: 64654
  derived and/or modified CDS sequence (opt1) from hemagglutinin__InfluenzaA__AHL88951

SEQ ID NO: 75208 - RNA, 1701 nt, Artificial Sequence; identical to SEQ ID NO: 64654
  derived and/or modified CDS sequence (opt1) from hemagglutinin__InfluenzaA__AHL89030

SEQ ID NO: 75209 - RNA, 1701 nt, Artificial Sequence
  derived and/or modified CDS sequence (opt1) from hemagglutinin__InfluenzaA__AHL89042
augaagaccaucaucgcccugagcuacauccucugccugguguucgcccagaagcugcccggcaacgacaacuccaccgcgacgcucugccuggggcaccacgccgucccgaacggcaccaucgugaagaccaucaccaacgaccagaucgaggugacgaacgccaccgagcugguccagagcuccagcaccggggagaucugcgacagcccccaccagauccucgacggcgagaacugcacccugaucgacgcccugcucggggacccccagugcgacggcuuccagaacaagaagugggaccuguucguggagcgcagcaaggccuacuccaacugcuaccccuacgacgugccggacuacgcgagccugcggucccucgucgccagcuccggcacgcuggaguucaacaacgagaacuucaacuggaccggggugacccagaacggcaccagcuccgccugcaagcgccggagcaacaacuccuucuucagccgccugaacuggcucacgcaccugaaguucaaguaccccgcccugaacgugaccaugcccaacaacgagaaguucgacaagcucuacaucuggggcguccaccaccccgggaccgacaacgaccagaucuuccuguacgcgcaggccuccgggcggaucaccgugagcacgaagcgcucccagcagaccgugaucccgaacaucggcagccggccccgcguccggaacauccccagccgcaucuccaucuacuggaccaucgugaagcccggcgacauccugcucaucaacagcaccgggaaccugaucgccccgcggggcuacuucaagauccgcuccgggaaguccuccaucaugcggagcgacgcccccaucggcaagugcaacuccgagugcaucacgcccaacggcagcauccccaacgacaagccguuccagaacgugaaccgcaucaccuacggggccugcccccgguacgucaagcagaacacccugaagcucgcgaccggcaugcgcaacgugcccgagaagcagacgcgggggaucuucggcgccaucgccggguucaucgagaacggcugggagggcaugguggacgggugguacggcuuccgccaccagaacuccgaggggaucggccaggccgccgaccucaagagcacccaggcggccaucaaccagaucaacgggaagcugaaccggcugaucggcaagaccaacgagaaguuccaccagaucgagaaggaguucuccgaggucgagggccgcauccaggaccuggagaaguacguggaggacaccaagaucgaccuguggagcuacaacgccgagcuccugguggcccuggagaaccagcacacgaucgaccucaccgacuccgagaugaacaagcuguucgagcggaccaagaagcagcugcgcgagaacgccgaggacauggggaacggcugcuucaagaucuaccacaagugcgacaacgcgugcaucgggagcauccgcaacggcaccuacgaccacgacgucuaccgggacgaggcccucaacaaccgcuuccagaucaaggggguggagcugaaguccggcuacaaggacuggauccuguggaucagcuucgccaucuccugcuuccuccugugcguggcccuggucggcuucaucaugugggccugccagaaggggaacauccggugcaacaucugcaucuga

SEQ ID NO: 75210 - RNA, 1701 nt, Artificial Sequence
  derived and/or modified CDS sequence (opt1) from hemagglutinin__InfluenzaA__AHL89054
augaagaccaucaucgcccugagcuacauccucugccugguguucgcccagaagcugcccggcaacgacaacuccaccgcgacgcucugccuggggcaccacgccgucccgaacggcaccaucgugaagaccaucaccaacgaccagaucgaggugacgaacgccaccgagcugguccagagcuccagcaccgggggcaucugcgacagcccccaccagauccucgacggggagaacugcacccugaucgacgcccugcucggcgacccccagugcgacggcuuccagaacaagaagugggaccuguucguggagcgcagcaaggccuacuccaacugcuaccccuacgacgugccggacuacgcgagccugcggucccucgucgccagcuccgggacgcuggaguucaacaacgagagcuucaacuggaccggcgugacccagaacgggaccuccagcgccugcaagcgccgguccaacaacagcuucuucucccgccugaacuggcucacgcaccugaaguucaaguaccccgcccugaacgugaccaugcccaacaacgagaaguucgacaagcucuacaucuggggcguccaccaccccgggaccgacaacgaccagaucuuccuguacgcgcaggccagcggccggaucaccguguccacgaagcgcagccagcagaccgugaucccgaacaucggcagccggccccgcguccggaacauccccucccgcaucagcaucuacuggaccaucgugaagcccggggacauccugcucaucaacuccaccggcaaccugaucgccccgcggggguacuucaagauccgcagcggcaaguccagcaucaugcgguccgacgcccccaucggcaagugcaacagcgagugcaucacgcccaacggguccauccccaacgacaagccguuccagaacgugaaccgcaucaccuacggcgccugcccccgguacgucaagcagaacacccugaagcucgcgaccgggaugcgcaacgugcccgagaagcagacgcggggcaucuucggggccaucgccggcuucaucgagaacggcugggaggggaugguggacggcugguacggguuccgccaccagaacagcgagggcaucgggcaggccgccgaccugaaguccacccaggcggccaucaaccagaucaacggcaagcugaaccggcucaucggcaagaccaacgagaaguuccaccagaucgagaaggaguucagcgaggucgaggggcgcauccaggaccuggagaaguacguggaggacaccaagaucgaccugugguccuacaacgccgagcuccugguggcccuggagaaccagcacacgaucgaccucaccgacagcgagaugaacaagcuguucgagcggaccaagaagcagcugcgcgagaacgccgaggacaugggcaacgggugcuucaagaucuaccacaagugcgacaacgcgugcaucggcuccauccgcaacgggaccuacgaccacgacgucuaccgggacgaggcccucaacaaccgcuuccagaucaagggcguggagcugaaguccggcuacaaggacuggauccuguggaucuccuucgccaugagcugcuuccuccugugcguggcccugcucggguucaucaugugggccugccagaagggcaacauccggugcaacaucugcaucuga

SEQ ID NO: 75211 - RNA, 1701 nt, Artificial Sequence; identical to SEQ ID NO: 65605
  derived and/or modified CDS sequence (opt1) from hemagglutinin__InfluenzaA__AHL89066

SEQ ID NO: 75212 - RNA, 1701 nt, Artificial Sequence
  derived and/or modified CDS sequence (opt1) from hemagglutinin__InfluenzaA__AHL89078
augaagaccaucaucgcccugagcuacauccucugccugguguucgcccagaagcugcccggcgacgacaacuccaccgcgacgcucugccuggggcaccacgccgucccgaacggcaccguggugaagaccaucaccaacgaccagaucgaggucacgaacgccaccgagcuggugcagagcuccagcaccgggggcaucugcgacagcccccaccagauccucgacggggagaacugcacccugaucgacgcccugcucggcgacccccagugcgacggcuuccagaacaagaagugggaccuguucguggagcgcagcaaggccuacuccaacugcuaccccuacgacgucccggacuacgcgagccugcggucccucguggccagcuccgggacgcuggaguucaacaacgagagcuucaacuggaccggcgugacccagaacgggaccuccagcgccugcaagcgccgguccaacaacagcuucuucucccgccugaacuggcucacgcaccugaaguucaaguaccccgcccugaacgucaccaugcccaacaacgagaaguucgacaagcucuacaucuggggcgugcaccaccccgggaccgacaacgaccagaucuuccuguacgcgcaggccagcggccggaucaccguguccacgaagcgcagccagcagaccgucaucccgaacaucggcagccggccccgcgugcggaacauccccucccgcaucagcaucuacuggaccaucgugaagcccggggacauccugcucaucaacuccaccggcaaccugaucgccccgcggggguacuucaagauccgcagcggcaaguccagcaucaugcgguccgacgcccccaucggcaagugcaacagcgagugcaucacgcccaacggguccauccccaacgacaagccguuccagaacgucaaccgcaucaccuacggcgccugcccccgguacgugaagcagaacacccugaagcucgcgaccgggaugcgcaacgugcccgagaagcagacgcggggcaucuucggggccaucgccggcuucaucgagaacggcugggaggggauggucgacggcugguacggguuccgccaccagaacagcgagggcaucgggcaggccgccgaccugaaguccacccaggcggccaucaaccagaucaacggcaagcugaaccggcucaucggcaagaccaacgagaaguuccaccagaucgagaaggaguucagcgagguggaggggcgcauccaggaccuggagaaguacguggaggacaccaagaucgaccugugguccuacaacgccgagcuccuggucgcccuggagaaccagcacacgaucgaccucaccgacagcgagaugaacaagcuguucgagcggaccaagaagcagcugcgcgagaacgccgaggacaugggcaacgggugcuucaagaucuaccacaagugcgacaacgcgugcaucggcuccauccgcaacgggaccuacgaccacgacguguaccgggacgaggcccucaacaaccgcuuccagaucaagggcguggagcugaaguccggcuacaaggacuggauccuguggaucuccuucgccaucagcugcuuccuccugugcgucgcccugcucggguucaucaugugggccugccagaagggcaacauccggugcaacaucugcaucuga

SEQ ID NO: 75213 - RNA, 1701 nt, Artificial Sequence
  derived and/or modified CDS sequence (opt1) from hemagglutinin__InfluenzaA__AHL89090
augaagaccaucaucgcccugagcuacauccucugccugguguucgcccagaagcugcccggcaacgacaacuccaccgcgacgcucugccuggggcaccacgccgucccgaacggcaccaucgugaagaccaucaccaacgaccagaucgaggugacgaacgccaccgagcugguccagagcuccagcaccgggggcaucugcgacucccccuaccagauccucgacggggagaacugcacccugaucgacgcccugcucggcgacccccagugcgacggcuuccagaacaagaagugggaccuguucguggagcgcagcaaggccuacuccaacugcuaccccuacgacgugccggacuacgcgagccugcggucccucgucgccagcuccgggacgcuggaguucaacaacgagagcuucaacuggaccggcgugacccagaacgggaccuccagcgccugcaagcgccgguccaacaacagcuucuucucccgccugaacuggcucacgcaccugaaguucaaguaccccgcccugaacgugaccaugcccaacaacgagaaguucgacaagcucuacaucuggggcguccaccaccccgggaccgacaacgaccagaucuuccuguacgcgcaggccagcggccggaucaccguguccacgaagcgcagccagcagaccgugaucccgaacaucggcagccggccccgcguccggaacauccccucccgcaucagcaucuacuggaccaucgugaagcccggggacauccugcucaucaacuccaccggcaaccugaucgccccgcggggguacuucaagauccgcagcggcaaguccagcaucaugcgguccgacgcccccaucggcaagugcaacagcgagugcaucacgcccaacggguccauccccaacgacaagccguuccagaacgugaaccgcaucaccuacggcgccugcccccgguacgucaagcagaacacccugaagcucgcgaccgggaugcgcaacgugcccgagaagcagacgcggggcaucuucggggccaucgccggcuucaucgagaacggcugggaggggaugguggacggcugguacggguuccgccaccagaacagcgagggcaucgggcaggccgccgaccugaaguccacccaggcggccaucaaccagaucaacggcaagcugaaccggcucaucggcaagaccaacgagaaguuccaccagaucgagaaggaguucagcgaggucgaggggcgcauccaggaccuggagaaguacguggaggacaccaagaucgaccugugguccuacaacgccgagcuccugguggcccuggagaaccagcacacgaucgaccucaccgacagcgagaugaacaagcuguucgagcggaccaagaagcagcugcgcgagaacgccgaggacaugggcaacgggugcuucaagaucuaccacaagugcgacaacgcgugcaucggcuccauccgcaacgggaccuacgaccacgacgucuaccgggacgaggcccucaacaaccgcuuccagaucaagggcguggagcucaagagcggcuacaaggacuggauccuguggaucuccuucgccaucagcugcuuccugcugugcguggcccugcucggguucaucaugugggccugccagaagggcaacauccggugcaacaucugcaucuga

SEQ ID NO: 75214 - RNA, 1701 nt, Artificial Sequence; identical to SEQ ID NO: 64654
  derived and/or modified CDS sequence (opt1) from hemagglutinin__InfluenzaA__AHL89102

SEQ ID NO: 75215 - RNA, 1701 nt, Artificial Sequence; identical to SEQ ID NO: 64654
  derived and/or modified CDS sequence (opt1) from hemagglutinin__InfluenzaA__AHL89114

SEQ ID NO: 75216 - RNA, 1701 nt, Artificial Sequence
  derived and/or modified CDS sequence (opt1) from hemagglutinin__InfluenzaA__AHL89126
augaagaccaucaucgcccugagcuacauccucugccugguguucgcccagaagcugcccggcaacgacaacuccaccgcgacgcucugccuggggcaccacgccgucccgaacggcaccaucgugaagaccaucaccaacgaccagaucgaggugacgaacgccaccgagcugguccagagcuccagcaccgggggcaucugcgacagcccccaccagauccucgacggggagaacugcacccugaucgacgcccugcucggcgacccccagugcgacggcuuccagaacaagaagugggaccuguucguggagcgcagcaaggccuacuccaacugcuaccccuacgacgugccggacuacgcgagccugcggucccucgucgccagcuccgggacgcuggaguucaacaacgagaacuucaacuggaccggcgugacccagaacgggaccagcuccgccugcaagcgccggagcaacaacuccuucuucagccgccugaacuggcucacgcaccugaaguucaaguaccccgcccugaacgugaccaugcccaacaacgagaaguucgacaagcucuacaucuggggcguccaccaccccgggaccgacaacgaccagaucuuccuguacgcgcaggccuccggccggaucaccgugagcacgaagcgcucccagcagaccgugaucccgaacaucggcagccggccccgcguccggaacauccccagccgcaucuccaucuacuggaccaucgugaagcccggggacauccugcucaucaacagcaccggcaaccugaucgccccgcggggguacuucaagauccgcuccggcaagagcuccaucaugcggagcgacgcccccaucggcaagugcaacuccgagugcaucacgcccaacgggagcauccccaacgacaagccguuccagaacgugaaccgcaucaccuacggcgccugcccccgguacgucaagcagaacacccugaagcucgcgaccgggaugcgcaacgugcccgagaagcagacgcggggcaucuucggggccaucgccggcuucaucgagaacggcugggaggggaugguggacggcugguacggguuccgccaccagaacuccgagggcaucgggcaggccgccgaccugaaguccacccaggcggccaucaaccagaucaacggcaagcugaaccggcucaucggcaagaccaacgagaaguuccaccagaucgagaaggaguucuccgaggucgaggggcgcauccaggaccuggagaaguacguggaggacaccaagaucgaccuguggagcuacaacgccgagcuccugguggcccuggagaaccagcacacgaucgaccucaccgacuccgagaugaacaagcuguucgagcggaccaagaagcagcugcgcgagaacgccgaggacaugggcaacgggugcuucaagaucuaccacaagugcgacaacgcgugcaucggcagcauccgcaacgggaccuacgaccacgacgucuaccgggacgaggcccucaacaaccgcuuccagaucaagggcguggagcugaaguccggcuacaaggacuggauccuguggaucagcuucgccaucuccugcuuccuccugugcguggcccugcucggguucaucaugugggccugccagaagggcaacauccggugcaacaucugcaucuga

SEQ ID NO: 75217 - RNA, 1701 nt, Artificial Sequence
  derived and/or modified CDS sequence (opt1) from hemagglutinin__InfluenzaA__AHL89138
augaagaccaucaucgcccugagcuacauccucugccugguguucgcccagaagcugcccggcaacgacaacuccaccgcgacgcucugccuggggcaccacgccgucccgaacggcaccaucgugaagaccaucaccaacgaccagaucgaggugacgaacgccaccgagcugguccagagcuccagcaccggggagaucugcgacagcccccaccagauccucgacggcgagaacugcacccugaucgacgcccugcucggggacccccagugcgacggcuuccagaacaagaagugggaccuguucguggagcgcagcaaggccuacuccaacugcuaccccuacgacgugccggacuacgcgagccugcggucccucgucgccagcuccggcacgcuggaguucaacaacgagagcuucaacuggaccggggugacccagaacggcaccuccagcgccugcaagcgccgguccaacaacagcuucuucucccgccugaacuggcucacgcaccugaaguucaaguaccccgcccugaacgugaccaugcccaacaacgagaaguucgacaagcucuacaucuggggcguccaccaccccgggaccgacaacgaccagaucuuccuguacgcgcagagcuccgggcggaucaccgugagcacgaagcgcagccagcagaccgugaucccgaacaucggcucccggccccgcguccggaacauccccagccgcaucuccaucuacuggaccaucgugaagcccggcgacauccugcucaucaacagcaccgggaaccugaucgccccgcggggcuacuucaagauccgcuccgggaaguccuccaucaugcggagcgacgcccccaucggcaagugcaacuccgagugcaucacgcccaacggcagcauccccaacgacaagccguuccagaacgugaaccgcaucaccuacggggccugcccccgguacgucaagcagaacacccugaagcucgccaccggcaugcgcaacgugcccgagaagcagacgcgggggaucuucggcgcgaucgccggguucaucgagaacggcugggagggcaugguggacgggugguacggcuuccgccaccagaacuccgaggggaucggccaggccgccgaccucaagagcacccaggccgcgaucaaccagaucaacgggaagcugaaccggcugaucggcaagaccaacgagaaguuccaccagaucgagaaggaguucuccgaggucgagggccgcauccaggaccuggagaaguacguggaggacaccaagaucgaccuguggagcuacaacgccgagcuccugguggcccuggagaaccagcacacgaucgaccucaccgacuccgagaugaacaagcuguucgagcggaccaagaagcagcugcgcgagaacgccgaggacauggggaacggcugcuucaagaucuaccacaagugcgacaacgccugcaucgggagcauccgcaacggcaccuacgaccacgacgucuaccgggacgaggcgcucaacaaccgcuuccagaucaaggggguggagcugaaguccggcuacaaggacuggauccuguggaucagcuucgccaucuccugcuuccuccugugcguggcccugcucggcuucaucaugugggccugccagaaggggaacauccggugcaacaucugcaucuga

SEQ ID NO: 75218 - RNA, 1701 nt, Artificial Sequence
  derived and/or modified CDS sequence (opt1) from hemagglutinin__InfluenzaA__AHL89150
augaagaccaucaucgcccugagcuacauccucugccugguguucgcccagaagcugcccggcaacgacaacuccaccgcgacgcucugccuggggcaccacgccgucccgaacggcaccaucgugaagaccaucaccaacgaccagaucgaggugacgaacgccaccgagcugguccagagcuccagcaccgggggcaucugcgacagcccccaccagauccucgacggggagaacugcacccugaucgacgcccugcucggcgacccccagugcgacggcuuccagaacaagaagugggaccuguucguggagcgcagcaaggccuacuccaacugcuaccccuacgacgugccggacuacgcgagccugcggucccucgucgccagcuccgggacgcuggaguucaacaacgagagcuucaacuggaccggcgugacccagaacgggaccuccagcgccugcaagcgccgguccaacaacagcuucuucucccgccugaacuggcucacgcaccugaaguucaaguaccccgcccugaacgugaccaugcccaacaacgagaaguucgacaagcucuacaucuggggcguccaccaccccgggaccgacaacgaccagaucuuccuguacgcgcaggccagcggccggaucaccguguccacgaagcgcagccagcagaccgugaucccgaacaucggcagccggccccgcguccggaacauccccucccgcaucagcaucuacuggaccaucgugaagcccggggacauccugcucaucaacuccaccggcaaccugaucgccccgcggggguacuucaagauccgcagcggcaaguccagcaucaugcgguccgacgcccccaucggcaagugcaacagcgagugcaucacgcccaacggguccauccccaacgacaagccguuccagaacgugaaccgcaucaccuacggcgccugcccccgguacgucaagcagaacacccugaagcucgcgaccgggaugcgcaacgugcccgagaagcagacgcggggcaucuucggggccaucgccggcuucaucgagaacggcugggaggggaugguggacggcugguacggguuccgccaccagaacagcgagggcaucgggcaggccgccgaccugaaguccacccaggcggccaucaaccagaucaacggcaagcugaaccggcucaucggcaagaccaacgagaaguuccaccagaucgagaaggaguucagcgaggucgaggggcgcauccaggaccuggagaaguacguggaggacaccaagaucgaccugugguccuacaacgccgagcuccugguggcccuggagaaccagcacacgaucgaccucaccgacagcgagaugaacaagcuguucgagcggaccaagaagcagcugcgcgagaacgccgaggacaugggcaacgggugcuucaagaucuaccacaagugcgacaacgcgugcaucggcuccauccgcaacgggaccuacgaccacgacgucuaccgggacgaggcccucaacaaccgcuuccagaucaagggcguggagcugaaguccggcuacaaggacuggauccuguggaucuccuucgccaucagcugcuuccuccugugcguggcccugcucgucuucaucaugugggccugccagaaggggaacauccggugcaacaucugcaucuga

SEQ ID NO: 75219 - RNA, 1701 nt, Artificial Sequence
  derived and/or modified CDS sequence (opt1) from hemagglutinin__InfluenzaA__AHL89162
augaagaccaucaucgcccugagcuacauccucugccugguguucgcccagaagcugcccggcaacgacaacuccaccgcgacgcucugccuggggcaccacgccgucccgaacggcaccaucgugaagaccaucaccaacgaccagaucgaggugacgaacgccaccgagcugguccagagcuccagcaccgggggcaucugcgacagcccccaccagauccucgacggggagaacugcacccugaucgacgcccugcucggcgacccccagugcgacggcuuccagaacaagaagugggaccuguucguggagcgcagcaaggccuacuccaacugcuaccccuacgacgugccggacuacgcgagccugcggucccucgucgccagcuccgggacgcuggaguucaacaacgagagcuucaacuggaccggcgugacccagaacgggaccuccagcgccugcaagcgccgguccaacaacagcuucuucucccgccugaacuggcucacgcaccugaaguucaaguaccccgcccugaacgugaccaugcccaacaacgagaaguucgacaagcucuacaucuggggcguccaccaccccgggaccgacaacgaccagaucuuccuguacgcgcaggccagcggccggaucaccguguccacgaagcgcagccagcagaccgugaucccgaacaucggcagccggccccgcguccggaacauccccucccgcaucagcaucuacuggaccaucgugaagcccggggacauccugcucaucaacuccaccggcaaccugaucgccccgcggggguacuucaagauccgcagcggcaaguccagcaucaugcgguccgacgcccccaucggcaagugcaacagcgagugcaucacgcccaacggguccauccccaacgacaagccguuccagaacgugaaccgcaucaccuacggcgccugcccccgguacgucaagcagaacacccugaagcucgcgaccgggaugcgcaacgugcccgagaagcagacgcggggcaucuucggggccaucgccggcuucaucgagaacggcugggaggggaugguggacggcugguacggguuccgccaccagaacagcgagggcaccgggcaggccgccgaccugaaguccacccaggcggccaccaaccagaucaacggcaagcugaaccggcucaucggcaagacgaacgagaaguuccaccagaucgagaaggaguucagcgaggucgaggggcgcauccaggaccuggagaaguacguggaggacaccaagaucgaccugugguccuacaacgccgagcuccugguggcccuggagaaccagcacaccaucgaccucaccgacagcgagaugaacaagcuguucgagcggacgaagaagcagcugcgcgagaacgccgaggacaugggcaacgggugcuucaagaucuaccacaagugcgacaacgcgugcaucggcuccauccgcaacgggaccuacgaccacgacgucuaccgggacgaggcccucaacaaccgcuuccagaucaagggcguggagcugaaguccggcuacaaggacuggauccuguggaucuccuucgccaucagcugcuuccuccugugcguggcccugcucggguucaucaugugggccugccagaagggcaacauccggugcaacaucugcaucuga

SEQ ID NO: 75220 - RNA, 1701 nt, Artificial Sequence
  derived and/or modified CDS sequence (opt1) from hemagglutinin__InfluenzaA__AHL89174
augaagaccaucaucgcccugagcuacacccucugccugguguucgcccagaagcugcccggcaacgacaacuccacggcgacccucugccuggggcaccacgccgucccgaacggcaccaucgugaagaccaucacgaacgaccagaucgaggugaccaacgccaccgagcugguccagagcuccagcaccgggggcaucugcgacagcccccaccagauccucgacggggagaacugcacgcugaucgacgcccugcucggcgacccccagugcgacggcuuccagaacaagaagugggaccuguucguggagcgcagcaaggccuacuccaacugcuaccccuacgacgugccggacuacgcgagccugcggucccucgucgccagcuccgggacccuggaguucaacaacgagagcuucaacuggaccggcgugacccagaacgggacguccagcgccugcaagcgccgguccaacaacagcuucuucucccgccugaacuggcucacccaccugaaguucaaguaccccgcccugaacgugaccaugcccaacaacgagaaguucgacaagcucuacaucuggggcguccaccaccccgggaccgacaacgaccagaucuuccuguacgcgcaggccagcggccggaucacgguguccaccaagcgcagccagcagaccgugaucccgaacaucggcagccggccccgcguccggaacauccccucccgcaucagcaucuacuggaccaucgugaagcccggggacauccugcucaucaacuccacgggcaaccugaucgccccgcggggguacuucaagauccgcagcggcaaguccagcaucaugcgguccgacgcccccaucggcaagugcaacagcgagugcaucacccccaacggguccauccccaacgacaagccguuccagaacgugaaccgcaucaccuacggcgccugcccccgguacgucaagcagaacacccugaagcucgcgacggggaugcgcaacgugcccgagaagcagacccggggcaucuucggggccaucgccggcuucaucgagaacggcugggaggggaugguggacggcugguacggguuccgccaccagaacagcgagggcaucgggcaggccgccgaccugaaguccacccaggcggccaucaaccagaucaacggcaagcugaaccggcucaucggcaagaccaacgagaaguuccaccagaucgagaaggaguucagcgaggucgaggggcgcauccaggaccuggagaaguacguggaggacacgaagaucgaccugugguccuacaacgccgagcuccugguggcccuggagaaccagcacaccaucgaccucaccgacagcgagaugaacaagcuguucgagcggaccaagaagcagcugcgcgagaacgccgaggacaugggcaacgggugcuucaagaucuaccacaagugcgacaacgcgugcaucggcuccauccgcaacgggacguacgaccacgacgucuaccgggacgaggcccucaacaaccgcuuccagaucaagggcguggagcugaaguccggcuacaaggacuggauccuguggaucuccuucgccaucagcugcuuccuccugugcguggcccugcucggguucaucaugugggccugccagaagggcaacauccggugcaacaucugcaucuga

SEQ ID NO: 75221 - RNA, 1701 nt, Artificial Sequence
  derived and/or modified CDS sequence (opt1) from hemagglutinin__InfluenzaA__AHL89210
augaagaccaucaucgcccugagcuacauccucugccugguguucgcccagaagcugcccggcaacgacaacuccaccgcgacgcucugccuggggcaccacgccgucccgaacggcaccaucgugaagaccaucaccaacgaccagaucgaggugacgaacgccaccgagcugguccagagcuccagcaccggggagaucugcgacagcccccaccagauccucgacggcgagaacugcacccugaucgacgcccugcucggggacccccagugcgacggcuuccagaacaagaagugggaccuguucguggagcgcagcaaggccuacuccaacugcuaccccuacgacgugccggacuacgcgagccugcggucccucgucgccagcuccggcacgcuggaguucaacaacgagagcuucaacuggaccggggugacccagaacggcaccuccagcgccugcaagcgccgguccaacaacagcuucuucucccgccugaacuggcucacgcaccugaaguucaaguaccccgcccugaacgugaccaugcccaacaacgagaaguucgacaagcucuacaucuggggcguccaccaccccgggaccgacaacgaccagaucuuccuguacgcgcaggccagcgggcggaucaccguguccacgaagcgcagccagcagaccgugaucccgaacaucggcagccggccccgcguccggaacauccccucccgcaucagcaucuacuggaccaucgugaagcccggcgacauccugcucaucaacuccaccgggaaccugaucgccccgcggggcuacuucaagauccgcagcgggaaguccagcaucaugcgguccgacgcccccaucggcaagugcaacagcgagugcaucacgcccaacggcuccauccccaacgacaagccguuccagaacgugaaccgcaucaccuacggggccugcccccgguacgucaagcagaacacccugaagcucgcgaccggcaugcgcaacgugcccgagaagcagacgcgggggaucuucggcgccaucgccggguucaucgagaacggcugggagggcaugguggacgggugguacggcuuccgccaccagaacagcgaggggaucggccaggccgccgaccugaaguccacccaggcggccaucaaccagaucaacgggaagcugaaccggcucaucggcaagaccaacgagaaguuccaccagaucgagaaggaguucagcgaggucgagggccgcauccaggaccuggagaaguacguggaggacaccaagaucgaccugugguccuacaacgccgagcuccugguggcccuggagaaccagcacacgaucgaccucaccgacagcgagaugaacaagcuguucgagcggaccaagaagcagcugcgcgagaacgccgaggacauggggaacggcugcuucaagaucuaccacaagugcgacaacgcgugcaucggguccauccgcaacggcaccuacgaccacgacgucuaccgggacgaggcccucaacaaccgcuuccagaucaaggggguggagcugaaguccggcuacaaggacuggauccuguggaucuccuucgccaucagcugcuuccuccugugcguggcccugcucggcuucaucaugugggccugccagaaggggaacauccggugcaacaucugcaucuga

SEQ ID NO: 75222 - RNA, 1701 nt, Artificial Sequence; identical to SEQ ID NO: 75221
  derived and/or modified CDS sequence (opt1) from hemagglutinin__InfluenzaA__AHL89222

SEQ ID NO: 75223 - RNA, 1701 nt, Artificial Sequence
  derived and/or modified CDS sequence (opt1) from hemagglutinin__InfluenzaA__AHL89234
augaagaccaucaucgcccugagcuacauccucugccugguguucgcccagaagcugcccggcaacgacaacuccaccgcgacgcucugccuggggcaccacgccgucccgaacggcaccaucgugaagaccaucaccaacgaccagaucgaggugacgaacgccaccgagcugguccagagcuccagcaccggggagaucugcgacagcccccaccagauccucgacggcgagaacugcacccugaucgacgcccugcucggggacccccagugcgacggcuuccagaacaagaagugggaccuguucguggagcgcagcaaggccuacuccaacugcuaccccuacgacgugccggacuacgcgagccugcggucccucgucgccagcuccggcacgcuggaguucaacaacgagagcuucaacuggaccggggugacccagaacggcaccuccagcgccugcaagcgccgguccaacaacagcuucuucucccgccugaacuggcucacgcaccugaaguucaaguaccccgcccugaacgugaccaugcccaacaacgagaaguucgacaagcucuacaucuggggcguccaccaccccgggaccgacaacgaccagaucuuccuguacgcgcaggccagcgggcggaucaccguguccacgaagcgcagccagcagaccgugaucccgaacaucggcagccggccccgcguccggaacauccccucccgcaucagcaucuacuggaccaucgugaagcccggcgacauccugcucaucaacuccaccgggaaccugaucgccccgcggggcuacuucaagauccgcagcgggaaguccagcaucaugcgguccgacgcccccaucggcaagugcaacagcgagugcaucacgcccaacggcuccauccccaacgacaagccguuccagaacgugaaccgcaucaccuacggggccugcccccgguacgucaagcagaacacccugaagcucgcgaccggcaugcgcaacgugcccgagaagcagacgcgggggaucuucggcgccaucgccggguucaucgagaacggcugggagggcaugguggacgggugguacggcuuccgccaccagaacagcgaggggaugggccaggccgccgaccugaaguccacccaggcggccaucaaccagaucaacgggaagcugaaccggcucaucggcaagaccaacgagaaguuccaccagaucgagaaggaguucagcgaggucgagggccgcauccaggaccuggagaaguacguggaggacaccaagaucgaccugugguccuacaacgccgagcuccugguggcccuggagaaccagcacacgaucgaccucaccgacagcgagaugaacaagcuguucgagcggaccaagaagcagcugcgcgagaacgccgaggacauggggaacggcugcuucaagaucuaccacaagugcgacaacgcgugcaucggguccauccgcaacggcaccuacgaccacgacgucuaccgggacgaggcccucaacaaccgcuuccagaucaaggggguggagcugaaguccggcuacaaggacuggauccuguggaucuccuucgccaucagcugcuuccuccugugcguggcccugcucggcuucaucaugugggccugccagaaggggaacauccggugcaacaucugcaucuga

SEQ ID NO: 75224 - RNA, 1701 nt, Artificial Sequence
  derived and/or modified CDS sequence (opt1) from hemagglutinin__InfluenzaA__AHL89246
augaagaccaucaucgcccugagcuacauccucugccugguguucgcccagaagcugcccggcaacgacaacuccaccgcgacgcucugccuggggcaccacgccgucccgaacggcaccaucgugaagaccaucaccaacgaccagaucgaggugacgaacgccaccgagcugguccagagcuccagcaccggggagaucugcgacagcccccaccagauccucgacggcgagaacugcacccugaucgacgcccugcucggggacccccagugcgacggcuuccagaacaagaagugggaccuguucguggagcgcagcaaggccuacuccaacugcuaccccuacgacgugccggacuacgcgagccugcggucccucgucgccagcuccggcacgcuggaguucaacaacgagagcuucaacuggaccggggugacccagaacggcaccuccagcgccugcaagcgccgguccaacaacagcuucuucucccgccugaacuggcucacgcaccugaaguucaaguaccccgcccugaacgugaccaugcccaacaacgagaaguucgacaagcucuacaucuggggcguccaccaccccgggaccgacaacgaccagaucuuccuguacgcgcaggccagcgggcggaucaccguguccacgaagcgcagccagcagaccgugaucccgaacaucggcagccggccccgcguccggaacauccccucccgcaucagcaucuacuggaccaucgugaagcccggcgacauccugcucaucaacuccaccgggaaccugaucgccccgcggggcuacuucaagauccgcagcgggaaguccagcaucaugcgguccgacgcccccaucggcaagugcaacagcgagugcaucacgcccaacggcuccauccccaacgacaagccguuccagaacgugaaccgcaucaccuacggggccugcccccgguacgucaagcagaacacccugaagcucgcgaccggcaugcgcaacgugcccgagaagcagacgcgggggaucuucggcgccaucgccggguucaucgagaacggcugggagggcaugguggacgggugguacggcuuccgccaccagaacagcgaggggaucggccaggccgccgaccugaaguccacccaggcggccaucaaccagaucaacgggaagcugaaccggcucaucggcaagaccaacgagaaguuccaccagaucgagaaggaguucagcgaggucgagggccgcauccaggaccuggagaaguacguggaggacaccaagaucgaccugugguccuacaacgccgagcuccugguggcccuggagaaccagcacacgaucgaccucaccgacagcgagaugaacaagcuguucgagcggaccaagaagcagcugcgcgagaacgccgaggacauggggaacggcugcuucaagaucuaccacaagugcgggaacgcgugcaucggcuccauccgcaacgggaccuacgaccacgacgucuaccgggacgaggcccucaacaaccgcuuccagaucaagggcguggagcugaaguccggcuacaaggacuggauccuguggaucuccuucgccaucagcugcuuccuccugugcguggcccugcucggguucaucaugugggccugccagaagggcaacauccggugcaacaucugcaucuga

SEQ ID NO: 75225 - RNA, 1701 nt, Artificial Sequence
  derived and/or modified CDS sequence (opt1) from hemagglutinin__InfluenzaA__AHL89258
augaagaccaucaucgcccugagcuacauccucugccugguguucgcccagaagcugcccggcaacgacaacuccaccgcgacgcucugccuggggcaccacgccgucccgaacggcaccaucgugaagaccaucaccaacgaccagaucgaggugacgaacgccaccgagcugguccagagcuccagcaccggggagaucugcgacagcccccaccagauccucgacggcgagaacugcacccugaucgacgcccugcucggggacccccagugcgacggcuuccagaacaagaagugggaccuguucguggagcgcagcaaggccuacuccaacugcuaccccuacgacgugccggacuacgcgagccugcggucccucgucgccagcuccggcacgcuggaguucaacaacgagagcuucaacuggaccggggugacccagaacggcaccuccagcgccugcaagcgccgguccaacaacagcuucuucucccgccugaacuggcucacgcaccugaaguucaaguaccaggcccugaacgugaccaugcccaacaacgagaaguucgacaagcucuacaucuggggcguccaccaccccgggaccgacaacgaccagaucuuccuguacgcgcaggccagcgggcggaucaccguguccacgaagcgcagccagcagaccgugauccccaacaucggcagccggccgcgcguccggaacauccccucccgcaucagcaucuacuggaccaucgugaagcccggcgacauccugcucaucaacuccaccgggaaccugaucgcgccccggggcuacuucaagauccgcagcgggaaguccagcaucaugcgguccgacgccccgaucggcaagugcaacagcgagugcaucacgcccaacggcuccauccccaacgacaagcccuuccagaacgugaaccgcaucaccuacggggccugcccgcgguacgucaagcagaacacccugaagcucgccaccggcaugcgcaacgugcccgagaagcagacgcgggggaucuucggcgccaucgccggguucaucgagaacggcugggagggcaugguggacgggugguacggcuuccgccaccagaacagcgaggggaucggccaggccgccgaccugaaguccacccaggcggccaucaaccagaucaacgggaagcugaaccggcucaucggcaagaccaacgagaaguuccaccagaucgagaaggaguucagcgaggucgagggccgcauccaggaccuggagaaguacguggaggacaccaagaucgaccugugguccuacaacgccgagcuccugguggcccuggagaaccagcacacgaucgaccucaccgacagcgagaugaacaagcuguucgagcggaccaagaagcagcugcgcgagaacgccgaggacauggggaacggcugcuucaagaucuaccacaagugcgacaacgcgugcaucggguccauccgcaacggcaccuacgaccacgacgucuaccgggacgaggcccucaacaaccgcuuccagaucaaggggguggagcugaaguccggcuacaaggacuggauccuguggaucuccuucgccaucagcugcuuccuccugugcgugguccugcucggcuucaucaugugggccugccagaaggggaacauccggugcaacaucugcaucuga

SEQ ID NO: 75226 - RNA, 1701 nt, Artificial Sequence; identical to SEQ ID NO: 75221
  derived and/or modified CDS sequence (opt1) from hemagglutinin__InfluenzaA__AHL89270

SEQ ID NO: 75227 - RNA, 1701 nt, Artificial Sequence; identical to SEQ ID NO: 75221
  derived and/or modified CDS sequence (opt1) from hemagglutinin__InfluenzaA__AHL89282

SEQ ID NO: 75228 - RNA, 1701 nt, Artificial Sequence; identical to SEQ ID NO: 75221
  derived and/or modified CDS sequence (opt1) from hemagglutinin__InfluenzaA__AHL89294

SEQ ID NO: 75229 - RNA, 1701 nt, Artificial Sequence; identical to SEQ ID NO: 75221
  derived and/or modified CDS sequence (opt1) from hemagglutinin__InfluenzaA__AHL89306

SEQ ID NO: 75230 - RNA, 1701 nt, Artificial Sequence; identical to SEQ ID NO: 65605
  derived and/or modified CDS sequence (opt1) from hemagglutinin__InfluenzaA__AHL89318

SEQ ID NO: 75231 - RNA, 1701 nt, Artificial Sequence
  derived and/or modified CDS sequence (opt1) from hemagglutinin__InfluenzaA__AHL89330
augaagaccaucaucgcccugagcuacauccucugccugguguucgcccagaagcugcccggcaacgacaacuccaccgcgacgcucugccuggggcaccacgccgucccgaacggcaccaucgugaagaccaucaccaacgaccagaucgaggugacgaacgccaccgagcugguccagagcuccagcaccggggagaucugcgacagcccccaccagauccucgacggcaagaacugcacccugaucgacgcccugcucggggacccccagugcgacggcuuccagaacaagaagugggaccuguucguggagcgcagcaaggccuacuccaacugcuaccccuacgacgugccggacuacgcgagccugcggucccucgucgccagcuccggcacgcuggaguucaacaacgagagcuucaacuggaccggggugacccagaacggcaccuccagcgccugcaagcgccgguccaacaacagcuucuucucccgccugaacuggcucacgcaccugaaguucaaguaccccgcccugaacgugaccaugcccaacaacgagaaguucgacaagcucuacaucuggggcguccaccaccccgggaccgacaacgaccagaucuuccuguacgcgcaggccagcgggcggaucaccguguccacgaagcgcagccagcagaccgugaucccgaacaucggcagccggccccgcguccggaacauccccucccgcaucagcaucuacuggaccaucgugaagcccggcgacauccugcucaucaacuccaccgggaaccugaucgccccgcggggcuacuucaagauccgcagcgggaaguccagcaucaugcgguccgacgcccccaucggcaagugcaacagcgagugcaucacgcccaacggcuccauccccaacgacaagccguuccagaacgugaaccgcaucaccuacggggccugcccccgguacgucaagcagaacacccugaagcucgcgaccggcaugcgcaacgugcccgagaagcagacgcgggggaucuucggcgccaucgccggguucaucgagaacggcugggagggcaugguggacgggugguacggcuuccgccaccagaacagcgaggggaucggccaggccgccgaccugaaguccacccaggcggccaucaaccagaucaacgggaagcugaaccggcucaucggcaagaccaacgagaaguuccaccagaucgagaaggaguucagcgaggucgagggccgcauccaggaccuggagaaguacguggaggacaccaagaucgaccugugguccuacaacgccgagcuccugguggcccuggagaaccagcacacgaucgaccucaccgacagcgagaugaacaagcuguucgagcggaccaagaagcagcugcgcgagaacgccgaggacauggggaacggcugcuucaagaucuaccacaagugcgacaacgcgugcaucggguccauccgcaacggcaccuacgaccacgacgucuaccgggacgaggcccucaacaaccgcuuccagaucaaggggguggagcugaaguccggcuacaaggacuggauccuguggaucuccuucgccaucagcugcuuccuccugugcguggcccugcucggcuucaucaugugggccugccagaaggggaacauccggugcaacaucugcaucuga

SEQ ID NO: 75232 - RNA, 1701 nt, Artificial Sequence; identical to SEQ ID NO: 64654
  derived and/or modified CDS sequence (opt1) from hemagglutinin__InfluenzaA__AHL89342

SEQ ID NO: 75233 - RNA, 1701 nt, Artificial Sequence; identical to SEQ ID NO: 65585
  derived and/or modified CDS sequence (opt1) from hemagglutinin__InfluenzaA__AHL89354

SEQ ID NO: 75234 - RNA, 1701 nt, Artificial Sequence
  derived and/or modified CDS sequence (opt1) from hemagglutinin__InfluenzaA__AHL89366
augaagaccaucaucgcccugagcuacauccucugccugguguucgcccagaagcugcccggcaacgacaacuccaccgcgacgcucugccuggggcaccacgccgucccgaacggcaccaucgugaagaccaucaccaacgaccagaucgaggugacgaacgccaccgagcugguccagagcuccagcaccggggagaucugcgacagcccccaccagauccucgacggcgagaacugcacccugaucgacgcccugcucggggacccccagugcgacggcuuccagaacaagaagugggaccuguucguggagcgcagcaaggccuacuccaacugcuaccccuacgacgugccggacuacgcgagccugcggucccucgucgccagcuccggcacgcuggaguucaacaacgagagcuucaacuggaccggggugacccagaacggcaccuccagcgccugcaagcgccgguccaacaacagcuucuucucccgccugaacuggcucacgcaccugaaguucaaguaccccgcccugaacgugaccaugcccaacaacgagaaguucgacaagcucuacaucuggggcguccaccaccccgggaccgacaacgaccagaucuuccuguacgcgcaggccagcgggcggaucaccguguccacgaagcgcagccagcagaccgugaucccgaacaucggcagccggccccgcguccggaacauccccucccgcaucagcaucuacuggaccaucgugaagcccggcgacauccugcucaucaacuccaccgggaaccugaucgccccgcggggcuacuucaagauccgcagcgggaaguccagcaucaugaaguccgacgcccccaucggcaagugcaacagcgagugcaucacgcccaacggcuccauccccaacgacaagccguuccagaacgugaaccggaucaccuacggggccugcccccgcuacgucaagcagaacacccugaagcucgcgaccggcaugcggaacgugcccgagaagcagacgcgcgggaucuucggcgccaucgccggguucaucgagaacggcugggagggcaugguggacgggugguacggcuuccggcaccagaacagcgaggggaucggccaggccgccgaccugaaguccacccaggcggccaucaaccagaucaacgggaagcugaaccgccucaucggcaagaccaacgagaaguuccaccagaucgagaaggaguucagcgaggucgagggccggauccaggaccuggagaaguacguggaggacaccaagaucgaccugugguccuacaacgccgagcuccugguggcccuggagaaccagcacacgaucgaccucaccgacagcgagaugaacaagcuguucgagcgcaccaagaagcagcugcgggagaacgccgaggacauggggaacggcugcuucaagaucuaccacaagugcgacaacgcgugcaucggguccauccgcaacggcaccuacgaccacgacgucuaccgcgacgaggcccucaacaaccgguuccagaucaaggggaucgagcugaaguccggcuacaaggacuggauccuguggaucuccuucgccaucagcugcuuccuccugugcguggugcugcucggcuucaucaugugggccugccagaaggggaacauccgcugcaacaucugcaucuga

SEQ ID NO: 75235 - RNA, 1701 nt, Artificial Sequence; identical to SEQ ID NO: 75221
  derived and/or modified CDS sequence (opt1) from hemagglutinin__InfluenzaA__AHL89378

SEQ ID NO: 75236 - RNA, 1701 nt, Artificial Sequence; identical to SEQ ID NO: 65852
  derived and/or modified CDS sequence (opt1) from hemagglutinin__InfluenzaA__AHL89390

SEQ ID NO: 75237 - RNA, 1701 nt, Artificial Sequence; identical to SEQ ID NO: 75221
  derived and/or modified CDS sequence (opt1) from hemagglutinin__InfluenzaA__AHL89402

SEQ ID NO: 75238 - RNA, 1701 nt, Artificial Sequence; identical to SEQ ID NO: 65605
  derived and/or modified CDS sequence (opt1) from hemagglutinin__InfluenzaA__AHL89414

SEQ ID NO: 75239 - RNA, 1701 nt, Artificial Sequence
  derived and/or modified CDS sequence (opt1) from hemagglutinin__InfluenzaA__AHL89426
augaagaccaucaucgcccugagcuacauccucugccugguguucgcccagaagcugcccggcaacgacaacuccaccgcgacgcucugccuggggcaccacgccgucccgaacggcaccaucgugaagaccaucaccaacgaccagaucgaggugacgaacgccaccgagcugguccagagcuccagcaccggggagaucugcgacagcccccaccagauccucgacggcgagaacugcacccugaucgacgcccugcucggggacccccagugcgacggcuuccagaacaagaagugggaccuguucguggagcgcuccaaggccuacuccaacugcuaccccuacgacgugccggacuacgcgagccugcggucccucgucgccagcuccggcacgcuggaguucaacaacgagagcuucaacuggaccggggugacccagaacggcaccuccagcgccugcaagcgccgguccaacaacagcuucuucucccgccugaacuggcucacgcaccugaaguucaaguaccccgcccugaacgugaccaugcccaacaacgagaaguucgacaagcucuacaucuggggcguccaccaccccgggaccgacaacgaccagaucuuccuguacgcgcaggccagcgggcggaucaccguguccacgaagcgcagccagcagaccgugaucccgaacaucggcagccggccccgcguccggaacauccccucccgcaucagcaucuacuggaccaucgugaagcccggcgacauccuguucaucaacuccaccgggaaccucaucgccccgcggggcuacuucaagauccgcagcgggaaguccagcaucaugcgguccgacgcccccaucggcaagugcaacagcgagugcaucacgcccaacggcuccauccccaacgacaagccguuccagaacgugaaccgcaucaccuacggggccugcccccgguacgucaagcagaacacccugaagcuggcgaccggcaugcgcaacgugcccgagaagcagacgcgggggaucuucggcgccaucgccggguucaucgagaacggcugggagggcaugguggacgggugguacggcuuccgccaccagaacagcgaggggaucggccaggccgccgaccucaaguccacccaggcggccaucaaccagaucaacgggaagcugaaccggcugaucggcaagaccaacgagaaguuccaccagaucgagaaggaguucagcgaggucgagggccgcauccaggaccucgagaaguacguggaggacaccaagaucgaccugugguccuacaacgccgagcugcucguggcccuggagaaccagcacacgaucgaccugaccgacagcgagaugaacaagcuguucgagcggaccaagaagcagcuccgcgagaacgccgaggacauggggaacggcugcuucaagaucuaccacaagugcgacaacgcgugcaucggguccauccgcaacggcaccuacgaccacgacgucuaccgggacgaggcccugaacaaccgcuuccagaucaaggggguggagcucaagagcggcuacaaggacuggauccuguggaucuccuucgccaucagcugcuuccugcucugcgugguccugcugggcuucaucaugugggccugccagaaggggaacauccggugcaacaucugcaucuga

SEQ ID NO: 75240 - RNA, 1701 nt, Artificial Sequence; identical to SEQ ID NO: 75221
  derived and/or modified CDS sequence (opt1) from hemagglutinin__InfluenzaA__AHL89438

SEQ ID NO: 75241 - RNA, 1701 nt, Artificial Sequence; identical to SEQ ID NO: 75221
  derived and/or modified CDS sequence (opt1) from hemagglutinin__InfluenzaA__AHL89450

SEQ ID NO: 75242 - RNA, 1701 nt, Artificial Sequence; identical to SEQ ID NO: 75221
  derived and/or modified CDS sequence (opt1) from hemagglutinin__InfluenzaA__AHL89462

SEQ ID NO: 75243 - RNA, 1701 nt, Artificial Sequence; identical to SEQ ID NO: 75221
  derived and/or modified CDS sequence (opt1) from hemagglutinin__InfluenzaA__AHL89474

SEQ ID NO: 75244 - RNA, 1701 nt, Artificial Sequence; identical to SEQ ID NO: 65852
  derived and/or modified CDS sequence (opt1) from hemagglutinin__InfluenzaA__AHL89486

SEQ ID NO: 75245 - RNA, 1701 nt, Artificial Sequence; identical to SEQ ID NO: 65605
  derived and/or modified CDS sequence (opt1) from hemagglutinin__InfluenzaA__AHL89498

SEQ ID NO: 75246 - RNA, 1701 nt, Artificial Sequence; identical to SEQ ID NO: 65605
  derived and/or modified CDS sequence (opt1) from hemagglutinin__InfluenzaA__AHL89510

SEQ ID NO: 75247 - RNA, 1701 nt, Artificial Sequence; identical to SEQ ID NO: 65605
  derived and/or modified CDS sequence (opt1) from hemagglutinin__InfluenzaA__AHL89522

SEQ ID NO: 75248 - RNA, 1701 nt, Artificial Sequence
  derived and/or modified CDS sequence (opt1) from hemagglutinin__InfluenzaA__AHL89534
augaagaccaucaucgcccugagcuacauccucugccugguguucgcccagaagcugcccggcaacgacaacuccaccgcgacgcucugccuggggcaccacgccgucccgaacggcaccaucgugaagaccaucaccaacgaccagaucgaggugacgaacgccaccgagcugguccagagcuccagcaccggggagaucugcgacagcccccaccagauccucgacggcgagaacugcacccugaucgacgcccugcucggggacccccagugcgacggcuuccagaacaagaagugggaccuguucguggagcgcagcaaggccuacuccaacugcuaccccuacgacgugccggacuacgcgagccugcggucccucgucgccagcuccggcacgcuggaguucaacaacgagagcuucaacuggaccggggugacccagaacggcaccuccagcgccugcaagcgccgguccaacaacagcuucuucucccgccugaacuggcucacgcaccugaaguucaaguaccccgcccugaacgugaccaugcccaacaacgagaaguucgacaagcucuacaucuggggcguccaccaccccgggaccgacaacgaccagaucuuccuguacgcgcaggccagcgggcggaucaccguguccacgaagcgcagccagcagaccgugaucccgaacaucggcagccggccccgcguccggaacauccccucccgcaucagcaucuacuggaccaucgugaagcccggcgacauccugcucaucaacuccaccgggaaccugaucgccccgcggggcuacuucaagauccgcagcgggaaguccagcaucaugcgguccgacgcccccaucggcaagugcaacagcgagugcaucacgcccaacggcuccauccccaacgacaagccguuccagaacgugaaccgcaucaccuacggggccugcccccgguacgucaagcagaacacccugaagcucgcgaccggcaugcgcaacgugcccgagaagcagacgcgggggaucuucggcgccaucgccggguucaucgagaacggcugggagggcaugguggacgggugguacggcuuccgccaccagaacagcgaggggaucggccaggccgccgaccugaaguccacccaggcggccaucaaccagaucaacgggaagcugaaccggcucaucggcaagaccaacgagaaguuccaccagaucgagaaggaguucagcgaggucgagggccgcauccaggaccuggagaaguacguggaggacaccaagaucgaccugugguccuacaacgccgagcuccugguggcccuggagaaccagcacacgaucgaccucaccgacagcgagaugaacaagcuguucgagcggaccaagaagcagcugcgcgagaacgccgaggacauggggaacggcugcuucaagaucuaccacaagugcgacaacgcgugcaucggguccauccgcaacggcaccuacgaccacgacgucuaccgggacgaggcccucaacaaccgcuuccagaucaaggggaucgagcugaaguccggcuacaaggacuggauccuguggaucuccuucgccaucagcugcuuccuccugugcguggugcugcucggcuucaucaugugggccugccagaaggggaacauccggugcaacaucugcaucuga

SEQ ID NO: 75249 - RNA, 1698 nt, Artificial Sequence
  derived and/or modified CDS sequence (opt1) from hemagglutinin__InfluenzaA__AHL89546
augaaggugaagcugcucguccugcugugcaccuucaccgccacguacgccgacaccaucugcaucggcuaccacgcgaacaacagcaccgacaccguggacacggugcucgagaagaacgucaccgugacccacuccgugaaccugcuggaggacagccacaacgggaagcucugccugcugaagggcaucgcgccccuccagcuggggaacugcuccgucgccggcuggauccuggggaacccggagugcgagcuccugaucagcaaggaguccuggagcuacaucguggagacccccaaccccgagaacggcacgugcuaccccggcuacuucgccgacuacgaggagcugcgcgagcagcucuccagcguguccagcuucgagcgguucgagaucuucccgaaggaguccagcuggcccaaccacaccgucaccgggguguccgccagcugcucccacaacggcaagagcuccuucuaccgcaaccugcuguggcucaccgggaagaacggccuguaccccaaccugagcaaguccuacgccaacaacaaggagaaggaggugcucguccuguggggcgugcaccacccgcccaacaucggggaccagcgggcccuguaccacacggagagcgccuacgugagcgucguguccagccacuacucccgccgguucacccccgagaucgccaagcgccccaaggugcgggaccaggagggccgcaucaacuacuacuggacccuccuggagcccggggacaccaucaucuucgaggcgaacggcaaccugaucgccccgcgguucgccuucgcccucagccgcggguucggcuccggcaucaucacgagcaacgcccccauggacgagugcgacgcgaagugccagacgccccagggggccaucaacuccagccugcccuuccagaacguccacccggugaccaucggcgagugccccaaguacgugcgguccgccaagcugcgcauggucaccgggcuccggaacauccccagcauccagucccgcggccuguucggggccaucgccggcuucaucgagggcggguggaccggcaugguggacgggugguacggcuaccaccaccagaacgagcaggggagcggcuacgcggccgaccagaaguccacccagaacgccaucaacggcaucaccaacaaggugaacagcgucaucgagaagaugaacacccaguucacggccguggggaaggaguucaacaagcuggagcggcgcauggagaaccucaacaagaaggucgacgacggcuuccuggacaucuggaccuacaacgccgagcugcucgugcugcuggagaacgagcggacccucgacuuccacgacuccaacgugaagaaccuguacgagaaggucaagagccagcugaagaacaacgcgaaggagaucgggaacggcugcuucgaguucuaccacaagugcaacgacgagugcauggaguccgugaagaacgggaccuacgacuaccccaaguacagcgaggaguccaagcucaaccgcgagcggaucgacggcgugaagcuggagagcaugggcgucuaccagauccuggccaucuacagcacgguggccuccagccucgugcugcuggucucccucggggccaucagcuucuggaugugcuccaacggcagccugcagugccgcaucugcaucuga

SEQ ID NO: 75250 - RNA, 1698 nt, Artificial Sequence; identical to SEQ ID NO: 65938
  derived and/or modified CDS sequence (opt1) from hemagglutinin__InfluenzaA__AHL89558

SEQ ID NO: 75251 - RNA, 1698 nt, Artificial Sequence; identical to SEQ ID NO: 65938
  derived and/or modified CDS sequence (opt1) from hemagglutinin__InfluenzaA__AHL89570

SEQ ID NO: 75252 - RNA, 1698 nt, Artificial Sequence; identical to SEQ ID NO: 65954
  derived and/or modified CDS sequence (opt1) from hemagglutinin__InfluenzaA__AHL89582

SEQ ID NO: 75253 - RNA, 1698 nt, Artificial Sequence; identical to SEQ ID NO: 65954
  derived and/or modified CDS sequence (opt1) from hemagglutinin__InfluenzaA__AHL89594

SEQ ID NO: 75254 - RNA, 1698 nt, Artificial Sequence; identical to SEQ ID NO: 65954
  derived and/or modified CDS sequence (opt1) from hemagglutinin__InfluenzaA__AHL89606

SEQ ID NO: 75255 - RNA, 1698 nt, Artificial Sequence; identical to SEQ ID NO: 65938
  derived and/or modified CDS sequence (opt1) from hemagglutinin__InfluenzaA__AHL89618

SEQ ID NO: 75256 - RNA, 1698 nt, Artificial Sequence; identical to SEQ ID NO: 65954
  derived and/or modified CDS sequence (opt1) from hemagglutinin__InfluenzaA__AHL89630

SEQ ID NO: 75257 - RNA, 1698 nt, Artificial Sequence
  derived and/or modified CDS sequence (opt1) from hemagglutinin__InfluenzaA__AHL89642
augaaggugaagcugcucguccugcugugcaccuucaccgccacguacgccgacaccaucugcaucggcuaccacgcgaacaacagcaccgacaccguggacacggugcucgagaagaacgucaccgugacccacuccgugaaccugcuggaggacaaccacaacgggaagcucugccugcugaagggcaucgcgccccuccagcuggggaacugcagcgucgccggcuggauccuggggaacccggagugcgagcuccugaucuccaaggagagcugguccuacaucguggagacccccaaccccgagaacggcacgugcuaccccggcuacuucgccgacuacgaggagcugcgcgagcagcucagcuccgugagcuccuucgagcgguucgagaucuucccgaaggagagcuccuggcccaaccacaccgucaccggggugagcgccuccugcagccacaacggcaaguccagcuucuaccgcaaccugcuguggcucaccgggaagaacggccuguaccccaaccuguccaagagcuacgccaacaacaaggagaaggaggugcucguccuguggggcgugcaccacccgcccaacaucggggaccagcgggcccuguaccacacggagaacgccuacguguccgucgugagcagccacuacucccgccgguucacccccgagaucgccaagcgccccaaggugcgggaccaggagggccgcaucaacuacuacuggacccuccuggagcccggggacaccaucaucuucgaggcgaacggcaaccugaucgccccgcgguucgccuucgcccucagccgcggguucggcuccggcaucaucacgagcaacgcccccaugggggagugcgacgcgaagugccagacgccccagggcgccaucaacuccagccugcccuuccagaacguccacccggugaccaucggggagugccccaaguacgugcgguccgccaagcugcgcauggucaccggccuccggaacauccccagcauccagucccgcgggcuguucggcgccaucgccggcuucaucgagggcggguggaccgggaugguggacggcugguacggguaccaccaccagaacgagcagggcagcggcuacgcggccgaccagaaguccacccagaacgccaucaacgggaucaccaacaaggugaacagcgucaucgagaagaugaacacccaguucacggccgugggcaaggaguucaacaagcuggagcggcgcauggagaaccucaacaagaaggucgacgacggguuccuggacaucuggaccuacaacgccgagcugcucgugcugcuggagaacgagcggacccucgacuuccacgacuccaacgugaagaaccuguacgagaaggucaagagccagcugaagaacaacgcgaaggagaucggcaacgggugcuucgaguucuaccacaagugcaacgacgagugcauggaguccgugaagaacggcaccuacgacuaccccaaguacagcgaggaguccaagcucaaccgcgagaagaucgacggcgugaagcuggagagcaugggggucuaccagauccuggccaucuacuccacgguggccagcagccucgugcugcuggucucccucggcgccaucagcuucuggaugugcuccaacgggagccugcagugccggaucugcaucuga

SEQ ID NO: 75258 - RNA, 1698 nt, Artificial Sequence; identical to SEQ ID NO: 65969
  derived and/or modified CDS sequence (opt1) from hemagglutinin__InfluenzaA__AHL89654

SEQ ID NO: 75259 - RNA, 1698 nt, Artificial Sequence
  derived and/or modified CDS sequence (opt1) from hemagglutinin__InfluenzaA__AHL89666
augaaggugaagcugcucguccugcugugcaccuucaccgccacguacgccgacaccaucugcaucggcuaccacgcgaacaacagcaccgacaccguggacacggugcucgagaagaacgucaccgugacccacuccgugaaccugcuggaggacaaccacaacgggaagcucugccugcugaagggcaucgcgccccuccagcuggggaacugcagcgucgccggcuggauccuggggaacccggagugcgagcuccugaucuccaaggagagcugguccuacaucguggagacccccaaccccgagaacggcacgugcuaccccggcuacuucgccgacuacgaggagcugcgcgagcagcucagcuccgugagcuccuucgagcgguucgagaucuucccgaaggagagcuccuggcccaaccacaccgucaccggggugagcgccuccugcagccacaacggcaaguccagcuucuaccgcaaccugcuguggcucaccgggaagaacggccuguaccccaaccuguccaagagcuacgccaacaacaaggagaaggaggugcucguccuguggggcgugcaccacccgcccaacaucggggaccagcgggcccuguaccacacggagaacgccuacguguccgucgugagcagccacuacucccgccgguucacccccgagaucgccaagcgccccaaggugcgggaccaggagggccgcaucaacuacuacuggacccuccuggagcccggggacaccaucaucuucgaggcgaacggcaaccugaucgccccgcgguucgccuucgcccucagccgcggguucggcuccggcaucaucacgagcaacgcccccaugggggagugcgacgcgaagugccagacgccccagggcgccaucaacuccagccugcccuuccagaacguccacccggugaccaucggggagugccccaaguacgugcgguccgccaagcugcgcauggucaccggccuccggaacauccccagcauccagucccgcgggcuguucggcgccaucgccggcuucaucgagggcggguggaccgggaugguggacggcugguacggguaccaccaccagaacgagcagggcagcggcuacgcggccgaccagaaguccacccagaacgccaucaacgggaucaccaacaaggugaacagcgucaucgagaagaugaacacccaguucacggccgugggcaaggaguucaacaagcuggagcggcgcauggagaaccucaacaagaaggucgacgacggguuccuggacaucuggaccuacaacgccgagcugcucgugcugcuggagaacgagcggacccucgacuuccacgacuccaacgugaagaaccuguacgagaaggucaagagccagcugaagaacaacgcggaggagaucggcaacgggugcuucgaguucuaccacaagugcaacgacgagugcauggaguccgugaagaacggcaccuacgacuaccccaaguacagcgaggaguccaagcucaaccgcgagaagaucgacggcgugaagcuggagagcaugggggucuaccagauccuggccaucuacuccacgguggccagcagccucgugcugcuggucucccucggcgccaucagcuucuggaugugcuccaacgggagccugcagugccggaucugcaucuga

SEQ ID NO: 75260 - RNA, 1698 nt, Artificial Sequence
  derived and/or modified CDS sequence (opt1) from hemagglutinin__InfluenzaA__AHL89678
augaaggugaagcugcucguccugcugugcaccuucaccgccacguacgccgacaccaucugcaucggcuaccacgcgaacaacagcaccgacaccguggacacggugcucgagaagaacgucaccgugacccacuccgugaaccugcuggaggacagccacaacgggaagcucugccugcugaagggcaucgcgccccuccagcuggggaacugcuccgucgccggcuggauccuggggaacccggagugcgagcuccugaucagcaaggaguccuggagcuacaucguggagacccccaaccccgagaacggcacgugcuaccccggcuacuucgccgacuacgaggagcugcgcgagcagcucuccagcguguccagcuucgagcgguucgagaucuucccgaaggaguccagcuggcccaaccacaccgucaccgggguguccgccagcugcucccacaacggcaagagcuccuucuaccgcaaccugcuguggcucaccgggaagaacggccuguaccccaaccugagcaaguccuacgccaacaacaaggagaaggaggugcucguccuguggggcgugcaccacccgcccaacaucggggaccagcgggcccuguaccacacggagaacgccuacgugagcgucgugagcucccacuacagccgccgguucacccccgagaucgccaagcgccccaaggugcgggaccaggagggccgcaucaacuacuacuggacccuccuggagcccggggacaccaucaucuucgaggcgaacggcaaccugaucgccccgcgguucgccuucgcccucucccgcggguucggcagcggcaucaucacguccaacgcccccaugggggagugcgacgcgaagugccagacgccccagggcgccaucaacagcucccugcccuuccagaacguccacccggugaccaucggggagugccccaaguacgugcggagcgccaagcugcgcauggucaccggccuccggaacauccccuccauccagagccgcgggcuguucggcgccaucgccggcuucaucgagggcggguggaccgggaugguggacggcugguacggguaccaccaccagaacgagcagggcuccggcuacgcggccgaccagaaguccacccagaacgccaucaacgggaucaccaacaaggugaacagcgucaucgagaagaugaacacccaguucacggccgugggcaaggaguucaacaagcuggagcggcgcauggagaaccucaacaagaaggucgacgacggguuccuggacaucuggaccuacaacgccgagcugcucgugcugcuggagaacgagcggacccucgacuuccacgacagcaacgugaagaaccuguacgagaaggucaagucccagcugaagaacaacgcgaaggagaucggcaacgggugcuucgaguucuaccacaagugcaacgacgagugcauggagagcgugaagaacggcaccuacgacuaccccaaguacuccgaggagagcaagcucaaccgcaagaagaucgacggcgugaagcuggaguccaugggggucuaccagauccuggccaucuacagcacgguggccagcucccucgugcugcuggucagccucggcgccaucuccuucuggaugugcagcaacgggucccugcagugccggaucugcaucuga

SEQ ID NO: 75261 - RNA, 1698 nt, Artificial Sequence
  derived and/or modified CDS sequence (opt1) from hemagglutinin__InfluenzaA__AHL89690
augaaggugaagcugcucguccugcugugcaccuucaccgccacguacgccgacaccaucugcaucggcuaccacgcgaacaacagcaccgacaccguggacacggugcucgagaagaacgucaccgugacccacuccgugaaccugcuggaggacagccacaacgggaagcucugccugcugaagggcaucgcgccccuccagcuggggaacugcuccgucgccggcuggauccuggggaacccggagugcgagcuccugaucagcaaggaguccuggagcuacaucguggagaagcccgaccccgagaacgggaccugcuaccccggccacuucgccgacuacgaggagcugcgcgagcagcucuccagcguguccagcuucgagcgguucgagaucuucccgaaggaguccagcuggcccaaccacacggucaccgggguguccgccagcugcucccacaacggcaagagcuccuucuacaagaaccugcuguggcucaccgggaagaacggccuguaccccaaccugagcaaguccuacgccaacaacaaggagaaggaggugcucguccuguggggcgugcaccacccgcccaacaucggcgaccagaaggcccuguaccacaccgagaacgccuacgugagcgucgugagcucccacuacagccgcaaguucacgcccgagaucgccaagcggcccaaggugcgcgaccaggagggccggaucaacuacuacuggacccuccuggagcccggggacaccaucaucuucgaggcgaacggcaaccugaucgccccgcgcuacgccuucgcccucucccggggguucggcagcggcaucaucaacuccaacgcccccauggacaagugcgacgcgaagugccagacgccccagggggccaucaacagcucccugcccuuccagaacguccacccggugaccaucggcgagugccccaaguacgugcgcagcgccaagcugcggauggucaccgggcuccgcaacauccccuccauccagagccggggccuguucggggccaucgccggcuucaucgagggcggguggaccggcaugguggacgggugguacggcuaccaccaccagaacgagcagggguccggcuacgcggccgaccagaaguccacccagaacgccaucaacggcaucacgaacaaggugaacagcgucaucgagaagaugaacacccaguucaccgccguggggaaggaguucaacaagcuggagcgccggauggagaaccucaacaagaaggucgacgacggcuucaucgacaucuggaccuacaacgccgagcugcuggugcuccuggagaacgagcgcacgcuggacuuccacgacagcaacgugaagaaccucuacgagaaggucaagucccagcugaagaacaacgcgaaggagaucgggaacggcugcuucgaguucuaccacaagugcaacgacgagugcauggagagcgugaagaacgggaccuacgacuaccccaaguacuccgaggagagcaagcugaaccgggagaagaucgacggcgugaagcucgaguccaugggcgucuaccagauccuggccaucuacagcaccguggccagcucccuggugcuccuggucagccugggggccaucuccuucuggaugugcagcaacggcucccuccagugccgcaucugcaucuga

SEQ ID NO: 75262 - RNA, 1698 nt, Artificial Sequence; identical to SEQ ID NO: 65969
  derived and/or modified CDS sequence (opt1) from hemagglutinin__InfluenzaA__AHL89702

SEQ ID NO: 75263 - RNA, 1698 nt, Artificial Sequence; identical to SEQ ID NO: 65938
  derived and/or modified CDS sequence (opt1) from hemagglutinin__InfluenzaA__AHL89714

SEQ ID NO: 75264 - RNA, 1698 nt, Artificial Sequence
  derived and/or modified CDS sequence (opt1) from hemagglutinin__InfluenzaA__AHL89726
augaaggugaagcugcucguccugcugugcaccuucaccgccacguacgccgacaccaucugcaucggcuaccacgcgaacaacagcaccgacaccguggacacggugcucgagaagaacgucaccgugacccacuccgugaaccugcuggaggacagccacaacgggaagcucugccugcugaagggcaucgcgccccuccagcuggggaacugcuccgucgccggcuggauccuggggaacccggagugcgagcuccugaucagcaaggaguccuggagcuacaucguggagacccccaaccccgagaacggcacgugcuaccccggcuacuucgccgacuacgaggagcugcgcgagcagcucuccagcguguccagcuucgagcgguucgagaucuucccgaaggaguccagcuggcccaaccacaccgucaccgggguguccgccagcugcucccacaacggcaagagcuccuucuaccgcaaccugcuguggcucaccgggaagaacggccuguaccccaaccugagcaaguccuacgccaacaacaaggagaaggaggugcucguccuguggggcgugcaccacccgcccaacaucggggaccagaaggcccuguaccacacggagaacgccuacgugagcgucgugagcucccacuacagccggcgcuucacccccgagaucgccaagcggcccaaggugcgcgaccaggagggccggaucaacuacuacuggacccuccuggagcccggggacaccaucaucuucgaggcgaacggcaaccugaucgccccgcgcuucgccuucgcccucucccggggguucggcagcggcaucaucacguccaacgcccccauggacgagugcgacgcgaagugccagacgccccagggggccaucaacagcucccugcccuuccagaacguccacccggugaccaucggcgagugccccaaguacgugcgcagcaccaagcugcggauggucaccgggcuccgcaacauccccuccauccagagccggggccuguucggggccaucgccggcuucaucgagggcggguggaccggcaugguggacgggugguacggcuaccaccaccagaacgagcagggguccggcuacgccgcggaccagaaguccacccagaacgccaucaacggcaucaccaacaaggugaacagcgucaucgagaagaugaacacgcaguucaccgccguggggaaggaguucaacaagcuggagcgccggauggagaaccucaacaagaaggucgacgacggcuuccuggacaucuggaccuacaacgccgagcugcucgugcugcuggagaacgagcgcacccucgacuuccacgacagcaacgugaagaaccuguacgagaaggucaagucccagcugaagaacaacgccaaggagaucgggaacggcugcuucgaguucuaccacaagugcaacgacgagugcauggagagcgugaagaacgggacguacgacuaccccaaguacuccgaggagagcaagcucaaccgggagaagaucgacggcgugaagcuggaguccaugggcgucuaccagauccuggcgaucuacagcaccguggccagcucccucgugcugcuggucagccucggggccaucuccuucuggaugugcagcaacggcucccugcagugccgcaucugcaucuga

SEQ ID NO: 75265 - RNA, 1698 nt, Artificial Sequence
  derived and/or modified CDS sequence (opt1) from hemagglutinin__InfluenzaA__AHL89750
augaaggugaagcugcucguccugcugugcaccuucaccgccacguacgccgacaccaucugcaucggcuaccacgcgaacaacagcaccgacaccguggacacggugcucgagaagaacgucaccgugacccacuccgugaaccugcuggaggacagccacaacgggaagcucugccugcugaagggcaucgcgccccuccagcuggggaacugcuccgucgccggcuggauccuggggaacccggagugcgagcuccugaucagcaaggaguccuggagcuacaucguggagacccccaaccccgagaacggcacgugcuaccccggcuacuucgccgacuacgaggagcugcgcgagcagcucuccagcguguccagcuucgagcgguucgagaucuucccgaaggaguccagcuggcccaaccacaccgucaccgggguguccgccagcugcucccacaacggcaagagcuccuucuaccgcaaccugcuguggcucaccgggaagaacggccuguaccccaaccugagcaaguccuacgccaacaacaaggagaaggaggugcucguccuguggggcgugcaccacccgcccaacaucggggaccagcgggcccuguaccacacggagaacgccuacgugagcgucgugagcucccacuacagccgccgguucacccccgagaucgccaagcgccccaaggugcgggaccaggagggccgcaucaacuacuacuggacccuccuggagcccggggacaccaucaucuucgaggcgaacggcaaccugaucgccccgcgguucgccuucgcccucucccgcggguucggcagcggcaucaucacguccaacgcccccauggacgggugcgacgcgaagugccagacgccccagggcgccaucaacagcucccugcccuuccagaacguccacccggugaccaucggggagugccccaaguacgugcggagcaccaagcugcgcauggucaccggccuccggaacauccccuccauccagagccgcgggcuguucggcgccaucgccggcuucaucgagggcggguggaccgggaugguggacggcugguacggguaccaccaccagaacgagcagggcuccggcuacgccgcggaccagaaguccacccagaacgccaucaacgggaucaccaacaaggugaacagcgucaucgagaagaugaacacgcaguucaccgccgugggcaaggaguucaacaagcuggagcggcgcauggagaaccucaacaagaaggucgacgacggguuccuggacaucuggaccuacaacgccgagcugcucgugcugcuggagaacgagcggacccucgacuuccacgacagcaacgugaagaaccuguacgagaaggucaagucccagcugaagaacaacgccaaggagaucggcaacgggugcuucgaguucuaccacaagugcaacgacgagugcauggagagcgugaagaacggcacguacgacuaccccaaguacuccgaggagagcaagcucaaccgcgagaagaucgacggcgugaagcuggaguccaugggggucuaccagauccuggcgaucuacagcaccguggccagcucccucgugcugcuggucagccucggcgccaucuccuucuggaugugcagcaacgggucccugcagugccggaucugcaucuga

SEQ ID NO: 75266 - RNA, 1698 nt, Artificial Sequence; identical to SEQ ID NO: 65934
  derived and/or modified CDS sequence (opt1) from hemagglutinin__InfluenzaA__AHL89762

SEQ ID NO: 75267 - RNA, 1698 nt, Artificial Sequence; identical to SEQ ID NO: 65980
  derived and/or modified CDS sequence (opt1) from hemagglutinin__InfluenzaA__AHL89774

SEQ ID NO: 75268 - RNA, 1698 nt, Artificial Sequence; identical to SEQ ID NO: 65969
  derived and/or modified CDS sequence (opt1) from hemagglutinin__InfluenzaA__AHL89786

SEQ ID NO: 75269 - RNA, 1698 nt, Artificial Sequence
  derived and/or modified CDS sequence (opt1) from hemagglutinin__InfluenzaA__AHL89798
augaaggugaagcugcucguccugcugugcaccuucaccgccacguacgccgacaccaucugcaucggcuaccacgcgaacaacagcaccgacaccguggacacggugcucgagaagaacgucaccgugacccacuccgugaaccugcuggaggaccgccacaacgggaagcucugccugcugaagggcaucgcgccccuccagcuggggaacugcagcgucgccggcuggauccuggggaacccggagugcgagcuccugaucuccaaggagagcugguccuacaucguggagacccccaaccccgagaacggcacgugcuaccccggcuacuucgccgacuacgaggagcugcgggagcagcucagcuccgugagcuccuucgagcgcuucgagaucuucccgaaggagagcuccuggcccaaccacaccgucaccggggugagcgccuccugcagccacaacggcaaguccagcuucuaccggaaccugcuguggcucaccgggaagaacggccuguaccccaaccugucccgcagcuacgccaacaacaaggagaaggaggugcucguccuguggggcgugcaccacccgcccuccaucggggaccagcgggcccuguaccacacggagaacgccuacgugagcgucgugagcucccacuacagccgccgguucacccccgagaucgccaagcgccccaaggugcgggaccaggagggccgcaucaacuacuacuggacccuccuggagcccggggacaccaucaucuucgaggcgaacggcaaccugaucgccccgcgguucgccuucgcccucucccgcggguucggcagcggcaucaucacguccaacgcccccauggacgagugcgacgcgaagugccagacgccccagggggccaucaacagcucccugcccuuccagaacguccacccggugaccaucggcgagugccccaaguacgugcggagcgccaagcugcgcauggucaccgggcuccggaacauccccuccauccagagccgcggccuguucggggccaucgccggcuucaucgagggcggguggaccggcaugguggacgggugguacggcuaccaccaccagaacgagcagggguccggcuacgcggccgaccagaaguccacccagaacgccaucaacggcaucaccaacaaggugaacagcgucaucgagaagaugaacacccaguucacggccguggggaaggaguucaacaagcuggagcggcgcauggagaaccucaacaagaaggucgacgacggcuuccuggacaucuggaccuacaacgccgagcugcucgugcugcuggagaacgagcggacccucgacuuccacgacagcaacgugaagaaccuguacgagaaggucaagucccagcugaagaacaacgcgaaggagaucgggaacggcugcuucgaguucuaccacaagugcaacgacgagugcauggagagcgugaagaacgggaccuacgacuaccccaaguacuccgaggagagcaagcucaaccgcgagaagaucgacggcgugaagcuggaguccaugggcgucuaccagauccuggccaucuacagcacgguggccagcucccucgugcugcuggucagccucggggccaucuccuucuggaugugcagcaacggcucccugcagugccggaucugcaucuga

SEQ ID NO: 75270 - RNA, 1698 nt, Artificial Sequence
  derived and/or modified CDS sequence (opt1) from hemagglutinin__InfluenzaA__AHL89810
augaaggugaagcugcucguccugcugugcaccuucaccgccacguacgccgacaccaucugcaucggcuaccacgcgaacaacagcaccgacaccguggacacggugcucgagaagaacgucaccgugacccacuccgugaaccugcuggaggacagccacaacgggaagcucugccugcugaagggcaucgcgccccuccagcuggggaacugcuccgucgccggcuggauccuggggaacccggagugcgagcuccugaucagcaaggaguccuggagcuacaucguggagacccccaaccccgagaacggcacgugcuaccccggcuacuucgccgacuacgaggagcugcgcgagcagcucuccagcguguccagcuucgagcgguucgagaucuucccgaaggaguccagcuggcccaaccacaccgucaccgggguguccgccagcugcucccacaacggcaagagcuccuucuaccgcaaccugcuguggcucaccgggaagaacggccuguaccccaaccugagcaaguccuacgccaacaacaaggagaaggaggugcucguccuguggggcgugcaccacccgcccaacaucggggaccagcgggcccuguaccacacggagaacgccuacgugagcgucgugagcucccacuacagccgccgguucacccccgagaucgccaagcgccccaaggugcgggaccaggagggccgcaucaacuacuacuggacccuccuggagcccggggacaccaucaucuucgaggcgaacggcaaccugaucgccccgcgguucgccuucgcccucucccgcggguucggcagcggcaucaucacguccaacgcccccaugggggagugcgacgcggagugccagacgccccagggcgccaucaacagcucccugcccuuccagaacguccacccggugaccaucggggagugccccaaguacgugcggagcgccaagcugcgcauggucaccggccuccggaacauccccuccauccagagccgcgggcuguucggcgccaucgccggcuucaucgagggcggguggaccgggaugguggacggcugguacggguaccaccaccagaacgagcagggcuccggcuacgcggccgaccagaaguccacccagaacgccaucaacgggaucaccaacaaggugaacagcgucaucgagaagaugaacacccaguucacggccgugggcaaggaguucaacaagcuggagcggcgcauggagaaccucaacaagaaggucgacgacggguuccuggacaucuggaccuacaacgccgagcugcucgugcugcuggagaacgagcggacccucgacuuccacgacagcaacgugaagaaccuguacgagaaggucaagucccagcugaagaacaacgcgaaggagaucggcaacgggugcuucgaguucuaccacaagugcaacgacgagugcauggagagcgugaagaacggcaccuacgacuaccccaaguacuccgaggagagcaagcucaaccgcgagaagaucgacggcgugaagcuggaguccaugggggucuaccagauccuggccaucuacagcacgguggccagcucccucgugcugcuggucagccucggcgccaucuccuucuggaugugcagcaacgggucccugcagugccggaucugcaucuga

SEQ ID NO: 75271 - RNA, 1698 nt, Artificial Sequence
  derived and/or modified CDS sequence (opt1) from hemagglutinin__InfluenzaA__AHL89822
augaaggugaagcugcucguccugcugugcaccuucaccgccacguacgccgacaccaucugcaucggcuaccacgcgaacaacagcaccgacaccguggacacggugcucgagaagaacgucaccgugacccacuccgugaaccugcuggaggaccgccacaacgggaagcucugccugcugaagggcaucgcgccccuccagcuggggaacugcagcgucgccggcuggauccuggggaacccggagugcgagcuccugaucuccaaggagagcugguccuacaucguggagacccccaaccccgagaacggcacgugcuaccccggcuacuucgccgacuacgaggagcugcgggagcagcucagcuccgugagcuccuucgagcgcuucgagaucuucccgaaggagagcuccuggcccaaccacaccgucaccggggugagcgccuccugcagccacaacggcaaguccagcuucuaccggaaccugcuguggcucaccgggaagaacggccuguaccccaaccuguccaagagcuacgccaacaacaaggagaaggaggugcucguccuguggggcgugcaccacccgcccaacaucggggaccagcgcgcccuguaccacacggagaacgccuacguguccgucgugagcagccacuacucccggcgcuucacccccgagaucgccaagcggcccaaggugcgcgaccaggagggccggaucaacuacuacuggacccuccuggagcccggggacaccaucaucuucgaggcgaacggcaaccugaucgccccgcgcuucgccuucgcccucagccggggguucggcuccggcaucaucacgagcaacgcccccauggacgagugcgacgcgaagugccagacgccccagggggccaucaacuccagccugcccuuccagaacguccacccggugaccaucggcgagugccccaaguacgugcgcuccgccaagcugcggauggucaccgggcuccgcaacauccccagcauccagucccggggccuguucggggccaucgccggcuucaucgagggcggguggaccggcaugguggacgggugguacggcuaccaccaccagaacgagcaggggagcggcuacgcggccgaccagaaguccacccagaacgccaucaacggcaucaccaacaaggugaacagcgucaucgagaagaugaacacccaguucacggccguggggaaggaguucaacaagcuggagcgccggauggagaaccucaacaagaaggucgacgacggcuuccuggacaucuggaccuacaacgccgagcugcucgugcugcuggagaacgagcgcacccucgacuuccacgacuccaacgugaagaaccuguacgagaaggucaagagccagcugaagaacaacgcgaaggagaucgggaacggcugcuucgaguucuaccacaagugcaacgacgagugcauggaguccgugaagaacgggaccuacgacuaccccaaguacagcgaggaguccaagcucaaccgggagaagaucgacggcgugaagcuggagagcaugggcgucuaccagauccuggccaucuacuccacgguggccagcagccucgugcugcuggucucccucggggccaucagcuucuggaugugcuccaacggcagccugcagugccgcaucugcaucuga

SEQ ID NO: 75272 - RNA, 1698 nt, Artificial Sequence
  derived and/or modified CDS sequence (opt1) from hemagglutinin__InfluenzaA__AHL89834
augaaggugaagcugcucguccugcugugcaccuucaccgccacguacgccgacaccaucugcaucggcuaccacgcgaacaacagcaccgacaccguggacacggugcucgagaagaacgucaccgugacccacuccgugaaccugcuggaggacagccacaacgggaagcucugccugcugaagggcaucgcgccccuccagcuggggaacugcuccgucgccggcuggauccuggggaacccggagugcgagcuccugaucagcaaggaguccuggagcuacaucguggagacccccaaccccgagaacggcacgugcuaccccggcaacuucgccgacuacgaggagcugcgcgagcagcucuccagcguguccagcuucgagcgguucgagaucuucccgaaggaguccagcuggcccaaccacaccgucaccgggguguccgccagcugcucccacaacggcaagagcuccuucuaccgcaaccugcuguggcucaccgggaagaacggccuguaccccaaccugagcaaguccuacgccaacaacaaggagaaggaggugcucguccuguggggcgugcaccacccgcccaacaucggggaccagcgggcccuguaccacacggagaacgccuacgugagcgucgugagcucccacuacagccgccgguucacccccgagaucgccaagcgccccaaggugcgggaccaggagggccgcaucaacuacuacuggacccuccuggagcccggggacaccaucaucuucgaggcgaacggcaaccugaucgccccgcgguucgccuucgcccucucccgcggguucggcagcggcaucaucacguccaacgcccccauggacgagugcgacgcgaagugccagacgccccagggggccaucaacagcucccugcccuuccagaacguccacccggugaccaucggcgagugccccaaguacgugcggagcgccaagcugcgcauggucaccgggcuccggaacauccccuccauccagagccgcggccuguucggggccaucgccggcuucaucgagggcggguggaccggcaugguggacgggugguacggcuaccaccaccagaacgagcagggguccggcuacgcggccgaccagaaguccacccagaacgccaucaacggcaucaccaacaaggugaacagcgucaucgagaagaugaacacccaguucacggccguggggaaggaguucaacaagcuggagcggcgcauggagaaccucaacaagaaggucgacgacggcuuccuggacaucuggaccuacaacgccgagcugcucgugcugcuggagaacgagcggacccucgacuuccacgacagcaacgugaagaaccuguacgagaaggucaagucccagcugaagaacaacgcgaaggagaucggggacggcugcuucgaguucuaccacaagugcaacgacgagugcauggagagcgugaagaacgggaccuacgacuaccccaaguacuccgaggagagcaagcucaaccgcgagaagaucgacggcgugaagcuggaguccaugggcgucuaccagauccuggccaucuacagcacgguggccagcucccucgugcugcuggucagccucggggccaucuccuucuggaugugcagcaacggcucccugcagugccggaucugcaucuga

SEQ ID NO: 75273 - RNA, 1698 nt, Artificial Sequence; identical to SEQ ID NO: 65980
  derived and/or modified CDS sequence (opt1) from hemagglutinin__InfluenzaA__AHL89846

SEQ ID NO: 75274 - RNA, 1701 nt, Artificial Sequence; identical to SEQ ID NO: 65952
  derived and/or modified CDS sequence (opt1) from hemagglutinin__InfluenzaA__AHL89858

SEQ ID NO: 75275 - RNA, 1701 nt, Artificial Sequence; identical to SEQ ID NO: 65952
  derived and/or modified CDS sequence (opt1) from hemagglutinin__InfluenzaA__AHL89870

SEQ ID NO: 75276 - RNA, 1701 nt, Artificial Sequence
  derived and/or modified CDS sequence (opt1) from hemagglutinin__InfluenzaA__AHL89882
augaagaccaucaucgcccugagcuacauccucugccugguguucgcccagaagcugcccggcaacgacaacuccaccgcgacgcucugccuggggcaccacgccgucccgaacggcaccaucgugaagaccaucaccaacgaccagaucgaggugacgaacgccaccgagcugguccagagcuccagcaccgggggcaucugcgacagcccccaccagauccucgacggggagaacugcacccugaucgacgcccugcucggcgacccccagugcgacggcuuccagaacaagaagugggaccuguucguggagcgcagcaaggccuacuccaacugcuaccccuacgacgugccggacuacgcgagccugcggucccucgucgccagcuccgggacgcuggaguucaacaacgagagcuucaacuggaccggcgugacccagaacgggaccuccagcgccugcaagcgcggcuccgacaacagcuucuucucccggcugaacuggcucacgcaccugaaguucaaguaccccgcccugaacgugaccaugcccaacaacgagaaguucgacaagcucuacaucuggggcguccaccaccccgggaccgacaacgaccagaucuuccuguacgcgcaggccagcggccgcaucaccguguccacgaagcggagccagcagaccgugaucccgaacaucgggagccgcccccggguccgcaacauccccucccggaucagcaucuacuggaccaucgugaagcccggcgacauccugcucaucaacuccaccgggaaccugaucgccccgcgcggcuacuucaagauccggagcggcaaguccagcaucaugcgcuccgacgcccccaucgggaagugcaacagcgagugcaucacgcccaacggcuccauccccaacgacaagccguuccagaacgugaaccggaucaccuacggggccugcccccgcuacgucaagcagaacacccugaagcucgcgaccggcaugcggaacgugcccgagaagcagacgcgcgggaucuucggcgccaucgccggcuucaucgagaacgggugggagggcaugguggacgggugguacggcuuccggcaccagaacagcgaggggaucggccaggccgccgaccugaaguccacccaggcggccaucaaccagaucaacggcaagcugaaccgccucaucgggaagaccaacgagaaguuccaccagaucgagaaggaguucagcgaggucgagggccggauccaggaccuggagaaguacguggaggacaccaagaucgaccugugguccuacaacgccgagcuccugguggcccuggagaaccagcacacgaucgaccucaccgacagcgagaugaacaagcuguucgagcgcaccaagaagcagcugcgggagaacgccgaggacauggggaacggcugcuucaagaucuaccacaagugcgacaacgcgugcaucggguccauccgcaacggcaccuacgaccacgacgucuaccgcgacgaggcccucaacaaccgguuccagaucaagggcguggagcugaaguccggguacaaggacuggauccuguggaucuccuucgccaucagcugcuuccuccugugcguggcccugcucggcuucaucaugugggccugccagaaggggaacauccgcugcaacaucugcaucuga

SEQ ID NO: 75277 - RNA, 1701 nt, Artificial Sequence; identical to SEQ ID NO: 65952
  derived and/or modified CDS sequence (opt1) from hemagglutinin__InfluenzaA__AHL89894

SEQ ID NO: 75278 - RNA, 1701 nt, Artificial Sequence
  derived and/or modified CDS sequence (opt1) from hemagglutinin__InfluenzaA__AHL89906
augaagaccaucaucgcccugagcuacauccucugccugguguacgcccagaagcugcccggcaucgacaacuccaccgcgacgcucugccuggggcaccacgccgucccgaacggcaccaucgugaagaccaucaccaacgaccagaucgaggugacgaacgccaccgagcugguccagagcuccagcaccggggagaucugcgacagcccccaccagauccucgacggcgagaacugcacccugaucgacgcccugcucggggacccccagugcgacggcuuccagaacaagaagugggaccuguucguggagcgcuccaaggccuacuccaacugcuaccccuacgacgugccggacuacgcgagccugcggucccucgucgccagcuccggcacgcuggaguucaacaacgagagcuucaacugggccggggugacccagaacggcaccuccagcgccugcaagcgcggguccaacaacagcuucuucucccggcugaacuggcucacccacagcaaguucaaguaccccgcgcugaacgugacgaugcccaacaacgaggaguucgacaagcuguacaucuggggcguccaccaccccgggaccgacaacgaccagaucuuccucuacgcccaggccuccggccgcaucaccgugagcaccaagcggagccagcagacggugaucccgaacaucggcucccgcccccggguccgcaacauccccagccggaucuccaucuacuggaccaucgugaagcccggggacauccugcugaucaacagcaccggcaaccucaucgccccgcgcggguacuucaagauccgguccggcaagagcuccaucaugcgcagcgacgcccccaucggcaagugcaacuccgagugcaucacccccaacgggagcauccccaacgacaagccguuccagaacgugaaccggaucacguacggcgcgugcccccgcuacguccggcagaacacccugaagcuggccaccgggaugcgcaacgugcccgagaagcagacccggggcaucuucggggccaucgccggcuucaucgagaacggcugggaggggaugguggacggcugguacggguuccgccaccagaacuccgagggcaucgggcaggccgcggaccucaagagcacgcaggccgccaucgaccagaucaacggcaagcugaaccggcugaucggcaagaccaacgagaaguuccaccagaucgagaaggaguucuccgaggucgaggggcgcauccaggaccucgagaaguacguggaggacaccaagaucgaccuguggagcuacaacgccgagcugcucguggcccuggagaaccagcacaccaucgaccugacggacuccgagaugaacaagcuguucgagaagaccaagaagcagcuccgggagaacgcggaggacaugggcaacgggugcuucaagaucuaccacaagugcgacaacgccugcaucggcagcauccgcaacgggaccuacgaccacgacgucuaccgcgacgaggcccugaacaaccgguuccagaucaagggcguggagcucaaguccggcuacaaggacuggauccuguggaucagcuucgccaucuccugcuuccugcucugcguggcccugcugggguucaucaugugggcgugccagaagggcaacauccgcugcaacaucugcaucuga

SEQ ID NO: 75279 - RNA, 1701 nt, Artificial Sequence
  derived and/or modified CDS sequence (opt1) from hemagglutinin__InfluenzaA__AHL89918
augaagaccaucaucgcccugagcuacauccucugccugguguucgcccagaagcugcccggcaacgacaacuccaccgcgacgcucugccuggggcaccacgccgucccgaacggcaccaucgugaagaccaucaccaacgaccagaucgaggugacgaacgccaccgagcugguccagagcuccagcaccggggagaucugcgacagcccccaccagauccucgacggcgagaacugcacccugaucgacgcccugcucggggacccccagugcgacggcuuccagaacaagaagugggaccuguucguggagcgcagcaaggccuacuccaacugcuaccccuacgacgugccggacuacgcgagccugcggucccucgucgccagcuccggcacgcuggaguucaacaacgagagcuucaacuggaccggggugacccagaacggcaccuccagcgccugcauccgccgguccaacaacagcuucuucucccgccugaacuggcucacgcaccugaaguucaaguaccccgcccugaacgugaccaugcccaacaacgagaaguucgacaagcucuacaucuggggcguccaccaccccgggaccgacaacgaccagaccuuccuguacgcgcaggccagcgggcggaucacgguguccaccaagcgcagccagcagaccgugaucccgaacaucggcagccggccccgcguccggaacauccccucccgcaucagcaucuacuggaccaucgugaagcccggcgacauccugcucaucaacuccacggggaaccugaucgccccgcggggcuacuucaagauccagagcgggaaguccagcaucaugcgcuccgacgcccccaucggcaagugcaacagcgagugcaucacccccaacggcuccauccccaacgacaagccguuccagaacgugaaccggaucaccuacggggccugcccccgcuacgucaagcagaacacccugaagcucgcgacgggcaugcggaacgugcccgagaagcagacccgcgggaucuucggcgccaucgccggguucaucgagaacggcugggagggcaugguggacgggugguacggcuuccggcaccagaacagcgaggggaucggccaggccgccgaccugaaguccacccaggcggccaucgaccagaucaacgggaagcugaaccgccucaucggcaagaccaacgagaaguuccaccagaucgagaaggaguucagcgaggucgagggccggauccaggaccuggagaaguacguggaggacacgaagaucgaccugugguccuacaacgccgagcuccugguggcccuggagaaccagcacaccaucgaccucaccgacagcgagaugaacaagcuguucgagaagaccaagaagcagcugcgcgagaacgccgaggacauggggaacggcugcuucaagaucuaccacaagugcgacaacgcgugcaucggguccauccggaacggcacguacgaccacgacgucuaccgcgacgaggcccucaacaaccgcuuccagaucaaggggguggagcugaaguccggcuacaaggacuggauccuguggaucuccuucgccaucagcugcuuccuccugugcguggcccugcucggcuucaucaugugggccugccagaaggggaacauccggugcaacaucugcaucuga

SEQ ID NO: 75280 - RNA, 1701 nt, Artificial Sequence
  derived and/or modified CDS sequence (opt1) from hemagglutinin__InfluenzaA__AHL89930
augaagaccaucaucgcccugagcuacauccucugccugguguucgcccagaagcugcccggcaucgacaacuccaccgcgacgcucugccuggggcaccacgccgucccgaacggcaccaucgugaagaccaucaccaacgaccagaucgaggugacgaacgccaccgagcugguccagagcuccagcaccgggggcaucugcgacagcccccaccagauccucgacggggagaacugcacccugaucgacgcccugcucggcgacccccagugcgacggcuuccagaacaagaagugggaccuguucguggagcgcuccaaggccuacuccaacugcuaccccuacgacgugccggacuacgcgagccugcggucccucgucgccagcuccgggacgcuggaguucaacaacgagagcuucaacugggccggcgugacccagaacgggaccuccagcgccugcaagcgcggcuccaacaacagcuucuucucccggcugaacuggcucacccacagcaaguucaaguaccccgcgcugaacgugacgaugcccaacaacgaggaguucgacaagcuguacaucuggggcguccaccaccccgggaccgacaacgaccagaucuuccucuacgcccaggccuccggccgcaucaccgugagcaccaagcggagccagcagacggugaucccgaacaucgggucccgcccccggguccgcaacauccccagccggaucuccaucuacuggaccaucgugaagcccggcgacauccugcugaucaacagcaccgggaaccucaucgccccgcgcggcuacuucaagauccgguccggcaagagcuccaucaugcgcagcgacgcccccaucuccaagugcaacagcgagugcaucacccccaacggguccauccccaacgacaagccguuccagaacgugaaccggaucacguacggcgcgugcccccgcuacgucaagcagaacacccugaagcuggccaccgggaugcggaacgugcccgagaagcagacccgcggcaucuucggggccaucgccggcuucaucgagaacggcugggaggggaugguggacggcugguacggguuccggcaccagaacagcgagggcauggggcaggccgcggaccucaaguccacgcaggccgccaucgaccagaucaacggcaagcugaaccgccugaucggcaagaccaacgagaaguuccaccagaucgagaaggaguucagcgaggucgaggggcggauccaggaccucgagaaguacguggaggacaccaagaucgaccugugguccuacaacgccgagcugcucguggcccuggagaaccagcacaccaucgaccugacggacagcgagaugaacaagcuguucgagaagaccaagaagcagcuccgcgagaacgcggaggacaugggcaacgggugcuucaagaucuaccacaagugcgacaacgccugcaucggcuccauccggaacgggaccuacgaccacgacgucuaccgcgacgaggcccugaacaaccgcuuccagaucaagggcguggagcucaagagcggcuacaaggacuggauccuguggaucuccuucgccaucagcugcuuccugcucugcguggcccugcugggguucaucaugugggcgugccagaagggcaacauccggugcaacaucugcaucuga

SEQ ID NO: 75281 - RNA, 1701 nt, Artificial Sequence; identical to SEQ ID NO: 65939
  derived and/or modified CDS sequence (opt1) from hemagglutinin__InfluenzaA__AHL89942

SEQ ID NO: 75282 - RNA, 1701 nt, Artificial Sequence
  derived and/or modified CDS sequence (opt1) from hemagglutinin__InfluenzaA__AHL89954
augaagaccaucaucgcccugagcuacauccucugccugguguucgcccagaagcugcccggcaacgacaacuccaccgcgacgcucugccuggggcaccacgccgucccgaacggcaccaucgugaagaccaucaccaacgaccagaucgaggugacgaacgccaccgagcugguccagagcuccagcaccggggagaucugcgacagcccccaccagauccucgacggcgagaacugcacccugaucgacgcccugcucggggacccccagugcgacggcuuccagaacaagaagugggaccuguucguggagcgcagcaaggccuacuccaacugcuaccccuacgacgugccggaccacgcgagccugcggucccucgucgccagcuccggcacgcuggaguucaacaacgagagcuucaacuggaccggggugacccagaacggcaccuccagcgccugcauccgccgguccaacaacagcuucuucucccgccugaacuggcucacgcaccugaaguucaaguaccccgcccugaacgugaccaugcccaacaacgagaaguucgacaagcucuacaucuggggcguccaccaccccgggaccgacaacgaccagaucuuccuguacgcgcaggccagcgggcggaucaccguguccacgaagcgcagccagcagaccgugaucccgaacaucggcagccggccccgcguccggaacauccccucccgcaucagcaucuacuggaccaucgugaagcccggcgacauccugcucaucaacuccaccgggaaccugaucgccccgcggggcuacuucaagauccgcagcgggaaguccagcaucaugcgguccgacgcccccaucggcaagugcaacagcgagugcaucacgcccaacggcuccauccccaacgacaagccguuccagaacgugaaccgcaucaccuacggggccugcccccgguacgucaagcagaacacccugaagcucgcgaccggcaugcgcaacgugcccgagaagcagacgcgggggaucuucggcgccaucgccggguucaucgagaacggcugggagggcaugguggacgggugguacggcuuccgccaccagaacagcgaggggaucggccaggccgccgaccugaaguccacccaggcggccaucgaccagaucaacgggaagcugaaccggcucaucggcaagaccaacgagaaguuccaccagaucgagaaggaguucagcgaggucgagggccgcauccaggaccuggagaaguacguggaggacaccaagaucgaccugugguccuacaacgccgagcuccugguggcccuggagaaccagcacacgaucgaccucaccgacagcgagaugaacaagcuguucgagaagaccaagaagcagcugcgggagaacgccgaggacauggggaacggcugcuucaagaucuaccacaagugcgacaacgcgugcaucggguccauccgcaacggcaccuacgaccacgacgucuaccgcgacgaggcccucaacaaccgguuccagaucaaggggguggagcugaaguccggcuacaaggacuggauccuguggaucuccuucgccaucagcugcuuccuccugugcguggcccugcucggcuucaucaugugggccugccagaaggggaacauccgcugcaacaucugcaucuga

SEQ ID NO: 75283 - RNA, 1701 nt, Artificial Sequence; identical to SEQ ID NO: 65952
  derived and/or modified CDS sequence (opt1) from hemagglutinin__InfluenzaA__AHL89966

SEQ ID NO: 75284 - RNA, 1701 nt, Artificial Sequence; identical to SEQ ID NO: 65952
  derived and/or modified CDS sequence (opt1) from hemagglutinin__InfluenzaA__AHL89978

SEQ ID NO: 75285 - RNA, 1701 nt, Artificial Sequence; identical to SEQ ID NO: 66011
  derived and/or modified CDS sequence (opt1) from hemagglutinin__InfluenzaA__AHL89990

SEQ ID NO: 75286 - RNA, 1701 nt, Artificial Sequence
  derived and/or modified CDS sequence (opt1) from hemagglutinin__InfluenzaA__AHL90002
augaagaccaucaucgcccugagcuacauccucugccugguguucgcccagaagcugcccggcaucgacaacuccaccgcgacgcucugccuggggcaccacgccgucccgaacggcaccaucgugaagaccaucaccaacgaccagaucgaggugacgaacgccaccgagcugguccagagcuccagcaccgggggcaucugcgacagcccccaccagauccucgacggggagaacugcacccugaucgacgcccugcucggcgacccccagugcgacggcuuccagaacaagaagugggaccuguucguggagcgcuccaaggccuacuccaacugcuaccccuacgacgugccggacuacgcgagccugcggucccucgucgccagcuccgggacgcuggaguucaacaacgagagcuucaacugggccggcgugacccagaacgggaccuccagcgccugcaagcgcggcuccaacaacagcuucuucucccggcugaacuggcucacccacagcaaguucaaguaccccgcgcugaacgugacgaugcccaacaacgaggaguucgacaagcuguacaucuggggcguccaccaccccgggaccgacaacgaccagaucuuccucuacgcccaggccuccggccgcaucaccgugagcaccaagcggagccagcagacggugaucccgaacaucgggucccgcccccggguccgcaacauccccagccggaucuccaucuacuggaccaucgugaagcccggcgacauccugcugaucaacagcaccgggaaccucaucgccccgcgcggcuacuucaagauccgguccggcaagagcuccaucaugcgcagcgacgcccccaucgggaagugcaacuccgagugcaucacccccaacggcagcauccccaacgacaagccguuccagaacgugaaccggaucacguacggggcgugcccccgcuacgucaagcagaacacccugaagcuggccaccggcaugcggaacgugcccgagaagcagacccgcgggaucuucggcgccaucgccggcuucaucgagaacgggugggagggcaugguggacgggugguacggcuuccggcaccagaacuccgaggggaugggccaggccgcggaccucaagagcacgcaggccgccaucgaccagaucaacggcaagcugaaccgccugaucgggaagaccaacgagaaguuccaccagaucgagaaggaguucuccgaggucgagggccggauccaggaccucgagaaguacguggaggacaccaagaucgaccuguggagcuacaacgccgagcugcucguggcccuggagaaccagcacaccaucgaccugacggacuccgagaugaacaagcuguucgagaagaccaagaagcagcuccgcgagaacgcggaggacauggggaacggcugcuucaagaucuaccacaagugcgacaacgccugcaucgggagcauccggaacggcaccuacgaccacgacgucuaccgcgacgaggcccugaacaaccgcuuccagaucaagggcguggagcucaaguccggguacaaggacuggauccuguggaucagcuucgccaucuccugcuuccugcucugcguggcccugcugggcuucaucaugugggcgugccagaaggggaacauccggugcaacaucugcaucuga

SEQ ID NO: 75287 - RNA, 1701 nt, Artificial Sequence
  derived and/or modified CDS sequence (opt1) from hemagglutinin__InfluenzaA__AHL90014
augaagaccaucaucgcccugagcuacauccucugccugguguucgcccagaagcugcccggcaacgacaacuccaccgcgacgcucugccuggggcaccacgccgucccgaacggcaccaucgugaagaccaucaccaacgaccagguggaggucacgaacgccaccgagcuggugcagagcuccagcaccggggagaucugcgacagcccccaccagauccucgacggcgagaacugcacccugaucgacgcccugcucggggacccccagugcgacggcuuccagaacaagaagugggaccuguucguggagcgcagcaaggccuacuccaacugcuaccccuacgacgucccggacuacgcgagccugcggucccucguggccagcuccggcacgcuggaguucaacaacgagagcuucaacuggaccggggugacccagaacggcaccuccagcgccugcauccgccgguccaacaacagcuucuucucccgccugaacuggcucacgcaccugaaguucaaguaccccgcccugaacgucaccaugcccaacaacgagaaguucgacaagcucuacaucuggggcgugcaccaccccgggaccgacaacgaccagaucuuccuguacgcgcaggccagcgggcggaucaccguguccacgaagcgcagccagcagaccgucaucccgaacaucggcagccggccccgcgugcggaacauccccucccgcaucagcaucuacuggaccaucgugaagcccggcgacauccugcucaucaacuccaccgggaaccugaucgccccgcggggcuacuucaagauccgcagcgggaaguccagcaucaugcgguccgacgcccccaucggcaagugcaacagcgagugcaucacgcccaacggcuccauccccaacgacaagccguuccagaacgucaaccgcaucaccuacggggccugcccccgguacgugaagcagaacacccugaagcucgcgaccggcaugcgcaacgugcccgagaagcagacgcgggggaucuucggcgccaucgccggguucaucgagaacggcugggagggcauggucgacgggugguacggcuuccgccaccagaacagcgaggggaucggccaggccgccgaccugaaguccacccaggcggccaucgaccagaucaacgggaagcugaaccggcucaucggcaagaccaacgagaaguuccaccagaucgagaaggaguucagcgagguggagggccgcauccaggaccuggagaaguacguggaggacaccaagaucgaccugugguccuacaacgccgagcuccuggucgcccuggagaaccagcacacgaucgaccucaccgacagcgagaugaacaagcuguucgagaagaccaagaagcagcugcgggagaacgccgaggacauggggaacggcugcuucaagaucuaccacaagugcgacaacgcgugcaucggguccauccgcaacggcaccuacgaccacgacguguaccgcgacgaggcccucaacaaccgguuccagaucaaggggguggagcugaaguccggcuacaaggacuggauccuguggaucuccuucgccaucagcugcuuccuccugugcgucgcccugcucggcuucaucaugugggccugccagaaggggaacauccgcugcaacaucugcaucuga

SEQ ID NO: 75288 - RNA, 1701 nt, Artificial Sequence; identical to SEQ ID NO: 75287
  derived and/or modified CDS sequence (opt1) from hemagglutinin__InfluenzaA__AHL90026

SEQ ID NO: 75289 - RNA, 1701 nt, Artificial Sequence
  derived and/or modified CDS sequence (opt1) from hemagglutinin__InfluenzaA__AHL90050
augaagaccaucaucgcccugagcuacauccucugccugguguucgcccagaagcugcccggcaacgacaacuccaccgcgacgcucugccuggggcaccacgccgucccgaacggcaccaucgugaagaccaucaccaacgaccagaucgaggugacgaacgccaccgagcugguccagagcuccagcaccggggagaucugcgacagcccccaccagauccucgacggcgagaacugcacccugaucgacgcccugcucggggacccccagugcgacggcuuccagaacaagaagugggaccuguucguggagcgcuccaaggccuacuccaacugcuaccccuacgacgugccggacuacgcgagccugcggucccucgucgccagcuccggcacgcuggaguucaacaacgagagcuucaacuggaccggggugacccagaacggcaccuccagcgccugcauccgccgguccaacaacagcuucuucucccgccugaacuggcucacgcaccugaaguucaaguaccccgcccugaacgugaccaugcccaacaacgagaaguucgacaagcucuacaucuggggcguccaccaccccgggaccgacaacgaccagaucuuccuguacgcgcaggccagcgggcggaucaccguguccacgaagcgcagccagcagaccgugaucccgaacaucggcagccggccccgcguccggaacauccccucccgcaucagcaucuacuggaccaucgugaagcccggcgacauccugcucaucaacuccaccgggaaccugaucgccccgcggggcuacuucaagauccgcagcgggaaguccagcaucaugcgguccgacgcccccaucggcaagugcaacagcgagugcaucacgcccaacggcuccauccccaacgacaagccguuccagaacgugaaccgcaucaccuacggggccugcccccgguacgucaagcagaacacccugaagcucgcgaccggcaugcgcaacgugcccgagaagcagacgcgggggaucuucggcgccaucgccggguucaucgagaacggcugggagggcaugguggacgggugguacggcuuccgccaccagaacagcgaggggaucggccaggccgccgaccugaaguccacccaggcggccaucgaccagaucaacgggaagcugaaccggcucaucggcaagaccaacgagaaguuccaccagaucgagaaggaguucagcgaggucgagggccgcauccaggaccuggagaaguacguggaggacaccaagaucgaccugugguccuacaacgccgagcuccugguggcccuggagaaccagcacacgaucgaccucaccgacgccgagaugaacaagcuguucgagaagaccaagaagcagcugcgggagaacgcggaggacauggggaacggcugcuucaagaucuaccacaagugcgacaacgccugcaucgggagcauccgcaacggcaccuacgaccacgacgucuaccgcgacgaggcccucaacaaccgguuccagaucaaggggguggagcugaaguccggcuacaaggacuggauccuguggaucagcuucgccaucuccugcuuccuccugugcguggcccugcucggcuucaucaugugggcgugccagaaggggaacauccgcugcaacaucugcaucuga

SEQ ID NO: 75290 - RNA, 1701 nt, Artificial Sequence
  derived and/or modified CDS sequence (opt1) from hemagglutinin__InfluenzaA__AHL90062
augaagaccaucaucgcccugagcuacauccucugccugguguucgcccagaagcugcccgagaacgacaacuccaccgcgacgcucugccugggccaccacgccgucccgaacgggaccaucgugaagaccaucaccaacgaccagaucgaggugacgaacgccaccgagcugguccagagcuccagcaccggcgagaucugcgacagcccccaccagauccucgacggggagaacugcacccugaucgacgcccugcucggcgacccccagugcgacggguuccagaacaagaagugggaccuguucguggagcgcagcaaggccuacuccaacugcuaccccuacgacgugccggacuacgcgagccugcggucccucgucgccagcuccggcacgcuggaguucaacaacgagagcuucaacuggaccggcgugacccagaacgggaccuccagcgccugcauccgccgguccaacaacagcuucuucucccgccugaacuggcucacgcaccugaaguucaaguaccccgcccugaacgugaccaugcccaacaacgagaaguucgacaagcucuacaucuggggcguccaccaccccgggaccgacaacgaccagaucuuccuguacgcgcaggccagcggccggaucaccguguccacgaagcgcagccagcagaccgugaucccgaacaucgggagccggccccgcguccggaacauccccucccgcaucagcaucuacuggaccaucgugaagcccggcgacauccugcucaucaacuccaccggcaaccugaucgccccgcggggguacuucaagauccgcagcggcaaguccagcaucaugcgguccgacgcccccaucgggaagugcaacagcgagugcaucacgcccaacggcuccauccccaacuacaagccguuccagaacgugaaccgcaucaccuacggcgccugcccccgguacgucaagcagaacacccugaagcucgcgaccgggaugcgcaacgugcccgagaagcagacgcggggcaucuucggggccaucgccggcuucaucgagaacgggugggagggcaugguggacggcugguacggguuccgccaccagaacagcgagggcaucgggcaggccgccgaccugaaguccacccaggcggccaucgaccagaucaacggcaagcugaaccggcucaucgggaagaccaacgagaaguuccaccagaucgagaaggaguucagcgaggucgagggccgcauccaggaccuggagaaguacguggaggacaccaagaucgaccugugguccuacaacgccgagcuccugguggcccuggagaaccagcacacgaucgaccucaccgacagcgagaugaacaagcuguucgagaagaccaagaagcagcugcgggagaacgccgaggacaugggcaacgggugcuucaagaucuaccacaagugcgacaacgcgugcaucggcuccauccgcaacgggaccuacgaccacgacgucuaccgcgacgaggcccucaacaaccgguuccagaucaagggcguggagcugaaguccggguacaaggacuggauccuguggaucuccuucgccaucagcugcuuccuccugugcguggcccugcucggcuucaucaugugggccugccagaagggcaacauccgcugcaacaucugcaucuga

SEQ ID NO: 75291 - RNA, 1701 nt, Artificial Sequence; identical to SEQ ID NO: 65952
  derived and/or modified CDS sequence (opt1) from hemagglutinin__InfluenzaA__AHL90074

SEQ ID NO: 75292 - RNA, 1701 nt, Artificial Sequence
  derived and/or modified CDS sequence (opt1) from hemagglutinin__InfluenzaA__AHL90086
augaagaccaucaucgcccugagcuacauccucugccugguguucgcccagaagcugcccggcaacgacaacuccaccgcgacgcucugccuggggcaccacgccgucccgaacggcaccaucgugaagaccaucaccaacgaccagaucgaggugacgaacgccaccgagcugguccagagcuccagcaccggggagaucugcgacagcccccaccagauccucgacggcgagaacugcacccugaucgacgcccugcucggggacccccagugcgacggcuuccagaacaagaagugggaccuguucguggagcgcagcaaggccuacuccaacugcuaccccuacgacgugccggacuacgcgagccugcggucccucgucgccagcuccggcacgcuggaguucaacaacgagagcuucaacuggaccggggugacccagaacggcaccuccagcgccugcauccgccgguacaacaacuccuucuucagccgccugaacuggcucacgcaccugaaguucaaguaccccgcccugaacgugaccaugcccaacaacgagaaguucgacaagcucuacaucuggggcguccaccaccccgggaccgacaacgaccagaucuuccuguacgcgcaggccuccgggcggaucaccgugagcacgaagcgcucccagcagaccgugaucccgaacaucggcagccggccccgcguccggaacauccccagccgcaucuccaucuacuggaccaucgugaagcccggcgacauccugcucaucaacagcaccgggaaccugaucgccccgcggggcuacuucaagauccgcuccgggaaguccuccaucaugcggagcgacgcccccaucggcaagugcaacuccgagugcaucacgcccaacggcagcauccccaacgacaagccguuccagaacgugaaccgcaucaccuacggggccugcccccgguacgucaagcagaacacccugaagcucgcgaccggcaugcgcaacgugcccgagaagcagacgcgggggaucuucggcgccaucgccggguucaucgagaacggcugggagggcaugguggacgggugguacggcuuccgccaccagaacuccgaggggaucggccaggccgccgaccucaagagcacccaggcggccaucgaccagaucaacgggaagcugaaccggcugaucggcaagaccaacgagaaguuccaccagaucgagaaggaguucuccgaggucgagggccgcauccaggaccuggagaaguacguggaggacaccaagaucgaccuguggagcuacaacgccgagcuccugguggcccuggagaaccagcacacgaucgaccucaccgacuccgagaugaacaagcuguucgagaagaccaagaagcagcugcgggagaacgccgaggacauggggaacggcugcuucaagaucuaccacaagugcgacaacgcgugcaucgggagcauccgcaacggcaccuacgaccacgacgucuaccgcgacgaggcccucaacaaccgguuccagaucaaggggguggagcugaaguccggcuacaaggacuggauccuguggaucagcuucgccaucuccugcuuccuccugugcguggcccugcucggcuucaucaugugggccugccagaaggggaacauccgcugcaacaucugcaucuga

SEQ ID NO: 75293 - RNA, 1701 nt, Artificial Sequence
  derived and/or modified CDS sequence (opt1) from hemagglutinin__InfluenzaA__AHL90098
augaagaccaucaucgcccugagcuacauccucugccugguguucgcccagaagcugcccggcaacgacaacuccaccgcgacgcucugccuggggcaccacgccgucccgaacggcaccaucgugaagaccaucaccaacgaccagaucgaggugacgaacgccaccgagcugguccagagcuccagcaccgggggcaucugcgacagcccccaccagauccucgacggggagaacugcacccugaucgacgcccugcucggcgacccccagugcgacggcuuccagaacaagaagugggaccuguucguggagcgcagcaaggccuacuccaacugcuaccccuacgacgugccggacuacgcgagccugcggucccucgucgccagcuccgggacgcuggaguucaacaacgagagcuucaacuggaccggcgugacccagaacgggaccuccagcgccugcaagcgcggcuccgacaacagcuucuucucccggcugaacuggcucacgcaccugaaguucaaguaccccgcccugaacgugaccaugcccaacaacgagaaguucgacaagcucuacaucuggggcguccaccaccccgggaccgacaacgaccagaucuuccuguacgcgcaggccagcggccgcaucaccguguccacgaagcggagccagcagaccgugaucccgaacaucgggagccgcccccggguccgcaacauccccucccggaucagcaucuacuggaccaucgugaagcccggcgacauccugcucaucaacuccaccgggaaccugaucgccccgcgcggcuacuucaagauccggagcggcaaguccagcaucaugcgcuccgacgcccccaucgacaagugcaacagcgagugcaucacgcccaacggguccauccccaacgacaagccguuccagaacgugaaccggaucaccuacggcgccugcccccgcuacgucaagcagaacacccugaagcucgcgaccgggaugcggaacgugcccgagaagcagacgcgcggcaucuucggggccaucgccggcuucaucgagaacggcugggaggggaugguggacggcugguacggguuccggcaccagaacagcgagggcaucgggcaggccgccgaccugaaguccacccaggcggccaucaaccagaucaacggcaagcugaaccgccucaucggcaagaccaacgagaaguuccaccagaucgagaaggaguucagcgaggucgaggggcggauccaggaccuggagaaguacguggaggacaccaagaucgaccugugguccuacaacgccgagcuccugguggcccuggagaaccagcacacgaucgaccucaccgacagcgagaugaacaagcuguucgagcgcaccaagaagcagcugcgggagaacgccgaggacaugggcaacgggugcuucaagaucuaccacaagugcgacaacgcgugcaucggcuccauccgcaacgggaccuacgaccacgacgucuaccgcgacgaggcccucaacaaccgguuccagaucaagggcguggagcugaaguccggcuacaaggacuggauccuguggaucuccuucgccaucagcugcuuccuccugugcguggcccugcucggguucaucaugugggccugccagaagggcaacauccgcugcaacaucugcaucuga

SEQ ID NO: 75294 - RNA, 1701 nt, Artificial Sequence
  derived and/or modified CDS sequence (opt1) from hemagglutinin__InfluenzaA__AHL90110
augaagaccaucaucgcccugagcuacauccucugccugguguucgcccagaagcugcccggcaacgacaacuccaccgcgacgcucugccuggggcaccacgccgucccgaacggcaccaucgugaagaccaucaccaacgaccagaucgaggugacgaacgccaccgagcugguccagagcuccagcaccggggagaucugcgacagcccccaccagauccucgacggcgagaacugcacccugaucgacgcccugcucggggacccccagugcgacggcuuccagaacaagaagugggaccuguucguggagcgcagcaaggccuacuccaacugcuaccccuacgacgugccggacuacgcgagccugcggucccucgucgccagcuccggcacgcuggaguucaacaacgagagcuucaacuggaccggggugacccagaacggcaccuccagcgccugcauccgccgguccaacaacagcuucuucucccgccugaacuggcucacgcaccugaaguucaaguaccccgcccugaacgugaccaugcccaacaacgagaaguucgacaagcucuacaucuggggcguccaccaccccgggaccgacaacgaccagaucuuccuguacgcgcaggccagcgggcggaucaccguguccacgaagcgcagccagcagaccgugaucccgaacaucggcagccggccccgcguccggaacauccccucccgcaucagcaucuacuggaccaucgugaagcccggcgacauccugcucaucaacuccaccgggaaccugaucgccccgcggggcuacuucaagauccagagcgggaaguccagcgugaugcgcuccgacgcccccaucggcaagugcaacagcgagugcaucacgcccaacggcuccauccccaacgacaagccguuccagaacgucaaccggaucaccuacggggccugcccccgcuacgugaagcagaacacccugaagcucgcgaccggcaugcggaacgugcccgagaagcagacgcgcgggaucuucggcgccaucgccggguucaucgagaacggcugggagggcauggucgacgggugguacggcuuccggcaccagaacagcgaggggaucggccaggccgccgaccugaaguccacccaggcggccaucgaccagaucaacgggaagcugaaccgccucaucggcaagaccaacgagaaguuccaccagaucgagaaggaguucagcgagguggagggccggauccaggaccuggagaaguacguggaggacaccaagaucgaccugugguccuacaacgccgagcuccuggucgcccuggagaaccagcacacgaucgaccucaccgacagcgagaugaacaagcuguucgagaagaccaagaagcagcugcgcgagaacgccgaggacauggggaacggcugcuucaagaucuaccacaagugcgacaacgcgugcaucggguccauccggaacggcaccuacgaccacgacguguaccgcgacgaggcccucaacaaccgcuuccagaucaaggggguggagcugaaguccggcuacaaggacuggauccuguggaucuccuucgccaucagcugcuuccuccugugcgucgcccugcucggcuucaucaugugggccugccagaaggggaacauccggugcaacaucugcaucuga

SEQ ID NO: 75295 - RNA, 1698 nt, Artificial Sequence; identical to SEQ ID NO: 68119
  derived and/or modified CDS sequence (opt1) from hemagglutinin__InfluenzaA__AHL90122

SEQ ID NO: 75296 - RNA, 1698 nt, Artificial Sequence; identical to SEQ ID NO: 66512
  derived and/or modified CDS sequence (opt1) from hemagglutinin__InfluenzaA__AHL90133

SEQ ID NO: 75297 - RNA, 1698 nt, Artificial Sequence; identical to SEQ ID NO: 68119
  derived and/or modified CDS sequence (opt1) from hemagglutinin__InfluenzaA__AHL90145

SEQ ID NO: 75298 - RNA, 1698 nt, Artificial Sequence
  derived and/or modified CDS sequence (opt1) from hemagglutinin__InfluenzaA__AHL90157
augaaggugaagcugcucguccugcugugcaccuucaccgccacguacgccgacaccaucugcaucggcuaccacgcgaacaacagcaccgacaccguggacacggugcucgagaagaacgucaccgugacccacuccgugaaccugcuggagaacagccacaacgggaagcucugccugcugaagggcaucgcgccccuccagcuggggaacugcuccgucgccggcuggauccuggggaacccggagugcgagcuccugaucagcaaggaguccuggagcuacaucguggagaagcccaaccccgagaacgggaccugcuaccccggccacuucgccgacuacgaggagcugcgcgagcagcucuccagcguguccagcuucgagcgguucgagaucuucccgaaggaguccagcuggcccaaccacacggucaccgggguguccgccagcugcucccacaacggcgagagcuccuucuaccgcaaccugcuguggcucaccgggaagaacggccuguaccccaaccugagcaaguccuacgccaacaacaaggagaaggaggugcucguccuguggggcgugcaccacccgcccaacaucggcgaccagaaggcccuguaccacaccgagaacgccuacgugagcgucgugagcucccacuacagccggaaguucacgcccgagaucgccaagcgccccaaggugcgggaccaggagggccgcaucaacuacuacuggacccuccuggagcccggggacaccaucaucuucgaggcgaacggcaaccugaucgccccgcgguacgccuucgcccucucccgcggguucggcagcggcaucaucaacuccaacgcccccauggacaagugcgacgcgaagugccagacgccccagggggccaucaacagcucccugcccuuccagaacguccacccggugaccaucggcgagugccccaaguacgugcggagcgccaagcugcgcauggucaccgggcuccggaacauccccuccauccagagccgcggccuguucggggccaucgccggcuucaucgagggcggguggaccggcaugguggacgggugguacggcuaccaccaccagaacgagcagggguccggcuacgcggccgaccagaaguccacccagaacgccaucaacggcaucacgaacaaggugaacagcgucaucgagaagaugaacacccaguucaccgccguggggaaggaguucaacaagcuggagcggcgcauggagaaccucaacaagaaggucgacgacggcuucaucgacaucuggaccuacaacgccgagcugcuggugcuccuggagaacgagcggacgcuggacuuccacgacagcaacgugaagaaccucuacgagaaggucaagauccagcugaagaacaacgcgaaggagaucgggaacggcugcuucgaguucuaccacaagugcaacgacgagugcauggaguccgugaagaacgggaccuacgacuaccccaaguacagcgaggaguccaagcugaaccgcgagaagaucgacggcgugaagcucgagagcaugggcgucuaccagauccuggccaucuacuccaccaucgccagcagccuggugcuccuggugucccugggggccaucagcuucuggaugugcuccaacggcagccuccagugccggaucugcaucuga

SEQ ID NO: 75299 - RNA, 1698 nt, Artificial Sequence; identical to SEQ ID NO: 68119
  derived and/or modified CDS sequence (opt1) from hemagglutinin__InfluenzaA__AHL90169

SEQ ID NO: 75300 - RNA, 1698 nt, Artificial Sequence
  derived and/or modified CDS sequence (opt1) from hemagglutinin__InfluenzaA__AHL90181
augaaggugaagcugcucguccugcugugcaccuucgccgccaccuacgcggacacgaucugcaucggcuaccacgccaacaacagcaccgacaccguggacaccgugcucgagaagaacgucacggugacccacuccgugaaccugcuggagaacagccacaacgggaagcucugccugcugaagggcaucgcgccccuccagcuggggaacugcuccgucgccggcuggauccuggggaacccggagugcgagcuccugaucagcaaggaguccuggagcuacaucguggagaagcccaaccccaagaacgggaccugcuaccccggccacuucgccgacuacgaggagcugcgcgagcagcucuccagcguguccagcuucgagcgguucgagaucuucccgaaggaguccagcuggcccaaccacaccgucacggggguguccgccagcugcucccacaacggcgagagcuccuucuaccgcaaccugcuguggcucaccgggaagaacggccuguaccccaaccugagcaaguccuacgccaacaacaaggagaaggaggugcucguccuguggggcgugcaccacccgcccaacaucggcgaccagaaggcccuguaccacaccgagaacgccuacgugagcgucgugagcucccacuacagccggaaguucacccccgagaucgcgaagcgccccaaggugcgggaccaggagggccgcaucaacuacuacuggacgcuccuggagcccggggacaccaucaucuucgaggccaacggcaaccugaucgccccgcgguacgccuucgcccucucccgcggguucggcagcggcaucaucaacuccaacgcgcccauggacaagugcgacgccaagugccagacgccccagggggccaucaacagcucccugcccuuccagaacguccacccggugaccaucggcgagugccccaaguacgugcggagcgccaagcugcgcauggucaccgggcuccggaacauccccuccauccagagccgcggccuguucggggccaucgcgggcuucaucgagggcggguggaccggcaugguggacgggugguacggcuaccaccaccagaacgagcagggguccggcuacgccgccgaccagaaguccacccagaacgccaucaacggcaucaccaacaaggugaacagcgucaucgagaagaugaacacgcaguucaccgccguggggaaggaguucaacaagcuggagcggcgcauggagaaccucaacaagaaggucgacgacggcuucaucgacaucuggaccuacaacgcggagcugcuggugcuccuggagaacgagcggacccuggacuuccacgacagcaacgugaagaaccucuacgagaaggucaagucccagcugaagaacaacgccaaggagaucgggaacggcugcuucgaguucuaccacaagugcaacgacgagugcauggagagcgugaagaacgggacguacgacuaccccaaguacuccgaggagagcaagcugaaccgcgagaagaucgacggcgugaagcucgaguccaugggcgucuaccagauccuggccaucuacagcaccguggccagcucccuggugcuccuggucagccugggggccaucuccuucuggaugugcagcaacggcucccuccagugccggaucugcaucuga

SEQ ID NO: 75301 - RNA, 1698 nt, Artificial Sequence; identical to SEQ ID NO: 67194
  derived and/or modified CDS sequence (opt1) from hemagglutinin__InfluenzaA__AHL90217

SEQ ID NO: 75302 - RNA, 1698 nt, Artificial Sequence; identical to SEQ ID NO: 67194
  derived and/or modified CDS sequence (opt1) from hemagglutinin__InfluenzaA__AHL90229

SEQ ID NO: 75303 - RNA, 1698 nt, Artificial Sequence
  derived and/or modified CDS sequence (opt1) from hemagglutinin__InfluenzaA__AHL90241
augaaggugaagcugcucguccugcugugcaccuucaccgccacguacgccgacaccaucugcaucggcuaccacgcgaacaacagcaccgacaccguggacacggugcucgagaagaacgucaccgugacccacuccgugaaccugcuggagaacagccacaacgggaagcucugccugcugaagggcaucgcgccccuccagcuggggaacugcuccgucgccggcuggauccuggggaacccggagugcgagcuccugauccccaaggagagcugguccuacaucguggagaagcccaaccccgagaacgggaccugcuacccgggccacuucgccgacuacgaggagcugcgcgagcagcucagcuccgugagcuccuucgagcgguucgagaucuuccccaaggagagcuccuggcccaaccacacggucaccggggugagcgccuccugcagccacaacggcgaguccagcuucuaccgcaaccugcuguggcucaccgggaagaacggccuguaccccaaccuguccaagagcuacgccaacaacaaggagaaggaggugcucguccuguggggcgugcaccacccgcccaacaucggcgaccagaaggcccuguaccacaccgagaacgccuacguguccgucgugagcagccacuacucccggaaguucacgcccgagaucgccaagcgccccaaggugcgggaccaggagggccgcaucaacuacuacuggacccuccuggagccgggggacaccaucaucuucgaggcgaacggcaaccugaucgcgccccgguacgccuucgcccucagccgcggguucggcuccggcaucaucaacagcaacgcccccauggacaagugcgacgccaagugccagacgccccagggggccaucaacuccagccugccguuccagaacguccaccccgugaccaucggcgagugccccaaguacgugcgguccgccaagcugcgcauggucaccgggcuccggaacauccccagcauccagucccgcggccuguucggggccaucgccggcuucaucgagggcggguggaccggcaugguggacgggugguacggcuaccaccaccagaacgagcaggggagcggcuacgcggccgaccagaaguccacccagaacgccaucaacggcaucacgaacaaggugaacagcgucaucgagaagaugaacacccaguucaccgccguggggaaggaguucaacaagcuggagcggcgcauggagaaccucaacaagaaggucgacgacggcuucaucgacaucuggaccuacaacgccgagcugcuggugcuccuggagaacgagcggacgcuggacuuccacgacuccaacgugaagaaccucuacgagaaggucaagagccagcugaagaacaacgcgaaggagaucgggaacggcugcuucgaguucuaccacaagugcaacgacgagugcauggaguccgugaagaacgggaccuacgacuacccgaaguacagcgaggaguccaagcugaaccgcgagaagaucgacggcgugaagcucgagagcaugggcgucuaccagauccuggccaucuacuccaccguggccagcagccuggugcuccuggucucccugggggccaucagcuucuggaugugcuccaacggcagccuccagugccggaucugcaucuga

SEQ ID NO: 75304 - RNA, 1698 nt, Artificial Sequence
  derived and/or modified CDS sequence (opt1) from hemagglutinin__InfluenzaA__AHL90253
augaaggugaagcugcucguccugcugugcaccuucaccgccacguacgccgacaccaucugcaucggcuaccacgcgaacaacagcaccgacaccguggacacggugcucgagaagaacgucaccgugacccacuccgugaaccugcuggagaacagccacaacgggaagcucugccugcugaagggcaucgcgccccuccagcuggggaacugcuccgucgccggcuggauccuggggaacccggagugcgagcuccugaucagcaaggaguccuggagcuacaucguggagaagcccaaccccgagaacgggaccugcuaccccggccacuucgccgacuacgaggagcugcgcgagcagcucuccagcguguccagcuucgagcgguucgagaucuucccgaagggguccagcuggcccaaccacacggucaccggcguguccgccagcugcucccacaacggggagagcuccuucuaccgcaaccugcuguggcucaccggcaagaacgggcuguaccccaaccugagcaaguccuacgccaacaacaaggagaaggaggugcucguccuguggggcgugcaccacccgcccaacaucggcgaccagaagacccuguaccacacggagaacgccuacgugagcgucgugagcucccacuacagccggaaguucacccccgagaucgccaagcgccccaaggugcgggaccaggaggggcgcaucaacuacuacuggacccuccuggagcccggcgacaccaucaucuucgaggccaacgggaaccugaucgcgccgcgguacgccuucgcccucucccgcggcuucggcagcgggaucaucaacuccaacgcccccauggacaagugcgacgccaagugccagacgccccagggcgcgaucaacagcucccugcccuuccagaacguccacccggugaccaucggggagugccccaaguacgugcggagcgccaagcugcgcauggucaccggccuccggaacauccccuccauccagagccgcgggcuguucggcgccaucgccggcuucaucgagggcggcuggaccgggaugguggacggcugguacggguaccaccaccagaacgagcagggcuccggcuacgccgcggaccagaaguccacgcagaacgccaucaacgggaucaccaacaaggugaacagcgucaucgagaagaugaacacccaguucaccgccgugggcaaggaguucaacaagcuggagcggcgcauggagaaccucaacaagaaggucgacgacggguucaucgacaucuggacguacaacgccgagcugcuggugcuccuggagaacgagcggacccuggacuuccacgacagcaacgugaagaaccucuacgagaaggucaagucccagcugaagaacaacgccaaggagaucggcaacgggugcuucgaguucuaccacaagugcaacgacgagugcauggagagcgugaagaacggcaccuacgacuaccccaaguacuccgaggugagcaagcugaaccgcgagaagaucgacggcgucaagcucgaguccauggggguguaccagauccuggcgaucuacagcaccguggccagcucccugguccuccuggugagccugggcgccaucuccuucuggaugugcagcaacgggucccuccagugccggaucugcaucuga

SEQ ID NO: 75305 - RNA, 1698 nt, Artificial Sequence; identical to SEQ ID NO: 66512
  derived and/or modified CDS sequence (opt1) from hemagglutinin__InfluenzaA__AHL90265

SEQ ID NO: 75306 - RNA, 1698 nt, Artificial Sequence
  derived and/or modified CDS sequence (opt1) from hemagglutinin__InfluenzaA__AHL90277
augaaggugaagcugcucguccugcugugcaccuucaccgccacguacgccgacaccaucugcaucggcuaccacgcgaacaacagcaccgacaccguggacacggugcucgagaagaacgucaccgugacccacuccgugaaccugcuggagaacagccacaacgggaagcucugccugcugaagggcaucgcgccccuccagcuggggaacugcuccgucgccggcuggauccuggggaacccggagugcgagcuccugaucagcaaggaguccuggagcuacaucguggagaagcccaaccccgagaacgggaccugcuaccccggccacuucgccgacuacgaggagcugcgcgagcagcucuccagcguguccagcuucgagcgguucgagaucuucccgaaggaguccagcuggcccaaccacacggucaccgggguguccgccagcugcucccacaacggcgagagcuccuucuaccgcaaccugcuguggcucaccgggaagaacggccuguaccccaaccugagcaaguccuacgccaacaacaaggagaaggaggugcucguccuguggggcgugcaccacccgcccaacaucguggaccagaagacccuguaccacacggagaacgccuacgucagcguggugagcucccacuacagccggaaguucacccccgagaucgccaagcgccccaagguccgggaccaggagggccgcaucaacuacuacuggacccuccuggagcccggcgacaccaucaucuucgaggccaacgggaaccugaucgcgccgcgguacgccuucgcccucucccgcggcuucgggagcggcaucaucaacuccaacgcccccauggacaagugcgacgccaagugccagacgccccagggcgcgaucaacagcucccugcccuuccagaacgugcacccggugaccaucggggagugccccaaguacguccggagcgccaagcugcgcauggugaccggccuccggaacauccccuccauccagagccgcgggcuguucggcgccaucgccggguucaucgagggcggcuggaccgggaugguggacggcugguacggguaccaccaccagaacgagcagggcuccggguacgccgcggaccagaaguccacgcagaacgccaucaacggcaucaccaacaaggucaacagcgugaucgagaagaugaacacccaguucaccgccgucggcaaggaguucaacaagcuggagcggcgcauggagaaccucaacaagaagguggacgacggguucaucgacaucuggacguacaacgccgagcugcuggugcuccuggagaacgagcggacccuggacuuccacgacagcaacgucaagaaccucuacgagaaggugaagucccagcugaagaacaacgccaaggagaucggcaacgggugcuucgaguucuaccacaagugcaacgacgagugcauggagagcgugaagaacggcaccuacgacuaccccaaguacuccgaggagagcaagcugaaccgcgagaagaucgacggggucaagcucgaguccaugggcguguaccagauccuggcgaucuacagcaccguggccagcucccugguccuccuggugagccugggcgccaucuccuucuggaugugcagcaacgggucccuccagugccggaucugcaucuga

SEQ ID NO: 75307 - RNA, 1698 nt, Artificial Sequence
  derived and/or modified CDS sequence (opt1) from hemagglutinin__InfluenzaA__AHL90289
augaaggugaagcugcucguccugcugugcaccuucaccgccacguacgccgacaccaucugcaucggcuaccacgcgaacaacagcaccgacaccguggacacggugcucgagaagaacgucaccgugacccacuccgugaaccugcuggagaacagccacaacgggaagcucugccugcugaagggcaucgcgccccuccagcuggggaacugcuccgucgccggcuggauccuggggaacccggagugcgagcuccugaucagcaaggaguccuggagcuacaucguggagaagcccaaccccgagaacgggaccugcuaccccggccacuucgccgacuacgaggagcugcgcgagcagcucuccagcguguccagcuucgagcgguucgagaucuucccgaaggaguccagcuggcccaaccacacggucaccgggguguccgccagcugcucccacaacggcgagagcuccuucuaccgcaaccugcuguggcucaccgggaagaacggccuguaccccaaccugagcaaguccuacgccaacaacaaggagaaggaggugcucguccuguggggcgugcaccacccgcccaacaucggcgaccagaaggcccuguaccacaccgagaacgccuacgugagcgucgugagcucccacuacagccggaaguucacgcccgagaucgccaagcgccccaaggugcgggaccaggagggccgcaucaacuacuacuggacccuccuggagccccgggacaccaucaucuucgaggcgaacgggaaccugaucgccccgcgcuacgccuucgcccucucccggggcuucgggagcggcaucaucaacuccaacgcccccauggacaagugcgacgcgaagugccagacgccccagggcgccaucaacagcucccugcccuuccagaacguccacccggugaccaucggggagugccccaaguacgugcgcagcgccaagcugcggauggucaccggccuccgcaacauccccuccauccagagccgggggcuguucggcgccaucgccggguucaucgagggcggcuggaccgggaugguggacggcugguacggguaccaccaccagaacgagcagggcuccggguacgcggccgaccagaaguccacccagaacgccaucaacggcaucacgaacaaggugaacagcgucaucgagaagaugaacacccaguucaccgccgugggcaaggaguucaacaagcuggagcgccggauggagaaccucaacaagaaggucgacgacggguucaucgacaucuggaccuacaacgccgagcugcuggugcuccuggagaacgagcgcacgcuggacuuccacgacagcaacgugaagaaccucuacgagaaggucaagucccagcugaagaacaacgcgaaggagaucggcaacgggugcuucgaguucuaccacaagugcaacgacgagugcauggagagcgugaagaacggcaccuacgacuaccccaaguacuccgaggagagcaagcugaaccgggagaagaucgacggggugaagcucgaguccaugggcgucuaccagauccuggccaucuacagcaccguggccagcucccuggugcuccuggucagccugggcgccaucuccuucuggaugugcagcaacgggucccuccagugccgcaucugcaucuga

SEQ ID NO: 75308 - RNA, 1698 nt, Artificial Sequence; identical to SEQ ID NO: 75307
  derived and/or modified CDS sequence (opt1) from hemagglutinin__InfluenzaA__AHL90301

SEQ ID NO: 75309 - RNA, 1698 nt, Artificial Sequence
  derived and/or modified CDS sequence (opt1) from hemagglutinin__InfluenzaA__AHL90325
augaaggugaagcugcucguccugcugugcaccuucaccgccacguacgccgacaccaucugcaucggcuaccacgcgaacaacagcaccgacaccguggacacggugcucgagaagaacgucaccgugacccacuccgugaaccugcuggagaacagccacaacgggaagcucugccugcugaagggcaucgcgccccuccagcuggggaacugcuccgucgccggcuggauccuggggaacccggagugcgagcuccugaucagcaaggaguccuggagcuacaucguggagaagcccaaccccgagaacgggaccugcuaccccggccacuucgccgacuacgaggagcugcgcgagcagcucuccagcguguccagcuucgagcgguucgagaucuucccgaaggaguccagcuggcccaaccacacggucaccgggguguccgccagcugcucccacaacggcgagagcuccuucuaccgcaaccugcuguggcucaccgggaagaacggccuguaccccaaccugagcaaguccuacgccaacaacaaggagaaggaggugcucguccuguggggcgugcaccacccgcccaacaucggcgaccagaaggcccuguaccacaccgagaacgccuacgugagcgucgugagcucccacuacagccggaaguucacgcccgagaucgccaagcgccccaaggugcgggaccaggagggccgcaucaacuacuacuggacccuccuggagcccggggacaccaucaucuucgaggcgaacggcaaccugaucgccccgcgguacgccuucgcccucucccgcggguucggcagcggcaucaucaacuccaacgcccccauggacaagugcgacgcgaagugccagacgccccagggggccaucaacagcucccugcccuuccagaacguccacccggugaccaucggcgagugccccaaguacgugcggagcgccaagcugcgcauggucaccgggcuccggaacauccccuccauccagagccgcggccuguucggggccaucgccggcuucaucgagggcggguggaccggcaugguggacgggugguacggcuaccaccaccagaacgagcagggguccggcuacgcggccgaccagaaguccacccagaacgccaucaacggcaucacgaacaaggugaacagcgucaucgagaagaugaacacccaguucaccgccguggggaaggaguucaacaagcuggagcggcgcauggagaaccucaacaagaaggucgacgacggcuucaucgacaucuggaccuacaacgccgagcugcuggugcuccuggagaacgagcggacgcuggacuuccacgacagcaacgugaagaaccucuacgagaaggucaagucccagcugaagaacaacgcgaaggagauggggaacggcugcuucgaguucuaccacaagugcaacgacgagugcauggagagcgugaagaacgggaccuacgacuaccccaaguacuccgaggagagcaagcugaaccgcgagaagaucgacggcgugaagcucgaguccaugggcgucuaccagauccuggccaucuacagcaccguggccagcucccuggugcuccuggucagccugggggccaucuccuucuggaugugcagcaacggcucccuccagugccggaucugcaucuga

SEQ ID NO: 75310 - RNA, 1698 nt, Artificial Sequence; identical to SEQ ID NO: 75309
  derived and/or modified CDS sequence (opt1) from hemagglutinin__InfluenzaA__AHL90337

SEQ ID NO: 75311 - RNA, 1698 nt, Artificial Sequence; identical to SEQ ID NO: 66512
  derived and/or modified CDS sequence (opt1) from hemagglutinin__InfluenzaA__AHL90349

SEQ ID NO: 75312 - RNA, 1698 nt, Artificial Sequence; identical to SEQ ID NO: 66512
  derived and/or modified CDS sequence (opt1) from hemagglutinin__InfluenzaA__AHL90361

SEQ ID NO: 75313 - RNA, 1698 nt, Artificial Sequence; identical to SEQ ID NO: 75306
  derived and/or modified CDS sequence (opt1) from hemagglutinin__InfluenzaA__AHL90373

SEQ ID NO: 75314 - RNA, 1701 nt, Artificial Sequence
  derived and/or modified CDS sequence (opt1) from hemagglutinin__InfluenzaA__AHL90385
augaagaccaucaucgcccugagcuacauccagugccucguguucgcccagaaguuccccggcaacgacaacuccaccgcgacgcugugccuggggcaccacgccgucccgaacggcaccaucgugaagaccaucaccaacgaccagaucgaggugacgaacgccaccgagcucguccagagcuccagcaccggggagaucugcgacagcccccaccagauccuggacggcgagaacugcacccugaucgacgcccuccugggggacccccagugcgacggcuuccagaacaagaacugggaccuguucguggagcgcagcaaggccuacuccaacugcuaccccuacgacgugccggacuacgcgagccuccggucccuggucgccagcuccggcacgcuggaguucaacaacgagagcuucaacuggaccggggugacccagaacggcaccuccagcgccugcauccgccgguccaacaacagcuucuucucccgccucaacuggcugacgcacagcaaguucaaguaccccgcccugaacgugaccaugcccaacaacgagaacuucgacaagcucuacaucuggggcguccaccaccccgggaccgacaacgaccagaucuuccuguacgcgcaggccuccgggcggaucaccgugagcacgaagcgcagccagcagaccgugaucccgaacaucggcucccggccccgcguccggaacauccccagccgcaucuccaucuacuggaccaucgugaagcccggcgacauccugcucaucaacagcaccgggaaccugaucgccccgcggggcuacuucaagauccgcuccgggaaguccuccaucaugcggagcgacgcccccaucggcaagugcaacuccgagugcaucacgcccaacggcagcauccccaacgacaagccguuccagaacgugaaccgcaucaccuacggggccugcccccgguacgucaagcagaacacccugaagcucgcgaccggcaugcgcaacgugcccgagaagcagacgcgggggaucuucggcgccaucgccggguucaucgagaacggcugggagggcaugguggacgggugguacggcuuccgccaccagaacuccgaggggaucggccaggccgccgaccucaagagcacccaggcggccaucgaccagaucaacgggaagcugaaccggcugaucggccgcaccaacgagaaguuccaccagaucgagaaggaguucuccgaggucgagggccggauccaggaccuggagaaguacguggaggacaccaagaucgaccuguggagcuacaacgccgagcuccugguggcccuggagaaccagcacacgaucgaccucaccgacuccgagaugaacaagcuguucgagaagaccaagaagcagcugcgcgagaacgccgaggacauggggaacggcugcuucaagaucuaccacaagugcgacaacgcgugcaucgggagcauccgcaacggcaccuacgaccacgacgucuaccgggacgaggcccucaacaaccgcuuccagaucaaggggguggagcugaaguccggcuacaaggacuggauccuguggaucagcuucgccaucuccugcuuccuccugugcaucgcccugcucggcuucaucaugugggccugccagaaggggaacauccggugcaacaucugcaucuga

SEQ ID NO: 75315 - RNA, 1701 nt, Artificial Sequence
  derived and/or modified CDS sequence (opt1) from hemagglutinin__InfluenzaA__AHL90397
augaagaccaucaucgcccugagcuacauccucugccugguguucgcccagaagcugcccggcaacgacaacuccaccgcgacgcucugccuggggcaccacgccgucccgaacggcaccaucgugaagaccaucaccaacgaccagaucgaggugacgaacgccaccgagcugguccagagcuccagcaccggggagaucugcgacagcccccaccagauccucgacggcgagaacugcacccugaucgacgcccugcucggggacccccagugcgacggcuuccagaacaagaagugggaccuguucguggagcgcagcaaggccuacuccaacugcuaccccuacgacgugccggacuacgcgagccugcggucccucgucgccagcuccggcacgcuggaguucaacaacgagagcuucaacuggaccggggugacccagaacggcaccuccagcgccugcauccgccgguccaacaacagcuucuucucccgccugaacuggcucacgcaccugaaguucaaguaccccgcccugaacgugaccaugcccaacaacgagcaguucgacaagcucuacaucuggggcguccaccaccccgggaccgacaacgaccagaucuuccuguacgcgcaggccagcgggcggaucaccguguccacgaagcgcagccagcagaccgugaucccgaacaucggcagccggccccgcguccggaacauccccucccgcaucagcaucuacuggaccaucgugaagcccggcgacauccugcucaucaacuccaccgggaaccugaucgccccgcggggcuacuucaagauccgcagcgggaaguccagcaucaugcgguccgacgcccccaucggcaagugcagcuccgagugcaucacgcccaacggcagcauccccaacgacaagccguuccagaacgugaaccgcaucaccuacggggccugcccccgguacgucaagcagaacacccugaagcucgcgaccggcaugcgcaacgugcccgagaagcagacgcgggggaucuucggcgccaucgccggguucaucgagaacggcugggagggcaugguggacgggugguacggcuuccgccaccagaacuccgaggggcggggccaggccgccgaccugaaguccacccaggcggccaucgaccagaucaacgggaagcugaaccgccucaucggcaagaccaacgagaaguuccaccagaucgagaaggaguucuccgaggucgagggccggauccaggaccuggagaaguacguggaggacaccaagaucgaccuguggagcuacaacgccgagcuccugguggcccuggagaaccagcacacgaucgaccucaccgacuccgagaugaacaagcuguucgagaagaccaagaagcagcugcgcgagaacgccgaggacauggggaacggcugcuucaagaucuaccacaagugcgacaacgcgugcaucgggagcauccgcaacggcaccuacgaccacgacgucuaccgggacgaggcccucaacaaccgcuuccagaucaaggggguggagcugaaguccggcuacaaggacuggauccuguggaucagcuucgccaucuccugcuuccuccugugcguggcccugcucggcuucaucaugugggccugccagaaggggaacauccggugcaacaucugcaucuga

SEQ ID NO: 75316 - RNA, 1701 nt, Artificial Sequence; identical to SEQ ID NO: 66458
  derived and/or modified CDS sequence (opt1) from hemagglutinin__InfluenzaA__AHL90410

SEQ ID NO: 75317 - RNA, 1701 nt, Artificial Sequence
  derived and/or modified CDS sequence (opt1) from hemagglutinin__InfluenzaA__AHL90422
augaagaccaucaucgcccugagcuacauccucugccugguguucgcccagaagcugcccggcaacgacaacuccaccgcgacgcucugccuggggcaccacgccgucccgaacggcaccaucgugaagaccaucaccaacgaccagaucgaggugacgaacgccaccgagcugguccagagcuccagcaccggggagaucugcgacagcccccaccagauccucgacggcgagaacugcacccugaucgacgcccugcucggggacccccagugcgacggcuuccagaacaagaagugggaccuguucguggagcgcagcaaggccuacuccaacugcuaccccuacgacgugccggacuacgcgagccugcggucccucgucgccagcuccggcacgcuggaguucaacaacgagagcuucaacuggaccggggugacccagaacggcaccuccagcgccugcauccgccgguccaacaacagcuucuucucccgccugaacuggcucacgcacagcaaguucaaguaccccgcccugaacgugaccaugcccaacaacgaggaguucgacaagcuguacaucuggggcguccaccaccccgggaccgacaacgaccagaucuuccucuacgcgcaggccuccgggcggaucaccgugagcacgaagcgcagccagcagaccgugaucccgaacaucggcucccggccccgcguccggaacauccccagccgcaucuccaucuacuggaccaucgugaagcccggcgacauccugcugaucaacagcaccgggaaccucaucgccccgcggggcuacuucaagauccgcuccgggaaguccuccaucaugcggagcgacgcccccaucggcaagugcaacuccgagugcaucacgcccaacggcagcauccccaacgacaagccguuccagaacgugaaccgcaucaccuacggggccugcccccgguacgucaagcagaacacccugaagcuggcgaccggcaugcgcaacgugcccgagaagcagacgcgggggaucuucggcgccaucgccggguucaucgagaacggcugggagggcaugguggacgggugguacggcuuccgccaccagaacuccgaggggaucggccaggccgccgaccucaagagcacccaggcggccaucgaccagaucaacgggaagcugaaccggcugaucggcaagaccaacgagaaguuccaccagaucgagaaggaguucuccgaggucgagggccgcauccaggaccucgagaaguacguggaggacaccaagaucgaccuguggagcuacaacgccgagcugcucguggcccuggagaaccagcacacgaucgaccugaccgacuccgagaugagcaagcuguucgagaagaccaagaagcagcuccgggagaacgccgaggacauggggaacggcugcuucaagaucuaccacaagugcgacaacacgugcaucggguccauccgcaacggcaccuacgaccacaacgucuaccgcgacgaggcgcugaacaaccgguuccagaucaaggggguggagcucaagagcggcuacaaggacuggauccuguggaucuccuucgccaucagcugcuuccugcucugcguggcccugcugggcuucaucaugugggccugccagaaggggaacauccgcugcaacaucugcaucuga

SEQ ID NO: 75318 - RNA, 1701 nt, Artificial Sequence; identical to SEQ ID NO: 66458
  derived and/or modified CDS sequence (opt1) from hemagglutinin__InfluenzaA__AHL90434

SEQ ID NO: 75319 - RNA, 1701 nt, Artificial Sequence; identical to SEQ ID NO: 66458
  derived and/or modified CDS sequence (opt1) from hemagglutinin__InfluenzaA__AHL90446

SEQ ID NO: 75320 - RNA, 1701 nt, Artificial Sequence
  derived and/or modified CDS sequence (opt1) from hemagglutinin__InfluenzaA__AHL90458
augaagaccaucaucgcccugagcuacauccucugccugguguucgcccagaagcugcccggcaacgacaacuccaccgcgacgcucugccuggggcaccacgccgucccgaacggcaccaucgugaagaccaucaccaacgaccagaucgaggugacgaacgccaccgagcugguccagagcuccagcaccggggagaucugcgacagcccccaccagauccucgacggcgagaacugcgcccugaucgacgcccugcucggggacccccagugcgacggcuuccagaacaagaagugggaccuguucguggagcgcagcaaggcguacuccaacugcuaccccuacgacgugccggacuacgccagccugcggucccucgucgccagcuccggcacccuggaguucaacaacgagagcuucaacuggacgggggugacccagaacggcaccuccagcgccugcauccgccgguccaacaacagcuucuucucccgccugaacuggcucacccaccugaaguucaaguaccccgcgcugaacgugacgaugcccaacaacgagcaguucgacaagcucuacaucuggggcguccaccaccccgggaccgacaacgaccagaucuuccuguacgcccaggccagcgggcggaucaccguguccaccaagcgcagccagcagacggugaucccgaacaucggcagccggccccgcguccggaacauccccucccgcaucagcaucuacuggaccaucgugaagcccggcgacauccugcucaucaacuccaccgggaaccugaucgccccgcggggcuacuucaagauccgcagcgggaaguccagcaucaugcgguccgacgcccccaucggcaagugcaacagcgagugcaucacccccaacggcuccauccccaacgacaagccguuccagaacgugaaccgcaucacguacggggcgugcccccgguacgucaagcagaacacccugaagcucgccaccggcaugcgcaacgugcccgagaagcagacccgggggaucuucggcgccaucgccggguucaucgagaacggcugggagggcaugguggacgggugguacggcuuccgccaccagaacagcgaggggcggggccaggccgcggaccugaaguccacgcaggccgccaucgaccagaucaacgggaagcugaaccgccucaucggcaagaccaacgagaaguuccaccagaucgagaaggaguucagcgaggucgagggccggauccaggaccuggagaaguacguggaggacaccaagaucgaccugugguccuacaacgccgagcuccugguggcccuggagaaccagcacaccaucgaccucacggacagcgagaugaacaagcuguucgagaagaccaagaagcagcugcgcgagaacgcggaggacauggggaacggcugcuucaagaucuaccacaagugcgacaacgccugcaucggguccauccgcaacggcaccuacgaccacgacgucuaccgggacgaggcccucaacaaccgcuuccagaucaaggggguggagcugaaguccggcuacaaggacuggauccuguggaucuccuucgccaucagcugcuuccuccugugcguggcccugcucggcuucaucaugugggcgugccagaaggggaacauccggugcaacaucugcaucuga

SEQ ID NO: 75321 - RNA, 1701 nt, Artificial Sequence; identical to SEQ ID NO: 66458
  derived and/or modified CDS sequence (opt1) from hemagglutinin__InfluenzaA__AHL90470

SEQ ID NO: 75322 - RNA, 1701 nt, Artificial Sequence; identical to SEQ ID NO: 66458
  derived and/or modified CDS sequence (opt1) from hemagglutinin__InfluenzaA__AHL90482

SEQ ID NO: 75323 - RNA, 1701 nt, Artificial Sequence; identical to SEQ ID NO: 66561
  derived and/or modified CDS sequence (opt1) from hemagglutinin__InfluenzaA__AHL90494

SEQ ID NO: 75324 - RNA, 1701 nt, Artificial Sequence; identical to SEQ ID NO: 66561
  derived and/or modified CDS sequence (opt1) from hemagglutinin__InfluenzaA__AHL90506

SEQ ID NO: 75325 - RNA, 1701 nt, Artificial Sequence
  derived and/or modified CDS sequence (opt1) from hemagglutinin__InfluenzaA__AHL90518
augaagaccaucaucgcccugagcuacauccucugccugguguucgcccagaagcugcccggcaacgacaacuccaccgcgacgcucugccuggggcaccacgccgucccgaacggcaccaucgugaagaccaucaccaacgaccagaucgaggugacgaacgccaccgagcugguccagagcuccagcaccggggagaucugcgacagcccccaccagauccucgacggcgagaacugcacccugaucgacgcccugcucggggacccccagugcgacggcuuccagaacaagaagugggaccuguucguggagcgcagcaaggccuacuccaacugcuaccccuacgacgugccggacuacgcgagccugcggucccucgucgccagcuccggcacgcuggaguucaagaacgagagcuucaacuggaccggggugacccagaacggcaccuccagcgccugcauccgccgguccaacaacagcuucuucucccgccugaacuggcucacgcaccugaaguucaaguaccccgcccugaacgugaccaugcccaacaaggagaaguucgacaagcucuacaucuggggcguccaccaccccgggaccgacaacgaccagaucuuccuguacgcgcaggccagcgggcggaucaccguguccacgaagcgcagccagcagaccgugaucccgaacaucggcagccggccccgcguccggaacauccccucccgcaucagcaucuacuggaccaucgugaagcccggcgacauccugcucaucaacuccaccgggaaccugaucgccccgcggggcuacuucaagauccgcagcgggaaguccagcaucaugcgguccgacgcccccaucggcaagugcaacagcgagugcaucacgcccaacggcuccauccccaacgacaagccguuccagaacgugaaccgcaucaccuacggggccugcccccgguacgucaagcagaacacccugaagcucgcgaccggcaugcgcaacgugcccgagaagcagacgcgggggaucuucggcgccaucgccggguucaucgagaacggcugggagggcaugguggacgggugguacggcuuccgccaccagaacagcgaggggaccggccaggccgccgaccugaaguccacccaggcggccaucgaccagaucaacgggaagcugaaccggcucaucggcaagaccaacgagaaguuccaccagaucgagaaggaguucagcgaggucgagggccgcauccaggaccuggagaaguacguggaggacacgaagaucgaccugugguccuacaacgccgagcuccugguggcccuggagaaccagcacaccaucgaccucaccgacagcgagaugaacaagcuguucgagaagaccaagaagcagcugcgggagaacgccgaggacauggggaacggcugcuucaagaucuaccacaagugcgacaacgcgugcaucggguccauccgcaacggcacguacgaccacgacgucuaccgcgacgaggcccucaacaaccgguuccagaucaaggggguggagcugaaguccggcuacaaggacuggauccuguggaucuccuucgccaucagcugcuuccuccugugcguggcccugcucggcuucaucaugugggccugccagaaggggaacauccgcugcaacaucugcaucuga

SEQ ID NO: 75326 - RNA, 1701 nt, Artificial Sequence; identical to SEQ ID NO: 67237
  derived and/or modified CDS sequence (opt1) from hemagglutinin__InfluenzaA__AHL90530

SEQ ID NO: 75327 - RNA, 1701 nt, Artificial Sequence; identical to SEQ ID NO: 66458
  derived and/or modified CDS sequence (opt1) from hemagglutinin__InfluenzaA__AHL90542

SEQ ID NO: 75328 - RNA, 1701 nt, Artificial Sequence; identical to SEQ ID NO: 66458
  derived and/or modified CDS sequence (opt1) from hemagglutinin__InfluenzaA__AHL90554

SEQ ID NO: 75329 - RNA, 1701 nt, Artificial Sequence; identical to SEQ ID NO: 66458
  derived and/or modified CDS sequence (opt1) from hemagglutinin__InfluenzaA__AHL90566

SEQ ID NO: 75330 - RNA, 1701 nt, Artificial Sequence; identical to SEQ ID NO: 66458
  derived and/or modified CDS sequence (opt1) from hemagglutinin__InfluenzaA__AHL90578

SEQ ID NO: 75331 - RNA, 1701 nt, Artificial Sequence; identical to SEQ ID NO: 66561
  derived and/or modified CDS sequence (opt1) from hemagglutinin__InfluenzaA__AHL90590

SEQ ID NO: 75332 - RNA, 1701 nt, Artificial Sequence; identical to SEQ ID NO: 66458
  derived and/or modified CDS sequence (opt1) from hemagglutinin__InfluenzaA__AHL90602

SEQ ID NO: 75333 - RNA, 1701 nt, Artificial Sequence; identical to SEQ ID NO: 66458
  derived and/or modified CDS sequence (opt1) from hemagglutinin__InfluenzaA__AHL90614

SEQ ID NO: 75334 - RNA, 1701 nt, Artificial Sequence
  derived and/or modified CDS sequence (opt1) from hemagglutinin__InfluenzaA__AHL90638
augaagaccaucaucgcccugagcuacauccucugccugguguucgcccagaagcugcccggcaacgacaacuccaccgcgacgcucugccuggggcaccacgccgucccgaacggcaccaucgugaagaccaucaccaacgaccagaucgaggugacgaacgccaccgagcugguccagagcuccagcaccggggagaucugcgacagcccccaccagauccucgacggcgagaacugcacccugaucgacgcccugcucggggacccccagugcgacggcuuccagaacaagaagugggaccuguucguggagcgcagcaaggccuacuccaacugcuaccccuacgacgugccggacuacgcgagccugcggucccucgucgccagcuccggcacgcuggaguucaacaacgagagcuucaacuggaccggggugacccagaacggcaccuccagcgccugcauccgccgguccaacaacagcuucuucucccgccugaacuggcucacgcaccugaaguucaaguaccccgcccugaacgugaccaugcccaacaacgagcaguucgacaagcucuacaucuggggcguccaccaccccgggaccgacaacgaccagaucuuccuguacgcgcaggccagcgggcggaucaccguguccacgaagcgcagccagcagaccgugaucccgaacaucggcagccggccccgcguccggaacauccccucccgcaucagcaucuacuggaccaucgugaagcccggcgacauccugcucaucaacuccaccgggaaccugaucgccccgcggggcuacuucaagauccgcagccggaaguccagcaucaugcgcuccgacgcccccaucgggaagugcaacagcgagugcaucacgcccaacggcuccauccccaacgacaagccguuccagaacgugaaccggaucaccuacggcgccugcccccgcuacgucaagcagaacacccugaagcucgcgaccgggaugcggaacgugcccgagaagcagacgcgcggcaucuucggggccaucgccggcuucaucgagaacgggugggagggcaugguggacggcugguacggguuccggcaccagaacagcgagggccgcgggcaggccgccgaccugaaguccacccaggcggccaucgaccagaucaacggcaagcugaaccggcucaucgggaagaccaacgagaaguuccaccagaucgagaaggaguucagcgaggucgagggccgcauccaggaccuggagaaguacguggaggacaccaagaucgaccugugguccuacaacgccgagcuccugguggcccuggagaaccagcacacgaucgaccucaccgacagcgagaugaacaagcuguucgagaagaccaagaagcagcugcgcgagaacgccgaggacaugggcaacgggugcuucaagaucuaccacaagugcgacaacgcgugcaucggcuccauccggaacgggaccuacgaccacgacgucuaccgcgacgaggcccucaacaaccgguuccagaucaagggcguggagcugaaguccggguacaaggacuggauccuguggaucuccuucgccaucagcugcuuccuccugugcguggcccugcucggcuucaucaugugggccugccagaagggcaacauccgcugcaacaucugcaucuga

SEQ ID NO: 75335 - RNA, 1701 nt, Artificial Sequence
  derived and/or modified CDS sequence (opt1) from hemagglutinin__InfluenzaA__AHL90650
augaagaccaucaucgcccugagcuacauccucugccugguguucgcccagaagcugcccggcaacgacaacuccaccgcgacgcucugccuggggcaccacgccgucccgaacggcaccaucgugaagaccaucaccaacgaccagaucgaggugacgaacgccaccgagcugguccagagcuccagcaccggggagaucugcgacagcccccaccagauccucgacggcgagaacugcacccugaucgacgcccugcucggggacccccagugcgacggcuuccagaacaagaagugggaccuguucguggagcgcagcaaggccuacuccaacugcuaccccuacgacgugccggacuacgcgagccugcggucccucgucgccagcuccggcacgcuggaguucaacaacgagagcuucaacuggaccggggugacccagaacggcaccuccagcgccugcauccgccgguccaacaacagcuucuucucccgccugaacuggcucacgcaccugaaguucaaguaccccgcccugaacgugaccaugcccaacaacgagcaguucgacaagcucuacaucuggggcguccaccaccccgggaccgacaacgaccagaccuuccuguacgcgcaggccagcgggcggaucacgguguccaccaagcgcagccagcagaccgugaucccgaacaucggcagccggccccgcguccggaacauccccucccgcaucagcaucuacuggaccaucgugaagcccggcgacauccugcucaucaacuccacggggaaccugaucgccccgcggggcuacuucaagauccgcagcgggaaguccagcaucaugcgguccgacgcccccaucggcaagugcaacagcgagugcaucacccccaacggcuccauccccaacgacaagccguuccagaacgugaaccgcaucaccuacggggccugcccccgguacgucaagcagaacacccugaagcucgcgacgggcaugcgcaacgugcccgagaagcagacccgggggaucuucggcgccaucgccggguucaucgagaacggcugggagggcaugguggacgggugguacggcuuccgccaccagaacagcgaggggcggggccaggccgccgaccugaaguccacccaggcggccaucgaccagaucaacgggaagcugaaccgccucaucggcaagaccaacgagaaguuccaccagaucgagaaggaguucagcgaggucgagggccggauccaggaccuggagaaguacguggaggacacgaagaucgaccugugguccuacaacgccgagcuccugguggcccuggagaaccagcacaccaucgaccucaccgacagcgagaugaacaagcuguucgagaagaccaagaagcagcugcgcgagaacgccgaggacauggggaacggcugcuucaagaucuaccacaagugcgacaacgcgugcaucggguccauccgcaacggcacguacgaccacgacgucuaccgggacgaggcccucaacaaccgcuuccagaucaaggggguggagcugaaguccggcuacaaggacuggauccuguggaucuccuucgccaucagcugcuuccuccugugcguggcccugcucggcuucaucaugugggccugccagaaggggaacauccggugcaacaucugcaucuga

SEQ ID NO: 75336 - RNA, 1701 nt, Artificial Sequence; identical to SEQ ID NO: 66458
  derived and/or modified CDS sequence (opt1) from hemagglutinin__InfluenzaA__AHL90662

SEQ ID NO: 75337 - RNA, 1701 nt, Artificial Sequence
  derived and/or modified CDS sequence (opt1) from hemagglutinin__InfluenzaA__AHL90674
augaagaccaucaucgcccugagcuacauccucugccugguguucgcccagaagcugcccggcaacgacaacuccaccgcgacgcucugccuggggcaccacgccgucccgaacggcaccaucgugaagaccaucaccaacgaccagaucgaggugacgaacgccaccgagcugguccagagcuccagcaccggggagaucugcgacagcccccaccagauccucgacggcgagaacugcacccugaucgacgcccugcucggggacccccagugcgacggcuuccagaacaagaagugggaccuguucguggagcgcagcaaggccuacuccaacugcuaccccuacgacgugccggacuacgcgagccugcggucccucgucgccagcuccggcacgcuggaguucaacaacgagagcuucaacuggaccggggugacccagaacggcaccuccagcgccugcauccgccgguccaacaacagcuucuucucccgccugaacuggcucacgcaccugaaguucaaguaccccgcccugaacgugaccaugcccaacaacgagaaguucgacaagcucuacaucuggggcguccaccaccccgggaccgacaacgaccagaucuuccuguacgcgcaggccagcgggcggaucaccguguccacgaagcgcagccagcagaccgugaucccgaacaucggcagccggccccgcguccggaacauccccucccgcaucagcaucuacuggaccaucgugaagcccggcgacauccugcucaucaacuccaccgggaaccugaucgccccgcggggcuacuucaagauccgcagcgggaaguccagcaucaugcgguccgacgcccccaucggcaagugcaacagcgagugcaucacgcccaacggcuccauccccaacgacaagccguuccagaacgugaaccgcaucaccuacggggccugcccccgguacgucaagcagaacacccugaagcucgcgaccggcaugcgcaacgugcccgagaagcagacgcgggggaucuucggcgccaucgccggguucaucgagaacggcugggagggcaugguggacgggugguacggcuuccgccaccagaacagcgaggggaucggccaggccgccgaccugaaguccacccaggcggccaucgaccagaucaacgggaagcugaaccggcucaucggcaagaccaacgagaaguuccaccagaucgagaaggaguucagcgaggucgagggccgcauccaggaccuggagaaguacguggaggacaccaagaucgaccugugguccuacaacgccgagcuccugguggcccuggagaaccagcacacgaucgaccucaccgacagcgagaugaacaagcuguucgagaagaccaagaagcagcugcgggagaacgccgaggacauggggaacggcugcuucaagaucuaccacaagugcgacaacgucugcaucggguccauccgcaacggcaccuacgaccacgacguguaccgcgacgaggcgcucaacaaccgguuccagaucaaggggguggagcugaaguccggcuacaaggacuggauccuguggaucuccuucgccaucagcugcuuccuccugugcgucgcccugcucggcuucaucaugugggccugccagaaggggaacauccgcugcaacaucugcaucuga

SEQ ID NO: 75338 - RNA, 1701 nt, Artificial Sequence
  derived and/or modified CDS sequence (opt1) from hemagglutinin__InfluenzaA__AHL90686
augaagaccaucaucgcccugagcuacauccucugccugguguucgcccagaagcugcccggcaacgacaacuccaccgcgacgcucugccuggggcaccacgccgucccgaacggcaccaucgugaagaccaucaccaacgaccagaucgaggugacgaacgccaccgagcugguccagagcuccagcaccggggagaucugcgacagcccccaccagauccucgacggcgagaacugcacccugaucgacgcccugcucggggacccccagugcgacggcuuccagaacaagaagugggaccuguucguggagcgcuccaaggccuacuccaacugcuaccccuacgacgugccggacuacgcgagccugcggucccucgucgccagcuccggcacgcuggaguucaacaacgagagcuucaacuggaccggggugacccagaacggcaccuccagcgccugcauccgccgguccaacaacagcuucuucucccgccugaacuggcucacgcaccugaaguucaaguaccccgcccugaacgugaccaugcccaacaacgagcaguucgacaagcucuacaucuggggcguccaccaccccgggaccgacaacgaccagaucuuccuguacgcgcaggccagcgggcggaucaccguguccacgaagcgcagccagcagaccgugaucccgaacaucggcagccggccccgcguccggaacauccccucccgcaucagcaucuacuggaccaucgugaagcccggcgacauccugcucaucaacuccaccgggaaccugaucgccccgcggggcuacuucaagauccgcagcgggaaguccagcaucaugcgguccgacgcccccaucggcaagugcaacagcgagugcaucacgcccaacggcuccauccccaacgacaagccguuccagaacgugaaccgcaucaccuacggggccugcccccgguacgucaagcagaacacccugaagcucgcgaccggcaugcgcaacgugcccgagaagcagacgcgggggaucuucggcgccaucgccggguucaucgagaacggcugggagggcaugguggacgggugguacggcuuccgccaccagaacagcgaggggcggggccaggccgccgaccugaaguccacccaggcggccaucgaccagaucaacgggaagcugaaccgccucaucggcaagaccaacgagaaguuccaccagaucgagaaggaguucagcgaggucgagggccggauccaggaccuggagaaguacguggaggacaccaagaucgaccugugguccuacaacgccgagcuccugguggccauggagaaccagcacacgaucgaccugaccgacagcgagaugaacaagcuguucgagaagaccaagaagcagcuccgcgagaacgccgaggacauggggaacggcugcuucaagaucuaccacaagugcgacaacgcgugcaucggguccauccgcaacggcaccuacgaccacgacgucuaccgggacgaggcccugaacaaccgcuuccagaucaaggggguggagcucaagagcggcuacaaggacuggauccuguggaucuccuucgccaucagcugcuuccugcucugcguggcccugcugggcuucaucaugugggccugccagaaggggaacauccggugcaacaucugcaucuga

SEQ ID NO: 75339 - RNA, 1701 nt, Artificial Sequence; identical to SEQ ID NO: 66458
  derived and/or modified CDS sequence (opt1) from hemagglutinin__InfluenzaA__AHL90698

SEQ ID NO: 75340 - RNA, 1701 nt, Artificial Sequence; identical to SEQ ID NO: 66458
  derived and/or modified CDS sequence (opt1) from hemagglutinin__InfluenzaA__AHL90710

SEQ ID NO: 75341 - RNA, 1698 nt, Artificial Sequence; identical to SEQ ID NO: 69996
  derived and/or modified CDS sequence (opt1) from hemagglutinin__InfluenzaA__AHL90722

SEQ ID NO: 75342 - RNA, 1698 nt, Artificial Sequence
  derived and/or modified CDS sequence (opt1) from hemagglutinin__InfluenzaA__AHL90746
augaaggugaagcugcucguccugcugugcaccuucaccgccacguacgccgacaccaucugcaucggcuaccacgcgaacaacagcaccgacaccguggacacggugcucgagaagaacgucaccgugacccacuccgugaaccugcuggagaacagccacaacgggaagcucugccugcugaagggcaucgcgccccuccagcuggggaacugcuccgucgccggcuggauccuggggaacccggagugcgagcuccugaucagcaaggaguccuggagcuacaucguggagaagcccaaccccgagaacgggaccugcuaccccggccacuucgccgacuacgaggagcugcgcgagcagcucuccagcguguccagcuucaagcgguucgagaucuucccgaaggaguccagcuggcccaaccacacggucaccgggguguccgccagcugcucccacaacggcgagagcuccuucuaccgcaaccugcuguggcucaccgggaagaacggccuguaccccaaccugagcaaguccuacgccaacaacaaggagaaggaggugcucguccuguggggcgugcaccacccgcccaacaucguggaccagaagacccuguaccggacggagaacgccuacgucagcguggugagcucccacuacagccgcaaguucacccccgagaucgccaagcggcccaagguccgcgaccaggagggccggaucaacuacuacuggacccuccuggagcccggcgacaccaucaucuucgaggccaacgggaaccugaucgcgccgcgcuacgccuucgcccucucccggggcuucgggagcggcaucaucaacuccaacgcccccaugggcaagugcgacgccaagugccagacgccccagggggcgaucaacagcucccugcccuuccagaacgugcacccggugaccaucggcgagugccccaaguacguccgcagcgccaagcugcggauggugaccgggcuccgcaacauccccuccauccagagccggggccuguucggggccaucgccggcuucaucgagggcggguggaccggcaugguggacgggugguacggcuaccaccaccagaacgagcagggguccggcuacgccgcggaccagaaguccacgcagaacgccaucaacggcaucaccaacaaggucaacagcgugaucgagaagaugaacacccaguucaccgccgucgggaaggaguucaacaagcuggagcgccggauggagaaccucaacaagaagguggacgacggcuucaucgacaucuggacguacaacgccgagcugcuggugcuccuggagaacgagcgcacccuggacuuccacgacagcaacgucaagaaccucuacgagaaggugaagucccagcugaagaacaacgccaaggagaucgggaacggcugcuucgaguucuaccacaagugcaacgacgagugcauggagagcgugaagaacgggaccuacgacuaccccaaguacuccgaggagagcaagcugaaccgggagaagaucgacggcgucaagcucgaguccaugggcguguaccagauccuggcgaucuacagcaccguggccagcucccugguccuccuggugagccugggggccaucuccuucuggaugugcagcaacggcucccuccagugccgcaucugcaucuga

SEQ ID NO: 75343 - RNA, 1698 nt, Artificial Sequence; identical to SEQ ID NO: 67155
  derived and/or modified CDS sequence (opt1) from hemagglutinin__InfluenzaA__AHL90758

SEQ ID NO: 75344 - RNA, 1698 nt, Artificial Sequence
  derived and/or modified CDS sequence (opt1) from hemagglutinin__InfluenzaA__AHL90770
augaaggugaagcugcucguccugcugugcaccuucaccgccacguacgccgacaccaucugcaucggcuaccacgcgaacaacagcaccgacaccguggacacggugcucgagaagaacgucaccgugacccacuccgugaaccugcuggagaacagccacaacgggaagcucugccugcugaagggcaucgcgccccuccagcuggggaacugcuccgucgccggcuggauccuggggaacccggagugcgagcuccugaucagcaaggaguccuggagcuacaucguggagaagcccaaccccgagaacgggaccugcuaccccggccacuucgccgacuacgaggagcugcgcgagcagcucuccagcguguccagcuucgagcgguucgagaucuucccgaaggacuccagcuggcccaaccacacggucaccgggguguccgccagcugcucccacaacggcgagagcuccuucuaccgcaaccugcuguggcucaccgggaagaacggccuguaccccaaccugagcaaguccuacgccaacaacaaggagaaggaggugcucguccuguggggcgugcaccacccgcccagcaucaacgaccagaagacccuguaccacacggagaacgccuacgugagcgucguguccagccaccacucccggaaguucacccccgagaucgccaagcgccccaaggugcgggaccaggagggccgcaucaacuacuacuggacccuccuggagcccggcgacaccaucaucuucgaggccaacgggaaccugaucgcgccgcgguacgccuucgcccucagccgcggcuucggguccggcaucaucaacagcaacgcccccauggacaagugcgacgccaagugccagacgccccagggcgcgaucaacuccagccugcccuuccagaacguccacccggugaccaucggggagugccccaaguacgugcgguccgccaagcugcgcauggucaccggccuccggaacauccccagcauccagucccgcgggcuguucggcgccaucgccggguucaucgagggcggcuggaccgggaugguggacggcugguacggguaccaccaccagaacgagcagggcagcggguacgccgcggaccagaaguccacgcagaacgccaucaacggcaucaccaacaaggugaacagcgucaucgagaagaugaacacccaguucaccgccgugggcaaggaguucaacaagcuggagcggcgcauggagaaccucaacaagaaggucgacgacggguucaucgacaucuggacguacaacgccgagcugcuggugcuccuggagaacgagcggacccuggacuuccacgacuccaacgugaagaaccucuacgagaaggucaagagccagcugaagaacaacgccaaggagaucggcaacgggugcuucgaguucuaccacaagugcaacgacgagugcauggaguccgugaagaacggcaccuacgacuaccccaaguacagcgaggaguccaagcugaaccgcgagaagaucgacggggugaagcucgagagcaugggcgucuaccagauccugaccaucuacagcacgguggcguccagccuggugcuccuggucucccugggcgccaucagcuucuggaugugcuccaacgggagccuccagugccggaucugcaucuga

SEQ ID NO: 75345 - RNA, 1698 nt, Artificial Sequence; identical to SEQ ID NO: 67640
  derived and/or modified CDS sequence (opt1) from hemagglutinin__InfluenzaA__AHL90782

SEQ ID NO: 75346 - RNA, 1698 nt, Artificial Sequence
  derived and/or modified CDS sequence (opt1) from hemagglutinin__InfluenzaA__AHL90794
augaaggugaagcugcucguccugcugugcaccuucaccgccacguacgccgacaccaucugcaucggcuaccacgcgaacaacagcaccgacaccguggacacggugcucgagaagaacgucaccgugacccacuccgugaaccugcuggagaacagccacaacgggaagcucugccugcugaagggcaucgcgccccuccagcuggggaacugcuccgucgccggcuggauccuggggaacccggagugcgagcuccugaucagcaaggaguccuggagcuacaucguggagaagcccaaccccgagaacgggaccugcuaccccggccacuucgccgacuacgaggagcugcgcgagcagcucuccagcguguccagcuucgagcgguucgagaucuucccgaaggaguccagcuggcccaaccacacggucaccgggguguccgccagcugcucccacaacggcgagagcuccuucuaccgcaaccugcuguggcucaccgggaagaacggccuguaccccaaccugagcaaguccuacgccaacaacaaggagaaggaggugcucguccuguggggcgugcaccacccgcccaacaucggcgaccagaacacccuguaccacacggagaacgccuacgugagcgucgugagcucccacuacagccggaaguucacccccgagaucgccaagcgccccaaggugcgggaccaggagggccgcaucaacuacuacuggacccuccuggagcccggggacaccaucaucuucgaggccaacggcaaccugaucgcgccgcgguacgccuucgcccucucccgcggguucggcagcggcaucaucaacuccaacgcccccauggacaagugcgacgccaagugccagacgccccagggggcgaucaacagcucccugcccuuccagaacguccacccggugaccaucggcgagugccccaaguacgugcggagcgccaagcugcgcauggucaccgggcuccggaacauccccuccauccagagccgcggccuguucggggccaucgccggcuucaucgagggcggguggaccggcaugguggacgggugguacggcuaccaccaccagaacgagcagggguccggcuacgccgcggaccagaaguccacgcagaacgccaucaacggcaucaccaacaaggugaacagcgucaucgagaagaugaacacccaguucaccgccguggggaaggaguucaacaagcuggagcggcgcauggagaaccucaacaagaaggucgacgacggcuucaucgacaucuggacguacaacgccgagcugcuggugcuccuggagaacgagcggacccuggacuuccacgacagcaacgugaagaaccucuacgagaaggucaagucccagcugaagaacaacgccaaggagaucgggaacggcugcuucgaguucuaccacaagugcaacgacgagugcauggagagcgugaagaacgggaccuacgacuaccccaaguacuccgaggagagcaagcugaaccgcgagaagaucgacggcgugaagcucgaguccaugggcgucuaccagauccuggcgaucuacagcaccguggccagcucccuggugcuccuggucagccugggggccaucuccuucuggaugugcagcaacggcucccuccagugccggaucugcaucuga

SEQ ID NO: 75347 - RNA, 1698 nt, Artificial Sequence
  derived and/or modified CDS sequence (opt1) from hemagglutinin__InfluenzaA__AHL90806
augaaggugaagcugcucguccugcugugcaccuucaccgccacguacgccgacaccaucugcaucggcuaccacgcgaacaacagcaccgacaccguggacacggugcucgagaagaacgucaccgugacccacuccgugaaccugcuggagaacagccacaacgggaagcucugccugcugaagggcaucgcgccccuccagcuggggaacugcuccgucgccggcuggauccuggggaacccggagugcgagcuccugaucagcaaggaguccuggagcuacaucguggagaagcccaaccccgagaacgggaccugcuaccccggccacuucgccgacuacgaggagcugcgcgagcagcucuccagcguguccagcuucgagcgguucgagaucuucccgaaggaguccagcuggcccaaccacacggucaccgggguguccgccagcugcucccacaacggcgagagcuccuucuaccgcaaccugcuguggcucaccgggaagaacggccuguaccccaaccugagcaaguccuacgccaacaacaaggagaaggaggugcucguccuguggggcgugcaccacccgcccaacaucguggaccagaagacccuguaccggacggagaacgccuacgucagcguggugagcucccacuacagccgcaaguucacccccgagaucgccaagcggcccaagguccgcgaccaggagggccggaucaacuacuacuggacccuccuggagcccggcgacaccaucaucuucgaggccaacgggaaccugaucgcgccgcgcuacgccuucgcccucucccggggcuucgggagcggcaucaucaacuccaacgcccccauggacaagugcgacgccaagugccagacgccccagggcgcgaucaacagcucccugcccuuccagaacgugcacccggugaccaucggggagugccccaaguacguccgcagcgccaagcugcggauggugaccggccuccgcaacauccccuccauccagagccgggggcuguucggcgccaucgccggguucaucgagggcggcuggaccgggaugguggacggcugguacggguaccaccaccagaacgagcagggcuccggguacgccgcggaccagaaguccacgcagaacgccaucaacggcaucaccaacaaggucaacagcgugaucgagaagaugaacacccaguucaccgccgucggcaaggaguucaacaagcuggagcgccggauggagaaccucaacaagaagguggacgacggguucaucgacaucuggacguacaacgccgagcugcuggugcuccuggagaacgagcgcacccuggacuuccacgacagcaacgucaagaaccucuacgagaaggugaagucccagcugaagaacaacgccaaggagaucggcaacgggugcuucgaguucuaccacaagugcaacgacgagugcauggagagcgugaagaacggcaccuacgacuaccccaaguacuccgaggagagcaagcugaaccgggagaagaucgacggggucaagcucgaguccaugggcguguaccagauccuggcgaucuacagcaccguggccagcucccugguccuccugaucagccugggcgccaucuccuucuggaugugcagcaacgggucccuccagugccgcaucugcaucuga

SEQ ID NO: 75348 - RNA, 1698 nt, Artificial Sequence; identical to SEQ ID NO: 69996
  derived and/or modified CDS sequence (opt1) from hemagglutinin__InfluenzaA__AHL90818

SEQ ID NO: 75349 - RNA, 1698 nt, Artificial Sequence; identical to SEQ ID NO: 69996
  derived and/or modified CDS sequence (opt1) from hemagglutinin__InfluenzaA__AHL90830

SEQ ID NO: 75350 - RNA, 1698 nt, Artificial Sequence; identical to SEQ ID NO: 67155
  derived and/or modified CDS sequence (opt1) from hemagglutinin__InfluenzaA__AHL90842

SEQ ID NO: 75351 - RNA, 1698 nt, Artificial Sequence; identical to SEQ ID NO: 69537
  derived and/or modified CDS sequence (opt1) from hemagglutinin__InfluenzaA__AHL90854

SEQ ID NO: 75352 - RNA, 1698 nt, Artificial Sequence; identical to SEQ ID NO: 67155
  derived and/or modified CDS sequence (opt1) from hemagglutinin__InfluenzaA__AHL90866

SEQ ID NO: 75353 - RNA, 1698 nt, Artificial Sequence; identical to SEQ ID NO: 69537
  derived and/or modified CDS sequence (opt1) from hemagglutinin__InfluenzaA__AHL90878

SEQ ID NO: 75354 - RNA, 1698 nt, Artificial Sequence; identical to SEQ ID NO: 69996
  derived and/or modified CDS sequence (opt1) from hemagglutinin__InfluenzaA__AHL90890

SEQ ID NO: 75355 - RNA, 1698 nt, Artificial Sequence; identical to SEQ ID NO: 69537
  derived and/or modified CDS sequence (opt1) from hemagglutinin__InfluenzaA__AHL90902

SEQ ID NO: 75356 - RNA, 1698 nt, Artificial Sequence; identical to SEQ ID NO: 67155
  derived and/or modified CDS sequence (opt1) from hemagglutinin__InfluenzaA__AHL90914

SEQ ID NO: 75357 - RNA, 1698 nt, Artificial Sequence; identical to SEQ ID NO: 69537
  derived and/or modified CDS sequence (opt1) from hemagglutinin__InfluenzaA__AHL90938

SEQ ID NO: 75358 - RNA, 1698 nt, Artificial Sequence; identical to SEQ ID NO: 69537
  derived and/or modified CDS sequence (opt1) from hemagglutinin__InfluenzaA__AHL90950

SEQ ID NO: 75359 - RNA, 1698 nt, Artificial Sequence; identical to SEQ ID NO: 69537
  derived and/or modified CDS sequence (opt1) from hemagglutinin__InfluenzaA__AHL90962

SEQ ID NO: 75360 - RNA, 1698 nt, Artificial Sequence
  derived and/or modified CDS sequence (opt1) from hemagglutinin__InfluenzaA__AHL90974
augaaggugaagcugcucguccugcugugcaccuucaccgccacguacgccgacaccaucugcaucggcuaccacgcgaacaacagcaccgacaccguggacacggugcucgagaagaacgucaccgugacccacuccgugaaccugcuggagaacagccacaacgggaagcucugccugcugaagggcaucgcgccccuccagcuggggaacugcuccgucgccggcuggauccuggggaacccggagugcgagcuccugaucagcaaggaguccuggagcuacaucguggagaagcccaaccccgagaacgggaccugcuaccccggccacuucgccgacuacgaggagcugcgcgagcagcucuccagcguguccagcuucgagcgguucgagaucuucccgaaggaguccagcuggcccaaccacacggucaccgggguguccgccagcugcucccacaacggcgagagcuccuucuaccgcaaccugcuguggcucaccgggaagaacggccuguaccccaaccugagcaaguccuacgccaacaacaaggagaaggaggugcucguccuguggggcgugcaccacccgcccagcaucagcgaccagaagacccuguaccacacggagaacgccuacguguccgucgugagcucccacuacagccggaaguucacccccgagguggccaagcgccccaagguccgggaccaggagggccgcaucaacuacuacuggacccuccuggagcccggcgacaccaucaucuucgaggccaacgggaaccugaucgcgccgcgguacgccuucgcccucucccgcggcuucgggagcggcaucaucaacuccaacgcccccauggacaagugcgacgccaagugccagacgccccagggcgcgaucaacagcucccugcccuuccagaacgugcacccggugaccaucggggagugccccaaguacguccggagcgccaagcugcgcauggugaccggccuccggaacauccccuccauccagagccgcgggcuguucggcgccaucgccggguucaucgagggcggcuggaccgggaugguggacggcugguacggguaccaccaccagaacgagcagggcuccggguacgccgcggaccagaaguccacgcagaacgccaucaacggcaucaccaacaaggucaacagcgugaucgagaagaugaacacccaguucaccgccgucggcaaggaguucaacaagcuggagcggcgcauggagaaccucaacaagaagguggacgacggguucaucgacaucuggacguacaacgccgagcugcuggugcuccuggagaacgagcggacccuggacuuccacgacagcaacgucaagaaccucuacgagaaggugaagggccagcugaagaacaacgccaaggagaucgggaacggcugcuucgaguucuaccacaagugcaacgacgagugcauggaguccgugaagaacgggaccuacgacuaccccaaguacagcgaggaguccaagcugaaccgcgagaagaucgacggcgucaagcucgagagcaugggcguguaccagauccuggcgaucuacagcaccguggccuccagccugguccuccuggugucccugggggccaucagcuucuggaugugcuccaacggcagccuccagugccggaucugcaucuga

SEQ ID NO: 75361 - RNA, 1698 nt, Artificial Sequence
  derived and/or modified CDS sequence (opt1) from hemagglutinin__InfluenzaA__AHL90986
augaaggugaagcugcucguccugcugugcaccuucaccgccacguacgccgacaccaucugcaucggcuaccacgcgaacaacagcaccgacaccguggacacggugcucgagaagaacgucaccgugacccacuccgugaaccugcuggagaacagccacaacgggaagcucugccugcugaagggcaucgcgccccuccagcuggggaacugcuccgucgccggcuggauccuggggaacccggagugcgagcuccugaucagcaaggaguccuggagcuacaucguggagaagcccaaccccgagaacgggaccugcuaccccggccacuucgccgacuacgaggagcugcgcgagcagcucuccagcguguccagcuucgagcgguucgagaucuucccgaaggaguccagcuggcccaaccacacggucaccgggguguccgccagcugcucccacaacggcgagagcuccuucuaccgcaaccugcuguggcucaccgugaagaacgggcuguaccccaaccugagcaaguccuacgccaacaacaaggagaaggagguccucgugcuguggggcgugcaccacccgcccaacaucgucgaccagaagacccuguaccggacggagaacgccuacgugagcguggucagcucccacuacagccgcaaguucacccccgagaucgccaagcggcccaaggugcgcgaccaggaggggcggaucaacuacuacuggacccuccuggagcccggcgacaccaucaucuucgaggccaacggcaaccugaucgcgccgcgcuacgccuucgcccucuccaagggguucggcagcgggaucaucaacuccaacgcccccauggacaagugcgacgccaagugccagacgccccggggcgcgaucaacagcucccugcccuuccagaacgugcacccggucaccaucggcgagugccccaaguacgugcgcagcgccaagcugcggauggugaccgggcuccgcaacauccccuccauccagagccggggccuguucggggccaucgccggcuucaucgagggcggcuggaccggcauggucgacgggugguacggcuaccaccaccagaacgagcagggguccggcuacgccgcggaccagaaguccacgcagaacgccaucaacgggaucaccaacaaggugaacagcgucaucgagaagaugaacacccaguucaccgccgugggcaaggaguucaacaagcuggagcgccggauggagaaccucaacaagaagguggacgacggcuucaucgacaucuggacguacaacgccgagcugcugguccuccuggagaacgagcgcacccuggacuuccacgacagcaacgugaagaaccucuacgagaaggugaagucccagcugaagaacaacgccaaggagaucgggaacggcugcuucgaguucuaccacaagugcaacgacgagugcauggagagcgucaagaacgggaccuacgacuaccccaaguacuccgaggagagcaagcugaaccgggagaagaucgacggcgugaagcucgaguccauggggguguaccagauccuggcgaucuacagcaccgucgccagcucccuggugcuccuggugagccugggcgccaucuccuucuggaugugcagcaacggcucccuccagugccgcaucugcaucuga

SEQ ID NO: 75362 - RNA, 1698 nt, Artificial Sequence
  derived and/or modified CDS sequence (opt1) from hemagglutinin__InfluenzaA__AHL91010
augaaggugaagcugcucguccugcugugcaccuucaccgccacguacgccgacaccaucugcaucggcuaccacgcgaacaacagcaccgacaccguggacacggugcucgagaagaacgucaccgugacccacuccgugaaccugcuggagaacagccacaacgggaagcucugccugcugaagggcaucgcgccccuccagcuggggaacugcuccgucgccggcuggauccuggggaacccggagugcgagcuccugaucagcaaggaguccuggagcuacaucguggagaagcccaaccccgagaacgggaccugcuaccccggccacuucgccgacuacgaggagcugcgcgagcagcucuccagcguguccagcuucgagcgguucgagaucuucccgaaggacuccagcuggcccaaccacacggucaccgggguguccgccagcugcucccacaacggcgagagcuccuucuaccgcaaccugcuguggcucaccgggaagaacggccuguaccccaaccugagcaaguccuacgccaacaacaaggagaaggaggugcucguccuguggggcgugcaccacccgcccagcaucaacgaccagaagacccuguaccacacggagaacgccuacgugagcgucguguccagccacuacucccggaaguucacccccgagaucgccaagcgccccaaggugcgggaccaggagggccgcaucaacuacuacuggacccuccuggagcccggcgacaccaucaucuucgaggccaacgggaaccugaucgcgccgcgguacgccuucgcccucagccgcggcuucggguccggcaucaucaacagcaacgcccccauggacaagugcgacgccaagugccagacgccccagggcgcgaucaacuccagccugcccuuccagaacguccacccggugaccaucggggagugccccaaguacgugcgguccgccaagcugcgcauggucaccggccuccggaacauccccagcauccagucccgcgggcuguucggcgccaucgccggguucaucgagggcggcuggaccgggaugguggacggcugguacggguaccaccaccagaacgagcagggcagcggguacgccgcggaccagaaguccacgcagaacgccaucaacggcaucaccaacaaggugaacagcgucaucgagaagaugaacacccaguucaccgccgugggcaaggaguucaacaagcuggagcggcgcauggagaaccucaacaagaaggucgacgacggguucaucgacaucuggacguacaacgccgagcugcuggugcuccuggagaacgagcggacccuggacuuccacgacuccaacgugaagaaccucuacgagaaggucaagagccagcugaagaacaacgccaaggagaucggcaacgggugcuucgaguucuaccacaagugcaacgacgagugcauggaguccgugaagaacggcaccuacgacuaccccaaguacagcgaggaguccaagcugaaccgcgagaagaucgacggggugaagcucgagagcaugggcgucuaccagauccugaccaucuacagcacgguggcguccagccuggugcuccuggucucccugggcgccaucagcuucuggaugugcuccaacgggagccuccagugccggaucugcaucuga

SEQ ID NO: 75363 - RNA, 1698 nt, Artificial Sequence
  derived and/or modified CDS sequence (opt1) from hemagglutinin__InfluenzaA__AHL91022
augaaggugaagcugcucguccugcugugcaccuucaccgccacguacgccgacaccaucugcaucggcuaccacgcgaacaacagcaccgacaccguggacacggugcucgagaagaacgucaccgugacccacuccgugaaccugcuggagaacagccacaacgggaagcucugccugcugaagggcaucgcgccccuccagcuggggaacugcuccgucgccggcuggauccuggggaacccggagugcgagcuccugaucagcaaggaguccuggagcuacaucguggagaagcccaaccccgagaacgggaccugcuaccccggccacuucgccgacuacgaggagcugcgcgagcagcucuccagcguguccagcuucgagcgguucgagaucuucccgaaggacuccagcuggcccaaccacacggucaccgggguguccgccagcugcucccacaacggcgagaacagcuucuaccgcaaccugcuguggcucaccgggaagaacggccuguaccccaaccuguccaagagcuacgccaacaacaaggagaaggaggugcucguccuguggggcgugcaccacccgcccuccaucaacgaccagaagacccuguaccacacggagaacgccuacgugagcgucgugagcucccacuacagccggaaguucacccccgagaucgccaagcgccccaaggugcgggaccaggagggccgcaucaacuacuacuggacccuccuggagcccggcgacaccaucaucuucgaggccaacgggaaccugaucgcgccgcgguacgccuucgcccucucccgcggcuucgggagcggcaucaucaacuccaacgcccccauggacaagugcgacgccaagugccagacgccccagggcgcgaucaacagcucccugcccuuccagaacguccacccggugaccaucggggagugccccaaguacgugcggagcgccaagcugcgcauggucaccggccuccggaacauccccuccauccagagccgcgggcuguucggcgccaucgccggguucaucgagggcggcuggaccgggaugguggacggcugguacggguaccaccaccagaacgagcagggcuccggguacgccgcggaccagaaguccacgcagaacgccaucaacggcaucaccaacaaggugaacagcgucaucgagaagaugaacacccaguucaccgccgugggcaaggaguucaacaagcuggagcggcgcauggagaaccucaacaagaaggucgacgacggguucaucgacaucuggacguacaacgccgagcugcuggugcuccuggagaacgagcggacccuggacuuccacgacagcaacgugaagaaccucuacgagaaggucaagucccagcugaagaacaacgccaaggagaucggcaacgggugcuucgaguucuaccacaagugcaacgacgagugcauggagagcgugaagaacggcaccuacgacuaccccaaguacuccgaggagagcaagcugaaccgcgagaagaucgacggggugaagcucgaguccaugggcgucuaccagauccugaccaucuacagcacgguggcgagcucccuggugcuccuggucagccugggcgccaucuccuucuggaugugcagcaacgggucccuccagugccggaucugcaucuga

SEQ ID NO: 75364 - RNA, 1701 nt, Artificial Sequence; identical to SEQ ID NO: 66458
  derived and/or modified CDS sequence (opt1) from hemagglutinin__InfluenzaA__AHL91034

SEQ ID NO: 75365 - RNA, 1701 nt, Artificial Sequence; identical to SEQ ID NO: 69524
  derived and/or modified CDS sequence (opt1) from hemagglutinin__InfluenzaA__AHL91046

SEQ ID NO: 75366 - RNA, 1701 nt, Artificial Sequence; identical to SEQ ID NO: 75338
  derived and/or modified CDS sequence (opt1) from hemagglutinin__InfluenzaA__AHL91058

SEQ ID NO: 75367 - RNA, 1701 nt, Artificial Sequence
  derived and/or modified CDS sequence (opt1) from hemagglutinin__InfluenzaA__AHL91070
augaagaccaucaucgcccugagcuacauccucugccugguguucgcccagaagcugcccggcaacgacaacuccauggcgacccucugccuggggcaccacgccgucccgaacggcacgaucgugaagaccaucaccaacgaccagaucgaggugaccaacgccacggagcugguccagagcuccagcaccggggagaucugcgacagcccccaccagauccucgacggcgagaacugcacccugaucgacgcccugcucggggacccccagugcgacggcuuccagaacaagaagugggaccuguucguggagcgcagcaaggccuacuccaacugcuaccccuacgacgugccggacuacgcgagccugcggucccucgucgccagcuccggcacccuggaguucaacaacgagagcuucaacuggacgggggugacccagaacggcaccuccagcgccugcaugcgccgguccaacaacagcuucuucucccgccugaacuggcucacccaccugaaguucaaguaccccgcccugaacgugacgaugcccaacaacgagcaguucgacaagcucuacaucuggggcguccaccaccccgggaccgacaacgaccagaucuuccuguacgcgcaggccagcgggcggaucaccguguccaccaagcgcagccagcagacggugaucccgaacaucggcagccggccccgcguccggaacauccccucccgcaucagcaucuacuggaccaucgugaagcccggcgacauccugcucaucaacuccaccgggaaccugaucgccccgcggggcuacuucaagauccgcagcgggaaguccagcaucaugcgguccgacgcccccaucggcaagugcaacagcgagugcaucacccccaacggcuccauccccaacgacaagccguuccagaacgugaaccgcaucacguacggggccugcccccgguacgucaagcagaacacccugaagcucgcgaccggcaugcgcaacgugcccgagaagcagacccgggggaucuucggcgccaucgccggguucaucgagaacggcugggagggcaugguggacgggugguacggcuuccgccaccagaacagcgaggggcggggccaggccgccgaccugaaguccacgcaggcggccaucgaccagaucaacgggaagcugaaccgccucaucggcaagaccaacgagaaguuccaccagaucgagaaggaguucagcgaggucgagggccggauccaggaccuggagaaguacguggaggacaccaagaucgaccugugguccuacaacgccgagcuccugguggcccuggagaaccagcacaccaucgaccucacggacagcgagaugaacaagcuguucgagaagaccaagaagcagcugcgcgagaacgccgaggacauggggaacggcugcuucaagaucuaccacaagugcgacaacgcgugcaucggguccauccgcaacggcaccuacgaccacgacgucuaccgggacgaggcccucaacaaccgcuuccagaucaaggggguggagcugaaguccggcuacaaggacuggauccuguggaucuccuucgccaucagcugcuuccuccugugcguggcccugcucggcuucaucaugugggccugccagaaggggaacauccggugcaacaucugcaucuga

SEQ ID NO: 75368 - RNA, 1701 nt, Artificial Sequence
  derived and/or modified CDS sequence (opt1) from hemagglutinin__InfluenzaA__AHL91082
augaagaccaucaucgcccugagcuacauccucugccugguguucgcccagaagcugcccggcaacgacaacuccaccgcgacgcucugccuggggcaccacgccgucccgaacggcaccaucgugaagaccaucaccaacgaccagaucgaggugacgaacgccaccgagcugguccagagcuccagcaccggggagaucugcgacagcccccaccagauccucgacggcgagaacugcacccugaucgacgcccugcucggggacccccagugcgacggcuuccagaacaagaagugggaccuguucguggagcgcagcaaggccuacuccaacugcuaccccuacgacgugccggacuacgcgagccugcggucccucgucgccagcuccggcacgcuggaguucaacaacgagagcuucaacuggaccggggugacccagaacggcaccuccagcgccugcauccgccgguccaacaacagcuucuucucccgccugaacuggcucacgcaccugaaguucaaguaccccgcccugaacgugaccaugcccaacaacgagcaguucgacaagcucuacaucuggggcguccaccaccccgggaccgacaacgaccagaucuuccuguacgcgcaggccagcgggcggaucaccguguccacgaagcgcagccagcagaccgugaucccgaacaucggcagccggccccgcguccggaacauccccucccgcaucagcaucuacuggaccaucgugaagcccggcgacauccugcucaucaacuccaccgggaaccugaucgccccgcggggcuacuucaagauccgcagcgggaaguccagcaucaugcgguccgacgcccccaucggcaagugcaacagcgagugcaucacgcccaacggcuccauccccaacgacaagccguuccagaacgugaaccgcaucaccuacggggccugccccaucuacgucaagcagaacacccugaagcucgcgaccggcaugcggaacgugcccgagaagcagacgcgcgggaucuucggcgccaucgccggguucaucgagaacggcugggagggcaugguggacgggugguacggcuuccggcaccagaacagcgaggggcgcggccaggccgccgaccugaaguccacccaggcggccaucgaccagaucaacgggaagcugaaccggcucaucggcaagaccaacgagaaguuccaccagaucgagaaggaguucagcgaggucgagggccgcauccaggaccuggagaaguacguggaggacaccaagaucgaccugugguccuacaacgccgagcuccugguggcccuggagaaccagcacacgaucgaccucaccgacagcgagaugaacaagcuguucgagaagaccaagaagcagcugcgggagaacgccgaggacauggggaacggcugcuucaagaucuaccacaagugcgacaacgcgugcaucggguccauccgcaacggcaccuacgaccacgacgucuaccgcgacgaggcccucaacaaccgguuccagaucaaggggguggagcugaaguccggcuacaaggacuggauccuguggaucuccuucgccaucagcugcuuccuccugugcguggcccugcucggcuucaucaugugggccugccagaaggggaacauccgcugcaacaucugcaucuga

SEQ ID NO: 75369 - RNA, 1701 nt, Artificial Sequence; identical to SEQ ID NO: 69443
  derived and/or modified CDS sequence (opt1) from hemagglutinin__InfluenzaA__AHL91094

SEQ ID NO: 75370 - RNA, 1701 nt, Artificial Sequence
  derived and/or modified CDS sequence (opt1) from hemagglutinin__InfluenzaA__AHL91106
augaagaccaucaucgcccugagcuacauccucugccugguguucgcccagaagcugcccggcaacgacaacuccaccgcgacgcucugccuggggcaccacgccgucccgaacggcaccaucgugaagaccaucaccaacgaccagaucgaggugacgaacgccaccgagcugguccagagcuccagcaagggggagaucugcgacagcccccaccagauccucgacggcgagaacugcacccugaucgacgcccugcucggggacccccagugcgacggcuuccagaacaagaagugggaccuguucguggagcgcagcaaggccuacuccaacugcuaccccuacgacgugccggacuacgcgagccugcggucccucgucgccagcuccggcacccuggaguucaacaacgagagcuucaacuggacgggggugacccagaacggcaccuccagcgccugcauccgccgguccaacaacagcuucuucucccgccugaacuggcucacccaccugaaguucaaguaccccgcccugaacgugacgaugcccaacaacgagcaguucgacaagcucuacaucuggggcguccaccaccccgggaccgacaacgaccagaucuuccuguacgcgcaggccagcgggcggaucaccguguccaccaagcgcagccagcagacggugaucccgaacaucggcagccggccccgcguccggaacauccccucccgcaucagcaucuacuggaccaucgugaagcccggcgacauccugcucaucaacuccaccgggaaccugaucgccccgcggggcuacuucaagauccgcagcgggaaguccagcaucaugcgguccgacgcccccaucggcaagugcaacagcgagugcaucacccccaacggcuccauccccaacgacaagccguuccagaacgugaaccgcaucacguacggggccugcccccgguacgucaagcagaacacccugaagcucgcgaccggcaugcgcaacgugcccgagaagcagacccgggggaucuucggcgccaucgccggguucaucgagaacggcugggagggcaugguggacgggugguacggcuuccgccaccagaacagcgaggggcggggccaggccgccgaccugaaguccacgcaggcggccaucgaccagaucaacgggaagcugaaccgccucaucggcaagaccaacgagaaguuccaccagaucgagaaggaguucagcgaggucgagggccggauccaggaccuggagaaguacguggaggacaccaagaucgaccugugguccuacaacgccgagcuccugguggcccuggagaaccagcacaccaucgaccucacggacagcgagaugaacaagcuguucgagaagaccaagaagcagcugcgcgagaacgccgaggacauggggaacggcugcuucaagaucuaccacaagugcgacaacgcgugcaucggguccauccgcaacggcaccuacgaccacgacgucuaccgggacgaggcccucaacaaccgcuuccagaucaaggggguggagcugaaguccggcuacaaggacuggauccuguggaucuccuucgccaucagcugcuuccuccugugcguggcccugcucggcuucaucaugugggccugccagaaggggaacauccggugcaacaucugcaucuga

SEQ ID NO: 75371 - RNA, 1701 nt, Artificial Sequence
  derived and/or modified CDS sequence (opt1) from hemagglutinin__InfluenzaA__AHL91118
augaagaccaucaucgcccugagcuacauccucugccugguguucgcccagaagcugcccggcaacgacaacuccaccgcgacgcucugccuggggcaccacgccgucccgaacggcaccaucgugaagaccaucaccaacgaccagaucgaggugacgaacgccaccgagcugguccagagcuccagcaccggggagaucugcgacagcccccaccagauccucgacggcgagaacugcacccugaucgacgcccugcucggggacccccagugcgacggcuuccagaacaagaagugggaccuguucguggagcgcagcaaggccuacuccaacugcuaccccuacgacgugccggacuacgcgagccugcggucccucgucgccagcuccggcacgcuggaguucaacaacgagagcuucaacuggaccggggugacccagaacggcaccuccagcgccugcauccgccgguccaacaacagcuucuucuccaagcugaacuggcucacgcaccugaaguucaaguaccccgcccugaacgugaccaugcccaacaacgagcaguucgacaagcucuacaucuggggcguccaccaccccgggaccgacaacgaccagaucuuccuguacgcgcaggccagcgggcgcaucaccguguccacgaagcggagccagcagaccgugaucccgaacaucggcagccgcccccggguccgcaacauccccucccggaucagcaucuacuggaccaucgugaagcccggcgacauccugcucaucaacuccaccgggaaccugaucgccccgcgcggcuacuucaagauccggagcgggaaguccagcaucaugcgcuccgacgcccccaucggcaagugcaacagcgagugcaucacgcccaacggcuccauccccaacgacaagccguuccagaacgugaaccggaucaccuacggggccugcccccgcuacgucaagcagaacacccugaagcucgcgaccggcaugcggaacgugcccgagaagcagacgcgcgggaucuucggcgccaucgccggguucaucgagaacggcugggagggcaugguggacgggugguacggcuuccggcaccagaacagcgaggggcgcggccaggccgccgaccugaaguccacccaggcggccaucgaccagaucaacgggaagcugaaccggcucaucggcaagaccaacgagaaguuccaccagaucgagaaggaguucagcgaggucgagggccgcauccaggaccuggagaaguacguggaggacaccaagaucgaccugugguccuacaacgccgagcuccuggugacgcuggagaaccagcacaccaucgaccucaccgacagcgagaugaacaagcuguucgagaagaccaagaagcagcugcgggagaacgccgaggacauggggaacggcugcuucaagaucuaccacaagugcgacaacgccugcaucggguccauccgcaacggcacguacgaccacgacgucuaccgcgacgaggcgcucaacaaccgguuccagaucaaggggguggagcugaaguccggcuacaaggacuggauccuguggaucuccuucgccaucagcugcuuccuccugugcguggcccugcucggcuucaucaugugggccugccagaaggggaacauccgcugcaacaucugcaucuga

SEQ ID NO: 75372 - RNA, 1701 nt, Artificial Sequence
  derived and/or modified CDS sequence (opt1) from hemagglutinin__InfluenzaA__AHL91130
augaagaccaucaucgcccugagcuacauccucugccugguguucgcccagaagcugcccggcaacgacaacuccaccgcgacgcucugccuggggcaccacgccgucccgaacggcaccaucgugaagaccaucaccaacgaccagaucgaggugacgaacgccaccgagcugguccagagcuccagcaccggggagaucugcgacagcccccaccagauccucgacggcgagaacugcacccugaucgacgcccugcucggggacccccagugcgacggcuuccagaacaagaagugggaccuguucguggagcgcagcaaggccuacuccaacugcuaccccuacgacgugccggacuacgcgagccugcggucccucaucgccagcuccggcacgcuggaguucaacaacgagagcuucaacuggaccggggucacccagaacggcaccuccagcgccugcauccgccgguccaacaacagcuucuucucccgccugaacuggcucacgcaccugaaguucaaguaccccgcccugaacgugaccaugcccaacaacgagcaguucgacaagcucuacaucuggggcgugcaccaccccgggaccgacaacgaccagaucuuccuguacgcgcaggccagcgggcggaucaccgucuccacgaagcgcagccagcagaccgugaucccgaacaucggcagccggccccgcgugcggaacauccccucccgcaucagcaucuacuggaccaucgucaagcccggcgacauccugcucaucaacuccaccgggaaccugaucgccccgcggggcuacuucaagauccgcagcgggaaguccagcaucaugcgguccgacgcccccaucggcaagugcaacagcgagugcaucacgcccaacggcuccauccccaacgacaagccguuccagaacgugaaccgcaucaccuacggggccugcccccgguacgugaagcagaacacccugaagcucgcgaccggcaugcgcaacguccccgagaagcagacgcgggggaucuucggcgccaucgccggguucaucgagaacggcugggagggcaugguggacgggugguacggcuuccgccaccagaacagcgaggggcggggccaggccgccgaccugaaguccacccaggcggccaucgaccagaucaacgggaagcugaaccgccucaucggcaagaccaacgagaaguuccaccagaucgagaaggaguucagcgagguggagggccggauccaggaccuggagaaguacgucgaggacaccaagaucgaccugugguccuacaacgccgagcuccugguggcccuggagaaccagcacacgaucgaccucaccgacagcgagaugaacaagcuguucgagaagaccaagaagcagcugcgcgagaacgccgaggacauggggaacggcugcuucaagaucuaccacaagugcgacaacgcgugcaucggguccauccgcaacggcaccuacgaccacaacguguaccgggacgaggcccucaacaaccgcuuccagaucaagggggucgagcugaaguccggcuacaaggacuggauccuguggaucuccuucgccaucagcugcuuccuccugugcguggcccugcucggcuucaucaugugggccugccagaaggggaacauccggugcaacaucugcaucuga

SEQ ID NO: 75373 - RNA, 1701 nt, Artificial Sequence; identical to SEQ ID NO: 66458
  derived and/or modified CDS sequence (opt1) from hemagglutinin__InfluenzaA__AHL91142

SEQ ID NO: 75374 - RNA, 1701 nt, Artificial Sequence; identical to SEQ ID NO: 66458
  derived and/or modified CDS sequence (opt1) from hemagglutinin__InfluenzaA__AHL91154

SEQ ID NO: 75375 - RNA, 1701 nt, Artificial Sequence; identical to SEQ ID NO: 64654
  derived and/or modified CDS sequence (opt1) from hemagglutinin__InfluenzaA__AHL91166

SEQ ID NO: 75376 - RNA, 1701 nt, Artificial Sequence; identical to SEQ ID NO: 74491
  derived and/or modified CDS sequence (opt1) from hemagglutinin__InfluenzaA__AHL94984

SEQ ID NO: 75377 - RNA, 1701 nt, Artificial Sequence; identical to SEQ ID NO: 74491
  derived and/or modified CDS sequence (opt1) from hemagglutinin__InfluenzaA__AHL94996

SEQ ID NO: 75378 - RNA, 1701 nt, Artificial Sequence; identical to SEQ ID NO: 73859
  derived and/or modified CDS sequence (opt1) from hemagglutinin__InfluenzaA__AHL95008

SEQ ID NO: 75379 - RNA, 1701 nt, Artificial Sequence; identical to SEQ ID NO: 74021
  derived and/or modified CDS sequence (opt1) from hemagglutinin__InfluenzaA__AHL95020

SEQ ID NO: 75380 - RNA, 1701 nt, Artificial Sequence; identical to SEQ ID NO: 74018
  derived and/or modified CDS sequence (opt1) from hemagglutinin__InfluenzaA__AHL95032

SEQ ID NO: 75381 - RNA, 1701 nt, Artificial Sequence; identical to SEQ ID NO: 73892
  derived and/or modified CDS sequence (opt1) from hemagglutinin__InfluenzaA__AHL95044

SEQ ID NO: 75382 - RNA, 1701 nt, Artificial Sequence; identical to SEQ ID NO: 73882
  derived and/or modified CDS sequence (opt1) from hemagglutinin__InfluenzaA__AHL95056

SEQ ID NO: 75383 - RNA, 1701 nt, Artificial Sequence; identical to SEQ ID NO: 74021
  derived and/or modified CDS sequence (opt1) from hemagglutinin__InfluenzaA__AHL95068

SEQ ID NO: 75384 - RNA, 1701 nt, Artificial Sequence; identical to SEQ ID NO: 74569
  derived and/or modified CDS sequence (opt1) from hemagglutinin__InfluenzaA__AHL95080

SEQ ID NO: 75385 - RNA, 1701 nt, Artificial Sequence; identical to SEQ ID NO: 73892
  derived and/or modified CDS sequence (opt1) from hemagglutinin__InfluenzaA__AHL95092

SEQ ID NO: 75386 - RNA, 1701 nt, Artificial Sequence
  derived and/or modified CDS sequence (opt1) from hemagglutinin__InfluenzaA__AHL95104
augaagaccaucaucgcccugagcuacauccucugccugguguucgcccagaagcugcccggcaacgacaacuccaccgcgacgcucugccuggggcaccacgccgucccgaacggcaccaucgugaagaccaucaccaacgaccgcaucgaggugacgaacgccaccgagcugguccagaacagcuccaucggggagaucugcgacagcccccaccagauccucgacggcgagaacugcacccugaucgacgcccugcucggggacccccagugcgacggcuuccagaacaagaagugggaccuguucguggagcgguccaaggccuacagcaacugcuaccccuacgacgugccggacuacgcgucccugcgcagccucgucgccuccagcggcacccuggaguucaacaacgaguccuucaacugggccggggugacgcagaacggcaccagcuccgccugcaugcgggggagcaacuccagcuucuucucccgccugaacuggcucacccaccugaacuucaaguaccccgcgcugaacgugaccaugcccaacaacgagcaguucgacaagcucuacaucuggggcguccaccaccccgggacggacaaggaccagaucuuccuguacgcccagagcuccggccggaucaccgugagcaccaagcgcagccagcaggccgugaucccgaacaucggcucccggccccgcauccggaacauccccagccgcaucuccaucuacuggaccaucgucaagcccggggacauccugcucaucaacagcacgggcaaccugaucgccccgcggggguacuucaagauccgcuccggcaagagcuccaucaugcggagcgacgcccccaucggcaagugcaaguccgagugcaucacccccaacgggagcauccccaacgacaagccguuccagaacgugaaccgcaucaccuacggcgcgugcccccgguacgugaagcaguccacccugaagcucgccacggggaugcgcaacguccccgagaagcagacccggggcaucuucggggccaucgccggcuucaucgagaacggcugggaggggaugauggacggcugguacggguuccgccaccagaacagcgagggccgggggcaggccgcggaccugaaguccacccaggccgccaucgaccagaucaacggcaagcugaaccgccucaucggcaagaccaacgagaaguuccaccagaucgagaaggaguucagcgagguggaggggcggauccaggaccuggagaaguacguggaggacacgaagaucgaccugugguccuacaacgccgagcuccuggucgcccuggagaaccagcacaccaucgaccucaccgacagcgagaugaacaagcuguucgagaagaccaagaagcagcugcgcgagaacgcggaggacaugggcaacgggugcuucaagaucuaccacaagugcgacaacgccugcaucggcuccauccgcaacgggacguacgaccacgacguguaccgggacgaggcccucaacaaccgcuuccagaucaagggcguggagcucaagagcggcuacaaggacuggauccuguggaucuccuucgccaucagcugcuuccugcugugcgucgcccugcucggguucaucaugugggcgugccagaagggcaacauccggugcaacaucugcaucuga

SEQ ID NO: 75387 - RNA, 1701 nt, Artificial Sequence
  derived and/or modified CDS sequence (opt1) from hemagglutinin__InfluenzaA__AHL95116
augaagaccaucaucgcccugagcuacauccucugccugguguucgcccaggagcugcccggcaacgacgacuccaccgcgacgcucugccuggggcacuacgccgucccgaacggcaccaucgugaagaccaucaccaacgaccagaucgaggugacgaacgccaccgagcugguccagagcuccagcaccggggagaucugcaacagcccccaccagauccucgacggcgagaacugcacccugaucgacgcccugcucggggacccccagugcgacggcuuccagaacaagaagugggaccuguucguggagcgcagcaaggcccacuccaacugcuaccccuacgacgugccggacuacgcgagccugcggucccucgucgccagcuccggcacgcuggaguucaacaacgagagcuucaacuggaccggggugacccagaacggcaccuccagcgccugcauccgccgguccaacaacagcuucuucucccgccugaacuggcucacgcaccugaacuucaaguaccccgcccugaacgugaccaugcccaacaacgagcaguucgacaagcucuacaucuggggcguccaccaccccgggaccgacaaggaccagaucuuccuguacgcgaaggccagcgggcggaucaccguguccacgaagcgcagccagcaggccgugaucccgaacaucggcagccggccccgcguccggaacauccccucccgcgugagcaucuacuggaccaucgugaagcccggcgacauccugcucaucaacuccaccgggaaccugaucgccccgcggggcuacuucaagauccgcagcgggaaguccagcaucaugcgguccgacgcccccaucggcaagugcaacagcgcgugcaucacccccaacggcuccauccccaacgacaagccguuccagaacgucaaccgcaucacguacggggccugcccccgguacgugaagcagaacacccugaagcucgccaccggcaugcgcaacgugcccgagaagcagacccgggggaucuucggcgccaucgccggguucaucgagaacggcugggagggcauggucgacgggugguacggcuuccgccaccagaacagcgaggggcggggccaggcggccgaccugaaguccacgcaggccgccaucgaccagaucaacgggaagcugaaccgccucaucggcaagaccaacgagaaguuccaccagaucgagaaggaguucagcgagguggagggccggauccaggaccuggagaaguacguggaggacaccaagaucgaccugugguccuacaacgccgagcuccuggucgcgcuggagaaccagcacaccaucgaccucacggacagcgagaugaacaagcuguucgagaagaccaagaagcagcugcgcgagaacgccgaggacauggggaacggcugcuucaagaucuaccacaagugcgacaacgccugcaucggguccauccgcaacggcaccuacgaccacgacguguaccgggacgaggcccucaacaaccgcuuccagaucaaggggguggagcugaaguccggcuacaaggacuggauccuguggaucuccuucgccaucagcugcuuccuccugugcgucgcgcugcucggcuucaucaugugggccugccagaaggggaacauccggugcaacaucugcaucuga

SEQ ID NO: 75388 - RNA, 1701 nt, Artificial Sequence; identical to SEQ ID NO: 73859
  derived and/or modified CDS sequence (opt1) from hemagglutinin__InfluenzaA__AHL95128

SEQ ID NO: 75389 - RNA, 1701 nt, Artificial Sequence; identical to SEQ ID NO: 73882
  derived and/or modified CDS sequence (opt1) from hemagglutinin__InfluenzaA__AHL95140

SEQ ID NO: 75390 - RNA, 1701 nt, Artificial Sequence; identical to SEQ ID NO: 73892
  derived and/or modified CDS sequence (opt1) from hemagglutinin__InfluenzaA__AHL95152

SEQ ID NO: 75391 - RNA, 1701 nt, Artificial Sequence; identical to SEQ ID NO: 73859
  derived and/or modified CDS sequence (opt1) from hemagglutinin__InfluenzaA__AHL95164

SEQ ID NO: 75392 - RNA, 1701 nt, Artificial Sequence; identical to SEQ ID NO: 73892
  derived and/or modified CDS sequence (opt1) from hemagglutinin__InfluenzaA__AHL95176

SEQ ID NO: 75393 - RNA, 1701 nt, Artificial Sequence; identical to SEQ ID NO: 73892
  derived and/or modified CDS sequence (opt1) from hemagglutinin__InfluenzaA__AHL95188

SEQ ID NO: 75394 - RNA, 1701 nt, Artificial Sequence; identical to SEQ ID NO: 74018
  derived and/or modified CDS sequence (opt1) from hemagglutinin__InfluenzaA__AHL95200

SEQ ID NO: 75395 - RNA, 1701 nt, Artificial Sequence; identical to SEQ ID NO: 73892
  derived and/or modified CDS sequence (opt1) from hemagglutinin__InfluenzaA__AHL95212

SEQ ID NO: 75396 - RNA, 1701 nt, Artificial Sequence; identical to SEQ ID NO: 73882
  derived and/or modified CDS sequence (opt1) from hemagglutinin__InfluenzaA__AHL95224

SEQ ID NO: 75397 - RNA, 1701 nt, Artificial Sequence; identical to SEQ ID NO: 73882
  derived and/or modified CDS sequence (opt1) from hemagglutinin__InfluenzaA__AHL95236

SEQ ID NO: 75398 - RNA, 1701 nt, Artificial Sequence; identical to SEQ ID NO: 73907
  derived and/or modified CDS sequence (opt1) from hemagglutinin__InfluenzaA__AHL95248

SEQ ID NO: 75399 - RNA, 1701 nt, Artificial Sequence
  derived and/or modified CDS sequence (opt1) from hemagglutinin__InfluenzaA__AHL95260
augaagaccaucaucgcccugagcuacauccucugccugguguucgcccagaagcugcccggcaacgacaacuccaccgcgacgcucugccuggggcaccacgccgucccgaacggcaccaucgugaagaccaucaccaacgaccgcaucgaggugacgaacgccaccgagcugguccagaacagcuccaucagcgagaucugcgacagcccccaccagauccucgacggggagaacugcacccugaucgacgcccugcucggcgacccccagugcgacggguuccagaacaagaagugggaccuguucguggagcggagcaaggccuacuccaacugcuaccccuacgacgugccggacuacgcgagccugcgcucccucgucgccagcuccggcacccuggaguucaacaacgagagcuucaacugggccggcgugacgcagaacgggaccuccagcgccugcauccggggcuccaacagcuccuucuucagccgccugaacuggcucacccaccugaacuucaaguaccccgcgcugaacgugaccaugcccaacaacgagcaguucgacaagcucuacaucuggggcguccaccaccccgggacggacaaggaccagaucuuccuguacgcccaguccagcgggcggaucaccgugagcaccaagcgcucccagcaggccgugaucccgaacaucggcagccggccccgcauccggaacauccccucccgcaucagcaucuacuggaccaucgucaagcccggcgacauccugcucaucaacuccacggggaaccugaucgccccgcggggcuacuucaagauccgcagcgggaaguccagcaucaugcgguccgacgcccccaucggcaagugcaagagcgagugcaucacccccaacggcuccauccccaacgacaagccguuccagaacgugaaccgcaucaccuacggggcgugcccccgguacgugaagcagagcacccugaagcucgccacgggcaugcgcaacguccccgagaagcagacccgggggaucuucggcgccaucgccggguucaucgagaacggcugggagggcaugguggacgggugguacggcuuccgccaccagaacuccgaggggcggggccaggccgcggaccugaaguccacccaggccgccaucgaccagaucaacgggaagcugaaccgccucaucggcaagaccaacgagaaguuccaccagaucgagaaggaguucuccgagguggagggccggauccaggaccuggagaaguacgucgaggacacgaagaucgaccuguggagcuacaacgccgagcuccugguggcccuggagaaccagcacaccaucgaccucaccgacuccgagaugaacaagcuguucgagaagaccaagaagcagcugcgcgagaacgcggaggacauggggaacggcugcuucaagaucuaccacaagugcgacaacgccugcaucgggagcauccgcaacggcacguacgaccacgacguguaccgggacgaggcccucaacaaccgcuuccagaucaagggggucgagcugaaguccggcuacaaggacuggauccuguggaucagcuucgccaucagcugcuuccuccugugcguggcccugcucggcuucaucaugugggcgugccagaaggggaacauccggugcaacaucugcaucuga

SEQ ID NO: 75400 - RNA, 1701 nt, Artificial Sequence; identical to SEQ ID NO: 73892
  derived and/or modified CDS sequence (opt1) from hemagglutinin__InfluenzaA__AHL95272

SEQ ID NO: 75401 - RNA, 1701 nt, Artificial Sequence; identical to SEQ ID NO: 74018
  derived and/or modified CDS sequence (opt1) from hemagglutinin__InfluenzaA__AHL95284

SEQ ID NO: 75402 - RNA, 1701 nt, Artificial Sequence
  derived and/or modified CDS sequence (opt1) from hemagglutinin__InfluenzaA__AHL95296
augaaggccauccuggugguccuccuguacaccuucgccaccgcgaacgccgacacgcugugcaucggcuaccacgccaacaacagcaccgacaccguggacaccgugcucgagaagaacgucacggugacccacuccgugaaccugcuggaggacaagcacaacgggaagcucugcaagcugcgcggcgucgcgccccugcaccucgggaagugcaacaucgccggcuggauccuggggaacccggagugcgagagccuguccaccgccagcuccuggagcuacaucguggagaccuccagcuccgacaacggcacgugcuaccccggcgacuucaucaacuacgaggagcuccgggagcagcugagcuccgugagcuccuucgagcgcuucgagauguuccccaagaccagcuccuggcccaaccacgacagcaacaagggggucaccgccgccugcccgcacgccggcgcgaaguccuucuacaagaaccugaucuggcucgugaagaaggggaacagcuaccccaagcuguccaagagcuacaucaacgacaagggcaaggaggugcugguccucugggggauccaccaccccagcaccacggccgaccagcagucccuguaccagaacgccgacgccuacguguucgugggcaccagcaaguacuccaagaaguucaagcccgagaucgccauccggccgaagguccgcgaccaggagggccggaugaacuacuacuggacccugaucgagcccggggacaagaucaccuucgaggcgacgggcaaccucguggugccccgcuacgccuucgccauggagcggaacgccgggagcggcaucaucaucuccgacacccccguccacgacugcaacacgaccugccagaccccggagggcgccaucaacaccagccugcccuuccagaacauccaccccaucaccaucgggaagugccccaaguacgugaaguccaccaagcugcgccucgcgacgggccugcggaacgugccgagcauccagucccgcgggcuguucggcgccaucgccggguucaucgagggcggcuggaccgggauggucgacggcugguacggguaccaccaccagaacgagcagggcagcggguacgccgccgaccucaaguccacccagaacgcgaucgacaagaucaccaacaaggugaacagcgugaucgagaagaugaacacgcaguucaccgccgucggcaaggaguucaaccaccuggagaagcggaucgagaaccugaacaagaagguggacgacggcuuccucgacaucuggaccuacaacgccgagcugcugguccuccuggagaacgagcgcacccuggacuaccacgacuccaacgugaagaaccucuacgagaaggugcggaaccagcugaaggacaacgccaaggagaucgggaacggcugcuucgaguucuaccacaagugcgacaacacgugcauggagagcgucaagaacgggaccuacgacuaccccaaguacuccgaggaggccaagcugaaccgcgagaagaucgacggcgugaagcucgagagcacccggaucuaccagauccuggcgaucuacuccaccguggccagcucccugguccucguggugagccugggggccaucagcuucuggaugugcuccaacggcagccugcagugccgcaucugcaucuga

SEQ ID NO: 75403 - RNA, 1701 nt, Artificial Sequence; identical to SEQ ID NO: 73859
  derived and/or modified CDS sequence (opt1) from hemagglutinin__InfluenzaA__AHL95307

SEQ ID NO: 75404 - RNA, 1701 nt, Artificial Sequence; identical to SEQ ID NO: 73882
  derived and/or modified CDS sequence (opt1) from hemagglutinin__InfluenzaA__AHL95319

SEQ ID NO: 75405 - RNA, 1701 nt, Artificial Sequence
  derived and/or modified CDS sequence (opt1) from hemagglutinin__InfluenzaA__AHL95331
augaagaccaucaucgcccugagcuacauccucugccugguguucgcccagaagcugcccggcgacgacaacuccaccgcgacgcucugccuggggcaccacgccgucccgaacggcaccaucgugaagaccaucaccaacgaccgcaucgaggugacgaacgccaccgagcugguccagaacagcuccaucggggagaucugcgacagcccccaccagauccucgacggcgagaacugcacccugaucgacgcccugcucggggacccccagugcgacggcuuccagaacaagaagugggaccuguucguggagcgguccaaggccuacagcaacugcuaccccuacgacgugccggacuacgcgucccugcgcagccucgucgccuccagcggcacccuggaguucaacaacgaguccuucaacugggccggggugacgcagaacggcaccagcuccgccugcauccgggggagcaacuccagcuucuucucccgccugaacuggcucacccaccugaacuucaaguaccccgcgcugaacgugaccaugcccaacaacgagcaguucgacaagcucuacaucuggggcguccaccaccccgggacggacaaggaccagaucuuccuguacgcccagagcuccggccggaucaccgugagcaccaagcgcagccagcaggccgugaucccgaacaucggcucccggccccgcauccggaacauccccagccgcaucuccaucuacuggaccaucgucaagcccggggacauccugcucaucaacagcacgggcaaccugaucgccccgcggggguacuucaagauccgcuccggcaagagcuccaucaugcggagcgacgcccccaucggcaagugcaaguccgagugcaucacccccaacgggagcauccccaacgacaagccguuccagaacgugaaccgcaucaccuacggcgcgugcccccgguacgugaagcaguccacccugaagcucgccacggggaugcgcaacguccccgagaagcagacccggggcaucuucggggccaucgccggcuucaucgagaacggcugggaggggaugguggacggcugguacggguuccgccaccagaacagcgagggccgggggcaggccgcggaccugaaguccacccaggccgccaucgaccagaucaacggcaagcugaaccgccucaucggcaagaccaacgagaaguuccaccagaucgagaaggaguucagcgagguggaggggcggauccaggaccuggagaaguacgucgaggacacgaagaucgaccugugguccuacaacgccgagcuccugguggcccuggagaaccagcacaccaucgaccucaccgacagcgagaugaacaagcuguucgagaagaccaagaagcagcugcgcgagaacgcggaggacaugggcaacgggugcuucaagaucuaccacaagugcgacaacgccugcaucggcuccauccgcaacgggacguacgaccacgacguguaccgggacgaggcccucaacaaccgcuuccagaucaagggcgucgagcucaagagcggcuacaaggacuggauccuguggaucuccuucgccaucagcugcuuccugcugugcguggcccugcucggguucaucaugugggcgugccagaagggcaacauccggugcaacaucugcaucuga

SEQ ID NO: 75406 - RNA, 1701 nt, Artificial Sequence
  derived and/or modified CDS sequence (opt1) from hemagglutinin__InfluenzaA__AHL95343
augaagaccaucaucgcccugagcuacauccucugccugguguucgcccagaagcugcccggcaacgacaacuccaccgcgacgcucugccuggggcaccacgccgucccgaacggcaccaucgugaagaccaucaccaacgaccgcaucgaggugacgaacgccaccgagcugguccagaacagcuccaucggggagaucugcgacagcccccaccagauccucgacggcgagaacugcacccugaucgacgcccugcucggggacccccagugcgacggcuuccagaacaagaagugggaccuguucguggagcgguccaaggccuacagcaacugcuaccccuacgacgugccggacuacgcgucccugcgcagccucgucgccuccagcggcacccuggaguucaacaacgaguccuucaacugggccggggugacgcagaacggcaccagcuccgccugcauccgggggagcaacuccagcuucuucucccgccugaacuggcucacccaccugaacuucaaguaccccgcgcugaacgugaccaugcccaacaacgagcaguucgacaagcucuacaucuggggcguccaccaccccgggacggacaaggaccagaucuuccuguacgcccagagcuccggccggaucaccgugagcaccaagcgcagccagcaggccgugaucccgaacaucggcucccggccccgcauccggaacauccccagccgcaucuccaucuacuggaccaucgucaagcccggggacauccugcucaucaacagcacgggcaaccugaucgccccgcggggguacuucaagauccgcuccggcaagagcuccaucaugcggagcgacgcccccaucggcaagugcaaguccgagugcaucacccccaacgggagcauccccaacgacaagccguuccagaacgugaaccgcaucaccuacggcgcgugcccccgguacgugaagcaguccacccugaagcucgccacggggaugcgcaacguccccgagaagcagacccggggcaucuucggggccaucgccggcuucaucgagaacggcugggaggggaugguggacggcugguacggguuccgccaccagaacagcgagggccgggggcaggccgcggaccugaaguccacccaggccgccaucgaccagaucaacggcaagcugaaccgccucaucggcaagaccaacgagaaguuccaccagaucgagaaggaguucagcgagguggaggggcggauccaggaccuggagaaguacgucgaggacacgaagaucgaccugugguccuacaacgccgagcuccugguggcccuggagaaccagcacaccaucgaccucaccgacagcgagaugaacaagcuguucgagaagaccaagaagcagcugcgcgagaacgcggaggacaugggcaacgggugcuucaagaucuaccacaagugcgacaacgccugcaucggcuccauccgcaacgggacguacgaccacgacguguaccgggacgaggcccucaacaaccgcuuccagauccggggcgucgagcucaagagcggcuacaaggacuggauccuguggaucuccuucgccaucagcugcuuccugcugugcguggcccugcucggguucaucaugugggcgugccagaagggcaacauccgcugcaacaucugcaucuga

SEQ ID NO: 75407 - RNA, 1701 nt, Artificial Sequence; identical to SEQ ID NO: 73882
  derived and/or modified CDS sequence (opt1) from hemagglutinin__InfluenzaA__AHL95432

SEQ ID NO: 75408 - RNA, 1701 nt, Artificial Sequence; identical to SEQ ID NO: 74018
  derived and/or modified CDS sequence (opt1) from hemagglutinin__InfluenzaA__AHL95444

SEQ ID NO: 75409 - RNA, 1701 nt, Artificial Sequence; identical to SEQ ID NO: 73882
  derived and/or modified CDS sequence (opt1) from hemagglutinin__InfluenzaA__AHL95457

SEQ ID NO: 75410 - RNA, 1701 nt, Artificial Sequence
  derived and/or modified CDS sequence (opt1) from hemagglutinin__InfluenzaA__AHL95470
augaagaccaucaucgcccugagcuacauccucugccugguguucgcccagaagcugcccggcaacgacaacuccaccgcgacgcucugccuggggcaccacgccgucccgaacggcaccaucgugaagaccaucaccaacgaccagaucgaggugacgaacgccaccgagcugguccagagcuccagcaccggggagaucugcaacagcccccaccagauccucgacggcgagaacugcacccugaucgacgcccugcucggggacccccagugcgacggcuuccagaacaagaagugggaccuguucguggagcgcagcaaggccuacuccaacugcuaccccuacgacgugccggacuacgcgagccugcggucccucgucgccagcuccggcacgcuggaguucaacaacgagagcuucaacuggaccggggugaagcagaacggcaccuccagcgccugcauccgccgguccaacagcuccuucuucagccgccugaacuggcucacccaccugaacuucaaguaccccgcccugaacgugacgaugcccaacaacgagcaguucgacaagcucuacaucuggggcguccaccaccccgggaccgacaaggaccagaucuuccuguacgcgcaguccagcgggcggaucaccgugagcaccaagcgcucccagcaggccgugaucccgaacaucggcagccggccccgcauccggaacauccccucccgcaucagcaucuacuggacgaucguccggcccggcgacauccugcucaucaacuccaccgggaaccugaucgccccgcgcggcuacuucaagauccggagcgggaaguccagcaucaugcgcuccgacgcccccaucggcaagugcaacagcgagugcaucacccccaacggcuccauccccaacgacaagccguuccagaacgugaaccggaucaccuacggggccugcccccgcuacgugaagcagagcacgcugaagcucgcgaccggcaugcggaacguccccgagaagcagacccgcgggaucuucggcgccaucgccggguucaucgagaacggcugggagggcaugguggacgggugguacggcuuccggcaccagaacuccgaggggcgcggccaggccgccgaccugaaguccacccaggcggccaucgaccagaucaacgggaagcugaaccggcucaucggcaagacgaacgagaaguuccaccagaucgagaaggaguucuccgagguggagggccgcauccaggaccuggagaaguacgucgaggacaccaagaucgaccuguggagcuacaacgccgagcuccugguggcccuggagaaccagcacaccaucgaccucaccgacuccgagaugaacaagcuguucgagaagacgaagaagcagcugcgcgagaacgccgaggacauggggaacggcugcuucaagaucuaccacaagugcgacaacgcgugcaucgggagcauccggaacggcaccuacaaccacgacguguaccgcgacgaggcccucaacaaccgguuccagaucaagggggucgagcugaaguccggcuacaaggacuggauccuguggaucagcuucgccaucagcugcuuccuccugugcguggcccugcucggcuucaucaugugggccugccagaaggggaacauccgcugcaacaucugcaucuga

SEQ ID NO: 75411 - RNA, 1701 nt, Artificial Sequence; identical to SEQ ID NO: 74018
  derived and/or modified CDS sequence (opt1) from hemagglutinin__InfluenzaA__AHL95482

SEQ ID NO: 75412 - RNA, 1701 nt, Artificial Sequence; identical to SEQ ID NO: 74018
  derived and/or modified CDS sequence (opt1) from hemagglutinin__InfluenzaA__AHL95494

SEQ ID NO: 75413 - RNA, 1701 nt, Artificial Sequence
  derived and/or modified CDS sequence (opt1) from hemagglutinin__InfluenzaA__AHL95506
augaagaccaucaucgcccugagcuacauccucugccugguguucgcccagaagcugcccggcaacgacaacuccaccgcgacgcucugccuggggcaccacgccgucccgaacggcaccaucgugcgcaccaucaccaacgaccggaucgaggugacgaacgccaccgagcugguccagaacagcuccaucggggagaucugcgacagcccccaccagauccucgacggcgagaacugcacccugaucgacgcccugcucggggacccccagugcgacggcuuccagaacaagaagugggaccuguucguggagcgcuccaaggccuacagcaacugcuaccccuacgacgugccggacuacgcgucccugcggagccucgucgccuccagcggcacccuggaguucaacaacgaguccuucaacugggccggggugacgcagaacggcaccagcuccgccugcauccgcgggagcaacuccagcuucuucucccggcugaacuggcucacccaccugaacuucaaguaccccgcgcugaacgugaccaugcccaacaacgagcaguucgacaagcucuacaucuggggcguccaccaccccgggacggacaaggaccagaucuuccuguacgcccagagcuccggccgcaucaccgugagcaccaagcggagccagcaggccgugaucccgaacaucggcucccgcccccggauccgcaacauccccagccggaucuccaucuacuggaccaucgucaagcccggggacauccugcucaucaacagcacgggcaaccugaucgccccgcgcggguacuucaagauccgguccggcaagagcuccaucaugcgcagcgacgcccccaucggcaagugcaaguccgagugcaucacccccaacgggagcauccccaacgacaagccguuccagaacgugaaccggaucaccuacggcgcgugcccccgcuacgugaagcaguccacccugaagcucgccacggggaugcggaacguccccgagaagcagacccgcggcaucuucggggccaucgccggcuucaucgagaacggcugggaggggaugguggacggcugguacggguuccggcaccagaacagcgagggccgcgggcaggccgcggaccugaaguccacccaggccgccaucgaccagaucaacggcaagcugaaccggcucaucggcaagaccaacgagaaguuccaccagaucgagaaggaguucagcgagguggaggggcgcauccaggaccuggagaaguacgucgaggacacgaagaucgaccugugguccuacaacgccgagcuccugguggcccuggagaaccagcacaccaucgaccucaccgacagcgagaugaacaagcuguucgagaagaccaagaagcagcugcgcgagaacgcggaggacaugggcaacgggugcuucaagaucuaccacaagugcgacaacgccugcaucggcuccauccggaacgggacguacgaccacgacguguaccgcgacgaggcccucaacaaccgguuccagaucaagggcgucgagcucaagagcggcuacaaggacuggauccuguggaucuccuucgccaucagcugcuuccugcugugcguggcccugcucggguucaucaugugggcgugccagaagggcaacauccgcugcaacaucugcaucuga

SEQ ID NO: 75414 - RNA, 1701 nt, Artificial Sequence
  derived and/or modified CDS sequence (opt1) from hemagglutinin__InfluenzaA__AHL95518
augaagaccaucaucgcccugagcuacauccucugccugguguucgcccagaagcugcccggcaacgacaacuccaccgcgacgcucugccuggggcaccacgccgucccgaacggcaccaucgugaagaccaucaccaacgaccgcaucgaggugacgaacgccaccgagcugguccagaacagcuccaucggggagaucugcgacagcccccaccagauccucgacggcgagaacugcacccugaucgacgcccugcucggggacccccagugcgacggcuuccagaacaagaagugggaccuguucguggagcgguccaaggccuacagcaacugcuaccccuacgacgugccggacuacgcgucccugcgcagccucgucgccuccagcggcacccuggaguucaacaacgaguccuucaacugggccggggugacgcagaacggcaccagcuccgccugcauccgggggagcaacuccagcuucuucucccgccugaacuggcucacccaccugaacuucaaguaccccgcgcugaacgugaccaugcccaacaacgagcaguucgacaagcucuacaucuggggcguccaccaccccgggacggacaaggaccagaucuuccuguacgcccagagcuccggccggaucaccgugagcaccaagcgcagccagcaggccgugaucccgaacaucggcucccggccccgcauccggaacguccccagccgcaucuccaucuacuggaccaucgugaagcccggggacauccugcucaucaacagcacgggcaaccugaucgccccgcggggguacuucaagauccgcuccggcaagagcuccaucaugcggagcgacgcccccaucggcaagugcaaguccgagugcaucacccccaacgggagcauccccaacgacaagccguuccagaacgugaaccgcaucaccuacggcgcgugcccccgguacgucaagcaguccacccugaagcucgccacggggaugcgcaacgugcccgagaagcagacccggggcaucuucggggccaucgccggcuucaucgagaacggcugggaggggaugauggacggcugguacggguuccgccaccagaacagcgagggccgggggcaggccgcggaccugaaguccacccaggccgccaucgaccagaucaacggcaagcugaaccgccucaucggcaagaccaacgagaaguuccaccagaucgagaaggaguucagcgagguggaggggcggauccaggaccuggagaaguacgucgaggacacgaagaucgaccugugguccuacaacgccgagcuccugguggcccuggagaaccagcacaccaucgaccucaccgacagcgagaugaacaagcuguucgagaagaccaagaagcagcugcgcgagaacgcggaggacaugggcaacgggugcuucaagaucuaccacaagugcgacaacgccugcaucggcuccauccgcaacgggacguacgaccacgacguguaccgggacgaggcccucaacaaccgcuuccagaucaagggcgucgagcucaagagcggcuacaaggacuggauccuguggaucuccuucgccaucagcugcuuccugcugugcguggcccugcucggguucaucaugugggcgugccagaagggcaacauccggugcaacaucugcaucuga

SEQ ID NO: 75415 - RNA, 1701 nt, Artificial Sequence; identical to SEQ ID NO: 73892
  derived and/or modified CDS sequence (opt1) from hemagglutinin__InfluenzaA__AHL95530

SEQ ID NO: 75416 - RNA, 1701 nt, Artificial Sequence; identical to SEQ ID NO: 73892
  derived and/or modified CDS sequence (opt1) from hemagglutinin__InfluenzaA__AHL95542

SEQ ID NO: 75417 - RNA, 1701 nt, Artificial Sequence
  derived and/or modified CDS sequence (opt1) from hemagglutinin__InfluenzaA__AHL95554
augaagaccaucaucgcccugagcuacauccucugccugguguucgcccagaagcugcccggcaacgacaacuccauggcgacccucugccuggggcaccacgccgucccgaacggcacgaucgugaagaccaucaccaacgaccgcaucgaggugaccaacgccacggagcugguccagaacagcuccaucggggagaucugcgacagcccccaccagauccucgacggcgagaacugcacccugaucgacgcccugcucggggacccccagugcgacggcuuccagaacaagaagugggaccuguucguggagcgguccaaggccuacagcaacugcuaccccuacgacgugccggacuacgcgucccugcgcagccucgucgccuccagcggcacccuggaguucaacaacgaguccuucaacuggaccggggugacgcagaacggcaccagcuccgccugcauccggcgcagcaacuccagcuucuucucccggcugaacuggcucacccaccugaacuucaaguaccccgcccugaacgugaccaugcccaacaacgagcaguucgacaagcucuacaucuggggcguccaccaccccgggacggacaaggaccagaucuuccuguacgcgcagagcuccgggcgcaucaccgugagcaccaagcggagccagcaggccgugaucccgaacaucggcucccgcccccggauccgcaacauccccagccggaucuccaucuacuggaccaucgucaagcccggcgacauccugcucaucaacagcacggggaaccugaucgccccgcgcggcuacuucaagauccgguccggcaagagcuccaucaugcgcagcgacgcccccaucgggaagugcaaguccgagugcaucacccccaacggcagcauccccaacgacaagccguuccagaacgugaaccggaucaccuacggggccugcccccgcuacgugaagcaguccacccugaagcucgcgacgggcaugcggaacguccccgagaagcagacccgcgggaucuucggcgccaucgccggguucaucgagaacggcugggagggcaugguggacgggugguacggcuuccggcaccagaacagcgaggggcgcggccaggccgccgaccugaaguccacccaggcggccaucgaccagaucaacgggaagcugaaccggcucaucggcaagaccaacgagaaguuccaccagaucgagaaggaguucagcgagguggagggccgcauccaggaccuggagaaguacgucgaggacacgaagaucgaccugugguccuacaacgccgagcuccugguggcccuggagaaccagcacaccaucgaccucaccgacagcgagaugaacaagcuguucgagaagaccaagaagcagcugcgcgagaacgccgaggacauggggaacggcugcuucaagaucuaccacaagugcgacaacgcgugcaucggguccauccggaacggcacguacgaccacaacguguaccgcgacgaggcccucaacaaccgguuccagaucaagggggucgagcucaagagcggcuacaaggacuggauccuguggaucuccuucgccaucagcugcuuccugcugugcguggcccugcucggcuucaucaugugggccugccagaaggggaacauccgcugcaacaucugcaucuga

SEQ ID NO: 75418 - RNA, 1701 nt, Artificial Sequence
  derived and/or modified CDS sequence (opt1) from hemagglutinin__InfluenzaA__AHL95566
augaagaccaucaucgcccugagcuacauccucugccugguguucgcccagaagcugcccggcaacgacaacuccaccgcgacgcucugccuggggcaccacgccgucccgaacggcaccaucgugaagaccaucaccaacgaccgcaucgaggugacgaacgccaccgagcugguccagaacagcuccaucggggagaucugcgacagcccccaccagauccucgacggcgagaacugcacccugaucgacgcccugcucggggacccccagugcgacggcuuccagaacaagaagugggaccuguucguggagcgguccaaggccuacagcaacugcuaccccuacgacgugccggacuacgcgucccugcgcagccucgucgccuccagcggcacccuggaguucaacaacgaguccuucaacugggccggggugacgcagaacggcaccagcuccgccugcauccgggggagcaacuccagcuucuucucccgccugaacuggcucacccaccugaacuucaaguaccccgcgcugaacgugaccaugcccaacaacgagcaguucgacaagcucuacaucuggggcguccaccaccccgggacggacaaggaccagaucuuccuguacgcccggagcuccggccgcaucaccgugagcaccaagcggagccagcaggccgugaucccgaacaucggcucccgcccccggauccgcaacauccccagccggaucuccaucuacuggaccaucgucaagcccggggacauccugcucaucaacagcacgggcaaccugaucgccccgcgcggguacuucaagauccgguccggcaagagcuccaucaugcgcagcgacgcccccaucggcaagugcaaguccgagugcaucacccccaacgggagcauccccaacgacaagccguuccagaacgugaaccggaucaccuacggcgcgugcccccgcuacgugaagcaguccacccugaagcucgccacggggaugcggaacguccccgagaagcagacccgcggcaucuucggggccaucgccggcuucaucgagaacggcugggaggggaugguggacggcugguacggguuccggcaccagaacagcgagggccgcgggcaggccgcggaccugaaguccacccaggccgccaucgaccagaucaacggcaagcugaaccggcucaucggcaagaccaacgagaaguuccaccagaucgagaaggaguucagcgagguggaggggcgcauccaggaccuggagaaguacgucgaggacacgaagaucgaccugugguccuacaacgccgagcuccugguggcccuggagaaccagcacaccaucgaccucaccgacagcgagaugaacaagcuguucgagaagaccaagaagcagcugcgcgagaacgcggaggacaugggcaacgggugcuucaagaucuaccacaagugcgacaacgccugcaucggcuccauccggaacgggacguacgaccacgacguguaccgcgacgaggcccucaacaaccgguuccagaucaagggcgucgagcucaagagcggcuacaaggacuggauccuguggaucuccuucgccaucagcugcuuccugcugugcguggcccugcucggguucaucaugugggcgugccagaagggcaacauccgcugcaacaucugcaucuga

SEQ ID NO: 75419 - RNA, 1701 nt, Artificial Sequence
  derived and/or modified CDS sequence (opt1) from hemagglutinin__InfluenzaA__AHL95578
augaagaccaucaucgcccugagcuacauccucugccugguguucgcccagaagcugcccggcaacgacgacuccaccgcgacgcucugccuggggcaccacgccgucccgaacggcaccaucgugaagaccaucaccaacgaccgcaucgaggugacgaacgccaccgagcugguccagaacagcuccaucggggagaucugcgacagcccccaccagauccucgacggcgagaacugcacccugaucgacgcccugcucggggacccccagugcgacggcuuccagaacaagaagugggaccuguucguggagcgguccaaggccuacagcaacugcuaccccuacgacgugccggacuacgcgucccugcgcagccucgucgccuccagcggcacccuggaguucaacaacgaguccuucaacugggccggggugacgcagaacggcaccagcuccgccugcauccgggggagcaacuccagcuucuucucccgccugaacuggcucacccaccugaacuucaaguaccccgcgcugaacgugaccaugcccaacaacgagcaguucgacaagcucuacaucuggggcguccaccaccccgggacggacaaggaccagaucuuccuguacgcccagagcuccggccggaucaccgugagcaccaagcgcagccagcaggccgugaucccgaacaucggcucccggccccgcauccggaacauccccagccgcaucuccaucuacuggaccaucgucaagcccggggacauccugcucaucaacagcacgggcaaccugaucgccccgcggggguacuucaagauccgcuccggcaagagcuccaucaugcggagcgacgcccccaucggcaagugcaaguccgagugcaucacccccaacgggagcauccccaacgacaagccguuccagaacgugaaccgcaucaccuacggcgcgugcccccgguacgugaagcaguccacccugaagcucgccacggggaugcgcaacguccccgagaagcagacccggggcaucuucggggccaucgccggcuucaucgagaacggcugggaggggaugauggacggcugguacggguuccgccaccagaacagcgagggccgggggcaggccgcggaccugaaguccacccaggccgccaucgaccagaucaacggcaagcugaaccgccucaucggcaagaccaacgagaaguuccaccagaucgagaaggaguucagcgagguggaggggcggauccaggaccuggagaaguacguggaggacacgaagaucgaccugugguccuacaacgccgagcuccuggucgcccuggagaaccagcacaccaucgaccucaccgacagcgagaugaacaagcuguucgagaagaccaagaagcagcugcgcgagaacgcggaggacaugggcaacgggugcuucaagaucuaccacaagugcgacaacgccugcaucggcuccauccgcaacgggacguacgaccacgacguguaccgggacgaggcccucaacaaccgcuuccagaucaagggcguggagcucaagagcggcuacaaggacuggauccuguggaucuccuucgccaucagcugcuuccugcugugcgucgcccugcucggguucaucaugugggcgugccagaagggcaacauccggugcaacaucugcaucuga

SEQ ID NO: 75420 - RNA, 1701 nt, Artificial Sequence
  derived and/or modified CDS sequence (opt1) from hemagglutinin__InfluenzaA__AHL95590
augaagaccaucaucgcccugagcuacauccucugccugguguucgcccagaagcugcccggcaacgacaacuccaccgcgacgcucugccuggggcaccacgccgucccgaacggcaccaucgugaagaccaucaccaacgaccgcaucgaggugacgaacgccaccgagcugguccagaacagcuccaucggggagaucugcgacagcccccaccagauccucgacggcgagaacugcacccugaucgacgcccugcucggggacccccagugcgacggcuuccagaacaagaagugggaccuguucguggagcgguccaaggccuacagcaacugcuaccccuacgacgugccggacuacgcgucccugcgcagccucgucgccuccagcggcacccuggaguucaacaacgaguccuucaacuggacgggggugacccagaacggcaccagcuccagcugcauccggcgcuccaacagcuccuucuucagccggcugaacuggcucacccaccugaacuucaaguaccccgcccugaacgugacgaugcccaacaacgagcaguucgacaagcucuacaucuggggcguccaccaccccgggaccgacaaggaccagaucuuccuguacgcccaguccagcgggcgcaucaccgugagcaccaagcggucccagcaggcggugaucccgaacaucggcagccgcccccggauccgcaacauccccucccggaucagcaucuacuggacgaucgucaagcccggcgacauccugcucaucaacuccaccgggaaccugaucgccccgcgcggcuacuucaagauccggagcgggaaguccagcaucaugcgcuccgacgcccccaucggcaagugcaagagcgagugcaucacccccaacggcuccauccccaacgacaagccguuccagaacgugaaccggaucaccuacggggccugcccccgcuacgugaagcagagcacgcugaagcucgccaccggcaugcggaacguccccgagaagcagacccgcgggaucuucggcgcgaucgccggguucaucgagaacggcugggagggcaugguggacgggugguacggcuuccggcaccagaacuccgaggggcgcggccaggccgccgaccucaagagcacccaggccgcgaucgaccagaucaacgggaagcugaaccggcugaucggcaagacgaacgagaaguuccaccagaucgagaaggaguucuccgagguggagggccgcauccaggaccuggagaaguacgucgaggacaccaagaucgaccuguggagcuacaacgccgagcuccugguggcccuggagaaccagcacaccaucgaccucaccgacuccgagaugaacaagcuguucgagaagacgaagaagcagcugcgcgagaacgccgaggacauggggaacggcugcuucaagaucuaccacaagugcgacaacgccugcaucgggagcauccggaacggcaccuacgaccacaacguguaccgcgacgaggcgcucaacaaccgguuccagaucaagggggucgagcugaaguccggcuacaaggacuggauccuguggaucagcuucgccaucagcugcuuccuccugugcguggcccugcucggcuucaucaugugggccugccagaaggggaacauccgcugcaacaucugcaucuga

SEQ ID NO: 75421 - RNA, 1701 nt, Artificial Sequence; identical to SEQ ID NO: 73892
  derived and/or modified CDS sequence (opt1) from hemagglutinin__InfluenzaA__AHL95602

SEQ ID NO: 75422 - RNA, 1701 nt, Artificial Sequence; identical to SEQ ID NO: 73892
  derived and/or modified CDS sequence (opt1) from hemagglutinin__InfluenzaA__AHL95614

SEQ ID NO: 75423 - RNA, 1701 nt, Artificial Sequence
  derived and/or modified CDS sequence (opt1) from hemagglutinin__InfluenzaA__AHL95626
augaagaccaucaucgcccugagcuacgugcucugccuggucuucgcccagaagcugcccggcaacgacaacuccaccgcgacgcucugccuggggcaccacgccgugccgaacggcaccaucgugaagaccaucaccaacgaccgcaucgaggucacgaacgccaccgagcuggugcagaacagcuccaucggggagaucugcgacagcccccaccagauccucgacggcgagaacugcacccugaucgacgcccugcucggggacccccagugcgacggcuuccagaacaagaagugggaccuguucguggagcgguccaaggccuacagcaacugcuaccccuacgacgucccggacuacgcgucccugcgcagccucguggccuccagcggcacccuggaguucaacaacgaguccuucaacugggccggggugacgcagaacggcaccagcuccgccugcauccgggggagcaacuccagcuucuucucccgccugaacuggcucacccaccugaacuucaaguaccccgcgcugaacgucaccaugcccaacaacgagcaguucgacaagcucuacaucuggggcgugcaccaccccgggacggacaaggaccagaucuuccuguacgcccagagcuccggccggaucaccgugagcaccaagcgcagccagcaggccgucaucccgaacaucggcucccggccccgcauccggaacauccccagccgcaucuccaucuacuggaccaucgugaagcccggggacauccugcucaucaacagcacgggcaaccugaucgccccgcggggguacuucaagauccgcuccggcaagagcuccaucaugcggagcgacgcccccaucggcaagugcaaguccgagugcaucacccccaacgggagcauccccaacgacaagccguuccagaacgugaaccgcaucaccuacggcgcgugcccccgguacgucaagcaguccacccugaagcucgccacggggaugcgcaacgugcccgagaagcagacccggggcaucuucggggccaucgccggcuucaucgagaacggcugggaggggaugguggacggcugguacggguuccgccaccagaacagcgagggccgggggcaggccgcggaccugaaguccacccaggccgccaucgaccagaucaacggcaagcugaaccgccucaucggcaagaccaacgagaaguuccaccagaucgagaaggaguucagcgaggucgaggggcggauccaggaccuggagaaguacguggaggacacgaagaucgaccugugguccuacaacgccgagcuccugguggcccuggagaaccagcacaccaucgaccucaccgacagcgagaugaacaagcuguucgagaagaccaagaagcagcugcgcgagaacgcggaggacaugggcaacgggugcuucaagaucuaccacaagugcgacaacgccugcaucggcuccauccgcaacgggacguacgaccacgacgucuaccgggacgaggcccucaacaaccgcuuccagaucaagggcguggagcucaagagcggcuacaaggacuggauccuguggaucuccuucgccaucagcugcuuccugcugugcguggcccugcucggguucaucaugugggcgugccagaagggcaacauccggugcaacaucugcaucuga

SEQ ID NO: 75424 - RNA, 1701 nt, Artificial Sequence; identical to SEQ ID NO: 73892
  derived and/or modified CDS sequence (opt1) from hemagglutinin__InfluenzaA__AHL95638

SEQ ID NO: 75425 - RNA, 1701 nt, Artificial Sequence; identical to SEQ ID NO: 73892
  derived and/or modified CDS sequence (opt1) from hemagglutinin__InfluenzaA__AHL95650

SEQ ID NO: 75426 - RNA, 1701 nt, Artificial Sequence
  derived and/or modified CDS sequence (opt1) from hemagglutinin__InfluenzaA__AHL95662
augaagaccaucaucgcccugagcuacauccucugccugguguucgcccagaagcugcccggcaacgacaacuccaccgcgacgcucugccuggggcaccacgccgucccgaacggcaccaucgugaagaccaucaccaacgaccgcaucgaggugacgaacgccaccgagcugguccagaacagcuccaucggggagaucugcgacagcccccaccagauccucgacggcgagaacugcacccugaucgacgcccugcucggggacccccagugcgacggcuuccagaacaagaagugggaccuguucguggagcgguccaaggccuacagcaacugcuaccccuacgacgugccggacuacgcgucccugcgcagccucgucgccuccagcggcacccuggaguucaacaacgaguccuucaacugggccggggugacgcagaacggcaccagcuccgccugcauccgggggagcaacuccagcuucuucucccgccugaacuggcucacccaccugaacuucaaguaccccgcgcugaacgugaccaugcccaacaacgagcaguucgacaagcucuacaucuggggcguccaccaccccgggacggacaaggaccagaucuuccuguacgcccagagcuccggccggaucaccgugagcaccaagcgcagccagcaggccgugaucccgaacaucggcucccggccccgcauccggaacauccccagccgcaucuccaucuacuggaccaucgucaagcccggggacauccugcucaucaacagcacgggcaaccugaucgccccgcggggguacuucaagauccgcuccggcaagagcuccaucaugcggagcgacgcccccaucggcaagugcaaguccgagugcaucacccccaacgggagcauccccaacgacaagccguuccagaacgugaaccgcaucaccuacggcgcgugcccccgguacgugaagcaguccacccugaagcucgccacggggaugcgcaacguccccgagaagcagacccggggcaucuucggggccaucgccggcuucaucgagaacggcugggaggggaugauggacggcugguacggguuccgccaccagaacagcgagggccgggggcaggccgcggaccugaaguccacccaggccgccaucgaccagaucaacggcaagcugaaccgccucaucggcaagaccaacgagaaguuccaccagaucgagaaggaguucagcgagguggaggggcggauccaggaccuggagaaguacguggaggacacgaagaucgaccugugguccuacaacgccgagcuccuggucacccuggagaaccagcacaccaucgaccucaccgacagcgagaugaacaagcuguucgagaagacgaagaagcagcugcgcgagaacgccgaggacaugggcaacgggugcuucaagaucuaccacaagugcgacaacgcgugcaucggcuccauccgcaacgggaccuacgaccacgacguguaccgggacgaggcccucaacaaccgcuuccagaucaagggcguggagcucaagagcggcuacaaggacuggauccuguggaucuccuucgccaucagcugcuuccugcugugcgucgcccugcucggguucaucaugugggccugccagaagggcaacauccggugcaacaucugcaucuga

SEQ ID NO: 75427 - RNA, 1701 nt, Artificial Sequence; identical to SEQ ID NO: 74018
  derived and/or modified CDS sequence (opt1) from hemagglutinin__InfluenzaA__AHL95686

SEQ ID NO: 75428 - RNA, 1701 nt, Artificial Sequence; identical to SEQ ID NO: 74018
  derived and/or modified CDS sequence (opt1) from hemagglutinin__InfluenzaA__AHL95698

SEQ ID NO: 75429 - RNA, 1701 nt, Artificial Sequence; identical to SEQ ID NO: 73892
  derived and/or modified CDS sequence (opt1) from hemagglutinin__InfluenzaA__AHL95710

SEQ ID NO: 75430 - RNA, 1701 nt, Artificial Sequence; identical to SEQ ID NO: 75406
  derived and/or modified CDS sequence (opt1) from hemagglutinin__InfluenzaA__AHL95722

SEQ ID NO: 75431 - RNA, 1701 nt, Artificial Sequence; identical to SEQ ID NO: 73882
  derived and/or modified CDS sequence (opt1) from hemagglutinin__InfluenzaA__AHL95734

SEQ ID NO: 75432 - RNA, 1701 nt, Artificial Sequence; identical to SEQ ID NO: 73882
  derived and/or modified CDS sequence (opt1) from hemagglutinin__InfluenzaA__AHL95746

SEQ ID NO: 75433 - RNA, 1701 nt, Artificial Sequence; identical to SEQ ID NO: 74021
  derived and/or modified CDS sequence (opt1) from hemagglutinin__InfluenzaA__AHL95758

SEQ ID NO: 75434 - RNA, 1701 nt, Artificial Sequence; identical to SEQ ID NO: 73892
  derived and/or modified CDS sequence (opt1) from hemagglutinin__InfluenzaA__AHL95770

SEQ ID NO: 75435 - RNA, 1701 nt, Artificial Sequence
  derived and/or modified CDS sequence (opt1) from hemagglutinin__InfluenzaA__AHL95782
augaagaccaucaucgcccugagcuacauccucugccugguguucgcccagaagcugcccggcaacgacaacuccaccgcgacgcucugccuggggcaccacgccgucccgaacggcaccaucgugaagaccaucaccaacgaccgcaucgaggugacgaacgccaccgagcugguccagaacagcuccaucggggagaucugcaacagcccccaccagauccucgacggcgagaacugcacccugaucgacgcccugcucggggacccccagugcgacggcuuccagaacaagaagugggaccuguucguggagcgguccaaggccuacagcaacugcuaccccuacgacgugccggacuacgcgucccugcgcagccucgucgccuccagcggcacccuggaguucaacaacgaguccuucaacuggacgggggugacccagaacggcaccagcuccgccugcauccggcgcagcaacuccagcuucuucucccggcugaacuggcucacccaccugaacuucaaguaccccgcccugaacgugacgaugcccaacaacgagcaguucgacaagcucuacaucuggggcguccaccaccccgggaccgacaaggaccagaucuuccuguacgcgcagagcuccgggcgcaucaccgugagcaccaagcggagccagcaggccgugaucccgaacaucggcucccgcccccggauccgcaacauccccagccggaucuccaucuacuggacgaucgucaagcccggcgacauccugcucaucaacagcaccgggaaccugaucgccccgcgcggcuacuucaagauccgguccggcaagagcuccaucaugcgcagcgacgcccccaucgggaagugcaaguccgagugcaucacccccaacggcagcauccccaacgacaagccguuccagaacgugaaccggaucaccuacggggccugcccccgcuacgugaagcaguccacgcugaagcucgcgaccggcaugcggaacguccccgagaagcagacccgcgggaucuucggcgccaucgccggguucaucgagaacggcugggagggcaugguggacgggugguacggcuuccggcaccagaacagcgaggggcgcggccaggccgccgaccugaaguccacccaggcggccaucgaccagaucaacgggaagcugaaccggcucaucggcaagacgaacgagaaguuccaccagaucgagaaggaguucagcgagguggagggccgcauccaggaccuggagaaguacgucgaggacaccaagaucgaccugugguccuacaacgccgagcuccugguggcccuggagaaccagcacaccaucgaccucaccgacagcgagaugaacaagcuguucgagaagacgaagaagcagcugcgcgagaacgccgaggacauggggaacggcugcuucaagaucuaccacaagugcgacaacgcgugcaucggguccauccggaacggcaccuacgaccacgacguguaccgcgacgaggcccucaacaaccgguuccagaucaagggggucgagcucaagagcggcuacaaggacuggauccuguggaucuccuucgccaucagcugcuuccugcugugcguggcccugcucggcuucaucaugugggccugccagaaggggaacauccgcugcaacaucugcaucuga

SEQ ID NO: 75436 - RNA, 1701 nt, Artificial Sequence
  derived and/or modified CDS sequence (opt1) from hemagglutinin__InfluenzaA__AHL95794
augaagaccaucaucgcccugagcuacauccucugccugguguucgcccagaagcugcccggcaacgacaacuccaccgcgacgcucugccuggggcaccacgccgucccgaacggcaccaucgugaagaccaucaccaacgaccgcaucgaggugacgaacgccaccgagcugguccagaacagcuccaucggggagaucugcgacagcccccaccagauccucgacggcgagaacugcacccugaucgacgcccugcucggggacccccagugcgacggcuuccagaacaagaagugggaccuguucguggagcggaacaaggccuacuccaacugcuaccccuacgacgugccggacuacgcgagccugcgcucccucgucgccagcuccggcacccuggaguucaacaacgagagcuucaacugggccggggugacgcagaacggcaccuccagcgccugcauccggggguccaacagcuccuucuucagccgccugaacuggcucacccaccugaacuucaaguaccccgcgcugaacgugaccaugcccaacaacgagcaguucgacaagcucuacaucuggggcguccaccaccccgggacggacaaggaccagaucuuccuguacgcccaguccagcggccggaucaccguguccaccaagcgcagccagcaggccgugaucccgaacaucggcagccggccccgcauccggaacauccccucccgcaucagcaucuacuggaccaucgucaagcccggggacauccugcucaucaacuccacgggcaaccugaucgccccgcggggguacuucaagauccgcagcggcaaguccagcaucaugcgguccgacgcccccaucggcaagugcaagagcgagugcaucacccccaacggguccauccccaacgacaagccguuccagaacgugaaccgcaucaccuacggcgcgugcccccgguacgugaagcagagcacccugaagcucgccacggggaugcgcaacguccccgagaagcagacccggggcaucuucggggccaucgccggcuucaucgagaacggcugggaggggaugguggacggcugguacggguuccgccaccagaacuccgagggccgggggcaggccgcggaccucaagagcacccaggccgccaucgaccagaucaacggcaagcugaaccgccugaucggcaagaccaacgagaaguuccaccagaucgagaaggaguucuccgagguggaggggcggauccaggaccuggagaaguacgucgaggacacgaagaucgaccuguggagcuacaacgccgagcuccugguggcccuggagaaccagcacaccaucgaccucaccgacuccgagaugaacaagcuguucgagaagaccaagaagcagcugcgcgagaacgcggaggacaugggcaacgggugcuucaagaucuaccacaagugcgacaacgccugcaucggcagcauccgcaacgggacguacgaccacgacguguaccgggacgaggcccucaacaaccgcuuccagaucaagggcgucgagcugaaguccggcuacaaggacuggauccuguggaucagcuucgccaucuccugcuuccuccugugcguggcccugcucggguucaucaugugggcgugccagaagggcaacauccggugcaacaucugcaucuga

SEQ ID NO: 75437 - RNA, 1701 nt, Artificial Sequence
  derived and/or modified CDS sequence (opt1) from hemagglutinin__InfluenzaA__AHL95806
augaagaccaucaucgcccugagcuacauccucugccugguguucgcccagaagcugcccggcaacgacaacuccaccgcgacgcucugccuggggcaccacgccgucccgaacggcaccaucgugaagaccaucaccaacgaccgcaucgaggugacgaacgccaccgagcugguccagaacagcuccaucggggagaucugcgacagcccccaccagauccucgacggcgagaacugcacccugaucgacgcccugcucggggacccccagugcgacggcuuccagaacaagaagugggaccuguucguggagcgguccaaggccuacagcaacugcuaccccuacgacgugccggacuacgcgucccugcgcagccucgucgccuccagcggcacccuggaguucaacaacgaguccuucaacugggccggggugacgcagaacggcaccagcuccgccugcauccgggggagcaacuccagcuucuucucccgccugaacuggcucacccaccugaacuucaaguaccccgcgcugaacgugaccaugcccaacaacgagcaguucgacaagcucuacaucuggggcguccaccaccccgggacggacaaggaccagaucuuccuguacgcccagagcuccggccggaucaccgugagcaccaagcgcagccagcaggccgugaucccgaacaucggcucccggccccgcauccggaacauccccagccgcaucuccaucuacuggaccaucgucaagcccggggacauccugcucaucaacagcacgggcaaccugaucgccccgcggggguacuucaagauccgcuccggcaagagcuccaucaugcggagcgacgcccccaucggcaagugcaaguccgagugcaucacccccaacgggagcauccccaacgacaagccguuccagaacgugaaccgcaucaccuacggcgcgugcccccgguacgugaagcaguccacccugaagcucgccacggggaugcgcaacguccccgagaagcagacccggggcaucuucggggccaucgccggcuucaucgagaacggcugggaggggaugguggacggcugguacggguuccgccaccagaacagcgagggccgggggcaggccgcggaccugaaguccacccaggccgccaucgaccagaucaacggcaagcugaaccgccucaucggcaagaccaacgagaaguuccaccagaucgagaaggaguucagcgagguggaggggcggauccaggaccuggagaaguacgucgaggacacgaagaucgaccugugguccuacaacgccgagcuccugguggcccuggagaaccagcacaccaucgaccucaccgacagcgagaugaacaagcuguucgagaagaccaagaagcagcugcgcgagaacgcggaggacaugggcaacgggugcuucaagaucuaccacaagugcgacaacgccugcaucggcuccauccgcaacgggacguacgaccacgacguguaccgggacgaggcccucaacaaccgcuuccagaucaagggcgucgagcucaagagcggcuacaaggacuggauccuguggaucuccuucgccaucagcugcuuccugcugugcguggcccugcucgggagcaucaugugggcgugccagaagggcaacauccggugcaacaucugcaucuga

SEQ ID NO: 75438 - RNA, 1701 nt, Artificial Sequence; identical to SEQ ID NO: 74018
  derived and/or modified CDS sequence (opt1) from hemagglutinin__InfluenzaA__AHL95818

SEQ ID NO: 75439 - RNA, 1701 nt, Artificial Sequence; identical to SEQ ID NO: 73882
  derived and/or modified CDS sequence (opt1) from hemagglutinin__InfluenzaA__AHL95830

SEQ ID NO: 75440 - RNA, 1701 nt, Artificial Sequence; identical to SEQ ID NO: 74018
  derived and/or modified CDS sequence (opt1) from hemagglutinin__InfluenzaA__AHL95842

SEQ ID NO: 75441 - RNA, 1701 nt, Artificial Sequence; identical to SEQ ID NO: 73882
  derived and/or modified CDS sequence (opt1) from hemagglutinin__InfluenzaA__AHL95854

SEQ ID NO: 75442 - RNA, 1701 nt, Artificial Sequence; identical to SEQ ID NO: 73892
  derived and/or modified CDS sequence (opt1) from hemagglutinin__InfluenzaA__AHL95866

SEQ ID NO: 75443 - RNA, 1701 nt, Artificial Sequence
  derived and/or modified CDS sequence (opt1) from hemagglutinin__InfluenzaA__AHL95878
augaaggccauccuggugaucaugcucuacaccuucgccaccgcgaacgccgacacgcugugcaucggcuaccacgccaacaacagcaccgacaccgucgacaccgugcuggagaagaacgugacggucacccacuccgugaaccuccuggaggacaagcacaacgggaagcugugcaagcuccgcggcgugagcccccugcaccuggggaagugcaacaucgccggcuggauccucgggaacccggagugcgagucccugagcaccgccuccagcugguccuacaucgucgagaccagcggcuccgacaacggcacgugcuaccccggggacuucaucgacuacgaggagcugcgggagcagcucagcuccgugagcuccuucgagcgcuucgagaucuuccccaagaccagcuccuggcccaaccacgacagcaacaagggcgugaccgcggccugcccgcacgccggggccaagggcuucuacaagaaccugaucuggcuggucaagaaggggaacuccuaccccaagcucagcaucuccuacaucaacgacaagggcaaggaggugcuggugcuguggggcauccaccaccccagcaccacggcggaccagcagagccucuaccagaacgccgacaccuacgucuucguggggaccucccgguacagcaagaaguucaagcccgagaucgccauccgcccgaaggugcgggaccaggagggccgcaugaacuacuacuggacccuggucgagcccggggacaagaucacguucgaggccaccggcaaccugguggugccccgguacgccuucgcgauggagcgcaacgccggcuccgggaucaucaucagcgacacccccguccacgacugcaacaccacgugccagaccccgaagggcgccaucaacaccucccuccccuuccagaacauccaccccaucaccaucgggaagugccccaaguacgucaagagcacgaagcugcggcuggccaccggccuccgcaacgugccguccauccagagccgggggcuguucggcgccaucgcgggcuucaucgagggcggguggaccgggaugguggacggcugguacggguaccaccaccagaacgagcagggcuccggcuacgccgccgaccucaagagcacccagaacgccaucgacaagaucacgaacaaggugaacuccgugaucgagaagaugaacacccaguucaccgccgucgggaaggaguucaaccaccuggagaagcgcaucgagaaccugaacaagaagguggacgacggcuuccuggacaucuggaccuacaacgcggagcuccugguccugcucgagaacgagcggacgcuggacuaccacgacagcaacgugaagaaccuguacgagaaggugcgcaaccagcucaagaacaacgccaaggagaucgggaacggcugcuucgaguucuaccacaagugcgacaacacgugcauggaguccgucaagaacgggaccuacgacuaccccaaguacagcgaggaggccaagcugaaccgggaggagaucgacggcgugaagcuggaguccacccgcaucuaccagauccucgccaucuacagcaccgccgcguccagccuggugcuggucgugucccucggcgccaucagcuucuggaugugcagcaacgggucccugcagugccggaucugcaucuga

SEQ ID NO: 75444 - RNA, 1701 nt, Artificial Sequence; identical to SEQ ID NO: 73892
  derived and/or modified CDS sequence (opt1) from hemagglutinin__InfluenzaA__AHL95889

SEQ ID NO: 75445 - RNA, 1701 nt, Artificial Sequence; identical to SEQ ID NO: 74018
  derived and/or modified CDS sequence (opt1) from hemagglutinin__InfluenzaA__AHL95901

SEQ ID NO: 75446 - RNA, 1701 nt, Artificial Sequence; identical to SEQ ID NO: 74018
  derived and/or modified CDS sequence (opt1) from hemagglutinin__InfluenzaA__AHL95913

SEQ ID NO: 75447 - RNA, 1701 nt, Artificial Sequence
  derived and/or modified CDS sequence (opt1) from hemagglutinin__InfluenzaA__AHL95937
augaagaccaucaucgcccugagcuacauccucugccugguguucgcccagaagcugcccggcaacgacaacuccaccgcgacgcucugccuggggcaccacgccgucccgaacggcaccaucgugaagaccaucaccaacgaccgcaucgaggugacgaacgccaccgagcugguccagaacagcuccaucggggagaucugcgacagcccccaccagauccucgacggcgagaacugcacccugaucgacgcccugcucggggacccccagugcgacggcuuccagaacaagaagugggaccuguucguggagcgguccaaggccuacagcaacugcuaccccuacgacgugccggacuacgcgucccugcgcagccucgucgccuccagcggcacccuggaguucaacaacgaguccuucaacugggccggggugacgcagaacggcaccagcuccgccugcauccgggggagcaacuccagcuucuucucccgccugaacuggcucacccaccugaacuucaaguaccccgcgcugaacgugaccaugcccaacaacgagcaguucgacaagcucuacaucuggggcguccaccaccccgggacggacaaggaccagaucuuccuguacgcccagagcuccggccggaucaccgugagcaccaagcgcagccagcaggccgugaucccgaacaucggcucccggccccgcauccggaacauccccagccgcaucuccaucuacuggaccaucgucaagcccggggacauccugcucaucaacagcacgggcaaccugaucgccccgcggggguacuucaagauccgcuccggcaagagcuccaucaugcggagcgacgcccccaucggcaagugcaaguccgagugcaucacccccaacgggagcauccccaacgacaagccguuccagaacgugaaccgcaucaccuacggcgcgugcccccgguacgugaagcaguccacccugaagcucgccacggggaugcgcaacguccccgagaagcagacccggggcaucuucggggccaucgccggcuucaucgagaacggcugggaggggaugguggacggcugguacggguuccgccaccagaacagcgagggccgggggcaggccgcggaccugaaguccacccaggccgccaucgaccagaucaacggcaagcugaaccgccucaucggcaagaccaacgagaaguuccaccagaucgagaaggaguucagcgagguggaggggcggauccaggaccuggagaaguacgucgaggacacgaagaccgaccugugguccuacaacgccgagcuccugguggcccuggagaaccagcacaccaucgaccucaccgacagcgagaugaacaagcuguucgagaagacgaagaagcagcugcgcgagaacgcggaggacaugggcaacgggugcuucaagaucuaccacaagugcgacaacgccugcaucggcuccauccgcaacgggaccuacgaccacgacguguaccgggacgaggcccucaacaaccgcuuccagaucaagggcgucgagcucaagagcggcuacaaggacuggauccuguggaucuccuucgccaucagcugcuuccugcugugcguggcccugcucggguucaucaugugggcgugccagaagggcaacauccggugcaacaucugcaucuga

SEQ ID NO: 75448 - RNA, 1701 nt, Artificial Sequence
  derived and/or modified CDS sequence (opt1) from hemagglutinin__InfluenzaA__AHL95949
augaagaccaucaucgcccugagcuacauccucugccugguguucgcccagaagcugcccggcaacgacaacuccaccgcgacgcucugccuggggcaccacgccgucccgaacggcaccaucgugaagaccaucaccaacgaccgcaucgaggugacgaacgccaccgagcugguccagaacagcuccaucggggagaucugcgacagcccccaccagauccucgacggcgagaacugcacccugaucgacgcccugcucggggacccccagugcgacggcuuccagaacaagaagugggaccuguucguggagcgguccaaggccuacagcaacugcuaccccuacgacgugccggacuacgcgucccugcgcagccucgucgccuccagcggcacccuggaguucaacaacgaguccuucaacuggacgggggugacccagaacggcaccagcuccgccugcauccggcgcagcaacaacuccuucuucagccggcugaacuggcucacccacuccaacuucaaguaccccgcccugaacaugacgaugcccaacaacgagcaguucgacaagcuguacaucuggggcgugcaccaccccgggaccgacaaggaccagaucuuccucuacgcgcagagcuccgggcgcaucaccgucagcaccaagcggagccagcaggccgugaucccgaacaucggcucccgcccccggauccgcaacauccccagccggaucuccaucuacuggacgaucgugaagcccggcgacauccugcugaucaacagcaccgggaaccucaucgccccgcgcggcuacuucaagauccgguccggcaagagcuccaucaugcgcagcgacgcccccaucgggaagugcaaguccgagugcaucacccccaacggcagcauccccaacgacaagccguuccagaacgucaaccggaucaccuacggggccugcccccgcuacgugaagcaguccacgcugaagcuggcgaccggcaugcggaacgugcccgagaagcagacccgcgggaucuucggcgccaucgccggguucaucgagaacggcugggagggcaugauggacgggugguacggcuuccggcaccagaacagcgaggggcgcggccaggccgccgaccucaaguccacccaggcggccaucgaccagaucaacgggaagcugaaccggcugaucggcaagacgaacgagaaguuccaccagaucgagaaggaguucagcgaggucgagggccgcauccaggaccucgagaaguacguggaggacaccaagaucgaccugugguccuacaacgccgagcugcucguggcccuggagaaccagcacaccaucgaccugaccgacagcgagaugaacaagcuguucgagaagacgaagaagcagcuccgcgagaacgccgaggacauggggaacggcugcuucaagaucuaccacaagugcgacaacgcgugcaucggguccauccggaacggcaccuacgaccacgacgucuaccgcgacgaggcccugaacaaccgguuccagaucaaggggguggagcucaagagcggcuacaaggacuggauccuguggaucuccuucgccaucagcugcuuccugcucugcguggcccugcugggcuucaucaugugggccugccagaaggggaacauccgcugcaacaucugcaucuga

SEQ ID NO: 75449 - RNA, 1701 nt, Artificial Sequence; identical to SEQ ID NO: 73892
  derived and/or modified CDS sequence (opt1) from hemagglutinin__InfluenzaA__AHL95961

SEQ ID NO: 75450 - RNA, 1701 nt, Artificial Sequence; identical to SEQ ID NO: 73892
  derived and/or modified CDS sequence (opt1) from hemagglutinin__InfluenzaA__AHL95973

SEQ ID NO: 75451 - RNA, 1701 nt, Artificial Sequence; identical to SEQ ID NO: 73892
  derived and/or modified CDS sequence (opt1) from hemagglutinin__InfluenzaA__AHL95985

SEQ ID NO: 75452 - RNA, 1701 nt, Artificial Sequence
  derived and/or modified CDS sequence (opt1) from hemagglutinin__InfluenzaA__AHL95997
augaagaccaucaucgcccugagcuacauccucugccugguguucgcccagaagcugcccggcaacgacaacuccaccgcgacgcucugccuggggcaccacgccgucccgaacggcaccaucgugaagaccaucaccaacgaccgcaucgaggugacgaacgccaccgagcugguccagaacagcuccaucggggagaucugcgacagcccccaccagauccucgacggcgagaacugcacccugaucgacgcccugcucggggacccccagugcgacggcuuccagaacaagaagugggaccuguucguggagcgguccaaggccuacagcaacugcuaccccuacgacgugccggacuacgcgucccugcgcagccucgucgccuccagcggcacccuggaguucaacaacgaguccuucaacugggccggggugacgcagaacggcaccagcuccagcugcauccggggguccaagagcuccuucuucagccgccugaacuggcucacccaccugaacuucaaguaccccgcccugaacgugaccaugcccaacaacgagcaguucgacaagcucuacaucuggggcguccaccaccccgggacggacaaggaccagaucuuccuguacgcgcaguccagcggccggaucaccgugagcaccaagcgcucccagcaggccgugaucccgaacaucggcagccggccccgcauccggaacauccccucccgcaucagcaucuacuggaccaucgucaagcccggggacauccugcucaucaacuccacgggcaaccugaucgccccgcggggguacuucaagauccgcagcggcaaguccagcaucaugcgguccgacgcccccaucggcaagugcaagagcgagugcaucacccccaacggguccauccccaacgacaagccguuccagaacgugaaccgcaucaccuacggcgccugcccccgguacgugaagcagagcacccugaagcucgcgacggggaugcgcaacguccccgagaagcagacccggggcaucuucggggccaucgccggcuucaucgagaacggcugggaggggaugauggacggcugguacggguuccgccaccagaacuccgagggccgggggcaggccgccgaccucaagagcacccaggcggccaucgaccagaucaacggcaagcugaaccgccugaucggcaagaccaacgagaaguuccaccagaucgagaaggaguucuccgagguggaggggcggauccaggaccuggagaaguacguggaggacacgaagaucgaccuguggagcuacaacgccgagcuccuggucgcccuggagaaccagcacaccaucgaccucaccgacuccgagaugaacaagcuguucgagaagaccaagaagcagcugcgcgagaacgccgaggacaugggcaacgggugcuucaagaucuaccacaagugcgacaacgcgugcaucggcagcauccgcaacgggacguacgaccacgacguguaccgggacgaggcccucaacaaccgcuuccagaucaagggcguggagcugaaguccggcuacaaggacuggauccuguggaucagcuucgccaucagcugcuuccuccugugcgucgcccugcucggguucaucaugugggccugccagaagggcaacauccggugcaacaucugcaucuga

SEQ ID NO: 75453 - RNA, 1701 nt, Artificial Sequence
  derived and/or modified CDS sequence (opt1) from hemagglutinin__InfluenzaA__AHL96021
augaagaccaucaucgcccugagcuacauccucugccugguguucgcccagaagcugcccggcaacgacaacuccaccgcgacgcucugccuggggcaccacgccgucccgaacggcaccaucgugaagaccaucaccaacgaccgcaucgaggugacgaacgccaccgagcugguccagaacagcuccaucggggagaucugcgacagcccccaccagauccucgacggcgagaacugcacccugaucgacgcccugcucggggacccccagugcgacggcuuccagaacaagaagugggaccuguucguggagcgguccaaggccuacagcaacugcuaccccuacgacgugccggacuacgcgucccugcgcagccucgucgccuccagcggcacccuggaguucaacaacgaguccuucaacugggccggggugacgcagaacggcaccagcuccgccugcauccgggggagcaaguccagcuucuucucccgccugaacuggcucacccaccugaacuucaaguaccccgcgcugaacgugaccaugcccaacaacgagcaguucgacaagcucuacaucuggggcguccaccaccccgggacggacaaggaccagaucuuccuguacgcccagagcuccggccggaucaccgugagcaccaagcgcagccagcaggccgugaucccgaacaucggcucccggccccgcauccggaacauccccagccgcaucuccaucuacuggaccaucgucaagcccggggacauccugcucaucaacagcacgggcaaccugaucgccccgcggggguacuucaagauccgcuccggcaagagcuccaucaugcggagcgacgcccccaucggcaagugcaaguccgagugcaucacccccaacgggagcauccccaacgacaagccguuccagaacgugaaccgcaucaccuacggcgcgugcccccgguacgugaagcaguccacccugaagcucgccacggggaugcgcaacguccccgagaagcagacccggggcaucuucggggccaucgccggcuucaucgagaacggcugggaggggaugauggacggcugguacggguuccgccaccagaacagcgagggccgggggcaggccgcggaccugaaguccacccaggccgccaucgaccagaucaacggcaagcugaaccgccucaucggcaagaccaacgagaaguuccaccagaucgagaaggaguucagcgagguggaggggcggauccaggaccuggagaaguacguggaggacacgaagaucgaccugugguccuacaacgccgagcuccuggucgcccuggagaaccagcacaccaucgaccucaccgacagcgagaugaacaagcuguucgagaagaccaagaagcagcugcgcgagaacgcggaggacaugggcaacgggugcuucaagaucuaccacaagugcgacaacgccugcaucggcuccauccgcaacgggacguacgaccacgacguguaccgggacgaggcccucaacaaccgcuuccagaucaagggcguggagcucaagagcggcuacaaggacuggauccuguggaucuccuucgccaucagcugcuuccugcugugcgucgcccugcucggguucaucaugugggcgugccagaagggcaacauccggugcaacaucugcaucuga

SEQ ID NO: 75454 - RNA, 1701 nt, Artificial Sequence; identical to SEQ ID NO: 73892
  derived and/or modified CDS sequence (opt1) from hemagglutinin__InfluenzaA__AHL96033

SEQ ID NO: 75455 - RNA, 1701 nt, Artificial Sequence; identical to SEQ ID NO: 74147
  derived and/or modified CDS sequence (opt1) from hemagglutinin__InfluenzaA__AHL96045

SEQ ID NO: 75456 - RNA, 1701 nt, Artificial Sequence; identical to SEQ ID NO: 74018
  derived and/or modified CDS sequence (opt1) from hemagglutinin__InfluenzaA__AHL96056

SEQ ID NO: 75457 - RNA, 1701 nt, Artificial Sequence; identical to SEQ ID NO: 73882
  derived and/or modified CDS sequence (opt1) from hemagglutinin__InfluenzaA__AHL96068

SEQ ID NO: 75458 - RNA, 1701 nt, Artificial Sequence; identical to SEQ ID NO: 73892
  derived and/or modified CDS sequence (opt1) from hemagglutinin__InfluenzaA__AHL96080

SEQ ID NO: 75459 - RNA, 1701 nt, Artificial Sequence
  derived and/or modified CDS sequence (opt1) from hemagglutinin__InfluenzaA__AHL96092
augaagaccaucaucgcccugagcuacauccucugccugguguucgcccagaagcugcccggcaacgacaacuccaccgcgacgcucugccuggggcaccacgccgucccgaacggcaccaucgugaagaccaucaccaacgaccgcaucgaggugacgaacgccaccgagcugguccagaacagcuccaucggggagaucugcgacagcccccaccagauccucgacggcgagaacugcacccugaucgacgcccugcucggggacccccagugcgacggcuuccagaacaagaagugggaccuguucaucgagcgguccaaggccuacagcaacugcuaccccuacgacgugccggacuacgcgucccugcgcagccucguggccuccagcggcacccuggaguucaacaacgaguccuucaacugggccggggucacgcagaacggcaccagcuccgccugcauccgggggagcaacuccagcuucuucucccgccugaacuggcucacccaccugaacuucaaguaccccgcgcugaacgugaccaugcccaacaacgagcaguucgacaagcucuacaucuggggcgugcaccaccccgggacggacaaggaccagaucuuccuguacgcccagagcuccggccggaucaccgucagcaccaagcgcagccagcaggccgugaucccgaacaucggcucccggccccgcauccggaacauccccagccgcaucuccaucuacuggaccaucgugaagcccggggacauccugcucaucaacagcacgggcaaccugaucgccccgcggggguacuucaagauccgcuccggcaagagcuccaucaugcggagcgacgcccccaucggcaagugcaaguccgagugcaucacccccaacgggagcauccccaacgacaagccguuccagaacgucaaccgcaucaccuacggcgcgugcccccgguacgugaagcaguccacccugaagcucgccacggggaugcgcaacgugcccgagaagcagacccggggcaucuucggggccaucgccggcuucaucgagaacggcugggaggggauggucgacggcugguacggguuccgccaccagaacagcgagggccgggggcaggccgcggaccugaaguccacccaggccgccaucgaccagaucaacggcaagcugaaccgccucaucggcaagaccaacgagaaguuccaccagaucgagaaggaguucagcgagguggaggggcggauccaggaccuggagaaguacguggaggacacgaagaucgaccugugguccuacaacgccgagcuccuggucgcccuggagaaccagcacaccaucgaccucaccgacagcgagaugaacaagcuguucgagaagaccaagaagcagcugcgcgagaacgcggaggacaugggcaacgggugcuucaagaucuaccacaagugcgacaacgccugcaucggcuccauccgcaacgggacguacgaccacgacguguaccgggacgaggcccucaacaaccgcuuccagaucaagggcguggagcucaagagcggcuacaaggacuggauccuguggaucuccuucgccaucagcugcuuccugcugugcgucgcccugcucggguucaucaugugggcgugccagaagggcaacauccggugcaacaucugcaucuga

SEQ ID NO: 75460 - RNA, 1701 nt, Artificial Sequence
  derived and/or modified CDS sequence (opt1) from hemagglutinin__InfluenzaA__AHL96104
augaagaccaucaucgcccugagcuacauccucugccugguguucgcccagaagcugcccggcaacgacaacuccaccgcgacgcucugccuggggcaccacgccgucccgaacggcaccaucgugaagaccaucaccaacgaccgcaucgaggugacgaacgccaccgagcugguccagaacagcuccaucggggagaucugcgacagcccccaccagauccucgacggcgagaacugcacccugaucgacgcccugcucggggacccccagugcgacggcuuccagaacaagaagugggaccuguucguggagcgguccaaggccuacagcaacugcuaccccuacgacgugccggacuacgcgucccugcgcagccucgucgccuccagcggcacccuggaguucaacaacgaguccuucaacuggacgggggugacccagaacggcaccagcuccgccugcauccggcgcagcaacuccagcuucuucucccggcugaacuggcucacccaccugaacuucaaguaccccgcccugaacgugacgaugcccaacaacgagcaguucgacaagcucuacaucuggggcguccaccaccccgggaccgacaaggaccagaucuuccuguacgcgcagagcuccgggcgcaucaccgugagcaccaagcggagccagcaggccgugaucccgaacaucggcucccgcccccggauccgcaacauccccagccggaucuccaucuacuggacgaucgucaagcccggcgacauccugcucaucaacagcaccgggaaccugaucgccccgcgcggcuacuucaagauccgguccggcaagagcuccaucaugcgcagcgacgcccccaucgggaagugcaaguccgagugcaucacccccaacggcagcauccccaacgacaagccguuccagaacgugaaccggaucaccuacggggccugcccccgcuacgugaagcaguccacgcugaagcucgcgaccggcaugcggaacguccccgagcgccagacccgggggaucuucggcgccaucgccggguucaucgagaacggcugggagggcaugguggacgggugguacggcuuccgccaccagaacagcgaggggcggggccaggccgccgaccugaaguccacccaggcggccaucgaccagaucaacgggaagcugaaccgccucaucggcaagacgaacgagaaguuccaccagaucgagaaggaguucagcgagguggagggccgcauccaggaccuggagaaguacgucgaggacaccaagaucgaccugugguccuacaacgccgagcuccugguggcccuggagaaccagcacaccaucgaccucaccgacagcgagaugaacaagcuguucgagaagacgaagaagcagcugcgggagaacgccgaggacauggggaacggcugcuucaagaucuaccacaagugcgacaacgcgugcaucggguccauccgcaacggcaccuacgaccacaacguguaccgggacgaggcccucaacaaccgcuuccagaucaagggggucgagcucaagagcggcuacaaggacuggauccuguggaucuccuucgccaucagcugcuuccugcugugcguggcccugcucggcuucaucaugugggccugccagaaggggaacauccggugcaacaucugcaucuga

SEQ ID NO: 75461 - RNA, 1701 nt, Artificial Sequence; identical to SEQ ID NO: 74506
  derived and/or modified CDS sequence (opt1) from hemagglutinin__InfluenzaA__AHL96116

SEQ ID NO: 75462 - RNA, 1701 nt, Artificial Sequence; identical to SEQ ID NO: 73882
  derived and/or modified CDS sequence (opt1) from hemagglutinin__InfluenzaA__AHL96128

SEQ ID NO: 75463 - RNA, 1701 nt, Artificial Sequence; identical to SEQ ID NO: 74018
  derived and/or modified CDS sequence (opt1) from hemagglutinin__InfluenzaA__AHL96152

SEQ ID NO: 75464 - RNA, 1701 nt, Artificial Sequence
  derived and/or modified CDS sequence (opt1) from hemagglutinin__InfluenzaA__AHL96164
augaagaccaucaucgcccugagcuacauccucugccugguguucgcccagaagcugcccggcaacgacaacuccaccgcgacgcucugccuggggcaccacgccgucccgaacggcaccaucgugaagaccaucaccaacgaccgcaucgaggugacgaacgccaccgagcugguccagaacagcuccaucggggagaucugcgacagcccccaccagauccucgacggcgagaacugcacccugaucgacgcccugcucggggacccccagugcgacggcuuccagaacaagaagugggaccuguucguggagcgguccaaggccuacagcaacugcuaccccuacgacgugccggacuacgcgucccugcgcagccucgucgccuccagcggcacccuggaguucaacaacgaguccuucaacugggccggggugacgcagaacggcaccagcuccgccugcauccgggggagcaacuccagcuucuucucccgccugaacuggcucacccaccugaacuucaaguaccccgcgcugaacgugaccaugcccaacaacgagcaguucgacaagcucuacaucuggggcguccaccaccccgggacggacaaggaccagaucuuccuguacgcccagagcuccggccggaucaccgugagcaccaagcgcagccagcaggccgugaucccgaacaucggcucccggccccgcauccggaacauccccagccgcaucuccaucuacuggaccaucgucaagcccggggacauccugcucaucaacagcacgggcaaccugaucgccccgcggggguacuucaagauccgcuccggcaagagcuccaucaugcggagcgacgcccccaucggcaagugcaaguccgagugcaucacccccaacgggagcauccccaacgacaagccguuccagaacgugaaccgcaucaccuacggcgcgugcccccgguacgugaagcaguccacccugaagcucgccacggggaugcgcaacguccccgagaagcagacccggggcaucuucggggccaucgccggcuucaucgagaacggcugggaggggaugguggacggcugguacggguuccgccaccagaacagcgagggccgggggcaggccgcggaccugaaguccacccaggccgccaucgaccagaucaacggcaagcugaaccgccucaucggcaagaccaacgagaaguuccaccagaucgagaaggaguucagcgagguggaggggcggauccaggaccuggagaaguacgucgaggacacgaagaucgaccugugguccuacaacgccgagcuccugguggcccuggagaaccagcacaccaucgaccucaccgacagcgagaugaacaagcuguucgagaagaccaagaagcagcugcgcgagaacgcggaggacaugggcaacgggugcuucaagaucuaccacaagugcgacaacgccugcaucggcuccauccgcaacgggacguacgaccacgacguguaccgggacgaggcccucaacaaccgcuuccagaucaagggcgucgagcucaagagcggcuacaagaacuggauccuguggaucuccuucgccaucagcugcuuccugcugugcguggcccugcucggguucaucaugugggcgugccagaagggcaacauccggugcaacaucugcaucuga

SEQ ID NO: 75465 - RNA, 1701 nt, Artificial Sequence; identical to SEQ ID NO: 74018
  derived and/or modified CDS sequence (opt1) from hemagglutinin__InfluenzaA__AHL96176

SEQ ID NO: 75466 - RNA, 1701 nt, Artificial Sequence; identical to SEQ ID NO: 74018
  derived and/or modified CDS sequence (opt1) from hemagglutinin__InfluenzaA__AHL96188

SEQ ID NO: 75467 - RNA, 1701 nt, Artificial Sequence
  derived and/or modified CDS sequence (opt1) from hemagglutinin__InfluenzaA__AHL96200
augaagaccaucaucgcccugagcuacauccucugccugguguucgcccagaagcugcccggcaacgacaacuccaccgcgacgcucugccuggggcaccacgccgucccgaacggcaccaucgugaagaccaucaccaacgaccgcaucgaggugacgaacgccaccgagcugguccagaacagcuccaucggggagaucugcgacagcccccaccaggugcucgacggcgagaacugcacccugaucgacgcccugcucggggacccccagugcgacggcuuccagaacaagaagugggaccuguucguggagcgguccaaggccuacagcaacugcuaccccuacgacgucccggacuacgcgucccugcgcagccucguggccuccagcggcacccuggaguucaacaacgaguccuucaacugggccggggugacgcagaacggcaccagcuccgccugcauccgggggagcaacuccagcuucuucucccgccugaacuggcucacccaccugaacuucaaguaccccgcgcugaacgucaccaugcccaacaacgagcaguucgacaagcucuacaucuggggcgugcaccaccccgggacggacaaggaccagaucuuccuguacgcccagagcuccggccggaucaccgugagcaccaagcgcagccagcaggccgucaucccgaacaucggcucccggccccgcauccggaacauccccagccgcaucuccaucuacuggaccaucgugaagcccggggacauccugcucaucaacagcacgggcaaccugaucgccccgcggggguacuucaagauccgcuccggcaagagcuccaucaugcggagcgacgcccccaucggcaagugcaaguccgagugcaucacccccaacgggagcauccccaacgacaagccguuccagaacgugaaccgcaucaccuacggcgcgugcccccgguacgucaagcaguccacccugaagcucgccacggggaugcgcaacgugcccgagaagcagacccggggcaucuucggggccaucgccggcuucaucgagaacggcugggaggggaugguggacggcugguacggguuccgccaccagaacagcgagggccgggggcaggccgcggaccugaaguccacccaggccgccaucgaccagaucaacggcaagcugaaccgccucaucggcaagaccaacgagaaguuccaccagaucgagaaggaguucagcgaggucgaggggcggauccaggaccuggagaaguacguggaggacacgaagaucgaccugugguccuacaacgccgagcuccugguggcccuggagaaccagcacaccaucgaccucaccgacagcgagaugaacaagcuguucgagaagaccaagaagcagcugcgcgagaacgcggaggacaugggcaacgggugcuucaagaucuaccacaagugcgacaacgccugcaucggcuccauccgcaacgggacguacgaccacgacgucuaccgggacgaggcccucaacaaccgcuuccagaucaagggcguggagcucaagagcggcuacaaggacuggauccuguggaucuccuucgccaucagcugcuuccugcugugcguggcccugcucggguucaucaugugggcgugccagaagggcaacauccggugcaacaucugcaucuga

SEQ ID NO: 75468 - RNA, 1701 nt, Artificial Sequence; identical to SEQ ID NO: 73882
  derived and/or modified CDS sequence (opt1) from hemagglutinin__InfluenzaA__AHL96212

SEQ ID NO: 75469 - RNA, 1701 nt, Artificial Sequence; identical to SEQ ID NO: 74491
  derived and/or modified CDS sequence (opt1) from hemagglutinin__InfluenzaA__AHL96224

SEQ ID NO: 75470 - RNA, 1701 nt, Artificial Sequence
  derived and/or modified CDS sequence (opt1) from hemagglutinin__InfluenzaA__AHL96236
augaagaccaucaucgcccugagcuacauccucugccugguguucgcccagaagcugcccggcaacgacaacuccaccgcgacgcucugccuggggcaccacgccgucccgaacggcaccaucgugaagaccaucaccaacgaccgcaucgaggugacgaacgccaccgagcugguccagaacagcuccaugggggagaucugcgacagcccccaccagauccucgacggcgagaacugcacccugaucgacgcccugcucggggacccccagugcgacggcuuccagaacaagaagugggaccuguucguggagcgguccaaggccuacagcaacugcuaccccuacgacgugccggacuacgcgucccugcgcagccucgucgccuccagcggcacccuggaguucaacaacgaguccuucaacuggacgggggugacccagaacggcaccagcuccgccugcauccggcgcagcaacuccagcuucuucucccggcugaacuggcucacccaccugaacuucaaguaccccgcccugaacgugacgaugcccaacaacgagcaguucgacaagcucuacaucuggggcguccaccaccccgggaccgacaaggaccagaucuuccuguacgcgcagagcuccgggcgcaucaccgugagcaccaagcggagccagcaggccgugaucccgaacaucggcucccgcccccggauccgcaacauccccagccggaucuccaucuacuggacgaucgucaagcccggcgacauccugcucaucaacagcaccgggaaccugaucgccccgcgcggcuacuucaagauccgguccggcaagagcuccaucaugcgcagcgacgcccccaucgggaagugcaaguccgagugcaucacccccaacggcagcauccccaacgacaagccguuccagaacgugaaccggaucaccuacggggccugcccccgcuacgugaagcaguccacgcugaagcucgcgaccggcaugcggaacguccccgagaagcagacccgcgggaucuucggcgccaucgccggguucaucgagaacggcugggagggcaugguggacgggugguacggcuuccggcaccagaacagcgaggggcgcggccaggccgccgaccugaaguccacccaggcggccaucgaccagaucaacgggaagcugaaccggcucaucggcaagacgaacgagaaguuccaccagaucgagaaggaguucagcgagguggagggccgcauccaggaccuggagaaguacgucgaggacaccaagaucgaccugugguccuacaacgccgagcuccugguggcccuggagaaccagcacaccaucgaccucaccgacagcgagaugaacaagcuguucgagaagacgaagaagcagcugcgcgagaacgccgaggacauggggaacggcugcuucaagaucuaccacaagugcgacaacgcgugcaucgaguccauccggaacgggaccuacgaccacgacguguaccgcgacgaggcccucaacaaccgguuccagaucaagggcgucgagcucaagagcggguacaagaacuggauccuguggaucuccuucgccaucagcugcuuccugcugugcguggcccugcucggcuucaucaugugggccugccagaagggcaacauccgcugcaacaucugcaucuga

SEQ ID NO: 75471 - RNA, 1701 nt, Artificial Sequence
  derived and/or modified CDS sequence (opt1) from hemagglutinin__InfluenzaA__AHL96248
augaagaccaucaucgcccugggcuacauccucugccugguguucgcccagaagcugcccgggaacgacaacagcaccgcgacgcucugccugggccaccacgccgucccgaacgggaccaucgugaagaccaucaccaacgaccgcaucgaggugacgaacgccaccgagcugguccagaacuccagcaucggcgagaucugcgacagcccccaccagauccucgacggggagaacugcacccugaucgacgcccugcucggcgacccccagugcgacggcuuccagaacaagaagugggaccuguucaucgagcggagcaaggccuacuccaacugcuaccccuacgacgugccggacuacgcgagccugcgcucccucguggccagcuccgggacccuggaguucaacaacgagagcuucaacuggacgggcgucacccagaacgggaccuccagcgccugcauccggcgcuccaacagcuccuucuucagccggcugaacuggcucacccaccugaacuucaaguaccccgcccugaacgugacgaugcccaacaacgagcaguucgacaagcucuacaucuggggcgugcaccaccccgggaccgacaaggaccagaucuuccuguacgcgcaguccagcggccgcaucaccgucuccaccaagcggagccagcaggccgugaucccgaacaucggcagccgcccccggauccgcaacauccccucccggaucagcaucuacuggacgaucgugaagcccggggacauccugcucaucaacuccaccggcaaccugaucgccccgcgcggguacuucaagauccggagcggcaaguccagcaucaugcgcuccgacgcccccaucggcaagugcaagagcgagugcaucacccccaacggguccauccccaacgacaagccguuccagaacgucaaccggaucaccuacggcgccugcccccgcuacgugaagcagagcacgcugaagcucgcgaccgggaugcggaacgugcccgagaagcagacccgcggcaucuucggggccaucgccggcuucaucgagaacggcugggaggggauggucgacggcugguacggguuccggcaccagaacuccgagggccgcgggcaggccgccgaccugaaguccacccaggcggccaucgaccagaucaacggcaagcugaaccggcucaucggcaagacgaacgagaaguuccaccagaucgagaaggaguucuccgagguggaggggcgcauccaggaccuggagaaguacguggaggacaccaagaucgaccuguggagcuacaacgccgagcuccuggucgcccuggagaaccagcacaccaucgaccucaccgacuccgagaugaacaagcuguucgagaagacgaagaagcagcugcgcgagaacgccgaggacaugggcaacgggugcuucaagaucuaccacaagugcgacaacgcgugcaucggcagcauccggaacgggaccuacgaccacgacguguaccgcgacgaggcccucaacaaccgguuccagaucaagggcguggagcugaaguccggcuacaaggacuggauccuguggaucagcuucgccaucuccugcuuccuccugugcgucgcccugcucggguucaucaugugggccugccagaagggcaacauccgcugcaacaucugcaucuga

SEQ ID NO: 75472 - RNA, 1701 nt, Artificial Sequence; identical to SEQ ID NO: 74018
  derived and/or modified CDS sequence (opt1) from hemagglutinin__InfluenzaA__AHL96260

SEQ ID NO: 75473 - RNA, 1701 nt, Artificial Sequence; identical to SEQ ID NO: 73882
  derived and/or modified CDS sequence (opt1) from hemagglutinin__InfluenzaA__AHL96274

SEQ ID NO: 75474 - RNA, 1701 nt, Artificial Sequence; identical to SEQ ID NO: 74018
  derived and/or modified CDS sequence (opt1) from hemagglutinin__InfluenzaA__AHL96304

SEQ ID NO: 75475 - RNA, 1701 nt, Artificial Sequence; identical to SEQ ID NO: 73859
  derived and/or modified CDS sequence (opt1) from hemagglutinin__InfluenzaA__AHL96318

SEQ ID NO: 75476 - RNA, 1701 nt, Artificial Sequence; identical to SEQ ID NO: 74018
  derived and/or modified CDS sequence (opt1) from hemagglutinin__InfluenzaA__AHL96330

SEQ ID NO: 75477 - RNA, 1701 nt, Artificial Sequence; identical to SEQ ID NO: 74021
  derived and/or modified CDS sequence (opt1) from hemagglutinin__InfluenzaA__AHL96342

SEQ ID NO: 75478 - RNA, 1701 nt, Artificial Sequence
  derived and/or modified CDS sequence (opt1) from hemagglutinin__InfluenzaA__AHL96354
augaagaccaucaucgcccugagcuacauccucugccugguguucgcccagaagcugcccggcaacgacaacuccaccgcgacgcucugccuggggcaccacgccgucccgaacggcaccaucgugaagaccaucaccaacgaccgcaucgaggugacgaacgccaccgagcugguccagaacagcuccaucggggagaucugcgacagcccccaccagauccucgacggcgagaacugcacccugaucgacgcccugcucggggacccccagugcgacggcuuccagaacaagaagugggaccuguucguggagcgguccaaggccuacagcaacugcuaccccuacgacgugccggacuacgcgucccugcgcagccucgucgccuccagcggcacccuggaguucaacaacgaguccuucaacugggccggggugacgcagaacggcaccagcuccgccugcauccgggggagcaacuccagcuucuucucccgccugaacuggcucacccaccugaacuucaaguaccccgcgcugaacgugaccaugcccaacaacgagcaguucgacaagcucuacaucuggggcguccaccaccccgggacggacaaggaccagaucuuccuguacgcccagagcuccggccggaucaccgugagcaccaagcgcagccagcaggccgugaucccgaacaucggcucccggccccgcauccggaacauccccagccgcaucuccaucuacuggaccaucgucaagcccggggacauccugcucaucaacagcacgggcaaccugaucgccccgcggggguacuucaagauccgcuccggcaagagcuccaucaugcggagcgacgcccccaucggcaagugcaaguccgagugcaucacccccaacgggagcauccccaacgacaagccguuccagaacgugaaccgcaucaccuacggcgcgugcccccgguacgugaagcaguccacccugaagcucgccacggggaugcgcaacguccccgagaagcagacccggggcaucuucggggccaucgccggcuucaucgagaacggcugggaggggaugguggacggcugguacggguuccgccaccugaacagcgagggccgggggcaggccgcggaccugaaguccacccaggccgccaucgaccagaucaacggcaagcucaaccgccugaucggcaagaccaacgagaaguuccaccagaucgagaaggaguucagcgagguggaggggcggauccaggaccuggagaaguacgucgaggacacgaagaucgaccucugguccuacaacgccgagcugcugguggcccucgagaaccagcacaccaucgaccugaccgacagcgagaugaacaagcuguucgagaagaccaagaagcagcuccgcgagaacgcggaggacaugggcaacgggugcuucaagaucuaccacaagugcgacaacgccugcaucggcuccauccgcaacgggacguacgaccacgacguguaccgggacgaggcccugaacaaccgcuuccagaucaagggcgucgagcucaagagcggcuacaaggacuggauccuguggaucuccuucgccaucagcugcuuccugcugugcguggcccuccugggguucaucaugugggcgugccagaagggcaacauccggugcaacaucugcaucuga

SEQ ID NO: 75479 - RNA, 1701 nt, Artificial Sequence
  derived and/or modified CDS sequence (opt1) from hemagglutinin__InfluenzaA__AHL96366
augaagaccaucaucgcccugagcuacauccucugccugguguucgcccagaagcugcccgagaacgacaacuccaccgcgacgcucugccugggccaccacgccgucccgaacgggaccaucgugaagaccaucaccaacgaccgcaucgaggugacgaacgccaccgagcugguccagaacagcuccaucggcgagaucugcgacagcccccaccagauccucgacggggagaacugcacccugaucgacgcccugcucggcgacccccagugcgacggguuccagaacaagaagugggaccuguucguggagcgguccaaggccuacagcaacugcuaccccuacgacgugccggacuacgcgucccugcgcagccucgucgccuccagcggcacccuggaguucaacaacgaguccuucaacugggccggcgugacgcagaacgggaccagcuccgccugcauccggggcagcaacuccagcuucuucucccgccugaacuggcucacccaccugaacuucaaguaccccgcgcugaacgugaccaugcccaacaacgagcaguucgacaagcucuacaucuggggcguccaccaccccgggacggacaaggaccagaucuuccuguacgcccagagcuccgggcggaucaccgugagcaccaagcgcagccagcaggccgugaucccgaacaucggcucccggccccgcauccggaacauccccagccgcaucuccaucuacuggaccaucgucaagcccggcgacauccugcucaucaacagcacggggaaccugaucgccccgcggggcuacuucaagauccgcuccggcaagagcuccaucaugcggagcgacgcccccaucgggaagugcaaguccgagugcaucacccccaacggcagcauccccaacgacaagccguuccagaacgugaaccgcaucaccuacggggcgugcccccgguacgugaagcaguccacccugaagcucgccacgggcaugcgcaacguccccgagaagcagacccgggggaucuucggcgccaucgccggguucaucgagaacggcugggagggcaugguggacgggugguacggcuuccgccaccagaacagcgaggggcggggccaggccgcggaccugaaguccacccaggccgccaucgaccagaucaacgggaagcugaaccgccucaucggcaagaccaacgagaaguuccaccagaucgagaaggaguucagcgagguggagggccggauccaggaccuggagaaguacgucgaggacacgaagaucgaccugugguccuacaacgccgagcuccugguggcccuggagaaccagcacaccaucgaccucaccgacagcgagaugaacaagcuguucgagaagaccaagaagcagcugcgcgagaacgcggaggacauggggaacggcugcuucaagaucuaccacaagugcgacaacgccugcaucggguccauccgcaacggcacguacgaccacgacguguaccgggacgaggcccucaacaaccgcuuccagaucaagggggucgagcucaagagcggcuacaaggacuggauccuguggaucuccuucgccaucagcugcuuccugcugugcguggcccugcucggcuucaucaugugggcgugccagaaggggaacauccggugcaacaucugcaucuga

SEQ ID NO: 75480 - RNA, 1701 nt, Artificial Sequence; identical to SEQ ID NO: 73892
  derived and/or modified CDS sequence (opt1) from hemagglutinin__InfluenzaA__AHL96378

SEQ ID NO: 75481 - RNA, 1701 nt, Artificial Sequence; identical to SEQ ID NO: 73882
  derived and/or modified CDS sequence (opt1) from hemagglutinin__InfluenzaA__AHL96390

SEQ ID NO: 75482 - RNA, 1701 nt, Artificial Sequence
  derived and/or modified CDS sequence (opt1) from hemagglutinin__InfluenzaA__AHL96402
augaagaccaucaucgcccugagcuacauccucugccugguguucgcccagaagauccccggcaacgacaacuccaccgcgacgcugugccucgggcaccacgccgucccgaacggcaccaucgugaagaccaucaccaacgaccgcaucgaggugacgaacgccaccgagcugguccagaacagcuccaucggggagaucugcgacagcccccaccagauccuggacggcgagaacugcacccucaucgacgcccugcugggggacccccagugcgacggcuuccagaacaagaagugggaccucuucguggagcgguccaaggccuacagcaacugcuaccccuacgacgugccggacuacgcgucccugcgcagccuggucgccuccagcggcacccucgaguucaacaacgaguccuucaacuggacgggggugacccagaacggcaccagcuccgccugcauccgggggagcaacuccagcuucuucucccgccugaacuggcugacccaccucaacuucaaguaccccgcccugaacgugacgaugcccaacaacgagcaguucgacaagcuguacaucuggggcguccaccaccccgggaccgacaaggaccagaucuuccucuacgcgcagagcuccggccggaucaccgugagcaccaagcgcagccagcaggccgugaucccgaacaucggcucccggccccgcauccggaacauccccagccgcaucuccaucuacuggacgaucgucaagcccggggacauccugcugaucaacagcaccggcaaccucaucgccccgcggggguacuucaagauccgcuccggcaagagcuccaucaugcggagcgacgcccccaucggcaagugcaaguccgagugcaucacccccaacgggagcauccccaacgacaagccguuccagaacgugaaccgcaucaccuacggcgccugcccccgguacgugaagcaguccacgcugaagcuggcgaccgggaugcgcaacguccccgagaagcagacccggggcaucuucggggccaucgccggcuucaucgagaacggcugggaggggaugguggacggcugguacggguuccgccaccagaacagcgagggccgggggcaggccgccgaccucaaguccacccaggcggccaucgaccagaucaacggcaagcugaaccgccugaucggcaagacgaacaagaaguuccaccagaucgagaaggaguucagcgagguggaggggcggauccaggaccucgagaaguacgucgaggacaccaagaucgaccugugguccuacaacgccgagcugcucguggcccuggagaaccagcacaccaucgaccugaccgacagcgagaugaacaagcuguucgagaagacgaagaagcagcuccgcgagaacgccgaggacaugggcaacgggugcuucaagaucuaccacaagugcgacaacgcgugcaucggcuccauccgcaacgggaccuacgaccacgacguguaccgggacgaggcccugaacaaccgcuuccagaucaagggcgucgagcucaagagcggcuacaaggacuggauccuguggaucuccuucgccaucagcugcuuccugcucugcguggcccugcugggguucaucaugugggccugccagaagggcaacauccggugcaacaucugcaucuga

SEQ ID NO: 75483 - RNA, 1701 nt, Artificial Sequence; identical to SEQ ID NO: 73892
  derived and/or modified CDS sequence (opt1) from hemagglutinin__InfluenzaA__AHL96414

SEQ ID NO: 75484 - RNA, 1701 nt, Artificial Sequence; identical to SEQ ID NO: 74018
  derived and/or modified CDS sequence (opt1) from hemagglutinin__InfluenzaA__AHL96426

SEQ ID NO: 75485 - RNA, 1701 nt, Artificial Sequence
  derived and/or modified CDS sequence (opt1) from hemagglutinin__InfluenzaA__AHL96438
augaagaccaucaucgcccugagcuacauccucugccugguguucgcccaggagcugcccggcaacgacgacuccaccgcgacgcucugccuggggcaccacgccgucccgaacggcaccaucgugaagaccaucaccaacgaccagaucgaggugacgaacgccaccgagcugguccagagcuccagcaccggggagaucugcaacagcccccaccagauccucgacggcgagaacugcacccugaucgacgcccugcucggggacccccagugcgacggcuuccagaacaagaagugggaccuguucguggagcgcagcaaggcccacuccaacugcuaccccuacgacgugccggacuacgcgagccugcggucccucgucgccagcuccggcacgcuggaguucaacaacgagagcuucaacuggaccggggugacccagaacggcaccuccagcgccugcauccgccgguccaacaacagcuucuucucccgccugaacuggcucacgcaccugaacuucaaguaccccgcccugaacgugaccaugcccaacaacgagcaguucgacaagcucuacaucuggggcguccaccaccccgggaccgacaaggaccagaucuuccuguacgcgcaggccagcgggcggaucaccguguccacgaagcgcagccagcaggccgugaucccgaacaucggcagccggccccgcguccggaacauccccucccgcgugagcaucuacuggaccaucgugaagcccggcgacauccugcucaucaacuccaccgggaaccugaucgccccgcggggcuacuucaagauccgcagcgggaaguccagcaucaugcgguccgacgcccccaucggcaagugcagcuccgcgugcaucacccccaacggcagcauccccaacgacaagccguuccagaacgucaaccgcaucacguacggggccugcccccgguacgugaagcagaacacccugaagcucgccaccggcaugcgcaacgugcccgagaagcagacccgggggaucuucggcgccaucgccggguucaucgagaacggcugggagggcauggucgacgggugguacggcuuccgccaccagaacuccgaggggcggggccaggcggccgaccugaaguccacgcaggccgccaucgaccagaucaacgggaagcugaaccgccucaucggcaagaccaacgagaaguuccaccagaucgagaaggaguucuccgagguggagggccggauccaggaccuggagaaguacguggaggacaccaagaucgaccuguggagcuacaacgccgagcuccuggucgcgcuggagaaccagcacaccaucgaccucacggacuccgagaugaacaagcuguucgagaagaccaagaagcagcugcgcgagaacgccgaggacauggggaacggcugcuucaagaucuaccacaagugcgacaacgccugcaucgggagcauccgcaacggcaccuacgaccacgacguguaccgggacgaggcccucaacaaccgcuuccagaucaaggggguggagcugaaguccggcuacaaggacuggauccuguggaucagcuucgccaucuccugcuuccuccugugcgucgcgcugcucggcuucaucaugugggccugccagaaggggaacauccggugcaacaucugcaucuga

SEQ ID NO: 75486 - RNA, 1701 nt, Artificial Sequence; identical to SEQ ID NO: 73892
  derived and/or modified CDS sequence (opt1) from hemagglutinin__InfluenzaA__AHL96450

SEQ ID NO: 75487 - RNA, 1701 nt, Artificial Sequence; identical to SEQ ID NO: 74018
  derived and/or modified CDS sequence (opt1) from hemagglutinin__InfluenzaA__AHL96462

SEQ ID NO: 75488 - RNA, 1701 nt, Artificial Sequence
  derived and/or modified CDS sequence (opt1) from hemagglutinin__InfluenzaA__AHL96474
augaaggccauccugguggucaugcucuacaccuucgccaccgcgaacgccgacacgcugugcaucggcuaccacgccaacaacagcaccgacaccguggacaccgugcuggagaagaacgucacggugacccacuccgugaaccuccuggaggacaagcacaacgggaagcugugcaagcuccgcggcgucagcccccugcaccuggggaagugcaacaucgccggcuggauccucgggaacccggagugcgagucccugagcaccgccuccagcugguccuacaucguggagaccagcggcuccgacaacggcacgugcuaccccggggacuucaucgacuacgaggagcugcgggagcagcucagcuccgugagcuccuucgagcgcuucgagaucuuccccaagaccagcuccuggcccaaccacgacagcaacaagggcgucaccgcggccugcccgcacgccggggccaagggcuucuacaagaaccugaucuggcuggugaagaaggggaacuccuaccccaagcucagcaucuccuacaucaacgacaagggcaaggaggugcugguccuguggggcauccaccaccccagcaccacggcggaccagcagagccucuaccagaacgccgacaccuacguguucguggggaccucccgguacagcaagaaguucaagcccgagaucgccauccgcccgaagguccgggaccaggagggccgcaugaacuacuacuggacccugguggagcccggggacaagaucacguucgaggccaccggcaaccugguggucccccgguacgccuucgcgauggagcgcaacgccggcuccgggaucaucaucagcgacacccccgugcacgacugcaacaccacgugccagaccccgaagggcgccaucaacaccucccuccccuuccagaacauccaccccaucaccaucgggaagugccccaaguacgucaagagcacgaagcugcggcuggccaccggccuccgcaacgugccguccauccagagccgggggcuguucggcgccaucgcgggcuucaucgagggcggguggaccgggaugguggacggcugguacggguaccaccaccagaacgagcagggcuccggcuacgccgccgaccucaagagcacccagaacgccaucgacaagaucacgaacaaggugaacuccgucaucgagaagaugaacacccaguucaccgccguggggaaggaguucaaccaccuggagaagcgcaucgagaaccugaacaagaaggucgacgacggcuuccuggacaucuggaccuacaacgcggagcuccuggugcugcucgagaacgagcggacgcuggacuaccacgacagcaacgugaagaaccuguacgagaagguccgcaaccagcucaagaacaacgccaaggagaucgggaacggcugcuucgaguucuaccacaagugcgacaacacgugcauggaguccgugaagaacgggaccuacgacuaccccaaguacagcgaggaggccaagcugaaccgggaggagaucgacggcgugaagcuggaguccacccgcaucuaccagauccucgccaucuacagcaccgccgcguccagccugguccugguggugucccucggcgccaucagcuucuggaugugcagcaacgggucccugcagugccggaucugcaucuga

SEQ ID NO: 75489 - RNA, 1701 nt, Artificial Sequence
  derived and/or modified CDS sequence (opt1) from hemagglutinin__InfluenzaA__AHL96485
augaagaccaucaucgcccugagcuacauccucugccugguguucgcccagaagcugcccggcaacgacaacuccaccgcgacgcucugccuggggcaccacgccgucccgaacggcaccaucgugaagaccaucaccaacgaccgcaucgaggugacgaacgccaccgagcugguccagaacagcuccaucggggagaucugcgacagcccccaccagauccucgacggcgagaacugcacccugaucgacgcccugcucggggacccccagugcgacggcuuccagaacaagaagugggaccuguucguggagcgguccaaggccuacagcaacugcuaccccuacgacgugccggacuacgcgucccugcgcagccucgucgccuccagcggcacccuggaguucaacaacgaguccuucaacuggacgggggugacccagaacggcaccagcuccgccugcauccggcgcagcaacuccagcuucuucucccggcugaacuggcucacccaccugaacuucaaguaccccgcccugaacgugacgaugcccaacaacgagcaguucgacaagcucuacaucuggggcguccaccaccccgggaccgacaaggaccagaucuuccuguacgcgcagagcuccgggcgcaucaccgugagcaccaagcggagccagcaggccgugaucccgaacaucggcucccgcccccggauccgcaacauccccagccggaucuccaucuacuggacgaucgucaagcccggcgacauccugcucaucaacagcaccgggaaccugaucgccccgcgcggcuacuucaagauccgguccggcaagagcuccaucaugaaguccgacgcccccaucgggaagugcaagagcgagugcaucacccccaacggcagcauccccaacgacaagccguuccagaacgugaaccgcaucaccuacggggccugcccccgguacgugaagcaguccacgcugaagcucgcgaccggcaugcgcaacguccccgagaagcagacccgggggaucuucggcgccaucgccggguucaucgagaacggcugggagggcaugguggacgggugguacggcuuccgccaccagaacagcgaggggcggggccaggccgccgaccugaaguccacccaggcggccaucgaccagaucaacgggaagcugaaccgccucaucggcaagacgaacgagaaguuccaccagaucgagaaggaguucagcgagguggagggccggauccaggaccuggagaaguacgucgaggacaccaagaucgaccugugguccuacaacgccgagcuccugguggcccuggagaaccagcacaccaucgaccucaccgacagcgagaugaacaagcuguucgagaagacgaagaagcagcugcgcgagaacgccgaggacauggggaacggcugcuucaagaucuaccacaagugcgacaacgcgugcaucggguccauccgcaacggcaccuacgaccacaacguguaccgggacgaggcccucaacaaccgcuuccagaucaagggggucgagcucaagagcggcuacaaggacuggauccuguggaucuccuucgccaucagcugcuuccugcugugcguggcccugcucggcuucaucaugugggccugccagaaggggaacauccggugcaacaucugcaucuga

SEQ ID NO: 75490 - RNA, 1701 nt, Artificial Sequence; identical to SEQ ID NO: 74018
  derived and/or modified CDS sequence (opt1) from hemagglutinin__InfluenzaA__AHL96497

SEQ ID NO: 75491 - RNA, 1701 nt, Artificial Sequence; identical to SEQ ID NO: 73892
  derived and/or modified CDS sequence (opt1) from hemagglutinin__InfluenzaA__AHL96509

SEQ ID NO: 75492 - RNA, 1701 nt, Artificial Sequence; identical to SEQ ID NO: 73859
  derived and/or modified CDS sequence (opt1) from hemagglutinin__InfluenzaA__AHL96521

SEQ ID NO: 75493 - RNA, 1701 nt, Artificial Sequence; identical to SEQ ID NO: 74018
  derived and/or modified CDS sequence (opt1) from hemagglutinin__InfluenzaA__AHL96533

SEQ ID NO: 75494 - RNA, 1701 nt, Artificial Sequence; identical to SEQ ID NO: 73882
  derived and/or modified CDS sequence (opt1) from hemagglutinin__InfluenzaA__AHL96545

SEQ ID NO: 75495 - RNA, 1701 nt, Artificial Sequence
  derived and/or modified CDS sequence (opt1) from hemagglutinin__InfluenzaA__AHL96569
augaagaccaucaucgcccugagcuacauccucugccugguguucgcccagaagcugcccggcaacgacaacuccaccgcgacgcucugccuggggcaccacgccgucccgaacggcaccaucgugaagaccaucaccaacgaccgcaucgaggugacgaacgccaccgagcugguccagaacagcuccaucggggagaucugcgacagcccccaccagauccucgacggcgagaacugcacccugaucgacgcccugcucggggacccccagugcgacggcuuccagaacaagaagugggaccuguucguggagcgguccaaggccuacagcaacugcuaccccuacgacgugccggacuacgcgucccugcgcagccucgucgccuccagcggcacccuggaguucaacaacgaguccuucaacuggacgggggugacccagaacggcaccagcuccgccugcauccggcgcagcaacuccagcuucuucucccggcugaacuggcucacccaccugaacuucaaguaccccgcccugaacgugacgaugcccaacaacgagcaguucgacaagcucuacaucuggggcguccaccaccccgggaccgacaaggaccagaucuuccuguacgcgcagagcuccgggcgcgugaccgugagcaccaagcggagccagcaggccgucaucccgaacaucggcucccgcccccggauccgcaacauccccagccggaucuccaucuacuggacgaucgugaagcccggcgacauccugcucaucaacagcaccgggaaccugaucgccccgcgcggcuacuucaagauccgguccggcaagagcuccaucaugcgcagcgacgcccccaucgggaagugcaaguccgagugcaucacccccaacggcagcauccccaacgacaagccguuccagaacgugaaccggaucaccuacggggccugcccccgcuacgucaagcaguccacgcugaagcucgcgaccggcaugcggaacgugcccgagaagcagacccgcgggaucuucggcgccaucgccggguucaucgagaacggcugggagggcaugguggacgggugguacggcuuccggcaccagaacagcgaggggcgcggccaggccgccgaccugaaguccacccaggcggccaucgaccagaucaacgggaagcugaaccggcucaucggcaagacgaacgagaaguuccaccagaucgagaaggaguucagcgaggucgagggccgcauccaggaccuggagaaguacguggaggacaccaagaucgaccugugguccuacaacgccgagcuccugguggcccuggagaaccagcacaccaucgaccucaccgacagcgagaugaacaagcuguucgagaagacgaagaagcagcugcgcgagaacgccgaggacauggggaacggcugcuucaagaucuaccacaagugcgacaacgcgugcaucggguccauccggaacggcaccuacgaccacgacgucuaccgcgacgaggcccucaacaaccgguuccagaucaaggggguggagcucaagagcggcuacaaggacuggauccuguggaucuccuucgccaucagcugcuuccugcugugcguggcccugcucggcuucaucaugugggccugccagaaggggaacauccgcugcaacaucugcaucuga

SEQ ID NO: 75496 - RNA, 1701 nt, Artificial Sequence; identical to SEQ ID NO: 75488
  derived and/or modified CDS sequence (opt1) from hemagglutinin__InfluenzaA__AHL96581

SEQ ID NO: 75497 - RNA, 1701 nt, Artificial Sequence
  derived and/or modified CDS sequence (opt1) from hemagglutinin__InfluenzaA__AHL96592
augaagaccaucaucgcccugggcuacauccucugccugguguucgcccagaagauccccgggaacgacaacagcaccgcgacgcugugccucggccaccacgccgucccgaacgggaccaucgugaagaccaucaccaacgaccgcaucgaggugacgaacgccaccgagcugguccagaacuccagcaucggcgagaucugcgacagcccccaccagauccuggacggggagaacugcacccucaucgacgcccugcugggcgacccccagugcgacggcuuccagaacaagaagugggaccucuucaucgagcgguccaaggccuacuccaacugcuaccccuacgacgugccggacuacgcgagccugcgcucccugguggccagcuccgggacccucgaguucaacaacgagagcuucaacuggacgggcgucacccagaacgggaccuccagcgccugcauccggcgcuccaacagcuccuucuucagccggcugaacuggcugacccaccucaacuucaaguaccccgcccugaacgugacgaugcccaacaacgagcaguucgacaagcuguacaucuggggcgugcaccaccccgggaccgacaaggaccagaucuuccucuacgcgcaguccagcggccgcaucaccgucuccaccaagcggagccagcaggccgugaucccgaacaucggcagccgcccccggauccgcaacauccccucccggaucagcaucuacuggacgaucgugaagcccggggacauccugcugaucaacuccaccggcaaccucaucgccccgcgcggguacuucaagauccggagcggcaaguccagcaucaugcgcuccgacgcccccaucggcaagugcaagagcgagugcaucacccccaacggguccauccccaacgacaagccguuccagaacgucaaccggaucaccuacggcgccugcccccgcuacgugaagcagagcacgcugaagcuggcgaccgggaugcggaacgugcccgagaagcagacccgcggcaucuucggggccaucgccggcuucaucgagaacggcugggaggggauggucgacggcugguacggguuccggcaccagaacuccgagggccgcgggcaggccgccgaccucaagagcacccaggcggccaucgaccagaucaacggcaagcugaaccggcugaucggcaagacgaacgagaaguuccaccagaucgagaaggaguucuccgagguggaggggcgcauccaggaccucgagaaguacguggaggacaccaagaucgaccuguggagcuacaacgccgagcugcucgucgcccuggagaaccagcacaccaucgaccugaccgacuccgagaugaacaagcuguucgagaagacgaagaagcagcuccgcgagaacgccgaggacaugggcaacgggugcuucaagaucuaccacaagugcgacaacgcgugcaucggcagcauccggaacgggaccuacgaccacgacguguaccgcgacgaggcccugaacaaccgguuccagaucaagggcguggagcucaaguccggcuacaaggacuggauccuguggaucagcuucgccaucuccugcuuccugcucugcgucgcccugcugggguucaucaugugggccugccagaagggcaacauccgcugcaacaucugcaucuga

SEQ ID NO: 75498 - RNA, 1701 nt, Artificial Sequence; identical to SEQ ID NO: 74018
  derived and/or modified CDS sequence (opt1) from hemagglutinin__InfluenzaA__AHL96604

SEQ ID NO: 75499 - RNA, 1701 nt, Artificial Sequence; identical to SEQ ID NO: 74018
  derived and/or modified CDS sequence (opt1) from hemagglutinin__InfluenzaA__AHL96616

SEQ ID NO: 75500 - RNA, 1701 nt, Artificial Sequence
  derived and/or modified CDS sequence (opt1) from hemagglutinin__InfluenzaA__AHL96628
augaagaccaucaucgcccugagcuacauccucugccugguguucgcccagaagcugcccggcaacgacaacuccaccgcgacgcucugccuggggcaccacgccgucccgaacggcaccaucgugaagaccaucaccaacgaccgcaucgaggugacgaacgccaccgagcugguccagaacagcuccaucggggagaucugcgacagcccccaccagauccucgacggcgagaacugcacccugaucgacgcccugcucggggacccccagugcgacggcuuccagaacaagaagugggaccuguucguggagcgguccaaggccuacagcaacugcuaccccuacgacgugccggacuacgcgucccugcgcagccucgucgccuccagcggcacccuggaguucaacaacgaguccuucaacuggacgggggugacccagaacggcaccagcuccgccugcauccggcgcagcaacuccagcuucuucucccggcugaacuggcucacccaccugaacuucaaguaccccgcccugaacgugacgaugcccaacaacgagcaguucgacaagcucuacaucuggggcguccaccaccccgggaccgacaaggaccagaucuuccuguacgcgcagagcuccgggcgcaucaccgugagcaccaagcggagccagcaggccgugaucccgaacaucggcucccgcccccggauccgcaacauccccagccggaucuccaucuacuggacgaucgucaagcccggcgacauccugcucaucaacagcaccgggaaccugaucgccccgcgcggcuacuucaagauccgguccggcaagagcuccaucaugcgcagcgacgcccccaucgggaagugcaaguccgagugcaucacccccaacggcagcauccccaacgacaagccguuccagaacgugaaccggaucaccuacggggccugcccccgcuacgugaagcaguccacgcugaagcucgcgaccggcaugcggaacguccccgagaagcagacccgcgggaucuucggcgccaucgccggguucaucgagaacggcuggggcgggaugguggacggcugguacggguuccggcaccagaacagcgagggccgcgggcaggccgccgaccugaaguccacccaggcggccaucgaccagaucaacggcaagcugaaccggcucaucggcaagacgaacgagaaguuccaccagaucgagaaggaguucagcgagguggaggggcgcauccaggaccuggagaaguacgucgaggacaccaagaucgaccugugguccuacaacgccgagcuccugguggcccuggagaaccagcacaccaucgaccucaccgacagcgagaugaacaagcuguucgagaagacgaagaagcagcugcgcgagaacgccgaggacaugggcaacgggugcuucaagaucuaccacaagugcgacaacgcgugcaucggcuccauccggaacgggaccuacgaccacaacguguaccgcgacgaggcccucaacaaccgguuccagaucaagggcgucgagcucaagagcggcuacaaggacuggauccuguggaucuccuucgccaucagcugcuuccugcugugcguggcccugcucggguucaucaugugggccugccagaagggcaacauccgcugcaacaucugcaucuga

SEQ ID NO: 75501 - RNA, 1701 nt, Artificial Sequence; identical to SEQ ID NO: 75489
  derived and/or modified CDS sequence (opt1) from hemagglutinin__InfluenzaA__AHL96640

SEQ ID NO: 75502 - RNA, 1701 nt, Artificial Sequence
  derived and/or modified CDS sequence (opt1) from hemagglutinin__InfluenzaA__AHL96652
augaagaccaucaucgcccugagcuacauccucugccugguguucgcccagaagcugcccggcaacgacaacuccaccgcgacgcucugccuggggcaccacgccgucccgaacggcaccaucgugaagaccaucaccaacgaccgcaucgaggugacgaacgccaccgagcugguccaggacagcuccaucggggagaucugcgacagcccccaccagauccucgacggcgagaacugcacccugaucgacgcccugcucggggacccccagugcgacggcuuccagaacaagaagugggaccuguucguggagcgguccaaggccuacagcaacugcuaccccuacgacgugccggacuacgcgucccugcgcagccucgucgccuccagcggcacccuggaguucaacaacgaguccuucaacugggccggggugacgcagaacggcaccagcuccgccugcauccgggggagcaacuccagcuucuucucccgccugaacuggcucacccaccugaacuucaaguaccccgcgcugaacgugaccaugcccaacaacgagcaguucgacaagcucuacaucuggggcguccaccaccccgggacggacaaggaccagaucuuccuguacgcccagagcuccggccggaucaccgugagcaccaagcgcagccagcaggccgugaucccgaacaucggcucccggccccgcauccggaacauccccagccgcaucuccaucuacuggaccaucgucaagcccggggacauccugcucaucaacagcacgggcaaccugaucgccccgcggggguacuucaagauccgcuccggcaagagcuccaucaugcggagcgacgcccccaucggcaagugcaaguccgagugcaucacccccaacgggagcauccccaacgacaagccguuccagaacgugaaccgcaucaccuacggcgcgugcccccgguacgugaagcaguccacccugaagcucgccacggggaugcgcaacguccccgagaagcagacccggggcaucuucggggccaucgccggcuucaucgagaacggcugggaggggaugguggacggcugguacggguuccgccaccagaacagcgagggccgggggcaggccgcggaccugaaguccacccaggccgccaucgaccagaucaacggcaagcugaaccgccucaucggcaagaccaacgagaaguuccaccagaucgagaaggaguucagcgagguggaggggcggauccaggaccuggagaaguacgucgaggacacgaagaucgaccugugguccuacaacgccgagcuccugguggcccuggagaaccagcacaccaucgaccucaccgacagcgagaugaacaagcuguucgagaagaccaagaagcagcugcgcgagaacgcggaggacaugggcaacgggugcuucaagaucuaccacaagugcgacaacgccugcaucggcuccauccgcaacgggacguacgaccacgacguguaccgggacgaggcccucaacaaccgcuuccagaucaagggcgucgagcucaagagcggcuacaaggacuggauccuguggaucuccuucgccaucagcugcuuccugcugugcguggcccugcucggguucaucaugugggcgugccagaagggcaacauccggugcaacaucugcaucuga

SEQ ID NO: 75503 - RNA, 1701 nt, Artificial Sequence; identical to SEQ ID NO: 74491
  derived and/or modified CDS sequence (opt1) from hemagglutinin__InfluenzaA__AHL96664

SEQ ID NO: 75504 - RNA, 1701 nt, Artificial Sequence
  derived and/or modified CDS sequence (opt1) from hemagglutinin__InfluenzaA__AHL96676
augaagaccaucaucgcccugagcuacauccucugccugguguucgcccagaagcugcccggcaacgacaacuccaccgcgacgcucugccuggggcaccacgccgucccgaacggcaccaucgugaagaccaucaccaacgaccgcaucgaggugacgaacgccaccgagcugguccagaacagcuccaucggggagaucugcgacagcccccaccagauccucgacggcgagaacugcacccugaucgacgcccugcucggggacccccagugcgacggcuuccagaacaagaagugggaccuguucguggagcgguccaaggccuacagcaacugcuaccccuacgacgugccggacuacgcgucccugcgcagccucgucgccuccagcggcacccuggaguucaacaacgaguccuucaacuggacgggggugacccagaacggcaccagcuccgccugcauccggcgcagcaacuccagcuucuucucccggcugaacuggcucacccaccugaacuucaaguaccccgcccugaacgugacgaugcccaacaacgagcaguucgacaagcucuacaucuggggcguccaccaccccgggaccgacaaggaccagaucuuccuguacgcgcagagcuccgggcgcaucaccgugagcaccaagcggagccagcaggccgugaucccgaacaucggcucccgcccccggauccgcaacauccccagccggaucuccaucuacuggacgaucgucaagcccggcgacauccugcucaucaacagcaccgggaaccugaucgccccgcgcggcuacuucaagauccgguccggcaagagcuccaucaugcgcagcgacgcccccaucgggaagugcaaguccgagugcaucacccccaacggcagcauccccaucgacaagccguuccagaacgugaaccggaucaccuacggggccugcccccgcuacgugaagcaguccacgcugaagcucgcgaccggcaugcggaacguccccgagaagcagacccgcgggaucuucggcgccaucgccggguucaucgagaacggcugggagggcaugguggacgggugguacggcuuccggcaccagaacagcgaggggcgcggccaggccgccgaccugaaguccacccaggcggccaucgaccagaucaacgggaagcugaaccggcucaucggcaagacgaacgagaaguuccaccagaucgagaaggaguucagcgagguggagggccgcauccaggaccuggagaaguacgucgaggacaccaagaucgaccugugguccuacaacgccgagcuccugguggcccuggagaaccagcacaccaucgaccucaccgacagcgagaugaacaagcuguucgagaagacgaagaagcagcugcgcgagaacgccgaggacauggggaacggcugcuucaagaucuaccacaagugcgacaacgcgugcaucggguccauccggaacggcaccuacgaccacgacguguaccgcgacgaggcccucaacaaccgguuccagaucaagggggucgagcucaagagcggcuacaaggacuggauccuguggaucuccuucgccaucagcugcuuccugcugugcguggcccugcucggcuucaucaugugggccugccagaaggggaacauccgcugcaacaucugcaucuga

SEQ ID NO: 75505 - RNA, 1701 nt, Artificial Sequence; identical to SEQ ID NO: 74018
  derived and/or modified CDS sequence (opt1) from hemagglutinin__InfluenzaA__AHL96688

SEQ ID NO: 75506 - RNA, 1701 nt, Artificial Sequence; identical to SEQ ID NO: 74018
  derived and/or modified CDS sequence (opt1) from hemagglutinin__InfluenzaA__AHL96700

SEQ ID NO: 75507 - RNA, 1701 nt, Artificial Sequence; identical to SEQ ID NO: 74018
  derived and/or modified CDS sequence (opt1) from hemagglutinin__InfluenzaA__AHL96712

SEQ ID NO: 75508 - RNA, 1701 nt, Artificial Sequence; identical to SEQ ID NO: 73892
  derived and/or modified CDS sequence (opt1) from hemagglutinin__InfluenzaA__AHL96724

SEQ ID NO: 75509 - RNA, 1701 nt, Artificial Sequence; identical to SEQ ID NO: 73882
  derived and/or modified CDS sequence (opt1) from hemagglutinin__InfluenzaA__AHL96748

SEQ ID NO: 75510 - RNA, 1701 nt, Artificial Sequence; identical to SEQ ID NO: 73892
  derived and/or modified CDS sequence (opt1) from hemagglutinin__InfluenzaA__AHL96784

SEQ ID NO: 75511 - RNA, 1701 nt, Artificial Sequence
  derived and/or modified CDS sequence (opt1) from hemagglutinin__InfluenzaA__AHL96796
augaagaccaucaucgcccugagcuacauccucugccugguguucgcccagaagcugcccggcaacgacaacuccaccgcgacgcucugccuggggcaccacgccgucccgaacggcaccaucgugaagaccaucaccaacgaccgcaucgaggugacgaacgccaccgagcugguccagaacagcuccaucggggagaucugcgacagcccccaccagauccucgacggcgagaacugcacccugaucgacgcccugcucggggacccccagugcgacggcuuccagaacaagaagugggaccuguucaucgagcgguccaaggccuacagcaacugcuaccccuacgacgugccggacuacgcgucccugcgcagccucguggccuccagcggcacccuggaguucaacaacgaguccuucaacuggacgggggucacccagaacggcaccagcuccgccugcauccggcgcagcaacuccagcuucuucucccggcugaacuggcucacccaccugaacuucaaguaccccgcccugaacgugacgaugcccaacaacgagcaguucgacaagcucuacaucuggggcgugcaccaccccgggaccgacaaggaccagaucuuccuguacgcgcagagcuccgggcgcaucaccgucagcaccaagcggagccagcaggccgugaucccgaacaucggcucccgcccccggauccgcaacauccccagccggaucuccaucuacuggacgaucgugaagcccggcgacauccugcucaucaacagcaccgggaaccugaucgccccgcgcggcuacuucaagauccgguccggcaagagcuccaucaugcgcagcgacgcccccaucgggaagugcaaguccgagugcaucacccccaacggcagcauccccaacgacaagccguuccagaacgucaaccggaucaccuacggggccugcccccgcuacgugaagcaguccacgcugaagcucgcgaccggcaugcggaacgugcccgagaagcagacccgcgggaucuucggcgccaucgccggguucaucgagaacggcugggagggcauggucgacgggugguacggcuuccggcaccagaacagcgaggggcgcggccaggccgccgaccugaaguccacccaggcggccaucgaccagaucaacgggaagcugaaccggcucaucggcaagacgaacgagaaguuccaccagaucgagaaggaguucagcgagguggagggccgcauccaggaccuggagaaguacguggaggacaccaagaucgaccugugguccuacaacgccgagcuccuggucgcccuggagaaccagcacaccaucgaccucaccgacagcgagaugaacaagcuguucgagaagacgaagaagcagcugcgcgagaacgccgaggacauggggaacggcugcuucaagaucuaccacaagugcgacaacgcgugcaucggguccauccggaacggcaccuacgaccacgacguguaccgcgacgaggcccucaacaaccgguuccagaucaaggggguggagcucaagagcggcuacaaggacuggauccuguggaucuccuucgccaucagcugcuuccugcugugcgucgcccugcucggcuucaucaugugggccugccagaaggggaacauccgcugcaacaucugcaucuga

SEQ ID NO: 75512 - RNA, 1701 nt, Artificial Sequence; identical to SEQ ID NO: 73882
  derived and/or modified CDS sequence (opt1) from hemagglutinin__InfluenzaA__AHL96808

SEQ ID NO: 75513 - RNA, 1701 nt, Artificial Sequence; identical to SEQ ID NO: 73882
  derived and/or modified CDS sequence (opt1) from hemagglutinin__InfluenzaA__AHL96820

SEQ ID NO: 75514 - RNA, 1701 nt, Artificial Sequence; identical to SEQ ID NO: 73892
  derived and/or modified CDS sequence (opt1) from hemagglutinin__InfluenzaA__AHL96832

SEQ ID NO: 75515 - RNA, 1701 nt, Artificial Sequence; identical to SEQ ID NO: 73892
  derived and/or modified CDS sequence (opt1) from hemagglutinin__InfluenzaA__AHL96844

SEQ ID NO: 75516 - RNA, 1701 nt, Artificial Sequence; identical to SEQ ID NO: 73892
  derived and/or modified CDS sequence (opt1) from hemagglutinin__InfluenzaA__AHL96856

SEQ ID NO: 75517 - RNA, 1701 nt, Artificial Sequence
  derived and/or modified CDS sequence (opt1) from hemagglutinin__InfluenzaA__AHL96868
augaagaccaucaucgcccugagcuacauccucugccugguguucgcccagaagcugcccggcaacgacaacuccaccgcgacgcucugccuggggcaccacgccgucccgaacggcaccaucgugaagaccaucaccaacgaccgcaucgaggugacgaacgccaccgagcugguccagaacagcuccaucggggagaucugcgacagcccccaccagauccucgacggcgggaacugcacccugaucgacgcccugcucggcgacccccagugcgacggcuuccagaacaagaagugggaccuguucguggagcgguccaaggccuacagcaacugcuaccccuacgacgugccggacuacgcgucccugcgcagccucgucgccuccagcgggacccuggaguucaacaacgaguccuucaacuggacgggcgugacccagaacgggaccagcuccgccugcauccggcgcagcaacuccagcuucuucucccggcugaacuggcucacccaccugaacuucaaguaccccgcccugaacgugacgaugcccaacaacgagcaguucgacaagcucuacaucuggggcguccaccaccccgggaccgacaaggaccagaucuuccuguacgcgcagagcuccggccgcaucaccgugagcaccaagcggagccagcaggccguggucccgaacaucggcucccgcccccggauccgcaacauccccagccggaucuccaucuacuggacgaucgugaagcccggggacauccugcucaucaacagcaccggcaaccugaucgccccgcgcggguacuucaagauccgguccggcaagagcuccaucaugcgcagcgacgcccccaucggcaagugcaaguccgagugcaucacccccaacgggagcauccccaacgacaagccguuccagaacgugaaccggaucaccuacggcgccugcccccgcuacgucaagcaguccacgcugaagcucgcgaccgggaugcggaacgugcccgagaagcagacccgcggcaucuucggggccaucgccggcuucaucgagaacggcugggaggggaugauggacggcugguacggguuccggcaccagaacagcgagggccgcgggcaggccgccgaccugaaguccacccaggcggccaucgaccagaucaacggcaagcugaaccggcucaucggcaagacgaacgagaaguuccaccagaucgagaaggaguucagcgagguggaggggcgcauccaggaccuggagaaguacgucgaggacaccaagaucgaccugugguccuacaacgccgagcuccugguggcccuggagaaccagcacaccaucgaccucaccgacagcgagaugaacaagcuguucgagaagacgaagaagcagcugcgcgagaacgccgaggacaugggcaacgggugcuucaagaucuaccacaagugcgacaacgcgugcaucggcuccauccggaacgggaccuacgaccacgacguguaccgcgacgaggcccucaacaaccgguuccagaucaagggcgucgagcucaagagcggcuacaaggacuggauccuguggaucuccuucgccaugagcugcuuccugcugugcguggcccugcucggguucaucaugugggccugccagaagggcaacauccgcugcaacaucugcaucuga

SEQ ID NO: 75518 - RNA, 1701 nt, Artificial Sequence; identical to SEQ ID NO: 73882
  derived and/or modified CDS sequence (opt1) from hemagglutinin__InfluenzaA__AHL96880

SEQ ID NO: 75519 - RNA, 1701 nt, Artificial Sequence
  derived and/or modified CDS sequence (opt1) from hemagglutinin__InfluenzaA__AHL96892
augaagaccaucaucgcccugagcuacauccucugccugguguucgcccagaagcugcccggcaacgacaacuccaccgcgacgcucugccuggggcaccacgccgucccgaacggcaccaucgugaagaccaucaccaacgaccgcaucgaggugacgaacgccaccgagcugguccagaacagcuccaucggggagaucugcgacagcccccaccagauccucgacggcgagaacugcacccugaucgacgcccugcucggggacccccagugcgacggcuuccagaacaagaagugggaccuguucguggagcgguccaaggccuacagcaacugcuaccccuacgacgugccggacuacgcgucccugcgcagccucgucgccuccagcggcacccuggaguucaacaacgaguccuucaacugggccggggugacgcagaacggcaccagcuccgccugcauccgggggagcaacuccagcuucuucucccgccugaacuggcucacccaccugaacuucaaguaccccgcgcugaacgugaccaugcccaacaacgagcaguucgacaagcucuacaucuggggcguccaccaccccgggacggacaaggaccagaucuuccuguacgcccagagcuccggccggaucaccgugagcaccaagcgcagccagcaggccgugaucccgaacaucggcucccggccccgcauccggaacauccccagccgcaucuccaucuacuggaccaucgucaagcccggggacauccugcucaucaacagcacgggcaaccugaucgccccgcggggguacuucaagauccgcuccggcaagagcuccaucaugcggagcgacgcccccaucggcaagugcaaguccgagugcaucacccccaacgggagcauccccaacgacaagccguuccagaacgugaaccgcaucaccuacggcgcgugcccccgguacgugaagcaguccacccugaagcucgccacggggaugcgcaacguccccgagaagcagacccggggcaucuucggggccaucgccggcuucaucgagaacggcugggaggggaugguggacggcugguacggguuccgccaccagaacagcgagggccgggggcaggccgcggaccugaaguccacccaggccgccaucgaccagaucaacggcaagcugaaccgccucaucggcaagaccaacgagaaguuccaccagaucgagaaggaguucagcgagguggaggggcggguccaggaccuggagaaguacguggaggacacgaagaucgaccugugguccuacaacgccgagcuccugguggcccuggagaaccagcacaccaucgaccucaccgacagcgagaugaacaagcuguucgagaagaccaagaagcagcugcgcgagaacgcggaggacaugggcaacgggugcuucaagaucuaccacaagugcgacaacgccugcaucggcuccauccgcaacgggacguacgaccacgacgucuaccgggacgaggcccucaacaaccgcuuccagaucaagggcguggagcucaagagcggcuacaaggacuggauccuguggaucuccuucgccaucagcugcuuccugcugugcguggcccugcucggguucaucaugugggcgugccagaagggcaacauccggugcaacaucugcaucuga

SEQ ID NO: 75520 - RNA, 1701 nt, Artificial Sequence
  derived and/or modified CDS sequence (opt1) from hemagglutinin__InfluenzaA__AHL96904
augaagaccaucaucgcccugagcuacauccucugccugguguucgcccagaagcugcccggcaacgacaacuccaccgcgacgcucugccuggggcaccacgccgucccgaacggcaugaucgugaagaccaucaccaacgaccgcaucgaggugaccaacgccacggagcugguccagaacagcuccaucggggagaucugcgacagcccccaccagauccucgacggcgagaacugcacccugaucgacgcccugcucggggacccccagugcgacggcuuccagaacaagaagugggaccuguucguggagcgguccaaggccuacagcaacugcuaccccuacgacgugccggacuacgcgucccugcgcagccucgucgccuccagcggcacccuggaguucaacaacgaguccuucaacuggaccggggugacgcagaacggcaccagcuccgccugcauccggcgcagcaacuccagcuucuucucccggcugaacuggcucacccaccugaacuucaaguaccccgcccugaacgugaccaugcccaacaacgagcaguucgacaagcucuacaucuggggcguccaccaccccgggacggacaaggaccagaucuuccuguacgcgcagagcuccgggcgcaucaccgugagcaccaagcggagccagcaggccguggucccgaacaucggcucccgcccccggauccgcaacauccccagccggaucuccaucuacuggaccaucgugaagcccggcgacauccugcucaucaacagcacggggaaccugaucgccccgcgcggcuacuucaagauccgguccggcaagagcuccaucaugcgcagcgacgcccccaucgggaagugcaaguccgagugcaucacccccaacggcagcauccccaacgacaagccguuccagaacgugaaccggaucaccuacggggccugcccccgcuacgucaagcaguccacccugaagcucgcgacgggcaugcggaacgugcccgagaagcagacccgcgggaucuucggcgccaucgccggguucaucgagaacggcugggagggcaugguggacgggugguacggcuuccggcaccagaacagcgaggggcgcggccaggccgccgaccugaaguccacccaggcggccaucgaccagaucaacgggaagcugaaccggcucaucggcaagaccaacgagaaguuccaccagaucgagaaggaguucagcgaggucgagggccgcauccaggaccuggagaaguacguggaggacacgaagaucgaccugugguccuacaacgccgagcuccugguggcccuggagaaccagcacaccaucgaccucaccgacagcgagaugaacaagcuguucgagaagaccaagaagcagcugcgcgagaacgccgaggacauggggaacggcugcuucaagaucuaccacaagugcgacaacgcgugcaucggguccauccggaacggcacguacgaccacgacgucuaccgcgacgaggcccucaacaaccgguuccagaucaaggggguggagcucaagagcggcuacaaggacuggauccuguggaucuccuucgccaugagcugcuuccugcugugcguggcccugcucggcagcaucaugugggccugccagaaggggaacauccgcugcaacaucugcaucuga

SEQ ID NO: 75521 - RNA, 1701 nt, Artificial Sequence; identical to SEQ ID NO: 73882
  derived and/or modified CDS sequence (opt1) from hemagglutinin__InfluenzaA__AHL96916

SEQ ID NO: 75522 - RNA, 1701 nt, Artificial Sequence; identical to SEQ ID NO: 73882
  derived and/or modified CDS sequence (opt1) from hemagglutinin__InfluenzaA__AHL96928

SEQ ID NO: 75523 - RNA, 1701 nt, Artificial Sequence; identical to SEQ ID NO: 73882
  derived and/or modified CDS sequence (opt1) from hemagglutinin__InfluenzaA__AHL96940

SEQ ID NO: 75524 - RNA, 1701 nt, Artificial Sequence; identical to SEQ ID NO: 73892
  derived and/or modified CDS sequence (opt1) from hemagglutinin__InfluenzaA__AHL96952

SEQ ID NO: 75525 - RNA, 1701 nt, Artificial Sequence; identical to SEQ ID NO: 73892
  derived and/or modified CDS sequence (opt1) from hemagglutinin__InfluenzaA__AHL96964

SEQ ID NO: 75526 - RNA, 1701 nt, Artificial Sequence; identical to SEQ ID NO: 74050
  derived and/or modified CDS sequence (opt1) from hemagglutinin__InfluenzaA__AHL96976

SEQ ID NO: 75527 - RNA, 1701 nt, Artificial Sequence
  derived and/or modified CDS sequence (opt1) from hemagglutinin__InfluenzaA__AHL96988
augaagaccaucaucgcccugagcuacauccucugccugguguucgcccagaagcugcccggcaacgacaacuccaccgcgacgcucugccuggggcaccacgccgucccgaacggcaccaucgugaagaccaucaccaacgaccgcaucgaggugacgaacgccaccgagcugguccagaacagcuccaucggggagaucugcgacagcccccaccagauccucgacggcgagaacugcacccugaucgacgcccugcucggggacccccagugcgacggcuuccagaacaagaagugggaccuguucguggagcgguccaaggccuacagcaacugcuaccccuacgacgugccggacuacgcgucccugcgcagccucgucgccuccagcggcacccuggaguucaacaacgaguccuucaacuggacgggggugacccagaacggcaccagcuccgccugcauccggcgcagcaacuccagcuucuucucccggcugaacuggcucacccaccugaacuucaaguaccccgcccugaacgugacgaugcccaacaacgagcaguucgacaagcucuacaucuggggcguccaccaccccgggaccgacaaggaccagaucuuccuguacgcgcagagcuccgggcgcaucaccgugagcaccaagcggagccagcaggccgugaucccgaacaucggcucccgcccccggauccgcaacauccccagccggaucuccaucuacuggacgaucguccgccccggcgacauccugcucaucaacagcaccgggaaccugaucgccccgcggggcuacuucaagauccgcuccggcaagagcuccaucaugcggagcgacgcccccaucgggaagugcaaguccgagugcaucacccccaacggcagcauccccaacgacaagccguuccagaacgugaaccgcaucaccuacggggccugcccccgguacgugaagcaguccacgcugaagcucgcgaccggcaugcgcaacguccccgagaagcagacccgggggaucuucggcgccaucgccggguucaucgagaacggcugggagggcaugguggacgggugguacggcuuccgccaccagaacagcgaggggcggggccaggccgccgaccugaaguccacccaggcggccaucgaccagaucaacgggaagcugaaccgccucaucggcaagacgaacgagaaguuccaccagaucgagaaggaguucagcgagguggagggccgcauccaggaccuggagaaguacgucgaggacaccaagaucgaccugugguccuacaacgccgagcuccugguggcccuggagaaccagcacaccaucgaccucaccgacagcgagaugaacaagcuguucgagaagacgaagaagcagcugcgggagaacgccgaggacauggggaacggcugcuucaagaucuaccacaagugcgacaacgcgugcaucggguccauccgcaacggcaccuacgaccacaacguguaccgggacgaggcccucaacaaccgcuuccagaucaagggggucgagcucaagagcggcuacaaggacuggauccuguggaucuccuucgccaucagcugcuuccugcugugcguggcccugcucggcuucaucaugugggccugccagaaggggaacauccggugcaacaucugcaucuga

SEQ ID NO: 75528 - RNA, 1701 nt, Artificial Sequence; identical to SEQ ID NO: 73892
  derived and/or modified CDS sequence (opt1) from hemagglutinin__InfluenzaA__AHL97000

SEQ ID NO: 75529 - RNA, 1701 nt, Artificial Sequence; identical to SEQ ID NO: 74018
  derived and/or modified CDS sequence (opt1) from hemagglutinin__InfluenzaA__AHL97012

SEQ ID NO: 75530 - RNA, 1701 nt, Artificial Sequence
  derived and/or modified CDS sequence (opt1) from hemagglutinin__InfluenzaA__AHL97024
augaagaccaucaucgcccugagcuacauccucugccugguguucgcccagaagcugcccggcaacgacaacuccaccgcgacgcucugccuggggcaccacgccgucccgaacggcaccaucgugaagaccaucaugaacgaccgcaucgaggugaccaacgccacggagcugguccagaacagcuccaucggggagaucugcgacagcccccaccagauccucgacggcgagaacugcacccugaucgacgcccugcucggggacccccagugcgacggcuuccagaacaagaagugggaccuguucguggagcgguccaaggccuacagcaacugcuaccccuacgacgugccggacuacgcgucccugcgcagccucgucgccuccagcggcacccuggaguucaacaacgaguccuucaacugggccggggugacccagaacggcacgagcuccgccugcauccgggggagcaacuccagcuucuucucccgccugaacuggcucacccaccugaacuucaaguaccccgcgcugaacgugaccaugcccaacaacgagcaguucgacaagcucuacaucuggggcguccaccaccccgggaccgacaaggaccagaucuuccuguacgcccagagcuccggccggaucacggugagcaccaagcgcagccagcaggccgugaucccgaacaucggcucccggccccgcauccggaacauccccagccgcaucuccaucuacuggaccaucgucaagcccggggacauccugcucaucaacagcaccggcaaccugaucgccccgcggggguacuucaagauccgcuccggcaagagcuccaucaugcggagcgacgcccccaucggcaagugcaaguccgagugcaucacgcccaacgggagcauccccaacgacaagccguuccagaacgugaaccgcaucaccuacggcgcgugcccccgguacgugaagcaguccacccugaagcucgccaccgggaugcgcaacguccccgagaagcagacgcggggcaucuucggggccaucgccggcuucaucgagaacggcugggaggggaugauggacggcugguacggguuccgccaccagaacagcgagggccgggggcaggccgcggaccugaaguccacccaggccgccaucgaccagaucaacggcaagcugaaccgccucaucggcaagaccaacgagaaguuccaccagaucgagaaggaguucagcgagguggaggggcggauccaggaccuggagaaguacguggaggacaccaagaucgaccugugguccuacaacgccgagcuccuggucgcccuggagaaccagcacacgaucgaccucaccgacagcgagaugaacaagcuguucgagaagaccaagaagcagcugcgcgagaacgcggaggacaugggcaacgggugcuucaagaucuaccacaagugcgacaacgccugcaucggcuccauccgcaacgggaccuacgaccacgacguguaccgggacgaggcccucaacaaccgcuuccagaucaagggcguggagcucaagagcggcuacaaggacuggauccuguggaucuccuucgccaucagcugcuuccugcugugcgucgcccugcucggguucaucaugugggcgugccagaagggcaacauccggugcaacaucugcaucuga

SEQ ID NO: 75531 - RNA, 1701 nt, Artificial Sequence
  derived and/or modified CDS sequence (opt1) from hemagglutinin__InfluenzaA__AHL97036
augaagaccaucaucgcccugagcuacauccucugccugguguucgcccagaagcugcccggcaacgacaacuccaccgcgacccucugccuggggcaccacgccgucccgaacggcaccaucgugaagaccaucaccaacgaccgcaucgaggugacgaacgccaccgagcugguccagaacagcuccaucggggagaucugcgacagcccccaccagauccucgacggcgagaacugcacccugaucgacgcccugcucggggacccccagugcgacggcuuccagaacaagaagugggaccuguucguggagcgguccaaggccuacagcaacugcuaccccuacgacgugccggacuacgcgucccugcgcagccucgucgccuccagcggcacccuggaguucaacaacgaguccuucaacuggacgggggugacccagaacggcaccagcuccgccugcauccggcgcagcaacuccagcuucuucucccggcugaacuggcucacccaccugaacuucaaguaccccgcccugaacgugacgaugcccaacaacgagcaguucgacaagcucuacaucuggggcguccaccaccccgggaccgacaaggaccagaucuuccuguacgcgcagagcuccgggcgcaucaccgugagcaccaagcggagccagcaggccgugaucccgaacaucggcucccgcccccggauccgcaacauccccagccggaucuccaucuacuggacgaucgucaagcccggcgacauccugcucaucaacagcaccgggaaccugaucgccccgcgcggcuacuucaagauccgguccggcaagagcuccaucaugcgcagcgacgcccccaucgggaagugcaaguccgagugcaucacccccaacggcagcauccccaacgacaagccguuccagaacgugaaccggaucaccuacggggccugcccccgcuacgugaagcaguccacgcugaagcucgcgaccggcaugcggaacguccccgagaagcagacccgcgggaucuucggcgccaucgccggguucaucgagaacggcugggagggcaugguggacgggugguacggcuuccggcaccagaacagcgaggggcgcggccaggccgccgaccugaaguccacccaggcggccaucgaccagaucaacgggaagcugaaccggcucaucggcaagacgaacgagaaguuccaccagaucgagaaggaguucagcgagguggagggccgcauccaggaccuggagaaguacgucgaggacaccaagaucgaccugugguccuacaacgccgagcuccugguggcccuggagaaccagcacaccaucgaccucaccgacagcgagaugaacaagcuguucgagaagacgaagaagcagcugcgcgagaacgccgaggacauggggaacggcugcuucaagaucuaccacaagugcgacaacacgugcaucggguccauccggaacggcaccuacgaccacgacguguaccgcgacgaggcgcucaacaaccgguuccagaucaagggggucgagcucaagagcggcuacaaggacuggauccuguggaucuccuucgccaucagcugcuuccugcugugcguggcccugcucggcuucaucaugugggccugccagaaggggaacauccgcugcaacaucugcaucuga

SEQ ID NO: 75532 - RNA, 1701 nt, Artificial Sequence; identical to SEQ ID NO: 73907
  derived and/or modified CDS sequence (opt1) from hemagglutinin__InfluenzaA__AHL97048

SEQ ID NO: 75533 - RNA, 1701 nt, Artificial Sequence
  derived and/or modified CDS sequence (opt1) from hemagglutinin__InfluenzaA__AHL97060
augaagaccaucaucgcccugagcuacauccucugccugguguucgcccagaagauccccggcaacgacaacuccaccgcgacgcugugccucgggcaccacgccgucccgaacggcaccaucgugaagaccaucaccaacgaccgcaucgaggugacgaacgccaccgagcugguccagaacagcuccaucggggagaucugcgacagcccccaccagauccuggacggcgagaacugcacccucaucgacgcccugcugggggacccccagugcgacggcuuccagaacaagaagugggaccucuucguggagcgguccaaggccuacagcaacugcuaccccuacgacgugccggacuacgcgucccugcgcagccuggucgccuccagcggcacccucgaguucaacaacgaguccuucaacuggacgggggugacccagaacggcaccagcuccgccugcauccggcgcagcaacuccagcuucuucucccggcugaacuggcugacccaccucaacuucaaguaccccgcccugaacgugacgaugcccaacaacgagcaguucgacaagcuguacaucuggggcguccaccaccccgggaccgacaaggaccagaucuuccucuacgcgcagagcuccgggcgcaucaccgugagcaccaagcggagccagcaggccgugaucccgaacaucggcucccgcccccggauccgcaacauccccagccggaucuccaucuacuggacgaucgucaagcccggcgacauccugcugaucaacagcaccgggaaccucaucgccccgcgcggcuacuucaagauccgguccggcaagagcuccaucaugcgcagcgacgcccccaucgggaagugcaaguccgagugcaucacccccaacggcagcauccccaacgacaagccguuccagaacgugaaccggaucaccuacggggccugcccccgcuacgugaagcaguccacgcugaagcuggcgaccggcaugcggaacguccccgagaagcagacccgcgggaucuucggcgccaucgccggguucaucgagaacggcugggagggcaugguggacgggugguacggcuuccggcaccagaacagcgaggggcgcggccaggccgccgaccucaaguccacccaggcggccaucgaccagaucaacgggaagcugaaccggcugaucggcaagacgaacgagaaguuccaccagaucgagaaggaguucagcgagguggagggccgcauccaggaccucgagaaguacgucgaggacaccaagaucgaccugugguccuacaacgccgagcugcucguggcccuggagaaccagcacaccaucgaccugaccgacagcgagaugaacaagcuguucgagaagacgaagaagcagcuccgcgagaacgccgaggacauggggaacggcugcuucaagaucuaccacaagugcgacaacgcgugcaucggguccauccggaacggcaccuacgagcacgacguguaccgcgacgaggcccugaacaaccgguuccagaucaagggggucgagcucaagagcggcuacaaggacuggauccuguggaucuccuucgccaucagcugcuuccugcucugcguggcccugcugggcuucaucaugugggccugccagaaggggaacauccgcugcaacaucugcaucuga

SEQ ID NO: 75534 - RNA, 1701 nt, Artificial Sequence; identical to SEQ ID NO: 74018
  derived and/or modified CDS sequence (opt1) from hemagglutinin__InfluenzaA__AHL97072

SEQ ID NO: 75535 - RNA, 1701 nt, Artificial Sequence; identical to SEQ ID NO: 74018
  derived and/or modified CDS sequence (opt1) from hemagglutinin__InfluenzaA__AHL97084

SEQ ID NO: 75536 - RNA, 1701 nt, Artificial Sequence; identical to SEQ ID NO: 73859
  derived and/or modified CDS sequence (opt1) from hemagglutinin__InfluenzaA__AHL97096

SEQ ID NO: 75537 - RNA, 1701 nt, Artificial Sequence; identical to SEQ ID NO: 74021
  derived and/or modified CDS sequence (opt1) from hemagglutinin__InfluenzaA__AHL97108

SEQ ID NO: 75538 - RNA, 1701 nt, Artificial Sequence
  derived and/or modified CDS sequence (opt1) from hemagglutinin__InfluenzaA__AHL97120
augaagaccaucaucgcccugagcuacauccucugccugguguucgcccagaagcugcccggcaacgacaacuccaccgcgacgcucugccuggggcaccacgccgucccgaacggcaccaucgugaagaccaucaccaacgaccgcaucgaggugacgaacgccaccgagcugguccagaacagcuccaucggggagaucugcgacagcccccaccagauccucgacggcgagaacugcacccugaucgacgcccugcucggggacccccagugcgacggcuuccagaacaagaagugggaccuguucguggagcgguccaaggccuacagcaacugcuaccccuacgacgugccggacuacgcgucccugcgcagccucgucgccuccagcggcacccuggaguucaacaacgaguccuucaacugggccggggugacgcagaacggcaccagcuccgccugcauccgggggagcaacuccagcuucuucucccgccugaacuggcucacccaccugaacuucaaguaccccgcgcugaacgugaccaugcccaacaacgagcaguucgacaagcucuacaucuggggcguccaccaccccgggacggacaaggaccagaucuuccuguacgcccagagcuccggccggaucaccgugagcaccaagcgcagccagcaggccgugaucccgaacaucggcucccggccccgcauccggaacauccccagccgcaucuccaucuacuggaccaucgucaagcccggggacauccugcucaucaacagcacgggcaaccugaucgccccgcggggguacuucaagauccgcuccggcaagagcuccaucaugcggagcgacgcccccaucggcaagugcaaguccgagugcaucacccccaacgggagcauccccaacgacaagccguuccagaacgugaaccgcgugaccuacggcgcgugcccccgguacgucaagcaguccacccugaagcucgccacggggaugcgcaacgugcccgagaagcagacccggggcaucuucggggccaucgccggcuucaucgagaacggcugggaggggaugguggacggcugguacggguuccgccaccagaacagcgagggccgggggcaggccgcggaccugaaguccacccaggccgccaucgaccagaucaacggcaagcugaaccgccucaucggcaagaccaacgagaaguuccaccagaucgagaaggaguucagcgaggucgaggggcggauccaggaccuggagaaguacguggaggacacgaagaucgaccugugguccuacaacgccgagcuccugguggcccuggagaaccagcacaccaucgaccucaccgacagcgagaugaacaagcuguucgagaagaccaagaagcagcugcgcgagaacgcggaggacaugggcaacgggugcuucaagaucuaccacaagugcgacaacgccugcaucggcuccaucaucaacgggacguacgaccacgacgucuaccgcgacgaggcccucaacaaccgguuccagaucaagggcguggagcucaagagcggcuacaaggacuggauccuguggaucuccuucgccaucagcugcuuccugcugugcguggcccugcucggguucaucaugugggcgugccagaagggcaacauccgcugcaacaucugcaucuga

SEQ ID NO: 75539 - RNA, 1701 nt, Artificial Sequence
  derived and/or modified CDS sequence (opt1) from hemagglutinin__InfluenzaA__AHL97132
augaagaccaucaucgcccugagcuacauccucugccugguguucgcccagaagcugcccggcaacgacaacuccaccgcgacgcucugccuggggcaccacgccgucccgaacggcaccaucgugaagaccaucaccaacgaccagaucgaggugacgaacgccaccgagcugguccagaacagcuccaucggggagaucugcgacagcccccaccagauccucgacggcgagaacugcacccugaucgacgcccugcucggggacccccagugcgacggcuuccagaacaagaagugggaccuguucguggagcgcuccaaggccuacagcaacugcuaccccuacgacgugccggacuacgcgucccugcggagccucgucgccuccagcggcacccuggaguucaacaacgaguccuucaacugggccggggugacgcagaacggcaccagcuccgccugcauccgcgggagcaacuccagcuucuucucccggcugaacuggcucacccaccugaacuucaaguaccccgcgcugaacgugaccaugcccaacaacgagcaguucgacaagcucuacaucuggggcguccaccaccccgggacggacaaggaccagaucuuccuguacgcccagagcuccggccgcaucaccgugagcaccaagcggagccagcaggccgugaucccgaacaucggcucccgcccccggauccgcaacauccccagccggaucuccaucuacuggaccaucgucaagcccggggacauccugcucaucaacagcacgggcaaccugaucgccccgcgcggguacuucaagauccgguccggcaagagcuccaucaugcgcagcgacgcccccaucggcaagugcaaguccgagugcaucacccccaacgggagcauccccaacgacaagccguuccagaacgugaaccggaucaccuacggcgcgugcccccgcuacgugaagcaguccacccugaagcucgccacggggaugcggaacguccccggcaagcagacccgcgggaucuucggcgccaucgccggcuucaucgagaacgggugggagggcaugguggacgggugguacggcuuccggcaccagaacagcgaggggcgcggccaggccgcggaccugaaguccacccaggccgccaucgaccagaucaacggcaagcugaaccggcucaucgggaagaccaacgagaaguuccaccagaucgagaaggaguucagcgagguggagggccgcauccaggaccuggagaaguacgucgaggacacgaagaucgaccugugguccuacaacgccgagcuccugguggcccuggagaaccagcacaccaucgaccucaccgacagcgagaugaacaagcuguucgagaagaccaagaagcagcugcgggagaacgcggaggacauggggaacggcugcuucaagaucuaccacaagugcgacaacgccugcaucggguccauccgcaacggcacguacgaccacgacguguaccgcgacgaggcccucaacaaccgguuccagaucaagggcgucgagcucaagagcggguacaaggacuggauccuguggaucuccuucgccaucagcugcuuccugcugugcguggcccugcucggcuucaucaugugggcgugccagaaggggaacauccgcugcaacaucugcaucuga

SEQ ID NO: 75540 - RNA, 1701 nt, Artificial Sequence; identical to SEQ ID NO: 74018
  derived and/or modified CDS sequence (opt1) from hemagglutinin__InfluenzaA__AHL97144

SEQ ID NO: 75541 - RNA, 1701 nt, Artificial Sequence; identical to SEQ ID NO: 74018
  derived and/or modified CDS sequence (opt1) from hemagglutinin__InfluenzaA__AHL97156

SEQ ID NO: 75542 - RNA, 1701 nt, Artificial Sequence; identical to SEQ ID NO: 74018
  derived and/or modified CDS sequence (opt1) from hemagglutinin__InfluenzaA__AHL97168

SEQ ID NO: 75543 - RNA, 1701 nt, Artificial Sequence; identical to SEQ ID NO: 73892
  derived and/or modified CDS sequence (opt1) from hemagglutinin__InfluenzaA__AHL97180

SEQ ID NO: 75544 - RNA, 1701 nt, Artificial Sequence; identical to SEQ ID NO: 74018
  derived and/or modified CDS sequence (opt1) from hemagglutinin__InfluenzaA__AHL97192

SEQ ID NO: 75545 - RNA, 1701 nt, Artificial Sequence; identical to SEQ ID NO: 74018
  derived and/or modified CDS sequence (opt1) from hemagglutinin__InfluenzaA__AHL97204

SEQ ID NO: 75546 - RNA, 1701 nt, Artificial Sequence; identical to SEQ ID NO: 74018
  derived and/or modified CDS sequence (opt1) from hemagglutinin__InfluenzaA__AHL97216

SEQ ID NO: 75547 - RNA, 1701 nt, Artificial Sequence
  derived and/or modified CDS sequence (opt1) from hemagglutinin__InfluenzaA__AHL97228
augaagaccaucaucgcccugagcuacauccucugccugguguucgcccagaagcugcccggcaacgacaacuccaccgcgacgcucugccuggggcaccacgccgucccgaacggcaccguggugaagaccaucaccaacgaccgcaucgaggucacgaacgccaccgagcuggugcagaacagcuccaucggggagaucugcgacagcccccaccagauccucgacggcgagaacugcacccugaucgacgcccugcucggggacccccagugcgacggcuuccagaacaagaagugggaccuguucguggagcgguccaaggccuacagcaacugcuaccccuacgacgucccggacuacgcgucccugcgcagccucguggccuccagcggcacccuggaguucaacaacgaguccuucaacuggacgggggugacccagaacggcaccagcuccgccugcauccggcgcagcaacaacuccuucuucagccggcugaacuggcucacccaccugaacuucaaguaccccgcccugaacgucacgaugcccaacaacgagcaguucgacaagcucuacaucuggggcgugcaccaccccgggaccgacaaggaccagaucuuccuguacgcgcaguccagcgggcgcaucaccguguccaccaagcggagccagcaggccgucaucccgaacaucggcagccgcccccggauccgcaacauccccucccggaucagcaucuacuggacgaucgugaagcccggcgacauccugcucaucaacuccaccgggaaccugaucgccccgcgcggcuacuucaagauccggagcgggaaguccagcaucaugcgcuccgacgcccccaucggcaagugcaagagcgagugcaucacccccaacggcuccauccccaacgacaagccguuccagaacgugaaccggaucaccuacggggccugcccccgcuacgucaagcagagcacgcugaagcucgcgaccggcaugcggaacgugcccgagaagcagacccgcgggaucuucggcgccaucgccggguucaucgagaacggcugggagggcaugguggacgggugguacggcuuccggcaccagaacuccgaggggcgcggccaggccgccgaccucaagagcacccaggcggccaucgaccagaucaacgggaagcugaaccggcugaucggcaagacgaacgagaaguuccaccagaucgagaaggaguucuccgaggucgagggccgcauccaggaccuggagaaguacguggaggacaccaagaucgaccuguggagcuacaacgccgagcuccugguggcccuggagaaccagcacaccaucgaccucaccgacuccgagaugaacaagcuguucgagaagacgaagaagcagcugcgcgagaacgccgaggacauggggaacggcugcuucaagaucuaccacaagugcgacaacgcgugcaucgggagcauccggaacggcaccuacgaccacgacgucuaccgcgacgaggcccucaacaaccgguuccagaucaaggggguggagcugaaguccggcuacaaggacuggauccuguggaucagcuucgccaucuccugcuuccuccugugcgugguccugcucggcuucaucaugugggccugccagaaggggaacauccgcugcaacaucugcaucuga

SEQ ID NO: 75548 - RNA, 1701 nt, Artificial Sequence; identical to SEQ ID NO: 74018
  derived and/or modified CDS sequence (opt1) from hemagglutinin__InfluenzaA__AHL97240

SEQ ID NO: 75549 - RNA, 1701 nt, Artificial Sequence
  derived and/or modified CDS sequence (opt1) from hemagglutinin__InfluenzaA__AHL97252
augaagaccaucaucgcccugagcuacauccucugccugguguucgcccaggagcugcccggcaacgacgacuccaccgcgacgcucugccuggggcaccacgccgucccgaacggcaccaucgugaagaccaucaccaacgaccagaucgaggugacgaacgccaccgagcugguccagagcuccagcaccggggagaucugcaacagcccccaccagauccucgacggcgagaacugcacccugaucgacgcccugcucggggacccccagugcgacggcuuccagaacaagaagugggaccuguucguggagcgcagcaaggcccacuccaacugcuaccccuacgacgugccggacuacgcgagccugcggucccucgucgccagcuccggcacgcuggaguucaacaacgagaacuucaacuggaccggggugacccagaacggcaccagcuccgccugcauccgccggagcaacaacuccuucuucagccgccugaacuggcucacgcaccugaacuucaaguaccccgcccugaacgugaccaugcccaacaacgagcaguucgacaagcucuacaucuggggcguccaccaccccgggaccgacaaggaccagaucuuccuguacgcgcaggccuccgggcggaucaccgugagcacgaagcgcucccagcaggccgugaucccgaacaucggcagccggccccgcguccggaacauccccagccgcguguccaucuacuggaccaucgugaagcccggcgacauccugcucaucaacagcaccgggaaccugaucgccccgcggggcuacuucaagauccgcuccgggaaguccuccaucaugcggagcgacgcccccaucggcaagugcaacuccgcgugcaucacccccaacggcagcauccccaacgacaagccguuccagaacgucaaccgcaucacguacggggccugcccccgguacgugaagcagaacacccugaagcucgccaccggcaugcgcaacgugcccgagaagcagacccgggggaucuucggcgccaucgccggguucaucgagaacggcugggagggcauggucgacgggugguacggcuuccgccaccagaacuccgaggggcggggccaggcggccgaccucaagagcacgcaggccgccaucgaccagaucaacgggaagcugaaccgccugaucggcaagaccaacgagaaguuccaccagaucgagaaggaguucuccgagguggagggccggauccaggaccuggagaaguacguggaggacaccaagaucgaccuguggagcuacaacgccgagcuccuggucgcgcuggagaaccagcacaccaucgaccucacggacuccgagaugaacaagcuguucgagaagaccaagaagcagcugcgcgagaacgccgaggacauggggaacggcugcuucaagaucuaccacaagugcgacaacgccugcaucgggagcauccgcaacggcaccuacgaccacgacguguaccgggacgaggcccucaacaaccgcuuccagaucaaggggguggagcugaaguccggcuacaaggacuggauccuguggaucagcuucgccaucuccugcuuccuccugugcgucgcgcugcucggcuucaucaugugggccugccagaaggggaacauccggugcaacaucugcaucuga

SEQ ID NO: 75550 - RNA, 1701 nt, Artificial Sequence; identical to SEQ ID NO: 73882
  derived and/or modified CDS sequence (opt1) from hemagglutinin__InfluenzaA__AHL97264

SEQ ID NO: 75551 - RNA, 1701 nt, Artificial Sequence; identical to SEQ ID NO: 74018
  derived and/or modified CDS sequence (opt1) from hemagglutinin__InfluenzaA__AHL97276

SEQ ID NO: 75552 - RNA, 1701 nt, Artificial Sequence
  derived and/or modified CDS sequence (opt1) from hemagglutinin__InfluenzaA__AHL97288
augaagaccaucaucgcccugagcuacauccucugccugguguucgcccagaagcugcccggcaacgacaacuccaccgcgacgcucugccuggggcaccacgccgucccgaacggcaccaucgugaagaccaucaccaacgaccgcaucgaggugacgaacgccaccgagcugguccagaacagcuccaucggggagaucugcaacagcccccaccagauccucgacggcgagaacugcacccugaucgacgcccugcucggggacccccagugcgacggcuuccagaacaagaagugggaccuguucguggagcgguccaaggccuacagcaacugcuaccccuacgacgugccggacuacgcgucccugcgcagccucgucgccuccagcggcacccuggaguucaacaacgaguccuucaacuggacgggggugacccagaacggcaccagcuccgccugcauccggcgcagcaacuccagcuucuucucccggcugaacuggcucacccaccugaacuucaaguaccccgcccugaacgugacgaugcccaacaacgagcaguucgacaagcucuacaucuggggcguccaccaccccgggaccgacaaggaccagaucuuccuguacgcgcagagcuccgggcgcaucaccgugagcaccaagcggagccagcaggccgugaucccgaacaucggcucccgcccccggauccgcaacauccccagccggaucuccaucuacuggacgaucgucaagcccggcgacauccugcucaucaacagcaccgggaaccugaucgccccgcgcggcuacuucaagauccgguccggcaagagcuccaucaugcgcagcgacgcccccaucgggaagugcaaguccgagugcaucacccccaacggcagcauccccaacgacaagccguuccagaacgugaaccggaucaccuacggggccugcccccgcuacgugaagcaguccacgcugaagcucgcgaccggcaugcggaacguccccgagaagcagacccgcgggaucuucggcgccaucgccggguucaucgagaacggcugggagggcaugguggacgggugguacggcuuccggcaccagaacagcgaggggcgcggccaggccgccgaccugaaguccacccaggcggccaucgaccagaucaacgggaagcugaaccggcucaucggcaagacgaacgagaaguuccaccagaucgagaaggaguucagcgagguggagggccgcauccaggaccuggagaaguacgucgaggacaccaagaucgaccugugguccuacaacgccgagcuccugguggcccuggagaaccagcacaccaucgaccucaccgacagcgagaugaacaagcuguucgagaagaucaagaagcagcugcgcgagaacgccgaggacauggggaacggcugcuucaagaucuaccacaagugcgacaacgcgugcaucggguccauccggaacggcacguacgaccacaacguguaccgcgacgaggcccucaacaaccgguuccagaucaagggggucgagcucaagagcggcuacaaggacuggauccuguggaucuccuucgccaucagcugcuuccugcugugcguggcccugcucggcuucaucaugugggccugccagaaggggaacauccgcugcaacaucugcaucuga

SEQ ID NO: 75553 - RNA, 1701 nt, Artificial Sequence; identical to SEQ ID NO: 73892
  derived and/or modified CDS sequence (opt1) from hemagglutinin__InfluenzaA__AHL97300

SEQ ID NO: 75554 - RNA, 1701 nt, Artificial Sequence; identical to SEQ ID NO: 74018
  derived and/or modified CDS sequence (opt1) from hemagglutinin__InfluenzaA__AHL97312

SEQ ID NO: 75555 - RNA, 1701 nt, Artificial Sequence; identical to SEQ ID NO: 74018
  derived and/or modified CDS sequence (opt1) from hemagglutinin__InfluenzaA__AHL97336

SEQ ID NO: 75556 - RNA, 1701 nt, Artificial Sequence; identical to SEQ ID NO: 74018
  derived and/or modified CDS sequence (opt1) from hemagglutinin__InfluenzaA__AHL97348

SEQ ID NO: 75557 - RNA, 1701 nt, Artificial Sequence
  derived and/or modified CDS sequence (opt1) from hemagglutinin__InfluenzaA__AHL97372
augaagaccaucaucgcccugagcuacauccucugccugguguucgcccagaagcugcccggcaacgacaacuccaccgcgacgcucugccuggggcaccacgccgucccgaacggcaccaucgugaagaccaucaccaacgaccgcaucgaggugacgaacgccaccgagcugguccagaacagcuccaucggggagaucugcgacagcccccaccagauccucgacggcgagaacugcacccugaucgacgcccugcucggggacccccagugcgacggcuuccagaacaagaagugggaccuguucguggagcgguccaacgccuacagcaacugcuaccccuacgacgugccggacuacgcgucccugcgcagccucgucgccuccagcggcacccuggaguucaacaacgaguccuucaacugggccggggugacgcagaacggcaccagcuccgccugcauccgggggagcaacuccagcuucuucucccgccugaacuggcucacccaccugaacuucaaguaccccgcgcugaacgugaccaugcccaacaacgagcaguucgacaagcucuacaucuggggcguccaccaccccgggacggacaaggaccagaucuuccuguacgcccagagcuccggccggaucaccgugagcaccaagcgcagccagcaggccgugaucccgaacaucggcucccggccccgcauccggaacauccccagccgcaucuccaucuacuggaccaucgucaagcccggggacauccugcucaucaacagcacgggcaaccugaucgccccgcggggguacuucaagauccgcuccggcaagagcuccaucaugcggagcgacgcccccaucggcaagugcaaguccgagugcaucacccccaacgggagcauccccaacgacaagccguuccagaacgugaaccgcaucaccuacggcgcgugcccccgguacgugaagcaguccacccugaagcucgccacggggaugcgcaacguccccgagaagcagacccggggcaucuucggggccaucgccggcuucaucgagaacggcugggaggggaugguggacggcugguacggguuccgccaccagaacagcgagggccgggggcaggccgcggaccugaaguccacccaggccgccaucgaccagaucaacggcaagcugaaccgccucaucggcaagaccaacgagaaguuccaccagaucgagaaggaguucagcgagguggaggggcggauccaggaccuggagaaguacgucgaggacacgaagaucgaccugugguccuacaacgccgagcuccugguggcccuggagaaccagcacaccaucgaccucaccgacagcgagaugaacaagcuguucgagaagaccaagaagcagcugcgcgagaacgcggaggacaugggcaacgggugcuucaagaucuaccacaagugcgacaacgccugcaucggcuccauccgcaacgggacguacgaccacgacguguaccgggacgaggcccucaacaaccgcuuccagaucaagggcgucgagcucaagagcggcuacaaggacuggauccuguggaucuccuucgccaucagcugcuuccugcugugcguggcccugcucggguucaucaugugggcgugccagaagggcaacauccggugcaacaucugcaucuga

SEQ ID NO: 75558 - RNA, 1701 nt, Artificial Sequence; identical to SEQ ID NO: 74018
  derived and/or modified CDS sequence (opt1) from hemagglutinin__InfluenzaA__AHL97384

SEQ ID NO: 75559 - RNA, 1701 nt, Artificial Sequence; identical to SEQ ID NO: 73882
  derived and/or modified CDS sequence (opt1) from hemagglutinin__InfluenzaA__AHL97396

SEQ ID NO: 75560 - RNA, 1701 nt, Artificial Sequence; identical to SEQ ID NO: 73859
  derived and/or modified CDS sequence (opt1) from hemagglutinin__InfluenzaA__AHL97408

SEQ ID NO: 75561 - RNA, 1701 nt, Artificial Sequence; identical to SEQ ID NO: 75530
  derived and/or modified CDS sequence (opt1) from hemagglutinin__InfluenzaA__AHL97420

SEQ ID NO: 75562 - RNA, 1701 nt, Artificial Sequence
  derived and/or modified CDS sequence (opt1) from hemagglutinin__InfluenzaA__AHL97444
augaagaccaucaucgcccugagcuacauccucugccugguguucgcccagaagcugcccggcaacgacaacuccaccgcgacgcucugccuggggcaccacgccgucccgaacggcaccaucgugaagaccaucaccaacgaccgcaucgaggugacgaacgccaccgagcugguccagaacagcuccaucggggagaucugcgacagcccccaccagauccucgacggcgagaacugcacccugaucgacgcccugcucggggacccccagugcgacggcuuccagaacaagaagugggaccuguucguggagcgguccaaggccuacagcaacugcuaccccuacgacgugccggacuacgcgucccugcgcagccucgucgccuccagcggcacccuggaguucaacaacgaguccuucaacugggccggggugacgcagaacggcaccagcuccgccugcauccgggggagcaacuccagcuucuucucccgccugaacuggcucacccaccugaacuucaaguaccccgcgcugaacgugaccaugcccaacaacgagcaguucgacaagcucuacaucuggggcguccaccaccccgggacggacaaggaccagaucuuccuguacgcccagagcuccggccggaucaccgugagcaccaagcgcagccagcaggccgugaucccgaacaucggcucccggccccgcauccggaacauccccagccgcaucuccaucuacuggaccaucgucaagcccggggacauccugcucaucaacagcacgggcaaccugaucgccccgcggggguacuucaagauccgcuccggcaagagcuccaucaugcggagcgacgcccccaucggcaagugcaaguccgagugcaucacccccaacgggagcauccccaacgacaagccguuccagaacgugaaccgcaucaccuacgggaccugcccccgguacgugaagcaguccacgcugaagcucgcgaccggcaugcgcaacguccccgagaagcagacccggggcaucuucggggccaucgccggcuucaucgagaacggcugggaggggaugguggacggcugguacggguuccgccaccagaacagcgagggccgggggcaggccgccgaccugaaguccacccaggcggccaucgaccagaucaacggcaagcugaaccgccucaucggcaagacgaacgagaaguuccaccagaucgagaaggaguucagcgagguggaggggcggauccaggaccuggagaaguacgucgaggacaccaagaucgaccugugguccuacaacgccgagcuccugguggcccuggagaaccagcacaccaucgaccucaccgacagcgagaugaacaagcuguucgagaagacgaagaagcagcugcgcgagaacgccgaggacaugggcaacgggugcuucaagaucuaccacaagugcgacaacgcgugcaucggcuccauccgcaacgggaccuacgaccacgacguguaccgggacgaggcccucaacaaccgcuuccagaucaagggcgucgagcucaagagcggcuacaaggacuggauccuguggaucuccuucgccaucagcugcuuccugcugugcguggcccugcucggguucaucaugugggccugccagaagggcaacauccggugcaacaucugcaucuga

SEQ ID NO: 75563 - RNA, 1701 nt, Artificial Sequence; identical to SEQ ID NO: 73892
  derived and/or modified CDS sequence (opt1) from hemagglutinin__InfluenzaA__AHL97456

SEQ ID NO: 75564 - RNA, 1701 nt, Artificial Sequence
  derived and/or modified CDS sequence (opt1) from hemagglutinin__InfluenzaA__AHL97468
augaagaccaucaucgcccugagcuacauccucugccugguguucgcccagaagcugcccggcaacgacaacuccaccgcgacgcucugccuggggcaccacgccgucccgaacggcaccaucgugaagaccaucaccaacgaccgcaucgaggugacgaacgccaccgagcugguccagaacagcuccaucggggagaucugcgacagcccccaccagauccucgacggcgagaacugcacccugaucgacgcccugcucggggacccccagugcgacggcuuccagaacaagaagugggaccuguucguggagcgguccaaggccuacagcaacugcuaccccuacgacgugccggacuacgcgucccugcgcagccucgucgccuccagcggcacccuggaguucaacaacgaguccuucaacuggacgggggugacccagaacggcaccagcuccgccugcauccggcgcagcaacuccagcuucuucucccggcugaacuggcucacccaccugaacuucaaguaccccgcccugaacgugacgaugcccaacaacgagcaguucgacaagcucuacaucuggggcguccaccaccccgggaccgacaaggaccagaucuuccuguacgcgcagagcuccgggcgcaucaccgugagcaccaagcggagccagcaggccgugaucccgaacaucggcucccgcccccggauccgcaacauccccagccggaucuccaucuacuggacgaucgucaagcccggcgacauccugcucaucaacagcaccgggaaccugaucgccccgcgcggcuacuucaagauccgguccggcaagagcuccaucaugcgcagcgacgcccccaucgggaagugcaaguccgagugcaucacccccaacggcagcauccccaacgacaagccguuccagaacgugaaccggaucaccuacggggccugcccccgcuacgugaagcaguccacgcugaagcucgcgaccggcaugcggaacguccccgagaagcagacccgcgggaucuucggcgccaucgccggguucaucgagaacggcugggagggcaugauggacgggugguacggcuuccggcaccagaacagcgaggggcgcggccaggccgccgaccugaaguccacccaggcggccaucgaccagaucaacgggaagcugaaccggcucaucggcaagacgaacgagaaguuccaccagaucgagaaggaguucagcgagguggagggccgcauccaggaccuggagaaguacguggaggacaccaagaucgaccugugguccuacaacgccgagcuccuggucgcccuggagaaccagcacaccaucgaccucaccgacagcgagaugaacaagcuguucgagaagacgaagaagcagcugcgcgagaacgccgaggacauggggaacggcugcuucaagaucuaccacaagugcgacaacgcgugcaucggguccauccggaacggcaccuacgaccacaacguguaccgcgacgaggcccucaacaaccgguuccagaucaaggggguggagcucaagagcggcuacaaggacuggauccuguggaucuccuucgccaucagcugcuuccugcugugcgucgcccugcucggcuucaucaugugggccugccagaaggggaacauccgcugcaacaucugcaucuga

SEQ ID NO: 75565 - RNA, 1701 nt, Artificial Sequence; identical to SEQ ID NO: 74018
  derived and/or modified CDS sequence (opt1) from hemagglutinin__InfluenzaA__AHL97480

SEQ ID NO: 75566 - RNA, 1701 nt, Artificial Sequence; identical to SEQ ID NO: 74018
  derived and/or modified CDS sequence (opt1) from hemagglutinin__InfluenzaA__AHL97493

SEQ ID NO: 75567 - RNA, 1701 nt, Artificial Sequence; identical to SEQ ID NO: 75530
  derived and/or modified CDS sequence (opt1) from hemagglutinin__InfluenzaA__AHL97505

SEQ ID NO: 75568 - RNA, 1701 nt, Artificial Sequence
  derived and/or modified CDS sequence (opt1) from hemagglutinin__InfluenzaA__AHL97517
augaagaccaucaucgcccugagcuacauccucugccugguguucgcccagaagcugcccggcaacgacaacuccaccgcgacgcucugccuggggcaccacgccgucccgaacggcaccaucgugaagaccaucaccaacgaccgcaucgaggugacgaacgccaccgagcugguccagaacagcuccaucggggagaucugcgacagcccccaccagauccucgacggcgagaacugcacccugaucgacgcccugcucggggacccccagugcgacggcuuccagaacaagaagugggaccuguucguggagcgguccaaggccuacagcaacugcuaccccuacgacgugccggacuacgcgucccugcgcagccucgucgccuccagcggcacccuggaguucaacaacgaguccuucaacuggacgggggugacccagaacggcaccagcuccgccugcauccggcgcagcaacuccagcuucuucucccggcugaacuggcucacccaccugaacuucaaguaccccgcccugaacgugacgaugcccaacaacgagcaguucgacaagcucuacaucuggggcguccaccaccccgggaccgacaaggaccagaucuuccuguacgcgcagagcuccgggcgcaucaccgugagcacccagcggagccagcaggccgugaucccgaacaucggcucccgcccccggauccgcaacauccccagccggaucuccaucuacuggacgaucgucaagcccggcgacauccugcucaucaacagcaccgggaaccugaucgccccgcgcggcuacuucaagauccgguccggcaagagcuccaucaugcgcagcgacgcccccaucgggaagugcaaguccgagugcaucacccccaacggcagcauccccaacgacaagccguuccagaacgugaaccggaucaccuacggggccugcccccgcuacgugaagcaguccacgcugaagcucgcgaccggcaugcggaacguccccgagaagcagacccgcgggaucuucggcgccaucgccggguucaucgagaacggcugggagggcaugguggacgggugguacggcuuccggcaccagaacagcgaggggcgcggccaggccgccgaccugaaguccacccaggcggccaucgaccagaucaacgggaagcugaaccggcucaucggcaagacgaacgagaaguuccaccagaucgagaaggaguucagcgagguggagggccgcauccaggaccuggagaaguacgucgaggacaccaagaucgaccugugguccuacaacgccgagcuccugguggcccuggagaaccagcacaccaucgaccucaccgacagcgagaugaacaagcuguucgagaagacgaagaagcagcugcgcgagaacgccgaggacauggggaacggcugcuucaagaucuaccacaagugcgacaacgcgugcaucggguccauccggaacggcaccuacgaccacaacguguaccgcgacgaggcccucaacaaccgguuccagaucaagggggucgagcucaagagcggcuacaaggacuggauccuguggaucuccuucgccaucagcugcuuccugcugugcguggcccugcucggcuucaucaugugggccugccagaaggggaacauccgcugcaacaucugcaucuga

SEQ ID NO: 75569 - RNA, 1701 nt, Artificial Sequence; identical to SEQ ID NO: 73907
  derived and/or modified CDS sequence (opt1) from hemagglutinin__InfluenzaA__AHL97529

SEQ ID NO: 75570 - RNA, 1701 nt, Artificial Sequence; identical to SEQ ID NO: 73892
  derived and/or modified CDS sequence (opt1) from hemagglutinin__InfluenzaA__AHL97541

SEQ ID NO: 75571 - RNA, 1701 nt, Artificial Sequence; identical to SEQ ID NO: 74018
  derived and/or modified CDS sequence (opt1) from hemagglutinin__InfluenzaA__AHL97553

SEQ ID NO: 75572 - RNA, 1701 nt, Artificial Sequence; identical to SEQ ID NO: 73859
  derived and/or modified CDS sequence (opt1) from hemagglutinin__InfluenzaA__AHL97565

SEQ ID NO: 75573 - RNA, 1701 nt, Artificial Sequence
  derived and/or modified CDS sequence (opt1) from hemagglutinin__InfluenzaA__AHL97577
augaagaccaucaucgcccugagcuacauccucugccugguguucgcccagaagauccccggcaacgacaacuccaccgcgacgcugugccucgggcaccacgccgucccgaacggcaccaucgugaagaccaucaccaacgaccgcaucgaggugacgaacgccaccgagcugguccagaacagcuccaucggggagaucugcgacagcccccaccagauccuggacggcgagaacugcacccucaucgacgcccugcugggggacccccagugcgacggcuuccagaacaagaagugggaccucuucguggagcgguccaaggccuacagcaacugcuaccccuacgacgugccggacuacgcgucccugcgcagccuggucgccuccagcggcacccucgaguucaacaacgaguccuucaacuggacgggggugacccagaacggcaccagcuccgccugcauccgggggagcaacuccagcuucuucucccgccugaacuggcugacccaccucaacuucaaguaccccgcccugaacgugacgaugcccaacaacgagcaguucgacaagcuguacaucuggggcguccaccaccccgggaccgacaaggaccagaucuuccucuacgcgcagagcuccggccggaucaccgugagcaccaagcgcagccagcaggccgugaucccgaacaucggcucccggccccgcauccggaacauccccagccgcaucuccaucuacuggacgaucgucaagcccggggacauccugcugaucaacagcaccggcaaccucaucgccccgcggggguacuucaagauccgcuccggcaagagcuccaucaugcggagcgacgcccccaucggcaagugcaaguccgagugcaucacccccaacgggagcauccccaacgacaagccguuccagaacgugaaccgcaucaccuacggcgccugcccccgguacgugaagcaguccacgcugaagcuggcgaccgggaugcgcaacguccccgagaagcagacccggggcaucuucggggccaucgccggcuucaucgagaacggcugggaggggaugguggacggcugguacggguuccgccaccagaacagcgagggccgggggcaggccgccgaccucaaguccacccaggcggccaucgaccagaucaacggcaagcugaaccgccugaucggcaagacgaacgagaaguuccaccagaucgagaaggaguucagcgagguggaggggcggauccaggaccucgagaaguacgucgaggacaccaagaucgaccugugguccuacaacgccgagcugcucguggcccuggagaaccagcacaccaucgaccugaccgacagcgagaugaacaagcuguucgagcgcacgaagaagcagcuccgcgagaacgccgaggacaugggcaacgggugcuucaagaucuaccacaagugcgacaacgcgugcaucggcuccauccggaacgggaccuacgaccacgacguguaccgcgacgaggcccugaacaaccgguuccagaucaagggcgucgagcucaagcccggcuacaaggacuggauccuguggaucagcuucgccaucuccugcuuccugcucugcguggcccugcugggguucaucaugugggccugccagaagggcaacauccgcugcaacaucugcaucuga

SEQ ID NO: 75574 - RNA, 1701 nt, Artificial Sequence; identical to SEQ ID NO: 74047
  derived and/or modified CDS sequence (opt1) from hemagglutinin__InfluenzaA__AHL97589

SEQ ID NO: 75575 - RNA, 1701 nt, Artificial Sequence; identical to SEQ ID NO: 74018
  derived and/or modified CDS sequence (opt1) from hemagglutinin__InfluenzaA__AHL97601

SEQ ID NO: 75576 - RNA, 1701 nt, Artificial Sequence; identical to SEQ ID NO: 73882
  derived and/or modified CDS sequence (opt1) from hemagglutinin__InfluenzaA__AHL97613

SEQ ID NO: 75577 - RNA, 1701 nt, Artificial Sequence; identical to SEQ ID NO: 75564
  derived and/or modified CDS sequence (opt1) from hemagglutinin__InfluenzaA__AHL97625

SEQ ID NO: 75578 - RNA, 1701 nt, Artificial Sequence; identical to SEQ ID NO: 73892
  derived and/or modified CDS sequence (opt1) from hemagglutinin__InfluenzaA__AHL97637

SEQ ID NO: 75579 - RNA, 1701 nt, Artificial Sequence
  derived and/or modified CDS sequence (opt1) from hemagglutinin__InfluenzaA__AHL97661
augaagaccaucaucgcccugggcuacauccucugccugguguucgcccagaagcugcccgggaacgacaacagcaccgcgacgcucugccugggccaccacgccgucccgaacgggaccaucgugaagaccaucaccaacgaccgcaucgaggugacgaacgccaccgagcugguccagaacuccagcaucggcgagaucugcgacagcccccaccagauccucgacggggagaacugcacccugaucgacgcccugcucggcgacccccagugcgacggcuuccagaacaagaagugggaccuguucguggagcggagcaaggccuacuccaacugcuaccccuacgacgugccggacuacgcgagccugcgcucccucgucgccagcuccgggacccuggaguucaacaacgagagcuucaacuggacgggcgugacccagaacgggaccuccagcgccugcauccggcgcuccaacagcuccuucuucagccggcugaacuggcucacccaccugaacuucaaguaccccgcccugaacgugacgaugcccaacaacgagcaguucgacaagcucuacaucuggggcguccaccaccccgggaccgacaaggaccagaucuuccuguacgcgcaguccagcggccgcaucaccguguccaccaagcggagccagcaggccgugaucccgaacaucggcagccgcccccggauccgcaacauccccucccggaucagcaucuacuggacgaucgucaagcccggggacauccugcucaucaacuccaccggcaaccugaucgccccgcgcggguacuucaagauccggagcggcaaguccagcaucaugcgcuccgacgcccccaucggcaagugcaagagcgagugcaucacccccaacggguccauccccaacgacaagccguuccagaacgugaaccggaucaccuacggcgccugcccccgcuacgugaagcagagcacgcugaagcucgcgaccgggaugcggaacguccccgagaagcagacccgcggcaucuucggggccaucgccggcuucaucgagaacggcugggaggggaugguggacggcugguacggguuccggcaccagaacuccgagggccgcgggcaggccgccgaccugaaguccacccaggcggccaucgaccagaucaacggcaagcugaaccggcucaucggcaagacgaacgagaaguuccaccagaucgagaaggaguucuccgagguggaggggcgcauccaggaccuggagaaguacgucgaggacaccaagaucgaccuguggagcuacaacgccgagcuccugguggcccuggagaaccagcacaccaucgaccucaccgacuccgagaugaacaagcuguucgagaagacgaagaagcagcugcgcgagaacgccgaggacaugggcaacgggugcuucaagaucuaccacaagugcgacaacgcgugcaucggcagcauccggaacgggaccuacgaccacaacguguaccgcgacgaggcccucaacaaccgguuccagaucaagggcgucgagcugaaguccggcuacaaggacuggauccuguggaucagcuucgccaucuccugcuuccuccugugcguggcccugcucggguucaucaugugggccugccagaagggcaacauccgcugcaacaucugcaucuga

SEQ ID NO: 75580 - RNA, 1701 nt, Artificial Sequence
  derived and/or modified CDS sequence (opt1) from hemagglutinin__InfluenzaA__AHL97673
augaagaccaccaucgcccugagcuacauccucugccugguguucgcccaggagcugcccggcaacgacgacuccacggcgacccucugccuggggcaccacgccgucccgaacggcaccaucgugaagaccaucacgaacgaccagaucgaggugaccaacgccaccgagcugguccagagcuccagcaccggggagaucugcaacagcccccaccagauccucgacggcgagaacugcacgcugaucgacgcccugcucggggacccccagugcgacggcuuccagaacaagaagugggaccuguucguggagcgcagcaaggcccacuccaacugcuaccccuacgacgugccggacuacgcgagccugcggucccucgucgccagcuccggcacccuggaguucaacaacgagagcuucaacuggaccggggugacccagaacggcacguccagcgccugcauccgccgguccaacaacagcuucuucucccgccugaacuggcucacccaccugaacuucaaguaccccgcccugaacgugaccaugcccaacaacgagcaguucgacaagcucuacaucuggggcguccaccaccccgggaccgacaaggaccagaucuuccuguacgcgcaggccagcgggcggaucacgguguccaccaagcgcagccagcaggccgugaucccgaacaucggcagccggccccgcguccggaacauccccucccgcgugagcaucuacuggaccaucgugaagcccggcgacauccugcucaucaacuccaccgggaaccugaucgccccgcggggcuacuucaagauccgcagcgggaaguccagcaucaugcgguccgacgcccccaucggcaagugcaacagcgcgugcaucacgcccaacggcuccauccccaacgacaagccguuccagaacgucaaccgcaucaccuacggggccugcccccgguacgugaagcagaacacccugaagcucgccaccggcaugcgcaacgugcccgagaagcagacgcgggggaucuucggcgccaucgccggguucaucgagaacggcugggagggcauggucgacgggugguacggcuuccgccaccagaacagcgaggggcggggccaggcggccgaccugaaguccacccaggccgccaucgaccagaucaacgggaagcugaaccgccucaucggcaagaccaacgagaaguuccaccagaucgagaaggaguucagcgagguggagggccggauccaggaccuggagaaguacguggaggacaccaagaucgaccugugguccuacaacgccgagcuccuggucgcgcuggagaaccagcacacgaucgaccucaccgacagcgagaugaacaagcuguucgagaagaccaagaagcagcugcgcgagaacgccgaggacauggggaacggcugcuucaagaucuaccacaagugcgacaacgccugcaucggguccauccgcaacggcaccuacgaccacgacguguaccgggacgaggcccucaacaaccgcuuccagaucaaggggguggagcugaaguccggcuacaaggacuggauccuguggaucuccuucgccaucagcugcuuccuccugugcgucgcgcugcucggcuucaucaugugggccugccagaaggggaacauccggugcaacaucugcaucuga

SEQ ID NO: 75581 - RNA, 1701 nt, Artificial Sequence; identical to SEQ ID NO: 74018
  derived and/or modified CDS sequence (opt1) from hemagglutinin__InfluenzaA__AHL97685

SEQ ID NO: 75582 - RNA, 1701 nt, Artificial Sequence
  derived and/or modified CDS sequence (opt1) from hemagglutinin__InfluenzaA__AHL97697
augaagaccaucaucgcccugagcuacauccucugccugguguucgcccagaagcugcccggcaacgacaacuccaccgcgacgcucugccuggggcaccacgccgucccgaacggcaccaucgugaagaccaucaccaacgaccgcaucgaggugacgaacgccaccgagcugguccagaacagcuccaucggggagaucugcgacagcccccaccagauccucgacggcgagaacugcacccugaucgacgcccugcucggggacccccagugcgacggcuuccagaacaagaagugggaccuguucguggagcggggcaaggccuacuccaacugcuaccccuacgacgugccggacuacgcgagccugcgcucccucgucgccagcuccgggacccuggaguucaacaacgagagcuucaacugggccggcgugacgcagaacgggaccuccagcgccugcauccggggcuccaacagcuccuucuucagccgccugaacuggcucacccaccugaacuucaaguaccccgcgcugaacgugaccaugcccaacaacgagcaguucgacaagcucuacaucuggggcguccaccaccccgggacggacaaggaccagaucuuccuguacgcccaguccagcggccggaucaccguguccaccaagcgcagccagcaggccgugaucccgaacaucgggagccggccccgcauccggaacauccccucccgcaucagcaucuacuggaccaucgucaagcccggcgacauccugcucaucaacuccacggggaaccugaucgccccgcggggcuacuucaagauccgcagcggcaaguccagcaucaugcgguccgacgcccccaucgggaagugcaagagcgagugcaucacccccaacggcuccauccccaacgacaagccguuccagaacgugaaccgcaucaccuacggggcgugcccccgguacgugaagcagagcacccugaagcucgccacgggcaugcgcaacguccccgagaagcagacccgggggaucuucggcgccaucgccggcuucaucgagaacgggugggagggcaugguggacgggugguacggcuuccgccaccagaacuccgaggggcggggccaggccgcggaccucaagagcacccaggccgccaucgaccagaucaacggcaagcugaaccgccugaucgggaagaccaacgagaaguuccaccagaucgagaaggaguucuccgagguggagggccggauccaggaccuggagaaguacgucgaggacacgaagaucgaccuguggagcuacaacgccgagcuccugguggcccuggagaaccagcacaccaucgaccucaccgacuccgagaugaacaagcuguucgagaagaccaagaagcagcugcgcgagaacgcggaggacauggggaacggcugcuucaagaucuaccacaagugcgacaacgccugcaucgggagcauccgcaacggcacguacgaccacgacguguaccgggacgaggcccucaacaaccgcuuccagaucaagggcgucgagcugaaguccggguacaaggacuggauccuguggaucagcuucgccaucuccugcuuccuccugugcguggcccugcucggcuucaucaugugggcgugccagaaggggaacauccggugcaacaucugcaucuga

SEQ ID NO: 75583 - RNA, 1701 nt, Artificial Sequence; identical to SEQ ID NO: 73892
  derived and/or modified CDS sequence (opt1) from hemagglutinin__InfluenzaA__AHL97709

SEQ ID NO: 75584 - RNA, 1701 nt, Artificial Sequence; identical to SEQ ID NO: 74018
  derived and/or modified CDS sequence (opt1) from hemagglutinin__InfluenzaA__AHL97721

SEQ ID NO: 75585 - RNA, 1701 nt, Artificial Sequence; identical to SEQ ID NO: 73892
  derived and/or modified CDS sequence (opt1) from hemagglutinin__InfluenzaA__AHL97733

SEQ ID NO: 75586 - RNA, 1701 nt, Artificial Sequence; identical to SEQ ID NO: 73882
  derived and/or modified CDS sequence (opt1) from hemagglutinin__InfluenzaA__AHL97745

SEQ ID NO: 75587 - RNA, 1701 nt, Artificial Sequence; identical to SEQ ID NO: 74018
  derived and/or modified CDS sequence (opt1) from hemagglutinin__InfluenzaA__AHL97757

SEQ ID NO: 75588 - RNA, 1701 nt, Artificial Sequence; identical to SEQ ID NO: 74018
  derived and/or modified CDS sequence (opt1) from hemagglutinin__InfluenzaA__AHL97769

SEQ ID NO: 75589 - RNA, 1701 nt, Artificial Sequence
  derived and/or modified CDS sequence (opt1) from hemagglutinin__InfluenzaA__AHL97781
augaagaccaucaucgcccugagcuacauccucugccugguguucgcccaggagcugcccggcaacgacgacuccaccgcgacgcucugccuggggcaccacgccgucccgaacggcaccaucgugaagaccaucaccaacgaccagaucgaggugacgaacgccaccgagcugguccagagcuccagcaccggggagaucugcaacagcccccaccagauccucgacggcgagaacugcacccugaucgacgcccugcucggggacccccagugcgacggcuuccagaacaagaagugggaccuguucguggagcgcagcaaggcccacuccaacugcuaccccuacgacgugccggacuacgcgagccugcggucccucgucgccagcuccggcacgcuggaguucaacaacgagagcuucaacuggaccggggugacccagaacggcaccuccagcgccugcauccgccgguccaacaacagcuucuucucccgccugaacuggcucacgcaccugaacuucaaguaccccgcccugaacgugaccaugcccaacaacgagcaguucgacaagcucuacaucuggggcguccaccaccccgggaccgacaaggaccagaucuuccuguacgcgcaggccagcgggcggaucaccguguccacgaagcgcagccagcaggccgugaucccgaacaucggcagccggccccgcguccggaacauccccucccgcgugagcaucuacuggaccaucgugaagcccggcgacauccugcucaucaacuccaccgggaaccugaucgccccgcggggcuacuucaagauccgcagcgggaacuccagcaucaugcgguccgacgcccccaucggcaagugcaacagcacgugcaucacccccaacggcuccauccccaacgacaagccguuccagaacgucaaccgcaucaccuacggggcgugcccccgguacgugaagcagaacacccugaagcucgccaccggcaugcgcaacgugcccgagaagcagacgcgggggaucuucggcgccaucgccggguucaucgagaacggcugggagggcauggucgacgggugguacggcuuccgccaccagaacagcgaggggcggggccaggccgcggaccugaaguccacccaggccgccaucgaccagaucaacgggaagcugaaccgccucaucggcaagaccaacgagaaguuccaccagaucgagaaggaguucagcgagguggagggccggauccaggaccuggagaaguacguggaggacaccaagaucgaccugugguccuacaacgccgagcuccuggucgcccuggagaaccagcacacgaucgaccucaccgacagcgagaugaacaagcuguucgagaagaccaagaagcagcugcgcgagaacgcggaggacauggggaacggcugcuucaagaucuaccacaagugcgacaacgccugcaucggguccauccgcaacggcaccuacgaccacgacguguaccgggacgaggcccucaacaaccgcuuccagaucaaggggguggagcugaaguccggcuacaaggacuggauccuguggaucuccuucgccaucagcugcuuccuccugugcgucgcccugcucggcuucaucaugugggcgugccagaaggggaacauccggugcaacaucugcaucuga

SEQ ID NO: 75590 - RNA, 1701 nt, Artificial Sequence; identical to SEQ ID NO: 74018
  derived and/or modified CDS sequence (opt1) from hemagglutinin__InfluenzaA__AHL97793

SEQ ID NO: 75591 - RNA, 1701 nt, Artificial Sequence
  derived and/or modified CDS sequence (opt1) from hemagglutinin__InfluenzaA__AHL97805
augaagaccaucaucgcccugagcuacauccucugccugguguucgcccagaagcugcccggcaacgacaacuccaccgcgacgcucugccuggggcaccacgccgucccgaacggcaccaucgugaagaccaucaccaacgaccgcaucgaggugacgaacgccaccgagcugguccagaacagcuccaucggggagaucugcgacagcccccaccagauccucgacggcgagaacugcacccugaucgacgcccugcucggggacccccagugcgacggcuuccagaacaagaagugggaccuguucguggagcgguccaaggccuacagcaacugcuaccccuacgacgugccggacuacgcgucccugcgcagccucgucgccuccagcggcacccuggaguucaacaacgaguccuucaacugggccggggugacgcagaacggcaccagcuccgccugcauccgggggagcaacuccagcuucuucucccgccugaacuggcucacccaccugaacuucaaguaccccgcgcugaacgugaccaugcccaacaacgagcaguucgacaagcucuacaucuggggcguccaccaccccgggacggacaaggaccagaucuuccuguacgcccagagcuccggccggaucaccgugagcaccaagcgcagccagcaggccgugaucccgaacaucggcucccggccccgcauccggaacauccccagccgcaucuccaucuacuggaccaucgucaagcccggggacauccugcucaucaacagcacgggcaaccugaucgccccgcggggguacuucaagauccgcuccggcaagagcuccaucaugcggagcgacgcccccaucggcaagugcaaguccgagugcaucacccccaacgggagcauccccaacgacaagccguuccagaacgugaaccgcaucaccuacggcgcgugcccccgguacgugaagcaguccacccugaagcucgccacggggaugcgcaacguccccgagaagcagacccggggcaucuucggggccaucgccggcuucaucgagaacggcugggaggggaugguggacggcugguacggguuccgccaccagaacuacgagggccgggggcaggccgcggaccucaagagcacccaggccgccaucgaccagaucaacggcaagcugaaccgccugaucggcaagaccaacgagaaguuccaccagaucgagaaggaguucuccgagguggaggggcggauccaggaccuggagaaguacgucgaggacacgaagaucgaccuguggagcuacaacgccgagcuccugguggcccuggagaaccagcacaccaucgaccucaccgacuccgagaugaacaagcuguucgagaagaccaagaagcagcugcgcgagaacgcggaggacaugggcaacgggugcuucaagaucuaccacaagugcgacaacgccugcaucggcagcauccgcaacgggacguacgaccacgacguguaccgggacgaggcccucaacaaccgcuuccagaucaagggcgucgagcugaaguccggcuacaaggacuggauccuguggaucagcuucgccaucuccugcuuccuccugugcguggcccugcucggguucaucaugugggcgugccagaagggcaacauccggugcaacaucugcaucuga

SEQ ID NO: 75592 - RNA, 1701 nt, Artificial Sequence; identical to SEQ ID NO: 73892
  derived and/or modified CDS sequence (opt1) from hemagglutinin__InfluenzaA__AHL97817

SEQ ID NO: 75593 - RNA, 1701 nt, Artificial Sequence; identical to SEQ ID NO: 75582
  derived and/or modified CDS sequence (opt1) from hemagglutinin__InfluenzaA__AHL97829

SEQ ID NO: 75594 - RNA, 1701 nt, Artificial Sequence; identical to SEQ ID NO: 74018
  derived and/or modified CDS sequence (opt1) from hemagglutinin__InfluenzaA__AHL97841

SEQ ID NO: 75595 - RNA, 1701 nt, Artificial Sequence; identical to SEQ ID NO: 74018
  derived and/or modified CDS sequence (opt1) from hemagglutinin__InfluenzaA__AHL97853

SEQ ID NO: 75596 - RNA, 1701 nt, Artificial Sequence; identical to SEQ ID NO: 74018
  derived and/or modified CDS sequence (opt1) from hemagglutinin__InfluenzaA__AHL97865

SEQ ID NO: 75597 - RNA, 1701 nt, Artificial Sequence; identical to SEQ ID NO: 74018
  derived and/or modified CDS sequence (opt1) from hemagglutinin__InfluenzaA__AHL97877

SEQ ID NO: 75598 - RNA, 1701 nt, Artificial Sequence; identical to SEQ ID NO: 73892
  derived and/or modified CDS sequence (opt1) from hemagglutinin__InfluenzaA__AHL97889

SEQ ID NO: 75599 - RNA, 1701 nt, Artificial Sequence; identical to SEQ ID NO: 73892
  derived and/or modified CDS sequence (opt1) from hemagglutinin__InfluenzaA__AHL97901

SEQ ID NO: 75600 - RNA, 1701 nt, Artificial Sequence; identical to SEQ ID NO: 73882
  derived and/or modified CDS sequence (opt1) from hemagglutinin__InfluenzaA__AHL97913

SEQ ID NO: 75601 - RNA, 1701 nt, Artificial Sequence
  derived and/or modified CDS sequence (opt1) from hemagglutinin__InfluenzaA__AHL97925
augaagaccaucaucgcccugagcuacauccucugccugguguucgcccagaagcugcccggcaacgacaacuccaccgcgacgcucugccuggggcaccacgccgucccgaacggcaccaucgugaagaccaucaccaacgaccgcaucgaggugacgaacgccaccgagcugguccagaacagcuccaucggggagaucugcgacagcccccaccagauccucgacggcgagaacugcacccugaucgacgcccugcucggggacccccagugcgacggcuuccagaacaagaagugggaccuguucguggagcgguccaaggccuacagcaacugcuaccccuacgacgugccggacuacgcgucccugcgcagccucgucgccuccagcggcacccuggaguucaacaacgaguccuucaacuggacgggggugacccagaacggcaccagcuccgccugcauccggcgcagcaacaacuccuucuucagccggcugaacuggcucacccacuccaacuucaaguaccccgcccugaacgugacgaugcccaacaacgagcaguucgacaagcuguacaucuggggcguccaccaccccgggaccgacaaggaccagaucuuccucuacgcgcagagcuccgggcgcaucaccgugagcaccaagcggagccagcaggccgugaucccgaacaucggcucccgcccccggauccgcaacauccccagccggaucuccaucuacuggacgaucgucaagcccggcgacauccugcugaucaacagcaccgggaaccucaucgccccgcgcggcuacuucaagauccgguccggcaagagcuccaucaugcgcagcgacgcccccaucgggaagugcaaguccgagugcaucacccccaacggcagcauccccaacgacaagccguuccagaacgugaaccggaucaccuacggggccugcccccgcuacgugaagcaguccacgcugaagcuggcgaccggcaugcggaacguccccgagaagcagacccgcgggaucuucggcgccaucgccggguucaucgagaacggcugggagggcaugauggacgggugguacggcuuccggcaccagaacagcgaggggcgcggccaggccgccgaccucaaguccacccaggcggccaucgaccagaucaacgggaagcugaaccggcugaucggcaagacgaacgagaaguuccaccagaucgagaaggaguucagcgagguggagggccgcauccaggaccucgagaaguacguggaggacaccaagaucgaccugugguccuacaacgccgagcugcucgucgcccuggagaaccagcacaccaucgaccugaccgacagcgagaugaacaagcuguucgagaagacgaagaagcugcugcgcgagaacgccgaggacauggggaacggcugcuucaagaucuaccacaagugcgacaacgcgugcaucggguccauccggaacggcaccuacgaccacgacguguaccgcgacgaggcccucaacaaccgguuccagaucaaggggguggagcucaagagcggcuacaaggacuggauccuguggaucuccuucgccaucagcugcuuccuccugugcgucgcccugcucggcuucaucaugugggccugccagaaggggaacauccgcugcaacaucugcaucuga

SEQ ID NO: 75602 - RNA, 1701 nt, Artificial Sequence; identical to SEQ ID NO: 73882
  derived and/or modified CDS sequence (opt1) from hemagglutinin__InfluenzaA__AHL97937

SEQ ID NO: 75603 - RNA, 1701 nt, Artificial Sequence; identical to SEQ ID NO: 75562
  derived and/or modified CDS sequence (opt1) from hemagglutinin__InfluenzaA__AHL97949

SEQ ID NO: 75604 - RNA, 1701 nt, Artificial Sequence; identical to SEQ ID NO: 73892
  derived and/or modified CDS sequence (opt1) from hemagglutinin__InfluenzaA__AHL97961

SEQ ID NO: 75605 - RNA, 1701 nt, Artificial Sequence; identical to SEQ ID NO: 73892
  derived and/or modified CDS sequence (opt1) from hemagglutinin__InfluenzaA__AHL97973

SEQ ID NO: 75606 - RNA, 1701 nt, Artificial Sequence; identical to SEQ ID NO: 73892
  derived and/or modified CDS sequence (opt1) from hemagglutinin__InfluenzaA__AHL97985

SEQ ID NO: 75607 - RNA, 1701 nt, Artificial Sequence
  derived and/or modified CDS sequence (opt1) from hemagglutinin__InfluenzaA__AHL97997
augaagaccaucaucgcccugagcuacauccucugccugguguucgcccagaagcugcccggcaacgacaacuccaccgcgacgcucugccuggggcaccacgccgucccgaacggcaccaucgugaagaccaucaccaacgaccgcaucgaggugacgaacgccaccgagcugguccagaacagcuccaucggggagaucugcgacagcccccaccagauccucgacggcgagaacugcacccugaucgacgcccugcucggggacccccagugcgacggcuuccagaacaagaagugggaccuguucguggagcgguccaaggccuacagcaacugcuaccccuacgacgugccggacuacgcgucccugcgcagccucgucgccuccagcggcacccuggaguucaacaacgaguccuucaacuggacgggggugacccagaacggcaccagcuccgccugcauccggcgcagcaacuccagcuucuucucccggcugaacuggcucacccaccugaacuucaaguaccccgcccugaacgugacgaugcccaacaacgagcaguucgacaagcucuacaucuggggcguccaccaccccgggaccgacaaggaccagaucuuccuguacgcgcagagcuccgggcgcaucaccgugagcaccaagcggagccagcaggccgugaucccgaacaucggcucccgcccccggauccgcaacauccccagccggaucuccaucuacuggacgaucgucaagcccggcgacauccugcucaucaacagcaccgggaaccugaucgccccgcgcggcuacuucaagauccgguccggcaagagcuccaucaugcgcagcgacgcccccaucgggaagugcaaguccgagugcaucacccccaacggcagcauccccaacgacaagccguuccagaacgugaaccggaucaccuacggggccugcccccgcuacgugaagcaguccacgcugaagcucgcgaccggcaugcggaacguccccgagaagcagacccgcgggaucuucggcgccaucgccggguucaucgagaacggcugggagggcaugguggacgggugguacggcuuccggcaccagaacagcgaggggcgcggccaggccgccgaccugaaguccacccaggcggccaucgaccagaucaacgggaagcugaaccggcucaucggcaagacgaacgagaaguuccaccagaucgagaaggaguucagcgagguggagggccgcauccaggaccuggagaaguacgucgaggacaccaagaucgaccugugguccuacaacgccgagcuccugguggcccuggagaaccagcacaccaucgaccucaccgacagcgagaugaacaagcuguucgagaagacgaagaagcagcugcgcgagaacgccgaggacauggggaacggcugcuucaagaucuaccacaagugcgacaacgcgugcaucggguccauccggaacggcaccuacgaccacgacguguaccgcgacgaggcccucaacaaccgguuccagauccgcggggucgagcucaagagcggcuacaaggacuggauccuguggaucuccuucgccaucagcugcuuccugcugugcguggcccugcucggcuucaucaugugggccugccagaaggggaacauccggugcaacaucugcaucuga

SEQ ID NO: 75608 - RNA, 1701 nt, Artificial Sequence; identical to SEQ ID NO: 74018
  derived and/or modified CDS sequence (opt1) from hemagglutinin__InfluenzaA__AHL98009

SEQ ID NO: 75609 - RNA, 1701 nt, Artificial Sequence
  derived and/or modified CDS sequence (opt1) from hemagglutinin__InfluenzaA__AHL98021
augaagaccaucaucgcccugagcuacauccucugccugguguucgcccagaagcugcccggcaacgacaacuccaccgcgacgcucugccuggggcaccacgccgucccgaacggcaccaucgugaagaccaucaccaacgaccgcaucgaggugacgaacgccaccgagcugguccagaacagcuccaucgggaagaucugcgacagcccccaccagauccucgacggcgagaacugcacccugauggacgcccugcucggggacccccagugcgacggcuuccagaacaagaagugggaccuguucguggagcgguccaaggccuacagcaacugcuaccccuacgacgugccggacuacgcgucccugcgcagccucgucgccuccagcggcacccuggaguucaacaacgaguccuucaacugggccggggugacgcagaacggcaccagcuccgccugcauccggcgcagcaacuccagcuucuucucccggcugaacuggcucacccaccugaacuucaaguaccccgcgcugaacgugaccaugcccaacaacgagcaguucgacaagcucuacaucuggggcguccaccaccccgggacggacaaggaccagaucuuccuguacgcccagagcuccgggcgcaucaccgugagcaccaagcggagccagcaggccgugaucccgaacaucggcucccgcccccggauccgcaacauccccagccggaucuccaucuacuggaccaucgucaagcccggcgacauccugcucaucaacagcacggggaaccugaucgccccgcgcggcuacuucaagauccgguccggcaagagcuccaucaugcgcagcgacgcccccaucgggaagugcaaguccgagugcaucacccccaacggcagcauccccaacgacaagccguuccagaacgugaaccggaucaccuacggggcgugcccccgcuacgugaagcaguccacccugaagcucgccacgggcaugcggaacguccccgagaagcagacccgcgggaucuucggcgccaucgccggguucaucgagaacggcugggagggcaugauggacgggugguacggcuuccggcaccagaacagcgaggggcgcggccaggccgcggaccugaaguccacccaggccgccaucgaccagaucaacgggaagcugaaccggcucaucggcaagaccaacgagaaguuccaccagaucgagaaggaguucagcgagguggagggccgcauccaggaccuggagaaguacguggaggacacgaagaucgaccugugguccuacaacgccgagcuccuggucgcccuggagaaccagcacaccaucgaccucaccgacagcgagaugaacaagcuguucgagaagaccaagaagcagcugcgcgagaacgcggaggacauggggaacggcugcuucaagaucuaccacaagugcgacaacgccugcaucggguccauccggaacggcacguacgaccacaacguguaccgcgacgaggcccucaacaaccgguuccagaucaaggggguggagcucaagagcggcuacaaggacuggauccuguggaucuccuucgccaucagcugcuuccugcugugcgucgcccugcucggcuucaucaugugggcgugccagaaggggaacauccgcugcaacaucugcaucuga

SEQ ID NO: 75610 - RNA, 1701 nt, Artificial Sequence; identical to SEQ ID NO: 73892
  derived and/or modified CDS sequence (opt1) from hemagglutinin__InfluenzaA__AHL98033

SEQ ID NO: 75611 - RNA, 1701 nt, Artificial Sequence; identical to SEQ ID NO: 75489
  derived and/or modified CDS sequence (opt1) from hemagglutinin__InfluenzaA__AHL98045

SEQ ID NO: 75612 - RNA, 1701 nt, Artificial Sequence; identical to SEQ ID NO: 75489
  derived and/or modified CDS sequence (opt1) from hemagglutinin__InfluenzaA__AHL98057

SEQ ID NO: 75613 - RNA, 1701 nt, Artificial Sequence; identical to SEQ ID NO: 75489
  derived and/or modified CDS sequence (opt1) from hemagglutinin__InfluenzaA__AHL98069

SEQ ID NO: 75614 - RNA, 1701 nt, Artificial Sequence
  derived and/or modified CDS sequence (opt1) from hemagglutinin__InfluenzaA__AHL98081
augaagaccaucaucgcccugagcuacauccucugccugguguucgcccagaagcugcccggcaacgacaacuccaccgcgacgcucugccuggggcaccacgccgucccgaacggcaccaucgugaagaccaucaccaacgaccgcaucgaggugacgaacgccaccgagcugguccagaacagcuccaucggggagaucugcgacagcccccaccagauccucgacggcgagaacugcacccugaucgacgcccugcucggggacccccagugcgacggcuuccagaacaagaagugggaccuguucguggagcgguccaaggccuacagcaacugcuaccccuacgacgugccggacuacgcgucccugcgcagccucgucgccuccagcggcacccuggaguucaacaacgaguccuucaacuggacgggggugacccagaacggcaccagcuccgccugcauccgcaagagcaacuccagcuucuucucccggcugaacuggcucacccaccugaacuucaaguaccccgcccugaacgugacgaugcccaacaacgagcaguucgacaagcucuacaucuggggcguccaccaccccgggaccgacaaggaccagaucuuccuguacgcgcagagcuccgggcggaucaccgugagcacccagcgcagccagcaggccgugaucccgaacaucggcucccggccccgcauccggaacauccccagccgcaucuccaucuacuggacgaucgucaagcccggcgacauccugcucaucaacagcaccgggaaccugaucgccccgcggggcuacuucaagauccgcuccggcaagagcuccaucaugcggagcgacgcccccaucgggaagugcaaguccgagugcaucacccccaacggcagcauccccaacgacaagccguuccagaacgugaaccgcaucaccuacggggccugcccccgguacgugaagcaguccacgcugaagcucgcgaccggcaugcgcaacguccccgagaagcagacccgggggaucuucggcgccaucgccggguucaucgagaacggcugggagggcaugguggacgggugguacggcuuccgccaccagaacagcgaggggcggggccaggccgccgaccugaaguccacccaggcggccaucgaccagaucaacgggaagcugaaccgccucgugggcaagacgaacgagaaguuccaccagaucgagaaggaguucagcgaggucgagggccggauccaggaccuggagaaguacguggaggacaccaagaucgaccugugguccuacaacgccgagcuccugguggcccuggagaaccagcacaccaucgaccucaccgacagcgagaugaacaagcuguucgagaagacgaagaagcagcugcgcgagaacgccgaggacauggggaacggcugcuucaagaucuaccacaagugcgacaacgcgugcaucggguccauccgcaacggcaccuacgaccacgacgucuaccgggacgaggcccucaacaaccgcuuccagaucaaggggguggagcucaagagcggcuacaaggacuggauccuguggaucuccuucgccaucagcugcuuccugcugugcguggcccugcucggcuucaucaugugggccugccagaaggggaacauccggugcaacaucugcaucuga

SEQ ID NO: 75615 - RNA, 1701 nt, Artificial Sequence; identical to SEQ ID NO: 73882
  derived and/or modified CDS sequence (opt1) from hemagglutinin__InfluenzaA__AHL98093

SEQ ID NO: 75616 - RNA, 1701 nt, Artificial Sequence
  derived and/or modified CDS sequence (opt1) from hemagglutinin__InfluenzaA__AHL98105
augaaggccauccugguggucaugcucuacaccuucgccaccgcgaacgccgacacgcugugcaucggcuaccacgccaacaacagcaccgacaccguggacaccgugcuggagaagaacgucacggugacccacuccgugaaccuccuggaggacaagcacaacgggaagcugugcaagcuccgcggcgucgcgccccugcaccuggggaagugcaacaucgccggcuggauccucgggaacccggagugcgagagccuguccaccgccagcuccuggagcuacaucguggagaccuccggcagcgacaacggcacgugcuaccccggggacuucaucgacuacgaggagcugcgggagcagcucuccagcguguccagcuucgagcgcuucgagaucuuccccaagaccuccagcuggcccaaccacgacuccaacaagggcgucaccgccgccugcccgcacgccggggcgaagggcuucuacaagaaccugaucuggcuggugaagaaggggaacagcuaccccaagcucuccaucagcuacaucaacgacaagggcaaggaggugcugguccuguggggcauccaccaccccuccaccacggccgaccagcagagccucuaccagaacgccgacaccuacguguucgugggggccagccgguacuccaagaaguucaagcccgagaucgccauccgcccgaagguccgggaccaggagggccgcaugaacuacuacuggacccugguggagcccggggacaagaucaccuucgaggcgacgggcaaccugguggucccccgguacgccuucgccauggagcgcaacgccggcagcgggaucaucaucuccgacacccccgugcacgacugcaacacgaccugccagaccccgaagggcgccaucaacaccagccuccccuuccagaacauccaccccaucaccaucgggaagugccccaaguacgugaaguccaccaagcugcggcuggcgacgggccuccgcaacgucccgagcauccagucccgggggcuguucggcgccaucgccggcuucaucgagggcggguggaccgggaugguggacggcugguacggguaccaccaccagaacgagcagggcagcggcuacgccgccgaccugaaguccacccagaacgcgaucgacaagaucaccaacaaggugaacagcgucaucgagaagaugaacacgcaguucaccgccguggggaaggaguucaaccaccucgagaagcgcaucgagaaccugaacaagaaggucgacgacggcuuccuggacaucuggaccuacaacgccgagcuccuggugcugcucgagaacgagcggacccuggacuaccacgacuccaacgugaagaaccuguacgagaagguccgcaaccagcucaagaacaacgccaaggagaucgggaacggcugcuucgaguucuaccacaagugcgacaacacgugcauggagagcgugaagaacgggaccuacgacuaccccaaguacuccgaggaggccaagcugaaccgggaggagaucgacggcgugaagcuggagagcacccgcaucuaccagauccucgcgaucuacuccaccgccgccagcucccugguccugguggugagccucggcgccaucuccuucuggaugugcagcaacgggagccugcagugccggaucugcaucuga

SEQ ID NO: 75617 - RNA, 1701 nt, Artificial Sequence; identical to SEQ ID NO: 73882
  derived and/or modified CDS sequence (opt1) from hemagglutinin__InfluenzaA__AHL98116

SEQ ID NO: 75618 - RNA, 1701 nt, Artificial Sequence; identical to SEQ ID NO: 73892
  derived and/or modified CDS sequence (opt1) from hemagglutinin__InfluenzaA__AHL98128

SEQ ID NO: 75619 - RNA, 1701 nt, Artificial Sequence; identical to SEQ ID NO: 73882
  derived and/or modified CDS sequence (opt1) from hemagglutinin__InfluenzaA__AHL98140

SEQ ID NO: 75620 - RNA, 1701 nt, Artificial Sequence; identical to SEQ ID NO: 73882
  derived and/or modified CDS sequence (opt1) from hemagglutinin__InfluenzaA__AHL98152

SEQ ID NO: 75621 - RNA, 1701 nt, Artificial Sequence; identical to SEQ ID NO: 73892
  derived and/or modified CDS sequence (opt1) from hemagglutinin__InfluenzaA__AHL98164

SEQ ID NO: 75622 - RNA, 1701 nt, Artificial Sequence; identical to SEQ ID NO: 73892
  derived and/or modified CDS sequence (opt1) from hemagglutinin__InfluenzaA__AHL98176

SEQ ID NO: 75623 - RNA, 1701 nt, Artificial Sequence; identical to SEQ ID NO: 73882
  derived and/or modified CDS sequence (opt1) from hemagglutinin__InfluenzaA__AHL98188

SEQ ID NO: 75624 - RNA, 1701 nt, Artificial Sequence; identical to SEQ ID NO: 74047
  derived and/or modified CDS sequence (opt1) from hemagglutinin__InfluenzaA__AHL98200

SEQ ID NO: 75625 - RNA, 1701 nt, Artificial Sequence; identical to SEQ ID NO: 73882
  derived and/or modified CDS sequence (opt1) from hemagglutinin__InfluenzaA__AHL98212

SEQ ID NO: 75626 - RNA, 1701 nt, Artificial Sequence; identical to SEQ ID NO: 73882
  derived and/or modified CDS sequence (opt1) from hemagglutinin__InfluenzaA__AHL98224

SEQ ID NO: 75627 - RNA, 1701 nt, Artificial Sequence; identical to SEQ ID NO: 74018
  derived and/or modified CDS sequence (opt1) from hemagglutinin__InfluenzaA__AHL98236

SEQ ID NO: 75628 - RNA, 1701 nt, Artificial Sequence; identical to SEQ ID NO: 73892
  derived and/or modified CDS sequence (opt1) from hemagglutinin__InfluenzaA__AHL98248

SEQ ID NO: 75629 - RNA, 1701 nt, Artificial Sequence; identical to SEQ ID NO: 73882
  derived and/or modified CDS sequence (opt1) from hemagglutinin__InfluenzaA__AHL98260

SEQ ID NO: 75630 - RNA, 1701 nt, Artificial Sequence; identical to SEQ ID NO: 73892
  derived and/or modified CDS sequence (opt1) from hemagglutinin__InfluenzaA__AHL98272

SEQ ID NO: 75631 - RNA, 1701 nt, Artificial Sequence; identical to SEQ ID NO: 75488
  derived and/or modified CDS sequence (opt1) from hemagglutinin__InfluenzaA__AHL98284

SEQ ID NO: 75632 - RNA, 1701 nt, Artificial Sequence
  derived and/or modified CDS sequence (opt1) from hemagglutinin__InfluenzaA__AHL98295
augaagaccaucaucgcccugagcuacauccucugccugguguucgcccagaagauccccggcaacgacaacuccaccgcgacgcugugccucgggcaccacgccgucccgaacggcaccaucgugaagaccaucaccaacgaccgcaucgaggugacgaacgccaccgagcugguccagaacagcuccaucggggagaucugcgacagcccccaccagauccuggacggcgagaacugcacccucaucgacgcccugcugggggacccccagugcgacggcuuccagaacaagaagugggaccucuucguggagcgguccaaggccuacagcaacugcuaccccuacgacgugccggacuacgcgucccugcgcagccuggucgccuccagcggcacccucgaguucaacaacgaguccuucaacugggccggggugacgcagaacggcaccagcuccgccugcauccgggggagcaacuccagcuucuucucccgccugaacuggcugacccaccucaacuucaaguaccccgcgcugaacgugaccaugcccaacaacgagcaguucgacaagcuguacaucuggggcguccaccaccccgggacggacaaggaccagaucuuccucuacgcccagagcuccggccggaucaccgugagcaccaagcgcagccagcaggccgugaucccgaacaucggcucccggccccgcauccggaacauccccagccgcaucuccaucuacuggaccaucgucaagcccggggacauccugcugaucaacagcacgggcaaccucaucgccccgcggggguacuucaagauccgcuccggcaagagcuccaucaugcggagcgacgcccccaucggcaagugcaaguccgagugcaucacccccaacgggagcauccccaacgacaagccguuccagaacgugaaccgcaucaccuacggcgcgugcccccgguacgugaagcaguccacccugaagcuggccacggggaugcgcaacguccccgagaagcagacccggggcaucuucggggccaucgccggcuucaucgagaacggcugggaggggaugauggacggcugguacggguuccgccaccagaacagcgagggccgggggcaggccgcggaccucaaguccacccaggccgccaucgaccagaucaacggcaagcugaaccgccugaucggcaagaccaacgagaaguuccaccagaucgagaaggaguucagcgagguggaggggcggauccaggaccucgagaaguacguggaggacacgaagaucgaccugugguccuacaacgccgagcugcucgucgcccuggagaaccagcacaccaucgaccugaccgacagcgagaugaacaagcuguucgagaagaccaagaagcagcuccgcgagaacgcggaggacaugggcaacgggugcuucaagaucuaccacaagugcgacaacgccugcaucggcuccauccgcaacgggacguacgaccacgacguguaccgggacgaggcccugaacaaccgcuuccagaucaagggcguggagcucaagagcggcuacaaggacuggauccuguggaucuccuucgccaucagcugcuuccugcucugcgucgcccugcugggguucaucaugugggcgugccagaagggcaacauccggugcaacaucugcaucuga

SEQ ID NO: 75633 - RNA, 1701 nt, Artificial Sequence; identical to SEQ ID NO: 75530
  derived and/or modified CDS sequence (opt1) from hemagglutinin__InfluenzaA__AHL98307

SEQ ID NO: 75634 - RNA, 1701 nt, Artificial Sequence; identical to SEQ ID NO: 73892
  derived and/or modified CDS sequence (opt1) from hemagglutinin__InfluenzaA__AHL98319

SEQ ID NO: 75635 - RNA, 1701 nt, Artificial Sequence; identical to SEQ ID NO: 73892
  derived and/or modified CDS sequence (opt1) from hemagglutinin__InfluenzaA__AHL98331

SEQ ID NO: 75636 - RNA, 1701 nt, Artificial Sequence; identical to SEQ ID NO: 74018
  derived and/or modified CDS sequence (opt1) from hemagglutinin__InfluenzaA__AHL98343

SEQ ID NO: 75637 - RNA, 1701 nt, Artificial Sequence; identical to SEQ ID NO: 75530
  derived and/or modified CDS sequence (opt1) from hemagglutinin__InfluenzaA__AHL98354

SEQ ID NO: 75638 - RNA, 1701 nt, Artificial Sequence; identical to SEQ ID NO: 73882
  derived and/or modified CDS sequence (opt1) from hemagglutinin__InfluenzaA__AHL98366

SEQ ID NO: 75639 - RNA, 1701 nt, Artificial Sequence; identical to SEQ ID NO: 73882
  derived and/or modified CDS sequence (opt1) from hemagglutinin__InfluenzaA__AHL98378

SEQ ID NO: 75640 - RNA, 1701 nt, Artificial Sequence; identical to SEQ ID NO: 73882
  derived and/or modified CDS sequence (opt1) from hemagglutinin__InfluenzaA__AHL98390

SEQ ID NO: 75641 - RNA, 1701 nt, Artificial Sequence; identical to SEQ ID NO: 73882
  derived and/or modified CDS sequence (opt1) from hemagglutinin__InfluenzaA__AHL98402

SEQ ID NO: 75642 - RNA, 1701 nt, Artificial Sequence; identical to SEQ ID NO: 73892
  derived and/or modified CDS sequence (opt1) from hemagglutinin__InfluenzaA__AHL98414

SEQ ID NO: 75643 - RNA, 1701 nt, Artificial Sequence
  derived and/or modified CDS sequence (opt1) from hemagglutinin__InfluenzaA__AHL98426
augaagaccaucaucgcccugagcuacauccucugccugguguucgcccagaagcugcccggcaacgacaacuccaccgcgacgcucugccuggggcaccacgccgucccgaacggcaccaucgugaagaccaucaccaacgaccgcaucgaggugacgaacgccaccgagcugguccagaacagcuccaucggggagaucugcgacagcccccaccagauccucgacggcgagaacugcacccugaucgacgcccugcucggggacccccagugcgacggcuuccagaacaagaagugggaccuguucguggagcgguccaaggccuacagcaacugcuaccccuacgacgugccggacuacgcgucccugcgcagccucgucgccuccagcggcacccuggaguucaacaacgaguccuucaacuggacgggggugacccagaacggcaccagcuccgccugcauccggcgcagcaacaacuccuucuucagccggcugaacuggcucacccacuccaacuucaaguaccccgcccugaacgugacgaugcccaacaacgagcaguucgacaagcuguacaucuggggcguccaccaccccgggaccgacaaggaccagaucuuccucuacgcgcagagcuccgggcgcaucaccgugagcaccaagcggagccagcaggccgugaucccgaacaucggcucccgcccccggauccgcaacauccccagccggaucuccaucuacuggacgaucgucaagcccggcgacauccugcugaucaacagcaccgggaaccucaucgccccgcgcggcuacuucaagauccgguccggcaagagcuccaucaugcgcagcgacgcccccaucgggaagugcaaguccgagugcaucacccccaacggcagcauccccaacgacaagccguuccagaacgugaaccggaucaccuacggggccugcccccgcuacgugaagcaguccacgcugaagcuggcgaccggcaugcggaacguccccgagaagcagacccgcgggaucuucggcgccaucgccggguucaucgagaacggcugggagggcaugauggacgggugguacggcuuccggcaccagaacagcgaggggcgcggccaggccgccgaccucaaguccacccaggcggccaucgaccagaucaacgggaagcugaaccggcugaucggcaagacgaacgagaaguuccaccagaucgagaaggaguucagcgagguggagggccgcauccaggaccucgagaaguacguggaggacaccaagaucgaccugugguccuacaacgccgagcugcucgucgcccuggagaaccagcacaccaucgaccugaccgacagcgagaugaacaagcuguucgagaagacgaagaagcagcuccgcgagaacgccgaggacauggggaacggcugcuucaagaucuaccacaagugcgacaacgcgugcaucggguccauccggaacggcaccuacgaccacgacguguaccgcgacgaggcccugaacaaccgguuccaggugaagggggucgagcucaagagcggcuacaaggacuggauccuguggaucuccuucgccaucagcugcuuccugcucugcguggcccugcugggcuucaucaugugggccugccagaaggggaacauccgcugcaacaucugcaucuga

SEQ ID NO: 75644 - RNA, 1701 nt, Artificial Sequence; identical to SEQ ID NO: 74064
  derived and/or modified CDS sequence (opt1) from hemagglutinin__InfluenzaA__AHL98438

SEQ ID NO: 75645 - RNA, 1701 nt, Artificial Sequence; identical to SEQ ID NO: 74064
  derived and/or modified CDS sequence (opt1) from hemagglutinin__InfluenzaA__AHL98449

SEQ ID NO: 75646 - RNA, 1701 nt, Artificial Sequence
  derived and/or modified CDS sequence (opt1) from hemagglutinin__InfluenzaA__AHL98471
augaaggccauccuggugguccuccuguacaccuucgccaccgcgaacgccgacacgcugugcaucggcuaccacgccaacaacagcaccgacaccguggacaccgugcucgagaagaacgucacggugacccacuccgugaaccugcuggaggacaagcacaacgggaagcucugcaagcugcgcggcgucgcgccccugcaccucgggaagugcaacaucgccggcuggauccuggggaacccggagugcgagagccuguccaccgccagcuccuggagcuacaucguggagaccuccagcuccgacaacggcacgugcuaccccggcgacuucaucaacuacgaggagcuccgggagcagcugagcuccgugagcuccuucgagaaguucgagaucuuccccaagaccagcuccuggcccaaccacgacagcaacaagggggucaccgccgccugcccgcacgccggcgcgaaguccuucuacaagaaccugaucuggcucgugaagaaggggaacagcuaccccaagcugcgcgaguccuacaucaacgacaagggcaaggaggugcugguccucugggggauccaccaccccagcaccacggccgaccagcagagccuguaccagaacgccgacgccuacguguucgugggcaccucccgguacagcaagaaguucaagcccgagaucgccauccgcccgaagguccgggaccaggagggccgcaugaacuacuacuggacccugaucgagcccggggacaagaucaccuucgaggcgacgggcaaccucguggugccccgguacgccuucgccauggagcgcaacgccggguccggcaucaucaucagcgacacccccguccacgacugcaacacgaccugccagaccccggagggcgccaucaacaccucccugcccuuccagaacauccaccccaucaccaucgggaagugccccaaguacgucaagagcaccaagcugcggcucgcgacgggccugcgcaacgugccguccauccagagccgggggcuguucggcgccaucgccggguucaucgagggcggcuggaccgggaugguggacggcugguacggguaccaccaccagaacgagcagggcuccggguacgccgccgaccucaagagcacccagaacgcgaucgacaagaucaccaacaaggugaacuccgugaucgagaagaugaacacgcaguucaccgccgucggcaaggaguucaaccaccuggagaagcgcaucgagaaccugaacaagaagguggacgacggcuuccucgacaucuggaccuacaacgccgagcugcugguccuccuggagaacgagcggacccuggacuaccacgacagcaacgugaagaaccucuacgagaaggugcgcaaccagcugaagaacaacgccaaggagaucgggaacggcugcuucgaguucuaccacaagugcgacaacacgugcauggaguccgucaagaacgggaccuacgacuaccccaaguacagcgaggaggccaagcugaaccgggagaagaucgacggcgugaagcucgaguccacccgcaucuaccagauccuggcgaucuacagcaccguggccuccagccugguccucguggugucccugggggccaucagcuucuggaugugcagcaacggcucccugcagugccggaucugcaucuga

SEQ ID NO: 75647 - RNA, 1701 nt, Artificial Sequence; identical to SEQ ID NO: 74018
  derived and/or modified CDS sequence (opt1) from hemagglutinin__InfluenzaA__AHL98482

SEQ ID NO: 75648 - RNA, 1701 nt, Artificial Sequence; identical to SEQ ID NO: 73859
  derived and/or modified CDS sequence (opt1) from hemagglutinin__InfluenzaA__AHL98494

SEQ ID NO: 75649 - RNA, 1701 nt, Artificial Sequence; identical to SEQ ID NO: 74018
  derived and/or modified CDS sequence (opt1) from hemagglutinin__InfluenzaA__AHL98506

SEQ ID NO: 75650 - RNA, 1701 nt, Artificial Sequence; identical to SEQ ID NO: 74018
  derived and/or modified CDS sequence (opt1) from hemagglutinin__InfluenzaA__AHL98518

SEQ ID NO: 75651 - RNA, 1701 nt, Artificial Sequence; identical to SEQ ID NO: 73859
  derived and/or modified CDS sequence (opt1) from hemagglutinin__InfluenzaA__AHL98530

SEQ ID NO: 75652 - RNA, 1701 nt, Artificial Sequence; identical to SEQ ID NO: 74018
  derived and/or modified CDS sequence (opt1) from hemagglutinin__InfluenzaA__AHL98542

SEQ ID NO: 75653 - RNA, 1701 nt, Artificial Sequence; identical to SEQ ID NO: 74018
  derived and/or modified CDS sequence (opt1) from hemagglutinin__InfluenzaA__AHL98554

SEQ ID NO: 75654 - RNA, 1701 nt, Artificial Sequence; identical to SEQ ID NO: 73892
  derived and/or modified CDS sequence (opt1) from hemagglutinin__InfluenzaA__AHL98566

SEQ ID NO: 75655 - RNA, 1701 nt, Artificial Sequence; identical to SEQ ID NO: 73892
  derived and/or modified CDS sequence (opt1) from hemagglutinin__InfluenzaA__AHL98578

SEQ ID NO: 75656 - RNA, 1701 nt, Artificial Sequence; identical to SEQ ID NO: 74018
  derived and/or modified CDS sequence (opt1) from hemagglutinin__InfluenzaA__AHL98590

SEQ ID NO: 75657 - RNA, 1701 nt, Artificial Sequence; identical to SEQ ID NO: 73882
  derived and/or modified CDS sequence (opt1) from hemagglutinin__InfluenzaA__AHL98602

SEQ ID NO: 75658 - RNA, 1701 nt, Artificial Sequence; identical to SEQ ID NO: 73859
  derived and/or modified CDS sequence (opt1) from hemagglutinin__InfluenzaA__AHL98614

SEQ ID NO: 75659 - RNA, 1701 nt, Artificial Sequence
  derived and/or modified CDS sequence (opt1) from hemagglutinin__InfluenzaA__AHL98626
augaagaccaucaucgcccugagcuacauccucugccugguguucgcccaggagcugcccggcaacgacgacuccaccgcgacgcucugccuggggcaccacgccgucccgaacggcaccaucgugaagaccaucaccaacgaccagaucgaggugacgaacgccaccgagcugguccagagcuccagcaccggggagaucugcaacagcccccaccagauccucgacggcgagaacugcacccugaucgacgcccugcucggggacccccagugcgacggcuuccagaacaagcgcugggaccuguucguggagcggagcaaggcccacuccaacugcuaccccuacgacgugccggacuacgcgagccugcgcucccucgucgccagcuccggcacgcuggaguucaacaacgagagcuucaacuggaccggggugacccagaacggcaccuccagcgccugcauccggcgcuccaacaacagcuucuucucccggcugaacuggcucacgcaccugaacuucaaguaccccgcccugaacgugaccaugcccaacaacgagcaguucgacaagcucuacaucuggggcguccaccaccccgggaccgacaaggaccagaucuuccuguacgcgcaggccagcgggcgcaucaccguguccacgaagcggagccagcaggccgugaucccgaacaucggcagccgcccccggguccgcaacauccccucccgggugagcaucuacuggaccaucgugaagcccggcgacauccugcucaucaacuccaccgggaaccugaucgccccgcgcggcuacuucaagauccggagcgggaaguccagcaucaugcgcuccgacgcccccaucggcaagugcaacagcgcgugcaucacccccaacggcuccauccccaacgacaagccguuccagaacgucaaccggaucacguacggggccugcccccgcuacgugaagcagaacacccugaagcucgccaccggcaugcggaacgugcccgagaagcagacccgcgggaucuucggcgccaucgccggguucaucgagaacggcugggagggcauggucgacgggugguacggcuuccggcaccagaacagcgaggggcgcggccaggcggccgaccugaaguccacgcaggccgccaucgaccagaucaacgggaagcugaaccggcucaucggcaagaccaacgagaaguuccaccagaucgagaaggaguucagcgagguggagggccgcauccaggaccuggagaaguacguggaggacaccaagaucgaccugugguccuacaacgccgagcuccuggucgcgcuggagaaccagcacaccaucgaccucacggacagcgagaugaacaagcuguucgagaagaccaagaagcagcugcgcgagaacgccgaggacauggggaacggcugcuucaagaucuaccacaagugcgacaacgccugcaucggguccauccggaacggcaccuacgaccacgacguguaccgcgacgaggcccucaacaaccgguuccagaucaaggggguggagcugaaguccggcuacaaggacuggauccuguggaucuccuucgccaucagcugcuuccuccugugcgucgcgcugcucggcuucaucaugugggccugccagaaggggaacauccgcugcaacaucugcaucuga

SEQ ID NO: 75660 - RNA, 1701 nt, Artificial Sequence; identical to SEQ ID NO: 73882
  derived and/or modified CDS sequence (opt1) from hemagglutinin__InfluenzaA__AHL98638

SEQ ID NO: 75661 - RNA, 1701 nt, Artificial Sequence; identical to SEQ ID NO: 73892
  derived and/or modified CDS sequence (opt1) from hemagglutinin__InfluenzaA__AHL98650

SEQ ID NO: 75662 - RNA, 1701 nt, Artificial Sequence
  derived and/or modified CDS sequence (opt1) from hemagglutinin__InfluenzaA__AHL98662
augaagaccaucaucgcccugagcuacauccucugccugguguucgcccagaagcugcccggcaacgacaacuccaccgcgacgcucugccuggggcaccacgccgucccgaacggcaccauggugaagaccaucaccaacgaccgcaucgaggugacgaacgccaccgagcugguccagaacagcuccaucggggagaucugcgacagcccccaccagauccucgacggcgagaacugcacccugaucgacgcccugcucggggacccccagugcgacggcuuccagaacaagaagugggaccuguucguggagcgguccaaggccuacagcaacugcuaccccuacgacgugccggacuacgcgucccugcgcagccucgucgccuccagcggcacccuggaguucaacaacgaguccuucaacuggacgggggugacccagaacggcaccagcuccgccugcauccggcgcagcaacaacuccuucuucagccggcugaacuggcucacccacuccaacuucaaguaccccgcccugaacgugacgaugcccaacaacgagcaguucgacaagcuguacaucuggggcguccaccaccccgggaccgacaaggaccagaucuuccucuacgcgcagagcuccgggcgcaucaccgugagcaccaagcggagccagcaggccgugaucccgaacaucggcucccgcccccggauccgcaacauccccagccggaucuccaucuacuggacgaucgucaagcccggcgacauccugcugaucaacagcaccgggaaccucaucgccccgcgcggcuacuucaagauccgguccggcaagagcuccaucaugcgcagcgacgcccccaucgggaagugcaaguccgagugcaucacccccaacggcagcauccccaacgacaagccguuccagaacgugaaccggaucaccuacggggccugcccccgcuacgugaagcaguccacgcugaagcuggcgaccggcaugcggaacguccccgagaagcagacccgcgggaucuucggcgccaucgccggguucaucgagaacggcugggagggcaugauggacgggugguacggcuuccggcaccagaacagcgaggggcgcggccaggccgccgaccucaaguccacccaggcggccaucgaccagaucaacgggaagcugaaccggcugaucggcaagacgaacgagaaguuccaccagaucgagaaggaguucagcgagguggagggccgcauccaggaccucgagaaguacguggaggacaccaagaucgaccugugguccuacaacgccgagcugcucgucgcccuggagaaccagcacaccaucgaccugaccgacagcgagaugaacaagcuguucgagaagacgaagaagcagcuccgcgagaacgccgaggacauggggaacggcugcuucaagaucuaccacaagugcgacaacgcgugcaucggguccauccggaacggcaccuacgaccacgacguguaccgcgacgaggcccugaacaaccgguuccagaucaaggggguggagcucaagagcggcuacaaggacuggauccuguggaucuccuucgccaucagcugcuuccugcucugcgucgcccugcugggcuucaucaugugggccugccagaaggggaacauccgcugcaacaucugcaucuga

SEQ ID NO: 75663 - RNA, 1701 nt, Artificial Sequence; identical to SEQ ID NO: 75530
  derived and/or modified CDS sequence (opt1) from hemagglutinin__InfluenzaA__AHL98674

SEQ ID NO: 75664 - RNA, 1701 nt, Artificial Sequence; identical to SEQ ID NO: 73882
  derived and/or modified CDS sequence (opt1) from hemagglutinin__InfluenzaA__AHL98686

SEQ ID NO: 75665 - RNA, 1701 nt, Artificial Sequence; identical to SEQ ID NO: 74018
  derived and/or modified CDS sequence (opt1) from hemagglutinin__InfluenzaA__AHL98699

SEQ ID NO: 75666 - RNA, 1701 nt, Artificial Sequence; identical to SEQ ID NO: 74147
  derived and/or modified CDS sequence (opt1) from hemagglutinin__InfluenzaA__AHL98711

SEQ ID NO: 75667 - RNA, 1701 nt, Artificial Sequence; identical to SEQ ID NO: 74491
  derived and/or modified CDS sequence (opt1) from hemagglutinin__InfluenzaA__AHL98722

SEQ ID NO: 75668 - RNA, 1701 nt, Artificial Sequence; identical to SEQ ID NO: 73892
  derived and/or modified CDS sequence (opt1) from hemagglutinin__InfluenzaA__AHL98734

SEQ ID NO: 75669 - RNA, 1701 nt, Artificial Sequence; identical to SEQ ID NO: 74018
  derived and/or modified CDS sequence (opt1) from hemagglutinin__InfluenzaA__AHL98746

SEQ ID NO: 75670 - RNA, 1701 nt, Artificial Sequence; identical to SEQ ID NO: 73892
  derived and/or modified CDS sequence (opt1) from hemagglutinin__InfluenzaA__AHL98758

SEQ ID NO: 75671 - RNA, 1701 nt, Artificial Sequence; identical to SEQ ID NO: 73882
  derived and/or modified CDS sequence (opt1) from hemagglutinin__InfluenzaA__AHL98770

SEQ ID NO: 75672 - RNA, 1701 nt, Artificial Sequence; identical to SEQ ID NO: 74021
  derived and/or modified CDS sequence (opt1) from hemagglutinin__InfluenzaA__AHL98782

SEQ ID NO: 75673 - RNA, 1701 nt, Artificial Sequence
  derived and/or modified CDS sequence (opt1) from hemagglutinin__InfluenzaA__AHL98794
augaagaccaucaucgcccugagcuacauccucugccugguguucgcccagaagcugcccggcaacgacaacuccaccgcgacgcucugccuggggcaccacgccgucccgaacggcaccaucgugaagaccaucaccaacgaccgcaucgaggugacgaacgccaccgagcugguccagaacagcuccaucggggagaucugcgacagcccccaccagauccucgacggcgagaacugcacccugaucgacgcccugcucggggacccccagugcgacggcuuccagaacaagaagugggaccuguucguggagcgguccaaggccuacagcaacugcuaccccuacgacgugccggacuacgcgucccugcgcagccucgucgccuccagcggcacccuggaguucaacaacgaguccuucaacugggccggggugacgcagaacggcaccagcuccgccugcauccgggggagcaacuccagcuucuucucccgccugaacuggcucacccaccugaacuucaaguaccccgcgcugaacgugaccaugcccaacaacgagcaguucgacaagcucuacaucuggggcguccaccaccccgggacggacaaggaccagaucuuccuguacgcccagagcuccggccggaucaccgugagcaccaagcgcagccagcaggccgugaucccgaacaucggcucccggccccgcauccggaacauccccagccgcaucuccaucuacuggaccaucgucaagcccggggacauccugcucaucaacagcacgggcaaccugaucgccccgcggggguacuucaagauccgcuccggcaagagcuccaucaugcggagcgacgcccccaucggcaagugccgcuccgagugcaucacccccaacgggagcauccccaacgacaagccguuccagaacgugaaccggaucaccuacggcgcgugcccccgcuacgugaagcaguccacccugaagcucgccacggggaugcggaacguccccgagaagcagacccgcggcaucuucggggccaucgccggcuucaucgagaacggcugggaggggaugguggacggcugguacggguuccggcaccagaacagcgagggccgcgggcaggccgcggaccugaaguccacccaggccgccaucgaccagaucaacggcaagcugaaccggcucaucggcaagaccaacgagaaguuccaccagaucgagaaggaguucagcgagguggaggggcgcauccaggaccuggagaaguacgucgaggacacgaagaucgaccugugguccuacaacgccgagcuccugguggcccuggagaaccagcacaccaucgaccucaccgacagcgagaugaacaagcuguucgagaagaccaagaagcagcugcgcgagaacgcggaggacaugggcaacgggugcuucaagaucuaccacaagugcgacaacgccugcaucggcuccauccggaacgggacguacgaccacgacguguaccgcgacgaggcccucaacaaccgguuccagaucaagggcgucgagcucaagagcggcuacaaggacuggauccuguggaucuccuucgccaucagcugcuuccugcugugcguggcccugcucggguucaucaugugggcgugccagaagggcaacauccgcugcaacaucugcaucuga

SEQ ID NO: 75674 - RNA, 1701 nt, Artificial Sequence
  derived and/or modified CDS sequence (opt1) from hemagglutinin__InfluenzaA__AHL98806
augaagaccaucaucgcccugagcuacauccucugccugguguucgcccagaagcugcccggcaacgacaacuccaccgcgacgcucugccuggggcaccacgccgucccgaacggcaccaucgugaagaccaucaccaacgaccgcaucgaggugacgaacgccaccgagcugguccagaacagcuccaucggggagaucugcgacagcccccaccagauccucgacggcgagaacugcacccugaucgacgcccugcucggggacccccagugcgacggcuuccagaacaagaagugggaccuguucguggagcgguccaaggccuacagcaacugcuaccccuacgacgugccggacuacgcgucccugcgcagccucgucgccuccagcggcacccuggaguucaacaacgaguccuucaacugggccggggugacgcagaacggcaccagcuccgccugcauccgggggagcaacuccagcuucuucucccgccugaacuggcucacccaccugaacuucaaguaccccgcgcugaacgugaccaugcccaacaacgagcaguucgacaagcucuacaucuggggcguccaccaccccgggacggacaaggaccagaucuuccuguacgcccagagcuccggccggaucaccgugagcaccaagcgcagccagcaggccgugaucccgaacaucggcucccggccccgcauccggaacauccccagccgcaucuccaucuacuggaccaucgucaagcccggggacauccugcucaucaacagcacgggcaaccugaucgccccgcggggguacuucaagauccgcuccggcaagagcuccaucaugcggagcgacgcccccaucggcaagugcaaguccgagugcaucacccccaacgggagcauccccaacgacaagccguuccagaacgugaaccgcaucaccuacggcgcgugcccccgguacgugaagcaguccacccugaagcucgccacggggaugcgcaacguccccgagaagcagacccggggcaucuucggggccaucgccggcuucaucgagaacggcugggaggggaugguggacggcugguacggguuccgccaccagaacagcgagggccgggggcaggccgcggaccugaaguccacccagaccgccaucgaccagaucaacggcaagcugaaccgccucaucggcaagacgaacgagaaguuccaccagaucgagaaggaguucagcgagguggaggggcggauccaggaccuggagaaguacgucgaggacaccaagaucgaccugugguccuacaacgccgagcuccugguggcccuggagaaccagcacaccaucgaccucaccgacagcgagaugaacaagcuguucgagaagacgaagaagcagcugcgcgagaacgccgaggacaugggcaacgggugcuucaagaucuaccacaagugcgacaacgcgugcaucggcuccauccgcaacgggaccuacgaccacgacguguaccgggacgaggcccucaacaaccgcuuccagaucaagggcgucgagcucaagagcggcuacaaggacuggauccuguggaucuccuucgccaucagcugcuuccugcugugcguggcccugcucggguucaucaugugggccugccagaagggcaacauccggugcaacaucugcaucuga

SEQ ID NO: 75675 - RNA, 1701 nt, Artificial Sequence; identical to SEQ ID NO: 73882
  derived and/or modified CDS sequence (opt1) from hemagglutinin__InfluenzaA__AHL98818

SEQ ID NO: 75676 - RNA, 1701 nt, Artificial Sequence; identical to SEQ ID NO: 73892
  derived and/or modified CDS sequence (opt1) from hemagglutinin__InfluenzaA__AHL98830

SEQ ID NO: 75677 - RNA, 1701 nt, Artificial Sequence; identical to SEQ ID NO: 73882
  derived and/or modified CDS sequence (opt1) from hemagglutinin__InfluenzaA__AHL98842

SEQ ID NO: 75678 - RNA, 1701 nt, Artificial Sequence; identical to SEQ ID NO: 73882
  derived and/or modified CDS sequence (opt1) from hemagglutinin__InfluenzaA__AHL98854

SEQ ID NO: 75679 - RNA, 1701 nt, Artificial Sequence
  derived and/or modified CDS sequence (opt1) from hemagglutinin__InfluenzaA__AHL98878
augaagaccaucaucgcccugagcuacauccucugccugguguucacccagaagcugcccggcaacgacaacuccacggccacccucugccuggggcaccacgcggucccgaacggcaccaucgugaagaccaucacgaacgaccgcaucgaggugaccaacgccaccgagcugguccagaacagcuccaucggggagaucugcgacagcccccaccagauccucgacggcgagaacugcacccugaucgacgcccugcucggggacccccagugcgacggcuuccagaacaagaagugggaccuguucguggagcgguccaaggccuacagcaacugcuaccccuacgacgugccggacuacgccucccugcgcagccucgucgcguccagcggcacgcuggaguucaacaacgaguccuucaacuggaccggggugacccagaacggcaccagcuccgccugcauccggcgcagcaacuccagcuucuucucccggcugaacuggcucacgcaccugaacuucaaguaccccgcccugaacgugaccaugcccaacaacgagcaguucgacaagcucuacaucuggggcguccaccaccccgggaccgacaaggaccagaucuuccuguacgcccagagcuccgggcgcaucaccgugagcacgaagcggagccagcaggcggugaucccgaacaucggcucccgcccccggauccgcaacauccccagccggaucuccaucuacuggaccaucgucaagcccggcgacauccugcucaucaacagcaccgggaaccugaucgccccgcgcggcuacuucaagauccgguccggcaagagcuccaucaugcgcagcgacgcccccaucgggaagugcaaguccgagugcaucacccccaacggcagcauccccaacgacaagccguuccagaacgugaaccggaucacguacggggccugcccccgcuacgugaagcaguccacccugaagcucgccaccggcaugcggaacguccccgagaagcagacccgcgggaucuucggcgcgaucgccggguucaucgagaacggcugggagggcaugguggacgggugguacggcuuccggcaccagaacagcgaggggcgcggccaggccgccgaccugaaguccacgcaggccgcgaucgaccagaucaacgggaagcugaaccggcucaucggcaagaccaacgagaaguuccaccagaucgagaaggaguucagcgagguggagggccgcauccaggaccuggagaaguacgucgaggacaccaagaucgaccugugguccuacaacgccgagcuccugguggcccuggagaaccagcacaccaucgaccucacggacagcgagaugaacaagcuguucgagaagaccaagaagcagcugcgcgagaacgccgaggacauggggaacggcugcuucaagaucuaccacaagugcgacaacgccugcaucggguccauccggaacggcaccuacgaccacaacguguaccgcgacgaggcgcucaacaaccgguuccagaucaagggggucgagcucaagagcggcuacaaggacuggauccuguggaucuccuucgccaucagcugcuuccugcugugcguggcccugcucggcuucaucaugugggccugccagaaggggaacauccgcugcaacaucugcaucuga

SEQ ID NO: 75680 - RNA, 1701 nt, Artificial Sequence
  derived and/or modified CDS sequence (opt1) from hemagglutinin__InfluenzaA__AHL98890
augaagaccaucaucgcccugagcuacauccucugccugguguucgcccagaagcugcccggcaacgacaacuccaccgcgacgcucugccuggggcaccacgccgucccgaacggcaccaucgugaagaccaucaccaacgaccgcaucgaggugacgaacgccaccgagcugguccagaacagcuccaucggggagaucugcgacagcccccaccagauccucgacggcgagaacugcacccugaucgacgcccugcucggggacccccagugcgacggcuuccagaacaagaagugggaccuguucguggagcgguccaaggccuacagcaacugcuaccccuacgacgugccggacuacgcgucccugcgcagccucgucgccuccagcggcacccuggaguucaacaacgaguccuucaacugggccggggugacgcagaacggcaccagcuccgccugcauccgggggagcaacuccagcuucuucucccgccugaacuggcucacccaccugaacuucaaguaccccgcgcugaacgugaccaugcccaacaacgagcaguucgacaagcucuacaucuggggcguccaccaccccgggacggacaaggaccagaucuuccuguacgcccagagcuccggccggaucaccgugagcaccaagcgcagccagcaggccgugaucccgaacaucggcucccggccccgcauccggaacauccccagccgcaucuccaucuacuggaccaucgucaagcccggggacauccugcucaucaacagcacgggcaaccugaucgccccgcggggguacuucaagauccgcuccggcaagagcuccaucaugcggagcgacgcccccaucggcaagugcaaguccgagugcaucacccccaacgggagcauccccaacgacaagccguuccagaacgugaaccgcaucaccuacggcgcgugcccccgguacgugaagcaguccacccugaagcucgccacggggaugcgcaacguccccgagaagcagacccggggcaucuucggggccaucgccggcuucaucgagaacggcugggaggggaugguggacggcugguacggguuccgccaccagaacagcgagggccgggggcaggccgcggaccugaaguccacccaggccgccaucgaccagaucaacggcaagcugaaccgccucaucggcaagaccaacgagaaguuccaccagaucgagaaggaguucagcgagguggaggggcggauccaggaccuggagaaguacgucgaggacacgaagaucgaccugugguccuacaacgccgagcuccugguggcccuggagaaccagcacaccaucgaccucaccgacagcgagaugaacaagcuguucgagaagaccaagaagcagcugcgcgagaacgcggaggacaugggcaacgggugcuucaagaucuaccacaagugcgacaacgccugcaucggcuccauccgcaacgggacguacgaccacgacguguaccgggacgaggcccucaacaaccgcuuccagaucaagggcgucgagcucaagagcggcuacaaggacuggauccuguggaucuccuucgccaucagcugccugcugcugugcguggcccuccugggguucaucaugugggcgugccagaagggcaacauccggugcaacaucugcaucuga

SEQ ID NO: 75681 - RNA, 1701 nt, Artificial Sequence
  derived and/or modified CDS sequence (opt1) from hemagglutinin__InfluenzaA__AHL98902
augaagaccaucaucgcccugagcuacauccucugccugguguucgcccagaagcugcccggcaacgacaacuccaccgcgacgcucugccuggggcaccacgccgucccgaacggcaccguggugaagaccaucaccaacgaccgcaucgaggucacgaacgccaccgagcuggugcagaacagcuccaucggggagaucugcgacagcccccaccagauccucgacggcgagaacugcacccugaucgacgcccugcucggggacccccagugcgacggcuuccagaacaagaagugggaccuguucguggagcgguccaaggccuacagcaacugcuaccccuacgacgucccggacuacgcgucccugcgcagccucguggccuccagcggcacccuggaguucaacaacgaguccuucaacugggccggggugacgcagaacggcaccagcuccgccugcauccgggggagcaacuccagcuucuucucccgccugaacuggcucacccaccugaacuucaaguaccccgcgcugaacgucaccaugcccaacaacgagcaguucgacaagcucuacaucuggggcgugcaccaccccgggacggacaaggaccagaucuuccuguacgcccagagcuccggccggaucaccgugagcaccaagcgcagccagcaggccgucaucccgaacaucggcucccggccccgcauccggaacauccccagccgcaucuccaucuacuggaccaucgugaagcccggggacauccugcucaucaacagcacgggcaaccugaucgccccgcggggguacuucaagauccgcuccggcaagagcuccaucaugcggagcgacgcccccaucggcaagugcaaguccgagugcaucacccccaacgggagcauccccaacgacaagccguuccagaacgugaaccgcaucaccuacggcgcgugcccccgguacgucaagcaguccacccugaagcucgccacggggaugcgcaacgugcccgagaagcagacccggggcaucuucggggccaucgccggcuucaucgagaacggcugggaggggaugguggacggcugguacggguuccgccaccagaacagcgagggccgggggcaggccgcggaccugaaguccacccaggccgccaucgaccagaucaacggcaagcugaaccgccucaucggcaagaccaacgagaaguuccaccagaucgagaaggaguucagcgaggucgaggggcggauccaggaccuggagaaguacguggaggacacgaagaucgaccugugguccuacaacgccgagcuccugguggcccuggagaaccagcacaccaucgaccucaccgacagcgagaugaacaagcuguucgagaagaccaagaagcagcugcgcgagaacgcggaggacaugggcaacgggugcuucaagaucuaccacaagugcgacaacgccugcaucggcuccauccgcaacgggacguacgaccacgacgucuaccgggacgaggcccucaacaaccgcuuccagaucaagggcguggagcucaagagcggcuacaaggacuggauccuguggaucuccuucgccaucagcugcuuccugcugugcguggcccugcucggguucaucaugugggcgugccagaagggcaacauccggugcaacaucugcaucuga

SEQ ID NO: 75682 - RNA, 1701 nt, Artificial Sequence; identical to SEQ ID NO: 73892
  derived and/or modified CDS sequence (opt1) from hemagglutinin__InfluenzaA__AHL98913

SEQ ID NO: 75683 - RNA, 1701 nt, Artificial Sequence; identical to SEQ ID NO: 73882
  derived and/or modified CDS sequence (opt1) from hemagglutinin__InfluenzaA__AHL98925

SEQ ID NO: 75684 - RNA, 1701 nt, Artificial Sequence; identical to SEQ ID NO: 74021
  derived and/or modified CDS sequence (opt1) from hemagglutinin__InfluenzaA__AHL98937

SEQ ID NO: 75685 - RNA, 1701 nt, Artificial Sequence; identical to SEQ ID NO: 74018
  derived and/or modified CDS sequence (opt1) from hemagglutinin__InfluenzaA__AHL98961

SEQ ID NO: 75686 - RNA, 1701 nt, Artificial Sequence
  derived and/or modified CDS sequence (opt1) from hemagglutinin__InfluenzaA__AHL98973
augaagaccaucaucgcccugagcuacauccucugccugguguucgcccagaagcugcccggcaacgacaacuccaccgcgacgcucugccuggggcaccacgccgucccgaacggcaccaucgugaagaccaucaccaacgaccgcaucgaggugacgaacgccaccgagcugguccagaacagcuccaucggggagaucugcgacagcccccaccagauccucgacggcgagaacugcacccugaucgacgcccugcucggggacccccagugcgacggcuuccagaacaagaagugggaccuguucguggagcgguccaaggccuacagcaacugcuaccccuacgacgugccggacuacgcgucccugcgcagccucgucgccuccagcggcacccuggaguucaacaacgaguccuucaacuggacgggggugacccagaacggcaccagcuccgccugcauccggcgcagcaacuccagcuucuucucccggcugaacuggcucacccaccugaacuucaaguaccccgcccugaacgugacgaugcccaacaacgagcaguucgacaagcucuacaucuggggcguccaccaccccgggaccgacaaggaccagaucuuccuguacgcgcagagcuccgggcgcaucaccgugagcaccaagcggagccagcaggccguggucccgaacaucggcucccgcccccggauccgcaacauccccagccggaucuccaucuacuggacgaucgugaagcccggcgacauccugcucaucaacagcaccgggaaccugaucgccccgcgcggcuacuucaagauccgguccggcaagagcuccaucaugcgcagcgacgcccccaucgggaagugcaaguccgagugcaucacccccaacggcagcauccccaacgacaagccguuccagaacgugaaccggaucaccuacggggccugcccccgcuacgucaagcaguccacgcugaagcucgcgaccggcaugcggaacgugcccgagaagcagacccgcgggaucuucggcgccaucgccggguucaucgagaacggcugggagggcaugguggacgggugguacggcuuccggcaccagaacagcgaggggcgcggccaggccgccgaccugaaguccacccaggcggccaucgaccagaucaacgggaagcugaaccggcucaucggcaagacgaacgagaaguuccaccagaucgagaaggaguucagcgaggucgagggccgcauccaggaccuggagaaguacguggaggacaccaagaucgaccugugguccuacaacgccgagcuccugguggcccuggagaaccagcacaccaucgaccucaccgacagcgagaugaacaagcuguucgagaagacgaagaagcagcugcgcgagaacgccgaggacauggggaacggcugcuucaagaucuaccacaagugcgacaacgcgugcaucggguccauccggaacggcaccuacgaccacgacgucuaccgcgacgaggcccucaacaaccgguuccagaucaaggggguggagcucaagagcggcuacaaggacuggauccuguggaucuccuucgccaugagcugcuuccugcugugcguggcccugcucggcuucaucaugugggccugccagaaggggaacauccgcugcaacaucugcaucuga

SEQ ID NO: 75687 - RNA, 1701 nt, Artificial Sequence
  derived and/or modified CDS sequence (opt1) from hemagglutinin__InfluenzaA__AHL98985
augaagaccaucaucgcccugagcuacauccucugccugguguucgcccagaagcugcccggcaacgacaacuccaccgcgacgcucugccuggggcaccacgccgucccgaacggcaccaucgugaagaccaucaccaacgaccgcaucgaggugacgaacgccaccgagcugguccagaacagcuccaucggggagaucugcgacagcccccaccagauccucgacggcgagaacugcaccaucaucgacgcccugcugggggacccccagugcgacggcuuccagaacaagaagugggaccucuucguggagcgguccaaggccuacagcaacugcuaccccuacgacgugccggacuacgcgucccugcgcagccuggucgccuccagcggcacccucgaguucaacaacgaguccuucaacugggccggggugacgcagaacggcaccagcuccgccugcauccgggggagcaacuccagcuucuucucccgccugaacuggcugacccaccucaacuucaaguaccccgcgcugaacgugaccaugcccaacaacgagcaguucgacaagcuguacaucuggggcguccaccaccccgggacggacaaggaccagaucuuccucuacgcccagagcuccggccggaucaccgugagcaccaagcgcagccagcaggccgugaucccgaacaucggcucccggccccgcauccggaacauccccagccgcaucuccaucuacuggaccaucgucaagcccggggacauccugcugaucaacagcacgggcaaccucaucgccccgcggggguacuucaagauccgcuccggcaagagcuccaucaugcggagcgacgcccccaucggcaagugcaaguccgagugcaucacccccaacgggagcauccccaacgacaagccguuccagaacgugaaccgcaucaccuacggcgcgugcccccgguacgugaagcaguccacccugaagcuggccacggggaugcgcaacguccccgagaagcagacccggggcaucuucggggccaucgccggcuucaucgagaacggcugggaggggaugguggacggcugguacggguuccgccaccagaacagcgagggccgggggcaggccgcggaccucaaguccacccaggccgccaucgaccagaucaacggcaagcugaaccgccugaucggcaagaccaacgagaaguuccaccagaucgagaaggaguucagcgagguggaggggcggauccaggaccucgagaaguacgucgaggacacgaagaucgaccugugguccuacaacgccgagcugcucguggcccuggagaaccagcacaccaucgaccugaccgacagcgagaugaacaagcuguucgagaagaccaagaagcagcuccgcgagaacgcggaggacaugggcaacgggugcuucaagaucuaccacaagugcgacaacgccugcaucggcuccauccgcaacgggacguacgaccacgacguguaccgggacgaggcccugaacaaccgcuuccagaucaagggcgucgagcucaagagcggcuacaaggacuggauccuguggaucuccuucgccaucagcugcuuccugcucugcguggcccugcugggguucaucaugugggcgugccagaagggcaacauccggugcaacaucugcaucuga

SEQ ID NO: 75688 - RNA, 1701 nt, Artificial Sequence; identical to SEQ ID NO: 74018
  derived and/or modified CDS sequence (opt1) from hemagglutinin__InfluenzaA__AHL98997

SEQ ID NO: 75689 - RNA, 1701 nt, Artificial Sequence; identical to SEQ ID NO: 73882
  derived and/or modified CDS sequence (opt1) from hemagglutinin__InfluenzaA__AHL99009

SEQ ID NO: 75690 - RNA, 1701 nt, Artificial Sequence; identical to SEQ ID NO: 73892
  derived and/or modified CDS sequence (opt1) from hemagglutinin__InfluenzaA__AHL99021

SEQ ID NO: 75691 - RNA, 1701 nt, Artificial Sequence
  derived and/or modified CDS sequence (opt1) from hemagglutinin__InfluenzaA__AHL99045
augaagaccaucaucgcccugagcuacauccucugccugguguucgcccagaagauccccggcaacgacaacuccaccgcgacgcugugccucgggcaccacgccgucccgaacggcaccaucgugaagaccaucaccaacgaccgcaucgaggugacgaacgccaccgagcugguccagaacagcuccaucggggagaucugcgacagcccccaccagauccuggacggcgagaacugcacccucaucgacgcccugcugggggacccccagugcgacggcuuccagaacaagaagugggaccucuucguggagcgguccaaggccuacagcaacugcuaccccuacgacgugccggacuacgcgucccugcgcagccuggucgccuccagcggcacccucgaguucaacaacgaguccuucaacuggacgggggugacccagaacggcaccagcuccgccugcauccggcgcagcaacuccagcuucuucucccggcugaacuggcugacccaccucaacuucaaguaccccgcccugaacgugacgaugcccaacaacgagcaguucgacaagcuguacaucuggggcguccaccaccccgggaccgacaaggaccagaucuuccucuacgcgcagagcuccgggcgcaucaccgugagcaccaagcggagccagcaggccgugaucccgaacaucggcucccgcccccggauccgcaacauccccagccggaucuccaucuacuggacgaucgucaagcccggcgacauccugcugaucaacagcaccgggaaccucaucgccccgcgcggcuacuucaagauccgguccggcaagagcuccaucaugcgcagcgacgcccccaucgggaagugcaaguccgagugcaucacccccaacggcagcauccccaacgacaagccguuccagaacgugaaccggaucaccuacgggcccugcccccgcuacgugaagcaguccacgcugaagcuggccaccggcaugcggaacguccccgagaagcagacccgcgggaucuucggcgcgaucgccggguucaucgagaacggcugggagggcaugguggacgggugguacggcuuccggcaccagaacagcgaggggcgcggccaggccgccgaccucaaguccacccaggccgcgaucgaccagaucaacgggaagcugaaccggcugaucggcaagacgaacgagaaguuccaccagaucgagaaggaguucagcgagguggagggccgcauccaggaccucgagaaguacgucgaggacaccaagaucgaccugugguccuacaacgccgagcugcucguggcccuggagaaccagcacaccaucgaccugaccgacagcgagaugaacaagcuguucgagaagacgaagaagcagcuccgcgagaacgccgaggacauggggaacggcugcuucaagaucuaccacaagugcgacaacgccugcaucggguccauccggaacggcaccuacgaccacgacguguaccgcgacgaggcgcugaacaaccgguuccagaucaagggggucgagcucaagagcggcuacaaggacuggauccuguggaucuccuucgccaucagcugcuuccugcucugcguggcccugcugggcuucaucaugugggccugccagaaggggaacauccgcugcaacaucugcaucuga

SEQ ID NO: 75692 - RNA, 1701 nt, Artificial Sequence
  derived and/or modified CDS sequence (opt1) from hemagglutinin__InfluenzaA__AHL99057
augaagaccaucaucgcccugagcuacauccucugccugguguucgcccagaagcugcccggcaacgacaacuccaccgcgacgcucugccuggggcaccacgccgucccgaacggcaccaucgugaagaccaucaccaacgaccgcaucgaggugacgaacgccaccgagcugguccagaacagcuccaucggggagaucugcgacagcccccaccagaucaucgacggcgagaacugcacccucaucgacgcccugcugggggacccccagugcgacggcuuccagaacaagaagugggaccucuucguggagcgguccaaggccuacagcaacugcuaccccuacgacgugccggacuacgcgucccugcgcagccuggucgccuccagcggcacccucgaguucaacaacgaguccuucaacugggccggggugacgcagaacggcaccagcuccgccugcauccgggggagcaacuccagcuucuucucccgccugaacuggcugacccaccucaacuucaaguaccccgcgcugaacgugaccaugcccaacaacgagcaguucgacaagcuguacaucuggggcguccaccaccccgggacggacaaggaccagaucuuccucuacgcccagagcuccggccggaucaccgugagcaccaagcgcagccagcaggccgugaucccgaacaucggcucccggccccgcauccggaacauccccagccgcaucuccaucuacuggaccaucgucaagcccggggacauccugcugaucaacagcacgggcaaccucaucgccccgcggggguacuucaagauccgcuccggcaagagcuccaucaugcggagcgacgcccccaucggcaagugcaaguccgagugcaucacccccaacgggagcauccccaacgacaagccguuccagaacgugaaccgcaucaccuacggcgcgugcccccgguacgugaagcaguccacccugaagcuggccacggggaugcgcaacguccccgagaagcagacccggggcaucuucggggccaucgccggcuucaucgagaacggcugggaggggaugguggacggcugguacggguuccgccaccagaacagcgagggccgggggcaggccgcggaccucaaguccacccaggccgccaucgaccagaucaacggcaagcugaaccgccugaucggcaagaccaacgagaaguuccaccagaucgagaaggaguucagcgagguggaggggcggauccaggaccucgagaaguacgucgaggacacgaagaucgaccugugguccuacaacgccgagcugcucguggcccuggagaaccagcacaccaucgaccugaccgacagcgagaugaacaagcuguucgagaagaccaagaagcagcuccgcgagaacgcggaggacaugggcaacgggugcuucaagaucuaccacaagugcgacaacgccugcaucggcuccauccgcaacgggacguacgaccacgacguguaccgggacgaggcccugaacaaccgcuuccagaucaagggcgucgagcucaagagcggcuacaaggacuggauccuguggaucuccuucgccaucagcugcuuccugcucugcguggcccugcugggguucaucaugugggcgugccagaagggcaacauccggugcaacaucugcaucuga

SEQ ID NO: 75693 - RNA, 1701 nt, Artificial Sequence
  derived and/or modified CDS sequence (opt1) from hemagglutinin__InfluenzaA__AHL99069
augaagaccaucaucgcccugagcuacauccucugccugguguucgcccagaagcugcccggcaacgacaacuccaccgcgacgcucugccuggggcaccacgccgucccgaacggcaccaucgugaagaccaucaccaacgaccgcaucgaggugacgaacgccaccgagcugguccagaacagcuccaucggggagaucugcgacagcccccaccagauccucgacggcgagaacugcacccugaucgacgcccugcucggggacccccagugcgacggcuuccagaacaagaagugggaccuguucguggagcgguccaaggccuacagcaacugcuaccccuacgacgugccggacuacgcgucccugcgcagccucgucgccuccagcggcacccuggaguucaacaacgaguccuucaacugggccggggugacgcagaacggcaccagcuccgccugcauccgggggagcaacuccagcuucuucucccgccugaacuggcucacccaccugaacuucaaguaccccgcgcugaacgugaccaugcccaacaacgagcaguucgacaagcucuacaucuggggcguccaccaccccgggacggacaaggaccagaucuuccuguacgcccagagcuccggccggaucaccgugagcaccaagcgcagccagcaggccgugaucccgaacaucggcucccggccccgcauccggaacauccccagccgcaucuccaucuacuggaccaucgucaagcccggggacacgcugcucaucaacagcaccggcaaccugaucgccccgcggggguacuucaagauccgcuccggcaagagcuccaucaugcggagcgacgcccccaucggcaagugcaaguccgagugcaucacccccaacgggagcauccccaacgacaagccguuccagaacgugaaccgcaucaccuacggcgcgugcccccgguacgugaagcaguccacgcugaagcucgccaccgggaugcgcaacguccccgagaagcagacccggggcaucuucggggccaucgccggcuucaucgagaacggcugggaggggaugguggacggcugguacggguuccgccaccagaacagcgagggccgggggcaggccgcggaccugaaguccacccaggccgccaucgaccagaucaacggcaagcugaaccgccucaucggcaagacgaacgagaaguuccaccagaucgagaaggaguucagcgagguggaggggcggauccaggaccuggagaaguacgucgaggacaccaagaucgaccugugguccuacaacgccgagcuccugguggcccuggagaaccagcacaccaucgaccucaccgacagcgagaugaacaagcuguucgagaagacgaagaagcagcugcgcgagaacgcggaggacaugggcaacgggugcuucaagaucuaccacaagugcgacaacgccugcaucggcuccauccgcaacgggaccuacgaccacaacguguaccgggacgaggcccucaacaaccgcuuccagaucaagggcgucgagcucaagagcggcuacaaggacuggauccuguggaucuccuucgccaucagcugcuuccugcugugcguggcccugcucggguucaucaugugggcgugccagaagggcaacauccggugcaacaucugcaucuga

SEQ ID NO: 75694 - RNA, 1701 nt, Artificial Sequence
  derived and/or modified CDS sequence (opt1) from hemagglutinin__InfluenzaA__AHL99081
augaagaccaucaucgcccugagcuacauccucugccugguguucgcccagaagcugcccggcaacgacaacuccaccgcgacgcucugccuggggcaccacgccgucccgaacggcaccaucgugaagaccaucaccaacgaccgcaucgaggugacgaacgccaccgagcugguccagaacagcuccaucggggagaucugcgacagcccccaccagauccucgacggcgagaacugcacccugaucgacgcccugcucggggacccccagugcgacggcuuccagaacaagaagugggaccuguucguggagcgguccaaggccuacagcaacugcuaccccuacgacgugccggacuacgcgucccugcgcagccucgucgccuccagcggcacccuggaguucaacaacgaguccuucaacuggacgggggugacccagaacggcaccagcuccgccugcauccggcgcagcaacuccagcuucuucucccggcugaacuggcucacccaccugaacuucaaguaccccgcccugaacgugacgaugcccaacaacgagcaguucgacaagcucuacaucuggggcguccaccaccccgggaccgacaaggaccagaucuuccuguacgcgcagagcuccgggcgcaucaccgugagcaccaagcggagccagcaggccgugaucccgaacaucggcucccgcccccggauccgcaacauccccagccggaucuccaucuacuggacgaucgucaagcccggcgacauccugcucaucaacagcaccgggaaccugaucgccccgcgcggcuacuucaagauccgguccggcaagagcuccaucaugcgcagcgacgcccccaucgggaagugcaaguccgagugcaucacccccaacggcagcauccccaacgacaagccguuccagaacgugaaccggaucaccuacggggccugcccccgcuacgugaagcagggcacgcugaagcucgcgaccgggaugcggaacguccccgagaagcagacccgcggcaucuucggggccaucgccggcuucaucgagaacggcugggaggggaugguggacggcugguacggguuccggcaccagaacuccgagggccgcgggcaggccgccgaccucaagagcacccaggcggccaucgaccagaucaacggcaagcugaaccggcugaucggcaagacgaacgagaaguuccaccagaucgagaaggaguucuccgagguggaggggcgcauccaggaccuggagaaguacgucgaggacaccaagaucgaccuguggagcuacaacgccgagcuccugguggcccuggagaaccagcacaccaucgaccucaccgacuccgagaugaacaagcuguucgagaagacgaagaagcagcugcgcgagaacgccgaggacaugggcaacgggugcuucaagaucuaccacaagugcgacaacgcgugcaucggcagcauccggaacgggaccuacgaccacaacguguaccgcgacgaggcccucaacaaccgguuccagaucaagggcgucgagcugaaguccggcuacaaggacuggauccuguggaucagcuucgccaucuccugcuuccuccugugcguggcccugcucggguucaucaugugggccugccagaagggcaacauccgcugcaacaucugcaucuga

SEQ ID NO: 75695 - RNA, 1701 nt, Artificial Sequence
  derived and/or modified CDS sequence (opt1) from hemagglutinin__InfluenzaA__AHL99093
augaagaccaucaucgcccugagcuacauccucugccugaucuucgcccagaagcugcccggcaacgacaacuccaccgcgacgcucugccuggggcaccacgccgugccgaacggcaccaucgucaagaccaucaccaacgaccgcaucgaggugacgaacgccaccgagcuggugcagaacagcuccaucggggagaucugcgacagcccccaccagauccucgacggcgagaacugcacccugaucgacgcccugcucggggacccccagugcgacggcuuccagaacaagaagugggaccuguucgucgagcgguccaaggccuacagcaacugcuaccccuacgacgugccggacuacgcgucccugcgcagccucguggccuccagcggcacccuggaguucaacaacgaguccuucaacuggacgggggucacccagaacggcaccagcuccgccugcauccggcgcagcaacuccagcuucuucucccggcugaacuggcucacccaccugaacuucaaguaccccgcccugaacgugacgaugcccaacaacgagcaguucgacaagcucuacaucuggggcgugcaccaccccgggaccgacaaggaccagaucuuccuguacgcgcagagcuccgggcgcaucaccgucagcaccaagcggagccagcaggccgugaucccgaacaucggcucccgcccccggauccgcaacauccccagccggaucuccaucuacuggacgaucgugaagcccggcgacauccugcucaucaacagcaccgggaaccugaucgccccgcgcggcuacuucaagauccgguccggcaagagcuccaucaugcgcagcgacgcccccaucgggaagugcaaguccgagugcaucacccccaacggcagcauccccaacgacaagccguuccagaacgucaaccggaucaccuacggggccugcccccgcuacgugaagcaguccacgcugaagcucgcgaccggcaugcggaacgugcccgagaagcagacccgcgggaucuucggcgccaucgccggguucaucgagaacggcugggagggcauggucgacgggugguacggcuuccggcaccagaacagcgaggggcgcggccaggccgccgaccugaaguccacccaggcggccaucgaccagaucaacgggaagcugaaccggcucaucggcaagacgaacgagaaguuccaccagaucgagaaggaguucagcgagguggagggccgcauccaggaccuggagaaguacguggaggacaccaagaucgaccugugguccuacaacgccgagcuccuggucgcccuggagaaccagcacaccaucgaccucaccgacagcgagaugaacaagcuguucgagaagacgaagaagcagcugcgcgagaacgccgaggacauggggaacggcugcuucaagaucuaccacaagugcgacaacgcgugcaucggguccauccggaacggcaccuacgaccacaacguguaccgcgacgaggcccucaacaaccgguuccagaucaaggggguggagcucaagagcggcuacaaggacuggauccuguggaucuccuucgccaucagcugcuuccugcugugcgucgcccugcucggcuucaucaugugggccugccagaaggggaacaucaagugcaacaucugcaucuga

SEQ ID NO: 75696 - RNA, 1701 nt, Artificial Sequence; identical to SEQ ID NO: 73882
  derived and/or modified CDS sequence (opt1) from hemagglutinin__InfluenzaA__AHL99117

SEQ ID NO: 75697 - RNA, 1701 nt, Artificial Sequence
  derived and/or modified CDS sequence (opt1) from hemagglutinin__InfluenzaA__AHL99129
augaagaccaucaucgcccugagcuacauccucugccugguguucgcccagaagcugcccggcaacgacaacuccaccgcgacgcucugccuggggcaccacgccgucccgaacggcaccaucgugaagaccaucaccaacgaccgcaucgaggugacgaacgccaccgagcugguccagaacagcuccaucggggagaucugcgacagcccccaccagauccucgacggcgagaacugcacccugaucgacgcccugcucggggacccccagugcgacggcuuccagaacaagaagugggaccuguucguggagcgguccaaggccuacagcaacugcuaccccuacgacgugccggacuacgcgucccugcgcagccucgucgccuccagcggcacccuggaguucaacaacgaguccuucaacuggacgggggugacccagaacggcaccagcuccgccugcauccggcgcagcaacuccagcuucuucucccggcugaacuggcucacccaccugaacuucaaguaccccgcccugaacgugacgaugcccaacaacgagcaguucgacaagcucuacaucuggggcguccaccaccccgggaccgacaaggaccagaucuuccuguacgcgcagagcuccgggcgcaucaccgugagcaccaagcggagccagcaggccgugaucccgaacaucggcucccgcccccggauccgcaacauccccagccggaucuccaucuacuggacgaucgucaagcccggcgacauccugcucaucaacagcaccgggaaccugaucgccccgcgcggcuacuucaagauccgguccggcaagagcuccaucaugcgcagcgacgcccccaucgggaagugcaaguccgagugcaucacccccaacggcagcauccccaacgacaagccguuccagaacgugaaccggaucaccuacggggccugcccccgcuacgugaagcaguccacgcugaagcucgcgaccggcaugcggaacguccccgagaagcagacccgcgggaucuucggcgccaucgccggguucaucgagaacggcugggagggcaugguggacgggugguacggcuuccggcaccagaacagcgaggggcgcggccaggccgccgaccugaaguccacccaggcggccaucgaccagaucaacgggaagcugaaccggcucaucggcaagacgaacgagaaguuccaccagaucgagaaggaguucagcgagguggagggccgcauccaggacaucgagaaguacgucgaggacaccaagaucgaccugugguccuacaacgccgagcugcucguggcccuggagaaccagcacaccaucgaccugaccgacagcgagaugaacaagcuguucgagaagacgaagaagcagcuccgcgagaacgccgaggacauggggaacggcugcuucaagaucuaccacaagugcgacaacgcgugcaucggguccauccggaacggcaccuacgaccacaacguguaccgcgacgaggcccugaacaaccgguuccagaucaagggggucgagcucaagagcggcuacaaggacuggauccuguggaucuccuucgccaucagcugcuuccugcucugcguggcccugcugggcuucaucaucugggccugccagaaggggaacauccgcugcaacaucugcaucuga

SEQ ID NO: 75698 - RNA, 1701 nt, Artificial Sequence
  derived and/or modified CDS sequence (opt1) from hemagglutinin__InfluenzaA__AHL99141
augaagaccaucaucgcccugagcuacauccucugccugguguucgcccagaagcugcccggcaacgacaacuccaccgcgacgcucugccuggggcaccacgccgucccgaacggcaccaucgugaagaccaucaccaacgaccagaucgaggugacgaacgccaccgagcugguccagaacagcuccaucggggagaucugcgacagcccccaccagauccucgacggcgagaacugcacccugaucgacgcccugcucggggacccccagugcgacggcuuccagaacaagaagugggaccuguucguggagcgcuccaaggccuacagcaacugcuaccccuacgacgugccggacuacgcgucccugcggagccucgucgccuccagcggcacccuggaguucaacaacgaguccuucaacuggacgggggugacccagaacggcaccagcuccgccugcauccgccggagcaacuccagcuucuucucccgccugaacuggcucacccaccuggacuucaaguaccccgcccugaacgugacgaugcccaacaacgagcaguucgacaagcucuacaucuggggcguccaccaccccgggaccgacaaggaccagaucuuccuguacgcgcagagcuccgggcggaucaccgugagcaccaagcgcagccagcaggccgugaucccgaacaucggcucccggccccgcauccggaacauccccagccgcaucuccaucuacuggacgaucgucaagcccggcgacauccugcucaucaacagcaccgggaaccugaucgccccgcggggcuacuucaagauccgcuccggcaagagcuccaucaugcggagcgacgcccccaucgggaagugcaaguccgagugcaucacccccaacggcagcauccccaacgacaagccguuccagaacgugaaccgcaucaccuacggggccugcccccgguacgugaagcaguccacgcugaagcucgcgaccggcaugcgcaacguccccgagaagcagacccgggggaucuucggcgccaucgccggguucaucgagaacggcugggagggcaugguggacgggugguacggcuuccgccaccagaacagcgaggggcggggccaggccgccgaccugaaguccacccaggcggccaucgaccagaucaacgggaagcugaaccgccucaucggcaagacgaacgagaaguuccaccagaucgagaaggaguucagcgagguggagggccggauccaggaccuggagaaguacgucgaggacaccaagaucgaccugugguccuacaacgccgagcuccugguggcccuggagaaccagcacaccaucgaccucaccgacagcgagaugaacaagcuguucgagaagacgaagaagcagcugcgcgagaacgccgaggacauggggaacggcugcuucaagaucuaccacaagugcgacaacgcgugcaucggguccauccgcaacggcaccuacgaccacgacguguaccgggacgaggcccucaacaaccgcuuccagaucaagggggucgagcucaagagcggcuacaaggacuggauccuguggaucuccuucgccaucagcugcuuccugcugugcguggcccugcucggcuucaucaugugggccugccagaaggggaacauccggugcaacaucugcaucuga

SEQ ID NO: 75699 - RNA, 1701 nt, Artificial Sequence
  derived and/or modified CDS sequence (opt1) from hemagglutinin__InfluenzaA__AHL99153
augaagaccaucaucgcccugagcuacauccucugccugguguucgcccagaagcugcccggcaacgacaacuccaccgcgacgcucugccuggggcaccacgccgucccgaacggcaccaucgugaagaccaucaccaacgaccgcaucgaggugacgaacgccaccgagcugguccagaacagcuccaucggggagaucugcgacagcccccaccagauccucgacggcgagaacugcacccugaucgacgcccugcucggggacccccagugcgacggcuuccagaacaagaagugggaccuguucguggagcgguccaaggccuacagcaacugcuaccccuacgacgugccggacuacgcgucccugcgcagccucgucgccuccagcggcacccuggaguucaacaacgaguccuucaacugggccggggugacgcagaacggcaccagcuccgccugcauccgggggagcaacuccagcuucuucucccgccugaacuggcucacccaccugaacuucaaguaccccgcgcugaacgugaccaugcccaacaacgagcaguucgacaagcucuacaucuggggcguccaccaccccgggacggacaaggaccagaucuuccuguacgcccagagcuccggccggaucaccgugagcaccaagcgcagccagcaggccgugaccccgaacaucggcucccggccccgcauccgggacauccccagccgcaucuccaucuacuggacgaucgucaagcccggggacauccugcucaucaacagcaccggcaaccugaucgccccgcggggguacuucaagauccgcuccggcaagagcuccaucaugcggagcgacgcccccaucggcaagugcaaguccgagugcaucacccccaacgggagcauccccaacgacaagccguuccagaacgugaaccgcaucaccuacggcgcgugcccccgguacgugaagcaguccacgcugaagcucgccaccgggaugcgcaacguccccgagaagcagacccggggcaucuucggggccaucgccggcuucaucgagaacggcugggaggggaugauggacggcugguacggguuccgccaccagaacagcgagggccgggggcaggccgcggaccugaaguccacccaggccgccaucgaccagaucaacggcaagcugaaccgccucaucggcaagacgaacgagaaguuccaccagaucgagaaggaguucagcgagguggaggggcggauccaggaccuggagaaguacguggaggacaccaagaucgaccugugguccuacaacgccgagcuccuggucgcccuggagaaccagcacaccaucgaccucaccgacagcgagaugaacaagcuguucgagaagacgaagaagcagcugcgcgagaacgcggaggacaugggcaacgggugcuucaagaucuaccacaagugcgacaacgccugcaucggcuccauccgcaacgggaccuacgaccacgacguguaccgggacgaggcccucaacaaccgcuuccagaucaagggcguggagcucaagagcggcuacaaggacuggauccuguggaucuccuucgccaucagcugcuuccugcugugcgucgcccugcucggguucaucaugugggcgugccagaagggcaacauccggugcaacaucugcaucuga

SEQ ID NO: 75700 - RNA, 1701 nt, Artificial Sequence; identical to SEQ ID NO: 74021
  derived and/or modified CDS sequence (opt1) from hemagglutinin__InfluenzaA__AHL99165

SEQ ID NO: 75701 - RNA, 1701 nt, Artificial Sequence; identical to SEQ ID NO: 74506
  derived and/or modified CDS sequence (opt1) from hemagglutinin__InfluenzaA__AHL99177

SEQ ID NO: 75702 - RNA, 1701 nt, Artificial Sequence; identical to SEQ ID NO: 73882
  derived and/or modified CDS sequence (opt1) from hemagglutinin__InfluenzaA__AHL99189

SEQ ID NO: 75703 - RNA, 1701 nt, Artificial Sequence; identical to SEQ ID NO: 74018
  derived and/or modified CDS sequence (opt1) from hemagglutinin__InfluenzaA__AHL99225

SEQ ID NO: 75704 - RNA, 1701 nt, Artificial Sequence; identical to SEQ ID NO: 74491
  derived and/or modified CDS sequence (opt1) from hemagglutinin__InfluenzaA__AHL99237

SEQ ID NO: 75705 - RNA, 1701 nt, Artificial Sequence; identical to SEQ ID NO: 73892
  derived and/or modified CDS sequence (opt1) from hemagglutinin__InfluenzaA__AHL99249

SEQ ID NO: 75706 - RNA, 1701 nt, Artificial Sequence; identical to SEQ ID NO: 73882
  derived and/or modified CDS sequence (opt1) from hemagglutinin__InfluenzaA__AHL99261

SEQ ID NO: 75707 - RNA, 1701 nt, Artificial Sequence; identical to SEQ ID NO: 74021
  derived and/or modified CDS sequence (opt1) from hemagglutinin__InfluenzaA__AHL99273

SEQ ID NO: 75708 - RNA, 1701 nt, Artificial Sequence
  derived and/or modified CDS sequence (opt1) from hemagglutinin__InfluenzaA__AHL99285
augaagaccaucaucgcccugagcuacauccucugccugguguucgcccagaagcugcccggcaacgacaacuccaccgcgacgcucugccuggggcaccacgccgucccgaacggcaccaucgugaagaccaucaccaacgaccgcaucgaggugacgaacgccaccgagcugguccagaacagcuccaucggggagaucugcgacagcccccaccagauccucgacggcgagaacugcacccugaucgacgcccugcucggggacccccagugcgacggcuuccagaacaagaagugggaccuguucguggagcgguccaaggccuacagcaacugcuaccccuacgacgugccggacuacgcgucccugcgcagccucgucgccuccagcggcacccuggaguucaacaacgaguccuucaacuggacgggggugacccagaacggcaccagcuccgccugcauccggcgcagcaacuccagcuucuucucccggcugaacuggcucacccaccugaacuucaaguaccccgcccugaacgugacgaugcccaacaacgagcaguucgacaagcucuacaucuggggcguccaccaccccgggaccgacaaggaccagaucuuccuguacgcgcagagcuccgggcgcaucaccgugagcaccaagcggagccagcaggccgugaucccgaacaucggcucccgcccccggauccgcaacauccccagccggaucuccaucuacuggacgaucgucaagcccggcgacauccugcucaucaacagcaccgggaaccugaucgccccgcgcggcuacuucaagauccaguccggcaagagcuccaucaugcggagcgacgcccccaucgggaagugcaaguccgagugcaucacccccaacggcagcauccccaacgacaagccguuccagaacgugaaccgcaucaccuacggggccugcccccgguacgugaagcaguccacgcugaagcucgcgaccggcaugcgcaacguccccgagaagcagacccgggggaucuucggcgccaucgccggguucaucgagaacggcugggagggcaugguggacgggugguacggcuuccgccaccagaacagcgaggggcggggccaggccgccgaccugaaguccacccaggcggccaucgaccagaucaacgggaagcugaaccgccucaucggcaagacgaacgagaaguuccaccagaucgagaaggaguucagcgagguggagggccggauccaggaccuggagaaguacgucgaggacaccaagaucgaccugugguccuacaacgccgagcuccugguggcccuggagaaccagcacaccaucgaccucaccgacagcgagaugaacaagcuguucgagaagacgaagaagcagcugcgcgagaacgccgaggacauggggaacggcugcuucaagaucuaccacaagugcgacaacgcgugcaucggguccauccgcaacggcaccuacgaccacaacguguaccgggacgaggcccucaacaaccgcuuccagaucaagggggucgagcucaagagcggcuacaaggacuggauccuguggaucuccuucgccaucagcugcuuccugcugugcguggcccugcucggcuucaucaugugggccugccagaaggggaacauccggugcaacaucugcaucuga

SEQ ID NO: 75709 - RNA, 1701 nt, Artificial Sequence; identical to SEQ ID NO: 74047
  derived and/or modified CDS sequence (opt1) from hemagglutinin__InfluenzaA__AHL99297

SEQ ID NO: 75710 - RNA, 1701 nt, Artificial Sequence; identical to SEQ ID NO: 73892
  derived and/or modified CDS sequence (opt1) from hemagglutinin__InfluenzaA__AHL99309

SEQ ID NO: 75711 - RNA, 1701 nt, Artificial Sequence
  derived and/or modified CDS sequence (opt1) from hemagglutinin__InfluenzaA__AHL99321
augaagaccaucaucgcccugagcuacauccucugccugguguucacccagaagcugcccggcaacgacaacuccacggccacccucugccuggggcaccacgcggucccgaacggcaccaucgugaagaccaucacgaacgaccagaucgaggugaccaacgccaccgagcugguccagaacagcuccaucggggagaucugcgacagcccccaccagauccucgacggcgagaacugcacccugaucgacgcccugcucggggacccccagugcgacggcuuccagaacaagaagugggaccuguucguggagcgcuccaaggccuacagcaacugcuaccccuacgacgugccggacuacgccucccugcggagccucgucgcguccagcggcacgcuggaguucaacaacgaguccuucaacugggccggggugacccagaacggcaccagcuccgccugcauccgcgggagcaacuccagcuucuucucccggcugaacuggcucacccaccugaacuucaaguaccccgcccugaacgugacgaugcccaacaacgagcaguucgacaagcucuacaucuggggcguccaccaccccgggaccgacaaggaccagaucuuccuguacgcgcagagcuccggccgcaucaccgugagcaccaagcggagccagcaggccgugaucccgaacaucggcucccgcccccggauccgcaacauccccagccggaucuccaucuacuggacgaucgucaagcccggggacauccugcucaucaacagcaccggcaaccugaucgccccgcgcggguacuucaagauccgguccggcaagagcuccaucaugcgcagcgacgcccccaucggcaagugcaaguccgagugcaucacccccaacgggagcauccccaacgacaagccguuccagaacgugaaccggaucaccuacggcgccugcccccgcuacgugaagcaguccacgcugaagcucgcgaccgggaugcggaacguccccgagaagcagacccgcggcaucuucggggccaucgccggcuucaucgagaacggcugggaggggaugguggacggcugguacggguuccggcaccagaacagcgagggccgcgggcaggccgccgaccugaaguccacccaggcggccaucgaccagaucaacggcaagcugaaccggcucaucggcaagacgaacgagaaguuccaccagaucgagaaggaguucagcgagguggaggggcgcauccaggaccuggagaaguacgucgaggacaccaagaucgaccugugguccuacaacgccgagcuccugguggcccuggagaaccagcacaccaucgaccucaccgacagcgagaugaacaagcuguucgagaagacgaagaagcagcugcgggagaacgccgaggacaugggcaacgggugcuucaagaucuaccacaagugcgacaacgcgugcaucggcuccauccgcaacgggaccuacgaccacgacguguaccgcgacgaggcccucaacaaccgguuccagaucaagggcgucgagcucaagagcggcuacaaggacuggauccuguggaucuccuucgccaucagcugcuuccugcugugcguggcccugcucggguucaucaugugggccugccagaagggcaacauccgcugcaacaucugcaucuga

SEQ ID NO: 75712 - RNA, 1701 nt, Artificial Sequence
  derived and/or modified CDS sequence (opt1) from hemagglutinin__InfluenzaA__AHL99333
augaagaccaucaucgcccugagcuacauccucugccugguguucgcccaggagcugcccggcaacgacgacuccaccgcgacgcucugccuggggcaccacgccgucccgaacggcaccaucgugaagaccaucaccaacgaccagaucgaggugacgaacgccaccgagcugguccagagcuccagcaccggggagaucugcaacagcccccaccagauccucgacggcgagaacugcacccugaucgacgcccugcucggggacccccagugcgacggcuuccagaacaagaagugggaccuguucguggagcgcagcaaggcccacuccaacugcuaccccuacgacgugccggacuacgcgagccugcggucccucgucgccagcuccggcacgcuggaguucaacaacgagagcuucaacuggaccggggugacccagaacggcaccuccagcgccugcauccgccgguccaacaacagcuucuucucccgccugaacuggcucacgcaccugaacuucaaguaccccgcccugaacgugaccaugcccaacaacgagcaguucgacaagcucuacaucuggggcguccaccaccccgggaccgacaaggaccagaucuuccuguacgcgcaggccagcgggcggaucaccguguccacgaagcgcagccagcaggccgugaucccgaacaucggcagccggccccgcguccggaacauccccucccgcgugagcaucuacuggaccaucgugaagcccggcgacauccugcucaucaacuccaccgggaaccugaucgccccgcggggcuacuucaagauccgcagcgggaaguccagcaucaugcgguccgacgcccccaucggcaagugcaacagcgcgugcaucacccccaacggcuccauccccaacgacaagccguuccagaacgucaaccgcaucacguacggggccugcccccgguacgugaagcagaacacccugaagcucgccaccggcaugcgcaacgugcccgagaagcagacccgggggaucuucggcgccaucgccggguucaucgagaacggcugggagggcauggucgacgggugguacggcuuccgccaccagaacagcgaggggcggggccaggcggccgaccugaaguccacgcaggccgccaucgaccagaucaacgggaagcugaaccgccucaucggcaagaccaacgagaaguuccaccagaucgagaaggaguucagcgagguggagggccggauccaggaccuggagaaguacguggaggacaccaagaucgaccugugguccuacaacgccgagcuccuggucgcgcuggagaaccagcacaccaucgaccucacggacagcgagaugaacaagcuguucgagaagaccaagaagcagcugcgcgagaacgccgaggacauggggaacggcugcuucaagaucuaccacaagugcgacaacgccugcaucggguccauccgcaacggcaccuacgaccacaacguguaccgggacgaggcccucaacaaccgcuuccagaucaaggggguggagcugaaguccggcuacaaggacuggauccuguggaucuccuucgccaucagcugcuuccuccugugcgucgcgcugcucggcuucaucaugugggccugccagaaggggaacauccggugcaacaucugcaucuga

SEQ ID NO: 75713 - RNA, 1701 nt, Artificial Sequence
  derived and/or modified CDS sequence (opt1) from hemagglutinin__InfluenzaA__AHL99356
augaaggccauccuggugguccuccuguacaccuucgccaccgcgaacgccgacacgcugugcaucggcuaccacgccaacaacagcaccgacaccguggacaccgugcucgagaagaacgucacggugacccacuccgugaaccugcuggaggacaagcacaacgggaagcucugcaagcugcgcggcgucgcgccccugcaccucgggaagugcaacaucgccggcuggauccuggggaacccggagugcgagagccuguccaccgccagcuccuggagcuacaucguggagaccuccagcuccgacaacggcacgugcuaccccggcgacuucaucaacuacgaggagcuccgggagcagcugagcuccgugagcuccuucgagcgcuucgagaucuuccccaagaccagcuccuggcccaaccacgacagcaacaagggggucaccgccgccugcccgcacgccggcgcgaaguccuucuacaagaaccugaucuggcucgugaagaaggggaacagcuaccccaagcuguccaagagcuacaucaacgacaagggcaaggaggugcugguccucugggggauccaccaccccagcaccacggccgaccagcagucccuguaccagaacgccgacgccuacguguucgugggcaccagcaaguacuccaagaaguucaagcccgagaucgccauccggccgaagguccgcgaccaggagggccggaugaacuacuacuggacccugaucgagcccggggacaagaucaccuucgaggcgacgggcaaccucguggugccccgcuacgccuucgccauggagcggaacgccgggagcggcaucaucaucuccgacacccccguccacgacugcaacacgaccugccagaccccggagggcgccaucaacaccagccugcccuuccagaacauccaccccaucaccaucgggaagugccccaaguacgugaaguccaccaagcugcgccucgcgacgggccugcggaacgugccgagcauccagucccgcgggcuguucggcgccaucgccggguucaucgagggcggcuggaccgggauggucgacggcugguacggguaccaccaccagaacgagcagggcagcggguacgccgccgaccucaaguccacccagaacgcgaucgacaagaucaccaacaaggugaacagcgugaucgagaagaugaacacgcaguucaccgccgucggcaaggaguucaaccaccuggagaagcggaucgagaaccugaacaagaagguggacgacggcuuccucgacaucuggaccuacaacgccgagcugcugguccuccuggagaacgagcgcacccuggacuaccacgacuccaacgugaagaaccucuacgagaaggugcggaaccagcugaagaacaacgccaaggagaucgggaacggcugcuucgaguucuaccacaagugcgacaacacgugcauggagagcgucaagaacgggaccuacgacuaccccaaguacuccgaggaggccaagcugaaccgcgagaagaucgacggcgugaagcucgagagcacccggaucuaccagauccuggcgaucuacuccaccguggccagcucccugguccucguggugagccugggggccaucagcuucuggaugugcuccaacggcagccugcagugccgcaucugcaucuga

SEQ ID NO: 75714 - RNA, 1701 nt, Artificial Sequence; identical to SEQ ID NO: 73907
  derived and/or modified CDS sequence (opt1) from hemagglutinin__InfluenzaA__AHL99367

SEQ ID NO: 75715 - RNA, 1701 nt, Artificial Sequence
  derived and/or modified CDS sequence (opt1) from hemagglutinin__InfluenzaA__AHL99379
augaaggccauccugguggucaugcucuacaccuucgccaccgcgaacgccgacacgcugugcaucggcuaccacgccaacaacagcaccgacaccguggacaccgugcuggagaagaacgucacggugacccacuccgugaaccuccuggaggacaagcacaacgggaagcugugcaagcuccgcggcgucgcgccccugcaccuggggaagugcaacaucgccggcuggauccucgggaacccggagugcgagagccuguccaccgccagcuccuggagcuacaucguggagaccuccggcagcgacaacggcacgugcuaccccggggacuucaucgacuacgaggagcugcgggagcagcucuccagcguguccagcuucgagcgcuucgagaucuuccccaagaccuccagcuggcccaaccacgacuccaacaagggcgucaccgccgccugcccgcacgccggggcgaagggcuucuacaagaaccugaucuggcuggugaagaaggggaacagcuaccccaagcucuccaucagcuacaucaacgacaagggcaaggaggugcugguccuguggggcauccaccaccccuccaccacggccgaccagcagagccucuaccagaacgccgacaccuacguguucguggggaccagccgguacuccaagaaguucaagcccgagaucgccauccgcccgaagguccgggaccaggagggccgcaugaacuacuacuggacccugguggagcccggggacaagaucacguucgaggccaccggcaaccugguggucccccgguacgcguucgccauggagcgcaacgccggcagcgggaucaucaucuccgacacccccgugcacgacugcaacaccacgugccagaccccgaagggcgccaucaacaccagccuccccuuccagaacauccaccccaucaccaucgggaagugccccaaguacgugaaguccacgaagcugcggcuggccaccggccuccgcaacgucccgagcauccagucccgggggcuguucggcgcgaucgccggcuucaucgagggcggguggaccgggaugguggacggcugguacggguaccaccaccagaacgagcagggcagcggcuacgccgccgaccugaaguccacccagaacgccaucgacaagaucacgaacaaggugaacagcgucaucgagaagaugaacacccaguucaccgcgguggggaaggaguucaaccaccucgagaagcgcaucgagaaccugaacaagaaggucgacgacggcuuccuggacaucuggaccuacaacgccgagcuccuggugcugcucgagaacgagcggacgcuggacuaccacgacuccaacgugaagaaccuguacgagaagguccgcaaccagcucaagaacaacgccaaggagaucgggaacggcugcuucgaguucuaccacaagugcgacaacacgugcauggagagcgugaagaacgggaccuacgacuaccccaaguacuccgaggaggccaagcugaaccgggagaagaucgacggcgugaagcuggagagcacccgcaucuaccagauccucgccaucuacuccaccgcggccagcucccugguccugguggugagccucggcgccaucuccuucuggaugugcagcaacgggagccugcagugccggaucugcaucuga

SEQ ID NO: 75716 - RNA, 1701 nt, Artificial Sequence; identical to SEQ ID NO: 75708
  derived and/or modified CDS sequence (opt1) from hemagglutinin__InfluenzaA__AHL99390

SEQ ID NO: 75717 - RNA, 1701 nt, Artificial Sequence; identical to SEQ ID NO: 73882
  derived and/or modified CDS sequence (opt1) from hemagglutinin__InfluenzaA__AHL99402

SEQ ID NO: 75718 - RNA, 1701 nt, Artificial Sequence
  derived and/or modified CDS sequence (opt1) from hemagglutinin__InfluenzaA__AHL99426
augaagaccaucaucgcccugagcuacauccucugccugguguucgcccagaagcugcccggcaacgacaacuccaccgcgacgcucugccuggggcaccacgccgucccgaacggcaccaucgugaagaccaucaccaacgaccgcaucgaggugacgaacgccaccgagcugguccagaacagcuccaucggggagaucugcgacagcccccaccagauccucgacggcgagaacugcacccugaucgacgcccugcucggggacccccagugcgacggcuuccagaacaagaagugggaccuguucguggagcgguccaaggccuacagcaacugcuaccccuacgacgugccggacuacgcgucccugcgcagccucgucgccuccagcggcacccuggaguucaacaacgaguccuucaacuggacgggggugacccagaacggcaccagcuccgccugcauccggcgcagcaacuccagcuucuucucccggcugaacuggcucacccaccugaacuucaaguaccccgcccugaacgugacgaugcccaacaacgagcaguucgacaagcucuacaucuggggcguccaccaccccgggaccgacaaggaccagaucuuccuguacgcgcagagcuccgggcgcaucaccgugagcaccaagcggagccagcaggccgugaucccgaacaucggcucccgcccccggauccgcaacauccccagccggaucuccaucuacuggacgaucgucaagcccggcgacauccugcucaucaacagcaccgggaaccugaucgccccgcgcggcuacuucaagauccgguccggcaagagcuccaugaugcgcagcgacgcccccaucgggaagugcaaguccgagugcaucacccccaacggcagcauccccaacgacaagccguuccagaacgugaaccggaucaccuacggggccugcccccgcuacgugaagcaguccacgcugaagcucgcgaccggcaugcggaacguccccgagaagcagacccgcgggaucuucggcgccaucgccggguucaucgagaacggcugggagggcaugguggacgggugguacggcuuccggcaccagaacagcgaggggcgcggccaggccgccgaccugaaguccacccaggcggccaucgaccagaucaacgggaagcugaaccggcucaucggcaagacgaacgagaaguuccaccagaucgagaaggaguucagcgagguggagggccgcauccaggaccuggagaaguacgucgaggacaccaagaucgaccugugguccuacaacgccgagcuccugguggcccuggagaaccagcacaccaucgaccucaccgacagcgagaugaacaagcuguucgagaagacgaagaagcagcugcgcgagaacgccgaggacauggggaacggcugcuucaagaucuaccacaagugcgacaacgcgugcaucggguccauccggaacggcaccuacgaccacgacguguaccgcgacgaggcccucaacaaccgguuccagaucaagggggucgagcucaagagcggcuacaaggacuggauccuguggaucuccuucgccaucagcugcuuccugcugugcguggcccugcucggcuucaucaugugggccugccagaaggggaacauccgcugcaacaucugcaucuga

SEQ ID NO: 75719 - RNA, 1701 nt, Artificial Sequence
  derived and/or modified CDS sequence (opt1) from hemagglutinin__InfluenzaA__AHL99438
augaagaccaucaucgcccugagcuacauccucugccugguguucgcccagaagcugcccggcaacgacaacuccaccgcgacgcucugccuggggcaccacgccgucccgaacggcaccaucgugaagaccaucaccaacgaccgcaucgaggugacgaacgccaccgagcugguccagaacagcuccaucggggagaucugcgacagcccccaccagauccucgacggcgagaacugcacccugaucgacgcccugcucggggacccccagugcgacggcuuccagaacaagaagugggaccuguucguggagcgguccaaggccuacagcaacugcuaccccuacgacgugccggacuacgcgucccugcgcagccucgucgccuccagcggcacccuggaguucaacaacgaguccuucaacuggacgggggugacccagaacggcaccagcuccgccugcauccggcgcagcaacuccagcuucuucucccggcugaacuggcucacccaccugaacuucaaguaccccgcccugaacgugacgaugcccaacaacgagcaguucgacaagcucuacaucuggggcguccaccaccccgggaccgacaaggaccagaucuuccuguacgcgcagagcuccgggcgcaucaccgugagcaccaagcggagccagcaggccgugaucccgaacaucggcucccgcccccggauccgcaacauccccagccggaucuccaucuacuggacgaucgucaagcccggcgacauccugcucaucaacagcaccgggaaccugaucgccccgcgcggcuacuucaagauccaguccggcaagagcuccaucaugcggagcgacgcccccaucgggaagugcaaguccgagugcaucacccccaacggcagcauccccaacgacaagccguuccagaacgugaaccgcaucaccuacggggccugcccccgguacgugaagcaguccacgcugaagcucgcgaccggcaugcgcaacguccccgagaagcagacccgggggaucuucggcgccaucgccggguucaucgagaacggcugggagggcaugguggacgggugguacggcuuccgccaccagaacagcgaggggcggggccaggccgccgaccugaaguccacccaggcggccaucgaccagaucaacgggaagcugaaccgccucaucggcaagacgaacgagaaguuccaccagaucgagaaggaguucagcgagguggagggccggauccaggaccuggagaaguacgucgaggacaccaagaucgaccugugguccuacaacgccgagcuccugguggcccuggagaaccagcacaccaucgaccucaccgacagcgagaugaacaagcuguucgagaagacgaagaagcagcugcgcgagaacgccgaggacauggggaacggcugcuucaagaucuaccacaagugcgacaacgcgugcaucggguccauccgcaacggcaccuacgaccacgacguguaccgggacgaggcccucaacaaccgcuuccagaucaagggggucgagcucaagagcggcuacaaggacuggauccuguggaucuccuucgccaucagcugcuuccugcugugcguggcccugcucggcuucaucaugugggccugccagaaggggaacauccggugcaacaucugcaucuga

SEQ ID NO: 75720 - RNA, 1701 nt, Artificial Sequence; identical to SEQ ID NO: 74018
  derived and/or modified CDS sequence (opt1) from hemagglutinin__InfluenzaA__AHL99450

SEQ ID NO: 75721 - RNA, 1701 nt, Artificial Sequence; identical to SEQ ID NO: 74491
  derived and/or modified CDS sequence (opt1) from hemagglutinin__InfluenzaA__AHL99462

SEQ ID NO: 75722 - RNA, 1701 nt, Artificial Sequence; identical to SEQ ID NO: 74021
  derived and/or modified CDS sequence (opt1) from hemagglutinin__InfluenzaA__AHL99474

SEQ ID NO: 75723 - RNA, 1701 nt, Artificial Sequence; identical to SEQ ID NO: 74047
  derived and/or modified CDS sequence (opt1) from hemagglutinin__InfluenzaA__AHL99486

SEQ ID NO: 75724 - RNA, 1701 nt, Artificial Sequence; identical to SEQ ID NO: 74018
  derived and/or modified CDS sequence (opt1) from hemagglutinin__InfluenzaA__AHL99498

SEQ ID NO: 75725 - RNA, 1701 nt, Artificial Sequence; identical to SEQ ID NO: 73882
  derived and/or modified CDS sequence (opt1) from hemagglutinin__InfluenzaA__AHL99510

SEQ ID NO: 75726 - RNA, 1701 nt, Artificial Sequence; identical to SEQ ID NO: 73882
  derived and/or modified CDS sequence (opt1) from hemagglutinin__InfluenzaA__AHL99522

SEQ ID NO: 75727 - RNA, 1701 nt, Artificial Sequence; identical to SEQ ID NO: 73907
  derived and/or modified CDS sequence (opt1) from hemagglutinin__InfluenzaA__AHL99534

SEQ ID NO: 75728 - RNA, 1701 nt, Artificial Sequence; identical to SEQ ID NO: 73882
  derived and/or modified CDS sequence (opt1) from hemagglutinin__InfluenzaA__AHL99546

SEQ ID NO: 75729 - RNA, 1701 nt, Artificial Sequence; identical to SEQ ID NO: 73882
  derived and/or modified CDS sequence (opt1) from hemagglutinin__InfluenzaA__AHL99558

SEQ ID NO: 75730 - RNA, 1701 nt, Artificial Sequence
  derived and/or modified CDS sequence (opt1) from hemagglutinin__InfluenzaA__AHL99570
augaagaccaucaucgcccugagcuacauccucugccugguguucgcccagaagcugcccggcaacgacaacuccaccgcgacgcucugccuggggcaccacgccgucccgaacggcaccaucgugaagaccaucaccaacgaccgcaucgaggugacgaacgccaccgagcugguccagaacagcuccaucggggagaucugcgacagcccccaccagauccucgacggcgagaacugcacccugaucgacgcccugcucggggacccccagugcgacggcuuccagaacaagaagugggaccuguucguggagcgguccaaggccuacagcuccugcuaccccuacgacgugccggacuacgcgagccugcgcucccucgucgccagcuccggcacccuggaguucaacaacgagagcuucaacuggacgggggugacccagaacggcaccuccagcgccugcauccggcgcuccaacagcuccuucuucagccggcugaacuggcucacccaccugaacuucaaguaccccgcccugaacgugacgaugcccaacaacgagcaguucgacaagcucuacaucuggggcguccaccaccccgggaccgacaaggaccagaucuuccuguacgcgcaguccagcgggcgcaucaccgugagcaccaagcggucccagcaggccgugaucccgaacaucggcagccgcccccggauccgcaacauccccucccggaucagcaucuacuggacgaucgucaagcccggcgacauccugcucaucaacuccaccgggaaccugaucgccccgcgcggcuacuucaagauccggagcgggaaguccagcaucaugcgcuccgacgcccccaucggcaagugcaagagcgagugcaucacccccaacggcuccauccccaacgacaagccguuccagaacgugaaccggaucaccuacggggccugcccccgcuacaucaagcagagcacgcugaagcucgcgaccggcaugcggaacgugcccgagaagcagacccgcgggaucuucggcgccaucgccggguucaucgagaacggcugggagggcauggucgacgggugguacggcuuccggcaccagaacuccgaggggcgcggccaggccgccgaccucaagagcacccaggcggccaucgaccagaucaacgggaagcugaaccggcugaucggcaagacgaacgagaaguuccaccagaucgagaaggaguucuccgagguggagggccgcauccaggaccuggagaaguacguggaggacaccaagaucgaccuguggagcuacaacgccgagcuccuggucgcccuggagaaccagcacaccaucgaccucaccgacuccgagaugaacaagcuguucgagaagacgaagaagcagcugcgcgagaacgccgaggacauggggaacggcugcuucaagaucuaccacaagugcgacaacgcgugcaucgggagcauccggaacggcaccuacgaccacgacguguaccgcgacgaggcccucaacaaccgguuccagaucaaggggguggagcugaaguccggcuacaaggacuggauccuguggaucagcuucgccaucagcugcuuccuccugugcgucgcccugcucggcuucaucaugugggccugccagaaggggaacauccgcugcaacaucugcaucuga

SEQ ID NO: 75731 - RNA, 1701 nt, Artificial Sequence; identical to SEQ ID NO: 73882
  derived and/or modified CDS sequence (opt1) from hemagglutinin__InfluenzaA__AHL99582

SEQ ID NO: 75732 - RNA, 1701 nt, Artificial Sequence
  derived and/or modified CDS sequence (opt1) from hemagglutinin__InfluenzaA__AHL99594
augaaggccauccugguggucaugcucuacaccuucgccaccgcgaacgccgacacgcugugcaucggcuaccacgccaacaacagcaccgacaccguggacaccgugcuggagaagaacgucacggugacccacuccgugaaccuccuggaggacaagcacaacgggaagcugugcaagcuccgcggcgucgcgccccugcaccuggggaagugcaacaucgccggcuggauccucgggaacccggagugcgagagccuguccaccgccagcuccuggagcuacaucguggagaccuccggcagcgacaacggcacgugcuaccccggggacuucaucgacuacgaggagcugcgggagcagcucuccagcguguccagcuucgagcgcuucgagaucuuccccaagaccuccagcuggcccaaccacgacuccaacaagggcgucaccgccgccugcccgcgggccggggcgaagggcuucuacaagaaccugaucuggcuggugaagaaggggaacagcuaccccaagcucuccaucagcuacaucaacgacaagggcaaggaggugcugguccuguggggcauccaccaccccuccaccacggccgaccagcagagccucuaccagaacgccgacaccuacguguucguggggaccagccgcuacuccaagaaguucaagcccgagaucgccauccggccgaagguccgcgaccaggagggccggaugaacuacuacuggacccugguggagcccggggacaagaucacguucgaggccaccggcaaccugguggucccccgcuacgcguucgccauggagcggaacgccggcagcgggaucaucaucuccgacacccccgugcacgacugcaacaccacgugccagaccccgaagggcgccaucaacaccagccuccccuuccagaacauccaccccaucaccaucgggaagugccccaaguacgugaaguccacgaagcugcgccuggccaccggccuccggaacgucccgagcauccagucccgcgggcuguucggcgcgaucgccggcuucaucgagggcggguggaccgggaugguggacggcugguacggguaccaccaccagaacgagcagggcagcggcuacgccgccgaccugaaguccacccagaacgccaucgacaagaucacgaacaaggugaacagcgucaucgagaagaugaacacccaguucaccgcgguggggaaggaguucaaccaccucgagaagcggaucgagaaccugaacaagaaggucgacgacggcuuccuggacaucuggaccuacaacgccgagcuccuggugcugcucgagaacgagcgcacgcuggacuaccacgacuccaacgugaagaaccuguacgagaagguccggaaccagcucaagaacaacgccaaggagaucgggaacggcugcuucgaguucuaccacaagugcgacaacacgugcauggagagcgugaagaacgggaccuacgacuaccccaaguacuccgaggaggccaagcugaaccgcgaggagaucgacggcgugaagcuggagagcacccggaucuaccagauccucgccaucuacuccaccgcggccagcucccugguccugguggugagccucggcgccaucuccuucuggaugugcagcaacgggagccugcagugccgcaucugcaucuga

SEQ ID NO: 75733 - RNA, 1701 nt, Artificial Sequence; identical to SEQ ID NO: 74491
  derived and/or modified CDS sequence (opt1) from hemagglutinin__InfluenzaA__AHL99605

SEQ ID NO: 75734 - RNA, 1701 nt, Artificial Sequence; identical to SEQ ID NO: 74021
  derived and/or modified CDS sequence (opt1) from hemagglutinin__InfluenzaA__AHL99617

SEQ ID NO: 75735 - RNA, 1701 nt, Artificial Sequence; identical to SEQ ID NO: 73882
  derived and/or modified CDS sequence (opt1) from hemagglutinin__InfluenzaA__AHL99629

SEQ ID NO: 75736 - RNA, 1701 nt, Artificial Sequence
  derived and/or modified CDS sequence (opt1) from hemagglutinin__InfluenzaA__AHL99641
augaagaccaucaucgcccugagcuacauccucugccugguguucgcccagaagcugcccggcaacgacaacuccaccgcgacgcucugccuggggcaccacgccgucccgaacggcaccaucgugaagaccaucaccaacgaccgcaucgaggugacgaacgccaccgagcugguccagaacagcuccaucggggagaucugcgacagcccccaccagauccucgacggcgagaacugcacccugaucgacgcccugcucggggacccccagugcgacggcuuccagaacaagaagugggaccuguucguggagcgguccaaggccuacagcaacugcuaccccuacgacgugccggacuacgcgucccugcgcagccucgucgccuccagcggcacccuggaguucaacaacgaguccuucaacuggacgggggugacccagaacggcaccagcuccgccugcauccggcgcagcaacuccagcuucuucucccggcugaacuggcucacccaccugaacuucaaguaccccgcccugaacgugacgaugcccaacaacgagcaguucgacaagcucuacaucuggggcguccaccaccccgggaccgacaaggaccagaucuuccuguacgcgcagagcuccgggcgcaucaccgugagcaccaagcggagccagcaggccguggucccgaacaucggcucccgcccccggauccgcaacauccccagccggaucuccaucuacuggacgaucgugaagcccggcgacauccugcucaucaacagcaccgggaaccugaucgccccgcgcggcuacuucaagauccgguccggcaagagcuccaucaugcgcagcgacgcccccaucgggaagugcaaguccgagugcaucacccccaacggcagcauccccaacgacaagccguuccagaacgugaaccggaucaccuacggggccugcccccgcuacgucaagcaguccacgcugaagcucgcgaccggcaugcggaacgugcccgagaagcagacccgcgggaucuucggcgccaucgccggguucaucgagaacggcugggagggcaugguggacgggugguacggcuuccggcaccagaacagcgaggggcgcggccaggccgccgaccugaaguccacccaggcggccaucgaccagaucaacgggaagcugaaccggcucaucggcaagacgaacgagaaguuccaccagaucgagaaggaguucagcgaggucgagggccgcauccaggaccuggagaaguacguggaggacaccaagaucgaccugugguccuacaacgccgagcuccugguggcccuggagaaccagcacaccaucgaccucaccgacagcgagaugaacaagcuguucgagaagacgaagaagcagcugcgcgagaacgccgaggacauggggaacggcugcuucaagaucuaccacaagugcgacaacgcgugcaucggguccauccggaacggcaccuacaaccacgacgucuaccgcgacgaggcccucaacaaccgguuccagaucaaggggguggagcucaagagcggcuacaaggacuggauccuguggaucuccuucgccaugagcugcuuccugcugugcguggcccugcucggcuucaucaugugggccugccagaaggggaacauccgcugcaacaucugcaucuga

SEQ ID NO: 75737 - RNA, 1701 nt, Artificial Sequence
  derived and/or modified CDS sequence (opt1) from hemagglutinin__InfluenzaA__AHL99665
augaagaccaucaucgcccugagcuacauccucugccugguguucgcccagaagcugcccggcaacgacaacuccaccgcgacgcucugccuggggcaccacgccgucccgaacggcaccaucgugaagaccaucaccaacgaccgcaucgaggugacgaacgccaccgagcugguccagaacagcuccaucggggagaucugcgacagcccccaccagauccucgacggcgagaacugcacccugaucgacgcccugcucggggacccccagugcgacggcuuccagaacaagaagugggaccuguucguggagcgguccaaggccuacagcaacugcuaccccuacgacgugccggacuacgcgucccugcgcagccucgucgccuccagcggcacccuggaguucaacaacgaguccuucaacuggacgggggugacccagaacggcaccagcuccgccugcauccggcgcagcaacuccagcuucuucucccggcugaacuggcucacccaccugaacuucaaguaccccgcccugaacgugacgaugcccaacaacgagcaguucgacaagcucuacaucuggggcguccaccaccccgggaccgacaaggaccagaucuuccuguacgcgcagagcuccgggcgcaucaccgugagcaccaagcggagccagcaggccgugaucccgaacaucggcucccgcccccggauccgcaacauccccagccggaucuccaucuacuggacgaucgucaagcccggcgacauccugcucaucaacagcaccgggaaccugaucgccccgcgcggcuacuucaagauccgguccggcaagagcuccaucaugcgcagcgacgcccccaucgggaagugcaaguccgagugcaucacccccaacggcagcauccccaacgacaagccguuccagaacgugaaccggaucaccuacggggccugcccccgcuacaucaagcaguccacgcugaagcucgcgaccggcaugcggaacgugcccgagaagcagacccgcgggaucuucggcgccaucgccggguucaucgagaacggcugggagggcauggucgacgggugguacggcuuccggcaccagaacagcgaggggcgcggccaggccgccgaccugaaguccacccaggcggccaucgaccagaucaacgggaagcugaaccggcucaucggcaagacgaacgagaaguuccaccagaucgagaaggaguucagcgagguggagggccgcauccaggaccuggagaaguacguggaggacaccaagaucgaccugugguccuacaacgccgagcuccuggucgcccuggagaaccagcacaccaucgaccucaccgacagcgagaugaacaagcuguucgagaagacgaagaagcagcugcgcgagaacgccgaggacauggggaacggcugcuucaagaucuaccacaagugcgacaacgcgugcaucggguccauccggaacggcaccuacgaccacgacguguaccgcgacgaggcccucaacaaccgguuccagaucaaggggguggagcucaagagcggcuacaaggacuggauccuguggaucuccuucgccaucagcugcuuccugcugugcgucgcccugcucggcuucaucaugugggccugccagaaggggaacauccgcugcaacaucugcaucuga

SEQ ID NO: 75738 - RNA, 1701 nt, Artificial Sequence; identical to SEQ ID NO: 73882
  derived and/or modified CDS sequence (opt1) from hemagglutinin__InfluenzaA__AHL99677

SEQ ID NO: 75739 - RNA, 1701 nt, Artificial Sequence; identical to SEQ ID NO: 73882
  derived and/or modified CDS sequence (opt1) from hemagglutinin__InfluenzaA__AHL99689

SEQ ID NO: 75740 - RNA, 1701 nt, Artificial Sequence
  derived and/or modified CDS sequence (opt1) from hemagglutinin__InfluenzaA__AHL99701
augaagaccaucaucgcccugagcuacauccucugccugguguucgcccagaagcugcccggcaacgacaacuccaccgcgacgcucugccuggggcaccacgccgucccgaacggcaccaucgugaagaccaucaccaacgaccgcaucgaggugacgaacgccaccgagcugguccagaacagcuccaucggggagaucugcgacagcccccaccagauccucgacggcgagaacugcacccugaucgacgcccugcucggggacccccagugcgacggcuuccagaacaagaagugggaccuguucguggagcgguccaaggccuacagcaacugcuaccccuacgacgugccggacuacgcgucccugcgcagccucgucgccuccagcggcacccuggaguucaacaacgaguccuucaacugggccggggugacgcagaacggcaccagcuccgccugcauccgggggagcaacuccagcuucuucucccgccugaacuggcucacccaccugaacuucaaguaccccgcgcugaacgugaccaugcccaacaacgagcaguucgacaagcucuacaucuggggcguccaccaccccgggacggacaaggaccagaucuuccuguacgcccagagcuccggccggaucaccgugagcaccaagcgcagccagcaggccgugaccccgaacaucggcucccggccccgcauccggaacauccccagccgcaucuccaucuacuggacgaucgucaagcccggggacauccugcucaucaacagcaccggcaaccugaucgccccgcggggguacuucaagauccgcuccggcaagagcuccaucaugcggagcgacgcccccaucggcaagugcaaguccgagugcaucacccccaacgggagcauccccaacgacaagccguuccagaacgugaaccgcaucaccuacggcgcgugcccccgguacgugaagcaguccacgcugaagcucgccaccgggaugcgcaacguccccgagaagcagacccggggcaucuucggggccaucgccggcuucaucgagaacggcugggaggggaugauggacggcugguacggguuccgccaccagaacagcgagggccgggggcaggccgcggaccugaaguccacccaggccgccaucgaccagaucaacggcaagcugaaccgccucaucggcaagacgaacgagaaguuccaccagaucgagaaggaguucagcgagguggaggggcggauccaggaccuggagaaguacguggaggacaccaagaucgaccugugguccuacaacgccgagcuccuggucgcccuggagaaccagcacaccaucgaccucaccgacagcgagaugaacaagcuguucgagaagacgaagaagcagcugcgcgagaacgcggaggacaugggcaacgggugcuucaagaucuaccacaagugcgacaacgccugcaucggcuccauccgcaacgggaccuacgaccacgacguguaccgggacgaggcccucaacaaccgcuuccagaucaagggcguggagcucaagagcggcuacaaggacuggauccuguggaucuccuucgccaucagcugcuuccugcugugcgucgcccugcucggguucaucaugugggcgugccagaagggcaacauccggugcaacaucugcaucuga

SEQ ID NO: 75741 - RNA, 1701 nt, Artificial Sequence
  derived and/or modified CDS sequence (opt1) from hemagglutinin__InfluenzaA__AHL99713
augaagaccaucaucgcccugagcuacauccucugccugguguucgcccagaagcugcccggcaacgacaacuccaccgcgacccucugccuggggcaccacgccgucccgaacggcaccaucgugaagaccaucaccaacgaccgcaucgaggugacgaacgccaccgagcugguccagaacagcuccaucggggagaucugcgacagcccccaccagauccucgacggcgagaacugcacccugaucgacgcccugcucggggacccccagugcgacggcuuccagaacaagaagugggaccuguucguggagcgguccaaggccuacagcaacugcuaccccuacgacgugccggacuacaccucccugcgcagccucgucgcguccagcggcacgcuggaguucaacaacgaguccuucaacuggaccggggugacccagaacggcaccagcuccgccugcauccggcgcagcaacuccagcuucuucucccggcugaacuggcucacgcaccugaacuucaaguaccccgcccugaacgugaccaugcccaacaacgagcaguucgacaagcucuacaucuggggcguccaccaccccgggaccgacaaggaccagaucuuccuguacgcccagagcuccgggcgcaucaccgugagcacgaagcggagccagcaggcggugaucccgaacaucggcucccgcccccggauccgcaacauccccagccggaucuccaucuacuggaccaucgucaagcccggcgacauccugcucaucaacagcaccgggaaccugaucgccccgcgcggcuacuucaagauccgguccggcaagagcuccaucaugcgcagcgacgcccccaucgggaagugcaaguccgagugcaucacccccaacggcagcauccccaacgacaagccguuccagaacgugaaccggaucacguacggggccugcccccgcuacgugaagcaguccacccugaagcucgccaccggcaugcggaacguccccgagaagcagacccgcgggaucuucggcgcgaucgccggguucaucgagaacggcugggagggcaugguggacgggugguacggcuuccggcaccagaacagcgaggggcgcggccaggccgccgaccugaaguccacgcaggccgcgaucgaccagaucaacgggaagcugaaccggcucaucggcaagaccaacgagaaguuccaccagaucgagaaggaguucagcgagguggagggccgcauccaggaccuggagaaguacgucgaggacaccaagaucgaccugugguccuacaacgccgagcuccugguggcccuggagaaccagcacaccaucgaccucacggacagcgagaugaacaagcuguucgagaagaccaagaagcagcugcgcgagaacgccgaggacauggggaacggcugcuucaagaucuaccacaagugcgacaacgccugcaucggguccauccggaacggcaccuacgaccacgacguguaccgcgacgaggcgcucaacaaccgguuccagaucaagggggucgagcucaagagcggcuacaaggacuggauccuguggaucuccuucgccaucacgugcuuccugcugugcguggcccugcucggcuucaucaugugggccugccagaaggggaacauccgcugcaacaucugcaucuga

SEQ ID NO: 75742 - RNA, 1701 nt, Artificial Sequence; identical to SEQ ID NO: 73882
  derived and/or modified CDS sequence (opt1) from hemagglutinin__InfluenzaA__AHL99725

SEQ ID NO: 75743 - RNA, 1701 nt, Artificial Sequence; identical to SEQ ID NO: 74084
  derived and/or modified CDS sequence (opt1) from hemagglutinin__InfluenzaA__AHL99737

SEQ ID NO: 75744 - RNA, 1701 nt, Artificial Sequence; identical to SEQ ID NO: 73882
  derived and/or modified CDS sequence (opt1) from hemagglutinin__InfluenzaA__AHL99748

SEQ ID NO: 75745 - RNA, 1701 nt, Artificial Sequence; identical to SEQ ID NO: 73882
  derived and/or modified CDS sequence (opt1) from hemagglutinin__InfluenzaA__AHL99760

SEQ ID NO: 75746 - RNA, 1701 nt, Artificial Sequence; identical to SEQ ID NO: 73892
  derived and/or modified CDS sequence (opt1) from hemagglutinin__InfluenzaA__AHL99772

SEQ ID NO: 75747 - RNA, 1701 nt, Artificial Sequence; identical to SEQ ID NO: 73907
  derived and/or modified CDS sequence (opt1) from hemagglutinin__InfluenzaA__AHL99784

SEQ ID NO: 75748 - RNA, 1701 nt, Artificial Sequence; identical to SEQ ID NO: 74047
  derived and/or modified CDS sequence (opt1) from hemagglutinin__InfluenzaA__AHL99796

SEQ ID NO: 75749 - RNA, 1701 nt, Artificial Sequence; identical to SEQ ID NO: 73882
  derived and/or modified CDS sequence (opt1) from hemagglutinin__InfluenzaA__AHL99808

SEQ ID NO: 75750 - RNA, 1701 nt, Artificial Sequence
  derived and/or modified CDS sequence (opt1) from hemagglutinin__InfluenzaA__AHL99820
augaagaccaucaucgcccugagcuacauccucugccugguguucgcccagaagcugcccggcaacgacaacuccaccgcgacgcucugccuggggcaccacgccgucccgaacggcaccaucgugaagaccaucaccaacgaccgcaucgaggugacgaacgccaccgagcugguccagaacagcuccaucggggagaucugcgacagcccccaccagauccucgacggcgagaacugcacccugaucgacgcccugcucggggacccccagugcgacggcuuccagaacaagaagugggaccuguucguggagcgguccaaggccuacagcaacugcuaccccuacgacgugccggacuacgcgucccugcgcagccucgucgccuccagcggcacccuggaguucaacaacgaguccuucaacuggacgggggugacccagaacggcaccagcuccgccugcauccggcgcagcaacuccagcuucuucucccggcugaacuggcucacccaccugaacuucaaguaccccgcccugaacgugacgaugcccaacaacgagcaguucgacaagcucuacaucuggggcguccaccaccccgggaccgacaaggaccagaucuuccuguacgcgcagagcuccgggcgcaucaccgugagcaccaagcggagccagcaggccgugaucccgaacaucggcucccgcccccggauccgcaacauccccagccggaucuccaucuacuggacgaucgucaagcccggcgacauccugcucaucaacagcaccgggaaccugaucgccccgcgcggcuacuucaagauccgguccggcaagagcuccaucaugcgcagcgacgcccccaucgggaagugcaaguccgagugcaucacccccaacggcagcauccccaacgacaagccguuccagaacgugaaccggaucaccuacggggccugcccccgcuacgugaagcaguccacgcugaagcucgcgaccggcaugcggaacguccccgagaagcagacccgcgggaucuucggcgccaucgccggguucaucgagaacggcugggagggcaugguggacgggugguacggcuuccggcaccagaacagcgacgggcgcggccaggccgccgaccugaaguccacccaggcggccaucgaccagaucaacgggaagcugaaccggcucaucggcaagacgaacgagaaguuccaccagaucgagaaggaguucagcgagguggagggccgcauccaggaccuggagaaguacgucgaggacaccaagaucgaccugugguccuacaacgccgagcuccugguggcccuggagaaccagcacaccaucgaccucaccgacagcgagaugaacaagcuguucgagaagacgaagaagcagcugcgcgagaacgccgaggacauggggaacggcugcuucaagaucuaccacaagugcgacaacgcgugcaucggguccauccggaacggcaccuacgaccacgacguguaccgcgacgaggcccucaacaaccgguuccagaucaagggggucgagcucaagagcggcuacaaggacuggauccuguggaucuccuucgccaucagcugcuuccugcugugcguggugcugcucggcuucaucaugugggccugccagaaggggaacauccgcugcaacaucugcaucuga

SEQ ID NO: 75751 - RNA, 1701 nt, Artificial Sequence; identical to SEQ ID NO: 73882
  derived and/or modified CDS sequence (opt1) from hemagglutinin__InfluenzaA__AHL99832

SEQ ID NO: 75752 - RNA, 1701 nt, Artificial Sequence; identical to SEQ ID NO: 73907
  derived and/or modified CDS sequence (opt1) from hemagglutinin__InfluenzaA__AHL99844

SEQ ID NO: 75753 - RNA, 1701 nt, Artificial Sequence; identical to SEQ ID NO: 73859
  derived and/or modified CDS sequence (opt1) from hemagglutinin__InfluenzaA__AHL99856

SEQ ID NO: 75754 - RNA, 1701 nt, Artificial Sequence
  derived and/or modified CDS sequence (opt1) from hemagglutinin__InfluenzaA__AHL99868
augaagaccaucaucgcccugagcuacauccucugccugguguucgcccaggagcugcccggcaacgacgacuccaccgcgacgcucugccuggggcaccacgccgucccgaacggcaccaucgugaagaccaucaccaacgaccagaucgaggugacgaacgccaccgagcugguccagagcuccagcaccggggagaucugcaacagcccccaccagauccucgacggcgagaacugcacccugaucgacgcccugcucggggacccccagugcgacggcuuccagaacaagaagugggaccuguucguggagcgcagcaaggcccacuccaacugcuaccccuacgacgugccggacuacgcgagccugcggucccucgucgccagcuccggcacgcuggaguucaacaacgagagcuucaacuggaccggggugacccagaacggcaccuccagcgccugcauccgccgguccaacaacagcuucuucucccgccugaacuggcucacgcaccugaacuucaaguaccccgcccugaacgugaccaugcccaacaacgagcaguucgacaagcucuacaucuggggcguccaccaccccgggaccgacaaggaccagaucuuccuguacgcgcaggccagcgggcggaucaccguguccacgaagaagucccagcaggccgugaucccgaacaucggcagccgcccccggguccgcaacauccccucccgggugagcaucuacuggaccaucgugaagcccggcgacauccugcucaucaacuccaccgggaaccugaucgccccgcgcggcuacuucaagauccggagcgggaaguccagcaucaugcgcuccgacgcccccaucggcaagugcaacagcgcgugcaucacccccaacggcuccauccccaacgacaagccguuccagaacgucaaccggaucacguacggggccugcccccgcuacgugaagcagaacacccugaagcucgccaccggcaugcggaacgugcccgagaagcagacccgcgggaucuucggcgccaucgccggguucaucgagaacggcugggagggcauggucgacgggugguacggcuuccggcaccagaacagcgaggggcgcggccaggcggccgaccugaaguccacgcaggccgccaucgaccagaucaacgggaagcugaaccggcucaucggcaagaccaacgagaaguuccaccagaucgagaaggaguucagcgagguggagggccgcauccaggaccuggagaaguacguggaggacaccaagaucgaccugugguccuacaacgccgagcuccuggucgcgcuggagaaccagcacaccaucgaccucacggacagcgagaugaacaagcuguucgagaagaccaagaagcagcugcgggagaacgccgaggacauggggaacggcugcuucaagaucuaccacaagugcgacaacgccugcaucggguccauccgcaacggcaccuacgaccacgacguguaccgcgacgaggcccucaacaaccgguuccagaucaaggggguggagcucaagagcggcuacaaggacuggauccuguggaucuccuucgccaucagcugcuuccugcugugcgucgcgcugcucggcuucaucaugugggccugccagaaggggaacauccgcugcaacaucugcaucuga

SEQ ID NO: 75755 - RNA, 1701 nt, Artificial Sequence; identical to SEQ ID NO: 74021
  derived and/or modified CDS sequence (opt1) from hemagglutinin__InfluenzaA__AHL99880

SEQ ID NO: 75756 - RNA, 1701 nt, Artificial Sequence; identical to SEQ ID NO: 73882
  derived and/or modified CDS sequence (opt1) from hemagglutinin__InfluenzaA__AHL99892

SEQ ID NO: 75757 - RNA, 1701 nt, Artificial Sequence; identical to SEQ ID NO: 74018
  derived and/or modified CDS sequence (opt1) from hemagglutinin__InfluenzaA__AHL99904

SEQ ID NO: 75758 - RNA, 1701 nt, Artificial Sequence
  derived and/or modified CDS sequence (opt1) from hemagglutinin__InfluenzaA__AHL99916
augaagaccaucaucgcccugagcuacauccucugccugguguucgcccagaagcugcccggcaacgacaacuccaccgcgacgcucugccuggggcaccacgccgucccgaacggcaccaucgugaagaccaucaccaacgaccgcaucgaggugacgaacgccaccgagcugguccagaacagcuccaucggggagaucugcgacagcccccaccagauccucgacggcgagaacugcacccugaucgacgcccugcucggggacccccagugcgacggcuuccagaacaagaagugggaccuguucguggagcgguccaaggccuacagcaacugcuaccccuacgacgugccggacuacgcgucccugcgcagccucgucgccuccagcggcacccuggaguucaacaacgaguccuucaacugggccggggugacgcagaacggcaccagcuccgccugcauccgggggagcaacuccagcuucuucucccgccugaacuggcucacccaccugaacuucaaguaccccgcgcugaacgugaccaugcccaacaacgagcaguucgacaagcucuacaucuggggcguccaccaccccgggacggacaaggaccagaucuuccuguacgcccagagcuccggccggaucaccgugagcaccaagcgcagccagcaggccgugaucccgaacaucggcucccggccccgcauccggaacauccccagccgcaucuccaucuacuggaccaucgucaagcccggggacauccugcucaucaacagcacgggcaaccugaucgccccgcggggguacuucaagaugcgcuccggcaagagcuccaucaugcggagcgacgcccccaucggcaagugcaaguccgagugcaucacccccaacgggagcauccccaacgacaagccguuccagaacgugaaccgcaucaccuacggcgcgugcccccgguacgugaagcaguccacccugaagcucgccacggggaugcgcaacguccccgagaagcagacccggggcaucuucggggccaucgccggcuucaucgagaacggcugggaggggaugauggacggcugguacggguuccgccaccagaacagcgagggccgggggcaggccgcggaccugaaguccacccaggccgccaucgaccagaucaacggcaagcugaaccgccucaucggcaagaccaacgagaaguuccaccagaucgagaaggaguucagcgagguggaggggcggauccaggaccuggagaaguacguggaggacacgaagaucgaccugugguccuacaacgccgagcuccuggucgcccuggagaaccagcacaccaucgaccucaccgacagcgagaugaacaagcuguucgagaagaccaagaagcagcugcgcgagaacgcggaggacaugggcaacgggugcuucaagaucuaccacaagugcgacaacgccugcaucggcuccauccgcaacgggacguacgaccacgacguguaccgggacgaggcccucaacaaccgcuuccagaucaagggcguggagcucaagagcggcuacaaggacuggauccuguggaucuccuucgccaucagcugcuuccugcugugcgucgcccugcucggguucaucaugugggcgugccagaagggcaacauccggugcaacaucugcaucuga

SEQ ID NO: 75759 - RNA, 1701 nt, Artificial Sequence; identical to SEQ ID NO: 73907
  derived and/or modified CDS sequence (opt1) from hemagglutinin__InfluenzaA__AHL99928

SEQ ID NO: 75760 - RNA, 1701 nt, Artificial Sequence
  derived and/or modified CDS sequence (opt1) from hemagglutinin__InfluenzaA__AHL99940
augaagaccaucaucgcccugagcuacauccucugccugguguucgcccagaagcugcccggcaacgacaacuccaccgcgacgcucugccuggggcaccacgccgucccgaacggcaccaucgugaagaccaucaccaacgaccgcaucgaggugacgaacgccaccgagcugguccagaacagcuccaucggggagaucugcgacagcccccaccagauccucgacggcgagaacugcacccugaucgacgcccugcucggggacccccagugcgacggcuuccagaacaagaagugggaccuguucguggagcgguccaaggccuacagcaacugcuaccccuacgacgugccggacuacgcgucccugcgcagccucgucgccuccagcggcacccuggaguucaacaacgaguccuucaacuggacgggggugacccagaacggcaccagcuccgccugcauccggcgcagcaacuccagcuucuucucccggcugaacuggcucacccaccugaacuucaaguaccccgcccugaacgugacgaugcccaacaacgagcaguucgacaagcucuacaucuggggcguccaccaccccgggaccgacaaggaccagaucuuccuguacgcgcagagcuccgggcgcaucaccgugagcaccaagcggagccagcaggccgugaucccgaacaucggcucccgcccccggauccgcaacauccccagccggaucuccaucuacuggacgaucgucaagcccggcgacauccugcucaucaacagcaccgggaaccugaucgccccgcgcggcuacuucaagauccgguccggcaagagcuccaucaugcgcagcgacgcccccaucgggaagugcaaguccgagugcaucacccccaacggcagcauccccaacgacaagccguuccagaacgugaaccggaucaccuacggggccugcccccgcuacgugaagcaguccacgcugaagcucgcgaccggcaugcggaacguccccgagaagcagacccgcgggaucuucggcgccaucgccggguucaucgagaacggcugggagggcaugguggacgggugguacggcuuccggcaccagaacagcgaggggcgcggccaggccgccgaccugaaguccacccaggcggccaucgaccagaucaacgggaagcugaaccggcucaucggcaagacgaacgagaaguuccaccagaucgagaaggaguucagcggcguggaggggcgcauccaggaccuggagaaguacgucgaggacaccaagaucgaccugugguccuacaacgccgagcuccugguggcccuggagaaccagcacaccaucgaccucaccgacagcgagaugaacaagcuguucgagaagacgaagaagcagcugcgcgagaacgccgaggacaugggcaacgggugcuucaagaucuaccacaagugcgacaacgcgugcaucggcuccauccggaacgggaccuacgaccacgacguguaccgcgacgaggcccucaacaaccgguuccagaucaagggcgucgagcucaagagcggcuacaaggacuggauccuguggaucuccuucgccaucagcugcuuccugcugugcguggcccugcucggguucaucaugugggccugccagaagggcaacauccgcugcaacaucugcaucuga

SEQ ID NO: 75761 - RNA, 1701 nt, Artificial Sequence; identical to SEQ ID NO: 73882
  derived and/or modified CDS sequence (opt1) from hemagglutinin__InfluenzaA__AHL99952

SEQ ID NO: 75762 - RNA, 1701 nt, Artificial Sequence; identical to SEQ ID NO: 73907
  derived and/or modified CDS sequence (opt1) from hemagglutinin__InfluenzaA__AHL99964

SEQ ID NO: 75763 - RNA, 1701 nt, Artificial Sequence; identical to SEQ ID NO: 73907
  derived and/or modified CDS sequence (opt1) from hemagglutinin__InfluenzaA__AHL99976

SEQ ID NO: 75764 - RNA, 1701 nt, Artificial Sequence; identical to SEQ ID NO: 73907
  derived and/or modified CDS sequence (opt1) from hemagglutinin__InfluenzaA__AHL99988

SEQ ID NO: 75765 - RNA, 1701 nt, Artificial Sequence; identical to SEQ ID NO: 73882
  derived and/or modified CDS sequence (opt1) from hemagglutinin__InfluenzaA__AHM00001

SEQ ID NO: 75766 - RNA, 1701 nt, Artificial Sequence; identical to SEQ ID NO: 73882
  derived and/or modified CDS sequence (opt1) from hemagglutinin__InfluenzaA__AHM00013

SEQ ID NO: 75767 - RNA, 1701 nt, Artificial Sequence; identical to SEQ ID NO: 73892
  derived and/or modified CDS sequence (opt1) from hemagglutinin__InfluenzaA__AHM00025

SEQ ID NO: 75768 - RNA, 1701 nt, Artificial Sequence; identical to SEQ ID NO: 73907
  derived and/or modified CDS sequence (opt1) from hemagglutinin__InfluenzaA__AHM00037

SEQ ID NO: 75769 - RNA, 1701 nt, Artificial Sequence; identical to SEQ ID NO: 73907
  derived and/or modified CDS sequence (opt1) from hemagglutinin__InfluenzaA__AHM00061

SEQ ID NO: 75770 - RNA, 1701 nt, Artificial Sequence; identical to SEQ ID NO: 73882
  derived and/or modified CDS sequence (opt1) from hemagglutinin__InfluenzaA__AHM00073

SEQ ID NO: 75771 - RNA, 1701 nt, Artificial Sequence; identical to SEQ ID NO: 73882
  derived and/or modified CDS sequence (opt1) from hemagglutinin__InfluenzaA__AHM00085

SEQ ID NO: 75772 - RNA, 1701 nt, Artificial Sequence
  derived and/or modified CDS sequence (opt1) from hemagglutinin__InfluenzaA__AHM00097
augaaggccauccuggugguccuccuguacaccuucgccaccgcgaacgccgacacgcugugcaucggcuaccacgccaacaacagcaccgacaccguggacaccgugcucgagaagaacgucacggugacccacuccgugaaccugcuggaggacaagcacaacgggaagcucugcaagcugcgcggcgucgcgccccugcaccucgggaagugcaacaucgccggcuggauccuggggaacccggagugcgagagccuguccaccgccagcuccuggagcuacaucguggagaccuccagcuccgacaacggcacgugcuaccccggcgacuucaucgacuacgaggagcuccgggagcagcugagcuccgugagcuccuucgagcgcuucgagaucuuccccaagaccagcuccuggcccaaccacgacagcaacaagggggucaccgccgccugcccgcacgccggcgcgaagggguucuacaagaaccugaucuggcucgugaagaagggcaacuccuaccccaagcugagcaacuccuacaucaacgacaaggggaaggaggugcugguccucuggggcauccaccaccccagcaccacggccgaccagcagagccuguaccagaacgccgacaccuacguguucgugggcaccucccgguacagcaagaaguucaagcccgagaucgccauccgcccgaagguccgggaccaggaggggcgcaugaacuacuacuggacccugguggagcccggcgacaagaucacguucgaggccaccgggaaccucguggucccccgguacgcguucgccauggagcgcaacgccggcuccggcaucaucaucagcgacaccaccgugcacgacugcaacacgaccugccagacccccaagggggccaucaacaccucccugccguuccagaacauccaccccaucacgaucggcaagugccccaaguacgucaagagcaccaagcugcggcucgccaccgggcugcgcaacgugcccuccauccagagccggggccuguucggggcgaucgccggcuucaucgagggcggguggaccggcaugguggacgggugguacggcuaccaccaccagaacgagcagggguccggcuacgccgccgaccucaagagcacgcagaacgccaucgacaagaucaccaacaaggugaacuccgucaucgagaagaugaacacccaguucaccgcggugggcaaggaguucaaccaccuggagaagcgcaucgagaaccugaacaagaaggucgacgacggguuccucgacaucuggacguacaacgccgagcugcuggugcuccuggagaacgagcggacccuggacuaccacgacagcaacgugaagaaccucuacgagaagguccgcaaccagcugaagaacaacgccaaggagaucggcaacgggugcuucgaguucuaccacaagugcgacaacaugugcauggaguccgugaagaacggcaccuacgacuacccgaaguacagcgaggaggccaagcugaaccgggagaagaucgacggggugaagcucgaguccacccgcaucuaccagauccuggccaucuacagcacggucgcguccagccuggugcucguggucucccugggcgccaucagcuucuggaugugcagcaacggcucccugcagugccggaucugcaucuga

SEQ ID NO: 75773 - RNA, 1701 nt, Artificial Sequence; identical to SEQ ID NO: 73907
  derived and/or modified CDS sequence (opt1) from hemagglutinin__InfluenzaA__AHM00108

SEQ ID NO: 75774 - RNA, 1701 nt, Artificial Sequence; identical to SEQ ID NO: 73907
  derived and/or modified CDS sequence (opt1) from hemagglutinin__InfluenzaA__AHM00120

SEQ ID NO: 75775 - RNA, 1701 nt, Artificial Sequence
  derived and/or modified CDS sequence (opt1) from hemagglutinin__InfluenzaA__AHM00132
augaagaccaucaucgcccugagcuacauccucugccugguguucgcccaggagcugcccggcaacgacgacuccaccgcgacgcucugccuggggcaccacgccgucccgaacggcaccaucgugaagaccaucaccaacgaccagaucgaggugacgaacgccaccgagcugguccagagcuccagcaccggggagaucugcaacagcccccaccagauccucgacggcgagaacugcacccugaucgacgcccugcucggggacccccagugcgacggcuuccagaacaagaagugggaccuguucguggagcgcagcaaggcccacuccaacugcuaccccuacgacgugccggacuacgcgagccugcggucccucgucgccagcuccggcacgcuggaguucaacaacgagagcuucaacuggaccggggugacccagaacggcaccuccagcgccugcauccgccgguccaacaacagcuucuucucccgccugaacuggcucacgcaccugaacuucaaguaccccgcccugaacgugaccaugcccaacaacgagcaguucgacaagcucuacaucuggggcguccaccaccccgggaccgacaaggaccagaucagccuguacgcgcaggccuccgggcggaucaccgugagcacgaagcgcagccagcaggccgugaucccgaacaucggcucccggccccgcguccggaacauccccagccgcguguccaucuacuggaccaucgugaagcccggcgacauccugcucaucaacagcaccgggaaccugaucgccccgcggggcuacuucaagauccgcuccgggaaguccuccaucaugcggagcgacgcccccaucggcaagugcaacuccgcgugcaucacccccaacggcagcauccccaacgacaagccguuccagaacgucaaccgcaucacguacggggccugcccccgguacgugaagcagaacacccugaagcucgccaccggcaugcgcaacgugcccgagaagcagacccgggggaucuucggcgccaucgccggguucaucgagaacggcugggagggcauggucgacgggugguacggcuuccgccaccagaacuccgaggggcggggccaggcggccgaccucaagagcacgcaggccgccaucgaccagaucaacgggaagcugaaccgccugaucggcaagaccaacgagaaguuccaccagaucgagaaggaguucuccgagguggagggccggauccaggaccuggagaaguacguggaggacaccaagaucgaccuguggagcuacaacgccgagcuccuggucgcgcuggagaaccagcacaccaucgaccucacggacuccgagaugaacaagcuguucgagaagaccaagaagcagcugcgcgagaacgccgaggacauggggaacggcugcuucaagaucuaccacaagugcgacaacgccugcaucgggagcauccgcaacggcaccuacgaccacgacguguaccgggacgaggcccucaacaaccgcuuccagaucaaggggguggagcugaaguccggcuacaaggacuggauccuguggaucagcuucgccaucuccugcuuccuccugugcgucgcgcugcucggcuucaucaugugggccugccagaaggggaacauccggugcaacaucugcaucuga

SEQ ID NO: 75776 - RNA, 1701 nt, Artificial Sequence; identical to SEQ ID NO: 73882
  derived and/or modified CDS sequence (opt1) from hemagglutinin__InfluenzaA__AHM00144

SEQ ID NO: 75777 - RNA, 1701 nt, Artificial Sequence; identical to SEQ ID NO: 73907
  derived and/or modified CDS sequence (opt1) from hemagglutinin__InfluenzaA__AHM00156

SEQ ID NO: 75778 - RNA, 1701 nt, Artificial Sequence; identical to SEQ ID NO: 73882
  derived and/or modified CDS sequence (opt1) from hemagglutinin__InfluenzaA__AHM00168

SEQ ID NO: 75779 - RNA, 1701 nt, Artificial Sequence
  derived and/or modified CDS sequence (opt1) from hemagglutinin__InfluenzaA__AHM00180
augaagaccaucaucgcccugagcuacauccucugccugguguucgcccagaagcugcccggcaacgacaacuccaccgcgacgcucugccuggggcaccacgccgucccgaacggcaccaucgugaagaccaucaccaacgaccgcaucgaggugacgaacgccaccgagcugguccagaacagcuccaucggggagaucugcgacaacccccaccagauccucgacggcgagaacugcacccugaucgacgcccugcucggggacccccagugcgacggcuuccagaacaagaagugggaccuguucguggagcggagcaaggccuacuccaacugcuaccccuacgacgugccggacuacgcgagccugcgcucccucgucgccagcuccggcacccuggaguucaacaacgagagcuucaacuggacgggggugacccagaacggcaccuccagcgccugcauccggcgcuccaacagcuccuucuucagccggcugaacuggcucacccaccugaacuucaaguaccccgcccugaacgugacgaugcccaacaacgagcaguucgacaagcucuacaucuggggcguccaccaccccgggaccgacaaggaccagaucuuccuguacgcgcaguccagcgggcgcaucaccguguccaccaagcggagccagcaggccgugaucccgaacaucggcagccgcccccggauccgcaacauccccucccggaucagcaucuacuggacgaucgucaagcccggcgacauccugcucaucaacuccaccgggaaccugaucgccccgcgcggcuacuucaagauccggagcgggaaguccagcaucaugcgcuccgacgcccccaucggcaagugcaagagcgagugcaucacccccaacggcuccauccccaacgacaagccguuccagaacgugaaccggaucaccuacggggccugcccccgcuacgugaagcagagcacgcugaagcucgcgaccggcaugcggaacguccccgagaagcagacccgcgggaucuucggcgccaucgccggguucaucgagaacggcugggagggcaugguggacgggugguacggcuuccggcaccagaacuccgaggggcgcggccaggccgccgaccucaagagcacccaggcggccaucgaccagaucaacgggaagcugaaccggcugaucggcaagacgaacgagaaguuccaccagaucgagaaggaguucuccgagguggagggccgcauccaggaccuggagaaguacgucgaggacaccaagaucgaccuguggagcuacaacgccgagcuccugguggcccuggagaaccagcacaccaucgaccucaccgacuccgagaugaacaagcuguucgagaagacgaagaagcagcugcgcgagaacgccgaggacauggggaacggcugcuucaagaucuaccacaagugcgacaacgcgugcaucgggagcauccggaacggcaccuacgaccacaacguguaccgcgacgaggcccucaacaaccgguuccagaucaagggggucgagcugaaguccggcuacaaggacuggauccuguggaucagcuucgccaucuccugcuuccuccugugcguggcccugcucggcuucaucaugugggccugccagaaggggaacauccgcugcaacaucugcaucuga

SEQ ID NO: 75780 - RNA, 1701 nt, Artificial Sequence; identical to SEQ ID NO: 73859
  derived and/or modified CDS sequence (opt1) from hemagglutinin__InfluenzaA__AHM00192

SEQ ID NO: 75781 - RNA, 1701 nt, Artificial Sequence; identical to SEQ ID NO: 73907
  derived and/or modified CDS sequence (opt1) from hemagglutinin__InfluenzaA__AHM00204

SEQ ID NO: 75782 - RNA, 1701 nt, Artificial Sequence; identical to SEQ ID NO: 73907
  derived and/or modified CDS sequence (opt1) from hemagglutinin__InfluenzaA__AHM00216

SEQ ID NO: 75783 - RNA, 1701 nt, Artificial Sequence; identical to SEQ ID NO: 73882
  derived and/or modified CDS sequence (opt1) from hemagglutinin__InfluenzaA__AHM00228

SEQ ID NO: 75784 - RNA, 1701 nt, Artificial Sequence; identical to SEQ ID NO: 73882
  derived and/or modified CDS sequence (opt1) from hemagglutinin__InfluenzaA__AHM00240

SEQ ID NO: 75785 - RNA, 1701 nt, Artificial Sequence; identical to SEQ ID NO: 73882
  derived and/or modified CDS sequence (opt1) from hemagglutinin__InfluenzaA__AHM00252

SEQ ID NO: 75786 - RNA, 1701 nt, Artificial Sequence; identical to SEQ ID NO: 73882
  derived and/or modified CDS sequence (opt1) from hemagglutinin__InfluenzaA__AHM00264

SEQ ID NO: 75787 - RNA, 1701 nt, Artificial Sequence; identical to SEQ ID NO: 73859
  derived and/or modified CDS sequence (opt1) from hemagglutinin__InfluenzaA__AHM00276

SEQ ID NO: 75788 - RNA, 1701 nt, Artificial Sequence; identical to SEQ ID NO: 73882
  derived and/or modified CDS sequence (opt1) from hemagglutinin__InfluenzaA__AHM00288

SEQ ID NO: 75789 - RNA, 1701 nt, Artificial Sequence; identical to SEQ ID NO: 73882
  derived and/or modified CDS sequence (opt1) from hemagglutinin__InfluenzaA__AHM00300

SEQ ID NO: 75790 - RNA, 1701 nt, Artificial Sequence; identical to SEQ ID NO: 73907
  derived and/or modified CDS sequence (opt1) from hemagglutinin__InfluenzaA__AHM00312

SEQ ID NO: 75791 - RNA, 1701 nt, Artificial Sequence; identical to SEQ ID NO: 73859
  derived and/or modified CDS sequence (opt1) from hemagglutinin__InfluenzaA__AHM00324

SEQ ID NO: 75792 - RNA, 1701 nt, Artificial Sequence; identical to SEQ ID NO: 73859
  derived and/or modified CDS sequence (opt1) from hemagglutinin__InfluenzaA__AHM00336

SEQ ID NO: 75793 - RNA, 1701 nt, Artificial Sequence; identical to SEQ ID NO: 73907
  derived and/or modified CDS sequence (opt1) from hemagglutinin__InfluenzaA__AHM00348

SEQ ID NO: 75794 - RNA, 1701 nt, Artificial Sequence
  derived and/or modified CDS sequence (opt1) from hemagglutinin__InfluenzaA__AHM00360
augaagaccaucaucgcccugagcuacauccucugccugguguucgcccagaagcugcccggcaacgacaacuccaccgcgacgcucugccuggggcaccacgccgucccgaacggcaccaucgugaagaccaucaccaacgaccagaucgaggugacgaacgccaccgagcugguccagaacagcuccaucggggagaucugcgacagcccccaccagauccucgacggcgagaacugcacccugaucgacgcccugcucggggacccccagugcgacggcuuccagaacaagaagugggaccuguucguggagcgcuccaaggccuacagcaacugcuaccccuacgacgugccggacuacgcgucccugcggagccucgucgccuccagcggcacccuggaguucaacaacgaguccuucaacuggacgggggugacccagaacggcaccagcuccgccugcauccgccggagcaacuccagcuucuucucccgccugaacuggcucacccaccugaacuucaaguaccccgcccugaacgugacgaugcccaacaacgagcaguucgacaagcucuacaucuggggcguccaccaccccgggaccgacaaggaccagaucuuccuguacgcgcagagcuccgggcggaucaccgugagcaccaagcgcagccagcaggccgugaucccgaacaucggcucccggccccgcauccggaacauccccagccgcaucuccaucuacuggacgaucgucaagcccggcgacauccugcucaucaacagcaccgggaaccugaucgccccgcggggcuacuucaagauccgcuccggcaagagcuccaucaugcggagcgacgcccccaucgggaagugcaaguccgagugcaucacccccaacggcagcauccccaacgacaagccguuccagaacgugaaccgcaucaccuacggggccugcccccgguacgugaagcaguccacgcugaagcucgcgaccggcaugcgcaacguccccgagaagcagacccgggggaucuucggcgccaucgccggguucaucgagaacggcugggagggcaugguggacgggugguacggcuuccgccaccagaacagcgaggggcggggccaggccgccgaccugaaguccacccaggcggccaucgaccagaucaacgggaagcugaaccgccucaucggcaagacgaacgagaaguuccaccagaucgagaaggaguucagcgagguggagggccggauccaggaccuggagaaguacgucgaggacaccaagaucgaccugugguccuacaacgccgagcuccugguggcccuggagaaccagcacaccaucgaccucaccgacagcgagaugaacaagcuguucgagaagacgaagaagcagcugcgcgagaacgccgaggacauggggaacggcugcuucaagaucuaccacaagugcgacaacgcgugcaucggguccauccgcaacggcaccuacgaccacgacguguaccgggacgaggcccucaacaaccgcuuccagaucaagggggucgagcucaagagcggcuacaaggacuggauccuguggaucuccuucgccaucagcugcuuccugcugugcguggcccugcucggcuucaucaugugggccugccagaaggggaacauccggugcaacaucugcaucuga

SEQ ID NO: 75795 - RNA, 1701 nt, Artificial Sequence; identical to SEQ ID NO: 73907
  derived and/or modified CDS sequence (opt1) from hemagglutinin__InfluenzaA__AHM00372

SEQ ID NO: 75796 - RNA, 1701 nt, Artificial Sequence; identical to SEQ ID NO: 73907
  derived and/or modified CDS sequence (opt1) from hemagglutinin__InfluenzaA__AHM00395

SEQ ID NO: 75797 - RNA, 1701 nt, Artificial Sequence; identical to SEQ ID NO: 73882
  derived and/or modified CDS sequence (opt1) from hemagglutinin__InfluenzaA__AHM00407

SEQ ID NO: 75798 - RNA, 1701 nt, Artificial Sequence; identical to SEQ ID NO: 73882
  derived and/or modified CDS sequence (opt1) from hemagglutinin__InfluenzaA__AHM00419

SEQ ID NO: 75799 - RNA, 1701 nt, Artificial Sequence; identical to SEQ ID NO: 73882
  derived and/or modified CDS sequence (opt1) from hemagglutinin__InfluenzaA__AHM00443

SEQ ID NO: 75800 - RNA, 1701 nt, Artificial Sequence; identical to SEQ ID NO: 73907
  derived and/or modified CDS sequence (opt1) from hemagglutinin__InfluenzaA__AHM00455

SEQ ID NO: 75801 - RNA, 1701 nt, Artificial Sequence; identical to SEQ ID NO: 73907
  derived and/or modified CDS sequence (opt1) from hemagglutinin__InfluenzaA__AHM00467

SEQ ID NO: 75802 - RNA, 1701 nt, Artificial Sequence; identical to SEQ ID NO: 73907
  derived and/or modified CDS sequence (opt1) from hemagglutinin__InfluenzaA__AHM00479

SEQ ID NO: 75803 - RNA, 1701 nt, Artificial Sequence; identical to SEQ ID NO: 73907
  derived and/or modified CDS sequence (opt1) from hemagglutinin__InfluenzaA__AHM00491

SEQ ID NO: 75804 - RNA, 1701 nt, Artificial Sequence; identical to SEQ ID NO: 73882
  derived and/or modified CDS sequence (opt1) from hemagglutinin__InfluenzaA__AHM00503

SEQ ID NO: 75805 - RNA, 1701 nt, Artificial Sequence; identical to SEQ ID NO: 73882
  derived and/or modified CDS sequence (opt1) from hemagglutinin__InfluenzaA__AHM00515

SEQ ID NO: 75806 - RNA, 1701 nt, Artificial Sequence
  derived and/or modified CDS sequence (opt1) from hemagglutinin__InfluenzaA__AHM00527
augaagaccaucaucgcccugagcuacauccucugccugguguucgcccagaagcugcccggcaacgacaacuccaccgcgacgcucugccuggggcaccacgccgucccgaacggcaccaucgugaagaccaucaccaacgaccgcaucgaggugacgaacgccaccgagcugguccagaacagccccaucggggagaucugcgacagcccccaccagauccucgacggcgagaacugcacccugaucgacgcccugcucggggacccccagugcgacggcuuccagaacaagaagugggaccuguucguggagcggagcaaggccuacuccaacugcuacccguacgacgugcccgacuacgcgagccugcgcucccucgucgccagcuccggcacccuggaguucaacaacgagagcuucaacuggacgggggugacccagaacggcaccuccagcgccugcauccggcgcuccaacagcuccuucuucagccggcugaacuggcucacccaccugaacuucaaguaccccgcccugaacgugacgaugcccaacaacgagcaguucgacaagcucuacaucuggggcguccaccacccggggaccgacaaggaccagaucuuccuguacgcgcaguccagcgggcgcaucaccguguccaccaagcggagccagcaggccgugauccccaacaucggcagccgcccccggauccgcaacauccccucccggaucagcaucuacuggacgaucgucaagccgggcgacauccugcucaucaacuccaccgggaaccugaucgcgccccgcggcuacuucaagauccggagcgggaaguccagcaucaugcgcuccgacgcccccaucggcaagugcaagagcgagugcaucacccccaacggcuccaucccgaacgacaagcccuuccagaacgugaaccggaucaccuacggggccugcccccgcuacgugaagcagagcacgcugaagcucgccaccggcaugcggaacguccccgagaagcagacccgcgggaucuucggcgccaucgccggguucaucgagaacggcugggagggcaugguggacgggugguacggcuuccggcaccagaacuccgaggggcgcggccaggccgccgaccugaaguccacccaggcggccaucgaccagaucaacgggaagcugaaccggcucaucggcaagacgaacgagaaguuccaccagaucgagaaggaguucuccgagguggagggccgcauccaggaccuggagaaguacgucgaggacaccaagaucgaccuguggagcuacaacgccgagcuccugguggcccuggagaaccagcacaccaucgaccucaccgacuccgagaugaacaagcuguucgagaagacgaagaagcagcugcgcgagaacgccgaggacauggggaacggcugcuucaagaucuaccacaagugcgacaacgcgugcaucgggagcauccggaacggcaccuacgaccacaacguguaccgcgacgaggcccucaacaaccgguuccagaucaagggggucgagcugaaguccggcuacaaggacuggauccuguggaucagcuucgccaucuccugcuuccuccugugcguggcccugcucggcuucaucaugugggccugccagaaggggaacauccgcugcaacaucugcaucuga

SEQ ID NO: 75807 - RNA, 1701 nt, Artificial Sequence; identical to SEQ ID NO: 73859
  derived and/or modified CDS sequence (opt1) from hemagglutinin__InfluenzaA__AHM00539

SEQ ID NO: 75808 - RNA, 1701 nt, Artificial Sequence
  derived and/or modified CDS sequence (opt1) from hemagglutinin__InfluenzaA__AHM00543
augaagaccaucaucgcccugagcuacauccucugccugguguucgcccaggagcugcccggcaacgacgacuccaccgcgacgcucugccuggggcaccacgccgucccgaacggcaccaucgugaagaccaucaccaacgaccagaucgaggugacgaacgccaccgagcugguccagagcuccagcaccggggagaucugcaacagcccccaccagauccucgacggcgagaacugcacccugaucgacgcccugcucggggacccccagugcgacggcuuccagaacaagaagugggaccuguucguggagcgcuccaaggcccacuccaacugcuaccccuacgacgugccggacuacgcgagccugcggucccucgucgccagcuccggcacgauggaguucaacaacgagagcuucaacuggaccggggugacccagaacggcaccuccagcgccugcauccgccgguccaacaacagcuucuucucccgccugaacuggcugacgcaccucaacuucaaguaccccgcccugaacgugaccaugcccaacaacgagcaguucgacaagcuguacaucuggggcguccaccaccccgggaccgacaaggaccagaucuuccucuacgcgcaggccagcgggcggaucaccguguccacgaagcgcagccagcaggccgugaucccgaacaucggcagccggccccgcguccggaacauccccucccgcgugagcaucuacuggaccaucgugaagcccggcgacauccugcugaucaacuccaccgggaaccucaucgccccgcggggcuacuucaagauccgcagcgggaaguccagcaucaugcgguccgacgcccccaucggcaagugcaacagcgcgugcaucacccccaacggcuccauccccaacgacaagccguuccagaacgucaaccgcaucacguacggggccugcccccgguacgugaagcagaacacccugaagcuggccaccggcaugcgcaacgugcccgagaagcagacccgggggaucuucggcgccaucgccggguucaucgagaacggcugggagggcauggucgacgggugguacggcuuccgccaccagaacagcgaggggcggggccaggcggccgaccucaaguccacgcaggccgccaucgaccagaucaacgggaagcugaaccgccugaucggcaagaccaacgagaaguuccaccagaucgagaaggaguucagcgagguggagggccggauccaggaccucgagaaguacguggaggacaccaagaucgaccugugguccuacaacgccgagcugcucgucgcgcuggagaaccagcacaccaucgaccugacggacagcgagaugaacaagcuguucgagaagaccaagaagcagcuccgcgagaacgccgaggacauggggaacggcugcuucaagaucuaccacaagugcgacaacgccugcaucggguccauccgcaacggcaccuacgaccacgacguguaccgggacgaggcccugaacaaccgcuuccagaucaaggggguggagcucaagagcggcuacaaggacuggauccuguggaucuccuucgccaucagcugcuuccugcucugcgucgcgcugcugggcuucaucaugugggccugccagaaggggaacauccggugcaacaucugcaucuga

SEQ ID NO: 75809 - RNA, 1701 nt, Artificial Sequence; identical to SEQ ID NO: 73882
  derived and/or modified CDS sequence (opt1) from hemagglutinin__InfluenzaA__AHM00555

SEQ ID NO: 75810 - RNA, 1701 nt, Artificial Sequence
  derived and/or modified CDS sequence (opt1) from hemagglutinin__InfluenzaA__AHM00567
augaagaccaucaucgcccugagcuacauccucugccugguguucgcccagaagcugcccggcaacgacaacuccaccgcgacgcucugccuggggcaccacgccgucccgaacggcaccaucgugaagaccaucaccaacgaccgcaucgaggugacgaacgccaccgagcugguccagaacagcuccaucggggagaucugcgacagcccccaccagauccucgacggcgagaacugcacccugaucgacgcccugcucggggacccccagugcgacggcuuccagaacaagaagugggaccuguucguggagcgguccaaggccuacagcaacugcuaccccuacgacgugccggacuacgcgucccugcgcagccucgucgccuccagcggcacccuggaguucaacaacgaguccuucaacuggacgggggugacccagaacggcaccagcuccgccugcauccgcaagagcaacuccagcuucuucucccggcugaacuggcucacccaccugaacuucaaguaccccgcccugaacgugacgaugcccaacaacgagcaguucgacaagcucuacaucuggggcguccaccaccccgggaccgacaaggaccagaucuuccuguacgcgcagagcuccgggcggaucaccgugagcaccaagcgcagccagcaggccgugaucccgaacaucggcucccggccccgcauccggaacauccccagccgcaucuccaucuacuggacgaucgucaagcccggcgacauccugcucaucaacagcaccgggaaccugaucgccccgcggggcuacuucaagauccgcuccggcaagagcuccaucaugcggagcgacgcccccaucgggaagugcaaguccgagugcaucacccccaacggcagcauccccaacgacaagccguuccagaacgugaaccgcaucaccuacggggccugcccccgguacgugaagcaguccacgcugaagcucgcgaccggcaugcgcaacguccccgagaagcagacccgggggaucuucggcgccaucgccggguucaucgagaacggcugggagggcaugguggacgggugguacggcuuccgccaccagaacagcgaggggcggggccaggccgccgaccugaaguccacccaggcggccaucgaccagaucaacgggaagcugaaccgccucaucggcaagacgaacgagaaguuccaccagaucgagaaggaguucagcgagguggagggccggauccaggaccuggagaaguacgucgaggacaccaagaucgaccugugguccuacaacgccgagcuccugguggcccuggagaaccagcacaccaucgaccucaccgacagcgagaugaacaagcuguucgagaagacgaagaagcagcugcgcgagaacgccgaggacauggggaacggcugcuucaagaucuaccacaagugcgacaacgcgugcaucggguccauccgcaacggcaccuacgaccacgacguguaccgggacgaggcccucaacaaccgcuuccagaucaagggggucgagcucaagagcggcuacaaggacuggauccuguggaucuccuucgccaucagcugcuuccugcugugcguggcccugcucggcuucaucaugugggccugccagaaggggaacauccggugcaacaucugcaucuga

SEQ ID NO: 75811 - RNA, 1701 nt, Artificial Sequence; identical to SEQ ID NO: 73882
  derived and/or modified CDS sequence (opt1) from hemagglutinin__InfluenzaA__AHM00579

SEQ ID NO: 75812 - RNA, 1701 nt, Artificial Sequence; identical to SEQ ID NO: 73907
  derived and/or modified CDS sequence (opt1) from hemagglutinin__InfluenzaA__AHM00591

SEQ ID NO: 75813 - RNA, 1701 nt, Artificial Sequence; identical to SEQ ID NO: 73882
  derived and/or modified CDS sequence (opt1) from hemagglutinin__InfluenzaA__AHM00603

SEQ ID NO: 75814 - RNA, 1701 nt, Artificial Sequence; identical to SEQ ID NO: 73882
  derived and/or modified CDS sequence (opt1) from hemagglutinin__InfluenzaA__AHM00615

SEQ ID NO: 75815 - RNA, 1701 nt, Artificial Sequence
  derived and/or modified CDS sequence (opt1) from hemagglutinin__InfluenzaA__AHM00627
augaagaccaccaucgcccugagcuacauccucugccugguguucgcccagaagcugcccggcaacgacaacuccacggcgacccucugccuggggcaccacgccgucccgaacggcaccaucgugaagaccaucacgaacgaccgcaucgaggugaccaacgccaccgagcugguccagaacagcuccaucggggagaucugcgacagcccccaccagauccucgacggcgagaacugcacccugaucgacgcccugcucggggacccccagugcgacggcuuccagaacaagaagugggaccuguucguggagcgguccaaggccuacagcaacugcuaccccuacgacgugccggacuacgcgucccugcgcagccucgucgccuccagcggcacgcuggaguucaacaacgaguccuucaacuggaccggggugacccagaacggcaccagcuccgccugcauccggcgcagcaacuccagcuucuucucccggcugaacuggcucacgcaccugaacuucaaguaccccgcccugaacgugaccaugcccaacaacgagcaguucgacaagcucuacaucuggggcguccaccaccccgggaccgacaaggaccagaucuuccuguacgcgcagagcuccgggcgcaucaccgugagcacgaagcggagccagcaggccgugaucccgaacaucggcucccgcccccggauccgcaacauccccagccggaucuccaucuacuggaccaucgucaagcccggcgacauccugcucaucaacagcaccgggaaccugaucgccccgcgcggcuacuucaagauccgguccggcaagagcuccaucaugcgcagcgacgcccccaucgggaagugcaaguccgagugcaucacccccaacggcagcauccccaacgacaagccguuccagaacgugaaccggaucacguacggggccugcccccgcuacgugaagcaguccacccugaagcucgcgaccggcaugcggaacguccccgagaagcagacccgcgggaucuucggcgccaucgccggguucaucgagaacggcugggagggcaugguggacgggugguacggcuuccggcaccagaacagcgaggggcgcggccaggccgccgaccugaaguccacgcaggcggccaucgaccagaucaacgggaagcugaaccggcucaucggcaagaccaacgagaaguuccaccagaucgagaaggaguucagcgagguggagggccgcauccaggaccuggagaaguacgucgaggacaccaagaucgaccugugguccuacaacgccgagcuccugguggcccuggagaaccagcacaccaucgaccucacggacagcgagaugaacaagcuguucgagaagaccaagaagcagcugcgcgagaacgccgaggacauggggaacggcugcuucaagaucuaccacaagugcgacaacgcgugcaucggguccauccggaacggcaccuacgaccacaacguguaccgcgacgaggcccucaacaaccgguuccagaucaagggggucgagcucaagagcggcuacaaggacuggauccuguggaucuccuucgccaucagcugcuuccugcugugcguggcccugcucggcuucaucaugugggccugccagaaggggaacauccgcugcaacaucugcaucuga

SEQ ID NO: 75816 - RNA, 1701 nt, Artificial Sequence; identical to SEQ ID NO: 73882
  derived and/or modified CDS sequence (opt1) from hemagglutinin__InfluenzaA__AHM00639

SEQ ID NO: 75817 - RNA, 1701 nt, Artificial Sequence; identical to SEQ ID NO: 73859
  derived and/or modified CDS sequence (opt1) from hemagglutinin__InfluenzaA__AHM00651

SEQ ID NO: 75818 - RNA, 1701 nt, Artificial Sequence; identical to SEQ ID NO: 74018
  derived and/or modified CDS sequence (opt1) from hemagglutinin__InfluenzaA__AHM00663

SEQ ID NO: 75819 - RNA, 1701 nt, Artificial Sequence; identical to SEQ ID NO: 73907
  derived and/or modified CDS sequence (opt1) from hemagglutinin__InfluenzaA__AHM00675

SEQ ID NO: 75820 - RNA, 1701 nt, Artificial Sequence; identical to SEQ ID NO: 74969
  derived and/or modified CDS sequence (opt1) from hemagglutinin__InfluenzaA__AHM00687

SEQ ID NO: 75821 - RNA, 1701 nt, Artificial Sequence
  derived and/or modified CDS sequence (opt1) from hemagglutinin__InfluenzaA__AHM00698
augaagaccaucaucgcccugagcuacauccucugccugguguucgcccaggagcugcccggcaacgacgacuccaccgcgacgcucugccuggggcaccacgccgucccgaacggcaccaucgugaagaccaucaccaacgaccagaucgaggugacgaacgccaccgagcugguccagagcuccagcaccggggagaucugcaacagcccccaccagauccucgacggcgagaacugcacccugaucgacgcccugcucggggacccccagugcgacggcuuccagaacaagaagugggaccuguucguggagcgcagcaaggcccacuccaacugcuaccccuacgacgugccggacuacgcgagccugcggucccucgucgccagcuccggcacgcuggaguucaacaacgagagcuucaacuggaccggggugacccagaacggcaccuccagcgccugcacgcgccgguccaacaacagcuucuucucccgccugaacuggcucacccaccugaacuucaaguaccccgcccugaacgugaccaugcccaacaacgagcaguucgacaagcucuacaucuggggcguccaccaccccgggaccgacaaggaccagaucuuccuguacgcgcaggccagcgggcggaucacgguguccaccaagcgcagccagcaggccgugaucccgaacaucggcagccggccccgcguccggaacauccccucccgcgugagcaucuacuggaccaucgugaagcccggcgacauccugcucaucaacuccaccgggaaccugaucgccccgcggggcuacuucaagauccgcagcgggaaguccagcaucaugcgguccgacgcccccaucggcaagugcaacagcgcgugcaucacgcccaacggcuccauccccaacgacaagccguuccagaacgucaaccgcaucaccuacggggccugcccccgguacgugaagcagaacacccugaagcucgccaccggcaugcgcaacgugcccgagaagcagacgcgggggaucuucggcgccaucgccggguucaucgagaacggcugggagggcauggucgacgggugguacggcuuccgccaccagaacagcgaggggcggggccaggcggccgaccugaaguccacccaggccgccaucgaccagaucaacgggaagcugaaccgccucaucggcaagaccaacgagaaguuccaccagaucgagaaggaguucagcgagguggagggccggauccaggaccuggagaaguacguggaggacaccaagaucgaccugugguccuacaacgccgagcuccuggucgcgcuggagaaccagcacacgaucgaccucaccgacagcgagaugaacaagcuguucgagaagaccaagaagcagcugcgcgagaacgccgaggacauggggaacggcugcuucaagaucuaccacaagugcgacaacgccugcaucggguccauccgcaacggcaccuacgaccacgacguguaccgggacgaggcccucaacaaccgcuuccagaucaaggggguggagcugaaguccggcuacaaggacuggauccuguggaucuccuucgccaucagcugcuuccuccugugcgucgcgcugcucggcuucaucaugugggccugccagaaggggaacauccggugcaacaucugcaucuga

SEQ ID NO: 75822 - RNA, 1701 nt, Artificial Sequence; identical to SEQ ID NO: 73882
  derived and/or modified CDS sequence (opt1) from hemagglutinin__InfluenzaA__AHM00710

SEQ ID NO: 75823 - RNA, 1701 nt, Artificial Sequence; identical to SEQ ID NO: 73882
  derived and/or modified CDS sequence (opt1) from hemagglutinin__InfluenzaA__AHM00722

SEQ ID NO: 75824 - RNA, 1701 nt, Artificial Sequence; identical to SEQ ID NO: 73882
  derived and/or modified CDS sequence (opt1) from hemagglutinin__InfluenzaA__AHM00734

SEQ ID NO: 75825 - RNA, 1701 nt, Artificial Sequence; identical to SEQ ID NO: 74017
  derived and/or modified CDS sequence (opt1) from hemagglutinin__InfluenzaA__AHM00746

SEQ ID NO: 75826 - RNA, 1701 nt, Artificial Sequence; identical to SEQ ID NO: 73882
  derived and/or modified CDS sequence (opt1) from hemagglutinin__InfluenzaA__AHM00758

SEQ ID NO: 75827 - RNA, 1701 nt, Artificial Sequence; identical to SEQ ID NO: 74050
  derived and/or modified CDS sequence (opt1) from hemagglutinin__InfluenzaA__AHM00770

SEQ ID NO: 75828 - RNA, 1701 nt, Artificial Sequence; identical to SEQ ID NO: 73859
  derived and/or modified CDS sequence (opt1) from hemagglutinin__InfluenzaA__AHM00782

SEQ ID NO: 75829 - RNA, 1701 nt, Artificial Sequence
  derived and/or modified CDS sequence (opt1) from hemagglutinin__InfluenzaA__AHM00794
augaagaccaucaucgcccugagcuacauccucugccugguguucacccagaagcugcccggcaacgacaacuccacggccacccucugccuggggcaccacgcggucccgaacggcaccaucgugaagaccaucacgaacgaccgcaucgaggugaccaacgccaccgagcugguccagaacagcuccaucggggagaucugcgacagcccccaccagauccucgacggcgagaacugcacccugaucgacgcccugcucggggacccccagugcgacggcuuccagaacaagaagugggaccuguucguggagcgguccaaggccuacagcaacugcuaccccuacgacgugccggacuacgccucccugcgcagccucgucgcguccagcggcacgcuggaguucaacaacgaguccuucaacuggaccggggugacccagaacggcaccagcuccgccugcauccggcgcagcaacuccagcuucuucucccggcugaacuggcucacgcaccugaacuucaaguaccccgcccugaacgugaccaugcccaacaacgagcaguucgacaagcucuacaucuggggcguccaccaccccgggaccgacaaggaccagaucuuccuguacgcccagagcuccgggcgcaucaccgugagcacgaagcggagccagcaggcggugaucccgaacaucggcucccgcccccggauccgcaacauccccagccggaucuccaucuacuggaccaucgucaagcccggcgacauccugcucaucaacagcaccgggaaccugaucgccccgcgcggcuacuucaagauccgguccggcaagagcuccaucaugcgcagcgacgcccccaucgggaagugcaaguccgagugcaucacccccaacggcagcauccccaacgacaagccguuccagaacgugaaccggaucacguacggggccugcccccgcuacgugaagcaguccacccugaagcucgccaccggcaugcggaacguccccgagaagcagacccgcgggaucuucggcgcgaucgccggguucaucgagaacggcugggagggcaugguggacgggugguacggcuuccggcaccagaacagcgaggggcgcggccaggccgccgaccugaaguccacgcaggccgcgaucgaccagaucaacgggaagcugaaccggcucaucggcaagaccaacgagaaguuccaccagaucgagaaggaguucagcgagguggagggccgcauccaggaccuggagaaguacgucgaggacaccaagaucgaccugugguccuacaacgccgagcuccugguggcccuggagaaccagcacaccaucgaccucacggacagcgagaugaacaagcuguucgagaagaccaagaagcagcugcgcgagaacgccgaggacauggggaacggcugcuucaagaucuaccacaagugcgacaacgccugcaucggguccauccggaacggcaccuacgaccacgacguguaccgcgacgaggcgcucaacaaccgguuccagaucaagggggucgagcucaagagcggcuacaaggacuggauccuguggaucuccuucgccaucagcugcuuccugcugugcguggcccugcucggcuucaucaugugggccugccagaaggggaacauccgcugcaacaucugcaucuga

SEQ ID NO: 75830 - RNA, 1701 nt, Artificial Sequence; identical to SEQ ID NO: 74050
  derived and/or modified CDS sequence (opt1) from hemagglutinin__InfluenzaA__AHM00806

SEQ ID NO: 75831 - RNA, 1701 nt, Artificial Sequence
  derived and/or modified CDS sequence (opt1) from hemagglutinin__InfluenzaA__AHM00818
augaagaccaucaucgcccugagcuacauccucugccugguguucgcccagaagcugcccggcaacgacaacuccaccgcgacgcucugccuggggcaccacgccgucccgaacggcaccaucgugaagaccaucaccaacgaccgcaucgaggugacgaacgccaccgagcugguccagaacagcuccaucggggagaucugcgacagcccccaccagauccucgacggcgagaacugcacccugaucgacgcccugcucggggacccccagugcgacggcuuccagaacaagaagugggaccuguucguggagcgguccaaggccuacagcaacugcuaccccuacgacgugccggacuacgcgucccugcgcagccucgucgccuccagcggcacccuggaguucaacaacgagaacuucaacuggacgggggugacccagaacggcaccuccagcgccugcauccggcgcuccaacagcuccuucuucagccggcugaacuggcucacccaccugaacuucaaguaccccgcccugaacgugacgaugcccaacaacgagcaguucgacaagcucuacaucuggggcguccaccaccccgggaccgacaaggaccagaucuuccuguacgcgcaguccagcgggcgcaucaccguguccaccaagcggagccagcaggccgugaucccgaacaucggcagccgcccccggauccgcaacauccccucccggaucagcaucuacuggacgaucgucaagcccggcgacauccugcucaucaacuccaccgggaaccugaucgccccgcgcggcuacuucaagauccggagcgggaaguccagcaucaugcgcuccgacgcccccaucggcaagugcaagagcgagugcaucacccccaacggcuccauccccaacgacaagccguuccagaacgugaaccggaucaccuacggggccugcccccgcuacgugaagcagagcacgcugaagcucgcgaccggcaugcggaacguccccgagaagcagacccgcgggaucuucggcgccaucgccggguucaucgagaacggcugggagggcaugguggacgggugguacggcuuccggcaccagaacuccgaggggcgcggccaggccgccgaccucaagagcacccaggcggccaucgaccagaucaacgggaagcugaaccggcugaucggcaagacgaacgagaaguuccaccagaucgagaaggaguucuccgagguggagggccgcauccaggaccuggagaaguacgucgaggacaccaagaucgaccuguggagcuacaacgccgagcuccugguggcccuggagaaccagcacaccaucgaccucaccgacuccgagaugaacaagcuguucgagaagacgaagaagcagcugcgcgagaacgccgaggacauggggaacggcugcuucaagaucuaccacaagugcgacaacgcgugcaucgggagcauccggaacggcaccuacgaccacgacguguaccgcgacgaggcccucaacaaccgguuccagaucaagggggucgagcugaaguccggcuacaaggacuggauccuguggaucagcuucgccaucuccugcuuccuccugugcguggcccugcucggcuucaucaugugggccugccagaaggggaacauccgcugcaacaucugcaucuga

SEQ ID NO: 75832 - RNA, 1701 nt, Artificial Sequence; identical to SEQ ID NO: 73907
  derived and/or modified CDS sequence (opt1) from hemagglutinin__InfluenzaA__AHM00830

SEQ ID NO: 75833 - RNA, 1701 nt, Artificial Sequence; identical to SEQ ID NO: 73907
  derived and/or modified CDS sequence (opt1) from hemagglutinin__InfluenzaA__AHM00842

SEQ ID NO: 75834 - RNA, 1701 nt, Artificial Sequence; identical to SEQ ID NO: 75810
  derived and/or modified CDS sequence (opt1) from hemagglutinin__InfluenzaA__AHM00854

SEQ ID NO: 75835 - RNA, 1701 nt, Artificial Sequence; identical to SEQ ID NO: 75810
  derived and/or modified CDS sequence (opt1) from hemagglutinin__InfluenzaA__AHM00866

SEQ ID NO: 75836 - RNA, 1701 nt, Artificial Sequence; identical to SEQ ID NO: 73882
  derived and/or modified CDS sequence (opt1) from hemagglutinin__InfluenzaA__AHM00878

SEQ ID NO: 75837 - RNA, 1701 nt, Artificial Sequence; identical to SEQ ID NO: 73859
  derived and/or modified CDS sequence (opt1) from hemagglutinin__InfluenzaA__AHM00890

SEQ ID NO: 75838 - RNA, 1701 nt, Artificial Sequence; identical to SEQ ID NO: 73892
  derived and/or modified CDS sequence (opt1) from hemagglutinin__InfluenzaA__AHM00902

SEQ ID NO: 75839 - RNA, 1701 nt, Artificial Sequence; identical to SEQ ID NO: 73882
  derived and/or modified CDS sequence (opt1) from hemagglutinin__InfluenzaA__AHM00914

SEQ ID NO: 75840 - RNA, 1701 nt, Artificial Sequence; identical to SEQ ID NO: 73882
  derived and/or modified CDS sequence (opt1) from hemagglutinin__InfluenzaA__AHM00926

SEQ ID NO: 75841 - RNA, 1701 nt, Artificial Sequence; identical to SEQ ID NO: 73859
  derived and/or modified CDS sequence (opt1) from hemagglutinin__InfluenzaA__AHM00938

SEQ ID NO: 75842 - RNA, 1701 nt, Artificial Sequence
  derived and/or modified CDS sequence (opt1) from hemagglutinin__InfluenzaA__AHM00950
augaagaccaucaucgcccugagcuacauccucugccugguguucgcccagaagcugcccggcaacgacaacuccaccgcgacgcucugccuggggcaccacgccgucccgaacggcaccaucgugaagaccaucaccaacgaccgcaucgaggugacgaacgccaccgagcugguccagaacagcuccaucggggagaucugcgacagcccccaccagauccucgacggcgagaacugcacccugaucgacgcccugcucggggacccccagugcgacggcuuccagaacaagaagugggaccuguucguggagcgguccaaggccuacagcaacugcuaccccuacgacgugccggacuacgucucccugcgcagccucguggcguccagcggcacccuggaguucaacaacgaguccuucaacuggacgggggugacccagaacggcaccagcuccgccugcauccggcgcagcaacuccagcuucuucucccggcugaacuggcucacccaccugaacuucaaguaccccgcccugaacgucacgaugcccaacaacgagcaguucgacaagcucuacaucuggggcgugcaccaccccgggaccgacaaggaccagaucuuccuguacgcccagagcuccgggcgcaucaccgugagcaccaagcggagccagcaggcggucaucccgaacaucggcucccgcccccggauccgcaacauccccagccggaucuccaucuacuggacgaucgugaagcccggcgacauccugcucaucaacagcaccgggaaccugaucgccccgcgcggcuacuucaagauccgguccggcaagagcuccaucaugcgcagcgacgcccccaucgggaagugcaaguccgagugcaucacccccaacggcagcauccccaacgacaagccguuccagaacgugaaccggaucaccuacggggccugcccccgcuacgucaagcaguccacgcugaagcucgccaccggcaugcggaacgugcccgagaagcagacccgcgggaucuucggcgcgaucgccggguucaucgagaacggcugggagggcaugguggacgggugguacggcuuccggcaccagaacagcgaggggcgcggccaggccgccgaccugaaguccacccaggccgcgaucgaccagaucaacgggaagcugaaccggcucaucggcaagacgaacgagaaguuccaccagaucgagaaggaguucagcgaggucgagggccgcauccaggaccuggagaaguacguggaggacaccaagaucgaccugugguccuacaacgccgagcuccugguggcccuggagaaccagcacaccaucgaccucaccgacagcgagaugaacaagcuguucgagaagacgaagaagcagcugcgcgagaacgccgaggacauggggaacggcugcuucaagaucuaccacaagugcgacaacgccugcaucggguccauccggaacggcaccuacgaccacaacgucuaccgcgacgaggcgcucaacaaccgguuccagaucaaggggguggagcucaagagcggcuacaaggacuggauccuguggaucuccuucgccaugagcugcuuccugcugugcguggcccugcucggcuucaucaugugggccugccagaaggggaacauccgcugcaacaucugcaucuga

SEQ ID NO: 75843 - RNA, 1701 nt, Artificial Sequence; identical to SEQ ID NO: 73859
  derived and/or modified CDS sequence (opt1) from hemagglutinin__InfluenzaA__AHM00962

SEQ ID NO: 75844 - RNA, 1701 nt, Artificial Sequence
  derived and/or modified CDS sequence (opt1) from hemagglutinin__InfluenzaA__AHM00974
augaagaccaucaucgcccugagcuacauccucugccugguguucgcccaggagcugcccggcaacgacgacuccaccgcgacgcucugccuggggcaccacgccgucccgaacggcaccaucgugaagaccaucaccaacgaccagaucgaggugacgaacgccaccgagcugguccagagcuccagcaccggggagaucugcaacagcccccaccagauccucgacggcgagaacugcacccugaucgacgcccugcucggggacccccagugcgacggcuuccagaacaagaagugggaccuguucguggagcgcagcaaggcccacuccaacugcuaccccuacgacgugccggacuacgcgagccugcggucccucgucgccagcuccggcacgcuggaguucaacaacgagagcuucaacuggaccggggugacccagaacggcaccuccagcgccugcauccgccgguccaacaacagcuucuucucccgccugaacuggcucacgcaccugaacuucaaguaccccgcccugaacgugaccaugcccaacaacgagcaguucgacaagcucuacaucuggggcguccaccaccccgggaccgacaaggaccagaucuuccuguacgcgcaggccagcgggggcaucaccguguccacgaagcggagccagcaggccgugaucccgaacaucggcagccgcccccggguccgcaacauccccucccgggugagcaucuacuggaccaucgugaagcccggggacauccugcucaucaacuccaccggcaaccugaucgccccgcgcggguacuucaagauccggagcggcaaguccagcaucaugcgcuccgacgcccccaucggcaagugcaacagcgcgugcaucacccccaacggguccauccccaacgacaagccguuccagaacgucaaccggaucacguacggcgccugcccccgcuacgugaagcagaacacccugaagcucgccaccgggaugcggaacgugcccgagaagcagacccgcggcaucuucggggccaucgccggcuucaucgagaacggcugggaggggauggucgacggcugguacggguuccggcaccagaacagcgagggccgcgggcaggcggccgaccugaaguccacgcaggccgccaucgaccagaucaacggcaagcugaaccggcucaucggcaagaccaacgagaaguuccaccagaucgagaaggaguucagcgagguggaggggcgcauccaggaccuggagaaguacguggaggacaccaagaucgaccugugguccuacaacgccgagcuccuggucgcgcuggagaaccagcacaccaucgaccucacggacagcgagaugaacaagcuguucgagaagaccaagaagcagcugcgggagaacgccgaggacaugggcaacgggugcuucaagaucuaccacaagugcgacaacgccugcaucggcuccauccgcaacgggaccuacgaccacgacguguaccgcgacgaggcccucaacaaccgguuccagaucaagggcguggagcugaaguccggcuacaaggacuggauccuguggaucuccuucgccaucagcugcuuccuccugugcgucgcgcugcucggguucaucaugugggccugccagaagggcaacauccgcugcaacaucugcaucuga

SEQ ID NO: 75845 - RNA, 1683 nt, Artificial Sequence
  derived and/or modified CDS sequence (opt1) from hemagglutinin__InfluenzaA__AHM24224
augaacacccagauccugguguucgcccucaucgccaucauccccaccaacgcggacaagaucugccugggccaccacgccgucagcaacgggacgaaggugaacacccugaccgagcgcggcguggaggucgugaacgccaccgagacgguggagcggaccaacaucccgcgcaucugcuccaaggggaagcggaccgucgaccucggccagugcgggcugcugggcaccaucacgggcccgccccagugcgaccaguuccucgaguucagcgccgaccugaucaucgagcgccgggagggguccgacgugugcuaccccggcaaguucgugaaggaggaggcccugcgccagauccuccgggagagcgggggcaucgacaaggaggcgaugggguucaccuacuccggcauccgcaccaacggcgccaccagcgccugccggcgcuccgggagcuccuucuacgccgagaugaaguggcugcugagcaacacggacaacgcggccuucccgcagaugaccaaguccuacaagaacacccgcaagagccccgcccucaucgucuggggcauccaccacuccgugagcaccgccgagcagacgaagcuguacggguccggcaacaagcuggugaccgucggcagcuccaacuaccagcagagcuucgugcccucccccggggcccggccccaggugaacggccucagcgggcggaucgacuuccacuggcugaugcugaaccccaacgacaccgucaccuucagcuucaacggcgcguucaucgcccccgaccgcgccuccuuccuccggggcaagagcauggggauccaguccggcguccagguggacgccaacugcgagggggacugcuaccacagcggcgggacgaucaucuccaaccugcccuuccagaacaucgacagccgcgccgugggcaagugcccgcgguacgugaagcagcgcucccugcuccuggcgaccgggaugaagaacgugcccgagauccccaagggccggggccuguucggggccaucgccggcuucaucgagaacgggugggagggccucaucgacgggugguacggcuuccgccaccagaacgcccagggcgaggggaccgccgcggacuacaagagcacccaguccgccaucgaccagaucacgggcaagcugaaccggcugaucgagaagaccaaccagcaguucgagcucaucgacaacgaguucaacgaggucgagaagcagaucgggaacgugaucaacuggacccgcgacagcaucaccgaggugugguccuacaacgccgagcugcuggucgccauggagaaccagcacacgaucgaccucgccgacagcgagauggacaagcuguacgagcgcgugaagcggcagcugcgcgagaacgcggaggaggacggcaccggcugcuucgagaucuuccacaagugcgacgacgacugcauggccuccauccggaacaacaccuacgaccacagcaaguaccgcgaggaggccaugcagaaccggauccagaucgaccccgucaagcucuccagcggguacaaggacgugauccugugguucuccuucggcgccagcugcuucauccugcucgcgaucgugauggggcuggucuucaucugcgugaagaacggcaacaugcgcugcaccaucugcaucuga

SEQ ID NO: 75846 - RNA, 1683 nt, Artificial Sequence; identical to SEQ ID NO: 74012
  derived and/or modified CDS sequence (opt1) from hemagglutinin__InfluenzaA__AHM24236

SEQ ID NO: 75847 - RNA, 1683 nt, Artificial Sequence; identical to SEQ ID NO: 74012
  derived and/or modified CDS sequence (opt1) from hemagglutinin__InfluenzaA__AHM24248

SEQ ID NO: 75848 - RNA, 1701 nt, Artificial Sequence
  derived and/or modified CDS sequence (opt1) from hemagglutinin__InfluenzaA__AHM98309
augaaggccauccuggugguccuccuguacaccuucgccaccgcgaacgccgacacgcugugcaucggcuaccacgccaacaacagcaccgacaccguggacaccgugcucgagaagaacgucacggugacccacuccgugaaccugcuggaggacaagcacaacgggaagcucugcaagcugcgcggcgucgcgccccugcaccucgggaagugcaacaucgccggcuggauccuggggaacccggagugcgagagccuguccaccgccagcuccuggagcuacaucguggagaccuccagcuccgacaacggcacgugcuaccccggcgacuucaucaacuacgaggagcuccgggagcagcugagcuccgugagcuccuucgagcgcuucgaggucuuccccaagaccagcuccuggcccaaccacgacagcaacaagggggugaccgccgccugcccgcacgccggcgcgaaguccuucuacaagaaccugaucuggcucgugaagaaggggaacagcuaccccaagcuguccaagagcuacaucaacgacaagggcaaggagguccuggugcucugggggauccaccaccccagcaccacggccgaccagcagucccuguaccagaacgccgacgccuacguguucgucggcaccagccgguacuccaagaaguucaagcccgagaucgccauccgcccgaaggugcgggaccaggagggccgcaugaacuacuacuggacccugguggagcccggggacaagaucaccuucgaggcgacgggcaaccucgucgugccccgguacgccuucgccauggagcgcaacgccgggagcggcaucaucaucuccgacacccccgugcacgacugcaacacgaccugccagaccccgaagggcgccaucaacaccagccugcccuuccagaacauccaccccaucaccaucgggaagugccccaaguacgucaaguccaccaagcugcggcucgcgacgggccugcgcaacgugccgagcauccagucccgggggcuguucggcgccaucgccggguucaucgagggcggcuggaccgggaugguggacggcugguacggguaccaccaccagaacgagcagggcagcggguacgccgccgaccucaaguccacccagaacgcgaucgacaagaucaccaacaaggucaacagcgugaucgagaagaugaacacgcaguucaccgccgucggcaaggaguucaaccaccuggagaagcgcaucgagaaccugaacaagaagguggacgacggcuuccucgacaucuggaccuacaacgccgagcugcuggugcuccuggagaacgagcggacccuggacuaccacgacuccaacgucaagaaccucuacgagaaggugcgcaaccagcugaagaacaacgccaaggagaucgggaacggcugcuucgaguucuaccacaagugcgacaacacgugcauggagagcgugaagaacgggaccuacgacuaccccaaguacuccgaggaggccaagcugaaccgggaggagaucgacggcgucaagcucgagagcacccgcaucuaccagauccuggcgaucuacuccaccguggccagcucccuggugcucgucgugagccugggggccaucagcuucuggaugugcuccaacggcagccugcagugccggaucugcaucuga

SEQ ID NO: 75849 - RNA, 1710 nt, Artificial Sequence
  derived and/or modified CDS sequence (opt1) from hemagglutinin__InfluenzaA__AHM98339
augaaggccauccuggugguccuccuguacaccuucgccaccgcgaacgccgacacgcugugcaucggcuaccacgccaacaacagcaccgacaccguggacaccgugcucgagaagaacgucacggugacccacuccgugaaccugcuggaggacaagcacaacgggaagcucugcaagcugcgcggcgucgcgccccugcaccucgggaagugcaacaucgccggcuggauccuggggaacccggagugcgagagccuguccaccgccagcuccuggagcuacaucguggagaccuccagcuccgacaacggcacgugcuaccccggcgacuucaucgacuacgaggagcuccgggagcagcugagcuccgugagcuccuucgagcgcuucgagaucuuccccaagaccagcuccuggcccaaccacgacagcaacaagggggucaccgccgccugcccgcacgccggcgcgaaguccuucuacaagaaccugaucuggcucgugaagaaggggaacagcuaccccaagcuguccaagagcuacaucaacgacaagggcaaggaggugcugguccucugggggauccaccaccccagcaccacggccgaccagcagucccuguaccagaacgccgacgccuacguguucgugggcaccagccgguacuccaagaaguucaagcccgagaucgccauccgcccgaagguccgggaccaggagggccgcaugaacuacuacuggacccugguggagcccggggacaagaucaccuucgaggcgacgggcaaccucguggucccccgguacgccuucgccauggagcgcaacgccgggagcggcaucaucaucuccgacacccccgugcacgacugcaacacgaccugccagaccccgaagggcgccaucaacaccagccugaccucccugcccuuccagaacauccaccccaucaccaucgggaagugccccaaguacgucaagagcacgaagcuccggcuggcgaccggccugcgcaacgugccguccauccagagccgggggcuguucggcgccaucgccggguucaucgagggcggcuggaccgggaugguggacggcugguacggguaccaccaccagaacgagcagggcuccggguacgccgccgaccucaagagcacccagaacgcgaucgacaagaucacgaacaaggugaacuccgucaucgagaagaugaacacccaguucaccgccgugggcaaggaguucaaccaccuggagaagcgcaucgagaaccucaacaagaaggucgacgacggcuuccuggacaucuggaccuacaacgccgagcugcucgugcugcuggagaacgagcggacgcucgacuaccacgacagcaacgugaagaaccuguacgagaagguccgcaaccagcugaagaacaacgccaaggagaucgggaacggcugcuucgaguucuaccacaagugcgacaacacgugcauggaguccgugaagaacgggaccuacgacuaccccaaguacagcgaggaggccaagcucaaccgggaggagaucgacggcgugaagcuggaguccacccgcaucuaccagauccuggcgaucuacagcaccgucgccuccagccucgugcugguggucagccugggggccaucuccuucuggaugugcagcaacggcucccuccagugccggaucugcaucuga

SEQ ID NO: 75850 - RNA, 1701 nt, Artificial Sequence
  derived and/or modified CDS sequence (opt1) from hemagglutinin__InfluenzaA__AHM98350
augaaggccauccugguggucaugcucuacaccuucgccaccgcgaacgccgacacgcugugcaucggcuaccacgccaacaacagcaccgacaccguggacaccgugcuggagaagaacgucacggugacccacuccgugaaccuccuggaggacaagcacaacgggaagcugugcaagcuccgcggcgucgcgccccugcaccuggggaagugcaacaucgccggcuggauccucgggaacccggagugcgagagccuguccaccgccagcuccuggagcuacaucguggagaccuccagcuccgacaacggcacgugcuaccccggcgacuucaucgacuacgaggagcugcgggagcagcucagcuccgugagcuccuucgagcgcuucgagaucuuccccaagaccagcuccuggcccaaccacgacgccaacaagggggucaccgccgccugcccgcacgcgggcgccaagggguucuacaagaaccugaucuggcuggugaagaagggcaacagcuaccccaagcucuccaagagcuacaucaacgacaaggggaaggaggugcugguccuguggggcauccaccaccccuccaccacggccgaccagcagagccucuaccagaacgccgacaccuacguguucgugggcaccagccgguacuccaagaaguucaagcccgagaucgccauccgcccgaagguccgggaccaggaggggcgcaugaacuacuacuggacccugguggagcccggcgacaagaucacguucgaggcgaccgggaaccugguggucccccgguacgccuucgccauggagcgcaacgccggcagcggcaucaucaucuccgacacccccgugcacgacugcaacaccacgugccagaccccgaagggggccaucaacaccagccuccccuuccagaacauccaccccaucaccaucggcaagugccccaaguacgugaaguccacgaagcugcggcuggcgaccgggcuccgcaacgucccgagcauccagucccggggccuguucggggccaucgccggcuucaucgagggcggguggaccggcaugguggacgggugguacggcuaccaccaccagaacgagcaggggagcggcuacgccgccgaccugaaguccacccagaacgcgaucgacaagaucacgaacaaggugaacagcgucaucgagaagaugaacacccaguucaccgccgugggcaaggaguucaaccaccucgagaagcgcaucgagaaccugaacaagaaggucgacgacggguuccuggacaucuggaccuacaacgccgagcuccuggugcugcucgagaacgagcggacgcuggacuaccacgacuccaacgugaagaaccuguacgagaagguccgcaaccagcucaagaacaacgccaaggagaucggcaacgggugcuucgaguucuaccacaagugcgacaacacgugcauggagagcgugaagaacggcaccuacgacuaccccaaguacuccgaggaggccaagcugaaccgggaggagaucgacggggugaagcuggagagcacccgcaucuaccagauccucgcgaucuacuccaccgucgccagcucccuggugcugguggucagccucggcgccaucuccuucuggaugugcagcaacggcagccugcagugccggaucugcaucuga

SEQ ID NO: 75851 - RNA, 1701 nt, Artificial Sequence; identical to SEQ ID NO: 70478
  derived and/or modified CDS sequence (opt1) from hemagglutinin__InfluenzaA__AHM98361

SEQ ID NO: 75852 - RNA, 1701 nt, Artificial Sequence; identical to SEQ ID NO: 70891
  derived and/or modified CDS sequence (opt1) from hemagglutinin__InfluenzaA__AHM98372

SEQ ID NO: 75853 - RNA, 1701 nt, Artificial Sequence; identical to SEQ ID NO: 70891
  derived and/or modified CDS sequence (opt1) from hemagglutinin__InfluenzaA__AHM98383

SEQ ID NO: 75854 - RNA, 1701 nt, Artificial Sequence; identical to SEQ ID NO: 70848
  derived and/or modified CDS sequence (opt1) from hemagglutinin__InfluenzaA__AHM98394

SEQ ID NO: 75855 - RNA, 1701 nt, Artificial Sequence
  derived and/or modified CDS sequence (opt1) from hemagglutinin__InfluenzaA__AHM98405
augaaggccauccuggugguccuccuguacaccuucgccaccgcgaacgccgacacgcugugcaucggcuaccacgccaacaacagcaccgacaccguggacaccgugcucgagaagaacgucacggugacccacuccgugaaccugcuggaggacaagcacaacgggaagcucugcaagcugcgcggcgucgcgccccugcaccucgggaagugcaacaucgccggcuggauccuggggaacccggagugcgagagccuguccaccgccagcuccuggagcuacaucguggagaccuccagcuccgacaacggcacgugcuaccccggcgacuucaucgacuacgaggagcuccgggagcagcugagcuccgugagcuccuucaagcgcuucgagaucuuccccaagaccagcuccuggcccaaccacgacagcaacaagggggucaccgccgccugcccgcacgccggcgcgaagggguucuacaagaaccugaucuggcucgugaagaagggcaacuccuaccccaagcugagcaaguccuacaucaacgacaaggggaaggaggugcugguccucuggggcauccaccaccccagcaccacggccgaccagcagagccuguaccagaacgccgacaccuacguguucgugggcaccucccgguacagcaagaaguucaagcccgagaucgccauccgcccgaagguccgggaccaggaggggcgcaugaacuacuacuggacccugguggagcccggcgacaagaucacguucgaggccaccgggaaccucguggucccccgguacgcguucgccauggagcgcaacgccggcuccggcaucaucaucagcgacacccccgugcacgacugcaacaccacgugccagaccccgaagggggccaucaacaccucccugcccuuccagaacauccaccccaucaccaucggcaagugccccaaguacgucaagagcacgaagcugcggcucgccaccgggcugcgcaacgugccguccauccagagccggggccuguucggggcgaucgccggcuucaucgagggcggguggaccggcaugguggacgggugguacggcuaccaccaccagaacgagcagggguccggcuacgccgccgaccucaagagcacccagaacgccaucgacaagaucacgaacaaggugaacuccgucaucgagaagaugaacacccaguucaccgcggugggcaaggaguucaaccaccuggagaagcgcaucgagaaccugaacaagaaggucgacgacggguuccucgacaucuggaccuacaacgccgagcugcuggugcuccuggagaacgagcggacgcuggacuaccacgacagcaacgugaagaaccucuacgagaagguccgcaaccagcugaagaacaacgccaaggagaucggcaacgggugcuucgaguucuaccacaagugcgacaacacgugcauggaguccgugaagaacggcaccuacgacuaccccaaguacagcgaggaggccaagcugaaccgggaggagaucgacggggugaagcucgaguccacccgcaucuaccagauccuggccaucuacagcaccgucgcguccagccuggugcucguggucucccugggcgccaucagcuucuggaugugcagcaacggcucccugcagugccggaucugcaucuga

SEQ ID NO: 75856 - RNA, 1701 nt, Artificial Sequence; identical to SEQ ID NO: 75855
  derived and/or modified CDS sequence (opt1) from hemagglutinin__InfluenzaA__AHM98416

SEQ ID NO: 75857 - RNA, 1701 nt, Artificial Sequence; identical to SEQ ID NO: 70848
  derived and/or modified CDS sequence (opt1) from hemagglutinin__InfluenzaA__AHM98427

SEQ ID NO: 75858 - RNA, 1701 nt, Artificial Sequence; identical to SEQ ID NO: 71066
  derived and/or modified CDS sequence (opt1) from hemagglutinin__InfluenzaA__AHM98438

SEQ ID NO: 75859 - RNA, 1701 nt, Artificial Sequence; identical to SEQ ID NO: 72210
  derived and/or modified CDS sequence (opt1) from hemagglutinin__InfluenzaA__AHM98449

SEQ ID NO: 75860 - RNA, 1701 nt, Artificial Sequence
  derived and/or modified CDS sequence (opt1) from hemagglutinin__InfluenzaA__AHM98460
augaaggccauccuggugguccuccugugcaccuucgccaccgcgaacgccgacacgcugugcaucggcuaccacgccaacaacagcaccgacaccguggacaccgugcucgagaagaacgucacggugacccacuccgugaaccugcuggaggacaagcacaacgggaagcucugcaagcugcgcggcgucgcgccccugcaccucgggaagugcaacaucgccggcuggauccuggggaacccggagugcgagagccuguccaccgccagcuccuggagcuacaucguggagaccuccagcuccgacaacggcacgugcuaccccggcgacuucaucgacuacgaggagcuccgggagcagcugagcuccgugagcuccuucgagcgcuucgagaucuuccccaagaccagcuccuggcccaaccacgacagcaacaagggggucaccgccgccugcccgcacgccggcgcgaagggguucuacaagaaccugaucuggcucgugaagaagggcaacuccuaccccaagcugagcaaguccuacaucaacgacaaggggaaggaggugcugguccucuggggcauccaccaccccagcaccacggccgaccagcagagccuguaccagaacgccgacaccuacguguucgugggcaccucccgguacagcaagaaguucaagcccgagaucgccauccgcccgaagguccgggaccaggaggggcgcaugaacuacuacuggacccugguggagcccggcgacaagaucacguucgaggccaccgggaaccucguggucccccgguacgcguucgccauggagcgcaacgccggcuccggcaucaucaucagcgacaccaccgugcacgacugcaacacgaccugccagacccccaagggggccaucaacaccucccugccguuccagaacauccaccccaucacgaucggcaagugccccaaguacgucaagagcaccaagcugcggcucgccaccgggcugcgcaacgugcccuccauccagagccggggccuguucggggcgaucgccggcuucaucgagggcggguggaccggcaugguggacgggugguacggcuaccaccaccagaacgagcagggguccggcuacgccgccgaccucaagagcacgcagaacgccaucgacaagaucaccaacaaggugaacuccgucaucgagaagaugaacacccaguucaccgcggugggcaaggaguucaaccaccuggagaagcgcaucgagaaccugaacaagaaggucgacgacggguuccucgacaucuggacguacaacgccgagcugcuggugcuccuggagaacgagcggacccuggacuaccacgacagcaacgugaagaaccucuacgagaagguccgcaaccagcugaagaacaacgccaaggagaucggcaacgggugcuucgaguucuaccacaagugcgacaacacgugcauggaguccgugaagaacggcaccuacgacuacccgaaguacagcgaggaggccaagcugaaccgggagaagaucgacggggugaagcucgaguccacccgcaucuaccagauccuggccaucuacagcaccgucgcguccagccuggugcucguggucucccugggcgccaucagcuucuggaugugcagcaacggcucccugcagugccggaucugcaucuga

SEQ ID NO: 75861 - RNA, 1701 nt, Artificial Sequence; identical to SEQ ID NO: 70891
  derived and/or modified CDS sequence (opt1) from hemagglutinin__InfluenzaA__AHM98471

SEQ ID NO: 75862 - RNA, 1701 nt, Artificial Sequence
  derived and/or modified CDS sequence (opt1) from hemagglutinin__InfluenzaA__AHM98482
augaaggccauccuggugguccuccuguacaccuucgccaccgcgaacgccgacacgcugugcaucggcuaccacgccaacaacagcaccgacaccguggacaccgugcucgagaagaacgucacggugacccacuccgugaaccugcuggaggacaagcacaacgggaagcucugcaagcugcgcggcgucgcgccccugcaccucgggaagugcaacaucgccggcuggauccuggggaacccggagugcgagagccuguccaccgccagcuccuggagcuacaucguggagaccuccagcuccgacaacggcacgugcuaccccggcgacuucaucgacuacgaggagcuccgggagcagcugagcuccgugagcuccuucgagcgcuucgagaucuuccccaagaccagcuccuggcccaaccacgacagcaacaagggggucaccgccgccugcccgcacgccggcgcgaagggguucuacaagaaccugaucuggcucgugaagaagggcaacuccuaccccaagcugagcaaguccuacaucaacgacaaggggaaggaggugcugguccucuggggcauccaccaccccagcaccacggccgaccagcagagccuguaccagaacgccgacaccuacguguucgugggcaccucccgguacagcaagaaguucaagcccgagaucgccauccgcccgaagguccgggaccaggaggggcgcaugaacuacuacuggacccugguggagcccggcgacaagaucacguucgaggccaccgggaaccucguggucccccgguacgcguucgccauggagcgcaacgccggcuccggcaucaucaucagcgacacccccgugcacgacugcaacaccacgugccagaccccgaagggggccaucaacaccucccugcccuuccagaacauccaccccaucaccaucggcaagugccccaaguacgucaagagcacgaagcugcggcucgccaccgggcugcgcaacgugccguccauccagagccggggccuguucggggcgaucgccggcuucaucgagggcggguggaccggcaugguggacgggugguacggcuaccaccaccagaacgagcagggguccggcuacgccgccgaccucaagagcacccagaacgccaucgacaagaucacgaacaaggugaacuccgucaucgacaagaugaacacccaguucaccgcggugggcaaggaguucaaccaccuggagaagcgcaucgagaaccugaacaagaaggucgacgacggguuccucgacaucuggaccuacaacgccgagcugcuggugcuccuggagaacgagcggacgcuggacuaccacgacagcaacgugaagaaccucuacgagaagguccgcaaccagcugaagaacaacgccaaggagaucggcaacgggugcuucgaguucuaccacaagugcgacaacacgugcauggaguccgugaagaacggcaccuacgacuaccccaaguacagcgaggaggccaagcugaaccgggaggagaucgacggggugaagcucgaguccacccgcaucuaccagauccuggccaucuacagcaccgucgcguccagccuggugcucguggucucccugggcgccaucagcuucuggaugugcagcaacggcucccugcagugccggaucugcaucuga

SEQ ID NO: 75863 - RNA, 1701 nt, Artificial Sequence
  derived and/or modified CDS sequence (opt1) from hemagglutinin__InfluenzaA__AHM98493
augaaggccauccuggugguccuccuguacaccuucgccaccgcgaacgccgacacgcugugcaucggcuaccacgccaacaacagcaccgacaccguggacaccgugcucgagaagaacgucacggugacccacuccgugaaccugcuggaggacaagcacaacgggaagcucugcaagcugcgcggcgucgcgccccugcaccucgggaagugcaacaucgccggcuggauccuggggaacccggagugcgagagccuguccaccgccagcuccuggagcuacaucguggagaccuccagcuccgacaacggcacgugcuaccccggcgacuucaucaacuacgaggagcuccgggagcagcugagcuccgugagcuccuucgagcgcuucgagaucuuccccaagaccagcuccuggcccaaccacgacagcaacaagggggucaccgccgccugcccgcacgccggcgcgaaguccuucuacaagaaccugaucuggcucgugaagaaggggaacagcuaccccaagcuguccaagagcuacaucaacgacaagggcaaggaggugcugguccucugggggauccaccaccccagcaccuccgccgaccagcagagccuguaccagaacgccgacgccuacguguucgugggcacguccaaguacagcaagaaguucaagcccgagaucgccguccggccgaaggugcgcgaccaggagggccggaugaacuacuacuggacccugguggagcccggggacaagaucaccuucgaggcgaccggcaaccuccuggucccccgcuacgccuucgccauggagcggaacgccggguccggcaucaucaucagcgacacgcccgugcacgacugcaacacgaccugccagaccccgaagggcgccaucaacaccucccugcccuuccagaacauccaccccaucaccaucgggaaguaccccaaguacgucaagagcaccaagcuccgccuggcgaccggccugcggaacgugccguccauccagagccgcgggcuguucggcgccaucgccggguucaucgagggcggcuggacggggaugguggacggcugguacggguaccaccaccagaacgagcagggcuccggguacgccgccgaccucaagagcacccagaacgcgaucgacaagaucaccaacaaggugaacuccgucaucgagaagaugaacacccaguucacggccgugggcaaggaguucaaccaccuggagaagcggaucgagaaccucaacaagaaggucgacgacggcuuccuggacaucuggaccuacaacgccgagcugcucgugcugcuggagaacgagcgcacccucgacuaccacgacagcaacgugaagaaccuguacgagaagguccggucccagcugaagaacaacgccaaggagaucgggaacggcugcuucgaguucuaccacaagugcgacaacacgugcauggagagcgugaagaacgggaccuacgacuaccccaaguacuccgaggaggccaagcucaaccgcgaggagaucgacggcgugaagcuggagagcacccggaucuaccagauccuggcgaucuacuccaccgucgccagcagccucgugcugguggucucccugggggccaucagcuucuggaugugcuccaacggcagccuccagugccgcaucugcaucuga

SEQ ID NO: 75864 - RNA, 1701 nt, Artificial Sequence
  derived and/or modified CDS sequence (opt1) from hemagglutinin__InfluenzaA__AHM98504
augaaggccauccuggugguccuccuguacaccuucgccaccgcgaacgccgacacgcugugcaucggcuaccacgccaacaacagcaccgacaccguggacaccgugcucgagaagaacgucacggugacccacuccgugaaccugcuggaggacaagcacaacgggaagcucugcaagcugcgcggcgucgcgccccugcaccucgggaagugcaacaucgccggcuggauccuggggaacccggagugcgagagccuguccaccgccagcuccuggagcuacaucguggagaccuccagcuccgacaacggcacgugcuaccccggcgacuucaucaacuacgaggagcuccgggagcagcugagcuccgugagcuccuucgagcgcuucgagaucuuccccaagaccagcuccuggcccaaccacgacagcaacaagggggucaccgccgccugcccgcacgccggcgcgaaguccuucuacaagaaccugaucuggcucgugaagaaggggaacagcuaccccaagcuguccaagagcuacaucaacgacaagggcaaggaggugcugguccucugggggauccaccaccccagcaccacggccgaccagcagucccuguaccagaacgccgacgccuacguguucgugggcaccagccgguacuccaagaaguucaagcccgagaucgccauccgcccgaagguccgggaccaggagggccgcaugaacuacuacuggacccugguggagcccggggacaagaucaccuucgaggcgacgggcaaccucguggucccccgguacgccuucgccauggagcgcaacgccgggagcggcaucaucaucuccgacacccccgugcacgacugcaacacgaccugccagaccccgaagggcgccaucaacaccagccugcccuuccagaacauccaccccaucaccaucgggaagugccccaaguacgugaaguccaccaagcugcggcucgcgacgggccugcgcaacgucccgagcauccagucccgggggcuguucggcgccaucgccggguucaucgagggcggcuggaccgggaugguggacggcugguacggguaccaccaccagaacgagcagggcagcggguacgccgccgaccucaaguccacccagaacgcgaucgacaagaucaccaacaaggugaacagcgucaucgagaagaugaacacgcaguucaccgccgugggcaaggaguucaaccaccuggagaagcgcaucgagaaccugaacaagaaggucgacgacggcuuccucgacaucuggaccuacaacgccgagcugcuggugcuccuggagaacgagcggacccuggacuaccacgacuccaacgugaagaaccucuacgagaagguccgcaaccagcugaagaacaacgccaaggagaucgggaacggcugcuucgaguucuaccacaagugcgacaacacgugcauggagagcgugaagaacgggaccuacgacuaccccaaguacuccaaggaggccaagcugaaccgggaggagaucgacggcgugaagcucgagagcacccgcaucuaccagauccuggcgaucuacuccaccgucgccagcucccuggugcucguggucagccugggggccaucagcuucuggaugugcuccaacggcagccugcagugccggaucugcaucuga

SEQ ID NO: 75865 - RNA, 1701 nt, Artificial Sequence; identical to SEQ ID NO: 70478
  derived and/or modified CDS sequence (opt1) from hemagglutinin__InfluenzaA__AHM98515

SEQ ID NO: 75866 - RNA, 1701 nt, Artificial Sequence
  derived and/or modified CDS sequence (opt1) from hemagglutinin__InfluenzaA__AHM98526
augaaggccauccuggugguccuccugcacaccuucgccaccgcgaacgccgacacgcugugcaucggcuaccacgccaacaacagcaccgacaccguggacaccgugcucgagaagaacgucacggugacccacuccgugaaccugcuggaggacaagcacaacgggaagcucugcaagcugcgcggcgucgcgccccugcaccucgggaagugcaacaucgccggcuggauccuggggaacccggagugcgagagccuguccaccgccagcuccuggagcuacaucguggagaccuccagcuccgacaacggcacgugcuaccccggcgacuucaucgacuacgaggagcuccgggagcagcugagcuccgugagcuccuucgagcgcuucgagaucuuccccaagaccagcuccuggcccaaccacgacagcaacaagggggucaccgccgccugcccgcacgccggcgcgaagggguucuacaagaaccugaucuggcucgugaagaagggcaacuccuaccccaagcugagcaaguccuacaucaacgacaaggggaaggaggugcugguccucuggggcauccaccaccccagcaccacggccgaccagcagagccuguaccagaacgccgacaccuacguguucgugggcaccucccgguacagcaagaaguucaagcccgagaucgccauccgcccgaagguccgggaccaggaggggcgcaugaacuacuacuggacccugguggagcccggcgacaagaucacguucgaggccaccgggaaccucguggucccccgguacgcguucgccauggagcgcaacgccggcuccggcaucaucaucagcgacacccccgugcacgacugcaacaccacgugccagaccccgaagggggccaucaacaccucccugcccuuccagaacauccaccccaucaccaucggcaagugccccaaguacgucaagagcacgaagcugcggcucgccaccgggcugcgcaacgugccguccauccagagccggggccuguucggggcgaucgccggcuucaucgagggcggguggaccggcaugguggacgggugguacggcuaccaccaccagaacgagcagggguccggcuacgccgccgaccuccgcagcacccagaacgccaucgacaagaucacgaacaaggugaacuccgucaucgagaagaugaacacccaguucaccgcggugggcaaggaguucaaccaccuggagaagcggaucgagaaccugaacaagaaggucgacgacggguuccucgacaucuggaccuacaacgccgagcugcugauccuccuggagaacgagcgcacgcuggacuaccacgacagcaacgugaagaaccucuacgagaaggugcggaaccagcugaagaacaacgccaaggagaucggcaacgggugcuucgaguucuaccacaagugcgacaacacgugcauggaguccgucaagaacggcaccuacgacuaccccaaguacagcgaggaggccaagcugaaccgcgaggagaucgacggggugaagcucgaguccacccggaucuaccagauccuggccaucuacagcaccguggcguccagccugguccucguggugucccugggcgccaucagcuucuggaugugcagcaacggcucccugcagugccgcaucugcaucuga

SEQ ID NO: 75867 - RNA, 1701 nt, Artificial Sequence; identical to SEQ ID NO: 70478
  derived and/or modified CDS sequence (opt1) from hemagglutinin__InfluenzaA__AHM98537

SEQ ID NO: 75868 - RNA, 1701 nt, Artificial Sequence
  derived and/or modified CDS sequence (opt1) from hemagglutinin__InfluenzaA__AHM98548
augaaggccauccuggugguccuccuguacaccuucgccaccgcgaacgccgacacgcugugcaucggcuaccacgccaacaacagcaccgacaccguggacaccgugcucgagaagaacgucacggugacccacuccgugaaccugcuggaggacaagcacaacgggaagcucugcaagcugcgcggcgucgcgccccugcaccucgggaagugcaacaucgccggcuggauccuggggaacccggagugcgagagccuguccaccgccagcuccuggagcuacaucguggagaccuccagcuccgacaacggcacgugcuaccccggcgacuucaucaacuacgaggagcuccgggagcagcugagcuccgugagcuccuucgagcgcuucgagaucuuccccaagaccagcuccuggcccaaccacgacagcaacaagggggucaccgccgccugcccgcacgccggcgcgaaguccuucuacaagaaccugaucuggcucgugaagaaggggaacagcuaccccaagcuguccaagagcuacaucaacgacaagggcaaggaggugcugguccucugggggauccaccaccccagcaccacggccgaccagcagucccuguaccagaacgccgacgccuacguguucgugggcaccagccgguacuccaagaaguucaagcccgagaucgccauccgcccgaagguccgggaccaggagggccgcaugaacuacuacuggacccugguggagcccggggacaagaucaccuucgaggcgacgggcaaccucguggucccccgguacgccuucgccauggagcgcaacgccgggagcggcaucaucaucuccgacacccccgugcacgacugcaacacgaccugccagaccccgaagggcgccaucaacaccagccugcccuuccagaacauccaccccgugaccaucgggaagugccccaaguacgucaaguccaccaagcugcggcucgcgacgggccugcgcaacgugccgagcauccagucccgggggcuguucggcgccaucgccggguucaucgagggcggcuggaccgggaugguggacggcugguacggguaccaccaccagaacgagcagggcagcggguacgccgccgaccucaaguccacccagaacgcgaucgacaagaucaccaacaaggucaacagcgugaucgagaagaugaacacgcaguucaccgccgucggcaaggaguucaaccaccuggagaagcgcaucgagaaccugaacaagaagguggacgacggcuuccucgacaucuggaccuacaacgccgagcugcuggugcuccuggagaacgagcggacccuggacuaccacgacuccaacgucaagaaccucuacgagaaggugcgcaaccagcugaagaacaacgccaaggagaucgggaacggcugcuucgaguucuaccacaagugcgacaacacgugcauggagagcgugaagaacgggaccuacgacuaccccaaguacuccgaggaggccaagcugaaccgggaggagaucgacggcgucaagcucgagagcacccgcaucuaccagauccuggcgaucuacuccaccguggccagcucccuggugcucgucgugagccugggggccaucagcuucuggaugugcuccaacggcagccugcagugccggaucugcaucuga

SEQ ID NO: 75869 - RNA, 1701 nt, Artificial Sequence
  derived and/or modified CDS sequence (opt1) from hemagglutinin__InfluenzaA__AHM98559
augaaggccauccuggugguccuccuguacaccuucgccaccgcgaaggccgacacgcugugcaucggcuaccacgccaacaacagcaccgacaccguggacaccgugcucgagaagaacgucacggugacccacuccgugaaccugcuggaggacaagcacaacgggaagcucugcaagcugcgcggcgucgcgccccugcaccucgggaagugcaacaucgccggcuggauccuggggaacccggagugcgagagccuguccaccgccagcuccuggagcuacaucguggagaccuccagcuccgacaacggcacgugcuaccccggcgacuucaucaacuacgaggagcuccgggagcagcugagcuccgugagcuccuucgagcgcuucgagaucuuccccaagaccagcuccuggcccaaccacgacagcaacaagggggucaccgccgccugcccgcacgccggcgcgaaguccuucuacaagaaccugaucuggcucgugaagaaggggaacagcuaccccaagcuguccaagagcuacaucaacgacaagggcaaggaggugcugguccucugggggauccaccaccccagcaccacggccgaccagcagucccuguaccagaacgccgacgccuacguguucgugggcaccagccgguacuccaagaaguucaagcccgagaucgccauccgcccgaagguccgggaccaggagggccgcaugaacuacuacuggacccugguggagcccggggacaagaucaccuucgaggcgacgggcaaccucguggucccccgguacgccuucgccauggagcgcaacgccgggagcggcaucaucaucuccgacacccccgugcacgacugcaacacgaccugccagaccccgaagggcgccaucaacaccagccugcccuuccagaacauccaccccaucaccaucgggaagugccccaaguacgugaaguccaccaagcugcggcucgcgacgggccugcgcaacgucccgagcauccagucccgggggcuguucggcgccaucgccggguucaucgagggcggcuggaccgggaugguggacggcugguacggguaccaccaccagaacgagcagggcagcggguacgccgccgaccucaaguccacccagaacgcgaucgacaagaucaccaacaaggugaacagcgucaucgagaagaugaacacgcaguucaccgccgugggcaaggaguucaaccaccuggagaagcgcaucgagaaccugaacaagaaggucgacgacggcuuccucgacaucuggaccuacaacgccgagcugcuggugcuccuggagaacgagcggacccuggacuaccacgacuccaacgugaagaaccucuacgagaagguccgcaaccagcugaagaacaacgccaaggagaucgggaacggcugcuucgaguucuaccacaagugcgacaacacgugcauggagagcgugaagaacgggaccuacgacuaccccaaguacuccgaggaggccaagcugaaccgggaggagaucgacggcgugaagcucgagagcacccgcaucuaccagauccuggcgaucuacuccaccgucgccagcucccuggugcucguggucagccugggggccaucagcuucuggaugugcuccaacggcagccugcagugccggaucugcaucuga

SEQ ID NO: 75870 - RNA, 1701 nt, Artificial Sequence; identical to SEQ ID NO: 70848
  derived and/or modified CDS sequence (opt1) from hemagglutinin__InfluenzaA__AHM98570

SEQ ID NO: 75871 - RNA, 1701 nt, Artificial Sequence
  derived and/or modified CDS sequence (opt1) from hemagglutinin__InfluenzaA__AHM98581
augaaggccauccuggugguccuccuguacaccuucgccaccgcgaacgccgacacgcugugcaucggcuaccacgccaacaacagcaccgacaccguggacaccgugcucgagaagaacgucacggugacccacuccgugaaccugcuggaggacaagcacaacgggaagcucugcaagcugcgcggcgucgcgccccugcaccucgggaagugcaacaucgccggcuggauccuggggaacccggagugcgagagccuguccaccgcccggagcugguccuacaucguggagaccagcuccagcgacaacggcacgugcuaccccggcgacuucaucgacuacgaggagcuccgcgagcagcuguccagcguguccagcuucaagcgguucgagaucuuccccaagaccuccagcuggcccaaccacgacuccaacaagggggucaccgccgccugcccgcacgccggcgcgaagggguucuacaagaaccugaucuggcucgugaagaagggcaacagcuaccccaagcuguccaagagcuacaucaacgacaaggggaaggaggugcugguccucuggggcauccaccaccccuccaccacggccgaccagcagagccuguaccagaacgccgacaccuacguguucgugggcaccagccgcuacuccaagaaguucaagcccgagaucgccauccggccgaagguccgcgaccaggaggggcggaugaacuacuacuggacccugguggagcccggcgacaagaucacguucgaggccaccgggaaccucguggucccccgcuacgcguucgccauggagcggaacgccggcagcggcaucaucaucuccgacacccccgugcacgacugcaacaccacgugccagaccccgaagggggccaucaacaccagccugcccuuccagaacauccaccccaucaccaucggcaagugccccaaguacgugaaguccacgaagcugcgccucgccaccgggcugcggaacgucccgagcauccagucccgcggccuguucggggcgaucgccggcuucaucgagggcggguggaccggcaugguggacgggugguacggcuaccaccaccagaacgagcaggggagcggcuacgccgccgaccucaaguccacccagaacgccaucgacaagaucacgaacaaggugaacagcgucaucgagaagaugaacacccaguucaccgcggugggcaaggaguucaaccaccuggagaagcggaucgagaaccugaacaagaaggucgacgacggguuccucgacaucuggaccuacaacgccgagcugcuggugcuccuggagaacgagcgcacgcuggacuaccacgacuccaacgugaagaaccucuacgagaagguccggaaccagcugaagaacaacgccaaggagaucggcaacgggugcuucgaguucuaccacaagugcgacaacacgugcauggagagcgugaagaacggcaccuacgacuaccccaaguacuccgaggaggccaagcugaaccgcgaggagaucgacggggugaagcucgagagcacccggaucuaccagauccuggccaucuacuccaccgucgcgagcucccuggugcucguggucagccugggcgccaucuccuucuggaugugcagcaacggcagccugcagugccgcaucugcaucuga

SEQ ID NO: 75872 - RNA, 1701 nt, Artificial Sequence; identical to SEQ ID NO: 70848
  derived and/or modified CDS sequence (opt1) from hemagglutinin__InfluenzaA__AHM98592

SEQ ID NO: 75873 - RNA, 1701 nt, Artificial Sequence; identical to SEQ ID NO: 70891
  derived and/or modified CDS sequence (opt1) from hemagglutinin__InfluenzaA__AHM98603

SEQ ID NO: 75874 - RNA, 1701 nt, Artificial Sequence; identical to SEQ ID NO: 70478
  derived and/or modified CDS sequence (opt1) from hemagglutinin__InfluenzaA__AHM98614

SEQ ID NO: 75875 - RNA, 1701 nt, Artificial Sequence; identical to SEQ ID NO: 75855
  derived and/or modified CDS sequence (opt1) from hemagglutinin__InfluenzaA__AHM98625

SEQ ID NO: 75876 - RNA, 1701 nt, Artificial Sequence; identical to SEQ ID NO: 75855
  derived and/or modified CDS sequence (opt1) from hemagglutinin__InfluenzaA__AHM98636

SEQ ID NO: 75877 - RNA, 1701 nt, Artificial Sequence
  derived and/or modified CDS sequence (opt1) from hemagglutinin__InfluenzaA__AHM98647
augaaggccauccuggugguccuccuguacaccuucgccaccgcgaaggccgacacgcugugcaucggcuaccacgccaacaacagcaccgacaccguggacaccgugcucgagaagaacgucacggugacccacuccgugaaccugcuggaggacaagcacaacgggaagcucugcaagcugcgcggcgucgcgccccugcaccucgggaagugcaacaucgccggcuggauccuggggaacccggagugcgagagccuguccaccgccagcuccuggagcuacaucguggagaccuccagcuccgacaacggcacgugcuaccccggcgacuucaucaacuacgaggagcuccgggagcagcugagcuccgugagcuccuucgagcgcuucgagaucuuccccaagaccagcuccuggcccaaccacgacagcaacaagggggucaccgccgccugcccgcacgccggcgcgaaguccuucuacaagaaccugaucuggcucgugaagaaggggaacagcuaccccaagcugucccagagcuacaucaacgacaagggcaaggaggugcugguccucugggggauccaccaccccagcaccacggccgaccagcagucccuguaccagaacgccgacgccuacguguucgugggcaccagccgguacuccaagaaguucaagcccgagaucgccauccgcccgaagguccgggaccaggagggccgcaugaacuacuacuggacccugguggagcccggggacaagaucaccuucgaggcgacgggcaaccucguggucccccgguacgccuucgccauggagcgcaacgccgggagcggcaucaucaucuccgacacccccgugcacgacugcaacacgaccugccagaccccgaagggcgccaucaacaccagccugcccuuccagaacauccaccccaucaccaucgggaagugccccaaguacgugaaguccaccaagcugcggcucgcgacgggccugcgcaacgucccgagcauccagucccgggggcuguucggcgccaucgccggguucaucgagggcggcuggaccgggaugguggacggcugguacggguaccaccaccagaacgagcagggcagcggguacgccgccgaccucaaguccacccagaacgcgaucgacaagaucaccaacaaggugaacagcgucaucgagaagaugaacacgcaguucaccgccgugggcaaggaguucaaccaccuggagaagcgcaucgagaaccugaacaagaaggucgacgacggcuuccucgacaucuggaccuacaacgccgagcugcuggugcuccuggagaacgagcggacccuggacuaccacgacuccaacgugaagaaccucuacgagaagguccgcaaccagcugaagaacaacgccaaggagaucgggaacggcugcuucgaguucuaccacaagugcgacaacacgugcauggagagcgugaagaacgggaccuacgacuaccccaaguacuccgaggaggccaagcugaaccgggaggagaucgacggcgugaagcucgagagcacccgcaucuaccagauccuggcgaucuacuccaccgucgccagcucccuggugcucguggucagccugggggccaucagcuucuggaugugcuccaacggcagccugcagugccggaucugcaucuga

SEQ ID NO: 75878 - RNA, 1701 nt, Artificial Sequence; identical to SEQ ID NO: 70891
  derived and/or modified CDS sequence (opt1) from hemagglutinin__InfluenzaA__AHM98658

SEQ ID NO: 75879 - RNA, 1701 nt, Artificial Sequence; identical to SEQ ID NO: 70848
  derived and/or modified CDS sequence (opt1) from hemagglutinin__InfluenzaA__AHM98669

SEQ ID NO: 75880 - RNA, 1701 nt, Artificial Sequence; identical to SEQ ID NO: 72210
  derived and/or modified CDS sequence (opt1) from hemagglutinin__InfluenzaA__AHM98701

SEQ ID NO: 75881 - RNA, 1701 nt, Artificial Sequence; identical to SEQ ID NO: 72210
  derived and/or modified CDS sequence (opt1) from hemagglutinin__InfluenzaA__AHM98712

SEQ ID NO: 75882 - RNA, 1701 nt, Artificial Sequence
  derived and/or modified CDS sequence (opt1) from hemagglutinin__InfluenzaA__AHM98723
augaaggccauccuggugguccuccuguacaccuucgccaccgcgaacgccgacacgcugugcaucggcuaccacgccaacaacagcaccgacaccguggacaccgugcucgagaagaacgucacggugacccacuccgugaaccugcuggaggacaagcacaacgggaagcucugcaagcugcgcggcgucgcgccccugcaccucgggaacugcaacaucgccggcuggauccuggggaacccggagugcgagagccuguccaccgccagcuccuggagcuacaucguggagaccuccagcuccgacaacggcacgugcuaccccggcgacuucaucaacuacgaggagcuccgggagcagcugagcuccgugagcuccuucgagcgcuucgagauccugcccaagaccagcuccuggcccaaccacgacagcaacaagggggucaccgccgccugcccgcaggccggcgcgaaguccuucuacaagaaccucaucuggcuggugaagaaggggaacagcuaccccaagcuguccaagagcuacaucaacgacaagggcaaggaggugcucguccugugggggauccaccaccccagcaccuccgccgaccagcagagccuguaccagaacgccgacgccuacguguucgugggcacguccaaguacagcaagaaguucaagcccgagaucgccguccggccgaaggugcgcgaccaggagggccggaugaacuacuacuggacccucaucgagcccggggacaagaucaccuucgaggcgaccggcaaccugcuggugccccgcuacgccuucgccauggagcggaacgccggguccggcaucaucaucagcgacacgcccguccacgacugcaacacgaccugccagaccccgaagggcgccaucaacaccucccuccccuuccagaacauccaccccaucaccaucgggaagugccccaaguacgucaagagcaccaagcugcgccuggcgaccggccuccggaacgugccguccauccagagccgcgggcuguucggcgccaucgccggguucaucgagggcggcuggacggggaugguggacggcugguacggguaccaccaccagaacgcccagggcuccggguacgccgcggaccucaagagcacccagaacgccaucgacaagaucaccaacaaggugaacuccgugaucgagaagaugaacacccaguucacggccgucggcaaggaguucaaccaccuggagaagcggaucgagaaccugaacaagaagguggacgacggcuuccuggacaucuggaccuacaacgccgagcuccugguccugcucgagaacgagcgcacccuggacuaccacgacagcaacgugaagaaccuguacgagaaggugcggucccagcucaagaacaacgccaaggagaucgggaacggcugcuucgaguucuaccacaagugcgacaacacgugcauggagagcgucaagaacgggaccuacgacuacccccgcuacuccgaggaggcgaagcugaaccgggaggagaucgacggcgugaagcuggagagcacccgcaucuaccagauccucgccaucuacuccaccguggccagcagccugguccugaucgugucccucggggccaucagcuucuggaugugcuccaacggcagccugcagugccggaucugcaucuga

SEQ ID NO: 75883 - RNA, 1701 nt, Artificial Sequence
  derived and/or modified CDS sequence (opt1) from hemagglutinin__InfluenzaA__AHM98734
augaaggccauccuggugguccuccuguacaccuucgccaccgcgaacgccgacacgcugugcaucggcuaccacgccaacaacagcaccgacaccguggacaccgugcucgagaagaacgucacggugacccacuccgugaaccugcuggaggacaagcacaacgggaagcucugcaagcugcgcggcgucgcgccccugcaccucgggaagugcaacaucgccggcuggauccuggggaacccggagugcgagacccugagcaccgccuccagcugguccuacaucguggagacgagcaacuccgacaacgggaccugcuaccccggcgacuucaucgacuacgaggagcuccgggagcagcugagcuccgugagcuccuucgagcgcuucgagaucuuccccaagaccagcuccuggcccaaccacgacagcaacaagggcgucaccgccgccugcccgcacgccggcuccaagggguucuacaagaaccugaucuggcucgugaagaagggcaacagcuaccccaagcuguccaagagcuacaucaacgacaaggggaaggaggugcugguccucuggggcauccaccaccccuccacgaccgcggaccagcagagccuguaccagaacgccgacaccuacguguucgugggcaccagccgguacuccaagaaguucaagcccgagaucgccauccgcccgaagguccgggaccaggaggggcgcaugaacuacuacuggacgcugguggagcccggcgacaagaucaccuucgaggccaccgggaaccucguggucccccgguacgccuucgcgauggagcgcgacgccggcagcggcaucaucaucuccgacacccccgugcacgacugcaacacgaccugccagaccccgaagggggccaucaacaccagccugcccuuccagaacauccaccccaucacgaucggcaagugccccaaguacgugaaguccaccaagcugcggcucgccaccgggcugcgcaacgucccgagcauccagucccggggccuguucggggccaucgcgggcuucaucgagggcggguggaccggcaugguggacgggugguacggcuaccaccaccagaacgagcaggggagcggcuacgccgccgaccucaaguccacgcagaacgccaucgacaagaucaccaacaaggugaacagcgucaucgagaagaugaacacccaguucaccgccgugggcaaggaguucaaccaccuggagaagcgcaucgagaaccugaacaagaaggucgacgacggguuccucgacaucuggacguacaacgcggagcugcuggugcuccuggagaacgagcggacccuggacuaccacgacuccaacgugaagaaccucuacgagaagguccgcaaccagcugaagaacaacgccaaggagaucggcaacgggugcuucgaguucuaccacaagugcgacaacacgugcauggagagcgugaagaacggcaccuacgacuaccccaaguacuccgaggaggccaagcugaaccgggaggagaucgacggggugaagcucgagagcacccgcaucuaccagauccuggccaucuacuccaccgccgcgagcucccugguccucguggugagccugggcgccaucuccuucuggaugugcagcaacggcagccugcagugccggaucugcaucuga

SEQ ID NO: 75884 - RNA, 1701 nt, Artificial Sequence; identical to SEQ ID NO: 72210
  derived and/or modified CDS sequence (opt1) from hemagglutinin__InfluenzaA__AHM98745

SEQ ID NO: 75885 - RNA, 1701 nt, Artificial Sequence
  derived and/or modified CDS sequence (opt1) from hemagglutinin__InfluenzaA__AHM98756
augaaggccauccuggugguccuccuguacaccuucgccaccgcgaacgccgacacgcugugcaucggcuaccacgccaacaacagcaccgacaccguggacaccgugcucgagaagaacgucacggugacccacuccgugaaccugcuggaggacaagcacaacgggaagcucugcaagcugcgcggcgucgcgccccugcaccucgggaagugcaacaucgccggcuggauccuggggaacccggagugcgagacccugagcaccgccuccagcugguccuacaucguggagacgagcuccagcgacaacgggaccugcuaccccggcgacuucaucgacuacgaggagcuccgggagcagcuguccagcguguccagcuucgagcgcuucgagaucuuccccaagaccuccagcuggcccaaccacgacuccaacaagggcgucaccgccgccugcccgcacgccggcgcgaagggguucuacaagaaccugaucuggcucgugaagaagggcaacagcuaccccaagcuguccaagagcuacaucaacgacaaggggaaggaggugcugguccucuggggcauccaccaccccuccacgaccgccgaccagcagagccuguaccagaacgccgacaccuacguguucgugggcaccagccgguacuccaagaaguucaagcccgagaucgccauccgcccgaagguccgggaccaggaggggcgcaugaacuacuacuggacgcugguggagcccggcgacaagaucaccuucgaggccaccgggaaccucguggucccccgguacgcguucgccauggagcgcgacgccggcagcggcaucaucaucuccgacacccccgugcacgacugcaacacgaccugccagaccccgaagggggccaucaacaccagccugcccuuccagaacauccaccccaucacgaucggcaagugccccaaguacgugaaguccaccaagcugcggcucgccaccgggcugcgcaacgucccgagcauccagucccggggccuguucggggcgaucgccggcuucaucgagggcggguggaccggcaugguggacgggugguacggcuaccaccaccagaacgagcaggggagcggcuacgccgccgaccucaaguccacgcagaacgccaucgacaagaucaccaacaaggugaacagcgucaucgugaagaugaacacccaguucaccgcggucggcaaggaguucaaccaccuggagaagcgcaucgagaaccugaacaagaagguggacgacggguuccucgacaucuggacguacaacgccgagcugcuggugcuccuggagaacgagcggacccuggacuaccacgacuccaacgucaagaaccucuacgagaaggugcgcaaccagcugaagaacaacgccaaggagaucggcaacgggugcuucgaguucuaccacaagugcgacaacacgugcauggagagcgugaagaacggcaccuacgacuaccccaaguacuccgaggaggccaagcugaaccgggaggagaucgacggggucaagcucgagagcacccgcaucuaccagauccuggccaucuacuccaccgcggccagcucccuggugcucguggucagccugggcgccaucuccuucuggaugugcagcaacggcagccugcagugccggaucugcaucuga

SEQ ID NO: 75886 - RNA, 1701 nt, Artificial Sequence; identical to SEQ ID NO: 72210
  derived and/or modified CDS sequence (opt1) from hemagglutinin__InfluenzaA__AHM98767

SEQ ID NO: 75887 - RNA, 1701 nt, Artificial Sequence
  derived and/or modified CDS sequence (opt1) from hemagglutinin__InfluenzaA__AHM98778
augaaggccauccuggugguccuccuguacaccuucgccaccgcgaacgccgacacgcugugcaucggcuaccacgccaacaacagcaccgacaccguggacaccgugcucgagaagaacgucacggugacccacuccgugaaccugcuggaggacaagcacaaccgcaagcucugcaagcugcgcggggucgcgccccugcaccucggcaagugcaacaucgccggguggauccugggcaacccggagugcgagagccuguccaccgccagcuccuggagcuacaucguggagaccuccagcuccgacaacgggacgugcuaccccggcgacuucaucaacuacgaggagcuccgggagcagcugagcuccgugagcuccuucgagcgguucgagaucuuccccaagaccagcuccuggcccaaccacgacagcaacaagggcgucaccgccgccugcccgcgcgccggggcgaaguccuucuacaagaaccugaucuggcucgugaagaagggcaacagcuaccccaagcuguccaagagcuacaucaacgacaaggggaaggaggugcugguccucuggggcauccaccaccccagcaccacggccgaccagcagucccuguaccagaacgccgacgccuacguguucguggggaccagccgguacuccaagaaguucaagcccgagaucgccauccgcccgaagguccgggaccaggagggccgcaugaacuacuacuggacccugguggagcccggcgacaagaucaccuucgaggcgacggggaaccuccuggugccccgguacgccuucgccauggagcgcaacgccggcagcgggaucaucaucuccgacacccccguccacgacugcaacacgaccugccagaccccgaagggcgccaucaacaccagccugcccuuccagaacauccaccccaucaccaucggcaagugccccaaguacgugaaguccaccaagcuccggcuggcgacggggcugcgcaacgugccgagcauccagucccggggccucuucggggccaucgccggcuucaucgagggcggguggaccggcauggucgacgggugguacggcuaccaccaccagaacgagcaggggagcggcuacgccgccgaccugaaguccacccagaacgcgaucgacaagaucaccaacaaggugaacagcgugaucgagaagaugaacacgcaguucaccgccgucgggaaggaguucaaccaccuggagaagcgcaucgagaaccucaacaagaagguggacgacggcuuccuggacaucuggaccuacaacgccgagcugcucguccugcuggagaacgagcggacccucgacuaccacgacuccaacgugaagaaccuguacgagaaggugcgcaaccagcugaagaacaacgccaaggagaucggcaacgggugcuucgaguucuaccacaagugcgacaacacgugcauggagagcgucaagaacggcaccuacgacuaccccaaguacuccgaggaggccaagcucaaccgggaggagaucgacggggugaagcuggagagcacccgcaucuaccagauccuggcgaucuacuccaccguggccagcucccucguccugguggugagccugggcgccaucagcuucuggaugugcuccaacgggagccuccagugccggaucugcaucuga

SEQ ID NO: 75888 - RNA, 1701 nt, Artificial Sequence; identical to SEQ ID NO: 71074
  derived and/or modified CDS sequence (opt1) from hemagglutinin__InfluenzaA__AHM98798

SEQ ID NO: 75889 - RNA, 1701 nt, Artificial Sequence; identical to SEQ ID NO: 70848
  derived and/or modified CDS sequence (opt1) from hemagglutinin__InfluenzaA__AHM98809

SEQ ID NO: 75890 - RNA, 1701 nt, Artificial Sequence; identical to SEQ ID NO: 70848
  derived and/or modified CDS sequence (opt1) from hemagglutinin__InfluenzaA__AHM98820

SEQ ID NO: 75891 - RNA, 1701 nt, Artificial Sequence; identical to SEQ ID NO: 70848
  derived and/or modified CDS sequence (opt1) from hemagglutinin__InfluenzaA__AHM98831

SEQ ID NO: 75892 - RNA, 1701 nt, Artificial Sequence
  derived and/or modified CDS sequence (opt1) from hemagglutinin__InfluenzaA__AHM98836
augaaggccauccugguggucaugcucuacaccuucgccaccgcgaacgccgacacgcugugcaucggcuaccacgccaacaacagcaccgacaccguggacaccgugcuggagaagaacgucacggugacccacuccgugaaccuccuggaggacaagcacaacgggaagcugugcaagcuccgcggcgucgcgccccugcaccuggggaagugcaacaucgccggcuggauccucgggaacccggagugcgagagccuguccaccgccagcuccuggagcuacaucguggagaccuccagcuccgacaacggcacgugcuaccccggcgacuucaucgacuacgaggagcugcgggagcagcucagcuccgugagcuccuucgagcgcuucgagaucuuccccaagaccagcuccuggcccaaccacgacagcaacaagggggucaccgccgccugcccgcacgccggcgcgaagggguucuacaagaaccugaucuggcuggugaagaagggcaacuccuaccccaagcucagcaaguccuacaucaacgacaaggggaaggaggugcugguccuguggggcauccaccaccccagcaccacggccgaccagcagagccucuaccagaacgccgacaccuacguguucgugggcaccucccgguacagcaagaaguucaagcccgagaucgccauccgcccgaagguccgggaccaggaggggcgcaugaacuacuacuggauccugguggagcccggcgacaagaucaccuucgaggccacggggaaccugguggucccccgguacgcguucgccauggagcgcaacgccggcuccggcaucaucaucagcgacacccccgugcacgacugcaacacgaccugccagaccccgaagggggccaucaacaccucccuccccuuccagaacauccaccccaucaccaucggcaagugccccaaguacgucaagagcaccaagcugcggcuggccacggggcuccgcaacgugccguccauccagagccggggccuguucggggcgaucgccggcuucaucgagggcggguggaccggcaugguggacgggugguacggcuaccaccaccagaacgagcagggguccggcuacgccgccgaccucaagagcacccagaacgccaucgacaagaucaccaacaaggugaacuccgucaucgagaagaugaacacgcaguucaccgcggugggcaaggaguucaaccaccuggagaagcgcaucgagaaccugaacaagaaggucgacgacggguuccuggacaucuggaccuacaacgccgagcuccuggugcugcucgagaacgagcggacccuggacuaccacgacagcaacgugaagaaccuguacgagaagguccgcaaccagcucaagaacaacgccaaggagaucggcaacgggugcuucgaguucuaccacaagugcgacaacacgugcauggaguccgugaagaacggcaccuacgacuaccccaaguacagcgaggaggccaagcugaaccgggaggagaucgacggggugaagcuggaguccacccgcaucuaccagauccucgccaucuacagcaccgucgcguccagccuggugcugguggucucccucggcgccaucagcuucuggaugugcagcaacggcucccugcagugccggaucugcaucuga

SEQ ID NO: 75893 - RNA, 1701 nt, Artificial Sequence
  derived and/or modified CDS sequence (opt1) from hemagglutinin__InfluenzaA__AHM98847
augaaggccauccugguggucaugcucuacaccuucgccaccgcgaacgccgacacgcugugcaucggcuaccacgccaacaacagcaccgacaccguggacaccgugcuggagaagaacgucacggugacccacuccgugaaccuccuggaggacaagcacgacgggaagcugugcaagcuccgcggcgucgcgccccugcaccuggggaagugcaacaucgccggcuggauccucgggaacccggagugcgagagccuguccaccgccagcuccuggagcuacaucguggagaccuccagcuccgacaacggcacgugcuaccccggcgacuucaucgacuacgaggagcugcgggagcagcucagcuccgugagcuccuucgagcgcuucgagaucuuccccaagaccagcuccuggcccaaccacgacagcaacaagggggucaccgccgccugcccgcacgccggcgcgaagggguucuacaagaaccugaucuggcuggugaagaagggcaacuccuaccccaagcucagcaaguccuacaucaacgacaaggggaaggaggugcugguccuguggggcauccaccaccccagcaccacggccgaccagcagagccucuaccagaacgccgacaccuacguguucgugggcaccucccgguacagcaagaaguucaagcccgagaucgccauccgcccgaagguccgggaccaggaggggcgcaugaacuacuacuggacccugguggagcccggcgacaagaucacguucgaggccaccgggaaccugguggucccccgguacgcguucgccauggagcgcaacgccggcuccggcaucaucaucagcgacacccccgugcacgacugcaacaccacgugccagaccccgaagggggccaucaacaccucccuccccuuccagaacauccaccccaucaccaucggcaagugccccaaguacgucaagagcacgaagcugcggcuggccaccgggcuccgcaacgugccguccauccagagccggggccuguucggggcgaucgccggcuucaucgagggcggguggaccggcaugguggacgggugguacggcuaccaccaccagaacgagcagggguccggcuacgccgccgaccucaagagcacccagaacgccaucgacaagaucacgaacaaggugaacuccgucaucgagaagaugaacacccaguucaccgcggugggcaaggaguucaaccaccuggagaagcgcaucgagaaccugaacaagaaggucgacgacggguuccuggacaucuggaccuacaacgccgagcuccuggugcugcucgagaacgagcggacgcuggacuaccacgacagcaacgugaagaaccuguacgagaagguccgcaaccagcucaagaacaacgccaaggagaucggcaacgggugcuucgaguucuaccacaagugcgacaacacgugcauggaguccgugaagaacggcaccuacgacuaccccaaguacagcgaggaggccaagcugaaccgggaggagaucgacggggugaagcuggaguccacccgcaucuaccagauccucgccaucuacagcaccgucgcguccagccuggugcugguggucucccucggcgccaucagcuucuggaugugcagcaacggcucccugcagugccggaucugcaucuga

SEQ ID NO: 75894 - RNA, 1701 nt, Artificial Sequence; identical to SEQ ID NO: 70848
  derived and/or modified CDS sequence (opt1) from hemagglutinin__InfluenzaA__AHM98858

SEQ ID NO: 75895 - RNA, 1701 nt, Artificial Sequence; identical to SEQ ID NO: 70891
  derived and/or modified CDS sequence (opt1) from hemagglutinin__InfluenzaA__AHM98877

SEQ ID NO: 75896 - RNA, 1701 nt, Artificial Sequence
  derived and/or modified CDS sequence (opt1) from hemagglutinin__InfluenzaA__AHM98898
augaaggccauccuggugguccuccuguacaccuucgccaccgcgaacgccgacacgcugugcaucggcuaccacgccaacaacagcaccgacaccguggacaccgugcucgagaagaacgucacggugacccacuccgugaaccugcuggaggacaaccacaacgggaagcucugcaagcugcgcggcgucgcgccccugcaccucgggaagugcaacaucgccggcuggauccuggggaacccggagugcgagagccuguccaccgccagcuccuggagcuacaucguggagaccuccagcuccgacaacggcacgugcuaccccggcgacuucaucaacuacgaggagcuccgggagcagcugagcuccgugagcuccuucgagcgcuucgagaucuuccccaagaccagcuccuggcccaaccacgacagcaacaagggggucaccgccgccugcccgcacgccggcgcgaaguccuucuacaagaaccugaucuggcucgugaagaaggggaacagcuaccccaagcuguccaagagcuacaucaacgacaagggcaaggaggugcugguccucugggggauccaccaccccagcaccacggccgaccagcagucccuguaccagaacgccgacgccuacguguucgugggcaccagccgguacuccaagaaguucaagcccgagaucgccauccgcccgaagguccgggaccaggagggccgcaugaacuacuacuggacccugguggagcccggggacaagaucaccuucgaggcgacgggcaaccucguggucccccgguacgccuucgccauggagcgcaacgccgggagcggcaucaucaucuccgacacccccgugcacgacugcaacacgaccugccagaccccgaagggcgccaucaacaccagccugcccuuccagaacauccaccccaucaccaucgggaagugccccaaguacgugaaguccaccaagcugcggcucgcgacgggccugcgcaacgucccgagcauccagucccgggggcuguucggcgccaucgccggguucaucgagggcggcuggaccgggaugguggacggcugguacggguaccaccaccagaacgagcagggcagcggguacgccgccgaccucaaguccacccagaacgcgaucgacaagaucaccaacaaggugaacagcgucaucgagaagaugaacacgcaguucaccgccgugggcaaggaguucaaccaccuggagaagcgcaucgagaaccugaacaagaaggucgacgacggcuuccucgacaucuggaccuacaacgccgagcugcuggugcuccuggagaacgagcggacccuggacuaccacgacuccaacgugaagaaccucuacgagaagguccgcaaccagcugaagaacaacgccaaggagaucgggaacggcugcuucgaguucuaccacaagugcgacaacacgugcauggagagcgugaagaacgggaccuacgacuaccccaaguacuccgaggaggccaagcugaaccgggaggagaucgacggcgugaagcucgagagcacccgcaucuaccagauccuggcgaucuacuccaccgucgccagcucccuggugcucguggucagccugggggccaucagcuucuggaugugcuccaacggcagccugcagugccggaucugcaucuga

SEQ ID NO: 75897 - RNA, 1701 nt, Artificial Sequence; identical to SEQ ID NO: 74474
  derived and/or modified CDS sequence (opt1) from hemagglutinin__InfluenzaA__AHM98909

SEQ ID NO: 75898 - RNA, 1701 nt, Artificial Sequence
  derived and/or modified CDS sequence (opt1) from hemagglutinin__InfluenzaA__AHM98932
augaaggccauccuggugguccuccuguacaccuucgccaccgcgaacgccgacacgcugugcaucggcuaccacgccaacaacagcaccgacaccguggacaccgugcucgagaagaacgucacggugacccacuccgugaaccugcuggaggacaagcacaacgggaagcucugcaagcugggcggggucgcgccccugcaccucggcaagugcaacaucgccggguggauccugggcaacccggagugcgagagccuguccaccgccagcuccuggagcuacaucguggagaccuccagcuccgacaacggcacgugcuaccccggggacuucaucgacuacgaggagcuccgcgagcagcugagcuccgugagcuccuucgagcgguucgagaucuuccccaagaccagcuccuggcccaaccacgacagcaacaagggcgucaccgccgccugcccgcacgccggggcgaaguccuucuacaagaaccugaucuggcucgugaagaagggcgacagcuaccccaagcuguccaagagcuacaucaacgacaaggggaaggaggugcugguccucuggggcauccaccaccccagcaccuccgccgaccagcagagccuguaccagaacgccgacgccuacguguucgugggcuccagccgcuacuccaagaaguucaagcccgagaucgccauccggccgaagguccgcgaccgggaggggcgcaugaacuacuacuggacgcugguggagcccggcgacaagaucaccuucgaggcgaccgggaaccucguggucccccgguacgccuucgccauggagcgcaacgccggcagcggcaucaucaucuccgacacccccgugcacgacugcaacacgaccugccagaccccgaagggggccaucaacaccagccugcccuuccagaacauccaccccaucacgaucggcaagugccccaaguacgugaaguccaccaagcugcggcucgcgaccgggcugcgcaacgucccgagcauccagucccggggccuguucggggccaucgccggcuucaucgagggcggguggaccggcaugguggacgggugguacggcuaccaccaccagaacgagcaggggagcggcuacgccgccgaccucaaguccacgcagaacgcgaucgacgagaucaccaacaaggugaacagcgucaucgagaagaugaacacccaguucaccgccgugggcaaggaguucaaccaccuggagaagcgcaucgagaaccugaacaagaaggucgacgacggguuccucgacaucuggacguacaacgccgagcugcuggugcuccuggagaacgagcggacccuggacuaccacgacuccaacgugaagaaccucuacgagaagguccgcagccagcugaagaacaacgccaaggagaucggcaacgggugcuucgaguucuaccacaagugcgacaacacgugcauggaguccgugaagaacggcaccuacgacuaccccaaguacagcgaggaggccaagcugaaccgggaggagaucgacggggugaagcucgaguccacccgcaucuaccagauccuggcgaucuacagcaccgucgccagcucccuggugcucguggucagccugggcgccaucuccuucuggaugugcagcaacggcucccugcagugccggaucugcaucuga

SEQ ID NO: 75899 - RNA, 1701 nt, Artificial Sequence; identical to SEQ ID NO: 75898
  derived and/or modified CDS sequence (opt1) from hemagglutinin__InfluenzaA__AHM98940

SEQ ID NO: 75900 - RNA, 1701 nt, Artificial Sequence; identical to SEQ ID NO: 75898
  derived and/or modified CDS sequence (opt1) from hemagglutinin__InfluenzaA__AHM98951

SEQ ID NO: 75901 - RNA, 1701 nt, Artificial Sequence
  derived and/or modified CDS sequence (opt1) from hemagglutinin__InfluenzaA__AHM98975
augaaggccauccuggugguccuccuguacaccuucgccaccgcgaacgccgacacgcugugcaucggcuaccacgccaacaacagcaccgacaccguggacaccgugcucgagaagaacgucacggugacccacuccgugaaccugcuggaggacaagcacaacgggaagcucugcaagcugcgcggcgucgcgccccugcaccucgggaagugcaacaucgccggcuggauccuggggaacccggagugcgagagccuguccaccgccagcuccuggagcuacaucguggagaccuccagcuccgacaacggcacgugcuaccccggcgacuucaucgacuacgaggagcuccgggagcagcugagcuccgugagcuccuucgagcgcuucgagaucuuccccaagaccagcuccuggcccaaccacgagagcaacaagggggucaccgccgccugcccgcacgccggcgcgaaguccuucuacaagaaccugaucuggcucgugaagaaggggaacagcuaccccaagcuguccaagagcuacaucaacgacaagggcaaggaggugcugguccucugggggauccaccaccccagcaccuccgccgaccagcagagccuguaccagaacgccgacgccuacguguucgugggcuccagccgguacuccaagaaguucaagcccgagaucgccauccgcccgaagguccgggaccaggagggccgcaugaacuacuacuggacgcugguggagcccggggacaagaucaccuucgaggcgaccggcaaccucguggucccccgguacgccuucgccauggagcgcaacgccgggagcggcaucaucaucuccgacacccccgugcacgacugcaacacgaccugccagaccccgaagggcgccaucaacaccagccugcccuuccagaacauccaccccaucacgaucgggaagugccccaaguacgugaaguccaccaagcugcggcucgcgaccggccugcgcaacgucccgagcauccagucccgggggcuguucggcgccaucgccggguucaucgagggcggcuggaccgggaugguggacggcugguacggguaccaccaccagaacgagcagggcagcggguacgccgccgaccucaaguccacgcagaacgcgaucgacgagaucaccaacaaggugaacagcgucaucgagaagaugaacacccaguucaccgccgugggcaaggaguucaaccaccuggagaagcgcaucgagaaccugaacaagaaggucgacgacggcuuccucgacaucuggacguacaacgccgagcugcuggugcuccuggagaacgagcggacccuggacuaccacgacuccaacgugaagaaccucuacgagaagguccgcagccagcugaagaacaacgccaaggagaucgggaacggcugcuucgaguucuaccacaagugcgacaacacgugcauggaguccgugaagaacgggaccuacgacuaccccaaguacagcgaggaggccaagcugaaccgggaggagaucgacggcgugaagcucgaguccacccgcaucuaccagauccuggcgaucuacagcaccgucgccagcucccuggugcucguggucagccugggggccaucuccuucuggaugugcagcaacggcucccugcagugccggaucugcaucuga

SEQ ID NO: 75902 - RNA, 1701 nt, Artificial Sequence
  derived and/or modified CDS sequence (opt1) from hemagglutinin__InfluenzaA__AHM98997
augaaggccauccuggugguccuccuguacaccuucgccaccgcgaacgccgacacgcugugcaucggcuaccacgccaacaacagcaccgacaccguggacaccgugcucgagaagaacgucacggugacccacuccgugaaccugcuggaggacaagcacaacgggaagcucugcaagcugcgcggcgucgcgccccugcaccucgggaagugcaacaucgccggcuggauccuggggaacccggagugcgagagccuguccaccgccagcuccuggagcuacaucguggagaccuccagcuccgacaacggcacgugcuaccccggcgacuucaucgacuacgaggagcuccgggagcagcugagcuccgugagcuccuucgagcgcuucgagaucuuccccaagaccagcuccuggcccaaccacgacagcaacaagggggucaccgccgccugcccgcacgccggcgcgaaguccuucuacaagaaccugaucuggcucgugaagaagggggacagcuaccccaagcuguccaagagcuacaucaacgacaagggcaaggaggugcugguccucugggggauccaccaccccagcaccuccgccgaccagcagagccuguaccagaacgccgacgccuacguguucgugggcuccagccgguacuccaagaaguucaagcccgagaucgccauccgcccgaagguccggggccaggaggggcgcaugaacuacuacuggacgcugguggagcccggcgacaagaucaccuucgaggcgaccgggaaccucguggucccccgguacgccuucgccauggagcgcaacgccggcagcggcaucaucaucuccgacacccccgugcacgacugcaacacgaccugccagaccccgaagggggccaucaacaccagccugcccuuccagaacauccaccccaucacgaucggcaagugccccaaguacgugaaguccaccaagcugcggcucgcgaccgggcugcgcaacgucccgagcauccagucccggggccuguucggggccaucgccggcuucaucgagggcggguggaccggcaugguggacgggugguacggcuaccaccaccagaacgagcaggggagcggcuacgccgccgaccucaaguccacgcagaacgcgaucgacgagaucaccaacaaggugaacagcgucaucgagaagaugaacacccaguucaccgccgugggcaaggaguucaaccaccuggagaagcgcaucgagaaccugaacaagaaggucgacgacggguuccucgacaucuggacguacaacgccgagcugcuggugcuccuggagaacgagcggacccuggacuaccacgacuccaacgugaagaaccucuacgagaagguccgcagccagcugaagaacaacgccaaggagaucggcaacgggugcuucgaguucuaccacaagugcgacaacacgugcauggaguccgugaagaacggcaccuacgacuaccccaaguacagcgaggaggccaagcugaaccgggaggagaucgacggggugaagcucgaguccacccgcaucuaccagauccuggcgaucuacagcaccgucgccagcucccuggugcucguggucagccugggcgccaucuccuucuggaugugcagcaacggcucccugcagugccggaucugcaucuga

SEQ ID NO: 75903 - RNA, 1701 nt, Artificial Sequence
  derived and/or modified CDS sequence (opt1) from hemagglutinin__InfluenzaA__AHM99019
augaaggccauccuggugguccuccuguacaccuucgccaccgcgaacgccgacacgcugugcaucggcuaccacgccaacaacagcaccgacaccguggacaccgugcucgagaagaacgucacggugacccacuccgugaaccugcuggaggacaagcacaacgggaagcucugcaagcugaagggcgucgcgccccugcaccucgggaagugcaacaucgccggcuggauccuggggaacccggagugcgagagccuguccaccgccagcuccuggagcuacaucguggagaccuccagcuccgacaacggcacgugcuaccccggcgacuucaucgacuacgaggagcuccgcgagcagcugagcuccgugagcuccuucgagcgguucgagaucuuccccaagaccagcuccuggcccaaccacgacagcaacaagggggucaccgccgccugcccgcacgccggcgcgaaguccuucuacaagaaccugaucuggcucgugaagaagggggacagcuaccccaagcuguccaagagcuacaucaacgacaagggcaaggaggugcugguccucugggggauccaccaccccagcaccuccgccgaccagcagagccuguaccagaacgccgacgccuacguguucgugggcuccagccgcuacuccaagaaguucaagcccgagaucgccauccggccgaagguccgcggccaggaggggcggaugaacuacuacuggacgcugguggagcccggcgacaagaucaccuucgaggcgaccgggaaccucguggucccccgcuacgccuucgccauggagcggaacgccggcagcggcaucaucaucuccgacacccccgugcacgacugcaacacgaccugccagaccccgaagggggccaucaacaccagccugcccuuccagaacauccaccccaucacgaucggcaagugccccaaguacgugaaguccaccaagcugcgccucgcgaccgggcugcggaacgucccgagcauccagucccgcggccuguucggggccaucgccggcuucaucgagggcggguggaccggcaugguggacgggugguacggcuaccaccaccagaacgagcaggggagcggcuacgccgccgaccucaaguccacgcagaacgcgaucgacgagaucaccaacaaggugaacagcgucaucgagaagaugaacacccaguucaccgccgugggcaaggaguucaaccaccuggagaagcggaucgagaaccugaacaagaaggucgacgacggguuccucgacaucuggacguacaacgccgagcugcuggugcuccuggagaacgagcgcacccuggacuaccacgacuccaacgugaagaaccucuacgagaagguccggagccagcugaagaacaacgccaaggagaucggcaacgggugcuucgaguucuaccacaagugcgacaacacgugcauggaguccgugaagaacggcaccuacgacuaccccaaguacagcgaggaggccaagcugaaccgcgaggagaucgacggggugaagcucgaguccacccggaucuaccagauccuggcgaucuacagcaccgucgccagcucccuggugcucguggucagccugggcgccaucuccuucuggaugugcagcaacggcucccugcagugccgcaucugcaucuga

SEQ ID NO: 75904 - RNA, 1701 nt, Artificial Sequence; identical to SEQ ID NO: 75903
  derived and/or modified CDS sequence (opt1) from hemagglutinin__InfluenzaA__AHM99031

SEQ ID NO: 75905 - RNA, 1701 nt, Artificial Sequence; identical to SEQ ID NO: 75903
  derived and/or modified CDS sequence (opt1) from hemagglutinin__InfluenzaA__AHM99043

SEQ ID NO: 75906 - RNA, 1701 nt, Artificial Sequence; identical to SEQ ID NO: 75903
  derived and/or modified CDS sequence (opt1) from hemagglutinin__InfluenzaA__AHM99054

SEQ ID NO: 75907 - RNA, 1701 nt, Artificial Sequence; identical to SEQ ID NO: 75903
  derived and/or modified CDS sequence (opt1) from hemagglutinin__InfluenzaA__AHM99065

SEQ ID NO: 75908 - RNA, 1701 nt, Artificial Sequence
  derived and/or modified CDS sequence (opt1) from hemagglutinin__InfluenzaA__AHM99075
augaaggccauccuggugguccuccuguacaccuucgccaccgcgaacgccgacacgcugugcaucggcuaccacgccaacaacagcaccgacaccguggacaccgugcucgagaagaacgucacggugacccacuccgugaaccugcuggaggacaagcacaacgggaagcucugcaagcugcgcggcgucgcgccccugcaccucgggaagugcaacaucgccggcuggauccuggggaacccggagugcgagagccuguccaccgccagcuccuggagcuacaucguggagaccuccagcuccgacaacggcacgugcuaccccggcgacuucaucgacuacgaggagcuccgggagcagcugagcuccgugagcuccuucgagcgcuucgagaucuuccccaagaccagcuccuggcccaaccacgacagcaacaagggggucaccgccgccugcccgcacgccggcgcgaaguccuucuacaagaaccugaucuggcucgugaagaagggggacagcuaccccaagcuguccaagagcuacaucaacgacaagggcaaggaggugcugguccucugggggauccaccaccccagcaccuccgccgaccagcagagccuguaccagaacgccgacgccuacguguucgugggcuccagccgguacuccaagaaguucaagcccgagaucgccauccgcccgaagguccgggaccaggagggccgcaugaacuacuacuggacgcugguggagcccggggacaagaucaccuucgaggcgaccggcaaccucguggucccccgguacgccuucgccauggagcgcaacgccgggagcggcaucaucaucuccgacacccccgugcacgacugcaacacgaccugccagaccccgaagggcgccaucaacaccagccugcccuuccagaacauccaccccaucacgaucgggaagugccccaaguacgugaaguccaccaagcugcggcucgcgaccggccugcgcaacgucccgagcauccagucccgggggcuguucggcgccaucgccggguucaucgagggcggcuggaccgggaugguggacggcugguacggguaccaccaccagaacgagcagggcagcggguacgccgccgaccucaaguccacgcagaacgcgaucgacgagaucaccaacaaggugaacagcgucaucgagaagaugaacacccaguucaccgccgugggcaaggaguucaaccaccuggagaagcgcaucgagaaccugaacaagaaggucgacgacggcuuccucgacaucuggacguacaacgccgagcugcuggugcuccuggagaacgagcggacccuggacuaccacgacuccaacgugaagaaccucuacgagaagguccgcagccagcugaagaacaacgccaaggagaucgggaacggcugcuucgaguucuaccacaagugcgacaacacgugcauggaguccgugaagaacgggaccuacgacuaccccaaguacagcgaggaggccaagcugaaccgggaggagaucgacggcgugaagcucgaguccacccgcaucuaccagauccuggcgaucuacagcaccgucgccagcucccuggugcucguggucagccugggggccaucuccuucuggaugugcagcaacggcucccugcagugccggaucugcaucuga

SEQ ID NO: 75909 - RNA, 1701 nt, Artificial Sequence
  derived and/or modified CDS sequence (opt1) from hemagglutinin__InfluenzaA__AHN00717
augaaggccauccugcucgugcugcugugcaccuucgccgcgaccaacgccgacacgcucugcaucggcuaccacgccaacaacagcaccgacaccgucgacaccgugcuggagaagaacgugacggucacccacuccgugaaccugcucgaggaccgccacaacgggaagcugugcaagcugggcgggaucgcgccccuccaccugggcaagugcaacaucgccggguggcugcucggcaacccggagugcgagcugcuguucaccgugagcuccuggagcuacaucgucgagaccuccaacagcgacaacggcacgugcuaccccggggacuucaucaacuacgaggagcuccgggagcagcuguccagcguguccagcuucgagcgcuucgagaucuuccccaagaccuccagcuggcccaaccacgagaccaaccggggcgugaccgccgccugcccguacgccggggccaacuccuucuaccgcaaccugaucuggcucgucaagaagggcaacagcuaccccaagcuguccaagagcuacgugaacaacaaggggaaggaggugcugguccucuggggcauccaccacccgcccacguccaccgaccagcagagccuguaccagaacgcggacgccuacguguucgugggcuccagcaaguacaaccggaaguucaagcccgagaucgccgcccgccccaagguccgggggcaggccggccgcaugaacuacuacuggacccugaucgagcccggggacaccaucacguucgaggcgaccggcaaccucguggugccccgguacgccuucgccaugaaccgcggcccggggagcggcaucaucaucuccgacgcccccguccacgacugcaacacgaccugccagacccccaagggggccaucaacaccagccugcccuuccagaacauccacccggugaccaucggcgagugccccaaguacgugaaguccaccaagcugcggauggcgacggggcuccgcaacauccccagcauccagucccggggccuguucggcgccaucgccggguucaucgagggcggguggaccggcaugaucgacgggugguacggcuaccaccaccagaacgagcagggcagcggguacgccgccgaccagaaguccacccagaacgcgaucgacggcaucaccaacaaggucaacagcgugaucaagaagaugaacacgcaguucaccgccguggggaaggaguucaaccaccuggagaagcgcaucgagaaccucaacaagaaggucgacgacggcuuccuggacguguggaccuacaacgccgagcugcucguccugcuggagaacgagcggacccucgacuuccacgacuccaacgugaagaaccuguacgagaaggugcgcagccagcugcggaacaacgccaaggagaucgggaacggcugcuucgaguucuaccacaagugcgacgacacgugcauggaguccgucaagaacggcaccuacgacuaccccaaguacagcgaggaguccaagcucaaccgcgaggagaucgacggggugaagcuggagagcacccggaucuaccagauccuggccaucuacuccaccgcggccagcucccucgugcugcuggucagccucggcgccaucuccuucuggaugugcagcaacgggagccugcagugccgcaucugcaucuga

SEQ ID NO: 75910 - RNA, 1701 nt, Artificial Sequence
  derived and/or modified CDS sequence (opt1) from hemagglutinin__InfluenzaA__AHN00764
augaaggccauccugcucgugcugcugugcaccuucgccgcgaccaacgccgacacgcucugcaucggcuaccacgccaacaacagcaccgacaccgucgacaccgugcuggagaagaacgugacggucacccacuccgugaaccugcucgaggacaagcacaacgggaagcugugcaagcugggcgggaucgcgccccuccaccugggcaagugcaacaucgccggguggcugcucggcaacccggagugcgagcugcuguucaccgugagcuccuggagcuacaucgucgagaccuccaacagcgacaacggcacgugcuaccccggggacuucaucaacuacgaggagcuccgcgagcagcuguccagcguguccagcuucgagcgguucgagaucuuccccaagaccuccagcuggcccaaccacgagaccaaccgcggcgugaccgccgccugcccguacgccggggccaacuccuucuaccggaaccugaucuggcucgucaagaagggcaacagcuaccccaagcuguccaagagcuacgugaacaacaaggggaaggaggugcugguccucuggggcauccaccacccgcccacguccaccgaccagcagagccuguaccagaacgcggacgccuacguguucgugggcuccagcaaguacaaccgcaaguucaagcccgagaucgccgcccggcccaagguccgcgggcaggccggccggaugaacuacuacuggacccugaucgagcccggggacaccaucacguucgaggcgaccggcaaccucguggugccccgcuacgccuucgccaugaaccggggcccggggagcggcaucaucaucuccgacgcccccguccacgacugcaacacgaccugccagacccccaagggggccaucaacaccagccugcccuuccagaacauccacccggugaccaucggcgagugccccaaguacgugaaguccaccaagcugcgcauggcgacggggcuccggaacauccccagcauccagucccgcggccuguucggcgccaucgccggguucaucgagggcggguggaccggcaugaucgacgggugguacggcuaccaccaccagaacgagcagggcagcggguacgccgccgaccagaaguccacccagaacgcgaucgacggcaucaccaacaaggucaacagcgugaucaagaagaugaacacgcaguucaccgccguggggaaggaguucaaccaccuggagaagcggaucgagaaccucaacaagaaggucgacgacggcuuccuggacguguggaccuacaacgccgagcugcucguccugcuggagaacgagcgcacccucgacuuccacgacuccaacgugaagaaccuguacgagaaggugcggagccagcugcgcaacaacgccaaggagaucgggaacggcugcuucgaguucuaccacaagugcgacgacacgugcauggaguccgucaagaacggcaccuacgacuaccccaaguacagcgaggaguccaagcucaaccgggaggagaucgacggggugaagcuggagagcacccgcaucuaccagauccuggccaucuacuccaccgcggccagcucccucgugcugcuggucagccucggcgccaucuccuucuggaugugcagcaacgggagccugcagugccggaucugcaucuga

SEQ ID NO: 75911 - RNA, 1683 nt, Artificial Sequence
  derived and/or modified CDS sequence (opt1) from hemagglutinin__InfluenzaA__AHN96323
augaacacccagauccugguguucgcccucaucgccaucauccccaccaacgcggacaagaucugccugggccaccacgccgucagcaacgggacgaaggugaacacccugaccgagcgcggcguggaggucgugaacgccaccgagacgguggagcggaccaacaucccgcgcaucugcuccaaggggaagcggaccgucgaccucggccagugcgggcugcugggcaccaucacgggcccgccccagugcgaccaguuccucgaguucagcgccgaccugaucaucgagcgccgggagggguccgacgugugcuaccccggcaaguucgugaacgaggaggcccugcgccagauccuccgggagagcgggggcaucgacaaggaggcgaugggguucaccuacuccggcauccgcaccaacggcgccaccagcgccugccggcgcuccgggagcuccuucuacgccgagaugaaguggcugcugagcaacacggacaacgcggccuucccgcagaugaccaaguccuacaagaacacccgcaagagccccgcccucaucgucuggggcauccaccacuccgugagcaccgccgagcagacgaagcuguacggguccggcaacaagcuggugaccgucggcagcuccaacuaccagcagagcuucgugcccucccccggggcccggccccaggugaacggccucagcgggcggaucgacuuccacuggcugaugcugaaccccaacgacaccgucaccuucagcuucaacggcgcguucaucgcccccgaccgcgccuccuuccuccggggcaagagcauggggauccaguccggcguccagguggacgccaacugcgagggggacugcuaccacagcggcgggacgaucaucuccaaccugcccuuccagaacaucgacagccgcgccgugggcaagugcccgcgguacgugaagcagcgcucccugcuccuggcgaccgggaugaagaacgugcccgagauccccaagggccggggccuguucggggccaucgccggcuucaucgagaacgggugggagggccucaucgacgggugguacggcuuccgccaccagaacgcccagggcgaggggaccgccgcggacuacaagagcacccaguccgccaucgaccagaucacgggcaagcugaaccggcugaucgagaagaccaaccagcaguucgagcucaucgacaacgaguucaacgaggucgagaagcagaucgggaacgugaucaacuggacccgcgacagcaucaccgaggugugguccuacaacgccgagcugcuggucgccauggagaaccagcacacgaucgaccucgccgacagcgagauggacaagcuguacgagcgcgugaagcggcagcugcgcgagaacgcggaggaggacggcaccggcugcuucgagaucuuccacaagugcgacgacgacugcauggccuccauccggaacaacaccuacgaccacagcaaguaccgcgaggaggccaugcagaaccggauccagaucgaccccgucaagcucuccagcggguacaaggacgugauccugugguucuccuucggcgccagcugcuucauccugcucgcgaucgugauggggcuggucuucaucugcgugaagaacggcaacaugcgcugcaccaucgggaucuga

SEQ ID NO: 75912 - RNA, 1701 nt, Artificial Sequence; identical to SEQ ID NO: 71006
  derived and/or modified CDS sequence (opt1) from hemagglutinin__InfluenzaA__AHN96442

SEQ ID NO: 75913 - RNA, 1701 nt, Artificial Sequence
  derived and/or modified CDS sequence (opt1) from hemagglutinin__InfluenzaA__AHN96443
augaagaccaucaucgcccugagcuacauccucugccugguguucgcccagaagcugcccggcaacgacaacuccaccgcgacgcucugccuggggcaccacgccgucccgaacggcaccaucgugaagaccaucaccaacgaccagaucgaggugacgaacgccaccgagcugguccagagcuccagcaccggggagaucugcaacagcccccaccagauccucgacggcgagaacugcacccugaucgacgcccugcucggggacccccagugcgacggcuuccagaacaagaagugggaccuguucguggagcgcagcaaggcccacuccaacugcuaccccuacgacgugccggacuacacgagccugcggucccucgucgcgagcuccggcacccuggaguucaacaacgagagcuucaacuggaccggggugacccagaacggcacguccagcgccugcauccgccgguccaacaacagcuucuucucccgccugaacuggcucacccaccugaacuucaaguaccccgcccugaacgugaccaugcccaacaacgagcaguucgacaagcucuacaucuggggcguccaccaccccgggaccgacaaggaccagaucuuccuguacgcccaggcgagcgggcggaucacgguguccaccaagcgcagccagcaggccgugaucccgaacaucggcagccggccccgcguccggaacauccccucccgcgugagcaucuacuggaccaucgugaagcccggcgacauccugcucaucaacuccaccgggaaccugaucgccccgcggggcuacuucaagauccgcagcgggaaguccagcaucaugcgguccgacgcccccaucggcaagugcaacagcgccugcaucacgcccaacggcuccauccccaacgacaagccguuccagaacgucaaccgcaucaccuacggggcgugcccccgguacgugaagcagaacacccugaagcucgccaccggcaugcgcaacgugcccgagaagcagacgcgggggaucuucggcgccaucgccggguucaucgagaacggcugggagggcauggucgacgggugguacggcuuccgccaccagaacagcgaggggcggggccaggccgcggaccugaaguccacccaggccgccaucgaccagaucaacgggaagcugaaccgccucaucggcaagaccaacgagaaguuccaccagaucgagaaggaguucagcgagguggagggccggauccaggaccuggagaaguacguggaggacaccaagaucgaccugugguccuacaacgccgagcuccuggucgcccuggagaaccagcacacgaucgaccucaccgacagcgagaugaacaagcuguucgagaagaccaagaagcagcugcgcgagaacgcggaggacauggggaacggcugcuucaagaucuaccacaagugcgacaacgccugcaucggguccauccgcaacggcaccuacgaccacgacguguaccgggacgaggcccucaacaaccgcuuccagaucaaggggguggagcugaaguccggcuacaaggacuggauccuguggaucuccuucgccaucagcugcuuccuccugugcgucgcccugcucggcuucaucaugugggcgugccagaaggggaacauccggugcaacaucugcaucuga

SEQ ID NO: 75914 - RNA, 1701 nt, Artificial Sequence
  derived and/or modified CDS sequence (opt1) from hemagglutinin__InfluenzaA__AHN96444
augaagaccaucaucgcccugagcuacauccucugccugguguucgcccagaagcugcccggcaacgacaacuccaccgcgacgcucugccuggggcaccacgccgucccgaacggcaccaucgugaagaccaucaccaacgaccgcaucgaggugacgaacgccaccgagcugguccagaacagcuccaucggggagaucugcgacagcccccaccagauccucgacggcgagaacugcacccugaucgacgcccugcucggggacccccagugcgacggcuuccagaacaagaagugggaccuguucguggagcgguccaaggccuacagcaacugcuaccccuacgacgugccggacuacgcgucccugcgcagccucgucgccuccagcggcacccuggaguucaacaacgaguccuucaacuggacgggggugacccagaacggcaccagcuccgccugcauccggcgcagcaacaacuccuucuucagccggcugaacuggcucacccaccugaacuucaaguaccccgcccugaacgugacgaugcccaacaaccagcaguucgacaagcucuacaucuggggcguccaccaccccgggaccgacaaggaccagaucuuccuguacgcgcaguccagcgggcgcaucaccguguccaccaagcggagccagcaggccgugaucccgaacaucggcagccgcccccggauccgcaacauccccucccggaucagcaucuacuggacgaucgucaagcccggcgacauccugcucaucaacuccaccgggaaccugaucgccccgcgcggcuacuucaagauccggagcgggaaguccagcaucaugcgcuccgacgcccccaucggcaagugcaagagcgagugcaucacccccaacggcuccauccccaacgacaagccguuccagaacgugaaccggaucaccuacggggccugcccccgcuacgugaagcagagcacgcugaagcucgcgaccggcaugcggaacguccccgagaagcagacccgcgggaucuucggcgccaucgccggguucaucgagaacggcugggagggcaugguggacgggugguacggcuuccggcaccagaacuccgaggggcgcggccaggccgccgaccucaagagcacccaggcggccaucgaccagaucaacgggaagcugaaccggcugaucggcaagacgaacgagaaguuccaccagaucgagaaggaguucuccgagguggagggccgcauccaggaccuggagaaguacgucgaggacaccaagaucgaccuguggagcuacaacgccgagcuccugguggcccuggagaaccagcacaccaucgaccucaccgacuccgagaugaacaagcuguucgagaagacgaagaagcagcugcgcgagaacgccgaggacauggggaacggcugcuucaagaucuaccacaagugcgacaacgcgugcaucgggagcauccggaacggcaccuacgaccacgacguguaccgcgacgaggcccucaacaaccgguuccagaucaaggggaucgagcugaaguccggcuacaaggacuggauccuguggaucagcuucgccaucuccugcuuccuccugugcgucgcccugcucggcuucaucaugugggccugccagaaggggaacauccgcugcaacaucugcaucuga

SEQ ID NO: 75915 - RNA, 1701 nt, Artificial Sequence
  derived and/or modified CDS sequence (opt1) from hemagglutinin__InfluenzaA__AHN96445
augaagaccaucaucgcccugagcuacauccucugccugguguucgcccagaagcugcccggcaacgacaacuccaccgcgacgcucugccuggggcaccacgccgucccgaacggcaccaucgugaagaccaucaccaacgaccgcaucgaggugacgaacgccaccgagcugguccagaacagcuccaucggggagaucugcgacagcccccaccagauccucgacggcgagaacugcacccugaucgacgcccugcucggggacccccagugcgacggcuuccagaacaagaagugggaccuguucguggagcgguccaaggccuacagcaacugcuaccccuacgacgugccggacuacgcgucccugcgcagccucgucgccuccagcggcacccuggaguucaacaacgaguccuucaacuggacgggggugacccagaacggcaccagcuccgccugcauccggcgcagcaacaacuccuucuucagccggcugaacuggcucacccaccugaacuucaaguaccccgcccugaacgugacgaugcccaacaaccagcaguucgacaagcucuacaucuggggcguccaccaccccgggaccgacaaggaccagaucuuccuguacgcgcaguccagcgggcgcaucaccguguccaccaagcggagccagcaggccgugaucccgaacaucggcagccgcccccggauccgcaacauccccucccggaucagcaucuacuggacgaucgucaagcccggcgacauccugcucaucaacuccaccgggaaccugaucgccccgcgcggcuacuucaagauccugagcgggaaguccagcaucaugcgguccgacgcccccaucggcaagugcaagagcgagugcaucacccccaacggcuccauccccaacgacaagccguuccagaacgugaaccgcaucaccuacggggccugcccccgguacgugaagcagagcacgcucaagcuggcgaccggcaugcgcaacguccccgagaagcagacccgggggaucuucggcgccaucgccggguucaucgagaacggcugggagggcaugguggacgggugguacggcuuccgccaccagaacuccgaggggcggggccaggccgccgaccucaagagcacccaggcggccaucgaccagaucaacgggaagcugaaccgccugaucggcaagacgaacgagaaguuccaccagaucgagaaggaguucuccgagguggagggccggauccaggaccuggagaaguacgucgaggacaccaagaucgaccucuggagcuacaacgccgagcugcugguggcccucgagaaccagcacaccaucgaccugaccgacuccgagaugaacaagcuguucgagaagacgaagaagcagcuccgcgagaacgccgaggacauggggaacggcugcuucaagaucuaccacaagugcgacaacgcgugcaucgggagcauccgcaacggcaccuacgaccacgacguguaccgggacgaggcccugaacaaccgcuuccagaucaagggggucgagcugaaguccggcuacaaggacuggauccucuggaucagcuucgccaucuccugcuuccugcugugcguggcccuccugggcuucaucaugugggccugccagaaggggaacauccggugcaacaucugcaucuga

SEQ ID NO: 75916 - RNA, 1701 nt, Artificial Sequence
  derived and/or modified CDS sequence (opt1) from hemagglutinin__InfluenzaA__AHN96447
augaagaccaucaucgcccugagcuacauccucugccugguguucgcccagaagcugcccggcaacgacaacuccaccgcgacgcucugccuggggcaccacgccgucccgaacggcaccaucgugaagaccaucaccaacgaccgcaucgaggugacgaacgccaccgagcugguccagaacagcuccaucggggagaucugcgacagcccccaccagauccucgacggcgagaacugcacccugaucgacgcccugcucggggacccccagugcgacggcuuccagaacaagaagugggaccuguucguggagcgguccaaggccuacagcaacugcuaccccuacgacgugccggacuacgcgucccugcgcagccucgucgccuccagcggcacccuggaguucaacaacgaguccuucaacugggccggggugacgcagaacggcaccagcuccgccugcauccgggggagcaacuccagcuucuucucccgccugaacuggcucacccaccugaacuucaaguaccccgcgcugaacgugaccaugcccaacaacgagcaguucgacaagcucuacaucuggggcguccaccaccccgggacggacaaggaccagaucuuccuguacgcccagagcuccggccggaucaccgugagcaccaagcgcagccagcaggccgugaucccgaacaucggcucccggccccgcauccggaacauccccagccgcaucuccaucuacuggaccaucgucaagcccggggacauccugcucaucaacagcacgggcaaccugaucgccccgcggggguacuucaagauccgcuccggcaagagcuccaucaugcggagcgacgcccccaucggcaagugcaaguccgagugcaucacccccaacgggagcauccccaacgacaagccguuccagaacgugaaccgcaucaccuacggcgcgugcccccgguacgugaagcaguccacccugaagcucgccacggggaugcgcaacguccccgagaagcagacccggggcaucuucggggccaucgccggcuucaucgagaacggcugggaggggaugguggacggcugguacggguuccgccaccagaacagcgagggccgggggcaggccgcggaccugaaguccacccaggccgccaucgaccagaucaacggcaagcugaaccgccucaucggcaagaccaacgagaaguuccaccagaucgagaaggaguucagcgagguggaggggcggauccaggaccuggagaaguacgucgaggacacgaagaucgaccugugguccuacaacgccgagcuccugguggcccuggagaaccagcacaccaucgaccucaccgacagcgagaugaacaagcuguucgagaagaccaagaagcagcugcgcgagaacgcggaggacaugggcaacgggugcuucaagaucuaccacaagugcgacaacgccugcaucggcuccauccgcaacgggacguacgaccacgacguguaccgggacgaggcccucaacaaccgcuuccagaucaagggcgucgagcucaagagcggcuacaaggacuggauccuguggaucuccuucgccaucagcugcuuccugcugugcguggugcugcucggguucaucaugugggccugccagaagggcaacauccggugcaacaucugcaucuga

SEQ ID NO: 75917 - RNA, 1701 nt, Artificial Sequence
  derived and/or modified CDS sequence (opt1) from hemagglutinin__InfluenzaA__AHV83765
augaaggccauccuggugguccuccuguacaccuucgccaccgcgaacgccgacacgcugugcaucggcuaccacgccaacaacagcaccgacaccguggacaccgugcucgagaagaacgucacggugacccacuccgugaaccugcuggaggacaagcacaacgggaagcucugcaagcugcgcggcgucgcgccccugcaccucgggaagugcaacaucgccggcuggauccuggggaacccggagugcgagagccuguccaccgccagcuccuggagcuacaucguggagaccuccagcuccgacaacggcacgugcuaccccggcgacuucaucaacuacgaggagcuccgggagcagcugagcuccgugagcuccuucgagcgcuucgagaucuuccccaagaccagcuccuggcccaaccacgacagcaacaagggggucaccgccgccugcccgcacgccggcgcgaaguccuucuacaagaaccugaucuggcucgugaagaaggggaacagcuaccccaagcugucccagagcuacaucaacgacaagggcaaggaggugcugguccucugggggauccaccaccccagcaccacggccgaccagcagucccuguaccagaacgccgacgccuacguguucgugggcaccagccgguacuccaagaaguucaagcccgagaucgccauccgcccgaagguccgggaccaggagggccgcaugaacuacuacuggacccugguggagcccggggacaagaucaccuucgaggcgacgggcaaccucguggucccccgguacgccuucaccauggagcgcaacgccgggagcggcaucaucaucuccgacacccccgugcacgacugcaacaccacgugccagaccccggagggcgccaucaacaccagccugcccuuccagaacauccaccccaucaccaucgggaagugccccaaguacgugaaguccacgaagcugcggcucgccaccggccugcgcaacgucccgagcauccagucccgggggcuguucggcgcgaucgccggguucaucgagggcggcuggaccgggaugguggacggcugguacggguaccaccaccagaacgagcagggcagcggguacgccgccgaccucaaguccacccagaacgccaucgacaagaucacgaacaaggugaacagcgucaucgagaagaugaacacccaguucaccgcggugggcaaggaguucaaccaccuggagaagcgcaucgagaaccugaacaagaaggucgacgacggcuuccucgacaucuggaccuacaacgccgagcugcuggugcuccuggagaacgagcggacgcuggacuaccacgacuccaacgugaagaaccucuacgagaagguccgcaaccagcugaagaccaacgccaaggagaucgggaacggcugcuucgaguucuaccacaagugcgacaacacgugcauggagagcgugaagaacgggaccuacgacuaccccaaguacuccgaggaggccaagcugaaccgggagaagaucgacggcgugaagcucgagagcacccgcaucuaccagauccuggccaucuacuccaccgucgcgagcucccuggugcucguggucagccugggggccaucagcuucuggaugugcuccaacggcagccugcagugccggaucugcaucuga

SEQ ID NO: 75918 - RNA, 1701 nt, Artificial Sequence; identical to SEQ ID NO: 75045
  derived and/or modified CDS sequence (opt1) from hemagglutinin__InfluenzaA__AHV83766

SEQ ID NO: 75919 - RNA, 1701 nt, Artificial Sequence; identical to SEQ ID NO: 74064
  derived and/or modified CDS sequence (opt1) from hemagglutinin__InfluenzaA__AHV83767

SEQ ID NO: 75920 - RNA, 1701 nt, Artificial Sequence
  derived and/or modified CDS sequence (opt1) from hemagglutinin__InfluenzaA__AHV83768
augaaggccauccuggugguccuccuguacaccuucaccacggccaacgcggacacccugugcaucggcuaccacgccaacaacagcaccgacaccguggacacggugcucgagaagaacgucaccgugacccacuccgugaaccugcuggaggacaagcacaacgggaagcucugcaagcugcgcggcgucgcgccccugcaccucgggaagugcaacaucgccggcuggauccuggggaacccggagugcgagagccuguccaccgccagcuccuggagcuacaucguggagacguccagcuccgacaacgggaccugcuaccccggcgacuucaucaacuacgaggagcuccgggagcagcugagcuccgugagcuccuucgagcgcuucgagaucuuccccaagaccagcuccuggcccaaccacgacagcaacaagggggucaccgccgccugcccgcacgccggcgccaaguccuucuacaagaaccugaucuggcucgugaagaaggggaacagcuaccccaagcugucccagagcuacaucaacgacaagggcaaggaggugcugguccucugggggauccaccaccccagcacgaccgcggaccagcagucccuguaccagaacgccgacgccuacguguucgugggcaccagccgguacuccaagaaguucaagcccgagaucgccauccgcccgaagguccgggaccaggagggccgcaugaacuacuacuggacccugcucgagcccggggacaagaucacguucgaggccaccggcaaccugguggugccccgguacgcguucaccauggagcgcaacgccgggagcggcaucaucaucuccgacacccccguccacgacugcaacacgaccugccagaccccggagggcgccaucaacaccagccugcccuuccagaacauccaccccaucacgaucgggaagugccccaaguacgugaaguccaccaagcuccggcuggccaccggccugcgcaacgugccgagcauccagucccggggccucuucggcgccaucgcgggguucaucgagggcggcuggaccgggauggucgacggcugguacggguaccaccaccagaacgagcagggcagcggguacgccgccgaccugaaguccacgcagaacgccaucgacaagaucaccaacaaggugaacagcgugaucgagaagaugaacacccaguucaccgccgucggcaaggaguucaaccaccuggagaagcgcaucgagaaccucaacaagaagguggacgacggcuuccuggacaucuggacguacaacgcggagcugcucguccugcuggagaacgagcggacccucgacuaccacgacuccaacgugaagaaccuguacgagaaggugcgcaaccagcugaagaacaacgccaaggagaucgggaacggcugcuucgaguucuaccacaagugcgacaacacgugcauggacagcgucaagaacgggaccuacgacuaccccaaguacuccgaggaggccaagcucaaccgggagaagaucgacggcgugaagcuggagagcacccgcaucuaccagauccuggccaucuacuccaccguggccagcucccucguccugguggugagccugggggcgaucagcuucuggaugugcuccaacggcagccuccagugccggaucugcaucuga

SEQ ID NO: 75921 - RNA, 1701 nt, Artificial Sequence; identical to SEQ ID NO: 75022
  derived and/or modified CDS sequence (opt1) from hemagglutinin__InfluenzaA__AHV83770

SEQ ID NO: 75922 - RNA, 1701 nt, Artificial Sequence
  derived and/or modified CDS sequence (opt1) from hemagglutinin__InfluenzaA__AHV83771
augaaggccauccuggugguccuccuguacaccuucgccaccgcgaacgccgacacgcugugcaucggcuaccacgccaacaacagcaccgacaccguggacaccgugcucgagaagaacgucacggugacccacuccgugaaccugcuggaggacaagcacaacgggaagcucugcaagcugcgcggcgucgcgccccugcaccucgggaagugcaacaucgccggcuggauccuggggaacccggagugcgagagccuguccaccgccagcuccuggagcuacaucguggagaccuccagcuccgacaacggcacgugcuaccccggcgacuucaucaacuacgaggagcuccgggagcagcugagcuccgugagcuccuucgagcgcuucgagaucuuccccaagaccagcuccuggcccaaccacgacagcaacaagggggucaccgccgccugcccgcacgccggcgcgaaguccuucuacaagaaccugaucuggcucgugaagaaggggaacagcuaccccaagcugucccagagcuacaucaacgacaagggcaaggaggugcugguccucugggggauccaccaccccagcaccacgaccgaccagcagucccuguaccagaacgccgacgccuacguguucgugggcaccagccgguacuccaagaaguucaagcccgagaucgccauccgcccgaagguccgggaccaggagggccgcaugaacuacuacuggacccugguggagcccggggacaagaucacguucgaggccaccggcaaccucguggucccccgguacgcguucaccauggagcgcaacgccgggagcggcaucaucaucuccgacacccccgugcacgacugcaacacgaccugccagaccccggagggcgccaucaacaccagccugcccuuccagaacauccaccccaucacgaucgggaagugccccaaguacgugaaguccaccaagcugcggcucgccaccggccugcgcaacgucccgagcauccagucccgggggcuguucggcgccaucgcgggguucaucgagggcggcuggaccgggaugguggacggcugguacggguaccaccaccagaacgagcagggcagcggguacgccgccgaccagaaguccacgcagaacgccaucgacaagaucaccaacaaggugaacagcgucaucgagaagaugaacacccaguucaccgccgugggcaaggaguucaaccaccucgagaagcgcaucgagaaccugaacaagaaggucgacgacggcuuccuggacaucuggacguacaacgcggagcuccuggugcugcucgagaacgagcggacccuggacuaccacgacuccaacgugaagaaccuguacgagaagguccgcaaccagcucaagaacaacgccaaggagaucgggaacggcugcuucgaguucuaccacaagugcgacaacacgugcauggagagcgugaagaacgggaccuacgacuaccccaaguacuccgaggaggccaagcugaaccgggagaagaucgacggcgugaagcuggagagcacccgcaucuaccagauccucgccaucuacuccaccgucgccagcucccuggugcugguggucagccucggggcgaucagcuucuggaugugcuccaacggcagccugcagugccggaucugcaucuga

SEQ ID NO: 75923 - RNA, 1701 nt, Artificial Sequence; identical to SEQ ID NO: 74064
  derived and/or modified CDS sequence (opt1) from hemagglutinin__InfluenzaA__AHV83772

SEQ ID NO: 75924 - RNA, 1701 nt, Artificial Sequence; identical to SEQ ID NO: 74064
  derived and/or modified CDS sequence (opt1) from hemagglutinin__InfluenzaA__AHV83773

SEQ ID NO: 75925 - RNA, 1701 nt, Artificial Sequence; identical to SEQ ID NO: 74064
  derived and/or modified CDS sequence (opt1) from hemagglutinin__InfluenzaA__AHV83774

SEQ ID NO: 75926 - RNA, 1701 nt, Artificial Sequence
  derived and/or modified CDS sequence (opt1) from hemagglutinin__InfluenzaA__AHV83775
augaaggccauccuggugguccuccuguacaccuucgccaccgcgaacgccgacacgcugugcaucggcuaccacgccaacaacagcaccgacaccguggacaccgugcucgagaagaacgucacggugacccacuccgugaaccugcuggaggacaagcacaacgggaagcucugcaagcugcgcggcgucgcgccccugcaccucgggaagugcaacaucgccggcuggauccuggggaacccggagugcgagagccuguccaccgccagcuccuggagcuacaucguggagaccuccagcuccgacaacggcacgugcuaccccggcgacuucaucaacuacgaggagcuccgggagcagcugagcuccgugagcuccuucgagcgcuucgagaucuuccccaagaccagcuccuggcccaaccacgacagcaacaagggggucaccgccgccugcccgcacgccggcgcgaaguccuucuacaagaaccugaucuggcucgugaagaaggggaacagcuaccccaagcugucccagagcuacaucaacgacaagggcaaggaggugcugguccucugggggauccaccaccccagcaccacggccgaccagcagucccuguaccagaacgccgacgccuacguguucgugggcaccagccgguacuccaagaaguucaagcccgagaucgccauccgcccgaagguccgggaccaggagggccgcaugaacuacuacuggacccugguggagcccggggacaagaucaccuucgaggcgacgggcaaccucguggucccccgguacgccuucaccauggagcgcaacgccgggagcggcaucaucaucuccgacacccccgugcacgacugcaacaccacgugccagaccccggagggcgccaucaacaccagccugcccuuccagaacauccaccccaucaccaucgggaagugccccaaguacgugaaguccacgaagcugcggcucgccaccggccugcgcaacaucccgagcauccagucccgggggcuguucggcgcgaucgccggguucaucgagggcggcuggaccgggauggucgacggcugguacggguaccaccaccagaacgagcagggcagcggguacgccgccgaccucaaguccacccagaacgccaucgacaagaucacgaacaaggugaacagcgugaucgagaagaugaacacccaguucaccgcggucggcaaggaguucaaccaccuggagaagcgcaucgagaaccugaacaagaagguggacgacggcuuccucgacaucuggaccuacaacgccgagcugcugguccuccuggagaacgagcggacgcuggacuaccacgacuccaacgugaagaaccucuacgagaaggugcgcaaccagcugaagaacaacgccaaggagaucgggaacggcugcuucgaguucuaccacaagugcgacaacacgugcauggagagcgucaagaacgggaccuacgacuaccccaaguacuccgaggaggccaagcugaaccgggagaagaucgacggcgugaagcucgagagcacccgcaucuaccagauccuggccaucuacuccaccguggcgagcucccugguccucguggugagccugggggccaucagcuucuggaugugcuccaacggcagccugcagugccggaucugcaucuga

SEQ ID NO: 75927 - RNA, 1701 nt, Artificial Sequence; identical to SEQ ID NO: 74064
  derived and/or modified CDS sequence (opt1) from hemagglutinin__InfluenzaA__AHV83776

SEQ ID NO: 75928 - RNA, 1701 nt, Artificial Sequence
  derived and/or modified CDS sequence (opt1) from hemagglutinin__InfluenzaA__AHV83777
augaaggccauccuggugguccuccuguacaccuucgccaccgcgaacgccgacacgcugugcaucggcuaccacgccaacaacagcaccgacaccguggacaccgugcucgagaagaacgucacggugacccacuccgugaaccugcuggaggacaagcacaacgggaagcucugcaagcugcgcggcgucgcgccccugcaccucgggaagugcaacaucgccggcuggauccuggggaacccggagugcgagagccuguccaccgccagcuccuggagcuacaucguggagaccuccagcuccgacaacggcacgugcuaccccggcgacuucaucaacuacgaggagcuccgggagcagcugagcuccgugagcuccuucgagcgcuucgagaucuuccccaagaccagcuccuggcccaaccacgacagcaacaagggggucaccgccgccugcccgcacgccggcgcgaaguccuucuacaagaaccugaucuggcucgugaagaaggggaacagcuaccccaagcugucccagagcuacaucaacgacaagggcaaggaggugcugguccucugggggauccaccaccccagcaccacggccgaccagcagucccuguaccagaacgccgacgccuacguguucgugggcaccagccgguacuccaagaaguucaagcccgagaucgccauccgcccgaagguccgggaccaggagggccgcaugaacuacuacuggacccugguggagcccggggacaagaucaccuucgaggcgacgggcaaccucguggucccccgguacgccuucaccauggagcgcaacgccgggagcggcaucaucaucuccgacacccccgugcacgacugcaacaccacgugccagaccccggagggcgccaucaacaccagccugcccuuccagaacauccaccccaucaccaucgggaagugccccaaguacgugaaguccacgaagcugcggcucgccaccggccugcgcaacaucccgagcauccagucccgggggcuguucggcgcgaucgccggguucaucgagggcggcuggaccgggauggucgacggcugguacggguaccaccaccagaacgagcagggcagcggguacgccgccgaccucaaguccacccagaacgccaucgacaagaucacgaacaaggugaacagcgugaucgagaagaugaacacccaguucaccgcggucggcaaggaguucaaccaccuggagaagcgcaucgagaaccugaacaagaagguggacgacggcuuccucgacaucuggaccuacaacgccgagcugcugguccuccuggagaacgagcggacgcuggacuaccacgacuccaacgugaagaaccucuacgagaaggugcgcaaccagcugaagaacaacgccaaggagaucgggaacggcugcuucgaguucuaccacaagugcgacaacacgugcauggagagcgucaagaacgggaccuacgacuaccccaaguacuccgaggaggccaagcugaaccgggagaagaucgacggcgugaagcucgagagcacccgcaucuaccagauccuggccaucuacuccaccguggcgagcucccugguccucguggugagccugggggccaucugcuucuggaugugcagcaacggcucccugcagugccggaucugcaucuga

SEQ ID NO: 75929 - RNA, 1701 nt, Artificial Sequence
  derived and/or modified CDS sequence (opt1) from hemagglutinin__InfluenzaA__AHV83778
augaaggccauccuggugguccuccuguacaccuucaccacggccaacgcggacacccugugcaucggcuaccacgccaacaacagcaccgacaccguggacacggugcucgagaagaacgucaccgugacccacuccgugaaccugcuggaggacaagcacaacgggaagcucugcaagcugcgcggcgucgcgccccugcaccucgggaagugcaacaucgccggcuggauccuggggaacccggagugcgagagccuguccaccgccagcuccuggagcuacaucguggagacguccagcuccgacaacgggaccugcuaccccggcgacuucaucaacuacgaggagcuccgggagcagcugagcuccgugagcuccuucgagcgcuucgagaucuuccccaagaccagcuccuggcccaaccacgacagcaacaagggcgucaccgccgccugcccgcacgccggcgccaaguccuucuacaagaaccugaucuggcucgugaagaaggggaacagcuaccccaagcugucccagagcuacaucaacgacaagggcaaggaggugcugguccucugggggauccaccaccccagcacgaccgcggaccagcagucccuguaccagaacgccgacgccuacguguucgugggcaccagccgguacuccaagaaguucaagcccgagaucgccauccgcccgaagguccgggaccaggagggccgcaugaacuacuacuggacccugguggagcccggggacaagaucacguucgaggccaccggcaaccucguggucccccgguacgcguucaccauggagcgcaacgccgggagcggcaucaucaucuccgacacccccguguacgacugcaacacgaccugccagaccccggagggcgccaucaacaccagccugcccuuccagaacauccaccccaucacgaucgggaagugccccaaguacgugaaguccaccaagcugcggcucgccaccggccugcgcaacgucccgagcauccagucccgggggcuguucggcgccaucgcgggguucaucgagggcggcuggaccgggaugguggacggcugguacggguaccaccaccagaacgagcagggcagcggguacgccgccgaccucaaguccacgcagaacgccaucgacaagaucaccaacaaggugaacagcgucaucgagaagaugaacacccaguucaccgccgugggcaaggaguucaaccaccuggagaagcgcaucgagaaccugaacaagaaggucgacgacggcuuccucgacaucuggacguacaacgcggagcugcuggugcuccuggagaacgagcggacccuggacuaccacgacuccaacgugaagaaccucuacgagaagguccgcaaccagcugaagaacaacgccaaggagaucgggaacggcugcuucgaguucuaccacaagugcgacaacacgugcauggagagcgugaagaacgggaccuacgacuaccccaaguacuccgaggaggccaagcugaaccgggagaagaucgacggcgugaagcucgagagcacccgcaucuaccagauccuggccaucuacuccaccgucgccagcucccuggugcucguggucagccugggggcgaucagcuucuggaugugcuccaacggcagccugcagugccggaucugcaucuga

SEQ ID NO: 75930 - RNA, 1701 nt, Artificial Sequence
  derived and/or modified CDS sequence (opt1) from hemagglutinin__InfluenzaA__AHV83779
augaaggccauccuggugguccuccuguacaccuucgccaccacgaacgcggacacccugugcaucggcuaccacgccaacaacagcaccgacaccguggacacggugcucgagaagaacgucaccgugacccacuccgugaaccugcuggaggacaagcacaacgggaagcucugcaagcugcgcggcgucgcgccccugcaccucgggaagugcaacaucgccggcuggauccuggggaacccggagugcgagagccuguccaccgccagcuccuggagcuacaucguggagacguccagcuccgacaacgggaccugcuaccccggcgacuucaucaacuacgaggagcuccgggagcagcugagcuccgugagcuccuucgagcgcuucgagaucuuccccaagaccagcuccuggcccaaccacgacagcaacaagggcgucaccgccgccugcccgcacgccggcgccaaguccuucuacaagaaccugaucuggcucgugaagaaggggaacagcuaccccaagcugucccagagcuacaucaacgacaagggcaaggaggugcugguccucugggggauccaccaccccagcacgaccgcggaccagcagucccuguaccagaacgccgacgccuacguguucgugggcaccagccgguacuccaagaaguucaagcccgagaucgccauccgcccgaagguccgggaccaggagggccgcaugaacuacuacuggacccugguggagcccggggacaagaucacguucgaggccaccggcaaccucguggucccccgguacgcguucaccauggagcgcaacgccgggagcggcaucaucaucuccgacacccccgugcacgacugcaacacgaccugccagaccccggagggcgccaucaacaccagccugcccuuccagaacauccaccccaucacgaucgggaagugccccaaguacgugaaguccaccaagcugcggcucgccaccggccugcgcaacgucccgagcauccagucccgggggcuguucggcgccaucgcgggguucaucgagggcggcuggaccgggaugguggacggcugguacggguaccaccaccagaacgagcagggcagcggguacgccgccgaccucaaguccacgcagaacgccaucgacaagaucaccaacaaggugaacagcgucaucgagaagaugaacacccaguucaccgccgugggcaaggaguucaaccaccuggagaagcgcaucgagaaccugaacaagaaggucgacgacggcuuccucgacaucuggacguacaacgcggagcugcuggugcuccuggagaacgagcggacccuggacuaccacgacuccaacgugaagaaccucuacgagaagguccgcaaccagcugaagaacaacgccaaggagaccgggaacggcugcuucgaguucuaccacaagugcgacaacacgugcauggagagcgugaagaacgggaccuacgacuaccccaaguacuccgaggaggccaagcugaaccgggagaagaucgacggcgugaagcucgagagcacccgcaucuaccagauccuggccaucuacuccaccgucgccagcucccuggugcucguggucagccugggggcgaucagcuucuggaugugcuccaacggcagccugcagugccggaucugcaucuga

SEQ ID NO: 75931 - RNA, 1701 nt, Artificial Sequence
  derived and/or modified CDS sequence (opt1) from hemagglutinin__InfluenzaA__AHV83780
augaaggccauccuggugguccuccuguacaccuucgccaccgcgaacgccgacacgcugugcaucggcuaccacgccaacaacagcaccgacaccguggacaccgugcucgagaagaacgucacggugacccacuccgugaaccugcuggaggacaagcacaacgggaagcucugcaagcugcgcggcgucgcgccccugcaccucgggaagugcaacaucgccggcuggauccuggggaacccggagugcgagagccuguccaccgccagcuccuggagcuacaucguggagaccuccagcuccgacaacggcacgugcuaccccggcgacuucaucaacuacgaggagcuccgggagcagcugagcuccgugagcuccuucgagcgcuucgagaucuuccccaagaccagcuccuggcccaaccacgacagcaacaagggggucaccgccgccugcccgcacgccggcgcgaaguccuucuacaagaaccugaucuggcucgugaagaaggggaacagcuaccccaagcugcggcaguccuacaucaacgacaagggcaaggaggugcugguccucugggggauccaccaccccagcaccacgaccgaccagcagagccuguaccagaacgccgacgccuacguguucgugggcaccucccgcuacagcaagaaguucaagcccgagaucgccauccggccgaagguccgcgaccaggagggccggaugaacuacuacuggacccugguggagcccggggacaagaucacguucgaggccaccggcaaccucguggucccccgcuacgcguucaccauggagcggaacgccggguccggcaucaucaucagcgacacccccgugcacgacugcaacacgaccugccagaccccggagggcgccaucaacaccucccugcccuuccagaacauccaccccaucacgaucgggaagugccccaaguacgucaagagcaccaagcugcgccucgccaccggccugcggaacgugccguccauccagagccgcgggcuguucggcgccaucgcgggguucaucgagggcggcuggaccgggaugguggacggcugguacggguaccaccaccagaacgagcagggcuccggguacgccgccgaccucaagagcacgcagaacgccaucgacaagaucaccaacaaggugaacuccgucaucgagaagaugaacacccaguucaccgccgugggcaaggaguucaaccaccuggagaagcggaucgagaaccugaacaagaaggucgacgacggcuuccucgacaucuggacguacaacgcggagcugcuggugcuccuggagaacgagcgcacccuggacuaccacgacagcaacgugaagaaccucuacgagaagguccggaaccagcugaagaacaacgccaaggagaucgggaacggcugcuucgaguucuaccacaagugcgacaacacgugcauggaguccgugaagaacgggaccuacgacuaccccaaguacagcgaggaggccaagcugaaccgcgagaagaucgacggcgugaagcucgaguccacccggaucuaccagauccuggccaucuacagcaccgucgccuccagccuggugcucguggucucccugggggcgaucagcuucuggaugugcagcaacggcucccugcagugccgcaucugcaucuga

SEQ ID NO: 75932 - RNA, 1701 nt, Artificial Sequence; identical to SEQ ID NO: 74064
  derived and/or modified CDS sequence (opt1) from hemagglutinin__InfluenzaA__AHV83781

SEQ ID NO: 75933 - RNA, 1701 nt, Artificial Sequence
  derived and/or modified CDS sequence (opt1) from hemagglutinin__InfluenzaA__AHV83782
augaaggccauccuggugguccuccuguacacccuggccaccgcgaacgccgacacgcucugcaucggcuaccacgccaacaacagcaccgacaccguggacaccgugcuggagaagaacgucacggugacccacuccgugaaccugcucgaggacaagcacaacgggaagcugugcaagcugcgcggcgucgcgccccuccaccuggggaagugcaacaucgccggcuggauccuggggaacccggagugcgagagccucuccaccgccagcuccuggagcuacaucguggagaccuccagcuccgacaacggcacgugcuaccccggcgacuucaucaacuacgaggagcugcgggagcagcugagcuccgugagcuccuucgagcgcuucgagaucuuccccaagaccagcuccuggcccaaccacgacagcaacaagggggucaccgccgccugcccgcacgccggcgcgaaguccuucuacaagaaccucaucuggcuggugaagaaggggaacagcuaccccaagcugucccagagcuacaucaacgacaagggcaaggaggugcucguccugugggggauccaccaccccagcaccacggccgaccagcagucccuguaccagaacgccgacgccuacguguucgugggcaccagccgguacuccaagaaguucaagcccgagaucgccauccgcccgaagguccgggaccaggagggccgcaugaacuacuacuggacccucguggagcccggggacaagaucaccuucgaggcgacgggcaaccugguggcgccccgguacgccuucaccauggagcgcaacgccgggagcggcaucaucaucuccgacacccccguccacgacugcaacaccacgugccagaccccggagggcgccaucaacaccagccugcccuuccagaacauccaccccaucaccaucgggaagugccccaaguacgugaaguccacgaagcuccggcuggccaccggccugcgcaacgugccgagcauccagucccggggccucuucggggccaucgccggguucaucgagggcggcuggaccgggauggucgacggcugguacggguaccaccaccagaacgagcagggcagcggguacgccgccgaccugaaguccacccagaacgcgaucgacaagaucacgaacaaggugaacagcgugaucgagaagaugaacacccaguucaccgccgucggcaaggaguucaaccaccuggagaagcgcaucgagaaccucaacaagaagguggacgacggcuuccuggacaucuggaccuacaacgccgagcugcucguccugcuggagaacgagcggacgcucgacuaccacgacuccaacgugaagaaccuguacgagaaggugcgcaaccagcugaagaacaacgccaaggagaucgggaacggcugcuucgaguucuaccacaagugcgacaacacgugcauggagagcgucaagaacgggaccuacgacuaccccaaguacuccgaggaggccaagcucaaccgggagaagaucgacggcgugaagcuggagagcacccgcaucuaccagauccuggcgaucuacuccaccguggccagcucccucguccugguggugagccugggggccaucagcuucuggaugugcuccaacggcagccuccagugccggaucugcaucuga

SEQ ID NO: 75934 - RNA, 1701 nt, Artificial Sequence
  derived and/or modified CDS sequence (opt1) from hemagglutinin__InfluenzaA__AHV83783
augaaggccauccuggugguccuccuguacaccuucgccaccgcgaacgccgacacgcugugcaucggcuaccacgccaacaacagcaccgacaccguggacaccgugcucgagaagaacaucacggucacccacuccgugaaccugcuggaggacaagcacaacgggaagcucugcaagcugcgcggcguggcgccccugcaccucgggaagugcaacaucgccggcuggauccuggggaacccggagugcgagagccuguccaccgccagcuccuggagcuacaucgucgagaccuccagcuccgacaacggcacgugcuaccccggcgacuucaucaacuacgaggagcuccgggagcagcugagcuccgugagcuccuucgagcgcuucgagaucuuccccaagaccagcuccuggcccaaccacgacagcaacaagggggugaccgccgccugcccgcacgccggcgcgaagggguucuacaagaaccugaucuggcucgucaagaagggcaacuccuaccccaagcugcggcagagcuacaucaacgacaaggggaaggaggugcuggugcucuggggcauccaccaccccuccaccacgaccgaccagcagagccuguaccagaacgccgacgccuacgucuucgugggcaccagccgcuacuccaagaaguucaagcccgagaucgccauccggccgaaggugcgcgaccaggaggggcggaugaacuacuacuggacccuggucgagcccggcgacaagaucacguucgaggccaccgggaaccucguggugccccgcuacgcguucaccauggagcggaacgccggcagcggcaucaucaucuccgacacccccguccacgacugcaacacgaccugccagaccccggagggggccaucaacaccagccugcccuuccagaacauccaccccaucacgaucggcaagugccccaaguacgugaaguccaccaagcugcgccucgccaccgggcugcggaacgugccgagcauccagucccgcggccuguucggggccaucgcgggcuucaucgagggcggguggaccggcauggucgacgggugguacggcuaccaccaccagaacgagcaggggagcggcuacgccgccgaccucaaguccacgcagaacgccaucgacaagaucaccaacaaggugaacagcgugaucgagaagaugaacacccaguucaccgccgucggcaaggaguucaaccaccuggagaagcggaucgagaaccugaacaagaagguggacgacggguuccucgacaucuggacguacaacgcggagcugcugguccuccuggagaacgagcgcacccuggacuaccacgacuccaacgugaagaaccucuacgagaaggugcggaaccagcugaagaacaacgccaaggagaucggcaacgggugcuucgaguucuaccacaagugcgacaacacgugcauggagagcgucaagaacggcaccuacgacuaccccaaguacuccgaggaggccaagcugaaccgcgagaagaucgacggggugaagcucgagagcacccggaucuaccagauccuggccaucuacuccaccguggccagcucccugguccucguggugagccugggcgcgaucuccuucuggaugugcagcaacggcagccugcagugccgcaucugcaucuga

SEQ ID NO: 75935 - RNA, 1701 nt, Artificial Sequence; identical to SEQ ID NO: 74064
  derived and/or modified CDS sequence (opt1) from hemagglutinin__InfluenzaA__AHV83784

SEQ ID NO: 75936 - RNA, 1701 nt, Artificial Sequence; identical to SEQ ID NO: 74064
  derived and/or modified CDS sequence (opt1) from hemagglutinin__InfluenzaA__AHV83785

SEQ ID NO: 75937 - RNA, 1701 nt, Artificial Sequence; identical to SEQ ID NO: 74064
  derived and/or modified CDS sequence (opt1) from hemagglutinin__InfluenzaA__AHV83787

SEQ ID NO: 75938 - RNA, 1701 nt, Artificial Sequence
  derived and/or modified CDS sequence (opt1) from hemagglutinin__InfluenzaA__AHV83788
augaaggccauccuggugguccuccuguacaccuucgccaccgcgaacgccgacacgcugugcaucggcuaccacgccaacaacagcaccgacaccguggacaccgugcucgagaagaacgucacggugacccacuccgugaaccugcuggaggacaagcacaacgggaagcucugcaagcugcgcggcgucagcccccugcaccucgggaagugcaacaucgccggcuggauccuggggaacccggagugcgagucccugagcaccgccuccagcugguccuacaucguggagaccagcuccagcgacaacggcacgugcuaccccggcgacuucgugaacuacgaggagcuccgggagcagcuguccagcgucuccagcuucgagcgcuucgagaucuuccccaagaccuccagcuggcccaaccacgacuccaacaagggggugaccgcggccugcccgcacgccggcgccaagagcuucuacaagaaccugaucuggcucgugaagaaggggaacuccuaccccaagcugagccagagcuacaucaacgacaagggcaaggagguccuggugcucugggggauccaccaccccuccaccacggcggaccagcagagccuguaccagaacgccgacgccuacguguucgucggcaccucccgguacagcaagaaguucaagcccgagaucgccauccgcccgaaggugcgggaccaggagggccgcaugaacuacuacuggacccugguggagcccggggacaagaucaccuucgaggccacgggcaaccucgucgugccccgguacgcguucaccauggagcgcaacgccggguccggcaucaucaucagcgacacccccgugcacgacugcaacaccacgugccagaccccggagggcgccaucaacaccucccugcccuuccagaacauccaccccaucaccaucgggaagugccccaaguacgucaagagcacgaagcugcggcucgccaccggccugcgcaacgugccguccauccagagccgggggcuguucggcgccaucgcgggguucaucgagggcggcuggaccgggaugguggacggcugguacggguaccaccaccagaacgagcagggcuccggguacgccgccgaccucaagagcacccagaacgccaucgacaagaucacgaacaaggucaacuccgugaucgagaagaugaacacccaguucaccgccgucggcaaggaguucaaccaccuggagaagcgcaucgagaaccugaacaagaagguggacgacggcuuccucgacaucuggaccuacaacgcggagcugcuggugcuccuggagaacgagcggacgcuggacuaccacgacagcaacgucaagaaccucuacgagaaggugcgcaaccagcugaagaacaacgccaaggagaucgggaacggcugcuucgaguucuaccacaagugcgacaacacgugcauggaguccgugaagaacgggaccuacgacuaccccaaguacagcgaggaggccaagcugaaccgggagaagaucgacggcgucaagcucgaguccacccgcaucuaccagauccuggccaucuacagcaccguggccuccagccuggugcucgucgugagccugggggcgaucuccuucuggaugugcagcaacggcucccugcagugccggaucugcaucuga

SEQ ID NO: 75939 - RNA, 1701 nt, Artificial Sequence; identical to SEQ ID NO: 75926
  derived and/or modified CDS sequence (opt1) from hemagglutinin__InfluenzaA__AHV83789

SEQ ID NO: 75940 - RNA, 1701 nt, Artificial Sequence; identical to SEQ ID NO: 74064
  derived and/or modified CDS sequence (opt1) from hemagglutinin__InfluenzaA__AHV83790

SEQ ID NO: 75941 - RNA, 1701 nt, Artificial Sequence; identical to SEQ ID NO: 74064
  derived and/or modified CDS sequence (opt1) from hemagglutinin__InfluenzaA__AHV83791

SEQ ID NO: 75942 - RNA, 1701 nt, Artificial Sequence; identical to SEQ ID NO: 74064
  derived and/or modified CDS sequence (opt1) from hemagglutinin__InfluenzaA__AHV83792

SEQ ID NO: 75943 - RNA, 1701 nt, Artificial Sequence
  derived and/or modified CDS sequence (opt1) from hemagglutinin__InfluenzaA__AHV83793
augaaggccauccuggugguccuccuguacaccuucgccaccgcgaacgccgacacgcugugcaucggcuaccacgccaacaacagcaccgacaccguggacaccgugcucgagaagaacgucacggugacccacuccgugaaccugcuggaggacaagcacaacgggaagcucugcaagcugcgcggcgucgcgccccugcaccucgggaagugcaacaucgccggcuggauccuggggaacccggagugcgagagccuguccaccgccagcuccuggagcuacaucguggagaccuccagcuccgacaacggcacgugcuaccccggcgacuucaucaacuacgaggagcuccgggagcagcugagcuccgugagcuccuucgagaaguucgagaucuuccccaagaccagcuccuggcccaaccacgacagcaacaagggggucaccgccgccugcccgcacgccggcgcgaaguccuucuacaagaaccugaucuggcucgugaagaaggggaacagcuaccccaagcugucccagagcuacaucaacgacaagggcaaggagauccuggugcucugggggauccaccaccccagcaccacggccgaccagcagucccuguaccagaacgccgacgccuacgucuucgugggcaccagccgcuacuccaagaaguucaagcccgagaucgccauccggccgaaggugcgcgaccaggagggccggaugaacuacuacuggacccuggucgagcccggggacaagaucaccuucgaggcgacgggcaaccucguggugccccgcuacgccuucaccauggagcggaacgccgggagcggcaucaucaucuccgacacccccguccacgacugcaacaccacgugccagaccccggagggcgccaucaacaccagccugcccuuccagaacauccaccccaucaccaucgggaagugccccaaguacgugaaguccacgaagcugcgccucgccaccggccugcggaacgugccgagcauccagucccgcgggcuguucggcgcgaucgccggguucaucgagggcggcuggaccgggauggucgacggcugguacggguaccaccaccagaacgagcagggcagcggguacgccgccgaccagaaguccacccagaacgccaucgacaagaucacgaacaaggugaacagcgugaucgagaagaugaacacccaguucaccgcggucggcaaggaguucaaccaccucgagaagcggaucgagaaccugaacaagaagguggacgacggcuuccuggacaucuggaccuacaacgccgagcuccugguccugcucgagaacgagcgcacgcuggacuaccacgacuccaacgugaagaaccuguacgagaaggugcggaaccagcucaagaacaacgccaaggagaucgggaacggcugcuucgaguucuaccacaagugcgacaacacgugcauggagagcgucaagaacgggaccuacgacuaccccaaguacuccgaggaggccaagcugaaccgcgagaagaucgacggcgugaagcuggagagcacccggaucuaccagauccucgccaucuacuccaccguggcgagcucccugguccugguggugagccucggggccaucagcuucuggaugugcuccaacggcagccugcagugccgcaucugcaucuga

SEQ ID NO: 75944 - RNA, 1701 nt, Artificial Sequence
  derived and/or modified CDS sequence (opt1) from hemagglutinin__InfluenzaA__AHV83794
augaaggccauccuggugguccuccuguacaccuucgccaccgcgaacgccgacacgcugugcaucggcuaccacgccaacaacagcaccgacaccguggacaccgugcucgagaagaacgucacggugacccacuccgugaaccugcuggaggacaagcacaacgggaagcucugcaagcugcgcggcgucgcgccccugcaccucgggaagugcaacaucgccggcuggauccuggggaacccggagugcgagagccuguccaccgccagcuccuggagcuacaucguggagaccuccagcuccgacaacggcacgugcuaccccggcgacuucaucaacuacgaggagcuccgggagcagcugagcuccgugagcuccuucgagcgcuucgagaucuuccccaagaccagcuccuggcccaaccacgacagcaacaagggggucaccgccgccugcccgcacgccggcgcgaaguccuucuacaagaaccugaucuggcucgugaagaaggggaacagcuaccccaagcugucccagagcuacaucaacgacaagggcaaggaggugcugguccucugggggauccaccaccccagcaccacggccgaccagcagucccuguaccagaacgccgacgccuacguguucgugggcaccagccgguacuccaagaaguucaagcccgagaucgccauccgcccgaagguccgggaccaggagggccgcaugaacuacuacuggacccugguggagcccggggacaagaucaccuucgaggcgacgggcaaccucguggucccccgguacgccuucaccauggagcgcaacgccgggagcggcaucaucaucuccgacacccccgugcacgacugcaacaccacgugccagaccccggagggcgccaucaacaccagccugcccuuccagaacauccaccccaucaccaucgggaagugccccaaguacgugaaguccacgaagcugcggcucgccaccggccugcgcaacgucccgagcauccagucccgggggcuguucggcgcgaucgccggguucaucgagggcggcuggaccgggaugguggacggcugguacggguaccaccaccagaacgagcagggcagcggguacgccgccgaccagaaguccacccagaacgccaucgacaagaucacgaacaaggugaacagcgucaucgagaagaugaacacccaguucaccgcggugggcaaggaguucaaccaccucgagaagcgcaucgagaaccugaacaagaaggucgacgacggcuuccuggacaucuggaccuacaacgccgagcuccuggugcugcucgagaacgagcggacgcuggacuaccacgacuccaacgugaagaaccuguacgagaagguccgcaaccagcucaagaacaacgccaaggagaucgggaacggcugcuucgaguucuaccacaagugcgacaacacgugcauggagagcgugaagaacgggaccuacgacuaccccaaguacuccgaggaggccaagcugaaccgggagaagaucgacggcgugaagcuggagagcacccgcaucuaccagauccucgccaucuacuccaccgucgcgagcucccuggugcugguggucagccucggggccaucagcuucuggaugugcuccaacggcagccugcagugccggaucugcaucuga

SEQ ID NO: 75945 - RNA, 1701 nt, Artificial Sequence
  derived and/or modified CDS sequence (opt1) from hemagglutinin__InfluenzaA__AHV83795
augaaggccauccuggugguccuccuguacaccuucgccaccgcgaacgccgacacgcugugcaucggcuaccacgccaacaacagcaccgacaccguggacaccgugcucgagaagaacgucacggugacccacuccgugaaccugcuggaggacaagcacaacgggaagcucugcaagcugcgcggcgucgcgccccugcaccucgggaagugcaacaucgccggcuggauccuggggaacccggagugcgagagccuguccgccgccagcuccuggagcuacaucguggagaccuccagcuccgacaacgggaccugcuaccccggcgacuucaucaacuacgaggagcuccgggagcagcugagcuccgugagcuccuucgagcgcuucgagaucuuccccaagacgagcuccuggcccaaccacgacagcaacaagggcgucaccgccgccugcccgcacgcgggcgccaaguccuucuacaagaaccugaucuggcucgugaagaaggggaacagcuaccccaagcugucccagagcuacaucaacgacaagggcaaggaggugcugguccucugggggauccaccaccccagcaccaccgccgaccagcagucccuguaccagaacgccgacacguacguguucgugggcaccagccgguacuccaagaaguucaagcccgagaucgccauccgcccgaagguccgggaccaggagggccgcaugaacuacuacuggacccugguggagcccggggacaagaucaccuucgaggcgacgggcaaccucguggucccccgguacgccuucaccauggagcgcaacgccgggagcggcaucaucaucuccgacacccccgugcacgacugcaacaccacgugccagaccccggagggcgccaucaacaccagccugcccuuccagaacauccaccccaucaccaucgggaagugccccaaguacgugaaguccacgaagcugcggcucgccaccggccugcgcaacgucccgagcauccagucccgggggcuguucggcgcgaucgccggguucaucgagggcggcuggaccgggaugguggacggcugguacggguaccaccaccagaacgagcagggcagcggguacgccgccgaccagaaguccacccagaacgccaucgacaagaucacgaacaaggugaacagcgucaucgagaagaugaacacccaguucaccgcggugggcaaggaguucaaccaccucgagaagcgcaucgagaaccugaacaagaaggucgacgacggcuuccuggacaucuggaccuacaacgccgagcuccuggugcugcucgagaacgagcggacgcuggacuaccacgacuccaacgugaagaaccuguacgagaagguccgcaaccagcucaagaacaacgccaaggagaucgggaacggcugcuucgaguucuaccacaagugcgacaacacgugcauggagagcgugaagaacgggaccuacgacuaccccaaguacuccgaggaggccaagcugaaccgggagaagaucgacggcgugaagcuggagagcaccaagaucuaccagauccucgccaucuacuccaccgucgcgagcucccuggugcugguggucagccucggggccaucagcuucuggaugugcuccaacggcagccugcagugccgcaucugcaucuga

SEQ ID NO: 75946 - RNA, 1701 nt, Artificial Sequence; identical to SEQ ID NO: 75944
  derived and/or modified CDS sequence (opt1) from hemagglutinin__InfluenzaA__AHV83796

SEQ ID NO: 75947 - RNA, 1701 nt, Artificial Sequence; identical to SEQ ID NO: 74064
  derived and/or modified CDS sequence (opt1) from hemagglutinin__InfluenzaA__AHV83798

SEQ ID NO: 75948 - RNA, 1701 nt, Artificial Sequence; identical to SEQ ID NO: 74064
  derived and/or modified CDS sequence (opt1) from hemagglutinin__InfluenzaA__AHV83799

SEQ ID NO: 75949 - RNA, 1701 nt, Artificial Sequence
  derived and/or modified CDS sequence (opt1) from hemagglutinin__InfluenzaA__AHV83800
augaaggccauccuggugguccuccuguacaccuucgccaccgcgaacgccgacacgcugugcaucggcuaccacgccaacaacagcaccgacaccguggacaccgugcucgagaagaacgucacggugacccacuccgugaaccugcuggaggacaagcacaacgggaagcucugcaagcugcgcggcgucgcgccccugcaccucgggaagugcaacaucgccggcuggauccuggggaacccggagugcgagagccuguccaccgccagcuccuggagcuacaucguggagaccuccagcuccgacaacggcacgugcuaccccggcgacuucaucaacuacgaggagcuccgggagcagcugagcuccgugagcuccuucgagcgcuucgagaucuuccccaagaccagcuccuggcccaaccacgacagcaacaagggggucaccgccgccugcccgcacgccggcgcgaaguccuucuacaagaaccugaucuggcucgugaagaaggggaacagcuaccccaagcugucccagagcuacaucaacgacaagggcaaggaggugcugguccucugggggauccaccaccccagcaccacggccgaccagcagucccuguaccagaacgccgacgccuacguguucgugggcaccagccgguacuccaagaaguucaagcccgagaucgccauccgcccgaagguccgggaccaggagggccgcaugaacuacuacuggacccugguggagcccggggacaagaucaccuucgaggcgacgggcaaccucguggucccccgguacgccuucaccauggagcgcaacgccgggagcggcaucaucaucuccgacacccccgugcacgacugcaacaccacgugccagaccccggagggcgccaucaacaccagccugcccuuccagaacauccaccccaucaccaucgggaagugccccaaguacgugaaguccacgaagcugcggcucgccaccggccugcgcaacgucccgagcauccagucccgggggcuguucggcgcgaucgccggguucaucgagggcggcuggaccgggaugguggacggcugguacggguaccaccaccagaacgagcagggcagcggguacgccgccgaccucaaguccacccagaacgccaucgacaagaucacgaacaaggugaacagcgucaucgagaagaugaacacccaguucaccgcggugggcaaggaguucaaccaccuggagaagcgcaucgagaaccugaacaagaaggucgacgacggcuuccucgacaucuggaccuacaacgccgagcugcuggugcuccuggagaacgagaagacgcuggacuaccacgacuccaacgugaagaaccucuacgagaagguccggaaccagcugaagaacaacgccaaggagaucgggaacggcugcuucgaguucuaccacaagugcgacaacacgugcauggagagcgugaagaacgggaccuacgacuaccccaaguacuccgaggaggccaagcugaaccgcgagaagaucgacggcgugaagcucgagagcacccggaucuaccagauccuggccaucuacuccaccgucgcgagcucccuggugcucguggucagccugggggccaucagcuucuggaugugcuccaacggcagccugcagugccgcaucugcaucuga

SEQ ID NO: 75950 - RNA, 1701 nt, Artificial Sequence
  derived and/or modified CDS sequence (opt1) from hemagglutinin__InfluenzaA__AHV83801
augaaggccauccuggugguccuccuguacaccuucgccaccgcgaacgccgacacgcugugcaucggcuaccacgccaacaacagcaccgacaccguggacaccgugcucgagaagaacgucacggugacccacuccgugaaccugcuggaggacaagcacaacgggaagcucugcaagcugcgcggcgucgcgccccugcaccucgggaagugcaacaucgccggcuggauccuggggaacccggagugcgagagccuguccaccgccagcuccuggagcuacaucguggagaccuccagcuccgacaacggcacgugcuaccccggcgacuucaucaacuacgaggagcuccgggagcagcugagcuccgugagcuccuucgagcgcuucgagaucuuccccaagaccagcuccuggcccaaccacgacagcaacaagggggucaccgccgccugcccgcacgccggcgcgaaguccuucuacaagaaccugaucuggcucgugaagaaggggaacagcuaccccaagcugucccagagcuacaucaacgacaagggcaaggaggugcugguccucugggggauccaccaccccagcaccacggccgaccagcagucccuguaccagaacgccgacgccuacguguucgugggcaccagccgguacuccaagaaguucaagcccgagaucgccauccgcccgaagguccgggaccaggagggccgcaugaacuacuacuggacccugguggagcccggggacaagaucaccuucgaggcgacgggcaaccucguggucccccgguacgccuucaccauggagcgcaacgccgggagcggcaucaucaucuccgacacccccgugcacgacugcaacaccacgugccagaccccggagggcgccaucaacaccagccugcccuuccagaacauccaccccaucaccaucgggaagugccccaaguacgugaaguccacgaagcugcggcucgccaccggccugcgcaacgucccgagcauccagucccgggggcuguucggcgcgaucgccggguucaucgagggcggcuggaccgggaugguggacggcugguacggguaccaccaccagaacgagcagggcagcggguacgccgccgaccagaaguccacccagaacgccaucgacaagaucacgaacaaggugaacagcgucaucgagaagaugaacacccaguucaccgcggugggcaaggaguucaaccaccucgagaagcgcaucgagaaccugaacaagaaggucgacgacggcuuccuggacaucuggaccuacaacgccgagcuccuggugcugcucgagaacgagcggacgcuggacuaccacgacuccaacgugaagaaccuguacgagaagguccgcaaccagcucaagaacaacgccaaggagaucgggaacggcugcuucgaguucuaccacaagugcgacaacacgugcauggagagcgugaagaacgggaccuacgacuaccccaaguacuccgaggaggccaagcugaaccgggagaagaucgacggcgugaagcuggagagcaccaagaucuaccagauccucgccaucuacuccaccgucgcgagcucccuggugcugguggucagccucggggccaucagcuucuggaugugcuccaacggcagccugcagugccgcaucugcaucuga

SEQ ID NO: 75951 - RNA, 1701 nt, Artificial Sequence
  derived and/or modified CDS sequence (opt1) from hemagglutinin__InfluenzaA__AHV83802
augaaggccauccuggugguccuccuguacaccuucgccaccgcgaacgccgacacgcugugcaucggcuaccacgccaacaacagcaccgacaccguggacaccgugcucgagaagaacgucacggugacccacuccgugaaccugcuggaggacaagcacaacgggaagcucugcaagcugcgcggcgucgcgccccugcaccucgggaagugcaacaucgccggcuggauccuggggaacccggagugcgagagccuguccaccgccagcuccuggagcuacaucguggagaccuccagcuccgacaacggcacgugcuaccccggcgacuucaucaacuacgaggagcuccgggagcagcugagcuccgugagcuccuucgagcgcuucgagaucuuccccaagaccagcuccuggcccaaccacgacagcaacaagggggucaccgccgccugcccgcacgccggcgcgaaguccuucuacaagaaccugaucuggcucgugaagaaggggaacagcuaccccaagcugucccagagcuacaucaacgacaagggcaaggaggugcugguccucugggggauccaccaccccagcaccacggccgaccagcagggccuguaccagaacguggacgccuacguguucgucggcaccucccgguacagcaagaaguucaagcccgagaucgccauccgcccgaaggugcgggaccaggaggggcgcaugaacuacuacuggacccugguggagcccggcgacaagaucaccuucgaggccacggggaaccucgucgugccccgguacgcguucaccauggagcgcaacgccggcuccggcaucaucaucagcgacacccccgugcacgacugcaacaccacgugccagaccccggagggggccaucaacaccucccugcccuuccagaacauccaccccaucaccaucggcaagugccccaaguacgucaagagcacgaagcugcggcucgccaccgggcugcgcaacgugccguccauccagagccggggccuguucggggccaucgcgggcuucaucgagggcggguggaccggcaugguggacgggugguacggcuaccaccaccagaacgagcagggguccggcuacgccgccgaccucaagagcacccagaacgccaucgacaagaucacgaacaaggucaacuccgugaucgagaagaugaacacccaguucaccgccgucggcaaggaguucaaccaccuggagaagcgcaucgagaaccugaacaagaagguggacgacggguuccucgacaucuggaccuacaacgcggagcugcuggugcuccuggagaacgagcggacgcuggacuaccacgacagcaacgucaagaaccucuacgagaaggugcgcaaccagcugaagaacaacgccaaggagaucggcaacgggugcuucgaguucuaccacaagugcgacaacacgugcauggaguccgugaagaacggcaccuacgacuaccccaaguacagcgaggaggccaagcugaaccgggagaagaucgacggggucaagcucgaguccacccgcaucuaccagauccuggccaucuacagcaccguggccuccagccuggugcucgucgugucccugggcgcgaucagcuucuggaugugcagcaacggcucccugcagugccggaucugcaucuga

SEQ ID NO: 75952 - RNA, 1701 nt, Artificial Sequence; identical to SEQ ID NO: 74064
  derived and/or modified CDS sequence (opt1) from hemagglutinin__InfluenzaA__AHV83803

SEQ ID NO: 75953 - RNA, 1701 nt, Artificial Sequence; identical to SEQ ID NO: 74064
  derived and/or modified CDS sequence (opt1) from hemagglutinin__InfluenzaA__AHV83804

SEQ ID NO: 75954 - RNA, 1701 nt, Artificial Sequence; identical to SEQ ID NO: 74064
  derived and/or modified CDS sequence (opt1) from hemagglutinin__InfluenzaA__AHV83805

SEQ ID NO: 75955 - RNA, 1701 nt, Artificial Sequence; identical to SEQ ID NO: 75944
  derived and/or modified CDS sequence (opt1) from hemagglutinin__InfluenzaA__AHV83806

SEQ ID NO: 75956 - RNA, 1701 nt, Artificial Sequence
  derived and/or modified CDS sequence (opt1) from hemagglutinin__InfluenzaA__AHV83807
augaaggccauccuggugguccuccuguacaccuucgccaccgcgaacgccgacacgcugugcaucggcuaccacgccaacaacagcaccgacaccguggacaccgugcucgagaaggacgucacggugacccacuccgugaaccugcuggaggacaagcacaacgggaagcucugcaagcugcgcggcgucgcgccccugcaccucgggaagugcaacaucgccggcuggauccuggggaacccggagugcgagagccuguccaccgccagcuccuggagcuacaucguggagaccuccagcuccgacaacggcacgugcuaccccggcgacuucaucaacuacgaggagcuccgggagcagcugagcuccgugagcuccuucgagcgcuucgagaucuuccccaagaccagcuccuggcccaaccacgacagcaacaagggggucaccgccgccugcccgcacgccggcgcgaaguccuucuacaagaaccugaucuggcucgugaagaaggggaacagcuaccccaagcugucccagagcuacaucaacgacaagggcaaggaggugcugguccucugggggauccaccaccccagcaccacggccgaccagcagucccuguaccagaacgccgacgccuacguguucgugggcaccagccgguacuccaagaaguucaagcccgagaucgccauccgcccgaagguccgggaccaggagggccgcaugaacuacuacuggacccugguggagcccggggacaagaucaccuucgaggcgacgggcaaccucguggucccccgguacgccuucaccauggagcgcaacgccgggagcggcaucaucaucuccgacacccccgugcacgacugcaacaccacgugccagaccccggagggcgccaucaacaccagccugcccuuccagaacauccaccccaucaccaucgggaagugccccaaguacgugaaguccacgaagcugcggcucgccaccggccugcgcaacgucccgagcauccagucccgggggcuguucggcgcgaucgccggguucaucgagggcggcuggaccgggaugguggacggcugguacggguaccaccaccagaacgagcagggcagcggguacgccgccgaccucaaguccacccagaacgccaucgacaagaucacgaacaaggugaacagcgucaucgagaagaugaacacccaguucaccgcggugggcaaggaguucaaccaccuggagaagcgcaucgagaaccugaacaagaaggucgacgacggcuuccucgacaucuggaccuacaacgccgagcugcuggugcuccuggagaacgagcggacgcuggacuaccacgacuccaacgugaagaaccucuacgagaagguccgcaaccagcugaagaacaacgccaaggagaucgggaacggcugcuucgaguucuaccacaagugcgacaacacgugcauggagagcgugaagaacgggaccuacgacuaccccaaguacuccgaggaggccaagcugaaccgggagaagaucgacggcgugaagcucgagagcacccgcaucuaccagauccuggccaucuacuccaccgucgcgagcucccuggugcucguggucagccugggggccaucagcuucuggaugugcuccaacggcagccugcagugccggaucugcaucuga

SEQ ID NO: 75957 - RNA, 1701 nt, Artificial Sequence
  derived and/or modified CDS sequence (opt1) from hemagglutinin__InfluenzaA__AHV83808
augaaggccauccuggugguccuccuguacaccuucgccaccgcgaacgccgacacgcugugcaucggcuaccacgccaacaacagcaccgacaccguggacaccgugcucgagaagaacgucacggugacccacuccgugaaccugcuggaggacaagcacaacgggaagcucugcaagcugcgcggcgucgcgccccugcaccucgggaagugcaacaucgccggcuggauccuggggaacccggagugcgagagccuguccaccgccagcuccuggagcuacaucguggagaccuccagcuccgacaacggcacgugcuaccccggcgacuucaucaacuacgaggagcuccgggagcagcugagcuccgugagcuccuucgagcgcuucgagaucuuccccaagaccagcuccuggcccaaccacgacagcaacaagggggucaccgccgccugcccgcacgccggcgcgaaguccuucuacaagaaccugaucuggcucgugaagaaggggaacagcuaccccaagcugucccagagcuacaucaacgacaagggcaaggaggugcugguccucugggggauccaccaccccagcaccacggccgaccagcagucccuguaccagaacgccgaggccuacguguucgugggcaccagccgguacuccaagaaguucaagcccgagaucgccauccgcccgaagguccgggaccaggagggccgcaugaacuacuacuggacccugguggagcccggggacaagaucaccuucgaggcgacgggcaaccucguggucccccgguacgccuucaccauggagcgcaacgccgggagcggcaucaucaucuccgacacccccgugcacgacugcaacaccacgugccagaccccggagggcgccaucaacaccagccugcccuuccagaacauccaccccaucaccaucgggaagugccccaaguacgugaaguccacgaagcugcggcucgccaccggccugcgcaacgucccgagcauccagucccgggggcuguucggcgcgaucgccggguucaucgagggcggcuggaccgggaugguggacggcugguacggguaccaccaccagaacgagcagggcagcggguacgccgccgaccucaaguccacccagaacgccaucgacaagaucacgaacaaggugaacagcgucaucgagaagaugaacacccaguucaccgcggugggcaaggaguucaaccaccuggagaagcgcaucgagaaccugaacaagaaggucgacgacggcuuccucgacaucuggaccuacaacgccgagcugcuggugcuccuggagaacgagcggacgcuggacuaccacgacuccaacgugaagaaccucuacgagaagguccgcaaccagcugaagaacaacgccaaggagaucgggaacggcugcuucgaguucuaccacaagugcgacaacaugugcauggagagcgugaagaacgggaccuacgacuaccccaaguacuccgaggaggccaagcugaaccgggagaagaucgacggcgugaagcucgagagcacccgcaucuaccagauccuggccaucuacuccaccgucgcgagcucccuggugcucguggucagccugggggccaucagcuucuggaugugcuccaacggcagccugcagugccggaucugcaucuga

SEQ ID NO: 75958 - RNA, 1701 nt, Artificial Sequence; identical to SEQ ID NO: 74064
  derived and/or modified CDS sequence (opt1) from hemagglutinin__InfluenzaA__AHV83809

SEQ ID NO: 75959 - RNA, 1701 nt, Artificial Sequence; identical to SEQ ID NO: 75045
  derived and/or modified CDS sequence (opt1) from hemagglutinin__InfluenzaA__AHV83810

SEQ ID NO: 75960 - RNA, 1701 nt, Artificial Sequence
  derived and/or modified CDS sequence (opt1) from hemagglutinin__InfluenzaA__AHV83812
augaaggccauccuggugguccuccuguacaccuucaccacggccaacgcggacacccugugcaucggcuaccacgccaacaacagcaccgacaccguggacacggugcucgagaagaacgucaccgugacccacuccgugaaccugcuggaggacaagcacaacgggaagcucugcaagcugcgcggcgucgcgccccugcaccucgggaagugcaacaucgccggcuggauccuggggaacccggagugcgagagccuguccaccgccagcuccuggagcuacaucguggagacguccagcuccgacaacgggaccugcuaccccggcgacuucaucaacuacgaggagcuccgggagcagcugagcuccgugagcuccuucgagcgcuucgagaucuuccccaagaccagcuccuggcccaaccacgacagcaacaagggcgucaccgccgccugcccgcacgccggcgccaaguccuucuacaagaaccugaucuggcucgugaagaaggggaacagcuaccccaagcugucccagagcuacaucaacgacaagggcaaggaggugcugguccucugggggauccaccaccccagcacgaccgcggaccagcagucccuguaccagaacgccgacgccuacguguucgugggcaccagccgguacuccaagaaguucaagcccgagaucgccauccgcccgaagguccgggaccaggagggccgcaugaacuacuacuggacccugguggagcccggggacaagaucacguucgaggccaccggcaaccucguggucccccgguacgcguucaccauggagcgcaacgccgggagcggcaucaucaucuccgacacccccgugcacgacugcaacacgaccugccagaccccggagggcgccaucaacaccagccugcccuuccagaacauccaccccaucacgaucgggaagugccccaaguacgugaaguccaccaagcugcggcucgccaccggccugcgcaacgucccgagcauccagucccgggggcuguucggcgccaucgcgggguucaucgagggcggcuggaccgggaugguggacggcugguacggguaccaccaccagaacgagcagggcagcggguacgccgccgaccucaaguccacgcagaacgccaucgacaagaucaccaacaaggugaacagcgucaucgagaagaugaacacccaguucaccgccgugggcaaggaguucaaccaccuggagaagcgcaucgagaaccugaacaagaaggucgacgacggcuuccucgacaucuggacguacaacgcggagcugcuggugcuccuggagaacgagcggacccuggacuaccacgacuccaacgugaagaaccucuacgagaagguccgcaaccagcugaagaacaacgccaaggagaucgggaacggcugcuucgaguucuaccacaagugcgacaacacgugcauggagagcgugaagaacgggaccuacgaguaccccaaguacuccgaggaggccaagcugaaccgggagaagaucgacggcgugaagcucgagagcaccaagaucuaccagauccuggccaucuacuccaccgucgccagcucccuggugcucguggucagccugggggcgaucagcuucuggaugugcuccaacggcagccugcagugccgcaucugcaucuga

SEQ ID NO: 75961 - RNA, 1701 nt, Artificial Sequence; identical to SEQ ID NO: 74064
  derived and/or modified CDS sequence (opt1) from hemagglutinin__InfluenzaA__AHV83813

SEQ ID NO: 75962 - RNA, 1701 nt, Artificial Sequence
  derived and/or modified CDS sequence (opt1) from hemagglutinin__InfluenzaA__AHV83814
augaaggccauccuggugguccuccuguacaccuucgccaccgcgaacgccgacacgcugugcaucggcuaccacgccaacaacagcaccgacaccguggacaccgugcucgagaagaacgucacggugacccacuccgugaaccugcuggaggacaagcacaacgggaagcucugcaagcugcgcggcgucgcgccccugcaccucgggaagugcaacaucgccggcuggauccuggggaacccggagugcgagagccuguccaccgccagcuccuggagcuacaucguggagaccuccagcuccgacaacggcacgugcuaccccggcgacuucaucaacuacgaggagcuccgggagcagcugagcuccgugagcuccuucgagcgcuucgagaucuuccccaagaccagcuccuggcccaaccacgacagcaacaagggggucaccgccgccugcccgcacgccggcgcgaaguccuucuacaagaaccugaucuggcucgugaagaaggggaacagcuaccccaagcugucccagagcuacaucaacgacaagggcaaggaggugcugguccucugggggauccaccaccccagcaccacggccgaccagcagucccuguaccagaacgccgacgccuacguguucgugggcaccagccgguacuccaagaaguucaagcccgagaucgccauccgcccgaagguccgggaccaggagggccgcaugaacuacuacuggacccugguggagcccggggacaagaucaccuucgaggcgacgggcaaccucguggucccccgguacgccuucaccauggagcgcaacgccgggagcggcaucaucaucuccgacacccccgugcacgacugcaacaccacgugccagaccccggagggcgccaucaacaccagccugcccuuccagaacauccaccccaucaccaucgggaagugccccaaguacgugaaguccacgaagcugcggcucgccaccggccugcgcaacgucccgagcauccagucccgggggcuguucggcgcgaucgccggguucaucgagggcggcuggaccgggaugguggacggcugguacggguaccaccaccagaacgagcagggcagcggguacgccgccgaccucaaguccacccagaacgccaucgacaagaucacgaacaaggugaacagcgucaucgagaagaugaacacccaguucaccgcggugggcaaggaguucaaccaccuggagaagcgcaucgagaaccugaacaagaaggucgacgacggcuuccucgacaucuggaccuacaacgccgagcugcuggugcuccuggagaacgagcggaaccuggacuaccacgacuccaacgugaagaaccucuacgagaagguccgcaaccagcugaagacgaacgccaaggagaucgggaacggcugcuucgaguucuaccacaagugcgacaacacgugcauggagagcgugaagaacgggaccuacgacuaccccaaguacuccgaggaggccaagcugaaccgggagaagaucgacggcgugaagcucgagagcacccgcaucuaccagauccuggccaucuacuccaccgucgcgagcucccuggugcucguggucagccugggggccaucagcuucuggaugugcuccaacggcagccugcagugccggaucugcaucuga

SEQ ID NO: 75963 - RNA, 1701 nt, Artificial Sequence; identical to SEQ ID NO: 75045
  derived and/or modified CDS sequence (opt1) from hemagglutinin__InfluenzaA__AHV83815

SEQ ID NO: 75964 - RNA, 1701 nt, Artificial Sequence; identical to SEQ ID NO: 74064
  derived and/or modified CDS sequence (opt1) from hemagglutinin__InfluenzaA__AHV83816

SEQ ID NO: 75965 - RNA, 1701 nt, Artificial Sequence
  derived and/or modified CDS sequence (opt1) from hemagglutinin__InfluenzaA__AHV83817
augaaggccauccuggugguccuccuguacaccuucgccaccgcgaacgccgacacgcugugcaucggcuaccacgccaacaacagcaccgacaccguggacaccgugcucgagaagaacgucacggugacccacuccgugaaccugcuggaggacaagcacaacgggaagcucugcaagcugcgcggcgucgcgccccugcaccucgggaagugcaacaucgccggcuggauccuggggaacccggagugcgagagccuguccaccgccagcuccuggagcuacaucguggagaccuccagcuccgacaacggcacgugcuaccccggcgacuucaucaacuacgaggagcuccgggagcagcugagcuccgugagcuccuucgagcgcuucgagaucuuccccaagaccagcuccuggcccaaccacgacagcaacaagggggucaccgccgccugcccgcacgccggcgcgaaguccuucuacaagaaccugguguggcucgugaagaaggggaacagcuaccccaagcugucccagagcuacaucaacgacaagggcaaggagguccuggugcucugggggauccaccaccccagcaccacggccgaccagcagucccuguaccagaacgccgacgccuacguguucgucggcaccagccgguacuccaagaaguucaagcccgagaucgccauccgcccgaaggugcgggaccaggagggccgcaugaacuacuacuggacccugguggagcccggggacaagaucaccuucgaggcgacgggcaaccucgucgugccccgguacgccuucaccauggagcgcaacgccgggagcggcaucaucaucuccgacacccccgugcacgacugcaacaccacgugccagaccccggagggcgccaucaacaccagccugcccuuccagaacauccaccccaucaccaucgggaagugccccaaguacgucaaguccacgaagcugcggcucgccaccggccugcgcaacgugccgagcauccagucccgggggcuguucggcgcgaucgccggguucaucgagggcggcuggaccgggaugguggacggcugguacggguaccaccaccagaacgagcagggcagcggguacgccgccgaccucaaguccacccagaacgccaucgacaagaucacgaacaaggucaacagcgugaucgagaagaugaacacccaguucaccgcggucggcaaggaguucaaccaccuggagaagcgcaucgagaaccugaacaagaagguggacgacggcuuccucgacaucuggaccuacaacgccgagcugcuggugcuccuggagaacgagcggacgcuggacuaccacgacuccaacgucaagaaccucuacgagaaggugcgcaaccagcugaagaacaacgccaaggagaucgggaacggcugcuucgaguucuaccacaagugcgacaacacgugcauggagagcgugaagaacgggaccuacgacuaccccaaguacuccgaggaggccaagcugaaccgggagaagaucgacggcgucaagcucgagagcacccgcaucuaccagauccuggccaucuacuccaccguggcgagcucccuggugcucgucgugagccugggggccaucagcuucuggaugugcuccaacggcagccugcagugccggaucugcaucuga

SEQ ID NO: 75966 - RNA, 1701 nt, Artificial Sequence; identical to SEQ ID NO: 75944
  derived and/or modified CDS sequence (opt1) from hemagglutinin__InfluenzaA__AHV83818

SEQ ID NO: 75967 - RNA, 1701 nt, Artificial Sequence; identical to SEQ ID NO: 75926
  derived and/or modified CDS sequence (opt1) from hemagglutinin__InfluenzaA__AHV83819

SEQ ID NO: 75968 - RNA, 1701 nt, Artificial Sequence
  derived and/or modified CDS sequence (opt1) from hemagglutinin__InfluenzaA__AHV83821
augaaggccauccuggugguccuccuguacaccuucgccaccgcgaacgccgacacgcugugcaucggcuaccacgccaacaacagcaccgacaccguggacaccgugcucgagaagaacgucacggugacccacuccgugaaccugcuggaggacaagcacaacgggaagcucugcaagcugcgcggcgucagcccccugcaccucgggaagugcaacaucgccggcuggauccuggggaacccggagugcgagucccugagcaccgccuccagcugguccuacaucguggagaccagcuccagcgacaacggcacgugcuaccccggcgacuucgugaacuacgaggagcuccgggagcagcuguccagcgucuccagcuucgagcgcuucgagaucuuccccaagaccuccagcuggcccaaccacgacuccaacaagggggugaccgcggccugcccgcacgccggcgccaagagcuucuacaagaaccugaucuggcucgugaagaaggggaacuccuaccccaagcugagccagagcuacaucaacgacaagggcaaggagguccuggugcucugggggauccaccaccccuccaccacggcggaccagcagagccuguaccagaacgccgacgccuacguguucgucggcaccucccgguacagcaagaaguucaagcccgagaucgccauccgcccgaaggugcgggaccaggagggccgcaugaacuacuacuggacccugguggagcccggggacaagaucaccuucgaggccacgggcaaccucgucgugccccgguacgcguucaccauggagcgcaacgccggguccggcaucaucaucagcgacacccccgugcacaacugcaacaccacgugccagaccccggagggcgccaucaacaccucccugcccuuccagaacauccaccccaucaccaucgggaagugccccaaguacgucaagagcacgaagcugcggcucgccaccggccugcgcaacgugccguccauccagagccgggggcuguucggcgccaucgcgggguucaucgagggcggcuggaccgggaugguggacggcugguacggguaccaccaccagaacgagcagggcuccggguacgccgccgaccucaagagcacccagaacgccaucgacaagaucacgaacaaggucaacuccgugaucgagaagaugaacacccaguucaccgccgucggcaaggaguucaaccaccuggagaagcgcaucgagaaccugaacaagaagguggacgacggcuuccucgacaucuggaccuacaacgcggagcugcuggugcuccuggagaacgagcggacgcuggacuaccacgacagcaacgucaagaaccucuacgagaaggugcgcaaccagcugaagaacaacgccaaggagaucgggaacggcugcuucgaguucuaccacaagugcgacaacacgugcauggaguccgugaagaacgggaccuacgacuaccccaaguacagcgaggaggccaagcugaaccgggagaagaucgacggcgucaagcucgaguccacccgcaucuaccagauccuggccaucuacagcaccguggccuccagccuggugcucgucgugagccugggggcgaucuccuucuggaugugcagcaacggcucccugcagugccggaucugcaucuga

SEQ ID NO: 75969 - RNA, 1701 nt, Artificial Sequence
  derived and/or modified CDS sequence (opt1) from hemagglutinin__InfluenzaA__AHV83822
augaaggccauccuggugguccuccuguacaccuucgccaccgcgaacgccgacacgcugugcaucggcuaccacgccaacaacagcaccgacaccguggacaccgugcucgagaagaacgucacggugacccacuccgugaaccugcuggaggacaagcacaacgggaagcucugcaagcugcgcggcgucagcccccugcaccucgggaagugcaacaucgccggcuggauccuggggaacccggagugcgagucccugagcaccgccuccagcugguccuacaucguggagaccagcuccagcgacaacggcacgugcuaccccggcgacuucgugaacuacgaggagcuccgggagcagcuguccagcgucuccagcuucgagcgcuucgagaucuuccccaagaccuccagcuggcccaaccacgacuccaacaagggggugaccgcggccugcccgcacgccggcgccaagagcuucuacaagaaccugaucuggcucgugaagaaggggaacuccuaccccaagcugagccagagcuacaucaacgacaagggcaaggagguccuggugcucugggggauccaccaccccuccaccacggcggaccagcagagccuguaccagaacgccgacgccuacguguucgucggcaccucccgguacagcaagaaguucaagcccgagaucgccauccgcccgaaggugcgggaccaggagggccgcaugaacuacuacuggacccugguggagcccggggacaagaucaccuucgaggccacgggcaaccucgucgugccccgguacgcguucaccauggagcgcaacgccggguccggcaucaucaucagcgacacccccgugcacgacugcaacaccacgugccagaccccggagggcgccaucaacaccucccugcccuuccagaacauccaccccaucaccaucgggaagugccccaaguacgucaagagcacgaagcugcggcucgccaccggccugcgcaacgugccguccauccagagccgggggcuguucggcgccaucgcgggguucaucgagggcggcuggaccgggaugguggacggcugguacggguaccaccaccagaacgagcagggcuccggguacgccgccgaccucaagagcacccagaacgccaucgacaagaucacgaacaaggucaacuccaucaucgagaagaugaacacccaguucaccgccgugggcaaggaguucaaccaccuggagaagcgcaucgagaaccugaacaagaaggucgacgacggcuuccucgacaucuggaccuacaacgcggagcugcuggugcuccuggagaacgagcggacgcuggacuaccacgacagcaacgugaagaaccucuacgagaagguccgcaaccagcugaagaacaacgccaaggagaucgggaacggcugcuucgaguucuaccacaagugcgacaacacgugcauggaguccgugaagaacgggaccuacgacuaccccaaguacagcgaggaggccaagcugaaccgggagaagaucgacggcgugaagcucgaguccacccgcaucuaccagauccuggccaucuacagcaccgucgccuccagccuggugcucguggucagccugggggcgaucuccuucuggaugugcagcaacggcucccugcagugccggaucugcaucuga

SEQ ID NO: 75970 - RNA, 1701 nt, Artificial Sequence
  derived and/or modified CDS sequence (opt1) from hemagglutinin__InfluenzaA__AHV83823
augaaggccauccuggugguccuccuguacaccuucgccaccgcgaacgccgacacgcugugcaucggcuaccacgccaacaacagcaccgacaccguggacaccgugcucgagaagaacgucacggugacccacuccgugaaccugcuggaggacaagcacaacgggaagcucugcaagcugcgcggcgucgcgccccugcaccucgggaagugcaacaucgccggcuggauccuggggaacccggagugcgagagccuguccaccgccagcuccuggagcuacaucguggagaccuccagcuccgacaacggcacgugcuaccccggcgacuucaucaacuacgaggagcuccgggagcagcugagcuccgugagcuccuucgagcgcuucgagaucuuccccaagaccagcuccuggcccaaccacgacagcaacaagggggucaccgccgccugcccgcacgccggcgcgaaguccuucuacaagaaccugaucuggcucgugaagaaggggaacagcuaccccaagaucucccagagcuacaucaacgacaagggcaaggaggugcugguccugugggggauccaccaccccagcaccacggccgaccagcagucccucuaccagaacgccgacgccuacguguucgugggcaccagccgguacuccaagaaguucaagcccgagaucgccauccgcccgaagguccgggaccaggagggccgcaugaacuacuacuggacccugguggagcccggggacaagaucaccuucgaggcgacgggcaaccugguggucccccgguacgccuucaccauggagcgcaacaccgggagcggcaucaucaucuccgacacccccgugcacgacugcaacacgaccugccagaccccggagggcgccaucaacaccagccuccccuuccagaacauccaccccaucacgaucgggaagugccccaaguacgugaaguccaccaagcugcggcuggccaccggccuccgcaacgucccgagcauccagucccgggggcuguucggcgccaucgcgggguucaucgagggcggcuggaccgggaugguggacggcugguacggguaccaccaccagaacgagcagggcagcggguacgccgccgaccugaaguccacgcagaacgccaucgacaagaucaccaacaaggugaacagcgucaucgagaagaugaacacccaguucaccgccgugggcaaggaguucaaccaccucgagaagcgcaucgagaaccugaacaagaaggucgacgacggcuuccuggacaucuggacguacaacgcggagcuccuggugcugcucgagaacgagcggacccuggacuaccacgacuccaacgugaagaaccuguacgagaagguccgcaaccagcucaagaacaacgccaaggagaucgggaacggcugcuucgaguucuaccacaagugcgacaacacgugcauggagagcgugaagaacgggaccuacgacuaccccaaguacuccgaggaggccaagcugaaccgggagaagaucgacggcgugaagcuggagagcacccgcaucuaccagauccucgccaucuacuccaccgucgccagcucccuggugcugguggucagccucggggcgaucagcuucuggaugugcuccaacggcagccugcagugccggaucugcaucuga

SEQ ID NO: 75971 - RNA, 1701 nt, Artificial Sequence
  derived and/or modified CDS sequence (opt1) from hemagglutinin__InfluenzaA__AHV83824
augaaggccauccuggugguccuccuguacaccuucgccaccgcgaacgccgacacgcugugcaucggcuaccacgccaacaacagcaccgacaccguggacaccgugcucgagaagaacgucacggugacccacuccgugaaccugcuggaggacaagcacaacgggaagcucugcaagcugcgcggcgucgcgccccugcaccucgggaagugcaacaucgccggcuggauccuggggaacccggagugcgagagccuguccaccgccagcuccuggagcuacaucguggagaccuccagcuccgacaacggcacgugcuaccccggcgacuucaucaacuacgaggagcuccgggagcagcugagcuccgugagcuccuucgagcgcuucgagaucuuccccaagaccagcuccuggcccaaccacgacagcaacaagggggucaccgccgccugcccgcacgccggcgcgaaguccuucuacaagaaccugaucuggcucgugaagaaggggaacagcuaccccaagcugcggcaguccuacaucaacgacaagggcaaggaggugcugguccucugggggauccaccaccccagcaccacgaccgaccagcagagccuguaccagaacgccgacgccuacguguucgugggcaccucccgcuacagcaagaaguucaagcccgagaucgccauccggccgaagguccgcgaccaggagggccggaugaacuacuacuggacccugguggagcccggggacaagaucacguucgaggccaccggcaaccucguggucccccgcuacgcguucaccauggagcggaacgccggguccggcaucaucaucagcgacacccccgugcacgacugcaacacgaccugccagaccccggagggcgccaucaacaccucccugcccuuccagaacauccaccccaucacgaucgggaagugccccaaguacgucaagagcaccaagcugcgccucgccaccggccugcggaacgugccguccauccagagccgcgggcuguucggcgccaucgcgggguucaucgagggcggcuggaccgggaugguggacggcugguacggguaccaccaccagaacgagcagggcuccggguacgccgccgaccucaagagcacgcagaacgccaucgacaagaucaccaacaaggugaacuccgucaucgagaagaugaacacccaguucaccgccgugggcaaggaguucaaccaccuggagaagcggaucgagaaccugaacaagaaggucgacgacggcuuccucgacaucuggacguacaacgcggagcugcuggugcuccuggagaacgagcgcaaccuggacuaccacgacagcaacgugaagaaccucuacgagaagguccggaaccagcugaagaacaacgccaaggagaucgggaacggcugcuucgaguucuaccacaagugcgacaacacgugcauggaguccgugaagaacgggaccuacgacuaccccaaguacagcgaggaggccaagcugaaccgcgagaagaucgacggcgugaagcucgaguccacccggaucuaccagauccuggccaucuacagcaccgucgccuccagccuggugcucguggucucccugggggcgaucagcuucuggaugugcagcaacggcucccugcagugccgcaucugcaucuga

SEQ ID NO: 75972 - RNA, 1701 nt, Artificial Sequence; identical to SEQ ID NO: 75944
  derived and/or modified CDS sequence (opt1) from hemagglutinin__InfluenzaA__AHV83825

SEQ ID NO: 75973 - RNA, 1701 nt, Artificial Sequence
  derived and/or modified CDS sequence (opt1) from hemagglutinin__InfluenzaA__AHV83826
augaaggccauccuggugguccuccuguacaccuucgccaccgcgaacgccgacacgcugugcaucggcuaccacgccaacaacagcaccgacaccguggacaccgugcucgagaagaacgucacggugacccacuccgugaaccugcuggaggacaagcacaacgggaagcucugcaagcugcgcggcgucgcgccccugcaccucgggaagugcaacaucgccggcuggauccuggggaacccggagugcgagagccuguccaccgccagcuccuggagcuacaucguggagaccuccagcuccgacaacggcacgugcuaccccggcgacuucaucaacuacgaggagcuccgggagcagcugagcuccgugagcuccuucgagcgcuucgagaucuuccccaagaccagcuccuggcccaaccacgacagcaacaagggggucaccgccgccugcccgcacgccggcgcgaaguccuucuacaagaaccugaucuggcucgugaagaaggggaacagcuaccccaagcugucccagagcuacuucaacgacaagggcaaggaggugcugguccucugggggauccaccaccccagcaccacggccgaccagcagucccuguaccagaacgccgacgccuacguguucgugggcaccagccgguacuccaagaaguucaagcccgagaucgccauccgcccgaagguccgggaccaggagggccgcaugaacuacuacuggacccugguggagcccggggacaagaucaccuucgaggcgacgggcaaccucguggucccccgguacgccuucaccauggagcgcaacgccgggagcggcaucaucaucuccgacacccccgugcacgacugcaacaccacgugccagaccccggagggcgccaucaacaccagccugcccuuccagaacauccaccccaucaccaucgggaagugccccaaguacgugaaguccacgaagcugcggcucgccaccggccugcgcaacgucccgagcauccagucccgggggcuguucggcgcgaucgccggguucaucgagggcggcuggaccgggaugguggacggcugguacggguaccaccaccagaacgagcagggcagcggguacgccgccgaccucaaguccacccagaacgccaucgacaagaucacgaacaaggugaacagcgucaucgagaagaugaacacccaguucaccgcggugggcaaggaguucaaccaccuggagaagcgcaucgagaaccugaacaagaaggucgacgacggcuuccucgacaucuggaccuacaacgccgagcugcuggugcuccuggagaacgagcggacgcuggacuaccacgacuccaacgugaagaaccucuacgagaagguccgcaaccagcugaagaacaacgccaaggagaucgggaacggcugcuucgaguucuaccacaagugcgacaacacgugcauggagagcgugaagaacgggaccuacgacuaccccaaguacuccgaggaggccaagcugaaccgggagaagaucgacggcgugaagcucgagagcacccgcaucuaccagauccuggccaucuacuccaccgcggccagcucccugguccucguggugagccugggggccaucagcuucuggaugugcuccaacggcagccugcagugccggaucugcaucuga

SEQ ID NO: 75974 - RNA, 1701 nt, Artificial Sequence; identical to SEQ ID NO: 74064
  derived and/or modified CDS sequence (opt1) from hemagglutinin__InfluenzaA__AHV83827

SEQ ID NO: 75975 - RNA, 1701 nt, Artificial Sequence; identical to SEQ ID NO: 74064
  derived and/or modified CDS sequence (opt1) from hemagglutinin__InfluenzaA__AHV83828

SEQ ID NO: 75976 - RNA, 1701 nt, Artificial Sequence
  derived and/or modified CDS sequence (opt1) from hemagglutinin__InfluenzaA__AHV83829
auggaggccauccuggugguccuccuguacaccuucgccaccgcgaacgccgacacgcugugcaucggcuaccacgccaacaacagcaccgacaccguggacaccgugcucgagaagaacgucacggugacccacuccgugaaccugcuggaggacaagcacaacgggaagcucugcaagcugcgcggcgucgcgccccugcaccucgggaagugcaacaucgccggcuggauccuggggaacccggagugcgagagccuguccaccgccagcuccuggagcuacaucguggagaccuccagcuccgacaacggcacgugcuaccccggcgacuucaucaacuacgaggagcuccgggagcagcugagcuccgugagcuccuucgagcgcuucgagaucuuccccaagaccagcuccuggcccaaccacgacagcaacaagggggucaccgccgccugcccgcacgccggcgcgaaguccuucuacaagaaccugaucuggcucgugaagaaggggaacagcuaccccaagaucucccagagcuacaucaacgacaagggcaaggaggugcugguccugugggggauccaccaccccagcaccacggccgaccagcagucccucuaccagaacgccgacgccuacguguucgugggcaccagccgguacuccaagaaguucaagcccgagaucgccauccgcccgaagguccgggaccaggagggccgcaugaacuacuacuggacccugguggagcccggggacaagaucaccuucgaggcgacgggcaaccugguggucccccgguacgccuucaccauggagcgcaacgccgggagcggcaucaucaucuccgacacccccgugcacgacugcaacaccacgugccagaccccggagggcgccaucaacaccagccuccccuuccagaacauccaccccaucaccaucgggaagugccccaaguacgugaaguccacgaagcugcggcuggccaccggccuccgcaacgucccgagcauccagucccgggggcuguucggcgcgaucgccggguucaucgagggcggcuggaccgggaugguggacggcugguacggguaccaccaccagaacgagcagggcagcggguacgccgccgaccugaaguccacccagaacgccaucgacaagaucacgaacaaggugaacagcgucaucgagaagaugaacacccaguucaccgcggugggcaaggaguucaaccaccucgagaagcgcaucgagaaccugaacaagaaggucgacgacggcuuccuggacaucuggaccuacaacgccgagcuccuggugcugcucgagaacgagcggacgcuggacuaccacgacuccaacgugaagaaccuguacgagaagguccgcaaccagcucaagaacaacgccaaggagaucgggaacggcugcuucgaguucuaccacaagugcgacaacacgugcauggagagcgugaagaacgggaccuacgacuaccccaaguacuccgaggaggccaagcugaaccgggagaagaucgacggcgugaagcuggagagcacccgcaucuaccagauccucgccaucuacuccaccgucgcgagcucccuggugcugguggucagccucggggccaucagcuucuggaugugcuccaacggcagccugcagugccggaucugcaucuga

SEQ ID NO: 75977 - RNA, 1701 nt, Artificial Sequence; identical to SEQ ID NO: 74064
  derived and/or modified CDS sequence (opt1) from hemagglutinin__InfluenzaA__AHV83830

SEQ ID NO: 75978 - RNA, 1701 nt, Artificial Sequence
  derived and/or modified CDS sequence (opt1) from hemagglutinin__InfluenzaA__AHV83831
augaaggccauccuggugguccuccuguacaccuucgccaccgcgaacgccgacacgcugugcaucggcuaccacgccaacaacagcaccgacaccguggacaccgugcucgagaagaacgucacggugacccacuccgugaaccugcuggaggacaagcacaacgggaagcucugcaagcugcgcggcgucgcgccccugcaccucgggaagugcaacaucgccggcuggauccuggggaacccggagugcgagagccuguccaccgccagcuccuggagcuacaucguggagaccuccagcuccgacaacggcacgugcuaccccggcgacuucaucaacuacgaggagcuccgggagcagcugagcuccgugagcuccuucgagcgcuucgagaucuuccccaagaccagcuccuggcccaaccacgacagcaacaagggggucaccgccgccugcccgcacgccggcgcgaaguccuucuacaagaaccugaucuggcucgugaagaaggggaacagcuaccccaagcugucccagagcuacaucaacgacaagggcaaggaggugcugguccucugggggauccaccaccccagcaccaucgccgaccagcagucccuguaccagaacgccgacgccuacguguucgugggcacgagccgguacuccaagaaguucaagcccgagaucgccauccgcccgaagguccgggaccaggagggccgcaugaacuacuacuggacccugguggagcccggggacaagaucaccuucgaggcgaccggcaaccucguggucccccgguacgccuucacgauggagcgcaacgccgggagcggcaucaucguguccgacacccccgugcacgacugcaacacgaccugccagaccccggagggcgccaucaacaccagccugcccuuccagaacauccaccccaucaccaucgggaagugccccaaguacgucaaguccaccaagcugcggcucgccacgggccugcgcaacgugccgagcauccagucccgggggcuguucggcgcgaucgccggguucaucgagggcggcuggaccgggaugguggacggcugguacggguaccaccaccagaacgagcagggcagcggguacgccgccgaccucaaguccacccagaacgccaucgacaagaucaccaacaaggucaacagcgugaucgagaagaugaacacgcaguucaccgcggucggcaaggaguucaaccaccuggagaagcgcaucgagaaccugaacaagaagguggacgacggcuuccucgacaucuggaccuacaacgccgagcugcuggugcuccuggagaacgagcggacccuggacuaccacgacuccaacgucaagaaccucuacgagaaggugcgcaaccagcugaagaacaacgccaaggagaucgggaacggcugcuucgaguucuaccacaagugcgacaacacgugcauggagagcgugaagaacgggaccuacgacuaccccaaguacuccgaggaggccaagcugaaccgggagaagaucgacggcgucaagcucgagagcacccgcaucuaccagauccuggccaucuacuccaccguggcgagcucccuggugcucgucgugagccugggggccaucagcuucuggaugugcuccaacggcagccugcagugccggaucugcaucuga

SEQ ID NO: 75979 - RNA, 1701 nt, Artificial Sequence; identical to SEQ ID NO: 75027
  derived and/or modified CDS sequence (opt1) from hemagglutinin__InfluenzaA__AHV83832

SEQ ID NO: 75980 - RNA, 1701 nt, Artificial Sequence; identical to SEQ ID NO: 74064
  derived and/or modified CDS sequence (opt1) from hemagglutinin__InfluenzaA__AHV83833

SEQ ID NO: 75981 - RNA, 1701 nt, Artificial Sequence; identical to SEQ ID NO: 75045
  derived and/or modified CDS sequence (opt1) from hemagglutinin__InfluenzaA__AHV83834

SEQ ID NO: 75982 - RNA, 1701 nt, Artificial Sequence
  derived and/or modified CDS sequence (opt1) from hemagglutinin__InfluenzaA__AHV83836
augaaggccauccuggugguccuccuguacaccuucgccaccgcgaacgccgacacgcugugcaucggcuaccacgccaacaacagcaccgacaccguggacaccgugcucgagaagaacgucacggugacccacuccgugaaccugcuggaggacaagcacaacgggaagcucugcaagcugcgcggcgucgcgccccugcaccucgggaagugcaacaucgccggcuggauccuggggaacccggagugcgagagccuguccaccgccagcuccuggagcuacaucguggagaccuccagcuccgacaacggcacgugcuaccccggcgacuucaucaacuacgaggagcuccgggagcagcugagcuccgugagcuccuucgagcgcuucgagaucuuccccaagaccagcuccuggcccaaccacgacagcaacaagggggucaccgccgccugcccgcacgccggcgcgaaguccuucuacaagaaccugaucuggcucgugaagaaggagaacagcuaccccaagcugcggcaguccuacaucaacgacaaggggaaggaggugcugguccucuggggcauccaccaccccagcaccacgaccgaccagcagagccuguaccagaacgccgacgccuacguguucguggggaccucccgcuacagcaagaaguucaagcccgagaucgccauccggccgaagguccgcgaccaggagggccggaugaacuacuacuggacccugguggagcccggcgacaagaucacguucgaggccaccgggaaccucguggucccccgcuacgcguucaccauggagcggaacgccggcuccgggaucaucaucagcgacacccccgugcacgacugcaacacgaccugccagaccccggagggcgccaucaacaccucccugcccuuccagaacauccaccccaucacgaucggcaagugccccaaguacgucaagagcaccaagcugcgccucgccaccgggcugcggaacgugccguccauccagagccgcggccuguucggggccaucgcgggcuucaucgagggcggguggaccggcaugguggacgggugguacggcuaccaccaccagaacgagcagggguccggcuacgccgccgaccucaagagcacgcagaacgccaucgacaagaucaccaacaaggugaacuccgucaucgagaagaugaacacccaguucaccgccguggggaaggaguucaaccaccuggagaagcggaucgagaaccugaacaagaaggucgacgacggcuuccucgacaucuggacguacaacgcggagcugcuggugcuccuggagaacgagcgcacccuggacuaccacgacagcaacgugaagaaccucuacgagaagguccggaaccagcugaagaacaacgccaaggagaucggcaacgggugcuucgaguucuaccacaagugcgacaacacgugcauggaguccgugaagaacggcaccuacgacuaccccaaguacagcgaggaggccaagcugaaccgcgagaagaucgacggggugaagcucgaguccacccggaucuaccagauccuggccaucuacagcaccgucgccuccagccuggugcucguggucucccugggcgcgaucagcuucuggaugugcagcaacgggucccugcagugccgcaucugcaucuga

SEQ ID NO: 75983 - RNA, 1701 nt, Artificial Sequence; identical to SEQ ID NO: 75931
  derived and/or modified CDS sequence (opt1) from hemagglutinin__InfluenzaA__AHV83837

SEQ ID NO: 75984 - RNA, 1701 nt, Artificial Sequence; identical to SEQ ID NO: 74064
  derived and/or modified CDS sequence (opt1) from hemagglutinin__InfluenzaA__AHV83838

SEQ ID NO: 75985 - RNA, 1701 nt, Artificial Sequence; identical to SEQ ID NO: 75027
  derived and/or modified CDS sequence (opt1) from hemagglutinin__InfluenzaA__AHV83839

SEQ ID NO: 75986 - RNA, 1701 nt, Artificial Sequence; identical to SEQ ID NO: 75045
  derived and/or modified CDS sequence (opt1) from hemagglutinin__InfluenzaA__AHV83840

SEQ ID NO: 75987 - RNA, 1701 nt, Artificial Sequence
  derived and/or modified CDS sequence (opt1) from hemagglutinin__InfluenzaA__AHV83841
augaaggccauccuggugguccuccuguacaccuucgccaccgcgaacgccgacacgcugugcaucggcuaccacgccaacaacagcaccgacaccguggacaccgugcucgagaagaacgucacggugacccacuccgugaaccugcuggaggacaagcacaacgggaagcucugcaagcugcgcggcgucgcgccccugcaccucgggaagugcaacaucgccggcuggauccuggggaacccggagugcgagagccuguccaccgccagcuccuggagcuacaucguggagaccuccagcuccgacaacggcacgugcuaccccggcgacuucaucaacuacgaggagcuccgggagcagcugagcuccgugagcuccuucgagcgcuucgagaucuuccccaagaccagcuccuggcccaaccacgacagcaacaagggggucaccgccgccugcccgcacgccggcgcgaaguccuucuacaagaaccugaucuggcucgugaagaaggggaacagcuaccccaagcugcggcaguccuacaucaacgacaagggcaaggaggugcugguccucugggggauccaccaccccagcaccacgaccgaccagcagagccuguaccagaacgccgacgccuacguguucgugggcaccucccgcuacagcaagaaguucaagcccgagaucgccauccggccgaagguccgcgaccaggagggccggaugaacuacuacuggacccugguggagcccggggacaagaucacguucgaggccaccggcaaccucguggucccccgcuacgcguucaccauggagcggaacgccggguccggcaucaucaucagcgacacccccgugcacaacugcaacacgaccugccagaccccggagggcgccaucaacaccucccugcccuuccagaacauccaccccaucacgaucgggaagugccccaaguacgucaagagcaccaagcugcgccucgccaccggccugcggaacgugccguccauccagagccgcgggcuguucggcgccaucgcgggguucaucgagggcggcuggaccgggaugguggacggcugguacggguaccaccaccagaacgagcagggcuccggguacgccgccgaccucaagagcacgcagaacgccaucgacaagaucaccaacaaggugaacuccgucaucgagaagaugaacacccaguucaccgccgugggcaaggaguucaaccaccuggagaagcggaucgagaaccugaacaagaaggucgacgacggcuuccucgacaucuggacguacaacgcggagcugcuggugcuccuggagaacgagcgcacccuggacuaccacgacagcaacgugaagaaccucuacgagaagguccggaaccagcugaagaacaacgccaaggagaucgggaacggcugcuucgaguucuaccacaagugcgacaacacgugcauggaguccgugaagaacgggaccuacgacuaccccaaguacagcgaggaggccaagcugaaccgcgagaagaucgacggcgugaagcucgaguccacccggaucuaccagauccuggccaucuacagcaccgucgccuccagccuggugcucguggucucccugggggcgaucagcuucuggaugugcagcaacggcucccugcagugccgcaucugcaucuga

SEQ ID NO: 75988 - RNA, 1701 nt, Artificial Sequence; identical to SEQ ID NO: 74064
  derived and/or modified CDS sequence (opt1) from hemagglutinin__InfluenzaA__AHV83842

SEQ ID NO: 75989 - RNA, 1701 nt, Artificial Sequence; identical to SEQ ID NO: 74064
  derived and/or modified CDS sequence (opt1) from hemagglutinin__InfluenzaA__AHV83843

SEQ ID NO: 75990 - RNA, 1701 nt, Artificial Sequence; identical to SEQ ID NO: 74064
  derived and/or modified CDS sequence (opt1) from hemagglutinin__InfluenzaA__AHV83844

SEQ ID NO: 75991 - RNA, 1701 nt, Artificial Sequence
  derived and/or modified CDS sequence (opt1) from hemagglutinin__InfluenzaA__AHV83845
augaaggccauccuggugguccuccuguacaccuucgccaccgcgaacgccgacacgcugugcaucggcuaccacgccaacaacagcaccgacaccguggacaccgugcucgagaagaacgucacggugacccacuccgugaaccugcuggaggacaagcacaacgggaagcucugcaagcugcgcggcgucgcgccccugcaccucgggaagugcaacaucgccggcuggauccuggggaacccggagugcgagagccuguccaccgccagcuccuggagcuacaucguggagaccuccagcuccgacaacggcacgugcuaccccggcgacuucaucaacuacgaggagcuccgggagcagcugagcuccgugagcuccuucgagcgcuucgagaucuuccccaagaccagcuccuggcccaaccacgacagcaacaagggggucaccgccgccugcccgcacgccggcgcgaaguccuucuacaagaaccugaucuggcucgugaagaaggggaacagcuaccccaagcugucccagagcuacaucaacgacaagggcaaggaggugcugguccucugggggauccaccacccgcccaccacggccgaccagcagagccuguaccagaacgccgacgccuacguguucgugggcaccucccgguacagcaagaaguucaagcccgagaucgccauccgccccaagguccgggaccaggagggccgcaugaacuacuacuggacccugguggagcccggggacaagaucaccuucgaggcgacgggcaaccucguggucccccgguacgccuucaccauggagcgcaacgccggguccggcaucaucaucagcgacaccccggugcacgacugcaacaccacgugccagacccccgagggcgccaucaacaccucccugcccuuccagaacauccaccccaucaccaucgggaagugcccgaaguacgucaagagcacgaagcugcggcucgccaccggccugcgcaacgugcccuccauccagagccgggggcuguucggcgcgaucgccggguucaucgagggcggcuggaccgggaugguggacggcugguacggguaccaccaccagaacgagcagggcuccggguacgccgccgaccucaagagcacccagaacgccaucgacaagaucacgaacaaggugaacuccgucaucgagaagaugaacacccaguucaccgcggugggcaaggaguucaaccaccuggagaagcgcaucgagaaccugaacaagaaggucgacgacggcuuccucgacaucuggaccuacaacgccgagcugcuggugcuccuggagaacgagcggacgcuggacuaccacgacagcaacgugaagaaccucuacgagaagguccgcaaccagcugaagaacaacgccaaggagaucgggaacggcugcuucgaguucuaccacaagugcgacaacacgugcauggaguccgugaagaacgggaccuacgacuaccccaaguacagcgaggaggccaagcugaaccgggagaagaucgacggcgugaagcucgaguccacccgcaucuaccagauccuggccaucuacagcaccgcggccuccagccugguccucguggugucccugggggccaucagcuucuggaugugcagcaacggcucccugcagugccggaucugcaucuga

SEQ ID NO: 75992 - RNA, 1701 nt, Artificial Sequence; identical to SEQ ID NO: 74064
  derived and/or modified CDS sequence (opt1) from hemagglutinin__InfluenzaA__AHV83846

SEQ ID NO: 75993 - RNA, 1701 nt, Artificial Sequence; identical to SEQ ID NO: 74064
  derived and/or modified CDS sequence (opt1) from hemagglutinin__InfluenzaA__AHV83847

SEQ ID NO: 75994 - RNA, 1701 nt, Artificial Sequence; identical to SEQ ID NO: 74064
  derived and/or modified CDS sequence (opt1) from hemagglutinin__InfluenzaA__AHV83848

SEQ ID NO: 75995 - RNA, 1701 nt, Artificial Sequence; identical to SEQ ID NO: 75917
  derived and/or modified CDS sequence (opt1) from hemagglutinin__InfluenzaA__AHV83849

SEQ ID NO: 75996 - RNA, 1701 nt, Artificial Sequence
  derived and/or modified CDS sequence (opt1) from hemagglutinin__InfluenzaA__AHV83850
augaaggccauccuggugguccuccuguacaccuucgccaccacgaacgcggacacccugugcaucggcuaccacgccaacaacagcaccgacaccguggacacggugcucgagaagaacgucaccgugacccacuccgugaaccugcuggaggacaagcacaacgggaagcucugcaagcugcgcggcgucgcgccccugcaccucgggaagugcaacaucgccggcuggauccuggggaacccggagugcgagagccuguccaaggccagcuccuggagcuacaucguggagaccuccagcuccgacaacggcacgugcuaccccggcgacuucaucaacuacgaggagcuccgggagcagcugagcuccgugagcuccuucgagcgcuucgagaucuuccccaagaccagcuccuggcccaaccacgacagcaacaagggggucaccgccgccugcccgcacgccggcgccaaguccuucuacaagaaccugaucuggcucgugaagaaggggaacagcuaccccaagcugucccagagcuacaucaacgacaagggcaaggaggugcugguccucugggggauccaccaccccagcaccacggcggaccagcagucccuguaccagaacgccgacgccuacguguucgugggcaccagccgguacuccaagaaguucaagcccgagaucgccauccgcccgaagguccgggaccaggagggccgcaugaacuacuacuggacccugguggagcccggggacaagaucaccuucgaggccacgggcaaccucguggucccccgguacgcguucaccauggagcgcaacgccgggagcggcaucaucaucuccgacacccccgugcacgacugcaacaccacgugccagaccccggagggcgccaucaacaccagccugcccuuccagaacauccaccccaucaccaucgggaagugccccaaguacgugaaguccacgaagcugcggcucgccaccggccugcgcaacgucccgagcauccagucccgggggcuguucggcgccaucgcgggguucaucgagggcggcuggaccgggaugguggacggcugguacggguaccaccaccagaacgagcagggcagcggguacgccgccgaccucaaguccacccagaacgccaucgacaagaucacgaacaaggugaacagcgucaucgagaagaugaacacccaguucaccgccgugggcaaggaguucaaccaccuggagaagcgcaucgagaaccugaacaagaaggucgacgacggcuuccucgacaucuggaccuacaacgcggagcugcuggugcuccuggagaacgagcggacgcuggacuaccacgacuccaacgugaagaaccucuacgagaagguccgcaaccagcugaagaacaacgccaaggagaucgggaacggcugcuucgaguucuaccacaagugcgacaacacgugcauggagagcgugaagaacgggaccuacgacuaccccaaguacuccgaggaggccaagcugaaccgggagaagaucgacggcgugaagcucgagagcacccgcaucuaccagauccuggccaucuacuccaccgucgccagcucccuggugcucguggucagccugggggcgaucagcuucuggaugugcuccaacggcagccugcagugccggaucugcaucuga

SEQ ID NO: 75997 - RNA, 1701 nt, Artificial Sequence; identical to SEQ ID NO: 74064
  derived and/or modified CDS sequence (opt1) from hemagglutinin__InfluenzaA__AHV83851

SEQ ID NO: 75998 - RNA, 1701 nt, Artificial Sequence; identical to SEQ ID NO: 74064
  derived and/or modified CDS sequence (opt1) from hemagglutinin__InfluenzaA__AHV83852

SEQ ID NO: 75999 - RNA, 1701 nt, Artificial Sequence
  derived and/or modified CDS sequence (opt1) from hemagglutinin__InfluenzaA__AHV83853
augaaggccauccuggugguccuccuguacaccuucgccaccgcgaacgccgacacgcugugcaucggcuaccacgccaacaacagcaccgacaccguggacaccgugcucgagaagaacgucacggugacccacuccgugaaccugcuggaggacaagcacaacgggaagcucugcaagcugcgcggcgucgcgccccugcaccucgggaagugcaacaucgccggcuggauccuggggaacccggagugcgagacccugagcaccgccuccagcugguccuacaucguggagacgagcuccagcgacaacgggaccugcuaccccggcgacuucaucgacuacgaggagcuccgggagcagcuguccagcguguccagcuucgagcgcuucgagaucuuccccaagaccuccagcuggcccaaccacgacuccaacaagggcgucaccgccgccugcccgcacgccggcgcgaagggguucuacaagaaccugaucuggcucgugaagaagggcaacagcuaccccaagcuguccaagagcuacaucaacgacaaggggaaggaggugcugguccucuggggcauccaccaccccuccacgaccgccgaccagcagagccuguaccagaacgccgacaccuacguguucgugggcaccagccgguacuccaagaaguucaagcccgagaucgccauccgcccgaagguccgggaccaggaggggcgcaugaacuacuacuggacgcugguggagcccggcgacaagaucaccuucgaggccaccgggaaccucguggucccccgguacgcguucgccauggagcgcgacgccggcagcggcaucaucaucuccgacacccccgugcacgacugcaacacgaccugccagaccccgaagggggccaucaacaccagccugcccuuccagaacauccaccccaucacgaucggcaagugccccaaguacgugaaguccaccaagcugcggcucgccaccgggcugcgcaacgucccgagcauccagucccggggccuguucggggcgaucgccggcuucaucgagggcggguggaccggcaugguggacgggugguacggcuaccaccaccagaacgagcaggggagcggcuacgccgccgaccucaaguccacgcagaacgccaucgacaagaucaccaacaaggugaacagcgucaucgagaagaugaacacccaguucaccgcggugggcaaggaguucaaccaccuggagaagcgcaucgagaaccugaacaagaaggucgacgacggguuccucgacaucuggacguacaacgccgagcugcuggugcuccuggagaacgagcggacccuggacuaccacgacuccaacgugaagaaccucuacgagaagguccgcacccagcugaagaacaacgccaaggagaucggcaacgggugcuucgaguucuaccacaagugcgacaacacgugcauggagagcgugaagaacggcaccuacgacuaccccaaguacuccgaggaggccaagcugaaccgggaggagaucgacggggugaagcucgagagcacccgcaucuaccagauccuggccaucuacuccaccgcggccagcucccugguccucguggugagccugggcgccaucuccuucuggaugugcagcaacggcagccugcagugccggaucugcaucuga

SEQ ID NO: 76000 - RNA, 1701 nt, Artificial Sequence; identical to SEQ ID NO: 75926
  derived and/or modified CDS sequence (opt1) from hemagglutinin__InfluenzaA__AHV83855

SEQ ID NO: 76001 - RNA, 1701 nt, Artificial Sequence
  derived and/or modified CDS sequence (opt1) from hemagglutinin__InfluenzaA__AHV83856
augaaggccauccuggugguccuccuguacaccuucgccaccgcgaacgccgacacgcugugcaucggcuaccacgccaacaacagcaccgacaccguggacaccgugcucgagaagaacgucacggugacccacuccgugaaccugcuggaggacaagcacaacgggaagcucugcaagcugcgcggcgucgcgccccugcaccucgggaagugcaacaucgccggcuggauccuggggaacccggagugcgagagccuguccaccgccagcuccuggagcuacaucguggagaccuccagcuccgacaacggcacgugcuaccccggcgacuucaucaacuacgaggagcuccgggagcagcugagcuccgugagcuccuucgagcgcuucgagaucuuccccaagaccagcuccuggcccaaccacgacagcaacaagggggucaccgccgccugcccgcacgccggcgcgaaguccuucuacaagaaccugaucuggcucgugaagaaggggaacagcuaccccaagcugucccagagcuacaucaacgacaagggcaaggaggugcugguccucugggggauccaccaccccagcaccacggccgaccagcagucccuguaccagaacgccgacgccuacguguucgugggcaccagccgguacuccaagaaguucaagcccgagaucgccauccgcccgaagguccgggaccaggagggccgcaugaacuacuacuggacccugguggagcccggggacaagaucaccuucgaggcgacgggcaaccucguggucccccgguacgccuucaccauggagcgcaacgccgggagcggcaucaucaucuccgacacccccgugcacgacugcaacaccacgugccagaccccggagggcgccaucaacaccagccugcccuuccagaacauccaccccaucaccaucgggaagugccccaaguacgugaaguccacgaagcugcggcucgccaccggccugcgcaacgucccgagcauccagucccgggggcuguucggcgcgaucgccggguucaucgagggcggcuggaccgggaugguggacggcugguacggguaccaccaccagaacgagcagggcagcggguacgccgccgaccucaaguccacccagaacgccaucgacaagaucacgaacaaggugaacagcgucaucgagaagaugaacacccaguucaccgcggugggcaaggaguucaaccaccuggagaagcgcaucgagaaccugaacaagaaggucgacgacggcuuccucgacaucuggaccuacaacgccgagcugcuggugcuccuggagaacgagcggacgcuggacuaccacgacuccaacgugaagaaccucuacgagaagguccgcaaccagcugaagaacaacgccaaggagaucgggaacggcugcuucgaguucuaccacaagugcgacaacacgugcauggagaucgugaagaacgggaccuacgacuaccccaaguacagcgaggaggccaagcugaaccgggagaagaucgacggcgugaagcucgaguccacccgcaucuaccagauccuggccaucuacagcaccgucgcguccagccuggugcucguggucucccugggggccaucagcuucuggaugugcagcaacggcucccugcagugccggaucugcaucuga

SEQ ID NO: 76002 - RNA, 1701 nt, Artificial Sequence; identical to SEQ ID NO: 75926
  derived and/or modified CDS sequence (opt1) from hemagglutinin__InfluenzaA__AHV83857

SEQ ID NO: 76003 - RNA, 1701 nt, Artificial Sequence
  derived and/or modified CDS sequence (opt1) from hemagglutinin__InfluenzaA__AHV83858
augaaggccauccuggugguccuccuguacaccuucgccaccgcgaacacggacacccugugcaucggcuaccacgccaacaacagcaccgacaccguggacacggugcucgagaagaacgucaccgugacccacuccgugaaccugcuggaggacaagcacaacgggaagcucugcaagcugcgcggcgucgcgccccugcaccucgggaagugcaacaucgccggcuggauccuggggaacccggagugcgagagccuguccaccgccagcuccuggagcuacaucguggagacguccagcuccgacaacgggaccugcuaccccggcgacuucaucaacuacgaggagcuccgggagcagcugagcuccgugagcuccuucgagcgcuucgagaucuuccccaagaccagcuccuggcccaaccacgacagcaacaagggcgucaccgccgccugcccgcacgccggcgccaaguccuucuacaagaaccugaucuggcucgugaagaaggggaacagcuaccccaagcugucccagagcuacaucaacgacaagggcaaggaggugcugguccucugggggauccaccaccccagcacgaccgcggaccagcagucccuguaccagaacgccgacgccuacguguucgugggcaccagccgguacuccaagaaguucaagcccgagaucgccauccgcccgaagguccgggaccaggagggccgcaugaacuacuacuggacccugguggagcccggggacaagaucacguucgaggccaccggcaaccucguggucccccgguacgcguucaccauggagcgcaacgccgggagcggcaucaucaucuccgacacccccgugcacgacugcaacacgaccugccagaccccggagggcgccaucaacaccagccugcccuuccagaacauccaccccaucacgaucgggaagugccccaaguacgugaaguccaccaagcugcggcucgccaccggccugcgcaacgucccgagcauccagucccgggggcuguucggcgccaucgcgggguucaucgagggcggcuggaccgggaugguggacggcugguacggguaccaccaccagaacgagcagggcagcggguacgccgccgaccagaaguccacgcagaacgccaucgacaagaucaccaacaaggugaacagcgucaucgagaagaugaacacccaguucaccgccgugggcaaggaguucaaccaccucgagaagcgcaucgagaaccugaacaagaaggucgacgacggcuuccuggacaucuggacguacaacgcggagcuccuggugcugcucgagaacgagcggacccuggacuaccacgacuccaacgugaagaaccuguacgagaagguccgcaaccagcucaagaacaacgccaaggagaucgggaacggcugcuucgaguucuaccacaagugcgacaacacgugcauggagagcgugaagaacgggaccuacgacuaccccaaguacuccgaggaggccaagcugaaccgggagaagaucgacggcgugaagcuggagagcacccgcaucuaccagauccucgccaucuacuccaccgucgccagcucccuggugcugguggucagccucggggcgaucagcuucuggaugugcuccaacggcagccugcagugccggaucugcaucuga

SEQ ID NO: 76004 - RNA, 1701 nt, Artificial Sequence; identical to SEQ ID NO: 74064
  derived and/or modified CDS sequence (opt1) from hemagglutinin__InfluenzaA__AHV83859

SEQ ID NO: 76005 - RNA, 1701 nt, Artificial Sequence
  derived and/or modified CDS sequence (opt1) from hemagglutinin__InfluenzaA__AHV83861
augaaggccauccuggugguccuccuguacaccuucaccacggccaacgcggacacccugugcaucggcuaccacgccaacaacagcaccgacaccguggacacggugcucgagaagaacgucaccgugacccacuccgugaaccugcuggaggacaagcacaacgggaagcucugcaagcugcgcggcgucgcgccccugcaccucgggaagugcaacaucgccggcuggauccuggggaacccggagugcgagagccuguccaccgccagcuccuggagcuacaucguggagacguccagcuccgacaacgggaccugcuaccccggcgacuucaucaacuacgaggagcuccgggagcagcugagcuccgugagcuccuucgagcgcuucgagaucuuccccaagaccagcuccuggcccaaccacgacagcaacaagggcgucaccgccgccugcccgcacgccggcgccaaguccuucuacaagaaccugaucuggcucgugaagaaggggaacagcuaccccaagcugucccagagcuacaucaacgacaagggcaaggaggugcugguccucugggggauccaccaccccagcacgaccgcggaccagcagucccuguaccagaacgccgacgccuacguguucgugggcaccagccgguacuccaagaaguucaagcccgagaucgccauccgcccgaagguccgggaccaggagggccgcaugaacuacuacuggacccugguggagcccggggacaagaucacguucgaggccaccggcaaccucguggucccccgguacgcguucaccauggagcgcaacgccgggagcggcaucaucaucuccgacacccccgugcacgacugcaacacgaccugccagaccccggagggcgccaucaacaccagccugcccuuccagaacauccaccccaucacgaucgggaagugccccaaguacgugaaguccaccaagcugcggcucgccaccggccugcgcaacgucccgagcauccagucccgggggcuguucggcgccaucgcgggguucaucgagggcggcuggaccgggaugguggacggcugguacggguaccaccaccagaacgagcagggcagcggguacgccgccgaccucaaguccacgcagaacgccaucgacaagaucaccaacaaggugaacagcgucaucgagaagaugaacacccaguucaccgccgugggcaaggaguucaaccaccuggagaagcgcaucgagaaccugaacaagaaggucgacgacggcuuccucgacaucuggacguacaacgcggagcugcuggugcuccuggagaacgagcggacccuggacuaccacgacuccaacgugaagaaccucuacgagaagguccgcaaccagcugaagaacaacgccaaggagaucgggaacggcugcuucgaguucuaccacaagugcgacaacacgugcauggagagcgugaagaacgggaccuacgacuaccccaaguacuccgaggaggccaagcugaaccgggagaagaucgacggcgugaagcucgagagcacccgcaucuaccagauccuggccaucuacuccaccgucgccagcucccuggugcucguggucagccugggggcgaucagcuucuggaugugcuccaacggcagccugcagugccggaucugcaucuga

SEQ ID NO: 76006 - RNA, 1701 nt, Artificial Sequence; identical to SEQ ID NO: 76005
  derived and/or modified CDS sequence (opt1) from hemagglutinin__InfluenzaA__AHV83862

SEQ ID NO: 76007 - RNA, 1701 nt, Artificial Sequence; identical to SEQ ID NO: 74064
  derived and/or modified CDS sequence (opt1) from hemagglutinin__InfluenzaA__AHV83863

SEQ ID NO: 76008 - RNA, 1701 nt, Artificial Sequence; identical to SEQ ID NO: 74064
  derived and/or modified CDS sequence (opt1) from hemagglutinin__InfluenzaA__AHV83864

SEQ ID NO: 76009 - RNA, 1701 nt, Artificial Sequence
  derived and/or modified CDS sequence (opt1) from hemagglutinin__InfluenzaA__AHV83866
augaaggccauccuggugguccuccuguacaccuucgccaccgcgaacgccgacacgcugugcaucggcuaccacgccaacaacagcaccgacaccguggacaccgugcucgagaagaacgucacggugacccacuccgugaaccugcuggaggacaagcacaacgggaagcucugcaagcugcgcggcgucgcgccccugcaccucgggaagugcaacaucgccggcuggauccuggggaacccggagugcgagagccuguccaccgccagcuccuggagcuacaucguggagaccuccagcuccgacaacggcacgugcuaccccggcgacuucaucaacuacgaggagcuccgggagcagcugagcuccgugagcuccuucgagcgcuucgagaucuuccccaagaccagcuccuggcccaaccacgacagcaacaagggggucaccgccgccugcccgcacgccggcgcgaaguccuucuacaagaaccugaucuggcucgugaagaaggggaacagcuaccccaagcugucccagagcuacaucaacgacaagggcaaggaggugcugguccucugggggauccaccaccccagcaccacggccgaccagcagucccuguaccagaacgccgacgccuacguguucgugggcaccagccgguacuccaagaaguucaagcccgagaucgccauccgcccgaagguccgggaccaggagggccgcaugaacuacuacuggacccugguggagcccggggacaagaucaccuucgaggcgacgggcaaccucguggucccccgguacgccuucaccauggagcgcaacgccgggagcggcaucaucaucuccgacacccccauccacgacugcaacaccacgugccagaccccggagggcgccaucaacaccagccugcccuuccagaacauccaccccaucaccaucgggaagugccccaaguacgugaaguccacgaagcugcggcucgccaccggccugcgcaacgugccgagcauccagucccgggggcuguucggcgcgaucgccggguucaucgagggcggcuggaccgggauggucgacggcugguacggguaccaccaccagaacgagcagggcagcggguacgccgccgaccucaaguccacccagaacgccaucgacaagaucacgaacaaggugaacagcgugaucgagaagaugaacacccaguucaccgcggucggcaaggaguucaaccaccuggagaagcgcaucgagaaccugaacaagaagguggacgacggcuuccucgacaucuggaccuacaacgccgagcugcugguccuccuggagaacgagcggacgcuggacuaccacgacuccaacgugaagaaccucuacgagaaggugcgcaaccagcugaagaacaacgccaaggagaucgggaacggcugcuucgaguucuaccacaagugcgacgacacgugcauggagagcgucaagaacgggaccuacgacuaccccaaguacuccgaggaggccaagcugaaccgggagaagaucgacggcgugaagcucgagagcacccgcaucuaccagauccuggccaucuacuccaccguggcgagcucccugguccucguggugagccugggggccaucagcuucuggaugugcuccaacggcagccugcagugccggaucugcaucuga

SEQ ID NO: 76010 - RNA, 1701 nt, Artificial Sequence
  derived and/or modified CDS sequence (opt1) from hemagglutinin__InfluenzaA__AHV83867
augaaggccauccuggugguccuccuguacaccuucgccaccgcgaacgccgacacgcugugcaucggcuaccacgccaacaacagcaccgacaccguggacaccgugcucgagaagaacgucacggugacccacuccgugaaccugcuggaggacaagcacaacgggaagcucugcaagcugcgcggcgucgcgccccugcaccucgggaagugcaacaucgccggcuggauccuggggaacccggagugcgagagccuguccaccgccagcuccuggagcuacaucguggagaccuccagcuccgacaacggcacgugcuaccccggcgacuucaucaacuacgaggagcuccgggagcagcugagcuccgugagcuccuucgagcgcuucgagaucuuccccaagaccagcuccuggcccaaccacgacagcaacaagggggucaccgccgccugcccgcacgccggcgcgaaguccuucuacaagaaccugaucuggcucgugaagaaggggaacagcuaccccaagcugucccagagcuacaucaacgacaagggcaaggaggugcugguccucugggggauccaccaccccagcaccacggccgaccagcagucccuguaccagaacgccgacgccuacguguucgugggcaccagccgguacuccaagaaguucaagcccgagaucgccauccgcccgaagguccgggaccaggagggccgcaugaacuacuacuggacccugguggagcccggggacaagaucaccuucgaggcgacgggcaaccucguggucccccgguacgccuucaccauggagcgcaacgccgggagcggcaucaucaucuccgacacccccgugcacgacugcaacaccacgugccagaccccggagggcgccaucaacaccagccugcccuuccagaacauccaccccaucaccaucgggaagugccccaaguacgugaaguccacgaagcugcggcucgccaccggccugcgcaacgucccgagcauccagucccgggggcuguucggcgcgaucgccggguucaucgagggcggcuggaccgggaugguggacggcugguacggguaccaccaccagaacgagcagggcagcggguacgccgccgaccucaaguccacccagaacgccaucgacaagaucacgaacaaggugaacagcgucaucgagaagaugaacacccaguucaccgcggugggcaaggaguucaaccaccuggagaagcgcaucgagaaccugaacaagaaggucgacgacggcuuccucgacaucuggaccuacaacgccgagcugcuggugcuccuggagaacgagcggacgcuggacuaccacgacuccaacgugaagaaccucuacgagaagguccgcaaccagcugaagaacaacgccaaggagaucgggaacggcugcuucgaguucuaccacaagugcgacgacacgugcauggagagcgugaagaacgggaccuacgacuaccccaaguacuccgaggaggccaagcugaaccgggagaagaucgacggcgugaagcucgagagcacccgcaucuaccagauccuggccaucuacuccaccgucgcgagcucccuggugcucguggucagccugggggccaucagcuucuggaugugcuccaacggcagccugcagugccggaucugcaucuga

SEQ ID NO: 76011 - RNA, 1701 nt, Artificial Sequence; identical to SEQ ID NO: 74064
  derived and/or modified CDS sequence (opt1) from hemagglutinin__InfluenzaA__AHV83868

SEQ ID NO: 76012 - RNA, 1701 nt, Artificial Sequence
  derived and/or modified CDS sequence (opt1) from hemagglutinin__InfluenzaA__AHV83869
augaaggccauccuggugguccuccuguacaccuucgccaccgcgaacgccgacacgcugugcaucggcuaccacgccaacaacagcaccgacaccguggacaccgugcucgagaagaacgucacggugacccacuccgugaaccugcuggaggacaagcacaacgggaagcucugcaagcugcgcggcgucgcgccccugcaccucgggaagugcaacaucgccggcuggauccuggggaacccggagugcgagagccuguccaccgcgagcuccuggagcuacaucguggagaccuccagcuccgacaacggcacgugcuaccccggcgacuucaucaacuacgaggagcuccgggagcagcugagcuccgugagcuccuucgagcgcuucgagaucuuccccaagaccaacagcuggcccaaccacgacuccaacaagggggucaccgccgccugcccgcacgccggcgccaagagcuucuacaagaaccugaucuggcucgugaagaaggggaacuccuaccccaagcugagccaguccuacaucaacgacaagggcaaggaggugcugguccucugggggauccaccaccccagcaccacggccgaccagcagagccuguaccagaacgccgacgccuacguguucgugggcaccucccgguacagcaagaaguucaagcccgagaucgccauccgcccgaagguccgggaccaggagggccgcaugaacuacuacuggacccugguggagcccggggacaagaucaccuucgaggcgacgggcaaccucguggucccccgguacgccuucaccauggagcgcaacgccggguccggcaucaucaucagcgacacccccgugcacgacugcaacaccacgugccagaccccggagggcgccaucaacaccucccugcccuuccagaacauccaccccaucaccaucgggaagugccccaaguacgucaagagcacgaagcugcggcucgccaccggccugcgcaacgugccguccauccagagccgggggcuguucggcgcgaucgccggguucaucgagggcggcuggaccgggaugguggacggcugguacggguaccaccaccagaacgagcagggcuccggguacgccgccgaccucaagagcacccagaacgccaucgacaagaucacgaacaaggugaacuccgucaucgagaagaugaacacccaguucaccgcggugggcaaggaguucaaccaccuggagaagcgcaucgagaaccugaacaagaaggucgacgacggcuuccucgacaucuggaccuacaacgccgagcugcuggugcuccuggagaacgagcggacgcuggacuaccacgacagcaacgugaagaaccucuacgagaagguccgcaaccagcugaagaacaacgccaaggagaucgggaacggcugcuucgaguucuaccacaagugcgacaacacgugcauggaguccgugaagaacgggaccuacgacuaccccaaguacagcgaggaggccaagcugaaccgggagaagaucgacggcgugaagcucgaguccacccgcaucuaccagauccuggccaucuacagcaccgucgcguccagccuggugcucguggucucccugggggccaucagcuucuggaugugcagcaacggcucccugcagugccggaucugcaucuga

SEQ ID NO: 76013 - RNA, 1701 nt, Artificial Sequence; identical to SEQ ID NO: 74064
  derived and/or modified CDS sequence (opt1) from hemagglutinin__InfluenzaA__AHV83870

SEQ ID NO: 76014 - RNA, 1701 nt, Artificial Sequence; identical to SEQ ID NO: 74064
  derived and/or modified CDS sequence (opt1) from hemagglutinin__InfluenzaA__AHV83871

SEQ ID NO: 76015 - RNA, 1701 nt, Artificial Sequence; identical to SEQ ID NO: 74064
  derived and/or modified CDS sequence (opt1) from hemagglutinin__InfluenzaA__AHV83872

SEQ ID NO: 76016 - RNA, 1701 nt, Artificial Sequence
  derived and/or modified CDS sequence (opt1) from hemagglutinin__InfluenzaA__AHV83873
augaaggccauccuggugguccuccuguacaccuucgccaccacgaacgcggacacccugugcaucggcuaccacgccaacaacagcaccgacaccguggacacggugcucgagaagaacgucaccgugacccacuccgugaaccugcuggaggacaagcacaacgggaagcucugcaagcugcgcggcgucgcgccccugcaccucgggaagugcaacaucgccggcuggauccuggggaacccggagugcgagagccuguccaccgccagcuccuggagcuacaucguggagacguccagcuccgacaacgggaccugcuaccccggcgacuucaucaacuacgaggagcuccgggagcagcugagcuccgugagcuccuucgagcgcuucgagaucuuccccaagaccagcuccuggcccaaccacgacagcaacaagggcgucaccgccgccugcccgcacgccggcgccaaguccuucuacaagaaccugaucuggcucgugaagaaggggaacagcuaccccaagcugucccagagcuacaucaacgacaagggcaaggaggugcugguccucugggggauccaccaccccagcacgguggcggaccagcagucccuguaccagaacgccgacgccuacguguucgucggcaccagccgguacuccaagaaguucaagcccgagaucgccauccgcccgaaggugcgggaccaggagggccgcaugaacuacuacuggacccugguggagcccggggacaagaucaccuucgaggccacgggcaaccucgucgugccccgguacgcguucaccauggagcgcaacgccgggagcggcaucaucaucuccgacacccccgugcacgacugcaacaccacgugccagaccccggagggcgccaucaacaccagccugcccuuccagaacauccaccccaucaccaucgggaagugccccaaguacgucaaguccacgaagcugcggcucgccaccggccugcgcaacgugccgagcauccagucccgggggcuguucggcgccaucgcgggguucaucgagggcggcuggaccgggaugguggacggcugguacggguaccaccaccagaacgagcagggcagcggguacgccgccgaccucaaguccacccagaacgccaucgacaagaucacgaacaaggucaacagcgugaucgagaagaugaacacccaguucaccgccgucggcaaggaguucaaccaccuggagaagcgcaucgagaaccugaacaagaagguggacgacggcuuccucgacaucuggaccuacaacgcggagcugcuggugcuccuggagaacgagcggacgcuggacuaccacgacuccaacgucaagaaccucuacgagaaggugcgcaaccagcugaagaacaacgccaaggagaucgggaacggcugcuucgaguucuaccacaagugcgacaacacgugcauggagagcgugaagaacgggaccuacgacuaccccaaguacuccgaggaggccaagcugaaccgggagaagaucgacggcgucaagcucgagagcacccgcaucuaccagauccuggccaucuacuccaccguggccagcucccuggugcucgucgugagccugggggcgaucagcuucuggaugugcuccaacggcagccugcagugccggaucugcaucuga

SEQ ID NO: 76017 - RNA, 1701 nt, Artificial Sequence; identical to SEQ ID NO: 74064
  derived and/or modified CDS sequence (opt1) from hemagglutinin__InfluenzaA__AHV83874

SEQ ID NO: 76018 - RNA, 1701 nt, Artificial Sequence; identical to SEQ ID NO: 74064
  derived and/or modified CDS sequence (opt1) from hemagglutinin__InfluenzaA__AHV83875

SEQ ID NO: 76019 - RNA, 1701 nt, Artificial Sequence; identical to SEQ ID NO: 74064
  derived and/or modified CDS sequence (opt1) from hemagglutinin__InfluenzaA__AHV83876

SEQ ID NO: 76020 - RNA, 1701 nt, Artificial Sequence
  derived and/or modified CDS sequence (opt1) from hemagglutinin__InfluenzaA__AHV83877
augaaggccauccuggugguccuccuguacaccuucgccaccgcgaacgccgacacgcugugcaucggcuaccacgccaacaacagcaccgacaccguggacaccgugcucgagaagaacgucacggugacccacuccgugaaccugcuggaggacaagcacaacgggaagcucugcaagcugcgcggcgucgcgccccugcaccucgggaagugcaacaucgccggcuggauccuggggaacccggagugcgagagccuguccaccgccagcuccuggagcuacaucguggagaccuccagcuccgacaacggcacgugcuaccccggcgacuucaucaacuacgaggagcuccgggagcagcugagcuccgugagcuccuucaagcgcuucgagaucuuccccaagaccagcuccuggcccaaccacgacagcaacaagggggucaccgccgccugcccgcacgccggcgcgaaguccuucuacaagaaccugaucuggcucgugaagaaggggaacagcuaccccaagcugucccagagcuacaucaacgacaagggcaaggaggugcugguccucugggggauccaccaccccagcaccacggccgaccagcagucccuguaccagaacgccgacgccuacguguucgugggcaccagccgguacuccaagaaguucaagcccgagaucgccauccgcccgaagguccgggaccaggagggccgcaugaacuacuacuggacccugguggagcccggggacaagaucaccuucgaggcgacgggcaaccucguggucccccgguacgccuucaccauggagcgcaacgccgggagcggcaucaucaucuccgacacccccgugcacgacugcaacaccacgugccagaccccggagggcgccaucaacaccagccugcccuuccagaacauccaccccaucaccaucgggaagugccccaaguacgugaaguccacgaagcugcggcucgccaccggccugcgcaacgucccgagcauccagucccgggggcuguucggcgcgaucgccggguucaucgagggcggcuggaccgggaugguggacggcugguacggguaccaccaccagaacgagcagggcagcggguacgccgccgaccucaaguccacccagaacgccaucgacaagaucacgaacaaggugaacagcgucaucgagaagaugaacacccaguucaccgcggugggcaaggaguucaaccaccuggagaagcgcaucgagaaccugaacaagaaggucgacgacggcuuccucgacaucuggaccuacaacgccgagcugcuggugcuccuggagaacgagcggacgcuggacuaccacgacuccaacgugaagaaccucuacgagaagguccgcaaccagcugaagaacaacgccaaggagaucgggaacggcugcuucgaguucuaccacaagugcgacaacacgugcauggagagcgugaagaacgggaccuacgacuaccccaaguacuccgaggaggccaagcugaaccgggagaagaucgacggcgugaagcucgagagcacccgcaucuaccagauccuggccaucuacuccaccgucgcgagcucccuggugcucguggucagccugggggccaucagcuucuggaugugcuccaacggcagccugcagugccggaucugcaucuga

SEQ ID NO: 76021 - RNA, 1701 nt, Artificial Sequence; identical to SEQ ID NO: 75931
  derived and/or modified CDS sequence (opt1) from hemagglutinin__InfluenzaA__AHV83878

SEQ ID NO: 76022 - RNA, 1701 nt, Artificial Sequence; identical to SEQ ID NO: 75931
  derived and/or modified CDS sequence (opt1) from hemagglutinin__InfluenzaA__AHV83879

SEQ ID NO: 76023 - RNA, 1701 nt, Artificial Sequence
  derived and/or modified CDS sequence (opt1) from hemagglutinin__InfluenzaA__AHV83881
augaaggccacccuggugguccuccuguacaccuucgccacggcgaacgccgacacccugugcaucggcuaccacgccaacaacagcaccgacaccguggacacggugcucgagaagaacgucaccgugacccacuccgugaaccugcuggaggacaagcacaacgggaagcucugcaagcugcgcggcgucgcgccccugcaccucgggaagugcaacaucgccggcuggauccuggggaacccggagugcgagagccuguccaccgccagcuccuggagcuacaucguggagacguccagcuccgacaacgggaccugcuaccccggcgacuucaucaacuacgaggagcuccgggagcagcugagcuccgugagcuccuucgagcgcuucgagaucuuccccaagaccagcuccuggcccaaccacgacagcaacaagggcgucaccgccgccugcccgcacgccggcgcgaaguccuucuacaagaaccugaucuggcucgugaagaaggggaacagcuaccccaagcugucccagagcuacaucaacgacaagggcaaggaggugcugguccucugggggauccaccaccccagcacgaccgccgaccagcagucccuguaccagaacgccgacgccuacguguucgugggcaccagccgguacuccaagaaguucaagcccgagaucgccauccgcccgaagguccgggaccaggagggccgcaugaacuacuacuggacccugguggagcccggggacaagaucacguucgaggcgaccggcaaccucguggucccccgguacgccuucaccauggagcgcaacgccgggagcggcaucaucaucuccgacacccccgugcacgacugcaacacgaccugccagaccccggagggcgccaucaacaccagccugcccuuccagaacauccaccccaucacgaucgggaagugccccaaguacgugaaguccaccaagcugcggcucgccaccggccugcgcaacgucccgagcauccagucccgggggcuguucggcgcgaucgccggguucaucgagggcggcuggaccgggaugguggacggcugguacggguaccaccaccagaacgagcagggcagcggguacgccgccgaccucaaguccacgcagaacgccaucgacaagaucaccaacaaggugaacagcgucaucgagaagaugaacacccaguucaccgcggugggcaaggaguucaaccaccuggagaagcgcaucgagaaccugaacaagaaggucgacgacggcuuccucgacaucuggacguacaacgccgagcugcuggugcuccuggagaacgagcggacccuggacuaccacgacuccaacgugaagaaccucuacgagaagguccgcaaccagcugaagaacaacgccaaggagaucgggaacggcugcuucgaguucuaccacaagugcgacaacacgugcauggagagcgugaagaacgggaccuacgacuaccccaaguacuccgaggaggccaagcugaaccgggagaagaucgacggcgugaagcucgagagcacccgcaucuaccagauccuggccaucuacuccaccgucgcgagcucccuggugcucguggucagccugggggccaucagcuucuggaugugcuccaacggcagccugcagugccggaucugcaucuga

SEQ ID NO: 76024 - RNA, 1701 nt, Artificial Sequence; identical to SEQ ID NO: 75045
  derived and/or modified CDS sequence (opt1) from hemagglutinin__InfluenzaA__AHV83882

SEQ ID NO: 76025 - RNA, 1701 nt, Artificial Sequence; identical to SEQ ID NO: 75027
  derived and/or modified CDS sequence (opt1) from hemagglutinin__InfluenzaA__AHV83883

SEQ ID NO: 76026 - RNA, 1701 nt, Artificial Sequence; identical to SEQ ID NO: 74064
  derived and/or modified CDS sequence (opt1) from hemagglutinin__InfluenzaA__AHV83884

SEQ ID NO: 76027 - RNA, 1701 nt, Artificial Sequence
  derived and/or modified CDS sequence (opt1) from hemagglutinin__InfluenzaA__AHV83885
augaaggccauccuggugguccuccuguacaccuucgccaccgcgaacgccgacacgcugugcaucggcuaccacgccaacaacagcaccgacaccguggacaccgugcucgagaagaacgucacggugacccacuccgugaaccugcuggaggacaagcacaacgggaagcucugcaagcugcgcggcgucgcgccccugcaccucgggaagugcaacaucgccggcuggauccuggggaacccggagugcgagagccuguccaccgccagcuccuggagcuacaucguggagaccuccagcuccgacaacggcacgugcuaccccggcgacuucaucaacuacgaggagcuccgggagcagcugagcuccgugagcuccuucgagcgcuucgagaucuuccccaagaccagcuccuggcccaaccacgacagcaacaagggggucaccgccgccugcccgcacgccggcgcgaaguccuucuacaagaaccugaucuggcucgugaagaaggggaacagcuaccccaagcugucccagagcuacaucaacgacaagggcaaggaggugcugguccucugggggauccaccaccccagcaccacggccgaccagcagucccuguaccagaacgccgacgccuacguguucgugggcaccagccgguacuccaagaaguucaagcccgagaucgccauccgcccgaagguccgggaccaggagggccgcaugaacuacuacuggacccugguggagcccggggacaagaucaccuucgaggcgacgggcaaccucguggucccccgguacgccuucaccauggagcgcaacgccgggagcggcaucaucaucuccgacacccccguguacgacugcaacaccacgugccagaccccggagggcgccaucaacaccagccugcccuuccagaacauccaccccaucaccaucgggaagugccccaaguacgugaaguccacgaagcugcggcucgccaccggccugcgcaacgucccgagcauccagucccgggggcuguucggcgcgaucgccggguucaucgagggcggcuggaccgggaugguggacggcugguacggguaccaccaccagaacgagcagggcagcggguacgccgccgaccucaaguccacccagaacgccaucgacaagaucacgaacaaggugaacagcgucaucgagaagaugaacacccaguucaccgcggugggcaaggaguucaaccaccuggagaagcgcaucgagaaccugaacaagaaggucgacgacggcuuccucgacaucuggaccuacaacgccgagcugcuggugcuccuggagaacgagcggacgcuggacuaccacgacuccaacgugaagaaccucuacgagaagguccgcaaccagcugaagaacaacgccaaggagaucgggaacggcugcuucgaguucuaccacaagugcgacaacacgugcauggagagcgugaagaacgggaccuacgacuaccccaaguacuccgaggaggccaagcugaaccgggagaagaucgacggcgugaagcucgagagcacccgcaucuaccagauccuggccaucuacuccaccgucgcgagcucccuggugcucguggucagccugggggccaucagcuucuggaugugcuccaacggcagccugcagugccggaucugcaucuga

SEQ ID NO: 76028 - RNA, 1701 nt, Artificial Sequence; identical to SEQ ID NO: 75944
  derived and/or modified CDS sequence (opt1) from hemagglutinin__InfluenzaA__AHV83887

SEQ ID NO: 76029 - RNA, 1701 nt, Artificial Sequence; identical to SEQ ID NO: 74064
  derived and/or modified CDS sequence (opt1) from hemagglutinin__InfluenzaA__AHV83888

SEQ ID NO: 76030 - RNA, 1701 nt, Artificial Sequence
  derived and/or modified CDS sequence (opt1) from hemagglutinin__InfluenzaA__AHV83889
augaaggccauccuggugguccuccugcacacccuggccaccgcgaacgccgacacgcucugcaucggcuaccacgccaacaacagcaccgacaccguggacaccgugcuggagaagaacgucacggugacccacuccgugaaccugcucgaggacaagcacaacgggaagcugugcaagcugcgcggcgucgcgccccuccaccuggggaagugcaacaucgccggcuggauccuggggaacccggagugcgagagccucuccaccgccagcuccuggagcuacaucguggagaccuccagcuccgacaacggcacgugcuaccccggcgacuucaucaacuacgaggagcugcgggagcagcugagcuccgugagcuccuucgagcgcuucgagaucuuccccaagaccagcuccuggcccaaccacgacagcaacaagggggucaccgccgccugcccgcacgccggcgcgaaguccuucuacaagaaccucaucuggcuggugaagaaggggaacagcuaccccaagcugucccagagcuacaucaacgacaagggcaaggaggugcucguccugugggggauccaccaccccagcaccacggccgaccagcagucccuguaccagaacgccgacgccuacguguucgugggcaccagccgguacuccaagaaguucaagcccgagaucgccauccgcccgaagguccgggaccaggagggccgcaugaacuacuacuggacccucguggagcccggggacaagaucaccuucgaggcgacgggcaaccugguggucccccgguacgccuucaccauggagcgcaacgccgggagcggcaucaucaucuccgacacccccgugcacgacugcaacaccacgugccagaccccggagggcgccaucaacaccagccugcccuuccagaacauccaccccaucaccaucgggaagugccccaaguacgugaaguccacgaagcuccggcuggccaccggccugcgcaacgucccgagcauccagucccggggccucuucggggcgaucgccggguucaucgagggcggcuggaccgggaugguggacggcugguacggguaccaccaccagaacgagcagggcagcggguacgccgccgaccugaaguccacccagaacgccaucgacaagaucacgaacaaggugaacagcgucaucgagaagaugaacacccaguucaccgcggugggcaaggaguucaaccaccuggagaagcgcaucgagaaccucaacaagaaggucgacgacggcuuccuggacaucuggaccuacaacgccgagcugcucgugcugcuggagaacgagcggacgcucgacuaccacgacuccaacgugaagaaccuguacgagaagguccgcaaccagcugaagaacaacgccaaggagaucgggaacggcugcuucgaguucuaccacaagugcgacaacacgugcauggagagcgugaagaacgggaccuacgacuaccccaaguacuccgaggaggccaagcucaaccgggagaagaucgacggcgugaagcuggagagcacccgcaucuaccagauccuggccaucuacuccaccgucgcgagcucccucgugcugguggucagccugggggccaucagcuucuggaugugcuccaacggcagccuccagugccggaucugcaucuga

SEQ ID NO: 76031 - RNA, 1701 nt, Artificial Sequence; identical to SEQ ID NO: 74064
  derived and/or modified CDS sequence (opt1) from hemagglutinin__InfluenzaA__AHV83890

SEQ ID NO: 76032 - RNA, 1701 nt, Artificial Sequence; identical to SEQ ID NO: 74064
  derived and/or modified CDS sequence (opt1) from hemagglutinin__InfluenzaA__AHV83891

SEQ ID NO: 76033 - RNA, 1701 nt, Artificial Sequence; identical to SEQ ID NO: 74064
  derived and/or modified CDS sequence (opt1) from hemagglutinin__InfluenzaA__AHV83893

SEQ ID NO: 76034 - RNA, 1701 nt, Artificial Sequence; identical to SEQ ID NO: 74064
  derived and/or modified CDS sequence (opt1) from hemagglutinin__InfluenzaA__AHV83894

SEQ ID NO: 76035 - RNA, 1701 nt, Artificial Sequence
  derived and/or modified CDS sequence (opt1) from hemagglutinin__InfluenzaA__AHV83895
augaaggccauccuggugguccuccuguacaccuucgccaccgcgaacgccgacacgcugugcaucggcuaccacgccaacaacagcaccgacaccguggacaccgugcucgagaagaacgucacggugacccacuccgugaaccugcuggaggacaagcacaacgggaagcucugcaagcugcgcggcgucgcgccccugcaccucgggaagugcaacaucgccggcuggauccuggggaacccggagugcgagagccuguccaccgccagcuccuggagcuacaucguggagaccuccagcuccgacaacggcacgugcuaccccggcgacuucaucaacuacgaggagcuccgggagcagcugagcuccgugagcuccuucgagcgcuucgagaucuuccccaagaccagcuccuggcccaaccacgacagcaacaagggggucaccgccgccugcccgcacgccggcgcgaaguccuucuacaagaaccugaucuggcucgugaagaaggggaacagcuaccccaagcugucccagagcuacaucaacgacaagggcaaggaggugcugguccucugggggauccaccaccccagcaccacggccgaccagcagucccuguaccagaacgccgacgccuacguguucgugggcaccagccgguacuccaagaaguucaagcccgagaucgccauccgcccgaagguccgggaccaggagggccgcaugaacuacuacuggacccugguggagcccggggacaagaucaccuucgaggcgacgggcaaccucguggucccccgguacgccuucaccauggagcgcaacgccgggagcggcaucaucaucuccgacacccccgugcacgacugcaacaccacgugccagaccccggagggcgccaucaacaccagccugcccuuccagaacauccaccccaucaccaucgggaagugccccaaguacgugaaguccacgaagcugcggcucgccaccggccugcgcaacgucccgagcauccagucccgggggcuguucggcgcgaucgccggguucaucgagggcggcuggaccgggaugguggacggcugguacggguaccaccaccagaacgagcagggcagcggguacgccgccgaccucaaguccacccagaacgccaucgacaagaucacgaacaaggugaacagcgucaucgagaagaugaacacccaguucaccgcggugggcaaggaguucaaccaccuggagaagcgcaucgagaaccugaacaagaaggucgacgacggcuuccucgacaucuggaccuacaacgccgagcugcuggugcuccuggagaacgagcggacgcuggacuaccacgacuccaacgugaagaaccucuacgagaagguccgcaaccagcugaagaacaacgccaaggagaucgggaacggcugcuucgaguucuaccacaagugcgacaacacgugcauggagagcgugaagaacgggaccuacgacuaccccaaguacuccgaggagaccaagcugaaccgggagaagaucgacggcgugaagcucgagagcacccgcaucuaccagauccuggccaucuacuccaccgucgccagcucccuggugcucguggucagccugggggcgaucagcuucuggaugugcuccaacggcagccugcagugccggaucugcaucuga

SEQ ID NO: 76036 - RNA, 1701 nt, Artificial Sequence; identical to SEQ ID NO: 74064
  derived and/or modified CDS sequence (opt1) from hemagglutinin__InfluenzaA__AHV83896

SEQ ID NO: 76037 - RNA, 1701 nt, Artificial Sequence; identical to SEQ ID NO: 74064
  derived and/or modified CDS sequence (opt1) from hemagglutinin__InfluenzaA__AHV83897

SEQ ID NO: 76038 - RNA, 1701 nt, Artificial Sequence
  derived and/or modified CDS sequence (opt1) from hemagglutinin__InfluenzaA__AHV83898
augaaggccauccuggugguccuccuguacaccuucgccaccgcgaacgccgacacgcugugcaucggcuaccacgccaacaacagcaccgacaccguggacaccgugcucgagaagaacgucacggugacccacuccgugaaccugcuggaggacaagcacaacgggaagcucugcaagcugcgcggcgucgcgccccugcaccucgggaagugcaacaucgccggcuggauccuggggaacccggagugcgagagccuguccaccgccagcuccuggagcuacaucguggagaccuccagcuccgacaacggcacgugcuaccccggcgacuucaucaacuacgaggagcuccgggagcagcugagcuccgugagcuccuucgagcgcuucgagaucuuccccaagaccagcuccuggcccaaccacgacagcaacaagggggucaccgccgccugcccgcacgccggcgcgaaguccuucuacaagaaccugaucuggcucgugaagaaggggaacagcuaccccaagcugucccagagcuacaucaacgacaagggcaaggaggugcugguccucugggggauccaccaccccagcaccacggccgaccagcagucccuguaccagaacgccgacgccuacguguucgugggcaccagccgguacuccaagaaguucaagcccgagaucgccauccgcccgaagguccgggaccaggagggccgcaugaacuacuacuggacccugguggagcccggggacaagaucaccuucgaggcgacgggcaaccucguggucccccgguacgccuucaccauggagcgcaacgccgggagcggcaucaucaucuccgacacccccgugcacgacugcaacaccacgugccagaccccggagggcgccaucaacaccagccugcccuuccagaacauccaccccaucaccaucgggaagugccccaaguacgugaaguccacgaagcugcggcucgucaccggccugcgcaacgugccgagcauccagucccgggggcuguucggcgccaucgcgggguucaucgagggcggcuggaccgggaugguggacggcugguacggguaccaccaccagaacgagcagggcagcggguacgccgccgaccucaaguccacccagaacgccaucgacaagaucacgaacaaggucaacagcgugaucgagaagaugaacacccaguucaccgccgucggcaaggaguucaaccaccuggagaagcgcaucgagaaccugaacaagaagguggacgacggcuuccucgacaucuggaccuacaacgcggagcugcuggugcuccuggagaacgagcggacgcuggacuaccacgacuccaacgucaagaaccucuacgagaaggugcgcaaccagcugaagaacaacgccaaggagaucgggaacggcugcuucgaguucuaccacaagugcgacaacacgugcauggagagcgugaagaacgggaccuacgacuaccccaaguacuccgaggaggccaagcugaaccgggagaagaucgacggcgucaagcucgagagcacccgcaucuaccagauccuggccaucuacuccaccguggccagcucccuggugcucgucgugagccugggggcgaucagcuucuggaugugcuccaacggcagccugcagugccggaucugcaucuga

SEQ ID NO: 76039 - RNA, 1701 nt, Artificial Sequence; identical to SEQ ID NO: 74064
  derived and/or modified CDS sequence (opt1) from hemagglutinin__InfluenzaA__AHV83899

SEQ ID NO: 76040 - RNA, 1701 nt, Artificial Sequence; identical to SEQ ID NO: 74064
  derived and/or modified CDS sequence (opt1) from hemagglutinin__InfluenzaA__AHV83900

SEQ ID NO: 76041 - RNA, 1701 nt, Artificial Sequence; identical to SEQ ID NO: 74064
  derived and/or modified CDS sequence (opt1) from hemagglutinin__InfluenzaA__AHV83901

SEQ ID NO: 76042 - RNA, 1701 nt, Artificial Sequence; identical to SEQ ID NO: 74064
  derived and/or modified CDS sequence (opt1) from hemagglutinin__InfluenzaA__AHV83902

SEQ ID NO: 76043 - RNA, 1701 nt, Artificial Sequence; identical to SEQ ID NO: 74064
  derived and/or modified CDS sequence (opt1) from hemagglutinin__InfluenzaA__AHV83903

SEQ ID NO: 76044 - RNA, 1701 nt, Artificial Sequence; identical to SEQ ID NO: 74064
  derived and/or modified CDS sequence (opt1) from hemagglutinin__InfluenzaA__AHV83904

SEQ ID NO: 76045 - RNA, 1701 nt, Artificial Sequence
  derived and/or modified CDS sequence (opt1) from hemagglutinin__InfluenzaA__AHV83905
augaaggccauccuggugguccuccuguacacccugaccacggccaacgcggacacccucugcaucggcuaccacgccaacaacagcaccgacaccguggacacggugcuggagaagaacgucaccgugacccacuccgugaaccugcucgaggacaagcacaacgggaagcugugcaagcugcgcggcgucgcgccccuccaccuggggaagugcaacaucgccggcuggauccuggggaacccggagugcgagagccucuccaccgccagcuccuggagcuacaucguggagacguccagcuccgacaacgggaccugcuaccccggcgacuucaucaacuacgaggagcugcgggagcagcugagcuccgugagcuccuucgagcgcuucgagaucuuccccaagaccagcuccuggcccaaccacgacagcaacaagggggucaccgccgccugcccgcacgccggcgccaaguccuucuacaagaaccucaucuggcuggugaagaaggggaacagcuaccccaagcugucccagagcuacaucaacgacaagggcaaggaggugcucguccugugggggauccaccaccccagcacgaccgcggaccagcagucccuguaccagaacgccgacgccuacguguucgugggcaccagccgguacuccaagaaguucaagcccgagaucgccauccgcccgaagguccgggaccaggagggccgcaugaacuacuacuggacccucguggagcccggggacaagaucacguucgaggccaccggcaaccugguggucccccgguacgcguucaccauggagcgcaacgccgggagcggcaucaucaucuccgacacccccgugcacgacugcaacacgaccugccagaccccggagggcgccaucaacaccagccugcccuuccagaacauccaccccaucacgaucgggaagugccccaaguacgugaaguccaccaagcuccggcuggccaccggccugcgcaacgucccgagcauccagucccggggccucuucggcgccaucgcgggguucaucgagggcggcuggaccgggaugguggacggcugguacggguaccaccaccagaacgagcagggcagcggguacgccgccgaccugaaguccacgcagaacgccaucgacaagaucaccaacaaggugaacagcgucaucgagaagaugaacacccaguucaccgccgugggcaaggaguucaaccaccuggagaagcgcaucgagaaccucaacaagaaggucgacgacggcuuccuggacaucuggacguacaacgcggagcugcucgugcugcuggagaacgagcggacccucgacuaccacgacuccaacgugaagaaccuguacgagaagguccgcaaccagcugaagaacaacgccaaggagaucgggaacggcugcuucgaguucuaccacaagugcgacaacacgugcauggagagcgugaagaacgggaccuacgacuaccccaaguacuccgaggaggccaagcucaaccgggagaagaucgacggcgugaagcuggagagcacccgcaucuaccagauccuggccaucuacuccaccgucgccagcucccucgugcugguggucagccugggggcgaucagcuucuggaugugcuccaacggcagccuccagugccggaucugcaucuga

SEQ ID NO: 76046 - RNA, 1701 nt, Artificial Sequence; identical to SEQ ID NO: 74064
  derived and/or modified CDS sequence (opt1) from hemagglutinin__InfluenzaA__AHV83906

SEQ ID NO: 76047 - RNA, 1701 nt, Artificial Sequence; identical to SEQ ID NO: 74064
  derived and/or modified CDS sequence (opt1) from hemagglutinin__InfluenzaA__AHV83907

SEQ ID NO: 76048 - RNA, 1701 nt, Artificial Sequence
  derived and/or modified CDS sequence (opt1) from hemagglutinin__InfluenzaA__AHV83908
augaaggccauccuggugguccuccuguacaccuucgccaccgcgaacgccgacacgcugugcaucggcuaccacgccaacaacagcaccgacaccguggacaccgugcucgagaagaacgucacggugacccacuccgugaaccugcuggaggacaagcacaacgggaagcucugcaagcugcgcggcgucgcgccccugcaccucgggaagugcaacaucgccggcuggauccuggggaacccggagugcgagccccugagcaccgcguccagcugguccuacaucguggagaccagcuccagcgacaacggcacgugcuaccccggcgacuucaucaacuacgaggagcuccgggagcagcuguccagcguguccagcuucgagcgcuucgagaucuuccccaagaccuccagcuggccgaaccacgacuccaacaagggggucaccgccgccugcccccacgccggcgccaagagcuucuacaagaaccugaucuggcucgugaagaaggggaacuccuaccccaagcugagccaguccuacaucaacgacaagggcaagaaggugcugguccucugggggauccaccaccccagcaccacggccgaccagcagagccuguaccagaacgccgacgccuacguguucgugggcaccucccgguacagcaagaaguucaagccggagaucgccauccgccccaagguccgggaccaggagggccgcaugaacuacuacuggacccugguggagcccggggacaagaucaccuucgaggcgacgggcaaccucguggucccccgguacgccuucaccauggagcgcaacgccggguccggcaucaucaucagcgacaccccggugcacgacugcaacaccacgugccagacccccgagggcgccaucaacaccucccugcccuuccagaacauccaccccaucaccaucgggaagugcccgaaguacgucaagagcacgaagcugcggcucgccaccggccugcgcaacgugcccuccauccagagccgggggcuguucggcgcgaucgccggguucaucgagggcggcuggaccgggaugguggacggcugguacggguaccaccaccagaacgagcagggcuccggguacgccgccgaccucaagagcacccagaacgccaucgacaagaucacgaacaaggugaacuccgucaucgagaagaugaacacccaguucaccgcggugggcaaggaguucaaccaccuggagaagcgcaucgagaaccugaacaagaaggucgacgacggcuuccucgacaucuggaccuacaacgccgagcugcuggugcuccuggagaacgagcggacgcuggacuaccacgacagcaacgugaagaaccucuacgagaagguccgcaaccagcugaagaacaacgccaaggagaucgggaacggcugcuucgaguucuaccacaagugcgacaacacgugcauggaguccgugaagaacgggaccuacgacuaccccaaguacagcgaggaggccaagcugaaccgggagaagaucgacggcgugaagcucgaguccacccgcaucuaccagauccuggccaucuacagcaccgucgcguccagccuggugcucguggucucccugggggccaucagcuucuggaugugcagcaacggcucccugcagugccggaucugcaucuga

SEQ ID NO: 76049 - RNA, 1701 nt, Artificial Sequence
  derived and/or modified CDS sequence (opt1) from hemagglutinin__InfluenzaA__AHV83911
augaaggccauccuggugguccuccuguacaccuucgccaccgcgaacgccgacacgcugugcaucggcuaccacgccaacaacagcaccgacaccguggacaccgugcucgagaagaacgucacggugacccacuccgugaaccugcuggaggacaagcacaacgggaagcucugcaagcugcgcggcgucgcgccccugcaccucgggaagugcaacaucgccggcuggauccuggggaacccggagugcgagccccugagcaccgcguccagcugguccuacaucguggagaccagcuccagcgacaacggcacgugcuaccccggcgacuucaucaacuacgaggagcuccgggagcagcuguccagcguguccagcuucgagcgcuucgagaucuuccccaagaccuccagcuggccgaaccacgacuccaacaagggggucaccgccgccugcccccacgccggcgccaagagcuucuacaagaaccugaucuggcucgugaagaaggggaacuccuaccccaagcugagccaguccuacaucaacgacaagggcaaggaggugcugguccucugggggauccaccaccccagcaccacggccgaccagcagagccuguaccagaacgccgacgccuacguguucgugggcaccucccgguacagcaagaaguucaagccggagaucgccauccgccccaagguccgggaccaggagggccgcaugaacuacuacuggacccugguggagcccggggacaagaucaccuucgaggcgacgggcaaccucguggucccccgguacgccuucaccauggagcgcaacgccggguccggcaucaucaucagcgacaccccggugcacgacugcaacaccacgugccagacccccgagggcgccaucaacaccucccugcccuuccagaacauccaccccaucaccaucgggaagugcccgaaguacgucaagagcacgaagcugcggcucgccaccggccugcgcaacgugcccuccauccagagccgggggcuguucggcgcgaucgccggguucaucgagggcggcuggaccgggaugguggacggcugguacggguaccaccaccagaacgagcagggcuccggguacgccgccgaccucaagagcacccagaacgccaucgacaagaucacgaacaaggugaacuccgucaucgagaagaugaacacccaguucaccgcggugggcaaggaguucaaccaccuggagaagcgcaucgagaaccugaacaagaaggucgacgacggcuuccucgacaucuggaccuacaacgccgagcugcuggugcuccuggagaacgagcggacgcuggacuaccacgacagcaacgugaagaaccucuacgagaagguccgcaaccagcugaagaacaacgccaaggagaucgggaacggcugcuucgaguucuaccacaagugcgacaacacgugcauggaguccgugaagaacgggaccuacgacuaccccaaguacagcgaggaggccaagcugaaccgggagaagaucgacggcgugaagcucgaguccacccgcaucuaccagauccuggccaucuacagcaccgucgcguccagccuggugcucguggucucccugggggccaucagcuucuggaugugcagcaacggcucccugcagugccggaucugcaucuga

SEQ ID NO: 76050 - RNA, 1701 nt, Artificial Sequence; identical to SEQ ID NO: 74064
  derived and/or modified CDS sequence (opt1) from hemagglutinin__InfluenzaA__AHV83912

SEQ ID NO: 76051 - RNA, 1701 nt, Artificial Sequence; identical to SEQ ID NO: 74064
  derived and/or modified CDS sequence (opt1) from hemagglutinin__InfluenzaA__AHV83913

SEQ ID NO: 76052 - RNA, 1701 nt, Artificial Sequence; identical to SEQ ID NO: 74064
  derived and/or modified CDS sequence (opt1) from hemagglutinin__InfluenzaA__AHV83915

SEQ ID NO: 76053 - RNA, 1701 nt, Artificial Sequence; identical to SEQ ID NO: 74064
  derived and/or modified CDS sequence (opt1) from hemagglutinin__InfluenzaA__AHV83916

SEQ ID NO: 76054 - RNA, 1701 nt, Artificial Sequence; identical to SEQ ID NO: 76049
  derived and/or modified CDS sequence (opt1) from hemagglutinin__InfluenzaA__AHV83917

SEQ ID NO: 76055 - RNA, 1701 nt, Artificial Sequence; identical to SEQ ID NO: 75027
  derived and/or modified CDS sequence (opt1) from hemagglutinin__InfluenzaA__AHV83919

SEQ ID NO: 76056 - RNA, 1701 nt, Artificial Sequence; identical to SEQ ID NO: 75944
  derived and/or modified CDS sequence (opt1) from hemagglutinin__InfluenzaA__AHV83920

SEQ ID NO: 76057 - RNA, 1701 nt, Artificial Sequence; identical to SEQ ID NO: 75045
  derived and/or modified CDS sequence (opt1) from hemagglutinin__InfluenzaA__AHV83921

SEQ ID NO: 76058 - RNA, 1701 nt, Artificial Sequence
  derived and/or modified CDS sequence (opt1) from hemagglutinin__InfluenzaA__AHV83922
augaaggccauccuggugguccuccuguacaccuucgccaccgcgaacgccgacacgcugugcaucggcuaccacgccaacaacagcaccgacaccguggacaccgugcucgagaagaacgucacggugacccacuccgugaaccugcuggaggacaagcacaacgggaagcucugcaagcugcgcggcgucgcgccccugcaccucgggaagugcaacaucgccggcuggauccuggggaacccggagugcgagagccuguccaccgccagcuccuggagcuacaucguggagaccuccagcuccgacaacggcacgugcuaccccggcgacuucaucaacuacgaggagcuccgggagcagcugagcuccgugagcuccuucgagcgcuucgagaucuuccccaagaccagcuccuggcccaaccacgacagcaacaagggggucaccgccgccugcccgcacgccggcgcgaaguccuucuacaagaaccugaucuggcucgugaagaaggggaacagcuaccccaagcugucccagagcuacaucaacgacaagggcaaggaggugcugguccucugggggauccaccaccccagcaccacggccgaccagcagucccuguaccagaacgccgacgccuacguguucgugggcaccagccgguacuccaagaaguucaagcccgagaucgccauccgcccgaagguccgggaccaggagggccgcaugaacuacuacuggacccugguggagcccggggacaagaucaccuucgaggcgacgggcaaccucguggucccccgguacgccuucaccauggagcgcaacgccgggagcggcaucaucaucuccgacacccccgugcacgacugcaacaccacgugccagaccccggagggcgccaucaacaccagccugcccuuccagaacauccaccccaucaccaucgggaagugccccaaguacgugaaguccacgaagcugcggcucgccaccggccugcgcaacgucccgagcauccagucccgggggcuguucggcgcgaucgccggguucaucgagggcggcuggaccgggaugguggacggcugguacggguaccaccaccagaacgagcagggcagcggguacgccgccgaccucaaguccacccagaacgccaucgacaagaucacgaacaaggugaacagcgucaucgagaagaugaacacccaguucaccgcggugggcaaggaguucucccaccuggagaagcgcaucgagaaccugaacaagaaggucgacgacggcuuccucgacaucuggaccuacaacgccgagcugcuggugcuccuggagaacgagcggacgcuggacuaccacgacagcaacgugaagaaccucuacgagaagguccgcaaccagcugaagaacaacgccaaggagaucgggaacggcugcuucgaguucuaccacaagugcgacaacacgugcauggaguccgugaagaacgggaccuacgacuaccccaaguacagcgaggaggccaagcugaaccgggagaagaucgacggcgugaagcucgaguccacccgcaucuaccagauccuggccaucuacagcaccgucgcguccagccuggugcucguggucagccugggggccaucuccuucuggaugugcagcaacggcucccugcagugccggaucugcaucuga

SEQ ID NO: 76059 - RNA, 1701 nt, Artificial Sequence; identical to SEQ ID NO: 75960
  derived and/or modified CDS sequence (opt1) from hemagglutinin__InfluenzaA__AHV83923

SEQ ID NO: 76060 - RNA, 1701 nt, Artificial Sequence; identical to SEQ ID NO: 75944
  derived and/or modified CDS sequence (opt1) from hemagglutinin__InfluenzaA__AHV83924

SEQ ID NO: 76061 - RNA, 1701 nt, Artificial Sequence; identical to SEQ ID NO: 75960
  derived and/or modified CDS sequence (opt1) from hemagglutinin__InfluenzaA__AHV83925

SEQ ID NO: 76062 - RNA, 1701 nt, Artificial Sequence; identical to SEQ ID NO: 75944
  derived and/or modified CDS sequence (opt1) from hemagglutinin__InfluenzaA__AHV83926

SEQ ID NO: 76063 - RNA, 1701 nt, Artificial Sequence; identical to SEQ ID NO: 76049
  derived and/or modified CDS sequence (opt1) from hemagglutinin__InfluenzaA__AHV83927

SEQ ID NO: 76064 - RNA, 1701 nt, Artificial Sequence
  derived and/or modified CDS sequence (opt1) from hemagglutinin__InfluenzaA__AHV83928
augaaggccauccuggugguccuccuguacaccuucaccacggccaacgcggacacccugugcaucggcuaccacgccaacaacagcaccgacaccguggacacggugcucgagaagaacgucaccgugacccacuccgugaaccugcuggaggacaagcacaacgggaagcucugcaagcugcgcggcgucgcgccccugcaccucgggaagugcaacaucgccggcuggauccuggggaacccggagugcgagagccuguccaccgccagcuccuggagcuacaucguggagacguccagcuccgacaacgggaccugcuaccccggcgacuucaucaacuacgaggagcuccgggagcagcugagcuccgugagcuccuucgagcgcuucgagaucuuccccaagaccagcuccuggcccaaccacgacagcaacaagggcgucaccgccgccugcccgcacgccggcgccaaguccuucuacaagaaccugaucuggcucgugaagaaggggaacagcuaccccaagcugucccagagcuacaucaacgacaagggcaaggaggugcugguccucugggggauccaccaccccagcacgaccgcggaccagcagucccuguaccagaacgccgacgccuacguguucgugggcaccagccgguacuccaagaaguucaagcccgagaucgccauccgcccgaagguccgggaccaggagggccgcaugaacuacuacuggacccugguggagcccggggacaagaucacguucgaggccaccggcaaccucguggucccccgguacgcguucaccauggagcgcaacgccgggagcggcaucaucaucuccgacacccccgugcacgacugcaacacgaccugccagaccccggagggcgccaucaacaccagccugcccuuccagaacauccaccccaucacgaucgggaagugccccaaguacgugaaguccaccaagcugcggcucgccaccggccugcgcaacgucccgagcauccagucccgggggcuguucggcgccaucgcgggguucaucgagggcggcuggaccgggaugguggacggcugguacggguaccaccaccagaacgagcagggcagcggguacgccgccgaccagaaguccacgcagaacgccaucgacaagaucaccaacaaggugaacagcgucaucgagaagaugaacacccaguucaccgccgugggcaaggaguucaaccaccucgagaagcgcaucgagaaccugaacaagaaggucgacgacggcuuccuggacaucuggacguacaacgcggagcuccuggugcugcucgagaacgagcggacccuggacuaccacgacuccaacgugaagaaccuguacgagaagguccgcaaccagcucaagaacaacgccaaggagaucgggaacggcugcuucgaguucuaccacaagugcgacaacacgugcauggagagcgugaagaacgggaccuacgacuaccccaaguacuccgaggaggccaagcugaaccgggagaagaucgacggcgugaagcuggagagcacccgcaucuaccagauccucgccaucuacuccaccgucgccagcucccuggugcugguggucagccucggggcgaucagcuucuggaugugcuccaacggcagccugcagugccggaucugcaucuga

SEQ ID NO: 76065 - RNA, 1701 nt, Artificial Sequence; identical to SEQ ID NO: 75944
  derived and/or modified CDS sequence (opt1) from hemagglutinin__InfluenzaA__AHV83929

SEQ ID NO: 76066 - RNA, 1701 nt, Artificial Sequence
  derived and/or modified CDS sequence (opt1) from hemagglutinin__InfluenzaA__AHV83930
augaaggccauccuggugauccuccuguacaccuucgccaccgcgaacgccgacacgcugugcaucggcuaccacgccaacaacagcaccgacaccgucgacaccgugcucgagaagaacgugacggucacccacuccgugaaccugcuggaggacaagcacaacgggaagcucugcaagcugcgcggcguggcgccccugcaccucgggaagugcaacaucgccggcuggauccuggggaacccggagugcgagagccuguccaccgccagcuccuggagcuacaucgucgagaccuccagcuccgacaacggcacgugcuaccccggcgacuucaucaacuacgaggagcuccgggagcagcugagcuccgugagcuccuucgagcgcuucgagaucuuccccaagaccagcuccuggcccaaccacgacagcaacaagggggugaccgccgccugcccgcacgccggcgcgaaguccuucuacaagaaccugaucuggcucgucaagaaggggaacagcuaccccaagcugucccagagcuacaucaacgacaagggcaaggaggugcuggugcucugggggauccaccaccccagcaccacggccgaccagcagucccuguaccagaacgccgacgccuacgucuucgugggcaccagccgguacuccaagaaguucaagcccgagaucgccauccgcccgaaggugcgggaccaggagggccgcaugaacuacuacuggacccuggucgagcccggggacaagaucaccuucgaggcgacgggcaaccucguggugccccgguacgccuucaccauggagcgcaacgccgggagcggcaucaucaucuccgacacccccguccacgacugcaacaccacgugccagaccccggagggcgccaucaacaccagccugcccuuccagaacauccaccccaucaccaucgggaagugccccaaguacgugaaguccacgaagcugcggcucgccaccggccugcgcaacgugccgagcauccagucccgggggcuguucggcgcgaucgccggguucaucgagggcggcuggaccgggauggucgacggcugguacggguaccaccaccagaacgagcagggcagcggguacgccgccgaccucaaguccacccagaacgccaucgacaagaucacgaacaaggugaacagcgugaucgagaagaugaacacccaguucaccgcggucggcaaggaguucaaccaccuggagaagcgcaucgagaaccugaacaagaagguggacgacggcuuccucgacaucuggaccuacaacgccgagcugcugguccuccuggagaacgagcggacgcuggacuaccacgacuccaacgugaagaaccucuacgagaaggugcgcaaccagcugaagaacaacgccaaggagaucgggaacggcugcuucgaguucuaccacaagugcgacaacacgugcauggagagcgucaagaacgggaccuacgacuaccccaaguacuccgaggaggccaagcugaaccgggagaagaucgacggcgugaagcucgagagcacccgcaucuaccagauccuggccaucuacuccaccguggcgagcucccugguccucguggugagccugggggccaucagcuucuggaugugcuccaacggcagccugcagugccggaucugcaucuga

SEQ ID NO: 76067 - RNA, 1701 nt, Artificial Sequence; identical to SEQ ID NO: 75944
  derived and/or modified CDS sequence (opt1) from hemagglutinin__InfluenzaA__AHV83931

SEQ ID NO: 76068 - RNA, 1701 nt, Artificial Sequence; identical to SEQ ID NO: 74064
  derived and/or modified CDS sequence (opt1) from hemagglutinin__InfluenzaA__AHV83932

SEQ ID NO: 76069 - RNA, 1701 nt, Artificial Sequence
  derived and/or modified CDS sequence (opt1) from hemagglutinin__InfluenzaA__AHV83933
augaaggccauccuggugguccuccuguacaccuucgccaccgcgaacgccgacacgcugugcaucggcuaccacgccaacaacagcaccgacaccguggacaccgugcucgagaagaacgucacggugacccacuccgugaaccugcuggaggacaagcacaacgggaagcucugcaagcugcgcggcgucacgccccugcaccucgggaagugcaacaucgccggcuggauccuggggaacccggagugcgagagccuguccaccgccagcuccuggagcuacaucguggagaccuccagcuccgacaacgggaccugcuaccccggcgacuucaucaacuacgaggagcuccgggagcagcugagcuccgugagcuccuucgagcgcuucgagaucuuccccaagaccagcuccuggcccaaccacgacagcaacaagggcgucaccgcggccugcccgcacgccggcgccaaguccuucuacaagaaccugaucuggcucgugaagaaggggaacagcuaccccaagcugucccagagcuacaucaacgacaagggcaaggaggugcugguccucugggggauccaccaccccagcacgaccgcggaccagcagucccuguaccagaacgccgacgccuacguguucgugggcaccagccgguacuccaagaaguucaagcccgagaucgccauccgcccgaagguccgggaccaggagggccgcaugaacuacuacuggacccugguggagcccggggacaagaucacguucgaggccaccggcaaccucguggucccccgguacgcguucaccauggagcgcaacgccgggagcggcaucaucaucuccgacacccccgugcacgacugcaacacgaccugccagaccccggagggcgccaucaacaccagccugcccuuccagaacauccaccccaucacgaucgggaagugccccaaguacgugaaguccaccaagcugcggcucgccaccggccugcgcaacgucccgagcauccagucccgggggcuguucggcgccaucgcgggguucaucgagggcggcuggaccgggaugguggacggcugguacggguaccaccaccagaacgagcagggcagcggguacgccgccgaccagaaguccacgcagaacgccaucgacaagaucaccaacaaggugaacagcgucaucgagaagaugaacacccaguucaccgccgugggcaaggaguucaaccaccucgagaagcgcaucgagaaccugaacaagaaggucgacgacggcuuccuggacaucuggacguacaacgcggagcuccuggugcugcucgagaacgagcggacccuggacuaccacgacuccaacgugaagaaccuguacgagaagguccgcaaccagcucaagaacaacgccaaggagaucgggaacggcugcuucgaguucuaccacaagugcgacaacacgugcauggagagcgugaagaacgggaccuacgacuaccccaaguacuccgaggaggccaagcugaaccgggagaagaucgacggcgugaagcuggagagcacccgcaucuaccagauccucgcccuguacuccaccgucgccagcucccuggugcucguggucagccugggggcgaucagcuucuggaugugcuccaacggcagccugcagugccggaucugcaucuga

SEQ ID NO: 76070 - RNA, 1701 nt, Artificial Sequence; identical to SEQ ID NO: 75027
  derived and/or modified CDS sequence (opt1) from hemagglutinin__InfluenzaA__AHV83934

SEQ ID NO: 76071 - RNA, 1701 nt, Artificial Sequence; identical to SEQ ID NO: 74064
  derived and/or modified CDS sequence (opt1) from hemagglutinin__InfluenzaA__AHV83935

SEQ ID NO: 76072 - RNA, 1701 nt, Artificial Sequence; identical to SEQ ID NO: 74064
  derived and/or modified CDS sequence (opt1) from hemagglutinin__InfluenzaA__AHV83937

SEQ ID NO: 76073 - RNA, 1701 nt, Artificial Sequence
  derived and/or modified CDS sequence (opt1) from hemagglutinin__InfluenzaA__AHV83938
augaaggccauccuggugguccuccuguacaccuucgccaccgcgaacgccgacacgcugugcaucggcuaccacgccaacaacagcaccgacaccguggacaccgugcucgagaagaacgucacggugacccacuccgugaaccugcuggaggacaagcacaacgggaagcucugcaagcugcgcggcgucgcgccccugcaccucgggaagugcaacaucgccggcuggauccuggggaacccggagugcgagagccuguccaccgccagcuccuggagcuacaucguggagaccuccagcuccgacaacggcacgugcuaccccggcgacuucaucaacuacgaggagcuccgggagcagcugagcuccgugagcuccuucgagcgcuucgagaucuuccccaagaccagcuccuggcccaaccacgacagcaacaagggggucaccgccgccugcccgcacgccggcgcgaaguccuucuacaagaaccugaucuggcucgugaagaaggggaacagcuaccccaagaucucccagagcuacaucaacgacaagggcaaggaggugcugguccugugggggauccaccaccccagcaccacggccgaccagcagucccucuaccagaacgccgacgccuacguguucgugggcaccagccgguacuccaagaaguucaagcccgagaucgccauccgcccgaagguccgggaccaggagggccgcaugaacuacuacuggacccugguggagcccggggacaagaucaccuucgaggcgacgggcaaccugguggucccccgguacgccuucaccauggagcgcaacgccgggagcggcaucaucaucuccgacacccccgugcacgacugcaacaccacgugccagaccccggagggcgccaucaacaccagccuccccuuccagaacauccaccccaucaccaucgggaagugccccaaguacgugaaguccacgaagcugcggcuggccaccggccuccgcaacgucccgagcauccagucccgggggcuguucggcgcgaucgccggguucaucgagggcggcuggaccgggaugguggacggcugguacggguaccaccaccagaacgagcagggcagcggguacgccgccgaccagaaguccacccagaacgccaucgacaagaucacgaacaaggugaacagcgucaucgagaagaugaacacccaguucaccgcggugggcaaggaguucaaccaccuggagaagcgcaucgagaaccucaacaagaaggucgacgacggcuuccuggacaucuggaccuacaacgccgagcugcucgugcugcuggagaacgagcggacgcucgacuaccacgacuccaacgugaagaaccuguacgagaagguccgcaaccagcugaagaacaacgccaaggagaucgggaacggcugcuucgaguucuaccacaagugcgacaacacgugcauggagagcgugaagaacgggaccuacgacuaccccaaguacuccgaggaggccaagcucaaccgggagaagaucgacggcgugaagcuggagagcacccgcaucuaccagauccuggccaucuacuccaccgucgcgagcucccucgugcugguggucagccugggggccaucagcuucuggaugugcuccaacggcagccuccagugccggaucugcaucuga

SEQ ID NO: 76074 - RNA, 1701 nt, Artificial Sequence; identical to SEQ ID NO: 76073
  derived and/or modified CDS sequence (opt1) from hemagglutinin__InfluenzaA__AHV83939

SEQ ID NO: 76075 - RNA, 1701 nt, Artificial Sequence
  derived and/or modified CDS sequence (opt1) from hemagglutinin__InfluenzaA__AHV83940
augaaggccauccuggugguccuccuguacaccuucgccaccgcgaacgccgacacgcugugcaucggcuaccacgccaacaacagcaccgacaccguggacaccgugcucgagaagaacgucacggugacccacuccgugaaccugcuggaggacaagcacaacgggaagcucugcaagcugcgcggcgucgcgccccugcaccucgggaagugcaacaucgccggcuggauccuggggaacccggagugcgagagccuguccaccgccagcuccuggagcuacaucguggagaccuccagcuccgacaacggcacgugcuaccccggcgacuucaucaacuacgaggagcuccgggagcagcugagcuccgugagcuccuucgagcgcuucgagaucuuccccaagaccagcuccuggcccaaccacgacagcaacaagggggucaccgccgccugcccgcacgccggcgcgaaguccuucuacaagaaccugaucuggcucgugaagaaggggaacagcuaccccaagcugucccagagcuacaucaacgacaagggcaaggaggugcugguccucugggggauccaccaccccagcaccacggccgaccagcagucccuguaccagaacgccgacgccuacguguucgugggcaccagccgguacuccaagaaguucaagcccgagaucgccauccgcccgaagguccgggaccaggagggccgcaugaacuacuacuggacccugguggagcccggggacaagaucaccuucgaggcgacgggcaaccucguggucccccgguacgccuucaccauggagcgcaacgccgggagcggcaucaucaucuccgacacccccgugcacgacugcaacaccacgugccagaccccggagggcgccaucaacaccagccugcccuuccagaacauccaccccaucaccaucgggaagugccccaaguacgugaaguccacgaagcugcggcucgccaccggccugcgcaacgucccgagcauccagucccgggggcuguucggcgcgaucgccggguucaucgagggcggcuggaccgggaugguggacggcugguacggguaccaccaccagaacgagcagggcagcggguacgccgccgaccagaaguccacccagaacgccaucgacaagaucacgaacaaggugaacagcgucaucgagaagaugaacacccaguucaccgcggugggcaaggaguucaaccaccucgagaagcgcaucgagaaccugaacaagaaggucgacgacggcuucauggacaucuggaccuacaacgccgagcugcucgugcugcuggagaacgagcggacgcucgacuaccacgacuccaacgugaagaaccuguacgagaagguccgcaaccagcugaagaacaacgccaaggagaucgggaacggcugcuucgaguucuaccacaagugcgacaacacgugcauggagagcgugaagaacgggaccuacgacuaccccaaguacuccgaggaggccaagcucaaccgggagaagaucgaccgcgugaagcuggagagcacccggaucuaccagauccuggccaucuacuccaccgucgcgagcucccucgugcugguggucagccugggcgccaucagcuucuggaugugcuccaacgggagccuccagugccgcaucugcaucuga

SEQ ID NO: 76076 - RNA, 1701 nt, Artificial Sequence; identical to SEQ ID NO: 74064
  derived and/or modified CDS sequence (opt1) from hemagglutinin__InfluenzaA__AHV83941

SEQ ID NO: 76077 - RNA, 1701 nt, Artificial Sequence
  derived and/or modified CDS sequence (opt1) from hemagglutinin__InfluenzaA__AHV83943
augaaggccauccuggugguccuccuguacaccuucgccaccgcgaacgccgacacgcugugcaucggcuaccacgccaacaacagcaccgacaccguggacaccgugcucgagaagaacgucacggugacccacuccgugaaccugcuggaggacaagcacaacgggaagcucugcaagcugcgcggcgucgcgccccugcaccucgggaagugcaacaucgccggcuggauccuggggaacccggagugcgagagccuguccaccgccagcuccuggagcuacaucguggagaccuccagcuccgacaacggcacgugcuaccccggcgacuucaucaacuacgaggagcuccgggagcagcugagcuccgugagcuccuucgagcgcuucgagaucuuccccaagaccagcuccuggcccaaccacgacagcaacaagggggucaccgccgccugcccgcacgccggcgcgaaguccuucuacaagaaccugaucuggcucgugaagaaggggaacagcuaccccaagcugucccagagcuacaucaacgacaagggcaaggaggugcugguccucugggggauccaccaccccagcaccacggccgaccagcagucccuguaccagaacgccgacgccuacguguucgugggcaccagccgguacuccaagaaguucaagcccgagaucgccauccgcccgaagguccgggaccaggagggccgcaugaacuacuacuggacccugguggagcccggggacaagaucaccuucgaggcgacgggcaaccucguggucccccgguacgccuucaccauggagcgcaacgccgggagcggcaucaucaucuccgacacccccgugcacgacugcaacaccacgugccagaccccggagggcgccaucaacaccagccugcccuuccagaacauccaccccaucaccaucgggaagugccccaaguacgugaaguccacgaagcugcggcucgccaccggccugcgcaacgucccgagcauccagucccgggggcuguucggcgcgaucgccggguucaucgagggcggcuggaccgggaugguggacggcugguacggguaccaccaccagaacgagcagggcagcggguacgccgccgaccucaaguccacccagaacgccaucgacaagaucacgaacaaggugaacagcgucaucgagaagaugaacacccaguucaccgcggugggcaaggaguucaaccaccuggagaagcgcaucgagaaccugaacaagaaggucgacgacggcuuccucgacaucuggaccuacaacgccgagcugcuggugcuccuggagaacgagcggacgcuggacuaccacgacuccaacgugaagaaccucuacgagaagguccgcaaccagcugaagaacaacgccaaggagaucgggaacggcugcuucgaguucuaccacaagugcgacaacaugugcauggagagcgugaagaacgggaccuacgacuaccccaaguacuccgaggaggccaagcugaaccgggagaagaucgacggcgugaagcucgagagcacccgcaucuaccagauccuggccaucuacuccaccgucgcgagcucccuggugcucguggucagccugggggccaucagcuucuggaugugcuccaacggcagccugcagugccggaucugcaucuga

SEQ ID NO: 76078 - RNA, 1701 nt, Artificial Sequence
  derived and/or modified CDS sequence (opt1) from hemagglutinin__InfluenzaA__AHV83944
augaaggccauccuggugguccuccuguacaccuucgccaccgcgaacgccgacacgcugugcaucggcuaccacgccaacaacagcaccgacaccguggacaccgugcucgagaagaacgucacggugacccacuccgugaaccugcuggaggacgagcacaacgggaagcucugcaagcugcgcggcgucgcgccccugcaccucgggaagugcaacaucgccggcuggauccuggggaacccggagugcgagagccuguccaccgccagcuccuggagcuacaucguggagaccuccagcuccgacaacggcacgugcuaccccggcgacuucaucaacuacgaggagcuccgggagcagcugagcuccgugagcuccuucgagcgcuucgagaucuuccccaagaccagcuccuggcccaaccacgacagcaacaagggggucaccgccgccugcccgcacgccggcgcgaaguccuucuacaagaaccugaucuggcucgugaagaaggggaacagcuaccccaagcugucccagagcuacaucaacgacaagggcaaggaggugcugguccucugggggauccaccaccccagcaccacggccgaccagcagucccuguaccagaacgccgacgccuacguguucgugggcaccagccgguacuccaagaaguucaagcccgagaucgccauccgcccgaagguccgggaccaggagggccgcaugaacuacuacuggacccugguggagcccggggacaagaucaccuucgaggcgacgggcaaccucguggucccccgguacgccuucaccauggagcgcaacgccgggagcggcaucaucaucuccgacacccccgugcacgacugcaacaccacgugccagaccccggagggcgccaucaacaccagccugcccuuccagaacauccaccccaucaccaucgggaagugccccaaguacgugaaguccacgaagcugcggcucgccaccggccugcgcaacgucccgagcauccagucccgggggcuguucggcgcgaucgccggguucaucgagggcggcuggaccgggaugguggacggcugguacggguaccaccaccagaacgagcagggcagcggguacgccgccgaccucaaguccacccagaacgccaucgacaagaucacgaacaaggugaacagcgucaucgagaagaugaacacccaguucaccgcggugggcaaggaguucaaccaccuggagaagcgcaucgagaaccugaacaagaaggucgacgacggcuuccucgacaucuggaccuacaacgccgagcugcuggugcuccuggagaacgagcggacgcuggacuaccacgacuccaacgugaagaaccucuacgagaagguccgcaaccagcugaagaacaacgccaaggagaucgggaacggcugcuucgaguucuaccacaagugcgacaacacgugcauggagagcgugaagaacgggaccuacgacuaccccaaguacuccgaggaggccaagcugaaccgggagaagaucgacggcgugaagcucgagagcacccgcaucuaccagauccuggccaucuacuccaccgucgcgagcucccuggugcucguggucagccugggggccaucagcuucuggaugugcuccaacggcagccugcagugccggaucugcaucuga

SEQ ID NO: 76079 - RNA, 1701 nt, Artificial Sequence
  derived and/or modified CDS sequence (opt1) from hemagglutinin__InfluenzaA__AHV83945
augaaggccauccuggugguccuccuguacaccuucgccaccgcgaacgccgacacgcugugcaucggcuaccacgccaacaacagcaccgacaccguggacaccgugcucgagaagaacgucacggugacccacuccgugaaccugcuggaggacaagcacaacgggaagcucugcaagcugcgcggcgucgcgccccugcaccucgggaagugcaacaucgccggcuggauccuggggaacccggagugcgagagccuguccaccgccagcuccuggagcuacaucguggagaccuccagcuccgacaacggcacgugcuaccccggcgacuucaucaacuacgaggagcuccgggagcagcugagcuccgugagcuccuucgagcgcuucgagaucuuccccaagaccagcuccuggcccaaccacgacagcaacaagggggucaccgccgccugcccgcacgccggcgcgaaguccuucuacaagaaccugaucuggcucgugaagaaggggaacagcuaccccaagcugucccagagcuacaucaacgacaagggcaaggaggugcugguccucugggggauccaccaccccagcaccacgaccgaccagcagucccuguaccagaacgccgacgccuacguguucgugggcaccagccgguacuccaagaaguucaagcccgagaucgccauccgcccgaagguccgggaccaggagggccgcaugaacuacuacuggacccugguggagcccggggacaagaucacguucgaggccaccggcaaccucguggucccccgguacgcguucaccauggagcgcaacgccgggagcggcaucaucaucuccgacacccccgugcacgacugcaacacgaccugccagaccccggagggcgccaucaacaccagccugcccuuccagaacauccaccccaucacgaucgggaagugccccaaguacgugaaguccaccaagcugcggcucgccaccggccugcgcaacgucccgagcauccagucccgggggcuguucggcgccaucgcgggguucaucgagggcggcuggaccgggaugguggacggcugguacggguaccaccaccagaacgagcagggcagcggguacgccgccgaccucaaguccacgcagaacgccaucgacaagaucaccaacaaggugaacagcgucaucgagaagaugaacacccaguucaccgccgugggcaaggaguucaaccaccuggagaagcgcaucgagaaccugaacaagaaggucgacgacggcuuccucgacaucuggacguacaacgcggagcugcuggugcuccuggagaacgagcggacccuggacuaccacgacuccaacgugaagaaccucuacgagaagguccgcaaccagcugaagaacaacgccaaggagaucgggaacggcugcuucgaguucuaccacaagugcgacaacacgugcauggagagcgugaagaacgggaccuacgacuaccccaaguacuccgaggaggccaagcugaaccgggagaagaucgacggcgugaagcucgagagcacccgcaucuaccagauccuggccaucuacuccaccgucgccagcucccuggugcucguggucagccugggggcgaucagcuucuggaugugcuccaacggcagccugcagugccggaucugcaucuga

SEQ ID NO: 76080 - RNA, 1701 nt, Artificial Sequence
  derived and/or modified CDS sequence (opt1) from hemagglutinin__InfluenzaA__AHV83947
augaaggccauccuggugguccuccuguacaccuucgccaccgcgaacgccgacacgcugugcaucggcuaccacgccaacaacagcaccgacaccguggacaccgugcucgagaagaacgucacggugacccacuccgugaaccugcuggaggacaagcacaacgggaagcucugcaagcugcgcggcgucgcgccccugcaccucgggaagugcaacaucgccggcuggauccuggggaacccggagugcgagagccuguccaccgccagcuccuggagcuacaucguggagaccuccagcuccgacaacggcacgugcuaccccggcgacuucaucaacuacgaggagcuccgggagcagcugagcuccgugagcuccuucgagcgcuucgagaucuuccccaagaccagcuccuggcccaaccacgacagcaacaagggggucaccgccgccugcccgcacgccggcgcgaaguccuucuacaagaaccugaucuggcucgugaagaaggggaacagcuaccccaagcugucccagagcuacaucaacgacaagggcaaggaggugcugguccucugggggauccaccaccccagcaccacggccgaccagcagucccuguaccagaacgccgacgccuacguguucgugggcaccagccgguacuccaagaaguucaagcccgagaucgccauccgcccgaagguccgggaccaggagggccgcaugaacuacuacuggacccugguggagcccggggacaagaucaccuucgaggcgacgggcaaccucguggucccccgguacgccuucaccgugaagcgcaacgccgggagcggcaucaucaucuccgacacccccgugcacgacugcaacaccacgugccagaccccggagggcgccaucaacaccagccugcccuuccagaacauccaccccaucaccaucgggaagugccccaaguacgucaaguccacgaagcugcggcucgccaccggccugcgcaacgugccgagcauccagucccgggggcuguucggcgcgaucgccggguucaucgagggcggcuggaccgggaugguggacggcugguacggguaccaccaccagaacgagcagggcagcggguacgccgccgaccagaaguccacccagaacgccaucgacaagaucacgaacaaggucaacagcgugaucgagaagaugaacacccaguucaccgcggucggcaaggaguucaaccaccucgagaagcgcaucgagaaccugaacaagaagguggacgacggcuuccuggacaucuggaccuacaacgccgagcuccuggugcugcucgagaacgagcggacgcuggacuaccacgacuccaacgucaagaaccuguacgagaaggugcgcaaccagcucaagaacaacgccaaggagaucgggaacggcugcuucgaguucuaccacaagugcgacaacacgugcauggagagcgugaagaacgggaccuacgacuaccccaaguacuccgaggaggccaagcugaaccgggagaagaucgacggcgucaagcuggagagcacccgcaucuaccagauccucgccaucuacuccaccguggcgagcucccuggugcuggucgugagccucggggccaucagcuucuggaugugcuccaacggcagccugcagugccggaucugcaucuga

SEQ ID NO: 76081 - RNA, 1701 nt, Artificial Sequence; identical to SEQ ID NO: 74064
  derived and/or modified CDS sequence (opt1) from hemagglutinin__InfluenzaA__AHV83948

SEQ ID NO: 76082 - RNA, 1701 nt, Artificial Sequence; identical to SEQ ID NO: 74064
  derived and/or modified CDS sequence (opt1) from hemagglutinin__InfluenzaA__AHV83949

SEQ ID NO: 76083 - RNA, 1701 nt, Artificial Sequence; identical to SEQ ID NO: 74064
  derived and/or modified CDS sequence (opt1) from hemagglutinin__InfluenzaA__AHV83950

SEQ ID NO: 76084 - RNA, 1701 nt, Artificial Sequence
  derived and/or modified CDS sequence (opt1) from hemagglutinin__InfluenzaA__AHV83953
augaagaccaucaucgcccugagcuacauccucugccugguguucgcccagaagcugcccggcaacgacaacuccaccgcgacgcucugccuggggcaccacgccgucccgaacggcaccaucgugaagaccaucaccaacgaccgcaucgaggugacgaacgccaccgagcugguccagaacagcuccaucggggagaucugcgacagcccccaccagauccucgacggcgagaacugcacccugaucgacgcccugcucggggacccccagugcgacggcuuccagaacaagaagugggaccuguucguggagcgguccaaggccuacagcaacugcuaccccuacgacgugccggacuacgcgucccugcgcagccucgucgccuccagcggcacccuggaguucaacaacgaguccuucaacugggccggggugacgcagaacggcaccagcuccgccugcauccgggggagcaacuccagcuucuucucccgccugaacuggcucacccaccugaacuucaaguaccccgcgcugaacgugaccaugcccaacaacgagcaguucgacaagcucuacaucuggggcguccaccaccccgggacggacaaggaccagaucuuccuguacgcccagagcuccggccggaucaccgugagcaccaagcgcagccagcaggccgugaucccgaacaucggcucccggccccgcauccggaacauccccagccgcaucuccaucuacuggaccaucgucaagcccggggacauccugcucaucaacagcacgggcaaccugaucgccccgcggggguacuucaagauccgcuccggcaagagcuccaucaugcggagcgacgcccccaucggcaagugcaaguccgagugcaucacccccaacgggagcauccccaacgacaagccguuccagaacgugaaccgcaucaccuacggcgcgugcccccgguacgugaagcaguccacccugaagcucgccacggggaugcgcaacguccccgagaagcagacccggggcaucuucggggccaucgccggcuucaucgagaacggcugggaggggaugauggacggcugguacggguuccgccaccagaacagcgagggccgggggcaggccgcggaccugaaguccacccaggccgccaucgaccagaucaacggcaagcugaaccgccucaucggcaagaccaacgagaaguuccaccagaucgagaaggaguucagcgagguggaggggcggauccaggaccuggagaaguacguggaggacacgaagaucgaccugugguccuacaacgccgagcuccuggucgcccuggagaaccagcacaccaucgaccucaccgacagcgagaugaacaagcuguucgagaagaccaagaagcagcugcgcgagaacgcggaggaccucggcaacgggugcuucaagaucuaccacaagugcgacaacgccugcaucggcuccauccgcaacgggacguacgaccacgacguguaccgggacgaggcccugaacaaccgcuuccagaucaagggcguggagcucaagagcggcuacaaggacuggauccuguggaucuccuucgccaucagcugcuuccugcugugcgucgcccuccugggguucaucaugugggcgugccagaagggcaacauccggugcaacaucugcaucuga

SEQ ID NO: 76085 - RNA, 1701 nt, Artificial Sequence; identical to SEQ ID NO: 75916
  derived and/or modified CDS sequence (opt1) from hemagglutinin__InfluenzaA__AHV83954

SEQ ID NO: 76086 - RNA, 1701 nt, Artificial Sequence
  derived and/or modified CDS sequence (opt1) from hemagglutinin__InfluenzaA__AHV83956
augaagaccaucaucgcccugagcuacauccucugccugguguucgcccagaagcugcccggcaacgacaacuccaccgcgacgcucugccuggggcaccacgccgucccgaacggcaccaucgugaagaccaucaccaacgaccgcaucgaggugacgaacgccaccgagcugguccagaacagcuccaucggggagaucugcgacagcccccaccagauccucgacggcgagaacugcacccugaucgacgcccugcucggggacccccagugcgacggcuuccagaacaagaagugggaccuguucguggagcgguccaaggccuacagcaacugcuaccccuacgacgugccggacuacgcgucccugcgcagccucgucgccuccagcggcacccuggaguucaacaacgagaacuucaacugggccggggugacgcagaacggcaccuccagcgccugcauccggggguccaacagcuccuucuucagccgccugaacuggcucacccaccugaacuucaaguaccccgcgcugaacgugaccaugcccaacaacgagcaguucgacaagcucuacaucuggggcguccaccaccccgggacggacaaggaccagaucuuccuguacgcccaguccagcggccggaucaccguguccaccaagcgcagccagcaggccgugaucccgaacaucggcagccggccccgcauccggaacauccccucccgcaucagcaucuacuggaccaucgucaagcccggggacauccugcucaucaacuccacgggcaaccugaucgccccgcggggguacuucaagauccgcagcggcaaguccagcaucaugcgguccgacgcccccaucggcaagugcaagagcgagugcaucacccccaacggguccauccccaacgacaagccguuccagaacgugaaccgcaucaccuacggcgcgugcccccgguacgugaagcagagcacccugaagcucgccacggggaugcgcaacguccaggagaagcagacccggggcaucuucggggccaucgccggcuucaucgagaacggcugggaggggaugaaggacggcugguacggguuccgccaccagaacuccgagggccgggggcaggccgcggaccucaagagcacccaggccgccaucgaccagaucaacggcaagcugaaccgccugaucggcaagaccaacgagaaguuccaccagaucgagaaggaguucuccgagguggaggggcggauccaggaccuggagaaguacguggaggacacgaagaucgaccuguggagcuacaacgccgagcuccuggucgcccuggagaaccagcacaccaucgaccucaccgacuccgagaugaacaagcuguucgagaagaccaagaagcagcugcgcgagaacgcggaggacaugggcaacgggugcuucaagaucuaccacaagugcgacaacgccugcaucggcagcauccgcaacgggacguacgaccacgacguguaccgggacgaggcccucaacaaccgcuuccagaucaagggcguggagcugaaguccggcuacaaggacuggauccuguggaucagcuucgccaucuccugcuuccuccugugcgucgcccugcucggguucaucaugugggcgugccagaagggcaacauccggugcaacaucugcaucuga

SEQ ID NO: 76087 - RNA, 1701 nt, Artificial Sequence
  derived and/or modified CDS sequence (opt1) from hemagglutinin__InfluenzaA__AHZ13523
augaagaccaucaucgcccugagcuacaucuucugccucguguucgcccagaagcugcccggcaacgacaacuccaccgcgacgcugugccucgggcaccacgccgucccgaacggcacccuggugaagaccaucaccaacgaccagaucgaggugacgaacgccaccgagcugguccagagcuccagcaccgggcgcaucugcgacagcccccaccggauccucgacggcaagaacugcacccugaucgacgcccugcucggggacccccacugcgacggcuuccagaacgagaagugggaccuguucguggagcgcagcaaggccuucuccaacugcuaccccuacgacgugccggacuacgcgagccugcggucccucgucgccagcuccggcacgcuggaguucaucaacgagggguucaacuggaccggcgugacccagagcgggggcuccuacgccugcaagcgcgggagcgugaacuccuucuucagccggcugaacuggcucuacaaguccgagagcaaguaccccguccugaacgugaccaugcccaacaacggcaaguucgacaagcuguacaucuggggcgugcaccaccccuccacggacaaggagcagaccaaccucuacguccgcgccagcgggcgggugaccgugagcaccaagcgcucccagcagacggucaucccgaacaucggcagccggcccugggugcgcgggcuguccagccggaucuccaucuacuggaccaucgugaagcccggcgacauccugcucaucaacagcaccggcaaccugaucgcgccccgcggguacuucaagauccggaccggcaaguccagcaucaugcgcuccgacgccccgaucgggacgugcagcuacgagugcaucacccccaacggcuccauccccaacgacaagcccuuccagaacgucaacaagaucaccuacggggccugcccgcgguacgugaagcagaacacccugaagcucgccacgggcaugcgcaacgugcccgagaagcagacccggggcaucuucggggccaucgcgggcuucaucgagaacgggugggagggcauggucgacgggugguacggcuuccgccaccagaacagcgagggcaccgggcaggccgccgaccugaaguccacccaggccgccaucgaccagaucaacggcaagcugaaccggcucaucgagaagacgaacgagaaguuccaccagaucgagaaggaguucagcgagguggaggggcgcauccaggaccuggagaaguacguggaggacaccaagaucgaccugugguccuacaacgcggagcuccuggucgcccuggagaaccagcacaccaucgaccucaccgacagcgagaugaacaagcuguucgagaagacgcggaagcagcugcgcgagaacgccgaggacaugggcaacgggugcuucaagaucuaccacaagugcgacaacgccugcaucggcuccauccgcaacggcaccuacaaccacgacguguaccgggacgaggcccucaacaaccgcuuccagaucaagggggucgagcugaaguccggcuacaaggacuggauccuguggaucuccuucgcgaucagcugcuuccuccugugcguggugcugcucggguucaucaugugggccugccagaagggcaacauccggugcaacaucugcaucuga

SEQ ID NO: 76088 - RNA, 1698 nt, Artificial Sequence; identical to SEQ ID NO: 67640
  derived and/or modified CDS sequence (opt1) from hemagglutinin__InfluenzaA__AHZ13582

SEQ ID NO: 76089 - RNA, 1701 nt, Artificial Sequence
  derived and/or modified CDS sequence (opt1) from hemagglutinin__InfluenzaA__AHZ35584
augaagaccaucaucgcccugagcuacauccucugccugaucuucgcccaggagauccccggcaacgacaacuccaccgcgacgcugugccucgggcaccacgccgugccgaacggcaccaucgucaagaccaucaccaacgaccagaucgaggugacgaacgccaccgagcuggugcagagcuccagcaccggggagaucugcaacagcccccaccagauccuggacggcgagaacugcacccucaucgacgcccugcugggggacccccagugcgacgacuuccagaacaagaagugggaccucuucgucgagcgcuccaaggcccacuccaacugcuaccccuacgacgugccggacuacgcgagccugcggucccugguggccagcuccggcacgcucgaguucaacaacgagagcuucaacuggaccggcgucacccagaacgggaccuccagcgccugcauccgccgguccaacaacagcuucuucucccgccugaacuggcugacgcaccucaacuucaaguaccccgcccugaacgugaccaugcccaacaacgagcaguucgacaagcuguacaucuggggcgugcaccaccccgggaccgacaaggaccagaucuuccucuacgcgcaggccagcggccggaucaccgucuccacgaagcgcagccagcaggccgugaucccgaacaucgggagccggccccgcgugcggaacauccccucccgcgucagcaucuacuggaccaucgugaagcccggcgacauccugcugaucaacuccaccggcaaccucaucgccccgcggggguacuucaagauccgcagcggcaaguccagcaucaugcgguccgacgcccccaucgggaagugcaacagcgcgugcaucacccccaacggcuccauccccaacgacaagccguuccagaacgugaaccgcaucacguacggcgccugcccccgguacgucaagcagaacacccugaagcuggccaccgggaugcgcaacgugcccgagaagcagacccggggcaucuucggggccaucgccggcuucaucgagaacgggugggagggcaugguggacggcugguacggguuccgccaccagaacagcgagggccgggggcaggcggccgaccucaaguccacgcaggccgccaucgaccagaucaacggcaagcugaaccgccugaucgggaagaccaacgagaaguuccaccagaucgagaaggaguucagcgaggucgagggccggauccaggaccucgagaaguacguggaggacaccaagaucgaccugugguccuacaacgccgagcugcucguggcgcuggagaaccagcacaccaucgaccugacggacagcgagaugaacaagcuguucgagaagaccaagaagcagcuccgcgagaacgccgaggacaugggcaacgggugcuucaagaucuaccacaagugcgacaacgccugcaucggcuccauccgcaacgggaccuacgaccacgacgucuaccgggacgaggcccugaacaaccgcuuccagaucaagggcguggagcucaagagcggguacaaggacuggauccuguggaucuccuucgccaucagcugcuuccugcucugcguggcgcugcugggcuucaucaugugggccugccagaagggcaacauccggugcaacaucugcaucuga

SEQ ID NO: 76090 - RNA, 1701 nt, Artificial Sequence
  derived and/or modified CDS sequence (opt1) from hemagglutinin__InfluenzaA__AHZ35608
augaagaccaucaucgcccugagcuacauccucugccugaucuucgcccaggagauccccggcaacgacaacuccaccgcgacgcugugccucgggcaccacgccgugccgaacggcaccaucgucaagaccaucaccaacgaccagaucgaggugacgaacgccaccgagcuggugcagagcuccagcaccggggagaucugcaacagcccccaccagauccuggacggcgagaacugcacccucaucgacgcccugcugggggacccccagugcgacgacuuccagaacaaggagugggaccucuucgucgagcgcuccaaggcccacuccaacugcuaccccuacgacgugccggacuacgcgagccugcggucccugguggccagcuccggcacgcucgaguucaacaacgagagcuucaacuggaccggcgucacccagaacgggaccuccagcgccugcauccgccgguccaacaacagcuucuucucccgccugaacuggcugacgcaccucaacuucaaguaccccgcccugaacgugaccaugcccaacaacgagcaguucgacaagcuguacaucuggggcgugcaccaccccgggaccgacaaggaccagaucuuccucuacgcgcaggccagcggccggaucaccgucuccacgaagcgcagccagcaggccgugaucccgaacaucgggagccggccccgcgugcggaacauccccucccgcgucagcaucuacuggaccaucgugaagcccggcgacauccugcugaucaacuccaccggcaaccucaucgccccgcggggguacuucaagauccgcagcggcaaguccagcaucaugcgguccgacgcccccaucgggaagugcaacagcgcgugcaucacccccaacggcuccauccccaacgacaagccguuccagaacgugaaccgcaucacguacgggaccugcccccgguacgucaagcagaacacccugaagcuggccaccggcaugcgcaacgugcccgagaagcagacgcggggcaucuucggggccaucgccggcuucaucgagaacgggugggagggcaugguggacggcugguacggguuccgccaccagaacagcgagggccgggggcaggccgcggaccucaaguccacccaggccgccaucgaccagaucaacggcaagcugaaccgccugaucgggaagaccaacgagaaguuccaccagaucgagaaggaguucagcgaggucgagggccggauccaggaccucgagaaguacguggaggacaccaagaucgaccugugguccuacaacgccgagcugcucguggcccuggagaaccagcacacgaucgaccugaccgacagcgagaugaacaagcuguucgagaagaccaagaagcagcuccgcgagaacgcggaggacaugggcaacgggugcuucaagaucuaccacaagugcgacaacgccugcaucggcuccauccgcaacgggaccuacgaccacgacgucuaccgggacgaggcccugaacaaccgcuuccagaucaagggcguggagcucaagagcggguacaaggacuggauccuguggaucuccuucgccaucagcugcuuccugcucugcguggcccugcugggcuucaucaugugggcgugccagaagggcaacauccggugcaacaucugcaucuga

SEQ ID NO: 76091 - RNA, 1701 nt, Artificial Sequence; identical to SEQ ID NO: 76089
  derived and/or modified CDS sequence (opt1) from hemagglutinin__InfluenzaA__AHZ35620

SEQ ID NO: 76092 - RNA, 1701 nt, Artificial Sequence; identical to SEQ ID NO: 76089
  derived and/or modified CDS sequence (opt1) from hemagglutinin__InfluenzaA__AHZ35632

SEQ ID NO: 76093 - RNA, 1701 nt, Artificial Sequence; identical to SEQ ID NO: 76089
  derived and/or modified CDS sequence (opt1) from hemagglutinin__InfluenzaA__AHZ35644

SEQ ID NO: 76094 - RNA, 1701 nt, Artificial Sequence; identical to SEQ ID NO: 76089
  derived and/or modified CDS sequence (opt1) from hemagglutinin__InfluenzaA__AHZ35656

SEQ ID NO: 76095 - RNA, 1701 nt, Artificial Sequence; identical to SEQ ID NO: 76089
  derived and/or modified CDS sequence (opt1) from hemagglutinin__InfluenzaA__AHZ35668

SEQ ID NO: 76096 - RNA, 1701 nt, Artificial Sequence; identical to SEQ ID NO: 76090
  derived and/or modified CDS sequence (opt1) from hemagglutinin__InfluenzaA__AHZ35680

SEQ ID NO: 76097 - RNA, 1701 nt, Artificial Sequence; identical to SEQ ID NO: 76089
  derived and/or modified CDS sequence (opt1) from hemagglutinin__InfluenzaA__AHZ35692

SEQ ID NO: 76098 - RNA, 1701 nt, Artificial Sequence; identical to SEQ ID NO: 76089
  derived and/or modified CDS sequence (opt1) from hemagglutinin__InfluenzaA__AHZ35716

SEQ ID NO: 76099 - RNA, 1701 nt, Artificial Sequence; identical to SEQ ID NO: 76090
  derived and/or modified CDS sequence (opt1) from hemagglutinin__InfluenzaA__AHZ35728

SEQ ID NO: 76100 - RNA, 1701 nt, Artificial Sequence; identical to SEQ ID NO: 76089
  derived and/or modified CDS sequence (opt1) from hemagglutinin__InfluenzaA__AHZ35740

SEQ ID NO: 76101 - RNA, 1701 nt, Artificial Sequence; identical to SEQ ID NO: 76089
  derived and/or modified CDS sequence (opt1) from hemagglutinin__InfluenzaA__AHZ35752

SEQ ID NO: 76102 - RNA, 1701 nt, Artificial Sequence; identical to SEQ ID NO: 76089
  derived and/or modified CDS sequence (opt1) from hemagglutinin__InfluenzaA__AHZ35764

SEQ ID NO: 76103 - RNA, 1701 nt, Artificial Sequence; identical to SEQ ID NO: 76089
  derived and/or modified CDS sequence (opt1) from hemagglutinin__InfluenzaA__AHZ35776

SEQ ID NO: 76104 - RNA, 1701 nt, Artificial Sequence
  derived and/or modified CDS sequence (opt1) from hemagglutinin__InfluenzaA__AHZ35823
augaaggccauccuggugguccuccuguacaccuucgccaucgcgaacgccgacacccugugcaucggcuaccacgccaacaacagcacggacaccguggacaccgugcucgagaagaacgucaccgugacgcacuccgugaaccugcuggaggacaagcacaacgggaagcucugcaagcugcgcggcgucgcgccccugcaccucgggaagugcaacaucgccggcuggauccuggggaacccggagugcgagagccuguccaccgccagcuccuggagcuacaucguggagaccuccagcuccgacaacgggaccugcuaccccggcgacuucaucaacuacgaggagcuccgggagcagcugagcuccgugagcuccuucgagcgcuucgagauguuccccaagacgagcuccuggcccaaccacgacagcaacaagggcgucaccgccgccugcccgcacgccggcgcgaaguccuucuacaagaaccugaucuggcucgugaagaaggggaacagcuaccccaagcuguccaagagcuacaucaacgacaagggcaaggaggugcugguccucugggggauccaccaccccagcaccaccgccgaccagcagucccuguaccagaacgccgacgccuacguguucgugggcacgagccgguacuccaagaaguucaagcccgagaucgccauccgcccgaagguccgggaccaggagggccgcaugaacuacuacuggacccugguggagcccggggacaagaucaccuucgaggcgaccggcaaccucguggucccccgguacgccuucgccauggagcgcaacgccgggagcggcaucaucaucuccgacacgcccgugcacgacugcaacacgaccugccagaccccgaagggcgccaucaacaccagccugcccuuccagaacauccaccccaucaccaucgggaagugccccaaguacgugaaguccaccaagcugcggcucgcgaccggccugcgcaacgucccgagcauccagucccgggggcuguucggcgccaucgccggguucaucgagggcggcuggacggggaugguggacggcugguacggguaccaccaccagaacgagcagggcagcggguacgccgccgaccucaaguccacccagaacgcgaucgacaagaucaccaacaaggugaacagcgucaucgagaagaugaacacccaguucacggccgugggcaaggaguucaaccaccuggagaagcgcaucgagaaccugaacaagaaggucgacgacggcuuccucgacaucuggaccuacaacgccgagcugcuggugcuccuggagaacgagcggacccuggacuaccacgacuccaacgugaagaaccucuacgagaagguccgcaaccagcugaagaacaacgccaaggagaucgggaacggcugcuucgaguucuaccacaagugcgacaacacgugcauggagagcgugaagaacgggaccuacgacuaccccaaguacuccgaggaggccaagcugaaccgggaggagaucgacggcgugaagcucgagagcacccgcaucuaccagauccuggcgaucuacuccaccgucgccagcucccuggugcucguggucagccugggggccaucagcuucuggaugugcuccaacggcagccugcagugccggaucugcaucuga

SEQ ID NO: 76105 - RNA, 1701 nt, Artificial Sequence; identical to SEQ ID NO: 76104
  derived and/or modified CDS sequence (opt1) from hemagglutinin__InfluenzaA__AHZ35834

SEQ ID NO: 76106 - RNA, 1701 nt, Artificial Sequence; identical to SEQ ID NO: 76104
  derived and/or modified CDS sequence (opt1) from hemagglutinin__InfluenzaA__AHZ35845

SEQ ID NO: 76107 - RNA, 1701 nt, Artificial Sequence; identical to SEQ ID NO: 76104
  derived and/or modified CDS sequence (opt1) from hemagglutinin__InfluenzaA__AHZ35856

SEQ ID NO: 76108 - RNA, 1701 nt, Artificial Sequence
  derived and/or modified CDS sequence (opt1) from hemagglutinin__InfluenzaA__AHZ35867
augaagaccaacaucgcccugagcuacauccucugccugguguccgcccagaagcugcccggcaacgacaacagcaccgcgacgcucugccuggggcaccacgccgucccgaacggcaccaucgugaagaccaucaccaacgaccagaucgaggugacgaacgccaccgagcugguccaguccagcuccaccggggagaucugcaacagcccccaccagauccucgacggcgagaacugcacccugaucgacgcccugcucggggacccccagugcgacggcuuccagaacaagaagugggaccuguucguggagcgcuccaaggcccacagcaacugcuaccccuacgacgugccggacuacgcgucccugcggagccucgucgccuccagcggcacgcuggaguucaacaacgaguccuucaacuggaccggggugacccagaacggcaccagcuccgccugcauccgccggagcaacaacuccuucuucagccgccugaacuggcucacgcaccugaacuucaaguaccccgcccugaacgugaccaugcccaacaacgagcaguucgacaagcucuacaucuggggcguccaccaccccgggaccgacaaggaccagaucuuccuguacgcgcaggccgccgggcggaucaccguguccacgaagcgcagccagcaggccgugaucccgaacaucggcagccggccccgcguccggaacauccccucccgcgugagcaucuacuggaccaucgugaagcccggcgacauccugcucaucaacuccaccgggaaccugaucgccccgcggggcuacuucaagauccgcagcgggaaguccagcaucaugcgguccgacgcgcccaucggcaagugcaacagcgccugcaucacccccaacggcuccauccccaacgacaagccguuccagaacgucaaccgcaucacguacggggccugcccccgguacgugaagcagaacacccugaagcucgccaccggcaugcgcaacgugcccgagaagcagacccgggggaucuucggcgccaucgcgggguucaucgagaacggcugggagggcauggucgacgggugguacggcuuccgccaccagaacagcgaggggcggggccaggccgccgaccugaaguccacgcaggccgccaucgaccagaucaacgggaagcugaaccgccucaucggcaagaccaacgagaaguuccaccagaucgagaaggaguucagcgagguggagggccggauccaggaccuggagaaguacguggaggacaccaagaucgaccugugguccuacaacgcggagcuccuggucgugcuggagaaccagcacaccaucgaccucacggacagcgagaugaacaagcuguucgagaagaccaagaagcagcugcgcgagaacgccgaggacauggggaacggcugcuucaagaucuaccacaagugcgacaacgccugcaucggguccauccgcaacggcaccuacgaccacgacguguaccgggacgaggcccucaacaaccgcuuccagaucaagggggucgagcucaagagcggcuacaaggacuggauccuguggaucuccuucgccaucagcugcuuccugcugugcguggcgcugcucggcuucaucaugugggccugccagaaggggaacauccggugcaacaucugcaucuga

SEQ ID NO: 76109 - RNA, 1701 nt, Artificial Sequence
  derived and/or modified CDS sequence (opt1) from hemagglutinin__InfluenzaA__AHZ35879
augaagaccaacaucgcccugagcuacauccucugccugguguccgcccagaagcugcccggcaacgacaacagcaccgcgacgcucugccuggggcaccacgccgucccgaacggcaccaucgugaagaccaucaccaacgaccagaucgaggugacgaacgccaccgagcugguccaguccagcuccaccggggagaucugcaacagcccccaccagauccucgacggcgagaacugcacccugaucgacgcccugcucggggacccccagugcgacggcuuccagaacaagaagugggaccuguucguggagcgcuccaaggcccacagcaacugcuaccccuacgacgugccggacuacgcgucccugcggagccucgucgccuccagcggcacgcuggaguucaacaacgaguccuucaacuggaccggggugacccagaacggcaccagcuccgccugcauccgccggagcaacaacuccuucuucagccgccugaacuggcucacgcaccugaacuucaaguaccccgcccugaacgugaccaugcccaacaacgagcaguucgacaagcucuacaucuggggcguccaccaccccgggaccgacaaggaccagaucuuccuguacgcgcaggccgccgggcggaucaccguguccacgaagcgcagccagcaggccgugaucccgaacaucggcagccggccccgcguccggaacauccccucccgcgugagcaucuacuggaccaucgugaagcccggcgacauccugcucaucaacuccaccgggaaccugaucgccccgcggggcuacuucaagauccgcagcgggaaguccagcaucaugcgguccgacgcgcccaucggcaagugcaacagcgccugcaucacccccaacggcuccauccccaacgacaagccguuccagaacgucaaccgcaucacguacggggccugcccccgguacgugaagcagaacacccugaagcucgccaccggcaugcgcaacgugcccgagaagcagacccgggggaucuucggcgccaucgcgggguucaucgagaacggcugggagggcauggucgacgggugguacggcuuccgccaccagaacagcgaggggcggggccaggccgccgaccugaaguccacgcaggccgccaucgaccagaucaacgggaagcugaaccgccucaucggcaagaccaacgagaaguuccaccagaucgagaaggaguucagcgagguggagggccggauccaggaccuggagaaguacguggaggacaccaagaucgaccugugguccuacaacgcggagcuccuggucgcccuggagaaccagcacaccaucgaccucacggacagcgagaugaacaagcuguucgagaagaccaagaagcagcugcgcgagaacgccgaggacauggggaacggcugcuucaagaucuaccacaagugcgacaacgccugcaucggguccauccgcaacggcaccuacgaccacgacguguaccgggacgaggcccucaacaaccgcuuccagaucaaggggguggagcucaagagcggcuacaaggacuggauccuguggaucuccuucgcgaucagcugcuuccugcugugcgucgcccugcucggcuucaucaugugggccugccagaaggggaacauccggugcaacaucugcaucuga

SEQ ID NO: 76110 - RNA, 1701 nt, Artificial Sequence; identical to SEQ ID NO: 76104
  derived and/or modified CDS sequence (opt1) from hemagglutinin__InfluenzaA__AHZ35891

SEQ ID NO: 76111 - RNA, 1701 nt, Artificial Sequence; identical to SEQ ID NO: 76104
  derived and/or modified CDS sequence (opt1) from hemagglutinin__InfluenzaA__AHZ35902

SEQ ID NO: 76112 - RNA, 1710 nt, Artificial Sequence
  derived and/or modified CDS sequence (opt1) from hemagglutinin__InfluenzaA__AHZ35913
augaaggccauccuggugguccuccuguacaccuucgccaucgcgaacgccgacacccugugcaucggcuaccacgccaacaacagcacggacaccguggacaccgugcucgagaagaacgucaccgugacgcacuccgugaaccugcuggaggacaagcacaacgggaagcucugcaagcugcgcggcgucgcgccccugcaccucgggaagugcaacaucgccggcuggauccuggggaacccggagugcgagagccuguccaccgccagcuccuggagcuacaucguggagaccuccagcuccgacaacgggaccugcuaccccggcgacuucaucaacuacgaggagcuccgggagcagcugagcuccgugagcuccuucgagcgcuucgagauguuccccaagacgagcuccuggcccaaccacgacagcaacaagggggucaccgccgccugcccgcacgccggcgcgaaguccuucuacaagaaccugaucuggcucgugaagaaggggaacagcuaccccaagcuguccaagagcuacaucaacgacaagggcaaggaggugcugguccucugggggauccaccaccccagcaccaccgccgaccagcagucccuguaccagaacgccgacgccuacguguucgugggcacgagccgguacuccaagaaguucaagcccgagaucgccauccgcccgaagguccgggaccaggagggccgcaugaacuacuacuggacccugguggagcccggggacaagaucaccuucgaggcgaccggcaaccucguggucccccgguacgccuucgccauggagcgcaacgccgggagcggcaucaucaucuccgacacgcccgugcacgacugcaacacgaccugccagaccccgaagggcgccaucaacaccagccugaccucccugcccuuccagaacauccaccccaucaccaucgggaagugccccaaguacgucaagagcaccaagcuccggcuggcgacgggccugcgcaacgugccguccauccagagccggggccucuucggcgccaucgccggguucaucgagggcggcuggaccgggaugguggacggcugguacggguaccaccaccagaacgagcagggcuccggguacgccgccgaccucaagagcacccagaacgcgaucgacaagaucaccaacaaggugaacuccgucaucgagaagaugaacacgcaguucaccgccgugggcaaggaguucaaccaccuggagaagcgcaucgagaaccugaacaagaaggucgacgacggcuuccuggacaucuggaccuacaacgccgagcugcucgugcugcuggagaacgagcggacccucgacuaccacgacagcaacgugaagaaccuguacgagcgcguccggaaccagcugaagaacaacgccaaggagaucgggaacggcugcuucgaguucuaccacaagugcgacaacacgugcauggaguccgugaagaacgggaccuacgacuaccccaaguacagcgaggaggccaagcucaaccgcgaggagaucgacggcgugaagcuggaguccacccggaucuaccagauccuggcgaucuacagcaccgucgccuccagccucgugcugguggucagccugggggccaucuccuucuggaugugcagcaacggcucccuccagugccgcaucugcaucuga

SEQ ID NO: 76113 - RNA, 1701 nt, Artificial Sequence
  derived and/or modified CDS sequence (opt1) from hemagglutinin__InfluenzaA__AHZ35924
augaaggccauccuggugguccuccuguacaccuucgccaccgcgaacgccgacacgcugugcaucggcuaccacgccaacaacagcaccgacaccguggacaccgugcucgagaagaacgucacggugacccacuccgugaaccugcuggaggacaagcacaacgggaagcucugcaagcugcgcggcgucgcgccccugcaccucgggaagugcaacaucgccggcuggauccuggggaacccggagugcgagagccuguccaccgccagcuccuggagcuacaucguggagaccuccagcuccgacaacggcacgugcuaccccggcgacuucaucaacuacgaggagcuccgggagcagcugagcuccgugagcuccuucgagcgcuucgagaucuuccccaagaccagcuccuggcccaaccacgacagcaacaagggggucaccgccgccugcccgcaggccggcgcgaaguccuucuacaagaaccugaucuggcucgugaagaaggggaacagcuaccccaagcuguccaagagcuacaucaacgacaagggcaaggaggugcugguccucugggggauccaccaccccagcaccuccgccgaccagcagagccuguaccagaacgccgacgccuacguguucgugggcacguccaaguacagcaagaaguucaagcccgagaucgccguccggccgaaggugcgcgaccaggagggccggaugaacuacuacuggacccugguggagcccggggacaagaucaccuucgaggcgaccggcaaccuccuggucccccgcuacgccuucgccauggagcggaacgccggguccggcaucaucaucagcgacacgcccgugcacgacugcaacacgaccugccagaccccgaagggcgccaucaacaccucccugcccuuccagaacauccaccccaucaccaucgggaagugccccaaguacgucaagagcaccaagcuccgccuggcgaccggccugcggaacgugccguccacgcagagccgcgggcuguucggcgccaucgccggguucaucgagggcggcuggaccgggaugguggacggcugguacggguaccaccaccagaacgcccagggcuccggguacgccgcggaccucaagagcacccagaacgccaucgacaagaucaccaacaaggugaacuccgucaucgagaagaugaacacgcaguucaccgccgugggcaaggaguucaaccaccuggagaagcggaucgagaaccucaacaagaaggucgacgacggcuuccuggacaucuggaccuacaacgccgagcugcucgugcugcuggagaacgagcgcacccucgacuaccacgacagcaacgugaagaaccuguacgagaagguccggucccagcugaagaacaacgccaaggagaucgggaacggcugcuucgaguucuaccacaagugcgacaacacgugcauggagagcgugaagaacgggaccuacgacuaccccaaguacuccgaggaggcgaagcucaaccgcgaggagaucgacggcgugaagcuggagagcacccggaucuaccagauccuggccaucuacuccaccgucgccagcagccucgugcugguggucucccugggggccaucagcuucuggaugugcuccaacggcagccuccagugccgcaucugcaucuga

SEQ ID NO: 76114 - RNA, 1701 nt, Artificial Sequence
  derived and/or modified CDS sequence (opt1) from hemagglutinin__InfluenzaA__AHZ35935
augaaggccauccuggugguccuccuguacaccuucgccaucgcgaacgccgacacccugugcaucggcuaccacgccaacaacagcacggacaccguggacaccgugcucgagaagaacgucaccgugacgcacuccgugaaccugcuggaggacaagcacaacgggaagcucugcaagcugcgcggcgucgcgccccugcaccucgggaagugcaacaucgccggcuggauccuggggaacccggagugcgagagccuguccaccgccagcuccuggagcuacaucguggagaccuccagcuccgacaacgggaccugcuaccccggcgacuucaucaacuacgaggagcuccgggagcagcugagcuccgugagcuccuucgagcgcuucgagauguuccccaagacgagcuccuggcccaaccacgacagcaacaagggcgucaccgccgccugcccgcacgccggcgcgaaguccuucuacaagaaccugaucuggcucgugaagaaggggaacagcuaccccaagcuguccaagagcuacaucaacgacaagggcaaggaggugcugguccucugggggauccaccaccccagcaccaccgccgaccagcagucccuguaccagaacgccgacgccuacguguucgugggcacgagccgguacuccaagaaguucaagcccgagaucgccauccgcccgaagguccgggaccaggagggccgcaugaacuacuacuggacccugguggagcccggggacaagaucaccuucgaggcgaccggcaaccucguggucccccgguacgccuucgccauggagcgcaacgccgggagcggcaucaucaucuccgacacgcccgugcacgacugcaacacgaccugccagaccccgaagggcgccaucaacaccagccugcccuuccagaacauccaccccaucaccaucgggaagugccccaaguacgugaaguccaccaagcugcggcucgcgaccggccugcgcaacaucccgagcauccagucccgggggcuguucggcgccaucgccggguucaucgagggcggcuggacggggauggucgacggcugguacggguaccaccaccagaacgagcagggcagcggguacgccgccgaccucaaguccacccagaacgcgaucgacaagaucaccaacaaggugaacagcgugaucgagaagaugaacacccaguucacggccgucggcaaggaguucaaccaccuggagaagcgcaucgagaaccugaacaagaagguggacgacggcuuccucgacaucuggaccuacaacgccgagcugcugguccuccuggagaacgagcggacccuggacuaccacgacuccaacgugaagaaccucuacgagaaggugcgcaaccagcugaagaacaacgccaaggagaucgggaacggcugcuucgaguucuaccacaagugcgacaacacgugcauggagagcgucaagaacgggaccuacgacuaccccaaguacuccgaggaggccaagcugaaccgggaggagaucgacggcgugaagcucgagagcacccgcaucuaccagauccuggcgaucuacuccaccguggccagcucccugguccucguggugagccugggggccaucagcuucuggaugugcuccaacggcagccugcagugccggaucugcaucuga

SEQ ID NO: 76115 - RNA, 1701 nt, Artificial Sequence; identical to SEQ ID NO: 76109
  derived and/or modified CDS sequence (opt1) from hemagglutinin__InfluenzaA__AHZ35946

SEQ ID NO: 76116 - RNA, 1701 nt, Artificial Sequence; identical to SEQ ID NO: 76104
  derived and/or modified CDS sequence (opt1) from hemagglutinin__InfluenzaA__AHZ35958

SEQ ID NO: 76117 - RNA, 1701 nt, Artificial Sequence; identical to SEQ ID NO: 76104
  derived and/or modified CDS sequence (opt1) from hemagglutinin__InfluenzaA__AHZ35980

SEQ ID NO: 76118 - RNA, 1701 nt, Artificial Sequence; identical to SEQ ID NO: 76104
  derived and/or modified CDS sequence (opt1) from hemagglutinin__InfluenzaA__AHZ35991

SEQ ID NO: 76119 - RNA, 1701 nt, Artificial Sequence; identical to SEQ ID NO: 76104
  derived and/or modified CDS sequence (opt1) from hemagglutinin__InfluenzaA__AHZ36002

SEQ ID NO: 76120 - RNA, 1701 nt, Artificial Sequence
  derived and/or modified CDS sequence (opt1) from hemagglutinin__InfluenzaA__AHZ36013
augaaggccauccuggugguccuccuguacaccuucgccaucgcgaacgccgacacccugugcaucggcuaccacgccaacaacagcacggacaccguggacaccgugcucgagaagaacgucaccgugacgcacuccgugaaccugcuggaggacaagcacaaccgcaagcucugcaagcugcgcggggucgcgccccugcaccucggcaagugcaacaucgccggguggauccugggcaacccggagugcgagagccuguccaccgccagcuccuggagcuacaucguggagaccuccagcuccgacaacgggaccugcuaccccggcgacuucaucaacuacgaggagcuccgggagcagcugagcuccgugagcuccuucgagcgguucgagauguuccccaagacgagcuccuggcccaaccacgacagcaacaagggcgucaccgccgccugcccgcacgccggggcgaaguccuucuacaagaaccugaucuggcucgugaagaagggcaacagcuaccccaagcuguccaagagcuacaucaacgacaaggggaaggaggugcugguccucuggggcauccaccaccccagcaccaccgccgaccagcagucccuguaccagaacgccgacgccuacguguucguggggacgagccgcuacuccaagaaguucaagcccgagaucgccauccggccgaagguccgcgaccaggagggccggaugaacuacuacuggacccugguggagcccggcgacaagaucaccuucgaggcgaccgggaaccucguggucccccgcuacgccuucgccauggagcggaacgccggcagcgggaucaucaucuccgacacgcccgugcacgacugcaacacgaccugccagaccccgaagggcgccaucaacaccagccugcccuuccagaacauccaccccaucaccaucggcaagugccccaaguacgugaaguccaccaagcugcgccucgcgaccgggcugcggaacgucccgagcauccagucccgcggccuguucggggccaucgccggcuucaucgagggcggguggacgggcaugguggacgggugguacggcuaccaccaccagaacgagcaggggagcggcuacgccgccgaccucaaguccacccagaacgcgaucgacaagaucaccaacaaggugaacagcgucaucgagaagaugaacacccaguucacggccguggggaaggaguucaaccaccuggagaagcggaucgagaaccugaacaagaaggucgacgacggcuuccucgacaucuggaccuacaacgccgagcugcuggugcuccuggagaacgagcgcacccuggacuaccacgacuccaacgugaagaaccucuacgagaagguccggaaccagcugaagaacaacgccaaggagaucggcaacgggugcuucgaguucuaccacaagugcgacaacacgugcauggagagcgugaagaacggcaccuacgacuaccccaaguacuccgaggaggccaagcugaaccgcgaggagaucgacggggugaagcucgagagcacccggaucuaccagauccuggcgaucuacuccaccgucgccagcucccuggugcucguggucagccugggcgccaucagcuucuggaugugcuccaacgggagccugcagugccgcaucugcaucuga

SEQ ID NO: 76121 - RNA, 1701 nt, Artificial Sequence
  derived and/or modified CDS sequence (opt1) from hemagglutinin__InfluenzaA__AHZ36024
augaaggccauccuggugguccuccuguacaccuucgccaccgcgaacgccgacacgcugugcaucggcuaccacgccaacaacagcaccgacaccguggacaccgugcucgagaagaacgucacggugacccacuccgugaaccugcuggaggacaagcacaacgggaagcucugcaagcugcgcggcgucgcgccccugcaccucgggaagugcaacaucgccggcuggauccuggggaacccggagugcgagagccuguccaccgccagcuccuggagcuacaucguggagaccuccagcuccgacaacggcacgugcuaccccggcgacuucaucaacuacgaggagcuccgggagcagcugagcuccgugagcuccuucgagcgcuucgagaucuuccccaagaccagcuccuggcccaaccacgacagcaacaagggggucaccgccgccugcccgcacgccggcgcgaaguccuucuacaagaaccugaucuggcucgugaagaaggggaacagcuaccccaagcuguccaagagcuacaucaacgacaagggcaaggaggugcugguccucugggggauccaccaccccagcaccacggccgaccagcagucccuguaccagaacgccgacgccuacguguucgugggcaccagccgguacuccaagaaguucaagcccgagaucgccauccgcccgaagguccgggaccaggagggccgcaugaacuacuacuggacccugguggagcccggggacaagaucaccuucgaggcgacgggcaaccucguggucccccgguacgccuucgccauggagcgcaacgccgggagcggcaucaucaucuccgacacccccgugcacgacugcaacacgaccugccagaccccgaagggcgccaucaacaccagccugcccuuccagaacauccaccccaucaccaucgggaagugccccaaguacgugaaguccaccaagcugcggcucgcgacgggccugcgcaacgucccgagcauccagucccgggggcuguucggcgccaucgccggguucaucgagggcggcuggaccgggaugguggacggcugguacggguaccaccaccagaacgagcagggcagcggguacgccgccgaccucaaguccacccagaacgcgaucgacaagaucaccaacaaggugaacagcgucaucgagaagaugaacacgcaguucaccgccgugggcaaggaguucaaccaccuggagaagcgcaucgagaaccugaacaagaaggucgacgacggcuuccucgacaucuggaccuacaacgccgagcugcuggugcuccuggagaacgagcggacccuggacuaccacgacuccaacgugaagaaccucuacgagaagguccgcaaccagcugaagaacaacgccaaggagaucgggaacggcugcuucgaguucuaccacaagugcgacaacacgugcauggagagcgugaagaacgggaccuacgacuaccccaaguacuccgaggaggccaagcugaaccgggaggagaucgacggcgugaagcucgagagcacccgcaccuaccagauccuggcgaucuacuccacggucgccagcucccuggugcucguggucagccugggggccaucagcuucuggaugugcuccaacggcagccugcagugccggaucugcaucuga

SEQ ID NO: 76122 - RNA, 1701 nt, Artificial Sequence
  derived and/or modified CDS sequence (opt1) from hemagglutinin__InfluenzaA__AHZ36035
augaagaccaucaucgcccugagcuacauccucugccugguguucgcccagaagcugcccggcaacgacaacuccaccgcgacgcucugccuggggcaccacgccgucccgaacggcaccaucgugaagaccaucaccaacgaccagaucgaggugacgaacgccaccgagcugauccagagcuccagcaccggggagaucugcaacagcccccaccagauccucgacggcgagaacugcacccugaucgacgcccugcucggggacccccagugcgacggcuuccagaacaagaagugggaccuguucgucgagcgcagcaaggcccacuccaacugcuaccccuacgacgugccggacuacgcgagccugcggucccucguggccagcuccggcacgcuggaguucaacaacgagagcuucaacuggaccggggucacccagaacggcaccuccagcgccugcauccgccgguccaacaacagcuucuucucccgccugaacuggcucacgcaccugaacuucaaguaccccgcccugaacgugaccaugcccaacaacgagcaguucgacaagcucuacaucuggggcgugcaccaccccgggaccgacaaggaccagaucuuccuguacgcgcaggccgccgggcggaucaccgucagcacgaagcgcucccagcaggccgugaucccgaacaucggcagccggccccgcgugcggaacauccccagccgcgucuccaucuacuggaccaucgugaagcccggcgacauccugcucaucaacagcaccgggaaccugaucgccccgcggggcuacuucaagauccgcuccgggaaguccuccaucaugcggagcgacgcgcccaucggcaagugcaacuccgccugcaucacccccaacggcagcauccccaacgacaagccguuccagaacgugaaccgcaucacguacggggccugcccccgguacgucaagcagaacacccugaagcucgccaccggcaugcgcaacgugcccgagaagcagacccgggggaucuucggcgccaucgcgggguucaucgagaacggcugggagggcaugguggacgggugguacggcuuccgccaccagaacuccgaggggcggggccaggccgccgaccucaagagcacgcaggccgccaucgaccagaucaacgggaagcugaaccgccugaucggcaagaccaacgagaaguuccaccagaucgagaaggaguucuccgaggucgagggccggauccaggaccuggagaaguacguggaggacaccaagaucgaccuguggagcuacaacgcggagcuccugguggcccuggagaaccagcacaccaucgaccucacggacuccgagaugaacaagcuguucgagaagaccaagaagcagcugcgcgagaacgccgaggacauggggaacggcugcuucaagaucuaccacaagugcgacaacgccugcaucgggagcauccgcaacggcaccuacgaccacgacgucuaccgggacgaggcccucaacaaccgcuuccagaucaaggggguggagcugaaguccggcuacaaggacuggauccuguggaucagcuucgcgaucuccugcuuccuccugugcguggcccugcucggcuucaucaugugggccugccagaaggggaacauccggugcaacaucugcaucuga

SEQ ID NO: 76123 - RNA, 1701 nt, Artificial Sequence; identical to SEQ ID NO: 70879
  derived and/or modified CDS sequence (opt1) from hemagglutinin__InfluenzaA__AHZ36047

SEQ ID NO: 76124 - RNA, 1701 nt, Artificial Sequence; identical to SEQ ID NO: 76104
  derived and/or modified CDS sequence (opt1) from hemagglutinin__InfluenzaA__AHZ36059

SEQ ID NO: 76125 - RNA, 1701 nt, Artificial Sequence; identical to SEQ ID NO: 76121
  derived and/or modified CDS sequence (opt1) from hemagglutinin__InfluenzaA__AHZ36070

SEQ ID NO: 76126 - RNA, 1701 nt, Artificial Sequence; identical to SEQ ID NO: 76120
  derived and/or modified CDS sequence (opt1) from hemagglutinin__InfluenzaA__AHZ36081

SEQ ID NO: 76127 - RNA, 1701 nt, Artificial Sequence; identical to SEQ ID NO: 76121
  derived and/or modified CDS sequence (opt1) from hemagglutinin__InfluenzaA__AHZ36092

SEQ ID NO: 76128 - RNA, 1701 nt, Artificial Sequence; identical to SEQ ID NO: 76104
  derived and/or modified CDS sequence (opt1) from hemagglutinin__InfluenzaA__AHZ36103

SEQ ID NO: 76129 - RNA, 1701 nt, Artificial Sequence; identical to SEQ ID NO: 76121
  derived and/or modified CDS sequence (opt1) from hemagglutinin__InfluenzaA__AHZ36114

SEQ ID NO: 76130 - RNA, 1701 nt, Artificial Sequence; identical to SEQ ID NO: 76104
  derived and/or modified CDS sequence (opt1) from hemagglutinin__InfluenzaA__AHZ36125

SEQ ID NO: 76131 - RNA, 1701 nt, Artificial Sequence; identical to SEQ ID NO: 76104
  derived and/or modified CDS sequence (opt1) from hemagglutinin__InfluenzaA__AHZ36136

SEQ ID NO: 76132 - RNA, 1701 nt, Artificial Sequence; identical to SEQ ID NO: 70879
  derived and/or modified CDS sequence (opt1) from hemagglutinin__InfluenzaA__AHZ36147

SEQ ID NO: 76133 - RNA, 1701 nt, Artificial Sequence
  derived and/or modified CDS sequence (opt1) from hemagglutinin__InfluenzaA__AHZ36158
augaaggccauccuggugguccuccuguacaccuucgccaucgcgaacgccgacacccugugcaucggcuaccacgccaacaacagcacggacaccguggacaccgugcucgagaagaacgucaccgugacgcacuccgugaaccugcuggaggacaagcacaacgggaagcucugcaagcugcgcggcgucgcgccccugcaccucgggaagugcaacaucgccggcuggauccuggggaacccggagugcgagagccuguccaccgccagcuccuggagcuacaucguggagaccuccagcuccgacaacgggaccugcuaccccggcgacuucaucaacuacgaggagcuccgggagcagcugagcuccgugagcuccuucgagcgcuucgagauguuccccaagacgagcuccuggcccaaccacgacagcaacaagggcgucaccgccgccugcccgcacgccggcgcgaaguccuucuacaagaaccugaucuggcucgugaagaaggggaacagcuaccccaagcuguccaagagcuacaucaacgacaagggcaaggaggugcugguccucugggggauccaccaccccagcaccaccgccgaccagcagucccuguaccagaacgccgacgccuacguguucgugggcacgagccgguacuccaagaaguucaagcccgagaucgccacccgcccgaagguccgggaccaggagggccgcaugaacuacuacuggacccugguggagcccggggacaagaucaccuucgaggcgacgggcaaccucguggucccccgguacgccuucgccauggagcgcaacgccgggagcggcaucaucaucuccgacacccccgugcacgacugcaacacgaccugccagaccccgaagggcgccaucaacaccagccugcccuuccagaacauccaccccaucaccaucgggaagugccccaaguacgugaaguccaccaagcugcggcucgcgacgggccugcgcaacgucccgagcauccagucccgggggcuguucggcgccaucgccggguucaucgagggcggcuggaccgggaugguggacggcugguacggguaccaccaccagaacgagcagggcagcggguacgccgccgaccucaaguccacccagaacgcgaucgacaagaucaccaacaaggugaacagcgucaucgagaagaugaacacgcaguucaccgccgugggcaaggaguucaaccaccuggagaagcgcaucgagaaccugaacaagaaggucgacgacggcuuccucgacaucuggaccuacaacgccgagcugcuggugcuccuggagaacgagcggacccuggacuaccacgacuccaacgugaagaaccucuacgagaagguccgcaaccagcugaagaacaacgccaaggagaucgggaacggcugcuucgaguucuaccacaagugcgacaacacgugcauggagagcgugaagaacgggaccuacgacuaccccaaguacuccgaggaggccaagcugaaccgggaggagaucgacggcgugaagcucgagagcacccgcaucuaccagauccuggcgaucuacuccaccgucgccagcucccuggugcucguggucagccugggggccaucagcuucuggaugugcuccaacggcagccugcagugccggaucugcaucuga

SEQ ID NO: 76134 - RNA, 1701 nt, Artificial Sequence; identical to SEQ ID NO: 76104
  derived and/or modified CDS sequence (opt1) from hemagglutinin__InfluenzaA__AHZ36169

SEQ ID NO: 76135 - RNA, 1701 nt, Artificial Sequence
  derived and/or modified CDS sequence (opt1) from hemagglutinin__InfluenzaA__AHZ36180
augaaggccauccuggugguccuccuguacaccuucgccaucgcgaacgccgacacccugugcaucggcuaccacgccaacaacagcacggacaccguggacaccgugcucgagaagaacgucaccgugacgcacuccgugaaccugcuggaggacaagcacaacgggaagcucugcaagcugcgcggcgucgcgccccugcaccucgggaagugcaacaucgccggcuggauccuggggaacccggagugcgagagccuguccaccgccagcuccuggagcuacaucguggagaccuccagcuccgacaacgggaccugcuaccccggcgacuucaucaacuacgaggagcuccgggagcagcugagcuccgugagcuccuucgagcgcuucgagauguuccccaagacgagcuccuggcccaaccacgacagcaacaagggcgucaccgccgccugcccgcacgccggcgcgaaguccuucuacaagaaccugaucuggcucgugaagaaggggaacagcuaccccaagcuguccaagagcuacaucaacgacaagggcaaggaggugcugguccucugggggauccaccaccccagcaccaccgccgaccagcagucccuguaccagaacgccgacgccuacguguucgugggcacgagccgguacuccaagaaguucaagcccgagaucgccauccgcccgaagguccgggaccaggagggccgcaugaacuacuacuggacccugguggagcccggggacaagaucaccuucgaggcgaccggcaaccucguggucccccgguacgccuucgccauggagcgcaacgccgggagcggcaucaucaucuccgacacgcccauccacgacugcaacacgaccugccagaccccgaagggcgccaucaacaccagccugcccuuccagaacauccaccccaucaccaucgggaagugccccaaguacgugaaguccaccaagcugcggcucgcgaccggccugcgcaacgugccgagcauccagucccgggggcuguucggcgccaucgccggguucaucgagggcggcuggacggggauggucgacggcugguacggguaccaccaccagaacgagcagggcagcggguacgccgccgaccucaaguccacccagaacgcgaucgacaagaucaccaacaaggugaacagcgugaucgagaagaugaacacccaguucacggccgucggcaaggaguucaaccaccuggagaagcgcaucgagaaccugaacaagaagguggacgacggcuuccucgacaucuggaccuacaacgccgagcugcugguccuccuggagaacgagcggacccuggacuaccacgacuccaacgugaagaaccucuacgagaaggugcgcaaccagcugaagaacaacgccaaggagaucgggaacggcugcuucgaguucuaccacaagugcgacaacacgugcauggagagcgucaagaacgggaccuacgacuaccccaaguacuccgaggaggccaagcugaaccgggaggagaucgacggcgugaagcucgagagcacccgcaucuaccagauccuggcgaucuacuccaccguggccagcucccugguccucguggugagccugggggccaucagcuucuggaugugcuccaacggcagccugcagugccggaucugcaucuga

SEQ ID NO: 76136 - RNA, 1701 nt, Artificial Sequence; identical to SEQ ID NO: 76109
  derived and/or modified CDS sequence (opt1) from hemagglutinin__InfluenzaA__AHZ36191

SEQ ID NO: 76137 - RNA, 1701 nt, Artificial Sequence; identical to SEQ ID NO: 70879
  derived and/or modified CDS sequence (opt1) from hemagglutinin__InfluenzaA__AHZ36203

SEQ ID NO: 76138 - RNA, 1701 nt, Artificial Sequence; identical to SEQ ID NO: 76104
  derived and/or modified CDS sequence (opt1) from hemagglutinin__InfluenzaA__AHZ36215

SEQ ID NO: 76139 - RNA, 1701 nt, Artificial Sequence; identical to SEQ ID NO: 70879
  derived and/or modified CDS sequence (opt1) from hemagglutinin__InfluenzaA__AHZ36226

SEQ ID NO: 76140 - RNA, 1701 nt, Artificial Sequence; identical to SEQ ID NO: 76104
  derived and/or modified CDS sequence (opt1) from hemagglutinin__InfluenzaA__AHZ36238

SEQ ID NO: 76141 - RNA, 1701 nt, Artificial Sequence; identical to SEQ ID NO: 76104
  derived and/or modified CDS sequence (opt1) from hemagglutinin__InfluenzaA__AHZ36249

SEQ ID NO: 76142 - RNA, 1701 nt, Artificial Sequence
  derived and/or modified CDS sequence (opt1) from hemagglutinin__InfluenzaA__AHZ36260
augaaggccauccuggugguccuccuguacaccuucgccaucgcgaacgccgacacccugugcaucggcuaccacgccaacaacagcacggacaccguggacaccgugcucgagaagaacgucaccgugacgcacuccgugaaccugcuggaggacaagcacaacgggaagcucugcaagcugcgcggcgucgcgccccugcaccucgggaagugcaacaucgccggcuggauccuggggaacccggagugcgagagccuguccaccgcgagcuccuggagcuacaucguggagaccuucuccagcgacaacgggaccugcuaccccggcgacuucaucaacuacgaggagcuccgggagcagcuguccagcguguccagcuucgagcgcuucgagauguuccccaagacguccagcuggcccaaccacgacuccaacaagggcgucaccgccgccugcccgcacgccggcgccaagagcuucuacaagaaccugaucuggcucgugaagaaggggaacuccuaccccaagcugagcaaguccuacaucaacgacaagggcaaggaggugcugguccucugggggauccaccaccccagcaccaccgccgaccagcagagccuguaccagaacgccgacgccuacguguucgugggcacgucccgguacagcaagaaguucaagcccgagaucgccauccgcccgaagguccgggaccaggagggccgcaugaacuacuacuggacccugguggagcccggggacaagaucaccuucgaggcgaccggcaaccucguggucccccgguacgccuucgccauggagcgcaacgccggguccggcaucaucaucagcgacacgcccgugcacgacugcaacacgaccugccagaccccgaagggcgccaucaacaccucccugcccuuccagaacauccaccccaucaccaucgggaagugccccaaguacgucaagagcaccaagcugcggcucgcgaccggccugcgcaacgugccguccauccagagccgggggcuguucggcgccaucgccggguucaucgagggcggcuggacggggaugguggacggcugguacggguaccaccaccagaacgagcagggcuccggguacgccgccgaccucaagagcacccagaacgcgaucgacaagaucaccaacaaggugaacuccgucaucgagaagaugaacacccaguucacggccgugggcaaggaguucaaccaccuggagaagcgcaucgagaaccugaacaagaaggucgacgacggcuuccucgacaucuggaccuacaacgccgagcugcuggugcuccuggagaacgagcggacccuggacuaccacgacagcaacgugaagaaccucuacgagaagguccgcaaccagcugaagaacaacgccaaggagaucgggaacggcugcuucgaguucuaccacaagugcgacaacacgugcauggaguccgugaagaacgggaccuacgacuaccccaaguacagcgaggaggccaagcugaaccgggaggagaucgacggcgugaagcucgaguccacccgcaucuaccagauccuggcgaucuacagcaccgucgccuccagccuggugcucguggucucccugggggccaucagcuucuggaugugcagcaacggcucccugcagugccggaucugcaucuga

SEQ ID NO: 76143 - RNA, 1701 nt, Artificial Sequence; identical to SEQ ID NO: 76089
  derived and/or modified CDS sequence (opt1) from hemagglutinin__InfluenzaA__AHZ36271

SEQ ID NO: 76144 - RNA, 1701 nt, Artificial Sequence; identical to SEQ ID NO: 76104
  derived and/or modified CDS sequence (opt1) from hemagglutinin__InfluenzaA__AHZ36283

SEQ ID NO: 76145 - RNA, 1701 nt, Artificial Sequence; identical to SEQ ID NO: 76089
  derived and/or modified CDS sequence (opt1) from hemagglutinin__InfluenzaA__AHZ36294

SEQ ID NO: 76146 - RNA, 1701 nt, Artificial Sequence
  derived and/or modified CDS sequence (opt1) from hemagglutinin__InfluenzaA__AHZ36306
augaaggccauccuggugguccuccuguacaccuucgccaucgcgaacgccgacacccugugcaucggcuaccacgccaacaacagcacggacaccguggacaccgugcucgagaagaacgucaccgugacgcacuccgugaaccugcuggaggacaagcacaacgggaagcucugcaagcugcgcggcgucgcgccccugcaccucgggaagugcaacaucgccggcuggauccuggggaacccggagugcgagagccuguccaccgccagcuccuggagcuacaucguggagaccuccagcuccgacaacgggaccugcuaccccggcgacuucaucaacuacgaggagcuccgggagcagcugagcuccgugagcuccuucgagcgcuucgagauguuccccaagacgagcuccuggcccaaccacgacagcaacaagggcgucaccgccgccugcccgcacgccggcgcgaaguccuucuacaagaaccugaucuggcucgugaagaaggggaacagcuaccccaagcuguccaagagcuacaucaacgacaagggcaaggaggugcugguccucugggggauccaccaccccagcaccaccgccgaccagcagucccuguaccagaacgccgacgccuacguguucgugggcacgagccgguacuccaagaaguucaagcccgagaucgccauccgcccgaagguccgggaccaggagggccgcaugaacuacuacuggacccugguggagcccggggacaagaucaccuucgaggcgaccggcaaccucguggucccccgguacgccuucgccauggagcgcaacgccgggagcggcaucaucaucuccgacacgcccgugcacgacugcaacacgaccugccagaccccgaagggcgccaucaacaccagccugcccuuccagaacauccaccccaucaccaucgggaagugccccaaguacgugaaguccaagaagcugcggcucgcgaccggccugcgcaacgucccgagcauccagucccgggggcuguucggcgccaucgccggguucaucgagggcggcuggaccgggaugguggacggcugguacggguaccaccaccagaacgagcagggcagcggguacgccgccgaccucaaguccacgcagaacgcgaucgacaagaucaccaacaaggugaacagcgucaucgagaagaugaacacccaguucaccgccgugggcaaggaguucaaccaccuggagaagcgcaucgagaaccugaacaagaaggucgacgacggcuuccucgacaucuggacguacaacgccgagcugcuggugcuccuggagaacgagcggacccuggacuaccacgacuccaacgugaagaaccucuacgagaagguccgcaaccagcugaagaacaacgccaaggagaucgggaacggcugcuucgaguucuaccacaagugcgacaacacgugcauggagagcgugaagaacgggaccuacgacuaccccaaguacuccgaggaggccaagcugaaccgggaggagaucgacggcgugaagcucgagagcacccgcaucuaccagauccuggcgaucuacuccaccgucgccagcucccuggugcucguggucagccugggggccaucagcuucuggaugugcuccaacggcagccugcagugccggaucugcaucuga

SEQ ID NO: 76147 - RNA, 1701 nt, Artificial Sequence; identical to SEQ ID NO: 76104
  derived and/or modified CDS sequence (opt1) from hemagglutinin__InfluenzaA__AHZ36317

SEQ ID NO: 76148 - RNA, 1701 nt, Artificial Sequence; identical to SEQ ID NO: 76104
  derived and/or modified CDS sequence (opt1) from hemagglutinin__InfluenzaA__AHZ36328

SEQ ID NO: 76149 - RNA, 1701 nt, Artificial Sequence
  derived and/or modified CDS sequence (opt1) from hemagglutinin__InfluenzaA__AHZ36339
augaaggccauccuggugguccuccuguacaccuucgccaucgcgaacgccgacacccugugcaucggcuaccacgccaacaacagcacggacaccguggacaccgugcucgagaagaacgucaccgugacgcacuccgugaaccugcuggaggacaagcacaacgggaagcucugcaagcugcgcggcgucgcgccccugcaccucgggaagugcaacaucgccggcuggauccuggggaacccggagugcgagagccuguccaccgccagcuccuggagcuacaucguggagaccuccagcuccgacaacgggaccugcuaccccggcgacuucaucaacuacgaggagcuccgggagcagcugagcuccgugagcuccuucgagcgcuucgagauguuccccaagacgagcuccuggcccaaccacgacagcaacaagggcgucaccgccgccugcccgcacgccggcgcgaaguccuucuacaagaaccugaucuggcucgugaagaaggggaacagcuaccccaagcuguccaagagcuacaucaacgacaagggcaaggaggugcugguccucugggggauccaccaccccagcaccaccgccgaccagcagucccuguaccagaacgccgacgccuacguguucgugggcacgagccgguacuccaagaaguucaagcccgagaucgccauccgcccgaagguccgggaccaggagggccgcaugaacuacuacuggacccugguggagcccggggacaagaucaccuucgaggcgaccggcaaccucguggucccccgguacgccuucgccauggagcgcaacgccgggagcggcaucaucaucuccgacacgcccgugcacgacugcaacacgaccugccagaccccgaagggcgccgugaacaccagccugcccuuccagaacauccaccccaucaccaucgggaagugccccaaguacgucaaguccaccaagcugcggcucgcgaccggccugcgcaacgugccgagcauccagucccgggggcuguucggcgccaucgccggguucaucgagggcggcuggacggggaugguggacggcugguacggguaccaccaccagaacgagcagggcagcggguacgccgccgaccucaaguccacccagaacgcgaucgacaagaucaccaacaaggucaacagcgugaucgagaagaugaacacccaguucacggccgucggcaaggaguucaaccaccuggagcgccggaucgagaaccugaacaagaagguggacgacggcuuccucgacaucuggaccuacaacgccgagcugcuggugcuccuggagaacgagcgcacccuggacuaccacgacuccaacgucaagaaccucuacgagaaggugcggaaccagcugaagaacaacgccaaggagaucgggaacggcugcuucgaguucuaccacaagugcgacaacacgugcauggagagcgugaagaacgggaccuacgacuaccccaaguacuccgaggaggccaagcugaaccgcgaggagaucgacggcgucaagcucgagagcacccggaucuaccagauccuggcgaucuacuccaccguggccagcucccuggugcucgucgugagccugggggccaucagcuucuggaugugcuccaacggcagccugcagugccgcaucugcaucuga

SEQ ID NO: 76150 - RNA, 1701 nt, Artificial Sequence
  derived and/or modified CDS sequence (opt1) from hemagglutinin__InfluenzaA__AHZ36362
augaaggccauccuggugguccuccuguacaccuucgccaucgcgaacgccgacacccugugcaucggcuaccacgccaacaacagcacggacaccguggacaccgugcucgagaagaacgucaccgugacgcacuccaucaaccugcuggaggacaagcacaacgggaagcucugcaagcugcgcggcguggcgccccugcaccucgggaagugcaacaucgccggcuggauccuggggaacccggagugcgagagccuguccaccgccagcuccuggagcuacaucgucgagaccuccagcuccgacaacgggaccugcuaccccggcgacuucaucaacuacgaggagcuccgggagcagcugagcuccgugagcuccuucgagcgcuucgagauguuccccaagacgagcuccuggcccaaccacgacagcaacaagggcgugaccgccgccugcccgcacgccggcgcgaaguccuucuacaagaaccugaucuggcucgucaagaaggggaacagcuaccccaagcuguccaagagcuacaucaacgacaagggcaaggaggugcuggugcucugggggauccaccaccccagcaccaccgccgaccagcagucccuguaccagaacgccgacgccuacgucuucgugggcacgagccgguacuccaagaaguucaagcccgagaucgccauccgcccgaaggugcgggaccaggagggccgcaugaacuacuacuggacccuggucgagcccggggacaagaucaccuucgaggcgaccggcaaccucguggugccccgguacgccuucgccauggagcgcaacgccgggagcggcaucaucaucuccgacacgcccguccacgacugcaacacgaccugccagaccccgaagggcgccgugaacaccagccugcccuuccagaacauccaccccaucaccaucgggaagugccccaaguacgugaaguccaccaagcugcggcucgcgaccggccugcgcaacgucccgagcauccagucccgggggcuguucggcgccaucgccggguucaucgagggcggcuggacggggaugguggacggcugguacggguaccaccaccagaacgagcagggcagcggguacgccgccgaccucaaguccacccagaacgcgaucgacaagaucaccaacaaggugaacagcgucaucgagaagaugaacacccaguucacggccgugggcaaggaguucaaccaccuggagcgccggaucgagaaccugaacaagaaggucgacgacggcuuccucgacaucuggaccuacaacgccgagcugcuggugcuccuggagaacgagcgcacccuggacuaccacgacuccaacgugaagaaccucuacgagaagguccggaaccagcugaagaacaacgccaaggagaucgggaacggcugcuucgaguucuaccacaagugcgacaacacgugcauggagagcgugaagaacgggaccuacgacuaccccaaguacuccgaggaggccaagcugaaccgcgaggagaucgacggcgugaagcucgagagcacccggaucuaccagauccuggcgaucuacuccaccgucgccagcucccuggugcucguggucagccugggggccaucagcuucuggaugugcuccaacggcagccugcagugccgcaucugcaucuga

SEQ ID NO: 76151 - RNA, 1701 nt, Artificial Sequence
  derived and/or modified CDS sequence (opt1) from hemagglutinin__InfluenzaA__AHZ36385
augaagaccaucaucgcccugagcuacauccucugccugaucuucgcccaggagauccccggcaacgacaacuccaccgcgacgcugugccucgggcaccacgccgugccgaacggcaccaucgucaagaccaucaccaacgaccagaucgaggugacgaacgccaccgagcuggugcagagcuccagcaccggggagaucugcaacagcccccaccagauccuggacggcgagaacugcacccucaucgacgcccugcugggggacccccagugcgacgacuuccagaacaagaagugggaccucuucgucgagcgcuccaaggcccacuccaacugcuaccccuacgacgugccggacuacgcgagccugcggucccugguggccagcuccggcacgcucgaguucaacaacgagagcuucaacuggaccggcgucacccagaacgggaccuccagcgccugcauccgccgguccaacaacagcuucuucucccgccugaacuggcugacgcaccucaacuucaaguaccccgcccugaacgugaccaugcccaacaacgagcaguucgacaagcuguacaucuggggcgugcaccaccccgggaccgacaaggaccagaucuuccucuacgcgcaggccagcggccggaucaccgucuccacgaagcgcagccagcaggccgugaucccgaacaucgggagccggccccgcgugcggaacauccccucccgcgucagcaucuacuggaccaucgugaagcccggcgacauccugcugaucaacuccaccggcaaccucaucgccccgcggggguacuucaagauccgcagcggcaaguccagcaucaugcgguccgacgcccccaucgggaagugcaacagcgcgugcaucacccccaacggcuccauccccaacgacaagccguuccagaacgugaaccgcaucacguacggcgccugcccccgguacgucaagcagaacacccugaagcuggccaccgggaugcgcaacgugcccgagaagcagacccggggcaucuucggggccaucgccggcuucaucgagaacgggugggagggcaugguggacggcugguacggguuccgccaccagaacagcgagggccgggggcaggcggccgaccucaaguccacgcaggccgccaucgaccagaucaacggcaagcugaaccgccugaucgggaagaccaacgagaaguuccaccagaucgagaaggaguucagcgaggucgagggccggauccaggaccucgagaaguacguggaggacaccaagaucgaccugugguccuacaacgccgagcugcucguggcgcuggagaaccagcacaccaucgaccugacggacagcgagaugaacaagcuguucgagaagaccaagaagcagcuccgcgagaacgccgaggacaugggcaacgggugcuucaagaucuaccacaagugcgacaacgccugcaucggcuccauccgcaacgggaccuacgaccacgacgucuaccgggacgaggcccugaacaaccgcuucaagaucaagggcguggagcucaagagcggguacaaggacuggauccuguggaucuccuucgccaucagcugcuuccugcucugcguggcgcugcugggcuucaucaugugggccugccagaagggcaacauccggugcaacaucugcaucuga

SEQ ID NO: 76152 - RNA, 1701 nt, Artificial Sequence
  derived and/or modified CDS sequence (opt1) from hemagglutinin__InfluenzaA__AHZ36397
augaagaccaucaucgcccugagcuacauccucugccugaucuucgcccaggagauccccggcaacgacaacuccaccgcgacgcugugccucgggcaccacgccgugccgaacggcaccaucgucaagaccaucaccaacgaccagaucgaggugacgaacgccaccgagcuggugcagagcuccagcaccggggagaucugcaacagcccccaccagauccuggacggcgagaacugcacccucaucgacgcccugcugggggacccccagugcgacgacuuccagaacaagaagugggaccucuucgucgagcgcuccaaggcccacuccaacugcuaccccuacgacgugccggacuacgcgagccugcggucccugguggccagcuccggcacgcucgaguucaacaacgagagcuucaacuggaccggcgucacccagaacgggaccuccagcgccugcauccgccgguccaacaacagcuucuucucccgccugaacuggcugacgcaccucaacuucaaguaccccgcccugaacgugaccaugcccaacaacgagcaguucgacaagcuguacaucuggggcgugcaccaccccgggaccgacaaggaccagaucuuccucuacgcgcaggccagcggccggaucaccgucuccacgaagcgcagccagcaggccgugaucccgaacaucgggagccggccccgcgugcggaacauccccucccgcgucagcaucuacuggaccaucgugaagcccggcgacauccugcugaucaacuccaccggcaaccucaucgccccgcggggguacuucaagauccgcagcggcaaguccagcaucaugcgguccgacgcccccaucgggaagugcaacagcgcgugcaucacccccaacggcuccauccccaacgacaagccguuccagaacgugaaccgcaucacguacggcgccugcccccgguacgucaagcagaacacccugaagcuggccaccgggaugcgcaacgugcccgagaagcagacccggggcaucuucggggccaucgccggcuucaucgagaacgggugggagggcaugguggacggcugguacggguuccgccaccagaacagcgagggccgggggcaggcggccgaccucaaguccacgcaggccgccaucgaccagaucaacggcaagcugaaccgccugaucgggaagaccaacgagaaguuccaccagaucgagaaggaguucagcgaggucgagggccggauccaggaccucgagaaguacguggaggacaccaagaucgaccugugguccuacaacgccgagcugcucguggcgcuggagaaccagcacaccaucgaccugacggacagcgagaugaacaagcuguucgagaagaccaagaagcagcuccgcgagaacgccgaggacaugggcaacgggugcuucaagaucuaccacaagugcgacaacgccugcaucggcuccauccgcaacgggaccuacgaccacaacgucuaccgggacgaggcccugaacaaccgcuucaagaucaagggcguggagcucaagagcggguacaaggacuggauccuguggaucuccuucgccaucagcugcuuccugcucugcguggcgcugcugggcuucaucaugugggccugccagaagggcaacauccggugcaacaucugcaucuga

SEQ ID NO: 76153 - RNA, 1701 nt, Artificial Sequence; identical to SEQ ID NO: 76089
  derived and/or modified CDS sequence (opt1) from hemagglutinin__InfluenzaA__AHZ36409

SEQ ID NO: 76154 - RNA, 1701 nt, Artificial Sequence; identical to SEQ ID NO: 76090
  derived and/or modified CDS sequence (opt1) from hemagglutinin__InfluenzaA__AHZ36433

SEQ ID NO: 76155 - RNA, 1701 nt, Artificial Sequence
  derived and/or modified CDS sequence (opt1) from hemagglutinin__InfluenzaA__AHZ36445
augaagaccaucaucgcccugagcuacauccucugccugaucuucgcccaggagauccccggcaacgacaacuccaccgcgacgcugugccucgggcaccacgccgugccgaacggcaccaucgucaagaccaucaccaacgaccagaucgaggugacgaacgccaccgagcuggugcagagcuccagcaccggggagaucugcaacagcccccaccagauccuggacggcgagaacugcacccucaucgacgcccugcugggggacccccagugcgacgacuuccagaacaagaagugggaccucuucgucgagcgcuccaaggcccacuccaacugcuaccccuacgacgugccggacuacgcgagccugcggucccugguggccagcuccggcacgcucgaguucaacaacgagagcuucaacuggaccggcgucacccagaacgggaccuccagcgccugcauccgccgguccaacaacagcuucuucucccgccugaacuggcugacgcaccucaacuucaaguaccccgcccugaacgugaccaugcccaacaacgagcaguucgacaagcuguacaucuggggcgugcaccaccccgggaccgacaaggaccagaucuuccucuacgcgcaggccagcggccggaucaccgucuccacgaagcgcagccagcaggccgugaucccgaacaucgggagccggccccgcgugcggaacauccccucccgcgucagcaucuacuggaccaucgugaagcccggcgacauccugcugaucaacuccaccggcaaccucaucgccccgcggggguacuucaagauccgcagcggcaaguccagcaucaugcgguccgacgcccccaucgggaagugcaacagcgcgugcaucacccccaacggcuccauccccaacgacaagccguuccagaacgugaaccgcaucacguacggcgccugcccccgguacgucaagcagaacacccugaagcuggccaccgggaugcgcaacgugcccgagaagcagacccggggcaucuucggggccaucgccggcuucaucgagaacgggugggagggcaugguggacggcugguacggguuccgccaccagaacagcgagggccgggggcaggcggccgaccucaaguccacgcaggccgccaucgaccagaucaacggcaagcugaaccgccugaucgggaagaccaacgagaaguuccaccagaucgagaaggaguucagcgaggucgagggccggauccaggaccucgagaaguacguggaggacaccaagaucgaccugugguccuacaacgccgagcugcucguggcgcuggagaaccagcacaccaucgaccugacggacagcgagaugaacaagcuguucgagaagaccaagaagcagcuccgcgagaacgccgaggacaugggcaacgggugcuucaagaucuaccacaagugcgacgacgccugcaucggcuccauccgcaacgggaccuacgaccacgacgucuaccgggacgaggcccugaacaaccgcuuccagaucaagggcguggagcucaagagcggguacaaggacuggauccuguggaucuccuucgccaucagcugcuuccugcucugcguggcgcugcugggcuucaucaugugggccugccagaagggcaacauccggugcaacaucugcaucuga

SEQ ID NO: 76156 - RNA, 1701 nt, Artificial Sequence; identical to SEQ ID NO: 76089
  derived and/or modified CDS sequence (opt1) from hemagglutinin__InfluenzaA__AHZ36457

SEQ ID NO: 76157 - RNA, 1701 nt, Artificial Sequence; identical to SEQ ID NO: 76089
  derived and/or modified CDS sequence (opt1) from hemagglutinin__InfluenzaA__AHZ36469

SEQ ID NO: 76158 - RNA, 1701 nt, Artificial Sequence
  derived and/or modified CDS sequence (opt1) from hemagglutinin__InfluenzaA__AHZ36481
augaagaccaucaucgcccugagcuacauccucugccugaucuucgcccaggagauccccggcaacgacaacuccaccgcgacgcugugccucgggcaccacgccgugccgaacggcaccaucgucaagaccaucaccaacgaccagaucgaggugacgaacgccaccgagcuggugcagagcuccagcaccggggagaucugcaacagcccccaccagauccuggacggcgagaacugcacccucaucgacgcccugcugggggacccccagugcgacgacuuccagaacaagaagugggaccucuucgucgagcgcuccaaggcccacuccaacugcuaccccuacgacgugccggacuacgcgagccugcggucccugguggccagcuccggcacgcucgaguucaacaacgagagcuucaacuggaccggcgucacccagaacgggaccuccagcgccugcauccgccgguccaacaacagcuucuucucccgccugaacuggcugacgcaccucaacuucaaguaccccgcccugaacgugaccaugcccaacaacgagcaguucgacaagcuguacaucuggggcgugcaccaccccgggaccgacaaggaccagaucuuccucuacgcgcaggccagcggccggaucaccgucuccacgaagcgcagccagcaggccgugaucccgaacaucgggagccggccccgcgugcggaacauccccucccgcgucagcaucuacuggaccaucgugaagcccggcgacauccugcugaucaacuccaccggcaaccucaucgccccgcggggguacuucaagauccgcaacggcaagagcuccaucaugcggagcgacgcccccaucgggaagugcaacuccgcgugcaucacccccaacggcagcauccccaacgacaagccguuccagaacgugaaccgcaucacguacggcgccugcccccgguacgucaagcagaacacccugaagcuggccaccgggaugcgcaacgugcccgagaagcagacccggggcaucuucggggccaucgccggcuucaucgagaacgggugggagggcaugguggacggcugguacggguuccgccaccagaacuccgagggccgggggcaggcggccgaccucaagagcacgcaggccgccaucgaccagaucaacggcaagcugaaccgccugaucgggaagaccaacgagaaguuccaccagaucgagaaggaguucuccgaggucgagggccggauccaggaccucgagaaguacguggaggacaccaagaucgaccuguggagcuacaacgccgagcugcucguggcgcuggagaaccagcacaccaucgaccugacggacuccgagaugaacaagcuguucgagaagaccaagaagcagcuccgcgagaacgccgaggacaugggcaacgggugcuucaagaucuaccacaagugcgacaacgccugcaucggcagcauccgcaacgggaccuacgaccacgacgucuaccgggacgaggcccugaacaaccgcuuccagaucaagggcguggagcucaaguccggguacaaggacuggauccuguggaucagcuucgccaucuccugcuuccugcucugcguggcgcugcugggcuucaucaugugggccugccagaagggcaacauccggugcaacaucugcaucuga

SEQ ID NO: 76159 - RNA, 1701 nt, Artificial Sequence; identical to SEQ ID NO: 76090
  derived and/or modified CDS sequence (opt1) from hemagglutinin__InfluenzaA__AHZ36493

SEQ ID NO: 76160 - RNA, 1701 nt, Artificial Sequence; identical to SEQ ID NO: 76090
  derived and/or modified CDS sequence (opt1) from hemagglutinin__InfluenzaA__AHZ36505

SEQ ID NO: 76161 - RNA, 1701 nt, Artificial Sequence; identical to SEQ ID NO: 76090
  derived and/or modified CDS sequence (opt1) from hemagglutinin__InfluenzaA__AHZ36517

SEQ ID NO: 76162 - RNA, 1701 nt, Artificial Sequence
  derived and/or modified CDS sequence (opt1) from hemagglutinin__InfluenzaA__AHZ36529
augaagaccaucaucgcccugagcuacauccucugccugaucuucgcccaggagauccccggcaacgacaacuccaccgcgacgcugugccucgggcaccacgccgugccgaacggcaccaucgucaagaccaucaccaacgaccagaucgaggugacgaacgccaccgagcuggugcagagcuccagcaccggggagaucugcaacagcccccaccagauccuggacggcgagaacugcacccucaucgacgcccugcugggggacccccagugcgacgacuuccagaacaagaagugggaccucuucgucgagcgcuccaaggcccacuccaacugcuaccccuacgacgugccggacuacgcgagccugcggucccugguggccagcuccggcacgcucgaguucaacaacgagagcuucaacuggaccggcgucacccagaacgggaccuccagcgccugcauccgccgguccaacaacagcuucuucucccgccugaacuggcugacgcaccucaacuucaaguaccccgcccugaacgugaccaugcccaacaacgagcaguucgacaagcuguacaucuggggcgugcaccaccccgggaccgacaaggaccagaucuuccucuacgcgcaggccagcggccggaucaccgucuccacgaagcgcagccagcaggccgugaucccgaacaucgggagccggccccgcgugcggaacauccccucccgcgucagcaucuacuggaccaucgugaagcccggcgacauccugcugaucaacuccaccggcaaccucaucgccccgcggggguacuucaagauccgcagcggcaaguccagcaucaugcgguccgacgcccccaucgggaagugcaacagcuccugcaucacccccaacggcagcauccccaacgacaagccguuccagaacgugaaccgcaucacguacggcgcgugcccccgguacgucaagcagaacacccugaagcuggccaccgggaugcgcaacgugcccgagaagcagacccggggcaucuucggggccaucgccggcuucaucgagaacgggugggagggcaugguggacggcugguacggguuccgccaccagaacuccgagggccgggggcaggccgcggaccucaagagcacgcaggccgccaucgaccagaucaacggcaagcugaaccgccugaucgggaagaccaacgagaaguuccaccagaucgagaaggaguucuccgaggucgagggccggauccaggaccucgagaaguacguggaggacaccaagaucgaccuguggagcuacaacgccgagcugcucguggcccuggagaaccagcacaccaucgaccugacggacuccgagaugaacaagcuguucgagaagaccaagaagcagcuccgcgagaacgcggaggacaugggcaacgggugcuucaagaucuaccacaagugcgacaacgccugcaucggcagcauccgcaacgggaccuacgaccacgacgucuaccgggacgaggcccugaacaaccgcuuccagaucaagggcguggagcucaaguccggguacaaggacuggauccuguggaucagcuucgccaucuccugcuuccugcucugcguggcccugcugggcuucaucaugugggcgugccagaagggcaacauccggugcaacaucugcaucuga

SEQ ID NO: 76163 - RNA, 1701 nt, Artificial Sequence; identical to SEQ ID NO: 76089
  derived and/or modified CDS sequence (opt1) from hemagglutinin__InfluenzaA__AHZ36541

SEQ ID NO: 76164 - RNA, 1701 nt, Artificial Sequence
  derived and/or modified CDS sequence (opt1) from hemagglutinin__InfluenzaA__AHZ36553
augaagaccaucaucgcccugagcuacauccucugccugaucuucgcccaggagauccccggcaacgacaacuccaccgcgacgcugugccucgggcaccacgccgugccgaacggcaccaucgucaagaccaucaccaacgaccagaucgaggugacgaacgccaccgagcuggugcagagcuccagcaccggggagaucugcaacagcccccaccagauccuggacggcgagaacugcacccucaucgacgcccugcugggggacccccagugcgacgacuuccagaacaaggagugggaccucuucgucgagcgcuccaaggcccacuccaacugcuaccccuacgacgugccggacuacgcgagccugcggucccugguggccagcuccggcacgcucgaguucaagaacgagagcuucaacuggaccggcgucacccagaacgggaccuccagcgccugcauccgccgguccaacaacagcuucuucucccgccugaacuggcugacgcaccucaacuucaaguaccccgcccugaacgugaccaugcccaacaacgagcaguucgacaagcuguacaucuggggcgugcaccaccccgggaccgacaaggaccagaucuuccucuacgcgcaggccagcggccggaucaccgucuccacgaagcgcagccagcaggccgugaucccgaacaucgggagccggccccgcgugcggaacauccccucccgcgucagcaucuacuggaccaucgugaagcccggcgacauccugcugaucaacuccaccggcaaccucaucgccccgcggggguacuucaagauccgcagcggcaaguccagcaucaugcgguccgacgcccccaucgggaagugcaacagcgcgugcaucacccccaacggcuccauccccaacgacaagccguuccagaacgugaaccgcaucacguacgggaccugcccccgguacgucaagcagaacacccugaagcuggccaccggcaugcgcaacgugcccgagaagcagacgcggggcaucuucggggccaucgccggcuucaucgagaacgggugggagggcaugguggacggcugguacggguuccgccaccagaacagcgagggccgggggcaggccgcggaccucaaguccacccaggccgccaucgaccagaucaacggcaagcugaaccgccugaucgggaagaccaacgagaaguuccaccagaucgagaaggaguucagcgaggucgagggccggauccaggaccucgagaaguacguggaggacaccaagaucgaccugugguccuacaacgccgagcugcucguggcccuggagaaccagcacacgaucgaccugaccgacagcgagaugaacaagcuguucgagaagaccaagaagcagcuccgcgagaacgcggaggacaugggcaacgggugcuucaagaucuaccacaagugcgacaacgccugcaucggcuccauccgcaacgggaccuacgaccacgacgucuaccgggacgaggcccugaacaaccgcuuccagaucaagggcguggagcucaagagcggguacaaggacuggauccuguggaucuccuucgccaucagcugcuuccugcucugcguggcccugcugggcuucaucaugugggcgugccagaagggcaacauccggugcaacaucugcaucuga

SEQ ID NO: 76165 - RNA, 1701 nt, Artificial Sequence; identical to SEQ ID NO: 76089
  derived and/or modified CDS sequence (opt1) from hemagglutinin__InfluenzaA__AHZ36565

SEQ ID NO: 76166 - RNA, 1701 nt, Artificial Sequence; identical to SEQ ID NO: 76089
  derived and/or modified CDS sequence (opt1) from hemagglutinin__InfluenzaA__AHZ36577

SEQ ID NO: 76167 - RNA, 1701 nt, Artificial Sequence; identical to SEQ ID NO: 76089
  derived and/or modified CDS sequence (opt1) from hemagglutinin__InfluenzaA__AHZ36589

SEQ ID NO: 76168 - RNA, 1701 nt, Artificial Sequence; identical to SEQ ID NO: 76164
  derived and/or modified CDS sequence (opt1) from hemagglutinin__InfluenzaA__AHZ36601

SEQ ID NO: 76169 - RNA, 1701 nt, Artificial Sequence
  derived and/or modified CDS sequence (opt1) from hemagglutinin__InfluenzaA__AHZ36613
augaagaccaucaucgcccugagcuacauccucugccugaucuucgcccaggagauccccggcaacgacaacuccaccgcgacgcugugccucgggcaccacgccgugccgaacggcaccaucgucaagaccaucaccaacgaccagaucgaggugacgaacgccaccgagcuggugcagagcuccagcaccggggagaucugcaacagcccccaccagauccuggacggcgagaacugcacccucaucgacgcccugcugggggacccccagugcgacgacuuccagaacaaggagugggaccucuucgucgagcgcuccaaggcccacuccaacugcuaccccuacgacgugccggacuacgcgagccugcggucccugguggccagcuccggcacgcucgaguucaacaacgagagcuucaacuggaccggcgucacccagaacgggaccuccagcgccugcauccgccgguccaacaacagcuucuucucccgccugaacuggcugacgcaccucaacuucaaguaccccgcccugaacgugaccaugcccaacaacgagcaguucgacaagcuguacaucuggggcgugcaccaccccgggaccgacaaggaccagaucuuccucuacgcgcaggccagcggccggaucaccgucuccacgaagcgcagccagcaggccgugaucccgaacaucgggagccggccccgcgugcggaacauccccucccgcgucagcaucuacuggaccaucgugaagcccggcgacauccugcugaucaacuccaccggcaaccucaucgccccgcggggguacuucaagauccgcagcggcaaguccagcaucaugcgguccgacgcccccaucgggaagugcaacagcgcgugcaucacccccaacggcuccauccccaacgacaagccguuccagaacgugaaccgcaucacguacgggaccugcccccgguacgucaagcagaacacccugaagcuggccaccggcaugcgcaacgugcccgagaagcagacgcggggcaucuucggggccaucgccggcuucaucgagaacgggugggagggcaugguggacggcugguacggguuccgccaccagaacagcgagggccgggggcaggccgcggaccucaaguccacccaggccgccaucgaccagaucaacggcaagcugaaccgccugaucgggaagaccaacgagaaguuccaccagaucgagaaggaguucagcgaggucgagggccggauccaggaccucgagaaguacguggaggacaccaagaucgaccugugguccuacaacgccgagcugcucguggcccuggagaaccagcacacgaucgaccugaccgacagcgagaugaacaagcuguucgagaagaccaagaagcagcuccgcgagaacgcggaggacaugggcaacgggugcuucaagaucuaccacaagugcgacaacgccugcaucggcuccauccgcaacgggaccuacgaccacgacgucuaccgggacgaggcccugaacaaccgcuuccagaucaagggcguggagcucaagagcggguacaaggacuggauccuguggaucuccuucgccacgagcugcuuccugcucugcguggcccugcugggcuucaucaugugggcgugccagaagggcaacauccggugcaacaucugcaucuga

SEQ ID NO: 76170 - RNA, 1701 nt, Artificial Sequence; identical to SEQ ID NO: 76089
  derived and/or modified CDS sequence (opt1) from hemagglutinin__InfluenzaA__AHZ36625

SEQ ID NO: 76171 - RNA, 1701 nt, Artificial Sequence; identical to SEQ ID NO: 76090
  derived and/or modified CDS sequence (opt1) from hemagglutinin__InfluenzaA__AHZ36637

SEQ ID NO: 76172 - RNA, 1701 nt, Artificial Sequence; identical to SEQ ID NO: 76090
  derived and/or modified CDS sequence (opt1) from hemagglutinin__InfluenzaA__AHZ36649

SEQ ID NO: 76173 - RNA, 1701 nt, Artificial Sequence; identical to SEQ ID NO: 74018
  derived and/or modified CDS sequence (opt1) from hemagglutinin__InfluenzaA__AHZ36661

SEQ ID NO: 76174 - RNA, 1701 nt, Artificial Sequence; identical to SEQ ID NO: 74018
  derived and/or modified CDS sequence (opt1) from hemagglutinin__InfluenzaA__AHZ36673

SEQ ID NO: 76175 - RNA, 1701 nt, Artificial Sequence
  derived and/or modified CDS sequence (opt1) from hemagglutinin__InfluenzaA__AHZ36685
augaagaccaucaucgcccugagcuacauccucugccugguguucgcccagaagcugcccggcaacgacaacuccaccgcgacgcucugccuggggcaccacgccgucccgaacggcaccaucgugaagaccaucaccaacgaccgcaucgaggugacgaacgccaccgagcugguccagaacagcuccaucggggagaucugcgacagcccccaccagauccucgacggcgagaacugcacccugaucgacgcccugcucggggacccccagugcgacggcuuccagaacaagaagugggaccuguucguggagcgguccaaggccuacagcaacugcuaccccuacgacgugccggacuacgcgucccugcgcagccucgucgccuccagcggcacccuggaguucaacaacgaguccuucaacugggccggggugacgcagaacggcaccagcuccgccugcauccgggggagcaacuccagcuucuucucccgccugaacuggcucacccaccugaacuucaaguaccccgcgcugaacgugaccaugcccaacaacgagcaguucgacaagcucuacaucuggggcguccaccaccccgggacggacaaggaccagaucuuccuguacgcccagagcuccggccggaucaccgugagcaccaagcgcagccagcaggccgugaucccgaacaucggcucccggccccgcauccggaacauccccagccgcaucuccaucuacuggaccaucgucaagcccggggacauccugcucaucaacagcacgggcaaccugaucgccccgcggggguacuucaagauccgcuccggcaagagcuccaucaugcggagcgacgcccccaucggcaagugcaaguccgagugcaucacccccaacgggagcauccccaacgacaagccguuccagaacgugaaccgcaucaccuacggcgcgugcccccgguacgugaagcaguccacccugaagcucgccacggggaugcgcaacguccccgagaagcagacccggggcaucuucggggccaucgccggcuucaucgagaacggcugggaggggaugguggacggcugguacggguuccgccaccagaacagcgagggccgggggcaggccgcggaccugaaguccacccaggccgccaucgaccagaucaacggcaagcugaaccgccucaucggcaagaccaacgagaaguuccaccagaucgagaaggaguucagcgagguggaggggcggauccaggaccuggagaaguacgucgaggacacgaagaucgaccugugguccuacaacgccgagcuccugguggcccuggagaaccagcacaccaucgaccucaccgacagcgagaugaacaagcuguucgagaagaccaagaagcagcugcgcgagaacgcggaggacaugggcaacgggugcuucaagaucuaccacaagugcgacaacgccugcaucggcuccauccgcaacgggacguacgaccacgacguguaccgggacgaggcccucaacaaccgcuuccagaucaagcgggucgagcucaagagcggcuacaaggacuggauccuguggaucuccuucgccaucagcugcuuccugcugugcguggcccugcucggcuucaucaugugggcgugccagaaggggaacauccgcugcaacaucugcaucuga

SEQ ID NO: 76176 - RNA, 1683 nt, Artificial Sequence; identical to SEQ ID NO: 74012
  derived and/or modified CDS sequence (opt1) from hemagglutinin__InfluenzaA__AHZ39698

SEQ ID NO: 76177 - RNA, 1683 nt, Artificial Sequence
  derived and/or modified CDS sequence (opt1) from hemagglutinin__InfluenzaA__AHZ39722
augaacacccagauccugguguucgcccucaucgccaucauccccaccaacgcggacaagaucugccugggccaccacgccgucagcaacgggacgaaggugaacacccugaccgagcgcggcguggaggucgugaacgccaccgagacgguggagcggaccaacaucccgcgcaucugcuccaaggggaagcggaccgucgaccucggccagugcgggcugcugggcaccaucacgggcccgccccagugcgaccaguuccucgaguucagcgccgaccugaucaucgagcgccgggagggguccgacgugugcuaccccggcaaguucgugaacgaggaggcccugcgccagauccuccgggagagcgggggcaucgacaaggaggcgaugggguucaccuacuccggcauccgcaccgacggcgccaccagcgccugccggcgcuccgggagcuccuucuacgccgagaugaaguggcugcugagcaacacggacgacgcggccuucccgcagaugaccaaguccuacaagaacacccgcaagagccccgcccucaucgucuggggcauccaccacuccgugagcaccgccgagcagacgaagcuguacggguccggcaacaagcuggugaccgucggcagcuccaacuaccagcagagcuucgugcccucccccggggcccggccccaggugaacggccucagcgggcggaucgacuuccacuggcugaugcugaaccccaacgacaccgucaccuucagcuucaacggcgcguucaucgcccccgaccgcgccuccuuccuccggggcaagagcauggggauccaguccggcguccagguggacgccaacugcgagggggacugcuaccacagcggcgggacgaucaucuccaaccugcccuuccagaacaucgacagccgcgccgugggcaagugcccgcgguacgugaagcagcgcucccugcuccuggcgaccgggaugaagaacgugcccgagauccccaagggccggggccuguucggggccaucgccggcuucaucgagaacgggugggagggccucaucgacgggugguacggcuuccgccaccagaacgcccagggcgaggggaccgccgcggacuacaagagcacccaguccgccaucgaccagaucacgggcaagcugaaccggcugaucgagaagaccaaccagcaguucgagcucaucgacaacgaguucaacgaggucgagaagcagaucgggaacgugaucaacuggacccgcgacagcaucaccgaggugugguccuacaacgccgagcugcuggucgccauggagaaccagcacacgaucgaccucgccgacagcgagauggacaagcuguacgagcgcgugaagcggcagcugcgcgagaacgcggaggaggacggcaccggcugcuucgagaucuuccacaagugcgacgacgacugcauggccuccauccggaacaacaccuacgaccacagcaaguaccgcgaggaggccaugcagaaccggauccagaucgaccccgucaagcucuccagcggguacaaggacgugauccugugguucuccuucggcgccagcugcuucauccugcucgcgaucgugauggggcuggucuucaucugcgugaagaacggcaacaugcgcugcaccaucugcaucuga

SEQ ID NO: 76178 - RNA, 1683 nt, Artificial Sequence; identical to SEQ ID NO: 76177
  derived and/or modified CDS sequence (opt1) from hemagglutinin__InfluenzaA__AHZ39734

SEQ ID NO: 76179 - RNA, 1683 nt, Artificial Sequence
  derived and/or modified CDS sequence (opt1) from hemagglutinin__InfluenzaA__AHZ39746
augaacacccagauccugguguucgcccucaucgccaucauccccaccaacgcggacaagaucugccugggccaccacgccgucagcaacgggacgaaggugaacacccugaccgagcgcggcguggaggucgugaacgccaccgagacgguggagcggaccaacaucccgcgcaucugcuccaaggggaagcggaccgucgaccucggccagugcgggcugcugggcaccaucacgggcccgccccagugcgaccaguuccucgaguucagcgccgaccugaucaucgagcgccgggagggguccgacgugugcuaccccggcaaguucgugaacgaggaggcccugcgccagauccuccgggagagcgggggcaucgacaaggaggcgaugggguucaccuacuccggcauccgcaccaacggcgccaccagcgccugccggcgcuccgggagcuccuucuacgccgagaugaaguggcugcugagcaacacggacaacgcggccuucccgcagaugaccaaguccuacaagaacacccgcaagagccccgcccucaucgucuggggcauccaccacuccgugagcaccgccgagcagacgaagcuguacggguccggcaacaagcuggugaccgucggcagcuccaacuaccagcagagcuucgugcccucccccggggagcggccccaggugaacggccucagcgggcggaucgacuuccacuggcugaugcugaaccccaacgacaccgucaccuucagcuucaacggcgccuucaucgcgcccgaccgcgccuccuuccuccggggcaagagcauggggauccaguccggcguccagguggacgccaacugcgagggggacugcuaccacagcggcgggacgaucaucuccaaccugcccuuccagaacaucgacagccgcgccgugggcaagugcccgcgguacgugaagcagcgcucccugcuccuggccaccgggaugaagaacgugcccgagauccccaagggccggggccuguucggggcgaucgccggcuucaucgagaacgggugggagggccucaucgacgggugguacggcuuccgccaccagaacgcccagggcgaggggaccgccgccgacuacaagagcacccaguccgcgaucgaccagaucacgggcaagcugaaccggcugaucgagaagaccaaccagcaguucgagcucaucgacaacgaguucaacgaggucgagaagcagaucgggaacgugaucaacuggacccgcgacagcaucaccgaggugugguccuacaacgccgagcugcuggucgccauggagaaccagcacacgaucgaccucgccgacagcgagauggacaagcuguacgagcgcgugaagcggcagcugcgcgagaacgccgaggaggacggcaccggcugcuucgagaucuuccacaagugcgacgacgacugcauggcguccauccggaacaacaccuacgaccacagcaaguaccgcgaggaggccaugcagaaccggauccagaucgaccccgucaagcucuccagcggguacaaggacgugauccugugguucuccuucggcgccagcugcuucauccugcucgccaucgugauggggcuggucuucaucugcgugaagaacggcaacaugcgcugcaccaucugcaucuga

SEQ ID NO: 76180 - RNA, 1683 nt, Artificial Sequence; identical to SEQ ID NO: 76177
  derived and/or modified CDS sequence (opt1) from hemagglutinin__InfluenzaA__AHZ39758

SEQ ID NO: 76181 - RNA, 1683 nt, Artificial Sequence; identical to SEQ ID NO: 76177
  derived and/or modified CDS sequence (opt1) from hemagglutinin__InfluenzaA__AHZ39770

SEQ ID NO: 76182 - RNA, 1683 nt, Artificial Sequence; identical to SEQ ID NO: 76177
  derived and/or modified CDS sequence (opt1) from hemagglutinin__InfluenzaA__AHZ39782

SEQ ID NO: 76183 - RNA, 1701 nt, Artificial Sequence; identical to SEQ ID NO: 73907
  derived and/or modified CDS sequence (opt1) from hemagglutinin__InfluenzaA__AHZ39794

SEQ ID NO: 76184 - RNA, 1701 nt, Artificial Sequence; identical to SEQ ID NO: 74021
  derived and/or modified CDS sequence (opt1) from hemagglutinin__InfluenzaA__AHZ39806

SEQ ID NO: 76185 - RNA, 1701 nt, Artificial Sequence
  derived and/or modified CDS sequence (opt1) from hemagglutinin__InfluenzaA__AHZ39818
augaagaccaucaucgcccugagcuacauccucugccugguguucgcccagaagcugcccggcaacgacaacuccaccgcgacgcucugccuggggcaccacgccgucccgaacggcaccaucgugaagaccaucaccaacgaccagaucgaggugacgaacgccaccgagcugguccagagcuccagcaccggggagaucugcaacagcccccaccagauccucgacggcgagaacugcacccugaucgacgcccugcucggggacccccagugcgacggcuuccagaacaagaagugggaccuguucguggagcgcagcaaggcccacuccaacugcuaccccuacgacgugccggacuacgcgagccugcggucccucgucgccagcuccggcacgcuggaguucaacaacgagagcuucaacuggaccggggugacccagaacggcaccuccagcgccugcauccgccgguccaacaacagcuucuucucccgccugaacuggcucacgcaccugaacuucaaguaccccgcccugaacgugaccaugcccaacaacgagcaguucgacaagcucuacaucuggggcguccaccaccccgggaccgacaaggaccagaccuuccuguacgcgcaggccgccgggcggaucacggugagcaccaagcgcucccagcaggccgugaucccgaacaucggcagccggccccgcguccggaacauccccagccgcguguccaucuacuggaccaucgugaagcccggcgacauccugcucaucaacagcaccgggaaccugaucgccccgcggggcuacuucaagauccgcuccgggaaguccuccaucaugcggagcgacgcgcccaucggcaagugcaacuccgccugcaucacgcccaacggcagcauccccaacgacaagccguuccagaacgucaaccgcaucaccuacggggccugcccccgguacgugaagcagaacacccugaagcucgccaccggcaugcgcaacgugcccgagaagcagacgcgggggaucuucggcgccaucgcgggguucaucgagaacggcugggagggcauggucgacgggugguacggcuuccgccaccagaacuccgaggggcggggccaggccgccgaccucaagagcacccaggccgccaucgaccagaucaacgggaagcugaaccgccucaucggcaagaccaacgagaaguuccaccagaucgagaaggaguucuccgagguggagggccggauccaggaccuggagaaguacguggaggacaccaagaucgaccuguggagcuacaacgcggagcucaucgucgcccuggagaaccagcacacgaucgaccugaccgacuccgagaugaacaagcuguucgagaagaccaagaagcagcugcgcgagaacgccgaggacauggggaacggcugcuucaagaucuaccacaagugcgacaacgccugcaucgggagcauccgcaacggcaccuacgaccacgacguguaccgggacgaggcccugaacaaccgcuuccagaucaaggggguggagcucaaguccggcuacaaggacuggauccuguggaucagcuucgcgaucuccugcuuccugcucugcgucgugcugcugggcuucaucaugugggccugccagaaggggaacauccggugcaacaucugcaucuga

SEQ ID NO: 76186 - RNA, 1701 nt, Artificial Sequence; identical to SEQ ID NO: 73907
  derived and/or modified CDS sequence (opt1) from hemagglutinin__InfluenzaA__AHZ39841

SEQ ID NO: 76187 - RNA, 1701 nt, Artificial Sequence; identical to SEQ ID NO: 73927
  derived and/or modified CDS sequence (opt1) from hemagglutinin__InfluenzaA__AHZ39853

SEQ ID NO: 76188 - RNA, 1701 nt, Artificial Sequence; identical to SEQ ID NO: 73907
  derived and/or modified CDS sequence (opt1) from hemagglutinin__InfluenzaA__AHZ39865

SEQ ID NO: 76189 - RNA, 1701 nt, Artificial Sequence
  derived and/or modified CDS sequence (opt1) from hemagglutinin__InfluenzaA__AHZ39877
augaagaccaucaucgcccugagcuacauccucugccugguguucgcccagaagcugcccggcaacgacaacuccaccgcgacgcucugccuggggcaccacgccgucccgaacggcaccaucgugaagaccaucaccaacgaccgcaucgaggugacgaacgccaccgagcugguccagaacagcuccaucggggagaucugcgacagcccccaccagauccucgacggcgagaacugcacccugaucgacgcccugcucggggacccccagugcgacggcuuccagaacaagaagugggaccuguucguggagcgguccaaggccuacagcaacugcuaccccuacgacgugccggacuacgcgucccugcgcagccucgucgccuccagcggcacccuggaguucaacaacgaguccuucaacuggacgggggugacccagaacggcaccagcuccgccugcauccggcgcagcaacuccagcuucuucucccggcugaacuggcucacccaccugaacuucaaguaccccgcccugaacgugacgaugcccaacaacgagcaguucgacaagcucuacaucuggggcguccaccaccccgggaccgacaaggaccagaucuuccuguacgcgcagagcuccgggcgcaucaccgugagcaccaagcggagccagcaggccgugaucccgaacaucggcucccgcccccggauccgcaacauccccagccggaucuccaucuacuggacgaucgucaagcccggcgacauccugcucaucaacagcaccgggaaccugaucgccccgcgcggcuacuucaagauccgguccggcaagagcuccaucaugcgcagcgacgcccccaucgggaagugcaaguccgagugcaucacccccaacggcagcauccccaacgacaagccguuccagaacgugaaccggaucaccuacggggccugcccccgcuacgugaagcaguccacgcugaagcucgcgaccggcaugcggaacguccccgagaagcagacccgcgggaucuucggcgccaucgccggguucaucgagaacggcugggagggcaugguggacgggugguacggcuuccggcaccagaacagcgaggggcgcggccaggccgccgaccugaaguccacccaggcggccaucgaccagaucaacgggaagcugaaccggcucaucggcaagacgaacgagaaguuccaccagaucgagaaggaguucagcgagguggagggccgcauccaggaccuggagaaguacgucgaggacaccaagaucgaccugugguccuacaacgccgagcuccugguggcccuggagaaccagcacaccaucgaccucaccgacagcgagaugaacaagcuguucgagaagacgaagaagcagcugcgcgagaacgccgaggacauggggaacggcugcuucaagaucuaccacaagugcgacaacgcgugcaucggguccauccggaacggcaccuacgaccacaacguguaccgcgacgaggcccucaacaaccgguuccagaucaagggggucgagcucaagagcggcuacaaggacuggauccuguggaucuccuucgccaccagcugcuuccugcugugcguggcccugcucggcuucaucaugugggccugccagaaggggaacauccgcugcaacaucugcaucuga

SEQ ID NO: 76190 - RNA, 1701 nt, Artificial Sequence; identical to SEQ ID NO: 73927
  derived and/or modified CDS sequence (opt1) from hemagglutinin__InfluenzaA__AHZ39889

SEQ ID NO: 76191 - RNA, 1701 nt, Artificial Sequence; identical to SEQ ID NO: 73908
  derived and/or modified CDS sequence (opt1) from hemagglutinin__InfluenzaA__AHZ39913

SEQ ID NO: 76192 - RNA, 1701 nt, Artificial Sequence
  derived and/or modified CDS sequence (opt1) from hemagglutinin__InfluenzaA__AHZ39925
augaagaccaucaucgcccugagcuacauccucugccugguguucgcccagaagcugcccggcaacgacaacuccaccgcgacgcucugccuggggcaccacgccgucccgaacggcaccaucgugaagaccaucaccaacgaccgcaucgaggugacgaacgccaccgagcugguccagaacagcuccaucggggagaucugcgacagcccccaccagauccucgacggcgagaacugcacccugaucgacgcccugcucggggacccccagugcgacggcuuccagaacaagaagugggaccuguucguggagcgguccaaggccuacagcaacugcuaccccuacgacgugccggacuacgcgucccugcgcagccucgucgccuccagcggcacccuggaguucaacaacgaguccuucaacuggacgggggugacccagaacggcaccagcuccgccugcauccggcgcagcaacuccagcuucuucucccggcugaacuggcucacccaccugaacuucaaguaccccgcccugaacgugacgaugcccaacaacgagcaguucgacaagcucuacaucuggggcguccaccaccccgggaccgacaaggaccagaucuuccuguacgcgcagagcuccgggcgcaucaccgugagcaccaagcggagccagcaggccgugaucccgaacaucggcucccgcccccggauccgcgacauccccagccggaucuccaucuacuggacgaucgucaagcccggcgacauccugcucaucaacagcaccgggaaccugaucgccccgcgcggcuacuucaagauccgguccggcaagagcuccaucaugcgcagcgacgcccccaucgggaagugcaaguccgagugcaucacccccaacggcagcauccccaacgacaagccguuccagaacgugaaccggaucaccuacggggccugcccccgcuacgugaagcaguccacgcugaagcucgcgaccggcaugcggaacguccccgagaagcagacccgcgggaucuucggcgccaucgccggguucaucgagaacggcugggagggcaugguggacgggugguacggcuuccggcaccagaacagcgaggggcgcggccaggccgccgaccugaaguccacccaggcggccaucgaccagaucaacgggaagcugaaccggcucaucggcaagacgaacgagaaguuccaccagaucgagaaggaguucagcgagguggagggccgcauccaggaccuggagaaguacgucgaggacaccaagaucgaccugugguccuacaacgccgagcuccugguggcccuggagaaccagcacaccaucgaccucaccgacagcgagaugaacaagcuguucgagaagacgaagaagcagcugcgcgagaacgccgaggacauggggaacggcugcuucaagaucuaccacaagugcgacaacgcgugcaucggguccauccggaacggcaccuacgaccacgacguguaccgcgacgaggcccucaacaaccgguuccagaucaagggggucgagcucaagagcggcuacaaggacuggauccuguggaucuccuucgccaucagcugcuuccugcugugcguggcccugcucggcuucaucaugugggccugccagaaggggaacauccgcugcaacaucugcaucuga

SEQ ID NO: 76193 - RNA, 1701 nt, Artificial Sequence; identical to SEQ ID NO: 73907
  derived and/or modified CDS sequence (opt1) from hemagglutinin__InfluenzaA__AHZ39937

SEQ ID NO: 76194 - RNA, 1701 nt, Artificial Sequence; identical to SEQ ID NO: 73907
  derived and/or modified CDS sequence (opt1) from hemagglutinin__InfluenzaA__AHZ39949

SEQ ID NO: 76195 - RNA, 1701 nt, Artificial Sequence; identical to SEQ ID NO: 73907
  derived and/or modified CDS sequence (opt1) from hemagglutinin__InfluenzaA__AHZ39961

SEQ ID NO: 76196 - RNA, 1701 nt, Artificial Sequence; identical to SEQ ID NO: 73907
  derived and/or modified CDS sequence (opt1) from hemagglutinin__InfluenzaA__AHZ39973

SEQ ID NO: 76197 - RNA, 1701 nt, Artificial Sequence
  derived and/or modified CDS sequence (opt1) from hemagglutinin__InfluenzaA__AHZ39985
augaagaccaucaucgcccugagcuacauccucugccugguguucgcccagaagcugcccggcaacgacaacuccaccgcgacgcucugccuggggcaccacgccgucccgaacggcaccaucgugaagaccaucaccaacgaccgcaucgaggugacgaacgccaccgagcugguccagaacagcuccaucggggagaucugcgacagcccccaccagauccucgacggcgagaacugcacccugaucgacgcccugcucggggacccccagugcgacggcuuccagaacaagaagugggaccuguucguggagcgguccaaggccuacagcaacugcuaccccuacgacgugccggacuacgcgucccugcgcagccucgucgccuccagcggcacccuggaguucaacaacgaguccuucaacuggacgggggugacccagaacggcaccagcuccgccugcauccggcgcagcaacuccagcuucuucucccggcugaacuggcucacccaccugaacuucaaguaccccgcccugaacgugacgaugcccaacaacgagcaguucgacaagcucuacaucuggggcguccaccaccccgggaccgacaaggaccagaucuuccuguacgcgcagagcuccgggcgcaucaccgugagcaccaagcggagccagcaggccgugaucccgaacaucggcucccgcccccggauccgcaacauccccagccggaucuccaucuacuggacgaucgucaagcccggcgacauccugcucaucaacagcaccgggaaccugaucgccccgcgcggcuacuucaagauccgguccggcaagagcuccaucaugcgcagcgacgccuccaucgggaagugcaagagcgagugcaucacccccaacggcuccauccccaacgacaagcccuuccagaacgugaaccggaucaccuacggggccugcccgcgcuacgugaagcagagcacgcugaagcucgcgaccggcaugcggaacguccccgagaagcagacccgcgggaucuucggcgccaucgccggguucaucgagaacggcugggagggcaugguggacgggugguacggcuuccggcaccagaacuccgaggggcgcggccaggccgccgaccucaagagcacccaggcggccaucgaccagaucaacgggaagcugaaccggcugaucggcaagacgaacgagaaguuccaccagaucgagaaggaguucuccgagguggagggccgcauccaggaccuggagaaguacgucgaggacaccaagaucgaccuguggagcuacaacgccgagcuccugguggcccuggagaaccagcacaccaucgaccucaccgacuccgagaugaacaagcuguucgagaagacgaagaagcagcugcgcgagaacgccgaggacauggggaacggcugcuucaagaucuaccacaagugcgacaacgcgugcaucgggagcauccggaacggcaccuacgaccacaacguguaccgcgacgaggcccucaacaaccgguuccagaucaagggggucgagcugaaguccggcuacaaggacuggauccuguggaucagcuucgccaccagcugcuuccuccugugcguggcccugcucggcuucaucaugugggccugccagaaggggaacauccgcugcaacaucugcaucuga

SEQ ID NO: 76198 - RNA, 1701 nt, Artificial Sequence; identical to SEQ ID NO: 73907
  derived and/or modified CDS sequence (opt1) from hemagglutinin__InfluenzaA__AHZ39997

SEQ ID NO: 76199 - RNA, 1701 nt, Artificial Sequence
  derived and/or modified CDS sequence (opt1) from hemagglutinin__InfluenzaA__AHZ40009
augaagaccaucaucgcccugagcuacauccucugccugguguucgcccagaagcugcccggcaacgacaacuccaccgcgacgcucugccuggggcaccacgccgucccgaacggcaccaucgugaagaccaucaccaacgaccgcaucgaggugacgaacgccaccgagcugguccagaucagcuccaucggggagaucugcgacagcccccaccagauccucgacggcgagaacugcacccugaucgacgcccugcucggggacccccagugcgacggcuuccagaacaagaagugggaccuguucguggagcgguccaaggccuacagcaacugcuaccccuacgacgugccggacuacgcgucccugcgcagccucgucgccuccagcggcacccuggaguucaacaacgaguccuucaacuggacgggggugacccagaacggcaccagcuccgccugcauccgcaagagcaacuccagcuucuucucccggcugaacuggcucacccaccugaacuucaaguaccccgcccugaacgugacgaugcccaacaacgagcaguucgacaagcucuacaucuggggcguccaccaccccgggaccgacaaggaccagaucuuccuguacgcgcagagcuccgggcggaucaccgugagcaccaagcgcagccagcaggccgugaucccgaacaucggcucccggccccgcauccggaacauccccagccgcaucuccaucuacuggacgaucgucaagcccggcgacauccugcucaucaacagcaccgggaaccugaucgccccgcggggcuacuucaagauccgcuccggcaagagcuccaucaugcggagcgacgcccccaucgggaagugcaaguccgagugcaucacccccaacggcagcauccccaacgacaagccguuccagaacgugaaccgcaucaccuacggggccugcccccgguacgugaagcaguccacgcugaagcucgcgaccggcaugcgcaacguccccgagaagcagacccgggggaucuucggcgccaucgccggguucaucgagaacggcugggagggcaugguggacgggugguacggcuuccgccaccagaacagcgaggggcggggccaggccgccgaccugaaguccacccaggcggccaucgaccagaucaacgggaagcugaaccgccucaucggcaagacgaacgagaaguuccaccagaucgagaaggaguucagcgagguggagggccggauccaggaccuggagaaguacgucgaggacaccaagaucgaccugugguccuacaacgccgagcuccugguggcccuggagaaccagcacaccaucgaccucaccgacagcgagaugaacaagcuguucgagaagacgaagaagcagcugcgcgagaacgccgaggacauggggaacggcugcuucaagaucuaccacaagugcgacaacgcgugcaucggguccauccgcaacggcaccuacgaccacgacguguaccgggacgaggcccucaacaaccgcuuccagaucaagggggucgagcucaagagcggcuacaaggacuggauccuguggaucuccuucgccaucagcugcuuccugcugugcguggcccugcucggcuucaucaugugggccugccagaaggggaacauccggugcaacaucugcaucuga

SEQ ID NO: 76200 - RNA, 1701 nt, Artificial Sequence; identical to SEQ ID NO: 73907
  derived and/or modified CDS sequence (opt1) from hemagglutinin__InfluenzaA__AHZ40021

SEQ ID NO: 76201 - RNA, 1701 nt, Artificial Sequence; identical to SEQ ID NO: 73882
  derived and/or modified CDS sequence (opt1) from hemagglutinin__InfluenzaA__AHZ40033

SEQ ID NO: 76202 - RNA, 1701 nt, Artificial Sequence; identical to SEQ ID NO: 73907
  derived and/or modified CDS sequence (opt1) from hemagglutinin__InfluenzaA__AHZ40045

SEQ ID NO: 76203 - RNA, 1701 nt, Artificial Sequence; identical to SEQ ID NO: 73907
  derived and/or modified CDS sequence (opt1) from hemagglutinin__InfluenzaA__AHZ40060

SEQ ID NO: 76204 - RNA, 1701 nt, Artificial Sequence; identical to SEQ ID NO: 73907
  derived and/or modified CDS sequence (opt1) from hemagglutinin__InfluenzaA__AHZ40072

SEQ ID NO: 76205 - RNA, 1701 nt, Artificial Sequence; identical to SEQ ID NO: 73907
  derived and/or modified CDS sequence (opt1) from hemagglutinin__InfluenzaA__AHZ40084

SEQ ID NO: 76206 - RNA, 1701 nt, Artificial Sequence; identical to SEQ ID NO: 73907
  derived and/or modified CDS sequence (opt1) from hemagglutinin__InfluenzaA__AHZ40096

SEQ ID NO: 76207 - RNA, 1701 nt, Artificial Sequence; identical to SEQ ID NO: 73908
  derived and/or modified CDS sequence (opt1) from hemagglutinin__InfluenzaA__AHZ40108

SEQ ID NO: 76208 - RNA, 1701 nt, Artificial Sequence; identical to SEQ ID NO: 74021
  derived and/or modified CDS sequence (opt1) from hemagglutinin__InfluenzaA__AHZ40120

SEQ ID NO: 76209 - RNA, 1701 nt, Artificial Sequence
  derived and/or modified CDS sequence (opt1) from hemagglutinin__InfluenzaA__AHZ40130
augaagaccaucaucgcccugagcuacauccucugccugguguucgcccagaagcugcccggcaacgacaacuccaccgcgacgcucugccuggggcaccacgccgucccgaacggcaccaucgugaagaccaucaccaacgaccgcaucgaggugacgaacgccaccgagcugguccagaacagcuccaucggggagaucugcgacagcccccaccagauccucgacggcgagaacugcacccugaucgacgcccugcucggggacccccagugcgacggcuuccagaacaagaagugggaccuguucguggagcgguccaaggccuacagcaacugcuaccccuacgacgugccggacuacgcgucccugcgcagccucgucgccuccagcggcacccuggaguucaacaacgaguccuucaacuggacgggggugacccagaacggcaccagcuccgccugcauccggcgcagcaacuccagcuucuucucccggcugaacuggcucacccaccugaacuucaaguaccccgcccugaacgugacgaugcccaacaacgagcaguucgacaagcucuacaucuggggcguccaccaccccgggaccgacaaggaccagaucuuccuguacgcgcagagcuccgggcgcaucaccgugagcaccaagcggagccagcaggccgugaucccgaacaucggcucccgcccccggauccgcaacauccccagccggaucuccaucuacuggacgaucgucaagcccggcgacauccugcucaucaacagcaccgggaaccugaucgccccgcgcggcuacuucaagauccgguccggcaagagcuccaucaugcgcagcgacgcccccaucgggaagugcaaguccgagugcaucacccccaacggcagcauccccaacgacaagccguuccagaacgugaaccggaucaccuacggggccugcccccgcuacgugaagcaguccacgcugaagcucgcgaccggcaugcggaacguccccgagaagcagacccgcgggaucuucggcgccaucgccggguucaucgagaacggcugggagggcaugguggacgggugguacggcuuccggcaccagaacagcgaggggcgcggccaggccgccgaccugaaguccacccaggcggccaucgaccagaucaacgggaagcugaaccggcucaucggcaagacgaacgagaaguuccaccagaucgagaaggaguucagcgagguggagggccgcauccaggaccuggagaaguacgucgaggacaccaagaucgaccugugguccuacaacgccgagcuccugguggcccuggagaaccagcacaccaucgaccucaccgacagcgagaugaacaagcuguucgagaagacgaagaagcagcugcgcgagaacgccgaggacauggggaacggcugcuucaagaucuaccacaagugcgacaacgcgugcaucggguccauccggaacggcaccuacgaccacaacguguaccgcgacgaggcccucaacaaccgguuccagaucaagggggucgagcucaagagcggcuacaagaacuggauccuguggaucuccuucgccaucagcugcuuccugcugugcguggcccugcucggcuucaucaugugggccugccagaaggggaacauccgcugcaacaucugcaucuga

SEQ ID NO: 76210 - RNA, 1701 nt, Artificial Sequence
  derived and/or modified CDS sequence (opt1) from hemagglutinin__InfluenzaA__AHZ40142
augaagaccaucaucgcccugagcuacauccucugccugguguucgcccagaagcugcccggcaacgacaacuccaccgcgacgcucugccuggggcaccacgccgucccgaacggcaccaucgugaagaccaucaccaacgaccgcaucgaggugacgaacgccaccgagcugguccagaacagcuccaucggggagaucugcgacagcccccaccagauccucgacggcgagaacugcacccugaucgacgcccugcucggggacccccagugcgacggcuuccaggacaagaagugggaccuguucguggagcgguccaaggccuacagcaacugcuaccccuacgacgugccggacuacgcgucccugcgcagccucgucgccuccagcggcacccuggaguucaacaacgagaacuucaacuggacgggggugacccagaacggcaccuccagcgccugcauccggcgcuccaacagcuccuucuucagccggcugaacuggcucacccaccugaacuucaaguaccccgcccugaacgugacgaugcccaacaacgagcaguucgacaagcucuacaucuggggcguccaccaccccgggaccgacaaggaccagaucuuccuguacgcgcaguccagcgggcgcaucaccguguccaccaagcggagccagcaggccgugaucccgaacaucggcagccgcccccggauccgcaacauccccucccggaucagcaucuacuggacgaucgucaagcccggcgacauccugcucaucaacuccaccgggaaccugaucgccccgcgcggcuacuucaagauccggagcgggaaguccagcaucaugcgcuccgacgcccccaucggcaagugcaagagcgagugcaucacccccaacggcuccauccccaacgaccggccguuccagaacgugaaccgcaucaccuacggggccugcccccgguacgugaagcagagcacgcugaagcucgcgaccggcaugcgcaacguccccgagaagcagacccgggggaucuucggcgccaucgccggguucaucgagaacggcugggagggcaugguggacgggugguacggcuuccgccaccagaacuccgaggggcggggccaggccgccgaccucaagagcacccaggcggccaucgaccagaucaacgggaagcugaaccgccugaucggcaagacgaacgagaaguuccaccagaucgagaaggaguucuccgagguggagggccgcauccaggaccuggagaaguacgucgaggacaccaagaucgaccuguggagcuacaacgccgagcuccugguggcccuggagaaccagcacaccaucgaccucaccgacuccgagaugaacaagcuguucgagaagacgaagaagcagcugcgggagaacgccgaggacauggggaacggcugcuucaagaucuaccacaagugcgacaacgcgugcaucgggagcauccgcaacggcaccuacgaccacgacguguaccgggacgaggcccucaacaaccgcuuccagaucaagggggucgagcugaaguccggcuacaaggacuggauccuguggaucagcuucgccaucuccugcuuccuccugugcguggcccugcucggcuucaucaugugggccugccagaaggggaacauccggugcaacaucugcaucuga

SEQ ID NO: 76211 - RNA, 1701 nt, Artificial Sequence
  derived and/or modified CDS sequence (opt1) from hemagglutinin__InfluenzaA__AHZ40154
augaagaccaucaucgcccugagcuacauccucugccugggcuucgcccaggagcugcccgggaacgacaacuccaccgcgacgcucugccugggccaccacgccgugccgaacgggaccaucgucaagaccaucaccaacgaccagaucgaggugacgaacgccaccgagcuggugcagagcuccagcaccggcgagaucugcaacagcccccaccagauccucgacggggagaacugcacccugaucgacgcccugcucggcgacccccagugcgacggcuuccagaacaagaagugggaccuguucgucgagcgcagcaaggcccacuccaacugcuaccccuacgacgugccggacuacgcgagccugcggucccucguggccagcuccgggacgcuggaguucaacaacgagagcuucaacuggaccggcgucacccagaacgggaccuccagcgccugcauccgcggcuccaacaacagcuucuucucccggcugaacuggcucacgcaccugaacuucaaguaccccgcccugaacgugaccaugcccaacaacgagcaguucgacaagcucuacaucuggggcgugcaccaccccgggaccgacaaggaccagaucuuccuguacgcgcaggccagcggccgcaucaccgucuccacgaagcggagccagcaggccgugaucccgaacaucgggagccgcccccgggugcgcaacauccccucccgggucagcaucuacuggaccaucgugaagcccggcgacaugcugcucaucaacuccaccgggaaccugaucgccccgcgcggcuacuucaagauccggagcggcaaguccagcaucaugcgcuccgacgcccccaucgggaagugcaacagcgcgugcaucacccccaacggcuccauccccaacgacaagccguuccagaacgugaaccggaucacguacggggccugcccccgcuacgucaagcagaacacccugaagcucgccaccggcaugcggaacgugcccgagaagcagacccgcgggaucuucggcgccaucgccggcuucaucgagaacgggugggagggcaugguggacgggugguacggcuuccggcaccagaacagcgaggggcgcggccaggcggccgaccugaaguccacgcaggccgccaucgaccagaucaacggcaagcugaaccggcucaucgggaagaccaacgagaaguuccaccagaucgagaaggaguucagcgaggucgagggccgcauccaggaccuggagaaguacguggaggacaccaagaucgaccugugguccuacaacgccgagcuccugguggcgcuggagaaccagcacaccaucgaccucacggacagcgagaugaacaagcuguucgagaagaccaagaagcagcugcgggagaacgccgaggacauggggaacggcugcuucaagaucuaccacaagugcaacaacgccugcaucggguccauccgcaacggcaccuacgaccacgacgucuaccgcgacgaggcccucaacaaccgguuccagaucaagggcguggagcugaaguccggguacaaggacuggauccuguggaucuccuucgccaucagcugcuuccuccugugcguggcgcugcucggcuucaucaugugggccugccagaaggggaacauccgcugcaacaucugcaucuga

SEQ ID NO: 76212 - RNA, 1701 nt, Artificial Sequence
  derived and/or modified CDS sequence (opt1) from hemagglutinin__InfluenzaA__AHZ40166
augaaggccauccuggugguccuccuguacaccuucgccaccgcgaacgccgacacgcugugcaucggcuaccacgccaacaacagcaccgacaccguggacaccgugcucgagaagaacgucacggugacccacuccgugaaccugcuggaggacaagcacaacgggaagcucugcaagcugcgcggcgucgcgccccugcaccucgggaagugcaacaucgccggcuggauccuggggaacccggagugcgagagccuguccaccgccagcuccuggagcuacaucguggagaccuccagcuccgacaacggcacgugcuaccccggcgacuucaucaacuacgaggagcuccgggagcagcugagcuccgugagcuccuucgagcgcuucgagaucuuccccaagaccagcuccuggcccaaccacgacagcaacaagggggucaccgccgccugcccgcacgccggcgcgaaguccuucuacaagaaccugaucuggcucgugaagaaggggaacagcuaccccaagcuguccaagagcuacaucaacgacaagggcaaggaggugcugguccucugggggauccaccaccccagcaccacggccgaccagcagucccuguaccagaacgccgacgccuacguguucgugggcaccagccgguacuccaagaaguucaagcccgagaucgccauccgcccgaagguccgggaccaggagggccgcaugaacuacuacuggacccugaucgagcccggggacaagaucaccuucgaggcgacgggcaaccucguggugccccgguacgccuucgccauggagcgcaacgccgggagcggcaucaucaucuccgacacccccguccacgacugcaacacgaccugccagaccccggagggcgccaucaacaccagccugcccuuccagaacauccaccccaucaccaucgggcggugccccaaguacgugaaguccaccaagcugcgccucgcgacgggccugcggaacgugccgagcauccagucccgcgggcuguucggcgccaucgccggguucaucgagggcggcuggaccgggauggucgacggcugguacggguaccaccaccagaacgagcagggcagcggguacgccgccgaccucaaguccacccagaacgcgaucgacaagaucaccaacaaggugaacagcgugaucgagaagaugaacacgcaguucaccgccgucggcaaggaguucaaccaccuggagaagcggaucgagaaccugaacaagaagguggacgacggcuuccucgacaucuggaccuacaacgccgagcugcugguccuccuggagaacgagcgcacccuggacuaccacgacuccaacgugaagaaccucuacgagaaggugcggaaccagcugaagaacaacgccaaggagaucgggaacggcugcuucgaguucuaccacaagugcgacaacacgugcauggagagcgucaagaacgggaccuacgacuaccccaaguacuccgaggaggccaagcugaaccgcgagaagaucgacggcgugaagcucgagagcacccggaucuaccagauccuggcgaucuacuccaccguggccagcucccugguccucguggugagccugggggccaucagcuucuggaugugcuccaacggcagccugcagugccgcaucugcaucuga

SEQ ID NO: 76213 - RNA, 1701 nt, Artificial Sequence; identical to SEQ ID NO: 73907
  derived and/or modified CDS sequence (opt1) from hemagglutinin__InfluenzaA__AHZ40177

SEQ ID NO: 76214 - RNA, 1701 nt, Artificial Sequence; identical to SEQ ID NO: 73907
  derived and/or modified CDS sequence (opt1) from hemagglutinin__InfluenzaA__AHZ40189

SEQ ID NO: 76215 - RNA, 1701 nt, Artificial Sequence; identical to SEQ ID NO: 73907
  derived and/or modified CDS sequence (opt1) from hemagglutinin__InfluenzaA__AHZ40201

SEQ ID NO: 76216 - RNA, 1701 nt, Artificial Sequence; identical to SEQ ID NO: 73892
  derived and/or modified CDS sequence (opt1) from hemagglutinin__InfluenzaA__AHZ40213

SEQ ID NO: 76217 - RNA, 1701 nt, Artificial Sequence; identical to SEQ ID NO: 73859
  derived and/or modified CDS sequence (opt1) from hemagglutinin__InfluenzaA__AHZ40225

SEQ ID NO: 76218 - RNA, 1701 nt, Artificial Sequence
  derived and/or modified CDS sequence (opt1) from hemagglutinin__InfluenzaA__AHZ40237
augaagaccaucaucgcccugagcuacauccucugccugguguucgcccagaagcugcccggcaacgacaacuccaccgcgacgcucugccuggggcaccacgccgucccgaacggcaccaucgugaagaccaucaccaacgaccagaucgaggugacgaacgccaccgagcugguccagaacagcuccaucggggagaucugcgacagcccccaccagauccucgacggcgagaacugcacccugaucgacgcccugcucggggacccccagugcgacggcuuccagaacaagaagugggaccuguucguggagcgcuccaaggccuacagcaacugcuaccccuacgacgugccggacuacgcgucccugcggagccucgucgccuccagcggcacccuggaguucaacaacgaguccuucaacugggccggggugacgcagaacggcaccagcuccgccugcauccgcgggagcaacuccagcuucuucucccggcugaacuggcucacccaccugaacuucaaguaccccgcgcugaacgugaccaugcccaacaacgagcaguucgacaagcucuacaucuggggcguccaccaccccgggacggacaaggaccagaucuuccuguacgcccagagcuccggccgcaucaccgugagcaccaagcggagccagcaggccgugaucccgaacaucggcucccgcccccggauccgcaacauccccagccggaucuccaucuacuggaccaucgucaagcccggggacauccugcucaucaacagcacgggcaaccugaucgccccgcgcggguacuucaagauccgguccggcaagagcuccaucaugcgcagcgacgcccccaucggcaagugcaaguccgagugcaucacccccaacgggagcauccccaccgacaagccguuccagaacgugaaccggaucaccuacggcgcgugcccccgcuacgugaagcaguccacgcugaagcucgccaccgggaugcggaacguccccgagaagcagacccgcggcaucuucggggccaucgccggcuucaucgagaacggcugggaggggaugguggacggcugguacggguuccggcaccagaacagcgagggccgcgggcaggccgcggaccugaaguccacccaggccgccaucgaccagaucaacggcaagcugaaccggcucaucggcaagacgaacgagaaguuccaccagaucgagaaggaguucagcgagguggaggggcgcauccaggaccuggagaaguacgucgaggacaccaagaucgaccugugguccuacaacgccgagcuccugguggcccuggagaaccagcacaccaucgaccucaccgacagcgagaugaacaagcuguucgagaagacgaagaagcagcugcgggagaacgcggaggacaugggcaacgggugcuucaagaucuaccacaagugcgacaacgccugcaucggcuccauccgcaacgggaccuacgaccacgacguguaccgcgacgaggcccucaacaaccgguuccagaucaagggcgucgagcucaagagcggcuacaaggacuggauccuguggaucuccuucgccaucagcugcuuccugcugugcguggcccugcucggguucaucaugugggcgugccagaagggcaacauccgcugcaacaucugcaucuga

SEQ ID NO: 76219 - RNA, 1701 nt, Artificial Sequence; identical to SEQ ID NO: 73915
  derived and/or modified CDS sequence (opt1) from hemagglutinin__InfluenzaA__AHZ40249

SEQ ID NO: 76220 - RNA, 1701 nt, Artificial Sequence; identical to SEQ ID NO: 73882
  derived and/or modified CDS sequence (opt1) from hemagglutinin__InfluenzaA__AHZ40261

SEQ ID NO: 76221 - RNA, 1701 nt, Artificial Sequence; identical to SEQ ID NO: 74021
  derived and/or modified CDS sequence (opt1) from hemagglutinin__InfluenzaA__AHZ40273

SEQ ID NO: 76222 - RNA, 1701 nt, Artificial Sequence
  derived and/or modified CDS sequence (opt1) from hemagglutinin__InfluenzaA__AHZ40285
augaagaccaucaucgcccugagcuacauccucugccugguguucgcccagaagcugcccggcaacgacaacuccaccgcgacgcucugccuggggcaccacgccgucccgaacggcaccaucgugaagaccaucaccaacgaccagaucgaggugacgaacgccaccgagcugguccagagcuccagcaccggggagaucugcgacagcccccaccagauccucgacggcgagaacugcacccugaucgacgcccugcucggggacccccagugcgacggcuuccagaacaagaagugggaccuguucguggagcgcagcaaggccuacuccaacugcuaccccuacgacgugccggacuacgcgagccugcggucccucgucgccagcuccggcacgcuggaguucaacaacgagagcuucaacuggaccggggugacccagaacggcaccuccagcgccugcauccgccgguccgacagcuccuucuucagccgccugaacuggcucacgcaccugaacuucaaguaccccgcccugaacgugaccaugcccaacaacgagcaguucgacaagcucuacaucuggggcguccaccaccccgggaccgacaaggaccagaucuuccuguacgcgcaggccuccgggcggaucaccgugagcacgaagcgcagccagcaguccgugaucccgaacaucggcagccggccccgcauccggaacauccccucccgcaucagcaucuacuggaccaucgucaagcccggcgacauccugcucaucaacuccaccgggaaccugaucgccccgcggggcuacuucaagauccagagcgggaaguccagcaucaugcgcuccgacacccccaucggcaagugcaacagcgagugcaucacgcccaacggcuccauccccaacgacaagccguuccagaacgugaaccggaucaccuacggggccugcccccgcuacgugaagcagaacacccugaagcucgccaccggcaugcggaacguccccgagaagcagacgcgcgggaucuucggcgcgaucgccggguucaucgagaacggcugggagggcaugguggacgggugguacggcuuccggcaccagaacagcgaggggcgcggccaggccgccgaccugaaguccacccaggccgcgaucgaccagaucaacgggaagcugaaccggcucaucggcaagaccaacgagaaguuccaccagaucgagaaggaguucagcgagguggagggccgcauccaggaccuggagaaguacgucgaggacaccaagaucgaccugugguccuacaacgccgagcuccugguggcccuggagaaccagcacacgaucgaccucaccgacagcgagaugaacaagcuguucgagaagaccaagaagcagcugcgggagaacgccgaggacauggggaacggcugcuucaagaucuaccacaagugcgacaacgccugcaucggguccauccgcaacggcaccuacaaccacgacguguaccgcgacgaggcgcucaacaaccgguuccagaucaagggggucgagcugaaguccggcuacaaggacuggauccuguggaucuccuucgccaucagcugcuuccuccugugcguggcccugcucggcuucaucaugugggccugccagaaggggaacauccgcugcaacaucugcaucuga

SEQ ID NO: 76223 - RNA, 1701 nt, Artificial Sequence; identical to SEQ ID NO: 74018
  derived and/or modified CDS sequence (opt1) from hemagglutinin__InfluenzaA__AHZ40297

SEQ ID NO: 76224 - RNA, 1701 nt, Artificial Sequence
  derived and/or modified CDS sequence (opt1) from hemagglutinin__InfluenzaA__AHZ40309
augaagaccaucaucgcccugagcuacauccucugccugguguucgcccagaagcugcccggcaacgacaacuccaccgcgacgcucugccuggggcaccacgccgucccgaacggcaccaucgugaagaccaucaccaacgaccgcaucgaggugacgaacgccaccgagcugguccagaacagcuccaucggggagaucugcgacagcccccaccagauccucgacggcgagaacugcacccugaucgacgcccugcucggggacccccagugcgacggcuuccagaacaagaagugggaccuguucguggagcgguccaaggccuacagcaacugcuaccccuacgacgugccggacuacgcgucccugcgcagccucgucgccuccagcggcacccuggaguucaacaacgaguccuucaacuggacgggggugacccagaacggcaccagcuccgccugcauccggcgcagcaacaacuccuucuucagccggcugaacuggcucacccaccugaacuucaaguaccccgcccugaacgugacgaugcccaacaacgagcaguucgacaagcucuacaucuggggcguccaccaccccgggaccgacaaggaccagaucuuccuguacgcgcaguccagcgggcgcaucaccguguccaccaagcggagccagcaggccgugaucccgaacaucggcagccgcccccggauccgcaacauccccucccggaucagcaucuacuggacgaucgucaagcccggcgacauccugcucaucaacuccaccgggaaccugaucgccccgcgcggcuacuucaagauccggaacggcaagagcuccaucaugcgcagcgacgcccccaucgggaagugcaaguccgagugcaucacccccaacggcagcauccccaacgacaagccguuccagaacgugaaccggaucaccuacggggccugcccccgcuacgugaagcaguccacgcugaagcucgcgaccggcaugcggaacguccccgagaagcagacccgcgggaucuucggcgccaucgccggguucaucgagaacggcugggagggcaugguggacgggugguacggcuuccggcaccagaacagcgaggggcgcggccaggccgccgaccugaaguccacccaggcggccaucgaccagaucaacgggaagcugaaccggcucaucggcaagacgaacgagaaguuccaccagaucgagaaggaguucagcgagguggagggccgcauccaggaccuggagaaguacgucgaggacaccaagaucgaccugugguccuacaacgccgagcuccugguggcccuggagaaccagcacaccaucgaccucaccgacagcgagaugaacaagcuguucgagaagacgaagaagcagcugcgcgagaacgccgaggacauggggaacggcugcuucaagaucuaccacaagugcgacaacgcgugcaucggguccauccggaacggcaccuacgaccacgacguguaccgcgacgaggcccucaacaaccgguuccagaucaagggggucgagcucaagagcggcuacaaggacuggauccuguggaucuccuucgccaucagcugcuuccugcugugcguggugcugcucggcuucaucaugugggccugccagaaggggaacauccgcugcaacaucugcaucuga

SEQ ID NO: 76225 - RNA, 1701 nt, Artificial Sequence; identical to SEQ ID NO: 73907
  derived and/or modified CDS sequence (opt1) from hemagglutinin__InfluenzaA__AHZ40321

SEQ ID NO: 76226 - RNA, 1701 nt, Artificial Sequence; identical to SEQ ID NO: 73907
  derived and/or modified CDS sequence (opt1) from hemagglutinin__InfluenzaA__AHZ40333

SEQ ID NO: 76227 - RNA, 1701 nt, Artificial Sequence
  derived and/or modified CDS sequence (opt1) from hemagglutinin__InfluenzaA__AHZ40345
augaagaccaucaucgcccugagcuacauccucugccugguguucgcccagaagcugcccggcaacgacaacuccaccgcgacgcucugccuggggcaccacgccgucccgaacggcaccaucgugaagaccaucaccaacgaccgcaucgaggugacgaacgccaccgagcugguccagaacagcuccaucggggagaucugcgacagcccccaccagauccucgacggcgagaacugcacccugaucgacgcccugcucggggacccccagugcgacggcuuccagaacaagaagugggaccuguucguggagcgguccaaggccuacagcaacugcuaccccuacgacgugccggacuacgcgucccugcgcagccucgucgccuccagcggcacccuggaguucaacaacgaguccuucaacuggacgggggugacccagaacggcaccagcuccgccugcauccggcgcagcaacuccagcuucuucucccggcugaacuggcucacccaccugaacuucaaguaccccgcccugaacgugacgaugcccaacaacgagcaguucgacaagcucuacaucuggggcguccaccaccccgggaccgacaaggaccagaucuuccuguacgcgcagagcuccgggcgcaucaccgugagcaccaagcggagccagcaggccgugaucccgaacaucggcucccgcccccggauccgcaacauccccagccggaucuccaucuacuggacgaucgucaagcccggcgacauccugcucaucaacagcaccgggaaccugaucgccccgcgcggcuacuucaagauccgguccggcaagagcuccaucaugcgcagcgacgcccccaucgggaagugcaaguccgagugcaucacccccaacggcagcauccccuccgacaagccguuccagaacgugaaccggaucaccuacggggccugcccccgcuacgugaagcagagcacgcugaagcucgcgaccggcaugcggaacguccccgagaagcagacccgcgggaucuucggcgccaucgccggguucaucgagaacggcugggagggcaugguggacgggugguacggcuuccggcaccagaacuccgaggggcgcggccaggccgccgaccucaagagcacccaggcggccaucgaccagaucaacgggaagcugaaccggcugaucggcaagacgaacgagaaguuccaccagaucgagaaggaguucuccgagguggagggccgcauccaggaccuggagaaguacgucgaggacaccaagaucgaccuguggagcuacaacgccgagcuccugguggcccuggagaaccagcacaccaucgaccucaccgacuccgagaugaacaagcuguucgagaagacgaagaagcagcugcgcgagaacgccgaggacauggggaacggcugcuucaagaucuaccacaagugcgacaacgcgugcaucgggagcauccggaacggcaccuacgaccacgacguguaccgcgacgaggcccucaacaaccgguuccagaucaagggggucgagcugaaguccggcuacaaggacuggauccuguggaucagcuucgccaucagcugcuuccuccugugcguggcccugcucggcuucaucaugugggccugccagaaggggaacauccgcugcaacaucugcaucuga

SEQ ID NO: 76228 - RNA, 1701 nt, Artificial Sequence; identical to SEQ ID NO: 73908
  derived and/or modified CDS sequence (opt1) from hemagglutinin__InfluenzaA__AHZ40357

SEQ ID NO: 76229 - RNA, 1701 nt, Artificial Sequence
  derived and/or modified CDS sequence (opt1) from hemagglutinin__InfluenzaA__AHZ40369
augaagaccaucaucgcccugagcuacauccucugccugguguucgcccagaagcugcccggcaacgacaacuccaccgcgacgcucugccuggggcaccacgccgucccgaacggcaccaucgugaagaccaucaccaacgaccgcaucgaggugacgaacgccaccgagcugguccagaacagcuccaucggggagaucugcgacagcccccaccagauccucgacggcgagaacugcacccugaucgacgcccugcucggggacccccagugcgacggcuuccagaacaagaagugggaccuguucguggagcgguccaaggccuacagcaacugcuaccccuacgacgugccggacuacgcgucccugcgcagccucgucgccuccagcggcacccuggaguucaacaacgaguccuucaacuggacgggggugacccagaacggcaccagcuccgccugcauccggcgcagcaacuccagcuucuucucccggcugaacuggcucacccaccugaacuucaaguaccccgcccugaacgugacgaugcccaacaacgagcaguucgacaagcucuacaucuggggcguccaccaccccgggaccgacaaggaccagaucuuccuguacgcgcagagcuccgggcgcaucaccgugagcaccaagcggagccagcaggccgugaucccgaacaucggcucccgcccccggauccgcaacauccccagccggaucuccaucuacuggacgaucgucaagcccggcgacauccugcucaucaacagcaccgggaaccugaucgccccgcgcggcuacuucaagauccgguccgggcgcagcuccaucaugcggagcgacgcccccaucggcaagugcaaguccgagugcaucacccccaacggcagcauccccaacgacaagccguuccagaacgugaaccgcaucaccuacggggccugcccccgguacgugaagcaguccacgcugaagcucgcgaccggcaugcgcaacguccccgagaagcagacccgggggaucuucggcgccaucgccggguucaucgagaacggcugggagggcaugguggacgggugguacggcuuccgccaccagaacagcgaggggcggggccaggccgccgaccugaaguccacccaggcggccaucgaccagaucaacgggaagcugaaccgccucaucggcaagacgaacgagaaguuccaccagaucgagaaggaguucagcgagguggagggccgcauccaggaccuggagaaguacgucgaggacaccaagaucgaccugugguccuacaacgccgagcuccugguggcccuggagaaccagcacaccaucgaccucaccgacagcgagaugaacaagcuguucgagaagacgaagaagcagcugcgggagaacgccgaggacauggggaacggcugcuucaagaucuaccacaagugcgacaacgcgugcaucggguccauccgcaacggcaccuacgaccacgacguguaccgggacgaggcccucaacaaccgcuuccagaucaagggggucgagcucaagagcggcuacaaggacuggauccuguggaucuccuucgccaucagcugcuuccugcugugcguggcccugcucggcuucaucaugugggccugccagaaggggaacauccggugcaacaucugcaucuga

SEQ ID NO: 76230 - RNA, 1701 nt, Artificial Sequence; identical to SEQ ID NO: 74018
  derived and/or modified CDS sequence (opt1) from hemagglutinin__InfluenzaA__AHZ40381

SEQ ID NO: 76231 - RNA, 1701 nt, Artificial Sequence; identical to SEQ ID NO: 73907
  derived and/or modified CDS sequence (opt1) from hemagglutinin__InfluenzaA__AHZ40393

SEQ ID NO: 76232 - RNA, 1701 nt, Artificial Sequence; identical to SEQ ID NO: 73907
  derived and/or modified CDS sequence (opt1) from hemagglutinin__InfluenzaA__AHZ40405

SEQ ID NO: 76233 - RNA, 1701 nt, Artificial Sequence; identical to SEQ ID NO: 73907
  derived and/or modified CDS sequence (opt1) from hemagglutinin__InfluenzaA__AHZ40417

SEQ ID NO: 76234 - RNA, 1701 nt, Artificial Sequence
  derived and/or modified CDS sequence (opt1) from hemagglutinin__InfluenzaA__AHZ40429
augaagaccaucaucgcccugagcuacauccucugccugguguucgcccaggagcugcccggcaacgacgacuccaccgcgacgcucugccuggggcaccacgccgucccgaacggcaccaucgugaagaccaucaccaacgaccagaucgaggugacgaacgccaccgagcugguccagagcuccagcaccggggagaucugcaacagcccccaccagauccucgacggcgagaacugcacccugaucgacgcccugcucggggacccccagugcgacggcuuccagaacaagaagugggaccuguucguggagcgcagcaaggcccacuccaacugcuaccccuacgacgugccggacuacgcgagccugcggucccucgucgccagcuccggcacgcuggaguucaagaacgagagcuucaacuggaccggggugacccagaacggcaccuccagcgccugcauccgccgguccaacaacagcuucuucucccgccugaacuggcucacgcaccugaacuucaaguaccccgcccugaacgugaccaugcccaacaacgagcaguucgacaagcucuacaucuggggcguccaccaccccgggaccgacaaggaccagaucuuccuguacgcgcaggccagcgggcggaucaccguguccacgaagcgcagccagcaggccgugaucccgaacaucggcagccggccccgcguccggaacauccccucccgcgugagcaucuacuggaccaucgugaagcccggcgacauccugcucaucaacuccaccgggaaccugaucgccccgcggggcuacuucaagauccgcagcgggaaguccagcaucaugcgguccgacgcccccaucggcaagugcaacagcgcgugcaucacccccaacggcuccauccccaacgacaagccguuccagaacgucaaccgcaucacguacggggccugcccccgguacgugaagcagaacacccugaagcucgccaccggcaugcgcaacgugcccgagaagcagacccgggggaucuucggcgccaucgccggguucaucgagaacggcugggagggcauggucgacgggugguacggcuuccgccaccagaacagcgaggggcggggccaggcggccgaccugaaguccacgcaggccgccaucgaccagaucaacgggaagcugaaccgccucaucggcaagaccaacgagaaguuccaccagaucgagaaggaguucagcgagguggagggccggauccaggaccuggagaaguacguggaggacaccaagaucgaccugugguccuacaacgccgagcuccuggucgcgcuggagaaccagcacaccaucgaccucacggacagcgagaugaacaagcuguucgagaagaccaagaagcagcugcgcgagaacgccgaggacauggggaacggcugcuucaagaucuaccacaagugcgacaacgccugcaucggguccauccgcaacggcaccuacgaccacgacguguaccgggacgaggcccucaacaaccgcuuccagaucaaggggguggagcugaaguccggcuacaaggacuggauccuguggaucuccuucgccaucagcugcuuccuccugugcgucgcgcugcucggcuucaucaugugggccugccagaaggggaacauccggugcaacaucugcaucuga

SEQ ID NO: 76235 - RNA, 1701 nt, Artificial Sequence; identical to SEQ ID NO: 73907
  derived and/or modified CDS sequence (opt1) from hemagglutinin__InfluenzaA__AHZ40441

SEQ ID NO: 76236 - RNA, 1701 nt, Artificial Sequence; identical to SEQ ID NO: 74050
  derived and/or modified CDS sequence (opt1) from hemagglutinin__InfluenzaA__AHZ40453

SEQ ID NO: 76237 - RNA, 1701 nt, Artificial Sequence
  derived and/or modified CDS sequence (opt1) from hemagglutinin__InfluenzaA__AHZ40465
augaagaccaucaucgcccugagcuacauccucugccugguguucgcccagaagcugcccggcaacgacaacuccaccgcgacgcucugccuggggcaccacgccgucccgaacggcaccaucgugaagaccaucaccaacgaccgcaucgaggugacgaacgccaccgagcugguccagaacagcuccaucggggagaucugcgacagcccccaccagauccucgacggcgagaacugcacccugaucgacgcccugcucggggacccccagugcgacggcuuccagaacaagaagugggaccuguucguggagcgguccaaggccuacagcaacugcuaccccuacgacaugccggacuacgcgucccugcgcagccucguggccuccagcggcacccuggaguucaacaacgaguccuucaacuggacgggggucacccagaacggcaccagcuccgccugcauccggcgcagcaacuccagcuucuucucccggcugaacuggcucacccaccugaacuucaaguaccccgcccugaacgugacgaugcccaacaacgagcgcuucgacaagcucuacaucuggggcgugcaccaccccgggaccgacaaggaccagaucuuccuguacgcgcagagcuccgggcggaucaccgucagcaccaagcgcagccagcaggccgugaucccgaacaucggcucccggccccgcauccggaacauccccagccgcaucuccaucuacuggacgaucgugaagcccggcgacauccugcucaucaacagcaccgggaaccugaucgccccgcggggcuacuucaagauccgcuccggcaagagcuccaucaugcggagcgacgcccccaucgggaagugcaaguccgagugcaucacccccaacggcagcauccccaacgacaagccguuccagaacgucaaccgcaucaccuacggggccugcccccgguacgugaagcaguccacgcugaagcucgcgaccggcaugcgcaacgugcccgagaagcagacccgggggaucuucggcgccaucgccggguucaucgagaacggcugggagggcauggucgacgggugguacggcuuccgccaccagaacagcgaggggcggggccaggccgccgaccugaaguccacccaggcggccaucgaccagaucaacgggaagcugaaccgccucaucggcaagacgaacgagaaguuccaccagaucgagaaggaguucagcgagguggagggccgcauccaggaccuggagaaguacguggaggacaccaagaucgaccugugguccuacaacgccgagcuccuggucgcccuggagaaccagcacaccaucgaccucaccgacagcgagaugaacaagcuguucgagaagacgaagaagcagcugcgggagaacgccgaggacauggggaacggcugcuucaagaucuaccacaagugcgacaacgcgugcaucggguccauccgcaacggcaccuacgaccacaacguguaccgggacgaggcccucaacaaccgcuuccagaucaaggggguggagcucaagagcggcuacaaggacuggauccuguggaucuccuucgccaucagcugcuuccugcugugcgucgcccugcucggcuucaucaugugggccugccagaaggggaacauccggugcaacaucugcaucuga

SEQ ID NO: 76238 - RNA, 1701 nt, Artificial Sequence; identical to SEQ ID NO: 73908
  derived and/or modified CDS sequence (opt1) from hemagglutinin__InfluenzaA__AHZ40477

SEQ ID NO: 76239 - RNA, 1701 nt, Artificial Sequence; identical to SEQ ID NO: 74084
  derived and/or modified CDS sequence (opt1) from hemagglutinin__InfluenzaA__AHZ40489

SEQ ID NO: 76240 - RNA, 1701 nt, Artificial Sequence; identical to SEQ ID NO: 73907
  derived and/or modified CDS sequence (opt1) from hemagglutinin__InfluenzaA__AHZ40500

SEQ ID NO: 76241 - RNA, 1701 nt, Artificial Sequence; identical to SEQ ID NO: 73907
  derived and/or modified CDS sequence (opt1) from hemagglutinin__InfluenzaA__AHZ40512

SEQ ID NO: 76242 - RNA, 1701 nt, Artificial Sequence
  derived and/or modified CDS sequence (opt1) from hemagglutinin__InfluenzaA__AHZ40524
augaagaccaucaucgcccugagcuacauccucugccugguguucgcccagaagcugcccggcaacgacaacuccaccgcgacgcucugccuggggcaccacgccgucccgaacggcaccaucgugaagaccaucaccaacgaccgcaucgaggugacgaacgccaccgagcugguccagaacagcuccaucggggagaucugcgacagcccccaccagauccucgacggcgagaacugcacccugaucgacgcccugcucggggacccccagugcgacggcuuccagaacaagaagugggaccuguucguggagcgguccaaggccuacagcaacugcuaccccuacgacgugccggacuacgcgucccugcgcagccucgucgccuccagcggcacccuggaguucaacaacgaguccuucaacugggccggggugacgcagaacggcaccagcuccgccugcauccgggggagcaacuccagcuucuucucccgccugaacuggcucacccaccugaacuucaaguaccccgcgcugaacgugaccaugcccaacaacgagcaguucgacaagcucuacaucuggggcguccaccaccccgggacggacaaggaccagaucuuccuguacgcccagagcuccggccggaucaccgugagcaccaagcgcagccagcaggccgugaucccgaacaucggcucccggccccgcauccggaacauccccagccgcaucuccaucuacuggaccaucgucaagcccggggacauccugcucaucaacagcacgggcaaccugaucgccccgcggggguacuucaagauccgcuccggcaagagcuccaucaugcggagcgacgcccccaucggcaagugcaaguccgagugcaucacccccaacgggagcauccccaacgacaagccguuccagaacgugaaccgcaucaccuacggcgcgugcccccgguacgugaagcaguccacccugaagcucgccacggggaugcgcaacguccccgagcggcagacccgcggcaucuucggggccaucgccggcuucaucgagaacggcugggaggggaugguggacggcugguacggguuccggcaccagaacagcgagggccgcgggcaggccgcggaccugaaguccacccaggccgccaucgaccagaucaacggcaagcugaaccggcucaucggcaagaccaacgagaaguuccaccagaucgagaaggaguucagcgagguggaggggcgcauccaggaccuggagaaguacgucgaggacacgaagaucgaccugugguccuacaacgccgagcuccugguggcccuggagaaccagcacaccaucgaccucaccgacagcgagaugaacaagcuguucgagaagaccaagaagcagcugcgcgagaacgcggaggacaugggcaacgggugcuucaagaucuaccacaagugcgacaacgccugcaucggcuccauccggaacgggacguacgaccacgacguguaccgcgacgaggcccucaacaaccgguuccagaucaagggcgucgagcucaagagcggcuacaaggacuggauccuguggaucuccuucgccaucagcugcuuccugcugugcguggcccugcucggguucaucaugugggcgugccagaagggcaacauccgcugcaacaucugcaucuga

SEQ ID NO: 76243 - RNA, 1701 nt, Artificial Sequence; identical to SEQ ID NO: 75794
  derived and/or modified CDS sequence (opt1) from hemagglutinin__InfluenzaA__AHZ40536

SEQ ID NO: 76244 - RNA, 1701 nt, Artificial Sequence; identical to SEQ ID NO: 73907
  derived and/or modified CDS sequence (opt1) from hemagglutinin__InfluenzaA__AHZ40548

SEQ ID NO: 76245 - RNA, 1701 nt, Artificial Sequence; identical to SEQ ID NO: 73882
  derived and/or modified CDS sequence (opt1) from hemagglutinin__InfluenzaA__AHZ40572

SEQ ID NO: 76246 - RNA, 1701 nt, Artificial Sequence; identical to SEQ ID NO: 73882
  derived and/or modified CDS sequence (opt1) from hemagglutinin__InfluenzaA__AHZ40583

SEQ ID NO: 76247 - RNA, 1701 nt, Artificial Sequence
  derived and/or modified CDS sequence (opt1) from hemagglutinin__InfluenzaA__AHZ40595
augaaggccauccugguggucaugcucuacaccuucgccaccgcgaacgccgacacgcugugcaucggcuaccacgccaacaacagcaccgacaccguggacaccgugcuggagaagaacgucacggugacccacuccgugaaccuccuggaggacaagcacgacgggaagcugugcaagcuccgcggcgucgcgccccugcaccuggggaagugcaacaucgccggcuggauccucgggaacccggagugcgagagccuguccaccgccagcuccuggagcuacaucguggagaccuccggcagcgacaacggcacgugcuaccccggggacuucaucgacuacgaggagcugcgggagcagcucuccagcguguccagcuucgagcgcuucgagaucuuccccaagaccuccagcuggcccaaccacgacuccaacaagggcgucaccgccgccugcccgcacgccggggcgaagggcuucuacaagaaccugaucuggcuggugaagaaggggaacagcuaccccaagcucuccaucagcuacaucaacgacaagggcaaggaggugcugguccuguggggcauccaccaccccuccaccacggccgaccagcagagccucuaccagaacgccgacaccuacguguucguggggaccagccgguacuccaagaaguucaagcccgagaucgccauccgcccgaagguccgggaccaggagggccgcaugaacuacuacuggacccugguggagcccggggacaagaucacguucgaggccaccggcaaccugguggucccccgguacgcguucgccaugaagcgcaacgccggcagcgggaucaucaucuccgacacccccgugcacgacugcaacaccacgugccagaccccgaagggcgccaucaacaccagccuccccuuccagaacauccaccccaucaccaucgggaagugccccaaguacgugaaguccacgaagcugcggcuggccaccggccuccgcaacgucccgagcauccagucccgggggcuguucggcgcgaucgccggcuucaucgagggcggguggaccgggaugguggacggcugguacggguaccaccaccagaacgagcagggcagcggcuacgccgccgaccugaaguccacccagaacgccaucgacaagaucacgaacaaggugaacagcgucaucgagaagaugaacacccaguucaccgcgguggggaaggaguucaaccaccucgagaagcgcaucgagaaccugaacaagaaggucgacgacggcuuccuggacaucuggaccuacaacgccgagcuccuggugcugcucgagaacgagcggacgcuggacuaccacgacuccaacgugaagaaccuguacgagaagguccgcaaccagcucaagaacaacgccaaggagaucgggaacggcugcuucgaguucuaccacaagugcgacaacacgugcauggagagcgugaagaacgggaccuacgacuaccccaaguacuccgaggaggccaagcugaaccgggagaagaucgacggcgugaagcuggagagcacccgcaucuaccagauccucgccaucuacuccaccgcggccagcucccugguccugguggugagccucggcgccaucuccuucuggaugugcagcaacgggagccugcagugccggaucugcaucuga

SEQ ID NO: 76248 - RNA, 1701 nt, Artificial Sequence
  derived and/or modified CDS sequence (opt1) from hemagglutinin__InfluenzaA__AHZ40606
augaagaccaucaucgcccugagcuacauccucugccugguguucgcccagaagcugcccggcaacgacaacuccaccgcgacgcucugccuggggcaccacgccgucccgaacggcaccaucgugaagaccaucaccaacgaccgcaucgaggugacgaacgccaccgagcugguccagaacagcuccaucggggagaucugcgacagcccccaccagauccucgacggcgagaacugcacccugaucgacgcccugcucggggacccccagugcgacggcuuccagaacaagaagugggaccuguucguggagcgguccaaggccuacagcaacugcuaccccuacgacgugccggacuacgcgucccugcgcagccucgucgccuccagcggcacccuggaguucaacaacgaguccuucaacuggacgggggugacccagaacggcaccagcuccgccugcauccggcgcagcaacuccagcuucuucucccggcugaacuggcucacccaccugaacuucaaguaccccgcccugaacgugacgaugcccaacaacgagcaguucgacaagcucuacaucuggggcguccaccaccccgggaccgacaaggaccagaucuuccuguacgcgcagagcuccgggcgcaucaccgugagcaccaagcggagccagcaggccgugaucccgaacaucggcucccgcccccggauccgcaacauccccagccggaucuccaucuacuggacgaucgucaagcccggcgacauccugcucaucaacagcaccgggaaccugaucgccccgcgcggcuacuucaagauccgguccggcaagagcuccaucaugcgcagcgacgcccccaucgggaagugcaaguccgagugcaucacccccaacggcagcauccccaacgacaagccguuccagaacgugaaccggaucaccuacggggccugcccccgcuacgugaagcaguccacgcugaagcucgcgaccggcaugcggaacguccccgagaagcagacccgcgggaucuucggcgccaucgccggguucaucgagaacggcugggagggcaugauggacgggugguacggcuuccggcaccagaacagcgaggggcgcggccaggccgccgaccugaaguccacccaggcggccaucgaccagaucaacgggaagcugaaccggcucaucggcaagacgaacgagaaguuccaccagaucgagaaggaguucagcgagguggagggccgcauccaggaccuggagaaguacguggaggacaccaagaucgaccugugguccuacaacgccgagcuccuggucgcccuggagaaccagcacaccaucgaccucaccgacagcgagaugaacaagcuguucgagaagacgaagaagcagcugcgcgagaacgccgaggacauggggaacggcugcuucaagaucuaccacaagugcgacaacgcgugcaucggguccauccggaacggcaccuacgaccacgacguguaccgcgacgaggcccucaacaaccgguuccagaucaaggggguggagcucaagagcggcuacaaggacuggauccuguggaucuccuucgccaucagcugcuuccugcugugcgucgcccugcucggcuucaucaugugggccugccagaaggggaacauccgcugcaacaucugcaucuga

SEQ ID NO: 76249 - RNA, 1701 nt, Artificial Sequence; identical to SEQ ID NO: 73907
  derived and/or modified CDS sequence (opt1) from hemagglutinin__InfluenzaA__AHZ40618

SEQ ID NO: 76250 - RNA, 1701 nt, Artificial Sequence; identical to SEQ ID NO: 73946
  derived and/or modified CDS sequence (opt1) from hemagglutinin__InfluenzaA__AHZ40626

SEQ ID NO: 76251 - RNA, 1701 nt, Artificial Sequence; identical to SEQ ID NO: 73907
  derived and/or modified CDS sequence (opt1) from hemagglutinin__InfluenzaA__AHZ40638

SEQ ID NO: 76252 - RNA, 1701 nt, Artificial Sequence; identical to SEQ ID NO: 73882
  derived and/or modified CDS sequence (opt1) from hemagglutinin__InfluenzaA__AHZ40650

SEQ ID NO: 76253 - RNA, 1701 nt, Artificial Sequence
  derived and/or modified CDS sequence (opt1) from hemagglutinin__InfluenzaA__AHZ40662
augaagaccaucaucgcccugagcuacauccucugccugguguucgcccaggagcugcccggcaacgacgacuccaccgcgacgcucugccuggggcaccacgccgucccgaacggcaccaucgugaagaccaucaccaacgaccgcaucgaggugacgaacgccaccgagcugguccagagcuccagcaccggggagaucugcaacagcccccaccagauccucgacggcgagaacugcacccugaucgacgcccugcucggggacccccagugcgacggcuuccagaacaagaagugggaccuguucguggagcggagcaaggcccacuccaacugcuaccccuacgacgugccggacuacgcgagccugcgcucccucgucgccagcuccggcacgcuggaguucaacaacgagagcuucaacuggaccggggugacccagaacggcaccuccagcgccugcauccggcgcuccaacaacagcuucuucucccggcugaacuggcucacgcaccugaacuucaaguaccccgcccugaacgugaccauccccaacaacgagcaguucgacaagcucuacaucuggggcguccaccaccccgggaccgacaaggaccagaucuuccuguacgcgcaggccagcgggcgcaucaccguguccacgaagcggagccagcagaccgugaucccgaacaucggcagccgcccccggguccgcaacauccccucccgggugagcaucuacuggaccaucgugaagcccggcgacauccugcucaucaacuccaccgggaaccugaucgccccgcgcggcuacuucaagauccggagcgggaaguccagcaucaugcgcuccgacgcccccaucggcaagugcaacagcgccugcaucacgcccaacggcuccauccccaacgacaagccguuccagaacgucaaccggaucaccuacggggcgugcccccgcuacgugaagcagaacacccugaagcucgccaccggcaugcggaacgugcccgagaagcagacgcgcgggaucuucggcgccaucgccggguucaucgagaacggcugggagggcauggucgacgggugguacggcuuccggcaccagaacagcgaggggcgcggccaggccgcggaccugaaguccacccaggccgccaucgaccagaucaacgggaagcugaaccggcucaucggcaagaccaacgagaaguuccaccagaucgagaaggaguucagcgagguggagggccgcauccaggaccuggagaaguacguggaggacaccaagaucgaccugugguccuacaacgccgagcuccuggucgcccuggagaaccagcacacgaucgaccucaccgacagcgagaugaacaagcuguucgagaagaccaagaagcagcugcgcgagaacgcggaggacauggggaacggcugcuucaagaucuaccacaagugcgacaacgccugcaucggguccauccggaacggcaccuacgaccacgacguguaccgcgacgaggcccucaacaaccgguuccagaucaaggggguggagcugaaguccggcuacaaggacuggauccuguggaucuccuucgccaucagcugcuuccuccugugcgucgcccugcucggcuucaucaugugggcgugccagaaggggaacauccgcugcaacaucugcaucuga

SEQ ID NO: 76254 - RNA, 1701 nt, Artificial Sequence; identical to SEQ ID NO: 73927
  derived and/or modified CDS sequence (opt1) from hemagglutinin__InfluenzaA__AHZ40674

SEQ ID NO: 76255 - RNA, 1701 nt, Artificial Sequence; identical to SEQ ID NO: 73907
  derived and/or modified CDS sequence (opt1) from hemagglutinin__InfluenzaA__AHZ40686

SEQ ID NO: 76256 - RNA, 1701 nt, Artificial Sequence; identical to SEQ ID NO: 73892
  derived and/or modified CDS sequence (opt1) from hemagglutinin__InfluenzaA__AHZ40698

SEQ ID NO: 76257 - RNA, 1701 nt, Artificial Sequence; identical to SEQ ID NO: 73892
  derived and/or modified CDS sequence (opt1) from hemagglutinin__InfluenzaA__AHZ40710

SEQ ID NO: 76258 - RNA, 1701 nt, Artificial Sequence; identical to SEQ ID NO: 74018
  derived and/or modified CDS sequence (opt1) from hemagglutinin__InfluenzaA__AHZ40722

SEQ ID NO: 76259 - RNA, 1701 nt, Artificial Sequence; identical to SEQ ID NO: 73915
  derived and/or modified CDS sequence (opt1) from hemagglutinin__InfluenzaA__AHZ40734

SEQ ID NO: 76260 - RNA, 1701 nt, Artificial Sequence; identical to SEQ ID NO: 74018
  derived and/or modified CDS sequence (opt1) from hemagglutinin__InfluenzaA__AHZ40746

SEQ ID NO: 76261 - RNA, 1701 nt, Artificial Sequence; identical to SEQ ID NO: 76211
  derived and/or modified CDS sequence (opt1) from hemagglutinin__InfluenzaA__AHZ40758

SEQ ID NO: 76262 - RNA, 1701 nt, Artificial Sequence; identical to SEQ ID NO: 66691
  derived and/or modified CDS sequence (opt1) from hemagglutinin__InfluenzaA__AHZ40782

SEQ ID NO: 76263 - RNA, 1701 nt, Artificial Sequence; identical to SEQ ID NO: 66691
  derived and/or modified CDS sequence (opt1) from hemagglutinin__InfluenzaA__AHZ40793

SEQ ID NO: 76264 - RNA, 1701 nt, Artificial Sequence; identical to SEQ ID NO: 66691
  derived and/or modified CDS sequence (opt1) from hemagglutinin__InfluenzaA__AHZ40804

SEQ ID NO: 76265 - RNA, 1701 nt, Artificial Sequence
  derived and/or modified CDS sequence (opt1) from hemagglutinin__InfluenzaA__AHZ40815
augaaggccauccuggugguccuccuguacaccuucgccaccgcgaacgccgacacgcugugcaucggcuaccacgccaacaacagcaccgacaccguggacaccgugcucgagaagaacgucacggugacccacuccgugaaccugcuggaggacaagcacaacgggaagcucugcaagcugcgcggcgucgcgccccugcaccucgggaagugcaacaucgccggcuggauccuggggaacccggagugcgagagccuguccaccgcgagcuccuggagcuacaucguggagacccccuccagcgacaacggcacgugcuaccccggcgacuucaucgacuacgaggagcuccgggagcagcuguccagcguguccagcuucgagcgcuucgagaucuuccccaagaccuccagcuggccgaaccacgacuccaacaagggggucaccgccgccugcccccacgccggcgccaagagcuucuacaagaaccugaucuggcucgugaagaaggggaacuccuaccccaagcugagcaaguccuacaucaacgacaagggcaaggaggugcugguccucugggggauccaccaccccagcaccagcgccgaccagcagucccuguaccagaacgccgacgccuacguguucgugggcagcucccgguacagcaagaaguucaagccggagaucgccauccgccccaagguccgggaccgcgagggccggaugaacuacuacuggacgcugguggagcccggggacaagaucaccuucgaggcgaccggcaaccucguggucccccgcuacgccuucgccauggagcggaacgccggguccggcaucaucaucagcgacaccccggugcacgacugcaacacgaccugccagacccccaagggcgccaucaacaccucccugcccuuccagaacauccaccccaucacgaucgggaagugcccgaaguacgucaagagcaccaagcugcgccucgcgaccggccugcggaacauccccuccauccagagccgcgggcuguucggcgccaucgccggguucaucgagggcggcuggaccgggaugguggacggcugguacggguaccaccaccagaacgagcagggcuccggguacgccgccgaccucaagagcacgcagaacgcgaucgacgagaucaccaacaaggugaacuccgugaucgagaagaugaacacccaguucaccgccgucggcaaggaguucaaccaccuggagaagcggaucgagaaccugaacaagaagguggacgacggcuuccucgacaucuggacguacaacgccgagcugcugguccuccuggagaacgagcgcacccuggacuaccacgacagcaacgugaagaaccucuacgagaaggugcggucccagcugaagaacaacgccaaggagaucgggaacggcugcuucgaguucuaccacaagugcgacaacacgugcauggagagcgucaagaacgggaccuacgacuaccccaaguacuccgaggaggccaagcugaaccgcgaggagaucgacggcgugaagcucgagagcacccggaucuaccagauccuggcgaucuacuccaccguggccagcagccugguccucguggugucccugggggccaucagcuucuggaugugcuccaacggcagccugcagugccgcaucugcaucuga

SEQ ID NO: 76266 - RNA, 1701 nt, Artificial Sequence
  derived and/or modified CDS sequence (opt1) from hemagglutinin__InfluenzaA__AHZ40826
augaaggccauccuggugguccuccuguacaccuucgccaccgcgaacgccgacacgcugugcaucggcuaccacgccaacaacagcaccgacaccguggacaccgugcucgagaagaacgucacggugacccacuccgugaaccugcuggaggacaagcacaacgggaagcucugcaagcugcgcggcgucgcgccccugcaccucgggaagugcaacaucgccggcuggauccuggggaacccggagugcgagagccuguccaccgcgagcuccuggagcuacaucguggagacccccuccagcgacaacggcacgugcuaccccggcgacuucaucgacuacgaggagcuccgggagcagcuguccagcguguccagcuucgagcgcuucgagaucuuccccaagaccuccagcuggccgaaccacgacuccaacaagggggucaccgccgccugcccccacgccggcgccaagagcuucuacaagaaccugaucuggcucgugaagaaggggaacuccuaccccaagcugagcaaguccuacaucaacgacaagggcaaggaggugcugguccucugggggauccaccaccccagcaccagcgccgaccagcaguccaucuaccagaacgccgacgccuacguguucgugggcagcucccgguacagcaagaaguucaagccggagaucgccauccgccccaagguccgggaccaggagggccgcaugaacuacuacuggacgcugguggagcccggggacaagaucaccuucgaggcgaccggcaaccugguggucccccgguacgccuucgccauggagcgcaacgccggguccggcaucaucaucagcgacaccccggugcacgacugcaacacgaccugccagacccccaagggcgccaucaacaccucccuccccuuccagaacauccaccccaucacgaucgggaagugcccgaaguacgucaagagcaccaagcugcggcuggcgaccggccuccgcaacauccccuccauccagagccgggggcuguucggcgccaucgccggguucaucgagggcggcuggaccgggaugguggacggcugguacggguaccaccaccagaacgagcagggcuccggguacgccgccgaccucaagagcacgcagaacgcgaucgacgagaucaccaacaaggugaacuccgugaucgagaagaugaacacccaguucaccgccgucggcaaggaguucaaccaccuggagaagcgcaucgagaaccugaacaagaagguggacgacggcuuccuggacaucuggacguacaacgccgagcuccugguccugcucgagaacgagcggacccuggacuaccacgacagcaacgugaagaaccuguacgagaaggugcgcucccagcucaagaacaacgccaaggagaucgggaacggcugcuucgaguucuaccacaagugcgacaacacgugcauggagagcgucaagaacgggaccuacgacuaccccaaguacuccgaggaggccaagcugaaccgggaggagaucgacggcgugaagcuggagagcacccgcaucuaccagauccucgcgaucuacuccaccguggccagcagccugguccugguggugucccucggggccaucagcuucuggaugugcuccaacggcagccugcagugccggaucugcaucuga

SEQ ID NO: 76267 - RNA, 1701 nt, Artificial Sequence
  derived and/or modified CDS sequence (opt1) from hemagglutinin__InfluenzaA__AHZ40848
augaaggccauccuggugguccuccuguacaccuucgccaccgcgaacgccgacacgcugugcaucggcuaccacgccaacaacagcaccgacaccguggacaccgugcucgagaagaacgucacggugacccacuccgugaaccugcuggaggacaagcacaacgggaagcucugcaagcugcgcggcgucgcgccccugcaccucgggaagugcaacaucgccggcuggauccuggggaacccggagugcgagagccuguccaccgcgagcuccuggagcuacaucguggagacccccuccagcgacaacggcacgugcuaccccggcgacuucaucgacuacgaggagcuccgggagcagcuguccagcguguccagcuucgagcgcuucgagaucuuccccaagaccuccagcuggccgaaccacgacuccaacaagggggucaccgccgccugcccccacgccggcgccaagagcuucuacaagaaccugaucuggcucgugaaggaggggaacuccuaccccaagcugagcaaguccuacaucaacgacaagggcaaggaggugcugguccucugggggauccaccaccccagcaccagcgccgagcagcagucccuguaccagaacgccgacgccuacguguucgugggcagcucccgguacagcaagaaguucaagccggagaucgccgcgcgccccaagguccggggccaggccgggcgcaugaacuacuacuggacgcugguggagcccggcgacaagaucaccuucgaggccaccgggaaccucguggucccccgguacgccuucgccauggagcgcaacgcgggcuccggcaucaucaucagcgacaccccggugcacgacugcaacacgaccugccagacccccaagggggccaucaacaccucccugcccuuccagaacauccaccccaucacgaucggcaagugcccgaaguacgucaagagcaccaagcugcggcucgccaccgggcugcgcaacauccccuccauccagagccggggccuguucggggccaucgccggcuucaucgagggcggguggaccggcaugguggacgggugguacggcuaccaccaccagaacgagcagggguccggcuacgcggccgaccucaagagcacgcagaacgccaucgacgagaucaccaacaaggugaacuccgugaucgagaagaugaacacccaguucaccgccgucggcaaggaguucaaccaccuggagaagcgcaucgagaaccugaacaagaagguggacgacggguuccucgacaucuggacguacaacgccgagcugcugguccuccuggagaacgagcggacccuggacuaccacgacagcaacgugaagaaccucuacgagaaggugcgcucccagcugaagaacaacgcgaaggagaucggcaacgggugcuucgaguucuaccacaagugcgacaacacgugcauggagagcgucaagaacggcaccuacgacuaccccaaguacuccgaggaggccaagcugaaccgggaggagaucgacggggugaagcucgagagcacccgcaucuaccagauccuggccaucuacuccaccguggccagcagccugguccucguggugucccugggcgcgaucagcuucuggaugugcuccaacggcagccugcagugccggaucugcaucuga

SEQ ID NO: 76268 - RNA, 1701 nt, Artificial Sequence
  derived and/or modified CDS sequence (opt1) from hemagglutinin__InfluenzaA__AHZ40881
augaaggccauccuggugguccuccuguacaccuucgccaccgcgaacgccgacacgcugugcaucggcuaccacgccaacaacagcaccgacaccguggacaccgugcucgagaagaacgucacggugacccacuccgugaaccugcuggaggacaagcacaacgggaagcucugcaagcugcgcggcgucgcgccccugcaccucgggaagugcaacaucgccggcuggauccuggggaacccggagugcgagagccuguccaccgcgagcuccuggagcuacaucguggagacccccuccagcgacaacggcacgugcuaccccggcgacuucaucgacuacgaggagcuccgggagcagcuguccagcguguccagcuucgagcgcuucgagaucuuccccaagaccuccagcuggccgaaccacgacuccaacaagggggucaccgccgccugcccccacgccggcgccaagagcuucuacaagaaccugaucuggcucgugaagaaggggaacuccuaccccaagcugagcaaguccuacaucaacgacaagggcaaggaggugcugguccucugggggauccaccaccccagcaccagcgccgagcagcagucccuguaccagaacgccgacgccuacguguucgugggcagcucccgguacagcaagaaguucaagccggagaucgccgcgcgccccaagguccggggccaggccgggcgcaugaacuacuacuggacgcugguggagcccggcgacaagaucaccuucgaggccaccgggaaccucguggucccccgguacgccuucgccauggagcgcaacgcgggcuccggcaucaucaucagcgacaccccggugcacgacugcaacacgaccugccagacccccaagggggccaucaacaccucccugcccuuccagaacauccaccccaucacgaucggcaagugcccgaaguacgucaagagcaccaagcugcggcucgccaccgggcugcgcaacauccccuccauccagagccggggccuguucggggccaucgccggcuucaucgagggcggguggaccggcaugguggacgggugguacggcuaccaccaccagaacgagcagggguccggcuacgcggccgaccucaagagcacgcagaacgccaucgacgagaucaccaacaaggugaacuccgugaucgagaagaugaacacccaguucaccgccgucggcaaggaguucaaccaccuggagaagcgcaucgagaaccugaacaagaagguggacgacggguuccucgacaucuggacguacaacgccgagcugcugguccuccuggagaacgagcggacccuggacuaccacgacagcaacgugaagaaccucuacgagaaggugcgcucccagcugaagaacaacgcgaaggagaucggcaacgggugcuucgaguucuaccacaagugcgacaacacgugcauggagagcgucaagaacggcaccuacgacuaccccaaguacuccgaggaggccaagcugaaccgggaggagaucgacggggugaagcucgagagcacccgcaucuaccagauccuggccaucuacuccaccguggccagcagccugguccucguggugucccugggcgcgaucagcuucuggaugugcuccaacggcagccugcagugccggaucugcaucuga

SEQ ID NO: 76269 - RNA, 1701 nt, Artificial Sequence; identical to SEQ ID NO: 76268
  derived and/or modified CDS sequence (opt1) from hemagglutinin__InfluenzaA__AHZ40892

SEQ ID NO: 76270 - RNA, 1701 nt, Artificial Sequence; identical to SEQ ID NO: 76267
  derived and/or modified CDS sequence (opt1) from hemagglutinin__InfluenzaA__AHZ40914

SEQ ID NO: 76271 - RNA, 1701 nt, Artificial Sequence; identical to SEQ ID NO: 76268
  derived and/or modified CDS sequence (opt1) from hemagglutinin__InfluenzaA__AHZ40925

SEQ ID NO: 76272 - RNA, 1701 nt, Artificial Sequence
  derived and/or modified CDS sequence (opt1) from hemagglutinin__InfluenzaA__AHZ40936
augaaggccauccuggugguccuccuguacaccuucgccaccgcgaacgccgacacgcugugcaucggcuaccacgccaacaacagcaccgacaccguggacaccgugcucgagaagaacgucacggugacccacuccgugaaccugcuggaggacaagcacaacgggaagcucugcaagcugcgcggcgucgcgccccugcaccucgggaagugcaacaucgccggcuggauccuggggaacccggagugcgagagccuguccaccgcgagcuccuggagcuacaucguggagacccccuccagcgacaacggcacgugcuaccccggcgacuucaucgacuacgaggagcuccgggagcagcuguccagcguguccagcuucgagcgcuucgagaucuuccccaagaccuccagcuggccgaaccacgacuccaacaagggggucaccgccgccugcccccacgccggcgccaagagcuucuacaagaaccugaucuggcucgugaagaaggggaacuccuaccccaagcugagcaaguccuacaucaacgacaagggcaaggaggugcugguccucugggggauccaccaccccagcaccagcgccgagcagcagucccuguaccagaacgccgacgccuacguguucgugggcagcucccgguacagcaagaaguucaagccggagaucgccgcgcgccccaagguccgggaccaggccggccgcaugaacuacuacuggacgcugguggagcccggggacaagaucaccuucgaggccaccggcaaccucguggucccccgguacgccuucgccauggagcgcaacgcgggguccggcaucaucaucagcgacaccccggugcacgacugcaacacgaccugccagacccccaagggcgccaucaacaccucccugcccuuccagaacauccaccccaucacgaucgggaagugcccgaaguacgucaagagcaccaagcugcggcucgccaccggccugcgcaacauccccuccauccagagccgggggcuguucggcgccaucgccggguucaucgagggcggcuggaccgggaugguggacggcugguacggguaccaccaccagaacgagcagggcuccggguacgcggccgaccucaagagcacgcagaacgccaucgacgagaucaccaacaaggugaacuccgugaucgagaagaugaacacccaguucaccgccgucggcaaggaguucaaccaccuggagaagcgcaucgagaaccugaacaagaagguggacgacggcuuccucgacaucuggacguacaacgccgagcugcugguccuccuggagaacgagcggacccuggacuaccacgacagcaacgugaagaaccucuacgagaaggugcgcucccagcugaagaacaacgcgaaggagaucgggaacggcugcuucgaguucuaccacaagugcgacaacacgugcauggagagcgucaagaacgggaccuacgacuaccccaaguacuccgaggaggccaagcugaaccgggaggagaucgacggcgugaagcucgagagcacccgcaucuaccagauccuggccaucuacuccaccguggccagcagccugguccucguggugucccugggggcgaucagcuucuggaugugcuccaacggcagccugcagugccggaucugcaucuga

SEQ ID NO: 76273 - RNA, 1701 nt, Artificial Sequence; identical to SEQ ID NO: 76267
  derived and/or modified CDS sequence (opt1) from hemagglutinin__InfluenzaA__AHZ40947

SEQ ID NO: 76274 - RNA, 1701 nt, Artificial Sequence; identical to SEQ ID NO: 76268
  derived and/or modified CDS sequence (opt1) from hemagglutinin__InfluenzaA__AHZ40958

SEQ ID NO: 76275 - RNA, 1701 nt, Artificial Sequence; identical to SEQ ID NO: 76272
  derived and/or modified CDS sequence (opt1) from hemagglutinin__InfluenzaA__AHZ40969

SEQ ID NO: 76276 - RNA, 1701 nt, Artificial Sequence; identical to SEQ ID NO: 76272
  derived and/or modified CDS sequence (opt1) from hemagglutinin__InfluenzaA__AHZ40980

SEQ ID NO: 76277 - RNA, 1701 nt, Artificial Sequence; identical to SEQ ID NO: 76272
  derived and/or modified CDS sequence (opt1) from hemagglutinin__InfluenzaA__AHZ40991

SEQ ID NO: 76278 - RNA, 1701 nt, Artificial Sequence; identical to SEQ ID NO: 76272
  derived and/or modified CDS sequence (opt1) from hemagglutinin__InfluenzaA__AHZ41002

SEQ ID NO: 76279 - RNA, 1701 nt, Artificial Sequence; identical to SEQ ID NO: 76272
  derived and/or modified CDS sequence (opt1) from hemagglutinin__InfluenzaA__AHZ41013

SEQ ID NO: 76280 - RNA, 1701 nt, Artificial Sequence; identical to SEQ ID NO: 76268
  derived and/or modified CDS sequence (opt1) from hemagglutinin__InfluenzaA__AHZ41024

SEQ ID NO: 76281 - RNA, 1701 nt, Artificial Sequence; identical to SEQ ID NO: 76268
  derived and/or modified CDS sequence (opt1) from hemagglutinin__InfluenzaA__AHZ41035

SEQ ID NO: 76282 - RNA, 1701 nt, Artificial Sequence; identical to SEQ ID NO: 76268
  derived and/or modified CDS sequence (opt1) from hemagglutinin__InfluenzaA__AHZ41046

SEQ ID NO: 76283 - RNA, 1701 nt, Artificial Sequence; identical to SEQ ID NO: 76268
  derived and/or modified CDS sequence (opt1) from hemagglutinin__InfluenzaA__AHZ41057

SEQ ID NO: 76284 - RNA, 1701 nt, Artificial Sequence; identical to SEQ ID NO: 76268
  derived and/or modified CDS sequence (opt1) from hemagglutinin__InfluenzaA__AHZ41068

SEQ ID NO: 76285 - RNA, 1701 nt, Artificial Sequence; identical to SEQ ID NO: 76272
  derived and/or modified CDS sequence (opt1) from hemagglutinin__InfluenzaA__AHZ41079

SEQ ID NO: 76286 - RNA, 1701 nt, Artificial Sequence; identical to SEQ ID NO: 76268
  derived and/or modified CDS sequence (opt1) from hemagglutinin__InfluenzaA__AHZ41090

SEQ ID NO: 76287 - RNA, 1701 nt, Artificial Sequence; identical to SEQ ID NO: 76272
  derived and/or modified CDS sequence (opt1) from hemagglutinin__InfluenzaA__AHZ41101

SEQ ID NO: 76288 - RNA, 1701 nt, Artificial Sequence; identical to SEQ ID NO: 76268
  derived and/or modified CDS sequence (opt1) from hemagglutinin__InfluenzaA__AHZ41112

SEQ ID NO: 76289 - RNA, 1701 nt, Artificial Sequence; identical to SEQ ID NO: 76268
  derived and/or modified CDS sequence (opt1) from hemagglutinin__InfluenzaA__AHZ41123

SEQ ID NO: 76290 - RNA, 1701 nt, Artificial Sequence; identical to SEQ ID NO: 76268
  derived and/or modified CDS sequence (opt1) from hemagglutinin__InfluenzaA__AHZ41134

SEQ ID NO: 76291 - RNA, 1701 nt, Artificial Sequence; identical to SEQ ID NO: 76268
  derived and/or modified CDS sequence (opt1) from hemagglutinin__InfluenzaA__AHZ41145

SEQ ID NO: 76292 - RNA, 1701 nt, Artificial Sequence; identical to SEQ ID NO: 76268
  derived and/or modified CDS sequence (opt1) from hemagglutinin__InfluenzaA__AHZ41156

SEQ ID NO: 76293 - RNA, 1701 nt, Artificial Sequence; identical to SEQ ID NO: 76268
  derived and/or modified CDS sequence (opt1) from hemagglutinin__InfluenzaA__AHZ41167

SEQ ID NO: 76294 - RNA, 1701 nt, Artificial Sequence; identical to SEQ ID NO: 76268
  derived and/or modified CDS sequence (opt1) from hemagglutinin__InfluenzaA__AHZ41178

SEQ ID NO: 76295 - RNA, 1701 nt, Artificial Sequence; identical to SEQ ID NO: 76268
  derived and/or modified CDS sequence (opt1) from hemagglutinin__InfluenzaA__AHZ41189

SEQ ID NO: 76296 - RNA, 1701 nt, Artificial Sequence; identical to SEQ ID NO: 76267
  derived and/or modified CDS sequence (opt1) from hemagglutinin__InfluenzaA__AHZ41246

SEQ ID NO: 76297 - RNA, 1701 nt, Artificial Sequence; identical to SEQ ID NO: 76272
  derived and/or modified CDS sequence (opt1) from hemagglutinin__InfluenzaA__AHZ41263

SEQ ID NO: 76298 - RNA, 1701 nt, Artificial Sequence; identical to SEQ ID NO: 76268
  derived and/or modified CDS sequence (opt1) from hemagglutinin__InfluenzaA__AHZ41281

SEQ ID NO: 76299 - RNA, 1701 nt, Artificial Sequence; identical to SEQ ID NO: 76268
  derived and/or modified CDS sequence (opt1) from hemagglutinin__InfluenzaA__AHZ41292

SEQ ID NO: 76300 - RNA, 1701 nt, Artificial Sequence; identical to SEQ ID NO: 76267
  derived and/or modified CDS sequence (opt1) from hemagglutinin__InfluenzaA__AHZ41303

SEQ ID NO: 76301 - RNA, 1701 nt, Artificial Sequence; identical to SEQ ID NO: 76267
  derived and/or modified CDS sequence (opt1) from hemagglutinin__InfluenzaA__AHZ41314

SEQ ID NO: 76302 - RNA, 1701 nt, Artificial Sequence; identical to SEQ ID NO: 76267
  derived and/or modified CDS sequence (opt1) from hemagglutinin__InfluenzaA__AHZ41325

SEQ ID NO: 76303 - RNA, 1701 nt, Artificial Sequence; identical to SEQ ID NO: 76267
  derived and/or modified CDS sequence (opt1) from hemagglutinin__InfluenzaA__AHZ41336

SEQ ID NO: 76304 - RNA, 1701 nt, Artificial Sequence; identical to SEQ ID NO: 76267
  derived and/or modified CDS sequence (opt1) from hemagglutinin__InfluenzaA__AHZ41347

SEQ ID NO: 76305 - RNA, 1701 nt, Artificial Sequence; identical to SEQ ID NO: 76268
  derived and/or modified CDS sequence (opt1) from hemagglutinin__InfluenzaA__AHZ41358

SEQ ID NO: 76306 - RNA, 1701 nt, Artificial Sequence; identical to SEQ ID NO: 76268
  derived and/or modified CDS sequence (opt1) from hemagglutinin__InfluenzaA__AHZ41366

SEQ ID NO: 76307 - RNA, 1701 nt, Artificial Sequence; identical to SEQ ID NO: 76272
  derived and/or modified CDS sequence (opt1) from hemagglutinin__InfluenzaA__AHZ41377

SEQ ID NO: 76308 - RNA, 1701 nt, Artificial Sequence; identical to SEQ ID NO: 76268
  derived and/or modified CDS sequence (opt1) from hemagglutinin__InfluenzaA__AHZ41388

SEQ ID NO: 76309 - RNA, 1701 nt, Artificial Sequence; identical to SEQ ID NO: 76272
  derived and/or modified CDS sequence (opt1) from hemagglutinin__InfluenzaA__AHZ41410

SEQ ID NO: 76310 - RNA, 1701 nt, Artificial Sequence; identical to SEQ ID NO: 76268
  derived and/or modified CDS sequence (opt1) from hemagglutinin__InfluenzaA__AHZ41432

SEQ ID NO: 76311 - RNA, 1701 nt, Artificial Sequence
  derived and/or modified CDS sequence (opt1) from hemagglutinin__InfluenzaA__AHZ41441
augaaggccauccuggugguccuccuguacaccuucgccaccgcgaacgccgacacgcugugcaucggcuaccacgccaacaacagcaccgacaccguggacaccgugcucgagaagaacgucacggugacccacuccgugaaccugcuggaggacaagcacaacgggaagcucugcaagcugcgcggcgucgcgccccugcaccucgggaagugcaacaucgccggcuggauccuggggaacccggagugcgagagccuguccaccgcgagcuccuggagcuacaucguggagacccccuccagcgacaacggcacgugcuaccccggcgacuucaucgacuacgaggagcuccgggagcagcuguccagcguguccagcuucgagcgcuucgagaucuuccccaagaccuccagcuggccgaaccacgacuccaacaagggggucaccgccgccugcccccacgccggcgccaagagcuucuacaagaaccugaucuggcucgugaaggaggggaacuccuaccccaagcugagcaaguccuacaucaacgacaagggcaaggaggugcugguccucugggggauccaccaccccagcaccagcgccgagcagcagucccuguaccagaacgccgacgccuacguguucgugggcagcucccgguacagcaagaaguucaagccggagaucgccgcgcgccccaagguccgggaccaggccggccgcaugaacuacuacuggacgcugguggagcccggggacaagaucaccuucgaggccaccggcaaccucguggucccccgguacgccuucgccauggagcgcaacgcgggguccggcaucaucaucagcgacaccccggugcacgacugcaacacgaccugccagacccccaagggcgccaucaacaccucccugcccuuccagaacauccaccccaucacgaucgggaagugcccgaaguacgucaagagcaccaagcugcggcucgccaccggccugcgcaacauccccuccauccagagccgggggcuguucggcgccaucgccggguucaucgagggcggcuggaccgggaugguggacggcugguacggguaccaccaccagaacgagcagggcuccggguacgcggccgaccucaagagcacgcagaacgccaucgacgagaucaccaacaaggugaacuccgugaucgagaagaugaacacccaguucaccgccgucggcaaggaguucaaccaccuggagaagcgcaucgagaaccugaacaagaagguggacgacggcuuccucgacaucuggacguacaacgccgagcugcugguccuccuggagaacgagcggacccuggacuaccacgacagcaacgugaagaaccucuacgagaaggugcgcucccagcugaagaacaacgcgaaggagaucgggaacggcugcuucgaguucuaccacaagugcgacaacacgugcauggagagcgucaagaacgggaccuacgacuaccccaaguacuccgaggaggccaagcugaaccgggaggagaucgacggcgugaagcucgagagcacccgcaucuaccagauccuggccaucuacuccaccguggccagcagccugguccucguggugucccugggggcgaucagcuucuggaugugcuccaacggcagccugcagugccggaucugcaucuga

SEQ ID NO: 76312 - RNA, 1701 nt, Artificial Sequence; identical to SEQ ID NO: 76267
  derived and/or modified CDS sequence (opt1) from hemagglutinin__InfluenzaA__AHZ41452

SEQ ID NO: 76313 - RNA, 1701 nt, Artificial Sequence
  derived and/or modified CDS sequence (opt1) from hemagglutinin__InfluenzaA__AHZ41463
augaaggccauccuggugguccuccuguacaccuucgccaccgcgaacgccgacacgcugugcaucggcuaccacgccaacaacagcaccgacaccguguacaccgugcucgagaagaacgucacggugacccacuccgugaaccugcuggaggacaagcacaacgggaagcucugcaagcugcgcggcgucgcgccccugcaccucgggaagugcaacaucgccggcuggauccuggggaacccggagugcgagagccuguccaccgcgagcuccuggagcuacaucguggagacccccuccagcgacaacggcacgugcuaccccggcgacuucaucgacuacgaggagcuccgggagcagcuguccagcguguccagcuucgagcgcuucgagaucuuccccaagaccuccagcuggccgaaccacgacuccaacaagggggucaccgccgccugcccccacgccggcgccaagagcuucuacaagaaccugaucuggcucgugaagaaggggaacuccuaccccaagcugagcaaguccuacaucaacgacaagggcaaggaggugcugguccucugggggauccaccaccccagcaccagcgccgagcagcagucccuguaccagaacgccgacgccuacguguucgugggcagcucccgguacagcaagaaguucaagccggagaucgccgcgcgccccaagguccggggccaggccgggcgcaugaacuacuacuggacgcugguggagcccggcgacaagaucaccuucgaggccaccgggaaccucguggucccccgguacgccuucgccauggagcgcaacgcgggcuccggcaucaucaucagcgacaccccggugcacgacugcaacacgaccugccagacccccaagggggccaucaacaccucccugcccuuccagaacauccaccccaucacgaucggcaagugcccgaaguacgucaagagcaccaagcugcggcucgccaccgggcugcgcaacauccccuccauccagagccggggccuguucggggccaucgccggcuucaucgagggcggguggaccggcaugguggacgggugguacggcuaccaccaccagaacgagcagggguccggcuacgcggccgaccucaagagcacgcagaacgccaucgacgagaucaccaacaaggugaacuccgugaucgagaagaugaacacccaguucaccgccgucggcaaggaguucaaccaccuggagaagcgcaucgagaaccugaacaagaagguggacgacggguuccucgacaucuggacguacaacgccgagcugcugguccuccuggagaacgagcggacccuggacuaccacgacagcaacgugaagaaccucuacgagaaggugcgcucccagcugaagaacaacgcgaaggagaucggcaacgggugcuucgaguucuaccacaagugcgacaacacgugcauggagagcgucaagaacggcaccuacgacuaccccaaguacuccgaggaggccaagcugaaccgggaggagaucgacggggugaagcucgagagcacccgcaucuaccagauccuggccaucuacuccaccguggccagcagccugguccucguggugucccugggcgcgaucagcuucuggaugugcuccaacggcagccugcagugccggaucugcaucuga

SEQ ID NO: 76314 - RNA, 1701 nt, Artificial Sequence; identical to SEQ ID NO: 76267
  derived and/or modified CDS sequence (opt1) from hemagglutinin__InfluenzaA__AHZ41473

SEQ ID NO: 76315 - RNA, 1701 nt, Artificial Sequence; identical to SEQ ID NO: 76267
  derived and/or modified CDS sequence (opt1) from hemagglutinin__InfluenzaA__AHZ41484

SEQ ID NO: 76316 - RNA, 1701 nt, Artificial Sequence; identical to SEQ ID NO: 76272
  derived and/or modified CDS sequence (opt1) from hemagglutinin__InfluenzaA__AHZ41495

SEQ ID NO: 76317 - RNA, 1701 nt, Artificial Sequence; identical to SEQ ID NO: 76267
  derived and/or modified CDS sequence (opt1) from hemagglutinin__InfluenzaA__AHZ41506

SEQ ID NO: 76318 - RNA, 1701 nt, Artificial Sequence
  derived and/or modified CDS sequence (opt1) from hemagglutinin__InfluenzaA__AHZ41517
augaaggccauccuggugguccuccuguacaccuucgccaccgcgaacgccgacacgcugugcaucggcuaccacgccaacaacagcaccgacaccguggacaccgugcucgagaagaacgucacggugacccacuccgugaaccugcuggaggacaagcacaacgggaagcucugcaagcugcgcggcgucgcgccccugcaccucgggaagugcaacaucgccggcuggauccuggggaacccggagugcgagagccuguccaccgcgagcuccuggagcuacaucguggagacccccuccagcgacaacggcacgugcuaccccggcgacuucaucgacuacgaggagcuccgggagcagcuguccagcguguccagcuucgagcgcuucgagaucuuccccaagaccuccagcuggccgaaccacgacuccaacaagggggucaccgccgccugcccccacgccggcgccaagagcuucuacaagaaccugaucuggcucgugaagaaggggaacuccuaccccaagcugagcgaguccuacaucaacgacaagggcaaggaggugcugguccucugggggauccaccaccccagcaccagcgccgagcagcagucccuguaccagaacgccgacgccuacguguucgugggcagcucccgguacagcaagaaguucaagccggagaucgccgcgcgccccaagguccggggccaggccgggcgcaugaacuacuacuggacgcugguggagcccggcgacaagaucaccuucgaggccaccgggaaccucguggucccccgguacgccuucgccauggagcgcaacgcgggcuccggcaucaucaucagcgacaccccggugcacgacugcaacacgaccugccagacccccaagggggccaucaacaccucccugcccuuccagaacauccaccccaucacgaucggcaagugcccgaaguacgucaagagcaccaagcugcggcucgccaccgggcugcgcaacauccccuccauccagagccggggccuguucggggccaucgccggcuucaucgagggcggguggaccggcaugguggacgggugguacggcuaccaccaccagaacgagcagggguccggcuacgcggccgaccucaagagcacgcagaacgccaucgacgagaucaccaacaaggugaacuccgugaucgagaagaugaacacccaguucaccgccgucggcaaggaguucaaccaccuggagaagcgcaucgagaaccugaacaagaagguggacgacggguuccucgacaucuggacguacaacgccgagcugcugguccuccuggagaacgagcggacccuggacuaccacgacagcaacgugaagaaccucuacgagaaggugcgcucccagcugaagaacaacgcgaaggagaucggcaacgggugcuucgaguucuaccacaagugcgacaacacgugcauggagagcgucaagaacggcaccuacgacuaccccaaguacuccgaggaggccaagcugaaccgggaggagaucgacggggugaagcucgagagcacccgcaucuaccagauccuggccaucuacuccaccguggccagcagccugguccucguggugucccugggcgcgaucagcuucuggaugugcuccaacggcagccugcagugccggaucugcaucuga

SEQ ID NO: 76319 - RNA, 1701 nt, Artificial Sequence
  derived and/or modified CDS sequence (opt1) from hemagglutinin__InfluenzaA__AHZ41528
augaaggccauccuggugguccuccuguacaccuucgccaccgcgaacgccgacacgcugugcaucggcuaccacgccaacaacagcaccgacaccguggacaccgugcucgagaagaacgucacggugacccacuccgugaaccugcuggaggacaagcacaacgggaagcucugcaagcugcgcggcgucgcgccccugcaccucgggaagugcaacaucgccggcuggauccuggggaacccggagugcgagagccuguccaccgcgagcuccuggagcuacaucguggagacccccuccagcgacaacggcacgugcuaccccggcgacuucaucgacuacgaggagcuccgggagcagcuguccagcguguccagcuucgagcgcuucgagaucuuccccaagaccuccagcuggccgaaccacgacuccaacaagggggucaccgccgccugcccccacgccggcgccaagagcuucuacaagaaccugaucuggcucgugaagaaggggaacuccuaccccaagcugagcgaguccuacaucaacgacaagggcaaggaggugcugguccucugggggauccaccaccccagcaccagcgccgaccagcagucccuguaccagaacgccgacgccuacguguucgugggcagcucccgguacagcaagaaguucaagccggagaucgccgcgcgccccaagguccggggccaggccgggcgcaugaacuacuacuggacgcugguggagcccggcgacaagaucaccuucgaggccaccgggaaccucguggucccccgguacgccuucgccauggagcgcaacgcgggcuccggcaucaucaucagcgacaccccggugcacgacugcaacacgaccugccagacccccaagggggccaucaacaccucccugcccuuccagaacauccaccccaucacgaucggcaagugcccgaaguacgucaagagcaccaagcugcggcucgccaccgggcugcgcaacauccccuccauccagagccggggccuguucggggccaucgccggcuucaucgagggcggguggaccggcaugguggacgggugguacggcuaccaccaccagaacgagcagggguccggcuacgcggccgaccucaagagcacgcagaacgccaucgacgagaucaccaacaaggugaacuccgugaucgagaagaugaacacccaguucaccgccgucggcaaggaguucaaccaccuggagaagcgcaucgagaaccugaacaagaagguggacgacggguuccucgacaucuggacguacaacgccgagcugcugguccuccuggagaacgagcggacccuggacuaccacgacagcaacgugaagaaccucuacgagaaggugcgcucccagcugaagaacaacgcgaaggagaucggcaacgggugcuucgaguucuaccacaagugcgacaacacgugcauggagagcgucaagaacggcaccuacgacuaccccaaguacuccgaggaggccaagcugaaccgggaggagaucgacggggugaagcucgagagcacccgcaucuaccagauccuggccaucuacuccaccguggccagcagccugguccucguggugucccugggcgcgaucagcuucuggaugugcuccaacggcagccugcagugccggaucugcaucuga

SEQ ID NO: 76320 - RNA, 1701 nt, Artificial Sequence; identical to SEQ ID NO: 76272
  derived and/or modified CDS sequence (opt1) from hemagglutinin__InfluenzaA__AHZ41539

SEQ ID NO: 76321 - RNA, 1701 nt, Artificial Sequence; identical to SEQ ID NO: 76267
  derived and/or modified CDS sequence (opt1) from hemagglutinin__InfluenzaA__AHZ41550

SEQ ID NO: 76322 - RNA, 1701 nt, Artificial Sequence; identical to SEQ ID NO: 76268
  derived and/or modified CDS sequence (opt1) from hemagglutinin__InfluenzaA__AHZ41561

SEQ ID NO: 76323 - RNA, 1701 nt, Artificial Sequence
  derived and/or modified CDS sequence (opt1) from hemagglutinin__InfluenzaA__AHZ41572
augaaggccauccuggugguccuccuguacaccuucgccaccgcgaacgccgacacgcugugcaucggcuaccacgccaacaacagcaccgacaccguggacaccgugcucgagaagaacgucacggugacccacuccgugaaccugcuggaggacaagcacaacgggaagcucugcaagcugcgcggcgucgcgccccugcaccucgggaagugcaacaucgccggcuggauccuggggaacccggagugcgagagccuguccaccgcgagcuccuggagcuacaucguggagacccccuccagcgacaacggcacgugcuaccccggcgacuucaucgacuacgaggagcuccgggagcagcuguccagcguguccagcuucgagcgcuucgagaucuuccccaagaccuccagcuggccgaaccacgacuccaacaagggggucaccgccgccugcccccacgccggcgccaagagcuucuacaagaaccugaucuggcucgugaagaaggggaacuccuaccccaagcugagcaaguccuacaucaacgacaagggcaaggaggugcugguccucugggggauccaccaccccagcaccagcgccgagcagcagucccuguaccagaacgccgacgccuacguguucgugggcagcucccgguacagcaagaaguucaagccggagaucgccgcgcgccccaagguccggggccaggccgggcgcaugaacuacuacuggacgcugguggagcccggcgacgagaucaccuucgaggccaccgggaaccucguggucccccgguacgccuucgccauggagcgcaacgcgggcuccggcaucaucaucagcgacaccccggugcacgacugcaacacgaccugccagacccccaagggggccaucaacaccucccugcccuuccagaacauccaccccaucacgaucggcaagugcccgaaguacgucaagagcaccaagcugcggcucgccaccgggcugcgcaacauccccuccauccagagccggggccuguucggggccaucgccggcuucaucgagggcggguggaccggcaugguggacgggugguacggcuaccaccaccagaacgagcagggguccggcuacgcggccgaccucaagagcacgcagaacgccaucgacgagaucaccaacaaggugaacuccgugaucgagaagaugaacacccaguucaccgccgucggcaaggaguucaaccaccuggagaagcgcaucgagaaccugaacaagaagguggacgacggguuccucgacaucuggacguacaacgccgagcugcugguccuccuggagaacgagcggacccuggacuaccacgacagcaacgugaagaaccucuacgagaaggugcgcucccagcugaagaacaacgcgaaggagaucggcaacgggugcuucgaguucuaccacaagugcgacaacacgugcauggagagcgucaagaacggcaccuacgacuaccccaaguacuccgaggaggccaagcugaaccgggaggagaucgacggggugaagcucgagagcacccgcaucuaccagauccuggccaucuacuccaccguggccagcagccugguccucguggugucccugggcgcgaucagcuucuggaugugcuccaacggcagccugcagugccggaucugcaucuga

SEQ ID NO: 76324 - RNA, 1701 nt, Artificial Sequence; identical to SEQ ID NO: 76272
  derived and/or modified CDS sequence (opt1) from hemagglutinin__InfluenzaA__AHZ41583

SEQ ID NO: 76325 - RNA, 1701 nt, Artificial Sequence; identical to SEQ ID NO: 76267
  derived and/or modified CDS sequence (opt1) from hemagglutinin__InfluenzaA__AHZ41594

SEQ ID NO: 76326 - RNA, 1701 nt, Artificial Sequence
  derived and/or modified CDS sequence (opt1) from hemagglutinin__InfluenzaA__AHZ41605
augaaggccauccuggugguccuccuguacaccuucgccaccgcgaacgccgacacgcugugcaucggcuaccacgccaacaacagcaccgacaccguggacaccgugcucgagaagaacgucacggugacccacuccgugaaccugcuggaggacaagcacaacgggaagcucugcaagcugcgcggcgucgcgccccugcaccucgggaagugcaacaucgccggcuggauccuggggaacccggagugcgagagccuguccaccgcgagcuccuggagcuacaucguggagacccccuccagcgacaacggcacgugcuaccccggcgacuucaucgacuacgaggagcuccgggagcagcuguccagcguguccagcuucgagcgcuucgagaucuuccccaacaccuccagcuggccgaaccacgacuccaacaagggggucaccgccgccugcccccacgccggcgccaagagcuucuacaagaaccugaucuggcucgugaagaaggggaacuccuaccccaagcugagcaaguccuacaucaacgacaagggcaaggaggugcugguccucugggggauccaccaccccagcaccagcgccgagcagcagucccuguaccagaacgccgacgccuacguguucgugggcagcucccgguacagcaagaaguucaagccggagaucgccgcgcgccccaaggucaugggccaggccgggcggaugaacuacuacuggacgcugguggagcccggcgacaagaucaccuucgaggccaccgggaaccucguggucccccgcuacgccuucgccauggagcggaacgcgggcuccggcaucaucaucagcgacaccccggugcacgacugcaacacgaccugccagacccccaagggggccaucaacaccucccugcccuuccagaacauccaccccaucacgaucggcaagugcccgaaguacgucaagagcaccaagcugcgccucgccaccgggcugcggaacauccccuccauccagagccgcggccuguucggggccaucgccggcuucaucgagggcggguggaccggcaugguggacgggugguacggcuaccaccaccagaacgagcagggguccggcuacgcggccgaccucaagagcacgcagaacgccaucgacgagaucaccaacaaggugaacuccgugaucgagaagaugaacacccaguucaccgccgucggcaaggaguucaaccaccuggagaagcggaucgagaaccugaacaagaagguggacgacggguuccucgacaucuggacguacaacgccgagcugcugguccuccuggagaacgagcgcacccuggacuaccacgacagcaacgugaagaaccucuacgagaaggugcggucccagcugaagaacaacgcgaaggagaucggcaacgggugcuucgaguucuaccacaagugcgacaacacgugcauggagagcgucaagaacggcaccuacgacuaccccaaguacuccgaggaggccaagcugaaccgcgaggagaucgacggggugaagcucgagagcacccggaucuaccagauccuggccaucuacuccaccguggccagcagccugguccucguggugucccugggcgcgaucagcuucuggaugugcuccaacggcagccugcagugccgcaucugcaucuga

SEQ ID NO: 76327 - RNA, 1701 nt, Artificial Sequence; identical to SEQ ID NO: 76267
  derived and/or modified CDS sequence (opt1) from hemagglutinin__InfluenzaA__AHZ41616

SEQ ID NO: 76328 - RNA, 1701 nt, Artificial Sequence; identical to SEQ ID NO: 76272
  derived and/or modified CDS sequence (opt1) from hemagglutinin__InfluenzaA__AHZ41627

SEQ ID NO: 76329 - RNA, 1701 nt, Artificial Sequence; identical to SEQ ID NO: 76272
  derived and/or modified CDS sequence (opt1) from hemagglutinin__InfluenzaA__AHZ41638

SEQ ID NO: 76330 - RNA, 1701 nt, Artificial Sequence; identical to SEQ ID NO: 76268
  derived and/or modified CDS sequence (opt1) from hemagglutinin__InfluenzaA__AHZ41649

SEQ ID NO: 76331 - RNA, 1701 nt, Artificial Sequence; identical to SEQ ID NO: 76268
  derived and/or modified CDS sequence (opt1) from hemagglutinin__InfluenzaA__AHZ41660

SEQ ID NO: 76332 - RNA, 1701 nt, Artificial Sequence; identical to SEQ ID NO: 76272
  derived and/or modified CDS sequence (opt1) from hemagglutinin__InfluenzaA__AHZ41671

SEQ ID NO: 76333 - RNA, 1701 nt, Artificial Sequence; identical to SEQ ID NO: 76272
  derived and/or modified CDS sequence (opt1) from hemagglutinin__InfluenzaA__AHZ41682

SEQ ID NO: 76334 - RNA, 1701 nt, Artificial Sequence; identical to SEQ ID NO: 76272
  derived and/or modified CDS sequence (opt1) from hemagglutinin__InfluenzaA__AHZ41693

SEQ ID NO: 76335 - RNA, 1701 nt, Artificial Sequence; identical to SEQ ID NO: 76272
  derived and/or modified CDS sequence (opt1) from hemagglutinin__InfluenzaA__AHZ41704

SEQ ID NO: 76336 - RNA, 1701 nt, Artificial Sequence; identical to SEQ ID NO: 76272
  derived and/or modified CDS sequence (opt1) from hemagglutinin__InfluenzaA__AHZ41715

SEQ ID NO: 76337 - RNA, 1701 nt, Artificial Sequence; identical to SEQ ID NO: 76272
  derived and/or modified CDS sequence (opt1) from hemagglutinin__InfluenzaA__AHZ41726

SEQ ID NO: 76338 - RNA, 1701 nt, Artificial Sequence; identical to SEQ ID NO: 76272
  derived and/or modified CDS sequence (opt1) from hemagglutinin__InfluenzaA__AHZ41737

SEQ ID NO: 76339 - RNA, 1701 nt, Artificial Sequence; identical to SEQ ID NO: 76272
  derived and/or modified CDS sequence (opt1) from hemagglutinin__InfluenzaA__AHZ41748

SEQ ID NO: 76340 - RNA, 1701 nt, Artificial Sequence; identical to SEQ ID NO: 76272
  derived and/or modified CDS sequence (opt1) from hemagglutinin__InfluenzaA__AHZ41759

SEQ ID NO: 76341 - RNA, 1701 nt, Artificial Sequence; identical to SEQ ID NO: 74099
  derived and/or modified CDS sequence (opt1) from hemagglutinin__InfluenzaA__AHZ42561

SEQ ID NO: 76342 - RNA, 1701 nt, Artificial Sequence
  derived and/or modified CDS sequence (opt1) from hemagglutinin__InfluenzaA__AHZ42572
augaagaccaucaucgcccugagcuacauccucugccugguguucgcccagaagcugcccggcaacgacaacuccaccgcgacgcucugccuggggcaccacgccgucccgaacggcaccaucgugaagaccaucaccaacgaccgcaucgaggugacgaacgccaccgagcugguccagaacagcuccaucggggagaucugcgacagcccccaccagauccucgacggcgagaacugcacccugaucgacgcccugcucggggacccccagugcgacggcuuccagaacaagaagugggaccuguucguggagcgguccaaggccuacagcaacugcuaccccuacgacgugccggacuacgcgucccugcgcagccucgucgccuccagcggcacccuggaguucaacaacgaguccuucaacuggacgggggugacccagaacggcaccagcuccgccugcauccggcgcagcaacuccagcuucuucucccggcugaacuggcucacccaccugaacuucaaguaccccgcccugaacgugacgaugcccaacaacgagcaguucgacaagcucuacaucuggggcguccaccaccccgggaccgacaaggaccagaucuuccuguacgcgcagagcuccgggcgcaucaccgugagcaccaagcggagccagcaggccgugaucccgaacaucggcucccgcccccggauccgcaacauccccagccggaucuccaucuacuggacgaucgucaagcccggcgacauccugcucaucaacagcaccgggaaccugaucgccccgcgcggcuacuucaagauccgguccggcaagagcuccaucaugcgcagcgacgcccccaucgggaagugcaaguccgagugcaucacccccaacggcagcauccccaacgacaagccguuccagaacgugaaccggaucaccuacggggccugcccccgcuacgugaagcaguccacgcugaagcucgcgaccggcaugcggaacguccccgagaagcagacccgcgggaucuucggcgccaucgccggguucaucgagaacggcugggagggcaugguggacgggugguacggcuuccggcaccagaacagcgaggggcgcggccaggccgccgaccugaaguccacccaggcggccaucgaccagaucaacgggaagcugaaccggcucaucggcaagacgaacgagaaguuccaccagaucgagaaggaguucagcgagguggagggccgcauccaggaccuggagaaguacgucgaggacaccaagaucgaccugugguccuacaacgccgagcuccugguggcccuggagaaccagcacaccaucgaccucaccgacagcgagauggacaagcuguucgagaagacgaagaagcagcugcgcgagaacgccgaggacauggggaacggcugcuucaagaucuaccacaagugcgacaacgcgugcaucggguccauccggaacggcaccuacgaccacgacguguaccgcgacgaggcccucaacaaccgguuccagaucaagggggucgagcucaagagcggcuacaaggacuggauccuguggaucuccuucgccaucagcugcuuccugcugugcguggcccugcucggcuucaucaugugggccugccagaaggggaacauccgcugcaacaucugcaucuga

SEQ ID NO: 76343 - RNA, 1701 nt, Artificial Sequence; identical to SEQ ID NO: 75810
  derived and/or modified CDS sequence (opt1) from hemagglutinin__InfluenzaA__AHZ42584

SEQ ID NO: 76344 - RNA, 1701 nt, Artificial Sequence; identical to SEQ ID NO: 73907
  derived and/or modified CDS sequence (opt1) from hemagglutinin__InfluenzaA__AHZ42596

SEQ ID NO: 76345 - RNA, 1701 nt, Artificial Sequence; identical to SEQ ID NO: 74084
  derived and/or modified CDS sequence (opt1) from hemagglutinin__InfluenzaA__AHZ42608

SEQ ID NO: 76346 - RNA, 1701 nt, Artificial Sequence; identical to SEQ ID NO: 73907
  derived and/or modified CDS sequence (opt1) from hemagglutinin__InfluenzaA__AHZ42619

SEQ ID NO: 76347 - RNA, 1701 nt, Artificial Sequence
  derived and/or modified CDS sequence (opt1) from hemagglutinin__InfluenzaA__AHZ42631
augaagaccaucaucgcccugagcuacauccucugccugguguucgcccagaagcugcccggcaacuacaacuccaccgcgacgcucugccuggggcaccacgccgucccgaacggcaccaucgugaagaccaucaccaacgaccgcaucgaggugacgaacgccaccgagcugguccagaacagcuccaucggggagaucugcgacagcccccaccagauccucgacggcgagaacugcacccugaucgacgcccugcucggggacccccagugcgacggcuuccagaacaagaagugggaccuguucguggagcgguccaaggccuacagcaacugcuaccccuacgacgugccggacuacgcgucccugcgcagccucgucgccuccagcggcacccuggaguucaacaacgaguccuucaacuggacgggggugacccagaacggcaccagcuccgccugcauccggcgcagcaacuccagcuucuucucccggcugaacuggcucacccaccugaacuucaaguaccccgcccugaacgugacgaugcccaacaacgagcaguucgacaagcucuacaucuggggcguccaccaccccgggaccgacaaggaccagaucuuccuguacgcgcagagcuccgggcgcaucaccgugagcaccaagcggagccagcaggccgugaucccgaacaucggcucccgcccccggauccgcaacauccccagccggaucuccaucuacuggacgaucgucaagcccggcgacauccugcucaucaacagcaccgggaaccugaucgccccgcgcggcuacuucaagauccgguccggcaagagcuccaucaugcgcagcgacgcccccaucgggaagugcaaguccgagugcaucacccccaacggcagcauccccaacgacaagccguuccagaacgugaaccggaucaccuacggggccugcccccgcuacgugaagcaguccacgcugaagcucgcgaccggcaugcggaacguccccgagaagcagacccgcgggaucuucggcgccaucgccggguucaucgagaacggcugggagggcaugguggacgggugguacggcuuccggcaccagaacagcgaggggcgcggccaggccgccgaccugaaguccacccaggcggccaucgaccagaucaacgggaagcugaaccggcucaucggcaagacgaacgagaaguuccaccagaucgagaaggaguucagcgagguggagggccgcauccaggaccuggagaaguacgucgaggacaccaagaucgaccugugguccuacaacgccgagcuccugguggcccuggagaaccagcacaccaucgaccucaccgacagcgagaugaacaagcuguucgagaagacgaagaagcagcugcgcgagaacgccgaggacauggggaacggcugcuucaagaucuaccacaagugcgacaacgcgugcaucggguccauccggaacggcaccuacgaccacgacguguaccgcgacgaggcccucaacaaccgguuccagaucaagggggucgagcucaagagcggcuacaaggacuggauccuguggaucuccuucgccaucagcugcuuccugcugugcguggcccugcucggcuucaucaugugggccugccagaaggggaacauccgcugcaacaucugcaucuga

SEQ ID NO: 76348 - RNA, 1701 nt, Artificial Sequence
  derived and/or modified CDS sequence (opt1) from hemagglutinin__InfluenzaA__AHZ42643
augaaggccauccugguggucaugcucuacaccuucgccaccgcgaacgccgacacgcugugcaucggcuaccacgccaacaacagcaccgacaccguggacaccgugcuggagaagaacgucacggugacccacuccgugaaccuccuggaggacaagcacaacgggaagcugugcaagcuccgcggcgucgcgccccugcaccuggggaagugcaacaucgccggcuggauccucgggaacccggagugcgagagccuguccaccgccagcuccuggagcuacaucguggagaccuccggcagcgacaacggcacgugcuaccccggggacuucaucgacuacgaggagcugcgggagcagcucuccagcguguccagcuucgagcgcuucgagaucuuccccaaggccuccagcuggcccaaccacgacuccaacaagggcgucaccgccgccugcccgcacgcgggggccaagggcuucuacaagaaccugaucuggcuggugaagaaggggaacagcuaccccaagcucuccaucagcuacaucaacgacaagggcaaggaggugcugguccuguggggcauccaccaccccuccaccaccgccgaccagcagagccucuaccagaacgccgacacguacguguucguggggaccagccgguacuccaagaaguucaagcccgagaucgccauccgcccgaagguccgggaccaggagggccgcaugaacuacuacuggacccugguggagcccggggacaagaucaccuucgaggcgacgggcaaccugguggucccccgguacgccuucgccauggagcgcaacgccggcagcgggaucaucaucuccgacacccccgugcacgacugcaacacgaccugccagaccccgaagggcgccaucaacaccagccuccccuuccagaacauccaccccaucaccaucgggaagugccccaaguacgugaaguccaccaagcugcggcuggcgacgggccuccgcaacgucccgagcauccagucccgggggcuguucggcgccaucgccggcuucaucgagggcggguggaccgggaugguggacggcugguacggguaccaccaccagaacgagcagggcagcggcuacgccgccgaccugaaguccacccagaacgcgaucgacaagaucaccaacaaggugaacagcgucaucgagaagaugaacacgcaguucaccgccguggggaaggaguucaaccaccucgagaagcgcaucgagaaccugaacaagaaggucgacgacggcuuccuggacaucuggaccuacaacgccgagcuccuggugcugcucgagaacgagcggacccuggacuaccacgacuccaacgugaagaaccuguacgagaagguccgcaaccagcucaagaacaacgccaaggagaucgggaacggcugcuucgaguucuaccacaagugcgacaacacgugcauggagagcgugaagaacgggaccuacgacuaccccaaguacuccgaggaggccaagcugaaccgggagaagaucgacggcgugaagcuggagagcacccgcaucuaccagauccucgcgaucuacuccaccgccgccagcucccugguccugguggugagccucggcgccaucuccuucuggaugugcagcaacgggagccugcagugccggaucugcaucuga

SEQ ID NO: 76349 - RNA, 1701 nt, Artificial Sequence; identical to SEQ ID NO: 73907
  derived and/or modified CDS sequence (opt1) from hemagglutinin__InfluenzaA__AHZ42654

SEQ ID NO: 76350 - RNA, 1701 nt, Artificial Sequence; identical to SEQ ID NO: 73882
  derived and/or modified CDS sequence (opt1) from hemagglutinin__InfluenzaA__AHZ42666

SEQ ID NO: 76351 - RNA, 1701 nt, Artificial Sequence; identical to SEQ ID NO: 73882
  derived and/or modified CDS sequence (opt1) from hemagglutinin__InfluenzaA__AHZ42678

SEQ ID NO: 76352 - RNA, 1701 nt, Artificial Sequence
  derived and/or modified CDS sequence (opt1) from hemagglutinin__InfluenzaA__AHZ42690
augaaggccauccuggugguccuccuguacaccuacgccaccgcgaacgccgacacgcugugcaucggcuaccacgccaacaacagcaccgacaccguggacaccgugcucgagaagaacgucacggugacccacuccgugaaccugcuggaggacaagcacaacgggaagcucugcaagcugcgcggcgucgcgccccugcaccucgggaagugcaacaucgccggcuggauccuggggaacccggagugcgagagccuguccaccgccagcuccuggagcuacaucguggagaccuccagcuccgacaacggcacgugcuaccccggcgacuucaucaacuacgaggagcuccgggagcagcugagcuccgugagcuccuucgagcgcuucgagaucuuccccaagaccagcuccuggcccaaccacgacagcaacaagggggucaccgccgccugcccgcacgccggcgcgaaguccuucuacaagaaccugaucuggcucgugaagaaggggaacagcuaccccaagcuguccaagagcuacaucaacgacaagggcaaggaggugcugguccucugggggauccaccaccccagcaccacgaccgaccagcagucccuguaccagaacgccgacgccuacguguucgugggcaccagccgguacuccaagaaguucaagcccgagaucgccauccgcccgaagguccgggaccaggagggccgcaugaacuacuacuggacccugaucgagcccggggacaagaucacguucgaggccaccggcaaccucguggugccccgguacgcguucgccauggagcgcaacgccgggagcggcaucaucaucuccgacacccccguccacgacugcaacaccacgugccagaccccggagggcgccaucaacaccagccugcccuuccagaacauccaccccaucaccaucgggaagugccccaaguacgugaaguccacgaagcugcggcucgccaccggccugcgcaacgugccgagcauccagucccgggggcuguucggcgcgaucgccggguucaucgagggcggcuggaccgggauggucgacggcugguacggguaccaccaccagaacgagcagggcagcggguacgccgccgaccucaaguccacccagaacgccaucgacaagaucacgaacaaggugaacagcgugaucgagaagaugaacacccaguucaccgcggucggcaaggaguucaaccaccuggagaagcgcaucgagaaccugaacaagaagguggacgacggcuuccucgacaucuggaccuacaacgccgagcugcugguccuccuggagaacgagcggacgcuggacuaccacgacuccaacgugaagaaccucuacgagaaggugcgcaaccagcugaagaacaacgccaaggagaucgggaacggcugcuucgaguucuaccacaagugcgacaacacgugcauggagagcgucaagaacgggaccuacgacuaccccaaguacuccgaggaggccaagcugaaccgggagaagaucgacggcgugaagcucgagagcacccgcaucuaccagauccuggccaucuacuccaccguggcgagcucccugguccucguggugagccugggggccaucagcuucuggaugugcuccaacggcagccugcagugccggaucugcaucuga

SEQ ID NO: 76353 - RNA, 1701 nt, Artificial Sequence; identical to SEQ ID NO: 73907
  derived and/or modified CDS sequence (opt1) from hemagglutinin__InfluenzaA__AHZ42701

SEQ ID NO: 76354 - RNA, 1701 nt, Artificial Sequence; identical to SEQ ID NO: 73882
  derived and/or modified CDS sequence (opt1) from hemagglutinin__InfluenzaA__AHZ42713

SEQ ID NO: 76355 - RNA, 1701 nt, Artificial Sequence
  derived and/or modified CDS sequence (opt1) from hemagglutinin__InfluenzaA__AHZ42725
augaagaccaucaucgcccugagcuacauccucugccugguguucgcccagaagcugcccggcaacgacaacuccaccgcgacgcucugccuggggcaccacgccgucccgaacggcaccaucgugaagaccaucaccaacgaccgcaucgaggugacgaacgccaccgagcugguccagaacagcuccaucggggagaucugcgacagcccccaccagauccucgacggcgagaacugcacccugaucgacgcccugcucggggacccccagugcgacggcuuccagaacaagaagugggaccuguucguggagcgguccaaggccuacagcaacugcuaccccuacgacgugccggacuacgcgucccugcgcagccucgucgccuccagcggcacccuggaguucaacaacgaguccuucaacuggacgggggugacccagaacggcaccagcuccgccugcauccggcgcagcaacuccagcuucuucucccggcugaacuggcucacccaccugaacuucaaguaccccgcccugaacgugacgaugcccaacaacgagcaguucgacaagcucuacaucuggggcguccaccaccccgggaccgacaaggaccagaucuuccuguacgcgcagagcuccgggcgcaucaccgugagcaccaagcggagccagcaggccgugaucccgaacaucggcucccgcccccggauccgcaacauccccagccggaucuccaucuacuggacgaucgucaagcccggcgacauccugcucaucaacagcaccgggaaccugaucgccccgcgcggcuacuucaagauccggaacgggaaguccagcaucaugcgcuccgacgcccccaucggcaagugcaagagcgagugcaucacccccaacggcuccauccccaacgacaagccguuccagaacgugaaccggaucaccuacggggccugcccccgcuacgugaagcagagcacgcugaagcucgcgaccggcaugcggaacguccccgagaagcagacccgcgggaucuucggcgccaucgccggguucaucgagaacggcugggagggcaugguggacgggugguacggcuuccggcaccagaacuccgaggggcgcggccaggccgccgaccucaagagcacccaggcggccaucgaccagaucaacgggaagcugaaccggcugaucggcaagacgaacgagaaguuccaccagaucgagaaggaguucuccgagguggagggccgcauccaggaccuggagaaguacgucgaggacaccaagaucgaccuguggagcuacaacgccgagcuccugguggcccuggagaaccagcacaccaucgaccucaccgacuccgagaugaacaagcuguucgagaagacgaagaagcagcugcgcgagaacgccgaggacauggggaacggcugcuucaagaucuaccacaagugcgacaacgcgugcaucgggagcauccggaacggcaccuacgaccacgacguguaccgcgacgaggcccucaacaaccgguuccagaucaagggggucgagcugaaguccggcuacaaggacuggauccuguggaucagcuucgccaucuccugcuuccuccugugcguggcccugcucggcuucaucaugugggccugccagaaggggaacauccgcugcaacaucugcaucuga

SEQ ID NO: 76356 - RNA, 1701 nt, Artificial Sequence
  derived and/or modified CDS sequence (opt1) from hemagglutinin__InfluenzaA__AHZ42737
augaaggccauccuggugguccuccuguacaccuucgccaccgcgaacgccgacacgcugugcaucggcuaccacgccaacaacagcaccgacaccguggacaccgugcucgagaagaacgucacggugacccacuccgugaaccugcuggaggacaagcacaacgggaagcucugcaagcugcgcggcgucgcgccccugcaccucgggaagugcaacaucgccggcuggauccuggggaacccggagugcgagagccuguccaccgccagcuccuggagcuacaucguggagaccuccagcuccgacaacggcacgugcuaccccggcgacuucaucaacuacgaggagcuccgggagcagcugagcuccgugagcuccuucgagcgcuucgagaucuuccccaagaccagcuccuggcccaaccacgacagcaacaagggggucaccgccgccugcccgcacgccggcgcgaaguccuucuacaagaaccugaucuggcucgugaagaaggggaacagcuaccccaagcuguccaagagcuacaucaacgacaagggcaaggaggugcugguccucugggggauccaccaccccagcaccacggccgaccagcagucccuguaccagaacgccgacgccuacguguucgugggcaccagccgguacuccaagaaguucaagcccgagaucgccauccgcccgaagguccgggaccaggagggccgcaugaacuacuacuggacccugaucgagcccggggacaagaucaccuucgaggcgacgggcaaccucguggugccccgguacgccuucgccauggagcgcaacgccgagagcgggaucaucaucuccgacacccccguccacgacugcaacacgaccugccagaccccggagggcgccaucaacaccagccugcccuuccagaacauccaccccaucaccaucggcaagugccccaaguacgugaaguccaccaagcugcggcucgcgacggggcugcgcaacgugccgagcauccagucccggggccuguucggggccaucgccggcuucaucgagggcggguggaccggcauggucgacgggugguacggcuaccaccaccagaacgagcaggggagcggcuacgccgccgaccucaaguccacccagaacgcgaucgacaagaucaccaacaaggugaacagcgugaucgagaagaugaacacgcaguucaccgccgucgggaaggaguucaaccaccuggagaagcgcaucgagaaccugaacaagaagguggacgacggcuuccucgacaucuggaccuacaacgccgagcugcugguccuccuggagaacgagcggacccuggacuaccacgacuccaacgugaagaaccucuacgagaaggugcgcaaccagcugaagaacaacgccaaggagaucggcaacgggugcuucgaguucuaccacaagugcgacaacacgugcauggagagcgucaagaacggcaccuacgacuaccccaaguacuccgaggaggccaagcugaaccgggagaagaucgacggggugaagcucgagagcacccgcaucuaccagauccuggcgaucuacuccaccguggccagcucccugguccucguggugagccugggcgccaucagcuucuggaugugcuccaacgggagccugcagugccggaucugcaucuga

SEQ ID NO: 76357 - RNA, 1701 nt, Artificial Sequence; identical to SEQ ID NO: 73907
  derived and/or modified CDS sequence (opt1) from hemagglutinin__InfluenzaA__AHZ42748

SEQ ID NO: 76358 - RNA, 1701 nt, Artificial Sequence; identical to SEQ ID NO: 73927
  derived and/or modified CDS sequence (opt1) from hemagglutinin__InfluenzaA__AHZ42760

SEQ ID NO: 76359 - RNA, 1701 nt, Artificial Sequence
  derived and/or modified CDS sequence (opt1) from hemagglutinin__InfluenzaA__AHZ42772
augaagaccaucaucgcccugagcuacauccucugccugguguucgcccaggagcugcccggcaacgacgacuccaccgcgacgcucugccuggggcaccacgccgucccgaacggcaccaucgugaagaccaucaccaacgaccgcaucgaggugacgaacgccaccgagcugguccagagcuccagcaccggggagaucugcaacagcccccaccagauccucgacggcgagaacugcacccugaucgacgcccugcucggggacccccagugcgacggcuuccagaacaagaagugggaccuguucguggagcggagcaaggcccacuccaacugcuaccccuacgacgugccggacuacgcgagccugcgcucccucgucgccagcuccggcacgcuggaguucaacaacgagagcuucaacuggaccggggugacccagaacggcaccuccagcgccugcauccggcgcuccaacaacagcuucuucucccggcugaacuggcucacgcaccugaacuucaaguaccccgcccugaacgugaccaugcccaacaacgagcaguucgacaagcucuacaucuggggcguccaccaccccgggaccgacaaggaccagaucuuccuguacgcgcaggccagcgggcgcaucaccguguccacgaagcggagccagcagaccgugaucccgaacaucggcagccgcccccggguccgcaacauccccucccgggugagcaucuacuggaccaucgugaagcccggcgacauccugcucaucaacuccaccgggaaccugaucgccccgcgcggcuacuucaagauccggagcgggaaguccagcaucaugcgcuccgacgcccccaucggcaagugcaacagcgccugcaucacgcccaacggcuccauccccaacgacaagccguuccagaacgucaaccggaucaccuacggggcgugcccccgcuacgugaagcagaacacccugaagcucgccaccggcaugcggaacgugcccgagaagcagacgcgcgggaucuucggcgccaucgccggguucaucgagaacggcugggagggcauggucgacgggugguacggcuuccggcaccagaacagcgaggggcgcggccaggccgcggaccugaaguccacccaggccgccaucgaccagaucaacgggaagcugaaccggcucaucggcaagaccaacgagaaguuccaccagaucgagaaggaguucagcgagguggagggccgcauccaggaccuggagaaguacguggaggacaccaagaucgaccugugguccuacaacgccgagcuccuggucgcccuggagaaccagcacacgaucgaccucaccgacagcgagaugaacaagcuguucgagaagaccaagaagcagcugcgcgagaacgcggaggacauggggaacggcugcuucaagaucuaccacaagugcgacaacgccugcaucggguccauccggaacggcaccuacgaccacgacguguaccgcgacgaggcccucaacaaccgguuccagaucaaggagguggagcugaaguccggguacaaggacuggauccuguggaucuccuucgccaucagcugcuuccuccugugcgucgcccugcucggcuucaucaugugggcgugccagaagggcaacauccgcugcaacaucugcaucuga

SEQ ID NO: 76360 - RNA, 1701 nt, Artificial Sequence; identical to SEQ ID NO: 73907
  derived and/or modified CDS sequence (opt1) from hemagglutinin__InfluenzaA__AHZ42784

SEQ ID NO: 76361 - RNA, 1701 nt, Artificial Sequence; identical to SEQ ID NO: 73882
  derived and/or modified CDS sequence (opt1) from hemagglutinin__InfluenzaA__AHZ42796

SEQ ID NO: 76362 - RNA, 1701 nt, Artificial Sequence; identical to SEQ ID NO: 73882
  derived and/or modified CDS sequence (opt1) from hemagglutinin__InfluenzaA__AHZ42808

SEQ ID NO: 76363 - RNA, 1701 nt, Artificial Sequence; identical to SEQ ID NO: 76356
  derived and/or modified CDS sequence (opt1) from hemagglutinin__InfluenzaA__AHZ42820

SEQ ID NO: 76364 - RNA, 1701 nt, Artificial Sequence; identical to SEQ ID NO: 74491
  derived and/or modified CDS sequence (opt1) from hemagglutinin__InfluenzaA__AHZ42831

SEQ ID NO: 76365 - RNA, 1701 nt, Artificial Sequence
  derived and/or modified CDS sequence (opt1) from hemagglutinin__InfluenzaA__AHZ42843
augaagaccaucaucgcccugagcuacauccucugccugguguucgcccagaagcugcccggcaacgacaacuccaccgcgacgcucugccuggggcaccacgccgucccgaacggcaccauggugaagaccaucaccaacgaccgcaucgaggugacgaacgccaccgagcugguccagaacagcuccaucggggagaucugcgacagcccccaccagauccucgacggcgagaacugcacccugaucgacgcccugcucggggacccccagugcgacggcuuccagaacaagaagugggaccuguucguggagcgguccaaggccuacagcaacugcuaccccuacgacgugccggacuacgcgucccugcgcagccucgucgccuccagcggcacccuggaguucaacaacgaguccuucaacuggacgggggugacccagaacggcaccagcuccgccugcauccggcgcagcaacuccagcuucuucucccggcugaacuggcucacccaccugaacuucaaguaccccgcccugaacgugacgaugcccaacaacgagcaguucgacaagcucuacaucuggggcguccaccaccccgggaccgacaaggaccagaucuuccuguacgcgcagagcuccgggcgcaucaccgugagcaccaagcggagccagcaggccgugaucccgaacaucggcucccgcccccggauccgcaacauccccagccggaucuccaucuacuggacgaucgucaagcccggcgacauccugcucaucaacagcaccgggaaccugaucgccccgcgcggcuacuucaagauccgguccggcaagagcuccaucaugcgcagcgacgcccccaucgggaagugcaaguccgagugcaucacccccaacggcagcauccccaacgacaagccguuccagaacgugaaccggaucaccuacggggccugcccccgcuacgugaagcaguccacgcugaagcucgcgaccggcaugcggaacguccccgagaagcagacccgcgggaucuucggcgccaucgccggguucaucgagaacggcugggagggcaugguggacgggugguacggcuuccggcaccagaacagcgaggggcgcggccaggccgccgaccugaaguccacccaggcggccaucgaccagaucaacgggaagcugaaccggcucaucggcaagacgaacgagaaguuccaccagaucgagaaggaguucagcgagguggagggccgcauccaggaccuggagaaguacgucgaggacaccaagaucgaccugugguccuacaacgccgagcuccugguggcccuggagaaccagcacaccaucgaccucaccgacagcgagaugaacaagcuguucgagaagacgaagaagcagcugcgcgagaacgccgaggacauggggaacggcugcuucaagaucuaccacaagugcgacaacgcgugcaucggguccauccggaacggcaccuacgaccacaacguguaccgcgacgaggcccucaacaaccgguuccagaucaagggggucgagcucaagagcggcuacaaggacuggauccuguggaucuccuucgccaucagcugcuuccugcugugcguggcccugcucggcuucaucaugugggccugccagaaggggaacauccgcugcaacaucugcaucuga

SEQ ID NO: 76366 - RNA, 1701 nt, Artificial Sequence
  derived and/or modified CDS sequence (opt1) from hemagglutinin__InfluenzaA__AHZ42855
augaagaccaucaucgcccugagcuacauccucugccugguguucgcccagaagcugcccggcaacgacaacuccaccgcgacgcucugccuggggcaccacgccgucccgaacggcaccaucgugaagaccaucaccaacgaccgcaucgaggugacgaacgccaccgagcugguccagaacagcuccaucggggagaucugcgacagcccccaccagauccucgacggcgagaacugcacccugaucgacgcccugcucggggacccccagugcgacggcuuccagaacaagaagugggaccuguucguggagcgguccaaggccuacagcaacugcuaccccuacgacgugccggacuacgcgucccugcgcagccucgucgccuccagcggcacccuggaguucaacaacgaguccuucaacuggacgggggugacccagaacggcaccagcuccgccugcauccggcgcagcaacuccagcuucuucucccggcugaacuggcucacccaccugaacuucaaguaccccgcccugaacaugacgaugcccaacaacgagcaguucgacaagcucuacaucuggggcgugcaccaccccgggaccgacaaggaccagaucuuccuguacgcgcagagcuccgggcgcaucaccgucagcaccaagcggagccagcaggccgugaucccgaacaucggcucccgcccccggauccgcaacauccccagccggaucuccaucuacuggacgaucgugaagcccggcgacauccugcucaucaacagcaccgggaaccugaucgccccgcgcggcuacuucaagauccgguccggcaagagcuccaucaugcgcagcgacgcccccaucgggaagugcaaguccgagugcaucacccccaacggcagcauccccaacgacaagccguuccagaacgucaaccggaucaccuacggggccugcccccgcuacgugaagcaguccacgcugaagcucgcgaccggcaugcggaacgugcccgagaagcagacccgcgggaucuucggcgccaucgccggguucaucgagaacggcugggagggcauggucgacgggugguacggcuuccggcaccagaacagcgaggggcgcggccaggccgccgaccugaaguccacccaggcggccaucgaccagaucaacgggaagcugaaccggcucaucggcaagacgaacgagaaguuccaccagaucgagaaggaguucagcgagguggagggccgcauccaggaccuggagaaguacguggaggacaccaagaucgaccugugguccuacaacgccgagcuccuggucgcccuggagaaccagcacaccaucgaccucaccgacagcgagaugaacaagcuguucgagaagacgaagaagcagcugcgcgagaacgccgaggacauggggaacggcugcuucaagaucuaccacaagugcgacaacgcgugcaucggguccauccggaacggcaccuacgaccacaacguguaccgcgacgaggcccucaacaaccgguuccagaucaaggggguggagcucaagagcggcuacaaggacuggauccuguggaucuccuucgccaucagcugcuuccugcugugcgucgcccugcucggcuucaucaugugggccugccagaaggggaacauccgcugcaacaucugcaucuga

SEQ ID NO: 76367 - RNA, 1701 nt, Artificial Sequence
  derived and/or modified CDS sequence (opt1) from hemagglutinin__InfluenzaA__AHZ42867
augaagaccaucaucgcccugagcuacauccucugccugguguucgcccagaagcugcccggcaacgacaacuccaccgcgacgcucugccuggggcaccacgccgucccgaacggcaccaucgugaagaccaucaccaacgaccagaucgaggugacgaacgccaccgagcugguccagaacagcuccaucggggagaucugcgacagcccccaccagauccucgacggcgagaacugcacccugaucgacgcccugcucggggacccccagugcgacggcuuccagaacaagaagugggaccuguucguggagcgcuccaaggccuacagcaacugcuaccccuacgacgugccggacuacgcgucccugcggagccucgucgccuccagcggcacccuggaguucaacaacgaguccuucaacugggccggggugacgcagaacggcaccagcuccgccugcauccgcgggagcaacuccagcuucuucucccggcugaacuggcucacccaccugaacuucaaguaccccgcgcugaacgugaccaugcccaacaacgagcaguucgacaagcucuacaucuggggcguccaccaccccgggacggacaaggaccagaucuuccuguacgcccagagcuccggccgcaucaccgugagcaccaagcggagccagcaggccgugaucccgaacaucggcucccgcccccggauccgcaacauccccagccggaucuccaucuacuggaccaucgucaagcccggggacauccugcucaucaacagcacgggcaaccugaucgccccgcgcggguacuucaagauccgguccggcaagagcuccaucaugcgcagcgacgcccccaucggcaagugcaaguccgagugcaucacccccaacgggagcauccccaacgacaagccguuccagaacgugaaccggaucaccuacggcgcgugcccccgcuacgugaagcaguccacccugaagcucgccacggggaugcggaacguccccgagaagcagacccgcggcaucuucggggccaucgccggcuucaucgagaacggcugggaggggaugguggacggcugguacggguuccggcaccagaacagcgagggccgcgggcaggccgcggaccugaaguccacccaggccgccaucgaccagaucaacggcaagcugaaccggcucaucggcaagaccaacgagaaguuccaccagaucgagaaggaguucagcgagguggaggggcgcauccaggaccuggagaaguacgucgaggacacgaagaucgaccugugguccuacaacgccgagcuccugguggcccuggagaaccagcacaccaucgaccucaccgacagcgagaugaacaagcuguucgagaagaccaagaagcagcugcgggagaacgcggaggacaugggcaacgggugcuucaagaucuaccacaagugcgacaacgccugcaucggcuccauccgcaacgggacguacgaccacgacguguaccgcgacgaggcccucaacaaccgguuccagaucaagggcgucgagcucaagagcgaguacaaggacuggauccuguggaucuccuucgccaucagcugcuuccugcugugcguggcccugcucggcuucaucaugugggcgugccagaaggggaacauccgcugcaacaucugcaucuga

SEQ ID NO: 76368 - RNA, 1701 nt, Artificial Sequence; identical to SEQ ID NO: 73882
  derived and/or modified CDS sequence (opt1) from hemagglutinin__InfluenzaA__AHZ42879

SEQ ID NO: 76369 - RNA, 1701 nt, Artificial Sequence
  derived and/or modified CDS sequence (opt1) from hemagglutinin__InfluenzaA__AHZ42891
augaagaccaucaucgcccugagcuacauccucugccugguguucgcccagaagcugcccggcaacgacaacuccaccgcgacgcucugccuggggcaccacgccgucccgaacggcaccaucgugaagaccaucaccaacgaccgcaucgaggugacgaacgccaccgagcugguccagaacagcuccaucggggagaucugcgacagcccccaccagauccucgacggcgagaacugcacccugaucgacgcccugcucggggacccccagugcgacggcuuccagaacaagaagugggaccuguucguggagcgguccaaggccuacagcuccugcuaccccuacgacgugccggacuacgcgagccugcgcucccucgucgccagcuccggcacccuggaguucaacaacgagagcuucaacugggccggggugacgcagaacggcaccuccagcgccugcauccggcgcuccaacagcuccuucuucagccggcugaacuggcucacccaccugaacuucaaguaccccgcgcugaacgugaccaugcccaacaacgagcaguucgacaagcucuacaucuggggcguccaccaccccgggacggacaaggaccagaucuuccuguacgcccaguccagcgggcgcaucaccgugagcaccaagcggucccagcaggccgugaucccgaacaucggcagccgcccccggauccgcaacauccccucccggaucagcaucuacuggaccaucgucaagcccggcgacauccugcucaucaacuccacggggaaccugaucgccccgcgcggcuacuucaagauccggagcgggaaguccagcaucaugcgcuccgacgcccccaucggcaagugcaagagcgagugcaucacccccaacggcuccauccccaacgacaagccguuccagaacgugaaccggaucaccuacggggcgugcccccgcuacgugaagcagagcacccugaagcucgccacgggcaugcggaacguccccgagaagcagacccgcgggaucuucggcgccaucgccggguucaucgagaacggcugggagggcaugguggacgggugguacggcuuccggcaccagaacuccgaggggcgcggccaggccgcggaccucaagagcacccaggccgccaucgaccagaucaacgggaagcugaaccggcugaucggcaagaccaacgagaaguuccaccagaucgagaaggaguucuccgagguggagggccgcauccaggaccuggagaaguacgucgaggacacgaagaucgaccuguggagcuacaacgccgagcuccugguggcccuggagaaccagcacaccaucgaccucaccgacuccgagaugaacaagcuguucgagaagaccaagaagcagcugcgcgagaacgcggaggacauggggaacggcugcuucaagaucuaccacaagugcgacaacgccugcaucgggagcauccggaacggcacguacgaccacgacguguaccgcgacgaggcccucaacaaccgguuccagaucaagggggucgagcugaaguccggcuacaaggacuggauccuguggaucagcuucgccaucagcugcuuccuccugugcguggcccugcucggcuucaucaugugggcgugccagaaggggaacauccgcugcaacaucugcaucuga

SEQ ID NO: 76370 - RNA, 1701 nt, Artificial Sequence
  derived and/or modified CDS sequence (opt1) from hemagglutinin__InfluenzaA__AHZ42903
augaagaccaucaucgcccugagcuacauccucugccugguguucgcccagaagauccccggcaacgacaacuccaccgcgacgcugugccucgggcaccacgccgucccgaacggcaccaucgugaagaccaucaccaacgaccgcaucgaggugacgaacgccaccgagcugguccagaacagcuccaucggggagaucugcgacagcccccaccagauccuggacggcgagaacugcacccucaucgacgcccugcugggggacccccagugcgacggcuuccagaacaagaagugggaccucuucguggagcgguccaaggccuacagcaacugcuaccccuacgacgugccggacuacgcgucccugcgcagccuggucgccuccagcggcacccucgaguucaacaacgaguccuucaacuggacgggggugacccagaacggcaccagcuccgccugcauccggcgcagcaacuccagcuucuucucccggcugaacuggcugacccaccucaacuucaaguaccccgcccugaacgugacgaugcccaacaacgagcaguucgacaagcuguacaucuggggcguccaccaccccgggaccgacaaggaccagaucuuccucuacgcgcagagcuccgggcgcaucaccgugagcaccaagcggagccagcaggccgugaucccgaacaucggcucccgcccccggauccgcaacauccccagccggaucuccaucuacuggacgaucgucaagcccggcgacauccugcugaucaacagcaccgggaaccucaucgccccgcgcggcuacuucaagauccgguccggcaagagcuccaucaugcgcagcgacgcccccaucgggaagugcaaguccgagugcaucacccccaacggcagcauccccaacgacaagccguuccagaacgugaaccggaucaccuacggggccugcccccgcuacgugaagcaguccacgcugaagcuggcgaccggcaugcggaacguccccgagaagcagacccgcgggaucuucggcgccaucgccggguucaucgagaacggcugggagggcaugguggacgggugguacggcuuccggcaccagaacagcgaggggcgcggccaggccgccgaccucaaguccacccaggcggccaucgaccagaucaacgggaagcugaaccggcugaucggcaagacgaacgagaaguuccaccagaucgagaaggaguucagcgagguggagggccgcauccaggaccucgagaaguacgucgaggacaccaagaucgaccugugguccuacaacgccgagcugcucguggcccuggagaaccagcacaccaucgaccugaccgacagcgagaugaacaagcuguucgagaagacgaagaagcagcuccgcgagaacgccgaggacauggggaacggcugcuucaagaucuaccacaagugcgacaacgcgugcaucggguccauccggaacggcaccuacgaccacaacguguaccgcgacgaggcccugaacaaccgguuccagaucaagggggucgagcucaagagcggcuacaaggacuggauccuguggaucuccuucgccaucagcugcuuccugcucugcguggcccugcugggcuucaucaugugggccugccagaaggggaacauccgcugcaacaucugcaucuga

SEQ ID NO: 76371 - RNA, 1701 nt, Artificial Sequence; identical to SEQ ID NO: 73859
  derived and/or modified CDS sequence (opt1) from hemagglutinin__InfluenzaA__AHZ42915

SEQ ID NO: 76372 - RNA, 1683 nt, Artificial Sequence; identical to SEQ ID NO: 74012
  derived and/or modified CDS sequence (opt1) from hemagglutinin__InfluenzaA__AHZ59747

SEQ ID NO: 76373 - RNA, 1683 nt, Artificial Sequence
  derived and/or modified CDS sequence (opt1) from hemagglutinin__InfluenzaA__AHZ59759
augaacacccagauccugguguucgcccucaucgccaucauccccaccaacgcggacaagaucugccugggccaccacgccgucagcaacgggacgaaggugaacacccugaccgagcgcggcguggaggucgugaacgccaccgagacgguggagcggaccaacaucccgcgcaucugcuccaaggggaagcggaccgucgaccucggccagugcgggcugcugggcaccaucacgggcccgccccagugcgaccaguuccucgaguucagcgccgaccugaucaucgagcgccgggagggguccgacgugugcuaccccggcaaguucgugaacgaggaggcccugcgccagauccuccgggagagcgggggcaucgacaaggaggcgaugggguucaccuacuccggcauccgcaccaacggcgccaccagcgccugccggcgcuccgggagcuccuucuacgccgagaugaaguggcugcugagcaacacggacaacgcggccuucccgcagaugaccaaguccuacaagaacacccgcaagagccccgcccucaucgucuggggcauccaccacuccgugagcaccgccgagcagacgaagcuguacggguccggcaacaagcuggugaccgucggcagcuccaacuaccagcagagcuucgugcccucccccggggcccggccccaggugaacggccucagcgggcggaucgacuuccacuggcugaugcugaaccccaacgacaccgucaccuucagcuucaacggcgcguucaucgcccccgaccgcgccuccuuccuccggggcaagagcauggggauccaguccggcguccagguggacgccaacugcgagggggacugcuaccacagcggcgggacgaucaucuccaaccugcccuuccagaacaucgacagccgcgccgugggcaagugcccgcgguacgugaagcagcgcucccugcuccuggcgaccgggaugaagaacgugcccgagauccccaagggccggggccuguucggggccaucgccggcuucaucgagaacgggugggagggccucaucgacgggugguacggcuuccgccaccagaacgcccagggcgaggggaccgccgcggacuacaagagcacccaguccgccaucgaccagaucacgggcaagcugaaccggcugaucgagaagaccaaccagcaguucgagcucaucgacaacgaguucaacgaggucgagaagcagaucgggaacgugaucaacuggacccgcgacagcaucaccgaggugugguccuacaacgccgagcugcuggucgccauggagaaccagcacacgaucgaccucgccgacagcgagauggacaagcuguacgagcgcgugaagcggcagcugcgcgagaacgcggaggaggacggcaccggcugcuucgagaucuuccacaagugcgacgacgacugcauggccuccauccggaacaacaccuacgaccacagcaagucccgcgaggaggccaugcagaaccggauccagaucgaccccgucaagcucagcuccggguacaaggacgugauccugugguucagcuucggcgccuccugcuucauccugcucgcgaucgugauggggcuggucuucaucugcgugaagaacggcaacaugcgcugcaccaucugcaucuga

SEQ ID NO: 76374 - RNA, 1683 nt, Artificial Sequence
  derived and/or modified CDS sequence (opt1) from hemagglutinin__InfluenzaA__AHZ59771
augaacacccagauccugguguucgcccucaucgccaucauccccaccaacgcggacaagaucugccugggccaccacgccgucagcaacgggacgaaggugaacacccugaccgagcgcggcguggaggucgugaacgccaccgagacgguggagcggaccaacaucccgcgcaucugcuccaaggggaagcggaccgucgaccucggccagugcgggcugcugggcaccaucacgggcccgccccagugcgaccaguuccucgaguucagcgccgaccugaucaucgagcgccgggagggguccgacgugugcuaccccggcaaguucgugaacgaggaggcccugcgccagauccuccgggagagcgggggcaucgacaaggaggcgaugggguucaccuacuccggcauccgcaccaacggcgccaccagcgccugccggcgcuccgggagcuccuucuacgccgagaugaaguggcugcugagcaacacggacaacgcggccuucccgcagaugaccaaguccuacaagaacacccgcaagagccccgcccucaucgucuggggcauccaccacuccgugagcaccgccgagcagacgaagcuguacggguccggcaacaagcuggugaccgucggcagcuccaacuaccagcagagcuucgugcccucccccggggcccggccccaggugaacggccagagcgggcggaucgacuuccacuggcucaugcugaaccccaacgacaccgucaccuucagcuucaacggcgcguucaucgcccccgaccgcgccuccuuccugcggggcaagagcauggggauccaguccggcguccagguggacgccaacugcgagggggacugcuaccacagcggcgggacgaucaucuccaaccuccccuuccagaacaucgacagccgcgccgugggcaagugcccgcgguacgugaagcagcgcucccugcugcucgcgaccgggaugaagaacgugcccgagauccccaagggccggggccuguucggggccaucgccggcuucaucgagaacgggugggagggccugaucgacgggugguacggcuuccgccaccagaacgcccagggcgaggggaccgccgcggacuacaagagcacccaguccgccaucgaccagaucacgggcaagcucaaccggcugaucgagaagaccaaccagcaguucgagcugaucgacaacgaguucaacgaggucgagaagcagaucgggaacgugaucaacuggacccgcgacagcaucaccgaggugugguccuacaacgccgagcuccuggucgccauggagaaccagcacacgaucgaccuggccgacagcgagauggacaagcucuacgagcgcgugaagcggcagcugcgcgagaacgcggaggaggacggcaccggcugcuucgagaucuuccacaagugcgacgacgacugcauggccuccauccggaacaacaccuacgaccacagcaaguaccgcgaggaggccaugcagaaccggauccagaucgaccccgucaagcuguccagcggguacaaggacgugauccucugguucuccuucggcgccagcugcuucauccugcuggcgaucgugauggggcucgucuucaucugcgugaagaacggcaacaugcgcugcaccaucugcaucuga

SEQ ID NO: 76375 - RNA, 1683 nt, Artificial Sequence
  derived and/or modified CDS sequence (opt1) from hemagglutinin__InfluenzaA__AHZ59795
augaacacccagauccugguguucgcccucaucgccaucauccccaccaacgcggacaagaucugccugggccaccacgccgucagcaacgggacgaaggugaacacccugaccgagcgcggcguggaggucgugaacgccaccgagacgguggagcggaccaacaucccgcgcaucugcuccaaggggaagcggaccgucgaccucggccagugcgggcugcugggcaccaucacgggcccgccccagugcgaccaguuccucgaguucagcgccgaccugaucaucgagcgccgggagggguccgacgugugcuaccccggcaaguucgugaacgaggaggcccugcgccagauccuccgggagagcgggggcaucgacaaggaggcgaugggguucaccuacuccggcauccgcaccaacggcaccacgagcgccugccggcgcuccgggagcuccuucuacgccgagaugaaguggcugcugagcaacaccgacaacgccgcguucccgcagaugaccaaguccuacaagaacacccgcaagagccccgcccucaucgucuggggcauccaccacuccgugagcacggccgagcagaccaagcuguacggguccggcaacaagcuggugaccgucggcagcuccaacuaccagcagagcuucgugcccucccccggggcccggccccaggugaacggccucagcgggcggaucgacuuccacuggcugaugcugaaccccaacgacaccgucacguucagcuucaacggcgccuucaucgcgcccgaccgcgccuccuuccuccggggcaagagcauggggauccaguccggcguccagguggacgccaacugcgagggggacugcuaccacagcggcgggaccaucaucuccaaccugcccuuccagaacaucgacagccgcgccgugggcaagugcccgcgguacgugaagcagcgcucccugcuccuggccaccgggaugaagaacgugcccgagauccccaagggccggggccuguucggggcgaucgccggcuucaucgagaacgggugggagggccucaucgacgggugguacggcuuccgccaccagaacgcccagggcgaggggaccgccgccgacuacaagagcacgcaguccgcgaucgaccagaucaccggcaagcugaaccggcugaucgagaagaccaaccagcaguucgagcucaucgacaacgaguucaacgaggucgagaagcagaucgggaacgugaucaacuggacccgcgacagcaucacggaggugugguccuacaacgccgagcugcuggucgccauggagaaccagcacaccaucgaccucgccgacagcgagauggacaagcuguacgagcgcgugaagcggcagcugcgcgagaacgccgaggaggacggcaccggcugcuucgagaucuuccacaagugcgacgacgacugcauggcguccauccggaacaacaccuacgaccacagcaaguaccgcgaggaggccaugcagaaccggauccagaucgaccccgucaagcucuccagcggguacaaggacgugauccugugguucuccuucggcgccagcugcuucauccugcucgccaucgugauggggcuggucuucaucugcgugaagaacggcaacaugcgcugcacgaucugcaucuga

SEQ ID NO: 76376 - RNA, 1683 nt, Artificial Sequence; identical to SEQ ID NO: 76375
  derived and/or modified CDS sequence (opt1) from hemagglutinin__InfluenzaA__AHZ59807

SEQ ID NO: 76377 - RNA, 1683 nt, Artificial Sequence; identical to SEQ ID NO: 76375
  derived and/or modified CDS sequence (opt1) from hemagglutinin__InfluenzaA__AHZ59819

SEQ ID NO: 76378 - RNA, 1683 nt, Artificial Sequence; identical to SEQ ID NO: 74012
  derived and/or modified CDS sequence (opt1) from hemagglutinin__InfluenzaA__AHZ59831

SEQ ID NO: 76379 - RNA, 1683 nt, Artificial Sequence; identical to SEQ ID NO: 74012
  derived and/or modified CDS sequence (opt1) from hemagglutinin__InfluenzaA__AHZ59843

SEQ ID NO: 76380 - RNA, 1683 nt, Artificial Sequence; identical to SEQ ID NO: 74012
  derived and/or modified CDS sequence (opt1) from hemagglutinin__InfluenzaA__AHZ59855

SEQ ID NO: 76381 - RNA, 1683 nt, Artificial Sequence; identical to SEQ ID NO: 76374
  derived and/or modified CDS sequence (opt1) from hemagglutinin__InfluenzaA__AHZ59867

SEQ ID NO: 76382 - RNA, 1683 nt, Artificial Sequence; identical to SEQ ID NO: 74012
  derived and/or modified CDS sequence (opt1) from hemagglutinin__InfluenzaA__AHZ59879

SEQ ID NO: 76383 - RNA, 1683 nt, Artificial Sequence; identical to SEQ ID NO: 76374
  derived and/or modified CDS sequence (opt1) from hemagglutinin__InfluenzaA__AHZ59915

SEQ ID NO: 76384 - RNA, 1683 nt, Artificial Sequence; identical to SEQ ID NO: 74012
  derived and/or modified CDS sequence (opt1) from hemagglutinin__InfluenzaA__AHZ59927

SEQ ID NO: 76385 - RNA, 1683 nt, Artificial Sequence; identical to SEQ ID NO: 76374
  derived and/or modified CDS sequence (opt1) from hemagglutinin__InfluenzaA__AHZ59939

SEQ ID NO: 76386 - RNA, 1683 nt, Artificial Sequence; identical to SEQ ID NO: 74012
  derived and/or modified CDS sequence (opt1) from hemagglutinin__InfluenzaA__AHZ59951

SEQ ID NO: 76387 - RNA, 1683 nt, Artificial Sequence; identical to SEQ ID NO: 74012
  derived and/or modified CDS sequence (opt1) from hemagglutinin__InfluenzaA__AHZ59963

SEQ ID NO: 76388 - RNA, 1683 nt, Artificial Sequence; identical to SEQ ID NO: 74012
  derived and/or modified CDS sequence (opt1) from hemagglutinin__InfluenzaA__AHZ59988

SEQ ID NO: 76389 - RNA, 1683 nt, Artificial Sequence; identical to SEQ ID NO: 74012
  derived and/or modified CDS sequence (opt1) from hemagglutinin__InfluenzaA__AHZ60000

SEQ ID NO: 76390 - RNA, 1683 nt, Artificial Sequence; identical to SEQ ID NO: 74012
  derived and/or modified CDS sequence (opt1) from hemagglutinin__InfluenzaA__AHZ60012

SEQ ID NO: 76391 - RNA, 1683 nt, Artificial Sequence; identical to SEQ ID NO: 74012
  derived and/or modified CDS sequence (opt1) from hemagglutinin__InfluenzaA__AHZ60024

SEQ ID NO: 76392 - RNA, 1683 nt, Artificial Sequence; identical to SEQ ID NO: 76375
  derived and/or modified CDS sequence (opt1) from hemagglutinin__InfluenzaA__AHZ60036

SEQ ID NO: 76393 - RNA, 1683 nt, Artificial Sequence; identical to SEQ ID NO: 76375
  derived and/or modified CDS sequence (opt1) from hemagglutinin__InfluenzaA__AHZ60048

SEQ ID NO: 76394 - RNA, 1683 nt, Artificial Sequence; identical to SEQ ID NO: 76375
  derived and/or modified CDS sequence (opt1) from hemagglutinin__InfluenzaA__AHZ60060

SEQ ID NO: 76395 - RNA, 1683 nt, Artificial Sequence; identical to SEQ ID NO: 76375
  derived and/or modified CDS sequence (opt1) from hemagglutinin__InfluenzaA__AHZ60072

SEQ ID NO: 76396 - RNA, 1683 nt, Artificial Sequence; identical to SEQ ID NO: 76375
  derived and/or modified CDS sequence (opt1) from hemagglutinin__InfluenzaA__AHZ60084

SEQ ID NO: 76397 - RNA, 1683 nt, Artificial Sequence
  derived and/or modified CDS sequence (opt1) from hemagglutinin__InfluenzaA__AHZ60096
augaacacccagauccugguguucgcccucaucgccaucauccccaccaacgcggacaagaucugccugggccaccacgccgucagcaacgggacgaaggugaacacccugaccgagcgcggcguggaggucgugaacgccaccgagacgguggagcggaccaacaucccgcgcaucugcuccaaggggaagcggaccgucgaccucggccagugcgggcugcugggcaccaucacgggcccgccccagugcgaccaguuccucgaguucagcgccgaccugaucaucgagcgccgggagggguccgacgugugcuaccccggcaaguucgugaacgaggaggcccugcgccagauccuccgggagagcgggggcaucgacaaggaggcgaugggguucaccuacuccggcauccgcaccaacggcgccaccagcgccugccggcgcuccgggagcuccuucuacgccgagaugaaguggcugcugagcaacacggacgacgcggccuucccgcagaugaccaaguccuacaagaacacccgcaagagccccgcccucaucgucuggggcauccaccacuccgugagcaccgccgagcagacgaagcuguacggguccggcaacaagcuggugaccgucggcagcuccaacuaccagcagagcuucgugcccucccccggggcccggccccaggugaacggccucagcgggcggaucgacuuccacuggcugaugcugaaccccaacgacaccgucaccuucagcuucaacggcgcguucaucgcccccgaccgcgccuccuuccuccggggcaagagcauggggauccaguccggcguccagguggacgccaacugcgagggggacugcuaccacagcggcgggacgaucaucuccaaccugcccuuccagaacaucgacagccgcgccgugggcaagugcccgcgguacgugaagcagcgcucccugcuccuggcgaccgggaugaagaacgugcccgagauccccaagggccggggccuguucggggccaucgccggcuucaucgagaacgggugggagggccucaucgacgggugguacggcuuccgccaccagaacgcccagggcgaggggaccgccgcggacuacaagagcacccaguccgccaucgaccagaucacgggcaagcugaaccggcugaucgagaagaccaaccagcaguucgagcucaucgacaacgaguucaacgaggucgagaagcagaucgggaacgugaucaacuggacccgcgacagcaucaccgaggugugguccuacaacgccgagcugcuggucgccauggagaaccagcacacgaucgaccucgccgacagcgagauggacaagcuguacgagcgcgugaagcggcagcugcgcgagaacgcggaggaggacggcaccggcugcuucgagaucuuccacaagugcgacgacgacugcauggccuccauccggaacaacaccuacgaccacagcaaguaccgcgaggaggccaugcagaaccggauccagaucgaccccgucaagcucuccagcggguacaaggacgugauccugugguucuccuucggcgccagcugcuucauccugcucgcgaucgugauggggcuggucuucaucugcgugaagaacggcaacaugcgcugcaccaucugcaucuga

SEQ ID NO: 76398 - RNA, 1701 nt, Artificial Sequence
  derived and/or modified CDS sequence (opt1) from hemagglutinin__InfluenzaA__AIC64889
augaaggccauccuggugguccuccuguacaccuucgccaccgcgaacgccgacacgcugugcaucggcuaccacgccaacaacagcaccgacaccguggacaccgugcucgagaagaacgucacggugacccacuccgugaacauccuggaggacaagcacaacgggaagcugugcaagcuccgcggcgucgcgccccugcaccuggggaagugcaacaucgccggcuggauccucgggaacccggagugcgagagccuguccaccgccagcuccuggagcuacaucguggagaccuccagcuccgacaacggcacgugcuaccccggcgacuucaucgacuacgaggagcugcgggagcagcucagcuccgugagcuccuucgagcgcuucgagaucuuccccaagaccagcuccuggcccaaccacgacagcaacaagggggucaccgccgccugcccgcacgccggcgcgaaguccuucuacaagaaccugaucuggcuggugaagaaggagaacagcuaccccaagcucuccaagagcuacaucaacgacaaggggaaggaggugcugguccuguggggcauccaccaccccagcaccuccgccgaccagcagagccucuaccagaacgccgacgccuacguguucgugggguccagccgguacuccaagaaguucaagcccgagaucgccauccgcccgaagguccggggccaggagggccgcaugaacuacuacuggacgcugguggagcccggggacaagaucaccuucgaggcgaccggcaaccugguggucccccgguacgccuucgccauggagcgcaacgccgggagcggcaucaucaucuccgacacccccgugcacgacugcaacacgaccugccagaccccgaagggcgccaucaacaccagccuccccuuccagaacauccaccccaucacgaucgggaagugccccaaguacgugaaguccaccaagcugcggcuggcgaccggccuccgcaacgucccgagcauccagucccgggggcuguucggcgccaucgccggguucaucgagggcggcuggaccgggaugguggacggcugguacggguaccaccaccagaacgagcagggcagcggguacgccgccgaccugaaguccacgcagaacgcgaucgacgagaucaccaacaaggugaacagcgucaucgagaagaugaacacccaguucaccgccgugggcaaggaguucaaccaccucgagaagcgcaucgagaaccugaacaagaaggucgacgacggcuuccuggacaucuggacguacaacgccgagcuccuggugcugcucgagaacgagcggacccuggacuaccacgacuccaacgugaagaaccuguacgagaagguccgcagccagcucaagaacaacgccaaggagaucgggaacggcugcuucgaguucuaccacaagugcgacaacacgugcauggaguccgugaagaacgggaccuacgacuaccccaaguacagcgaggaggccaagcugaaccgggaggagaucgacggcgugaagcuggaguccacccgcaucuaccagauccucgcgaucuacagcaccgucgccagcucccuggugcugguggucagccucggggccaucuccuucuggaugugcagcaacggcucccugcagugccggaucugcaucuga

SEQ ID NO: 76399 - RNA, 1701 nt, Artificial Sequence; identical to SEQ ID NO: 74064
  derived and/or modified CDS sequence (opt1) from hemagglutinin__InfluenzaA__AIC73738

SEQ ID NO: 76400 - RNA, 1701 nt, Artificial Sequence
  derived and/or modified CDS sequence (opt1) from hemagglutinin__InfluenzaA__AIC73739
augaaggccauccuggugguccuccuguacaccuucgccaccgcgaacgccgacacgcugugcaucggcuaccacgccaacaacagcaccgacaccguggacaccgugcucgagaagaacgucacggugacccacuccgugaaccugcuggaggacaagcacaacgggaagcucugcaagcugcgcggcgucgcgccccugcaccucgggaagugcaacaucgccggcuggauccuggggaacccggagugcgagagccuguccaccgccagcuccuggagcuacaucguggagaccuccagcuccgacaacggcacgugcuaccccggcgacuucaucaacuacgaggagcuccgggagcagcugagcuccgugagcuccuucgagcgcuucgagaucuuccccaagaccagcuccuggcccaaccacgacagcaacaagggggucaccgccgccugcccgcacgccggcgcgaaguccuucuacaagaaccugaucuggcucgugaagaaggggaacagcuaccccaagcugucccagagcuacaucaacgacaagggcaaggaggugcugguccucugggggauccaccaccccagcaccacggccgaccagcagucccuguaccagaacgccgacgccuacguguucgugggcaccagccgguacuccaagaaguucaagcccgagaucgccauccgcccgaagguccgggaccaggagggccgcaugaacuacuacuggacccugguggagcccggggacaagaucaccuucgaggcgacgggcaaccucguggucccccgguacgccuucaccauggagcgccacgccgggagcggcaucaucaucuccgacacccccgugcacgacugcaacaccacgugccagaccccggagggcgccaucaacaccagccugcccuuccagaacauccaccccaucaccaucgggaagugccccaaguacgugaaguccacgaagcugcggcucgccaccggccugcgcaacgucccgagcauccagucccgggggcuguucggcgcgaucgccggguucaucgagggcggcuggaccgggaugguggacggcugguacggguaccaccaccagaacgagcagggcagcggguacgccgccgaccucaaguccacccagaacgccaucgacaagaucacgaacaaggugaacagcgucaucgagaagaugaacacccaguucaccgcggugggcaaggaguucaaccaccuggagaagcgcaucgagaaccugaacaagaaggucgacgacggcuuccucgacaucuggaccuacaacgccgagcugcuggugcuccuggagaacgagcggacgcuggacuaccacgacuccaacgugaagaaccucuacgagaagguccgcaaccagcugaagaacaacgccaaggagaucgggaacggcugcuucgaguucuaccacaagugcgacaacacgugcauggagagcgugaagaacgggaccuacgacuaccccaaguacuccgaggaggccaagcugaaccgggagaagaucgacggcgugaagcucgagagcacccgcaucuaccagauccuggccaucuacuccaccgucgcgagcucccuggugcucguggucagccugggggccaucagcuucuggaugugcuccaacggcagccugcagugccggaucugcaucuga

SEQ ID NO: 76401 - RNA, 1701 nt, Artificial Sequence
  derived and/or modified CDS sequence (opt1) from hemagglutinin__InfluenzaA__AIC73740
augaaggccauccuggugguccuccuguacaccuucaccacggccaacgcggacacccugugcaucggcuaccacgccaacaacagcaccgacaccguggacacggugcucgagaagaacgucaccgugacccacuccgugaaccugcuggaggacaagcacaacgggaagcucugcaagcugcgcggcgucgcgccccugcaccucgggaagugcaacaucgccggcuggauccuggggaacccggagugcgagagccuguccaccgccagcuccuggagcuacaucguggagacguccagcuccgacaacgggaccugcuaccccggcgacuucaucaacuacgaggagcuccgggagcagcugagcuccgugagcuccuucgagcgcuucgagaucuuccccaagaccagcuccuggcccaaccacgacagcaacaagggcgucaccgccgccugcccgcacgccggcgccaaguccuucuacaagaaccugaucuggcucgugaagaaggggaacagcuaccccaagcugucccagagcuacaucaacgacaagggcaaggaggugcugguccucugggggauccaccacccgcccacgaccgcggaccagcagagccuguaccagaacgccgacgccuacguguucgugggcaccucccgguacagcaagaaguucaagcccgagaucgccauccgccccaagguccgggaccaggagggccgcaugaacuacuacuggacccugguggagcccggggacaagaucacguucgaggccaccggcaaccucguggucccccgguacgcguucaccauggagcgcaacgccggguccggcaucaucaucagcgacaccccggugcacgacugcaacacgaccugccagacccccgagggcgccaucaacaccucccugcccuuccagaacauccaccccaucacgaucgggaagugcccgaaguacgucaagagcaccaagcugcggcucgccaccggccugcgcaacgugcccuccauccagagccgggggcuguucggcgccaucgcgggguucaucgagggcggcuggaccgggaugguggacggcugguacggguaccaccaccagaacgagcagggcuccggguacgccgccgaccucaagagcacgcagaacgccaucgacaagaucaccaacaaggugaacuccgucaucgagaagaugaacacccaguucaccgccgugggcaaggaguucaaccaccuggagaagcgcaucgagaaccugaacaagaaggucgacgacggcuuccucgacaucuggacguacaacgcggagcugcuggugcuccuggagaacgagcggacccuggacuaccacgacagcaacgugaagaaccucuacgagaagguccgcaaccagcugaagaacaacgccaaggagaucgggaacggcugcuucgaguucuaccacaagugcgacaacacgugcauggaguccgugaagaacgggaccuacgacuaccccaaguacagcgaggaggccaagcuggaccgggagaagaucgacggcgugcgccucgaguccacccggaucuaccagauccuggccaucuacagcaccgucgccuccagccuggugcucguggucucccugggggcgaucagcuucuggaugugcagcaacggcucccugcagugccgcaucugcaucuga

SEQ ID NO: 76402 - RNA, 1701 nt, Artificial Sequence
  derived and/or modified CDS sequence (opt1) from hemagglutinin__InfluenzaA__AIC73741
augaagaccaucaucgcccugagcuacauccucugccugguguucgcccagaagcugcccggcaacgacaacuccaccgcgacgcucugccuggggcaccacgccgucccgaacggcaccaucgugaagaccaucaccaacgaccgcaucgaggugacgaacgccaccgagcugguccagaacagcuccaucggggagaucugcgacagcccccaccagauccucgacggcgagaacugcacccugaucgacgcccugcucggggacccccacugcgacggcuuccagaacaagaagugggaccuguucguggagcgguccaaggccuacagcaacugcuaccccuacgacgugccggacuacgcgucccugcgcagccucgucgccuccagcggcacccuggaguucaacaacgaguccuucaacugggccggggugacgcagaacggcaccagcuccgccugcauccgggggagcaacuccagcuucuucucccgccugaacuggcucacccaccugaacuucaaguaccccgcgcugaacgugaccaugcccaacaacgagcaguucgacaagcucuacaucuggggcguccaccaccccgggacggacaaggaccagaucuuccuguacgcccagagcuccggccggaucaccgugagcaccaagcgcagccagcaggccgugaucccgaacaucggcucccggccccgcauccggaacauccccagccgcaucuccaucuacuggaccaucgucaagcccggggacauccugcucaucaacagcacgggcaaccugaucgccccgcggggguacuucaagauccgcuccggcaagagcuccaucaugcggagcgacgcccccaucggcaagugcaaguccgagugcaucacccccaacgggagcauccccaacgacaagccguuccagaacgugaaccgcaucaccuacggcgcgugcccccgguacgugaagcaguccacccugaagcucgccacggggaugcgcaacguccccgagaagcagacccggggcaucuucggggccaucgccggcuucaucgagaacggcugggaggggaugauggacggcugguacggguuccgccaccagaacagcgagggccgggggcaggccgcggaccugaaguccacccaggccgccaucgaccagaucaacggcaagcugaaccgccucaucggcaagaccaacgagaaguuccaccagaucgagaaggaguucagcgagguggaggggcggauccaggaccuggagaaguacguggaggacacgaagaucgaccugugguccuacaacgccgagcuccuggucgcccuggagaaccagcacaccaucgaccucaccgacagcgagaugaacaagcuguucgagaagaccaagaagcagcugcgcgagaacgcggaggacaugggcaacgggugcuucaagaucuaccaccgcugcgacaacgccugcaucggcuccauccggaacgggacguacgaccacaacguguaccgcgacgaggcccucaacaaccgguuccagauccgcggcguggagcucaagagcggcuacaaggacuggauccuguggaucuccuucgccaucagcugcuuccugcugugcgucgcccugcucggguucaucaugugggcgugccagaagggcaacauccggugcaacaucugcaucuga

SEQ ID NO: 76403 - RNA, 1701 nt, Artificial Sequence
  derived and/or modified CDS sequence (opt1) from hemagglutinin__InfluenzaA__AIC73742
augaaggccauccuggugguccuccuguacaccuucgccaccgcgaacgccgacacgcugugcaucggcuaccacgccaacaacagcaccgacaccguggacaccgugcucgagaagaacgucacggugacccacuccgugaaccugcuggaggacaagcacaacgggaagcucugcaagcugcgcggcgucgcgccccugcaccucgggaagugcaacaucgccggcuggauccuggggaacccggagugcgagagccuguccaccgccagcuccuggagcuacaucguggagaccuccagcuccgacaacggcacgugcuaccccggcgacuucaucaacuacgaggagcuccgggagcagcugagcuccgugagcuccuucgagcgcuucgagaucuuccccaagaccagcuccuggcccaaccacgacagcaacaagggggucaccgccgccugcccgcacgccggcgcgaaguccuucuacaagaaccugaucuggcucgugaagaaggggaacagcuaccccaagcugcggcaguccuacaucaacgacaagggcaaggaggugcugguccucugggggauccaccaccccagcaccacgaccgaccagcagagccuguaccagaacgccgacgccuacguguucgugggcaccucccgcuacagcaagaaguucaagcccgagaucgccauccggccgaagguccgcgaccaggagggccggaugaacuacuacuggacccugguggagcccggggacaagaucacguucgaggccaccggcaaccucguggucccccgcuacgcguucaccauggagcggaacgccggguccggcaucaucaucagcgacacccccgugcacgacugcaacacgaccugccagaccccggagggcgccaucaacaccucccugcccuuccagaacauccaccccaucacgaucgggaagugccccaaguacgucaagagcaccaagcugcgccucgccaccggccugcggaacgugccguccauccagagccgcgggcuguucggcgccaucgcgggguucaucgagggcggcuggaccgggaugguggacggcugguacggguaccaccaccagaacgagcagggcuccggguacgccgccgaccucaagagcacgcagaacgccaucgacaagaucaccaacaaggugaacuccgucaucgagaagaugaacacccaguucaccgccgugggcaaggaguucaaccaccuggagaagcggaucgagaaccugaaccgcaaggucgacgacggcuuccucgacaucuggacguacaacgcggagcugcuggugcuccuggagaacgagcggacccuggacuaccacgacagcaacgugaagaaccucuacgagaagguccgcaaccagcugaagaacaacgccaaggagaucgggaacggcugcuucgaguucuaccacaagugcgacaacacgugcauggaguccgugaagaacgggaccuacgacuaccccaaguacagcgaggaggccaagcugaaccgggagaagaucgacggcgugaagcucgaguccacccgcaucuaccagauccuggccaucuacagcaccgucgccuccagccuggugcucguggucucccugggggcgaucagcuucuggaugugcagcaacggcucccugcagugccggaucugcaucuga

SEQ ID NO: 76404 - RNA, 1701 nt, Artificial Sequence; identical to SEQ ID NO: 76403
  derived and/or modified CDS sequence (opt1) from hemagglutinin__InfluenzaA__AIC73743

SEQ ID NO: 76405 - RNA, 1701 nt, Artificial Sequence
  derived and/or modified CDS sequence (opt1) from hemagglutinin__InfluenzaA__AIC73744
augaaggccauccuggugguccuccuguacaccuucgccaccgcgaacgccgacacgcugugcaucggcuaccacgccaacaacagcaccgacaccguggacaccgugcucgagaagaacgucacggugacccacuccgugaaccugcuggaggacaagcacaacgggaagcucugcaagcugcgcggcgucgcgccccugcaccucgggaagugcaacaucgccggcuggauccuggggaacccggagugcgagagccuguccaccgccagcuccuggagcuacaucguggagaccuccagcuccgacaacggcacgugcuaccccggcgacuucaucaacuacgaggagcuccgggagcagcugagcuccgugagcuccuucgagcgcuucgagaucuuccccaagaccagcuccuggcccaaccacgacagcaacaagggggucaccgccgccugcccgcacgccggcgcgaaguccuucuacaagaaccugaucuggcucgugaagaaggggaacagcuaccccaagcugaaccaguccuacaucaacgacaagggcaaggaggugcugguccucugggggauccaccaccccagcaccacggccgaccagcagagccuguaccagaacgccgacgccuacguguucgugggcaccucccgguacagcaagaaguucaagcccgagaucgccauccgcccgaagguccgggaccaggagggccgcaugaacuacuacuggacccugguggagcccggggacaagaucaccuucgaggcgacgggcaaccucguggucccccgguacgccuucaccauggagcgcaacgccggguccggcaucaucaucagcgacacccccgcccacgacugcaacaccacgugccagaccccggagggcgccaucaacaccucccugcccuuccagaacauccaccccaucaccaucgggaagugccccaaguacgucaagagcacgaagcugcggcucgcgaccggccugcgcaacgugccguccauccagagccgggggcuguucggcgccaucgccggguucaucgagggcggcuggaccgggaugguggacggcugguacggguaccaccaccagaacgagcagggcuccggguacgccgccgaccucaagagcacccagaacgcgaucgacaagaucacgaacaaggugaacuccgugaucgagaagaugaacacccaguucaccgccgucggcaaggaguucaaccaccuggagaagcgcaucgagaaccugaacaagaagguggacgacggcuuccucgacaucuggaccuacaacgccgagcugcugguccuccuggagaacgagcggacgcuggacuaccacgacagcaacgugaagaaccucuacgagaaggugcgcaaccagcugaagaacaacgccaaggagaucgggaacggcugcuucgaguucuaccacaagugcgacaacacgugcauggaguccgucaagaacgggaccuacgacuaccccaaguacagcgaggaggccaagcugaaccgggagaagaucgacggcgugaagcucgaguccacccgcaucuaccagauccuggcgaucuacagcaccguggccuccagccugguccucguggugucccugggggccaucagcuucuggaugugcagcaacggcucccugcagugccggaucugcaucuga

SEQ ID NO: 76406 - RNA, 1701 nt, Artificial Sequence
  derived and/or modified CDS sequence (opt1) from hemagglutinin__InfluenzaA__AIC73745
augaaggccauccuggugguccuccuguacaccuucgccaccgcgaacgccgacacgcugugcaucggcuaccacgccaacaacagcaccgacaccguggacaccgugcucgagaagaacgucacggugacccacuccgugaaccugcuggaggacaagcacaacgggaagcucugcaagcugcgcggcgucgcgccccugcaccucgggaagugcaacaucgccggcuggauccuggggaacccggagugcgagagccuguccaccgccagcuccuggagcuacaucguggagaccuccagcuccgacaacggcacgugcuaccccggcgacuucaucaacuacgaggagcuccgggagcagcugagcuccgugagcuccuucgagcgcuucgagaucuuccccaagaccagcuccuggcccaaccacgacagcaacaagggggucaccgccgccugcccgcacgccggcgcgaaguccuucuacaagaaccugaucuggcucgugaagaaggggaacagcuaccccaagcugucccagagcuacaucaacgacaagggcaaggaggugcugguccucugggggauccaccaccccagcaccacggccgaccagcagucccuguaccagaacgccgacgccuacguguucgugggcaccagccgguacuccaagaaguucaagcccgagaucgccauccgcccgaagguccgggaccaggagggccgcaugaacuacuacugggcgcugguggagcccggggacaagaucaccuucgaggccaccggcaaccucguggucccccgguacgccuucacgauggagcgcaacgccgggagcggcaucaucaucuccgacacccccgugcacgacugcaacacgaccugccagaccccggagggcgccaucaacaccagccugcccuuccagaacauccaccccaucaccaucgggaagugccccaaguacgugaaguccaccaagcugcggcucgcgacgggccugcgcaacaucccgagcauccagucccgggggcuguucggcgccaucgccggguucaucgagggcggcuggaccgggauggucgacggcugguacggguaccaccaccagaacgagcagggcagcggguacgccgccgaccucaaguccacccagaacgcgaucgacaagaucaccaacaaggugaacagcgugaucgagaagaugaacacgcaguucaccgccgucggcaaggaguucaaccaccuggagaagcgcaucgagaaccugaacaagaagguggacgacggcuuccucgacaucuggaccuacaacgccgagcugcugguccuccuggagaacgagcggacccuggacuaccacgacuccaacgugaagaaccucuacgagaaggugcgcaaccagcugaagaacaacgccaaggagaucgggaacggcugcuucgaguucuaccacaagugcgacaacacgugcauggagagcgucaagaacgggaccuacgacuaccccaaguacuccgaggaggccaagcugaaccgggagaagaucgacggcgugaagcucgagagcacccgcaucuaccagauccuggcgaucuacuccaccguggccagcucccugguccucguggugagccugggggccaucagcuucuggaugugcuccaacggcagccugcagugccggaucugcaucuga

SEQ ID NO: 76407 - RNA, 1701 nt, Artificial Sequence
  derived and/or modified CDS sequence (opt1) from hemagglutinin__InfluenzaA__AIC73746
augaaggccauccuggugguccuccuguacaccuucgccaccgcgaacgccgacacgcugugcaucggcuaccacgccaacaacagcaccgacaccguggacaccgugcucgagaagaacgucacggugacccacuccgugaaccugcuggaggacaagcacaacgggaagcucugcaagcugcgcggcgucacgccccugcaccucgggaagugcaacaucgccggcuggauccuggggaacccggagugcgagagccuguccaccgccagcuccuggagcuacaucguggagaccuccagcuccgacaacgggaccugcuaccccggcgacuucaucaacuacgaggagcuccgggagcagcugagcuccgugagcuccuucgagcgcuucgagaucuuccccaagaccagcuccuggcccaaccacgacagcaacaagggcgucaccgcggccugcccgcacgccggcgccaaguccuucuacaagaaccugaucuggcucgugaagaaggggaacagcuaccccaagcugucccagagcuacaucaacgacaagggcaaggaggugcugguccucugggggauccaccaccccagcacgaccaccgaccagcagucccuguaccagaacgcggacgccuacguguucgugggcaccagccgguacuccaagaaguucaagcccgagaucgccauccgcccgaagguccgggaccaggagggccgcaugaacuacuacuggacgcugguggagcccggggacaagaucaccuucgaggccaccggcaaccucguggucccccgguacgccuucaccauggagcgcaacgcggggagcggcaucaucaucuccgacacgcccgugcacgacugcaacacgaccugccagaccccggagggcgccaucaacaccagccugcccuuccagaacauccaccccaucaccaucgggaagugccccaaguacgugaaguccaccaagcugcggcucgccaccggccugcgcaacgucccgagcauccagucccgggggcuguucggcgccaucgccggguucaucgagggcggcuggacggggaugguggacggcugguacggguaccaccaccagaacgagcagggcagcggguacgcggccgaccucaaguccacccagaacgccaucgacaagaucaccaacaaggugaacagcgucaucgagaagaugaacacccaguucacggccgugggcaaggaguucaaccaccuggagaagcgcaucgagaaccugaacaagaaggucgacgacggcuuccucgacaucuggaccuacaacgccgagcugcuggugcuccuggagaacgagcggacccuggacuaccacgacuccaacgugaagaaccucuacgagaagguccgcaaccagcugaagaacaacgcgaaggagaucgggaacggcugcuucgaguucuaccacaagugcgacaacacgugcauggagagcgugaagaacgggaccuacgacuaccccaaguacuccgaggaggccaagcugaaccgggagaagaucgacggcgugaagcucgagagcacccgcaucuaccagauccuggccaucuacuccaccgucgccagcucccuggugcucguggucagccugggggccaucagcuucuggaugugcuccaacggcagccugcagugccggaucugcaucuga

SEQ ID NO: 76408 - RNA, 1701 nt, Artificial Sequence
  derived and/or modified CDS sequence (opt1) from hemagglutinin__InfluenzaA__AIC73747
augaaggccauccuggugguccuccuguacacccuggccaccgcgaacgccgacacgcucugcaucggcuaccacgccaacaacagcaccgacaccguggacaccgugcuggagaagaacgucacggugacccacuccgugaaccugcucgaggacaagcacaacgggaagcugugcaagcugcgcggcgucgcgccccuccaccuggggaagugcaacaucgccggcuggauccuggggaacccggagugcgagagccucuccaccgccagcuccuggagcuacaucguggagaccuccagcuccgacaacggcacgugcuaccccggcgacuucaucaacuacgaggagcugcgggagcagcugagcuccgugagcuccuucgagcgcuucgagaucuuccccaagaccagcuccuggcccaaccacgacagcaacaagggggucaccgccgccugcccgcacgccggcgcgaaguccuucuacaagaaccucaucuggcuggugaagaaggggaacagcuaccccaagcugucccagagcuacaucaacgacaagggcaaggaggugcucguccugugggggauccaccaccccagcaccacggccgaccagcagucccuguaccagaacgccgacgccuacguguucgugggcaccagccgguacuccaagaaguucaagcccgagaucgccauccgcccgaagguccgggaccaggagggccgcaugaacuacuacuggacccucguggagcccggggacaagaucaccuucgaggcgacgggcaaccugguggucccccgguacgccuucaccauggagcgcaacaccgggagcggcaucaucaucuccgacacccccgugcacgacugcaacacgaccugccagaccccggagggcgccaucaacaccagccugcccuuccagaacauccaccccaucacgaucgggaagugccccaaguacgugaaguccaccaagcuccggcuggccaccggccugcgcaacgucccgagcauccagucccggggccucuucggggccaucgcgggguucaucgagggcggcuggaccgggaugguggacggcugguacggguaccaccaccagaacgagcagggcagcggguacgccgccgaccugaaguccacgcagaacgccaucgacaagaucaccaacaaggugaacagcgucaucgagaagaugaacacccaguucaccgccgugggcaaggaguucaaccaccuggagaagcgcaucgagaaccucaacaagaaggucgacgacggcuuccuggacaucuggacguacaacgcggagcugcucgugcugcuggagaacgagcggacccucgacuaccacgacuccaacgugaagaaccuguacgagaagguccgcaaccagcugaagaacaacgccaaggagaucgggaacggcugcuucgaguucuaccacaagugcgacaacacgugcauggagagcgugaagaacgggaccuacgacuaccccaaguacuccgaggaggccaagcucaaccgggagaagaucgacggcgugaagcuggagagcacccgcaucuaccagauccuggccaucuacuccaccgucgccagcucccucgugcugguggucagccugggggcgaucagcuucuggaugugcuccaacggcagccuccagugccggaucugcaucuga

SEQ ID NO: 76409 - RNA, 1701 nt, Artificial Sequence; identical to SEQ ID NO: 74064
  derived and/or modified CDS sequence (opt1) from hemagglutinin__InfluenzaA__AIC73748

SEQ ID NO: 76410 - RNA, 1701 nt, Artificial Sequence
  derived and/or modified CDS sequence (opt1) from hemagglutinin__InfluenzaA__AIC73749
augaagaccaucaucgcccugagcuacauccucugccugguguucgcccagaagcugcccggcaacgacaacuccaccgcgacgcucugccuggggcaccacgccgucccgaacggcaccaucgugaagaccaucaccaacgaccgcaucgaggugacgaacgccaccgagcugguccagaacagcuccaucggggagaucugcgacagcccccaccagauccucgacggcaagaacugcacccugaucgacgcccugcucggggacccccagugcgacggcuuccagaacaagcggugggaccuguucguggagcgcuccaaggccuacagcaacugcuaccccuacgacgugccggacuacgcgucccugcggagccucgucgccuccagcggcacccuggaguucaacgacgaguccuucaacugggccggggugacgcagaacggcaccagcuccgccugcauccgcgggagcaacuccagcuucuucucccggcugaacuggcucacccacagcaacuucaaguaccccgcgcugaacgugaccaugcccaacaacgagcaguucgacaagcuguacaucuggggcguccaccaccccgggacggacaaggaccagaucuuccucuacgcccacuccagcggccgcaucaccgugagcaccaagcggucccagcaggccgugaucccgaacaucggcagccgcccccggauccgcaacauccccucccggaucagcaucuacuggaccaucgucaagcccggggacauccugcugaucaacuccacgggcaaccucaucgccccgcgcggguacuucaagauccagagcggcaaguccagcaucaugcgguccgacgcccccaucggcaagugcaagagcgagugcaucacccccaacggguccaucaccaacgacaagcccuuccagaacgugaaccgcaucaccuacggcgcgugcccgcgguacgugaagcagagcacgcugaagcuggccaccgggaugcgcaacguccccgagaagcagacccggggcaucuucggggccaucgccggcuucaucgagaacggcugggaggggaugaaggacggcugguacggguuccgccaccagaacuccgagggccgggggcaggccgcggaccucaagagcacccaggccgccaucgaccagaucaacggcaagcugaaccgccugaucggcaagacgaacgagaaguuccaccagaucgagaaggaguucuccgagguggaggggcggauccaggaccucgagaaguacguggaggacaccaagaucgaccuguggagcuacaacgccgagcugcucgucgcccuggagaaccagcacaccaucgaccugaccgacuccgagaugaacaagcuguucgagaagacgaagaagcagcuccgcgagaacgcggaggacaugggcaacgggugcuucaagaucuaccacaagugcgacaacgccugcaucggcagcauccgcaacgggaccuacgaccacgacguguaccgggacgaggcccugaacaaccgcuuccagaucaagggcguggagcucaaguccggcuacaaggacuggauccuguggaucagcuucgccaucagcugcuuccugcucugcgucgcccugcugggguucaucaugugggcgugccagaagggcaacauccggugcaacaucugcaucuga

SEQ ID NO: 76411 - RNA, 1701 nt, Artificial Sequence; identical to SEQ ID NO: 74064
  derived and/or modified CDS sequence (opt1) from hemagglutinin__InfluenzaA__AIC73750

SEQ ID NO: 76412 - RNA, 1701 nt, Artificial Sequence
  derived and/or modified CDS sequence (opt1) from hemagglutinin__InfluenzaA__AIC73754
augaaggccauccuggugguccuccuguacaccuucgccaccgcgaacgccgacacgcugugcaucggcuaccacgccaacaacagcaccgacaccguggacaccgugcucgagaagaacgucacggugacccacuccgugaaccugcuggaggacaagcacaacgggaagcucugcaagcugcgcggcgucgcgccccugcaccucgggaagugcaacaucgccggcuggauccuggggaacccggagugcgagagccuguccaccgccagcuccuggagcuacaucguggagaccuccagcuccgacaacggcacgugcuaccccggcgacuucaucaacuacgaggagcuccgggagcagcugagcuccgugagcuccuucgagcgcuucgagaucuuccccaagaccagcuccuggcccaaccacgacagcaacaagggggucaccgccgccugcccgcacgccggcgcgaaguccuucuacaagaaccugaucuggcucgugaagaaggggaacagcuaccccaagcugucccagagcuacaucaacgacaagggcaaggaggugcugguccucugggggauccaccaccccagcaccacggccgaccagcagucccuguaccagaacgccgacgccuacguguucgugggcaccagccgguacucccgcaaguucaagcccgagaucgccauccggccgaagguccgcgaccaggagggccggaugaacuacuacuggacccugguggagcccggggacaagaucaccuucgaggcgacgggcaaccucguggucccccgcuacgccuucaccauggagcggaacgccgggagcggcaucaucaucuccgacacccccgugcacgacugcaacaccacgugccagaccccggagggcgccaucaacaccagccugcccuuccagaacauccaccccaucaccaucgggaagugccccaaguacgugaaguccacgaagcugcgccucgccaccggccugcggaacgucccgagcauccagucccgcgggcuguucggcgcgaucgccggguucaucgagggcggcuggaccgggaugguggacggcugguacggguaccaccaccagaacgagcagggcagcggguacgccgccgaccucaaguccacccagaacgccaucgacaagaucacgaacaaggugaacagcgucaucgagaagaugaacacccaguucaccgcggugggcaaggaguucaaccaccuggagaagcggaucgagaaccugaacaagaaggucgacgacggcuuccucgacaucuggaccuacaacgccgagcugcuggugcuccuggagaacgagcgcacgcuggacuaccacgacuccaacgugaagaaccucuacgagaagguccggaaccagcugaagaacaacgccaaggagaucgggaacggcugcuucgaguucuaccacaagugcgacaacacgugcauggagagcgugaagaacgggaccuacgacuaccccaaguacuccgaggaggccaagcugaaccgcgagaagaucgacggcgugaagcucgagagcacccggaucuaccagauccuggccaucuacuccaccgucgcgagcucccuggugcucguggucagccugggggccaucagcuucuggaugugcuccaacggcagccugcagugccgcaucugcaucuga

SEQ ID NO: 76413 - RNA, 1701 nt, Artificial Sequence; identical to SEQ ID NO: 74064
  derived and/or modified CDS sequence (opt1) from hemagglutinin__InfluenzaA__AIC73755

SEQ ID NO: 76414 - RNA, 1701 nt, Artificial Sequence; identical to SEQ ID NO: 74064
  derived and/or modified CDS sequence (opt1) from hemagglutinin__InfluenzaA__AIC73756

SEQ ID NO: 76415 - RNA, 1701 nt, Artificial Sequence; identical to SEQ ID NO: 74064
  derived and/or modified CDS sequence (opt1) from hemagglutinin__InfluenzaA__AIC73757

SEQ ID NO: 76416 - RNA, 1701 nt, Artificial Sequence
  derived and/or modified CDS sequence (opt1) from hemagglutinin__InfluenzaA__AIC73758
augaaggccauccuggugguccuccuguacaccuucgccaccgcgaacgccgacacgcugugcaucggcuaccacgccaacaacagcaccgacaccguggacaccgugcucgagaagaacgucacggugacccacuccgugaaccugcuggaggacaagcacaacgggaagcucugcaagcugcgcggcaucgcgccccugcaccucgggaagugcaacaucgccggcuggauccuggggaacccggagugcgagagccuguccaccgccagcuccuggagcuacaucgucgagaccuccagcuccgacaacggcacgugcuaccccggcgacuucaucaacuacgaggagcuccgggagcagcugagcuccgugagcuccuucgagcgcuucgagaucuuccccaagaccagcuccuggcccaaccacgacagcaacaagggggugaccgccgccugcccgcacgccggcgcgaaguccuucuacaagaaccugaucuggcucgucaagaaggggaacagcuaccccaagcugucccagagcuacaucaacgacaagggcaaggaggugcuggugcucugggggauccaccaccccagcaccacggccgaccagcagucccuguaccagaacgccgacgccuacgucuucgugggcaccagccgguacuccaagaaguucaagcccgagaucgccauccgcccgaaggugcgggaccaggagggccgcaugaacuacuacuggacccuggucgagcccggggacaagaucaccuucgaggcgacgggcaaccucguggugccccgguacgccuucaccauggagcgcaacgccgggagcggcaucaucaucuccgacacccccguccacgacugcaacaccacgugccagaccccggagggcgccaucaacaccagccugcccuuccagaacauccaccccaucaccaucgggaagugccccaaguacgugaaguccacgaagcugcggcucgccaccggccugcgcaacgugccgagcauccagucccgggggcuguucggcgcgaucgccggguucaucgagggcggcuggaccgggauggucgacggcugguacggguaccaccaccagaacgagcagggcagcggguacgccgccgaccucaaguccacccagaacgccaucgacaagaucacgaacaaggugaacagcgugaucgagaagaugaacacccaguucaccgcggucggcaaggaguucaaccaccuggagaagcgcaucgagaaccugaacaagaagguggacgacggcuuccucgacaucuggaccuacaacgccgagcugcugguccuccuggagaacgagcggacgcuggacuaccacgacuccaacgugaagaaccucuacgagaaggugcgcaaccagcugaagaacaacgccaaggagaucgggaacggcugcuucgaguucuaccacaagugcgacaacacgugcauggagagcgucaagaacgggaccuacgacuaccccaaguacuccgaggaggccaagcugaaccgggagaagaucgacggcgugaagcucgagagcacccgcaucuaccagauccuggccaucuacuccaccguggcgagcucccugguccucguggugagccugggggccaucagcuucuggaugugcuccaacggcagccugcagugccggaucugcaucuga

SEQ ID NO: 76417 - RNA, 1701 nt, Artificial Sequence
  derived and/or modified CDS sequence (opt1) from hemagglutinin__InfluenzaA__AIC73760
augaaggccauccugaucgugcuccuguacaccuucgccaccgcgaacgccgacacgcugugcaucggcuaccacgccaacaacagcaccgacaccgucgacaccgugcucgagaagaacgugacggucacccacuccgugaaccugcuggaggacaagcacaacgggaagcucugcaagcugcgcggcguggcgccccugcaccucgggaagugcaacaucgccggcuggauccuggggaacccggagugcgagagccuguccaccgccagcuccuggagcuacaucgucgagaccuccagcuccgacaacggcacgugcuaccccggcgacuucaucaacuacgaggagcuccgggagcagcugagcuccgugagcuccuucgagcgcuucgagaucuuccccaagaccagcuccuggcccaaccacgacagcaacaagggggugaccgccgccugcccgcacgccggcgcgaaguccuucuacaagaaccugaucuggcucgucaagaaggggaacagcuaccccaagcugucccagagcuacaucaacgacaagggcaaggaggugcuggugcucugggggauccaccaccccagcaccacggccgaccagcagucccuguaccagaacgccgacgccuacgucuucgugggcaccagccgguacuccaagaaguucaagcccgagaucgccauccgcccgaaggugcgggaccaggagggccgcaugaacuacuacuggacccuggucgagcccggggacaagaucaccuucgaggcgacgggcaaccucguggugccccgguacgccuucaccauggagcgcaacgccgggagcggcaucaucaucuccgacacccccguccacgacugcaacaccacgugccagaccccggagggcgccaucaacaccagccugcccuuccagaacauccaccccaucaccaucgggaagugccccaaguacgugaaguccacgaagcugcggcucgccaccggccugcgcaacgugccgagcauccagucccgggggcuguucggcgcgaucgccggguucaucgagggcggcuggaccgggauggucgacggcugguacggguaccaccaccagaacgagcagggcagcggguacgccgccgaccucaaguccacccagaacgccaucgacaagaucacgaacaaggugaacagcgugaucgagaagaugaacacccaguucaccgcggucggcaaggaguucaaccaccuggagaagcgcaucgagaaccugaacaagaagguggacgacggcuuccucgacaucuggaccuacaacgccgagcugcugguccuccuggagaacgagcggacgcuggacuaccacgacuccaacgugaagaaccucuacgagaaggugcgcaaccagcugaagaacaacgccaaggagaucgggaacggcugcuucgaguucuaccacaagugcgacaacacgugcauggagagcgucaagaacgggaccuacgacuaccccaaguacuccgaggaggccaagcugaaccgggagaagaucgacggcgugaagcucgagagcacccgcaucuaccagauccuggccaucuacuccaccguggcgagcucccugguccucguggugagccugggggccaucagcuucuggaugugcuccaacggcagccugcagugccggaucugcaucuga

SEQ ID NO: 76418 - RNA, 1701 nt, Artificial Sequence; identical to SEQ ID NO: 76417
  derived and/or modified CDS sequence (opt1) from hemagglutinin__InfluenzaA__AIC73761

SEQ ID NO: 76419 - RNA, 1701 nt, Artificial Sequence; identical to SEQ ID NO: 75944
  derived and/or modified CDS sequence (opt1) from hemagglutinin__InfluenzaA__AIC73762

SEQ ID NO: 76420 - RNA, 1701 nt, Artificial Sequence
  derived and/or modified CDS sequence (opt1) from hemagglutinin__InfluenzaA__AIC73763
augaaggccauccuggugguccuccuguacaccuucgccaccgcgaacgccgacacgcugugcaucggcuaccacgccaacaacagcaccgacaccguggacaccgugcucgagaagaacgucacggugacccacuccgugaaccugcuggaggacaagcacaacgggaagcucugcaagcugcgcggcgucgcgccccugcaccucgggaagugcaacaucgccggcuggauccuggggaacccggagugcgagagccuguccaccgccagcuccuggagcuacaucguggagaccuccagcuccgacaacggcacgugcuaccccggcgacuucaucaacuacgaggagcuccgggagcagcugagcuccgugagcuccuucgagcgcuucgagaucuuccccaagaccagcuccuggcccaaccacgacagcaacaagggggucaccgccgccugcccgcacgccggcgcgaaguccuucuacaagaaccugaucuggcucgugaagaaggggaacagcuaccccaagaucucccagagcuacaucaacgacaagggcaaggaggugcugguccugugggggauccaccaccccagcaccacggccgaccagcagucccucuaccagaacgccgacgccuacguguucgugggcaccagccgguacuccaagaaguucaagcccgagaucgccauccgcccgaagguccgggaccaggagggccgcaugaacuacuacuggacccugguggagcccggggacaagaucaccuucgaggcgacgggcaaccugguggucccccgguacgccuucaccauggagcgcaacgccgggagcggcaucaucaucuccgacacccccgugcacgacugcaacaccacgugccagaccccggagggcgccaucaacaccagccuccccuuccagaacauccaccccaucaccaucgggaagugccccaaguacgugaaguccacgaagcugcggcuggccaccggccuccgcaacgucccgagcauccagucccgggggcuguucggcgcgaucgccggguucaucgagggcggcuggaccgggaugguggacggcugguacggguaccaccaccagaacgagcagggcagcggguacgccgccgaccugaaguccacccagaacgccaucgacaagaucacgaacaaggugaacagcgucaucgagaagaugaacacccaguucaccgcggugggcaaggaguucaaccaccucgagaagcgcaucgagaaccugaacaagaaggucgacgacggcuuccuggacaucuggaccuacaacgccgagcuccuggugcugcucgagaacgagcggacgcuggacuaccacgacuccaacgugaagaaccuguacgagaagguccgcaaccagcucaagaacaacgccaaggagaucgggaacggcugcuucgaguucuaccacaagugcgacaacacgugcauggagagcgugaagaacgggaccuacgacuaccccaaguacuccgaggaggccaagcugaaccgggagaagaucgacggcgugaagcuggagagcacccgcaucuaccagauccucgccaucuacuccaccgucgcgagcucccuggugcugguggucagccucggggccaucagcuucuggaugugcuccaacggcagccugcagugccggaucugcaucuga

SEQ ID NO: 76421 - RNA, 1701 nt, Artificial Sequence; identical to SEQ ID NO: 74064
  derived and/or modified CDS sequence (opt1) from hemagglutinin__InfluenzaA__AIC73765

SEQ ID NO: 76422 - RNA, 1701 nt, Artificial Sequence; identical to SEQ ID NO: 74064
  derived and/or modified CDS sequence (opt1) from hemagglutinin__InfluenzaA__AIC73766

SEQ ID NO: 76423 - RNA, 1701 nt, Artificial Sequence
  derived and/or modified CDS sequence (opt1) from hemagglutinin__InfluenzaA__AIC73767
augaaggccauccuggugguccuccuguacaccuucgccaccgcgaacgccgacacgcugugcaucggcuaccacgccaacaacagcaccgacaccguggacaccgugcucgagaagaacgucacggugacccacuccgugaaccugcuggaggacaagcacaacgggaagcucugcaagcugcgcggcgucgcgccccugcaccucgggaagugcaacaucgccggcuggauccuggggaacccggagugcgagagccuguccaccgccagcuccuggagcuacaucguggagaccuccagcuccgacaacggcacgugcuaccccggcgacuucaucaacuacgaggagcuccgggagcagcugagcuccgugagcuccuucgagcgcuucgagaucuuccccaagaccagcuccuggcccaaccacgacagcaacaagggggucaccgccgccugcccgcacgccggcgcgaaguccuucuacaagaaccugaucuggcucaucaagaaggggaacagcuaccccaagcugucccagagcuacaucaacgacaagggcaaggaggugcuggugcucugggggauccaccaccccagcaccacggccgaccagcagucccuguaccagaacgccgacgccuacgucuucgugggcaccagccgguacuccaagaaguucaagcccgagaucgccauccgcccgaaggugcgggaccaggagggccgcaugaacuacuacuggacccuggucgagcccggggacaagaucaccuucgaggcgacgggcaaccucguggugccccgguacgccuucaccauggagcgcaacgccgggagcggcaucaucaucuccgacacccccguccacgacugcaacaccacgugccagaccccggagggcgccaucaacaccagccugcccuuccagaacauccaccccaucaccaucgggaagugccccaaguacgugaaguccacgaagcugcggcucgccaccggccugcgcaacaucccgagcauccagucccgggggcuguucggcgcgaucgccggguucaucgagggcggcuggaccgggaugguggacggcugguacggguaccaccaccagaacgagcagggcagcggguacgccgccgaccucaaguccacccagaacgccaucgacaagaucacgaacaaggucaacagcgugaucgagaagaugaacacccaguucaccgcggugggcaaggaguucaaccaccuggagaagcgcaucgagaaccugaacaagaaggucgacgacggcuuccucgacaucuggaccuacaacgccgagcugcuggugcuccuggagaacgagcggacgcuggacuaccacgacuccaacgucaagaaccucuacgagaagauccgcaaccagcugaagaacaacgccaaggagaucgggaacggcugcuucgaguucuaccacaagugcgacaacaugugcauggagagcgugaagaacgggaccuacgacuaccccaaguacuccgaggaggccaagcugaaccgggagaagaucgacggcgugaagcucgagagcacccgcaucuaccagauccuggccaucuacuccaccgucgcgagcucccuggugcucguggucagccugggggccaucagcuucuggaugugcuccaacggcagccugcagugccggaucugcaucuga

SEQ ID NO: 76424 - RNA, 1701 nt, Artificial Sequence; identical to SEQ ID NO: 74064
  derived and/or modified CDS sequence (opt1) from hemagglutinin__InfluenzaA__AIC73768

SEQ ID NO: 76425 - RNA, 1701 nt, Artificial Sequence; identical to SEQ ID NO: 74064
  derived and/or modified CDS sequence (opt1) from hemagglutinin__InfluenzaA__AIC73769

SEQ ID NO: 76426 - RNA, 1701 nt, Artificial Sequence; identical to SEQ ID NO: 74064
  derived and/or modified CDS sequence (opt1) from hemagglutinin__InfluenzaA__AIC73770

SEQ ID NO: 76427 - RNA, 1701 nt, Artificial Sequence; identical to SEQ ID NO: 74064
  derived and/or modified CDS sequence (opt1) from hemagglutinin__InfluenzaA__AIC73771

SEQ ID NO: 76428 - RNA, 1701 nt, Artificial Sequence
  derived and/or modified CDS sequence (opt1) from hemagglutinin__InfluenzaA__AIC73772
augaaggccauccuggugguccuccuguacaccuucgccaccgcgaacgccgacacgcugugcaucggcuaccacgccaacaacagcaccgacaccguggacaccgugcucgagaagaacgucacggugacccacuccgugaaccugcuggaggacaagcacaacgggaagcucugcaagcugcgcggcgucgcgccccugcaccucgggaagugcaacaucgccggcuggauccuggggaacccggagugcgagagccuguccaccgccagcuccuggagcuacaucguggagaccuccagcuccgacaacggcacgugcuaccccggcgacuucaucaacuacgaggagcuccgggagcagcugagcuccgugagcuccuucgagcgcuucgagaucuuccccaagaccagcuccuggcccaaccacgacagcaacaagggggucaccgccgccugcccgcacgccggcgcgaaguccuucuacaagaaccugaucuggcucgugaagaaggggaacagcuaccccaagcugucccagagcuacaucaacgacaagggcaaggaggugcugguccucugggggauccaccaccccagcaccacggccgaccagcagucccuguaccagaacgccgacgccuacguguucgugggcaccagccgguacuccaagaaguucaagcccgagaucgccauccgcccgaagguccgggaccaggagggccgcaugaacuacuacuggacccugguggagcccggggacaagaucaccuucgaggcgacgggcaaccucguggucccccgguacgccuucaccauggagcgcaacgccgggagcggcaucaucaucuccgacacccccgugcacgacugcaacaccacgugccagaccccggagggcgccaucaacaccagccugcccuuccagaacauccaccccaucaccaucgggaagugccccaaguacgugaaguccacgaagcugcggcucgccaccggccugcgcaacgucccgagcauccagucccgggggcuguucggcgcgaucgccggguucaucgagggcggcuggaccgggaugguggacggcugguacggguaccaccaccagaacgagcagggcagcggguacgccgccgaccucaaguccacccagaacgccaucgacaagaucacgaacaaggugaacagcgucaucgagaagaugaacacccaguucaccgcggugggcaaggaguucaaccaccuggagaagcgcaucgagaaccugaacaagaaggucgacgacggcuuccucgacaucuggaccuacaacgccgagcugcuggugcuccuggagaacgagcggacgcuggacuaccacgacuccaacgugaagaaccucuacgagaagguccgcaaccagcugaagaacaacgccaaggagaucgggaacggcugcuucgaguucuaccacaagugcgacaacacgugcauggagagcgugaagaacgggaccuacgacuaccccaaguacuccgaggaggccaagcugaaccgggagaagaucgacggcgugaagcucgagagcacccgcgucuaccagauccuggccaucuacuccaccguggcgagcucccuggugcucgucgugagccugggggccaucagcuucuggaugugcuccaacggcagccugcagugccggaucugcaucuga

SEQ ID NO: 76429 - RNA, 1701 nt, Artificial Sequence; identical to SEQ ID NO: 74064
  derived and/or modified CDS sequence (opt1) from hemagglutinin__InfluenzaA__AIC73773

SEQ ID NO: 76430 - RNA, 1701 nt, Artificial Sequence; identical to SEQ ID NO: 74064
  derived and/or modified CDS sequence (opt1) from hemagglutinin__InfluenzaA__AIC73775

SEQ ID NO: 76431 - RNA, 1701 nt, Artificial Sequence; identical to SEQ ID NO: 74064
  derived and/or modified CDS sequence (opt1) from hemagglutinin__InfluenzaA__AIC73776

SEQ ID NO: 76432 - RNA, 1701 nt, Artificial Sequence; identical to SEQ ID NO: 76428
  derived and/or modified CDS sequence (opt1) from hemagglutinin__InfluenzaA__AIC73777

SEQ ID NO: 76433 - RNA, 1701 nt, Artificial Sequence
  derived and/or modified CDS sequence (opt1) from hemagglutinin__InfluenzaA__AIC73778
augaagaccaucaucgcccugagcuacauccucugccugguguucgcccagaagcugcccggcaacgacaacuccaccgcgacgcucugccuggggcaccacgccgucccgaacggcaccaucgugaagaccaucaccaacgaccgcaucgaggugacgaacgccaccgagcugguccagaacagcuccaucggggagaucugcgacagcccccaccagauccucgacggcgagaacugcacccugaucgacgcccugcucggggacccccagugcgacggcuuccagaacaagaagugggaccuguucguggagcgguccaaggcccacagcaacugcuaccccuacgacgugccggacuacgcgucccugcgcagccucgucgccuccagcggcacccuggaguucaacaacgaguccuucaacuggacgggggugacccagaacggcaccagcuccgccugcauccggcgcagcaacuccagcuucuucucccggcugaacuggcucacccaccugaacuucaaguaccccgcccugaacgugacgaugcccaacaacgagcaguucgacaagcucuacaucuggggcguccaccaccccgggaccgacaaggaccagaucuuccuguacgcgcagagcuccgggcgcaucaccgugagcaccaagcggagccagcaggccgugaucccgaacaucggcucccgcccccggauccgcaacauccccagccggaucuccaucuacuggacgaucgucaagcccggcgacauccugcucaucaacagcaccgggaaccugaucgccccgcgcggcuacuucaagauccgguccggcaagagcuccaucaugcgcagcgacgcccccaucgggaagugcaaguccgagugcaucacccccaacggcagcauccccaacgacaagccguuccagaacgugaaccggaucaccuacggggccugcccccgcuacgugaagcaguccacgcugaagcucgcgaccggcaugcggaacguccccgagaagcagacccgcgggaucuucggcgccaucgccggguucaucgagaacggcugggagggcaugguggacgggugguacggcuuccggcaccagaacagcgaggggcgcggccaggccgccgaccugaaguccacccaggcggccaucgaccagaucaacgggaagcugaaccggcucaucggcaagacgaacgagaaguuccaccagaucgagaaggaguucagcgagguggagggccgcauccaggaccuggagaaguacgucgaggacaccaagaucgaccugugguccuacaacgccgagcuccugguggcccuggagaaccagcacaccaucgaccucaccgacagcgagaugaacaagcuguucgagaagacgaagaagcagcugcgcgagaacgccgaggacauggggaacggcugcuucaagaucuaccacaagugcgacaacgcgugcaucggguccauccggaacggcaccuacgaccacaacguguaccgcgacgaggcccucaacaaccgguuccagaucaagggggucgagcucaagagcggcuacaaggacuggauccuguggaucuccuucgccaucagcugcuuccugcugugcguggcccugcucggcuucaucaugugggccugccagaaggggaacauccgcugcaacaucugcaucuga

SEQ ID NO: 76434 - RNA, 1701 nt, Artificial Sequence; identical to SEQ ID NO: 76433
  derived and/or modified CDS sequence (opt1) from hemagglutinin__InfluenzaA__AIC73779

SEQ ID NO: 76435 - RNA, 1701 nt, Artificial Sequence; identical to SEQ ID NO: 76433
  derived and/or modified CDS sequence (opt1) from hemagglutinin__InfluenzaA__AIC73780

SEQ ID NO: 76436 - RNA, 1701 nt, Artificial Sequence; identical to SEQ ID NO: 75022
  derived and/or modified CDS sequence (opt1) from hemagglutinin__InfluenzaA__AIC73781

SEQ ID NO: 76437 - RNA, 1701 nt, Artificial Sequence; identical to SEQ ID NO: 76433
  derived and/or modified CDS sequence (opt1) from hemagglutinin__InfluenzaA__AIC73782

SEQ ID NO: 76438 - RNA, 1701 nt, Artificial Sequence; identical to SEQ ID NO: 76433
  derived and/or modified CDS sequence (opt1) from hemagglutinin__InfluenzaA__AIC73783

SEQ ID NO: 76439 - RNA, 1701 nt, Artificial Sequence; identical to SEQ ID NO: 76433
  derived and/or modified CDS sequence (opt1) from hemagglutinin__InfluenzaA__AIC73784

SEQ ID NO: 76440 - RNA, 1701 nt, Artificial Sequence; identical to SEQ ID NO: 74064
  derived and/or modified CDS sequence (opt1) from hemagglutinin__InfluenzaA__AIC73785

SEQ ID NO: 76441 - RNA, 1701 nt, Artificial Sequence; identical to SEQ ID NO: 76433
  derived and/or modified CDS sequence (opt1) from hemagglutinin__InfluenzaA__AIC73786

SEQ ID NO: 76442 - RNA, 1701 nt, Artificial Sequence; identical to SEQ ID NO: 74064
  derived and/or modified CDS sequence (opt1) from hemagglutinin__InfluenzaA__AIC73787

SEQ ID NO: 76443 - RNA, 1701 nt, Artificial Sequence; identical to SEQ ID NO: 74064
  derived and/or modified CDS sequence (opt1) from hemagglutinin__InfluenzaA__AIC73788

SEQ ID NO: 76444 - RNA, 1701 nt, Artificial Sequence
  derived and/or modified CDS sequence (opt1) from hemagglutinin__InfluenzaA__AIC73789
augaagaccaucaucgcccugagcuacauccucugccugguguucgcccagaagcccccgggcaacgacaacuccaccgcgacgcugugccucgggcaccacgccguccccaacggcaccaucgugaagaccaucaccaacgaccgcaucgaggugacgaacgccaccgagcugguccagaacagcuccaucggggagaucugcgacagcccccaccagauccuggacggcgagaacugcacccucaucgacgcccugcugggggacccccagugcgacggcuuccagaacaagaagugggaccucuucguggagcgguccaaggccuacagcaacugcuacccguacgacgugcccgacuacgcgucccugcgcagccuggucgccuccagcggcacccucgaguucaacaacgaguccuucaacugggccggggugacgcagaacggcaccagcuccgccugcauccgggggagcaacuccagcuucuucucccgccugaacuggcugacccaccucaacuucaaguaccccgcgcugaacgugaccaugcccaacaacgagcaguucgacaagcuguacaucuggggcguccaccacccggggacggacaaggaccagaucuuccucuacgcccagagcuccggccggaucaccgugagcaccaagcgcagccagcaggccgugauccccaacaucggcucccggccccgcauccggaacauccccagccgcaucuccaucuacuggaccaucgucaagccgggggacauccugcugaucaacagcacgggcaaccucaucgcgccccggggguacuucaagauccgcuccggcaagagcuccaucaugcggagcgacgcccccaucggcaagugcaaguccgagugcaucacccccaacgggagcaucccgaacgacaagcccuuccagaacgugaaccgcaucaccuacggcgccugcccccgguacgugaagcaguccacccugaagcuggccacggggaugcgcaacguccccgagaagcagacccggggcaucuucggggccaucgccggcuucaucgagaacggcugggaggggaugguggacggcugguacggguuccgccaccagaacagcgagggccgggggcaggccgcggaccucaaguccacccaggccgccaucgaccagaucaacggcaagcugaaccgccugaucggcaagaccaacgagaaguuccaccagaucgagaaggaguucagcgagguggaggggcggauccaggaccucgagaaguacgucgaggacacgaagaucgaccugugguccuacaacgccgagcugcucguggcccuggagaaccagcacaccaucgaccugaccgacagcgagaugaacaagcuguucgagaagaccaagaagcagcuccgcgagaacgcggaggacaugggcaacgggugcuucaagaucuaccacaagugcgacaacgccugcaucggcuccauccgcaacgggacguacgaccacgacguguaccgggacgaggcccugaacaaccgcuuccagaucaagggcgucgagcucaagagcggcuacaaggacuggauccuguggaucuccuucgccaucagcugcuuccugcucugcguggugcugcugggguucaucaugugggccugccagaagggcaacauccggugcaacaucugcaucuga

SEQ ID NO: 76445 - RNA, 1701 nt, Artificial Sequence
  derived and/or modified CDS sequence (opt1) from hemagglutinin__InfluenzaA__AIC73790
augaaggccauccuggugguccuccuguacaccuucgccaccacgaacgcggacacccugugcaucggcuaccacgccaacaacagcaccgacaccguggacacggugcucgagaagaacgucaccgugacccacuccgugaaccugcuggaggacaagcacaacgggaagcucugcaagcugcgcggcgucgcgccccugcaccucgggaagugcaacaucgccggcuggauccuggggaacccggagugcgagagccuguccaccgccagcuccuggagcuacaucguggagacguccagcuccgacaacgggaccugcuaccccggcgacuucaucaacuacgaggagcuccgggagcagcugagcuccgugagcuccuucgagcgcuucgagaucuuccccaagaccagcuccuggcccaaccacgacagcaacaagggcgucaccgccgccugcccgcacgccggcgccaaguccuucuacaagaaccugaucuggcucgugaagaaggggaacagcuaccccaagcugcggcaguccuacaucaacgacaagggcaaggaggugcugguccucugggggauccaccaccccagcacgaccaccgaccagcagagccuguaccagaacgcggacgccuacguguucgugggcaccucccgcuacagcaagaaguucaagcccgagaucgccauccggccgaagguccgcgaccaggagggccggaugaacuacuacuggacgcugguggagcccggggacaagaucaccuucgaggccaccggcaaccucguggucccccgcuacgccuucaccauggagcggaacgcgggguccggcaucaucaucagcgacacgcccgugcacgacugcaacacgaccugccagaccccggagggcgccaucaacaccucccugcccuuccagaacauccaccccaucaccaucgggaagugccccaaguacgucaagagcaccaagcugcgccucgccaccggccugcggaacgugccguccauccagagccgcgggcuguucggcgccaucgccggguucaucgagggcggcuggacggggaugguggacggcugguacggguaccaccaccagaacgagcagggcuccggguacgcggccgaccucaagagcacccagaacgccaucgacaagaucaccaacaaggugaacuccgucaucgagaagaugaacacccaguucacggccgugggcaaggaguucaaccaccuggagaagcggaucgagaaccugaacaagaaggucgacgacggcuuccucgacaucuggaccuacaacgccgagcugcuggugcuccuggagaacgagcgcacccuggacuaccacgacagcaacgugaagaaccucuacgagaagguccggaaccagcugaagaacaacgcgaaggagaucgggaacggcugcuucgaguucuaccacaagugcgacaacacgugcauggaguccgugaagaacgggaccuacgacuaccccaaguacagcgaggaggccaagcugaaccgcgagaagaucgacggcgugaagcucgaguccacccggaucuaccagauccuggccaucuacagcaccgucgccuccagccuggugcucguggucucccugggggccaucagcuucuggaugugcagcaacggcucccugcagugccgcaucugcaucuga

SEQ ID NO: 76446 - RNA, 1701 nt, Artificial Sequence
  derived and/or modified CDS sequence (opt1) from hemagglutinin__InfluenzaA__AIC73791
augaaggccauccuggugguccuccuguacaccuucgccaccgcgaacgccgacacgcugugcaucggcuaccacgccaacaacagcaccgacaccaucgacaccgugcucgagaagaacgugacggucacccacuccgugaaccugcuggaggacaagcacaacgggaagcucugcaagcugcgcggcguggcgccccugcaccucgggaagugcaacaucgccggcuggauccuggggaacccggagugcgagagccuguccaccgccagcuccuggagcuacaucgucgagaccuccagcuccgacaacggcacgugcuaccccggcgacuucaucaacuacgaggagcuccgggagcagcugagcuccgugagcuccuucgagcgcuucgagaucuuccccaagaccagcuccuggcccaaccacgacagcaacaagggggugaccgccgccugcccgcacgccggcgcgaaguccuucuacaagaaccugaucuggcucgucaagaaggggaacagcuaccccaagcugucccagagcuacaucaacgacaagggcaaggaggugcuggugcucugggggauccaccaccccagcaccacggccgaccagcagucccuguaccagaacgccgacgccuacgucuucgugggcaccagccgguacuccaagaaguucaagcccgagaucgccauccgcccgaaggugcgggaccaggagggccgcaugaacuacuacuggacccuggucgagcccggggacaagaucaccuucgaggcgacgggcaaccucguggugccccgguacgccuucaccauggagcgcaacgccgggagcggcaucaucaucuccgacacccccguccacgacugcaacaccacgugccagaccccggagggcgccaucaacaccagccugcccuuccagaacauccaccccaucaccaucgggaagugccccaaguacgugaaguccacgaagcugcggcucgccaccggccugcgcaacgugccgagcauccagucccgggggcuguucggcgcgaucgccggguucaucgagggcggcuggaccgggauggucgacggcugguacggguaccaccaccagaacgagcagggcagcggguacgccgccgaccucaaguccacccagaacgccaucgacaagaucacgaacaaggugaacagcgugaucgagaagaugaacacccaguucaccgcggucggcaaggaguucaaccaccuggagaagcgcaucgagaaccugaacaagaagguggacgacggcuuccucgacaucuggaccuacaacgccgagcugcugguccuccuggagaacgagcggacgcuggacuaccacgacuccaacgugaagaaccucuacgagaaggugcgcaaccagcugaagaacaacgccaaggagaucgggaacggcugcuucgaguucuaccacaagugcgacaacacgugcauggagagcgucaagaacgggaccuacgacuaccccaaguacuccgaggaggccaagcugaaccgggagaagaucgacggcgugaagcucgagagcacccgcaucuaccagauccuggccaucuacuccaccguggcgagcucccugguccucguggugagccugggggccaucagcuucuggaugugcuccaacggcagccugcagugccggaucugcaucuga

SEQ ID NO: 76447 - RNA, 1701 nt, Artificial Sequence; identical to SEQ ID NO: 74064
  derived and/or modified CDS sequence (opt1) from hemagglutinin__InfluenzaA__AIC73792

SEQ ID NO: 76448 - RNA, 1701 nt, Artificial Sequence; identical to SEQ ID NO: 76428
  derived and/or modified CDS sequence (opt1) from hemagglutinin__InfluenzaA__AIC73793

SEQ ID NO: 76449 - RNA, 1701 nt, Artificial Sequence
  derived and/or modified CDS sequence (opt1) from hemagglutinin__InfluenzaA__AIC73794
augaagaccaucaucggcgugagcuacauccugugccucgucuucgcccagaagcugcccgggaacgacaacuccaccgccacgcugugccucggccaccacgcggugccgaacgggaccaucgugaagaccaucaccaacgaccgcaucgaggucacgaacgccaccgagcuggugcagaacagcuccaucggcgagaucugcgacagcccccaccagauccuggacggggagaacugcacccucaucgacgcccugcugggcgacccccagugcgacggcuuccagaacaagaagugggaccucuucguggagcgguccaaggccuacagcaacugcuaccccuacgacgucccggacuacgccucccugcgcagccugguggcguccagcgggacccucgaguucaacaacgaguccuucaacugggccggcgugacgcagaacgggaccagcuccagcugcauccggggcuccaacagcuccuucuucagccgccugaacuggcugacccaccucaacuccaaguaccccgcccugaacgucaccaugcccaacaacgagcaguucgacaagcuguacaucuggggcgugcaccaccccgggacggacaaggaccagaucuuccucuacgcccagagcagcggccggaucaccguguccaccaagcgcagccagcaggcggucaucccgaacaucgggucccggccccgcauccgggacauccccagccgcaucuccaucuacuggaccaucgugaagcccggcgacauccugcugaucaacagcacggggaaccucaucgccccgcggggcuacuucaagauccgcuccggcaagagcuccaucaugcggagcgacgcccccaucgggaagugcaaguccgagugcaucacccccaacggcagcauccccaacgacaagccguuccagaacgugaaccgcaucaccuacggggccugcccccgguacgucaagcaguccacccugaagcuggccacgggcaugcgcaacgugcccgagcggcagacccgcgggaucuucggcgcgaucgccggcuucaucgagaacgggugggagggcaugguggacgggugguacggcuuccggcaccagaacagcgaggggcgcggccaggccgccgaccucaaguccacccaggccgcgaucgaccagaucaacggcaagcugaaccggcugaucgggaagaccaacgagaaguuccaccagaucgagaaggaguucagcgaggucgagggccgcauccaggaccucgagaaguacguggaggacacgaagaucgaccugugguccuacaacgccgagcugcucguggcccuggagaaccagcacaccaucgaccugaccgacagcgagaugaacaagcuguucgagaagaccaagaagcagcuccgcgagaacgccgaggacauggggaacggcugcuucaagaucuaccacaagugcgacaacgccugcaucggguccauccggaacggcacguacgaccacgacgucuaccgcgacgaggcgcugaacaaccgguuccagaucaagggcguggagcucaagagcggguacaaggacuggauccuguggaucagcuucgccaucuccugcuuccugcucugcguggcccugcugggcuucaucaugugggccugccagaaggggaacauccgcugcaacaucugcaucuga

SEQ ID NO: 76450 - RNA, 1701 nt, Artificial Sequence; identical to SEQ ID NO: 74064
  derived and/or modified CDS sequence (opt1) from hemagglutinin__InfluenzaA__AIC73796

SEQ ID NO: 76451 - RNA, 1701 nt, Artificial Sequence
  derived and/or modified CDS sequence (opt1) from hemagglutinin__InfluenzaA__AIC73797
augaagaccaucaucgcccugagcuacauccucugccugguguucgcccagaagcugcccggcaacgacaacuccaccgcgacgcucugccuggggcaccacgccgucccgaacggcaccaucgugaagaccaucaccaacgaccgcaucgaggugacgaacgccaccgagcugguccagaacagcuccaucggggagaucugcgacagcccccaccagauccucgacggcgagaacugcacccugaucgacgcccugcucggggacccccagugcgacggcuuccagaacaagaagugggaccuguucguggagcgguccaaggccuacagcaacugcuaccccuacgacgugccggacuacgcgucccugcgcagccucgucgccuccagcggcacccuggaguucaacaacgaguccuucaacugggccggggugacgcagaacggcaccagcuccagcugcauccggggguccaacagcuccuucuucagccgccugaacuggcucacccaccugaacuccaaguaccccgcccugaacgugaccaugcccaacaacgagcaguucgacaagcucuacaucuggggcguccaccaccccgggacggacaaggaccagaucuuccuguacgcgcagagcagcggccggaucaccguguccaccaagcgcagccagcaggccgugaucccgaacaucggcucccggccccgcauccgggacauccccagccgcaucuccaucuacuggaccaucgucaagcccggggacauccugcucaucaacagcacgggcaaccugaucgccccgcggggguacuucaagauccgcuccggcaagagcuccaucaugcggagcgacgcccccaucggcaagugcaaguccgagugcaucacccccaacgggagcauccccaacgacaagccguuccagaacgugaaccgcaucaccuacggcgccugcccccgguacgugaagcaguccacccugaagcucgcgacggggaugcgcaacguccccgagcggcagacccgcggcaucuucggggccaucgccggcuucaucgagaacggcugggaggggaugguggacggcugguacggguuccggcaccagaacagcgagggccgcgggcaggccgccgaccugaaguccacccaggcggccaucgaccagaucaacggcaagcugaaccggcucaucggcaagaccaacgagaaguuccaccagaucgagaaggaguucagcgagguggaggggcgcauccaggaccuggagaaguacgucgaggacacgaagaucgaccugugguccuacaacgccgagcuccugguggcccuggagaaccagcacaccaucgaccucaccgacagcgagaugaacaagcuguucgagaagaccaagaagcagcugcgcgagaacgccgaggacaugggcaacgggugcuucaagaucuaccacaagugcgacaacgcgugcaucggcuccauccggaacgggacguacgaccacgacguguaccgcgacgaggcccucaacaaccgguuccagaucaagggcgucgagcucaagagcggcuacaaggacuggauccuguggaucagcuucgccaucuccugcuuccugcugugcguggcccugcucggguucaucaugugggccugccagaagggcaacauccgcugcaacaucugcaucuga

SEQ ID NO: 76452 - RNA, 1701 nt, Artificial Sequence; identical to SEQ ID NO: 76451
  derived and/or modified CDS sequence (opt1) from hemagglutinin__InfluenzaA__AIC73798

SEQ ID NO: 76453 - RNA, 1701 nt, Artificial Sequence; identical to SEQ ID NO: 76451
  derived and/or modified CDS sequence (opt1) from hemagglutinin__InfluenzaA__AIC73800

SEQ ID NO: 76454 - RNA, 1701 nt, Artificial Sequence; identical to SEQ ID NO: 76451
  derived and/or modified CDS sequence (opt1) from hemagglutinin__InfluenzaA__AIC73801

SEQ ID NO: 76455 - RNA, 1701 nt, Artificial Sequence; identical to SEQ ID NO: 76451
  derived and/or modified CDS sequence (opt1) from hemagglutinin__InfluenzaA__AIC73802

SEQ ID NO: 76456 - RNA, 1701 nt, Artificial Sequence; identical to SEQ ID NO: 76451
  derived and/or modified CDS sequence (opt1) from hemagglutinin__InfluenzaA__AIC73803

SEQ ID NO: 76457 - RNA, 1701 nt, Artificial Sequence; identical to SEQ ID NO: 76451
  derived and/or modified CDS sequence (opt1) from hemagglutinin__InfluenzaA__AIC73804

SEQ ID NO: 76458 - RNA, 1701 nt, Artificial Sequence; identical to SEQ ID NO: 76451
  derived and/or modified CDS sequence (opt1) from hemagglutinin__InfluenzaA__AIC73805

SEQ ID NO: 76459 - RNA, 1701 nt, Artificial Sequence; identical to SEQ ID NO: 76451
  derived and/or modified CDS sequence (opt1) from hemagglutinin__InfluenzaA__AIC73806

SEQ ID NO: 76460 - RNA, 1701 nt, Artificial Sequence
  derived and/or modified CDS sequence (opt1) from hemagglutinin__InfluenzaA__AIC73807
augaaggccauccuggugguccuccuguacaccuucgccaccgcgaacgccgacacgcugugcaucggcuaccacgccaacaacagcaccgacaccguggacaccgugcucgagaagaacgucacggugacccacuccgugaaccugcuggaggacaagcacaacgggaagcucugcaagcugcgcggcgucgcgccccugcaccucgggaagugcaacaucgccggcuggauccuggggaacccggagugcgagagccuguccaccgccagcuccuggagcuacaucguggagaccuccagcuccgacaacggcacgugcuaccccggcgacuucaucaacuacgaggagcuccgggagcagcugagcuccgugagcuccuucgagcgcuucgagaucuuccccaagaccagcuccuggcccaaccacgacagcaacaagggggucaccgccgccugcccgcacgccggcgcgaaguccuucuacaagaaccugaucuggcucgugaagaaggggaacagcuaccccaagcugucccagagcuacaucaacaacaagggcaaggaggugcugguccucugggggauccaccaccccagcaccacggccgaccagcagucccuguaccagaacgccgacgccuacguguucgugggcaccagccgguacuccaagaaguucaagcccgagaucgccauccgcccgaagguccgggaccaggagggccgcaugaacuacuacuggacccugguggagcccggggacaagaucaccuucgaggcgacgggcaaccucguggucccccgguacgccuucaccauggagcgcaacgccgggagcggcaucaucaucuccgacacccccgugcacgacugcaacaccacgugccagaccccggagggcgccaucaacaccagccugcccuuccagaacauccaccccaucaccaucgggaagugccccaaguacgugaaguccacgaagcugcggcucgccaccggccugcgcaacgucccgagcauccagucccgggggcuguucggcgcgaucgccggguucaucgagggcggcuggaccgggaugguggacggcugguacggguaccaccaccagaacgagcagggcagcggguacgccgccgaccucaaguccacccagaacgccaucgacaagaucacgaacaaggugaacagcgucaucgagaagaugaacacccaguucaccgcggugggcaaggaguucaaccaccuggagaagcgcaucgagaaccugaacaagaaggucgacgacggcuuccucgacaucuggaccuacaacgccgagcugcuggugcuccuggagaacgagcggacgcuggacuaccacgacuccaacgugaagaaccucuacgagaagguccgcaaccagcugaagaacaacgccaaggagaucgggaacggcugcuucgaguucuaccacaagugcgacaacacgugcauggagagcgugaagaacgggaccuacgacuaccccaaguacuccgaggaggccaagcugaaccgggagaagaucgacggcgugaagcucgagagcacccgcaucuaccagauccuggccaucuacuccaccgucgcgagcucccuggugcucguggucagccugggggccaucagcuucuggaugugcuccaacggcagccugcagugccggaucugcaucuga

SEQ ID NO: 76461 - RNA, 1701 nt, Artificial Sequence; identical to SEQ ID NO: 76451
  derived and/or modified CDS sequence (opt1) from hemagglutinin__InfluenzaA__AIC73808

SEQ ID NO: 76462 - RNA, 1701 nt, Artificial Sequence
  derived and/or modified CDS sequence (opt1) from hemagglutinin__InfluenzaA__AIC73809
augaaggccauccuggugguccuccuguacaccuucgccaccgcgaacgccgacacgcugugcaucggcuaccacgccaacaacagcaccgacaccguggacaccgugcucgagaagaacgucacggugacccacuccgugaaccugcuggaggacaagcacaacgggaagcucugcaagcugcgcggcgucgcgccccugcaccucgggaagugcaacaucgccggcuggauccuggggaacccggagugcgagagccuguccaccgccagcuccuggagcuacaucguggagaccuccagcuccgacaacggcacgugcuaccccggcgacuucaucaacuacgaggagcuccgggagcagcugagcuccgugagcuccuucgagcgcuucgagaucuuccccaagaccagcuccuggcccaaccacgacagcaacaagggggucaccgccgccugcccgcacgccggcgcgaaguccuucuacaagaaccugaucuggcucgugaagaaggggaacagcuaccccaagcugcggcaguccuacaucaacgacaagggcaaggaggugcugguccucugggggauccaccaccccagcaccacgaccgaccagcagagccuguaccagaacgccgacgccuacguguucgugggcaccucccgcuacagcaagaaguucaagcccgagaucgccauccggccgaagguccgcgaccaggagggccggaugaacuacuacuggacccugguggagcccggggacaagaucacguucgaggccaccggcaaccucguggucccccgcuacgcguucaccauggagcggaacgccggguccggcaucaucaucagcgacacccccgugcacgacugcaacacgaccugccagaccccggagggcgccaucaacaccucccugcccuuccagaacauccaccccaucacgaucgggaagugccccaaguacgucaagagcaccaagcugcgccucgccaccggccugcggaacgugccguccauccagagccgcgggcuguucggcgccaucgcgggguucaucgagggcggcuggaccgggaugguggacggcugguacggguaccaccaccagaacgagcagggcuccggguacgccgccgaccucaagagcacgcagaacgccaucgacaagaucaccaacaaggugaacuccgucaucgagaagaugaacacccaguucaccgccgugggcaaggaguucaaccaccuggagaagcggaucgagaaccugaacaagaaggucgacgacggcuuccucgacaucuggacguacaacgcggagcugcuggugcuccuggagaacgagcgcacccuggacuaccacgacagcaacgugaagaaccucuacgagaagguccggaaccagcugaagaacaacgccaaggagaucgggaacggcugcuucgaguucuaccacaagugcgacaacacgugcauggaguccgugaagaacgggaccuacgacuaccccaaguacagcgaggaggccaagcugaaccgcgagaagaucgacgaggugaagcucgaguccacccggaucuaccagauccuggccaucuacagcaccgucgccuccagccuggugcucguggucucccugggcgcgaucagcuucuggaugugcagcaacgggucccugcagugccgcaucugcaucuga

SEQ ID NO: 76463 - RNA, 1701 nt, Artificial Sequence
  derived and/or modified CDS sequence (opt1) from hemagglutinin__InfluenzaA__AIC73810
augaaggccauccuggugguccuccuguacaccuucgccaccgcgaacgccgacacgcugugcaucggcuaccacgccaacaacagcaccgacaccguggacaccgugcucgagaagaacgucacggugacccacuccgugaaccugcuggaggacaagcacaacgggaagcucugcaagcugcgcggcgucgcgccccugcaccucgggaagugcaacaucgccggcuggauccuggggaacccggagugcgagagccuguccaccgccagcuccuggagcuacaucguggagaccuccagcuccgacaacggcacgugcuaccccggcgacuucaucaacuacgaggagcuccgggagcagcugagcuccgugagcuccuucgagcgcuucgagaucuuccccaagaccagcuccuggcccaaccacgacagcaacaagggggucaccgccgccugcccgcacgccggcgcgaaguccuucuacaagaaccugaucuggcucgugaagaaggggaacagcuaccccaagcugucccagagcuacaucaacgacaagggcaaggaggugcugguccucugggggauccaccaccccagcaccacggccgaccagcagucccuguaccagaacgccgacgccuacguguucgugggcaccagccgguacuccaagaaguucaagcccgagaucgccauccgcccgaagguccgggaccaggagggccgcaugaacuacuacuggacccugguggagcccggggacaagaucaccuucgaggcgacgggcaaccucguggucccccgguacgccuucaccauggagcgcaacgccgggagcggcaucaucaucuccgacacccccgugcacgacugcaacaccacgugccagaccccggagggcgccaucaacaccagccugcccuuccagaacauccaccccaucaccaucgggaagugccccaaguacgugaaguccacgaagcugcggcucgccaccggccugcgcaacgucccgagcauccagucccgggggcuguucggcgcgaucgccggguucaucgagggcggcuggaccgggaugguggacggcugguacggguaccaccaccagaacgagcagggcagcggguacgccgccgaccucaaguccacccagaacgccaucgacaagaucacgaacaaggugaacagcgucaucgagaagaugaacacccaguucaccgcggugggcaaggaguucaaccaccuggagaagcgcaucgagaaccugaacaagaaggucgacgacggcuuccucgacaucuggaccuacaacgccgagcugcuggugcuccuggagaacgagcggacgcuggacuaccacgacuccaacgugaagaaccucuacgagaagguccgcaaccagcugaagaacaacgccaaggagaucgggaacggcugcuucgaguucuaccaccggugcgacaacacgugcauggagagcgugaagaacgggaccuacgacuaccccaaguacuccgaggaggccaagcugaaccgcgagaagaucgacggcgugaagcucgagagcacccggaucuaccagauccuggccaucuacuccaccgucgcgagcucccuggugcucguggucagccugggggccaucagcuucuggaugugcuccaacggcagccugcagugccgcaucugcaucuga

SEQ ID NO: 76464 - RNA, 1701 nt, Artificial Sequence
  derived and/or modified CDS sequence (opt1) from hemagglutinin__InfluenzaA__AIC73813
augaaggccauccuggugguccuccuguacaccuucgccaccgcgaacgccgacacgcugugcaucggcuaccacgccaacaacagcaccgacaccguggacaccgugcucgagaagaacgucacggugacccacuccgugaaccugcuggaggacaagcacaacgggaagcucugcaagcugcgcggcgucgcgccccugcaccucgggaagugcaacaucgccggcuggauccuggggaacccggagugcgagagccuguccaccgccagcuccuggagcuacaucguggagaccuccagcuccgacaacggcacgugcuaccccggcgacuucaucaacuacgaggagcuccgggagcagcugagcuccgugagcuccuucgagcgcuucgagaucuuccccaagaccagcuccuggcccaaccacgacagcaacaagggggucaccgccgccugcccgcacgccggcgcgaaguccuucuacaagaaccugaucuggcucgugaagaaggggaacagcuaccccaagcugucccagagcuacaucaacgacaagggcaaggaggugcugguccucugggggauccaccaccccagcaccacggccgaccagcagucccuguaccagaacgccgacgccuacguguucgugggcaccagccgguacuccaagaaguucaagcccgagaucgccauccgcccgaagguccgggaccaggagggccgcaugaacuacuacuggacccugguggagcccggggacaagaucaccuucgaggcgacgggcaaccucguggucccccgguacgccuucaccauggagcgcaacgccgggagcggcaucaucaucuccgacacccccgugcacgacugcaacaccacgugccagaccccggagggcgccaucaacaccagccugcccuuccagaacauccaccccaucaccaucgggaagugccccaaguacgugaaguccacgaagcugcggcucgccaccggccugcgcaacgucccgagcauccagucccgggggcuguucggcgcgaucgccggguucaucgagggcggcuggaccgggaugguggacggcugguacggguaccaccaccagaacgagcagggcagcggguacgccgccgaccucaaguccacccagaacgccaucgacaagaucacgaacaaggugaacagcgucaucgagaagaugaacacccaguucaccgcggugggcaaggaguucaaccaccuggagaagcgcaucgagaaccugaacaagaaggucgacgacggcuuccucgacaucuggaccuacaacgccgagcugcuggugcuccuggagaacgagcggacgcuggacuaccacgacuccaacgugaagaaccucuacgagaagguccgcaaccagcugaagaacaacgccaaggagaucgggaacggcugcuucgaguucuaccacaagugcgacaacacgugcauggagagcgugaagaacgggaccuacgacuaccccaaguacuccgaggaggccaagcugaaccgggagaagaucgacggcgugaagcucgagagcacccgcaucuaccagauccuggccaucuacuccaccgcggccagcucccugguccucgugaucagccugggggccaucagcuucuggaugugcuccaacggcagccugcagugccggaucugcaucuga

SEQ ID NO: 76465 - RNA, 1701 nt, Artificial Sequence
  derived and/or modified CDS sequence (opt1) from hemagglutinin__InfluenzaA__AIC73815
augaagaccaucaucgcccugagcuacauccucugccugguguucgcccagaagauccccggcaacgacaacuccaccgcgacgcugugccucgggcaccacgccgucccgaacggcaccaucgugaagaccaucaccaacgaccgcaucgaggugacgaacgccaccgagcugguccagaacagcuccaucggggagaucugcgacagcccccaccagauccuggacggcgagaacugcacccucaucgacgcccugcugggggacccccagugcgacggcuuccagaacaagaagugggaccucuucguggagcgguccaaggccuacagcaacugcuaccccuacgacgugccggacuacgcgucccugcgcagccuggucgccuccagcggcacccucgaguucaacaacgaguccuucaacuggacgggggugacccagaacggcaccagcuccgccugcauccggcgcagcuccagcuccuucuucagccggcugaacuggcugacccaccucaacuacacguaccccgcccugaacgugaccaugcccaacaacgagcaguucgacaagcuguacaucuggggcguccaccaccccgggaccgacaaggaccagaucuuccucuacgcgcaguccagcgggcgcaucaccgugagcacgaagcggucccagcaggccgugaucccgaacaucggcagccgcccccggauccgcgacauccccucccggaucagcaucuacuggaccaucgucaagcccggcgacauccugcugaucaacuccaccgggaaccucaucgccccgcgcggcuacuucaagauccggagcgggaaguccagcaucaugcgcuccgacgcccccaucggcaagugcaagagcgagugcaucacccccaacggcuccauccccaacgacaagccguuccagaacgugaaccggaucacguacggggccugcccccgcuacgugaagcacagcacccugaagcuggcgaccggcaugcggaacguccccgagaagcagacccgcgggaucuucggcgccaucgccggguucaucgagaacggcugggagggcaugguggacgggugguacggcuuccggcaccagaacuccgaggggcgcggccaggccgccgaccucaagagcacgcaggcggccaucgaccagaucaacgggaagcugaaccggcugaucggcaagaccaacgagaaguuccaccagaucgagaaggaguucuccgagguggagggccgcauccaggaccucgagaaguacgucgaggacaccaagaucgaccuguggagcuacaacgccgagcugcucguggcccuggagaaccagcacaccaucgaccugacggacuccgagaugaacaagcuguucgagaagaccaagaagcagcuccgcgagaacgccgaggacauggggaacggcugcuucaagaucuaccacaagugcgacaacgcgugcaucgggagcauccggaacggcaccuacgaccacaacguguaccgcgacgaggcccugaacaaccgguuccagaucaagggggucgagcucaaguccggcuacaaggacuggauccuguggaucagcuucgccaucagcugcuuccugcucugcguggcccugcugggcuucaucaugugggccugccagaaggggaacauccgcugcaacaucugcaucuga

SEQ ID NO: 76466 - RNA, 1701 nt, Artificial Sequence; identical to SEQ ID NO: 75944
  derived and/or modified CDS sequence (opt1) from hemagglutinin__InfluenzaA__AIC73817

SEQ ID NO: 76467 - RNA, 1701 nt, Artificial Sequence; identical to SEQ ID NO: 74064
  derived and/or modified CDS sequence (opt1) from hemagglutinin__InfluenzaA__AIC73819

SEQ ID NO: 76468 - RNA, 1701 nt, Artificial Sequence
  derived and/or modified CDS sequence (opt1) from hemagglutinin__InfluenzaA__AIC73820
augaagaccaucaucgcccugagcuacauccucugccugguguucgcccagaagauccccggcaacgacaacuccaccgcgacgcugugccucgggcaccacgccgucccgaacggcaccaucgugaagaccaucaccaacgaccgcaucgaggugacgaacgccaccgagcugguccagaacagcuccaucggggagaucugcgacagcccccaccagauccuggacggcgagaacugcacccucaucgacgcccugcugggggacccccagugcgacggcuuccagaacaagaagugggaccucuucguggagcgguccaaggccuacagcaacugcuaccccuacgacgugccggacuacgcgucccugcgcagccuggucgccuccagcggcacccucgaguucaacaacgaguccuucaacuggacgggggugacccagaacggcaccagcuccgccugcauccggcgcagcuccagcuccuucuucagccggcugaacuggcugacccaccucaacuacacguaccccgcccugaacgugaccaugcccaacaacgagcaguucgacaagcuguacaucuggggcguccaccaccccgggaccgacaaggaccagaucuuccucuacgcgcaguccagcgggcgcaucaccgugagcacgaagcggucccagcaggccgugaucccgaacaucggcagccgcccccggauccgcgacauccccucccggaucagcaucuacuggaccaucgucaagcccggcgacauccugcugaucaacuccaccgggaaccucaucgccccgcgcggcuacuucaagauccggagcgggaaguccagcaucaugcgcuccgacgcccccaucggcaagugcaagagcgagugcaucacccccaacggcuccauccccaacgacaagccguuccagaacgugaaccggaucacguacggggccugcccccgcuacgugaagcacagcacccugaagcuggcgaccggcaugcggaacguccccgagaagcagacccgcgggaucuucggcgccaucgccggguucaucgagaacggcugggagggcaugguggacgggugguacggcuuccggcaccagaacuccgaggggcgcggccaggccgccgaccucaagagcacgcaggcggccaucgaccagaucaacgggaagcugaaccggcugaucggcaagaccaacgagaaguuccaccagaucgagaaggaguucuccgagguggagggccgcauccaggaccucgagaaguacaucgaggacaccaagaucgaccuguggagcuacaacgccgagcugcucgucgcccuggagaaccagcacaccaucgaccugacggacuccgagaugaacaagcuguucgagaagaccaagaagcagcuccgcgagaacgccgaggacauggggaacggcugcuucaagaucuaccacaagugcgacaacgcgugcaucgggagcauccggaacggcaccuacgaccacaacguguaccgcgacgaggcccugaacaaccgguuccagaucaaggggguggagcucaaguccggcuacaaggacuggauccuguggaucagcuucgccaucagcugcuuccugcucugcgucgcccugcugggcuucaucaugugggccugccagaaggggaacauccgcugcaacaucugcaucuga

SEQ ID NO: 76469 - RNA, 1701 nt, Artificial Sequence; identical to SEQ ID NO: 74064
  derived and/or modified CDS sequence (opt1) from hemagglutinin__InfluenzaA__AIC73821

SEQ ID NO: 76470 - RNA, 1701 nt, Artificial Sequence; identical to SEQ ID NO: 76428
  derived and/or modified CDS sequence (opt1) from hemagglutinin__InfluenzaA__AIC73824

SEQ ID NO: 76471 - RNA, 1701 nt, Artificial Sequence; identical to SEQ ID NO: 74064
  derived and/or modified CDS sequence (opt1) from hemagglutinin__InfluenzaA__AIC73825

SEQ ID NO: 76472 - RNA, 1701 nt, Artificial Sequence
  derived and/or modified CDS sequence (opt1) from hemagglutinin__InfluenzaA__AIC73827
augaaggccauccuggugguccuccuguacaccuucgccaccgcgaacgccgacacgcugugcaucggcuaccacgccaacaacagcaccgacaccguggacaccgugcucgagaagaacgucacggugacccacuccgugaaccugcuggaggacaagcacaacgggaagcucugcaagcugcgcggcgucgcgccccugcaccucgggaagugcaacaucgccggcuggauccuggggaacccggagugcgagccccugagcaccgcguccagcugguccuacaucguggagaccagcuccagcgacaacggcacgugcuaccccggcgacuucaucaacuacgaggagcuccgggagcagcuguccagcguguccagcuucgagcgcuucgagaucuuccccaagaccuccagcuggccgaaccacgacuccaacaagggggucaccgccgccugcccccacgccggcgccaagagcuucuacaagaaccugaucuggcucgugaagaaggggaacuccuaccccaagcugagccaguccuacaucaacgacaagggcaaggaggugcugguccucugggggauccaccaccccagcaccacggccgaccagcagagccuguaccagaacgccgacgccuacguguucgugggcaccucccgguacagcaagaaguucaagccggagaucgccauccgccccaagguccgggaccaggagggccgcaugaacuacuacuggacccugguggagcccggggacaagaucaccuucgaggcgacgggcaaccucguggucccccgguacgccuucaccauggagcgcaacgccggguccggcaucaucaucagcgacaccccggugcacgacugcaacaccacgugccagacccccgagggcgccaucaacaccucccugcccuuccagaacauccaccccaucaccaucgggaagugcccgaaguacgucaagagcacgaagcugcggcucgccaccggccugcgcaacgugcccuccauccagagccgggggcuguucggcgcgaucgccggguucaucgagggcggcuggaccgggaugguggacggcugguacggguaccaccaccagaacgagcagggcuccggguacgccgccgaccucaagagcacccagaacgccaucgacaagaucacgaacaaggugaacuccgucaucgagaagaugaacacccaguucaccgcggugggcaaggaguucaaccaccuggagaagcgcaucgagaaccugaacaagaaggucgacgacggcuuccucgacaucuggaccuacaacgccgagcugcuggugcuccuggagaacgagcggacgcuggacuaccacgacagcaacgugaagaaccucuacgagaagguccgcaaccagcugaagaacaacgccaaggagaucgggaacggcugcuucgaguucuaccacaagugcgacaacacgugcauggaguccgugaagaacgggaccuacgacuaccccaaguacagcgaggaggccaagcugaaccgggagaagaucgacggcgugaagcucgaguccacccgcaucuaccagauccuggccaucuacagcaccgucgcguccagccugauccucguggugucccugggggccaucagcuucuggaugugcagcaacggcucccugcagugccggaucugcaucuga

SEQ ID NO: 76473 - RNA, 1701 nt, Artificial Sequence
  derived and/or modified CDS sequence (opt1) from hemagglutinin__InfluenzaA__AIC73828
augaaggccauccuggugguccuccuguacaccuucgccaccgcgaacgccgacacgcugugcaucggcuaccacgccaacaacagcaccgacaccguggacaccgugcucgagaagaacgucacggugacccacuccgugaaccugcuggaggacaagcacaacgggaagcucugcaagcugcgcggcgucgcgccccugcaccucgggaagugcaacaucgccggcuggauccuggggaacccggagugcgagagccuguccaccgccagcuccuggagcuacaucguggagaccuccagcuccgacaacggcacgugcuaccccggcgacuucaucaacuacgaggagcuccgggagcagcugagcuccgugagcuccuucgagcgcuucgagaucuuccccaagaccagcuccuggcccaaccacgacagcaacaagggggucaccgccgccugcccgcacgccggcgcgaaguccuucuacaagaaccugaucuggcucgugaagaaggggaacagcuaccccaagcugucccagagcuacaucaacgacaagggcaaggaggugcugguccucugggggauccaccaccccagcaccacggccgaccagcagucccuguaccagaacgccgacgccuacguguucgugggcaccagccgguacuccaagaaguucaagcccgagaucgccauccgcccgaagguccgggaccaggagggccgcaugaacuacuacuggacccugguggagcccggggacaagaucaccuucgaggcgacgggcaaccucguggucccccgguacgccuucaccauggagcgcaacgccgggagcggcaucaucaucuccgacacccccgugcacgacugcaacaccacgugccagaccccggagggcgccaucaacaccagccugcccuuccagaacauccaccccaucaccaucgggaagugccccaaguacgugaaguccacgaagcugcggcucgccaccggccugcgcaacgucccgagcauccagucccgggggcuguucggcgcgaucgccggguucaucgagggcggcuggaccgggaugguggacggcugguacggguaccaccaccagaacgagcagggcagcggguacgccgccgaccucaaguccacccagaacgccaucgacaagaucacgaacaaggugaacagcgucaucgagaagaugaacacccaguucaccgcggugggcaaggaguucaaccaccuggagaagcgcaucgagaaccugaacaagaaggucgacgacggcuuccucgacaucuggaccuacaacgccgagcugcuggugcuccuggagaacgagcggacgcuggacuaccacgacuccaacgugaagaaccucuacgagaagguccgcaaccagcugaagaccaacgccaaggagaucgggaacggcugcuucgaguucuaccacaagugcgacaacacgugcauggagagcgugaagaacgggaccuacgacuaccccaaguacuccgaggaggccaagcugaaccgggagaagaucgacggcgugaagcucgagagcacccgcaucuaccagauccuggccaucuacuccaccgcggccagcucccugguccucguggugagccugggggccaucagcuucuggaugugcuccaacggcagccugcagugccggaucugcaucuga

SEQ ID NO: 76474 - RNA, 1701 nt, Artificial Sequence
  derived and/or modified CDS sequence (opt1) from hemagglutinin__InfluenzaA__AIC73830
augaaggccauccuggugguccuccuguacaccuucgccaccgcgaacgccgacacgcugugcaucggcuaccacgccaacaacagcaccgacaccguggacaccgugcucgagaagaacgucacggugacccacuccgugaaccugcuggaggacaagcacaacgggaagcucugcaagcugaagggcgucgcgccccugcaccucgggaagugcaacaucgccggcuggauccuggggaacccggagugcgagagccuguccaccgccagcuccuggagcuacaucguggagaccuccagcuccgacaacggcacgugcuaccccggcgacuucaucaacuacgaggagcuccgcgagcagcugagcuccgugagcuccuucgagcgguucgagaucuuccccaagaccagcuccuggcccaaccacgacagcaacaagggggucaccgccgccugcccgcacgccggcgcgaaguccuucuacaagaaccugaucuggcucgugaagaaggggaacagcuaccccaagcugucccagagcuacaucaacgacaagggcaaggaggugcugguccucugggggauccaccaccccagcaccacggccgaccagcagucccuguaccagaacgccgacgccuacguguucgugggcaccagccgcuacuccaagaaguucaagcccgagaucgccauccggccgaagguccgcgaccaggagggccggaugaacuacuacuggacccugguggagcccggggacaagaucaccuucgaggcgacgggcaaccucguggucccccgcuacgccuucaccauggagcggaacgccgggagcggcaucaucaucuccgacacccccgugcacgacugcaacaccacgugccagaccccggagggcgccaucaacaccagccugcccuuccagaacauccaccccaucaccaucgggaagugccccaaguacgugaaguccacgaagcugcgccucgccaccggccugcggaacgucccgagcauccagucccgcgggcuguucggcgcgaucgccggguucaucgagggcggcuggaccgggaugguggacggcugguacggguaccaccaccagaacgagcagggcagcggguacgccgccgaccucaaguccacccagaacgccaucgacaagaucacgaacaaggugaacagcgucaucgagaagaugaacacccaguucaccgcggugggcaaggaguucaaccaccuggagaagcggaucgagaaccugaacaagaaggucgacgacggcuuccucgacaucuggaccuacaacgccgagcugcuggugcuccuggagaacgagcgcacgcuggacuaccacgacuccaacgugaagaaccucuacgagaagguccggaaccagcugaagaacaacgccaaggagaucgggaacggcugcuucgaguucuaccacaagugcgacaacacgugcauggagagcgugaagaacgggaccuacgacuaccccaaguacuccgaggaggccaagcugaaccgcgagaagaucgacggcgugaagcucgagagcacccggaucuaccagauccuggccaucuacuccaccgucgcgagcucccuggugcucguggucagccugggggccaucagcuucuggaugugcuccaacggcagccugcagugccgcaucugcaucuga

SEQ ID NO: 76475 - RNA, 1701 nt, Artificial Sequence
  derived and/or modified CDS sequence (opt1) from hemagglutinin__InfluenzaA__AIC73833
augaaggccauccuggugguccuccuguacaccuucgccaccgcgaacgccgacacgcugugcaucggcuaccacgccaacaacagcaccgacaccguggacaccgugcucgagaagaacgucacggugacccacuccgugaaccugcuggaggacaagcacaacgggaagcucugcaagcugcgcggcgucgcgccccugcaccucgggaagugcaacaucgccggcuggauccuggggaacccggagugcgagagccuguccaccgccagcuccuggagcuacaucguggagaccuccagcuccgacaacggcacgugcuaccccggcgacuucaucaacuacgaggagcuccgggagcagcugagcuccgugagcuccuucgagcgcuucgagaucuuccccaagaccagcuccuggcccaaccacgacagcaacaagggggucaccgccgccugcccgcacgccggcgcgaaguccuucuacaagaaccugaucuggcucgugaagaaggggaacagcuaccccaagcugucccagagcuacaucaacgacaagggcaaggaggugcugguccucugggggauccaccaccccagcaccacggccgaccagcagucccuguaccagaacgccgacgccuacguguucgugggcaccagccgguacuccaagaaguucaagcccgagaucgccauccgcccgaagguccgggaccaggagggccgcaugaacuacuacuggacccugguggagcccggggacaagaucaccuucgaggcgacgggcaaccucguggucccccgguacgccuucaccauggagcgcaacgccgggagcggcaucaucaucuccgacacccccgugcacgacugcaacaccacgugccagaccccggagggcgccaucaacaccagccugcccuuccagaacauccaccccaucaccaucgggaagugccccaaguacgugaaguccacgaagcugcggcucgccaccggccugcgcaacgucccgagcauccagucccgggggcuguucggcgcgaucgccggguucaucgagggcggcuggaccgggaugguggacggcugguacggguaccaccaccagaacgagcagggcagcggguacgccgccgaccucaaguccacccagaacgccaucgacaagaucacgaacaaggugaacagcgucaucgagaagaugaacacccaguucaccgcggugggcaaggaguucaaccaccuggagaagcgcaucgagaaccugaacaagaaggucgacgacggcuuccucgacaucuggaccuacaacgccgagcugcuggugcuccuggagaacgagcggacgcuggacuaccacgacuccaacgugaagaaccucuacgagaagguccgcaaccagcugaagaacaacgccaaggagaucgggaacggcugcuucgaguucuaccacaagugcgacaacacgugcauggagagcgugaagaacgggaccuacgacuaccccaaguacuccgaggaggccaagcugaaccgggagaagaucgacggcgugaagcucgagagcacccgcaucuaccagauccuggccaucuacuccaccgcggccagcucccugguccucguggugagccugggggccaucagcuucuggaugugcuccaacggcagccugcagugccggaucugcaucuga

SEQ ID NO: 76476 - RNA, 1701 nt, Artificial Sequence
  derived and/or modified CDS sequence (opt1) from hemagglutinin__InfluenzaA__AIC73834
augaaggccauccuggugguccuccuguacaccuucgccaccgcgaacgccgacacgcugugcaucggcuaccacgccaacaacagcaccgacaccguggacaccgugcucgagaagaacgucacggugacccacuccgugaaccugcuggaggacaagcacaacgggaagcucugcaagcugcgcggcgucgcgccccugcaccucgggaagugcaacaucgccggcuggauccuggggaacccggagugcgagagccuguccaccgccagcuccuggagcuacaucguggagaccuccagcuccgacaacggcacgugcuaccccggcgacuucaucaacuacgaggagcuccgggagcagcugagcuccgugagcuccuucgagcgcuucgagaucuuccccaagaccagcuccuggcccaaccacgacagcaacaagggggucaccgccgccugcccgcacgacggcgccaaguccuucuacaagaaccugaucuggcucgugaagaaggggaacagcuaccccaagcugucccagagcuacaucaacgacaagggcaaggaggugcugguccucugggggauccaccaccccagcaccacggcgggccagcagucccuguaccagaacgccgacgccuacguguucgugggcaccagccgguacuccaagaaguucaagcccgagaucgccauccgcccgaagguccgggaccaggaggggcgcaugaacuacuacuggacccugguggagcccggcgacaagaucaccuucgaggccacggggaaccucguggucccccgguacgcguucaccauggagcgcaacgccggcagcggcaucaucaucuccgacacccccgugcacgacugcaacaccacgugccagaccccggagggggccaucaacaccagccugcccuuccagaacauccaccccaucaccaucggcaagugccccaaguacgugaaguccacgaagcugcggcucgccaccgggcugcgcaacgucccgagcauccagucccggggccuguucggggccaucgcgggcuucaucgagggcggguggaccggcaugguggacgggugguacggcuaccaccaccagaacgagcaggggagcggcuacgccgccgaccucaaguccacccagaacgccaucgacaagaucacgaacaaggugaacagcgucaucgagaagaugaacacccaguucaccgccgugggcaaggaguucaaccaccuggagaagcgcaucgagaaccugaacaagaaggucgacgacggguuccucgacaucuggaccuacaacgcggagcugcuggugcuccuggagaacgagcggacgcuggacuaccacgacuccaacgugaagaaccucuacgagaagguccgcaaccagcugaagaacaacgccaaggagaucggcaacgggugcuucgaguucuaccacaagugcgacaacacgugcauggagagcgugaagaacggcaccuacgacuaccccaaguacuccgaggaggccaagcugaaccgggagaagaucgacggggugaagcucgagagcacccgcaucuaccagauccuggccaucuacuccaccgucgccagcucccuggugcucguggucagccugggcgcgaucagcuucuggaugugcuccaacggcagccugcagugccggaucugcaucuga

SEQ ID NO: 76477 - RNA, 1701 nt, Artificial Sequence
  derived and/or modified CDS sequence (opt1) from hemagglutinin__InfluenzaA__AIC73835
augaaggccauccuggugguccuccuguacaccuucgccaccgcgaacgccgacacgcugugcaucggcuaccacgccaacaacagcaccgacaccguggacaccgugcucgagaagaacgucacggugacccacuccgugaaccugcuggaggacaagcacaacgggaagcucugcaagcugcgcggcgucgcgccccugcaccucgggaagugcaacaucgccggcuggauccuggggaacccggagugcgagagccuguccaccgccagcuccuggagcuacaucguggagaccuccagcuccgacaacggcacgugcuaccccggcgacuucaucaacuacgaggagcuccgggagcagcugagcuccgugagcuccuucgagcgcuucgagaucuuccccaagaccagcuccuggcccaaccacgacagcaacaagggggucaccgccgccugcccgcacgccggcgcgaaguccuucuacaagaaccugaucuggcucgugaagaaggggaacagcuaccccaagcugucccagagcuacaucaacgacaagggcaaggaggugcugguccucugggggauccaccaccccagcaccacggccgaccagcagucccuguaccagaacgccgacgccuacguguucgugggcaccagccgguacuccaagaaguucaagcccgagaucgccauccgcccgaagguccgggaccaggagggccgcaugaacuacuacuggacccugaucgagcccggggacaagaucaccuucgaggcgacgggcaaccucguggugccccgguacgccuucaccauggagcgcaacgccgggagcggcaucaucaucuccgacacccccguccacgacugcaacaccacgugccagaccccggagggcgccaucaacaccagccugcccuuccagaacauccaccccaucaccaucgggaagugccccaaguacgugaaguccacgaagcugcggcucgccaccggccugcgcaacgugccgagcauccagucccgggggcuguucggcgcgaucgccggguucaucgagggcggcuggaccgggauggucgacggcugguacggguaccaccaccagaacgagcagggcagcggguacgccgccgaccucaaguccacccagaacgccaucgacaagaucacgaacaaggugaacagcgugaucgagaagaugaacacccaguucaccgcggucggcaaggaguucaaccaccuggagaagcgcaucgagaaccugaacaagaagguggacgacggcuuccucgacaucuggaccuacaacgccgagcugcugguccuccuggagaacgagcggacgcuggacuaccacgacuccaacgugaagaaccucuacgagaaggugcgcaaccagcugaagaacaacgccaaggagaucgggaacggcugcuucgaguucuaccacaagugcgacaacacgugcauggagagcgucaagaacgggaccuacgacuaccccaaguacuccgaggaggccaagcugaaccgggagaagaucgacggcgugaagcucgagagcacccgcaucuaccagauccuggccaucuacuccaccguggcgagcucccugguccucguggugagccugggggccaucagccuguggaugugcuccaacggcagccuccagugccggaucugcaucuga

SEQ ID NO: 76478 - RNA, 1701 nt, Artificial Sequence; identical to SEQ ID NO: 76420
  derived and/or modified CDS sequence (opt1) from hemagglutinin__InfluenzaA__AIC73836

SEQ ID NO: 76479 - RNA, 1701 nt, Artificial Sequence
  derived and/or modified CDS sequence (opt1) from hemagglutinin__InfluenzaA__AIC73837
augaagaccaucaucgcccugagcuacauccucugccugguguucgcccagaagcugcccggcaacgacaacuccaccgcgacgcucugccuggggcaccacgccgucccgaacggcaccaucgugaagaccaucaccaacgaccgcaucgaggugacgaacgccaccgagcugguccagaacagcuccaucggggagaucugcgacagcccccaccagauccucgacggcgagaacugcacccugaucgacgcccugcucggggacccccagugcgacggcuuccagaacaagaagugggaccuguucguggagcgguccaaggccuacagcaacugcuaccccuacgacgugccggacuacgcgucccugcgcagccucgucgccuccagcggcacccuggaguucaacaacgaguccuucaacugggccggggugacgcagaacggcaccagcuccgccugcauccgggggagcaacuccagcuucuucucccgccugaacuggcucacccaccugaacuucaaguaccccgcgcugaacgugaccaugcccaacaacgagcaguucgacaagcucuacaucuggggcguccaccaccccgggacggacaaggaccagaucuuccuguacgcccagagcuccggccggaucaccgugagcaccaagcgcagccagcaggccgugaucccgaacaucggcucccggccccgcauccggaacauccccagccgcaucuccaucuacuggaccaucgucaagcccggggacauccugcucaucaacagcacgggcaaccugaucgccccgcggggguacuucaagauccgcuccggcaagagcuccaucaugcggagcgacgcccccaucggcaagugcaaguccgagugcaucacccccaacgggagcauccccaacgacaagccguuccagaacgugaaccgcaucaccuacggcgcgugcccccgguacgugaagcaguccacccugaagcucgccacggggaugcgcaacguccccgagaagcagacccggggcaucuucggggccaucgccggcuucaucgagaacggcugggaggggaugaaggacggcugguacggguuccgccaccagaacagcgagggccgggggcaggccgcggaccugaaguccacccaggccgccaucgaccagaucaacggcaagcugaaccgccucaucggcaagaccaacgagaaguuccaccagaucgagaaggaguucagcgagguggaggggcggauccaggaccuggagaaguacguggaggacacgaagaucgaccugugguccuacaacgccgagcuccuggucgcccuggagaaccagcacaccaucgaccucaccgacagcgagaugaacaagcuguucgagaagaccaagaagcagcugcgcgagaacgcggaggacaugggcaacgggugcuucaagaucuaccacaagugcgacaacgccugcaucggcuccauccgcaacgggacguacgaccacgacguguaccgggacgaggcccucaacaaccgcuuccagaucaagggcguggagcucaagagcggcuacaaggacuggauccuguggaucuccuucgccaucagcugcuuccugcugugcgucgcccugcucggguucaucaugugggcgugccagaagggcaacauccggugcaacaucugcaucuga

SEQ ID NO: 76480 - RNA, 1701 nt, Artificial Sequence
  derived and/or modified CDS sequence (opt1) from hemagglutinin__InfluenzaA__AIC73838
augaagaccaucaucgcccugagcuacauccucugccugguguucgcccagaagcugcccggcaacgacaacuccaccgcgacgcucugccuggggcaccacgccgucccgaacggcaccaucgugaagaccaucaccaacgaccgcaucgaggugacgaacgccaccgagcugguccagaacagcuccaucggggagaucugcaacagcccccaccagauccucgacggcgagaacugcacccugaucgacgcccugcucggggacccccagugcgacggcuuccagaacaagaagugggaccuguucguggagcgguccaaggccuacagcaacugcuaccccuacgacgugccggacuacgcgucccugcgcagccucgucgccuccagcggcacccuggaguucaacaacgaguccuucaacugggccggggugacgcagaacggcaccagcuccgccugcauccgggggagcaacuccagcuucuucucccgccugaacuggcucacccacagcaacuucaaguaccccgcgcugaacgugaccaugcccaacaacgagcaguucgacaagcuguacaucuggggcguccaccaccccgggacggacaaggaccagaucuuccucuacgcccaguccagcggccggaucaccgugagcaccaagcgcucccagcaggccgugaucccgaacaucggcagccggccccgcauccggaacauccccucccgcaucagcaucuacuggaccaucgucaagcccggggacauccugcugaucaacuccacgggcaaccucaucgccccgcggggguacuucaagauccgcagcggcaaguccagcaucaugcgguccgacgcccccaucggcaagugcaagagcgagugcaucacccccaacggguccauccccaacgacaagccguuccagaacgugaaccgcaucaccuacggcgcgugcccccgguacgugaagcagagcacccugaagcuggccacggggaugcgcaacguccccgagaagcagacccggggcaucuucggggccaucgccggcuucaucgagaacggcugggaggggaugauggacggcugguacggguuccgccaccagaacuccgagggccgggggcaggccgcggaccucaagagcacccaggccgccaucgaccagaucaacggcaagcugaaccgccugaucggcaagaccaacgagaaguuccaccagaucgagaaggaguucuccgagguggaggggcggauccaggaccucgagaaguacguggaggacacgaagaucgaccuguggagcuacaacgccgagcugcucgucgcccuggagaaccagcacaccaucgaccugaccgacuccgagaugaacaagcuguucgagaagaccaagaagcagcuccgcgagaacgcggaggaccugggcaacgggugcuucaagaucuaccacaagugcgacaacgccugcaucggcagcauccgcaacgggacguacgaccacgacguguaccgggacgaggcccucaacaaccgcuuccagaucaagggcguggagcugaaguccggcuacaaggacuggauccuguggaucagcuucgccaucagcugcuuccuccugugcgucgcccugcucggguucaucaugugggcgugccagaagggcaacauccggugcaacaucugcaucuga

SEQ ID NO: 76481 - RNA, 1701 nt, Artificial Sequence
  derived and/or modified CDS sequence (opt1) from hemagglutinin__InfluenzaA__AIC73839
augaaggccauccuggugguccuccuguacaccuucgccaccgcgaacgccgacacgcugugcaucggcuaccacgccaacaacagcaccgacaccguggacaccgugcucgagaagaacgucacggugacccacuccgugaaccugcuggaggacaagcacaacgggaagcucugcaagcugcgcggcgucgcgccccugcaccucgggaagugcaacaucgccggcuggauccuggggaacccggagugcgagagccuguccaccgccagcuccuggagcuacaucguggagaccuccagcuccgacaacggcacgugcuaccccggcgacuucaucaacuacgaggagcuccgggagcagcugagcuccgugagcuccuucgagcgcuucgagaucuuccccaagaccagcuccuggcccgaccacgacagcaacaagggggucaccgccgccugcccgcacgccggcgcgaaguccuucuacaagaaccugaucuggcucgugaagaaggggaacagcuaccccaagcugucccagagcuacaucaacgacaagggcaaggaggugcugguccucugggggauccaccaccccagcaccacggccgaccagcagucccuguaccagaacgccgacgccuacguguucgugggcaccagccgguacuccaagaaguucaagcccgagaucgccauccgcccgaagguccgggaccaggagggccgcaugaacuacuacuggacccugguggagcccggggacaagaucaccuucgaggcgacgggcaaccucguggucccccgguacgccuucaccauggagcgcaacgccgggagcggcaucaucaucuccgacacccccgugcacgacugcaacaccacgugccagaccccggagggcgccaucaacaccagccugcccuuccagaacauccaccccaucaccaucgggaagugccccaaguacgugaaguccacgaagcugcggcucgccaccggccugcgcaacgucccgagcauccagucccgggggcuguucggcgcgaucgccggguucaucgagggcggcuggaccgggaugguggacggcugguacggguaccaccaccagaacgagcagggcagcggguacgccgccgaccucaaguccacccagaacgccaucgacaagaucacgaacaaggugaacagcgucaucgagaagaugaacacccaguucaccgcggugggcaaggaguucaaccaccuggagaagcgcaucgagaaccugaacaagaaggucgacgacggcuuccucgacaucuggaccuacaacgccgagcugcuggugcuccuggagaacgagcggacgcuggacuaccacgacuccaacgugaagaaccucuacgagaagguccgcaaccagcugaagaacaacgccaaggagaccgggaacggcugcuucgaguucuaccacaagugcgacaacacgugcauggagagcgugaagaacgggaccuacgacuaccccaaguacuccgaggaggccaagcugaaccgggagaagaucgacggcgugaagcucgagagcacccgcaucuaccagauccuggccaucuacuccaccgucgcgagcucccuggugcucguggucagccugggggccaucagcuucuggaugugcuccaacggcagccugcagugccggaucugcaucuga

SEQ ID NO: 76482 - RNA, 1701 nt, Artificial Sequence; identical to SEQ ID NO: 74064
  derived and/or modified CDS sequence (opt1) from hemagglutinin__InfluenzaA__AIC73840

SEQ ID NO: 76483 - RNA, 1701 nt, Artificial Sequence
  derived and/or modified CDS sequence (opt1) from hemagglutinin__InfluenzaA__AIC73841
augaaggccauccuggugguccuccuguacaccuucgccaccgcgaacgccgacacgcugugcaucggcuaccacgccaacaacagcaccgacaccguggacaccgugcucgagaagaacgucacggugacccacuccgugaaccugcuggaggacaagcacaacgggaagcucugcaagcugcgcggcgucgcgccccugcaccucgggaagugcaacaucgccggcuggauccuggggaacccggagugcgagagccuguccaccgccagcuccuggagcuacaucguggagaccuccagcuccgacaacggcacgugcuaccccggcgacuucaucaacuacgaggagcuccgggagcagcugagcuccgugagcuccuucgagcgcuucgagaucuuccccaagaccagcuccuggcccaaccacgacagcaacaagggggucaccgccgccugcccgcacgccggcgcgaaguccuucuacaagaaccugaucuggcucgugaagaaggggaacagcuaccccaagcugucccagagcuacaucaacgacaagggcaaggaggugcugguccucugggggauccaccaccccagcaccaucgccgaccagcagucccuguaccagaacgccgacgccuacguguucgugggcacgagccgguacuccaagaaguucaagcccgagaucgccauccgcccgaagguccgggaccaggagggccgcaugaacuacuacuggacccugguggagcccggggacaagaucaccuucgaggcgaccggcaaccucguggucccccgguacgccuucacgauggagcgcaacgccgggagcggcaucaucaucuccgacacccccgugcacgacugcaacacgaccugccagaccccggagggcgccaucaacaccagccugcccuuccagaacauccaccccaucaccaucgggaagugccccaaguacgugaaguccaccaagcugcggcucgccacgggccugcgcaacaucccgagcauccagucccgggggcuguucggcgcgaucgccggguucaucgagggcggcuggaccgggauggucgacggcugguacggguaccaccaccagaacgagcagggcagcggguacgccgccgaccucaaguccacccagaacgccaucgacaagaucaccaacaaggugaacagcgugaucgagaagaugaacacgcaguucaccgcggucggcaaggaguucaaccaccuggagaagcgcaucgagaaccugaacaagaagguggacgacggcuuccucgacaucuggaccuacaacgccgagcugcugguccuccuggagaacgagcggacccuggacuaccacgacuccaacgugaagaaccucuacgagaaggugcgcaaccagcugaagaacaacgccaaggagaucgggaacggcugcuucgaguucuaccacaagugcgacaacacgugcauggagagcgucaagaacgggaccuacgacuaccccaaguacuccgaggaggccaagcugaaccgggagaagaucgacggcgugaagcucgagagcacccgcaucuaccagauccuggccaucuacuccaccguggcgagcucccugguccucguggugagccugggggccaucagcuucuggaugugcuccaacggcagccugcagugccggaucugcaucuga

SEQ ID NO: 76484 - RNA, 1701 nt, Artificial Sequence; identical to SEQ ID NO: 76479
  derived and/or modified CDS sequence (opt1) from hemagglutinin__InfluenzaA__AIC73842

SEQ ID NO: 76485 - RNA, 1707 nt, Artificial Sequence
  derived and/or modified CDS sequence (opt1) from hemagglutinin__InfluenzaA__AID48082
auggagaagaucgugcugcuguucgccaucgucagccuggugaaguccgaccagaucugcaucggcuaccacgccaacaacagcaccgagcaggucgacaccaucauggagaagaacgugacggugacccacgcgcaggacauccuggagaagacccacaacgggaagcucugcgaccuggacggcgugaagccccugauccuccgcgacugcuccgucgccggguggcugcugggcaacccgaugugcgacgaguucaucaacgugcccgaguggagcuacaucguggagaaggccaaccccgucaacgaccucugcuaccccggggacuucaacgacuacgaggagcugaagcaccuccucucccggaucaaccacuucgagaagauccagaucauccccaagagcuccuggagcucccacgaggccagccugggcguguccagcgccugcccguaccagggcaaguccagcuucuuccgcaacguggucuggcugaucaagaagaacuccaccuaccccacgaucaagcggagcuacaacaacaccaaccaggaggaccuccuggugcugugggggauccaccaccccaacgacgcggccgagcagaccaagcucuaccagaacccgaccacguacaucuccgugggcaccagcacccugaaccagcgccuggucccccggaucgccacccgcuccaaggugaacgggcagagcggccggauggaguucuucuggacgauccucaagcccaacgacgccaucaacuucgagagcaacgggaacuucaucgcgcccgaguacgccuacaagaucgugaagaagggcgacuccaccaucaugaaguccgagcuggaguacggcaacugcaacaccaagugccagaccccgaugggggccaucaacagcagcaugcccuuccacaacauccacccccugacgaucggcgagugccccaaguacgucaaguccaaccgccucgugcuggccaccgggcugcggaacagcccgcagcgcgagcggcgccggaagaagcgcggccucuucggcgccaucgcgggguucaucgagggcggguggcagggcaugguggacgggugguacggcuaccaccacuccaacgagcagggcagcggguacgccgccgacaaggaguccacccagaaggccaucgacggcgucaccaacaaggugaacagcaucaucgacaagaugaacacgcaguucgaggccguggggcgggaguucaaccaccuggagcgccggaucgagaaccugaacaagaagauggaggacggcuuccucgacgucuggaccuacaacgcggagcugcuggugcucauggagaacgagcgcacccuggacuuccacgacuccaacgucaagaaccuguacgacaaggugcggcuccagcugcgcgacaacgccaaggagcuggggaacggcugcuucgaguucuaccacaagugcgacgacgagugcauggagagcgugcggaacggcaccuacgacuacccccaguacuccgaggaggcccgccucaagcgcgaggagaucagcggggucaagcuggaguccaucggcaucuaccagauccugagcaucuacuccacgguggccagcucccucgcccuggcgaucaugguggccgggcugagccucuggaugugcagcaacggcucccugcagugccggaucugcaucuga

SEQ ID NO: 76486 - RNA, 1701 nt, Artificial Sequence
  derived and/or modified CDS sequence (opt1) from hemagglutinin__InfluenzaA__AID70444
augaaggccgugcuggucgugcuccuguacaccuucgccaccgcgaacgccgacacgcugugcaucggcuaccacgccaacaacagcaccgacaccguggacaccguccucgagaagaacgugacggugacccacuccgucaaccugcuggaggacaagcacaacgggaagcucugcaagcugcgcggcguggcgccccugcaccucgggaagugcaacaucgccggcuggauccuggggaacccggagugcgagagccuggccaccgccuccagcugguccuacaucguggagaccagcaacuccgacaacggcacgugcuaccccggcgacuucaucgacuacgaggagcuccgggagcagcugagcuccgucagcuccuucgagcgcuucgagaucuuccccaagaccagcuccuggcccaaccacgacagcaacaagggggugaccgccgccugcccgcacgcgggcgccaaguccuucuacaagaaccugaucuggcucgugaagaaggggaacagcuaccccaagcuguccaagagcuacaucaacgacaagggccgggagguccuggugcucugggggauccaccaccccuccaccagcgccgaccagcagagccuguaccagaacgccgacacguacguguucgucggcaccucccgcuacagcaagaaguucaagcccgagaucgccauccggccgaaggugcgcgaccaggagggccggaugaacuacuacuggacccugguggagcccggggacaagaucaccuucgaggcgacgggcaaccucgucgugccccgcuacgccuucgccauggagcggaacgccggguccggcaucaucaucagcgacacccccgugcacgacugcaacacgaccugccagaccccgaagggcgccaucaacaccucccugcccuuccagaacauccaccccaucaccaucgggaagugccccaaguacgucaagagcaccaagcugcgccucgcgacgggccugcggaacgugccguccauccagagccgcgggcuguucggcgccaucgccggguucaucgagggcggcuggaccgggaugguggacggcugguacggguaccaccaccagaacgagcagggcuccggguacgccgccgaccucaagagcacccagaacgcgaucgacgagaucaccaacaaggucaacuccgugaucgagaagaugaacacgcaguucaccgccgucggcaaggaguucaaccaccuggagaagcggaucgagaaccugaacaagaagguggacgacggcuuccucgacaucuggaccuacaacgccgagcugcuggugguccucgagaacgagcgcacccuggaguaccacgacagcaacgugaagaaccuguacgagaaggugcggucccaggucaagaacaacgccaaggagaucgggaacggcugcuucgaguucuaccacaagugcgacaacacgugcauggagagcgugaagaacgggaccuacgacuaccccaaguacuccgaggaggccaagcucaaccgcgaggagaucgacggcgugaagcuggagagcacccggaucuaccagauccuggcgaucuacuccaccgucgccagcucccucgugcugguggucagccugggggccaucagcuucuggaugugcuucaacggcucccuccagugccgcaucuacaucuga

SEQ ID NO: 76487 - RNA, 1701 nt, Artificial Sequence
  derived and/or modified CDS sequence (opt1) from hemagglutinin__InfluenzaA__AID70445
augaaggccauccuggugguccuccuguacaccuucgccaccgcgaacgccgacacccugugcaucggcuaccacgccaacaacagcaccgacaccguggacaccgugcucgagaagaacgucacggugacccacuccgugaaccugcuggaggacaagcacaacgggaagcucugcaagcugcgcggcgucgcgccccugcaccucgggaagugcaacaucgccggcuggauccuggggaacccggagugcgagagccuguccaccgccagcuccuggagcuacaucguggagaccuccagcuccgacaacggcacgugcuaccccggcgacuucaucgacuacgaggagcuccgggagcagcugagcuccgugagcuccuucgagcgcuucgagaucuuccccaagaccagcuccuggcccaaccacgacagcaacaagggggucaccgccgccugcccgcacgccggcgcgaaguccuucuacaagaaccugaucuggcucgugaagaaggggaacagcuaccccaagcuguccaagagcuacaucaacgacaagggcaaggaggugcugguccucugggggauccaccaccccagcaccacggccgaccagcagucccuguaccagaacgccgacaccuacguguucgugggcaccagccgguacuccaagaaguucaagcccgagaucgccauccgcccgaagguccgggaccaggagggccgcaugaacuacuacuggacccugguggagcccggggacaagaucacguucgaggccaccggcaaccucguggucccccgguacgcguucgccauggagcgcaacgccgggagcggcaucaucaucuccgacacccccgugcacgacugcaacaccacgugccagaccccgaagggcgccaucaacaccagccugcccuuccagaacauccaccccaucaccaucgggaagugccccaaguacgugaaguccacgaagcugcggcucgccaccggccugcgcaacgucccgagcauccagucccgggggcuguucggcgcgaucgccggguucaucgagggcggcuggaccgggaugguggacggcugguacggguaccaccaccagaacgagcagggcagcggguacgccgccgaccucaaguccacccagaacgccaucgacaagaucacgaacaaggugaacagcgucaucgagaagaugaacacccaguucaccgcggugggcaaggaguucaaccaccuggagaagcgcaucgagaaccugaacaagaaggucgacgacggcuuccucgacaucuggaccuacaacgccgagcugcugguggugcucgagaacgagcggacgcuggaguaccacgacuccaacgucaagaaccuguacgagaaggugcgcaaccagcucaagaacaacgccaaggagaucgggaacggcugcuucgaguucuaccacaagugcgacaacacgugcauggagagcgugaagaacgggaucuacgacuaccccaaguacuccgaggaggccaagcugaaccgggaggagaucgacggcgucaagcuggagagcacccgcaucuaccagauccucgccaucuacuccaccguggcgagcucccuggugcaggucgugagccugggggccaucagcuucuggaugugcuucaacggcucccuccagugccggaucugcaucuga

SEQ ID NO: 76488 - RNA, 1701 nt, Artificial Sequence
  derived and/or modified CDS sequence (opt1) from hemagglutinin__InfluenzaA__AID70446
augaaggccgugcuggucgugcuccuguacaccuucgccaccgcgaacgccgacacccugugcaucggcuaccacgccaacaacagcaccgacaccguggacaccguccucgagaagaacgugacggugacccacuccgucaaccugcuggaggacaagcacaacgggaagcucugcaagcugcgcggcguggcgccccugcaccucgggaagugcaacaucgccggcuggauccuggggaacccggagugcgagagccuguccaccgccagcuccuggagcuacaucguggagaccuccagcuccgacaacggcacgugcuaccccggcgacuucaucgacuacgaggagcuccgggagcagcugagcuccgucagcuccuucgagcgcuucgagaucuuccccaagaccagcuccuggcccaaccacgacagcaacaagggggugaccgccgccugcccgcacgccggcgcgaaguccuucuacaagaaccugaucuggcucgugaagaaggggaacagcuaccccaagcuguccaagagcuacaucaacgacaagggcaaggagauccugguccucugggggauccaccaccccagcaccacggccgaccagcagucccuguaccagaacgccgacaccuacguguucgugggcaccagccgguacuccaagaaguucaagcccgagaucgccauccgcccgaagguccgggaccaggagggccgcaugaacuacuacuggacccugguggagcccggggacaagaucacguucgaggccaccggcaaccucguggucccccgguacgcguucgccauggagcgcaacgccgggagcggcaucaucaucuccggcacccccgugcacgacugcaacaccacgugccagaccccgaagggggccaucaacaccagccugcccuuccagaacauccaccccaucaccaucggcaagugccccaaguacgugaaguccacgaagcugcggcucgccaccgggcugcgcaacgucccgagcauccagucccggggccuguucggggcgaucgccggcuucaucgagggcggguggaccggcaugguggacgggugguacggcuaccaccaccagaacgagcaggggagcggcuacgccgccgaccucaaguccacccagaacgccaucgacaagaucacgaacaaggugaacagcgucaucgagaagaugaacacccaguucaccgcggugggcaaggaguucaaccaccuggagaagcgcaucgagaaccugaacaagaaggucgacgacggguuccucgacaucuggaccuacaacgccgagcugcugguggugcucgagaacgagcggacgcuggaguaccacgacuccaacgucaagaaccuguacgagaaggugcgcaaccagcucaagaacaacgccaaggagaucggcaacgggugcuucgaguucuaccacaagugcgacaacacgugcauggagagcgugaagaacggcaucuacgacuaccccaaguacuccgaggaggccaagcugaaccgggaggagaucgacggggucaagcuggagagcacccgcaucuaccagauccucgccaucuacuccaccguggcgagcucccuggugcaggucgugagccugggcgccaucagcuucuggaugugcuucaacggcucccuccagugccggaucugcaucuga

SEQ ID NO: 76489 - RNA, 1701 nt, Artificial Sequence
  derived and/or modified CDS sequence (opt1) from hemagglutinin__InfluenzaA__AID70447
augaaggccauccuggugguccuccuguacaccuucgccaccgcgaacgccgacacccugugcaucggcuaccacgccaacaacagcaccgacaccguggacaccgugcucgagaagaacgucacggugacccacuccgugaaccugcuggaggacaagcacaacgggaagcucugcaagcugcgcggcgucgcgccccugcaccucgggaagugcaacaucgccggcuggauccuggggaacccggagugcgagagccuguccaccgccagcuccuggagcuacaucguggagaccuccagcuccgacaacggcacgugcuaccccggcgacuucaucgacuacgaggagcuccgggagcagcugagcuccgugagcuccuucgagcgcuucgagaucuuccccaagaccagcuccuggcccaaccacgacagcaacaagggggucaccgccgccugcccgcaggccggcgcgaagggguucuacaagaaccugcucuggcuggugaagaagggcaacuccuaccccaagcugagcaaguccuacaucaacgacaaggggaaggaggugcucguccuguggggcauccaccaccccagcaccacggccgaccagcagagccuguaccagaacgccgacaccuacguguucgugggcaccucccgguacagcaagaaguucaagcccgagaucgccauccgcccgaagguccgggaccaggaggggcgcaugaacuacuacuggacccucguggagcccggcgacaagaucacguucgaggccaccgggaaccugguggucccccgguacgcguucgccauggagcgcaacgccggcuccggcaucaucaucagcgacacccccgugcacgacugcaacaccacgugccagaccccgaagggggccaucaacaccucccugcccuuccagaacauccaccccaucaccaucggcaagugccccaaguacgucaagagcacgaagcuccggcuggccaccgggcugcgcaacgugccguccauccagagccggggccucuucggggcgaucgccggcuucaucgagggcggguggaccggcaugguggacgggugguacggcuaccaccaccagaacgagcagggguccggcuacgccgccgaccucaagagcacccagaacgccaucgacaagaucacgaacaaggugaacuccgucaucgagaagaugaacacccaguucaccagcgugggcaaggaguucaaccaccuggagaagcgcauggagaaccugaacaagaaggucgacgacggguuccuggacaucuggaccuacaacgcggagcugcucguggugcuggagaacgagcggacgcuggaguaccacgacuccaacgucaagaaccucuacgagaaggugcgcaaccagcugaagaacaacgccaaggagaucggcaacgggugcuucgaguucuaccacaagugcgacaacacgugcauggagagcgugaagaacggcaucuacgacuaccccaaguacuccgaggaggccaagcugaaccgggaggagaucgacggggucaagcucgagagcacccgcaucuaccagauccuggccaucuacuccaccguggccagcucccuggugcucgucgugagccugggcgcgaucagcuucuggaugugcuucaacggcucccugcagugccggaucugcaucuga

SEQ ID NO: 76490 - RNA, 1701 nt, Artificial Sequence
  derived and/or modified CDS sequence (opt1) from hemagglutinin__InfluenzaA__AID70448
augaaggccauccuggugguccuccuguacaccuucgccaccgcgaacgccgacacgcugugcaucggcuaccacgccaacaacagcaccgacaccguggacaccgugcucgagaagaacgucacggugacccacuccgugaaccugcuggaggacaagcacaacgggaagcucugcaagcugcgcggcgucgcgccccugcaccucgggaagugcaacaucgccggcuggauccuggggaacccggagugcgagagccuguccaccgccagcuccuggagcuacaucguggagaccuccagcuccgacaacggcacgugcuaccccggcgacuucaucgacuacgaggagcuccgggagcagcugagcuccgugagcuccuucgagcgcuucgagaucuuccccaagaccagcuccuggcccaaccacgacagcaacaagggggucaccgccgccugcccgcacgccggcgcgaagggguucuacaagaaccugaucuggcucgugaagaagggcaacuccuaccccaagcugagcaaguccuacaucaacgacaaggggaaggaggugcugguccucuggggcauccaccaccccagcaccacggccgaccagcagagccuguaccagaacgccgacaccuacguguucgugggcaccucccgguacagcaagaaguucaagcccgagaucgccauccgcccgaagguccgggaccaggaggggcgcaugaacuacuacuggacccugguggagcccggcgacaagaucacguucgaggccaccgggaaccucguggucccccgguacgcguucaccauggagcgcgacgccggcuccggcaucaucaucagcgacacccccgugcacgacugcaacacgaccugccagaccccgaagggggccaucaacaccucccugcccuuccagaacauccaccccaucacgaucggcaagugccccaaguacgucaagagcaccaagcugcggcucgccaccgggcugcgcaacgugccguccauccagagccggggccuguucggggccaucgcgggcuucaucgagggcggguggaccggcaugguggacgggugguacggcuaccaccaccagaacgagcagggguccggcuacgccgccgaccucaagagcacgcagaacgccaucgacaagaucaccaacaaggugaacuccgucaucgagaagaugaacacccaguucaccgccgugggcaaggaguucaaccaccuggagaagcgcaucgagaaccugaacaagaaggucgacgacggguuccucgacaucuggacguacaacgcggagcugcugguggugcucgagaacgagcggacccuggaguaccaggacagcaacgucaagaaccuguacgagaaggugcgcaaccagcucaagaacaacgccaaggagaucggcaacgggugccuggaguucuaccacaaguucgacaacacgugcauggaguccgugaagaacggcaccuacgacuaccccaaguacagcgaggaggccaagcugaaccgggagaagaucgacggggucaagcucgaguccacccgcaucuaccagauccuggccaucuacagcaccguggccuccagccuggugcucgucgugucccugggcaccaucagcuucuggaugugcuucaacggcagccugcagugccggaucugcaucuga

SEQ ID NO: 76491 - RNA, 1701 nt, Artificial Sequence
  derived and/or modified CDS sequence (opt1) from hemagglutinin__InfluenzaA__AID70449
augaaggccauccuggugguccuccuguacaccuucgccaccgcgaacgccgacacgcugugcaucggcuaccacgccaacaacagcaccgacaccguggacaccgugcucgagaagaacgucacggugacccacuccgugaaccugcuggaggacaagcacaacgggaagcucugcaagcugcgcggcgucgcgccccugcaccucgggaagugcaacaucgccggcuggauccuggggaacccggagugcgagagccuguccaccgccagcuccuggagcuacaucguggagaccuccagcuccgacaacggcacgugcuaccccggcgacuucaucgacuacgaggagcuccgggagcagcugagcuccgugagcuccuucgagcgcuucgagaucuuccccaagaccagcuccuggcccaaccacgacagcaacaagggggucaccgccgccugcccgcacgccggcgcgaaguccuucuacaagaaccugaucuggcucgugaagaaggggaacagcuaccccaagcuguccaagagcuacaucaacgacaagggcaaggaggugcugguccucugggggauccaccaccccagcaccacggccgaccagcagucccuguaccagaacgccgacaccuacguguucgugggcaccagccgguacuccaagaaguucaagcccgagaucgccauccgcccgaagguccgggaccaggagggccgcaugaacuacuacuggacccugguggagcccggggacaagaucacguucgaggccaccggcaaccucguggucccccgguacgcguucgccauggagcgcaacgccgggagcggcaucaucaucuccgacacccccgugcacgacugcaacaccacgugccagaccccgaagggcgccaucaacaccagccugcccuuccagaacauccaccccaucaccaucgggaagugccccaaguacgugaaguccacgaagcugcggcucgccaccggccugcgcaacgucccgagcauccagucccgggggcuguucggcgcgaucgccggguucaucgagggcggcuggaccgggaugguggacggcugguacggguaccaccaccagaacgagcagggcagcggguacgccgccgaccucaaguccacccagaacgccaucgacaagaucacgaacaaggugaacagcgucaucgagaagaugaacacccaguucaccgcggugggcaaggaguucaaccaccuggagaagcgcaucgagaaccugaacaagaaggucgacgacggcuuccucgacaucuggaccuacaacgccgagcugcugguggugcucgagaacgagcggacgcuggaguaccacgacuccaacgucaagaaccuguacgagaaggugcgcaaccagcucaagaacaacgccaaggagaucgggaacggcugcuucgaguucuaccacaagugcgacaacacgugcauggagagcgugaagaacgggaccuacgacuaccccaaguacuccgaggaggccaagcugaaccgggaggagaucgacggcgucaagcuggagagcacccgcaucuaccagauccucgccaucuacuccaccguggcgagcucccuggugcuggucgugagccucggggccaucagcuucuggaugugcuucaacggcucccugcagugccggaucugcguguga

SEQ ID NO: 76492 - RNA, 1701 nt, Artificial Sequence
  derived and/or modified CDS sequence (opt1) from hemagglutinin__InfluenzaA__AID70450
augaaggccauccuggugguccuccuguacaccuucgccaccgcgaacgccgacacgcugugcaucggcuaccacgccaacaacagcaccgacaccguggacaccgugcucgagaagaacgucacggugacccacuccgugaaccugcuggaggacaagcacaacgggaagcucugcaagcugcgcggcgucgcgccccugcaccucgggaagugcaacaucgccggcuggauccuggggaacccggagugcgagagccuguccaccgccagcuccuggagcuacaucguggagaccuccagcuccgacaacggcacgugcuaccccggcgacuucaucgacuacgaggagcuccgggagcagcugagcuccgugagcuccuucgagcgcuucgagaucuuccccaagaccagcuccuggcccaaccacgacagcaacaagggggucaccgccgccugcccgcacgccggcgcgaagggguucuacaagaaccugaucuggcucgugaagaagggcaacuccuaccccaagcugagcaaguccuacaucaacgacaaggggaaggaggugcugguccucuggggcauccaccaccccagcaccacggccgaccagcagagccuguaccagaacgccgacaccuacguguucgugggcaccucccgguacagcaagaaguucaagcccgagaucgccauccgcccgaagguccgggaccaggaggggcgcaugaacuacuacuggacccugguggagcccggcgacaagaucacguucgaggccaccgggaaccucguggucccccgguacgcguucgccauggagcgcgacgccggcuccggcaucaucaucagcgacacccccgugcacgacugcaacaccacgugccagaccuccaagggggccaucaacaccagccugccguuccagaacauccaccccaucaccaucggcaagugccccaaguacgugaaguccacgaagcugcggcucgccaccgggcugcgcaacguccccagcauccagucccggggccuguucggggcgaucgccggcuucaucgagggcggguggaccggcaugguggacgggugguacggcuaccaccaccagaacgagcaggggagcggcuacgccgccgaccucaaguccacccagaacgccaucgacaagaucacgaacaaggugaacagcgucaucgagaagaugaacacccaguucaccgcggugggcaaggaguucaaccaccuggagaagcgcaucgagaaccugaacaagaaggucgacgacggguuccucgacaucuggaccuacaacgccgagcugcugguggugcucgagaacgagcggacgcuggaguaccacgacuccaacgucaagaaccuguacgagaaggugcgcaaccagcucaagaacaacgccaaggagaucggcaacgggugcuucgaguucuaccacaaguucgacaacacgugcauggagagcgugaagaacggcaccuacgacuacccgaaguacuccgaggaggccaagcugaaccgggagaagaucgacggggucaagcuggagagcacccgcaucuaccagauccucgccaucuacuccaccguggcgagcucccuggugcaggucgugagccugggcgccaucagcuucuggaugugcuucaacggcucccuccagugccggaucugcaucuga

SEQ ID NO: 76493 - RNA, 1701 nt, Artificial Sequence
  derived and/or modified CDS sequence (opt1) from hemagglutinin__InfluenzaA__AID70451
augaaggccauccugguggucaugcucuacaccuucgccaccgcgaacgccgacacgcugugcaucggcuaccacgccaacaacagcaccgacaccguggacaccgugcuggagaagaacgucacggugacccacuccgugaaccuccuggaggacaagcacaacgggaagcugugcaagcuccgcggcgucgcgccccugcaccuggggaagugcaacaucgccggcuggauccucgggaacccggagugcgagagccuguccaccgccagcuccuggagcuacaucguggagaccuccagcuccgacaacggcacgugcuaccccggcgacuucaucgacuacgaggagcugcgggagcagcucagcuccgugagcuccuucgagcgcuucgagaucuuccccaagaccagcuccuggcccaaccacgacagcaacaagggggucaccgccgccugcccgcacgccggcgcgaagggguucuacaagaaccugaucuggcuggugaagaagggcaacuccuaccccaagcucagcaaguccuacaucaacgacaaggggaaggaggugcugguccuguggggcauccaccaccccagcaccacggccgaccagcagagccucuaccagaacgccgacaccuacguguucgugggcaccucccgguacagcaagaaguucaagcccgagaucgccauccgcccgaagguccgggaccaggaggggcgcaugaacuacuacuggacccugguggagcccggcgacaagaucacguucgaggccaccgggaaccugguggucccccgguacgcguucgccauggagcgcaacgccggcuccggcaucaucaucagcgacacccccgugcacgacugcaacaccacgugccagaccccgaagggggccaucaacaccucccuccccuuccagaacauccaccccaucaccaucggcaagugccccaaguacgucaagagcacgaagcugcggcuggccaccgggcuccgcaacgugccguccauccagagccggggccuguucggggcgaucgccggcuucaucgagggcggguggaccggcaugguggacgggugguacggcuaccaccaccagaacgagcagggguccggcuacgccgccgaccucaagagcacccagaacgccaucgacaagaucacgaacaaggugaacuccgucaucgagaagaugaacacccaguucaccgcggugggcaaggaguucaaccaccuggagaagcgcaucgagaaccugaacaagaaggucgacgacggguuccuggacaucuggaccuacaacgccgagcuccugguggugcuggagaacgagcggacgcucgaguaccacgacagcaacgucaagaaccuguacgagaaggugcgcaaccagcugaagaacaacgccaaggagaucggcaacgggugcuucgaguucuaccacaaguucgacaacacgugcauggaguccgugaagaacggcaccuacgacuaccccaaguacagcgaggaggccaagcucaaccgggaggagaucgacggggucaagcuggaguccacccgcaucuaccagauccuggccaucuacagcaccguggcguccagccucgugcuggucgugucccugggcgccaucagcuucuggaugugcuucaacggcagccuccagugccggaucugcaucuga

SEQ ID NO: 76494 - RNA, 1701 nt, Artificial Sequence
  derived and/or modified CDS sequence (opt1) from hemagglutinin__InfluenzaA__AID70452
augaaggccauccuggugguccuccuguacaccuucgccaccgcgaacgccgacacccugugcaucggcuaccacgccaacaacagcaccgacaccguggacaccgugcucgagaagaacgucacggugacccacuccgugaaccugcuggaggacaagcacaacgggaagcucugcaagcugcgcggcgucgcgccccugcaccucgggaagugcaacaucgccggcuggauccuggggaacccggagugcgagagccuguccaccgccagcuccuggagcuacaucguggagaccuccagcuccgacaacggcacgugcuaccccggcgacuucaucgacuacgaggagcuccgggagcagcuggggagcguguccagcuucaagcgcuucgagaucuuccccaagaccuccagcuggcccaaccacgacuccaacaagggcgucaccgccgccugcccgcacgccggggcgaagggcuucuacaagaaccugaucuggcucgugaagaaggggaacagcuaccccaagcuguccaagagcuacaucaacgacaagggcaaggaggugcugguccucuggggcauccaccaccccuccaccacggccgaccagcagagccuguaccagaacgccgacaccuacguguucguggggaccagccgguacuccaagaaguucaagcccgagaucgccauccgcccgaagguccgggaccaggagggccgcaugaacuacuacuggacccugguggagcccggggacaagaucacguucgaggccaccggcaaccucguggucccccgguacgcguucgccauggagcgcgacgccggcagcgggaucaucaucuccgacacccccgugcacgacugcaacaccacgugccagaccccgaagggcgccaucaacaccagccugcccuuccagaacauccaccccaucaccaucgggaagugccccaaguacgugaaguccacgaagcugcggcucgccaccggccugcgcaacgucccgagcauccagucccgggggcuguucggcgcgaucgccggcuucaucgagggcggguggaccgggaugguggacggcugguacggguaccaccaccagaacgagcagggcagcggcuacgccgccgaccucaaguccacccagaacgccaucgacaagaucacgaacaaggugaacagcgucaucgagaagaugaacacccaguucaccgcgguggggaaggaguucaaccaccuggagaagcgcaucgagaaccugaacaagaaggucgacgacggcuuccucgacaucuggaccuacaacgccgagcugcugguggugcucgagaacgagcggacgcuggaguaccacgacuccaacgucaagaaccuguacgagaaggugcgcaaccagcucaagaacaacgccaaggagaucgggaacggcugcuucgaguucuaccacaagugcgacaacacgugcauggagagcgugaagaacgggaucuacgacuaccccaaguacuccgaggaggccaagcugaaccgggagaagaucgacggcgucaagcuggagagcacccgcaucuaccagauccucgccaucuacuccaccguggcgagcucccuggugcuggucgugagccucggcgccaucuccuucuggaugcgguucaacgggagccugcagugcagcaucugcaucuga

SEQ ID NO: 76495 - RNA, 1701 nt, Artificial Sequence
  derived and/or modified CDS sequence (opt1) from hemagglutinin__InfluenzaA__AID70453
augaaggccauccuggugguccuccuguacaccuucgccaccgcgaacgccgacacgcugugcaucggcuaccacgccaacaacagcaccgacaccguggacaccgugcucgagaagaacgucacggugacccacuccgugaaccugcuggaggacaagcacaacgggaagcucugcaagcugcgcggcgucgcgccccugcaccucgggaagugcaacaucgccggcuggauccuggggaacccggagugcgagagccuguccaccgccagcuccuggagcuacaucguggagaccuccagcuccgacaacggcacgugcuaccccggcgacuucaucgacuacgaggagcuccgggagcagcugagcuccgugagcuccuucgagcgcuucgagaucuuccccaagaccagcuccuggcccaaccacgacagcaacaagggggucaccgccgccugcccgcacgccggcgcgaagggguucuacaagaaccugaucuggcucgugaagaagggcaacuccuaccccaagcugagcaaguccuacaucaacgacaaggggaaggaggugcugguccucuggggcauccaccaccccagcaccacggccgaccagcagagccuguaccagaacgccgacaccuacguguucgugggcaccucccgguacagcaagaaguucaagcccgagaucgccauccgcccgaagguccgggaccaggaggggcgcaugaacuacuacuggacccugguggagcccggcgacaagaucacguucgaggccaccgggaaccucguggucccccgguacgcguucgccauggagcgcgacgccggcuccggcaucaucaucagcgacacccccgugcaggacugcaacaccacgugccagaccccgaagggggccaucaacaccucccugcccuuccagaacauccaccccaucaccaucggcaagugccccaaguacgucaagagcacgaagcugcggcucgugaccgggcugcgcaacgugccguccauccagagccggggccuguucggggccaucgcgggcuucaucgagggcggguggaccggcaugguggacgggugguacggcuaccaccaccagaacgagcagggguccggcuacgccgccgaccucaagagcacccagaacgccaucgacaagaucacgaacaaggucaacuccgugaucgagaagaugaacacccaguucaccgccgucggcaaggaguucaaccaccuggagaagcgcaucgagaaccugaacaagaagguggacgacggguuccucgacaucuggaccuacaacgcggagcugcuggugguccucgagaacgagcggacgcuggaguaccacgacagcaaccugaagaaccucuacgagaaggugcgcaaccagcugaagaacaacgccaaggagaucggcaacgggugcuucgaguucuaccacaaguucgacaacacgugcauggaguccgugaagaacggcaccuacgacuaccccaaguacagcgaggaggccaagcugaaccgggaggagaucgacggggucaagcucgaguccacccgcaucuaccagauccuggccaucuacagcaccguggccuccagccuggugcaggucgugucccucggcgcgaucagcuucuggaugcgguucaacggcagccugcacugccgcaucugcaucuga

SEQ ID NO: 76496 - RNA, 1701 nt, Artificial Sequence
  derived and/or modified CDS sequence (opt1) from hemagglutinin__InfluenzaA__AID70454
augaaggccauccuggugguccuccuguacaccuucgccaccgcgaacgccgacacgcugugcaucggcuaccacgccaacaacagcaccgacaccguggacaccgugcucgagaagaacgucacggugacccacuccgugaaccugcuggaggacaagcacaacgggaagcucugcaagcugcgcggcgucgcgccccugcaccucgggaagugcaacaucgccggcuggauccuggggaacccggagugcgagagccuguccaccgccagcuccuggagcuacaucguggagaccuccagcuccgacaacggcacgugcuaccccggcgacuucaucaacuacgaggagcuccgggagcagcugagcuccgugagcuccuucgagcgcuucgagaucuuccccaagaccagcuccuggcccaaccacgacagcaacaagggggucaccgccgccugcccgcacgccggcgcgaaguccuucuacaagaaccugaucuggcucgugaagaaggggaacagcuaccccaagcuguccaagagcuacaucaacgacaagggcaaggaggugcugguccucugggggauccaccaccccagcaccacggccgaccagcagucccuguaccagaacgccgacgccuacguguucgugggcaccagccgguacuccaagaaguucaagcccgagaucgccauccgcccgaagguccgggaccaggagggccgcaugaacuacuacuggacccugguggagcccggggacaagaucaccuucgaggcgacgggcaaccucguggucccccgguacgccuucgccauggagcgcaacgccgggagcggcaucaucaucuccgacacccccgugcacgacugcaacacgaccugccagaccccgaagggcgccaucaacaccagccugcccuuccagaacauccaccccaucaccaucgggaagugccccaaguacgugaaguccaccaagaugcggcuggcgacgggccuccgcaacgucccgugcauccagagccgggggcuguucggcgccaucgccggguucaucgagggcggcuggaccgggaugguggacggcugguacggguaccaccaccagaacgagcagggcuccggguacgccgccgaccucaagagcacccagaacgcgaucgacaagaucaccaacaaggugaacuccgucaucgagaagaugaacacgcaguucaccgccgugggcaaggaguucaaccaccuggagaagcgcaucgagaaccugaacaagaaggucgacgacggcuuccuggacaucuggaccuacaacgccgagcuccugguggugcuggagaacgagcggacccucgacuaccacgacagcaacgucaagaaccuguacgagaaggugcgcaaccagcugaagaacaacgccaaggagaucgggaacggcugcuucgaguucuaccacaagugcgacaacacgugcauggaguccgugaagaacgggaccuacgacuaccccaaguacagcgaggaggccaagcucaaccgggaggagaucgacggcgucaagcuggaguccacccgcaucuaccagauccuggcgaucuacagcaccguggccuccagccucgugcuggucgugucccugggggccaucagcuucuggaugugcagcaacggcucccuccagugccggaucugcaucuga

SEQ ID NO: 76497 - RNA, 1701 nt, Artificial Sequence
  derived and/or modified CDS sequence (opt1) from hemagglutinin__InfluenzaA__AID70455
augaaggccauccuggugguccuccuguacaccuucgccaccgcgaacgccgacacgcugugcaucggcuaccacgccaacaacagcaccgacaccguggacaccgugcucgagaagaacgucacggugacccacuccgugaaccugcuggaggacaagcacaacgggaagcucugcaagcugggcggggucgcgccccugcaccucggcaagugcaacaucgccggguggauccugggcaacccggagugcgagagccuguccaccgccagcuccuggagcuacaucguggagaccuccagcuccgacaacggcacgugcuaccccggggacuucaucgacuacgaggagcuccgcgagcagcugagcuccgugagcuccuucgagcgguucgagaucuuccccaagaccagcuccuggcccaaccacgacagcaacaagggcgucaccgccgccugcccgcacgccggggcgaagggcuucuacaagaaccugaucuggcucgugaagaaggggaacuccuaccccaagaucagcaaguccuacaucaacgacaagggcaaggaggugcugguccuguggggcauccaccaccccagcaccacggccgaccagcagagccucuaccagaacgccgacaccuacaucuucguggggaccucccgcuacagcaagaaguucaagcccgagaucgccauccggccgaaggugcgcgaccaggagggccggaugaacuacuacuggacccuggucgagcccggggacaagaucacguucgaggccaccggcaaccugguggugccccgcuacgcguucgccauggagcgggacgccggcuccgggaucaucaucagcgacacccccguccacgacugcaacaccacgugccagaccccgaagggcgccaucaacaccucccuccccuuccagaacauccaccccaucaccaucgggaagugccccaaguacgucaagagcacgaagcugcgccuggccaccggccuccggaacgugccguccauccagagccgcgggcuguucggcgcgaucgccggcuucaucgagggcggguggaccgggaugguggacggcugguacggguaccaccaccagaacgagcagggcuccggcuacgccgccgaccucaagagcacccagaacgccaucgacaagaucacgaacaaggugaacuccgugaucaagaagaugaacacccaguucaccgcggucgggaaggaguucaaccaccuggagaagcggaucgagaaccugaacaagaagguggacgacggcuuccuggacaucuggaccuacaacgccgagcuccuggucgugcuggagaacgagcgcacgcucgaguaccacgacagcaacgugaagaaccuguacgagaagguccggaaccagcugaagaacaacgccaaggagaucgggaacggcugcuucgaguucuaccacaaguucgacaacacgugcauggaguccgugaagaacgggaccuacgacuaccccaaguacagcgaggaggccaagcucaaccgcgaggagaucgacggcgugaagcuggaguccacccggaucuaccagauccuggccaucuacagcaccgucgcguccagccucgugcugguggucucccugggcgccaucagcuucuggaugugcuucaacgggagccuccagugccgcaucugcaucuga

SEQ ID NO: 76498 - RNA, 1701 nt, Artificial Sequence
  derived and/or modified CDS sequence (opt1) from hemagglutinin__InfluenzaA__AID70456
augaaggccauccuggugguccuccuguacaccuucgccaccgcgaacgccgacacgcugugcaucggcuaccacgccaacaacagcaccgacaccguggacaccgugcucgagaagaacgucacggugacccacuccgugaaccugcuggaggacaagcacaacgggaagcucugcaagcugcgcggcgucgcgccccugcaccucgggaagugcaacaucgccggcuggauccuggggaacccggagugcgagagccuguccaccgccagcuccuggagcuacaucguggagaccuccagcuccgacaacggcacgugcuaccccggcgacuucaucgacuacgaggagcuccgggagcagcugagcuccgugagcuccuucgagcgcuucgagaucuuccccaagaccagcuccuggcccaaccacgacagcaacaagggggucaccgccgccugcccgcacgccggcgcgaaguccuucuacaagaaccugaucuggcucgugaagaaggggaacagcuaccccaagcuguccaagagcuacaucaacgacaagggcaaggaggugcugguccucugggggauccaccaccccagcaccacggccgaccagcagucccuguaccagaacgccgacaccuacguguucgugggcaccagccgguacuccaagaaguucaagcccgagaucgccauccgcccgaagguccgggaccaggagggccgcaugaacuacuacuggacccugguggagcccggggacaagaucacguucgaggccaccggcaaccucguggucccccgguacgcguucgccauggagcgcaacgccgggagcggcaucaucaucuccgacacccccgugcacgacugcaacaccacgugccagaccccgaagggcgccaucaacaccagccugcccuuccagaacauccaccccaucaccaucgggaagugccccaaguacgugaaguccacgaagcugcggcucgccaccggccugcgcaacgucccgagcauccagucccgggggcuguucggcgcgaucgccggguucaucgagggcggcuggaccgggaugguggacggcugguacggguaccaccaccagaacgagcagggcagcggguacgccgccgaccucaaguccacccagaacgccaucgacaagaucacgaacaaggugaacagcgucaucgagaagaugaacacccaguucaccgcgguggucaaggaguucaaccaccuggagaagcgcaucgagaaccugaacaagaagguggacgacggcuuccucgacaucuggaccuacaacgccgagcugcuggugguccucgagaacgagcggacgcuggaguaccacgacuccaaccugaagaaccucuacgagaaggugcgcaaccagcugaagaacaacgccaaggagaucggcaacgggugcuucgaguucuaccacaaguucgacaacacgugcauggagagcgugaagaacggcaccuacgacuaccccaaguacuccgaggaggccaagcugaaccgggaggagaucgacggggucaagcucgagagcacccgcaucuaccagauccuggccaucuacuccaccguggcgagcucccuggugcaggucgugagccucggcgccaucagcuucuggaugugcuucaacgggucccugcagugccggaucugcaucuga

SEQ ID NO: 76499 - RNA, 1701 nt, Artificial Sequence
  derived and/or modified CDS sequence (opt1) from hemagglutinin__InfluenzaA__AID70457
augaaggccauccuggugguccuccuguacaccuucgccaccgcgaacgccgacacgcugugcaucggcuaccacgccaacaacagcaccgacaccguggacaccgugcucgagaagaacgucacggugacccacuccgugaaccugcuggaggacaagcacaacgggaagcucugcaagcugcgcggcgucgcgccccugcaccucgggaagugcaacaucgccggcuggauccuggggaacccggagugcgagagccuguccaccgccagcuccuggagcuacaucguggagaccuccagcuccgacaacggcacgugcuaccccggcgacuucaucgacuacgaggagcuccgggagcagcugagcuccgugagcuccuucgagcgcuucgagaucuuccccaagaccagcuccuggcccaaccacgacagcaacaagggggucaccgccgccugcccgcacgccggcgcgaagggguucuacaagaaccugaucuggcucgugaagaagggcaacuccuaccccaagcugagcaaguccuacaucaacgacaaggggaaggaggugcugguccucuggggcauccaccaccccagcaccacggccgaccagcagagccuguaccagaacgccgacaccuacguguucgugggcaccucccgguacagcaagaaguucaagcccgagaucgccauccgcccgaagguccgggaccaggaggggcgcaugaacuacuacuggacccugguggagcccggcgacaagaucacguucgaggccaccgggaaccucguggucccccgguacgcguucgccauggagcgcgacgccggcuccggcaucaucaucagcgacacccccgugcacgacugcaacaccacgugccagaccccgaagggggccaucaacaccucccugcccuuccagaacauccaccccaucaccaucggcaagugccccaaguacgucaagagcacgaagcugcggcucgccaccgggcugcgcaacgugccguccauccagagccggggccuguucggggcgaucgccggcuucaucgagggcggguggaccggcaugguggacgggugguacggcuaccaccaccagaacgagcagggguccggcuacgccgccgaccucaagagcacccagaacgccaucgacaagaucacgaacaaggugaacuccgucaucgagaagaugaacacccaguucaccgcggugggcaaggaguucaaccaccuggagaagcgcaucgagaaccugaacaagaaggucgacgacggguuccucgacaucuggaccuacaacgccgagcugcugguggugcucgagaacgagcggacgcuggaguaccacgacagcaacgucaagaaccuguacgagaaggugcgcaaccagcucaagaacaacgccaaggagaucggcaacgggugcuucgaguucuaccacaaguucgacaacacgugcauggaguccgugaagaacggcaccuacgacuaccccaaguacagcgaggaggccaagcugaaccgggagaagaucgacggggucaagcuggaguccacccgcaucuaccagauccucgccaucuacagcaccguggcguccagccuggugcaggucgugucccugggcgccaucagcuucuggaagugcuucaacggcagccuccagugccggaucugcuccuga

SEQ ID NO: 76500 - RNA, 1701 nt, Artificial Sequence
  derived and/or modified CDS sequence (opt1) from hemagglutinin__InfluenzaA__AID70458
augaagaccaucaucgcccugagcuacauccucugccugguguucgcccagaaguuccccggcaacgacaacuccauggcgacccugugccucgggcaccacgccgucccgaacggcacgauggugaagaccaucaccaacgaccagaucgaggugaccaacgccacggagcugguccagagcuccagcaccgggggcaucugcaacagcccccaccagauccuggacgggggcaacugcacccucaucgacgcccugcugggcgacccccagugcgacggguuccagaacaagaagugggaccucuucguggagcgcuccaaggccuacuccaacugcuaccccuacgacgugccggacuacgcgagccugcgguccaucgucgccagcuccggcacccuggaguucaacaacgagagcuucaacuggacgggggugacccagaacggcaaguccgccagcugcaagcgcggguccgacaacagcuucuucucccggcucaacuggcugacccaccugaacuacaaguaccccgcccucaaggugaccaugcccaacaacgagaaguucgacaagcuguacaucuggggcguccaccaccccggcacguacaacgaccagaucagccuguacgcgcaggccuccgggaucaucaccgugagcaccaagcgcaaccagcagaccgugaucccgaacaucggcagccggccccgcguccgggacauccccucccgcaucagcaucuacuggacgaucgugaagcccggggacauccuccugaucaacuccaccggcaaccugaucgccccgcggggcuacuucaagauccagagcgggaaguccagcaucaugcgcuccgacgcccccaucggcaagugcaacagcgagugcaucacccccaacggguccauccccaacgacaagccguuccagaacgugaaccggaucaccuacggcgccugcccccgcuacgucaagcagaacacgcucaagcuggcgaccgggaugcggaacgugcccgagaagcagacccgcggcaucuucggcgccaucgccggguucaucgagaacggcugggaggggaugguggacggcugguacggguuccggcaccagaacagcgagggcaugggccaggccgccgaccugaaguccacccaggcggccaucaaccagaucaacgggaagcucaaccgccugaucggcaagacgaucgagaaguuccaccagaucgagaaggaguucagcgaggucgaggggcggauccaggaccuggagaaguacguggaggacaccaagaucgaccucugguccuacaacgccgagcugcugguggcccucgagaaccagcacaccaucgaccugaccgacagcgagauggacaagcuguucgagcgcacgaagaagcagaugcgggagaacgccgaggacaugggcaacgggugcuucaagaucuaccacaagugcgacaacgcgugcaucggcuccauccgcaacggcaucuacgaccgggacaucuaccgcgacgaggcccucagcaaccgcuuccagaucaagggggucgagcugaaggccggcuacaaggacuggauccuguggaucuccuucgccaucagcugcuuccuccugugcguggugcugcucggguucaucaugugggccugccagaagggcaaccugcggugcaacaucugcaucuga

SEQ ID NO: 76501 - RNA, 1701 nt, Artificial Sequence
  derived and/or modified CDS sequence (opt1) from hemagglutinin__InfluenzaA__AID70459
augaagaccaucaucgcccugagcuacauccucugccugguguucgcccagaagguccccggcaacgacaacuccaccgcgacgcugugccucgggcaccacgccgugccgaacggcaccaucgugaagaccaucaccaacgaccagaucgaggucacgaacgccaccgagcuggugcagagcuccagcaccggggagaucugcaacagcccccaccagauccuggacggcgagaacugcacccucaucgacgcccugcugggggacccccagugcgacggcuuccagaacaagaagugggaccucuucguggagcgcagcaaggcccacuccaacugcuaccccuacgacgucccggacuacgcgagccugcggucccugguggccagcuccggcacgcucgaguucaacaacgagagcuucaacuggaccggggugacccagaacggcaccuccagcgccugcauccgccgguccaacaacagcuucuucucccgccugaacuggcugacgcaccucaacuucaaguaccccgcccugaacgucaccaugcccaacaacgagcaguucgacaagcuguacaucuggggcgugcaccaccccgggaccgacaaggaccagaucuuccucuacgcgcaggccagcgggcggaucaccguguccacgaagaagucccagcaggccgucaucccgaacaucggcagccgcccccgggugcgcaacauccccucccgggugagcaucuacuggaccaucgucaagcccggcgacauccugcugaucaacuccaccgggaaccucaucgccccgcgcggcuacuucaagauccggagcgggaaguccagcaucaugcgcuccgacgcccccaucggcaagugcaacagcgcgugcaucacccccaacggcuccauccccaacgacaagccguuccagaacgugaaccggaucacguacggggccugcccccgcuacgugaagcagaacacccugaagcuggcccccggcaugcggaacguccccgagaagcagacccgcgggaucuucggcgccaucgccggguucaucgagaacggcugggagggcaugguggacgggugguacggcuuccggcaccagaacagcgaggggcgcggccaggcggccgaccucaaguccacccaggccgccaucgaccagaucaacgggaagcugaaccggcugaucggcaagacgaucgagaaguuccaccagaucgagaacgaguucagcgagguggagggccgcauccaggaccucgagaaguacgucgaggacaccaagaucgaccugugguccuacaucgccgagcugcucguggcgcuggagaaccagcacaccaucgaccugaccgacagcgagaugaacaagcuguucgagaagacgaagaagcagcuccgggagaacgccgaggacauggggaacggcugcuucaagaucuaccacaagugcgacaacgccugcaucggguccauccgcaacggcaucuacgaccacgacguguaccgcgacgaggcccugaacaaccgguuccagaucaagggggucgagcucaagagcggcuacaaggacuggauccuguggaucuccuucgccaucagcugcuuccugcucugcguggcgcugcugggcuucaucaugugggccugccagaaggggaacauccgcugcaacaucugcaucuga

SEQ ID NO: 76502 - RNA, 1701 nt, Artificial Sequence
  derived and/or modified CDS sequence (opt1) from hemagglutinin__InfluenzaA__AID70460
augaagaccaucaucgcccugagcuacauccucugccugguguucgcccagaagcugcccggcaacgacaacuccaccgcgacgcucugccuggggcaccacgccgucccgaacggcaccaucgugaagaccaucaccaacgaccagaucgaggugacgaacgccaccgagcugguccagagcuccagcaccggggagaucugcaacagcccccaccagauccucgacggcgagaacugcacccugaucgacgcccugcucggggacccccagugcgacggcuuccagaacaagaagugggaccuguucguggagcgcagcaaggcccacuccaacugcuaccccuacgacgugccggacuacgcgagccugcggucccucgucgccagcuccggcacgcuggaguucaacaacgagagcuucaacuggaccggggugacccagaacggcaccuccagcgccugcauccgccgguccaacaacagcuucuucucccgccugaacuggcucacgcaccugaacuucaaguaccccgcccugaacgugaccaugcccaacaacgagcaguucgacaagcucuacaucuggggcguccaccaccccgggaccgacaaggaccagaucuuccuguacgcgcaggccagcgggcggaucaccguguccacgaagaagucccagcaggccgugaucccgaacaucggcagccgcccccggguccgcaacauccccucccgggugagcaucuacuggaccaucgugaagcccggcgacauccugcucaucaacuccaccgggaaccugaucgccccgcgcggcuacuucaagauccggagcgggaaguccagcaucaugcgcuccgacgcccccaucggcaagugcaacagcgcgugcaucacccccaacggcuccauccccaacgacaagccguuccagaacgucaaccggaucacguacggggccugcccccgcuacgugaagcagaacacccugaagcucgccaccggcaugcggaacgugcccgagaagcagacccgcgggaucuucggcgccaucgccggguucaucgagaacggcugggagggcauggucgacgggugguacggcuuccggcaccagaacagcgaggggcgcggccaggcggccgaccugaaguccacgcaggccgccaucgaccagaucaacgggaagcugaaccggcucaucggcaagaccaucgagaaguuccaccagaucgagaaggaguucagcgagguggagggccgcauccaggaccuggagaaguacguggaggacaccaagaucgaccugugguccuacaacgccgagcuccuggucgcgcuggagaaccagcacaccaucgaccucacggacagcgagaugaacaagcuguucgagaagaccaagaagcagcugcgggagaacgccgaggacauggggaacggcugcuucaagaucuaccacaagugcgacaacgccugcaucggguccauccgcaacggcaucuacgaccacgacguguaccgcgacgaggcccucaacaaccgguuccagaucaaggggguggagcucaagagcggcuacaaggacuggauccuguggaucuccuucgccaucagcugcuuccugcugugcgucgcgcugcucggcuucaucaugugggccugccagaaggggaacauccgcugcaacaucugcaucuga

SEQ ID NO: 76503 - RNA, 1701 nt, Artificial Sequence
  derived and/or modified CDS sequence (opt1) from hemagglutinin__InfluenzaA__AID70461
augaagaccaucaucgcccugagcuacauccucugccugguguucgcccagaagcugcccggcaacgacaacuccaccgcgacccucugccuggggcaccacgccgucccgaacggcaccaucgugaagaccaucaccaacgaccagaucgaggugacgaacgccaccgagcugguccagagcuccagcaccggggagaucugcaacagcccccaccagauccucgacggcgagaacugcacccugaucgacgcccugcucggggacccccagugcgacggcuuccagaacaagaagugggaccuguucguggagcgcagcaaggcccacuccaacugcuaccccuacgacgugccggacuacgcgagccugcggucccucgucgccagcuccggcacgcuggaguucaacaacgagagcuucaacuggaccggggugacccagaacggcaccuccagcgccugcauccgccgguccaacaacagcuucuucucccgccugaacuggcucacgcaccugaacuucaaguaccccgcccugaacgugaccaugcccaacaacgagcaguucgacaagcucuacaucuggggcguccaccaccccgggaccgacaaggaccagaucuuccuguacgcgcaggccagcgggcggaucaccguguccacgaagaagucccagcaggccgugaucccgaacaucggcagccgcccccggguccgcaacauccccucccgggugagcaucuacuggaccaucgugaagcccggcgacauccugcucaucaacuccaccgggaaccugaucgccccgcgcggcuacuucaagauccggagcgggaaguccagcaucaugcgcuccgacgcccccaucggcaagugcaacagcgagugcaucacccccaacggcuccauccccaacgacaagccguuccagaacgucaaccggaucacguacggggcgugcccccgcuacgugaagcagaacacccugaagcucgccaccggcaugcggaacgugcccgagaagcagacccgcgggaucuucggcgccaucgccggguucaucgagaacggcugggagggcauggucgacgggugguacggcuuccggcaccagaacagcgaggggcgcggccaggccgcggaccugaaguccacgcaggccgccaucgaccagaucaacgggaagcugaaccggcucaucggcaagaccaucgagaaguuccaccagaucgagaaggaguucagcgagguggagggccgcauccaggaccuggagaaguacaucgaggacaccaagaucgaccugugguccuacaacgccgagcuccugguggcccuggagaaccagcacaccaucgaccucacggacagcgagaugaacaagcuguucgagaagaccaagaagcagcugcgggagaacgcggaggacauggggaacggcugcuucaagaucuaccacaagugcgacaacgccugcaucggguccauccgcaacggcaucuacgaccacgacgucuaccgcgacgaggcccucaacaaccgguuccagaucaaggggguggagcucaagagcggcuacaaggacuggauccuguggaucuccuucgccaucagcugcuuccugcugugcguggcccugcucggcuucaucaugugggcgugccagaaggggaacauccgcugcaucacgugcaucuga

SEQ ID NO: 76504 - RNA, 1701 nt, Artificial Sequence
  derived and/or modified CDS sequence (opt1) from hemagglutinin__InfluenzaA__AID70463
augaagaccaucaucgcccugagcuacauccucugccugguguucgcccagaagauccccggcaacgacaacuccaccgcgacgcugugccucgggcaccacgccgucccgaacggcaccaucgugaagaccaucaccaacgaccagaucgaggugacgaacgccaccgagcugguccagagcuccagcaccggggagaucugcaacagcccccaccagauccuggacggcgagaacugcacccucaucgacgcccugcugggggacccccagugcgacggcuuccagaacaagaagugggaccucuucguggagcgcagcaaggcccacuccaacugcuaccccuacgacgugccggacuacgcgagccugcggucccuggucgccagcuccggcacgcucgaguucaacaacgagagcuucaacuggaccggggugacccagaacggcaccuccagcgccugcauccgccgguccaacaacagcuucuucucccgccugaacuggcugacgcaccucaacuucaaguaccccgcccugaacgugaccaugcccaacaacgagcaguucgacaagcuguacaucuggggcguccaccaccccgggaccgacaaggaccagaucuuccucuacgcgcaggccagcgggcggaucaccguguccacgaagaagucccagcaggccgugaucccgaacaucggcagccgcccccggguccgcaacauccccucccgggugagcaucuacuggaccaucgugaagcccggcgacauccugcugaucaacuccaccgggaaccucaucgccccgcgcggcuacuucaagauccggagcgggaaguccagcaucaugcgcuccgacgcccccaucggcaagugcaacagcgcgugcaucacccccaacggcuccauccccaacgacaagccguuccagaacgucaaccggaucacguacggggccugcccccgcuacgugaagcagaacacccugaagcuggccaccggcaugcggaacgugcccgagaagcagacccgcgggaucuucggcgccaucgccggguucaucgagaacggcugggagggcauggucgacgggugguacggcuuccggcaccagaacagcgaggggcgcggccaggcggccgaccucaaguccacgcaggccgccaucgaccagaucaacgggaagcugaaccggcugaucggcaagaccaucgagaaguuccaccagaucgagaaggaguucagcgagguggagggccgcauccaggaccucgagaaguacguggaggacaccaagaucgaccugugguccuacaacgccgagcugcucgucgcgcuggagaaccagcacaccaucgaccugacggacagcgagaugaacaagcuguucgagaagaccaagaagcagcuccgggagaacgccgaggacauggggaacggcugcuucaagaucuaccacaagugcgacaacgccugcaucggguccauccgcaacggcaucuacgaccacgacguguaccgcgacgaggcccugaacaaccgguuccagaucaaggggguggagcucaagagcggcuacaaggacuggauccuguggaucuccuucgccaucagcugcuuccugcucugcgucgcgcugcugggcuucaucaugugggccugccagaaggggaacauccgcugcaacaucugcaucuga

SEQ ID NO: 76505 - RNA, 1701 nt, Artificial Sequence
  derived and/or modified CDS sequence (opt1) from hemagglutinin__InfluenzaA__AID70464
augaagaccaucaucgcccugagcuacauccucugccugguguucgcccagaagcugcccggcgacgacaacuccaccgcgacgcucugccuggggcaccacgccgucccgaacggcaccaucgugaagaccaucaccaacgaccagaucgaggugacgaacgccaccgagcugguccagagcuccagcaccggggagaucugcaacagcccccaccagauccucgacggcgagaacugcacccugaucgacgcccugcucggggacccccagugcgacggcuuccagaacaagaagugggaccuguucguggagcgcagcaaggcccacuccaacugcuaccccuacgacgugccggacuacgcgagccugcggucccucgucgccagcuccggcacgcuggaguucaacaacgagagcuucaacuggaccggggugacccagaacggcaccuccagcgccugcauccgccgguccaacaacagcuucuucucccgccugaacuggcucacgcaccugaacuucaaguaccccgcccugaacgugaccaugcccaacaacgagcaguucgacaagcucuacaucuggggcguccaccaccccgggaccgacaaggaccagaucuuccuguacgcgcaggccagcgggcggaucaccguguccacgaagaagucccagcaggccgugaucccgaacaucggcagccgcccccggguccgcaacauccccucccgggugagcaucuacuggaccaucgugaagcccggcgacauccugcucaucaacuccaccgggaaccugaucgccccgcgcggcuacuucaagauccggagcgggaaguccagcaucaugcgcuccgacgcccccaucggcaagugcaacagcgcgugcaucacccccaacggcuccauccccaacgacaagccguuccagaacgucaaccggaucacguacggggccugcccccgcuacgugaagcagaacacccugaagcucgccaccggcaugcggaacgugcccgagaagcagacccgcgggaucuucggcgccaucgccggguucaucgagaacggcugggagggcauggucgacgggugguacggcuuccggcaccagaacagcgaggggcgcggccaggcggccgaccugaaguccacgcaggccgccaucgaccagaucaacgggaagcugaaccggcucaucggcaagaccaucgagaaguuccaccagaucgagaaggaguucagcgagguggagggccgcauccaggaccuggagaaguacguggaggacaccaagaucgaccugugguccuacaacgccgagcuccuggucgcgcuggagaaccagcacaccaucgaccucacggacagcgagaugaacaagcuguucgagaagaccaagaagcagcugcgggagaacgccgaggacauggggaacggcugcuucaagaucuaccacaagugcgacaacgccugcaucggguccauccgcaacggcaccuacgaccacgacguguaccgcgacgaggcccucaacaaccgguuccagaucaaggggguggagcucaagagcggcuacaaggacuggauccuguggaucuccuucgccaucagcugcuuccugcugugcgucgcgcugcucggcuucaucaugugggccugccagaaggggaacauccgcugcaacaucugcaucuga

SEQ ID NO: 76506 - RNA, 1701 nt, Artificial Sequence
  derived and/or modified CDS sequence (opt1) from hemagglutinin__InfluenzaA__AID70465
augaagaccaucaucgcccugagcuacauccucugccugguguucgcccagaagcugcccggcgacgacaacuccaccgcgacgcucugccuggggcaccacgccgucccgaacggcaccaucgugaagaccaucaccaacgaccagaucgaggugacgaacgccaccgagcugguccagagcuccagcaccggggagaucugcaacagcccccaccagauccucgacggcgagaacugcacccugaucgacgcccugcucggggacccccagugcgacggcuuccagaacaagaagugggaccuguucguggagcgcagcaaggcccacuccaacugcuaccccuacgacgugccggacuacgcgagccugcggucccucgucgccagcuccggcacgcuggaguucaacaacgagagcuucaacuggaccggggugacccagaacggcaccuccagcgccugcauccgccgguccaacaacagcuucuucucccgccugaacuggcucacgcaccugaacuucaaguaccccgcccugaacgugaccaugcccaacaacgagcaguucgacaagcucuacaucuggggcguccaccaccccgggaccgacaaggaccagaucuuccuguacgcgcaggccagcgggcggaucaccguguccacgaagaagucccagcaggccgugaucccgaacaucggcagccgcccccggguccgcaacauccccucccgggugagcaucuacuggaccaucgugaagcccggcgacauccugcucaucaacuccaccgggaaccugaucgccccgcgcggcuacuucaagauccggagcgggaaguccagcaucaugcgcuccgacgcccccaucggcaagugcaacagcgcgugcaucacccccaacggcuccauccccaacgacaagccguuccagaacgucaaccggaucacguacggggccugcccccgcuacgugaagcagaacacccugaagcucgccaccggcaugcggaacgugcccgagaagcagacccgcgggaucuucggcgccaucgccggguucaucgagaacggcugggagggcauggucgacgggugguacggcuuccggcaccagaacagcgaggggcgcggccaggcggccgaccugaaguccacgcaggccgccaucgaccagaucaacgggaagcugaaccggcucaucggcaagaccaucgagaaguuccaccagaucgagaaggaguucagcgagguggagggccgcauccaggaccuggagaaguacguggaggacaccaagaucgaccugugguccuacaacgccgagcuccuggucgcgcuggagaaccaccacgccaucgaccucaccgacagcgagaugaacaagcuguucgagaagacgaagaagcagaugcgggagaacgccgaggacauggggaacggcugcuucaagaucuaccugaagugcgacaacgccugcaucggguccauccgcaacggcaucuacgaccacgacguguaccgcgacgaggcccucaacaaccgguuccagaucaaggggguggagcucaagagcggcuacaaggacuggauccuguggaucuccuucaccgagagcugcuuccugcugugcgucgcgcugcucggcuucaucaugugggccugccagaaggggaacauccgcugcaacaucugcaucuga

SEQ ID NO: 76507 - RNA, 1701 nt, Artificial Sequence
  derived and/or modified CDS sequence (opt1) from hemagglutinin__InfluenzaA__AID70466
augaagaccaucaucgcccugagcuacauccucugccugguguucgcccagaagcugcccggcaacgacaacuccaccgcgacgcucugccuggggcaccacgccgucccgaacggcaccaucgugaagaccaucaccaacgaccagaucgaggugacgaacgccaccgagcugguccagagcuccagcaccggggagaucugcaacagcccccaccagauccucgacggcgagaacugcacccugaucgacgcccugcucggggacccccagugcgacggcuuccagaacaagaagugggaccuguucguggagcgcagcaaggcccacuccaacugcuaccccuacgacgugccggacuacgcgagccugcggucccucgucgccagcuccggcacgcuggaguucaacaacgagagcuucaacuggaccggggugacccagaacggcaccuccagcgccugcauccgccgguccaacaacagcuucuucucccgccugaacuggcucacgcaccugaacuucaaguaccccgcccugaacgugaccaugcccaacaacgagcaguucgacaagcucuacaucuggggcguccaccaccccgggaccgacaaggaccagaucuuccuguacgcgcaggccagcgggcggaucaccguguccacgaagaagucccagcaggccgugaucccgaacaucggcagccgcccccggguccgcaacauccccucccgggugagcaucuacuggaccaucgugaagcccggcgacauccugcucaucaacuccaccgggaaccugaucgccccgcgcggcuacuucaagauccggagcgggaaguccagcaucaugcgcuccgacgcccccaucggcaagugcaacagcgcgugcaucacccccaacggcuccauccccaacgacaagccguuccagaacgucaaccggaucacguacggggccugcccccgcuacgugaagcagaacacccugaagcucgccaccggcaugcggaacgugcccgagaagcagacccgcgggaucuucggcgccaucgccggguucaucgagaacggcugggagggcauggucgacgggugguacggcuuccggcaccagaacagcgaggggcgcggccaggcggccgaccugaaguccacgcaggccgccaucgaccagaucaacgggaagcugaaccggcucaucggcaagaccaucgagaaguuccaccagaucgagaacgaguucagcgagguggagggccgcauccaggaccuggagaaguacguggaggacaccaagaucgaccugugguccuacaucggggagcuccuggucgcccuggagaaccagcacaccaucgaccucacggacagcgagaugaacaagcuguucgagaagaccaagaagcagcugcgggagaacgcggaggacaugggcaacgggugcuucaagaucuaccacaagugcgacaacgccugcaucggcuccauccgcaacgggaucuacgaccacgacguguaccgcgacgaggcccucaacaaccgguuccagaucaagggcguggagcucaagagcggcuacaaggacuggauccuguggaucuccuucgccaucagcugcuuccugcugugcgucgcccugcucggguucaucaugugggcgugccagaagggcaacauccgcugcaacaucugcaucuga

SEQ ID NO: 76508 - RNA, 1701 nt, Artificial Sequence
  derived and/or modified CDS sequence (opt1) from hemagglutinin__InfluenzaA__AID70467
augaagaccaucaucgcccugagcuacauccucugccugguguucgcccagaagcugcccggcaacgacaacuccaccgcgacgcucugccuggggcaccacgccgucccgaacggcaccaucgugaagaccaucaccaacgaccagaucgaggugacgaacgccaccgagcugguccagagcuccagcaccggggagaucugcaacagcccccaccagauccucgacggcgagaacugcacccugaucgacgcccugcucggggacccccagugcgacggcuuccagaacaagaagugggaccuguucguggagcgcagcaaggcccacuccaacugcuaccccuacgacgugccggacuacgcgagccugcggucccucgucgccagcuccggcacgcuggaguucaacaacgagagcuucaacuggaccggggugacccagaacggcaccuccagcgccugcauccgccgguccaacaacagcuucuucucccgccugaacuggcucacgcaccugaacuucaaguaccccgcccugaacgugaccaugcccaacaacgagcaguucgacaagcucuacaucuggggcguccaccaccccgggaccgacaaggaccagaucuuccuguacgcgcaggccagcgggcggaucaccguguccacgaagaagucccagcaggccgugaucccgaacaucggcagccgcccccggguccgcaacauccccucccgggugagcaucuacuggaccaucgugaagcccggcgacauccugcucaucaacuccaccgggaaccugaucgccccgcgcggcuacuucaagauccggagcgggaaguccagcaucaugcgcuccgacgcccccaucggcaagugcaacagcgcgugcaucacccccaacggcuccauccccaacgacaagccguuccagaacgucaaccggaucacguacggggccugcccccgcuacgugaagcagaacacccugaagcucgccaccggcaugcggaacgugcccgagaagcagacccgcgggaucuucggcgccaucgccggguucaucgagaacggcugggagggcauggucgacgggugguacggcuuccggcaccagaacugcgaggggcgcggccaggcggccgaccucaagagcacgcaggccgccaucgaccagaucaacgggaagcugaaccggcucaucggcaagaccaucgagaaguuccaccagaucgagaacgaguucuccgagguggagggccgcauccaggggcuggagaaguacguggaggacaccaagaucgaccuguggagcuacaucgccgagcucaucgucgcgcuggagaaccagcacaccaucgaccugacggacuccgagaugaacaagcuguucgagaagaccaagaagcagaugcgggagaacgccgaggacaugggcaacgggugcuucaagaucuaccacaagugcgacaacgccugcaucggcagcauccgcaacgggaucuacgaccacgacguguaccgcgacgaggcccugaacaaccgguuccagaucaagggcguggagcugaaguccggcuacaaggacuggauccucuggaucagcuucgccaucuccugcuuccugcugugcgucgcgcuccugggguucaucaugugggccugccagaagggcaacauccgcugcaacaucugcaucuga

SEQ ID NO: 76509 - RNA, 1701 nt, Artificial Sequence
  derived and/or modified CDS sequence (opt1) from hemagglutinin__InfluenzaA__AID70468
augaagaccaucaucgcccugagcuacauccucugccugguguucgcccagaagcugcccggcaacgacaacuccaccgcgacgcucugccuggggcaccacgccgucccgaacggcaccaucgugaagaccaucaccaacgaccagaucgaggugacgaacgccaccgagcugguccagagcuccagcaccggggagaucugcaacagcccccaccagauccucgacggcgagaacugcacccugaucgacgcccugcucggggacccccagugcgacggcuuccagaacaagaagugggaccuguucguggagcgcuccaaggcccacuccaacugcuaccccuacgacgugccggacuacgcgagccugcggucccucgucgccagcuccggcacgcuggaguucaacaacgagagcuucaacuggaccggggugacccagaacggcaccuccagcgccugcauccgccgguccaacaacagcuucuucucccgccugaacuggcucacgcaccugaacuucaaguaccccgcccugaacgugaccaugcccaacaacgagcaguucgacaagcucuacaucuggggcguccaccaccccgggaccgacaaggaccagaucuuccuguacgcgcaggccagcgggcggaucaccguguccacgaagcgcagccagcaggccgugaucccgaacaucggcagccggccccgcguccggaacauccccucccgcgugagcaucuacuggaccaucgugaagcccggcgacauccugcucaucaacuccaccgggaaccugaucgccccgcggggcuacuucaagauccgcagcgggaaguccagcaucaugcgguccgacgcccccaucggcaagugcaacagcgcgugcaucacccccaacggcuccauccccaacgacaagccguuccagaacgucaaccgcaucacguacggggccugcccccgguacgugaagcagaacacccugaagcucgccaccggcaugcgcaacgugcccgagaagcagacccgggggaucuucggcgccaucgccggguucaucgagaacggcugggagggcauggucgacgggugguacggcuuccgccaccagaacugcgaggggcggggccaggcggccgaccucaagagcacgcaggccgccaucgaccagaucaacgggaagcugaaccgccucaugggcaaguccaucgagaaguuccaccagaucgagaacgaguucagcgagguggagggccggauccaggggcuggagaaguacguggaggacaccaagaucgaccugugguccuacaacggcgagcucaucgucgcccuggagaaccagcacgcgaucgaccugaccgacagcgagaugaacaagcuguucgagaagaccaagaagcagaugcgcgagaacgccgaggacauggggaacggcugcuucaagaucuaccugaagugcgacaacgccugcaucggguccauccgcaacggcaucuacgaccacgacguguaccgggacgaggcccugaacaaccgcuuccagaucaagggcguggagcucaagagcggguacaaggacuggauccuguggaucuccuucacgaucagcugcuuccugcucugcgucgcccugcugggcuucaucaugugggcgcggcagaaggggaacauccgcugcaacaucugcaucuga

SEQ ID NO: 76510 - RNA, 1701 nt, Artificial Sequence
  derived and/or modified CDS sequence (opt1) from hemagglutinin__InfluenzaA__AID70469
augaagaccaucaucgcccugagcuacauccucugccugguguucgcccagaagguccccggcaacgagaacuccaccgcgacgcugugccucgggcaccacgccgugccgaacggcaccaucgugaagaccaucaccaacgaccagaucgaggucacgaacgccaccgagcuggugcagagcuccagcaccggggagaucugcaacagcccccaccagauccuggacggcgagaacugcacccucaucgacgcccugcugggggacccccagugcgacggcuuccagaacaagaagugggaccucuucguggagcgcuccaaggcccacuccaacugcuaccccuacgacgucccggacuacgcgagccugcggucccugguggccagcuccggcacgcucgaguucaacaacgagagcuucaacuggaccggggugacccagaacggcaccuccagcgccugcauccgccgguccaacaacagcuucuucucccgccugaacuggcugacgcaccucaacuucaaguaccccgcccugaacgucaccaugcccaacaacgagcaguucgacaagcuguacaucuggggcgugcaccaccccgggaccgacaaggaccagaucuuccucuacgcgcaggccagcgggcggaucaccguguccacgaagcgcagccagcaggccgucaucccgaacaucggcagccggccccgcgugcggaacauccccucccgcgugagcaucuacuggaccaucgucaagcccggcgacauccugcugaucaacuccaccgggaaccucaucgccccgcggggcuacuucaagauccgcagcgggaaguccagcaucaugcgguccgacgcccccaucggcaagugcaacagcgcgugcaucacccccaacggcuccauccccaacgacaagccguuccagaacgugaaccgcaucacguacggggccugcccccgguacgugaagcagaacacccugaagcuggccaccggcaugcgcaacguccccgagaagcagacccgggggaucuucggcgccaucgccggguucaucgagaacggcugggagggcaugguggacgggugguacggcuuccgccaccagaacugcgaggggcggggccaggcggccgaccucaagagcacgcaggccgccaucgaccagaucaacgggaagcugaaccgccugaucggcaagaccaucgagaaguuccaccagaucgagaaggaguucuccgagguggagggccggauccaggggcucgagaaguacgucgaggacaccaagaucgaccuguggagcuacaacgccgagcugcucguggcgcuggagaaccagcacaccaucgaccugacggacuccgagaugaacaagcuguucgagaagaccaagaagcagaugcgcgagaacgccgaggacaugggcaacgggugcuucaagaucuaccacaagugcgacaacgccugcaucggcagcauccgcaacgggaucuacgaccacgacguguaccgggacgaggcccucaacaaccgcuuccagaucaagggcgucgagcugaaguccggcuacaaggacuggauccucuggaucagcuucaccaucuccugcuuccugcugugcguggcccuccugggguucaucaugugggcgugccagaagggcaacauccggugcaacaucugcaucuga

SEQ ID NO: 76511 - RNA, 1701 nt, Artificial Sequence
  derived and/or modified CDS sequence (opt1) from hemagglutinin__InfluenzaA__AID70470
augaagaccaucaucgcccugagcuacauccucugccugguguucgcccagaagguccccggcaacgagaacuccaccgcgacgcugugccucgggcaccacgccgugccgaacggcaccaucgugaagaccaucaccaacgaccagaucgaggucacgaacgccaccgagcuggugcagagcuccagcaccggggagaucugcaacagcccccaccagauccuggacggcgagaacugcacccucaucgacgcccugcugggggacccccagugcgacggcuuccagaacaagaagugggaccucuucguggagcgcuccaaggcccacuccaacugcuaccccuacgacgucccggacuacgcgagccugcggucccugguggccagcuccggcacgcucgaguucaacaacgagagcuucaacuggaccggggugacccagaacggcaccuccagcgccugcauccgccgguccaacaacagcuucuucucccgccugaacuggcugacgcaccucaacuucaaguaccccgcccugaacgucaccaugcccaacaacgagcaguucgacaagcuguacaucuggggcgugcaccaccccgggaccgacaaggaccagaucuuccucuacgcgcaggccagcgggcggaucaccguguccacgaagcgcagccagcaggccgucaucccgaacaucggcagccggccccgcgugcggaacauccccucccgcgugagcaucuacuggaccaucgucaagcccggcgacauccugcugaucaacuccaccgggaaccucaucgccccgcggggcuacuucaagauccgcagcgggaaguccagcaucaugcgguccgacgcccccaucggcaagugcaacagcgcgugcaucacccccaacggcuccauccccaacgacaagccguuccagaacgugaaccgcaucacguacggggccugcccccgguacgugaagcagaacacccugaagcuggccaccggcaugcgcaacguccccgagaagcagacccgggggaucuucggcgccaucgccggguucaucgagaacggcugggagggcaugguggacgggugguacggcuuccgccaccagaacugcgaggggcggggccaggcggccgaccucaagagcacgcaggccgccaucgaccagaucaacgggaagcugaaccgccugaucggcaagaccaucgagaaguuccaccagaucgagaaggaguucuccgagguggagggccggauccaggggcucgagaaguacgucgaggacaccaagaucgaccuguggagcuacaacggcgagcugcucguggcccuggagaaccaccacaccaucgaccugacggacuccgagaugaacaagcuguucgagaagaccaagaagcagaugcgcgagaacgcggaggacauggggaacggcugcuucaagaucuaccacaagugcgacaacgccugcaucgggagcauccgcaacggcaucuacgaccacgacguguaccgggacgaggcccucaacaaccgcuuccagaucaagggcgucgagcugaaguccggguacaaggacuggauccucuggaucagcuucaccaucuccugcuuccugcugugcguggcccuccugggcuucaucaugugggccugccagaaggggaacauccggugcaacaucugcaucuga

SEQ ID NO: 76512 - RNA, 1701 nt, Artificial Sequence
  derived and/or modified CDS sequence (opt1) from hemagglutinin__InfluenzaA__AID70471
augaagaccaucaucgcccugagcuacauccucugccugguguucacccagaagcugcccggcaacgacaacuccacggccacccucugccuggggcaccacgcggucccgaacggcaccaucgugaagaccaucacgaacgaccagaucgaggugaccaacgccaccgagcugguccagagcuccagcaccggggagaucugcaacagcccccaccagauccucgacggcgagaacugcacgcugaucgacgcccugcucggggacccccagugcgacggcuuccagaacaagaagugggaccuguucguggagcgcagcaaggcccacuccaacugcuaccccuacgacgugccggacuacgccagccugcggucccucgucgcgagcuccggcacccuggaguucaacaacgagagcuucaacuggaccggggugacccagaacggcacguccagcgccugcauccgccgguccaacaacagcuucuucucccgccugaacuggcucacccaccugaacuucaaguaccccgcccugaacgugaccaugcccaacaacgagcaguucgacaagcucuacaucuggggcguccaccaccccgggaccgacaaggaccagaucuuccuguacgcccaggcgagcgggcggaucacgguguccaccaagaagucccagcaggccgugaucccgaacaucggcagccgcccccggguccgcaacauccccucccgggugagcaucuacuggaccaucgugaagcccggcgacauccugcucaucaacuccaccgggaaccugaucgccccgcgcggcuacuucaagauccggagcgggaaguccagcaucaugcgcuccgacgcccccaucggcaagugcaacagcgccugcaucacgcccaacggcuccauccccaacgacaagccguuccagaacgucaaccggaucaccuacggggcgugcccccgcuacgugaagcagaacacccugaagcucgccaccggcaugcggaacgugcccgagaagcagacgcgcgggaucuucggcgccaucgccggguucaucgagaacggcugggagggcauggucgacgggugguacggcuuccggcaccagaacagcgaggggcgcggccaggccgcggaccugaaguccacccaggccgccaucgaccagaucaacgggaagcugaaccggcucaucggcaagaccaucgagaaguuccaccagaucgagaacgaguucagcgagguggagggccgcauccaggaccuggagaaguacguggaggacaccaagaucgaccugugguccuacaacgccgagcucaucgucgcccuggagaaccaccacacgaucgaccugaccgacagcgagaugaacaagcuguucgagaagaccaagaagcagaugcgggagaacgcggaggacauggggaacggcugcuucaagaucuaccacaagugcgacaacgccugcaucggguccauccgcaacggcaucuacgaccacgacguguaccgcgacgaggcccugaacaaccgguuccagaucaaggggguggagcucaagagcggcuacaaggacuggauccucuggaucuccuucgccaucagcugcuuccugaucugcgucgcccugcucggcuucaucaugugggcgugccagaaggggaaccugcgcugcaacaucugcaucuga

SEQ ID NO: 76513 - RNA, 1701 nt, Artificial Sequence
  derived and/or modified CDS sequence (opt1) from hemagglutinin__InfluenzaA__AID70472
augaagaccaucaucgcccugagcuacauccucugccugguguucgcccagaagcugcccggcaacgacaacuccaccgcgacgcucugccuggggcaccacgccgucccgaacggcaccaucgugaagaccaucaccaacgaccagaucgaggugacgaacgccaccgagcugguccagagcuccagcaccggggagaucugcaacagcccccaccagauccucgacggcgagaacugcacccugaucgacgcccugcucggggacccccagugcgacggcuuccagaacaagaagugggaccuguucguggagcgcagcaaggcccacuccaacugcuaccccuacgacgugccggacuacgcgagccugcggucccucgucgccagcuccggcacgcuggaguucaacaacgagagcuucaacuggaccggggugacccagaacggcaccuccagcgccugcauccgccgguccaacaacagcuucuucucccgccugaacuggcucacgcaccugaacuucaaguaccccgcccugaacgugaccaugcccaacaacgagcaguucgacaagcucuacaucuggggcguccaccaccccgggaccgacaaggaccagaucuuccuguacgcgcaggccagcgggcggaucaccguguccacgaagaagucccagcaggccgugaucccgaacaucggcagccgcccccggguccgcaacauccccucccgggugagcaucuacuggaccaucgugaagcccggcgacauccugcucaucaacuccaccgggaaccugaucgccccgcgcggcuacuucaagauccggagcgggaaguccagcaucaugcgcuccgacgcccccaucggcaagugcaacagcgcgugcaucacccccaacggcuccauccccaacgacaagccguuccagaacgucaaccggaucacguacggggccugcccccgcuacgugaagcagaacacccugaagcucgccaccggcaugcggaacgugcccgagaagcagacccgcgggaucuucggcgccaucgccggguucaucgagaacggcugggagggcauggucgacgggugguacggcuuccggcaccagaacagcgaggggcgcggccaggcggccgaccugaaguccacgcaggccgccaucgaccagaucaacgggaagcugaaccggcucaucggcaagaccaucgagaaguuccaccagaucgagaaggaguucagcgagguggagggccgcauccaggaccuggagaaguacguggaggacaccaagaucgaccugugguccuacaacgccgagcuccuggucgcgcuggagaaccaccacaccaucgaccucacggacagcgagaugaacaagcuguucgagaagaccaagaagcagaugcgggagaacgccgaggacauggggaacggcugcuucaagaucuaccacaagugcgacaacgccugcaucggguccauccgcaacggcaucuacgaccacgacguguaccgcgacgaggcccugaacaaccgguuccagaucaaggggguggagcucaagagcggcuacaaggacuggauccuguggaucuccuucgccaucagcugcuuccugcucugcgucgcgcugcugggcuucaucaugugggccugccagaaggggaacauccgcugcaacaucugcaucuga

SEQ ID NO: 76514 - RNA, 1701 nt, Artificial Sequence
  derived and/or modified CDS sequence (opt1) from hemagglutinin__InfluenzaA__AID70473
augaagaccaucaucgcccugagcuacauccucugccugguguucgcccagaagcugcccggcaacgacaacuccaccgcgacgcucugccuggggcaccacgccgucccgaacggcaccaucgugaagaccaucaccaacgaccagaucgaggugacgaacgccaccgagcugguccagagcuccagcaccggggagaucugcaacagcccccaccagauccucgacggcgagaacugcacccugaucgacgcccugcucggggacccccagugcgacggcuuccagaacaagaagugggaccuguucguggagcgcagcaaggcccacuccaacugcuaccccuacgacgugccggacuacgcgagccugcggucccucgucgccagcuccggcacgcuggaguucaacaacgagagcuucaacuggaccggggugacccagaacggcaccuccagcgccugcauccgccgguccaacaacagcuucuucucccgccugaacuggcucacgcaccugaacuucaaguaccccgcccugaacgugaccaugcccaacaacgagcaguucgacaagcucuacaucuggggcguccaccaccccgggaccgacaaggaccagaucuuccuguacgcgcaggccagcgggcggaucaccguguccacgaagaagucccagcaggccgugaucccgaacaucggcagccgcccccggguccgcaacauccccucccgggugagcaucuacuggaccaucgugaagcccggcgacauccugcucaucaacuccaccgggaaccugaucgccccgcgcggcuacuucaagauccggagcgggaaguccagcaucaugcgcuccgacgcccccaucggcaagugcaacagcgcgugcaucacccccaacggcuccauccccaacgacaagccguuccagaacgucaaccggaucacguacggggccugcccccgcuacgugaagcagaacacccugaagcucgccaccggcaugcggaacgugcccgagaagcagacccgcgggaucuucggcgccaucgccggguucaucgagaacggcugggagggcauggucgacgggugguacggcuuccggcaccagaacugcgaggggcgcggccaggcggccgaccucaagagcacgcaggccgccaucgaccagaucaacgggaagcugaaccggcugaucggcaagaccaucgagaaguuccaccagaucgagaaggaguucuccgagguggagggccgcauccaggggcuggagaaguacguggaggacaccaagaucgaccuguggagcuacaacgccgagcuccuggucgcgcuggagaaccagcacaccaucgaccucacggacuccgagaugaacaagcuguucgagaagaccaagaagcagaugcgggagaacgccgaggacaugggcaacgggugcuucaagaucuaccacaagugcgacaacgccugcaucggcagcauccgcaacgggaucuacgaccacgacguguaccgcgacgaggcccugaacaaccgguuccagaucaagggcguggagcucaaguccggcuacaaggacuggauccuguggaucagcuucgccaucuccugcuuccugcucugcgucgcgcugcugggguucaucaugugggccugccagaagggcaacauccgcugcaacaucugcaucuga

SEQ ID NO: 76515 - RNA, 1701 nt, Artificial Sequence
  derived and/or modified CDS sequence (opt1) from hemagglutinin__InfluenzaA__AID70474
augaagaccaucaucgcccugagcuacauccucugccugguguucgcccagaagcugcccggcaacgacaacuccaccgcgacgcucugccuggggcaccacgccgucccgaacggcaccaucgugaagaccaucaccaacgaccagaucgaggugacgaacgccaccgagcugguccagagcuccagcaccggggagaucugcaacagcccccaccagauccucgacggcgagaacugcacccugaucgacgcccugcucggggacccccagugcgacggcuuccagaacaagaagugggaccuguucguggagcgcagcaaggcccacuccaacugcuaccccuacgacgugccggacuacgcgagccugcggucccucgucgccagcuccggcacgcuggaguucaacaacgagagcuucaacuggaccggggugacccagaacggcaccuccagcgccugcauccgccgguccaacaacagcuucuucucccgccugaacuggcucacgcaccugaacuucaaguaccccgcccugaacgugaccaugcccaacaacgagcaguucgacaagcucuacaucuggggcguccaccaccccgggaccgacaaggaccagaucuuccuguacgcgcaggccagcgggcggaucaccguguccacgaagaagucccagcaggccgugaucccgaacaucggcagccgcccccggguccgcaacauccccucccgggugagcaucuacuggaccaucgugaagcccggcgacauccugcucaucaacuccaccgggaaccugaucgccccgcgcggcuacuucaagauccggagcgggaaguccagcaucaugcgcuccgacgcccccaucggcaagugcaacagcgcgugcaucacccccaacggcuccauccccaacgacaagccguuccagaacgucaaccggaucacguacggggccugcccccgcuacgugaagcagaacacccugaagcucgccaccggcaugcggaacgugcccgagaagcagacccgcgggaucuucggcgccaucgccggguucaucgagaacgucugggagggcaugguggacggcugguucggguuccggcaccagaucugcgagggccgcgggcaggcggccggccuggagagcacgcaggccgccaucgaccagaucaacgggaagaugaaccggcugaugggcaagaccaucggcaaguuccaccagaucgugaacgaguucuccgaggucgaggggcgcauccaggaccucgagaaguacguggaggacaccaagaucgaccuguggagcuacaucggcgagcugcucguggcccuggagaaccaccacgcgaucgaccugaccgacuccgagaugaacaagcuguucgagaagacgaagaagcagaugcgggagaacgccgaggacauggggaacggcugcuucaagaucuaccacaagugcgacaacgccugcaucgggagcauccgcaacggcaucuacgaccgcgacgucuaccgggacgaggcccucaacaaccgcuuccacaucaagggcguggagcugaaguccggguacaaggacuggaucaucuggaucagcuccaccgagagcugcuuccuccugugcgucgcccugcucggcuucaucaugugggcgugccagaaggggaacauccgguccaacaucugcaucuga

SEQ ID NO: 76516 - RNA, 1701 nt, Artificial Sequence
  derived and/or modified CDS sequence (opt1) from hemagglutinin__InfluenzaA__AID70475
augaagaccaucaucgcccugagcuacaugcucugccugguguucgcccagaagcugcccggcaacgacaacuccaccgcgacgcucugccuggggcaccacgccgucccgaacggcaccaucgugaagaccaucaccaacgaccagaucgaggugacgaacgccaccgagcugguccagagcuccagcaccggggagaucugcaacagcccccaccagauccucgacggcgagaacugcacccugaucgacgcccugcucggggacccccagugcgacggcuuccagaacaagaagugggaccuguucguggagcgcagcaaggcccacuccaacugcuaccccuacgacgugccggacuacgcgagccugcggucccucgucgccagcuccggcacgcuggaguucaacaacgagagcuucaacuggaccggggugacccagaacggcaccuccagcgccugcauccgccgguccaacaacagcuucuucucccgccugaacuggcucacgcaccugaacuucaaguaccccgcccugaacgugaccaugcccaacaacgagcaguucgacaagcucuacaucuggggcguccaccaccccgggaccgacaaggaccagaucuuccuguacgcgcaggccagcgggcggaucaccguguccacgaagaagucccagcaggccgugaucccgaacaucggcagccgcccccggguccgcaacauccccucccgggugagcaucuacuggaccaucgugaagcccggcgacauccugcucaucaacuccaccgggaaccugaucgccccgcgcggcuacuucaagauccggagcgggaaguccagcaucaugcgcuccgacgcccccaucggcaagugcaacagcgcgugcaucacccccaacggcuccauccccaacgacaagccguuccagaacgucaaccggaucacguacggggccugcccccgcuacgugaagcagaacacccugaagcucgccaccggcaugcggaacgugcccgagaagcagacccgcgggaucuucggcgccaucgccggguucaucgagaacgucugggagggcaugguggacggcugguacggguuccggcaccagaacugcgagggccgcgggcaggcggccgaccucaagagcgcccaggccgccaucgaccccaucaacggcaagcugaaccggcugauggggaagacgaucggcaaguuccaccagaucgagaaggaguucuccgagguggagggccgcauccaggaccuggagaaguacgucgaggacaccaagaucgaccuguggagcuacaacggggagcuccugguggcgcuggagaaccagcacgccaucgaccucaccgacuccgagaugaacaagguguucgagaagaccaagaagcagcugcgggagaacgccgaggacaugggcaacgggugcuucaagaucuaccacaagugcgacaacgccugcaucggcagcauccgcaacgggaucuacgaccacgacgucuaccgcaacgaggcccugaacaaccgguuccagaucaagggcguggagcucaaguccggcuacaaggacuggauccuguggaucagcuucgcgaucuccugcuuccugcucagcgucgccucccugggguucaucaugugggccuaccagaagggcaacauccgcugcaacaucugcaucuga

SEQ ID NO: 76517 - RNA, 1701 nt, Artificial Sequence
  derived and/or modified CDS sequence (opt1) from hemagglutinin__InfluenzaA__AID70476
augaagaccaucaucgcccugagcuacauccucugccugguguucgcccagaagcugcccggcaacgagaacuccaccgcgacgcucgggcugggccaccacgccgucccgaacgggaccaucgugaagaccaucaccaacgaccagaucgaggugacgaacgccaccgagcugguccagagcuccagcaccggcgagaucugcaacagcccccaccagauccucgacggggagaacugcacccugaucgacgcccugcucggcgacccccagugcgacgacuuccagaacaagaagugggaccuguucguggagcgcagcaaggcccacuccaacugcuaccccuacgacgugccggacuacgcgagccugcggucccucgucgccagcuccggcacgcuggaguucaacaacgagagcuucaacuggaccggggugacccagaacggcaccuccagcgccugcauccgccgguccaacaacagcuucuucucccgccugaacuggcucacgcaccugaacuucaaguaccccgcccugaacgugaccaugcccaacaacgagcaguucgacaagcucuacaucuggggcguccaccaccccgggaccgacaaggaccagaucuuccuguacgcgcaggccagcgggcggaucaccguguccacgaagaagucccagcaggccgugaucccgaacaucggcagccgcccccggguccgcaacauccccucccgggugagcaucuacuggaccaucgugaagcccggcgacauccugcucaucaacuccaccgggaaccugaucgccccgcgcggcuacuucaagauccggagcgggaaguccagcaucaugcgcuccgacgcccccaucggcaagugcaacagcgcgugcaucacccccaacggcuccauccccaacgacaagccguuccagaacgucaaccggaucacguacggggccugcccccgcuacgugaagcagaacaaccugaagcucgccaccggcaugcggaacgugcccgagaagcagacccgcgggaucuucggcgccaucgccggguucaucgagaacggcugggagggcauggucgacgggugguacggcuuccggcaccagaacagcgaggggcgcggccaggcggccgaccugaaguccacccaggccgccaucgaccagaucaacgggaagcugaaccggcucaucggcaagacgaucgagaaguuccaccagaucgagaaggaguucagcgagguggagggccgcauccaggggcgggagaaguacguggaggacaccaagaucgaccugugguccuacaucggcgaguucaucgucgcccuggagaaccagcacaccaucgaccucaccgacagcgagaugaacaagcuguucgagaagacgaagaagcagaugcgcgagaacgcggaggacauggggaacggcugcuucaagaucuaccacaagugcgacaacgccugcaucggguccauccgcaacggcaucuacgaccacgacguguaccgggacgaggcccugaacaaccgcuuccagaucaagggcguggagcucaagagcggguacaaggacuggauccuguggaucuccuucgccaucagcugcuuccugcucugcgucgcccugcugggcuucaucaugugggcgugccagaaggggaacauccggugcaacaucugcaucuga

SEQ ID NO: 76518 - RNA, 1701 nt, Artificial Sequence
  derived and/or modified CDS sequence (opt1) from hemagglutinin__InfluenzaA__AID70477
augaagaccaucaucgcccugagcuacauccucugccugguguucgcccagaagcugcccggcaacgacuccagcaccgggacgcucugccugggccaccacgcggucccgaacgggaccaucgugaagaccaucaccaacgaccagaucgaggugacgaacgccaccgagcugguccaguccagcuccaccggcgagaucugcaaccgcccccaccagauccucgacggggagaacugcacccugaucgacgcccugcucggcgacccccagugcgacggcuuccagaacaagaagugggaccuguucguggagcggagcaaggcccacuccaacugcuaccccuacgacgugccggacuacgccagccugcgcucccucgucgcgagcuccgggacgcuggaguucaacaacgagagcuucaacuggaccggcgugacccagaacgggaccuccagcgccugcauccggcgcuccaacaacagcuucuucuccauccugaacuggcucacgcaccugaacuucaaguaccccgcccugaacgugaccaugcccaacaacgagcaguucgacaagcucuacaucuggggcguccaccaccccgggaccgacaaggaccagaucuuccuguacgcccaggcgagcggccggaucaccguguccacgaagaagucccagcaggccgugaucccgaacaucggcagccgcccccggguccgcaacauccccagccgggugagcaucuacuggaccaucgugaagcccggggagauccugcucaucaacuccaccggcaaccugaucgccccgcgcggguacuucaagauccggagcggcaaguccagcaucaugcgcuccgacgcccccaucggcaagugcuacagcgccugcaucacccccaacggguccauccccaacgacaagccguuccagaacgucaaccggaucacguacggcgcgugcccccgcuacgugaagcagcacccccugaagcucgccaccgggaugcggaacgugcccgagaagcagacccgcggcaucuucggggccaucgccggcuucaucgagaacggcugggaggggauggucgacggcugguacggguuccggcaccagaucugcgagggccgcgggcaggccgcggaccucaagagcacccaggccgccaucgaccagaucaacggcaagcugaaccggcucaucggcaagacgaucgagaaguuccaccagaucgagaaggaguucuccgagguggaguggcgcauccaggggcuggagaaguacguggaggacaccaaggucgaccuguggagcuacaacggcgagcucaucguggcccuggagaaccaccacaccaucgaccugaccgacuccgagaugaacaagcuguucgagaagacgaagaagcagaugcgggagaacgccgaggacauggggaacggcugcuucaagaucuaccugaagugcgacaacgcgugcaucgggagcauccgcaacggcaucuacgaccacgacguguaccgcgacgaggcccugaacaaccgguuccagaucaagggcgucgagcucaaguccggguacaaggacuggauccuguggaucagcuucaccgaguccugcuuccugcucagcguggcccugcugggcuucaucaugugggccugccagaaggggaacauccgcugcaacaucugcaucuga

SEQ ID NO: 76519 - RNA, 1701 nt, Artificial Sequence
  derived and/or modified CDS sequence (opt1) from hemagglutinin__InfluenzaA__AID70478
augaagaccaucaucgcccugagcuacauccucugccugguguucgcccagaagcugcccggcaacgacaacuccaccgcgacgcucugccuggggcaccacgccgucccgaacggcaccaucgugaagaccaucaccaacgaccagaucgaggugacgaacgccaccgagcugguccagagcuccagcaccggggagaucugcaacagcccccaccagauccucgacggcgagaacugcacccugaucgacgcccugcucggggacccccagugcgacggcuuccagaacaagaagugggaccuguucguggagcgcagcaaggcccacuccaacugcuaccccuacgacgugccggacuacgcgagccugcggucccucgucgccagcuccggcacgcuggaguucaacaacgagagcuucaacuggaccggggugacccagaacggcaccuccagcgccugcauccgccgguccaacaacagcuucuucucccgccugaacuggcucacgcaccugaacuucaaguaccccgcccugaacgugaccaugcccaacaacgagcaguucgacaagcucuacaucuggggcguccaccaccccgggaccgacaaggaccagaucuuccuguacgcgcaggccagcgggcggaucaccguguccacgaagaagucccagcaggccgugaucccgaacaucggcagccgcccccggguccgcaacauccccucccgggugagcaucuacuggaccaucgugaagcccggcgacauccugcucaucaacuccaccgggaaccugaucgccccgcgcggcuacuucaagauccggagcgggaaguccagcaucaugcgcuccgacgcccccaucggcaagugcaacagcgcgugcaucacccccaacggcuccauccccaacgacaagccguuccagaacgucaaccggaucacguacggggccugcccccgcuacgugaagcagaacacccugaagcucgccaccggcaugcggaacgugcccgagaagcagacccgcgggaucuucggcgccaucgccggguucaucgagaacggcugggagggcauggucgacgggugguacggcuuccggcaccagaacugcgaggggcgcggccaggcggccgaccuggagagcacgcaggccgccaucgaccagaucaacgggaagaugaaccggcugaugggcaagaccaucgagaaguuccaccagaucgagaaggaguucuccgagguggagggccgcauccaggggcgggagaaguacguggaggacaccaagaucgaccucuggagcuacaacggcgagcugcuggucgaccucgagaaccagcacaccaucgaccugacggacuccgagaugaacaagguguucgagaagaccaagaagcagaugcgcgagaacgccgaggacauggggaacggcugcuucaagaucuaccacaagugcgacaacgcgugcaucgggagcauccgcaacggcaucuacgaccacgacguguaccgggacgaggcccugaacaaccgcuuccagaucaagggcgucgagcucaaguccggguacaaggacuggauccaguggaucagcuucaccaucuccugcuuccugcugugcgugagccuccugggcuucaucaugugggccugccagaaggggaacauccggugcaacaucugcaucuga

SEQ ID NO: 76520 - RNA, 1701 nt, Artificial Sequence; identical to SEQ ID NO: 74064
  derived and/or modified CDS sequence (opt1) from hemagglutinin__InfluenzaA__AID70632

SEQ ID NO: 76521 - RNA, 1683 nt, Artificial Sequence
  derived and/or modified CDS sequence (opt1) from hemagglutinin__InfluenzaA__AID70634
augaacacccagauccugguguucgcccucaucgccaucauccccaccaacgcggacaagaucugccugggccaccacgccgucagcaacgggacgaaggugaacacccugaccgagcgcggcguggaggucgugaacgccaccgagacgguggagcggaccaacaucccgcgcaucugcuccaaggggaagcggaccgucgaccucggccagugcgggcugcugggcaccaucacgggcccgccccagugcgaccaguuccucgaguucagcgccgaccugaucaucgagcgccgggagggguccgacgugugcuaccccggcaaguucgugaacgaggaggcccugcgccagauccuccgggagagcgggggcaucgacaaggaggcgaugggguucaccuacuccggcauccgcaccaacggcgccaccagcgccugccggcgcuccgggagcuccuucuacgccgagaugaaguggcugcugagcaacacggacaacgcggccuucccgcagaugaccaaguccuacaagaacacccgcaagagccccgcccucaucgucuggggcauccaccacuccgugagcaccgccgagcagacgaagcuguacggguccggcaacaagcuggugaccgucggcagcuccaacuaccagcagagcuucgugcccucccccggggcccggccccaggugaacggccucagcgggcggaucgacuuccacuggcugaugcugaaccccaacgacaccgucaccuucagcuucaacggcgcguucaucgcccccgaccgcgccuccuuccuccggggcaagagcauggggauccaguccggcguccagguggacgccaacugcgagggggacugcuaccacagcggcgggacgaucaucuccaaccugcccuuccagaacaucgacagccgcgccgugggcaagugcccgcgguacgugaagcagcgcucccugcuccuggcgaccgggaugaagaacgugcccgagauccccaagggccggggccuguucggggccaucgccggcuucaucgagaacgggugggagggccucaucgacgggugguacggcuuccgccaccagaacgcccagggcgaggggaccgccgcggacuacaagagcacccaguccgccaucgaccagaucacgggcaagcugaaccggaucaucgagaagaccaaccagcaguucgagcugaucgacaacgaguucaacgaggucgagaagcagaucagcaacgugaucaacuggacccgcgacuccaucaccgagguguggagcuacaacgccgagcuccuggucgccauggagaaccagcacacgaucgaccuggccgacuccgagauggacaagcucuacgagcgcgugaagcggcagcugcgcgagaacgcggaggaggacgggaccggcugcuucgagaucuuccacaagugcgacgacgacugcauggccagcauccggaacaacaccuacgaccacuccaaguaccgcgaggaggccaugcagaaccggauccagaucgaccccgucaagcugagcuccggcuacaaggacgugauccucugguucagcuucggggccuccugcuucauccugcuggcgaucgugaugggccucgucuucaucugcgugaagaacgggaacaugcgcugcaccaucugcaucuga

SEQ ID NO: 76522 - RNA, 1701 nt, Artificial Sequence
  derived and/or modified CDS sequence (opt1) from hemagglutinin__InfluenzaA__AIF72902
augaagaccaucaucgcccugagcuacauccucugccugguguucgcccagaagcugcccggcaacgacaacuccaccgcgacgcucugccuggggcaccacgccgucccgaacggcaccaucgugaagaccaucaccaacgaccagaucgaggugacgaacgccaccgagcugguccagagcuccagcgccggggagaucugcgacagcccccaccagauccucgacggcgagaacugcacccugaucgacgcccugcucggggacccccagugcgacggcuuccagaacaagaagugggaccuguucguggagcgcagccgggcguacuccaacugcuaccccuacgacgugccggacuacgccagccugcgcucccucgucgccagcuccggcacccuggaguucaacaacgagagcuucaacuggacgggggugacccagaacggcaccuccagcgccugcauccggcgcuccaacaacagcuucuucucccggcugaacuggcucacccaccugaacuucaaguaccccgcgcugaacgugacgaugcccaacaacgagcaguucgacaagcucuacaucuggggcguccaccaccccgggaccgacaaggaccagaucuuccuguacgcccaggccagcgggcgcaucaccguguccaccaagcggagccagcaggccgugaucccgaacaucggcagccgcccccggguccgcaacauccccucccggaucagcaucuacuggacgaucgugaagcccggcgacauccugcucaucaacuccaccgggaaccugaucgccccgcgcggcuacuucaagauccggagcgggaaguccagcaucaugcgcuccgacgcgcccaucggcaagugcaacagcgagugcaucacccccaacggcuccauccccaacgacaagccguuccagaacgugaaccggaucaccuacggggccugcccccgcuacgucaagcagagcacgcugaagcucgccaccggcaugcggaacgugcccgagaagcagacccgcgggaucuucggcgccaucgccggguucaucgagaacggcugggagggcaugguggacgggugguacggcuuccggcaccagaacuccgaggggcgcggccaggcggccgaccugaaguccacccaggccgccaucgaccagaucaacgggaagcugaaccggcucaucggcaagacgaacgagaaguuccaccagaucgagaaggaguucuccgaggucgagggccgcauccaggaccuggagaaguacguggaggacaccaagaucgaccuguggagcuacaacgccgagcuccugguggcgcuggagaaccagcacaccaucgaccucaccgacuccgagaugaacaagcuguucgagaagacgaagaagcagcugcgcgagaacgccgaggacauggggaacggcugcuucaagaucuaccacaagugcgacaacgccugcaucgggagcauccggaacggcaccuacgaccacgacgucuaccgcgacgaggcccucaacaaccgguuccagaucaaggggguggagcugaaguccggcuacaaggacuggauccuguggaucagcuucgccaucuccugcuuccuccugugcguggcgcugcucggcuucaucaugugggccugccagaaggggaacauccgcugcaacaucugcaucuga

SEQ ID NO: 76523 - RNA, 1701 nt, Artificial Sequence
  derived and/or modified CDS sequence (opt1) from hemagglutinin__InfluenzaA__AIF72903
augaagaccaucaucgcccugagcuacauccucugccugguguucgcccaggagcugcccggcaacgacaacuccaccgcgacgcucugccuggggcaccacgccgucccgaacggcaccaucgugaagaccaucaccaacgaccagaucgaggugacgaacgccaccgagcugguccagagcuccagcgccggggagaucugcgacagcccccaccagauccucgacggcgagaacugcacccugaucgacgcccugcucggggacccccagugcgacggcuuccagaacaagaagugggaccuguucguggagcgcagccgggcguacuccaacugcuaccccuacgacgugccggacuacgccagccugcgcucccucgucgccagcuccggcacccuggaguucaacaacgagagcuucaacuggacgggggugacccagaacggcaccuccagcgccugcauccggcgcuccaacaacagcuucuucucccggcugaacuggcucacccaccugaacuucaaguaccccgcgcugaacgugacgaugcccaacaacgagcaguucgacaagcucuacaucuggggcguccaccaccccgggaccgacaaggaccagaucuuccuguacgcccaggccagcgggcgcaucaccguguccaccaagcggagccagcaggccgugaucccgaacaucggcagccgcccccggguccgcaacauccccucccggaucagcaucuacuggacgaucgugaagcccggcgacauccugcucaucaacuccaccgggaaccugaucgccccgcgcggcuacuucaagauccggagcgggaaguccagcaucaugcgcuccgacgcgcccaucggcaagugcaacagcgagugcaucacccccaacggcuccauccccaacgacaagccguuccagaacgugaaccggaucaccuacggggccugcccccgcuacgucaagcagagcacgcugaagcucgccaccggcaugcggaacgugcccgagaagcagacccgcgggaucuucggcgccaucgccggguucaucgagaacggcugggagggcaugguggacgggugguacggcuuccggcaccagaacuccgaggggcgcggccaggcggccgaccugaaguccacccaggccgccaucgaccagaucaacgggaagcugaaccggcucaucggcaagacgaacgagaaguuccaccagaucgagaaggaguucuccgaggucgagggccgcauccaggaccuggagaaguacguggaggacaccaagaucgaccuguggagcuacaacgccgagcuccugguggcgcuggagaaccagcacaccaucgaccucaccgacuccgagaugaacaagcuguucgagaagacgaagaagcagcugcgcgagaacgccgaggacauggggaacggcugcuucaagaucuaccacaagugcgacaacgccugcaucgggagcauccggaacggcaccuacgaccacgacgucuaccgcgacgaggcccucaacaaccgguuccagaucaaggggguggagcugaaguccggcuacaaggacugggugcuguggaucagcuucgccaucuccugcuuccuccugugcgucgcgcugcucggcuucaucaugugggccugccagaaggggaacauccgcugcaacaucugcaucuga

SEQ ID NO: 76524 - RNA, 1701 nt, Artificial Sequence
  derived and/or modified CDS sequence (opt1) from hemagglutinin__InfluenzaA__AIF72904
augaagaccaucaucgcccugagcuacauccucugccugguguucgcccaggagcugcccggcaacgacaacuccaccgcgacgcucugccuggggcaccacgccgucccgaacggcaccaucgugaagaccaucaccaacgaccagaucgaggugacgaacgccaccgagcugguccagagcuccagcgccggggagaucugcgacagcccccaccagauccucgacggcgagaacugcacccugaucgacgcccugcucggggacccccagugcgacggcuuccagaacaagaagugggaccuguucguggagcgcagccgggcguacuccaacugcuaccccuacgacgugccggacuacgccagccugcgcucccucgucgccagcuccggcacccuggaguucaacaacgagagcuucaacuggacgggggugacccagaacggcaccuccagcgccugcauccggcgcuccaacaacagcuucuucucccggcugaacuggcucacccaccugaacuucaaguaccccgcgcugaacgugacgaugcccaacaacgagcaguucgacaagcucuacaucuggggcguccaccaccccgggaccgacaaggaccagaucuuccuguacgcccaggccagcgggcgcaucaccguguccaccaagcggagccagcaggccgugaucccgaacaucggcagccgcccccggguccgcaacauccccucccggaucagcaucuacuggacgaucgugaagcccggcgacauccugcucaucaacuccaccgggaaccugaucgccccgcgcggcuacuucaagauccggagcgggaaguccagcaucaugcgcuccgacgcgcccaucggcaagugcaacagcgagugcaucacccccaacggcuccauccccaacgacaagccguuccagaacgugaaccggaucaccuacggggccugcccccgcuacgucaagcagagcacgcugaagcucgccaccggcaugcggaacgugcccgagaagcagacccgcgggaucuucggcgccaucgccggguucaucgagaacggcugggagggcaugauggacgggugguacggcuuccggcaccagaacuccgaggggcgcggccaggcggccgaccugaaguccacccaggccgccaucgaccagaucaacgggaagcugaaccggcucaucggcaagacgaacgagaaguuccaccagaucgagaaggaguucuccgagguggagggccgcauccaggaccuggagaaguacgucgaggacaccaagaucgaccuguggagcuacaacgccgagcuccugguggcgcuggagaaccagcacaccaucgaccucaccgacuccgagaugaacaagcuguucgagaagacgaagaagcagcugcgcgagaacgccgaggacauggggaacggcugcuucaagaucuaccacaagugcgacaacgccugcaucgggagcauccggaacggcaccuacgaccacgacguguaccgcgacgaggcccucaacaaccgguuccagaucaagggggucgagcugaaguccggcuacaaggacugggugcuguggaucagcuucgccaucuccugcuuccuccugugcguggcgcugcucggcuucaucaugugggccugccagaaggggaacauccgcugcaacaucugcaucuga

SEQ ID NO: 76525 - RNA, 1701 nt, Artificial Sequence
  derived and/or modified CDS sequence (opt1) from hemagglutinin__InfluenzaA__AIF72905
augaagaccaucaucgcccugagcuacauccucugccugguguucgcccagaagcugcccggcaacgacaacuccaccgcgacgcucugccuggggcaccacgccgucccgaacggcaccaucgugaagaccaucaccaacgaccagaucgaggugacgaacgccaccgagcugguccagagcuccagcgccggggagaucugcgacagcccccaccagauccucgacggcgagaacugcacccugaucgacgcccugcucggggacccccagugcgacggcuuccagaacaagaagugggaccuguucguggagcgcagccgggcguacuccaacugcuaccccuacgacgugccggacuacgccagccugcgcucccucgucgccagcuccggcacccuggaguucaagaacgagagcuucaacuggacgggggugacccagaacggcaccuccagcgccugcauccggcgcuccaacaacagcuucuucucccggcugaacuggcucacccacagcaacuucaaguaccccgcgcugaacgugacgaugcccaacaacgagcaguucgacaagcuguacaucuggggcguccaccaccccgggaccgacaaggaccagaucuuccucuacgcccaggccuccgggcgcaucaccgugagcaccaagcggagccagcaggccgugaucccgaacaucggcucccgcccccggguccgcaacauccccagccggaucuccaucuacuggacgaucgugaagcccggcgacauccugcugaucaacagcaccgggaaccucaucgccccgcgcggcuacuucaagauccgguccgggaaguccuccaucaugcgcagcgacgcgcccaucggcaagugcaacuccgagugcaucacccccaacggcagcauccccaacgacaagccguuccagaacgugaaccggaucaccuacggggccugcccccgcuacgucaagcaguccacgcugaagcuggccaccggcaugcggaacgugcccgagaagcagacccgcgggaucuucggcgccaucgccggguucaucgagaacggcugggagggcaugauggacgggugguacggcuuccggcaccagaacagcgaggggcgcggccaggcggccgaccucaaguccacccaggccgccaucgaccagaucaacgggaagcugaaccggcugaucggcaagacgaacgagaaguuccaccagaucgagaaggaguucagcgagguggagggccgcauccaggaccucgagaaguacgucgaggacaccaagaucgaccugugguccuacaacgccgagcugcucguggcgcuggagaaccagcacaccaucgaccugaccgacagcgagaugaacaagcuguucgagaagacgaagaagcagcuccgcgagaacgccgaggacauggggaacggcugcuucaagaucuaccacaagugcgacaacgccugcaucggguccauccggaacggcaccuacgaccacgacguguaccgcgacgaggcccugaacaaccgguuccagaucaagggggucgagcucaagagcggcuacaaggacuggauccuguggaucuccuucgccaucagcugcuuccugcucugcguggcgcugcugggcuucaucaugugggccugccagaaggggaacauccgcugcaacaucugcaucuga

SEQ ID NO: 76526 - RNA, 1701 nt, Artificial Sequence; identical to SEQ ID NO: 67435
  derived and/or modified CDS sequence (opt1) from hemagglutinin__InfluenzaA__AIF72906

SEQ ID NO: 76527 - RNA, 1701 nt, Artificial Sequence; identical to SEQ ID NO: 67435
  derived and/or modified CDS sequence (opt1) from hemagglutinin__InfluenzaA__AIF72907

SEQ ID NO: 76528 - RNA, 1701 nt, Artificial Sequence; identical to SEQ ID NO: 67435
  derived and/or modified CDS sequence (opt1) from hemagglutinin__InfluenzaA__AIF72908

SEQ ID NO: 76529 - RNA, 1701 nt, Artificial Sequence
  derived and/or modified CDS sequence (opt1) from hemagglutinin__InfluenzaA__AIF72909
augaagaccaucaucgcccugagcuacauccucugccugguguucgcccagaagcugcccggcaacgacaacuccaccgcgacgcucugccuggggcaccacgccgucccgaacggcaccaucgugaagaccaucaccaacgaccagaucgaggugacgaacgccaccgagcugguccagagcuccagcgccggggagaucugcgacggcccccaccagauccucgacggggagaacugcacccugaucgacgcccugcucggcgacccccagugcgacggcuuccagaacaagaagugggaccuguucguggagcgcucccgggcguacagcaacugcuaccccuacgacgugccggacuacgccucccugcgcagccucgucgccuccagcgggacccuggaguucaacaacgaguccuucaacuggacgggcaccacccagaacgggaccagcuccgccugcauccggcgcagcaacaacuccuucuucagccggcugaacuggcucacgcaccugaacuucaaguaccccgcgcugaacgugaccaugcccaacaacgagcaguucgacaagcucuacaucuggggcgugcaccaccccgggaccgacaaggaccagaucuuccuguacgcccaggccuccggccgcaucaccgucagcacgaagcggucccagcaggccgugaucccgaacaucggcagccgcccccgggugcgcaacauccccagccggaucuccaucuacuggaccaucgucaagcccggggacauccugcucaucaacagcaccggcaaccugaucgccccgcgcggguacuucaagauccgguccggcaagagcuccaucaugcgcagcgacgcgcccaucggcaagugcaacuccgagugcaucacccccaacgggagcauccccaacgacaagccguuccagaacgugaaccggaucacguacggcgccugcccccgcuacgugaagcaguccacccugaagcucgccaccgggaugcggaacguccccgagaagcagacccgcggcaucuucggggccaucgccggcuucaucgagaacggcugggaggggaugguggacggcugguacggguuccggcaccagaacagcgagggccgcgggcaggcggccgaccugaaguccacgcaggccgccaucgaccagaucaacggcaagcugaaccggcucaucggcaagaccaacgagaaguuccaccagaucgagaaggaguucagcgagguggaggggcgcauccaggaccuggagaaguacgucgaggacaccaagaucgaccugugguccuacaacgccgagcuccugguggcgcuggagaaccagcacaccaucgaccucacggacagcgagaugaacaagcuguucgagaagaccaagaagcagcugcgcgagaacgccgaggacaugggcaacgggugcuucaagaucuaccacaagugcgacaacgccugcaucggcuccauccggaacgggaccuacgaccacgacguguaccgcgacgaggcccucaacaaccgguuccagaucaagggcgucgagcucaagagcggcuacaaggacuggauccuguggaucuccuucgccaucagcugcuuccugcugugcguggcgcugcucggguucaucaugugggccugccagaagggcaacauccgcugcaacaucugcaucuga

SEQ ID NO: 76530 - RNA, 1701 nt, Artificial Sequence; identical to SEQ ID NO: 67435
  derived and/or modified CDS sequence (opt1) from hemagglutinin__InfluenzaA__AIF72910

SEQ ID NO: 76531 - RNA, 1701 nt, Artificial Sequence; identical to SEQ ID NO: 67435
  derived and/or modified CDS sequence (opt1) from hemagglutinin__InfluenzaA__AIF72911

SEQ ID NO: 76532 - RNA, 1701 nt, Artificial Sequence; identical to SEQ ID NO: 76522
  derived and/or modified CDS sequence (opt1) from hemagglutinin__InfluenzaA__AIF72912

SEQ ID NO: 76533 - RNA, 1701 nt, Artificial Sequence; identical to SEQ ID NO: 67435
  derived and/or modified CDS sequence (opt1) from hemagglutinin__InfluenzaA__AIF72913

SEQ ID NO: 76534 - RNA, 1701 nt, Artificial Sequence
  derived and/or modified CDS sequence (opt1) from hemagglutinin__InfluenzaA__AIF72914
augaagaccaucaucgcccugagcuacauccucugccugguguucgcccagaagcugcccggcaacgacaacuccaccgcgacgcucugccuggggcaccacgccgucccgaacggcaccaucgugaagaccaucaccaacgaccagaucgaggugacgaacgccaccgagcugguccagagcuccagcaccggggagaucugcgacagcccccaccagauccucgacggcgagaacugcacccugaucgacgcccugcucggggacccccagugcgacggcuuccagaacaagaagugggaccuguucguggagcgcagcaaggccuacuccaacugcuaccccuacgacgugccggacuacgcgagccugcggucccucgucgccagcuccggcacgcuggaguucaacaacgagagcuucaacuggaccggggugacccagaacggcaccuccagcgccugcauccgccgguccaacaacagcuucuucucccgccugaacuggcucacgcaccugaacuucaaguaccccgcccugaacgugaccaugcccaacaacgagcaguucgacaagcucuacaucuggggcguccaccaccccgggaccgacaaggaccagaucuuccuguacgcgcaggccagcgggcggaucaccguguccacgaagcgcagccagcaggccgugaucccgaacaucggcagccggccccgcguccggaacauccccucccgcaucagcaucuacuggaccaucgugaagcccggcgacauccugcucaucaacuccaccgggaaccugaucgccccgcggggcuacuucaagauccgcgggggcaagagcuccaucaugcggagcgacgcccccaucggcaagugcaacuccgagugcaucacccccaacgggagcauccccaacgacaagccguuccagaacgugaaccgcaucacguacggcgcgugcccccgguacgucaagcagaacacccugaagcucgccaccgggaugcgcaacgugcccgagaagcagacccggggcaucuucggggccaucgccggcuucaucgagaacggcugggaggggaugguggacggcugguacggguuccgccaccagaacuccgagggccgggggcaggccgcggaccugaaguccacgcaggccgccaucgaccagaucaacggcaagcugaaccgccucaucggcaagaccaacgagaaguuccaccagaucgagaaggaguucuccgaggucgaggggcggauccacgaccuggagaaguacguggaggacacccuguucgaccucuggguguacaacagcgagcugcuggucgcccuccagaaccagcacaccaucgaccugcccgacuccgagaugaacaagcuguucgagaagacgaagaagcagcuccgcgagaacgccgaggacaugggcaacgggugcuucaagaucuaccacaagugcgacaacgcgugcaucggcagcauccgcaacgggaccuacgaccacgacguguaccgggacgaggcccugaacaaccgcuuccagaucaagggcguggagcugaaguccggcuacaaggacuggauccucuggaucagcuucgccaucuccugcuuccugcugugcgucgcccuccugggguucaucaugugggccugccagaagggcaacauccggugcaacaucugcaucuga

SEQ ID NO: 76535 - RNA, 1701 nt, Artificial Sequence
  derived and/or modified CDS sequence (opt1) from hemagglutinin__InfluenzaA__AIF72915
augaagaccaucaucgcccugagcuacauccucugccugguguucgcccagaagcugcccggcaacgacaacuccaccgcgacgcucugccuggggcaccacgccgucccgaacggcaccaucgugaagaccaucaccaacgaccagaucgaggugacgaacgccaccgagcugguccagagcuccagcaccggggagaucugcgacagcccccuccagauccuggacggcgagaacugcacccugaucgacgcccuccugggggacccccagugcgacggcuuccagaacaagaagugggaccuguucguggagcgcagcaaggccuacuccaacugcuaccccuacgacgugccggacuacgcgagccuccggucccuggucgccagcuccggcacgcuggaguucaacaacgagagcuucaacuggaccggggugacccagaacggcaccuccagcgccugcauccgccgguccaacaacagcuucuucucccgccucaacuggcugacgcaccugaacuucaaguaccccgcccucaacgugaccaugcccaacaacgagcaguucgacaagcuguacaucuggggcguccaccaccccgggaccgacaaggaccagaucuuccuguacgcgcaggccagcgggcggaucaccguguccacgaagcgcagccagcaggccgugaucccgaacaucggcagccggccccgcguccggaacauccccucccgcaucagcaucuacuggaccaucgugaagcccggcgacauccuccugaucaacuccaccgggaaccugaucgccccgcggggcuacuucaagauccgcagcgggaaguccagcaucaugcgguccaacgcccccaucggcaagugcaacagcgagugcaucacccccaacggcuccauccccaacgacaagccguuccagaacgugaaccgcaucacguacggggcgugcccccgguacgucaagcagaacacccucaagcuggccaccggcaugcgcaacgugcccgagaagcagacccgggggaucuucggcgccaucgccggguucaucgagaacggcugggagggcaugguggacgggugguacggcuuccgccaccagaacagcgaggggcggggccaggccgcggaccugaaguccacgcaggccgccaucgaccagaucaacgggaagcucaaccgccugaucggcaagaccaacgagaaguuccaccagaucgagaaggaguucagcgaggucgagggccggauccaggaccuggagaaguacguggaggacaccaagaucgaccucugguccuacaacgccgagcugcugguggcccucgagaaccagcacaccaucgaccugacggacagcgagaugaacaagcuguucgagaagaccaagaagcagcuccgcgagaacgcggaggacauggggaacggcugcuucaagaucuaccacaagugcgacaacgccugcaucggguccauccgcaacggcaccuacgaccacgacgucuaccgggacgaggcccugaacaaccgcuuccagaucaaggggguggagcugaaguccggcuacaaggacuggauccucuggaucuccuucgccaucagcugcuuccugcugugcguggcccuccugggcuucaucaugugggcgugccagaaggggaacauccggugcaacaucugcaucuga

SEQ ID NO: 76536 - RNA, 1701 nt, Artificial Sequence; identical to SEQ ID NO: 67435
  derived and/or modified CDS sequence (opt1) from hemagglutinin__InfluenzaA__AIF72916

SEQ ID NO: 76537 - RNA, 1701 nt, Artificial Sequence
  derived and/or modified CDS sequence (opt1) from hemagglutinin__InfluenzaA__AIF72917
augaagaccaucaucgcccugagcuacauccucugccugguguucgcccagaagcugccccgcaacgacaacuccaccgcgacgcucugccugggccaccacgccgucccgaacgggaccaucgugaagaccaucaccaacgaccagaucgaggugacgaacgccaccgagcugguccagagcuccagcaccggcgagaucugcgacagcccccaccagauccucgacggggagaacugcacccugaucgacgcccugcucggcgacccccagugcgacggguuccagaacaagaagugggaccuguucguggagcggagcaaggccuacuccaacugcuaccccuacgacgugccggacuacgcgagccugcgcucccucgucgccagcuccggcacgcuggaguucaagaacgagagcuucaacuggaccggcgugacccagaacgggaccuccagcgccugcauccggcgcuccaacaacagcuucuucucccggcugaacuggcucacgcaccugaacuucaaguaccccgcccugaacgugaccaugcccaacaacgagcaguucgacaagcucuacaucuggggcguccaccaccccgggaccgacaaggaccagaucuuccuguacgcgcaggccagcggccgcaucaccguguccacgaagcggagccagcaggccgugaucccgaacaucgggagccgcccccggguccgcaacauccccucccggaucagcaucuacuggaccaucgugaagcccggcgacauccugcucaucaacuccaccggcaaccugaucgccccgcgcggguacuucaagauccggagcggcaaguccagcaucaugcgcuccgacgcccccaucgggaagugcaacagcgagugcaucacccccaacggcuccauccccaacgacaagccguuccagaacgugaaccggaucacguacggcgcgugcccccgcuacgucaagcagaacacccugaagcucgccaccgggaugcggaacgugcccgagaagcagacccgcggcaucuucggggccaucgccggcuucaucgagaacgggugggagggcaugguggacggcugguacggguuccggcaccagaacagcgagggccgcgggcaggccgcggaccugaaguccacgcaggccgccaucgaccagaucaacggcaagcugaaccggcucaucgggaagaccaacgagaaguuccaccagaucgagaaggaguucagcgaggucgagggccgcauccaggaccuggagaaguacguggaggacaccaagaucgaccugugguccuacaacgccgagcuccugguggcccuggagaaccagcacaccaucgaccucacggacagcgagaugaacaagcuguucgagaagaccaagaagcagcugcgcgagaacgcggaggacaugggcaacgggugcuucaagaucuaccacaagugcgacaacgccugcaucggcuccauccggaacgggaccuacgaccacgacgucuaccgcgacgaggcccucaacaaccgguuccagaucaagggcguggagcugaaguccggguacaaggacuggauccuguggaucuccuucgccaucagcugcuuccuccugugcguggcccugcucggcuucaucaugugggcgugccagaagggcaacauccgcugcgacaucugcaucuga

SEQ ID NO: 76538 - RNA, 1683 nt, Artificial Sequence
  derived and/or modified CDS sequence (opt1) from hemagglutinin__InfluenzaA__AIG44693
auggagaccgccagccugaucaccauccuccugguggucacgguguccaacgccgacaagaucugcaucggcuaccagagcaccaacuccaccgagaccguggacacgcugaccgagaacaacguccccgugacccacgcgaaggagcuccugcacaccgagcacaacgggaugcugugcgccacgagccucggccagccgcugauccuggacacgugcaccaucgaggggcucaucuacggcaaccccuccugcgaccugcugcucgggggccgcgaguggagcuacaucguggagcggcccuccgccgucaacggccugugcuaccccgggaacguggagaaccuggaggagcuccgcagccuguucuccagcgcccgguccuaccagcgcauccagaucuucccggacaccaucuggaacgugagcuacuccggcaccagcaaggccugcuccgacagcuucuaccgguccaugcgcuggcugacccagaaggacaacgcguaccccauccaggacgcccaguacaccaacaaccaggagaagaacauccucuucaugugggggaucaaccacccgcccaccgacacggcccagaccaaccuguacacccggaccgacacgaccaccagcgucgccaccgaggagaucaaccgcacguucaagccccugaucggcccccggccccucgugcacgggcugaugggccgcaucaacuacuacugguccgugcugaagcccggccagacccuccggaucaagagcaacgggaaccugaucgcgccgugguacggccacauccugagcgggaagucccacggccgcauccucaagaccgaccugaagcggggcaacugcaccguccagugccagacggagaagggcgggcugaacaccacccuccccuuccagaacgugagcaaguacgccuucgggaacugcuccaaguacaucggcaucaagagccugaagcuggccguggggcuccgcaacguccccucccggagcucccgcggccuguucggcgccaucgccggguucaucgagggcggguggagcggccugguggcggggugguacggcuuccagcacuccaacgaccagggcguggggauggccgccgaccgggacagcacccagaaggccaucgacaagaucacguccaaggucaacaacaucguggacaagaugaacaagcaguacgagaucaucgaccacgaguucagcgagguggagacccgccucaacaugaucaacaacaagaucgacgaccagauccaggacaucugggccuacaacgcggagcugcugguccuccuggagaaccagaagacccuggacgagcacgacgccaacgugaacaaccucuacaacaaggugaagcgggcccugggcuccaacgccgucgaggacgggaagggcugcuucgagcuguaccacaagugcgacgaccagugcauggagaccauccgcaacgggacguacaaccggcgcaaguaccaggaggagagcaagcucgagaagcagaagaucgagggcgugaagcuggaguccgagggcaccuacaagauccugaccaucuacagcaccgucgccuccagccucgugaucgcgaugggguucgccgccuuccuguucugggccauguccaacggcagcugccgcugcaacaucugcaucuga

SEQ ID NO: 76539 - RNA, 1701 nt, Artificial Sequence; identical to SEQ ID NO: 71006
  derived and/or modified CDS sequence (opt1) from hemagglutinin__InfluenzaA__AIJ10728

SEQ ID NO: 76540 - RNA, 1701 nt, Artificial Sequence
  derived and/or modified CDS sequence (opt1) from hemagglutinin__InfluenzaA__AIJ10729
augaagaccaucaucgcccugagcuacauccucugccugguguucgcccagaagcugcccggccacgacaacuccaccgcgacgcucugccuggggcaccacgccgucccgaacggcaccaucgugaagaccaucaccaacgaccagaucgaggugacgaacgccaccgagcugguccagagcuccagcaccggggagaucugcaacagcccccaccagauccucgacggcgagaacugcacccugaucgacgcccugcucggggacccccagugcgacggcuuccagaacaagaagugggaccuguucguggagcgcagcaaggcccacuccaacugcuaccccuacgacgugccggacuacgcgagccugcggucccucgucgccagcuccggcacgcuggaguucaacaacgagagcuucaacuggaccggggugacccagaacggcaccuccagcgccugcauccgccgguccaacaacagcuucuucucccgccugaacuggcucacgcaccugaacuucaaguaccccgcccugaacgugaccaugcccaacaacgagcaguucgacaagcucuacaucuggggcguccaccaccccgggaccgacaaggaccagaucuuccuguacgcgcaggccagcgggcggaucaccguguccacgaagcgcagccagcaggccgugaucccgaacaucggcagccggccccgcguccggaacauccccucccgcgugagcaucuacuggaccaucgugaagcccggcgacauccugcucaucaacuccaccgggaaccugaucgccccgcggggcuacuucaagauccgcagcgggaaguccagcaucaugcgguccgacgcccccaucggcaagugcaacagcgcgugcaucacccccaacggcuccauccccaacgacaagccguuccagaacgucaaccgcaucacguacggggccugcccccgguacgugaagcagaacacccugaagcucgccaccggcaugcgcaacgugcccgagaagcagaccaaggggaucuucggcgccaucgccggguucaucgagaacggcugggagggcauggucgacgggugguacggcuuccggcaccagaacagcgaggggcgcggccaggcggccgaccugaaguccacgcaggccgccaucgaccagaucaacgggaagcugaaccggcucaucggcaagaccaacgagaaguuccaccagaucgagaaggaguucagcgagguggagggccgcauccaggaccuggagaaguacguggaggacaccaagaucgaccugugguccuacaacgccgagcuccuggucgcgcuggagaaccagcacaccaucgaccucacggacagcgagaugaacaagcuguucgagaagaccaagaagcagcugcgggagaacgccgaggacauggggaacggcugcuucaagaucuaccacaagugcgacaacgccugcaucggguccauccgcaacggcaccuacgaccacgacguguaccgcgacgaggcccucaacaaccgguuccagaucaaggggguggagcugaaguccggcuacaaggacuggauccuguggaucuccuucgccaucagcugcuuccuccugugcgucgcgcugcucggcuucaucaugugggccugccagaaggggaacauccgcugcaacaucugcaucuga

SEQ ID NO: 76541 - RNA, 1701 nt, Artificial Sequence; identical to SEQ ID NO: 71006
  derived and/or modified CDS sequence (opt1) from hemagglutinin__InfluenzaA__AIJ10730

SEQ ID NO: 76542 - RNA, 1701 nt, Artificial Sequence; identical to SEQ ID NO: 71006
  derived and/or modified CDS sequence (opt1) from hemagglutinin__InfluenzaA__AIJ10731

SEQ ID NO: 76543 - RNA, 1701 nt, Artificial Sequence
  derived and/or modified CDS sequence (opt1) from hemagglutinin__InfluenzaA__AIJ10732
augaagaccaucaucgcccugagcuacauccucugccugguguucgcccaggagcugcccggcaacgacaacuccaccgcgacgcucugccuggggcaccacgccgucccgaacggcaccaucgugaagaccaucaccaacgaccagaucgaggugacgaacgccaccgagcugguccagagcuccagcaccggggagaucugcaacagcccccaccagauccucgacggcgagaacugcacccugaucgacgcccugcucggggacccccagugcgacggcuuccagaacaagaagugggaccuguucguggagcgcagcaaggcccacuccaacugcuaccccuacgacgugccggacuacgcgagccugcggucccucgucgccagcuccggcacgcuggaguucaacaacgagagcuucaacuggaccggggugacccagaacggcaccuccagcgccugcauccgccgguccaacaacagcuucuucucccgccugaacuggcucacgcaccugaacuuccgguaccccgcccugaacgugaccaugcccaacaacgagcaguucgacaagcucuacaucuggggcguccaccaccccgggaccgacaaggaccagaucuuccuguacgcgcaggccagcgggcgcaucaccguguccacgaagcggagccagcaggccgugaucccgaacaucggcagccgcccccggguccgcaacauccccucccgggugagcaucuacuggaccaucgugaagcccggcgacauccugcucaucaacuccaccgggaaccugaucgccccgcgcggcuacuucaagauccggagcgggaaguccagcaucaugcgcuccgacgcccccaucggcaagugcaacagcgcgugcaucacccccaacggcuccauccccaacgacaagccguuccagaacgucaaccggaucacguacggggccugcccccgcuacgugaagcagaacacccugaagcucgccaccggcaugcggaacgugcccgagaagcagacccgcgggaucuucggcgccaucgccggguucaucgagaacggcugggagggcauggucgacgggugguacggcuuccggcaccagaacagcgaggggcgcggccaggcggccgaccugaaguccacgcaggccgccaucgaccagaucaacgggaagcugaaccggcucaucggcaagaccaacgagaaguuccaccagaucgagaaggaguucagcgagguggagggccgcauccaggaccuggagaaguacguggaggacaccaagaucgaccugugguccuacaacgccgagcuccuggucgcgcuggagaaccagcacaccaucgaccucacggacagcgagaugaacaagcuguucgagaagaccaagaagcagcugcgcgagaacgccgaggacauggggaacggcugcuucaagaucuaccacaagugcgacaacgccugcaucggguccauccggaacggcaccuacgaccacgacguguaccgcgacgaggcccucaacaaccgguuccagaucaaggggguggagcugaaguccggcuacaaggacuggauccuguggaucuccuucgccaucagcugcuuccuccugugcgucgcgcugcucggcuucaucaugugggccugccagaaggggaacauccgcugcaacaucugcaucuga

SEQ ID NO: 76544 - RNA, 1701 nt, Artificial Sequence
  derived and/or modified CDS sequence (opt1) from hemagglutinin__InfluenzaA__AIJ10733
augaagaccaucaucgcccugagcuacauccucugccugguguucgcccaggagcugcccggcaacgacaacuccaccgcgacgcucugccuggggcaccacgccgucccgaacggcaccaucgugaagaccaucaccaacgaccagaucgaggugacgaacgccaccgagcugguccagagcuccagcaccggggagaucugcaacagcccccaccagauccucgacggcgagaacugcacccugaucgacgcccugcucggggacccccagugcgacggcuuccagaacaagaagugggaccuguucguggagcgcagcaaggcccacuccaacugcuaccccuacgacgugccggacuacgcgagccugcggucccucgucgccagcuccggcacgcuggaguucaacaacgagagcuucaacuggaccggggugacccagaacggcaccuccagcgccugcauccgccgguccaacaacagcuucuucucccgccugaacuggcucacgcaccugaacuuccgguaccccgcccugaacgugaccaugcccaacaacgagcaguucgacaagcucuacaucuggggcguccaccaccccgggaccgacaaggaccagaucuuccuguacgcgcaggccagcgggcgcaucaccguguccacgaagcggagccagcaggccgugaucccgaacaucggcagccgcccccggguccgcaacauccccucccgggugagcaucuacuggaccaucgugaagcccggcgacauccugcucaucaacuccaccgggaaccugaucgccccgcgcggcuacuucaagauccggagcgggaaguccagcaucaugcgcuccgacgcccccaucggcaagugcaagagcgcgugcaucacccccaacggcuccauccccaacgacaagccguuccagaacgucaaccggaucacguacggggccugcccccgcuacgugaagcagaacacccugaagcucgccaccggcaugcggaacgugcccgagaagcagacccgcgggaucuucggcgccaucgccggguucaucgagaacggcugggagggcauggucgacgggugguacggcuuccggcaccagaacagcgaggggcgcggccaggcggccgaccugaaguccacgcaggccgccaucgaccagaucaacgggaagcugaaccggcucaucggcaagaccaacgagaaguuccaccagaucgagaaggaguucagcgagguggagggccgcauccaggaccuggagaaguacguggaggacaccaagaucgaccugugguccuacaacgccgagcuccuggucgcgcuggagaaccagcacaccaucgaccucacggacagcgagaugaacaagcuguucgagaagaccaagaagcagcugcgcgagaacgccgaggacauggggaacggcugcuucaagaucuaccacaagugcgacaacgccugcaucggguccauccggaacggcaccuacgaccacgacguguaccgcgacgaggcccucaacaaccgguuccagaucaaggggguggagcugaaguccggcuacaaggacuggauccuguggaucuccuucgccaucagcugcuuccuccugugcgucgcgcugcucggcuucaucaugugggccugccagaaggggaacauccgcugcaacaucugcaucuga

SEQ ID NO: 76545 - RNA, 1701 nt, Artificial Sequence
  derived and/or modified CDS sequence (opt1) from hemagglutinin__InfluenzaA__AIJ10734
augaagaccaucaucgcccugagcuacauccucugccugguguucgcccagaagcugcccgagaacgacaacuccaccgcgacgcucugccugggccaccacgccgucccgaacgggaccaucgugaagaccaucaccaacgaccagaucgaggugacgaacgccaccgagcugguccagagcuccagcaccggcgagaucugcaacagcccccaccagauccucgacggggagaacugcacccugaucgacgcccugcucggcgacccccagugcgacggguuccagaacaagaagugggaccuguucguggagcgcagcaaggcccacuccaacugcuaccccuacgacgugccggacuacgcgagccugcggucccucgucgccagcuccggcacgcuggaguucaacaacgagagcuucaacuggaccggcgugacccagaacgggaccuccagcgccugcauccgccgguccaacaacagcuucuucucccgccugaacuggcucacgcaccugaacuucaaguaccccgcccugaacgugaccaugcccaacaacgagcaguucgacaagcucuacaucuggggcguccaccaccccgggaccgacaaggaccagaucuuccuguacgcgcaggccagcggccggaucaccguguccacgaagcgcagccagcaggccgugaucccgaacaucgggagccggccccgcguccggaacauccccucccgcaucagcaucuacuggaccaucgugaagcccggcgacauccugcucaucaacuccaccggcaaccugaucgccccgcggggguacuucaagauccgcagcggcaaguccagcaucaugcgguccgacgcccccaucgggaagugcaacagcacgugcaucacccccaacggcuccauccccaacgacaagccguuccagaacgugaaccgcaucaccuacggcgcgugcccccgguacgucaagcagaacacccugaagcucgccaccgggaugcgcaacgugcccgagaagcagacgcggggcaucuucggggccaucgccggcuucaucgagaacgggugggagggcaugguggacggcugguacggguuccgccaccagaacagcgagggccgggggcaggccgcggaccugaaguccacccaggccgccaucgaccagaucaacggcaagcugaaccgccucaucgggaagaccaacgagaaguuccaccagaucgagaaggaguucagcgaggucgagggccggauccaggaccuggagaaguacguggaggacaccaagaucgaccugugguccuacaacgccgagcuccugguggcccuggagaaccagcacacgaucgaccucaccgacagcgagaugaacaagcuguucgagaagaccaagaagcagcugcgcgagaacgcggaggacaugggcaacgggugcuucaagaucuaccacaagugcgacaacgccugcaucggcuccauccgcaacgggaccuacgaccacgacgucuaccgggacgaggcccucaacaaccgcuuccagaucaagggcguggagcugaaguccggguacaaggacuggauccuguggaucuccuucgccaucagcugcuuccuccugugcguggcccugcucggcuucaucaugugggcgugccagaagggcaacauccggugcaacaucugcaucuga

SEQ ID NO: 76546 - RNA, 1701 nt, Artificial Sequence
  derived and/or modified CDS sequence (opt1) from hemagglutinin__InfluenzaA__AIJ10735
augaagaccaucaucgcccugagcuacauccucugccugaucuucgcccagaagcugcccgagaacgacaacuccaccgcgacgcucugccugggccaccacgccgugccgaacgggaccaucgucaagaccaucaccaacgaccagaucgaggugacgaacgccaccgagcuggugcagagcuccagcaccggcgagaucugcaacagcccccaccagauccucgacggggagaacugcacccugaucgacgcccugcucggcgacccccagugcgacggguuccagaacaagaagugggaccuguucgucgagcgcagcaaggcccacuccaacugcuaccccuacgacgugccggacuacgcgagccugcggucccucguggccagcuccggcacgcuggaguucaacaacgagagcuucaacuggaccggcgucacccagaacgggaccuccagcgccugcauccgccgguccaacaacagcuucuucucccgccugaacuggcucacgcaccugaacuucaaguaccccgcccugaacgugaccaugcccaacaacgagcaguucgacaagcucuacaucuggggcgugcaccaccccgggaccgacaaggaccagaucuuccuguacgcgcaggccagcggccggaucaccgucuccacgaagcgcagccagcaggccgugaucccgaacaucgggagccggccccgcgugcggaacauccccucccgcgucagcaucuacuggaccaucgugaagcccggcgacauccugcucaucaacuccaccggcaaccugaucgccccgcggggguacuucaagauccgcagcggcaaguccagcaucaugcgguccgacgcccccaucgggaagugcaacagcacgugcaucacccccaacggcuccauccccaacgacaagccguuccagaacgugaaccgcaucaccuacggcgcgugcccccgguacgucaagcagaacacccugaagcucgccaccgggaugcgcaacgugcccgagaagcagacgcggggcaucuucggggccaucgccggcuucaucgagaacgggugggagggcaugguggacggcugguacggguuccgccaccagaacagcgagggcaaggggcaggccgcggaccugaaguccacccaggccgccaucgaccagaucaacggcaagcugaaccggcucaucgggaagaccaacgagaaguuccaccagaucgagaaggaguucagcgaggucgagggccgcauccaggaccuggagaaguacguggaggacaccaagaucgaccugugguccuacaacgccgagcuccugguggcccuggagaaccagcacacgaucgaccucaccgacagcgagaugaacaagcuguucgagaagaccaagaagcagcugcgggagaacgcggaggacaugggcaacgggugcuucaagaucuaccacaagugcgacaacgccugcaucggcuccauccgcaacgggaccuacgaccacgacgucuaccgcgacgaggcccucaacaaccgguuccagaucaagggcguggagcugaaguccggguacaaggacuggauccuguggaucuccuucgccaucagcugcuuccuccugugcguggcccugcucggcuucaucaugugggcgugccagaagggcaacauccgcugcaacaucugcaucuga

SEQ ID NO: 76547 - RNA, 1701 nt, Artificial Sequence
  derived and/or modified CDS sequence (opt1) from hemagglutinin__InfluenzaA__AIJ10736
augaagaccaucaucgcccugagcuacauccucugccugguguucgcccagaagcugcccggcaacgacaacuccaccgcgacgcucugccuggggcaccacgccgucccgaacggcaccaucgugaagaccaucaccaacgaccgcaucgaggugacgaacgccaccgagcugguccagaacagcaccaucggggagaucugcgacagcccccaccagauccucgacggcgagaacugcacccugaucgacgcccugcucggggacccccagugcgacggcuuccagaacaagaagugggaccuguucguggagcggagcaaggccuacuccaacugcuaccccuacgacgugccggacuacgcgagccugcgcucccucgucgccagcuccggcacgcuggaguucaacaacgagagcuucaacuggaccggggugacccagaacggcaccuccagcgccugcauccggcgcuccaacaacagcuucuucucccggcugaacuggcucacgcaccugaacuucaaguaccccgcccugaacgugaccaugcccaacaacgagcaguucgacaagcucuacaucuggggcguccaccaccccgggaccgacaaggaccagaucuuccuguacgcgcagagcuccgggcgcaucaccgugagcacgaagcggucccagcaggccgugaucccgaacaucggcagccgcccccggauccgcaacauccccagccggaucuccaucuacuggaccaucgucaagcccggcgacauccugcucaucaacagcaccgggaaccugaucgccccgcgcggcuacuucaagauccgguccgggaaguccuccaucaugcgcagcgacgcccccaucggcaagugcaaguccgagugcaucacccccaacggcagcauccccaacgacaagccguuccagaacgugaaccggaucacguacggggccugcccccgcuacgugaagcaguccacccugaagcucgcgaccggcaugcggaacguccccgagaagcagacccgcgggaucuucggcgccaucgccggguucaucgagaacggcugggagggcaugguggacgggugguacggcuuccggcaccagaacagcgaggggcgcggccaggccgccgaccugaaguccacgcaggcggccaucgaccagaucaacgggaagcugaaccggcucaucggcaagaccaacgagaaguuccaccagaucgagaaggaguucagcgagguggagggccgcauccaggaccuggagaaguacgucgaggacaccaagaucgaccugugguccuacaacgccgagcuccugguggcccuggagaaccagcacaccaucgaccucacggacagcgagaugaacaagcuguucgagaagaccaagaagcagcugcgcgagaacgccgaggacauggggaacggcugcuucaagaucuaccacaagugcgacaacgcgugcaucggguccauccggaacggcaccuacgaccacgacguguaccgcgacgaggcccucaacaaccgguuccagaucaagggggucgagcucaagagcggcuacaaggacuggauccuguggaucuccuucgccaucagcugcuuccugcugugcguggcccugcucggcuucaucaugugggccugccagaaggggaacauccgcugcaacaucugcaucuga

SEQ ID NO: 76548 - RNA, 1701 nt, Artificial Sequence
  derived and/or modified CDS sequence (opt1) from hemagglutinin__InfluenzaA__AIJ10737
augaagaccaucaucgcccugagcuacauccucugccugguggucgcccagaagcugcccggcaacgacaacuccaccgcgacgcucugccuggggcaccacgccgugccgaacggcaccaucgugaagaccaucaccaacgaccgcaucgaggucacgaacgccaccgagcuggugcagaacagcuccaucggggagaucugcgacagcccccaccagauccucgacggcgagaacugcacccugaucgacgcccugcucggggacccccagugcgacggcuuccagaacaagaagugggaccuguucguggagcgguccaaggccuacagcaacugcuaccccuacgacgucccggacuacgcgucccugcgcagccucguggccuccagcggcacccuggaguucaacaacgaguccuucaacuggacgggggugacccagaacggcaccagcuccgccugcauccggcgcagcaacaacuccuucuucagccggcugaacuggcucacccaccugaacuucaaguaccccgcccugaacgucacgaugcccaacaacgagcaguucgacaagcucuacaucuggggcgugcaccaccccgggaccgacaaggaccagaucuuccuguacgcgcaguccagcgggcgcaucaccguguccaccaagcggagccagcaggccgucaucccgaacaucggcagccgcccccggauccgcaacauccccucccggaucagcaucuacuggacgaucgugaagcccggcgacauccugcucaucaacuccaccgggaaccugaucgccccgcgcggcuacuucaagauccggagcgggaaguccagcaucaugcgcuccgacgcccccaucggcaagugcaagagcgagugcaucacccccaacggcuccauccccaacgacaagccguuccagaacgugaaccggaucaccuacggggccugcccccgcuacgucaagcagagcacgcugaagcucgcgaccggcaugcggaacgugcccgagaagcagacccgcgggaucuucggcgccaucgccggguucaucgagaacggcugggagggcaugguggacgggugguacggcuuccggcaccagaacuccgaggggcgcggccaggccgccgaccucaagagcacccaggcggccaucgaccagaucaacgggaagcugaaccggcugaucggcaagacgaacgagaaguuccaccagaucgagaaggaguucuccgaggucgagggccgcauccaggaccuggagaaguacguggaggacaccaagaucgaccuguggagcuacaacgccgagcuccugguggcccuggagaaccagcacaccaucgaccucaccgacuccgagaugaacaagcuguucgagaagacgaagaagcagcugcgcgagaacgccgaggacauggggaacggcugcuucaagaucuaccacaagugcgacaacgcgugcaucgggagcauccggaacggcaccuacgaccacgacgucuaccgcgacgaggcccucaacaaccgguuccagaucaaggggguggagcugaaguccggcuacaaggacuggauccuguggaucagcuucgccaucuccugcuuccuccugugcguggcccugcucggcuucaucaugugggccugccagaaggggaacauccgcugcaacaucugcaucuga

SEQ ID NO: 76549 - RNA, 1701 nt, Artificial Sequence
  derived and/or modified CDS sequence (opt1) from hemagglutinin__InfluenzaA__AIJ10738
augaagaccaucaucgcccugagcuacauccucugccugguguucgcccagaagcugcccggcaacgacaacuccaccgcgacgcucugccuggggcaccacgccgucccgaacggcaccaucgugaagaccaucaccaacgaccgcaucgaggugacgaacgccaccgagcugguccagaacagcuccaucggggagaucugcgacagcccccaccagauccucgacggcgagaacugcacccugaucgacgcccugcucggggacccccagugcgacggcuuccagaacaagaagugggaccuguucguggagcgguccaaggccuacagcaacugcuaccccuacgacgugccggacuacgcgucccugcgcagccucgucgccuccagcggcacccuggaguucaacaacgaguccuucaacuggacgggggugacccagaacggcaccagcuccgccugcauccggcgcagcaacaacuccuucuucagccggcugaacuggcucacccaccugaacuucaaguaccccgcccugaacgugacgaugcccaacaacgagcacuucgacaagcucuacaucuggggcguccaccaccccgggaccgacaaggaccagaucuuccuguacgcgcaguccagcgggcgcaucaccguguccaccaagcggagccagcaggccgugaucccgaacaucggcagccgcccccggauccgcaacauccccucccggaucagcaucuacuggacgaucgucaagcccggcgacauccugcucaucaacuccaccgggaaccugaucgccccgcgcggcuacuucaagauccggagcgggaaguccagcaucaugcgcuccgacgcccccaucggcaagugcaagagcgagugcaucacccccaacggcuccauccccaacgacaagccguuccagaacgugaaccggaucaccuacggggccugcccccgcuacgugaagcagagcacgcugaagcucgcgaccggcaugcggaacguccccgagaagcagacccgcgggaucuucggcgccaucgccggguucaucgagaacggcugggagggcaugguggacgggugguacggcuuccggcaccagaacuccgaggggcgcggccaggccgccgaccucaagagcacccaggcggccaucgaccagaucaacgggaagcugaaccggcugaucggcaagacgaacgagaaguuccaccagaucgagaaggaguucuccgagguggagggccgcauccaggaccuggagaaguacgucgaggacaccaagaucgaccuguggagcuacaacgccgagcuccugguggcccuggagaaccagcacaccaucgaccucaccgacuccgagaugaacaagcuguucgagaagacgaagaagcagcugcgcgagaacgccgaggacauggggaacggcugcuucaagaucuaccacaagugcgacaacgcgugcaucgggagcauccggaacggcaccuacgaccacgacguguaccgcgacgaggcccucaacaaccgguuccagaucaagggggucgagcugaaguccggcuacaaggacuggauccuguggaucagcuucgccaucuccugcuuccuccugugcguggcccugcucggcuucaucaugugggccugccagaaggggaacauccgcugcaacaucugcaucuga

SEQ ID NO: 76550 - RNA, 1701 nt, Artificial Sequence; identical to SEQ ID NO: 73477
  derived and/or modified CDS sequence (opt1) from hemagglutinin__InfluenzaA__AIJ10740

SEQ ID NO: 76551 - RNA, 1701 nt, Artificial Sequence; identical to SEQ ID NO: 73477
  derived and/or modified CDS sequence (opt1) from hemagglutinin__InfluenzaA__AIJ10741

SEQ ID NO: 76552 - RNA, 1701 nt, Artificial Sequence
  derived and/or modified CDS sequence (opt1) from hemagglutinin__InfluenzaA__AIJ10742
augaagaccaucaucgcccugagcuacauccucugccugguguucgcccagaagcugcccggcaacgacaacuccaccgcgacgcucugccuggggcaccacgccgucccgaacggcaccaucgugaagaccaucaccaacgaccgcaucgaggugacgaacgccaccgagcugguccagaacagcuccaucggggagaucugcgacagcccccaccagauccucgacggcgagaacugcacccugaucgacgcccugcucggggacccccagugcgacggcuuccagaacaagaagugggaccuguucguggagcgguccaaggccuacagcaacugcuaccccuacgacgugccggacuacgcgucccugcgcagccucgucgccuccagcggcacccuggaguucaacaacgaguccuucaacuggacgggggugacccagaacggcaccagcuccgccugcauccggcgcagcaacaacuccuucuucagccggcugaacuggcucacccaccugaacuucaaguaccccgcccugaacgugacgaugcccaacaacgagcaguucgacaagcucuacaucuggggcguccaccaccccgggaccgacaaggaccagaucuuccuguacgcgcaguccagcgggcgcaucaccguggccaccaagcggucccagcaggccgugaucccgaacaucggcagccgcccccggauccgcaacauccccagccggaucuccaucuacuggacgaucgucaagcccggcgacauccugcucaucaacagcaccgggaaccugaucgccccgcgcggcuacuucaagauccgguccggcaagagcuccaucaugcgcagcgacgcccccaucgggaagugcaaguccgagugcaucacccccaacggcagcauccccaacgacaagccguuccagaacgugaaccggaucaccuacggggcgugcccccgcuacgugaagcaguccacgcugaagcucgccaccggcaugcggaacguccccgagaagcagacccgcgggaucuucggcgccaucgccggguucaucgagaacggcugggagggcaugguggacgggugguacggcuuccggcaccagaacagcgaggggcgcggccaggccgcggaccugaaguccacccaggccgccaucgaccagaucaacgggaagcugaaccggcucaucggcaagacgaacgagaaguuccaccagaucgagaaggaguucagcgagguggagggccgcauccaggaccuggagaaguacgucgaggacaccaagaucgaccugugguccuacaacgccgagcuccugguggcccuggagaaccagcacaccaucgaccucaccgacagcgagaugaacaagcuguucgagaagacgaagaagcagcugcgcgagaacgcggaggacauggggaacggcugcuucaagaucuaccacaagugcgacaacgccugcaucggguccauccggaacggcaccuacgaccacgacguguaccgcgacgaggcccucaacaaccgguuccagaucaagggggucgagcucaagagcggcuacaaggacuggauccuguggaucuccuucgccaucagcugcuuccugcugugcguggcccugcucggcuucaucaugugggcgugccagaaggggaacauccgcugcaacaucugcaucuga

SEQ ID NO: 76553 - RNA, 1701 nt, Artificial Sequence
  derived and/or modified CDS sequence (opt1) from hemagglutinin__InfluenzaA__AIJ10743
augaagaccaucaucgcccugagcuacauccucugccugguguucgcccagaagcugcccggcaacgacaacuccaccgcgacgcucugccuggggcaccacgccgucccgaacggcaccaucgugaagaccaucaccaacgaccgcaucgaggugacgaacgccaccgagcugguccagaacagcuccaucggggagaucugcgacagcccccaccagauccucgacggcgagaacugcacccugaucgacgcccugcucggggacccccagugcgacggcuuccagaacaagaagugggaccuguucguggagcgguccaaggccuacagcaacugcuaccccuacgacgugccggacuacgcgucccugcgcagccucgucgccuccagcggcacccuggaguucaacaacgaguccuucaacuggacgggggugacccagaacggcaccagcuccgccugcauccggcgcagcaacaacuccuucuucagccggcugaacuggcucacccaccugaacuucaaguaccccgcccugaacgugacgaugcccaacaacgagcaguucgacaagcucuacaucuggggcguccaccaccccgggaccgacaaggaccagaucuuccuguacgcgcaguccagcgggcgcaucaccguguccaccaagcggagccagcaggccgugaucccgaacaucggcagccgcccccggauccgcaacauccccucccggaucagcaucuacuggacgaucgucaagcccggcgacauccugcucaucaacuccaccgggaaccugaucgccccgcgcggcuacuucaagauccggagcgggaaguccagcaucaugcgcuccgacgcccccaucggcaagugcaagagcgagugcaucacccccaacggcuccauccccaacgacaagccguuccagaacgugaaccggaucaccuacggggccugcccccgcuacgugaagcagagcacgcugaagcucgcgaccggcaugcggaacguccccgagaagcagacccgcgggaucuucggcgccaucgccggguucaucgagaacggcugggagggcaugguggacgggugguacggcuuccggcaccagaacuccgaggggcgcggccaggccgccgaccucaagagcacccaggcggccaucgaccagaucaacgggaagcugaaccggcugaucggcaagacgaacgagaaguuccaccagaucgagaaggaguucuccgagguggagggccgcauccaggaccuggagaaguacgucgaggacaucaagaucgaccuguggagcuacaacgccgagcuccugguggcccuggagaaccagcacaccaucgaccucaccgacuccgagaugaacaagcuguucgagaagaccaagaagcagcugcgcgagaacgccgaggacauggggaacggcugcuucaagaucuaccacaagugcgacaacgcgugcaucgggagcauccggaacggcacguacgaccacgacguguaccgcgacgaggcccucaacaaccgguuccagaucaagggggucgagcugaaguccggcuacaaggacuggauccuguggaucagcuucgccaucuccugcuuccuccugugcguggcccugcucggcuucaucaugugggccugccagaaggggaacauccgcugcaacaucugcaucuga

SEQ ID NO: 76554 - RNA, 1701 nt, Artificial Sequence
  derived and/or modified CDS sequence (opt1) from hemagglutinin__InfluenzaA__AIJ10744
augaagaccaucaucgcccugagcuacauccucugccugguguucgcccagaagcugcccggcaacgacaacuccaccgcgacgcucugccuggggcaccacgccgucccgaacggcaccaucgugaagaccaucaccaacgaccgcaucgaggugacgaacgccaccgagcugguccagaacagcuccaucggggagaucugcgacagcccccaccagauccucgacggcgagaacugcacccugaucgacgcccugcucggggacccccagugcgacggcuuccagaacaagaagugggaccuguucguggagcgguccaaggccuacagcaacugcuaccccuacgacgugccggacuacgcgucccugcgcagccucgucgccuccagcggcacccuggaguucaacaacgaguccuucaacuggacgggggugacccagaacggcaccagcuccgccugcauccggcgcagcaacaacuccuucuucagccggcugaacuggcucacccaccugaacuucaaguaccccgcccugaacgugacgaugcccaacaacgagcaguucgacaagcucuacaucuggggcguccaccaccccgggaccgacaaggaccagaucuuccuguacgcgcaguccagcgggcgcaucaccguguccaccaagcggagccagcaggccgugaucccgaacaucggcagccgcccccggauccgcaacauccccucccggaucagcaucuacuggacgaucgucaagcccggcgacauccugcucaucaacuccaccgggaaccugaucgccccgcgcggcuacuucaagauccggagcgggaaguccagcaucaugcgcuccgacgcccccaucggcaagugcaagagcgagugcaucacccccaacggcuccauccccaacgacaagccguuccagaacgugaaccggaucaccuacggggccugcccccgcuacgugaagcagcggacgcugaagcucgcgaccggcaugcgcaacguccccgagaagcagacccgggggaucuucggcgccaucgccggguucaucgagaacggcugggagggcaugguggacgggugguacggcuuccgccaccagaacagcgaggggcggggccaggccgccgaccugaaguccacccaggcggccaucgaccagaucaacgggaagcugaaccgccucaucggcaagacgaacgagaaguuccaccagaucgagaaggaguucagcgagguggagggccgcauccaggaccuggagaaguacgucgaggacaccaagaucgaccugugguccuacaacgccgagcuccugguggcccuggagaaccagcacaccaucgaccucaccgacagcgagaugaacaagcuguucgagaagacgaagaagcagcugcgggagaacgccgaggacauggggaacggcugcuucaagaucuaccacaagugcgacaacgcgugcaucggguccauccgcaacggcaccuacgaccacgacguguaccgggacgaggcccucaacaaccgcuuccagaucaagggggucgagcucaagagcggcuacaaggacuggauccuguggaucuccuucgccaucagcugcuuccugcugugcguggcccugcucggcuucaucaugugggccugccagaaggggaacauccggugcaacaucugcaucuga

SEQ ID NO: 76555 - RNA, 1701 nt, Artificial Sequence; identical to SEQ ID NO: 74018
  derived and/or modified CDS sequence (opt1) from hemagglutinin__InfluenzaA__AIJ10745

SEQ ID NO: 76556 - RNA, 1701 nt, Artificial Sequence
  derived and/or modified CDS sequence (opt1) from hemagglutinin__InfluenzaA__AIJ10747
augaagaccaucaucgcccugagcuacauccucugccugguguucgcccagaagcugcccggcaacgacaacuccaccgcgacgcucugccuggggcaccacgccgucccgaacggcaccaucgugaagaccaucaccaacgaccgcaucgaggugacgaacgccaccgagcugguccagaacagcuccaucggggagaucugcgacagcccccaccagauccucgacggcgagaacugcacccugaucgacgcccugcucggggacccccagugcgacgacuuccagaacaagaagugggaccuguucguggagcgguccaaggccuacagcaacugcuaccccuacgacgugccggacuacgcgucccugcgcagccucgucgccuccagcggcacccuggaguucaacaacgagaacuucaacuggacgggcgugacccagaacgggaccuccagcgccugcauccggcgcuccaacaacagcuucuucucccggcugaacuggcucacccaccugaacuucaaguaccccgcccugaacgugacgaugcccaacaacgagcaguucgacaagcucuacaucuggggcguccaccaccccgggaccgacaaggaccagaucuuccuguacgcgcagagcuccggccgcaucaccgugagcaccaagcggucccagcaggccgugaucccgaacaucgggagccgcccccggauccgcaacauccccagccggaucuccaucuacuggacgaucgucaagcccggcgacauccugcucaucaacagcaccggcaaccugaucgccccgcgcggguacuucaagauccgguccggcaagagcuccaucaugcgcagcgacgcccccaucgggaagugcaaguccgagugcaucacccccaacggcagcauccccaacgacaagccguuccagaacgugaaccggaucaccuacggcgccugcccccgcuacgugaagcaguccacgcugaagcucgcgaccgggaugcggaacguccccgagaagcagacccgcggcaucuucggggccaucgccggcuucaucgagaacgggugggagggcaugguggacggcugguacggguuccggcaccagaacagcgagggccgcgggcaggccgccgaccugaaguccacccaggcggccaucgaccagaucaacggcaagcugaaccggcucaucgggaagacgaacgagaaguuccaccagaucgagaaggaguucagcgagguggagggccgcauccaggaccuggagaaguacgucgaggacaccaagaucgaccugugguccuacaacgccgagcuccugguggcccuggagaaccagcacaccaucgaccucaccgacagcgagaugaacaagcuguucgagaagacgaagaagcagcugcgcgagaacgccgaggacaugggcaacgggugcuucaagaucuaccacaagugcgacaacgcgugcaucggcuccauccggaacgggaccuacgaccacgacguguaccgcgacgaggcccucaacaaccgguuccagaucaagggcgucgagcucaagagcggguacaaggacuggauccuguggaucuccuucgccaucagcugcuuccugcugugcguggcccugcucggcuucaucaugugggccugccagaagggcaacauccgcugcaacaucugcaucuga

SEQ ID NO: 76557 - RNA, 1701 nt, Artificial Sequence; identical to SEQ ID NO: 76556
  derived and/or modified CDS sequence (opt1) from hemagglutinin__InfluenzaA__AIJ10748

SEQ ID NO: 76558 - RNA, 1701 nt, Artificial Sequence
  derived and/or modified CDS sequence (opt1) from hemagglutinin__InfluenzaA__AIJ10750
augaagaccaucaucgcccugagcuacauccucugccugguguucgcccagaagcugcccggcaacgacaacuccaccgcgacgcucugccuggggcaccacgccgucccgaacggcaccaucgugaagaccaucaccaacgaccgcaucgaggugacgaacgccaccgagcugguccagaacagcuccaucggggagaucugcgacagcccccaccagauccucgacggcgagaacugcacccugaucgacgcccugcucggggacccccagugcgacggcuuccagaacaagaagugggaccuguucguggagcgguccaaggccuacagcaacugcuaccccuacgacgugccggacuacgcgucccugcgcagccucgucgccuccagcggcacccuggaguucaacaacgaguccuucaacuggacgggggugacccagaacggcaccagcuccgccugcauccggcgcagcaacuccagcuucuucucccggcugaacuggcucacccaccugaacuucaaguaccccgcccugaacgugacgaugcccaacaacgagcaguucgacaagcucuacaucuggggcguccaccaccccgggaccgacaaggaccagaucuuccuguacgcgcagagcuccgggcgcaucaccgugagcaccaagcggagccagcaggccgugaucccgaacaucggcucccgcccccggauccgcaacauccccagccggaucuccaucuacuggacgaucgucaagcccggcgacauccugcucaucaacagcaccgggaaccugaucgccccgcgcggcuacuucaagauccgguccggcaagagcuccaucauccgcagcgacgcccccaucgggaagugcaaguccgagugcaucacccccaacggcagcauccccaacgacaagccguuccagaacgugaaccggaucaccuacggggccugcccccgcuacgugaagcaguccacgcugaagcucgcgaccggcaugcggaacguccccgagaagcagacccgcgggaucuucggcgccaucgccggguucaucgagaacggcugggagggcaugguggacgggugguacggcuuccggcaccagaacagcgaggggcgcggccaggccgccgaccugaaguccacccaggcggccaucgaccagaucaacgggaagcugaaccggcucaucggcaagacgaacgagaaguuccaccagaucgagaaggaguucagcgagguggagggccgcauccaggaccuggagaaguacgucgaggacaccaagaucgaccugugguccuacaacgccgagcuccugguggcccuggagaaccagcacaccaucgaccucaccgacagcgagaugaacaagcuguucgagaagacgaagaagcagcugcgcgagaacgccgaggacauggggaacggcugcuucaagaucuaccacaagugcgacaacgcgugcaucggguccauccggaacggcaccuacgaccacaacguguaccgcgacgaggcccucaacaaccgguuccagaucaagggggucgagcucaagagcggcuacaaggacuggauccuguggaucuccuucgccaucagcugcuuccugcugugcguggcccugcucggcuucaucaugugggccugccagaaggggaacauccgcugcaacaucugcaucuga

SEQ ID NO: 76559 - RNA, 1701 nt, Artificial Sequence
  derived and/or modified CDS sequence (opt1) from hemagglutinin__InfluenzaA__AIJ10752
augaagaccaucaucgcccugagcuacauccucugccugguguucgcccagaagcugcccggcaacgacaacuccaccgcgacgcucugccuggggcaccacgccgucccgaacggcaccaucgugaagaccaucaccaacgaccgcaucgaggugacgaacgccaccgagcugguccagaacagcuccaucggggagaucugcgacagcccccaccagauccucgacggcgagaacugcacccugaucgacgcccugcucggggacccccagugcgacggcuuccagaacaagaagugggaccuguucguggagcgguccaaggccuacagcaacugcuaccccuacgacgugccggacuacgcgucccugcgcagccucgucgccuccagcggcacccuggaguucaacaacgaguccuucaacuggacgggggugacccagaacggcaccagcuccgccugcauccggcgcagcaacuccagcuucuucucccggcugaacuggcucacccaccugaacuucaaguaccccgcccugaacgugacgaugcccaacaacgagcaguucgacaagcucuacaucuggggcguccaccaccccgggaccgacaaggaccagaucuuccuguacgcgcagagcuccgggcgcaucaccgugagcaccaagcggagccagcaggccgugaucccgaacaucggcucccgcccccggauccgcaacauccccagccggaucuccaucuacuggacgaucgucaagcccggcgacauccugcucaucaacagcaccgggaaccugaucgccccgcgcggcuacuucaagauccgguccggcaagagcuccaucaugcgcagcgacgcccccaucgggaagugcaaguccgagugcaucacccccaacggcagcauccccaacgacaagccguuccagaacgugaaccggaucaccuacggggccugcccccgcuacgugaagcaguccacgcugaagcucgcgaccggcaugcggaacguccccgagaagcagacccgcgggaucuucggcgccaucgccggguucaucgagaacggcugggagggcaugguggacgggugguacggcuuccggcaccagaacagcgaggggcgcggccaggccgccgaccugaaguccacccaggcggccaucgaccagaucaacgggaagcugaaccggcucaucggcaagacgaacgagaaguuccaccagaucgagaaggaguucagcgagguggagggccgcauccaggaccuggagaaguacgucgaggacaccaagaucgaccugugguccuacaacgccgagcuccugguggcccuggagaaccagcacaccaucgaccucaccgacagcgagaugaacaagcuguucgagaagacgaagaagcagcugcgcgagaacgccgaggacauggggaacggcugcuucaagaucuaccacaagugcgacaacgcgugcaucggguccauccggaacggcaccuacgaccacgacguguaccgcgacgaggcccucaacaaccgguuccagaucaagggggucgagcucaagagcggcuacaaggacuggauccuguggaucuccuucgccaugagcugcuuccugcugugcguggcccugcucggcuucaucaugugggccugccagaaggggaacauccgcugcaacaucugcaucuga

SEQ ID NO: 76560 - RNA, 1701 nt, Artificial Sequence
  derived and/or modified CDS sequence (opt1) from hemagglutinin__InfluenzaA__AIJ10753
augaagaccaucaucgcccugagcuacauccucugccugguguucgcccagaagcugcccggcaacgacaacuccaccgcgacgcucugccuggggcaccacgccgucccgaacggcaccaucgugaagaccaucaccaacgaccgcaucgaggugacgaacgccaccgagcugguccagaacagcuccaucggggagaucugcgacagcccccaccagauccucgacggcgagaacugcacccugaucgacgcccugcucggggacccccagugcgacggcuuccagaacaagaagugggaccuguucguggagcgguccaaggccuacagcaacugcuaccccuacgacgugccggacuacgcgucccugcgcagccucgucgccuccagcggcacccuggaguucaacaacgaguccuucaacugggccggggugacgcagaacggcaccagcuccagcugcauccggggguccaacaacagcuucuucucccgccugaacuggcucacccaccugaacuucaaguaccccgcccugaacgugaccaugcccaacaacgagcaguucgacaagcucuacaucuggggcguccaccaccccgggacggacaaggaccagaucuuccuguacgcgcagagcuccggccggaucaccgugagcaccaagcgcagccagcaggccgugaucccgaacaucggcucccggccccgcauccggaacauccccagccgcaucuccaucuacuggaccaucgucaagcccggggacauccugcucaucaacagcacgggcaaccugaucgccccgcggggguacuucaagauccgcuccggcaagagcuccaucaugcggagcgacgcccccaucggcaagugcaaguccgagugcaucacccccaacgggagcauccccaacgacaagccguuccagaacgugaaccgcaucaccuacggcgccugcccccgguacgugaagcaguccacccugaagcucgcgacggggaugcgcaacguccccgagaagcagacccggggcaucuucggggccaucgccggcuucaucgagaacggcugggaggggaugauggacggcugguacggguuccgccaccagaacagcgagggccgggggcaggccgccgaccugaaguccacccaggcggccaucgaccagaucaacggcaagcugaaccgccucaucggcaagaccaacgagaaguuccaccagaucgagaaggaguucagcgagguggaggggcggauccaggaccuggagaaguacguggaggacacgaagaucgaccugugguccuacaacgccgagcuccuggucgcccuggagaaccagcacaccaucgaccucaccgacagcgagaugaacaagcuguucgagaagaccaagaagcagcugcgcgagaacgccgaggacaugggcaacgggugcuucaagaucuaccacaagugcgacaacgcgugcaucggcuccauccgcaacgggacguacgaccacgacguguaccgggacgaggcccucaacaaccgcuuccagaucaagggcguggagcucaagagcggcuacaaggacuggauccuguggaucuccuucgccaucagcugcuuccugcugugcgucgcccugcucggguucaucaugugggccugccagaagggcaacauccggugcaacaucugcaucuga

SEQ ID NO: 76561 - RNA, 1701 nt, Artificial Sequence; identical to SEQ ID NO: 74018
  derived and/or modified CDS sequence (opt1) from hemagglutinin__InfluenzaA__AIJ10754

SEQ ID NO: 76562 - RNA, 1701 nt, Artificial Sequence
  derived and/or modified CDS sequence (opt1) from hemagglutinin__InfluenzaA__AIJ10755
augaagaccaucaucgcccugagcuacauccucugccugguguucgcccagaagcugcccggcaacgacaacuccaccgcgacgcucugccuggggcaccacgccgucccgaacggcaccaucgugaagaccaucaccaacgaccgcaucgaggugacgaacgccaccgagcugguccagaacagcuccaucggggagaucugcgacagcccccaccagauccucgacggcgagaacugcacccugaucgacgcccugcucggggacccccagugcgacggcuuccagaacaagaagugggaccuguucguggagcgguccaaggccuacagcaacugcuaccccuacgacgugccggacuacgcgucccugcgcagccucgucgccuccagcggcacccuggaguucaacaacgaguccuucaacugggccggggugacgcagaacggcaccagcuccgccugcauccgggggagcaacuccagcuucuucucccgccugaacuggcucacccaccugaacuucaaguaccccgcgcugaacgugaccaugcccaacaacgagcaguucgacaagcucuacaucuggggcguccaccaccccgggacggacaaggaccagaucuuccuguacgcccagagcuccggccggaucaccgugagcaccaagcgcagccagcaggccgugaucccgaacaucggcucccggccccgcauccggaacauccccagccgcaucuccaucuacuggaccaucgucaagcccggggacauccugcucaucaacagcacgggcaaccugaucgccccgcggggguacuucaagauccgcuccggcaagagcuccaucaugcggagcgacgcccccaucggcaagugcaaguccgagugcaucacccccaacgggagcauccccaacgacaagccguuccagaacgugaaccgcaucaccuacggcgcgugcccccgguacgugaagcaguccacccugaagcucgccacggggaugcgcaacguccccgagaagcagacccggggcaucuucggggccaucgccggcuucaucgagaacggcugggaggggaugguggacggcugguacggguuccgccaccagaacagcgagggccgggggcaggccgcggaccugaaguccacccagagcgccaucgaccagaucaacggcaagcugaaccgccucaucggcaagaccaacgagaaguuccaccagaucgagaaggaguucuccgagguggaggggcggauccaggaccuggagaaguacgucgaggacacgaagaucgaccuguggagcuacaacgccgagcuccugguggcccuggagaaccagcacaccaucgaccucaccgacuccgagaugaacaagcuguucgagaagaccaagaagcagcugcgcgagaacgccgaggacaugggcaacgggugcuucaagaucuaccacaagugcgacaacgcgugcaucggcagcauccgcaacgggacguacgaccacgacguguaccgggacgaggcccucaacaaccgcuuccagaucaagggcgucgagcugaaguccggcuacaaggacuggauccuguggaucagcuucgccaucagcugcuuccuccugugcguggcccugcucggguucaucaugugggccugccagaagggcaacauccggugcaacaucugcaucuga

SEQ ID NO: 76563 - RNA, 1701 nt, Artificial Sequence; identical to SEQ ID NO: 74018
  derived and/or modified CDS sequence (opt1) from hemagglutinin__InfluenzaA__AIJ10756

SEQ ID NO: 76564 - RNA, 1701 nt, Artificial Sequence
  derived and/or modified CDS sequence (opt1) from hemagglutinin__InfluenzaA__AIJ10757
augaagaccaucaucgcccugagcuacauccucugccuggugaucgcccagaagcugcccggcaacgacaacuccaccgcgacgcucugccuggggcaccacgccgucccgaacggcaccaucgugaagaccaucaccaacgaccgcaucgaggugacgaacgccaccgagcugguccagaacagcuccaucggggagaucugcgacagcccccaccagauccucgacggcgagaacugcacccugaucgacgcccugcucggggacccccagugcgacggcuuccagaacaagaagugggaccuguucguggagcgguccaaggccuacagcaacugcuaccccuacgacgugccggacuacgcgucccugcgcagccucgucgccuccagcggcacccuggaguucaacaacgaguccuucaacugggccggggugacgcagaacggcaccagcuccgccugcauccgggggagcaacuccagcuucuucucccgccugaacuggcucacccaccugaacuucaaguaccccgcgcugaacgugaccaugcccaacaacgagcaguucgacaagcucuacaucuggggcguccaccaccccgggacggacaaggaccagaucuuccuguacgcccagagcuccggccggaucaccgugagcaccaagcgcagccagcaggccgugaucccgaacaucggcucccggccccgcauccggaacauccccagccgcaucuccaucuacuggaccaucgucaagcccggggacauccugcucaucaacagcacgggcaaccugaucgccccgcggggguacuucaagauccgcuccggcaagagcuccaucaugcggagcgacgcccccaucggcaagugcaaguccgagugcaucacccccaacgggagcauccccaacgacaagccguuccagaacgugaaccgcaucaccuacggcgcgugcccccgguacgugaagcaguccacccugaagcucgccacggggaugcgcaacguccccgagaagcagacccggggcaucuucggggccaucgccggcuucaucgagaacggcugggaggggaugguggacggcugguacggguuccgccaccagaacagcgagggccgggggcaggccgcggaccugaaguccacccaggccgccaucgaccagaucaacggcaagcugaaccgccucaucggcaagaccaacgagaaguuccaccagaucgagaaggaguucagcgagguggaggggcggauccaggaccuggagaaguacgucgaggacacgaagaucgaccugugguccuacaacgccgagcuccugguggcccuggagaaccagcacaccaucgaccucaccgacagcgagaugaacaagcuguucgagaagaccaagaagcagcugcgcgagaacgcggaggacaugggcaacgggugcuucaagaucuaccacaagugcgacaacgccugcaucggcuccauccgcaacgggacguacgaccacgacguguaccgggacgaggcccucaacaaccgcuuccagaucaagggcgucgagcucaagagcggcuacaaggacuggauccuguggaucuccuucgccaucagcugcuuccugcugugcguggugcugcucggguucaucaugugggccugccagaagggcaacauccggugcaacaucugcaucuga

SEQ ID NO: 76565 - RNA, 1701 nt, Artificial Sequence
  derived and/or modified CDS sequence (opt1) from hemagglutinin__InfluenzaA__AIJ10758
augaagaccaucaucgcccugagcuacauccucugccugguguucgcccagaagcugcccggcaacgacaacuccaccgcgacgcucugccuggggcaccacgccgucccgaacggcaccaucgugaagaccaucaccaacgaccgcaucgaggugacgaacgccaccgagcugguccagaacagcuccaucggggagaucugcgacagcccccaccagauccucgacggcgagaacugcacccugaucgacgcccugcucggggacccccagugcgacggcuuccagaacaagaagugggaccuguucguggagcgguccaaggccuacagcaacugcuaccccuacgacgugccggacuacgcgucccugcgcagccucgucgccuccagcggcacccuggaguucaacaacgaguccuucaacugggccggggugacgcagaacggcaccagcuccgccugcauccgggggagcaacuccagcuucuucucccgccugaacuggcucacccacagcaacuucaaguaccccgcgcugaacgugaccaugcccaacaacgagcaguucgacaagcuguacaucuggggcguccaccaccccgggacggacaaggaccagaucuuccucuacgcccaguccagcggccggaucaccgugagcaccaagcgcucccagcaggccgugaucccgaacaucggcagccggccccgcauccggaacauccccucccgcaucagcaucuacuggaccaucgucaagcccggggacauccugcugaucaacuccacgggcaaccucaucgccccgcggggguacuucaagauccgcagcggcaaguccagcaucaugcgguccgacgcccccaucggcaagugcaagagcgagugcaucacccccaacggguccauccccaacgacaagccguuccagaacgugaaccgcaucaccuacggcgcgugcccccgguacgugaagcagagcacccugaagcuggccacggggaugcgcaacguccccgagaagcagacccggggcaucuucggggccaucgccggcuucaucgagaacggcugggaggggaugauggacggcugguacggguuccgccaccagaacuccgagggccgggggcaggccgcggaccucaagagcacccaggccgccaucgaccagaucaacggcaagcugaaccgccugaucggcaagaccaacgagaaguuccaccagaucgagaaggaguucuccgagguggaggggcggauccaggaccucgagaaguacguggaggacacgaagaucgaccuguggagcuacaacgccgagcugcucgucgcccuggagaaccagcacaccaucgaccugaccgacuccgagaugaacaagcuguucgagaagaccaagaagcagcuccgcgagaacgcggaggacaugggcaacgggugcuucaagaucuaccacaagugcgacaacgccugcaucggcagcauccgcaacgggacguacgaccacgacguguaccgggacgaggcccugaacaaccgcuuccagaucaagggcguggagcucaaguccggcuacaaggacuggauccuguggaucagcuucgccaucagcugcuuccugcucugcgucgcccugcugggguucaucaugugggcgugccagaagggcaacauccggugcaacaucugcaucuga

SEQ ID NO: 76566 - RNA, 1701 nt, Artificial Sequence; identical to SEQ ID NO: 74018
  derived and/or modified CDS sequence (opt1) from hemagglutinin__InfluenzaA__AIJ10759

SEQ ID NO: 76567 - RNA, 1701 nt, Artificial Sequence
  derived and/or modified CDS sequence (opt1) from hemagglutinin__InfluenzaA__AIJ10760
augaagaccaucaucgcccugagcuacauccucugccuggugaucgcccagaagcugcccggcaacgacaacuccaccgcgacgcucugccuggggcaccacgccgucccgaacggcaccaucgugaagaccaucaccaacgaccgcaucgaggugacgaacgccaccgagcugguccagaacagcuccaucggggagaucugcgacagcccccaccagauccucgacggcgagaacugcacccugaucgacgcccugcucggggacccccagugcgacggcuuccagaacaagaagugggaccuguucguggagcgguccaaggccuacagcaacugcuaccccuacgacgugccggacuacgcgucccugcgcagccucgucgccuccagcggcacccuggaguucaacaacgaguccuucaacugggccggggugacgcagaacggcaccagcuccgccugcauccgggggagcaacuccagcuucuucucccgccugaacuggcucacccaccugaacuucaaguaccccgcgcugaacgugaccaugcccaacaacgagcaguucgacaagcucuacaucuggggcguccaccaccccgggacggacaaggaccagaucuuccuguacgcccagagcuccggccggaucaccgugagcaccaagcgcagccagcaggccgugaucccgaacaucggcucccggccccgcauccggaacauccccagccgcaucuccaucuacuggaccaucgucaagcccggggacauccugcucaucaacagcacgggcaaccugaucgccccgcggggguacuucaagauccgcuccggcaagagcuccaucaugcggagcgacgcccccaucggcaagugcaaguccgagugcaucacccccaacgggagcauccccaacgacaagccguuccagaacgugaaccgcaucaccuacggcgcgugcccccgguacgugaagcaguccacccugaagcucgccacggggaugcgcaacguccccgagaagcagacccggggcaucuucggggccaucgccggcuucaucgagaacggcugggaggggaugguggacggcugguacggguuccgccaccagaacagcgagggccgggggcaggccgcggaccugaaguccacccaggccgccaucgaccagaucaacggcaagcugaaccgccucaucggcaagaccaacgagaaguuccaccagaucgagaaggaguucagcgagguggaggggcggauccaggaccuggagaaguacgucgaggacacgaagaucgaccugugguccuacaacgccgagcuccugguggcccuggagaaccagcacaccaucgaccucaccgacagcgagaugaacaagcuguucgagaagaccaagaagcagcugcgcgagaacgcggaggacaugggcaacgggugcuucaagaucuaccacaagugcgacaacgccugcaucggcuccauccgcaacgggacguacgaccacgacguguaccgggacgaggcccucaacaaccgcuuccagaucaagggcgucgagcucaagagcggcuacaaggacuggauccuguggaucuccuucgccaucagcugcuuccugcugugcguggcccugcucggguucaucaugugggcgugccagaagggcaacauccggugcaacaucugcaucuga

SEQ ID NO: 76568 - RNA, 1701 nt, Artificial Sequence
  derived and/or modified CDS sequence (opt1) from hemagglutinin__InfluenzaA__AIJ10761
augaagaccaucaucgcccugagcuacauccucugccugguguucgcccagaagcugcccggcaacgacaacuccaccgcgacgcucugccuggggcaccacgccgucccgaacggcaccaucgugaagaccaucaccaacgaccgcaucgaggugacgaacgccaccgagcugguccagaacagcuccaucggggagaucugcgacagcccccaccagauccucgacggcgagaacugcacccugaucgacgcccugcucggggacccccagugcgacggcuuccagaacaagaagugggaccuguucguggagcgguccaaggccuacagcaacugcuaccccuacgacgugccggacuacgcgucccugcgcagccucgucgccuccagcggcacccuggaguucaacaacgaguccuucaacugggccggggugacgcagaacggcaccagcuccgccugcauccgggggagcaacuccagcuucuucucccgccugaacuggcucacccaccugaacuucaaguaccccgcgcugaacgugaccaugcccaacaacgagcaguucgacaagcucuacaucuggggcguccaccaccccgggacggacaaggaccagaucuuccuguacgcccagagcuccggccggaucaccgugagcaccaagcgcagccagcaggccgugaucccgaacaucggcucccggccccgcauccggaacauccccagccgcaucuccaucuacuggaccaucgucaagcccggggacauccugcucaucaacagcacgggcaaccugaucgccccgcggggguacuucaagauccgcuccggcaagagcuccaucaugcggagcgacgcccccaucggcaagugcaaguccgagugcaucacccccaacgggagcauccccaacgacaagccguuccagaacgugaaccgcaucaccuacggcgcgugcccccgguacgugaagcaguccacccugaagcucgccacggggaugcgcaacguccccgagaagcagacccggggcaucuucggggccaucgccggcuucaucgagaacggcugggaggggaugguggacggcugguacggguuccgccaccagaacagcgagggccgggggcaggccgcggaccugaaguccacccaggccgccaucgaccagaucaacggcaagcugaaccgccucaucggcaagaccaacgagaaguuccaccagaucgagaaggaguucagcgagguggaggggcggauccaggaccuggagaaguacgucgaggacacgaagaucgaccugugguccuacaacgccgagcuccugguggcccuggagaaccagcacaccaucgaccucaccgacagcgagaugaacaagcuguucgagaagaccaagaagcagcugcgcgagaacgcggaggacaugggcaacgggugcuucaagaucuaccacaagugcgacaacgccugcaucggcuccauccgcaacgggacguacgaccacgacguguaccggaacgaggcccucaacaagcgcuuccagaucaagggcgucgagcucaagagcggcuacaaggacuggauccuguggaucuccuucgccaucagcugcuuccugcugugcguggugcugcucggguucaucaugugggccugccagaagggcaacauccggugcaacaucugcaucuga

SEQ ID NO: 76569 - RNA, 1701 nt, Artificial Sequence; identical to SEQ ID NO: 75916
  derived and/or modified CDS sequence (opt1) from hemagglutinin__InfluenzaA__AIJ10762

SEQ ID NO: 76570 - RNA, 1701 nt, Artificial Sequence; identical to SEQ ID NO: 75916
  derived and/or modified CDS sequence (opt1) from hemagglutinin__InfluenzaA__AIJ10763

SEQ ID NO: 76571 - RNA, 1701 nt, Artificial Sequence; identical to SEQ ID NO: 75916
  derived and/or modified CDS sequence (opt1) from hemagglutinin__InfluenzaA__AIJ10764

SEQ ID NO: 76572 - RNA, 1701 nt, Artificial Sequence; identical to SEQ ID NO: 75916
  derived and/or modified CDS sequence (opt1) from hemagglutinin__InfluenzaA__AIJ10765

SEQ ID NO: 76573 - RNA, 1701 nt, Artificial Sequence; identical to SEQ ID NO: 75916
  derived and/or modified CDS sequence (opt1) from hemagglutinin__InfluenzaA__AIJ10766

SEQ ID NO: 76574 - RNA, 1701 nt, Artificial Sequence; identical to SEQ ID NO: 75916
  derived and/or modified CDS sequence (opt1) from hemagglutinin__InfluenzaA__AIJ10767

SEQ ID NO: 76575 - RNA, 1701 nt, Artificial Sequence
  derived and/or modified CDS sequence (opt1) from hemagglutinin__InfluenzaA__AIJ10768
augaagaccaucaucgcccugagcuacauccucugccugguguucgcccagaagcugcccggcaacgacaacuccaccgcgacgcucugccuggggcaccacgccgucccgaacggcaccaucgugaagaccaucaccaacgaccgcaucgaggugacgaacgccaccgagcugguccagaacagcuccaucggggagaucugcgacagcccccaccagauccucgacggcgagaacugcacccugaucgacgcccugcucggggacccccagugcgacggcuuccagaacaagaagugggaccuguucguggagcgguccaaggccuacagcaacugcuaccccuacgacgugccggacuacgcgucccugcgcagccucgucgccuccagcggcacccuggaguucaacaacgaguccuucaacugggccggggugacgcagaacggcaccagcuccgccugcauccgggggagcaacuccagcuucuucucccgccugaacuggcucacccaccugaacuucaaguaccccgcgcugaacgugaccaugcccaacaacgagcaguucgacaagcucuacaucuggggcguccaccaccccgggacggacaaggaccagaucuuccuguacgcccagagcuccggccggaucaccgugagcaccaagcgcagccagcaggccgugaucccgaacaucggcucccggccccgcauccggaacauccccagccgcaucuccaucuacuggaccaucgucaagcccggggacauccugcucaucaacagcacgggcaaccugaucgccccgcggggguacuucaagauccgcuccggcaagagcuccaucaugcggagcgacgcccccaucggcaagugcaaguccgagugcaucacccccaacgggagcauccccaacgacaagccguuccagaacgugaaccgcaucaccuacggcgcgugcccccgguacgugaagcaguccacccugaagcucgccacggggaugcgcaacauccccgagaagcagacccggggcaucuucggggccaucgccggcuucaucgagaacggcugggaggggauggucgacggcugguacggguuccgccaccagaacagcgagggccgggggcaggccgcggaccugaaguccacccaggccgccaucgaccagaucaacggcaagcugaaccgccucaucggcaagaccaacgagaaguuccaccagaucgagaaggaguucagcgagguggaggggcggauccaggaccuggagaaguacguggaggacacgaagaucgaccugugguccuacaacgccgagcuccuggucgcccuggagaaccagcacaccaucgaccucaccgacagcgagaugaacaagcuguucgagaagaccaagaagcagcugcgcgagaacgcggaggacaugggcaacgggugcuucaagaucuaccacaagugcgacaacgccugcaucggcuccauccgcaacgggacguacgaccacgacguguaccgggacgaggcccucaacaaccgcuuccagaucaagggcguggagcucaagagcggcuacaaggacuggauccuguggaucuccuucgccaucagcugcuuccugcugugcgucgugcugcucggguucaucaugugggccugccagaagggcaacauccggugcaacaucugcaucuga

SEQ ID NO: 76576 - RNA, 1701 nt, Artificial Sequence
  derived and/or modified CDS sequence (opt1) from hemagglutinin__InfluenzaA__AIJ10769
augaagaccaucaucgcccugagcuacauccucugccugguguucgcccagaagcugcccggcaacgacaacuccaccgcgacgcucugccuggggcaccacgccgucccgaacggcaccaucgugaagaccaucaccaacgaccgcaucgaggugacgaacgccaccgagcugguccagaacagcuccaucggggagaucugcgacagcccccaccagauccucgacggcgagaacugcacccugaucgacgcccugcucggggacccccagugcgacggcuuccagaacaagaagugggaccuguucguggagcgguccaaggccuacagcaacugcuaccccuacgacgugccggacuacgcgucccugcgcagccucgucgccuccagcggcacccuggaguucaacaacgaguccuucaacugggccggggugacgcagaacggcaccagcuccgccugcauccgggggagcaacuccagcuucuucucccgccugaacuggcucacccaccugaacuucaaguaccccgcgcugaacgugaccaugcccaacaacgagcaguucgacaagcucuacaucuggggcguccaccaccccgggacggacaaggaccagaucuuccuguacgcccagagcuccggccggaucaccgugagcaccaagcgcagccagcaggccgugaucccgaacaucggcucccggccccgcauccggaacauccccagccgcaucuccaucuacuggaccaucgucaagcccggggacauccugcucaucaacagcacgggcaaccugaucgccccgcggggguacuucaagauccaguccggcaagagcuccaucaugcgcagcgacgcccccaucggcaagugcaaguccgagugcaucacccccaacgggagcauccccaacgacaagccguuccagaacgugaaccggaucaccuacggcgcgugcccccgcuacgugaagcaguccacccugaagcucgccacggggaugcggaacguccccgagaagcagacccgcggcaucuucggggccaucgccggcuucaucgagaacggcugggaggggaugguggacggcugguacggguuccggcaccagaacagcgagggccgcgggcaggccgcggaccugaaguccacccaggccgccaucgaccagaucaacggcaagcugaaccggcucaucggcaagaccaacgagaaguuccaccagaucgagaaggaguucagcgagguggaggggcgcauccaggaccuggagaaguacgucgaggacacgaagaucgaccugugguccuacaacgccgagcuccugguggcccuggagaaccagcacaccaucgaccucaccgacagcgagaugaacaagcuguucgagaagaccaagaagcagcugcgggagaacgcggaggacaugggcaacgggugcuucaagaucuaccacaagugcgacaacgccugcaucggcuccauccgcaacgggacguacgaccacgacguguaccgcgacgaggcccucaacaaccgguuccagaucaagggcgucgagcucaagagcggcuacaaggacuggauccuguggaucuccuucgccaucagcugcuuccugcugugcguggugcugcucggguucaucaugugggccugccagaagggcaacauccgcugcaacaucugcaucuga

SEQ ID NO: 76577 - RNA, 1701 nt, Artificial Sequence; identical to SEQ ID NO: 75916
  derived and/or modified CDS sequence (opt1) from hemagglutinin__InfluenzaA__AIJ10770

SEQ ID NO: 76578 - RNA, 1701 nt, Artificial Sequence; identical to SEQ ID NO: 75916
  derived and/or modified CDS sequence (opt1) from hemagglutinin__InfluenzaA__AIJ10771

SEQ ID NO: 76579 - RNA, 1701 nt, Artificial Sequence; identical to SEQ ID NO: 75916
  derived and/or modified CDS sequence (opt1) from hemagglutinin__InfluenzaA__AIJ10772

SEQ ID NO: 76580 - RNA, 1701 nt, Artificial Sequence; identical to SEQ ID NO: 75916
  derived and/or modified CDS sequence (opt1) from hemagglutinin__InfluenzaA__AIJ10773

SEQ ID NO: 76581 - RNA, 1701 nt, Artificial Sequence
  derived and/or modified CDS sequence (opt1) from hemagglutinin__InfluenzaA__AIJ10774
augaagaccaucaucgcccugagcuacauccucugccugguguucgcccagaagcugcccggcaacgacaacuccaccgcgacgcucugccuggggcaccacgccgucccgaacggcaccaucgugaagaccaucaccaacgaccgcaucgaggugacgaacgccaccgagcugguccagaacagcuccaucggggagaucugcaacagcccccaccagauccucgacggcgagaacugcacccugaucgacgcccugcucggggacccccagugcgacggcuuccagaacaagaagugggaccuguucguggagcgguccaaggccuacagcaacugcuaccccuacgacgugccggacuacgcgucccugcgcagccucgucgccuccagcggcacccuggaguucaacaacgaguccuucaacugggccggggugacgcagaacggcaccagcuccgccugcauccgggggagcaacuccagcuucuucucccgccugaacuggcucacccaccugaacuucaaguaccccgcgcugaacgugaccaugcccaacaacgagcaguucgacaagcucuacaucuggggcguccaccaccccgggacggacaaggaccagaucuuccuguacgcccagagcuccggccggaucaccgugagcaccaagcgcagccagcaggccgugaucccgaacaucggcucccggccccgcauccggaacauccccagccgcaucuccaucuacuggaccaucgucaagcccggggacauccugcucaucaacagcacgggcaaccugaucgccccgcggggguacuucaagauccgcuccggcaagagcuccaucaugcggagcgacgcccccaucggcaagugcaaguccgagugcaucacccccaacgggagcauccccaacgacaagccguuccagaacgugaaccgcaucaccuacggcgcgugcccccgguacgugaagcaguccacccugaagcucgccacggggaugcgcaacguccccgagaagcagacccggggcaucuucggggccaucgccggcuucaucgagaacggcugggaggggaugauggacggcugguacggguuccgccaccagaacagcgagggccgggggcaggccgcggaccugaaguccacccagagcgccaucgaccagaucaacggcaagcugaaccgccucaucggcaagaccaacgagaaguuccaccagaucgagaaggaguucuccgagguggaggggcggauccaggaccuggagaaguacguggaggacacgaagaucgaccuguggagcuacaacgccgagcuccuggucgcccuggagaaccagcacaccaucgaccucaccgacuccgagaugaacaagcuguucgagaagaccaagaagcagcugcgcgagaacgccgaggacaugggcaacgggugcuucaagaucuaccacaagugcgacaacgcgugcaucggcagcauccgcaacgggacguacgaccacgacguguaccgggacgaggcccucaacaaccgcuuccagaucaagggcguggagcugaaguccggcuacaaggacuggauccuguggaucagcuucgccaucagcugcuuccuccugugcgucgugcugcucggguucaucaugugggccugccagaagggcaacauccggugcaacaucugcaucuga

SEQ ID NO: 76582 - RNA, 1701 nt, Artificial Sequence
  derived and/or modified CDS sequence (opt1) from hemagglutinin__InfluenzaA__AIJ10776
augaagaccaucaucgcccugagcugcauccucugccugguguucgcccagaagcugcccggcaacgacaacuccaccgcgacgcucugccuggggcaccacgccgucccgaacggcaccaucgugaagaccaucaccaacgaccgcaucgaggugacgaacgccaccgagcugguccagaacagcuccaucggggagaucugcgacagcccccaccagauccucgacggcgagaacugcacccugaucgacgcccugcucggggacccccagugcgacggcuuccagaacaagaagugggaccuguucguggagcgguccaaggccuacagcaacugcuaccccuacgacgugccggacuacgcgucccugcgcagccucgucgccuccagcggcacccuggaguucaacaacgaguccuucaacugggccggggugacgcagaacggcaccagcuccgccugcauccgggggagcaacuccagcuucuucucccgccugaacuggcucacccaccugaacuucaaguaccccgcgcugaacgugaccaugcccaacaacgagcaguucgacaagcucuacaucuggggcguccaccaccccgggacggacaaggaccagaucuuccuguacgcccagagcuccggccggaucaccgugagcaccaagcgcagccagcaggccgugaucccgaacaucggcucccggccccgcauccggaacauccccagccgcaucuccaucuacuggaccaucgucaagcccggggacauccugcucaucaacagcacgggcaaccugaucgccccgcggggguacuucaagauccgcuccggcaagagcuccaucaugcggagcgacgcccccaucggcaagugcaaguccgagugcaucacccccaacgggagcauccccaacgacaagccguuccagaacgugaaccgcaucaccuacggcgcgugcccccgguacgugaagcaguccacccugaagcucgccacggggaugcgcaacguccccgagaagcagacccggggcaucuucggggccaucgccggcuucaucgagaacggcugggaggggaugguggacggcugguacggguuccgccaccagaacagcgagggccgggggcaggccgcggaccugaaguccacccaggccgccaucgaccagaucaacggcaagcugaaccgccucaucggcaagaccaacgagaaguuccaccagaucgagaaggaguucagcgagguggaggggcggauccaggaccuggagaaguacgucgaggacacgaagaucgaccugugguccuacaacgccgagcuccugguggcccuggagaaccagcacaccaucgaccucaccgacagcgagauguccaagcuguucgagaagaccaagaagcagcugcgcgagaacgcggaggacaugggcaacgggugcuucaagaucuaccacaagugcgacaacgccugcaucggcagcauccgcaacgggacguacgaccacgacguguaccgggacgaggcccucaacaaccgcuuccagaucaagggcgucgagcugaaguccggcuacaaggacuggauccuguggaucagcuucgccaucagcugcuuccuccugugcguggugcugcucggguucaucaugugggccugccagaagggcaacauccggugcaacaucugcaucuga

SEQ ID NO: 76583 - RNA, 1701 nt, Artificial Sequence; identical to SEQ ID NO: 75916
  derived and/or modified CDS sequence (opt1) from hemagglutinin__InfluenzaA__AIJ10777

SEQ ID NO: 76584 - RNA, 1701 nt, Artificial Sequence; identical to SEQ ID NO: 75916
  derived and/or modified CDS sequence (opt1) from hemagglutinin__InfluenzaA__AIJ10778

SEQ ID NO: 76585 - RNA, 1701 nt, Artificial Sequence
  derived and/or modified CDS sequence (opt1) from hemagglutinin__InfluenzaA__AIJ10780
augaagaccaucaucgcccugagcuacauccucugccugguguucgcccagaagcugcccggcaacgacaacuccaccgcgacgcucugccuggggcaccacgccgucccgaacggcaccaucgugaagaccaucaccaacgaccgcaucgaggugacgaacgccaccgagcugguccagaacagcuccaucggggagaucugcgacagcccccaccagauccucgacggcgagaacugcacccugaucgacgcccugcucggggacccccagugcgacuccuuccagaacaagaagugggaccuguucguggagcggagcaaggccuacuccaacugcuaccccuacgacgugccggacuacgcgagccugcgcucccucgucgccagcuccggcacccuggaguucaacaacgagagcuucaacugggccggcgugacgcagaacgggaccuccagcgccugcauccggggcuccaacagcuccuucuucagccgccugaacuggcucacccacuccaacuucaaguaccccgcgcugaacgugaccaugcccaacaacgagcaguucgacaagcuguacaucuggggcguccaccaccccgggacggacaaggaccagaucuuccucuacgcccagagcagcgggcggaucaccguguccaccaagcgcagccagcaggccgugaucccgaacaucggcucccggccccgcauccggaacauccccagccgcaucuccaucuacuggaccaucgucaagcccggcgacauccugcugaucaacagcacggggaaccucaucgccccgcggggcuacuucaagauccgcuccggcaagagcuccaucaugcggagcgacgcccccaucgggaagugcaaguccgagugcaucacccccaacggcagcauccccaacgacaagccguuccagaacgugaaccgcaucaccuacggggcgugcccccgguacgugaagcaguccacccugaagcuggccacgggcaugcgcaacguccccgagaagcagacccgggggaucuucggcgccaucgccggguucaucgagaacggcugggagggcaugauggacgggugguacggcuuccgccaccagaacagcgaggggcggggccaggccgcggaccucaaguccacccaggccgccaucgaccagaucaacgggaagcugaaccgccugaucggcaagaccaacgagaaguuccaccagaucgagaaggaguucagcgagguggagggccggauccaggacaucgagaaguacguggaggacacgaagaucgaccucugguccuacaacgccgagcugcuggucgcccucgagaaccagcacaccaucgaccugaccgacagcgagaugaacaagcuguucgagaagaccaagaagcagcuccgcgagaacgcggaggacauggggaacggcugcuucaagaucuaccacaagugcgacaacgccugcaucggguccauccgcaacggcacguacgaccacgacguguaccgggacgaggcccugaacaaccgcuuccagaucaaggggguggagcucaagagcggcuacaaggacuggauccuguggaucagcuucgccaucuccugcuuccugcugugcgucgcccuccugggcuucaucaugugggcgugccagaaggggaacauccggugcaacaucugcaucuga

SEQ ID NO: 76586 - RNA, 1701 nt, Artificial Sequence; identical to SEQ ID NO: 75916
  derived and/or modified CDS sequence (opt1) from hemagglutinin__InfluenzaA__AIJ10781

SEQ ID NO: 76587 - RNA, 1701 nt, Artificial Sequence; identical to SEQ ID NO: 75916
  derived and/or modified CDS sequence (opt1) from hemagglutinin__InfluenzaA__AIJ10782

SEQ ID NO: 76588 - RNA, 1701 nt, Artificial Sequence
  derived and/or modified CDS sequence (opt1) from hemagglutinin__InfluenzaA__AIJ10783
augaagaccaucaucgcccugagcuacauccucugccugguguucgcccagaagcugcccggcaacgacaacuccaccgcgacgcucugccuggggcaccacgccgucccgaacggcaccaucgugaagaccaucaccaacgaccgcaucgaggugacgaacgccaccgagcugguccagaacagcuccaucggggagaucugcgacagcccccaccagauccucgacggcgagaacugcacccugaucgacgcccugcucggggacccccagugcgacggcuuccagaacaagaagugggaccuguucguggagcgguccaaggccuacagcaacugcuaccccuacgacgugccggacuacgcgucccugcgcagccucgucgccuccagcggcacccuggaguucaacaacgaguccuucaacugggugggggugacgcagaacggcaccagcuccgccugcauccgggggagcaacuccagcuucuucucccgccugaacuggcucacccaccugaacuucaaguaccccgcccugaacgucaccaugcccaacaacgagcaguucgacaagcucuacaucuggggcgugcaccaccccgggacggacaaggaccagaucuuccuguacgcgcagagcuccggccggaucaccgugagcaccaagcgcagccagcaggccgucaucccgaacaucggcucccggccccgcauccggaacauccccagccgcaucuccaucuacuggaccaucgugaagcccggggacauccugcucaucaacagcacgggcaaccugaucgccccgcggggguacuucaagauccgcuccggcaagagcuccaucaugcggagcgacgcccccaucggcaagugcaaguccgagugcaucacccccaacgggagcauccccaacgacaagccguuccagaacgugaaccgcaucaccuacggcgccugcccccgguacgucaagcaguccacccugaagcucgcgacggggaugcgcaacgugcccgagaagcagacccggggcaucuucggggccaucgccggcuucaucgagaacggcugggaggggaugaaggacggcugguacggguuccgccaccagaacagcgagggccgggggcaggccgccgaccugaaguccacccaggcggccaucgaccagaucaacggcaagcugaaccgccucaucggcaagaccaacgagaaguuccaccagaucgagaaggaguucagcgagguggaggggcggauccaggaccuggagaaguacgucgaggacacgaagaucgaccugugguccuacaacgccgagcuccugguggcccuggagaaccagcacaccaucgaccucaccgacagcgagaugaacaagcuguucgagaagaccaagaagcagcugcgcgagaacgccgaggacaugggcaacgggugcuucaagaucuaccacaagugcgacaacgcgugcaucggcuccauccgcaacgggacguacgaccacgacguguaccgggacgaggcccucaacaaccgcuuccagaucaagggcgucgagcucaagagcggcuacaaggacuggauccuguggaucuccuucgccaucagcugcuuccugcugugcguggcccugcucggguucaucaugugggccugccagaagggcaacauccggugcaacaucugcaucuga

SEQ ID NO: 76589 - RNA, 1701 nt, Artificial Sequence; identical to SEQ ID NO: 76588
  derived and/or modified CDS sequence (opt1) from hemagglutinin__InfluenzaA__AIJ10784

SEQ ID NO: 76590 - RNA, 1701 nt, Artificial Sequence
  derived and/or modified CDS sequence (opt1) from hemagglutinin__InfluenzaA__AIJ10785
augaagaccaucaucgcccugagcuacauccucugccugguguucgcccagaagcugcccggcaacgacaacuccaccgcgacgcucugccuggggcaccacgccgucccgaacggcaccaucgugaagaccaucaccaacgaccgcaucgaggugacgaacgccaccgagcugguccagaacagcuccaucggggagaucugcaacagcccccaccagauccucgacggcgagaacugcacccugaucgacgcccugcucggggacccccagugcgacggcuuccagaacaagaagugggaccuguucguggagcgguccaaggccuacagcaacugcuaccccuacgacgugccggacuacgcgucccugcgcagccucgucgccuccagcggcacccuggaguucaacaacgaguccuucaacugggccggggugacgcagaacggcaccagcuccgccugcauccgggggagcaacuccagcuucuucucccgccugaacuggcucacccaccugaacuucaaguaccccgcgcugaacgugaccaugcccaacaacgagcaguucgacaagcucuacaucuggggcguccaccaccccgggacggacaaggaccagaucuuccuguacgcccagagcuccggccggaucaccgugagcaccaagcgcagccagcaggccgugaucccgaacaucggcucccggccccgcauccggaacauccccagccgcaucuccaucuacuggaccaucgucaagcccggggacauccugcucaucaacagcacgggcaaccugaucgccccgcggggguacuucaagauccgcuccggcaagagcuccaucaugcggagcgacgcccccaucggcaagugcaaguccgagugcaucacccccaacgggagcauccccaacgacaagccguuccagaacgugaaccgcaucaccuacggcgcgugcccccgguacgugaagcaguccacccugaagcucgccacggggaugcgcaacguccccgagaagcagacccggggcaucuucggggccaucgccggcuucaucgagaacggcugggaggggaugauggacggcugguacggguuccgccaccagaacagcgagggccgggggcaggccgcggaccugaaguccacccagagcgccaucgaccagaucaacggcaagcugaaccgccucaucggcaagaccaacgagaaguuccaccagaucgagaaggaguucuccgagguggaggggcggauccaggaccuggagaaguacguggaggacacgaagaucgaccuguggagcuacaacgccgagcuccuggucgcccuggagaaccagcacaccaucgaccucaccgacuccgagaugaacaagcuguucgagaagaccaagaagcagcugcgcgagaacgccgaggacaugggcaacgggugcuucaagaucuaccacaagugcgacaacgcgugcaucggcagcauccgcaacgggacguacgaccacgacguguaccgggacgaggcccucaacaaccgcuuccagaucaagggcguggagcugaaguccggcuacaaggacuggauccuguggaucagcuucgccaucagcugcuuccuccugugcgucgcccugcucggguucaucaugugggccugccagaagggcaacauccggugcaacaucugcaucuga

SEQ ID NO: 76591 - RNA, 1701 nt, Artificial Sequence; identical to SEQ ID NO: 76588
  derived and/or modified CDS sequence (opt1) from hemagglutinin__InfluenzaA__AIJ10786

SEQ ID NO: 76592 - RNA, 1701 nt, Artificial Sequence
  derived and/or modified CDS sequence (opt1) from hemagglutinin__InfluenzaA__AIJ10787
augaagaccaucaucgcccugagcuacauccucugccugguguucgcccagaagcugcccggcaacgacaacuccaccgcgacgcucugccuggggcaccacgccgucccgaacggcaccaucgugaagaccaucaccaacgaccgcaucgaggugacgaacgccaccgagcugguccagaacagcuccaucggggagaucugcgacagcccccaccagauccucgacggcgagaacugcacccugaucgacgcccugcucggggacccccagugcgacggcuuccagaacaagaagugggaccuguucguggagcgguccaaggccuacagcaacugcuaccccuacgacgugccggacuacgcgucccugcgcagccucgucgccuccagcggcacccuggaguucaacaacgaguccuucaacugggugggggugacgcagaacggcaccagcuccgccugcauccgggggagcaacuccagcuucuucucccgccugaacuggcucacccaccugaacuucaaguaccccgcccugaacgucaccaugcccaacaacgagcaguucgacaagcucuacaucuggggcgugcaccaccccgggacggacaaggaccagaucuuccuguacgcgcagagcuccggccggaucaccgugagcaccaagcgcagccagcaggccgucaucccgaacaucggcucccggccccgcauccggaacauccccagccgcaucuccaucuacuggaccaucgugaagcccggggacauccugcucaucaacagcacgggcaaccugaucgccccgcggggguacuucaagauccgcuccggcaagagcuccaucaugcggagcgacgcccccaucggcaagugcaaguccgagugcaucacccccaacgggagcauccccaacgacaagccguuccagaacgugaaccgcaucaccuacggcgccugcccccgguacgucaagcaguccacccugaagcucgcgacggggaugcgcaacgugcccgagaagcagacccggggcaucuucggggccaucgccggcuucaucgagaacggcugggaggggaugaaggacggcugguacggguuccgccaccagaacagcgagggccgggggcaggccgccgaccugaaguccacccaggcggccaucgaccagaucaacggcaagcugaaccgccucaucggcaagaccaacgagaaguuccaccagaucgagaaggaguucagcgagguggaggggcggauccaggaccuggagaaguacgucgaggacacgaagaucgaccugugguccuacaacgccgagcuccugguggcccuggagaaccagcacaccaucgaccucaccgacagcgagaugaacaagcuguucgagaagaccaagaagcagcugcgcgagaacgccgaggacaugggcaacgggugcuucaagaucuaccacaagugcgacaacgcgugcaucggcuccauccgcaacgggacguacgaccacgacguguaccgggacgaggcccucaacaaccgcuuccggaucaagggcgucgagcucaagagcggcuacaaggacuggauccuguggaucuccuucgccaucagcugcuuccugcugugcguggcccugcucggguucaucaugugggccugccagaagggcaacauccgcugcaacaucugcaucuga

SEQ ID NO: 76593 - RNA, 1701 nt, Artificial Sequence; identical to SEQ ID NO: 76590
  derived and/or modified CDS sequence (opt1) from hemagglutinin__InfluenzaA__AIJ10788

SEQ ID NO: 76594 - RNA, 1701 nt, Artificial Sequence; identical to SEQ ID NO: 76590
  derived and/or modified CDS sequence (opt1) from hemagglutinin__InfluenzaA__AIJ10789

SEQ ID NO: 76595 - RNA, 1701 nt, Artificial Sequence; identical to SEQ ID NO: 76588
  derived and/or modified CDS sequence (opt1) from hemagglutinin__InfluenzaA__AIJ10790

SEQ ID NO: 76596 - RNA, 1701 nt, Artificial Sequence; identical to SEQ ID NO: 75916
  derived and/or modified CDS sequence (opt1) from hemagglutinin__InfluenzaA__AIJ10791

SEQ ID NO: 76597 - RNA, 1701 nt, Artificial Sequence
  derived and/or modified CDS sequence (opt1) from hemagglutinin__InfluenzaA__AIJ10792
augaagaccaucaucgcccugagcuacauccucugccugguguucgcccagaagcugcccggcgacgacaacuccaccgcgacgcucugccuggggcaccacgccgucccgaacggcaccaucgugaagaccaucaccaacgaccgcaucgaggugacgaacgccaccgagcugguccagaacagcuccaucggggagaucugcgacagcccccaccagauccucgacggcgagaacugcacccugaucgacgcccugcucggggacccccagugcgacggcuuccagaacaagaagugggaccuguucguggagcgguccaaggccuacagcaacugcuaccccuacgacgugccggacuacgcgucccugcgcagccucgucgccuccagcggcacccuggaguucaacaacgaguccuucaacugggccggggugacgcagaacggcaccagcuccgccugcauccgggggagcaacuccagcuucuucucccgccugaacuggcucacccaccugaacuucaaguaccccgcgcugaacgugaccaugcccaacaacgagcaguucgacaagcucuacaucuggggcguccaccaccccgggacggacaaggaccagaucuuccuguacgcccagagcuccggccggaucaccgugagcaccaagcgcagccagcaggccgugaucccgaacaucggcucccggccccgcauccggaacauccccagccgcaucuccaucuacuggaccaucgucaagcccggggacauccugcucaucaacagcacgggcaaccugaucgccccgcggggguacuucaagauccgcuccggcaagagcuccaucaugcggagcgacgcccccaucggcaagugcaaguccgagugcaucacccccaacgggagcauccccaacgacaagccguuccagaacgugaaccgcaucaccuacggcgcgugcccccgguacgugaagcaguccacccugaagcucgccacggggaugcgcaacguccccgagaagcagacccggggcaucuucggggccaucgccggcuucaucgagaacggcugggaggggaugguggacggcugguacggguuccgccaccagaacagcgagggccgggggcaggccgcggaccugaaguccacccaggccgccaucgaccagaucaacggcaagcugaaccgccucaucggcaagaccaacgagaaguuccaccagaucgagaaggaguucagcgagguggaggggcggauccaggaccuggagaaguacgucgaggacacgaagaucgaccugugguccuacaacgccgagcuccugguggcccuggagaaccagcacaccaucgaccucaccgacagcgagaugaacaagcuguucgagaagaccaagaagcagcugcgcgagaacgcggaggacaugggcaacgggugcuucaagaucuaccacaagugcgacaacgccugcaucggcuccauccgcaacgggacguacgaccacgacguguaccgggacgaggcccucaacaaccgcuuccagaucaagggcgucgagcucaagagcggcuacaaggacuggauccuguggaucuccuucgccaucagcugcuuccugcugugcguggugcugcucggguucaucaugugggccugccagaagggcaacauccggugcaacaucugcaucuga

SEQ ID NO: 76598 - RNA, 1701 nt, Artificial Sequence; identical to SEQ ID NO: 73907
  derived and/or modified CDS sequence (opt1) from hemagglutinin__InfluenzaA__AIJ29347

SEQ ID NO: 76599 - RNA, 1701 nt, Artificial Sequence
  derived and/or modified CDS sequence (opt1) from hemagglutinin__InfluenzaA__AIJ29349
augaagaccaucaucgcccugagcuacauccucugccugguguucgcccagaaguuccccggcaacgacaacuccaccgcgacgcugugccucgggcaccacgccgucccgaacggcaccaucgugaagaccaucaccaacgaccgcaucgaggugacgaacgccaccgagcugguccagaacagcuccaucggggagaucugcgacagcccccaccagauccuggacggcgagaacugcacccucaucgacgcccugcugggggacccccagugcgacggcuuccagaacaagaagugggaccucuucguggagcgguccaaggccuacagcaacugcuaccccuacgacgugccggacuacgcgucccugcgcagccuggucgccuccagcggcacccucgaguucaacaacgaguccuucaacuggacgggggugacccagaacggcaccagcuccgccugcauccggcgcagcaacuccagcuucuucucccggcugaacuggcugacccaccucaacuucaaguaccccgcccugaacgugacgaugcccaacaacgagcaguucgacaagcuguacaucuggggcguccaccaccccgggaccgacaaggaccagaucuuccucuacgcgcagagcuccgggcgcaucaccgugagcaccaagcggagccagcaggccgugaucccgaacaucggcucccgcccccggauccgcaacauccccagccggaucuccaucuacuggacgaucgucaagcccggcgacauccugcugaucaacagcaccgggaaccucaucgccccgcgcggcuacuucaagauccgguccggcaagagcuccaucaugcgcagcgacgcccccaucgggaagugcaaguccgagugcaucacccccaacggcagcauccccaacgacaagccguuccagaacgugaaccggaucaccuacggggccugcccccgcuacgugaagcaguccacgcugaagcuggcgaccggcaugcggaacguccccgagaagcagacccgcgggaucuucggcgccaucgccggguucaucgagaacggcugggagggcaugguggacgggugguacggcuuccggcaccagaacagcgaggggcgcggccaggccgccgaccucaaguccacccaggcggccaucgaccagaucaacgggaagcugaaccggcugaucggcaagacgaacgagaaguuccaccagaucgagaaggaguucagcgagguggagggccgcauccaggaccucgagaaguacgucgaggacaccaagaucgaccugugguccuacaacgccgagcugcucguggcccuggagaaccagcacaccaucgaccugaccgacagcgagaugaacaagcuguucgagaagacgaagaagcagcuccgcgagaacgccgaggacauggggaacggcugcuucaagaucuaccacaagugcgacaacgcgugcaucggguccauccggaacggcaccuacgaccacgacguguaccgcgacgaggcccugaacaaccgguuccagaucaagggggucgagcucaagagcggcuacaaggacuggauccuguggaucuccuucgccaucagcugcuuccugcucugcguggcccugcugggcuucaucaugugggccugccagaaggggaacauccgcugcaacaucugcaucuga

SEQ ID NO: 76600 - RNA, 1701 nt, Artificial Sequence
  derived and/or modified CDS sequence (opt1) from hemagglutinin__InfluenzaA__AIJ29351
augaagaccaucaucgcccugagcuacauccucugccugguguucgcccagaagcugcccggcaacgacaacuccaccgcgacgcucugccuggggcaccacgccgucccgaacggcaccaucgugaagaccaucaccaacgaccgcaucgaggugacgaacgccaccgagcugguccagaacagcuccaucggggagaucugcgacagcccccaccagauccucgacggcgagaacugcacccugaucgacgcccugcucggggacccccagugcgacggcuuccagaacaagaagugggaccuguucguggagcgguccaaggccuacagcaacugcuaccccuacgacgugccggacuacgcgucccugcgcagccucgucgccuccagcggcacccuggaguucaacaacgaguccuucaacuggacgggggugacccagaacggcaccagcuccgccugcauccggcgcagcaacuccagcuucuucucccggcugaacuggcucacccaccugaacuucaaguaccccgcccugaacgugacgaugcccaacaacgagcaguucgacaagcucuacaucuggggcguccaccaccccgggaccgacaaggaccagaucuuccuguacgcgcagagcuccgggcgcaucaccgugagcaccaagcggagccagcaggccgugaucccgaacaucggcucccgcccccggauccgcaacauccccagccggaucuccaucuacuggacgaucgucaagcccggcgacauccugcucaucaacagcaccgggaaccugaucgccccgcgcggcuacuucaagauccgguccggcaagagcuccaucaugcgcagcgacgcccccaucgggaagugcaaguccgagugcaucacccccaacggcagcauccccaacgacaagccguuccagaacgugaaccggaucaccuacggggccugcccccgcuacgugaagcaguccacgcugaagcucgcgaccggcaugcggaacguccccgagaagcagacccgcgggaucuucggcgccaucgccggguucaucgagaacggcugggagggcaugguggacgggugguacggcuuccggcaccagaacagcgaggggcgcggccaggccgccgaccugaaguccacccaggcggccaucgaccagaucaacgggaagcugaaccggcucaucggcaagacgaacgagaaguuccaccagaucgagaaggaguucagcgagguggagggccgcauccaggaccuggagaaguacgucgaggacaccaagaucgaccugugguccuacaacgccgagcuccugguggcccuggagaaccagcacaccaucgaccucaccgacagcgagaugaacaagcuguucgagaagacgaagaagcagcugcgcgagaacgccgaggacauggggaacggcugcuucaagaucuaccacaagugcgacaacgcgugcaucggguccauccggaacggcaccuacgaccacgacguguaccgcgacgaggcccucaacaaccgguuccagaucaagggggucgagcucaagagcggcuacaaggacuggauccuguggaucuccuucgccaucagcugccugcugcugugcguggcccuccugggcuucaucaugugggccugccagaaggggaacauccgcugcaacaucugcaucuga

SEQ ID NO: 76601 - RNA, 1701 nt, Artificial Sequence; identical to SEQ ID NO: 73504
  derived and/or modified CDS sequence (opt1) from hemagglutinin__InfluenzaA__AIJ29353

SEQ ID NO: 76602 - RNA, 1701 nt, Artificial Sequence
  derived and/or modified CDS sequence (opt1) from hemagglutinin__InfluenzaA__AIJ29355
augaagaccaucaucgcccugagcuacauccucugccugguguucgcccagaagcugcccggcaacgacaacuccaccgcgacgcucugccuggggcaccacgccgucccgaacggcaccaucgugaagaccaucaccaacgaccagaucgaggugacgaacgccaccgagcugguccagagcuccagcaccggggagaucugcgacagcccccaccagauccucgacggcgagaacugcacccugaucgacgcccugcucggggacccccagugcgacggcuuccagaacaagaagugggaccuguucguggagcgcagcaaggccuacuccaacugcuaccccuacgacgugccggacuacgcgagccugcggucccucgucgccagcuccggcacgcuggaguucaacaacgagagcuucaacuggaccggggugacccagaacggcaccuccagcgccugcauccgccgguccaacagcuccuucuucagccgccugaacuggcucacgcaccugaacuucaaguaccccgcccugaacgugaccaugcccaacaacgagcaguucgacaagcucuacaucuggggcguccaccaccccgggaccgacaaggaccagaucuuccuguacgcgcaguccagcgggcggaucaccgugagcacgaagcgcucccagcaggccgugaucccgaacaucggcagccggucccgcauccggaacauccccagccgcaucuccaucuacuggaccaucgucaagcccggcgacauccugcucaucaacagcaccgggaaccugaucgcgccccggggcuacuucaagauccgcuccgggaaguccuccaucaugcggagcgacgccccgaucggcaagugcaacuccgagugcaucacccccaacggcagcauccccaacgacaagcccuuccagaacgugaaccgcaucacguacggggccugcccgcgguacgugaagcaguccacccugaagcucgccaccggcaugcgcaacguccccgagaagcagacccgggggaucuucggcgccaucgccggguucaucgagaacggcugggagggcaugguggacgggugguacggcuuccgccaccagaacagcgaggggcggggccaggccgccgaccugaaguccacgcaggcggccaucgaccagaucaacgggaagcugaaccgccucaucggcaagaccaacgagaaguuccaccagaucgagaaggaguucagcgagguggagggccggauccaggaccuggagaaguacgucgaggacaccaagaucgaccugugguccuacaacgccgagcuccugguggcccuggagaaccagcacaccaucgaccucacggacagcgagaugaacaagcuguucgagaagaccaagaagcagcugcgcgagaacgccgaggacauggggaacggcugcuucaagaucuaccacaagugcgacaacgcgugcaucggguccauccgcaacggcaccuacaaccacgacguguaccgggacgaggcccucaacaaccgcuuccagaucaagggggucgagcucaagagcggcuacaaggacuggauccuguggaucagcuucgccaucuccugcuuccugcugugcguggcccugcucggcuucaucaugugggccugccagaaggggaacauccggugcaacaucugcaucuga

SEQ ID NO: 76603 - RNA, 1701 nt, Artificial Sequence; identical to SEQ ID NO: 73098
  derived and/or modified CDS sequence (opt1) from hemagglutinin__InfluenzaA__AIJ29357

SEQ ID NO: 76604 - RNA, 1701 nt, Artificial Sequence
  derived and/or modified CDS sequence (opt1) from hemagglutinin__InfluenzaA__AIJ29359
augaagaccaucaucgcccugagcuacauccucugccugguguucgcccagaagcugcccggcaacgacaacuccaccgcgacgcucugccuggggcaccacgccgucccgaacggcaccaucgugaagaccaucaccaacgaccgcaucgaggugacgaacgccaccgagcugguccagaacagcuccaucggggagaucugcgacagcccccaccagauccucgacggcgagaacugcacccugaucgacgcccugcucggggacccccagugcgacggcuuccagaacaagaagugggaccuguucguggagcgguccaaggccuacagcaacugcuaccccuacgacgugccggacuacgcgucccugcgcagccucgucgccuccagcggcacccuggaguucaacaacgaguccuucaacuggacgggggugacccagaacggcaccagcuccgccugcauccggcgcagcaacaacuccuucuucagccggcugaacuggcucacccaccugaacuucaaguaccccgcccugaacgugacgaugcccaacaacgagcaguucgacaagcucuacaucuggggcguccaccaccccgggaccgacaaggaccagaucuuccuguacgcgcaguccagcgggcgcaucaccguguccaccaagcggagccagcaggccgugaucccgaacaucggcagccgcccccggauccgcaacauccccucccggaucagcaucuacuggacgaucgucaagcccggcgacauccugcucaucaacuccaccgggaaccugaucgccccgcgcggcuacuucaagauccggagcgggaaguccagcaucaugcgcuccgacgcccccaucggcaagugcaagagcgagugcaucacccccaacggcuccauccccaacgacaagccguuccagaacgugaaccggaucaccuacggggccugcccccgcuacgugaagcagagcacgcugaagcucgcgaccggcaugcggaacguccccgagaagcagacccgcgggaucuucggcgccaucgccggguucaucgagaacggcugggagggcaugguggacgggugguacggcuuccggcaccagaacuccgaggggcgcggccaggccgccgaccucaagagcacccaggcggccaucgaccagaucaacgggaagcugaaccggcugaucggcaagacgaacgagaaguuccaccagaucgagaaggaguucuccgagguggagggccgcauccaggaccuggagaaguacgucgaggacaccaagaucgaccuguggagcuacaacgccgagcuccugguggcccuggagaaccagcacaccaucgaccucaccgacuccgagaugaacaagcuguucgagaagacgaagaagcagcugcgcgagaacgccgaggacauggggaacggcugcuucaagaucuaccacaagugcgacaacgcgugcaucgggagcauccggaacggcaccuacgaccacgacguguaccgcgacgaggccaucaacaaccgguuccagaucaagggggucgagcucaaguccggcuacaaggacuggauccuguggaucagcuucgccaucuccugcuuccugcucugcguggcccugcugggcuucaucaugugggccugccagaaggggaacauccgcugcaacaucugcaucuga

SEQ ID NO: 76605 - RNA, 1701 nt, Artificial Sequence
  derived and/or modified CDS sequence (opt1) from hemagglutinin__InfluenzaA__AIJ29361
augaagaccaucaucgcccugagcuacauccucugccugguguucgcccagaagcugcccggcaacgacaacuccaccgcgacgcucugccuggggcaccacgccgucccgaacggcaccaucgugaagaccaucaccaacgaccgcaucgaggugacgaacgccaccgagcugguccagaacagcuccaucggggagaucugcgacagcccccaccagauccucgacggcgagaacugcacccugaucgacgcccugcucggggacccccagugcgacggcuuccagaacaagaagugggaccuguucguggagcgguccaaggccuacagcaacugcuaccccuacgacgugccggacuacgucucccugcgcagccucguggcguccagcggcacccuggaguucaacaacgaguccuucaacuggacgggggugacccagaacggcaccagcuccgccugcauccggcgcagcaacaacuccuucuucagccggcugaacuggcucacccaccugaacuucaaguaccccgcccugaacgucacgaugcccaacaacgagcaguucgacaagcucuacaucuggggcgugcaccaccccgggaccgacaaggaccagaucuuccuguacgcccaguccagcgggcgcaucaccguguccaccaagcggagccagcaggcggucaucccgaacaucggcagccgcccccggauccgcaacauccccucccggaucagcaucuacuggacgaucgugaagcccggcgacauccugcucaucaacuccaccgggaaccugaucgccccgcgcggcuacuucaagauccggagcgggaaguccagcaucaugcgcuccgacgcccccaucggcaagugcaagagcgagugcaucacccccaacggcuccauccccaacgacaagccguuccagaacgugaaccggaucaccuacggggccugcccccgcuacgucaagcagagcacgcugaagcucgccaccggcaugcggaacgugcccgagaagcagacccgcgggaucuucggcgcgaucgccggguucaucgagaacggcugggagggcaugguggacgggugguacggcuuccggcaccagaacuccgaggggcgcggccaggccgccgaccucaagagcacccaggccgcgaucgaccagaucaacgggaagcugaaccggcugaucggcaagacgaacgagaaguuccaccagaucgagaaggaguucuccgaggucgagggccgcauccaggaccuggagaaguacguggaggacaccaagaucgaccuguggagcuacaacgccgagcuccugguggcccuggagaaccagcacaccaucgaccucaccgacuccgagaugaacaagcuguucgagaagacgaagaagcagcugcgcgagaacgccgaggacauggggaacggcugcuucaagaucuaccacaagugcgacaacgccugcaucgggagcauccggaacggcaccuacgaccacgacgucuaccgcgacgaggcgcucaacaaccgguuccagaucaaggggguggagcugaaguccggcuacaaggacuggauccuguggaucagcuucgccaucuccugcuuccuccugugcguggcccugcucggcuucaucaugugggccugccagaaggggaacauccgcugcaacaucugcaucuga

SEQ ID NO: 76606 - RNA, 1701 nt, Artificial Sequence; identical to SEQ ID NO: 74064
  derived and/or modified CDS sequence (opt1) from hemagglutinin__InfluenzaA__AIL93623

SEQ ID NO: 76607 - RNA, 1701 nt, Artificial Sequence
  derived and/or modified CDS sequence (opt1) from hemagglutinin__InfluenzaA__AIL93634
augaaggccauccuggugguccuccuguacaccuucgccaccgcgaacgccgacacgcugugcaucggcuaccacgccaacaacagcaccgacaccguggacaccgugcucgagaagaacgucacggugacccacuccgugaaccugcuggaggacaagcacaacgggaagcucugcaagcugcgcggcgucgcgccccugcaccucgggaagugcaacaucgccggcuggauccuggggaacccggagugcgagagccuguccaccgccagcuccuggagcuacaucguggagaccuccagcuccgacaacggcacgugcuaccccggcgacuucaucaacuacgaggagcuccgggagcagcugagcuccgugagcuccuucgagcgcuucgagaucuuccccaagaccagcuccuggcccaaccacgacagcaacaagggggucaccgccgccugcccgcacgccggcgcgaaguccuucuacaagaaccugaucuggcucgugaagaaggggaacagcuaccccaagcugucccagagcuacaucaacgacaagggcaaggaggugcugguccucugggggauccaccaccccagcaccacggccgaccagcagucccuguaccagaacgccgacgccuacguguucgugggcaccagccgguacuccaagaaguucaagcccgagaucgccauccgcccgaagguccgggaccaggagggccgcaugaacuacuacuggacccugguggagcccggggacaagaucaccuucgaggcgacgggcaaccucguggucccccgguacgccuucaccauggagcgcaacgccgggagcggcaucaucaucuccgacacccccgugcacgacugcaacaccacgugccagaccccggagggcgccaucaacaccagccugcccuuccagaacauccaccccaucaccaucgggaagugccccaaguacgugaaguccacgaagcugcggcucgccaccggccugcgcaacgucccgagcauccagucccgggggcuguucggcgcgaucgccggguucaucgagggcggcuggaccgggaugguggacggcugguacggguaccaccaccagaacgagcagggcagcggguacgccgccgaccucaaguccacccagaacgccaucgacaagaucacgaacaaggugaacagcgucaucgagaagaugaacacccaguucaccgcggugggcaaggaguucaaccaccuggagaagcgcaucgagaaccugaacaagaaggucgacgacggcuuccucgacaucuggaccuacaacgccgagcugcuggugcuccuggagaacgagcggacgcuggacuaccacgacuccaacgugaagaaccucuacgagaagguccgcaaccagcugaagaacaacgccaaggagaucgggaacggcugcuucgaguucuaccacaagugcaacaacacgugcauggagagcgugaagaacgggaccuacgacuaccccaaguacuccgaggaggccaagcugaaccgggagaagaucgacggcgugaagcucgagagcacccgcaucuaccagauccuggccaucuacuccaccgucgcgagcucccuggugcucguggucagccugggggccaucagcuucuggaugugcuccaacggcagccugcagugccggaucugcaucuga

SEQ ID NO: 76608 - RNA, 1701 nt, Artificial Sequence
  derived and/or modified CDS sequence (opt1) from hemagglutinin__InfluenzaA__AIL93645
augaagaccaucaucgcccugagcuacauccucugccugguguucgcccagaagcugcccggcaacgacaacuccaccgcgacgcucugccuggggcaccacgccgucccgaacggcaccaucgugaagaccaucaccaacgaccgcaucgaggugacgaacgccaccgagcugguccagaacagcuccaucggggagaucugcgacagcccccaccagauccucgacggcgagaacugcacccugaucgacgcccugcucggggacccccagugcgacggcuuccagaacaagaagugggaccuguucguggagcgguccaaggccuacagcaacugcuaccccuacgacgugccggacuacgcgucccugcgcagccucgucgccuccagcggcacccuggaguucaacaacgaguccuucaacugggccggggugacgcagaacggcaccagcuccgccugcauccgggggagcaacuccagcuucuucucccgccugaacuggcucacccaccugaacuuccgguaccccgcgcugaacgugaccaugcccaacaacgagcaguucgacaagcucuacaucuggggcguccaccaccccgggacggacaaggaccagaucuuccuguacgcccagagcuccggccgcaucaccgugagcaccaagcggagccagcaggccgugaucccgaacaucggcucccgcccccggauccgcaacauccccagccggaucuccaucuacuggaccaucgucaagcccggggacauccugcucaucaacagcacgggcaaccugaucgccccgcgcggguacuucaagauccgguccggcaagagcuccaucaugcgcagcgacgcccccaucggcaagugcaaguccgagugcaucacccccaacgggagcauccccaacgacaagccguuccagaacgugaaccggaucaccuacggcgcgugcccccgcuacgugaagcaguccacccugaagcucgccacggggaugcggaacguccccgagaagcagacccgcggcaucuucggggccaucgccggcuucaucgagaacggcugggaggggaugguggacggcugguacggguuccggcaccagaacagcgagggccgcgggcaggccgcggaccugaaguccacccaggccgccaucgaccagaucaacggcaagcugaaccggcucaucggcaagaccaacgagaaguuccaccagaucgagaaggaguucagcgagguggaggggcgcauccaggaccuggagaaguacgucgaggacacgaagaucgaccugugguccuacaacgccgagcuccugguggcccuggagaaccagcacaccaucgaccucaccgacagcgagaugaacaagcuguucgagaagaccaagaagcagcugcgcgagaacgcggaggacaugggcaacgggugcuucaagaucuaccacaagugcgacaacgccugcaucggcuccauccggaacgggacguacgaccacgacguguaccgcgacgaggcccucaacaaccgguuccagaucaagggcgucgagcucaagagcggcuacaaggacuggauccuguggaucuccuucgccaucagcugcuuccugcugugcguggcccugcucggguucaucaugugggcgugccagaagggcaacauccgcugcaacaucugcaucuga

SEQ ID NO: 76609 - RNA, 1701 nt, Artificial Sequence; identical to SEQ ID NO: 74018
  derived and/or modified CDS sequence (opt1) from hemagglutinin__InfluenzaA__AIL93657

SEQ ID NO: 76610 - RNA, 1701 nt, Artificial Sequence; identical to SEQ ID NO: 74018
  derived and/or modified CDS sequence (opt1) from hemagglutinin__InfluenzaA__AIL93669

SEQ ID NO: 76611 - RNA, 1701 nt, Artificial Sequence
  derived and/or modified CDS sequence (opt1) from hemagglutinin__InfluenzaA__AIL93681
augaaggccauccuggugguccuccuguacaccuucgccaccgcgaacgccgacacgcugugcaucggcuaccacgccaacaacagcaccgacaccguggacaccgugcucgagaagaacgucacggugacccacuccgugaaccugcuggaggacaagcacaacgggaagcucugcaagcugcgcggcgucgcgccccugcaccucgggaagugcaacaucgccggcuggauccuggggaacccggagugcgagagccuguccaccgccagcuccuggagcuacaucguggagaccuccagcuccgacaacggcacgugcuaccccggcgacuucaucaacuacgaggagcuccgggagcagcugagcuccgugagcuccuucgagcgcuucgagaucuuccccaagaccagcuccuggcccaaccacgacagcaacaagggggucaccgccgccugcccgcacgccggcgcgaaguccuucuacaagaaccugaucuggcucgugaagaaggggaacagcuaccccaagcugucccagagcuacaucaacgacaagggcaaggaggugcugguccucugggggauccaccaccccagcaccacggccgaccagcagucccuguaccagaacgccgacgccuacguguucgugggcaccagccgguacuccaagaaguucaagcccgagaucgccauccgcccgaagguccgggaccaggagggccgcaugaacuacuacuggacccugguggagcccggggacaagaucaccuucgaggcgacgggcaaccucguggucccccgguacgccuucaccauggagcgcagcgccggguccggcaucaucaucagcgacacccccgugcacgacugcaacaccacgugccagaccccggagggcgccaucaacaccucccugcccuuccagaacauccaccccaucaccaucgggaagugccccaaguacgucaagagcacgaagcugcggcucgccaccggccugcgcaacgugccguccauccagagccgggggcuguucggcgcgaucgccggguucaucgagggcggcuggaccgggaugguggacggcugguacggguaccaccaccagaacgagcagggcuccggguacgccgccgaccucaagagcacccagaacgccaucgacaagaucacgaacaaggugaacuccgucaucgagaagaugaacacccaguucaccgcggugggcaaggaguucaaccaccuggagaagcgcaucgagaaccugaacaagaaggucgacgacggcuuccucgacaucuggaccuacaacgccgagcugcuggugcuccuggagaacgagcggacgcuggacuaccacgacagcaacgugaagaaccucuacgagaagguccgcaaccagcugaagaacaacgccaaggagaucgggaacggcugcuucgaguucuaccacaagugcgacaacacgugcauggaguccgugaagaacgggaccuacgacuaccccaaguacagcgaggaggccaagcugaaccgggagaagaucgacggcgugaagcucgaguccacccgcaucuaccagauccuggccaucuacagcaccgucgcguccagccuggugcucguggucagccugggggccaucuccuucuggaugugcagcaacggcucccugcagugccggaucugcaucuga

SEQ ID NO: 76612 - RNA, 1701 nt, Artificial Sequence; identical to SEQ ID NO: 76608
  derived and/or modified CDS sequence (opt1) from hemagglutinin__InfluenzaA__AIL93692

SEQ ID NO: 76613 - RNA, 1701 nt, Artificial Sequence; identical to SEQ ID NO: 76608
  derived and/or modified CDS sequence (opt1) from hemagglutinin__InfluenzaA__AIL93716

SEQ ID NO: 76614 - RNA, 1701 nt, Artificial Sequence; identical to SEQ ID NO: 74018
  derived and/or modified CDS sequence (opt1) from hemagglutinin__InfluenzaA__AIL93728

SEQ ID NO: 76615 - RNA, 1701 nt, Artificial Sequence; identical to SEQ ID NO: 74018
  derived and/or modified CDS sequence (opt1) from hemagglutinin__InfluenzaA__AIL93740

SEQ ID NO: 76616 - RNA, 1701 nt, Artificial Sequence
  derived and/or modified CDS sequence (opt1) from hemagglutinin__InfluenzaA__AIL93752
augaagaccaucaucgcccugagcuacauccucugccugguguucgcccagaagcugcccggcaacgacaacuccaccgcgacgcucugccuggggcaccacgccgucccgaacggcaccaucgugaagaccaucaccaacgaccgcaucgaggugacgaacgccaccgagcugguccagaacagcuccaucggggagaucugcgaccggccccaccagauccucgacggcgagaacugcacccugaucgacgcccugcucggggacccccagugcgacggcuuccagaacaagaagugggaccuguucguggagcgcagcaaggccuacuccaacugcuaccccuacgacgugccggacuacgcgagccugcggucccucgucgccagcuccggcacccuggaguucaacaacgagagcuucaacugggccggggugacgcagaacggcaccuccagcgccugcauccgcggguccaacagcuccuucuucagccggcugaacuggcucacccaccugaacuucaaguaccccgcgcugaacgugaccaugcccaacaacgagcaguucgacaagcucuacaucuggggcguccaccaccccgggacggacaaggaccagaucuuccuguacgcccaguccagcggccgcaucaccguguccaccaagaagucccagcaggccgugaucccgaacaucggcagccggccccgcauccggaacauccccagccgcaucagcaucuacuggaccaucgucaagcccggggacauccugcucaucaacuccacgggcaaccugaucgccccgcggggguacuucaagauccgcagcggcaaguccagcaucaugcgguccgacgcccccaucggcaagugcaagagcgagugcaucacccccaacggguccauccccaacgacaagccguuccagaacgugaaccgcaucaccuacggcgcgugcccccgguacgugaagcagagcacccugaagcucgccacggggaugcgcaacguccccgagaagcagacccggggcaucuucggggccaucgccggcuucaucgagaacggcugggaggggaugguggacggcugguacggguuccgccaccagaacuccgagggccgggggcaggccgcggaccucaagagcacccaggccgccaucgaccagaucaacggcaagcugaaccgccugaucggcaagaccaacgagaaguuccaccagaucgagaaggaguucuccgagguggaggggcggauccaggaccuggagaaguacgucgaggacacgaagaucgaccuguggagcuacaacgccgagcuccugguggcccuggagaaccagcacaccaucgaccucaccgacuccgagaugaacaagcuguucgagaagaccaagaagcagcugcgcgagaacgcggaggacaugggcaacgggugcuucaagaucuaccacaagugcgacaacgccugcaucggcagcauccgcaacgggacguacgaccacgacguguaccgggacgaggcccucaacaaccgcuuccagaucaagggcgucgagcugaaguccggcuacaaggacuggauccuguggaucagcuucgccaucuccugcuuccuccugugcguggcccugcucggguucaucaugugggcgugccagaagggcaacauccggugcaacaucugcaucuga

SEQ ID NO: 76617 - RNA, 1701 nt, Artificial Sequence
  derived and/or modified CDS sequence (opt1) from hemagglutinin__InfluenzaA__AIL93764
augaagaccaucaucgcccugagcuacauccucugccugguguucacccagaagcugcccggcaacgacaacuccacggccacccucugccuggggcaccacgcggucccgaacggcaccaucgugaagaccaucacgaacgaccgcaucgaggugaccaacgccaccgagcugguccagaacagcuccaucggggagaucugcgacagcccccaccagauccucgacggcgagaacugcacccugaucgacgcccugcucggggacccccagugcgacggcuuccagaacaagaagugggaccuguucguggagcgguccaaggccuacagcaacugcuaccccuacgacgugccggacuacgccucccugcgcagccucgucgcguccagcggcacgcuggaguucaacaacgaguccuucaacugggccggggugacccagaacggcaccagcuccgccugcauccgggggagcaacuccagcuucuucucccgccugaacuggcucacccaccugaacuucaaguaccccgcccugaacgugacgaugcccaacaacgagcaguucgacaagcucuacaucuggggcguccaccaccccgggaccgacaaggaccagaucuuccuguacgcgcagagcuccggccggaucaccgugagcaccaagcgcagccagcaggccgugaucccgaacaucggcucccggccccgcauccggaacauccccagccgcaucuccaucuacuggacgaucgucaagcccggggacauccugcucaucaacagcaccggcaaccugaucgccccgcggggguacuucaagauccgcuccggcaagagcuccaucaugcggagcgacgcccccaucggcaagugcaaguccgagugcaucacccccaacgggagcauccccaacgacaagccguuccagaacgugaaccgcaucaccuacggcgccugcccccgguacgugaagcaguccacgcugaagcucgcgaccgggaugcgcaacguccccgagaagcagacccggggcaucuucggggccaucgccggcuucaucgagaacggcugggaggggaugguggacggcugguacggguuccgccaccagaacagcgagggccgggggcaggccgccgaccugaaguccacccaggcggccaucgaccagaucaacggcaagcugaaccgccucaucggcaagacgaacgagaaguuccaccagaucgagaaggaguucagcgagguggaggggcggauccaggaccuggagaaguacgucgaggacaccaagaucgaccugugguccuacaacgccgagcuccugguggcccuggagaaccagcacaccaucgaccucaccgacagcgagaugaacaagcuguucgagaagacgaagaagcagcugcgcgagaacgccgaggacaugggcaacgggugcuucaagaucuaccacaagugcgacaacgcgugcaucggcuccauccgcaacgagaccuacgaccacgacguguaccgggacgaggcccucaacaaccgcuuccagaucaagggggucgagcucaagagcggcuacaaggacuggauccuguggaucuccuucgccaucagcugcuuccugcugugcguggcccugcucggcuucaucaugugggccugccagaaggggaacauccggugcaacaucugcaucuga

SEQ ID NO: 76618 - RNA, 1701 nt, Artificial Sequence; identical to SEQ ID NO: 74018
  derived and/or modified CDS sequence (opt1) from hemagglutinin__InfluenzaA__AIL93776

SEQ ID NO: 76619 - RNA, 1701 nt, Artificial Sequence; identical to SEQ ID NO: 74018
  derived and/or modified CDS sequence (opt1) from hemagglutinin__InfluenzaA__AIL93788

SEQ ID NO: 76620 - RNA, 1701 nt, Artificial Sequence; identical to SEQ ID NO: 74018
  derived and/or modified CDS sequence (opt1) from hemagglutinin__InfluenzaA__AIL93812

SEQ ID NO: 76621 - RNA, 1701 nt, Artificial Sequence; identical to SEQ ID NO: 74018
  derived and/or modified CDS sequence (opt1) from hemagglutinin__InfluenzaA__AIL93824

SEQ ID NO: 76622 - RNA, 1701 nt, Artificial Sequence; identical to SEQ ID NO: 76611
  derived and/or modified CDS sequence (opt1) from hemagglutinin__InfluenzaA__AIL93836

SEQ ID NO: 76623 - RNA, 1701 nt, Artificial Sequence
  derived and/or modified CDS sequence (opt1) from hemagglutinin__InfluenzaA__AIL93847
augaaggccauccuggugguccuccuguacaccuucgccaccgcgaacgccgacacgcugugcaucggcuaccacgccaacaacagcaccgacaccguggacaccgugcucgagaagaacgucacggugacccacuccgugaaccugcuggaggacaagcacaacgggaagcucugcaagcugcgcggcgucgcgccccugcaccucgggaagugcaacaucgccggcuggauccuggggaacccggagugcgagagccuguccaccgccagcuccuggagcuacaucguggagaccuccagcuccgacaacggcacgugcuaccccggcgacuucaucaacuacgaggagcuccgggagcagcugagcuccgugagcuccuucgagcgcuucgagaucuuccccaagaccagcuccuggcccaaccacgacagcaacaagggggucaccgccgccugcccgcacgccggcgcgaaguccuucuacaagaaccugaucuggcucgugaagaaggggaacagcuaccccaagcugucccagagcuacaucaacgacaagggcaaggaggugcugguccucugggggauccaccaccccagcaccacggccgaccagcagucccuguaccagaacgccgacgccuacguguucgugggcaccagccgguacuccaagaaguucaagcccgagaucgccauccgcccgaagguccgggaccaggagggccgcaugaacuacuacuggacccugguggagcccggggacaagaucaccuucgaggcgacgggcaaccucguggucccccgguacgccuucaccauggagcgcagcgccggguccggcaucaucaucagcgacacccccgugcacgacugcaacaccacgugccagaccccggagggcgccaucaacaccucccugcccuuccagaacauccaccccaucaccaucgggaagugccccaaguacgucaagagcacgaagcugcggcucgccaccggccugcgcaacgugccguccauccagagccgggggcuguucggcgcgaucgccggguucaucgagggcggcuggaccgggaugguggacggcugguacggguaccaccaccagaacgagcagggcuccggguacgccgccgaccucaagagcacccagaacgccaucgacaagaucacgaacaaggugaacuccgucaucgagaagaugaacacccaguucaccgcggugggcaaggaguucaaccaccuggagaagcgcaucgagaaccugaacaagaaggucgacgacggcuuccucgacaucuggaccuacaacgccgagcugcuggugcuccuggagaacgagcggacgcuggacuaccacgacagcaacgugaagaaccucuacgagaagguccgcaaccagcugaagaacaacgccaaggagaucgggaacggcugcuucgaguucuaccacaagugcgacaacacgugcauggaguccgugaagaacgggaccuacgacuaccccaaguacagcgaggaggccaagcugaaccgggagaagaucgacggcgugaagcucgaguccacccgcaucuaccagauccuggccaucuacagcaccgucgcguccagccuggugcucguggucagccugggggccaucugcuucuggaugugcuccaacggcagccugcagugccggaucugcaucuga

SEQ ID NO: 76624 - RNA, 1701 nt, Artificial Sequence; identical to SEQ ID NO: 76608
  derived and/or modified CDS sequence (opt1) from hemagglutinin__InfluenzaA__AIL93858

SEQ ID NO: 76625 - RNA, 1701 nt, Artificial Sequence; identical to SEQ ID NO: 74018
  derived and/or modified CDS sequence (opt1) from hemagglutinin__InfluenzaA__AIL93870

SEQ ID NO: 76626 - RNA, 1701 nt, Artificial Sequence
  derived and/or modified CDS sequence (opt1) from hemagglutinin__InfluenzaA__AIL93882
augaagaccaucaucgcccugagcuacauccucugccugguguucgcccagaagcccccgggcaacgacaacuccaccgcgacgcugugccucgggcaccacgccguccccaacggcaccaucgugaagaccaucaccaacgaccgcaucgaggugacgaacgccaccgagcugguccagaacagcuccaucggggagaucugcgacagcccccaccagauccuggacggcgagaacugcacccucaucgacgcccugcugggggacccccagugcgacggcuuccagaacaagaagugggaccucuucguggagcgguccaaggccuacagcaacugcuacccguacgacgugcccgacuacgcgucccugcgcagccuggucgccuccagcggcacccucgaguucaacaacgaguccuucaacugggccggggugacgcagaacggcaccagcuccgccugcauccgggggagcaacuccagcuucuucucccgccugaacuggcugacccaccucaacuucaaguaccccgcgcugaacgugaccaugcccaacaacgagcaguucgacaagcuguacaucuggggcguccaccacccggggacggacaaggaccagaucuuccucuacgcccagagcuccggccggaucaccgugagcaccaagcgcagccagcaggccgugauccccaacaucggcucccggccccgcauccggaacauccccagccgcaucuccaucuacuggaccaucgucaagccgggggacauccugcugaucaacagcacgggcaaccucaucgcgccccggggguacuucaagauccgcuccggcaagagcuccaucaugcggagcgacgcccccaucggcaagugcaaguccgagugcaucacccccaacgggagcaucccgaacgacaagcccuuccagaacgugaaccgcaucaccuacggcgccugcccccgguacgugaagcaguccacccugaagcuggccacggggaugcgcaacguccccgagaagcagacccggggcaucuucggggccaucgccggcuucaucgagaacggcugggaggggaugguggacggcugguacggguuccgccaccagaacagcgagggccgggggcaggccgcggaccucaaguccacccaggccgccaucgaccagaucaacggcaagcugaaccgccugaucggcaagaccaacgagaaguuccaccagaucgagaaggaguucagcgagguggaggggcggauccaggaccucgagaaguacgucgaggacacgaagaucgaccugugguccuacaacgccgagcugcucguggcccuggagaaccagcacaccaucgaccugaccgacagcgagaugaacaagcuguucgagaagaccaagaagcagcuccgcgagaacgcggaggacaugggcaacgggugcuucaagaucuaccacaagugcgacaacgccugcaucggcuccauccgcaacgggacguacgaccacgacguguaccgggacgaggcccugaacaaccgcuuccagaucaagggcgucgagcucaagagcggcuacaaggacuggauccuguggaucuccuucgccaucagcugcuuccugcucugcguggcccugcugggguucaucaugugggcgugccagaagggcaacauccggugcaacaucugcaucuga

SEQ ID NO: 76627 - RNA, 1701 nt, Artificial Sequence; identical to SEQ ID NO: 74018
  derived and/or modified CDS sequence (opt1) from hemagglutinin__InfluenzaA__AIL93894

SEQ ID NO: 76628 - RNA, 1701 nt, Artificial Sequence
  derived and/or modified CDS sequence (opt1) from hemagglutinin__InfluenzaA__AIL93906
augaaggccauccuggugguccuccuguacaccuucgccaccgcgaacgccgacacgcugugcaucggcuaccacgccaacaacagcaccgacaccguggacaccgugcucgagaagaacgucacggugacccacuccaucaaccugcuggaggacaagcacaacgggaagcucugcaagcugcgcggcguggcgccccugcaccucgggaagugcaacaucgccggcuggauccuggggaacccggagugcgagagccuguccaccgccagcuccuggagcuacaucgucgagaccuccagcuccgacaacggcacgugcuaccccggcgacuucaucaacuacgaggagcuccgggagcagcugagcuccgugagcuccuucgagcgcuucgagauguuccccaagaccagcuccuggcccaaccacgacagcaacaagggggugaccgccgccugcccgcacgccggcgcgaaguccuucuacaagaaccugaucuggcucgucaagaaggggaacagcuaccccaagcuguccaagagcuacaucaacgacaagggcaaggaggugcuggugcucugggggauccaccaccccagcaccacggccgaccagcagucccuguaccagaacgccgacgccuacgucuucgugggcaccagcaaguacuccaagaaguucaagcccgagaucgccauccggccgaaggugcgcgaccaggagggccggaugaacuacuacuggacccugaucgagcccggggacaagaucaccuucgaggcgacgggcaaccucgucgugccccgcuacgccuucgccauggagcggaacgccgggagcggcaucaucaucuccgacacccccgugcacgacugcaacacgaccugccagaccccggagggcgccaucaacaccagccugcccuuccagaacauccaccccaucaccaucgggaagugccccaaguacgucaaguccaccaagcugcgccucgcgacgggccugcggaacgugccgagcauccagucccgcgggcuguucggcgccaucgccggguucaucgagggcggcuggaccgggaugguggacggcugguacggguaccaccaccagaacgagcagggcagcggguacgccgccgaccucaaguccacccagaacgcgaucgacaagaucaccaacaaggucaacagcgugaucgagaagaugaacacgcaguucaccgccgugggcaaggaguucaaccaccuggagaagcggaucgagaaccugaacaagaaggucgacgacggcuuccucgacaucuggaccuacaacgccgagcugcuggugcuccuggagaacgagcgcacccuggacuaccacgacuccaacgucaagaaccucuacgagaaggugcggaaccagcugaagaacaacgccaaggagaucgggaacggcugcuucgaguucuaccacaagugcgacaacacgugcauggagagcgugaagaacgggaccuacgacuaccccaaguacuccgaggaggccaagcugaaccgcgagaagaucgacggcgucaagcucgagagcacccggaucuaccagauccuggcgaucuacuccaccguggccagcucccuggugcucgucgugagccugggggccaucagcuucuggaugugcuccaacggcagccugcagugccgcaucugcaucuga

SEQ ID NO: 76629 - RNA, 1701 nt, Artificial Sequence
  derived and/or modified CDS sequence (opt1) from hemagglutinin__InfluenzaA__AIL93917
augaagaccaucaucgcccugagcuacauccucugccugguguucgcccagaagcugcccggcaacgacaacuccaccgcgacgcucugccuggggcaccacgccgucccgaacggcaccaucgugaagaccaucaccaacgaccgcaucgaggugacgaacgccaccgagcugguccagaacagcuccaucggggagaucugcgaccggccccaccagauccucgacggcgagaacugcacccugaucgacgcccugcucggggacccccagugcgacggcuuccagaacaagaagugggaccuguucguggagcgcagcaaggccuacuccaacugcuaccccuacgacgugccggacuacgcgagccugcggucccucgucgccagcuccggcacccuggaguucaacaacgagagcuucaacugggccggggugacgcagaacggcaccuccagcgccugcauccgcggguccaacagcuccuucuucagccggcugaacuggcucacccaccugaacuucaaguaccccgcgcugaacgugaccaugcccaacaacgagcaguucgacaagcucuacaucuggggcguccaccaccccgggacggacaaggaccagaucuuccuguacgcccaguccagcggccgcaucaccguguccaccaagcggagccagcaggccgugaucccgaacaucggcagccgcccccggauccgcaacauccccucccggaucagcaucuacuggaccaucgucaagcccggggacauccugcucaucaacuccacgggcaaccugaucgccccgcgcggguacuucaagauccggagcggcaaguccagcaucaugcgcuccgacgcccccaucggcaagugcaagagcgagugcaucacccccaacggguccauccccaacgacaagccguuccagaacgugaaccggaucaccuacggcgcgugcccccgcuacgugaagcagagcacccugaagcucgccacggggaugcggaacguccccgagaagcagacccgcggcaucuucggggccaucgccggcuucaucgagaacggcugggaggggaugguggacggcugguacggguuccggcaccagaacuccgagggccgcgggcaggccgcggaccucaagagcacccaggccgccaucgaccagaucaacggcaagcugaaccggcugaucggcaagaccaacgagaaguuccaccagaucgagaaggaguucuccgagguggaggggcgcauccaggaccuggagaaguacgucgaggacacgaagaucgaccuguggagcuacaacgccgagcuccugguggcccuggagaaccagcacaccaucgaccucaccgacuccgagaugaacaagcuguucgagaagaccaagaagcagaugcgcgagaacgcggaggacaugggcaacgggugcuucaagaucuaccacaagugcgacaacgccugcaucggcagcauccggaacgggacguacgaccacgacguguaccgcgacgaggcccugaacaaccgguuccagaucaagggcgucgagcucaaguccggcuacaaggacuggauccuguggaucagcuucgccaucuccugcuuccugcucugcguggcccugcugggguucaucaugugggcgugccagaagggcaacauccgcugcaacaucugcaucuga

SEQ ID NO: 76630 - RNA, 1701 nt, Artificial Sequence; identical to SEQ ID NO: 74064
  derived and/or modified CDS sequence (opt1) from hemagglutinin__InfluenzaA__AIL93929

SEQ ID NO: 76631 - RNA, 1701 nt, Artificial Sequence
  derived and/or modified CDS sequence (opt1) from hemagglutinin__InfluenzaA__AIL93940
augaaggccauccuggugguccuccuguacaccuucgccaccgcgaacgccgacacgcugugcaucggcuaccacgccaacaacagcaccgacaccguggacaccgugcucgagaagaacgucacggugacccacuccgugaaccugcuggaggacaagcacaacgggaagcucugcaagcugcgcggcgucagcccccugcaccucgggaagugcaacaucgccggcuggauccuggggaacccggagugcgagucccugagcaccgccuccagcugguccuacaucguggagaccagcuccagcgacaacggcacgugcuaccccggcgacuucaucaacuacgaggagcuccgggagcagcuguccagcguguccagcuucgagcgcuucgagaucuuccccaagaccuccagcuggcccaaccacgacuccaacaagggggucaccgcggccugcccgcacgccggcgccaagagcuucuacaagaaccugaucuggcucgugaagaaggggaacuccuaccccaagcugagccagagcuacaucaacgacaagggcaaggaggugcugguccucugggggauccaccaccccuccaccacggcggaccagcagagccuguaccagaacgccgacgccuacguguucgugggcaccucccgguacagcaagaaguucaagcccgagaucgccauccgcccgaagguccgggaccaggagggccgcaugaacuacuacuggacccugguggagcccggggacaagaucaccuucgaggccacgggcaaccucguggucccccgguacgcguucaccauggagcgcaacgccggguccggcaucaucaucagcgacacccccgugcacgacugcaacaccacgugccagaccccggagggcgccaucaacaccucccugcccuuccagaacauccaccccaucaccaucgggaagugccccaaguacgucaagagcacgaagcugcggcucgccaccggccugcgcaacgugccguccauccagagccgggggcuguucggcgccaucgcgggguucaucgagggcggcuggaccgggaugguggacggcugguacggguaccaccaccagaacgagcagggcuccggguacgccgccgaccucaagagcacccagaacgccaucgacaagaucacgaacaaggugaacuccgucaucgagaagaugaacacccaguucaccgccgugggcaaggaguucaaccaccuggagaagcgcaucgagaaccugaacaagaaggucgacgacggcuuccucgacaucuggaccuacaacgcggagcugcuggugcuccuggagaacgagcggacgcuggacuaccacgacagcaacgugaagaaccucuacgagaagguccgcaaccagcugaagaacaacgccaaggagaucgggaacggcugcuucgaguucuaccacaagugcgacaacacgugcauggaguccgugaagaacgggaccuacgacuaccccaaguacagcgaggaggccaagcugaaccgggagaagaucgacggcgugaagcucgaguccacccgcaucuaccagauccuggccaucuacagcaccgucgccuccagccuggugcucguggucagccugggggcgaucuccuucuggaugugcagcaacggcucccugcagugccggaucugcaucuga

SEQ ID NO: 76632 - RNA, 1701 nt, Artificial Sequence; identical to SEQ ID NO: 74018
  derived and/or modified CDS sequence (opt1) from hemagglutinin__InfluenzaA__AIL93951

SEQ ID NO: 76633 - RNA, 1701 nt, Artificial Sequence; identical to SEQ ID NO: 74018
  derived and/or modified CDS sequence (opt1) from hemagglutinin__InfluenzaA__AIL93963

SEQ ID NO: 76634 - RNA, 1701 nt, Artificial Sequence; identical to SEQ ID NO: 73882
  derived and/or modified CDS sequence (opt1) from hemagglutinin__InfluenzaA__AIL93975

SEQ ID NO: 76635 - RNA, 1701 nt, Artificial Sequence; identical to SEQ ID NO: 76611
  derived and/or modified CDS sequence (opt1) from hemagglutinin__InfluenzaA__AIL93987

SEQ ID NO: 76636 - RNA, 1701 nt, Artificial Sequence; identical to SEQ ID NO: 74018
  derived and/or modified CDS sequence (opt1) from hemagglutinin__InfluenzaA__AIL93998

SEQ ID NO: 76637 - RNA, 1701 nt, Artificial Sequence; identical to SEQ ID NO: 76608
  derived and/or modified CDS sequence (opt1) from hemagglutinin__InfluenzaA__AIL94010

SEQ ID NO: 76638 - RNA, 1701 nt, Artificial Sequence; identical to SEQ ID NO: 76608
  derived and/or modified CDS sequence (opt1) from hemagglutinin__InfluenzaA__AIL94022

SEQ ID NO: 76639 - RNA, 1701 nt, Artificial Sequence
  derived and/or modified CDS sequence (opt1) from hemagglutinin__InfluenzaA__AIL94046
augaagaccaucaucgcccugagcuacauccucugccugguguucgcccagaagcugcccggcaacgacaacuccaccgcgacgcucugccuggggcaccacgccgucccgaacggcaccaucgugaagaccaucaccaacgaccgcaucgaggugacgaacgccaccgagcugguccagaacagcuccaucggggagaucugcgaccggccccaccagauccucgacggcgagaacugcacccugaucgacgcccugcucggggacccccagugcgacggcuuccagaacaagaagugggaccuguucguggagcgcagcaaggccuacuccaacugcuaccccuacgacgugccggacuacgcgagccugcggucccucgucgccagcuccggcacccuggaguucaacaacgagagcuucaacugggccggggugacgcagaacggcaccuccagcgccugcauccgcggguccaacagcuccuucuucagccggcugaacuggcucacccaccugaacuucaaguaccccgcgcugaacgugaccaugcccaacaacgagcaguucgacaagcucuacaucuggggcguccaccaccccgggacggacaaggaccagaucuuccuguacgcccaguccagcggccgcaucaccguguccaccaagcggagccagcaggccgugaucccgaacaucggcagccgcccccggauccgcaacauccccucccggaucagcaucuacuggaccaucgucaagcccggggacauccugcucaucaacuccacgggcaaccugaucgccccgcgcggguacuucaagauccggagcggcaaguccagcaucaugcgcuccgacgcccccaucggcaagugcaagagcgagugcaucacccccaacggguccauccccaacgacaagccguuccagaacgugaaccggaucaccuacggcgcgugcccccgcuacgugaagcagagcacccugaagcucgccacggggaugcggaacguccccgagaagcagacccgcggcaucuucggggccaucgccggcuucaucgagaacggcugggaggggaugguggacggcugguacggguuccggcaccagaacuccgagggccgcgggcaggccgcggaccucaagagcacccaggccgccaucgaccagaucaacggcaagcugaaccggcugaucggcaagaccaacgagaaguuccaccagaucgagaaggaguucuccgagguggaggggcgcauccaggaccuggagaaguacgucgaggacacgaagaucgaccuguggagcuacaacgccgagcuccugguggcccuggagaaccagcacaccaucgaccucaccgacuccgagaugaacaagcuguucgagaagaccaagaagcagcugcgcgagaacgcggaggacaugggcaacgggugcuucaagaucuaccacaagugcgacaacgccugcaucggcagcauccggaacgggacguacgaccacgacguguaccgcgacgaggcccucaacaaccgguuccagaucaagggcgucgagcugaaguccggcuacaaggacuggauccuguggaucagcuucgccaucuccugcuuccuccugugcguggcccugcucggguucaucaugugggcgugccagaagggcaacauccgcugcaacaucugcaucuga

SEQ ID NO: 76640 - RNA, 1701 nt, Artificial Sequence
  derived and/or modified CDS sequence (opt1) from hemagglutinin__InfluenzaA__AIL94058
augaaggccauccuggugguccuccuguacaccuucgcccccgcgaacgccgacacccugugcaucggcuaccacgccaacaacagcacggacaccguggacaccgugcucgagaagaacgucaccgugacgcacuccgugaaccugcuggaggacaagcacaacgggaagcucugcaagcugcgcggcgucgccccgcugcaccucgggaagugcaacaucgccggcuggauccuggggaaccccgagugcgagagccuguccaccgcgagcuccuggagcuacaucguggagaccuccagcuccgacaacgggaccugcuaccccggcgacuucaucaacuacgaggagcuccgggagcagcugagcuccgugagcuccuucgagcgcuucgagaucuuccccaagacgagcuccuggccgaaccacgacagcaacaagggcgucaccgccgccugcccccacgccggcgcgaaguccuucuacaagaaccugaucuggcucgugaagaaggggaacagcuaccccaagcugucccagagcuacaucaacgacaagggcaaggaggugcugguccucugggggauccaccaccccagcaccaccgccgaccagcagucccuguaccagaacgccgacgccuacguguucgugggcacgagccgguacuccaagaaguucaagccggagaucgccauccgccccaagguccgggaccaggagggccgcaugaacuacuacuggacccugguggagcccggggacaagaucaccuucgaggcgaccggcaaccucguggucccccgguacgccuucacgaucgagcgcagcgccggguccggcaucaucaucagcgacaccccggugcacgacugcaacacgaccugccagacccccgagggcgccaucaacaccucccugcccuuccagaacauccaccccaucaccaucgggaagugcccgaaguacgucaagagcaccaagcugcggcucgccacgggccugcgcaacgugcccuccauccagagccgggggcuguucggcgcgaucgccggguucaucgagggcggcuggaccgggaugguggacggcugguacggguaccaccaccagaacgagcagggcuccggguacgccgccgaccucaagagcacccagaacgccaucgacaagaucaccaacaaggugaacuccgucaucgagaagaugaacacgcaguucaccgcggugggcaaggaguucaaccaccuggagaagcgcaucgagaaccugaacaagaaggucgacgacggcuuccucgacaucuggaccuacaacgccgagcugcuggugcuccuggagaacgagcggacccuggacuaccacgacagcaacgugaagaaccucuacgagaagguccgcaaccagcugaagaacaacgccaaggagaucgggaacggcugcuucgaguucuaccacaagugcgacaacacgugcauggaguccgugaagaacgggaccuacgacuaccccaaguacagcgaggaggccaagcugaaccgggagaagaucgacggcgugaagcucgaguccacccgcaucuaccagauccuggccaucuacagcaccgucgcguccagccuggugcucguggucagccugggggccaucuccuucuggaugugcagcaacggcucccugcagugccggaucugcaucuga

SEQ ID NO: 76641 - RNA, 1701 nt, Artificial Sequence; identical to SEQ ID NO: 76611
  derived and/or modified CDS sequence (opt1) from hemagglutinin__InfluenzaA__AIL94069

SEQ ID NO: 76642 - RNA, 1701 nt, Artificial Sequence; identical to SEQ ID NO: 74064
  derived and/or modified CDS sequence (opt1) from hemagglutinin__InfluenzaA__AIL94080

SEQ ID NO: 76643 - RNA, 1701 nt, Artificial Sequence; identical to SEQ ID NO: 76608
  derived and/or modified CDS sequence (opt1) from hemagglutinin__InfluenzaA__AIL94235

SEQ ID NO: 76644 - RNA, 1701 nt, Artificial Sequence; identical to SEQ ID NO: 74064
  derived and/or modified CDS sequence (opt1) from hemagglutinin__InfluenzaA__AIL94247

SEQ ID NO: 76645 - RNA, 1701 nt, Artificial Sequence
  derived and/or modified CDS sequence (opt1) from hemagglutinin__InfluenzaA__AIL94258
augaagaccaucaucgcccugagcuacauccucugccugguguucacccagaagcugcccggcaacgacaacuccacggccacccucugccuggggcaccacgcggucccgaacggcaccaucgugaagaccaucacgaacgaccgcaucgaggugaccaacgccaccgagcugguccagaacagcuccaucggggagaucugcgacagcccccaccagauccucgacggcgagaacugcacccugaucgacgcccugcucggggacccccagugcgacggcuuccagaacaagaagugggaccuguucguggagcgguccaaggccuacagcaacugcuaccccuacgacgugccggacuacgccucccugcgcagccucgucgcguccagcggcacgcuggaguucaacaacgaguccuucaacugggccggggugacccagaacggcaccagcuccgccugcauccgggggagcaacuccagcuucuucucccgccugaacuggcucacccaccugaacuucaaguaccccgcccugaacgugacgaugcccaacaacgagcaguucgacaagcucuacaucuggggcguccaccaccccgggaccgacaaggaccagaucuuccuguacgcgcagagcuccggccggaucaccgugagcaccaagcgcagccagcaggccgugaucccgaacaucggcucccggccccgcauccggaacauccccagccgcaucuccaucuacuggacgaucgucaagcccggggacauccugcucaucaacagcaccggcaaccugaucgccccgcggggguacuucaagauccgcuccggcaagagcuccaucaugcggagcgacgcccccaucggcaagugcaaguccgagugcaucacccccaacgggagcauccccaacgacaagccguuccagaacgugaaccgcaucaccuacggcgccugcccccgguacgugaagcaguccacgcugaagcucgcgaccgggaugcgcaacguccccgagaagcagacccggggcaucuucggggccaucgccggcuucaucgagaacggcugggaggggaugguggacggcugguacggguuccgccaccagaacagcgagggccgggggcaggccgccgaccugaaguccacccaggcggccaucgaccagaucaacggcaagcugaaccgccucaucggcaagacgaacgagaaguuccaccagaucgagaaggaguucagcgagguggaggggcggauccaggaccuggagaaguacgucgaggacaccaagaucgaccugugguccuacaacgccgagcuccugguggcccuggagaaccagcacaccaucgaccucaccgacagcgagaugaacaagcuguucgagaagacgaagaagcagcugcgcgagaacgccgaggacaugggcaacgggugcuucaagaucuaccacaagugcgacaacgcgugcaucggcuccauccgcaacgggaccuacgaccacgacguguaccgggacgaggcccucaacaaccgcuuccagaucaagggcgucgagcucaagagcggcuacaaggacuggauccuguggaucuccuucgccaucagcugcuuccugcugugcguggcccugcucggguucaucaugugggccugccagaagggcaacauccggugcaacaucugcaucuga

SEQ ID NO: 76646 - RNA, 1701 nt, Artificial Sequence
  derived and/or modified CDS sequence (opt1) from hemagglutinin__InfluenzaA__AIL94270
augaagaccaucaucgcccugagcuacauccucugccugguguucgcccagaagcugcccggcaacgacaacuccaccgcgacgcucugccuggggcaccacgccgucccgaacggcaccaucgugaagaccaucaccaacgaccgcaucgaggugacgaacgccaccgagcugguccagaacagcuccaucggggagaucugcgacagcccccaccagauccucgacggcgagaacugcacccugaucgacgcccugcucggggacccccagugcgacggcuuccagaacaagaagugggaccuguucguggagcgguccaaggccuacagcaacugcuaccccuacgacgugccggacuacgcgucccugcgcagccucgucgccuccagcggcacccuggaguucaacaacgaguccuucaacugggccggggugacgcagaacggcaccagcuccgccugcauccgggggagcaacuccagcuucuucucccgccugaacuggcucacccaccugaacuucaaguaccccgcgcugaacgugaccaugcccaacaacgagcaguucgacaagcucuacaucuggggcguccaccaccccgggacggacaaggaccagaucuuccuguacgcccagagcuccggccggaucaccgugagcaccaagcgcagccagcaggccgugaucccgaacaucggcucccggccccgcauccggaacauccccagccgcaucuccaucuacuggaccaucgucaagcccggggacauccugcucaucaacagcacgggcaaccugaucgccccgcggggguacuucaagauccgcuccggcaagagcuccaucaugcggagcgacgcccccaucggcaagugcaacuccgagugcaucacccccaacgggagcauccccaacgacaagccguuccagaacgugaaccgcaucaccuacggcgcgugcccccgguacgugaagcaguccacccugaagcucgccacggggaugcgcaacguccccgagaagcagacccggggcaucuucggggccaucgccggcuucaucgagaacggcugggaggggaugguggacggcugguacggguuccgccaccagaacagcgagggccgggggcaggccgcggaccugaaguccacccaggccgccaucgaccagaucaacggcaagcugaaccgccucaucggcaagaccaacgagaaguuccaccagaucgagaaggaguucagcgagguggaggggcggauccaggaccuggagaaguacgucgaggacacgaagaucgaccugugguccuacaacgccgagcuccugguggcccuggagaaccagcacaccaucgaccucaccgacagcgagaugaacaagcuguucgagaagaccaagaagcagcugcgcgagaacgcggaggacaugggcaacgggugcuucaagaucuaccacaagugcgacaacgccugcaucggcuccauccgcaacgggacguacgaccacgacguguaccgggacgaggcccucaacaaccgcuuccagaucaagggcgucgagcucaagagcggcuacaaggacuggauccuguggaucuccuucgccaucagcugcuuccugcugugcguggcccugcucggguucaucaugugggcgugccagaagggcaacauccggugcaacaucugcaucuga

SEQ ID NO: 76647 - RNA, 1701 nt, Artificial Sequence; identical to SEQ ID NO: 74018
  derived and/or modified CDS sequence (opt1) from hemagglutinin__InfluenzaA__AIL94282

SEQ ID NO: 76648 - RNA, 1701 nt, Artificial Sequence; identical to SEQ ID NO: 74018
  derived and/or modified CDS sequence (opt1) from hemagglutinin__InfluenzaA__AIL94294

SEQ ID NO: 76649 - RNA, 1701 nt, Artificial Sequence
  derived and/or modified CDS sequence (opt1) from hemagglutinin__InfluenzaA__AIL94306
augaagaccaucaccgcccugagcuacauccucugccuggccuucgcgcagaagcccccgggcaacgacaacuccacggccacccugugccucgggcaccacgccgugcccaacggcaccaucgucaagaccaucacgaacgaccgcaucgaggugaccaacgccaccgagcuggugcagaacagcuccaucggggagaucugcgacagcccccaccagauccuggacggcgagaacugcacccucaucgacgcccugcugggggacccccagugcgacggcuuccagaacaagaagugggaccucuucgucgagcgguccaaggcguacagcaacugcuacccguacgacgugcccgacuacgccucccugcgcagccugguggccuccagcggcacgcucgaguucaacaacgaguccuucaacugggccggggucacccagaacggcaccagcuccgcgugcauccgggggagcaacuccagcuucuucucccgccugaacuggcugacccaccucaacuucaaguaccccgcccugaacgugacgaugcccaacaacgagcaguucgacaagcuguacaucuggggcgugcaccacccggggaccgacaaggaccagaucuuccucuacgcccagagcuccggccggaucaccgucagcaccaagcgcagccagcaggccgugauccccaacaucggcucccggccccgcauccggaacauccccagccgcaucuccaucuacuggacgaucgugaagccgggggacauccugcugaucaacagcaccggcaaccucaucgcgccccggggguacuucaagauccgcuccggcaagagcuccaucaugcggagcgacgcccccaucggcaagugcaaguccgagugcaucacccccaacgggagcaucccgaacgacaagcccuuccagaacgucaaccgcaucaccuacggcgccugcccccgguacgugaagcaguccacgcugaagcuggccaccgggaugcgcaacgugcccgagaagcagacccggggcaucuucggggccaucgccggcuucaucgagaacggcugggaggggauggucgacggcugguacggguuccgccaccagaacagcgagggccgggggcaggcggccgaccucaaguccacccaggccgccaucgaccagaucaacggcaagcugaaccgccugaucggcaagacgaacgagaaguuccaccagaucgagaaggaguucagcgagguggaggggcggauccaggaccucgagaaguacguggaggacaccaagaucgaccugugguccuacaacgccgagcugcucgucgcgcuggagaaccagcacaccaucgaccugaccgacagcgagaugaacaagcuguucgagaagacgaagaagcagcuccgcgagaacgccgaggacaugggcaacgggugcuucaagaucuaccacaagugcgacaacgccugcaucggcuccauccgcaacgggaccuacgaccacgacguguaccgggacgaggcccugaacaaccgcuuccagaucaagggcguggagcucaagagcggcuacaaggacuggauccuguggaucuccuucgccaucagcugcuuccugcucugcgucgcgcugcugggguucaucaugugggccugccagaagggcaacauccggugcaacaucugcaucuga

SEQ ID NO: 76650 - RNA, 1701 nt, Artificial Sequence
  derived and/or modified CDS sequence (opt1) from hemagglutinin__InfluenzaA__AIL94318
augaagaccaucaucgcccugagcuacauccucugccugguguucgcccagaagcugcccggcaacgacaacuccaccgcgacgcucugccuggggcaccacgccgucccgaacggcaccaucgugaagaccaucaccaacgaccgcaucgaggugacgaacgccaccgagcugguccagaacagcuccaucggggagaucugcgacagcccccaccagauccucgacggcgagaacugcacccugaucgacgcccugcucggggacccccagugcgacggcuuccagaacaagaagugggaccuguucguggagcgguccaaggccuacagcaacugcuaccccuacgacgugccggacuacgcgucccugcgcagccucgucgccuccagcggcacccuggaguucaacaacgaguccuucaacuggacgggggugacccagaacggcaccagcuccgccugcauccggcgcagcaacuccagcuucuucucccggcugaacuggcucacccaccugaacuucaaguaccccgcccugaacgugacgaugcccaacaacgagcaguucgacaagcucuacaucuggggcguccaccaccccgggaccgacaaggaccagaucuuccuguacgcgcagagcuccgggcgcaucaccgugagcaccaagcggagccagcaggccgugaucccgaacaucggcucccgcccccggauccgcaacauccccagccggaucuccaucuacuggacgaucgucaagcccggcgacauccugcucaucaacagcaccgggaaccugaucgccccgcgcggcuacuucaagauccgguccggcaagagcuccaucaugcgcagcgacgcccccaucgggaagugcaaguccgagugcaucacccccaacggcagcauccccaacgacaagccguuccagaacgugaaccggaucaccuacggggccugcccccgcuacgugaagcaguccacgcugaagcucgcgaccggcaugcggaacguccccgagaagcagacccgcgggaucuucggcgccaucgccggguucaucgagaacggcugggagggcaugguggacgggugguacggcuuccggcaccugaacagcgaggggcgcggccaggccgccgaccugaaguccacccaggcggccaucgaccagaucaacgggaagcucaaccggcugaucggcaagacgaacgagaaguuccaccagaucgagaaggaguucagcgagguggagggccgcauccaggaccuggagaaguacgucgaggacaccaagaucgaccucugguccuacaacgccgagcugcugguggcccucgagaaccagcacaccaucgaccugaccgacagcgagaugaacaagcuguucgagaagacgaagaagcagcuccgcgagaacgccgaggacauggggaacggcugcuucaagaucuaccacaagugcgacaacgcgugcaucggguccauccggaacggcaccuacgaccacaacguguaccgcgacgaggcccugaacaaccgguuccagaucaagggggucgagcucaagagcggcuacaaggacuggauccuguggaucuccuucgccaucagcugcuuccugcugugcguggcccuccugggcuucaucaugugggccugccagaaggggaacauccgcugcaacaucugcaucuga

SEQ ID NO: 76651 - RNA, 1701 nt, Artificial Sequence; identical to SEQ ID NO: 73882
  derived and/or modified CDS sequence (opt1) from hemagglutinin__InfluenzaA__AIL94330

SEQ ID NO: 76652 - RNA, 1701 nt, Artificial Sequence; identical to SEQ ID NO: 74064
  derived and/or modified CDS sequence (opt1) from hemagglutinin__InfluenzaA__AIL94354

SEQ ID NO: 76653 - RNA, 1701 nt, Artificial Sequence; identical to SEQ ID NO: 74018
  derived and/or modified CDS sequence (opt1) from hemagglutinin__InfluenzaA__AIL94365

SEQ ID NO: 76654 - RNA, 1701 nt, Artificial Sequence
  derived and/or modified CDS sequence (opt1) from hemagglutinin__InfluenzaA__AIL94377
augaagaccaucaucgcccugagcuacauccucugccugguguucgcccagaagcugcccggcaacgacaacuccaccgcgacgcucugccuggggcaccacgccgucccgaacggcaccaucgugaagaccaucaccaacgaccgcaucgaggugacgaacgccaccgagcugguccagaacagcuccaucggggagaucugcgacagcccccaccagauccucgacggcgagaacugcacccugaucgacgcccugcucggggacccccacugcgacggcuuccagaacaagaagugggaccuguucguggagcgguccaaggccuacagcaacugcuaccccuacgacgugccggacuacgcgucccugcgcagccucgucgccuccagcggcacccuggaguucaacaacgaguccuucaacugggccggggugacgcagaacggcaccagcuccgccugcauccgggggagcaacuccagcuucuucucccgccugaacuggcucacccaccugaacuucaaguaccccgcgcugaacgugaccaugcccaacaacgagcaguucgacaagcucuacaucuggggcguccaccaccccgggacggacaaggaccagaucuuccuguacgcccagagcuccggccggaucaccgugagcaccaagcgcagccagcaggccgugaucccgaacaucggcucccggccccgcauccggaacauccccagccgcaucuccaucuacuggaccaucgucaagcccggggacauccugcucaucaacagcacgggcaaccugaucgccccgcggggguacuucaagauccgcuccggcaagagcuccaucaugcggagcgacgcccccaucggcaagugcaaguccgagugcaucacccccaacgggagcauccccaacgacaagccguuccagaacgugaaccgcaucaccuacggcgcgugcccccgguacgugaagcaguccacccugaagcucgccacggggaugcgcaacguccccgagaagcagacccggggcaucuucggggccaucgccggcuucaucgagaacggcugggaggggaugguggacggcugguacggguuccgccaccagaacagcgagggccgggggcaggccgcggaccugaaguccacccaggccgccaucgaccagaucaacggcaagcugaaccgccucaucggcaagaccaacgagaaguuccaccagaucgagaaggaguucagcgagguggaggggcggauccaggaccuggagaaguacgucgaggacacgaagaucgaccugugguccuacaacgccgagcuccugguggcccuggagaaccagcacaccaucgaccucaccgacagcgagaugaacaagcuguucgagaagaccaagaagcagcugcgcgagaacgcggaggacaugggcaacgggugcuucaagaucuaccacaagugcgacaacgccugcaucggcuccauccgcaacgggacguacgaccacgacguguaccgggacgaggcccucaacaaccgcuuccagaucaagggcgucgagcucaagagcggcuacaaggacuggauccuguggaucuccuucgccaucagcugcuuccugcugugcguggcccugcucggguucaucaugugggcgugccagaagggcaacauccggugcaacaucugcaucuga

SEQ ID NO: 76655 - RNA, 1701 nt, Artificial Sequence
  derived and/or modified CDS sequence (opt1) from hemagglutinin__InfluenzaA__AIL94389
augaaggccauccuggugguccuccuguacaccuucgccaccgcgaacgccgacacgcugugcaucggcuaccacgccaacaacagcaccgacaccguggacaccgugcucgagaagaacgucacggugacccacuccgugaaccugcuggaggacaagcacaacgggaagcucugcaagcugcgcggcgucgcgccccugcaccucgggaagugcaacaucgccggcuggauccuggggaacccggagugcgagagccuguccaccgccagcuccuggagcuacaucguggagaccuccagcuccgacaacggcacgugcuaccccggcgacuucaucaacuacgaggagcuccgggagcagcugagcuccgugagcuccuucgagcgcuucgagaucuuccccaagaccagcuccuggcccaaccacgacagcaacaagggggucaccgccgccugcccgcacgccggcgcgaaguccuucuacaagaaccugaucuggcucgugaagaaggggaacagcuaccccaagcugucccagagcuacaucaacgacaagggcaaggaggugcugguccucugggggauccaccaccccagcaccacggccgaccagcagucccuguaccagaacgccgacgccuacguguucgugggcaccagccgguacuccaagaaguucaagcccgagaucgccauccgcccgaagguccgggaccaggagggccgcaugaacuacuacuggacccugguggagcccggggacaagaucaccuucgaggcgacgggcaaccucguggucccccgguacgccuucaccauggagcgcaacgccgggagcggcaucaucaucuccgacacccccgugcacgacugcaacaccacgugccagaccccggagggcgccaucaacaccagccugcccuuccagaacauccaccccaucaccaucgggaagugccccaaguacgugaaguccacgaagcugcggcucgccaccggccugcgcaacgucccgagcauccagucccgggggcuguucggcgcgaucgccggguucaucgagggcggcuggaccgggaugguggacggcugguacggguaccaccaccagaacgagcagggcagcggguacgccgccgaccucaaguccacccagaacgccaucgacaagaucacgaacaaggugaacagcgucaucgagaagaugaacacccaguucaccgcggugggcaaggaguucaaccaccuggagaagcgcaucgagaaccugaacaagaaggucgacgacggcuuccucgacaucuggaccuacaacgccgagcugcugauccuccuggagaacgagcggacgcuggacuaccacgacuccaacgugaagaaccucuacgagaaggugcgcaaccagcugaagaacaacgccaaggagaucgggaacggcugcuucgaguucuaccacaagugcgacaacacgugcauggagagcgucaagaacgggaccuacgacuaccccaaguacuccgaggaggccaagcugaaccgggagaagaucgacggcgugaagcucgagagcacccgcaucuaccagauccuggccaucuacuccaccguggcgagcucccugguccucguggugagccugggggccaucagcuucuggaugugcuccaacggcagccugcagugccggaucugcaucuga

SEQ ID NO: 76656 - RNA, 1701 nt, Artificial Sequence; identical to SEQ ID NO: 74018
  derived and/or modified CDS sequence (opt1) from hemagglutinin__InfluenzaA__AIL94411

SEQ ID NO: 76657 - RNA, 1701 nt, Artificial Sequence; identical to SEQ ID NO: 74018
  derived and/or modified CDS sequence (opt1) from hemagglutinin__InfluenzaA__AIL94423

SEQ ID NO: 76658 - RNA, 1701 nt, Artificial Sequence; identical to SEQ ID NO: 76611
  derived and/or modified CDS sequence (opt1) from hemagglutinin__InfluenzaA__AIL94435

SEQ ID NO: 76659 - RNA, 1701 nt, Artificial Sequence; identical to SEQ ID NO: 74018
  derived and/or modified CDS sequence (opt1) from hemagglutinin__InfluenzaA__AIL94446

SEQ ID NO: 76660 - RNA, 1701 nt, Artificial Sequence; identical to SEQ ID NO: 74018
  derived and/or modified CDS sequence (opt1) from hemagglutinin__InfluenzaA__AIL94458

SEQ ID NO: 76661 - RNA, 1701 nt, Artificial Sequence
  derived and/or modified CDS sequence (opt1) from hemagglutinin__InfluenzaA__AIL94470
augaaggccauccuggugguccuccuguacaccuucgccaccgcgaacgccgacacgcugugcaucggcuaccacgccaacaacagcaccgacaccguggacaccgugcucgagaagaacgucacggugacccacuccgugaaccugcuggaggacaagcacaacgggaagcucugcaagcugcgcggcgucgcgccccugcaccucgggaagugcaacaucgccggcuggauccuggggaacccggagugcgagagccuguccaccgccagcuccuggagcuacaucguggagaccuccagcuccgacaacggcacgugcuaccccggcgacuucaucaacuacgaggagcuccgggagcagcugagcuccgugagcuccuucgagcgcuucgagaucuuccccaagaccagcuccuggcccaaccacgacagcaacaagggggucaccgccgccugcccgcacgccggcgcgaaguccuucuacaagaaccugaucuggcucgugaagaaggggaacagcuaccccaagcugucccagagcuacaucaacgacaagggcaaggaggugcugguccucugggggauccaccaccccagcaccacggccgaccagcagucccuguaccagaacgccgacgccuacguguucgugggcaccagccgguacuccaagaaguucaagcccgagaucgccauccgcccgaagguccgggaccaggagggccgcaugaacuacuacuggacccugguggagcccggggacaagaucaccuucgaggcgacgggcaaccucguggucccccgguacgccuucaccauggagcgcaacgccgggagcggcaucaucaucuccgacacccccgcccacgacugcaacaccacgugccagaccccggagggcgccaucaacaccagccugcccuuccagaacauccaccccaucaccaucgggaagugccccaaguacgugaaguccacgaagcugcggcucgcgaccggccugcgcaacgugccgagcauccagucccgggggcuguucggcgccaucgccggguucaucgagggcggcuggaccgggauggucgacggcugguacggguaccaccaccagaacgagcagggcagcggguacgccgccgaccucaaguccacccagaacgcgaucgacaagaucacgaacaaggugaacagcgugaucgagaagaugaacacccaguucaccgccgucggcaaggaguucaaccaccuggagaagcgcaucgagaaccugaacaagaagguggacgacggcuuccucgacaucuggaccuacaacgccgagcugcugguccuccuggagaacgagcggacgcuggacuaccacgacuccaacgugaagaaccucuacgagaaggugcgcaaccagcugaagaacaacgccaaggagaucgggaacggcugcuucgaguucuaccacaagugcgacaacacgugcauggagagcgucaagaacgggaccuacgacuaccccaaguacuccgaggaggccaagcugaaccgggagaagaucgacggcgugaagcucgagagcacccgcaucuaccagauccuggcgaucuacuccaccguggccagcucccugguccucguggugagccugggggccaucagcuucuggaugugcuccaacggcagccugcagugccggaucugcaucuga

SEQ ID NO: 76662 - RNA, 1701 nt, Artificial Sequence
  derived and/or modified CDS sequence (opt1) from hemagglutinin__InfluenzaA__AIL94481
augaagaccaucaucgcccugagcuacauccucugccugguguucgcccagaagcugcccggcaacgacaacuccaccgcgacgcucugccuggggcaccacgccgucccgaacggcaccaucgugaagaccaucaccaacgaccgcaucgaggugacgaacgccaccgagcugguccagaacagcuccaucggggagaucugcgacagcccccaccagauccucgacggcgagaacugcacccugaucgacgcccugcucggggacccccagugcgacggcuuccagaacaagaagugggaccuguucguggagcgguccaaggccuacagcaacugcuaccccuacgacgugccggacuacgcgucccugcgcagccucgucgccuccagcggcacccuggaguucaacaacgaguccuucaacugggccggggugacgcagaacggcaccagcuccgccugcauccgggggagcaacuccagcuucuucucccgccugaacuggcucacccaccugaacuucaaguaccccgcgcugaacgugaccaugcccaacaacgagcaguucgacaagcucuacaucuggggcguccaccaccccgggacggacaaggaccagaucuuccuguacgcccagagcuccggccggaucaccgugagcaccaagcgcagccagcaggccgugaucccgaacaucggcucccggccccgcauccggaacauccccagccgcaucuccaucuacuggaccaucgucaagcccggggacauccugcucaucaacagcacgggcaaccugaucgccccgcggggguacuucaagauccgcuccggcaagagcuccaucaugcggagcgacgcccccaucggcaagugcaaguccgagugcaucacccccaacgggagcauccccaacgacaagccguuccagaacgugaaccgcaucaccuacggcgcgugcccccgguacgugaagcaguccacccugaagcucgccacggggaugcgcaacguccccgagaagcagacccggggcaucuucggggccaucgccggcuucaucgagaacggcugggaggggaugguggacggcugguacggguuccgccaccagaacagcgagggccgggggcaggccgcggaccugaaguccacccaggccgccaucgaccagaucaacggcaagcugaaccgccucaucggcaagaccaacgagaaguuccaccagaucgagaaggaguucagcgagguggaggggcggauccaggaccuggagaaguacgucgaggacacgaagaucgaccugugguccuacaacgccgagcuccugguggcccuggagaaccagcacaccaucgaccucaccgacagcgagaugaacaagcuguucgagaagaccaagaagcagcugcgcgagaacgcggaggacaugggcaacgggugcuucaagaucuaccacaagugcgacaacgccugcaucggcuccauccgcaacgggacguacgaccacgacguguaccgggacgaggcccucaacaaccgcuuccagaucaagggcgucgagcucaagagcggcuacaaggacuggaucaucuggaucuccuucgccaucagcugcuuccugcugugcguggcccugcugggguucaucaugugggcgugccagaagggcaacauccggugcaacaucugcaucuga

SEQ ID NO: 76663 - RNA, 1701 nt, Artificial Sequence
  derived and/or modified CDS sequence (opt1) from hemagglutinin__InfluenzaA__AIL94493
augaaggccauccuggugguccuccuguacaccuucgccaccgcgaacgccgacacgcugugcaucggcuaccacgccaacaacagcaccgacaccguggacaccgugcucgagaagaacgucacggugacccacuccgugaaccugcuggaggacaagcacaacgggaagcucugcaagcugcgcggcgucgcgccccugcaccucgggaagugcaacaucgccggcuggauccuggggaacccggagugcgagagccuguccaccgccagcuccuggagcuacaucguggagaccuccagcuccgacaacggcacgugcuaccccggcgacuucaucaacuacgaggagcuccgggagcagcugagcuccgugagcuccuucgagcgcuucgagaucuuccccaagaccagcuccuggcccaaccacgacagcaacaagggggucaccgccgccugcccgcacgccggcgcgaaguccuucuacaagaaccugaucuggcucgugaagaaggggaacagcuaccccaagcugucccagagcuacaucaacgacaagggcaaggaggugcugguccucugggggauccaccaccccagcaccacggccgaccagcagucccuguaccagaacgccgacgccuacguguucgugggcaccagccgguacuccaagaaguucaagcccgagaucgccauccgcccgaagguccgggaccaggagggccgcaugaacuacuacuggacccugguggagcccggggacaagaucaccuucgaggcgacgggcaaccucguggucccccgguacgccuucaccauggagaagaacgccgggagcggcaucaucaucuccgacacccccgugcacgacugcaacaccacgugccagaccccggagggcgccaucaacaccagcuuccccuuccagaacauccaccccaucaccaucgggaagugccccaaguacgugaaguccacgaagcugcgccuggccaccggccuccggaacgucccgagcauccagucccgcgggcuguucggcgcgaucgccggguucaucgagggcggcuggaccgggaugguggacggcugguacggguaccaccaccagaacgagcagggcagcggguacgccgccgaccugaaguccacccagaacgccaucgacaagaucacgaacaaggugaacagcgucaucgagaagaugaacacccaguucaccgcggugggcaaggaguucaaccaccucgagaagcggaucgagaaccugaacaagaaggucgacgacggcuuccuggacaucuggaccuacaacgccgagcuccuggugcugcucgagaacgagcgcacgcuggacuaccacgacuccaacgugaagaaccuguacgagaagguccggaaccagcucaagaacaacgccaaggagaucgggaacggcugcuucgaguucuaccacaagugcgacaacacgugcauggagagcgugaagaacgggaccuacgacuaccccaaguacuccgaggaggccaagcugaaccgcgagaagaucgacggcgugaagcuggagagcacccggaucuaccagauccucgccaucuacuccaccgucgcgagcucccuggugcugguggucagccucggggccaucagcuucuggaugugcuccaacggcagccugcagugccgcaucugcaucuga

SEQ ID NO: 76664 - RNA, 1701 nt, Artificial Sequence; identical to SEQ ID NO: 76611
  derived and/or modified CDS sequence (opt1) from hemagglutinin__InfluenzaA__AIL94504

SEQ ID NO: 76665 - RNA, 1701 nt, Artificial Sequence; identical to SEQ ID NO: 74018
  derived and/or modified CDS sequence (opt1) from hemagglutinin__InfluenzaA__AIL94515

SEQ ID NO: 76666 - RNA, 1701 nt, Artificial Sequence; identical to SEQ ID NO: 74018
  derived and/or modified CDS sequence (opt1) from hemagglutinin__InfluenzaA__AIL94527

SEQ ID NO: 76667 - RNA, 1701 nt, Artificial Sequence
  derived and/or modified CDS sequence (opt1) from hemagglutinin__InfluenzaA__AIL94539
augaaggccauccuggugguccuccuguacaccuucgccaccgcgaacgccgacacgcugugcaucggcuaccacgccaacaacagcaccgacaccguggacaccgugcucgagaagaacgucacggugacccacuccgugaaccugcuggaggacaagcacaacgggaagcucugcaagcugcgcggcgucgcgccccugcaccucgggaagugcaacaucgccggcuggauccuggggaacccggagugcgagagccuguccaccgccagcuccuggagcuacaucguggagaccuccagcuccgacaacggcacgugcuaccccggcgacuucaucaacuacgaggagcuccgggagcagcugagcuccgugagcuccuucgagcgcuucgagaucuuccccaagaccagcuccuggcccaaccacgacagcaacaagggggucaccgccgccugcccgcacgccggcgcgaaguccuucuacaagaaccugaucuggcucgugaagaaggggaacagcuaccccaagcugucccagagcuacaucaacgacaagggcaaggaggugcugguccucugggggauccaccaccccagcaccacggccgaccagcagucccuguaccagaacgccgacgccuacguguucgugggcaccagccgguacuccaagaaguucaagcccgagaucgccauccgcccgaagguccgggaccaggagggccgcaugaacuacuacuggacccugguggagcccggggacaagaucaccuucgaggcgacgggcaaccucguggucccccgguacgccuucaccauggagcgcaacgccgggagcggcaucaucaucuccgacacccccgcccacgacugcaacaccacgugccagaccccggagggcgccaucaacaccagccugcccuuccagaacauccaccccaucaccaucgggaagugccccaaguacgugaaguccacgaagcugcggcucgcgaccggccugcgcaacgugccgagcauccagucccgggggcuguucggcgccaucgccggguucaucgagggcggcuggaccgggauggucgacggcugguacggguaccaccaccagaacgagcagggcagcggguacgccgccgaccucaaguccacccagaacgcgaucgacaagaucacgaacaaggugaacagcgugaucgagaagaugaacacccaguucaccgccgucggcaaggaguucaaccaccuggagaagcgcaucgagaaccugaacaagaagguggacgacggcuuccucgacaucuggaccuacaacgccgagcugcugguccuccuggagaacgagcggacgcuggacuaccacgacuccaacgugaagaaccucuacgagaaggugcgcaaccagcugaagaacaacgccaaggaggucgggaacggcugcuucgaguucuaccacaagugcgacaacacgugcauggagagcgugaagaacgggaccuacgacuaccccaaguacuccgaggaggccaagcugaaccgggagaagaucgacggcgugaagcucgagagcacccgcaucuaccagauccuggcgaucuacuccaccgucgccagcucccuggugcucguggucagccugggggccaucagcuucuggaugugcuccaacggcagccugcagugccggaucugcaucuga

SEQ ID NO: 76668 - RNA, 1701 nt, Artificial Sequence; identical to SEQ ID NO: 76611
  derived and/or modified CDS sequence (opt1) from hemagglutinin__InfluenzaA__AIL94550

SEQ ID NO: 76669 - RNA, 1701 nt, Artificial Sequence
  derived and/or modified CDS sequence (opt1) from hemagglutinin__InfluenzaA__AIL94561
augaagaccaucaucgcccugagcuacauccucugccugguguucgcccagaagcugcccggcaacgacaacuccaccgcgacgcucugccuggggcaccacgccgucccgaacggcaccaucgugaagaccaucaccaacgaccgcaucgaggugacgaacgccaccgagcugguccagaacagcuccaucggggagaucugcgacagcccccaccagauccucgacggcgagaacugcacccugaucgacgcccugcucggggacccccagugcgacggcuuccagaacaagaagugggaccuguucguggagcgguccaaggccuacagcaacugcuaccccuacgacgugccggacuacgcgucccugcgcagccucgucgccuccagcggcacccuggaguucaacaacgaguccuucaacugggccggggugacgcagaacggcaccagcuccgccugcauccgggggagcaacuccagcuucuucucccgccugaacuggcucacccaccugaacuucaaguaccccgcgcugaacgugaccaugcccaacaacgagcaguucgacaagcucuacaucuggggcguccaccaccccgggacggacaaggaccagaucuuccuguacgcccagagcuccggccggaucaccgugagcaccaagcgcagccagcaggccgugaucccgaacaucggcucccggccccgcauccggaacauccccagccgcaucuccaucuacuggaccaucgucaagcccggggacauccugcucaucaacagcacgggcaaccugaucgccccgcggggguacuucaagauccgcuccggcaagagcuccaucaugcggagcgacgcccccaucggcaagugcaaguccgagugcaucacccccaacgggagcauccccaacgacaagccguuccagaacgugaaccgcaucaccuacggcgcgugcccccgguacgugaagcaguccacccugaagcucgccacggggaugcgcaacguccccgagaagcagacccggggcaucuucggggccaucgccggcuucaucgagaacggcugggaggggaugguggacggcugguacggguuccgccaccagaacagcgagggccgggggcaggccgcggaccugaaguccacccaggccgccaucgaccagaucaacggcaagcugaaccgccucaucggcaagaccaacgagaaguuccaccagaucgagaaggaguucagcgagguggaggggcggauccaggaccuggagaaguacgucgaggacacgaagaucgaccugugguccuacaacgccgagcuccugguggcccuggagaaccagcacaccaucgaccucaccgacagcgagaugaacaagcuguucgagaagaccaagaagcagcugcgcgagaacgcggaggacaugggcaacgggugcuucaagaucuaccacaagugcgacaacgccugcaucggcuccauccgcaacgggacguacgaccacgacguguaccgggacgaggcccucaacaaccgcuuccagaucaagggcgucgagcucaagagcggcuacaaggacuggauccuguggaucuccuucgccaucagcugcuuccugcugugcguggcccugcucggguucaucaugugggcgugccagcggggcaacauccgcugcaacaucugcaucuga

SEQ ID NO: 76670 - RNA, 1701 nt, Artificial Sequence
  derived and/or modified CDS sequence (opt1) from hemagglutinin__InfluenzaA__AIL94573
augaaggccauccuggugguccuccuguacaccuucgccaccgcgaacgccgacacgcugugcaucggcuaccacgccaacaacagcaccgacaccguggacaccgugcucgagaagaacgucaucgugacgcacuccgugaaccugcuggaggacaagcacaacgggaagcucugcaagcugcgcggcgucgcgccccugcaccucgggaagugcaacaucgccggcuggauccuggggaacccggagugcgagagccuguccaccgccagcuccuggagcuacaucguggagaccuccagcuccgacaacgggaccugcuaccccggcgacuucaucaacuacgaggagcuccgggagcagcugagcuccgugagcuccuucgagcgcuucgagaucuuccccaagacgagcuccuggcccaaccacgacagcaacaagggcgucaccgccgccugcccgcacgccggcgcgaaguccuucuacaagaaccugaucuggcucgugaagaaggggaacagcuaccccaagcugucccagagcuacaucaacgacaagggcaaggaggugcugguccucugggggauccaccaccccagcaccaccgccgaccagcagucccuguaccagaacgccgacgccuacguguucgugggcacgagccgguacuccaagaaguucaagcccgagaucgccauccgcccgaagguccgggaccaggagggccgcaugaacuacuacuggacccugguggagcccggggacaagaucaccuucgaggcgaccggcaaccucguggucccccgguacgccuucacgauggagcgcaacgccgggagcggcaucaucaucuccgacacccccgugcacgacugcaacacgaccugccagaccccggagggcgccaucaacaccagccugcccuuccagaacauccaccccaucaccaucgggaagugccccaaguacgugaaguccaccaagcugcggcucgccacgggccugcgcaacgucccgagcauccagucccgggggcuguucggcgcgaucgccggguucaucgagggcggcuggaccgggaugguggacggcugguacggguaccaccaccagaacgagcagggcagcggguacgccgccgaccucaaguccacccagaacgccaucgacaagaucaccaacaaggugaacagcgucaucgagaagaugaacacgcaguucaccgcggugggcaaggaguucaaccaccuggagaagcgcaucgagaaccugaacaagaaggucgacgacggcuuccucgacaucuggaccuacaacgccgagcugcuggugcuccuggagaacgagcggacccuggacuaccacgacuccaacgugaagaaccucuacgagaagguccgcaaccagcugaagaacaacgccaaggagaucgggaacggcugcuucgaguucuaccacaagugcgacaacacgugcauggagagcgugaagaacgggaccuacgacuaccccaaguacuccgaggaggccaagcugaaccgggagaagaucgacggcgugaagcucgagagcacccgcgucuaccagauccuggccaucuacuccaccguggcgagcucccuggugcucgucgugagccugggggccaucagcuucuggaugugcuccaacggcagccugcagugccggaucugcaucuga

SEQ ID NO: 76671 - RNA, 1701 nt, Artificial Sequence
  derived and/or modified CDS sequence (opt1) from hemagglutinin__InfluenzaA__AIL94584
augaaggccauccuggugguccuccuguacaccuucgccaccgcgaacgccgacacgcugugcaucggcuaccacgccaacaacagcaccgacaccguggacaccgugcucgagaagaacaucacggucacccacuccgugaaccugcuggaggacaagcacaacgggaagcucugcaagcugcgcggcguggcgccccugcaccucgggaagugcaacaucgccggcuggauccuggggaacccggagugcgagagccuguccaccgccagcuccuggagcuacaucgucgagaccuccagcuccgacaacggcacgugcuaccccggcgacuucaucaacuacgaggagcuccgggagcagcugagcuccgugagcuccuucgagcgcuucgagaucuuccccaagaccagcuccuggcccaaccacgacagcaacaagggggugaccgccgccugcccgcacgccggcgcgaaguccuucuacaagaaccugaucuggcucgucaagaaggggaacagcuaccccaagcugucccagagcuacaucaacgacaagggcaaggaggugcuggugcucugggggauccaccaccccagcaccacggccgaccagcagucccuguaccagaacgccgacgccuacgucuucgugggcaccagccgguacuccaagaaguucaagcccgagaucgccauccgcccgaaggugcgggaccaggagggccgcaugaacuacuacuggacccuggucgagcccggggacaagaucaccuucgaggcgacgggcaaccucguggugccccgguacgccuucaccauggagcgcaacgccgggagcggcaucaucaucuccgacacccccguccacgacugcaacaccacgugccagaccccggagggcgccaucaacaccagccugcccuuccagaacauccaccccaucaccaucgggcggugccccaaguacgugaaguccacgaagcugcgccucgccaccggccugcggaacgugccgagcauccagucccgcgggcuguucggcgcgaucgccggguucaucgagggcggcuggaccgggauggucgacggcugguacggguaccaccaccagaacgagcagggcagcggguacgccgccgaccucaaguccacccagaacgccaucgacaagaucacgaacaaggugaacagcgugaucgagaagaugaacacccaguucaccgcggucggcaaggaguucaaccaccuggagaagcggaucgagaaccugaacaagaagguggacgacggcuuccucgacaucuggaccuacaacgccgagcugcugguccuccuggagaacgagcgcacgcuggacuaccacgacuccaacgugaagaaccucuacgagaaggugcggaaccagcugaagaacaacgccaaggagaucgggaacggcugcuucgaguucuaccacaagugcgacaacacgugcauggagagcgucaagaacgggaccuacgacuaccccaaguacuccgaggaggccaagcugaaccgcgagaagaucgacggcgugaagcucgagagcacccggaucuaccagauccuggccaucuacuccaccguggcgagcucccugguccucguggugagccugggggccaucagcuucuggaugugcuccaacggcagccugcagugccgcaucugcaucuga

SEQ ID NO: 76672 - RNA, 1701 nt, Artificial Sequence; identical to SEQ ID NO: 76079
  derived and/or modified CDS sequence (opt1) from hemagglutinin__InfluenzaA__AIL94595

SEQ ID NO: 76673 - RNA, 1701 nt, Artificial Sequence; identical to SEQ ID NO: 74018
  derived and/or modified CDS sequence (opt1) from hemagglutinin__InfluenzaA__AIL94606

SEQ ID NO: 76674 - RNA, 1701 nt, Artificial Sequence; identical to SEQ ID NO: 74064
  derived and/or modified CDS sequence (opt1) from hemagglutinin__InfluenzaA__AIL94618

SEQ ID NO: 76675 - RNA, 1701 nt, Artificial Sequence; identical to SEQ ID NO: 76611
  derived and/or modified CDS sequence (opt1) from hemagglutinin__InfluenzaA__AIL94629

SEQ ID NO: 76676 - RNA, 1701 nt, Artificial Sequence; identical to SEQ ID NO: 74018
  derived and/or modified CDS sequence (opt1) from hemagglutinin__InfluenzaA__AIL94640

SEQ ID NO: 76677 - RNA, 1701 nt, Artificial Sequence
  derived and/or modified CDS sequence (opt1) from hemagglutinin__InfluenzaA__AIL94652
augaaggccauccuggugguccuccuguacaccuucgccaccgcgaacgccgacacgcugugcaucggcuaccacgccaacaacagcaccgacaccguggacaccgugcucgagaagaacgucacggugacccacuccaucaaccugcuggaggacaagcacaacgggaagcucugcaagcugcgcggcguggcgccccugcaccucgggaagugcaacaucgccggcuggauccuggggaacccggagugcgagagccuguccaccgccagcuccuggagcuacaucgucgagaccuccagcuccgacaacggcacgugcuaccccggcgacuucaucaacuacgaggagcuccgggagcagcugagcuccgugagcuccuucgagcgcuucgagauguuccccaagaccagcuccuggcccaaccacgacagcaacaagggggugaccgccgccugcccgcacgccggcgcgaaguccuucuacaagaaccugaucuggcucgucaagaaggggaacagcuaccccaagcuguccaagagcuacaucaacgacaagggcaaggaggugcuggugcucugggggauccaccaccccagcaccacggccgaccagcagucccuguaccagaacgccgacgccuacgucuucgugggcaccagcaaguacuccaagaaguucaagcccgagaucgccauccggccgaaggugcgcgaccaggagggccggaugaacuacuacuggacccugaucgagcccggggacaagaucaccuucgaggcgacgggcaaccucgucgugccccgcuacgccuucgccauggagcggaacgccgggagcggcaucaucaucuccgacacccccgugcacgacugcaacacgaccugccagaccccggagggcgccaucaacaccagccugcccuuccagaacauccaccccaucaccaucgggaagugccccaaguacgucaaguccaccaagcugcgccucgcgacgggccugcggaacgugccgagcauccagucccgcgggcuguucggcgccaucgccggguucaucgagggcggcuggaccgggaugguggacggcugguacggguaccaccaccagaacgagcagggcagcggguacgccgccgaccucaaguccacccagaacgcgaucgacaagaucaccaacaaggucaacagcgugaucgagaagaugaacacgcaguucaccgccgugggcaaggaguucaaccaccuggagaagcggaucgagaaccugaacaagaaggucgacgacggcuuccucgacaucuggaccuacaacgccgagcugcuggugcuccuggagaacgagcgcacccuggacuaccacgacuccaacgucaagaaccucuacgagaaggugcggaaccagcugaagaacaacgccaaggagaucgggaacggcugcuucgaguucuaccacaagugcgacaacacgugcauggagagcgugaagaacgggaccuacgacuaccccaaguacuccgaggaggccaagcuggaccgcgagaagaucgacggcgucaagcucgagagcacccggaucuaccagauccuggcgaucuacuccaccguggccagcucccuggugcucgucgugagccugggggccaucagcuucuggaugugcuccaacggcagccugcagugccgcaucugcaucuga

SEQ ID NO: 76678 - RNA, 1701 nt, Artificial Sequence; identical to SEQ ID NO: 74064
  derived and/or modified CDS sequence (opt1) from hemagglutinin__InfluenzaA__AIL94663

SEQ ID NO: 76679 - RNA, 1701 nt, Artificial Sequence; identical to SEQ ID NO: 74064
  derived and/or modified CDS sequence (opt1) from hemagglutinin__InfluenzaA__AIL94674

SEQ ID NO: 76680 - RNA, 1701 nt, Artificial Sequence; identical to SEQ ID NO: 74018
  derived and/or modified CDS sequence (opt1) from hemagglutinin__InfluenzaA__AIL94697

SEQ ID NO: 76681 - RNA, 1701 nt, Artificial Sequence; identical to SEQ ID NO: 74064
  derived and/or modified CDS sequence (opt1) from hemagglutinin__InfluenzaA__AIL94709

SEQ ID NO: 76682 - RNA, 1701 nt, Artificial Sequence; identical to SEQ ID NO: 74064
  derived and/or modified CDS sequence (opt1) from hemagglutinin__InfluenzaA__AIL94720

SEQ ID NO: 76683 - RNA, 1701 nt, Artificial Sequence; identical to SEQ ID NO: 74018
  derived and/or modified CDS sequence (opt1) from hemagglutinin__InfluenzaA__AIL94731

SEQ ID NO: 76684 - RNA, 1701 nt, Artificial Sequence; identical to SEQ ID NO: 76611
  derived and/or modified CDS sequence (opt1) from hemagglutinin__InfluenzaA__AIL94743

SEQ ID NO: 76685 - RNA, 1701 nt, Artificial Sequence
  derived and/or modified CDS sequence (opt1) from hemagglutinin__InfluenzaA__AIL94754
augaaggccauccuggugguccuccuguacaccuucgccaccgcgaacgccgacacgcugugcaucggcuaccacgccaacaacagcaccgacaccguggacaccgugcucgagaagaacgucacggugacccacuccgugaaccugcuggaggacaagcacaacgggaagcucugcaagcugcgcggcgucgcgccccugcaccucgggaagugcaacaucgccggcuggauccuggggaacccggagugcgagagccuguccaccgccagcuccuggagcuacaucguggagaccuccagcuccgacaacggcacgugcuaccccggcgacuucaucaacuacgaggagcuccgggagcagcugagcuccgugagcuccuucgagcgcuucgagaucuuccccaagaccagcuccuggcccaaccacgacagcaacaagggggucaccgccgccugcccgcacgccggcgcgaaguccuucuacaagaaccugaucuggcucgugaagaaggggaacagcuaccccaagcugucccagagcuacaucaacgacaagggcaaggaggugcugguccucugggggauccaccaccccagcaccacggccgaccagcagucccuguaccagaacgccgacgccuacguguucgugggcaccagccgguacuccaagaaguucaagcccgagaucgccauccgcccgaagguccgggaccaggagggccgcaugaacuacuacuggacccugguggagcccggggacaagaucaccuucgaggcgacgggcaaccucguggucccccgguacgccuucaccauggagcgcaacgccgggagcggcaucaucaucuccgacacccccgugcacgacugcaacaccacgugccagaccccggagggcgccaucaacaccagccugcccuuccagaacauccaccccaucaccaucgggaagugccccaaguacgugaaguccacgaagcugcggcucgccaccggccugcgcaacgucccgagcauccagucccgggggcuguucggcgcgaucgccggguucaucgagggcggcuggaccgggaugguggacggcugguacggguaccaccaccagaacgagcagggcagcggguacgccgccgaccucaaguccacccagaacgccaucgacaagaucacgaacaaggugaacagcgucaucgagaagaugaacacccaguucaccgcggugggcaaggaguucaaccaccuggagaagcgcaucgagaaccugaacaagaaggucgacgacggcuuccucgacaucuggaccuacaacgccgagcugcugauccuccuggagaacgagcggacgcuggacuaccacgacuccaacgugaagaaccucuacgagaaggugcgcaaccagcugaagaacaacgccaaggagaucgggaacggcugcuucgaguucuaccacaagugcgacaacacgugcauggagagcgccaagaacgggaccuacgacuaccccaaguacuccgaggaggccaagcugaaccgggagaagaucgacggcgucaagcucgagagcacccgcaucuaccagauccuggcgaucuacuccaccguggccagcucccuggugcucgucgugagccugggggccaucagcuucuggaugugcuccaacggcagccugcagugccggaucugcaucuga

SEQ ID NO: 76686 - RNA, 1701 nt, Artificial Sequence; identical to SEQ ID NO: 76639
  derived and/or modified CDS sequence (opt1) from hemagglutinin__InfluenzaA__AIL94765

SEQ ID NO: 76687 - RNA, 1701 nt, Artificial Sequence; identical to SEQ ID NO: 74018
  derived and/or modified CDS sequence (opt1) from hemagglutinin__InfluenzaA__AIL94777

SEQ ID NO: 76688 - RNA, 1701 nt, Artificial Sequence; identical to SEQ ID NO: 75926
  derived and/or modified CDS sequence (opt1) from hemagglutinin__InfluenzaA__AIL94789

SEQ ID NO: 76689 - RNA, 1701 nt, Artificial Sequence; identical to SEQ ID NO: 74064
  derived and/or modified CDS sequence (opt1) from hemagglutinin__InfluenzaA__AIL94800

SEQ ID NO: 76690 - RNA, 1701 nt, Artificial Sequence
  derived and/or modified CDS sequence (opt1) from hemagglutinin__InfluenzaA__AIL94811
augaagaccaucaucgcccugagcuacauccucugccugguguucgcccagaagcugcccggcaacgacaacuccaccgcgacgcucugccuggggcaccacgccgucccgaacggcaccaucgugaagaccaucaccaacgaccgcaucgaggugacgaacgccaccgagcugguccagaacagcuccaucggggagaucugcgacagcccccaccagauccucgacggcgagaacugcacccugaucgacgcccugcucggggacccccagugcgacggcuuccagaacaagaagugggaccuguucguggagcgguccaaggccuacagcaacugcuaccccuacgacgugccggacuacgcgucccugcgcagccucgucgccuccagcggcacccuggaguucaacaacgaguccuucaacuggacgggggugacccagaacggcaccagcuccgccugcauccggcgcagcaacuccagcuucuucucccggcugaacuggcucacccaccugaacuucaaguaccccgcccugaacgugacgaugcccaacaacgagcaguucgacaagcucuacaucuggggcguccaccaccccgggaccgacaaggaccagaucuuccuguacgcgcagagcuccgggcgcaucaccgugagcaccaagcggagccagcaggccgugaucccgaacaucggcucccgcccccggauccgcaacauccccagccggaucuccaucuacuggacgaucgucaagcccggcgacauccugcucaucaacagcaccgggaaccugaucgccccgcgcggcuacuucaagauccgguccggcaagagcuccaucaugcgcagcgacgcccccaucgggaagugcaaguccgagugcaucacccccaacggcagcauccccaacgacaagccguuccagaacgugaaccggaucaccuacggggccugcccccgcuacgugaagcagaacacgcugaagcucgcgaccggcaugcggaacguccccgagaagcagacccgcgggaucuucggcgccaucgccggguucaucgagaacggcugggagggcaugguggacgggugguacggcuuccggcaccagaacuccgaggggcgcggccaggccgccgaccucaagagcacccaggcggccaucgaccagaucaacgggaagcugaaccggcugaucggcaagacgaacgagaaguuccaccagaucgagaaggaguucuccgagguggagggccgcauccaggaccuggagaaguacgucgaggacaccaagaucgaccuguggagcuacaacgccgagcuccugguggcccuggagaaccagcacaccaucgaccucaccgacuccgagaugaacaagcuguucgagaagacgaagaagcagcugcgcgagaacgccgaggacauggggaacggcugcuucaagaucuaccacaagugcgacaacgcgugcaucgggagcauccggaacggcaccuacgaccacaacguguaccgcgacgaggcccucaacaaccgguuccagaucaagggggucgagcugaaguccggcuacaaggacuggauccuguggaucagcuucgccaucuccugcuuccuccugugcguggcccugcucggcuucaucaugugggccugccagaaggggaacauccgcugcaacaucugcaucuga

SEQ ID NO: 76691 - RNA, 1701 nt, Artificial Sequence; identical to SEQ ID NO: 73882
  derived and/or modified CDS sequence (opt1) from hemagglutinin__InfluenzaA__AIL94823

SEQ ID NO: 76692 - RNA, 1701 nt, Artificial Sequence
  derived and/or modified CDS sequence (opt1) from hemagglutinin__InfluenzaA__AIL94835
augaagaccaucaucgcccugagcuacauccucugccugguguucgcccagaagcugcccggcaacgacaacuccaccgcgacgcucugccuggggcaccacgccgucccgaacggcaccaucgugaagaccaucaccaacgaccgcaucgaggugacgaacgccaccgagcugguccagaacuacagcaucggggagaucugcgacagcccccaccagauccucgacggcgagaacugcacccugaucgacgcccugcucggggacccccagugcgacggcuuccagaacaagaagugggaccuguucguggagcggagcaaggccuacuccaacugcuaccccuacgacgugccggacuacgcgagccugcgcucccucgucgccagcuccggcacccuggaguucaacaacgagagcuucaacugggccggggugacgcagaacggcaccuccagcgccugcauccggggguccaacagcuccuucuucagccgccugaacuggcucacccaccugaacuucaaguaccccgcgcugaacgugaccaugcccaacaacgagcaguucgacaagcucuacaucuggggcguccaccaccccgggacggacaaggaccagaucuuccuguacgcccaguccagcggccggaucaccguguccaccaagcgcagccagcaggccgugaucccgaacaucggcagccggccccgcauccggaacauccccucccgcaucagcaucuacuggaccaucgucaagcccggggacauccugcucaucaacuccacgggcaaccugaucgccccgcggggguacuucaagauccgcagcggcaaguccagcaucaugcgguccgacgcccccaucggcaagugcaagagcgagugcaucacccccaacggguccauccccaacgacaagccguuccagaacgugaaccgcaucaccuacggcgcgugcccccgguacgugaagcagagcacccugaagcucgccacggggaugcgcaacguccccgagaagcagacccggggcaucuucggggccaucgccggcuucaucgagaacggcugggaggggaugguggacggcugguacggguuccgccaccagaacuccgagggccgggggcaggccgcggaccugaaguccacccaggccgccaucgaccagaucaacggcaagcugaaccgccucaucggcaagaccaacgagaaguuccaccagaucgagaaggaguucuccgagguggaggggcggauccaggaccuggagaaguacgucgaggacacgaagaucgaccuguggagcuacaacgccgagcuccugguggcccuggagaaccagcacaccaucgaccucaccgacuccgagaugaacaagcuguucgagaagaccaagaagcagcugcgcgagaacgcggaggacaugggcaacgggugcuucaagaucuaccacaagugcgacaacgccugcaucggcagcauccgcaacgggacguacgaccacgacguguaccgggacgaggcccucaacaaccgcuuccagaucaagggcgucgagcugaaguccggcuacaaggacuggauccuguggaucagcuucgccaucuccugcuuccuccugugcguggcccugcucggguucaucaugugggcgugccagaagggcaacauccggugcaacaucugcaucuga

SEQ ID NO: 76693 - RNA, 1701 nt, Artificial Sequence
  derived and/or modified CDS sequence (opt1) from hemagglutinin__InfluenzaA__AIL94847
augaagaccaucaucgcccugagcuacauccucugccugguguucgcccagaagcugcccggcaacgacaacuccaccgcgacgcucugccuggggcaccacgccgucccgaacggcaccaucgugaagaccaucaccaacgaccagaucgaggugacgaacgccaccgagcugguccagagcuccagcaccggggagaucugcgacagcccccaccagauccucgacggcgagaacugcacccugaucgacgcccugcucggggacccccagugcgacggcuuccagaacaagaagugggaccuguucguggagcgcagcaaggccuacuccaacugcuaccccuacgacgugccggacuacgcgagccugcggucccucgucgccagcuccggcacgcuggaguucaacaacgagagcuucaacuggaccggggugacccagaacggcaccuccagcgccugcauccgccgguccaacaacagcuucuucucccgccugaacuggcucacgcaccugaaguucaaguaccccgcccugaacgugaccaugcccaacgacgagaaguucgacaagcucuacaucuggggcguccaccaccccgggaccgacaacgaccagaucuuccuguacgcgcaggccagcgggcggaucaccguguccacgaagcgcagccagcagaccgugaucccgaacaucggcagccggccccgcguccggaacauccccucccgcaucagcaucuacuggaccaucgugaagcccggcgacauccugcucaucaacuccaccgggaaccugaucgccccgcggggcuacuucaagauccgcagcgggaaguccagcaucaugcgguccgacgcccccaucggcaagugcaacagcgagugcaucacgcccaacggcuccauccccaacgacaagccguuccagaacgugaaccgcaucaccuacggggccugcccccgguacgucaagcagaacacccugaagcucgcgaccggcaugcgcaacgugcccgagaagcagacgcgggggaucuucggcgccaucgccggguucaucgagaacggcugggagggcaugguggacgggugguacggcuuccgccaccagaacagcgaggggaucggccaggccgccgaccugaaguccacccaggcggccaucgaccagaucaacgggaagcugaaccggcucaucggcaagaccaacgagaaguuccaccagaucgagaaggaguucagcgaggucgagggccgcauccaggaccuggagaaguacguggaggacaccaagaucgaccugugguccuacaacgccgagcuccugguggcccuggagaaccagcacacgaucgaccucaccgacagcgagaugaacaagcuguucgagaagaccaagaagcagcugcgggagaacgccgaggacauggggaacggcugcuucaagaucuaccacaagugcgacaacgcgugcaucggguccauccgcaacggcaccuacgaccacgacgucuaccgcgacgaggcccucaacaaccgguuccagaucaaggggguggagcugaaguccggcuacaaggacuggauccuguggaucuccuucgccaucagcugcuuccuccugugcguggcccugcucggcuucaucaugugggccugccagaaggggaacauccgcugcaacaucugcaucuga

SEQ ID NO: 76694 - RNA, 1701 nt, Artificial Sequence; identical to SEQ ID NO: 69557
  derived and/or modified CDS sequence (opt1) from hemagglutinin__InfluenzaA__AIL94859

SEQ ID NO: 76695 - RNA, 1701 nt, Artificial Sequence
  derived and/or modified CDS sequence (opt1) from hemagglutinin__InfluenzaA__AIL94871
augaagaccaucaucgcccugagcuacauccucugccugguguucgcccagaagcugcccggcaacgacaacuccaccgcgacgcucugccuggggcaccacgccgucccgaacggcaccaucgugaagaccaucaccaacgaccagaucgaggugacgaacgccaccgagcugguccagagcuccagcaccggggagaucugcgacagcccccaccagauccucgacggcgagaacugcacccugaucgacgcccugcucggggacccccagugcgacggcuuccagaacaagaagugggaccuguucguggagcgcagcaaggccuacuccaacugcuaccccuacgacgugccggacuacgcgagccugcggucccucgucgccagcuccggcacgcuggaguucaacaacgagagcuucaacuggaccggggugacccagaacggcaccuccagcgccugcauccgccgguccaacaacagcuucuucucccgccugaacuggcucacgcaccugaacuucaaguaccccgcccugaacgugaccaugcccaacaacgagcaguucgacaagcucuacaucuggggcguccaccaccccgggaccgacaaggaccagaucuuccuguacgcgcaggccagcgggcggaucaccguguccacgaagcgcagccagcaggccgugaucccgaacaucggcagccggccccgcguccggaacauccccucccgcaucagcaucuacuggaccaucgugaagcccggcgacauccugcucaucaacuccaccgggaaccugaucgccccgcggggcuacuucaagauccgcagcgggaaguccagcaucaugcgguccgacgcccccaucggcaagugcaacagcgagugcaucacccccaacggcuccauccccaacgacaagccguuccagaacgugaaccgcaucacguacggggcgugcccccgguacgucaagcagagcacccugaagcucgccaccggcaugcgcaacgugcccgagaagcagacccgggggaucuucggcgccaucgccggguucaucgagaacggcugggagggcaugguggacgggugguacggcuuccgccaccagaacuccgaggggcggggccaggccgcggaccugaaguccacgcaggccgccaucgaccagaucaacgggaagcugaaccgccucaucggcaagaccaacgagaaguuccaccagaucgagaaggaguucuccgaggucgagggccggauccaggaccuggagaaguacguggaggacaccaagaucgaccuguggagcuacaacgccgagcuccugguggcccuggagaaccagcacaccaucgaccucacggacuccgagaugaacaagcuguucgagaagaccaagaagcagcugcgcgagaacgcggaggacauggggaacggcugcuucaccaucuaccacaagugcgacaacgccugcaucgggagcauccgcaacggcaccuacgaccacaacgucuaccgggacgaggcccucaacaaccgcuuccagaucaaggggaucgagcugaaguccggcuacaaggacuggauccuguggaucagcuucgccaucuccugcuuccuccugugcguggcccugcucggcuucaucaugugggcgugccagaaggggaacauccggugcaacaucugcaucuga

SEQ ID NO: 76696 - RNA, 1701 nt, Artificial Sequence; identical to SEQ ID NO: 76104
  derived and/or modified CDS sequence (opt1) from hemagglutinin__InfluenzaA__AIL94883

SEQ ID NO: 76697 - RNA, 1701 nt, Artificial Sequence; identical to SEQ ID NO: 76089
  derived and/or modified CDS sequence (opt1) from hemagglutinin__InfluenzaA__AIL94894

SEQ ID NO: 76698 - RNA, 1701 nt, Artificial Sequence; identical to SEQ ID NO: 73882
  derived and/or modified CDS sequence (opt1) from hemagglutinin__InfluenzaA__AIL94906

SEQ ID NO: 76699 - RNA, 1701 nt, Artificial Sequence; identical to SEQ ID NO: 74018
  derived and/or modified CDS sequence (opt1) from hemagglutinin__InfluenzaA__AIL94918

SEQ ID NO: 76700 - RNA, 1701 nt, Artificial Sequence; identical to SEQ ID NO: 74018
  derived and/or modified CDS sequence (opt1) from hemagglutinin__InfluenzaA__AIL94930

SEQ ID NO: 76701 - RNA, 1701 nt, Artificial Sequence; identical to SEQ ID NO: 74018
  derived and/or modified CDS sequence (opt1) from hemagglutinin__InfluenzaA__AIL94942

SEQ ID NO: 76702 - RNA, 1701 nt, Artificial Sequence; identical to SEQ ID NO: 74064
  derived and/or modified CDS sequence (opt1) from hemagglutinin__InfluenzaA__AIL94954

SEQ ID NO: 76703 - RNA, 1701 nt, Artificial Sequence; identical to SEQ ID NO: 73882
  derived and/or modified CDS sequence (opt1) from hemagglutinin__InfluenzaA__AIL94965

SEQ ID NO: 76704 - RNA, 1701 nt, Artificial Sequence
  derived and/or modified CDS sequence (opt1) from hemagglutinin__InfluenzaA__AIM55837
augaaggccauccuggugguccuccuguacaccuucgccaccgcgacggccgacacccugugcaucggcuaccacgccaacaacagcaccgacaccguggacacggugcucgagaagaacgucaccgugacccacuccgugaaccugcuggaggacaagcacaacgggaagcucugcaagcugcgcggcgucgcgccccugcaccucgggaagugcaacaucgccggcuggauccuggggaacccggagugcgagagccuguccaccgccagcuccuggagcuacaucguggagacguccagcuccgacaacgggaccugcuaccccggcgacuucaucaacuacgaggagcuccgggagcagcugagcuccgugagcuccuucgagcgcuucgagaucuuccccaagaccagcuccuggcccaaccacgacagcaacaagggcgucaccgccgccugcccgcacgccggcgcgaaguccuucuacaagaaccugaucuggcucgugaagaaggggaacagcuaccccaagcugucccagagcuacaucaacgacaagggcaaggaggugcugguccucugggggauccaccaccccagcacgaccgccgaccagcagucccuguaccagaacgccgacgccuacguguucgugggcaccagccgguacuccaagaaguucaagcccgagaucgccauccgcccgaagguccgggaccaggagggccgcaugaacuacuacuggacccugguggagcccggggacaagaucacguucgaggcgaccggcaaccucguggucccccgguacgccuucaccauggagcgcaacgccgggagcggcaucaucaucuccgacacccccgugcacgacugcaacacgaccugccagaccccggagggcgccaucaacaccagccugcccuuccagaacauccaccccaucacgaucgggaagugccccaaguacgugaaguccaccaagcugagccucgccaccggccugcggaacgucccguccauccagagccgcgggcuguucggcgcgaucgccggguucaucgagggcggcuggaccgggaugguggacggcugguacggguaccaccaccagaacgagcagggcuccggguacgccgccgaccucaagagcacgcagaacgccaucgacaagaucaccaacaaggugaacuccgucaucgagaagaugaacacccaguucaccgcggugggcaaggaguucaaccaccuggagaagcggaucgagaaccugaacaagaaggucgacgacggcuuccucgacaucuggacguacaacgccgagcugcuggugcuccuggagaacgagcgcacccuggacuaccacgacagcaacgugaagaaccucuacgagaagguccggaaccagcugaagaacaacgccaaggagaucgggaacggcugcuucgaguucuaccacaagugcgacaacacgugcauggaguccgugaagaacgggaccuacgacuaccccaaguacagcgaggaggccaagcugaaccgcgagaagaucgacggcgugaagcucgaguccacccggaucuaccagauccuggccaucuacagcaccgucgcguccagccuggugcucguggucagccugggggccaucuccuucuggaugugcagcaacggcucccugcagugccgcaucugcaucuga

SEQ ID NO: 76705 - RNA, 1701 nt, Artificial Sequence
  derived and/or modified CDS sequence (opt1) from hemagglutinin__InfluenzaA__AIM55848
augaaggccauccuggugguccuccuguacaccuucgccaccgcgaacgccgacacgcugugcaucggcuaccacgccaacaacagcaccgacaccguggacaccgugcucgagaagaacgucacggugacccacuccgugaaccugcuggaggacaagcacaacgggaagcucugcaagcugcgcggcgucgcgccccugcaccucgggaagugcaacaucgccggcuggauccuggggaacccggagugcgagagccuguccaccgccagcuccuggagcuacaucguggagaccuccagcuccgacaacggcacgugcuaccccggcgacuucaucaacuacgaggagcuccgggagcagcugagcuccgugagcuccuucgagcgcuucgagaucuuccccaagaccagcuccuggcccaaccacgacagcaacaagggggucaccgccgccugcccgcacgccggcgcgaaguccuucuacaagaaccugaucuggcucgugaagaaggggaacagcuaccccaagcugucccagagcuacaucaacgacaagggcaaggaggugcugguccucugggggauccaccaccccagcaccacggccgaccagcagucccuguaccagaacgccgacgccuacguguucgugggcaccagccgguacuccaagaaguucaagcccgagaucgccauccgcccgaagguccgggaccaggagggccgcaugaacuacuacuggacccugguggagcccggggacaagaucaccuucgaggcgacgggcaaccucguggucccccgguacgccuucaccauggagcgcaacgccgggagcggcaucaucaucuccgacacccccgugcacgacugcaacaccacgugccagaccccggagggcgccaucaacaccagccugcccuuccagaacauccaccccaucaccaucgggaagugccccaaguacgugaaguccacgaagcugcggcucgccaccggccugcgcaacaucccgagcauccagucccgggggcuguucggcgcgaucgccggguucaucgagggcggcuggaccgggauggucgacggcugguacggguaccaccaccagaacgagcagggcagcggguacgccgccgaccucaaguccacccagaacgccaucgacaagaucacgaacaaggugaacagcgugaucgagaagaugaacacccaguucaccgcggucggcaaggaguucaaccaccuggagaagcgcaucgagaaccugaacaagaagguggacgacggcuuccucgacaucuggaccuacaacacggagcugcugguccuccuggagaacgagcggacccuggacuaccacgacuccaacgugaagaaccucuacgagaaggugcgcaaccagcugaagaacaacgccaaggagaucgggaacggcugcuucgaguucuaccacaagugcgacaacacgugcauggagagcgucaagaacgggaccuacgacuaccccaaguacuccgaggaggccaagcugaaccgggagaagaucgacggcgugaagcucgagagcacccgcaucuaccagauccuggccaucuacuccaccguggccagcucccugguccucguggugagccugggggcgaucagcuucuggaugugcuccaacggcagccugcagugccggaucugcaucuga

SEQ ID NO: 76706 - RNA, 1701 nt, Artificial Sequence; identical to SEQ ID NO: 74064
  derived and/or modified CDS sequence (opt1) from hemagglutinin__InfluenzaA__AIM55859

SEQ ID NO: 76707 - RNA, 1701 nt, Artificial Sequence; identical to SEQ ID NO: 74064
  derived and/or modified CDS sequence (opt1) from hemagglutinin__InfluenzaA__AIM55870

SEQ ID NO: 76708 - RNA, 1701 nt, Artificial Sequence; identical to SEQ ID NO: 74064
  derived and/or modified CDS sequence (opt1) from hemagglutinin__InfluenzaA__AIM55881

SEQ ID NO: 76709 - RNA, 1701 nt, Artificial Sequence; identical to SEQ ID NO: 75926
  derived and/or modified CDS sequence (opt1) from hemagglutinin__InfluenzaA__AIM55893

SEQ ID NO: 76710 - RNA, 1701 nt, Artificial Sequence; identical to SEQ ID NO: 75045
  derived and/or modified CDS sequence (opt1) from hemagglutinin__InfluenzaA__AIM55904

SEQ ID NO: 76711 - RNA, 1701 nt, Artificial Sequence; identical to SEQ ID NO: 74064
  derived and/or modified CDS sequence (opt1) from hemagglutinin__InfluenzaA__AIM55915

SEQ ID NO: 76712 - RNA, 1710 nt, Artificial Sequence
  derived and/or modified CDS sequence (opt1) from hemagglutinin__InfluenzaA__AIM55926
augaaggccauccuggugguccuccuguacaccuucgccaccacgaacgcggacacccugugcaucggcuaccacgccaacaacagcaccgacaccguggacacggugcucgagaagaacgucaccgugacccacuccgugaaccugcuggaggacaagcacaacgggaagcucugcaagcugcgcggcgucgcgccccugcaccucgggaagugcaacaucgccggcuggauccuggggaacccggagugcgagagccuguccaccgccagcuccuggagcuacaucguggagacguccagcuccgacaacgggaccugcuaccccggcgacuucaucaacuacgaggagcuccgggagcagcugagcuccgugagcuccuucgagcgcuucgagaucuuccccaagaccagcuccuggcccaaccacgacagcaacaagggggucaccgccgccugcccgcacgccggcgccaaguccuucuacaagaaccugaucuggcucgugaagaaggggaacagcuaccccaagcugucccagagcuacaucaacgacaagggcaaggaggugcugguccucugggggauccaccaccccagcacgaccgcggaccagcagucccuguaccagaacgccgacgccuacguguucgugggcaccagccgguacuccaagaaguucaagcccgagaucgccauccgcccgaagguccgggaccaggagggccgcaugaacuacuacuggacccugguggagcccggggacaagaucacguucgaggccaccggcaaccucguggucccccgguacgcguucaccauggagcgcaacgccgggagcggcaucaucaucuccgacacccccgugcacgacugcaacacgaccugccagaccccggagggcgccaucaacaccagccugacgucccugcccuuccagaacauccaccccaucaccaucgggaagugccccaaguacgucaagagcaccaagcuccggcuggccaccggccugcgcaacgugccguccauccagagccggggccucuucggcgccaucgcgggguucaucgagggcggcuggacggggaugguggacggcugguacggguaccaccaccagaacgagcagggcuccggguacgccgccgaccucaagagcacccagaacgccaucgacaagaucaccaacaaggugaacuccgucaucgagaagaugaacacccaguucacggccgugggcaaggaguucaaccaccuggagaagcgcaucgagaaccugaacaagaaggucgacgacggcuuccuggacaucuggaccuacaacgcggagcugcucgugcugcuggagaacgagcggacccucgacuaccacgacagcaacgugaagaaccuguacgagaagguccgcaaccagcugaagaacaacgccaaggagaucgggaacggcugcuucgaguucuaccacaagugcgacaacacgugcauggaguccgugaagaacgggaccuacgacuaccccaaguacagcgaggaggccaagcucaaccgggagaagaucgacggcgugaagcuggaguccacccgcaucuaccagauccuggccaucuacagcaccgucgccuccagccucgugcugguggucagccugggggcgaucuccuucuggaugugcagcaacggcucccuccagugccggaucugcaucuga

SEQ ID NO: 76713 - RNA, 1701 nt, Artificial Sequence; identical to SEQ ID NO: 74064
  derived and/or modified CDS sequence (opt1) from hemagglutinin__InfluenzaA__AIM55937

SEQ ID NO: 76714 - RNA, 1701 nt, Artificial Sequence; identical to SEQ ID NO: 75045
  derived and/or modified CDS sequence (opt1) from hemagglutinin__InfluenzaA__AIM55948

SEQ ID NO: 76715 - RNA, 1701 nt, Artificial Sequence; identical to SEQ ID NO: 75027
  derived and/or modified CDS sequence (opt1) from hemagglutinin__InfluenzaA__AIM55962

SEQ ID NO: 76716 - RNA, 1701 nt, Artificial Sequence; identical to SEQ ID NO: 75045
  derived and/or modified CDS sequence (opt1) from hemagglutinin__InfluenzaA__AIM55984

SEQ ID NO: 76717 - RNA, 1701 nt, Artificial Sequence; identical to SEQ ID NO: 75926
  derived and/or modified CDS sequence (opt1) from hemagglutinin__InfluenzaA__AIM55995

SEQ ID NO: 76718 - RNA, 1701 nt, Artificial Sequence
  derived and/or modified CDS sequence (opt1) from hemagglutinin__InfluenzaA__AIM56017
augaaggccauccuggugguccuccuguacaccuucgccaccacgaacgcggacacccugugcaucggcuaccacgccaacaacagcaccgacaccguggacacggugcucgagaagaacgucaccgugacccacuccgugaaccugcuggaggacaagcacaacgggaagcucugcaagcugcgcggcgucgcgccccugcaccucgggaagugcaacaucgccggcuggauccuggggaacccggagugcgagagccuguccaccgccagcuccuggagcuacaucguggagacguccagcuccgacaacgggaccugcuaccccggcgacuucaucaacuacgaggagcuccgggagcagcugagcuccgugagcuccuucgagcgcuucgagaucuuccccaagaccagcuccuggcccaaccacgacagcaacaagggcgucaccgccgccugcccgcacgccggcgccaaguccuucuacaagaaccugaucuggcucgugaagaaggggcacagcuaccccaagcugucccagagcuacaucaacgacaagggcaaggaggugcugguccucugggggauccaccaccccagcacgaccgcggaccagcagucccuguaccagaacgccgacgccuacguguucgugggcaccagccgguacuccaagaaguucaagcccgagaucgccauccgcccgaagguccgggaccaggagggccgcaugaacuacuacuggacccugguggagcccggggacaagaucacguucgaggccaccggcaaccucguggucccccgguacgcguucaccauggagcgcaacgccgggagcggcaucaucaucuccgacacccccgugcacgacugcaacacgaccugccagaccccggagggcgccaucaacaccagccugcccuuccagaacauccaccccaucacgaucgggaagugccccaaguacgugaaguccaccaagcugcggcucgccaccggccugcgcaacgucccgagcauccagucccgggggcuguucggcgccaucgcgggguucaucgagggcggcuggaccgggaugguggacggcugguacggguaccaccaccagaacgagcagggcagcggguacgccgccgaccucaaguccacgcagaacgccaucgacaagaucaccaacaaggugaacagcgucaucgagaagaugaacacccaguucaccgccgugggcaaggaguucaaccaccuggagaagcgcaucgagaaccugaacaagaaggucgacgacggcuuccucgacaucuggacguacaacgcggagcugcuggugcuccuggagaacgagcggacccuggacuaccacgacuccaacgugaagaaccucuacgagaagguccgcaaccagcugaagaacaacgccaaggagaucgggaacggcugcuucgaguucuaccacaagugcgacaacacgugcauggagagcgugaagaacgggaccuacgacuaccccaaguacuccgaggaggccaagcugaaccgggagaagaucgacggcgugaagcucgagagcacccgcaucuaccagauccuggccaucuacuccaccgucgccagcucccuggugcucguggucagccugggggcgaucagcuucuggaugugcuccaacggcagccugcagugccggaucugcaucuga

SEQ ID NO: 76719 - RNA, 1701 nt, Artificial Sequence; identical to SEQ ID NO: 76718
  derived and/or modified CDS sequence (opt1) from hemagglutinin__InfluenzaA__AIM56028

SEQ ID NO: 76720 - RNA, 1701 nt, Artificial Sequence
  derived and/or modified CDS sequence (opt1) from hemagglutinin__InfluenzaA__AIM56039
augaaggccauccuggugguccuccuguaccccuucgccaccgcgaacgccgacacccugugcaucggcuaccacgccaacaacagcacggacaccguggacaccgugcucgagaagaacgucaccgugacgcacuccgugaaccugcuggaggacaagcacaacgggaagcucugcaagcugcgcggcgucgccccgcugcaccucgggaagugcaacaucgccggcuggauccuggggaaccccgagugcgagagccuguccaccgcgagcuccuggagcuacaucguggaggccuccagcuccgacaacgggaccugcuaccccggcgacuucaucaacuacgaggagcuccgggagcagcugagcuccgugagcuccuucgagcgcuucgagaucuuccccaagaccagcuccuggccgaaccacgacagcaacaagggcgucacggccgccugcccccacgcgggcgccaaguccuucuacaagaaccugaucuggcucgugaagaaggggaacagcuaccccaagcugucccagagcuacaucaacgacaagggcaaggaggugcugguccucugggggauccaccaccccagcaccaccgccgaccagcagucccuguaccagaacgccgacgccuacguguucgugggcaccagccgguacuccaagaaguucaagccggagaucgcgauccgccccaagguccgggaccaggagggccgcaugaacuacuacuggacgcugguggagcccggggacaagaucaccuucgaggccaccggcaaccucguggucccccgguacgccuucaccauggagcgcaacgccgggagcggcaucaucaucuccgacacgccggugcacgacugcaacacgaccugccagacccccgagggcgccaucaacaccagccugcccuuccagaacauccaccccaucaccaucgggaagugcccgaaguacgugaaguccaccaagcugcggcucgcgaccggccugcgcaacguccccagcauccagucccgggggcuguucggcgccaucgccggguucaucgagggcggcuggacggggaugguggacggcugguacggguaccaccaccagaacgagcagggcagcggguacgccgccgaccucaaguccacccagaacgcgaucgacaagaucaccaacaaggugaacagcgucaucgagaagaugaacacccaguucacggccgugggcaaggaguucaaccaccuggagaagcgcaucgagaaccugaacaagaaggucgacgacggcuuccucgacaucuggaccuacaacgccgagcugcuggugcuccuggagaacgagcggacccuggacuaccacgacuccaacgugaagaaccucuacgagaagguccgcaaccagcugaagaacaacgccaaggagaucgggaacggcugcuucgaguucuaccacaagugcgacaacacgugcauggagagcgugaagaacgggaccuacgacuaccccaaguacuccgaggaggccaagcugaaccgggagaagaucgacggcgugaagcucgagagcacccgcaucuaccagauccuggcgaucuacuccaccgucgccagcucccuggugcucguggucagccugggggccaucagcuucuggaugugcuccaacggcagccugcagugccggaucugcaucuga

SEQ ID NO: 76721 - RNA, 1701 nt, Artificial Sequence
  derived and/or modified CDS sequence (opt1) from hemagglutinin__InfluenzaA__AIM56050
augaaggccauccuggugguccuccuguacaccuucgccaccacgaacgcggacacccugugcaucggcuaccacgccaacaacagcaccgacaccguggacacggugcucgagaagaacgucaccgugacccacuccgugaaccugcuggaggacaagcacaacgggaagcucugcaagcugcgcggcgucgcgccccugcaccucgggaagugcaacaucgccggcuggauccuggggaacccggagugcgagagccuguccaccgccagcuccuggagcuacaucguggagacguccagcuccgacaacgggaccugcuaccccggcgacuucaucaacuacgaggagcuccgggagcagcugagcuccgugagcuccuucgagcgcuucgagaucuuccccaagaccagcuccuggcccaaccacgacagcaacaagggcgucaccgccgccugcccgcacgccggcgccaaguccuucuacaagaaccugaucuggcucgugaagaaggggaacagcuaccccaagcugucccagagcuacaucaacgacaagggcaaggaggugcugguccucugggggauccaccaccccagcacgaccgcggaccagcagucccuguaccagaacgccgacgccuacguguucgugggcaccagccgguacuccaagaaguucaagcccgagaucgccauccgcccgaagguccgggaccaggagggccgcaugaacuacuacuggacccugguggagcccggggacaagaucacguucgaggccaccggcaaccucguggucccccgguacgcguucaccauggagcgcaacgccgggagcggcaucaucaucuccgacacccccgugcacgacugcaacacgaccugccagaccccggagggcgccaucaacaccagccugcccuuccagaacauccaccccaucacgaucgggaagugccccaaguacgugaaguccaccaagcugcggcucgccaccggccugcgcaacgucccgagcauccagucccgggggcuguucggcgccaucgcgggguucaucgagggcggcuggaccgggaugguggacggcugguacggguaccaccaccagaacgagcagggcagcggguacgccgccgaccucaaguccacgcagaacgccaucgacaagaucaccaacaaggugaacagcgucaucgagaagaugaacacccaguucaccgccgugggcaaggaguucaaccaccuggagaagcgcaucgagaaccugaacaagaaggucgacgacggcuuccucgacaucuggacguacaacgcggagcugcuggugcuccuggagaacgagcggacccuggacuaccacgacuccaacgugaagaaccucuacgagaagguccgcaaccagcugaagaacaacgccaaggagaucgggaacggcugcuucgaguucuaccacaagugcgacaacacgugcauggagagcgugaagaacgggaccuacgacuaccccaaguacuccgaggaggccaagcugaaccggggcaagaucgacggggugaagcucgagagcacccgcaucuaccagauccuggccaucuacuccaccgucgccagcucccuggugcucguggucagccugggcgcgaucagcuucuggaugugcuccaacggcagccugcagugccggaucugcaucuga

SEQ ID NO: 76722 - RNA, 1701 nt, Artificial Sequence; identical to SEQ ID NO: 74064
  derived and/or modified CDS sequence (opt1) from hemagglutinin__InfluenzaA__AIM56061

SEQ ID NO: 76723 - RNA, 1701 nt, Artificial Sequence; identical to SEQ ID NO: 74064
  derived and/or modified CDS sequence (opt1) from hemagglutinin__InfluenzaA__AIM56072

SEQ ID NO: 76724 - RNA, 1701 nt, Artificial Sequence; identical to SEQ ID NO: 75917
  derived and/or modified CDS sequence (opt1) from hemagglutinin__InfluenzaA__AIM56083

SEQ ID NO: 76725 - RNA, 1701 nt, Artificial Sequence; identical to SEQ ID NO: 74064
  derived and/or modified CDS sequence (opt1) from hemagglutinin__InfluenzaA__AIM56105

SEQ ID NO: 76726 - RNA, 1701 nt, Artificial Sequence; identical to SEQ ID NO: 74064
  derived and/or modified CDS sequence (opt1) from hemagglutinin__InfluenzaA__AIM56116

SEQ ID NO: 76727 - RNA, 1701 nt, Artificial Sequence
  derived and/or modified CDS sequence (opt1) from hemagglutinin__InfluenzaA__AIM56127
augaaggccauccuggugguccuccuguacaccuucgccaccgcgaacgccgacacgcugugcaucggcuaccacgccaacaacagcaccgacaccguggacaccgugcucgagaagaacgucacggugacccacuccgugaaccugcuggaggacaagcacaacgggaagcucugcaagcugcgcggcgucgcgccccugcaccucgggaagugcaacaucgccggcuggauccuggggaacccggagugcgagagccuguccaccgccagcuccuggagcuacaucguggagaccuccagcuccgacaacggcacgugcuaccccggcgacuucaucaacuacgaggagcuccgggagcagcugagcuccgugagcuccuucgagcgcuucgagaucuuccccaaggccagcuccuggcccaaccacgacagcaacaagggggucaccgccgccugcccgcacgcgggcgccaaguccuucuacaagaaccugaucuggcucgugaagaaggggaacagcuaccccaagcugucccagagcuacaucaacgacaagggcaaggaggugcugguccucugggggauccaccaccccagcaccaccgccgaccagcagucccuguaccagaacgccgacgccuacguguucgugggcacgagccgguacuccaagaaguucaagcccgagaucgcgauccgcccgaagguccgggaccaggagggccgcaugaacuacuacuggacccugguggagcccggggacaagaucaccuucgaggccaccggcaaccucguggucccccgguacgccuucacgauggagcgcaacgccgggagcggcaucaucaucuccgacacccccgugcacgacugcaacacgaccugccagaccccggagggcgccaucaacaccagccugcccuuccagaacauccaccccaucaccaucgggaagugccccaaguacgugaaguccaccaagcugcggcucgcgacgggccugcgcaacaucccgagcauccagucccgggggcuguucggcgccaucgccggguucaucgagggcggcuggaccgggauggucgacggcugguacggguaccaccaccagaacgagcagggcagcggguacgccgccgaccucaaguccacccagaacgcgaucgacaagaucaccaacaaggugaacagcgugaucgagaagaugaacacgcaguucaccgccgucggcaaggaguucaaccaccuggagaagcgcaucgagaaccugaacaagaagguggacgacggcuuccucgacaucuggaccuacaacgccgagcugcugguccuccuggagaacgagcggacccuggacuaccacgacuccaacgugaagaaccucuacgagaaggugcgcaaccagcugaagaacaacgccaaggagaucgggaacggcugcuucgaguucuaccacaagugcgacaacacgugcauggagagcgucaagaacgggaccuacgacuaccccaaguacuccgaggaggccaagcugaaccgggagaagaucgacggcgugaagcucgagagcacccgcaucuaccagauccuggcgaucuacuccaccguggccagcucccugguccucguggugagccugggggccaucagcuucuggaugugcuccaacggcagccugcagugccggaucugcaucuga

SEQ ID NO: 76728 - RNA, 1701 nt, Artificial Sequence; identical to SEQ ID NO: 74064
  derived and/or modified CDS sequence (opt1) from hemagglutinin__InfluenzaA__AIM56138

SEQ ID NO: 76729 - RNA, 1701 nt, Artificial Sequence; identical to SEQ ID NO: 74064
  derived and/or modified CDS sequence (opt1) from hemagglutinin__InfluenzaA__AIM56149

SEQ ID NO: 76730 - RNA, 1701 nt, Artificial Sequence; identical to SEQ ID NO: 75917
  derived and/or modified CDS sequence (opt1) from hemagglutinin__InfluenzaA__AIM56160

SEQ ID NO: 76731 - RNA, 1701 nt, Artificial Sequence; identical to SEQ ID NO: 74064
  derived and/or modified CDS sequence (opt1) from hemagglutinin__InfluenzaA__AIM56171

SEQ ID NO: 76732 - RNA, 1701 nt, Artificial Sequence
  derived and/or modified CDS sequence (opt1) from hemagglutinin__InfluenzaA__AIM56182
augaaggccauccuggugguccuccuguacaccuucgccaccgcgaacgccgacacgcugugcaucggcuaccacgccaacaacagcaccgacaccguggacaccgugcucgagaagaacgucacggugacccacuccgugaaccugcuggaggacaagcacaacgggaagcucugcaagcugcgcggcgucgcgccccugcaccucgggaagugcaacaucgccggcuggauccuggggaacccggagugcgagagccuguccaccgccagcuccuggagcuacaucguggagaccuccagcuccgacaacggcacgugcuaccccggcgacuucaucaacuacgaggagcuccgggagcagcugagcuccgugagcuccuucgagcgcuucgagaucuuccccaaggccagcuccuggcccaaccacgacagcaacaagggggucaccgccgccugcccgcacgcgggcgccaaguccuucuacaagaaccugaucuggcucgugaagaaggggaacagcuaccccaagcugucccagagcuacaucaacgacaagggcaaggaggugcugguccucugggggauccaccaccccagcaccaccgccgaccagcagucccuguaccagaacgccgacgccuacguguucgugggcacgagccgguacuccaagaaguucaagcccgagaucgcgauccgcccgaagguccgggaccaggagggccgcaugaacuacuacuggacccugguggagcccggggacaagaucaccuucgaggccaccggcaaccucguggucccccgguacgccuucacgauggagcgcaacgccgggagcggcaucaucaucuccgacacccccgugcacgacugcaacacgaccugccagaccccggagggcgccaucaacaccagccugcccuuccagaacauccaccccaucaccaucgggaagugccccaaguacgugaaguccaccaagcugcggcucgcgacgggccugcgcaacaucccgagcauccagucccgggggcuguucggcgccaucgccggguucaucgagggcggcuggaccgggauggucgacggcugguacggguaccaccaccagaacgagcagggcagcggguacgccgccgaccucaaguccacccagaacgcgaucgacaagaucaccaacaaggugaacagcgugaucgagaagaugaacacgcaguucaccgccgucggcaaggaguucaaccaccuggagaagcgcaucgagaaccugaacaagaagguggacgacggcuuccucgacaucuggaccuacaacgccgagcugcugguccuccuggagaacgagcggacccuggacuaccacgacuccaacgugaagaaccucuacgagaaggugcgcaaccagcugaagaacaacgccaaggagaucgggaacggcugcuucgaguucuaccacaagugcgacaacacgugcauggagagcgucaagaacgggaccuacgacuaccccaaguacuccgaggaggccaagcugaacaaggagaagaucgacggcgugaagcucgagagcacccggaucuaccagauccuggcgaucuacuccaccguggccagcucccugguccucguggugagccugggggccaucagcuucuggaugugcuccaacggcagccugcagugccgcaucugcaucuga

SEQ ID NO: 76733 - RNA, 1701 nt, Artificial Sequence
  derived and/or modified CDS sequence (opt1) from hemagglutinin__InfluenzaA__AIM56193
augaaggccauccuggugguccuccuguacaccuucgccaccgcgaacgccgacacgcugugcaucggcuaccacgccaacaacagcaccgacaccguggacaccgugcucgagaagaacgucacggugacccacuccgugaaccugcuggaggacaagcacaacgggaagcucugcaagcugcgcggcgucgcgccccugcaccucgggaagugcaacaucgccggcuggauccuggggaacccggagugcgagagccuguccaccgccagcuccuggagcuacaucguggagaccuccagcuccgacaacggcacgugcuaccccggcgacuucaucaacuacgaggagcuccgggagcagcugagcuccgugagcuccuucgagcgcuucgagaucuuccccaagaccagcuccuggcccaaccacgacagcaacaagggggucaccgccgccugcccgcacgccggcgcgaaguccuucuacaagaaccugaucuggcucgugaagaaggggaacagcuaccccaagcugucccagagcuacaucaacgacaagggcaaggaggugcugguccucugggggauccaccaccccagcaccacggccgaccagcagucccuguaccagaacgccgacgccuacguguucgugggcaccagccgguacuccaagaaguucaagcccgagaucgccauccgcccgaagguccgggaccaggagggccgcaugaacuacuacuggacccugguggagcccggggacaaggugaccuucgaggcgacgggcaaccucgucgugccccgguacgccuucaccauggagcgcaacgccgggagcggcaucaucaucuccgacacccccgugcacgacugcaacaccacgugccagaccccggagggcgccaucaacaccagccugcccuuccagaacauccaccccaucaccaucgggaagugccccaaguacgucaaguccacgaagcugcggcucgccaccggccugcgcaacgugccgagcauccagucccgggggcuguucggcgcgaucgccggguucaucgagggcggcuggaccgggaugguggacggcugguacggguaccaccaccagaacgagcagggcagcggguacgccgccgaccucaaguccacccagaacgccaucgacaagaucacgaacaaggucaacagcgugaucgagaagaugaacacccaguucaccgcggucggcaaggaguucaaccaccuggagaagcgcaucgagaaccugaacaagaagguggacgacggcuuccucgacaucuggaccuacaacgccgagcugcuggugcuccuggagaacgagcggacgcuggacuaccacgacuccaacgucaagaaccucuacgagaaggugcgcaaccagcugaagaacaacgccaaggagaucgggaacggcugcuucgaguucuaccacaagugcgacaacacgugcauggagagcgugaagaacgggaccuacgacuaccccaaguacuccgaggaggccaagcugaaccgggagaagaucgacggcgucaagcucgagagcacccgcaucuaccagauccuggccaucuacuccaccguggcgagcucccuggugcucgucgugagccugggggccaucagcuucuggaugugcuccaacggcagccugcagugccggaucugcaucuga

SEQ ID NO: 76734 - RNA, 1701 nt, Artificial Sequence; identical to SEQ ID NO: 74064
  derived and/or modified CDS sequence (opt1) from hemagglutinin__InfluenzaA__AIM56204

SEQ ID NO: 76735 - RNA, 1701 nt, Artificial Sequence; identical to SEQ ID NO: 74064
  derived and/or modified CDS sequence (opt1) from hemagglutinin__InfluenzaA__AIM56215

SEQ ID NO: 76736 - RNA, 1701 nt, Artificial Sequence; identical to SEQ ID NO: 74064
  derived and/or modified CDS sequence (opt1) from hemagglutinin__InfluenzaA__AIM56226

SEQ ID NO: 76737 - RNA, 1701 nt, Artificial Sequence; identical to SEQ ID NO: 76475
  derived and/or modified CDS sequence (opt1) from hemagglutinin__InfluenzaA__AIM56237

SEQ ID NO: 76738 - RNA, 1701 nt, Artificial Sequence; identical to SEQ ID NO: 74064
  derived and/or modified CDS sequence (opt1) from hemagglutinin__InfluenzaA__AIM56259

SEQ ID NO: 76739 - RNA, 1701 nt, Artificial Sequence
  derived and/or modified CDS sequence (opt1) from hemagglutinin__InfluenzaA__AIM56270
augaaggccauccuggugguccuccuguacaccuucgccaccgcgaacgccgacacgcugugcaucggcuaccacgccaacaacagcaccgacaccguggacaccgugcucgagaagaacgucacggugacccacuccgugaaccugcuggaggacaagcacaacgggaagcucugcaagcugcgcggcgucgcgccccugcaccucgggaagugcaacaucgccggcuggauccuggggaacccggagugcgagagccuguccaccgccagcuccuggagcuacaucguggagaccuccagcuccgacaacggcacgugcuaccccggcgacuucaucaacuacgaggagcuccgggagcagcugagcuccgugagcuccuucgagcgcuucgagaucuuccccaagaccagcuccuggcccaaccacgacagcaacaagggggucaccgccgccugcccgcacgccggcgcgaaguccuucuacaagaaccugaucuggcucgugaagaaggggaacagcuaccccaagcugucccagagcuacaucaacgacaagggcaaggaggugcugguccucugggggauccaccaccccagcaccacggccgaccagcagucccuguaccagaacgccgacgccuacguguucgugggcaccagccgguacuccaagaaguucaagcccgagaucgccauccgcccgaagguccgggaccaggagggccgcaugaacuacuacuggacccugguggagcccggggacaagaucaccuucgaggcgacgggcaaccucguggucccccgguacgccuucaccauggagcgcaacgccgggagcggcaucaucaucuccgacacccccgugcacgacugcaacaccacgugccagaccccggagggcgccgugaacaccagccugcccuuccagaacauccaccccaucaccaucgggaagugccccaaguacgucaaguccacgaagcugcggcucgccaccggccugcgcaacgugccgagcauccagucccgggggcuguucggcgcgaucgccggguucaucgagggcggcuggaccgggaugguggacggcugguacggguaccaccaccagaacgagcagggcagcggguacgccgccgaccucaaguccacccagaacgccaucgacaagaucacgaacaaggucaacagcgugaucgagaagaugaacacccaguucaccgcggucggcaaggaguucaaccaccuggagaagcgcaucgagaaccugaacaagaagguggacgacggcuuccucgacaucuggaccuacaacgccgagcugcuggugcuccuggagaacgagcggacgcuggacuaccacgacuccaacgucaagaaccucuacgagaaggugcgcaaccagcugaagaacaacgccaaggagaucgggaacggcugcuucgaguucuaccacaagugcgacaacacgugcauggagagcgugaagaacgggaccuacgacuaccccaaguacuccgaggaggccaagcugaaccgggagaagaucgacggcgucaagcucgagagcacccgcaucuaccagauccuggccaucuacuccaccguggcgagcucccuggugcucgucgugagccugggggccaucagcuucuggaugugcuccaacggcagccugcagugccggaucugcaucuga

SEQ ID NO: 76740 - RNA, 1701 nt, Artificial Sequence; identical to SEQ ID NO: 74064
  derived and/or modified CDS sequence (opt1) from hemagglutinin__InfluenzaA__AIM56281

SEQ ID NO: 76741 - RNA, 1701 nt, Artificial Sequence
  derived and/or modified CDS sequence (opt1) from hemagglutinin__InfluenzaA__AIM56292
augaaggccauccuggugguccuccuguacacccuggccaccgcgaacgccgacacgcucugcaucggcuaccacgccaacaacagcaccgacaccguggacaccgugcuggagaagaacgucacggugacccacuccgugaaccugcucgaggacaagcacaacgggaagcugugcaagcugcgcggcgucgcgccccuccaccuggggaagugcaacaucgccggcuggauccuggggaacccggagugcgagagccucuccaccgccagcuccuggagcuacaucguggagaccuccagcuccgacaacggcacgugcuaccccggcgacuucaucaacuacgaggagcugcgggagcagcugagcuccgugagcuccuucgagcgcuucgagaucuuccccaagaccagcuccuggcccaaccacgacagcaacaagggggucaccgccgccugcccgcacgccggcgcgaaguccuucuacaagaaccucaucuggcuggugaagaaggggaacagcuaccccaagcugucccagagcuacaucaacgacaagggcaaggagauccucgugcugugggggauccaccaccccagcaccacggccgaccagcagucccuguaccagaacgccgacgccuacgucuucgugggcaccagccgguacuccaagaaguucaagcccgagaucgccauccgcccgaaggugcgggaccaggagggccgcaugaacuacuacuggacccucgucgagcccggggacaagaucaccuucgaggcgacgggcaaccugguggugccccgguacgccuucaccauggagcgcaacgccgggagcggcaucaucaucuccgacacccccguccacgacugcaacaccacgugccagaccccggagggcgccaucaacaccagccugcccuuccagaacauccaccccaucaccaucgggaagugccccaaguacgugaaguccacgaagcuccggcuggccaccggccugcgcaacgugccgagcauccagucccggggccucuucggggcgaucgccggguucaucgagggcggcuggaccgggauggucgacggcugguacggguaccaccaccagaacgagcagggcagcggguacgccgccgaccugaaguccacccagaacgccaucgacaagaucacgaacaaggugaacagcgugaucgagaagaugaacacccaguucaccgcggucggcaaggaguucaaccaccuggagaagcgcaucgagaaccucaacaagaagguggacgacggcuuccuggacaucuggaccuacaacgccgagcugcucguccugcuggagaacgagcggacgcucgacuaccacgacuccaacgugaagaaccuguacgagaaggugcgcaaccagcugaagaacaacgccaaggagaucgggaacggcugcuucgaguucuaccacaagugcgacaacacgugcauggagagcgucaagaacgggaccuacgacuaccccaaguacuccgaggaggccaagcucaaccgggagaagaucgacggcgugaagcuggagagcacccgcaucuaccagauccuggccaucuacuccaccguggcgagcucccucguccugguggugagccugggggccaucagcuucuggaugugcuccaacggcagccuccagugccggaucugcaucuga

SEQ ID NO: 76742 - RNA, 1701 nt, Artificial Sequence
  derived and/or modified CDS sequence (opt1) from hemagglutinin__InfluenzaA__AIM56303
augaaggccauccuggugguccuccuguacacccuggccaccgcgaacgccgacacgcucugcaucggcuaccacgccaacaacagcaccgacaccguggacaccgugcuggagaagaacgucacggugacccacuccgugaaccugcucgaggacaagcacaacgggaagcugugcaagcugcgcggcgucgcgccccuccaccuggggaagugcaacaucgccggcuggauccuggggaacccggagugcgagagccucuccaccgccagcuccuggagcuacaucguggagaccuccagcuccgacaacggcacgugcuaccccggcgacuucaucaacuacgaggagcugcgggagcagcugagcuccgugagcuccuucgagcgcuucgagaucuuccccaagaccagcuccuggcccaaccacgacagcaacaagggggucaccgccgccugcccgcacgccggcgcgaaguccuucuacaagaaccucaucuggcuggugaagaaggggaacagcuaccccaagcugucccagagcuacaucaacgacaagggcaaggaggugcucguccugugggggauccaccaccccagcaccacggccgaccagcagucccuguaccagaacgccgacgccuacguguucgugggcaccagccgguacuccaagaaguucaagcccgagaucgccauccgcccgaagguccgggaccaggagggccgcaugaacuacuacuggacccucguggagcccggggacaagaucaccuucgaggcgacgggcaaccugguggucccccgguacgccuucaccauggagcgcaacgccgggagcggcaucaucaucuccgacacccaggugcacgacugcaacaccacgugccagacccccgagggcgccaucaacaccagccugccguuccagaacauccaccccaucaccaucgggaagugccccaaguacgugaaguccacgaagcuccggcuggccaccggccugcgcaacguccccagcauccagucccggggccucuucggggcgaucgccggguucaucgagggcggcuggaccgggaugguggacggcugguacggguaccaccaccagaacgagcagggcagcggguacgccgccgaccugaaguccacccagaacgccaucgacaagaucacgaacaaggugaacagcgucaucgagaagaugaacacccaguucaccgcggugggcaaggaguucaaccaccuggagaagcgcaucgagaaccucaacaagaaggucgacgacggcuuccuggacaucuggaccuacaacgccgagcugcucgugcugcuggagaacgagcggacgcucgacuaccacgacuccaacgugaagaaccuguacgagaagguccgcaaccagcugaagaacaacgccaaggagaucgggaacggcugcuucgaguucuaccacaagugcgacaacacgugcauggagagcgugaagaacgggaccuacgacuacccgaaguacuccgaggaggccaagcucaaccgggagaagaucgacggcgugaagcuggagagcacccgcaucuaccagauccuggccaucuacuccaccgucgcgagcucccucgugcugguggucagccugggggccaucagcuucuggaugugcuccaacggcagccuccagugccggaucugcaucuga

SEQ ID NO: 76743 - RNA, 1701 nt, Artificial Sequence
  derived and/or modified CDS sequence (opt1) from hemagglutinin__InfluenzaA__AIM56314
augaaggccauccuggugguccuccuguacaccuucgccaccgcgaacgccgacacgcugugcaucggcuaccacgccaacaacagcaccgacaccguggacaccgugcucgagaagaacgucacggugacccacuccgugaaccugcuggaggacaagcacaacgggaagcucugcaagcugcgcggcgucgcgccccugcaccucgggaagugcaacaucgccggcuggauccuggggaacccggagugcgagagccuguccaccgccagcuccuggagcuacaucguggagaccuccagcuccgacaacggcacgugcuaccccggcgacuucaucaacuacgaggagcuccgggagcagcugagcuccgugagcuccuucgagcgcuucgagaucuuccccaagaccagcuccuggcccaaccacgacagcaacaagggggucaccgccgccugcccgcacgccggcgcgaaguccuucuacaagaaccugaucuggcucgugaagaaggggaacagcuaccccaagcugucccagagcuacaucaacgacaagggcaaggaggugcugguccucugggggauccaccaccccagcaccacggccgaccagcagucccuguaccagaacgccgacgccuacguguucgugggcaccagccgguacuccaagaaguucaagcccgagaucgccauccgcccgaagguccgggaccaggagggccgcaugaacuacuacuggacccugguggagcccggggacaagaucaccuucgaggcgacgggcaaccucguggucccccgguacgccuucaccauggagcgcaacgccgggagcggcaucaucaucuccgacacccccgugcacgacugcaacaccacgugccagaccccggagggcgccaucaacaccagccugcccuuccagaacauccaccccaucaccaucgggaagugccccaaguacgugaaguccacgaagcugcggcucgccaccggccugcgcaacgucccgagcauccagucccgggggcuguucggcgcgaucgccggguucaucgagggcggcuggaccgggaugguggacggcugguacggguaccaccaccagaacgagcagggcagcggguacgccgccgaccucaaguccacccagaacgccaucgacaagaucacgaacaaggugaacagcgucaucgagaagaugaacacccaguucaccgcggugggcaaggaguucaaccaccuggagaagcgcaucgagaaccugaacaagaaggucgacgacggcuuccucgacaucuggaccuacaacgccgagcugcuggugcuccuggagaacgagcggacgcuggacuaccacgacuccaacgugaagaagcucuacgagaagguccgcaaccagcugaagaacaacgccaaggagaucgggaacggcugcuucgaguucuaccacaagugcgacaacacgugcauggagagcgugaagaacgggaccuacgacuaccccaaguacuccgaggaggccaagcugaaccgggagaagaucgacggcgugaagcucgagagcacccgcaucuaccagauccuggccaucuacuccaccgucgcgagcucccuggugcucguggucagccugggggccaucagcuucuggaugugcuccaacggcagccugcagugccggaucugcaucuga

SEQ ID NO: 76744 - RNA, 1701 nt, Artificial Sequence; identical to SEQ ID NO: 74064
  derived and/or modified CDS sequence (opt1) from hemagglutinin__InfluenzaA__AIM56325

SEQ ID NO: 76745 - RNA, 1701 nt, Artificial Sequence
  derived and/or modified CDS sequence (opt1) from hemagglutinin__InfluenzaA__AIM56336
augaaggccauccuggugguccuccuguacaccuucgccaccgcgaacgccgacacgcugugcaucggcuaccacgccaacaacagcaccgacaccguggacaccgugcucgagaagaacgucacggugacccacuccgugaaccugcuggaggacaagcacaacgggaagcucugcaagcugcgcggcgucgcgccccugcaccucgggaagugcaacaucgccggcuggauccuggggaacccggagugcgagagccuguccaccgccagcuccuggagcuacaucguggagaccuccagcuccgacaacggcacgugcuaccccggcgacuucaucaacuacgaggagcuccgggagcagcugagcuccgugagcuccuucgagcgcuucgagaucuuccccaagaccagcuccuggcccaaccacgacagcaacaagggggucaccgccgccugcccgcacgccggcgcgaaguccuucuacaagaaccugaucuggcucgugaagaaggggaacagcuaccccaagcugucccagagcuacaucaacgacaagggcaaggaggugcugguccucugggggauccaccaccccagcaccacggccgaccagcagucccuguaccagaacgccgacgccuacguguucgugggcaccagccgguacuccaagaaguucaagcccgagaucgccauccgcccgaagguccgggaccaggagggccgcaugaacuacuacuggacccugguggagcccggggacaagaucaccuucgaggcgacgggcaaccucguggucccccgguacgccuucaccauggagcgcaacgccgggagcggcaucaucaucuccgacacccccgugcacgacugcaacaccacgugccagaccccggagggcgccaucaacaccagccugcccuuccagaacauccaccccaucaccaucgggaagugccccaaguacgugaaguccacgaagcugcggcucgccaccggccugcgcaacaucccgagcauccagucccgggggcuguucggcgcgaucgccggguucaucgagggcggcuggaccgggauggucgacggcugguacggguaccaccaccagaacgagcagggcagcggguacgccgccgaccucaaguccacccagaacgccaucgacaagaucacgaacaaggugaacagcgugaucgagaagaugaacacccaguucaccgcggucggcaaggaguucaaccaccuggagaagcgcaucgagaaccugaacaagaagguggacgacggcuuccucgacaucuggaccuacaacgccgagcugcugguccuccuggagaacgagcggacgcuggacuaccacgacuccaacgugaagaaccucuacgagaagauccgcaaccagcugaagaacaacgccaaggagaucgggaacggcugcuucgaguucuaccacaagugcgacaacaugugcauggagagcgugaagaacgggaccuacgacuaccccaaguacuccgaggaggccaagcugaaccgggagaagaucgacggcgucaagcucgagagcacccgcaucuaccagauccuggccaucuacuccaccguggcgagcucccuggugcucgucgugagccugggggccaucagcuucuggaugugcuccaacggcagccugcagugccggaucugcaucuga

SEQ ID NO: 76746 - RNA, 1701 nt, Artificial Sequence
  derived and/or modified CDS sequence (opt1) from hemagglutinin__InfluenzaA__AIM56347
augaaggccauccuggugguccuccuguacaccuucgccaccgcgaacgccgacacgcugugcaucggcuaccacgccaacaacagcaccgacaccguggacaccgugcucgagaagaacgucacggugacccacuccgugaaccugcuggaggacaagcacaacgggaagcucugcaagcugcgcggcgucgcgccccugcaccucgggaagugcaacaucgccggcuggauccuggggaacccggagugcgagagccuguccaccaccagcuccuggagcuacaucguggagacguccagcuccgacaacgggaccugcuaccccggcgacuucaucaacuacgaggagcuccgggagcagcugagcuccgugagcuccuucgagcgcuucgagaucuuccccaagaccagcuccuggcccaaccacgacagcaacaagggcgucaccgccgccugcccgcacgccggcgccaaguccuucuacaagaaccugaucuggcucgugaagaaggggaacagcuaccccaagcugucccagagcuacaucaacgacaagggcaaggaggugcugguccucugggggauccaccaccccagcacgaccgcggaccagcagucccuguaccagaacgccgacgccuacguguucgugggcaccagccgguacuccaagaaguucaagcccgagaucgccauccgcccgaagguccgggaccaggagggccgcaugaacuacuacuggacccugguggagcccggggacaagaucacguucgaggccaccggcaaccucguggucccccgguacgcguucaccauggagcgcaacgccgggagcggcaucaucaucuccgacacccccgugcacgacugcaacacgaccugccagaccccggagggcgccaucaacaccagccugcccuuccagaacauccaccccaucacgaucgggaagugccccaaguacgugaaguccaccaagcugcggcucgccaccggccugcgcaacgucccgagcauccagucccgggggcuguucggcgccaucgcgggguucaucgagggcggcuggaccgggaugguggacggcugguacggguaccaccaccagaacgagcagggcagcggguacgccgccgaccucaaguccacgcagaacgccaucgacaagaucaccaacaaggugaacagcgucaucgagaagaugaacacccaguucaccgccgugggcaaggaguucaaccaccuggagaagcgcaucgagaaccugaacaagaaggucgacgacggcuuccucgacaucuggacguacaacgcggagcugcuggugcuccuggagaacgagcggacccuggacuaccacgacuccaacgugaagaaccucuacgagaagguccgcaaccagcugaagaacaacgccaaggagaucgggaacggcugcuucgaguucuaccacaagugcgacaacacgugcauggagagcgugaagaacgggaccuacgacuaccccaaguacuccgaggaggccaagcugaaccgggagaagaucgacggcgugaagcucgagagcacccgcaucuaccagauccuggccaucuacuccaccgucgccagcucccuggugcucguggucagccugggggcgaucagcuucuggaugugcuccaacggcagccugcagugccggaucugcaucuga

SEQ ID NO: 76747 - RNA, 1701 nt, Artificial Sequence
  derived and/or modified CDS sequence (opt1) from hemagglutinin__InfluenzaA__AIM56358
augaaggccauccuggugguccuccuguacaccuucgccaccgcgaacgccgacacgcugugcaucggcuaccacgccaacaacagcaccgacaccguggacaccgugcucgagaagaacgucacggugacccacuccgugaaccugcuggaggacaagcacaacgggaagcucugcaagcugcgcggcgucgcgccccugcaccucgggaagugcaacaucgccggcuggauccuggggaacccggagugcgagagccuguccaccgccagcuccuggagcuacaucguggagaccuccagcuccgacaacggcacgugcuaccccggcgacuucaucaacuacgaggagcuccgggagcagcugagcuccgugagcuccuucgagcgcuucgagaucuuccccaagaccagcuccuggcccaaccacgacagcaacaagggggucaccgccgccugcccgcacgccggcgcgaaguccuucuacaagaaccugaucuggcucgugaagaaggggaacagcuaccccaagcugucccagagcuacaucaacgacaagggcaaggaggugcugguccucugggggauccaccaccccagcaccacggccgaccagcagucccuguaccagaacgccgacgccuacguguucgugggcaccagccgguacuccaagaaguucaagcccgagaucgccauccgcccgaagguccgggaccaggagggccgcaugaacuacuacuggacccuggugaagcccggggacaagaucaccuucgaggcgacgggcaaccucguggucccccgguacgccuucaccauggagcgcaacgccgggagcggcaucaucaucuccgacacccccgugcacgacugcaacaccacgugccagaccccggagggcgccaucaacaccagccugcccuuccagaacauccaccccaucaccaucgggaagugccccaaguacgugaaguccacgaagcugcggcucgccaccggccugcgcaacgucccgagcauccagucccgggggcuguucggcgcgaucgccggguucaucgagggcggcuggaccgggaugguggacggcugguacggguaccaccaccagaacgagcagggcagcggguacgccgccgaccucaaguccacccagaacgccaucgacaagaucacgaacaaggugaacagcgucaucgagaagaugaacacccaguucaccgcggugggcaaggaguucaaccaccuggagaagcgcaucgagaaccugaacaagaaggucgacgacggcuuccucgacaucuggaccuacaacgccgagcugcuggugcuccuggagaacgagcggacgcuggacuaccacgacuccaacgugaagaaccucuacgagaagguccgcaaccagcugaagaacaacgccaaggagaucgggaacggcugcuucgaguucuaccacaagugcgacaacacgugcauggagagcgugaagaacgggaccuacgacuaccccaaguacuccgaggaggccaagcugaaccgggagaagaucgacggcgugaagcucgagagcacccgcaucuaccagauccuggccaucuacuccaccgucgcgagcucccuggugcucguggucagccugggggccaucagcuucuggaugugcuccaacggcagccugcagugccggaucugcaucuga

SEQ ID NO: 76748 - RNA, 1701 nt, Artificial Sequence; identical to SEQ ID NO: 74064
  derived and/or modified CDS sequence (opt1) from hemagglutinin__InfluenzaA__AIM56369

SEQ ID NO: 76749 - RNA, 1701 nt, Artificial Sequence
  derived and/or modified CDS sequence (opt1) from hemagglutinin__InfluenzaA__AIM56380
augaaggccauccuggugguccuccuguacaccuucgccaccgcgaacgccgacacgcugugcaucggcuaccacgccaacaacagcaccgacaccguggacaccgugcucgagaagaacgucacggugacccacuccgugaaccugcuggaggacaagcacaacgggaagcucugcaagcugcgcggcgucgcgccccugcaccucgggaagugcaacaucgccggcuggauccuggggaacccggagugcgagagccuguccaccgccagcuccuggagcuacaucguggagaccuccagcuccgacaacggcacgugcuaccccggcgacuucaucaacuacgaggagcuccgggagcagcugagcuccgugagcuccuucgagcgcuucgagaucuuccccaagaccagcuccuggcccaaccacgacagcaacaagggggucaccgccgccugcccgcacgccggcgcgaaguccuucuacaagaaccugaucuggcucgugaagaaggggaacagcuaccccaagcugucccagagcuacaucaacgacaagggcaaggaggugcugguccucugggggauccaccaccccagcaccacggccgaccagcagucccuguaccagaacgccgacgccuacguguucgugggcaccagccgguacuccaagaaguucaagcccgagaucgccauccgcccgaagguccgggaccaggagggccgcaugaacuacuacuggacccugguggagcccggggacaagaucaccuucgaggcgacgggcaaccucguggucccccgguacgccuucaccauggagcgcaacgccgggagcggcaucaucaucuccgacacccccgugcacgacugcaacaccacgugccagaccccggagggcgccaucaacaccagccugcccuuccagaacauccaccccaucaccaucgggaagugccccaaguacgugaaguccacgaagcugcggcucgccaccggccugcgcaacgucccgagcauccagucccgggggcuguucggcgcgaucgccggguucaucgagggcggcuggaccgggaugguggacggcugguacggguaccaccaccagaacgagcagggcagcggguacgccgccgaccucaaguccacccagaacgccaucgacaagaucacgaacaaggugaacagcgucaucgagaagaugaacacccaguucaccgcggugggcaaggaguucaaccaccuggagaagcgcaucgagaaccugaacaagaaggucgacgacggcuuccucgacaucuggaccuacaacgccgagcugcuggugcuccuggagaacgagcggacgcuggacuaccacgacuccaacgugaagaaccucuacgagaagguccgcaaccagcugaagaacaacgccaaggagaucgggaacggcugcuucgaguucuaccacaagugcgacaacacgugcauggagagcgugaagaacgggaccuacgacuaccccaaguacuccgaggaggccaagcugagccgggagaagaucgacggcgugaagcucgaguccacccgcaucuaccagauccuggccaucuacagcaccgucgcguccagccuggugcucguggucagccugggggccaucuccuucuggaugugcagcaacggcucccugcagugccggaucugcaucuga

SEQ ID NO: 76750 - RNA, 1701 nt, Artificial Sequence; identical to SEQ ID NO: 74064
  derived and/or modified CDS sequence (opt1) from hemagglutinin__InfluenzaA__AIM56391

SEQ ID NO: 76751 - RNA, 1701 nt, Artificial Sequence; identical to SEQ ID NO: 74064
  derived and/or modified CDS sequence (opt1) from hemagglutinin__InfluenzaA__AIM56402

SEQ ID NO: 76752 - RNA, 1701 nt, Artificial Sequence; identical to SEQ ID NO: 75917
  derived and/or modified CDS sequence (opt1) from hemagglutinin__InfluenzaA__AIM56413

SEQ ID NO: 76753 - RNA, 1701 nt, Artificial Sequence; identical to SEQ ID NO: 74064
  derived and/or modified CDS sequence (opt1) from hemagglutinin__InfluenzaA__AIM56425

SEQ ID NO: 76754 - RNA, 1701 nt, Artificial Sequence; identical to SEQ ID NO: 74064
  derived and/or modified CDS sequence (opt1) from hemagglutinin__InfluenzaA__AIM56436

SEQ ID NO: 76755 - RNA, 1701 nt, Artificial Sequence; identical to SEQ ID NO: 74064
  derived and/or modified CDS sequence (opt1) from hemagglutinin__InfluenzaA__AIM56447

SEQ ID NO: 76756 - RNA, 1701 nt, Artificial Sequence; identical to SEQ ID NO: 74064
  derived and/or modified CDS sequence (opt1) from hemagglutinin__InfluenzaA__AIM56469

SEQ ID NO: 76757 - RNA, 1701 nt, Artificial Sequence
  derived and/or modified CDS sequence (opt1) from hemagglutinin__InfluenzaA__AIM56480
augaaggccauccuggugguccuccuguacaccuucgccaccacgaacgcggacacccugugcaucggcuaccacgccaacaacagcaccgacaccguggacacggugcucgagaagaacgucaccgugacccacuccgugaaccugcuggaggacaagcacaacgggaagcucugcaagcugcgcggcgucgcgccccugcaccucgggaagugcaacaucgccggcuggauccuggggaacccggagugcgagagccuguccaccgccagcuccuggagcuacaucguggagacguccagcuccgacaacgggaccugcuaccccggcgacuucaucaacuacgaggagcuccgggagcagcugagcuccgugagcuccuucgagcgcuucgagaucuuccccaagaccagcuccuggcccaaccacgacagcaacaagggggucaccgccgccugcccgcacgccggcgccaaguccuucuacaagaaccugaucuggcucgugaagaaggggaacagcuaccccaagcugucccagagcuacaucaacgacaagggcaaggaggugcugguccucugggggauccaccaccccagcacgaccgcggaccagcagucccuguaccagaacgccgacgccuacguguucgugggcaccagccgguacuccaagaaguucaagcccgagaucgccauccgcccgaagguccgggaccaggagggccgcaugaacuacuacuggacccugguggagcccggggacaagaucacguucgaggccaccggcaaccucguggucccccgguacgcguucaccauggagcgcaacgccgggagcggcaucaucaucuccgacacccccgugcacgacugcaacacgaccugccagaccccggagggcgccaucaacaccagccugcccuuccagaacauccaccccaucacgcuggggaagugccccaaguacgugaaguccaccaagcuccggcuggccaccggccugcgcaacgucccgagcauccagucccggggccucuucggcgccaucgcgggguucaucgagggcggcuggaccgggaugguggacggcugguacggguaccaccaccagaacgagcagggcagcggguacgccgccgaccugaaguccacgcagaacgccaucgacaagaucaccaacaaggugaacagcgucaucgagaagaugaacacccaguucaccgccgugggcaaggaguucaaccaccuggagaagcgcaucgagaaccucaacaagaaggucgacgacggcuuccuggacaucuggacguacaacgcggagcugcucgugcugcuggagaacgagcggacccucgacuaccacgacuccaacgugaagaaccuguacgagaagguccgcaaccagcugaagaacaacgccaaggagaucgggaacggcugcuucgaguucuaccacaagugcgacaacacgugcauggagagcgugaagaacgggaccuacgacuaccccaaguacuccgaggaggccaagcucaaccgggagaagaucgacggcgugaagcuggagagcacccgcaucuaccagauccuggccaucuacuccaccgucgccagcucccucgugcugguggucagccugggggcgaucagcuucuggaugugcuccaacggcagccuccagugccggaucugcaucuga

SEQ ID NO: 76758 - RNA, 1701 nt, Artificial Sequence; identical to SEQ ID NO: 74064
  derived and/or modified CDS sequence (opt1) from hemagglutinin__InfluenzaA__AIM56491

SEQ ID NO: 76759 - RNA, 1710 nt, Artificial Sequence
  derived and/or modified CDS sequence (opt1) from hemagglutinin__InfluenzaA__AIM56502
augaaggccauccuggugguccuccuguacaccuucgccaccgcgaacgccgacacgcugugcaucggcuaccacgccaacaacagcaccgacaccguggacaccgugcucgagaagaacgucacggugacccacuccgugaaccugcuggaggacaagcacaacgggaagcucugcaagcugcgcggcgucgcgccccugcaccucgggaagugcaacaucgccggcuggauccuggggaacccggagugcgagagccuguccaccgccagcuccuggagcuacaucguggagaccuccagcuccgacaacggcacgugcuaccccggcgacuucaucaacuacgaggagcuccgggagcagcugagcuccgugagcuccuucgagcgcuucgagaucuuccccaaggccagcuccuggcccaaccacgacagcaacaagggggucaccgccgccugcccgcacgcgggcgccaaguccuucuacaagaaccugaucuggcucgugaagaaggggaacagcuaccccaagcugucccagagcuacaucaacgacaagggcaaggaggugcugguccucugggggauccaccaccccagcaccaccgccgaccagcagucccuguaccagaacgccgacgccuacguguucgugggcacgagccgguacuccaagaaguucaagcccgagaucgcgauccgcccgaagguccgggaccaggagggccgcaugaacuacuacuggacccugguggagcccggggacaagaucaccuucgaggccaccggcaaccucguggucccccgguacgccuucacgauggagcgcaacgccgggagcggcaucaucaucuccgacacccccgugcacgacugcaacacgaccugccagaccccggagggcgccaucaacaccagccugaccucccugcccuuccagaacauccaccccaucaccaucgggaagugccccaaguacgucaagagcacgaagcuccggcuggcgaccggccugcgcaacaucccguccauccagagccgggggcuguucggcgccaucgccggguucaucgagggcggcuggaccgggaugguggacggcugguacggguaccaccaccagaacgagcagggcuccggguacgccgccgaccucaagagcacccagaacgcgaucgacaagaucacgaacaaggugaacuccgugaucgagaagaugaacacccaguucaccgccgucggcaaggaguucaaccaccuggagaagcgcaucgagaaccucaacaagaagguggacgacggcuuccuggacaucuggaccuacaacgccgagcugcucguccugcuggagaacgagcggacgcucgacuaccacgacagcaacgugaagaaccuguacgagaaggugcgcaaccagcugaagaacaacgccaaggagaucgggaacggcugcuucgaguucuaccacaagugcgacaacacgugcauggaguccgucaagaacgggaccuacgacuaccccaaguacagcgaggaggccaagcucaaccgggagaagaucgacggcgugaagcuggaguccacccgcaucuaccagauccuggcgaucuacagcaccguggccuccagccucguccugguggugagccugggggccaucuccuucuggaugugcagcaacggcucccuccagugccggaucugcaucuga

SEQ ID NO: 76760 - RNA, 1701 nt, Artificial Sequence; identical to SEQ ID NO: 74064
  derived and/or modified CDS sequence (opt1) from hemagglutinin__InfluenzaA__AIM56513

SEQ ID NO: 76761 - RNA, 1701 nt, Artificial Sequence; identical to SEQ ID NO: 76009
  derived and/or modified CDS sequence (opt1) from hemagglutinin__InfluenzaA__AIM56524

SEQ ID NO: 76762 - RNA, 1701 nt, Artificial Sequence; identical to SEQ ID NO: 74064
  derived and/or modified CDS sequence (opt1) from hemagglutinin__InfluenzaA__AIM56535

SEQ ID NO: 76763 - RNA, 1701 nt, Artificial Sequence; identical to SEQ ID NO: 74064
  derived and/or modified CDS sequence (opt1) from hemagglutinin__InfluenzaA__AIM56546

SEQ ID NO: 76764 - RNA, 1701 nt, Artificial Sequence; identical to SEQ ID NO: 75917
  derived and/or modified CDS sequence (opt1) from hemagglutinin__InfluenzaA__AIM56557

SEQ ID NO: 76765 - RNA, 1701 nt, Artificial Sequence
  derived and/or modified CDS sequence (opt1) from hemagglutinin__InfluenzaA__AIM56568
augaaggccauccuggugguccuccuguacaccuucgccaccgcgaacgccgacacgcugugcaucggcuaccacgccaacaacagcaccgacaccguggacaccgugcucgagaagaacgucacggugacccacuccgugaaccugcuggaggacaagcacaacgggaagcucugcaagcugcgcggcgucgcgccccugcaccucgggaagugcaacaucgccggcuggauccuggggaacccggagugcgagagccuguccaccgcgagcuccuggagcuacaucguggagaccuccagcuccgacaacggcacgugcuaccccggcgacuucaucaacuacgaggagcuccgggagcagcugagcuccgugagcuccuucgagcgcuucgagaucuucagcaagaccuccagcuggcccaaccacgacuccaacaagggggucaccgccgccugcccccacgccggcgccaagagcuucuacaagaaccugaucuggcucgugaagaaggggaacuccuacccgaagcugagccagagcuacaucaacgacaagggcaaggaggugcugguccucugggggauccaccaccccuccaccacggccgaccagcagagccuguaccagaacgccgacgccuacguguucgugggcaccucccgguacagcaagaaguucaagcccgagaucgccauccgccccaagguccgggaccaggagggccgcaugaacuacuacuggacccugguggagccgggggacaagaucaccuucgaggcgacgggcaaccucguggucccccgguacgccuucaccauggagcgcaacgccggguccggcaucaucaucagcgacacccccgugcacgacugcaacaccacgugccagacccccgagggcgccaucaacaccucccugccguuccagaacauccaccccaucaccaucgggaagugccccaaguacgucaagagcacgaagcugcggcucgccaccggccugcgcaacgugcccuccauccagagccgggggcuguucggcgcgaucgccggguucaucgagggcggcuggaccgggaugguggacggcugguacggguaccaccaccagaacgagcagggcuccggguacgccgccgaccucaagagcacccagaacgccaucgacaagaucacgaacaaggugaacuccgucaucgagaagaugaacacccaguucaccgcggugggcaaggaguucaaccaccuggagaagcgcaucgagaaccugaacaagaaggucgacgacggcuuccucgacaucuggaccuacaacgccgagcugcuggugcuccuggagaacgagcggacgcuggacuaccacgacagcaacgugaagaaccucuacgagaagguccgcaaccagcugaagaacaacgccaaggagaucgggaacggcugcuucgaguucuaccacaagugcgacaacacgugcauggaguccgugaagaacgggaccuacgacuacccgaaguacagcgaggaggccaagcugaaccgggagaagaucgacggcgugaagcucgaguccacccgcaucuaccagauccuggccaucuacagcaccgucgcguccagccuggugcucguggucagccugggggccaucuccuucuggaugugcagcaacggcucccugcagugccggaucugcaucuga

SEQ ID NO: 76766 - RNA, 1701 nt, Artificial Sequence
  derived and/or modified CDS sequence (opt1) from hemagglutinin__InfluenzaA__AIM56579
augaaggccauccuggugguccuccuguacaccuucgccaccacgaacgcggacacccugugcaucggcuaccacgccaacaacagcaccgacaccguggacacggugcucgagaagaacgucaccgugacccacuccgugaaccugcuggaggacgagcacaacgggaagcucugcaagcugcgcggcgucgcgccccugcaccucgggaagugcaacaucgccggcuggauccuggggaacccggagugcgagagccuguccaccgccagcuccuggagcuacaucguggagacguccagcuccgacaacgggaccugcuaccccggcgacuucaucaacuacgaggagcuccgggagcagcugagcuccgugagcuccuucgagcgcuucgagaucuuccccaagaccagcuccuggcccaaccacgacagcaacaagggcgucaccgccgccugcccgcacgccggcgccaaguccuucuacaagaaccugaucuggcucgugaagaaggggaacagcuaccccaagcugucccagagcuacaucaacgacaagggcaaggaggugcugguccucugggggauccaccaccccagcacgaccgcggaccagcagucccuguaccagaacaccgacgccuacguguucgugggcaccagccgguacuccaagaaguucaagcccgagaucgccauccgcccgaagguccgggaccaggagggccgcaugagcuacuacuggacgcugguggagcccggggacaagaucaccuucgaggccaccggcaaccucguggucccccgguacgccuucaccauggagcgcaacgcgggguccggcaucaucaucagcgacacgcccgugcacgacugcaacacgaccugccagaccccggagggcgccaucaacaccucccugcccuuccagaacauccaccccaucaccaucgggaagugccccaaguacgucaagagcaccaagcugcggcucgccaccggccugcgcaacgugccguccauccagagccgggggcuguucggcgccaucgccggguucaucgagggcggcuggacggggaugguggacggcugguacggguaccaccaccagaacgagcagggcuccggguacgcggccgaccucaagagcacccagaacgccaucgacaagaucaccaacaaggugaacuccgucaucgagaagaugaacacccaguucacggccgugggcaaggaguucaaccaccuggagaagcgcaucgagaaccugaacaagaaggucgacgacggcuuccucgacaucuggaccuacaacgccgagcugcuggugcuccuggagaacgagcggacccuggacuaccacgacagcaacgugaagaaccucuacgagaagguccgcaaccagcugaagaacaacgcgaaggagaucgggaacggcugcuucgaguucuaccacaagugcgacaacacgugcauggaguccgugaagaacgggaccuacgacuaccccaaguacagcgaggaggccaagcugaaccgggagaagaucgacggcgugaagcucgaguccacccgcaucuaccagauccuggccaucuacagcaccgucgccuccagccuggugcucguggucagccugggggccaucuccuucuggaugugcagcaacggcucccugcagugccggaucugcaucuga

SEQ ID NO: 76767 - RNA, 1710 nt, Artificial Sequence
  derived and/or modified CDS sequence (opt1) from hemagglutinin__InfluenzaA__AIM56590
augaaggccauccuggugguccuccuguacaccuucgccaccgcgaacgccgacacgcugugcaucggcuaccacgccaacaacagcaccgacaccguggacaccgugcucgagaagaacgucacggugacccacuccgugaaccugcuggaggacaagcacaacgggaagcucugcaagcugcgcggcgucgcgccccugcaccucgggaagugcaacaucgccggcuggauccuggggaacccggagugcgagagccuguccaccgccagcuccuggagcuacaucguggagaccuccagcuccgacaacggcacgugcuaccccggcgacuucaucaacuacgaggagcuccgggagcagcugagcuccgugagcuccuucgagcgcuucgagaucuuccccaagaccagcuccuggcccaaccacgacagcaacaagggggucaccgccgccugcccgcacgccggcgcgaaguccuucuacaagaaccugaucuggcucgugaagaaggggaacagcuaccccaagcugucccagagcuacaucaacgacaagggcaaggaggugcugguccucugggggauccaccaccccagcaccacggccgaccagcagucccuguaccagaacgccgacgccuacguguucgugggcaccagccgguacuccaagaaguucaagcccgagaucgccauccgcccgaagguccgggaccaggagggccgcaugaacuacuacuggacccugguggagcccggggacaagaucaccuucgaggcgacgggcaaccucguggucccccgguacgccuucaccauggagcgcaacgccgggagcggcaucaucaucuccgacacccccgugcacgacugcaacaccacgugccagaccccggagggcgccaucaacaccagccugaccucccugcccuuccagaacauccaccccaucacgaucgggaagugccccaaguacgucaagagcaccaagcuccggcuggccaccggccugcgcaacgugccguccauccagagccgggggcuguucggcgcgaucgccggguucaucgagggcggcuggaccgggaugguggacggcugguacggguaccaccaccagaacgagcagggcuccggguacgccgccgaccucaagagcacgcagaacgccaucgacaagaucaccaacaaggugaacuccgucaucgagaagaugaacacccaguucaccgcggugggcaaggaguucaaccaccuggagaagcgcaucgagaaccucaacaagaaggucgacgacggcuuccuggacaucuggacguacaacgccgagcugcucgugcugcuggagaacgagcggacccucgacuaccacgacagcaacgugaagaaccuguacgagaagguccgcaaccagcugaagaacaacgccaaggagaucgggaacggcugcuucgaguucuaccacaagugcgacgacacgugcauggaguccgugaagaacgggaccuacgacuaccccaaguacagcgaggaggccaagcucaaccgggagaagaucgacggcgugaagcuggaguccacccgcaucuaccagauccuggccaucuacagcaccgucgcguccagccucgugcugguggucagccugggggccaucuccuucuggaugugcagcaacggcucccuccagugccggaucugcaucuga

SEQ ID NO: 76768 - RNA, 1710 nt, Artificial Sequence
  derived and/or modified CDS sequence (opt1) from hemagglutinin__InfluenzaA__AIM56601
augaaggccauccuggugguccuccuguacaccuucgccaccgcgaacgccgacacgcugugcaucggcuaccacgccaacaacagcaccgacaccguggacaccgugcucgagaagaacgucacggugacccacuccgugaaccugcuggaggacaagcacaacgggaagcucugcaagcugcgcggcgucgcgccccugcaccucgggaagugcaacaucgccggcuggauccuggggaacccggagugcgagagccuguccaccgccagcuccuggagcuacaucguggagaccuccagcuccgacaacggcacgugcuaccccggcgacuucaucaacuacgaggagcuccgggagcagcugagcuccgugagcuccuucgagcgcuucgagaucuuccccaagaccagcuccuggcccaaccacgacagcaacaagggggucaccgccgccugcccgcacgccggcgcgaaguccuucuacaagaaccugaucuggcucgugaagaaggggaacagcuaccccaagcugucccagagcuacaucaacgacaagggcaaggaggugcugguccucugggggauccaccaccccagcaccacggccgaccagcagucccuguaccagaacgccgacgccuacguguucgugggcaccagccgguacuccaagaaguucaagcccgagaucgccauccgcccgaagguccgggaccaggagggccgcaugaacuacuacuggacccugguggagcccggggacaagaucaccuucgaggcgacgggcaaccucguggucccccgguacgccuucaccauggagcgcaacgccgggagcggcaucaucaucuccgacacccccgugcacgacugcaacaccacgugccagaccccggagggcgccaucaacaccagccugaccucccugcccuuccagaacauccaccccaucacgaucgggaagugccccaaguacgucaagagcaccaagcuccggcuggccaccggccugcgcaacgugccguccauccagagccgggggcuguucggcgcgaucgccggguucaucgagggcggcuggaccgggaugguggacggcugguacggguaccaccaccagaacgagcagggcuccggguacgccgccgaccucaagagcacgcagaacgccaucgacaagaucaccaacaaggugaacuccgucaucgagaagaugaacacccaguucaccgcggugggcaaggaguucaaccaccuggagaagcgcaucgagaaccucaacaagaaggucgacgacggcuuccuggacaucuggacguacaacgccgagcugcucgugcugcuggagaacgagcggacccucgacuaccacgacagcaacgugaagaaccuguacgagaagguccgcaaccagcugaagaacaacgccaaggagaucgggaacggcugcuucgaguucuaccacaagugcgacaacacgugcauggaguccgugaagaacgggaccuacgacuaccccaaguacagcgaggaggccaagcucaaccgggagaagaucgacggcgugaagcuggaguccacccgcaucuaccagauccuggccaucuacagcaccgucgcguccagccucgugcugguggucagccugggggccaucuccuucuggaugugcagcaacggcucccuccagugccggaucugcaucuga

SEQ ID NO: 76769 - RNA, 1710 nt, Artificial Sequence
  derived and/or modified CDS sequence (opt1) from hemagglutinin__InfluenzaA__AIM56612
augaaggccauccuggugguccuccuguacaccuucgccaccgcgaacgccgacacgcugugcaucggcuaccacgccaacaacagcaccgacaccguggacaccgugcucgagaagaacgucacggugacccacuccgugaaccugcuggaggacaagcacaacgggaagcucugcaagcugcgcggcgucgcgccccugcaccucgggaagugcaacaucgccggcuggauccuggggaacccggagugcgagagccuguccaccgccagcuccuggagcuacaucguggagaccuccagcuccgacaacggcacgugcuaccccggcgacuucaucaacuacgaggagcuccgggagcagcugagcuccgugagcuccuucgagcgcuucgagaucuuccccaagaccagcuccuggcccaaccacgacagcaacaagggggucaccgccgccugcccgcacgccggcgcgaaguccuucuacaagaaccugaucuggcucgugaagaaggggaacagcuaccccaagcugucccagagcuacaucaacgacaagggcaaggaggugcugguccucugggggauccaccaccccagcaccacggccgaccagcagucccuguaccagaacgccgacgccuacguguucgugggcaccagccgguacuccaagaaguucaagcccgagaucgccauccgcccgaagguccgggaccaggagggccgcaugaacuacuacuggacccugguggagcccggggacaagaucaccuucgaggcgacgggcaaccucguggucccccgguacgccuucaccauggagcgcaacaccgggagcggcaucaucaucuccgacacccccgugcacgacugcaacacgaccugccagaccccggagggcgccaucaacaccagccugacgucccugcccuuccagaacauccaccccaucaccaucgggaagugccccaaguacgucaagagcaccaagcuccggcuggccaccggccugcgcaacgugccguccauccagagccgggggcuguucggcgccaucgcgggguucaucgagggcggcuggacggggaugguggacggcugguacggguaccaccaccagaacgagcagggcuccggguacgccgccgaccucaagagcacccagaacgccaucgacaagaucaccaacaaggugaacuccgucaucgagaagaugaacacccaguucacggccgugggcaaggaguucaaccaccuggagaagcgcaucgagaaccucaacaagaaggucgacgacggcuuccuggacaucuggaccuacaacgcggagcugcucgugcugcuggagaacgagcggacccucgacuaccacgacagcaacgugaagaaccuguacgagaagguccgcaaccagcugaagaacaacgccaaggagaucgggaacggcugcuucgaguucuaccacaagugcgacaacacgugcauggaguccgugaagaacgggaccuacgacuaccccaaguacagcgaggaggccaagcucaaccgggagaagaucgacggcgugaagcuggaguccacccgcaucuaccagauccuggccaucuacagcaccgucgccuccagccucgugcugguggucagccugggggcgaucuccuucuggaugugcagcaacggcucccuccagugccggaucugcaucuga

SEQ ID NO: 76770 - RNA, 1701 nt, Artificial Sequence
  derived and/or modified CDS sequence (opt1) from hemagglutinin__InfluenzaA__AIM56623
augaaggccauccuggugguccuccuguacaccuucgccaccgcgaacgccgacacgcugugcaucggcuaccacgccaacaacagcaccgacaccguggacaccgugcucgagaagaacgucacggugacccacuccgugaaccugcuggaggacaagcacaacgggaagcucugcaagcugcgcggcgucgcgccccugcaccucgggaagugcaacaucgccggcuggauccuggggaacccggagugcgagagccuguccaccgccagcuccuggagcuacaucguggagaccuccagcuccgacaacggcacgugcuaccccggcgacuucaucaacuacgaggagcuccgggagcagcugagcuccgugagcuccuucgagcgcuucgagaucuuccccaagaccagcuccuggcccaaccacgacagcaacaagggggucaccgccgccugcccgcacgccggcgcgaaguccuucuacaagaaccugaccuggcucgugaagaaggggaacagcuaccccaagcugucccagagcuacaucaacgacaagggcaaggaggugcugguccucugggggauccaccaccccagcacgaccgccgaccagcagucccuguaccagaacgccgacgccuacguguucgugggcaccagccgguacuccaagaaguucaagcccgagaucgccauccgcccgaagguccgggaccaggagggccgcaugaacuacuacuggacccugguggagcccggggacaagaucacguucgaggcgaccggcaaccucguggucccccgguacgccuucaccauggagcgcaacgccgggagcggcaucaucaucuccgacacccccgugcacgacugcaacacgaccugccagaccccggagggcgccaucaacaccagccugcccuuccagaacauccaccccaucacgaucgggaagugccccaaguacgugaaguccaccaagcugcggcucgccaccggccugcgcaacgucccgagcauccagucccgggggcuguucggcgcgaucgccggguucaucgagggcggcuggaccgggaugguggacggcugguacggguaccaccaccagaacgagcagggcagcggguacgccgccgaccucaaguccacgcagaacgccaucgacaagaucaccaacaaggugaacagcgucaucgagaagaugaacacccaguucaccgcggugggcaaggaguucaaccaccuggagaagcgcaucgagaaccugaacaagaaggucgacgacggcuuccucgacaucuggacguacaacgccgagcugcuggugcuccuggagaacgagcggacccuggacuaccacgacuccaacgugaagaaccucuacgagaagguccgcaaccagcugaagaacaacgccaaggagaucgggaacggcugcuucgaguucuaccacaagugcgacaacacgugcauggagagcgugaagaacgggaccuacgacuaccccaaguacuccgaggaggccaagcugaaccgggagaagaucgacggcgugaagcucgagagcacccgcaucuaccagauccuggccaucuacuccaccgucgcgagcucccuggugcucguggucagccugggggccaucagcuucuggaugugcuccaacggcagccugcagugccggaucugcaucuga

SEQ ID NO: 76771 - RNA, 1701 nt, Artificial Sequence
  derived and/or modified CDS sequence (opt1) from hemagglutinin__InfluenzaA__AIM56634
augaaggccauccuggugguccuccuguacaccuucgccaccgcgaacgccgacacgcugugcaucggcuaccacgccaacaacagcaccgacaccguggacaccgugcucgagaagaacgucacggugacccacuccgugaaccugcuggaggacaagcacaacgggaagcucugcaagcugcgcggcgucgcgccccugcaccucgggaagugcaacaucgccggcuggauccuggggaacccggagugcgagagccuguccaccgcgaacagcugguccuacaucguggagaccagcuccagcgacaacggcacgugcuaccccggcgacuucaucaacuacgaggagcuccgggagcagcuguccagcguguccagcuucgagcgcuucgagaucuuccccaagaccuccagcuggcccaaccacgacuccaacaagggggucaccgccgccugcccgcacgccggcgccaagagcuucuacaagaaccugaucuggcucgugaagaaggggaacuccuaccccaagcugagccaguccuacaucaacgacaagggcaaggaggugcugguccucugggggauccaccaccccagcaccacggccgaccagcagagccuguaccagaacgccgacgccuacguguucgugggcaccucccgguacagcaagaaguucaagcccgagaucgccauccgcccgaagguccgggaccaggagggccgcaugaacuacuacuggacccugguggagcccggggacaagaucaccuucgaggcgacgggcaaccucguggucccccgguacgccuucaccauggagcgcaacgccggguccggcaucaucaucagcgacacccccgugcacgacugcaacaccacgugccagaccccggagggcgccaucaacaccucccugcccuuccagaacauccaccccaucaccaucgggaagugccccaaguacgucaagagcacgaagcugcggcucgccaccggccugcgcaacgugccguccauccagagccgggggcuguucggcgcgaucgccggguucaucgagggcggcuggaccgggaugguggacggcugguacggguaccaccaccagaacgagcagggcuccggguacgccgccgaccucaagagcacccagaacgccaucgacaagaucacgaacaaggugaacuccgucaucgagaagaugaacacccaguucaccgcggugggcaaggaguucaaccaccuggagaagcgcaucgagaaccugaacaagaaggucgacgacggcuuccucgacaucuggaccuacaacgccgagcugcuggugcuccuggagaacgagcggacgcuggacuaccacgacagcaacgugaagaaccucuacgagaagguccgcaaccagcugaagaacaacgccaaggagaucgggaacggcugcuucgaguucuaccacaagugcgacaacacgugcauggaguccgugaagaacgggaccuacgacuaccccaaguacagcgaggaggccaagcugaaccgggagaagaucgacggcgugaagcucgaguccacccgcaucuaccagauccuggccaucuacagcaccgucgcguccagccuggugcucguggucucccugggggccaucagcuucuggaugugcagcaacggcucccugcagugccggaucugcaucuga

SEQ ID NO: 76772 - RNA, 1710 nt, Artificial Sequence
  derived and/or modified CDS sequence (opt1) from hemagglutinin__InfluenzaA__AIM56645
augaaggccauccuggugguccuccuguacaccuucgccaccgcgaacgccgacacgcugugcaucggcuaccacgccaacaacagcaccgacaccguggacaccgugcucgagaagaacgucacggugacccacuccgugaaccugcuggaggacaagcacaacgggaagcucugcaagcugcgcggcgucgcgccccugcaccucgggaagugcaacaucgccggcuggauccuggggaacccggagugcgagagccuguccaccgccagcuccuggagcuacaucguggagaccuccagcuccgacaacggcacgugcuaccccggcgacuucaucaacuacgaggagcuccgggagcagcugagcuccgugagcuccuucgagcgcuucgagaucuuccccaagaccagcuccuggcccaaccacgacagcaacaagggggucaccgccgccugcccgcacgccggcgcgaaguccuucuacaagaaccugaucuggcucgugaagaaggggaacagcuaccccaagcugucccagagcuacaucaacgacaagggcaaggaggugcugguccucugggggauccaccaccccagcaccacggccgaccagcagucccuguaccagaacgccgacgccuacguguucgugggcaccagccgguacuccaagaaguucaagcccgagaucgccauccgcccgaagguccgggaccaggagggccgcaugaacuacuacuggacccugguggagcccggggacaagaucaccuucgaggcgacgggcaaccucguggucccccgguacgccuucaccauggagcgcaacgccgggagcggcaucaucaucuccgacacccccgugcacgacugcaacaccacgugccagaccccggagggcgccaucaacaccagccugaccucccugcccuuccagaacauccaccccaucacgaucgggaagugccccaaguacgucaagagcaccaagcuccggcuggccaccggccugcgcaacgugccguccauccagagccggggccucuucggggcgaucgccggguucaucgagggcggcuggaccgggaugguggacggcugguacggguaccaccaccagaacgagcagggcuccggguacgccgccgaccagaaguccacgcagaacgccaucgacaagaucaccaacaaggugaacagcgucaucgagaagaugaacacccaguucaccgcggugggcaaggaguucaaccaccuggagaagcgcaucgagaaccugaacaagaaggucgacgacggcuuccucgacaucuggacguacaacgccgagcugcuggugcuccuggagaacgagcggacccuggacuaccacgacagcaacgugaagaaccucuacgagaagguccgcaaccagcugaagaacaacgccaaggagaucgggaacggcugcuucgaguucuaccacaagugcgacaacacgugcauggaguccgugaagaacgggaccuacgacuaccccaaguacagcgaggaggccaagcugaaccgggagaagaucgacggcgugaagcucgaguccacccgcaucuaccagauccuggccaucuacagcaccgucgcguccagccuggugcucguggucagccugggggccaucuccuucuggaugugcagcaacggcucccugcagugccggaucugcaucuga

SEQ ID NO: 76773 - RNA, 1701 nt, Artificial Sequence
  derived and/or modified CDS sequence (opt1) from hemagglutinin__InfluenzaA__AIM56656
augaaggccauccuggugguccuccuguacaccuucgccaccgcgaacgccgacacgcugugcaucggcuaccacgccaacaacagcaccgacaccguggacaccgugcucgagaagaacgucacggugacccacuccgugaaccugcuggaggacaagcacaacgggaagcucugcaagcugcgcggcgucgcgccccugcaccucgggaagugcaacaucgccggcuggauccuggggaacccggagugcgagagccuguccaccgcgagcuccuggagcuacaucguggagaccuccagcuccgacaacggcacgugcuaccccggcgacuucaucaacuacgaggagcuccgggagcagcugagcuccgugagcuccuucgagcgcuucgagaucuuccccaagaccaacagcuggcccaaccacgacuccaacaagggggucaccgccgccugcccgcacgccggcgccaagagcuucuacaagaaccugaucuggcucgugaagaaggggaacuccuaccccaagcugagccaguccuacaucaacgacaagggcaaggaggugcugguccucugggggauccaccaccccagcaccacggccgaccagcagagccuguaccagaacgccgacgccuacguguucgugggcaccucccgguacagcaagaaguucaagcccgagaucgccauccgcccgaagguccgggaccaggagggccgcaugaacuacuacuggacccugguggagcccggggacaagaucaccuucgaggcgacgggcaacaucguggucccccgguacgccuucaccauggagcgcaacgccggguccggcaucaucaucagcgacacccccgugcacgacugcaacaccacgugccagaccccggagggcgccaucaacaccucccuccccuuccagaacauccaccccaucaccaucgggaagugccccaaguacgucaagagcacgaagcugcggcuggccaccggccuccgcaacgugccguccauccagagccgggggcuguucggcgcgaucgccggguucaucgagggcggcuggaccgggaugguggacggcugguacggguaccaccaccagaacgagcagggcuccggguacgccgccgaccucaagagcacccagaacgccaucgacaagaucacgaacaaggugaacuccgucaucgagaagaugaacacccaguucaccgcggugggcaaggaguucaaccaccuggagaagcgcaucgagaaccugaacaagaaggucgacgacggcuuccuggacaucuggaccuacaacgccgagcuccuggugcugcucgagaacgagcggacgcuggacuaccacgacagcaacgugaagaaccuguacgagaagguccgcaaccagcucaagaacaacgccaaggagaucgggaacggcugcuucgaguucuaccacaagugcgacaacacgugcauggaguccgugaagaacgggaccuacgacuaccccaaguacagcgaggaggccaagcugaaccgggagaagaucgacggcgugaagcuggaguccacccgcaucuaccagauccucgccaucuacagcaccgucgcguccagccuggugcugguggucucccucggggccaucagcuucuggaugugcagcaacggcucccugcagugccggaucugcaucuga

SEQ ID NO: 76774 - RNA, 1701 nt, Artificial Sequence; identical to SEQ ID NO: 74064
  derived and/or modified CDS sequence (opt1) from hemagglutinin__InfluenzaA__AIM56667

SEQ ID NO: 76775 - RNA, 1701 nt, Artificial Sequence
  derived and/or modified CDS sequence (opt1) from hemagglutinin__InfluenzaA__AIM56678
augaaggccauccuggugguccuccuguacaccuucgccaccgcgaacgccgacacgcugugcaucggcuaccacgccaacaacagcaccgacaccguggacaccgugcucgagaagaacgucacggugacccacuccgugaaccugcuggaggacaagcacaacgggaagcucugcaagcugcgcggcgugcccccgcugcaccucgggaagugcaacaucgccggcuggauccuggggaaccccgagugcgagagccuguccaccgccagcuccuggagcuacaucgucgagaccuccagcuccgacaacggcacgugcuaccccggcgacuucaucaacuacgaggagcuccgggagcagcugagcuccgugagcuccuucgagcgcuucgagaucuuccccaagaccagcuccuggccgaaccacgacagcaacaagggggucaccgcggccugcccccacgccggcgccaaguccuucuacaagaaccugaucuggcucgugaagaaggggaacagcuaccccaagcugucccagagcuacaucaacgacaagggcaaggaggugcugguccucugggggauccaccaccccagcaccacggcggaccagcagucccuguaccagaacgccgacgccuacguguucgugggcaccagccgguacuccaagaaguucaagccggagaucgccauccgccccaagguccgggaccaggagggccgcaugaacuacuacuggacccugguggagcccggggacaagaucaccuucgaggccacgggcaaccucguggucccccgguacgcguucaccauggagcgcaacgccgggagcggcaucaucaucuccgacaccccggugcacgacugcaacaccacgugccagacccccgagggcgccaucaacaccagccugcccuuccagaacauccaccccaucaccaucgggaagugcccgaaguacgugaaguccacgaagcugcggcucgccaccggccugcgcaacguccccagcauccagucccgggggcuguucggcgccaucgcgggguucaucgagggcggcuggaccgggaugguggacggcugguacggguaccaccaccagaacgagcagggcagcggguacgccgccgaccucaaguccacccagaacgccaucgacaagaucacgaacaaggugaacagcgucaucgagaagaugaacacccaguucaccgccgugggcaaggaguucaaccaccuggagaagcgcaucgagaaccugaacaagaaggucgacgacggcuuccucgacaucuggaccuacaacgcggagcugcuggugcuccuggagaacgagcggacgcuggacuaccacgacuccaacgugaagaaccucuacgagaagguccgcaaccagcugaagaacaacgccaaggagaucgggaacggcugcuucgaguucuaccacaagugcgacaacacgugcauggagagcgugaagaacgggaccuacgacuaccccaaguacuccgaggaggccaagcugaaccgggagaagaucgacggcgugaagcucgagagcacccgcaucuaccagauccuggccaucuacuccaccgucgccagcucccuggugcucguggucagccugggggcgaucagcuucuggaugugcuccaacggcagccugcagugccggaucugcaucuga

SEQ ID NO: 76776 - RNA, 1701 nt, Artificial Sequence; identical to SEQ ID NO: 76412
  derived and/or modified CDS sequence (opt1) from hemagglutinin__InfluenzaA__AIM56689

SEQ ID NO: 76777 - RNA, 1701 nt, Artificial Sequence; identical to SEQ ID NO: 74064
  derived and/or modified CDS sequence (opt1) from hemagglutinin__InfluenzaA__AIM56700

SEQ ID NO: 76778 - RNA, 1710 nt, Artificial Sequence
  derived and/or modified CDS sequence (opt1) from hemagglutinin__InfluenzaA__AIM56711
augaaggccauccuggugguccuccuguacaccuucgccaccgcgaacgccgacacgcugugcaucggcuaccacgccaacaacagcaccgacaccguggacaccgugcucgagaagaacgucacggugacccacuccgugaaccugcuggaggacaagcacaacgggaagcucugcaagcugcgcggcgugcccccgcugcaccucgggaagugcaacaucgccggcuggauccuggggaaccccgagugcgagagccuguccaccgccagcuccuggagcuacaucguggagaccuccagcuccgacaacggcacgugcuaccccggcgacuucaucaacuacgaggagcuccgggagcagcugagcuccgugagcuccuucgagcgcuucgagaucuuccccaagaccagcuccuggccgaaccacgacagcaacaagggggucaccgcggccugcccccacgccggcgccaaguccuucuacaagaaccugaucuggcucgugaagaaggggaacagcuaccccaagcugucccagagcuacaucaacgacaagggcaaggaggugcugguccucugggggauccaccaccccagcaccacggcggaccagcagucccuguaccagaacgccgacgccuacguguucgugggcaccagccgguacuccaagaaguucaagccggagaucgccauccgccccaagguccgggaccaggagggccgcaugaacuacuacuggacccugguggagcccggggacaagaucaccuucgaggccacgggcaaccucguggucccccgguacgcguucaccauggagcgcaacgccgggagcggcaucaucaucuccgacaccccggugcacgacugcaacaccacgugccagacccccgagggcgccaucaacaccagccugaccucccugcccuuccagaacauccaccccaucacgaucgggaagugcccgaaguacgucaagagcaccaagcuccggcuggccaccggccugcgcaacguccccuccauccagagccgggggcuguucggcgccaucgcgggguucaucgagggcggcuggaccgggaugguggacggcugguacggguaccaccaccagaacgagcagggcuccggguacgccgccgaccucaagagcacgcagaacgccaucgacaagaucaccaacaaggugaacuccgucaucgagaagaugaacacccaguucaccgccgugggcaaggaguucaaccaccuggagaagcgcaucgagaaccucaacaagaaggucgacgacggcuuccuggacaucuggacguacaacgcggagcugcucgugcugcuggagaacgagcggacccucgacuaccacgacagcaacgugaagaaccuguacgagaagguccgcaaccagcugaagaacaacgccaaggagaucgggaacggcugcuucgaguucuaccacaagugcgacaacacgugcauggaguccgugaagaacgggaccuacgacuaccccaaguacagcgaggaggccaagcucaaccgggagaagaucgacggcgugaagcuggaguccacccgcaucuaccagauccuggccaucuacagcaccgucgccuccagccucgugcugguggucagccugggggcgaucuccuucuggaugugcagcaacggcucccuccagugccggaucugcaucuga

SEQ ID NO: 76779 - RNA, 1701 nt, Artificial Sequence; identical to SEQ ID NO: 76412
  derived and/or modified CDS sequence (opt1) from hemagglutinin__InfluenzaA__AIM56722

SEQ ID NO: 76780 - RNA, 1701 nt, Artificial Sequence; identical to SEQ ID NO: 74064
  derived and/or modified CDS sequence (opt1) from hemagglutinin__InfluenzaA__AIM56733

SEQ ID NO: 76781 - RNA, 1701 nt, Artificial Sequence; identical to SEQ ID NO: 74064
  derived and/or modified CDS sequence (opt1) from hemagglutinin__InfluenzaA__AIM56744

SEQ ID NO: 76782 - RNA, 1701 nt, Artificial Sequence
  derived and/or modified CDS sequence (opt1) from hemagglutinin__InfluenzaA__AIM56755
augaaggccauccuggugguccuccuguacaccuucgccaccgcgaacgccgacacgcugugcaucggcuaccacgccaacaacagcaccgacaccguggacaccgugcucgagaagaacgucacggugacccacuccgugaaccugcuggaggacaagcacaacgggaagcucugcaagcugcgcggcgucgcgccccugcaccucgggaagugcaacaucgccggcuggauccuggggaacccggagugcgagagccuguccaccgcgagcuccuggagcuacaucguggagaccuccagcuccgacaacggcacgugcuaccccggcgacuucaucaacuacgaggagcuccgggagcagcugagcuccgugagcuccuucgagcgcuucgagaucuuccccaagaccagcuccuggcccagccacgacuccaacaagggggucaccgccgccugcccgcacgccggcgccaagagcuucuacaagaaccugaucuggcucgugaagaaggggaacuccuaccccaagcugagccagagcuacaucaacgacaagggcaaggaggugcugguccucugggggauccaccaccccuccaccacggccgaccagcagagccuguaccagaacgccgacgccuacguguucgugggcaccucccgguacagcaagaaguucaagcccgagaucgccauccgcccgaagguccgggaccaggagggccgcaugaacuacuacuggacccugguggagcccggggacaagaucaccuucgaggcgacgggcaaccucguggucccccgguacgccuucaccauggagcgcaacgccggguccggcaucaucaucagcgacacccccgugcacgacugcaacaccacgugccagaccccggagggcgccaucaacaccucccugcccuuccagaacauccaccccaucaccaucgggaagugccccaaguacgucaagagcacgaagcugcggcucgccaccggccugcgcaacgugccguccauccagagccgggggcuguucggcgcgaucgccggguucaucgagggcggcuggaccgggaugguggacggcugguacggguaccaccaccagaacgagcagggcuccggguacgccgccgaccucaagagcacccagaacgccaucgacaagaucacgaacaaggugaacuccgucaucgagaagaugaacacccaguucaccgcggugggcaaggaguucaaccaccuggagaagcgcaucgagaaccugaacaagaaggucgacgacggcuuccucgacaucuggaccuacaacgccgagcugcuggugcuccuggagaacgagcggacgcuggacuaccacgacagcaacgugaagaaccucuacgagaagguccgcaaccagcugaagaacaacgccaaggagaucgggaacggcugcuucgaguucuaccacaagugcgacaacacgugcauggaguccgugaagaacgggaccuacgacuaccccaaguacagcgaggaggccaagcugaaccgggagaagaucgacggcgugaagcucgaguccacccgcaucuaccagauccuggccaucuacagcaccgucgcguccagccuggugcucguggucagccugggggccaucuccuucuggaugugcagcaacggcucccugcagugccggaucugcaucuga

SEQ ID NO: 76783 - RNA, 1710 nt, Artificial Sequence; identical to SEQ ID NO: 76768
  derived and/or modified CDS sequence (opt1) from hemagglutinin__InfluenzaA__AIM56766

SEQ ID NO: 76784 - RNA, 1701 nt, Artificial Sequence
  derived and/or modified CDS sequence (opt1) from hemagglutinin__InfluenzaA__AIM56777
augaaggccauccuggugguccuccuguacaccuucgccaccgcgaacgccgacacgcugugcaucggcuaccacgccaacaacagcaccgacaccguggacaccgugcucgagaagaacgucacggugacccacuccgugaaccugcuggaggggaagcacaacggcaagcucugcaagcugcgcggggucgcgccccugcaccucggcaagugcaacaucgccggguggauccugggcaacccggagugcgagagccuguccaccgccagcuccuggagcuacaucguggagaccuccagcuccgacaacggcacgugcuaccccggggacuucaucaacuacgaggagcuccgggagcagcugagcuccgugagcuccuucgagcgcuucgagaucuuccccaagaccagcuccuggcccaaccacgacagcaacaagggcgucaccgccgccugcccgcacgccggggcgaaguccuucuacaagaaccugaucuggcucgugaagaagggcaacagcuaccccaagcugucccagagcuacaucaacgacaaggggaaggaggugcugguccucuggggcauccaccaccccagcaccacggccgaccagcagucccuguaccagaacgccgacgccuacguguucgugggcaccagccgguacuccaagaaguucaagcccgagaucgccauccgcccgaagguccgggaccaggaggggcgcaugaacuacuacuggacccugguggagcccggcgacaagaucaccuucgaggcgacggggaaccucguggucccccgguacgccuucaccauggagcgcaacgccggcagcggcaucaucaucuccgacacccccgugcacgacugcaacaccacgugccagaccccggagggggccaucaacaccagccugcccuaccagaacauccaccccaucaccaucggcaagugccccaaguacgugaaguccacgaagcugcggcucgccaccgggcugcgcaacgucccgagcauccagucccggggccuguucggggcgaucgccggcuucaucgagggcggguggaccggcaugguggacgggugguacggcuaccaccaccagaacgagcaggggagcggcuacgccgccgaccucaaguccacccagaacgccaucgacaagaucacgaacaaggugaacagcgucaucgagaagaugaacacccaguucaccgcggugggcaaggaguucaaccaccuggagaagcgcaucgagaaccugaacaagaaggucgacgacggguuccucgacaucuggaccuacaacgccgagcugcuggugcuccuggagaacgagcggacgcuggacuaccacgacuccaacgugaagaaccucuacgagaagguccgcaaccagcugaagaacaacgccaaggagaucggcaacgggugcuucgaguucuaccacaagugcgacaacacgugcauggagagcgugaagaacggcaccuacgacuaccccaaguacuccgaggaggccaagcugaaccgggagaagaucgacggggugaagcucgagagcacccgcaucuaccagauccuggccaucuacuccaccgucgcgagcucccuggugcucguggucagccugggcgccaucagcuucuggaugugcuccaacggcagccugcagugccggaucugcaucuga

SEQ ID NO: 76785 - RNA, 1701 nt, Artificial Sequence; identical to SEQ ID NO: 74064
  derived and/or modified CDS sequence (opt1) from hemagglutinin__InfluenzaA__AIM56788

SEQ ID NO: 76786 - RNA, 1701 nt, Artificial Sequence; identical to SEQ ID NO: 74064
  derived and/or modified CDS sequence (opt1) from hemagglutinin__InfluenzaA__AIM56799

SEQ ID NO: 76787 - RNA, 1701 nt, Artificial Sequence; identical to SEQ ID NO: 74064
  derived and/or modified CDS sequence (opt1) from hemagglutinin__InfluenzaA__AIM56810

SEQ ID NO: 76788 - RNA, 1701 nt, Artificial Sequence; identical to SEQ ID NO: 74064
  derived and/or modified CDS sequence (opt1) from hemagglutinin__InfluenzaA__AIM56821

SEQ ID NO: 76789 - RNA, 1683 nt, Artificial Sequence
  derived and/or modified CDS sequence (opt1) from hemagglutinin__InfluenzaA__AIN76383
augaacacccagauccugguguucgcccucaucgccaucguccccaccaacgcggacaagaucugccugggccaccacgccgugagcaacgggacgaaggugaacacccugaccgagcgcggcgucgagguggugaacgccaccgagacggucgagcggaccaacaucccgcgcaucugcuccaaggggaagaagaccguggaccucggccagugcgggcugcugggcaccaucacgggcccgccccagugcgaccaguuccucgaguucagcgccgaccugaucaucgagcggcgcgagggguccgacgugugcuaccccggcaaguucgucaacgaggaggcccugcggcagauccuccgcgagagcgggggcaucgacaaggaggcgaugggguucaccuacuccggcauccggaccaacggcaccacgagcgccugccgccgguccgggagcuccuucuacgccgagaugaaguggcugcugagcaacaccgacaacgccgcguucccccagaugaccaaguccuacaagaacacccgcaagagccccgcccucaucguguggggcauccaccacuccgugagcacggccgagcagaccaagcuguacggguccggcaacaagcuggucaccgugggcagcuccaacuaccagcagagcuucgugcccucccccggggcccggccgcaggucaacggccucagcgggcgcaucgacuuccacuggcugaugcugaaccccaacgacaccgugacguucagcuucaacggcgccuucaucgcgcccgaccgggccuccuuccuccgcggcaagagcauggggauccaguccggcgugcaggucgacgccaacugcgagggggacugcuaccacagcggcgggaccaucaucuccaaccugcccuuccagaacaucgacagccgggccgugggcaagugcccgcgcuacgugaagcagaagucccugcuccuggccaccgggaugaagaacguccccgagauccccaagggccggggccuguucggggcgaucgccggcuucaucgagaacgggugggagggccucaucgacgggugguacggcuuccgccaccagaacgcccagggcgaggggaccgccgccgacuacaagagcacgcaguccgcgaucgaccagaucaccggcaagcugaaccggcugaucgagaagaccaaccagcaguucgagcucaucgacaacgaguucaacgagguggagaagcagaucgggaacgugaucaacuggacccgcgacagcaucacggaggucugguccuacaacgccgagcugcugguggccauggagaaccagcacaccaucgaccucgccgacagcgagauggacaagcuguacgagcgggucaagcgccagcugcgcgagaacgccgaggaggacggcaccggcugcuucgagaucuuccacaagugcgacgacgacugcauggcguccauccggaacaacaccuacgaccacagcaaguaccgcgaggaggccaugcagaaccggauccagaucgaccccgugaagcucuccagcggguacaaggacgugauccugugguucuccuucggcgccagcugcuucauccugcucgccaucgucauggggcugguguucaucugcgugaagaacggcaacaugcgcugcacgaucugcaucuga

SEQ ID NO: 76790 - RNA, 1689 nt, Artificial Sequence
  derived and/or modified CDS sequence (opt1) from hemagglutinin__InfluenzaA__AIP93103
auggccaucaucuaccugauccuccuguucaccgccgugcgcggcgaccagaucugcaucggguaccacgcgaacaacagcaccgagaaggucgacacgauccuggagcggaacgugaccgugacccacgccaaggacauccucgagaagacccacaacggcaagcugugcaagcugaacgggaucccgccccucgagcugggcgacugcuccaucgccggguggcugcucggcaaccccgagugcgaccgccugcugcggguccccgaguggagcuacaucauggagaaggagaacccccgcuacucccucugcuacccgggcagcuucaacgacuacgaggagcugaagcaccuccuguccagcgugaagcacuucgagaaggugaagauccugcccaaggacggguggacgcagcacgagaccgacggcggguccaaggccugcgccgucagcggcaagcccuccuucuuccggaacaugguguggcugaccaagaaggggcccaacuacccgguggcgaagcgcagcuacaacaacaccuccggcgagcagaugcucaucaucuggggcguccaccaccccaacgacgaggccgagcagcgggcccuguaccagaacguggggacguacgugagcgccuccaccagcacccugaacaagcgcuccacccccgagaucgcggcccggcccaaggucagcggccucgggucccgcauggaguucagcuggacgcugcuggacgugugggacaccaucuccuucgagagcaccggcaaccucguggccccggaguacggcuucaagaucagcaagcggggguccagcggcaucaugaagaccgaggggacgcugggcaacugcgagaccaagugccagacgccccugggggccaucaacaccacccuccccuuccacaacguccacccccugaccaucggcgagugcccgaaguacgugaaguccgagaagcuggugcucgccaccggcccccgcaacgucccccagaucgagagccgggggcuguucggcgcgaucgccggguucaucgagggcggguggcagggcaugguggacggcugguacggguaccaccacuccaacgaccagggcagcggguacgccgccgacaaggaguccacccagaaggccuucgaccgcaucacgaacaaggugaacagcgucaucgagaagaugaacacccaguucgaggcggugggcaaggaguucuccaaccuggagaagcggcucgagaaccugaacaagaagauggaggacggguuccuggacguguggaccuacaacgccgagcuccugguccugauggagaacgagcgcacccucgacuuccacgacagcaacgugaagaaccuguacgacaagguccggaugcagcugcgcgacaacgugaaggagcucggcaacggcugcuucgaguucuaccacaagugcgacgacgagugcaugaacuccgugaagaacgggacguacgacuaccccaaguacgaggaggagagcaagcugaagcggaacgagaucaagggcgucaagcuguccagcauggggguguaccagauccucgccaucuacgccaccguggccggcucccugagccuggcgaucaugaucgccggcaucuccuucuggaugugcagcaacgggucccuccagugccgcaucugcaucuga

SEQ ID NO: 76791 - RNA, 1689 nt, Artificial Sequence; identical to SEQ ID NO: 65679
  derived and/or modified CDS sequence (opt1) from hemagglutinin__InfluenzaA__AIP93115

SEQ ID NO: 76792 - RNA, 1701 nt, Artificial Sequence
  derived and/or modified CDS sequence (opt1) from hemagglutinin__InfluenzaA__AIR93971
augaaggccauccuggugguccuccuguacaccuucgccaccacgaacgcggacauccugugcaucggcuaccacgccaacaacagcaccgacaccguggacaccgugcucgagaagaacgucacggugacccacuccgugaaccugcuggaggacaagcacaacgggaagcucugcaagcugcgcggcgucgcgccccugcaccucgggaagugcaacaucgccggcuggauccuggggaacccggagugcgagagccuguccaccgccagcuccuggagcuacaucguggagaccuccagcuccgacaacggcacgugcuaccccggcgacuucaucgacuacgaggagcuccgggagcagcugagcuccgugagcuccuucgagcgcuucgagaucuuccccaagaccagcuccuggcccaaccacgacagcaacaagggggucaccgccgccugcccgcacgccggcgcccgguccuucuacaagaaccugaucuggcucgugaagaaggggaacagcuaccccaagcuguccaagagcuacaucaacgacaagggcaaggaggugcugguccucugggggauccaccaccccagcaccuccgcggaccagcagagccuguaccagaacgccgacgccuacguguucgugggcacgucccgcuacagcaagaaguucaagcccgagaucgccauccggccgaagguccgcgaccgggagggccgcaugaacuacuacuggacccugguggagcccggggacaagaucaccuucgaggccaccggcaaccucguggucccccgguacgcguucgccauggagcgcaacgccggguccggcaucaucacgagcgacacccccgugcacgacugcaacacgaccugccagaccccgaagggcgccaucaacaccucccugcccuuccagaacauccaccccaucaccaucgggaagugccccaaguacgucaagagcaccaagcugcggcucgccacgggccugcgcaacgugccguccauccagagccgggggcuguucggcgcgaucgccggguucaucgagggcggcuggaccgggaugguggacggcugguacggguaccaccaccagaacgagcagggcuccggguacgccgccgaccucaagagcacccagaacgccaucgacgagaucaccaacaaggugaacuccgucaucgagaagaugaacacgcaguucaccgcggugggcaaggaguucaaccaccuggagaagcgcaucgagaaccugaacaagaaggucgacgacggcuuccucgacaucuggaccuacaacgccgagcugcuggugcuccuggagaacgagcggacccuggacuaccacgacagcaacgugaagaaccucuacgagaagguccgcucccagcugaagaacaacgccaaggagaucgggaacggcugcuucgaguucuaccacaagugcgacaacacgugcauggagagcgugaagaacgggaccuacgacuaccccaaguacuccgaggaggccaagcugaaccgggaggagaucgacggcgugaagcucgagagcacccgcaucuaccagauccuggccaucuacuccaccgucgcgagcagccuggugcucguggucucccugggggccaucagcuucuggaugugcuccaacggcagccugcagugccggaucugcaucuga

SEQ ID NO: 76793 - RNA, 1701 nt, Artificial Sequence
  derived and/or modified CDS sequence (opt1) from hemagglutinin__InfluenzaA__AIR93982
augaaggccauccuggugguccuccuguacaccaucgccaccgcgaacgccgacacgcugugcaucggcuaccacgccaacaacagcaccgacaccguggacaccgugcucgagaagaacgucacggugacccacuccgugaaccugcuggaggacaagcacaacgggaagcucugcaagcugcgcggcgucgcgccccugcaccucgggaagugcaacaucgccggcuggauccuggggaacccggagugcgagagccuguccaccgccagcuccuggagcuacaucguggagaccuccagcuccgacaacggcacgugcuaccccggcgacuucaucgacuacgaggagcuccgggagcagcugagcuccgugagcuccuucgagcgcuucgagaucuuccccaagaccagcuccuggcccaaccacgacagcaacaagggggucaccgccgccugcccgcacgccggcgcgcgguccuucuacaagaaccugaucuggcucgugaagaaggggaacagcuaccccaagcuguccaagagcuacaucaacgacaagggcaaggaggugcugguccucugggggauccaccaccccagcaccuccgccgaccagcagagccuguaccagaacgccgacgccuacguguucgugggcacgucccgcuacagcaagaaguucaagcccgagaucgccauccggccgaagguccgcgaccgggagggccgcaugaacuacuacuggacccugguggagcccggggacaagaucaccuucgaggcgaccggcaaccucguggucccccgguacgccuucacgauggagcgcaacgccggguccggcaucaucaucagcgacacccccgugcacgacugcaacacgaccugccagaccccgaagggcgccaucaacaccucccugcccuuccagaacauccaccccaucaccaucgggaagugccccaaguacgucaagagcaccaagcugcggcucgccacgggccugcgcaacgugccguccauccagagccgggggcuguucggcgcgaucgccggguucaucgagggcggcuggaccgggaugguggacggcugguacggguaccaccaccagaacgagcagggcuccggguacgccgccgaccucaagagcacccagaacgccaucgacgagaucaccaacaaggugaacuccgucaucgagaagaugaacacgcaguucaccgcggugggcaaggaguucaaccaccuggagaagcgcaucgagaaccugaacaagaaggucgacgacggcuuccucgacaucuggaccuacaacgccgagcugcuggugcuccuggagaacgagcggacccuggacuaccacgacagcaacgugaagaaccucuacgagaagguccgcucccagcugaagacgaacgccaaggagaucgggaacggcugcuucgaguucuaccacaagugcgacaacacgugcauggagagcgugaagaacgggaccuacgacuaccccaaguacuccgaggaggccaagcugaaccgggaggagaucgacggcgugaagcucgagagcacccgcaucuaccagauccuggccaucuacuccaccgucgcgagcagccuggugcucguggucucccugggggccaucagcuucuggaugugcuccaacggcagccugcagugccggaucugcaucuga

SEQ ID NO: 76794 - RNA, 1701 nt, Artificial Sequence
  derived and/or modified CDS sequence (opt1) from hemagglutinin__InfluenzaA__AIR93993
augaaggccauccuggugguccuccuguacaccuucgccaccgcgaacgccgacacgcugugcaucggcuaccacgccaacaacagcaccgacaccguggacaccgugcucgagaagaacgucacggugacccacuccgugaaccugcuggaggacaagcacaacgggaagcucugcaagcugaagggcgucgcgccccugcaccucgggaagugcaacaucgccggcuggauccuggggaacccggagugcggcagccuguccaccgccagcuccuggagcuacaucguggagaccuccagcuccgacaacggcacgugcuaccccggggacuucaucgacuacgaggagcuccgcgagcagcugagcuccgugagcuccuucgagcgguucgagaucuuccccaagaccagcuccuggcccaaccacgacagcaacaagggcgucaccgccgccugcccgaacgccggguccaagagcuucuacaagaaccugaucuggcucgugaagaagggcaacuccuaccccaagcugagcaagagcuacaucaacgacaaggggaaggaggugcugguccucuggggcauccaccaccccuccaccagcgcggaccagcagucccuguaccagaacgccgacgccuacguguucgugggcacgagccgcuacuccaagaaguucaagcccgagaucgccauccggccgaagguccgcgggcaggagggccggauggacuacuacuggacccugguggagcccggggacaagaucaccuucgaggccaccggcaaccucguggucccccgcuacgcguucgccauggagcggaacacgggcagcgggaucaucaucuccgacacccccgugcacgacugcaacaccaucugccagaccccgaagggcgccaucaacacgagccugcccuuccagaacauccaccccaucaccaucgggaagugccccaaguacgugaaguccaccaagcugcgccucgccaccggccugcggaacgucccgagcauccagucccgcgggcuguucggcgccaucgcgggcuucaucgagggcggguggacggggaugguggacggcugguacggguaccaccaccagaacgagcagggcagcggcuacgccgccgaccucaaguccacccagaacgccaucgacgagaucaccaacaaggugaacagcgucaucgagaagaugaacacccaguucacggccguggggaaggaguucaaccaccuggagaagcggaucgagaaccugaacaagaaggucgacgacggcuuccucgacaucuggaccuacaacgcggagcugcuggugcuccuggagaacgagcgcacccuggacuaccacgacuccaacgugaagaaccucuacgagaagguccggagccagcugaagaacaacgccaaggagaucgggaagggcugcuucgaguucuaccacaagugcgacaccaugugcauggaguccgugaagaacgggacguacgacuaccccaaguacagcgaggaggccaagcugaaccgcgaggagaucgacggcgugaagcucgaguccacccggaucuaccagauccuggccaucuacagcaccgucgccagcucccuggugcucguggucagccugggcgcgaucuccuucuggaugugcagcaacgggucccugcagugccgcaucugcaucuga

SEQ ID NO: 76795 - RNA, 1701 nt, Artificial Sequence
  derived and/or modified CDS sequence (opt1) from hemagglutinin__InfluenzaA__AIR94000
augaaggccauccuggugguccuccuguacaccuucgccaccgcgaacgccgacacgcugugcaucggcuaccacgccaacaacagcaccgacaccguggacaccgugcucgagaagaacgucacggugacccacuccgugaaccugcuggaggacaagcacaacgggaagcucugcaagcugcgcggcgucgcgccccugcaccucgggaagugcaacaucgccggcuggauccuggggaacccggagugcgagagccuguccaccgccagcuccuggagcuacaucguggagaccuccagcuccgacaacggcacgugcuaccccggcgacuucaucgacuacgaggagcuccgggagcagcugagcuccgugagcuccuucgagcgcuucgagaucuuccccaagaccagcuccuggcccaaccacgacagcaacaagggggucaccgccgccugcccgcacgccggcgcgaaguccuucuacaagaaccugaucuggcucgugaagaaggggaacagcuaccccaagcuguccaagagcuacaucaacgacaagggcaaggaggugcugguccucugggggauccaccaccccagcaccuccgccgaccagcagagccuguaccagaacgccgacgccuacguguucgugggcacgucccgguacagcaagaaguucaagcccgagaucgccauccgcccgaagguccgggaccaggagggccgcaugaacuacuacuggacccugguggagcccggggacaagaucaccuucgaggcgaccggcaaccucguggucccccgguacgccuucgccauggagcgcaacgccggguccggcaucaucaucagcgacacgcccgugcacgacugcaacacgaccugccagaccccgaagggcgccaucaacaccuccuuccccuuccagaacauccaccccaucaccaucgggaagugccccaaguacgucaagagcaccaagcugcggcuggcgaccggccuccgcaacgugccguccauccagagccgggggcuguucggcgccaucgccggguucaucgagggcggcuggacggggaugguggacggcugguacggguaccaccaccagaacgagcagggcuccggguacgccgccgaccucaagagcacccagaacgcgaucgacgagaucaccaacaaggugaacuccgucaucgagaagaugaacacccaguucacggccgugggcaaggaguucaaccaccuggagaagcgcaucgagaaccugaacaagaaggucgacgacggcuuccuggacaucuggaccuacaacgccgagcuccuggugcugcucgagaacgagcggacccuggacuaccacgacagcaacgugaagaaccuguacgagaagguccgcucccagcucaagaccaacgccaaggagaucgggaacggcugcuucgaguucuaccacaagugcgacaacacgugcauggagagcgugaagaacgggaccuacgacuaccccaaguacuccgaggaggccaagcugaaccgggaggagaucgacggcgugaagcuggagagcacccgcaucuaccagauccucgcgaucuacuccaccgucgccagcagccuggugcugguggucucccucggggccaucagcuucuggaugugcuccaacggcagccugcagugccggaucugcaucuga

SEQ ID NO: 76796 - RNA, 1683 nt, Artificial Sequence
  derived and/or modified CDS sequence (opt1) from hemagglutinin__InfluenzaA__AIR94116
auggagaccgccagccugaucaccauccuccugguggucacgguguccaacgccgacaagaucugcaucggcuaccagagcaccaacuccaccgagaccguggacacgcugaccgagaacaacguccccgugacccacgcgaaggagcuccugcacaccgagcacaacgggaugcugugcgccacgagccucggccacccgcugauccuggacacgugcaccaucgaggggcucaucuacggcaaccccuccugcgaccugcugcucgggggccgcgaguggagcuacaucguggagcggcccuccgccgucaacggccugugcuaccccgggaacguggagaaccuggaggagcuccgcagccuguucuccagcgcccgguccuaccagcgcauccagaucuucccggacaccaucuggaacgugagcuacuccggcaccagcaaggccugcuccgacagcuucuaccgguccaugcgcuggcugacccagaaggacaacgcguaccccauccaggacgcccaguacaccaacaaccaggggaagaacauccucuucauguggggcaucaaccacccgcccaccgacacggcccagaccaaccuguacacccggaccgacacgaccaccagcgucgccaccgaggagaucaaccgcacguucaagccccugaucgggccccggccccucgugaacggccugaugggccgcaucaacuacuacugguccgugcugaagcccgggcagacccuccggaucaagagcaacggcaaccugaucgcgccgugguacgggcacauccugagcggcgagucccacggccgcauccucaagaccgaccugaagcgggggagcugcaccguccagugccagacggagaagggcgggcugaacaccacccuccccuuccagaacguguccaaguacgccuucggcaacugcagcaaguacaucgggaucaagucccugaagcuggccgugggccuccgcaacguccccagccgguccagccgcggccuguucggggccaucgccggcuucaucgagggcgggugguccgggcugguggcgggcugguacggcuuccagcacagcaacgaccagggggugggcauggccgccgaccgggacuccacccagaaggccaucgacaagaucacgagcaaggucaacaacaucguggacaagaugaacaagcaguacgagaucaucgaccacgaguucaacgagguggagacccgccucaacaugaucaacaacaagaucgacgaccagauccaggacaucugggccuacaacgcggagcugcugguccuccuggagaaccagaagacccuggacgagcacgacgccaacgugaacaaccucuacaacaaggugaagcgggcccugggguccaacgccgucgaggacggcaaggggugcuucgagcuguaccacaagugcgacgaccagugcauggagaccauccgcaacggcacguacaaccggcgcaaguaccaggaggagagcaagcucgagcgccagaagaucgagggcgugaagcuggaguccgaggggaccuacaagauccugaccaucuacagcaccgucgccuccagccucgugaucgcgaugggcuucgccgccuuccuguucugggccauguccaacgggagcugccggugcaacaucugcaucuga

SEQ ID NO: 76797 - RNA, 1701 nt, Artificial Sequence
  derived and/or modified CDS sequence (opt1) from hemagglutinin__InfluenzaA__AIT38333
augaagaccaucaucacccugagcuacauccucugccacguguucgcccagaagauccacggcuccgacagcuccacggccacccugugccuggggcaccacgcgguccccaacggcacccucgugaagaccaucacgaacgaccagaucgaggugaccaacgccaccgagcugguccagagcuccagcaccgggcgcaucugcgacaacccgcaccggauccuggacggcaagaacugcacgcucaucgacgcccugcugggggacccccacugcgacgaguuccagaacaaggagugggaccucuucguggagcgcuccaacgccuacagcgacugcuaccccuacuacgugcccgacuacgccucccugcggagccuggucgcguccagcggcacccucgaguucaacaacgaguccuucaacuggaccggcaucagccaggacgggaccuccagcuccugccgccggggcagcgugaaguccuucuucagccgccugaacuggcugcacgggcucgaguacaaguacccggcccagaacgugacgaugcugaacaacgacgaguucgacaagcuguacaucuggggcguccaccaccccagcaccgacuccgaccagaccagccucuacgugcagaccuccgggcgggugacggucagcaccaagcgcucccagcagaccgugauccccaacaucggcagccggcccugggugcgcggcaucuccagccggaucuccauccacuggaccaucgucaagccgggggacauccugcugaucaacagcacgggcaaccucaucgcgccccgcggguacuucaagauccggggcggcaaguccagcaucaugcgcuccgacgcccccaucgacaacugcgacagcgagugcgugacccccaacgggaacaucccgaacgacaagcccuuccagaacgugaaccggaucaccuacggccccugcccccgcuacaucaagcagaacacccugaagcuggccacggggaugcggaacgucccggagaagcagacccgcggcgugcucggggccaucgccggcuucaucgagaacggcugggaggggaugguggacggcugguacggguuccggcaccagaacuccgagggcaccgggcaggccgccgaccucaagagcacccaggcggccaucgaccagaucaacggcaagcugaaccgccugaucggcaagacgaacgagaaguuccaccagaucgagaaggaguucuccgagaucgaggggcggguccaggaccuggagaaguacguggaggacaccaagaucgaccuguggagcuacaacgccgagcuccuggugguccuggagaaccagcacaccaucgaccucaccgacuccgagaugaacaagcuguucgagcgcacgcgccggcagcugcgcgagaacgccgaggacaugggcaacgggugcuucaagaucuaccacaagugcgacaacgccugcaucggcagcauccggaacgggaccuacgugcacgacgucuaccgcgacgaggcgcucaacaaccgguuccagaucaagggcguggagcucaagagcggcuacaaggacuggauccuguggaucuccuucgccaucagcugcuuccugcugugcgccgugcugcucggguucaucaccugggccugccagaagggcaacauccgcugcaacaucugcaucuga

SEQ ID NO: 76798 - RNA, 1698 nt, Artificial Sequence
  derived and/or modified CDS sequence (opt1) from hemagglutinin__InfluenzaA__AIT38344
augaagaucaagcugcucauccugcugugcaccuucaccgccacguacgccgacaccaucugcaucggcuaccacgcgaacaacagcaccgacaccguggacacgguccucgagaagaacgugaccgugacccacuccgucaaccugcuggaggacagccacaacgggaagcucugccugcugcgcggcaucgcgccccuccagcuggggaacugcuccguggccggcuggauccuggggaacccggagugcgagagccucaucuccaaggagagcugguccuacaucguggagaagcccaaccccgagaacgggaccugcuaccccggcuacuucgccgacuacgaggagcugcgggagcagcugagcuccgucagcuccuucgagcgcuucgagaucuucccgaaggagagcuccuggcccaaccacacggugaccggggugagcgccuccugcagcuacaacggcaaggggaacuucuacaagaaccuccuguggcugacccggaagaacggccucuaccccaaccuguccaagagcuacaccaacaacaaggagaaggagguccugauccucuggggcgugcaccaccccuccaacaucaaggaccagcgcacgcuguaccacaccgagaacgccuacgugagcgucgugagcucccacuacagccggcgcuucaccccggagaucaccaagcggcccaaggugcgcgaccaggagggccggaucaacuacuacuggacgcugcucgagcccggcgacaccaucaucuucgaggccaacgggaaccugaucgcccccugguacgccuucgcgcugucccgcggcuucgggagcggcaucaucaccuccaacgccccgauggacgagugcgaggccaagugccagacgccccggggcgccaucaacagcucccuccccuuccagaacguccaccccgugaccaucggggagugcccgaaguacgugcgcagcgccaagcugcggauggucaccggccugcgcaacauccccuccauccagagccggggccucuucggggcgaucgccggguucaucgagggcggcuggaccgggaugaucgacggcugguacggguaccaccaccagaacgagcagggcuccggguacgccgccgacaaggagagcacccagaacgccaucaacggcaucacgaacaaggugaacuccgugaucgagaagaugaacacccaguucaccaccgucggcaaggaguucaacaagcuggagcgccggauggagaaccugaacaagaagguggacgacggguuccucgacaucuggacguacaacgcggagcugcuggugcuccuggagaacgagcgcacccuggacuuccacgacagcaacgucaagauccucuacgagaaggugaagucccagcugaagaacaacgccaaggagaucggcaacgggugcuucgaguucuaccacaagugcaacaacgagugcauggagagcgucaagaacggcaccuacgacuaccccaaguacuccgaggagagcaagcugaaccgggagaagaucgacggggugaagcucgaguccaugggcguguaccagauccuggccaucuacagcaccgucgccagcucccuggugcuccuggugagccugggcgccaucuccuucuggaugugcagcaacgggucccuccagugccgcaucugcaucuga

SEQ ID NO: 76799 - RNA, 1698 nt, Artificial Sequence
  derived and/or modified CDS sequence (opt1) from hemagglutinin__InfluenzaA__AIT38360
augaagaucaagcugcucauccugcugugcaccuucaccgccacguacgccgacaccaucugcaucggcuaccacgcgaacaacagcaccgacaccguggacacgguccucgagaagaacgugaccgugacccacuccgucaaccugcuggaggacagccacaacgggaagcucugccugcugaagggcaucgcgccccuccagcuggggaacugcuccguggccggcuggauccuggggaacccggagugcgagagccucaucuccaaggagagcugguccuacaucguggagaagcccaaccccgagaacgggaccugcuaccccggcuacuucgccgacuacgaggagcugcgcgagcagcugagcuccgucagcuccuucgagcgguucgagaucuucccgaaggagagcuccuggcccaaccacacggugaccggggugagcgccuccugcagcuacaacggcaaggggaacuucuacaagaaccuccuguggcugacccgcaagaacggccucuaccccaaccuguccaagagcuacaccaacaacaaggagaaggagguccugauccucuggggcgugcaccaccccuccaacaucgaggaccagcggacgcuguaccacaccgagaacgccuacgugagcgucgugagcucccacuacagccgccgguucaccccggagaucaccaagcgccccaaggugcggggccaggagggccgcaucaacuacuacuggacgcugcucgagcccggggacaccaucaucuucgaggccaacggcaaccugaucgcccccugguacgccuucgcgcugucccgggggcucggcagcggcaucaucaccuccaacgccccgauggacgagugcgaggccaagugccagacgccccgcggggccaucaacagcucccugcccuuccagaacguccaccccgugaccaucggcgagugcccgaaguacgugcggagcgccaagcugcgcauggucaccgggcuccggaacauccccuccauccagagccgcggccuguucggggcgaucgccggcuucaucgagggcggguggaccggcaugaucgacgggugguacggcuaccaccaccagaacgagcagggguccggcuacgccgccgacaaggagagcacccagaacgccaucaacggcaucacgaacaaggugaacuccgugaucgagaagaugaacacccaguucaccaccgucgggaaggaguucaacaagcuggagcggcgcauggagaaccucaacaagaagguggacgacggcuuccuggacaucuggacguacaacgcggagcugcucgugcugcuggagaacgagcggacccucgacuuccacgacagcaacgucaagaaccuguacgagaaggugaagucccagcugaagaacaacgccaaggagaucgggaacggcugcuucgaguucuaccacaagugcaacaacgagugcauggagagcgucaagaacgggaccuacgacuaccccaaguacuccgaggagagcaagcucaaccgcgagaagaucgacggcgugaagcuggaguccaugggcguguaccagauccuggccaucuacagcaccgucgccagcucccucgugcugcuggugagccucggggccaucuccuucuggaugugcagcaacggcucccugcagugccggaucugcaucuga

SEQ ID NO: 76800 - RNA, 1701 nt, Artificial Sequence; identical to SEQ ID NO: 74064
  derived and/or modified CDS sequence (opt1) from hemagglutinin__InfluenzaA__AIT93147

SEQ ID NO: 76801 - RNA, 1701 nt, Artificial Sequence; identical to SEQ ID NO: 66693
  derived and/or modified CDS sequence (opt1) from hemagglutinin__InfluenzaA__AIU39700

SEQ ID NO: 76802 - RNA, 1701 nt, Artificial Sequence
  derived and/or modified CDS sequence (opt1) from hemagglutinin__InfluenzaA__AIU39702
augaaggccauccuggugguccuccuguacaccuucgccaccgcgaacgccgacacgcugugcaucggcuaccacgccaacaacagcaccgacaccguggacaccgugcucgagaagaacgucacggugacccacuccgugaaccugcuggaggacaagcacaacgggaagcucugcaagcugcgcggcgucgcgccccugcaccucgggaagugcaacaucgccggcuggauccuggggaacccggagugcgagagccuguccaccgccagcuccuggagcuacaucguggagaccuccagcuccgacaacggcacgugcuaccccggcgacuucaucgacuacgaggagcuccgggagcagcugagcuccgugagcuccuucgagcgcuucgagaucuuccccaagaccagcuccuggcccaaccacgacagcaacaagggggucaccgccgccugcccgcacgccggcgcgaaguccuucuacaagaaccugaucuggcucgugaagaaggggaacagcuaccccaagcuguccaagagcuacaucaacgacaagggcaaggaggugcugguccucugggggauccaccaccccagcaccuccgccgaccagcagagccuguaccagaacgccgacgccuacguguucgugggcacgucccgguacagcaagaaguucaagcccgagaucgccauccgcccgaagguccgggaccaggagggccgcaugaacuacuacuggacccugguggagcccggggacaagaucaccuucgaggcgaccggcaaccucguggucccccgguacgccuucgccauggagcgcaacgccggguccggcaucaucaucagcgacacgcccgugcacgacugcaacacgaccugccagaccccgaagggcgccaucaacaccuccuuccccuuccagaacauccaccccaucaccaucgggaagugccccaaguacgucaagagcaccaagcugcggcuggcgaccggccuccgcaacaucccguccauccagagccgggggcuguucggcgccaucgccggguucaucgagggcggcuggacggggaugguggacggcugguacggguaccaccaccagaacgagcagggcuccggguacgccgccgaccucaagagcacccagaacgcgaucgacgagaucaccaacaaggugaacuccgugaucgagaagaugaacacccaguucacggccgucggcaaggaguucaaccaccuggagaagcgcaucgagaaccugaacaagaagguggacgacggcuuccuggacaucuggaccuacaacgccgagcuccugguccugcucgagaacgagcggacccuggacuaccacgacagcaacgugaagaaccuguacgagaaggugcgcucccagcucaagaacaacgccaaggagaucgggaacggcugcuucgaguucuaccacaagugcgacaacacgugcauggagagcgucaagaacgggaccuacgacuaccccaaguacuccgaggaggccaagcugaaccgggaggagaucgacggcgugaagcuggagagcacccgcaucuaccagauccucgcgaucuacuccaccguggccagcagccugguccugguggugucccucggggccaucagcuucuggaugugcuccaacggcagccugcagugccggaucugcaucuga

SEQ ID NO: 76803 - RNA, 1701 nt, Artificial Sequence; identical to SEQ ID NO: 70933
  derived and/or modified CDS sequence (opt1) from hemagglutinin__InfluenzaA__AIU39704

SEQ ID NO: 76804 - RNA, 1704 nt, Artificial Sequence
  derived and/or modified CDS sequence (opt1) from hemagglutinin__InfluenzaA__AIU46609
auggagaagaucgugcugcuccuggccaucgucagccuggugaaguccgaccagaucugcaucggcuaccacgccaacaacagcaccgagcaggucgacaccaucauggagaagaacgugacggugacccacgcgcaggacauccucgagaagacccacaacgggaagcugugcgaccugaacggcgugaagccccucauccugaaggacugcuccgucgccggguggcugcucggcaacccgaugugcgacgaguucauccgcgugcccgaguggagcuacaucguggagcgggccaaccccgccaacgaccugugcuaccccgggaaccugaacgacuacgaggagcucaagcaccuccugucccgcaucaaccacuucgagaagauccugaucauccccaagagcuccuggaccaaccacgagacgagccugggcgucuccgccgcgugcccguaccagggcacccccagcuucuuccggaacgugguguggcugaucaagaagaacgacgccuaccccaccaucaagaucuccuacaacaacaccaaccaggaggaccuccugauccugugggggauccaccacagcaacaacgccgccgagcagacgaaccucuacaagaacccgaccaccuacaucuccgucggcaccagcacgcugaaccagcgccuggugcccaagaucgcgacccggucccaggugaacgggcagcgcggccggauggacuucuucuggaccauccucaagcccaacgacgccauccacuucgagagcaacgggaacuucaucgcccccgaguacgccuacaagaucgucaagaagggcgacuccaccaucaugaaguccgagguggaguacggccacugcaacacgaagugccagaccccgaucggggccaucaacagcagcaugcccuuccacaacauccacccccugaccaucggcgagugccccaaguacgucaagagcaacaagcuggugcucgcgaccgggcugcgcaacuccccgcugcgggagaagcgccggaagcgcggccucuucggcgccaucgccggguucaucgagggcggguggcagggcaugguggacgggugguacggcuaccaccacagcaacgagcagggcuccggguacgccgccgacaaggagagcacgcagaaggcgaucgacggcgugaccaacaaggucaacuccaucaucgacaagaugaacacccaguucgaggccguggggcgggaguucaacaaccuggagcgccggaucgagaaccugaacaagaagauggaggacggcuuccucgacguguggaccuacaacgccgagcugcugguccucauggagaacgagcgcacgcuggacuuccacgacagcaacgugaagaaccuguacgacaagguccggcuccagcugcgcgacaacgccaaggagcuggggaacggcugcuucgaguucuaccacaagugcgacaacgagugcauggaguccgugcggaacggcaccuacgacuacccccaguacagcgaggaggcccgccucaagcgggaggagaucuccggggugaagcuggagagcaucggcaccuaccagauccuguccaucuacagcaccgucgcguccagccucgcccuggccaucaucguggccgggcugucccucuggaugugcagcaacggcucccugcagugccgcaucugcaucuga

SEQ ID NO: 76805 - RNA, 1689 nt, Artificial Sequence
  derived and/or modified CDS sequence (opt1) from hemagglutinin__InfluenzaA__AIU46714
auggccaucaucuaccugauccuccuguucaccgccgugcgcggcgaccagaucugcaucggguaccacgcgaacaacagcaccgagaaggucgacacgauccuggagcggaacgugaccgugacccacgccaaggacauccucgagaagacccacaacggcaagcugugcaagcugaacgggaucccgccccucgagcugggcgacugcuccaucgccggguggcugcucggcaaccccgagugcgaccgccugcugcggguccccgaguggagcuacaucauggagaaggagaaccccaaguacucccucugcuacccgggcagcuucaacgacuacgaggagcugaagcaccuccuguccagcgugaagcacuucgagaaggugaagauccugcccaaggacggguggacgcagcacaagaccgacggcggguccaaggccugcgccgucagcggcaagcaguccuucuuccgcaacaugguguggcugaccaagaaggggcagaacuaccccguggcgaagcggagcuacaacaacaccuccggcgagcagaugcucaucaucuggggcguccaccaccccaacgacgaggaggagcagcgcgcccuguaccagaagguggggacguacgugagcgccuccaccagcacccugaacaagcgguccaccccggagaucgccgcgcgccccgaggucaacggccucgggagccggauggaguucuccuggacgcugcuggacgugugggacaccaucaacuucgagagcaccggcaaccucguggcccccgaguacggcuucaagaucuccaagcgcgggagcagcggcaucaucaagaccgaggggacgcugggcaacugcgagaccaagugccagacgccccugggggccaucaacaccacccucccguuccacaacguccacccccugaccaucggcgagugccccaaguacgugaaguccgagaagcuggugcucgccaccggccugcggaacgucccccagaucgagagccgcgggcuguucggcgccaucgcgggguucaucgagggcggguggcagggcaugguggacggcugguacggguaccaccacuccaacgaccagggcagcggguacgccgccgacaaggaguccacccagaaggccuucgaccggaucacgaacaaggugaacagcgucaucgagaagaugaacacccaguucgaggccgugggcaaggaguucuccaaccucgagcgccggcuggagaaccugaacaagaagauggaggacggguuccucgacguguggaccuacaacgcggagcugcugguccucauggagaacgagcgcacccuggacuuccacgacagcaacgugaagaaccuguacgacaagguccggaugcagcuccgcgacaacgugaaggagcugggcaacggcugcuucgaguucuaccacaagugcgacaacgagugcaugaacuccgugaagaacgggacguacgacuacccgaaguacgaggaggagagcaagcugaagcggaacgagaucaagggcgucaagcucuccagcauggggguguaccagauccuggccaucuacgccaccguggccggcucccugagccucgccaucaugaucgcgggcaucuccuucuggaugugcagcaacgggucccugcagugccgcaucugcaucuga

SEQ ID NO: 76806 - RNA, 1701 nt, Artificial Sequence
  derived and/or modified CDS sequence (opt1) from hemagglutinin__InfluenzaA__AIV09219
augaaggccauccuggugguccuccuguacaccuucgccaccacgaacgcggacauccugugcaucggcuaccacgccaacaacagcaccgacaccguggacaccgugcucgagaagaacgucacggugacccacuccgugaaccugcuggaggacaagcacaacgggaagcucugcaagcugcgcggcgucgcgccccugcaccucgggaagugcaacaucgccggcuggauccuggggaacccggagugcgagcugcucagcaccaccuccagcugguccuacaucguggagacgagcuccagcgacaacgggaccugcuaccccggcgacuucaucgacuacgaggagcugcgggagcagcuguccagcguguccagcuucgagcgcuucgagaucuuccccaagaccuccagcuggcccgaccacgacuccaacaagggcgucaccgccgccugcccgcacgccggcgccgggagcuucuacaagaaccucaucuggcuggugaagaagggcaacuccuaccccaagcugagcaaguccuacaucaacgacaaggggaaggaggugcucguccuguggggcauccaccacccgcccacgagcgccgaccagcagcggcuguaccagaacgcggacgccuacguguucgugggcaccagccgcuacuccaagaaguucaagcccgagaucgccauccggcccaagguccgcgaccaggaggggcggaugaacuacuacuggacccucguggagcccggcgacaagaucaccuucgaggccacggggaaccugguggucccccgcuacgccuucgcgauggagcggaacgccggcagcggcaucaucaccuccgacaccccggugcacgacugcaacaccacgugccagacccccaagggggccaucaacaccagccugcccuuccagaacauccaccccaucaccaucggcaagugcccgaaguacgugaaguccacgaagcuccgccuggccaccgggcugcggaacguccccagcauccagucccgcggccucuucggggccaucgcgggcuucaucgagggcggguggaccggcaugguggacgggugguacggcuaccaccaccagaacgagcaggggagcggcuacgccgccgaccugaaguccacccagaacgccaucgacgagaucacgaacaaggugaacagcgucaucgacaagaugaacacccaguucaccgccgugggcaaggaguucaaccaccuggagaagcggaucgagaaccucaacaagaaggucgacgacggguuccuggacaucuggaccuacaacgcggagcugcucgugcugcuggagaacgagcgcacgcucgacuaccacgacuccaacgugaagaaccuguacgagaagguccggagccagcugaagaacaacgccaaggagaucggcaacgggugcuucgaguucuaccacaagugcgacaacacgugcauggaguccgugaagaacggcaccuacgacuaccccaaguacagcgaggaggccaagcucaaccgcgaggagaucgacggggugaagcuggaguccacccggaucuaccagauccuggccaucuacagcaccgucgccuccagccucgugcugguggucucccugggcgcgaucagcuucuggaugugcagcaacggcucccuccagugccgcaucugcaucuga

SEQ ID NO: 76807 - RNA, 1701 nt, Artificial Sequence
  derived and/or modified CDS sequence (opt1) from hemagglutinin__InfluenzaA__AIW60689
augaagaccaucaucgcccugagcuacauccucugccugguguucgcccagaagcugcccggcaacgacaacuccaccgcgacgcucugccuggggcaccacgccgucccgaacggcacccuggugaagaccaucaccaacgaccagaucgaggugacgaacgccaccgagcucguccagagcuccagcaccgggcgcaucugcgacagcccccaccggauccuggacggcaagaacugcacccugaucgacgcccuccugggggacccccacugcgacggcuuccagaacaaggagugggaccuguucguggagcgcagcaaggccuacuccgacugcuaccccuacgacgugccggacuacgcgagccuccggucccuggucgccagcuccggcacgcuggaguucaccaacgagggguucaacuggaccggcguggcccaggacgggaccagcuacgccugcaagcgcggcuccgugaaguccuucuucucccggcucaacuggcugcacaagcuggaguacaaguaccccgcgcucaacgucacgaugcccaacaacgacaaguucgacaagcuguacaucuggggcgugcaccaccccagcaccgacuccgaccagaccagcaucuacgugcaggccuccgggcgcgucaccgugagcacgaagcggagccagcagaccgugaucccgaacaucggcucccgccccuggguccgggggaucagcucccgcaucagcaucuacuggaccaucgugaagcccggcgacauccugcucaucaacuccaccgggaaccugaucgcgccccggggcuacuucaagauccgcagcggcaaguccagcaucaugcgguccgacgccccgaucgggaacugcaacagcgagugcaucacgcccaacggcuccauccccaacgacaagcccuuccagaacgugaaccgcaucaccuacggggccugcccgcgguacgucaagcagaacacccugaagcucgccaccggcaugcgcaacgugcccgagaagcagacgcgggggaucuucggcgccaucgccggcuucaucgagaacgggugggagggcaugguggacgggugguacggcuuccgccaccagaacuacgaggggaccggccaggccgccgaccucaagagcacccaggcggccaucaaccagaucaacggcaagcugaaccggcugaucgagaagaccaacgagaaguuccaccagaucgagaaggaguucuccgaggucgaggggcgcauccaggaccuggagaaguacguggaggacacgaagaucgaccuguggagcuacaacgccgagcuccugguggcccuggagaaccagcacaccaucgaccucaccgacuccgagaugaacaagcuguucgagcggacccgcaagcagcugcgcgagaacgccgaggacaugggcaacgggugcuucaagaucuaccacaagugcgacaacgcgugcaucggcagcauccggaacgggacguacgaccacgacgccuaccgcgacgaggcccucaacaaccgguuccagaucaagggcgucgagcugaaguccggcuacaaggacuggauccuguggaucagcuucgccaucuccugcuuccuccugugcgugguccugcucggguucaucaugugggccugccagaagggcaacauccgcugcaacaucugcaucuga

SEQ ID NO: 76808 - RNA, 1701 nt, Artificial Sequence
  derived and/or modified CDS sequence (opt1) from hemagglutinin__InfluenzaA__AIW60690
augaagaccaucaucgcccugagcuacauccucugccugguguucgcccagaagcugcccggcaacgacaacuccaccgcgacgcucugccuggggcaccacgccgucccgaacggcacccuggugaagaccaucaccaacgaccagaucgaggugacgaacgccaccgagcucguccagagcuccagcaccgggcgcaucugcgacagcccccaccggauccuggacggcaagaacugcacccugaucgacgcccuccugggggacccccacugcgacggcuuccagaacaaggagugggaccuguucguggagcgcagcaaggccuacuccgacugcuaccccuacgacgugccggacuacgcgagccuccggucccuggucgccagcuccggcacgcuggaguucaccaacgagggguucaacuggaccggcguggcccaggacgggaccagcuacgccugcaagcgcggcuccgugaaguccuucuucucccggcucaacuggcugcacaagcuggaguacaaguaccccgcgcucaacgucacgaugcccaacaacgacaaguucgacaagcuguacaucuggggcgugcaccaccccagcaccgacuccgaccagaccagccuguacgugcaggccuccgggcgcgucaccgugagcacgaagcggagccagcagaccgugaucccgaacaucggcucccgccccuggguccgcggggugagcucccggaucagcaucuacuggaccaucgugaagcccggcgacauccuccugaucaacuccaccgggaaccugaucgcgccccggggcuacuucaagauccgcagcggcaaguccagcaucaugcgguccgacgccccgaucgggaacugcaacagcgagugcaucacgcccaacggcuccauccccaacgacaagcccuuccagaacgucaaccgcaucaccuacggggccugcccgcgguacgugaagcagaacacccucaagcuggccaccggcaugcgcaacgugcccgagaagcagacgcgggggaucuucggcgccaucgccggcuucaucgagaacgggugggagggcauggucgacgggugguacggcuuccgccaccagaacuacgaggggaccggccaggccgccgaccucaagagcacccaggcggccaucaaccagaucaacggcaagcugaaccggcugaucgagaagaccaacgagaaguuccaccagaucgagaaggaguucuccgagguggaggggcgcauccaggaccuggagaaguacguggaggacacgaagaucgaccucuggagcuacaacgccgagcugcuggucgcccucgagaaccagcacaccaucgaccugaccgacuccgagaugaacaagcuguucgagcggacccgcaagcagcuccgcgagaacgccgaggacaugggcaacgggugcuucaagaucuaccacaagugcgacaacgcgugcaucggcagcauccggaacgggacguacgaccacgacgccuaccgcgacgaggcccugaacaaccgguuccagaucaagggcguggagcugaaguccggcuacaaggacuggauccucuggaucagcuucgccaucuccugcuuccugcugugcgucgugcuccugggguucaucaugugggccugccagaagggcaacauccgcugcaacaucugcaucuga

SEQ ID NO: 76809 - RNA, 1701 nt, Artificial Sequence
  derived and/or modified CDS sequence (opt1) from hemagglutinin__InfluenzaA__AIW60691
augaagaccaucaucgcccugagcuacauccucugccugguguucgcccagaagcugcccggcaacgacaacuccaccgcgacgcucugccuggggcaccacgccgucccgaacggcacccuggugaaggccaucaccaacgaccagaucgaggugaccaacgccacggagcucguccagagcuccagcaccgggcgcaucugcgacagcccccaccggauccuggacggcaagaacugcacccugaucgacgcccuccugggggacccccacugcgacggcuuccagaacaaggagugggaccuguucguggagcgcagcaaggcguacuccgacugcuaccccuacgacgugccggacuacgccagccuccggucccuggucgccagcuccggcacccuggaguucacgaacgagggguucaacuggaccggcguggcccaggacgggaccagcuacgcgugcaagcgcggcuccgugaaguccuucuucucccggcucaacuggcugcacaagcuggaguacaaguaccccgcccucaacgucaccaugcccaacaacgacaaguucgacaagcuguacaucuggggcgugcaccaccccagcacggacuccgaccagacccgccuguacgugcaggccagcgggcgggucaccguguccaccaagcgcagccagcagacggugaucccgaacaucggcagccggcccuggguccgcgggaucuccagccggaucuccaucuacuggaccaucgugaagcccggcgacauccuccugaucaacagcaccgggaaccugaucgcgccccgcggcuacuucaagauccgguccggcaagagcuccaucaugcgcagcgacgccccgaucgggaacugcaacuccgagugcaucacccccaacggcagcauccccaacgacaagcccuuccagaacgugaaccggaucacguacggggccugcccgcgcuacgucaagcagaacacccucaagcuggccaccggcaugcggaacgugcccgagaagcagacccgcgggaucuucggcgccaucgccggcuucaucgagaacgggugggagggcaugguggacgggugguacggcuuccggcaccagaacuccgaggggacgggccaggccgcggaccucaagagcacccaggccgccaucaaccagaucaacggcaagcugaaccgccugaucgagaagaccaacgagaaguuccaccagaucgagaaggaguucuccgaggucgaggggcggauccaggaccuggagaaguacguggaggacaccaagaucgaccucuggagcuacaacgccgagcugcugguggcccucgagaaccagcacacgaucgaccugaccgacuccgagaugaacaagcuguucgagcgcacccgcaagcagcuccgggagaacgcggaggacaugggcaacgggugcuucaagaucuaccacaagugcgacaacgccugcaucggcagcauccgcaacgggaccuacgaccacgacgucuaccgggacgaggcccugaacaaccgcuuccagaucaagggcguggagcugaaguccggcuacaaggacuggauccucuggaucagcuucgccaucuccugcuuccugcugugcgucgugcuccugggguucaucaugugggccugccagaagggcaacauccggugcaacaucugcaucuga

SEQ ID NO: 76810 - RNA, 1701 nt, Artificial Sequence
  derived and/or modified CDS sequence (opt1) from hemagglutinin__InfluenzaA__AIW60692
augaagaccaucaucgcccugagcuacauccucugccugguguucgcccagaagcugcccggcaacgacaacuccaccgcgacgcucugccuggggcaccacgccgucccgaacggcacccuggugaaggccaucaccaacgaccagaucgaggugaccaacgccacggagcucguccagagcuccagcaccgggcgcaucugcgacagcccccaccggauccuggacggcaagaacugcacccugaucgacgcccuccugggggacccccacugcgacggcuuccagaacaaggagugggaccuguucguggagcgcagcaaggcguacuccgacugcuaccccuacgacgugccggacuacgccagccuccggucccuggucgccagcuccggcacccuggaguucacgaacgagggguucaacuggaccggcguggcccaggacgggaccagcuacgcgugcaagcgcggcuccgugaaguccuucuucucccggcucaacuggcugcacaagcuggaguacaaguaccccgcccucaacgucaccaugcccaacaacgacaaguucgacaagcuguacaucuggggcgugcaccaccccagcacggacuccgaccagaccagccuguacgugcaggccuccgggcgcgucaccgugagcaccaagcggagccagcagacggugaucccgaacaucggcucccgccccuggguccgggggaucagcucccgcaucagcaucuacuggaccaucgugaagcccggcgacauccuccugaucaacuccaccgggaaccugaucgcgccccggggcuacuucaagauccgcagcggcaaguccagcaucaugcgguccgacgccccgaucgggaacugcaacagcgagugcaucacccccaacggcuccauccccaacgacaagcccuuccagaacgugaaccgcaucacguacggggccugcccgcgguacgucaagcagaacacccucaagcuggccaccggcaugcgcaacgugcccgagaagcagacccgggggaucuucggcgccaucgccggcuucaucgagaacgggugggagggcaugguggacgggugguacggcuuccgccaccagaacagcgaggggacgggccaggccgcggaccugaaguccacccaggccgccaucaaccagaucaacggcaagcucaaccggcugaucgagaagaccaacgagaaguuccaccagaucgagaaggaguucagcgaggucgaggggcgcauccaggaccuggagaaguacguggaggacaccaagaucgaccucugguccuacaacgccgagcugcugguggcccucgagaaccagcacacgaucgaccugaccgacagcgagaugaacaagcuguucgagcggacccgcaagcagcuccgcgagaacgcggaggacaugggcaacgggugcuucaagaucuaccacaagugcgacaacgccugcaucggcuccauccggaacgggaccuacgaccacgacgucuaccgcgacgaggcccugaacaaccgguuccagaucaagggcguggagcucaagagcggcuacaaggacuggauccuguggaucuccuucgccaucagcugcuuccugcugugcgucgugcuccugggguucaucaugugggccugccagaagggcaacauccgcugcaacaucugcaucuga

SEQ ID NO: 76811 - RNA, 1701 nt, Artificial Sequence
  derived and/or modified CDS sequence (opt1) from hemagglutinin__InfluenzaA__AIW60693
augaagaccaucaucgcccugagcuacauccucugccugguguucgcccagaagcugcccggcaacgacaacuccaccgcgacgcucugccuggggcaccacgccguccugaacggcacccucgugaagaccaucaccaacgaccagaucgaggugacgaacgccaccgagcugguccagaacagcuccaccgggcgcaucugcgacagcccgcaccagauccuggacggcgagaacugcacccucaucgacgcccugcugggggacccccacugcgacggcuuccagaacaaggagugggaccucuucguggagcgguccaaggccuacagcaacugcuaccccuacgacgugcccgacuacgcgucccugcgcagccuggucgccuccagcggcacgcucgaguucaacaacgaguccuucaacuggaccgggguggcccagaacggcaccagcuccgccugcaagcggcgcagcaucaaguccuucuucagccggcugaacuggcugcaccagcucaaguacaaguacccggcgcugaacgugaccaugcccaacaacgagaaguucgacaagcuguacaucuggggcguccaccaccccuccacggacagcgaccagaccuccaucuacgcccaggccagcgggcgcgugaccgugagcaccaagcggucccagcagacggucauccccaacaucgggagccgcccgugggugcggggcguguccagcaucaucuccaucuacuggaccaucgucaagcccggcgacauccuccugaucaacagcaccgggaaccugaucgcgccccgcggcuacuucaagauccgguccggcaagagcuccaucaugcgcagcgacgcccccaucgggaagugcaacuccgagugcaucaccccgaacggcagcauccccaacgacaagcccuuccagaacgugaaccggaucacguacggggccugcccccgcuacgugaagcagaacacccucaagcuggccaccggcaugcggaacgucccggagaagcagacccgcgggaucuucggcgccaucgccggguucaucgagaacggcugggagggcaugguggacgggugguacggcuuccggcaccagaacuccgaggggacgggccaggccgcggaccucaagagcacccaggccgccaucaaccagaucaacgggaagcugaaccgccugaucgagaagaccaacgagaaguuccaccagaucgagaaggaguucuccgagguggagggccggauccaggaccuggagaaguacgucgaggacaccaagaucgaccucuggagcuacaacgccgagcugcugguggcccucgagaaccagcacacgaucgaccugaccgacuccgagaugaacaagcuguucgagcgcacccggaagcagcuccgcgagaacgcggaggacaugggcaacgggugcuucaagaucuaccacaagugcgacaacgccugcaucggcagcauccgcaacgggaccuacgaccacgacguguaccgggacgaggcccugaacaaccgcuuccagaucaagggcgucgagcugaaguccggguacaaggacuggauccucuggaucagcuucgccaucagcugcuuccugcugugcgugguccuccugggcuucaucaugugggccugccagaagggcaacauccggugcaacaucugcaucuga

SEQ ID NO: 76812 - RNA, 1701 nt, Artificial Sequence
  derived and/or modified CDS sequence (opt1) from hemagglutinin__InfluenzaA__AIW60694
augaagaccaucaucgcccugagcuacauccucugccugguguucgcccagaagcugcccggcaacgacaacuccaccgcgacgcucugccuggggcaccacgccguccugaacggcacccucgugaagaccaucaccaacgaccagaucgaggugacgaacgccaccgagcugguccagaacagcuccaccgggcgcaucugcgacagcccgcaccagauccuggacggcgagaacugcacccucaucgacgcccugcugggggacccccacugcgacggcuuccagaacaaggagugggaccucuucguggagcgguccaaggccuacagcaacugcuaccccuacgacgugcccgacuacgcgucccugcgcagccuggucgccuccagcggcacgcucgaguucaacaacgaguccuucaacuggaccgggguggcccagaacggcaccagcuccgccugcaagcggcgcagcaucaaguccuucuucagccggcugaacuggcugcaccagcucaaguacaaguacccggcgcugaacgugaccaugcccaacaacgagaaguucgacaagcuguacaucuggggcguccaccaccccuccacggacagcgaccagaccucccucuacgcccaggccagcgggcgcgugaccgugagcaccaagcggucccagcagacggucauccccaacaucgggagccgcccgugggugcggggcguguccagccgcaucuccaucuacuggaccaucgucaagcccggcgacauccugcugaucaacagcaccgggaaccucaucgcgccccggggcuacuucaagauccgcuccggcaagagcuccaucaugcggagcgacgcccccaucgggaagugcaacuccgagugcaucaccccgaacggcagcauccccaacgacaagcccuuccagaacgugaaccgcaucacguacggggccugcccccgguacgugaagcagaacacccugaagcuggccaccggcaugcgcaacgucccggagaagcagacccgggggaucuucggcgccaucgccggguucaucgagaacggcugggagggcaugguggacgggugguacggcuuccgccaccagaacuccgaggggacgggccaggccgcggaccucaagagcacccaggccgccaucaaccagaucaacgggaagcugaaccggcugaucgagaagaccaacgagaaguuccaccagaucgagaaggaguucuccgagguggagggccgcauccaggaccucgagaaguacgucgaggacaccaagaucgaccuguggagcuacaacgccgagcugcucguggcccuggagaaccagcacacgaucgaccugaccgacuccgagaugaacaagcuguucgagcggacccgcaagcagcuccgcgagaacgcggaggacaugggcaacgggugcuucaagaucuaccacaagugcgacaacgccugcaucggcagcauccggaacgggaccuacgaccacgacguguaccgcgacgaggcccugaacaaccgguuccagaucaagggcgucgagcucaaguccggguacaaggacuggauccuguggaucagcuucgccaucagcugcuuccugcucugcgugguccugcugggcuucaucaugugggccugccagaagggcaacauccgcugcaacaucugcaucuga

SEQ ID NO: 76813 - RNA, 1701 nt, Artificial Sequence
  derived and/or modified CDS sequence (opt1) from hemagglutinin__InfluenzaA__AIW60695
augaagaccaucaucgcccugagcuacauccucugccugguguucgcccagaagcugcccggcaacgacaacuccaccgcgacgcucugccuggggcaccacgccgucccgaacggcacccuggugaagaccaucaccaacgaccagaucgaggugacgaacgccaccgagcucguccagagcuccagcaccgggggcaucugcgacagcccccaccagauccuggacggggagaacugcacccugaucgacgcccuccugggcgacccccacugcgacggcuuccagaacaaggagugggaccuguucguggagcgcagcaaggccuacuccaacugcuaccccuacgacgugccggacuacgcgagccuccggucccuggucgccagcuccgggacgcuggaguucaacaacgagagcuucaacuggaccggcguggcccagaacgggaccuccagcgccugcaagcgccgguccaacaagagcuucuucucccgccucaacuggcugcaccagcugaacuacaaguaccccgcgcucaacgugaccaugcccaacaacgagaaguucgacaagcuguacaucuggggcguccaccaccccagcacggacuccgaccagaucagcaucuacgcccaggccccggggcgggugaccgugagcaccaagcgcucccagcagaccgucauccccaacaucggcagccggcccugggugcgcggcguguccagcaucaucuccaucuacuggacgaucgucaagcccggggacauccugcucaucaacugcaccggcaaccugaucgccccgcggggguacuucaagauccgcagcggcaaguccagcaucaugcgguccgacgccagcaucggcaagugcaacuccgagugcaucacccccaacgggagcauccccaacgacaagcccuuccagaacgugaaccgcaucaccuacggcgcgugcccgcgguacgugaagcagaacacgcugaagcucgccaccgggaugcgcaacguccccgagaagcagacccggggcaucuucggggccaucgccggcuucaucgagaacggcugggaggggaugguggacggcugguacggguuccgccaccagaacuccgagggcaccgggcaggccgcggaccugaaguccacgcaggccgccaucaaccagaucaacggcaagcugaaccggcucaucgagaagaccaacgagaaguuccaccagaucgagaaggaguucuccgagguggagggccgcauccaggaccuggagaaguacgucgaggacaccaagaucgaccuguggagcuacaacgccgagcuccugguggcccuggagaaccagcacaccaucgaccucacggacuccgagaugaacaagcuguucgagcggaccaagaagcagcugcgcgagaacgcggaggacauggggaacggcugcuucaagaucuaccacaagugcgacaacgccugcaucgggagcauccggaacggcaccuacgaccacgacguguaccgcgacgaggcccucaacaaccgcuuccagaucaagggggucgagcugaaguccggcuacaaggacuggauccuguggaucagcuucgccaucagcugcuuccuccugugcgugguccugcucggcuucaucaugugggccugccagaaggggaacauccggugcaacaucugcaucuga

SEQ ID NO: 76814 - RNA, 1701 nt, Artificial Sequence
  derived and/or modified CDS sequence (opt1) from hemagglutinin__InfluenzaA__AIW60696
augaagaccaucaucgcccugagcuacauccucugccugguguucgcccagaagcugcccggcaacgacaacuccaccgcgacgcucugccuggggcaccacgccgucccgaacggcacccuggugaagaccaucaccaacgaccagaucgaggugacgaacgccaccgagcucguccagagcuccagcaccgggggcaucugcgacagcccccaccagauccuggacggggagaacugcacccugaucgacgcccuccugggcgacccccacugcgacggcuuccagaacaaggagugggaccuguucguggagcgcagcaaggccuacuccaacugcuaccccuacgacgugccggacuacgcgagccuccggucccuggucgccagcuccgggacgcuggaguucaacaacgagagcuucaacuggaccggcguggaccagaacgggaccuccagcgccugcaagcgccgguccaacaagagcuucuucucccgccucaacuggcugcaccagcugaaguacaaguaccccgcccucaacguggcgaugcccaacaacgagaaguucgacaagcuguacaucuggggcguccaccaccccagcaccgacuccgaccagaucagccuguacgcccaggccccggggcgggugacggugagcaccaagcgcucccagcagaccgucauccccaacaucggcagccggcccugggugcgcggcguguccagccggaucuccaucuacuggaccaucgucaagcccggggacauccuccugaucaacugcacgggcaaccugaucgccccgcgcggguacuucaagauccggagcggcaaguccagcaucaugcgcuccgacgccagcaucggcaagugcaacuccgagugcaucacccccaacgggagcauccccaacgacaagcccuuccagaacgugaaccggaucaccuacggcgcgugcccgcgcuacgugaagcagaacacccucaagcuggccacggggaugcggaacguccccgagaagcagacccgcggcaucuucggggccaucgccggcuucaucgagaacggcugggaggggaugguggacggcugguacggguuccggcaccagaacuccgagggcaccgggcaggccgcggaccugaaguccacccaggccgccaucaaccagaucaacggcaagcucaaccgccugaucgagaagacgaacgagaaguuccaccagaucgagaaggaguucuccgagguggagggccggauccaggaccuggagaaguacgucgaggacaccaagaucgaccucuggagcuacaacgccgagcugcugguggcccucgagaaccagcacaccaucgaccugaccgacuccgagaugaacaagcuguucgagcgcacgaagaagcagcuccgggagaacgcggaggacauggggaacggcugcuucaagaucuaccacaagugcgacaacgccugcaucgggagcauccgcaacggcaccuacgaccacgacguguaccgcgacgaggcccugaacaaccgguuccagaucaagggggucgagcugaaguccggcuacaaggacuggauccucuggaucagcuucgccaucagcugcuuccugcugugcgugguccuccugggcuucaucaugugggccugccagaaggggaacauccgcugcaacaucugcaucuga

SEQ ID NO: 76815 - RNA, 1701 nt, Artificial Sequence
  derived and/or modified CDS sequence (opt1) from hemagglutinin__InfluenzaA__AIW60697
augaagaccaucaucgcccugagcuacauccucugccugguguucgcccagaagcugcccggcaacgacaacuccaccgcgacgcucugccuggggcaccacgccgucccgaacggcaccaucgugaagaccaucaccaacgaccagaucgaggugacgaacgccaccgagcugguccagagcuccagcaccgggggcaucugcgacagcccccaccagauccucgacggggagaacugcacccugaucgacgcccugcucggcgacccccagugcgacggcuuccagaacaagaagugggaccuguucguggagcgcagcaaggccuacuccaacugcuaccccuacgacgugccggaccacgcgagccugcggucccucgucgccagcuccgggacgcuggaguucaacaacgagagcuucgacuggaccggcgugacccagaacgggaccuccagcuccugcaagcgccggagcaacaaguccuucuucagccgccugaacuggcucacgcaccugaaguacaaguaccccgcccugaacgugaccaugcccaacaacgagaaguucgacaagcucuacaucuggggcguccaccaccccgacaccgacuccgugcagaucagccuguacgcccaggcgagcgggcggaucaccguguccacgaagcgcagccagcagaccgucaucccgaacaucggcucccggccccgcgugcgggacaucagcucccgcaucagcaucuacuggaccaucgugaagcccggcgacauccugcucaucaacuccaccgggaaccugaucgcgccccggggcuacuucaagauccgcagcgggaaguccagcaucaugcgguccgacgccccgaucggcaagugcaacagcgagugcaucacgcccaacggcuccauccccaacgacaagcccuuccagaacgucaaccgcaucaccuacggggccugcccgcgguacgugaagcagaacacccugaagcucgccaccggcaugcgcaacgugcccgagaagcagacgcgggggaucuucggcgccaucgccggguucaucgagaacggcugggagggcauggucgacgggugguacggcuuccgccaccagaacagcgaggggaccggccaggccgccgaccugaaguccacccaggccgcgaucaaccagaucaacgggaagcugaaccggcucaucggcaagaccaacgagaaguuccaccagaucgagaaggaguucagcgagguggagggccgcauccaggaccuggagaaguacguggaggacacgaagaucgaccugugguccuacaacgccgagcuccuggucgcccuggagaaccagcacaccaucgaccucaccgacagcgagaugaacaagcuguucgagcggaccaagaagcagcugcgcgagaacgccgaggacauggggaacggcugcuucaagaucuaccacaagugcgacaacgccugcaucggguccauccgcaacggcacguacgaccacgacguguaccgggacgaggcgcucaacaaccgcuuccagaucaaggggguggagcugaaguccggcuacaaggacuggauccuguggaucagcuucgccaucuccugcuuccuccugugcgucgcccugcucggcuucaucaugugggccugccagaaggggaacauccggugcaacaucugcaucuga

SEQ ID NO: 76816 - RNA, 1701 nt, Artificial Sequence
  derived and/or modified CDS sequence (opt1) from hemagglutinin__InfluenzaA__AIW60698
augaagaccaucaucgcccugagcuacauccucugccugguguucgcccagaagcugcccggcaacgacaacuccaccgcgacgcucugccuggggcaccacgccgucccgaacggcaccaucgugaagaccaucaccaacgaccagaucgaggugacgaacgccaccgagcugguccagagcuccagcaccgggggcaucugcgacagcccccaccagauccucgacggggagaacugcacccugaucgacgcccugcucggcgacccccagugcgacggcuuccagaacaagaagugggaccuguucguggagcgcagcaaggccuacuccaacugcuaccccuacgacgugccggaccacgcgagccugcggucccucgucgccagcuccgggacgcuggaguucaacaacgagagcuucgacuggaccggcgugacccagaacgggaccuccagcgccugcaagcgccgguccaacaagagcuucuucucccgccugaacuggcucacgcaccugaaguacaaguaccccgcccugaacgugaccaugcccaacaacgagaaguucgacaagcucuacaucuggggcguccaccaccccgggaccgacagcgaccagaucucccuguacgcgcaggccagcggccggaucaccgugagcacgaagcgcucccagcagaccgugaucccgaacaucggcagccggccccgcguccgggacaucuccagccgcaucuccaucuacuggaccaucgugaagcccggggacauccugcucaucaacagcaccggcaaccugaucgcgccccggggguacuucaagauccgcuccggcaagagcuccaucaugcggagcgacgccccgaucggcaagugcaacuccgagugcaucacgcccaacgggagcauccccaacgacaagcccuuccagaacgugaaccgcaucaccuacggcgccugcccgcgguacgucaagcagaacacccugaagcucgccaccgggaugcgcaacgugcccgagaagcagacgcggggcaucuucggggccaucgccggcuucaucgagaacggcugggaggggaugguggacggcugguacggguuccgccaccagaacuccgagggcaccgggcaggccgccgaccugaaguccacccaggcggccaucaaccagaucaacggcaagcugaaccggcucaucggcaagaccaacgagaaguuccaccagaucgagaaggaguucuccgaggucgaggggcgcauccaggaccuggagaaguacguggaggacacgaagaucgaccuguggagcuacaacgccgagcuccugguggcccuggagaaccagcacaccaucgaccucaccgacuccgagaugaacaagcuguucgagcggaccaagaagcagcugcgcgagaacgccgaggacaugggcaacgggugcuucaagaucuaccacaagugcgacaacgcgugcaucggcagcauccgcaacgggacguacgaccacgacgucuaccgggacgaggcccucaacaaccgcuuccagaucaagggcguggagcugaaguccggcuacaaggacuggauccuguggaucagcuucgccaucagcugcuuccuccugugcguggcccugcucggguucaucaugugggccugccagaagggcaacauccggugcaacaucugcaucuga

SEQ ID NO: 76817 - RNA, 1701 nt, Artificial Sequence
  derived and/or modified CDS sequence (opt1) from hemagglutinin__InfluenzaA__AIW60699
augaagaccaucaucgcccugagcuacauccucugccugguguucgcccagaagcugcccggcaacgacaacuccaccgcgacgcucugcaucgggcaccacgccgucccgaacggcaccaucgugaagaccaucaccaacgaccagaucgaggugacgaacgccaccgagcugguccagagcuccagcaccgggggcaucugcgacagcccccaccagauccuggacggggagaacugcacccucaucgacgcccugcugggcgacccccagugcgacggcuuccagaacaagaagugggaccucuucguggagcgcagcaaggccuacuccaacugcuaccccuacgacgugccggacuacgcgagccugcggucccugaucgccagcuccgggacgcucgaguucaacaacgagagcuucaacuggaccggcgucacccagaacgggaccuccagcgccugcaagcgccgguccaacaacagcuucuucucccgccugaacuggcugacgcaccucaaguucaaguaccccgcccugaacgugaccaugcccaacaacgaggaguucgacaagcuguacaucuggggcgugcaccaccccgucaccgacaacgaccagaucagccucuacgcgcaggccuccgggaagaucaccgugagcacgaagcggagccagcagaccgugaucccgaacaucggcucccgcccccggguccgcgacauccccagccggaucuccaucuacuggaccaucgugaagcccggcgacauccugcugaucaagagcaccgggaaccucaucgccccgcgcggcuacuucaagauccgguccgggaaguccuccaucaugcgcagcgacgcccccaucggcaagugcaacuccgagugcaucacgcccaacggcagcauccccaacgacaagccguuccagaacgugaaccggaucaccuacggggccugcccccgcuacgucaagcagaacacccugaagcuggcgaccggcaugcggaacgugcccgagaagcagacgcgcgggaucuucggcgccaucgccggguucaucgagaacggcugggagggcaugguggacgggugguacggcuuccggcaccagaacuccgaggggaucggccaggccgccgaccucaagagcacccaggcggccaucgaccagaucaacgggaagcugaaccgccugaucggcaagaccaacgagaaguuccaccagaucgagaaggaguucuccgaggucgagggccggauccaggaccucgagaaguacguggaggacaccaagaucgaccuguggagcuacaacgccgagcugcucguggcccuggagaaccagcacacgaucgaccugaccgacuccgagaugaacaagcuguucgaggagaccaagaagcagcuccgcgagaacgccgaggacauggggaacggcugcuucaagaucuaccacaagugcgacaacgcgugcaucgggagcauccggaacggcaccuacgaccacgacgucuaccgcgacgaggcccugaacaaccgcuuccagaucaaggggguggagcucaaguccggcuacaaggacuggauccuguggaucagcuucgccaucuccugcuuccugcucugcguggcccugcugggcuucaucaugugggccugccagaaggggaacauccggugcaacaucugcaucuga

SEQ ID NO: 76818 - RNA, 1701 nt, Artificial Sequence
  derived and/or modified CDS sequence (opt1) from hemagglutinin__InfluenzaA__AIW60700
augaagaccaucaucgcccugagcuacauccucugccugguguucgcccagaagcugcccggcaacgacaacuccaccgcgacgcucugcaucgggcaccacgccgucccgaacggcaccaucgugaagaccaucaccaacgaccagaucgaggugacgaacgccaccgagcugguccagagcuccagcaccgggggcaucugcgacagcccccaccagauccuggacggggagaacugcacccucaucgacgcccugcugggcgacccccagugcgacggcuuccagaacaagaagugggaccucuucguggagcgcuccaaggccuacuccaacugcuaccccuacgacgugccggacuacgcgagccugcggucccugaucgccagcuccgggacgcucgaguucaacaacgagagcuucaacuggaccggcgucacccagaacgggaccuccagcgccugcaagcgccgguccaacaacagcuucuucucccgccugaacuggcugacgcaccucaaguucaaguaccccgcccugaacgugaccaugcccaacaacgaggaguucgacaagcuguacaucuggggcgugcaccaccccgggaccgacaacgaccagaucagccucuacgcgcaggccuccggcaagaucaccgucagcacgaagcggagccagcagaccgugaucccgaacaucggcucccgcccccgggugcgcgacauccccagccggaucuccaucuacuggaccaucgucaagcccggggacauccugcugaucaacagcaccggcaaccucaucgccccgcgcggguacuucaagauccgguccggcaagagcuccaucaugcgcagcgacgcccccaucggcaagugcaacuccgagugcaucacgcccaacgggagcauccccaacgacaagccguuccagaacgugaaccggaucaccuacggcgccugcccccgcuacgugaagcagaacacccugaagcuggcgaccgggaugcggaacguccccgagaagcagacgcgcggcaucuucggggccaucgccggcuucaucgagaacggcugggaggggaugguggacggcugguacggguuccggcaccagaacuccgagggcaucgggcaggccgccgaccucaagagcacccaggcggccaucgaccagaucaacggcaagcugaaccgccugaucggcaagaccaacgagaaguuccaccagaucgagaaggaguucuccgagguggaggggcggauccaggaccucgagaaguacgucgaggacaccaagaucgaccuguggagcuacaacgccgagcugcucguggcccuggagaaccagcacacgaucgaccugaccgacuccgagaugaacaagcuguucgaggagaccaagaagcagcuccgcgagaacgccgaggacaugggcaacgggugcuucaagaucuaccacaagugcgacaacgcgugcaucggcagcauccggaacgggaccuacgaccacgacguguaccgcgacgaggcccugaacaaccgcuuccagaucaagggcgucgagcucaaguccggcuacaaggacuggauccuguggaucagcuucgccaucuccugcuuccugcucugcguggcccugcugggguucaucaugugggccugccagaagggcaacauccggugcaacaucugcaucuga

SEQ ID NO: 76819 - RNA, 1701 nt, Artificial Sequence
  derived and/or modified CDS sequence (opt1) from hemagglutinin__InfluenzaA__AIW60701
augaagaccaucaucgcccugagcuacauccucugccugguguucacccagaagcugcccggcaacgacaacuccacggccacccucugccuggggcaccacgcggucccgaacggcaccaucgugaagaccaucacgaacgaccagaucgaggugaccaacgccaccgagcugguccagagcuccagcaccggggagaucugcgacagcccccaccagauccucgacggcgagaacugcacgcugaucgacgcccugcucggggacccccagugcgacggcuuccagaacaagaagugggaccuguucguggagcgcuccaaggccuacuccaacugcuaccccuacgacgugccggacuacgccagccugcggucccucgucgcgagcuccggcacccuggaguucaacaacgagagcuucaacuggaccggggugacccagaacggcacguccagcgccugcauccgccgguccaacaacagcuucuucucccgccugaacuggcucacccaccugaaguucaaguaccccgcccugaacgugaccaugcccaacaacgagaaguucgacaagcucuacaucuggggcguccaccaccccgggaccgacaacgaccagaucuucccguacgcccaggcgagcgggcggaucacgguguccaccaagcgcagccagcagaccgugauccccaacaucggcagccggccccgcguccggaacauccccucccgcaucagcaucuacuggaccaucgugaagccgggcgacauccugcugaucaacuccacggggaaccucaucgcgccccggggcuacuucaagauccgcagcgggaaguccagcaucaugcgguccgacgcccccaucggcaagugcaacagcgagugcaucacccccaacggcuccaucccgaacgacaagcccuuccagaacgugaaccgcaucaccuacggggccugcccccgguacgucaagcagaacacccugaagcuggccacgggcaugcgcaacgugcccgagaagcagacccgggggaucuucggcgccaucgccggguucaucgagaacggcugggagggcaugguggacgggugguacggcuuccgccaccagaacagcgaggggaucggccaggccgccgaccucaaguccacccaggccgcgaucgaccagaucaacgggaagcugaaccggcugaucggcaagaccaacgagaaguuccaccagaucgagaaggaguucagcgaggucgagggccgcauccaggaccucgagaaguacguggaggacacgaagaucgaccugugguccuacaacgccgagcugcucguggcccuggagaaccagcacaccaucgaccugaccgacagcgagaugaacaagcuguucgagaagaccaagaagcagcuccgggagaacgccgaggacauggggaacggcugcuucaagaucuaccacaagugcgacaacgccugcaucggguccauccgcaacggcacguacgaccacgacgucuaccgcgacgaggcgcugaacaaccgguuccagaucaaggggguggagcucaagagcggcuacaaggacuggauccuguggaucuccuucgccaucagcugcuuccugcucugcguggcccugcugggcuucaucaugugggccugccagaaggggaacauccgcugcaacaucugcaucuga

SEQ ID NO: 76820 - RNA, 1701 nt, Artificial Sequence
  derived and/or modified CDS sequence (opt1) from hemagglutinin__InfluenzaA__AIW60702
augaagaccaucaucgcccugagcuacauccucugccugguguucacccagaagcugcccggcaacgacaacuccacggccacccucugccuggggcaccacgcggucccgaacggcaccaucgugaagaccaucacgaacgaccagaucgaggugaccaacgccaccgagcugguccagagcuccagcaccggggagaucugcgacagcccccaccagauccucgacggcgagaacugcacgcugaucgacgcccugcucggggacccccagugcgacggcuuccagaacaagaagugggaccuguucguggagcgcagcaaggccuacuccaacugcuaccccuacgacgugccggacuacgccagccugcggucccucgucgcgagcuccggcacccuggaguucaacaacgagagcuucaacuggaccggggugacccagaacggcacguccagcgccugcauccgccgguccaacaacagcuucuucucccgccugaacuggcucacccaccugaaguucaaguaccccgcccugaacgugaccaugcccaacaacgagaaguucgacaagcucuacaucuggggcguccaccaccccgggaccgacaacgaccagaucuuccuguacgcccaggcgagcgggcggaucacgguguccaccaagcgcagccagcagaccgugaucccgaacaucggcagccggccccgcguccggaacauccccucccgcaucagcaucuacuggaccaucgugaagcccggcgacauccugcucaucaacuccacggggaaccugaucgccccgcggggcuacuucaagauccgcagcgggaaguccagcaucaugcgguccgacgcccccaucggcaagugcaacagcgagugcaucacccccaacggcuccauccccaacgacaagccguuccagaacgugaaccgcaucaccuacggggccugcccccgguacgucaagcagaacacccugaagcucgccacgggcaugcgcaacgugcccgagaagcagacccgggggaucuucggcgcgaucgccggguucaucgagaacggcugggagggcaugguggacgggugguacggcuuccgccaccagaacagcgaggggaucggccaggccgccgaccugaaguccacccaggccgcgaucgaccagaucaacgggaagcugaaccggcucaucggcaagaccaacgagaaguuccaccagaucgagaaggaguucagcgaggucgagggccgcauccaggaccuggagaaguacguggaggacacgaagaucgaccugugguccuacaacgccgagcuccugguggcccuggagaaccagcacaccaucgaccucaccgacagcgagaugaacaagcuguucgagaagaccaagaagcagcugcgggagaacgccgaggacauggggaacggcugcuucaagaucuaccacaagugcgacaacgccugcaucggguccauccgcaacggcacguacgaccacgacgucuaccgcgacgaggcgcucaacaaccgguuccagaucaaggggguggagcugaaguccggcuacaaggacuggauccuguggaucuccuucgccaucagcugcuuccuccugugcguggcccugcucggcuucaucaugugggccugccagaaggggaacauccgcugcaacaucugcaucuga

SEQ ID NO: 76821 - RNA, 1701 nt, Artificial Sequence; identical to SEQ ID NO: 76565
  derived and/or modified CDS sequence (opt1) from hemagglutinin__InfluenzaA__AIZ07211

SEQ ID NO: 76822 - RNA, 1701 nt, Artificial Sequence
  derived and/or modified CDS sequence (opt1) from hemagglutinin__InfluenzaA__AIZ07212
augaagaccaucauggcccugagcuacauccucugccugguguucgcccagaagcugcccggcaacgacaacuccaccgcgacgcucugccuggggcaccacgccgucccgaacggcaccaucgugaagaccaucaccaacgaccgcaucgaggugacgaacgccaccgagcugguccagaacagcuccaucggggagaucugcgacagcccccaccagauccucgacggcgagaacugcacccugaucgacgcccugcucggggacccccagugcgacggcuuccagaacaagaagugggaccuguucguggagcgguccaaggccuacagcaacugcuaccccuacgacgugccggacuacgcgucccugcgcagccucgucgccuccagcggcacccuggaguucaacaacgaguccuucaacugggccggggugacgcagaacggcaccagcuccgccugcauccgggggagcaacuccagcuucuucucccgccugaacuggcucacccacagcaacuucaaguaccccgcgcugaacgugaccaugcccaacaacgagcaguucgacaagcuguacaucuggggcguccaccaccccgggacggacaaggaccagaucuuccucuacgcccaguccagcggccggaucaccgugagcaccaagcgcucccagcaggccgugaucccgaacaucggcagccggccccgcauccggaacauccccucccgcaucagcaucuacuggaccaucgucaagcccggggacauccugcugaucaacuccacgggcaaccucaucgccccgcggggguacuucaagauccgcagcggcaaguccagcaucaugcgguccgacgcccccaucggcaagugcaagagcgagugcaucacccccaacggguccauccccaacgacaagccguuccagaacgugaaccgcaucaccuacggcgcgugcccccgguacgugaagcagagcacccugaagcuggccacggggaugcgcaacguccccgagaagcagacccggggcaucuucggggccaucgccggcuucaucgagaacggcugggaggggaugauggacggcugguacggguuccgccaccagaacuccgagggccgggggcaggccgcggaccucaagagcacccaggccgccaucgaccagaucaacggcaagcugaaccgccugaucggcaagaccaacgagaaguuccaccagaucgagaaggaguucuccgagguggaggggcggauccaggaccucgagaaguacguggaggacacgaagaucgaccuguggagcuacaacgccgagcugcucgucgcccuggagaaccagcacaccaucgaccugaccgacuccgagaugaacaagcuguucgagaagaccaagaagcagcuccgcgagaacgcggaggacaugggcaacgggugcuucaagaucuaccacaagugcgacaacgccugcaucggcagcauccgcaacgggacguacgaccacgacguguaccgggacgaggcccugaacaaccgcuuccagaucaagggcguggagcucaaguccggcuacaaggacuggauccuguggaucagcuucgccaucagcugcuuccugcucugcgucgcccugcugggguucaucaugugggcgugccagaagggcaacauccggugcaacaucugcaucuga

SEQ ID NO: 76823 - RNA, 1683 nt, Artificial Sequence
  derived and/or modified CDS sequence (opt1) from hemagglutinin__InfluenzaA__AJD78175
auggagaccgccagccugaucaccauccuccugguggucacgguguccaacgccgacaagaucugcaucggcuaccagagcaccaacuccaccgagaccguggacacgcugaccgagaacaacguccccgugacccacgcgaaggagcuccugcacaccgagcacaacgggaugcugugcgccacgagccucggccagccgcugauccuggacacgugcaccaucgaggggcucaucuacggcaaccccuccugcgaccugcugcucgggggccgcgaguggagcuacaucguggagcggcccuccgccgccaacggccugugcuaccccgggaacgucgagaaccuggaggagcuccgcagccuguucuccagcgcccgguccuaccagcgcauccagaucuucccggacaccaucuggaacgugagcuacuccggcaccagcaaggcgugcuccgacagcuucuaccgguccaugcgcuggcugacccagaaggacaacaccuaccccauccaggacgcccaguacaccaacaaccaggggaagaacauccucuucauguggggcaucaaccacccgcccacggacaccgcccagaccaaccuguacacccggacggacaccaccaccagcguggccacggaggagaucaaccgcaccuucaagccccugaucgggccccggccccucgucaacggccugaugggccgcaucaacuacuacugguccgugcugaagcccgggcagacccuccggaucaagagcaacggcaaccugaucgcgccgugguacgggcacauccugagcggcgagucccacggccgcauccucaagaccgaccugaagcgggggagcugcacggugcagugccagaccgagaagggcgggcugaacaccacccuccccuuccagaacgucuccaaguacgccuucggcaacugcagcaaguacaucgggaucaagucccugaagcuggccgugggccuccgcaacgugcccagccgguccagccgcggccuguucggggccaucgccggcuucaucgagggcgggugguccgggcuggucgcgggcugguacggcuuccagcacagcaacgaccagggggugggcauggccgccgaccgggacuccacgcagaaggccaucgacaagaucaccagcaaggugaacaacaucgucgacaagaugaacaagcaguacgagaucaucgaccacgaguucaacgagguggagacccgccucaacaugaucaacaacaagaucgacgaccagauccaggacaucugggccuacaacgcggagcugcuggugcuccuggagaaccagaagacccuggacgagcacgacgccaacgucaacaaccucuacaacaaggugaagcgggcccugggguccaacgccguggaggacggcaaggggugcuucgagcuguaccacaagugcgacgaccagugcauggagacgauccgcaacggcaccuacaaccggcgcaaguaccaggaggagagcaagcucgagcgccagaagaucgagggcgucaagcuggaguccgaggggaccuacaagauccugaccaucuacagcaccguggccuccagccucgucaucgcgaugggcuucgccgccuuccuguucugggccauguccaacgggagcugccggugcaacaucugcaucuga

SEQ ID NO: 76824 - RNA, 1683 nt, Artificial Sequence
  derived and/or modified CDS sequence (opt1) from hemagglutinin__InfluenzaA__AJD78187
auggagaccgccagccugaucaccauccuccugguggucacgguguccaacgccgacaagaucugcaucggcuaccagagcaccaacuccaccgagaccguggacacgcugaccgagaacaacguccccgugacccacgcgaaggagcuccugcacaccgagcacaacgggaugcugugcgccacgagccucggccacccgcugauccuggacacgugcaccaucgaggggcucaucuacggcaaccccuccugcgaccugcugcucgggggccgcgaguggagcuacaucguggagcggcccuccgccgucaacggccugugcuaccccgggaacguggagaaccuggaggagcuccgcagccuguucuccagcgcccgguccuaccagcgcauccagaucuucccggacaccaucuggaacgugagcuacuccggcaccagcaagaccugcuccgacagcuucuaccgguccaugcgcuggcugacccagaaggacaacgccuaccccauccaggacgcgcaguacaccaacaaccaggggaagaacauccucuucauguggggcaucaaccacccgcccacggacaccacccagaccaaccuguacacgcggaccgacaccaccacgagcgucgccaccgaggagaucaaccgcaccuucaagccccugaucgggccccggccccucgugaacggccugaugggccgcaucaacuacuacugguccgugcugaagcccgggcagacccuccggaucaagagcaacggcaaccugaucgccccgugguacgggcacauccugagcggcgagucccacggccgcauccucaagacggaccugaagcgggggagcugcaccguccagugccagaccgagaagggcgggcugaacaccacgcuccccuuccagaacguguccaaguacgccuucggcaacugcagcaaguacaucgggaucaagucccugaagcuggcggugggccuccgcaacguccccagccgguccagccgcggccuguucggggccaucgccggcuucaucgagggcgggugguccgggcugguggccggcugguacggcuuccagcacagcaacgaccagggggugggcauggccgcggaccgggacuccacccagaaggccaucgacaagaucaccagcaaggucaacaacaucguggacaagaugaacaagcaguacgagaucaucgaccacgaguucuccgagguggagacccgccucaacaugaucaacaacaagaucgacgaccagauccaggacaucugggccuacaacgccgagcugcugguccuccuggagaaccagaagacgcuggacgagcacgacgccaacgugaacaaccucuacaacaaggugaagcgggcgcuggggagcaacgccgucgaggacggcaaggggugcuucgagcuguaccacaagugcgacgaccagugcauggagaccauccgcaacggcaccuacaaccggcgcaaguaccaggaggaguccaagcucgagcgccagaagaucgagggcgugaagcuggagagcgaggggaccuacaagauccugaccaucuacuccacggucgccagcucccucgugaucgccaugggcuucgccgcguuccuguucugggccaugagcaacgggagcugccggugcaacaucugcaucuga

SEQ ID NO: 76825 - RNA, 1683 nt, Artificial Sequence
  derived and/or modified CDS sequence (opt1) from hemagglutinin__InfluenzaA__AJD78199
auggagaccgugagccugaucaccauccuccuggucgccacgguguccaacgccgacaagaucugcaucggcuaccagagcaccaacuccaccgagaccguggacacgcugaccgagaacaacguccccgugacccacgcgaaggagcuccugcacaccgagcacaacgggaugcugugcgccacgagccucggccagccgcugauccuggacacgugcaccaucgaggggcucaucuacggcaaccccuccugcgaccugagccuggaggggcgcgagugguccuacaucguggagcggcccagcgccgucaacggccucugcuaccccggcaacguggagaaccuggaggagcugcgcucccucuucagcuccgcccggagcuaccagcgcauccagaucuucccggacaccaucuggaacguguccuacgacgggaccagcaccgccugcuccggcagcuucuaccgguccaugcgcuggcugacccggaagaacggggacuaccccauccaggacgcgcaguacaccaacaaccagggcaagaacauccuguucaugugggggaucaaccacccgcccacggacaccacccagcgcgaccucuacacccggacggacaccaccaccagcgucgccacggaggagaucaaccgcaucuucaagccccugaucggcccccggccccuggugaacggccucauggggcgcaucgacuacuacugguccgugcugaagcccggccagacccugcggaucaagagcgacgggaaccucaucgccccgugguacggccacauccugagcggcgagucccacgggcgcauccugaagaccgaccucaagcggggcagcugcaccguccagugccagacggagaagggcgggcugaacaccacccugcccuuccagaacguguccaaguacgccuucgggaacugcagcaaguacaucggcaucaagucccucaagcuggcggugggccugcgcaacguccccagccgguccagccgcggccucuucggggccaucgccggguucaucgagggcgggugguccggccugguggccggcugguacggguuccagcacagcaacgaccagggcguggggauggccgcggaccgggacuccacccagaaggccaucgacaagaucacgagcaaggucaacaacaucguggacaagaugaacaagcaguacgagaucaucgaccacgaguucuccgagguggagacccgccugaacaugaucaacaacaagaucgacgaccagauccaggacaucugggccuacaacgccgagcuccugguccugcucgagaaccagaagacccuggacgagcacgacgccaacgugaacaaccuguacaacaaggugaagcgggcgcucggcagcaacgccgucgaggacgggaagggcugcuucgagcuguaccacaagugcgacgaccagugcauggagaccauccgcaacggcacguacaaccgccggaaguaccaggaggaguccaagcuggagcgccagaagaucgagggggugaagcucgagagcgagggcaccuacaagauccugaccaucuacuccaccgucgccagcucccuggugaucgccaugggguucgccgcguuccucuucugggccaugagcaacggcagcugccggugcaacaucugcaucuga

SEQ ID NO: 76826 - RNA, 1683 nt, Artificial Sequence
  derived and/or modified CDS sequence (opt1) from hemagglutinin__InfluenzaA__AJD78211
auggagaccgugagccugaucaccauccuccuggucgccacgguguccaacgccgacaagaucugcaucggcuaccagagcaccaacuccaccgagaccguggacacgcugaccgagaacaacguccccgugacccacgcgaaggagcuccugcacaccgagcacaacgggaugcugugcgccacgagccucggccagccgcugauccuggacacgugcaccaucgaggggcucaucuacggcaaccccuccugcgaccugagccuggaggggcgcgagugguccuacaucguggagcggcccagcgccgucaacggccucugcuaccccggcaacguggagaaccuggaggagcugcgcucccucuucagcuccgcccggagcuaccagcgcauccagaucuucccggacaccaucuggaacguguccuacgacgggaccagcaccgccugcuccggcagcuucuaccgguccaugcgcuggcugacccggaagaacggggacuaccccauccaggacgcgcaguacaccaacaaccagggcaagaacauccuguucaugugggggaucaaccacccgcccacggacaccacccagcgcgaccucuacacccggacggacaccaccaccagcgucgccacggaggagaucaaccgcaucuucaagccccugaucggcccccggccccuggugaacggccucauggggcgcaucgacuacuacugguccgugcugaagcccggccagacccugcggaucaagagcgacgggaaccucaucgccccgugguacggccacauccugagcggcgagucccacgggcgcauccugaagaccgaccucaagcggggcagcugcaccguccagugccagacggagaagggcgggcugaacaccacccugcccuuccagaacguguccaaguacgccuucgggaacugcagcaaguacaucggcaucaagucccucaagcuggcggugggccugcgcaacguccccagccggucccgccggggccucuucggggccaucgccggguucaucgagggcggguggagcggccugguggccggcugguacggguuccagcacuccaacgaccagggcguggggauggccgcggaccgcgacagcacccagaaggccaucgacaagaucacguccaaggucaacaacaucguggacaagaugaacaagcaguacgagaucaucgaccacgaguucagcgagguggagacccggcugaacaugaucaacaacaagaucgacgaccagauccaggacaucugggccuacaacgccgagcuccugguccugcucgagaaccagaagacccuggacgagcacgacgccaacgugaacaaccuguacaacaaggugaagcgcgcgcucggcuccaacgccgucgaggacgggaagggcugcuucgagcuguaccacaagugcgacgaccagugcauggagaccauccgcaacggcacguacaaccggcgcaaguaccaggaggagagcaagcuggagcggcagaagaucgagggggugaagcucgaguccgagggcaccuacaagauccugaccaucuacagcaccgucgccuccagccuggugaucgccaugggguucgccgcguuccucuucugggccauguccaacggcagcugccgcugcaacaucugcaucuga

SEQ ID NO: 76827 - RNA, 1689 nt, Artificial Sequence
  derived and/or modified CDS sequence (opt1) from hemagglutinin__InfluenzaA__AJI76401
auggccaucaucuaccugauccuccuguucgccaccgugcgcggcgaccagaucugcaucggguaccacgcgaacaacagcaccgagaaggucgacacgauccuggagcggaacgugaccgugacccacgccaaggacauccucgagaagacccacaacggcaagcugugcaagcugaacgggaucccgccccucgagcugggcgacugcuccaucgccggguggcugcucggcaaccccgagugcgaccgccugcugcggguccccgaguggagcuacaucauggagaaggagaacccccgcuacucccucugcuacccgggcagccugaacgacuacgaggagcugaagcaccuccuguccagcgugaagcacuucgagaaggugcggauccugcccaaggaccgcuggacgaaccacaccaccaccgggggcuccaaggccugcgccgucagcgggaagcccuccuucuuccggaacaugguguggcucacgaagaagggccccaacuacccgguggcgaaggggagcuacaacaacaccuccggcgagcagaugcugaucaucuggggcguccaccaccccaucgacgaggccgagcagcgcgcccuguaccagaacguggggaccuacgugagcgccuccaccagcacgcucuacaagcgguccauccccgagaucgcggcccgccccgaggucaacggccuggggagccggauggaguucuccuggacccugcucgacgugugggacaccaucaacuucgagagcaccggcaaccugguggccccggaguacggcuucaagaucuccaagcgcgggagcagcggcaucaugaagacggaggggacccugggcaacugcgagaccaagugccagacgccccucggggccaucaacaccacccugcccuuccacaacguccacccccugaccaucggcgagugcccgaaguacgugaaguccgagaagcucgugcuggccaccggccugcggaacgucccccagaucgagagccgcggccucuucggggcgaucgccggguucaucgagggcggguggcagggcaugguggacggcugguacggguaccaccacuccaacgaccagggcagcggguacgccgccgacaaggaguccacgcagaaggccuucgacggcaucaccaacaaggugaacagcgucaucgagaagaugaacacccaguucgaggcgguggggaaggaguucaacaaccuggagaagcggcuggagaaccucaacaagcgcauggaggacggcuuccuggacguguggaccuacaacgccgagcugcucguccugauggagaacgagcggacgcuggacuuccacgacuccaacgugaagaaccucuacgagaagguccgcaugcagcugcgggacaacgugcgcgagcugggcaacgggugcuucgaguucuaccacaagugcgacgacgagugcaugaacagcgugaagaacggcaccuacgacuaccccaaguacgaggaggaguccaagcucaagcggaacgagaucaagggggucaagcugagcuccaugggcguguaccagauccuggccaucuacgccaccguggccggcagccucucccuggcgaucauggucgccgggaucagcuucuggaugugcuccaacggcagccugcagugccgcaucugcaucuga

SEQ ID NO: 76828 - RNA, 1701 nt, Artificial Sequence; identical to SEQ ID NO: 76089
  derived and/or modified CDS sequence (opt1) from hemagglutinin__InfluenzaA__AJI80137

SEQ ID NO: 76829 - RNA, 1701 nt, Artificial Sequence; identical to SEQ ID NO: 76089
  derived and/or modified CDS sequence (opt1) from hemagglutinin__InfluenzaA__AJI80149

SEQ ID NO: 76830 - RNA, 1701 nt, Artificial Sequence; identical to SEQ ID NO: 74064
  derived and/or modified CDS sequence (opt1) from hemagglutinin__InfluenzaA__AJI80161

SEQ ID NO: 76831 - RNA, 1701 nt, Artificial Sequence
  derived and/or modified CDS sequence (opt1) from hemagglutinin__InfluenzaA__AJI80172
augaagaccaucaucgcccugagcuacauccucugccugguguucgcccagaagcugcccggcaacgacaacuccaccgcgacgcucugccuggggcaccacgccgucccgaacggcaccaucgugaagaccaucaccaacgaccgcaucgaggugacgaacgccaccgagcugguccagaacagcuccaucggggagaucugcgacagcccccaccagauccucgacggcgagaacugcucccugaucgacgcccugcucggggacccccagugcgacggcuuccagaacaagaagugggaccuguucguggagcggagcaaggccuacuccaacugcuaccccuacgacgugccggacuacgcgagccugcgcucccucgucgccagcuccggcacccuggaguucaacaacgagagcuucaacugggccggggugacccagaacggcacguccagcgccugcauccggggguccaacagcuccuucuucagccgccugaacuggcucacccaccugaacuucaaguaccccgcgcugaacgugaccaugcccaacaacgagcaguucgacaagcucuacaucuggggcguccaccaccccgggaccgacaaggaccagaucuuccuguacgcccaguccagcggccggaucacggugagcaccaagcgcucccagcaggccgugaucccgaacaucggcagccggccccgcauccggaacauccccucccgcaucagcaucuacuggaccaucgucaagcccggggacauccugcucaucaacuccaccggcaaccugaucgccccgcggggguacuucaagauccgcagcggcaaguccagcaucaugcgguccgacgcccccaucggcaagugcaagagcgagugcaucacgcccaacggguccauccccaacgacaagccguuccagaacgugaaccgcaucaccuacggcgcgugcccccgguacgugaagcagagcacccugaagcucgccaccgggaugcgcaacguccccgagaagcagacgcggggcaucuucggggccaucgccggcuucaucgagaacggcugggaggggaugguggacggcugguacggguuccgccaccagaacuccgagggccgggggcaggccgcggaccucaagagcacccaggccgccaucgaccagaucaacggcaagcugaaccgccugaucggcaagaccaacgagaaguuccaccagaucgagaaggaguucuccgagguggaggggcggauccaggaccuggagaaguacgucgaggacaccaagaucgaccuguggagcuacaacgccgagcuccugguggcccuggagaaccagcacacgaucgaccucaccgacuccgagaugaacaagcuguucgagaagaccaagaagcagcugcgcgagaacgcggaggacaugggcaacgggugcuucaagaucuaccacaagugcgacaacgccugcaucggcagcauccgcaacgggaccuacgaccacgacguguaccgggacgaggcccucaacaaccgcuuccagaucaagggcgucgagcugaaguccggcuacaaggacuggauccuguggaucagcuucgccaucagcugcuuccuccugugcguggcccugcucggguucaucaugugggcgugccagaagggcaacauccggugcaacaucugcaucuga

SEQ ID NO: 76832 - RNA, 1701 nt, Artificial Sequence
  derived and/or modified CDS sequence (opt1) from hemagglutinin__InfluenzaA__AJI80196
augaagaccaucaucgcccugagcuacauccucugccugguguucgcccagaagcugcccggcaacgacaacuccaccgcgacgcucugccuggggcaccacgccgucccgaacggcaccaucgugaagaccaucaccaacgaccgcaucgaggugacgaacgccaccgagcugguccagaacagcuccaucggggagaucugcgacagcccccaccagauccucgacggcgagaacugcacccugaucgacgcccugcucggggacccccagugcgacggcuuccagaacaaggagugggaccuguucguggagcgguccaaggccuacagcaacugcuaccccuacgacgugccggacuacgcgucccugcgcagccucgucgccuccagcggcacccuggaguucaacaacgaguccuucaacugggccggggugacgcagaacggcaccagcuccgccugcauccgggggagcaacuccagcuucuucucccgccugaacuggcucacccaccugaacuucaaguaccccgcgcugaacgugaccaugcccaacaacgagcaguucgacaagcucuacaucuggggcguccaccaccccgggacggacaaggaccagaucuuccuguacgcccagagcuccggccggaucaccgugagcaccaagcgcagccagcaggccgugaucccgaacaucggcucccggccccgcauccggaacauccccagccgcaucuccaucuacuggaccaucgucaagcccggggacauccugcucaucaacagcacgggcaaccugaucgccccgcggggguacuucaagauccgcuccggcaagagcuccaucaugcggagcgacgcccccaucggcaagugcaaguccgagugcaucacccccaacgggagcauccccaacgacaagccguuccagaacaucaaccgcaucaccuacggcgcgugcccccgguacgugaagcaguccacccugaagcucgccacggggaugcgcaacgugcccgagaagcagacccggggcaucuucggggccaucgccggcuucaucgagaacggcugggaggggauggucgacggcugguacggguuccgccaccagaacagcgagggccgggggcaggccgcggaccugaaguccacccaggccgccaucgaccagaucaacggcaagcugaaccgccucaucggcaagaccaacgagaaguuccaccagaucgagaaggaguucagcgagguggaggggcggauccaggaccuggagaaguacguggaggacacgaagaucgaccugugguccuacaacgccgaguuccucgucgcccuggagaaccagcacaccaucgaccugaccgacagcgagaugaacaagcuguucgagaagaccaagaagcagcuccgcgagaacgcggaggacaugggcaacgggugcuucaagaucuaccacaagugcgacaacgccugcaucggcuccauccgcaacgggacguacgaccacgacguguaccgggacgaggcccugaacaaccgcuuccagaucaagggcguggagcucaagagcggcuacaaggacuggauccuguggaucuccuucgccaucagcugcuuccugcucugcgucgcccugcugggguucaucaugugggcgugccagaagggcaacauccggugcaacaucugcaucuga

SEQ ID NO: 76833 - RNA, 1701 nt, Artificial Sequence; identical to SEQ ID NO: 76639
  derived and/or modified CDS sequence (opt1) from hemagglutinin__InfluenzaA__AJI80208

SEQ ID NO: 76834 - RNA, 1701 nt, Artificial Sequence; identical to SEQ ID NO: 74018
  derived and/or modified CDS sequence (opt1) from hemagglutinin__InfluenzaA__AJI80220

SEQ ID NO: 76835 - RNA, 1701 nt, Artificial Sequence; identical to SEQ ID NO: 76831
  derived and/or modified CDS sequence (opt1) from hemagglutinin__InfluenzaA__AJI80232

SEQ ID NO: 76836 - RNA, 1701 nt, Artificial Sequence; identical to SEQ ID NO: 74018
  derived and/or modified CDS sequence (opt1) from hemagglutinin__InfluenzaA__AJI80244

SEQ ID NO: 76837 - RNA, 1701 nt, Artificial Sequence; identical to SEQ ID NO: 73882
  derived and/or modified CDS sequence (opt1) from hemagglutinin__InfluenzaA__AJI80256

SEQ ID NO: 76838 - RNA, 1701 nt, Artificial Sequence; identical to SEQ ID NO: 74018
  derived and/or modified CDS sequence (opt1) from hemagglutinin__InfluenzaA__AJI80268

SEQ ID NO: 76839 - RNA, 1701 nt, Artificial Sequence
  derived and/or modified CDS sequence (opt1) from hemagglutinin__InfluenzaA__AJI80280
augaagaccaucaucgcccugagcuacauccucugccugguguucgcccagaagcugcccggcaacgacaacuccaccgcgacgcucugccuggggcaccacgccgucccgaacggcaccaucgugaagaccaucaccaacgaccgcaucgaggugacgaacgccaccgagcugguccagaacagcuccaucgggaagaucugcgacagcccccaccagauccucgacggcgagaacugcacccugaucgacgcccugcucggggacccccagugcgacggcuuccagaacaaggagugggaccuguucguggagcgguccaaggccuacagcaacugcuaccccuacgacgugccggacuacgcgucccugcgcagccucgucgccuccagcggcacccuggaguucaacaacgaguccuucaacugggccggggugacgcagaacggcaccagcuccgccugcauccgggggagcaacuccagcuucuucucccgccugaacuggcucacccaccugaacuucaaguaccccgcgcugaacgugaccaugcccaacaacgagcaguucgacaagcucuacaucuggggcguccaccaccccgggacggacaaggaccagaucuuccuguacgcccagagcuccggccggaucaccgugagcaccaagcgcagccagcaggccgugaucccgaacaucggcucccggccccgcauccggaacauccccagccgcaucuccaucuacuggaccaucgucaagcccggggacauccugcucaucaacagcacgggcaaccugaucgccccgcggggguacuucaagauccgcuccggcaagagcuccaucaugcggagcgacgcccccaucggcaagugcaaguccgagugcaucacccccaacgggagcauccccaacgacaagccguuccagaacgugaaccgcaucaccuacggcgcgugcccccgguacgugaagcaguccacccugaagcucgccacggggaugcgcaacguccccgagaagcagacccggggcaucuucggggccaucgccggcuucaucgagaacggcugggaggggaugguggacggcugguacggguuccgccaccagaacagcgagggccgggggcaggccgcggaccugaaguccacccaggccgccaucgaccagaucaacggcaagcugaaccgccucaucggcaagaccaacgagaaguuccaccagaucgagaaggaguucagcgagguggaggggcggauccaggaccuggagaaguacgucgaggacacgaagaucgaccugugguccuacaacgccgagcuccugguggcccuggagaaccagcacaccaucgaccucaccgacagcgagaugaacaagcuguucgagaagaccaagaagcagcugcgcgagaacgcggaggacaugggcaacgggugcuucaagaucuaccacaagugcgacaacgccugcaucggcuccauccgcaacgggacguacgaccacgacguguaccgggacgaggcccucaacaaccgcuuccagaucaagggcgucgagcucaagagcggcuacaaggacuggauccuguggaucuccuucgccaucagcugcuuccugcugugcguggcccugcucggguucaucaugugggcgugccagaagggcaacauccggugcaacaucugcaucuga

SEQ ID NO: 76840 - RNA, 1701 nt, Artificial Sequence; identical to SEQ ID NO: 76611
  derived and/or modified CDS sequence (opt1) from hemagglutinin__InfluenzaA__AJI80292

SEQ ID NO: 76841 - RNA, 1701 nt, Artificial Sequence; identical to SEQ ID NO: 76639
  derived and/or modified CDS sequence (opt1) from hemagglutinin__InfluenzaA__AJI80303

SEQ ID NO: 76842 - RNA, 1701 nt, Artificial Sequence; identical to SEQ ID NO: 76611
  derived and/or modified CDS sequence (opt1) from hemagglutinin__InfluenzaA__AJI80315

SEQ ID NO: 76843 - RNA, 1701 nt, Artificial Sequence
  derived and/or modified CDS sequence (opt1) from hemagglutinin__InfluenzaA__AJI80326
augaaggccauccuggugguccuccuguacaccuucgccaccgcgaacgccgacacgcugugcaucggcuaccacgccaacaacagcaccgacaccguggacaccgugcucgagaagaacgucacggugacccacuccgugaaccugcuggaggacaagcacaacgggaagcucugcaagcugcgcggcgucgcgccccugcaccucgggaagugcaacaucgccggcuggauccuggggaacccggagugcgagagccuguccaccgccagcuccuggagcuacaucguggagaccuccagcuccgacaacggcacgugcuaccccggcgacuucaucaacuacgaggagcuccgggagcagcugagcuccgugagcuccuucgagcgcuucgagaucuuccccaagaccagcuccuggcccaaccacgacagcaacaagggggucaccgccgccugcccgcacgccggcgcgaaguccuucuacaagaaccugaucuggcucgugaagaaggggaacagcuaccccaagcugucccagagcuacaucaacgacaagggcaaggaggugcugguccucugggggauccaccaccccagcaccacggccgaccagcagucccuguaccagaacgccgacgccuacguguucgugggcaccagccgguacuccaagaaguucaagcccgagaucgccauccgcccgaagguccgggaccaggagggccgcaugaacuacuacuggacccugguggagcccggggacaagaucaccuucgaggcgacgggcaaccucguggucccccgguacgccuucaccauggagaagaacgccgggagcggcaucaucaucuccgacacccccgugcacgacugcaacaccacgugccagaccccggagggcgccaucaacaccagccugcccuuccagaacauccaccccaucaccaucgggaagugccccaaguacgugaaguccacgaagcugcgccucgccaccggccugcggaacgucccgagcauccagucccgcgggcuguucggcgcgaucgccggguucaucgagggcggcuggaccgggaugguggacggcugguacggguaccaccaccagaacgagcagggcagcggguacgccgccgaccucaaguccacccagaacgccaucgacaagaucacgaacaaggugaacagcgucaucgagaagaugaacacccaguucaccgcggugggcaaggaguucaaccaccuggagaagcggaucgagaaccugaacaagaaggucgacgacggcuuccucgacaucuggaccuacaacgccgagcugcuggugcuccuggagaacgagcgcacgcuggacuaccacgacuccaacgugaagaaccucuacgagaagguccggaaccagcugaagaacaacgccaaggagaucgggaacggcugcuucgaguucuaccacaagugcgacaacacgugcauggagagcgugaagaacgggaccuacgacuaccccaaguacuccgaggaggccaagcugaaccgcgagaagaucgacggcgugaagcucgagagcacccggaucuaccagauccuggccaucuacuccaccgucgcgagcucccuggugcucguggucagccugggggccaucagcuucuggaugugcuccaacggcagccugcagugccgcaucugcaucuga

SEQ ID NO: 76844 - RNA, 1701 nt, Artificial Sequence
  derived and/or modified CDS sequence (opt1) from hemagglutinin__InfluenzaA__AJI80337
augaaggccauccuggugguccuccuguacaccuucgccaccgcgaacgccgacacgcugugcaucggcuaccacgccaacaacagcaccgacaccguggacaccgugcucgagaagaacgucacggugacccacuccaucaaccugcuggaggacaagcacaacgggaagcucugcaagcugcgcggcguggcgccccugcaccucgggaagugcaacaucgccggcuggauccuggggaacccggagugcgagagccuguccaccgccagcuccuggagcuacaucgucgagaccuccagcuccgacaacggcacgugcuaccccggcgacuucaucaacuacgaggagcuccgggagcagcugagcuccgugagcuccuucgagcgcuucgagauguuccccaagaccagcuccuggcccaaccacgacagcaacaagggggugaccgccgccugcccgcacgccggcgcgaaguccuucuacaagaaccugaucuggcucgucaagaaggggaacagcuaccccaagcuguccaagagcuacaucaacgacaagggcaaggaggugcuggugcucugggggauccaccaccccagcaccacggccgaccagcagucccuguaccagaacgccaacgccuacgucuucgugggcaccagcaaguacuccaagaaguucaagcccgagaucgccauccggccgaaggugcgcgaccaggagggccggaugaacuacuacuggacccugaucgagcccggggacaagaucaccuucgaggcgacgggcaaccucgucgugccccgcuacgccuucgccauggagcggaacgccgggagcggcaucaucaucuccgacacccccgugcacgacugcaacacgaccugccagaccccggagggcgccaucaacaccagccugcccuuccagaacauccaccccaucaccaucgggaagugccccaaguacgucaaguccaccaagcugcgccucgcgacgggccugcggaacaucccgagcauccagucccgcgggcuguucggcgccaucgccggguucaucgagggcggcuggaccgggaugguggacggcugguacggguaccaccaccagaacgagcagggcagcggguacgccgccgaccucaaguccacccagaacgcgaucgacaagaucaccaacaaggugaacagcgucaucgagaagaugaacacgcaguucaccgccgugggcaaggaguucaaccaccuggagaagcggaucgagaaccugaacaagaagguggacgacggcuuccucgacaucuggaccuacaacgccgagcugcugguccuccuggagaacgagcgcacccuggacuaccacgacuccaacgugaagaaccucuacgagaagguccggaaccagcugaagaacaacgccaaggagaucgggaacggcugcuucgaguucuaccacaagugcgacaacacgugcauggagagcgugaagaacgggaccuacgacuaccccaaguacuccgaggaggccaagcugaaccgcgagaagaucgacggcgugaagcucgagagcacccggaucuaccagauccuggcgaucuacuccaccgucgccagcucccuggugcucguggucagccugggggccaucagcuucuggaugugcuccaacggcagccugcagugccgcaucugcaucuga

SEQ ID NO: 76845 - RNA, 1701 nt, Artificial Sequence; identical to SEQ ID NO: 74018
  derived and/or modified CDS sequence (opt1) from hemagglutinin__InfluenzaA__AJI80348

SEQ ID NO: 76846 - RNA, 1701 nt, Artificial Sequence; identical to SEQ ID NO: 73882
  derived and/or modified CDS sequence (opt1) from hemagglutinin__InfluenzaA__AJI80360

SEQ ID NO: 76847 - RNA, 1701 nt, Artificial Sequence; identical to SEQ ID NO: 73882
  derived and/or modified CDS sequence (opt1) from hemagglutinin__InfluenzaA__AJI80372

SEQ ID NO: 76848 - RNA, 1701 nt, Artificial Sequence; identical to SEQ ID NO: 74064
  derived and/or modified CDS sequence (opt1) from hemagglutinin__InfluenzaA__AJI80384

SEQ ID NO: 76849 - RNA, 1701 nt, Artificial Sequence; identical to SEQ ID NO: 74064
  derived and/or modified CDS sequence (opt1) from hemagglutinin__InfluenzaA__AJI80395

SEQ ID NO: 76850 - RNA, 1701 nt, Artificial Sequence; identical to SEQ ID NO: 74064
  derived and/or modified CDS sequence (opt1) from hemagglutinin__InfluenzaA__AJI80406

SEQ ID NO: 76851 - RNA, 1701 nt, Artificial Sequence; identical to SEQ ID NO: 74064
  derived and/or modified CDS sequence (opt1) from hemagglutinin__InfluenzaA__AJI80417

SEQ ID NO: 76852 - RNA, 1701 nt, Artificial Sequence; identical to SEQ ID NO: 74064
  derived and/or modified CDS sequence (opt1) from hemagglutinin__InfluenzaA__AJI80428

SEQ ID NO: 76853 - RNA, 1701 nt, Artificial Sequence; identical to SEQ ID NO: 74018
  derived and/or modified CDS sequence (opt1) from hemagglutinin__InfluenzaA__AJI80439

SEQ ID NO: 76854 - RNA, 1701 nt, Artificial Sequence; identical to SEQ ID NO: 74018
  derived and/or modified CDS sequence (opt1) from hemagglutinin__InfluenzaA__AJI80462

SEQ ID NO: 76855 - RNA, 1701 nt, Artificial Sequence
  derived and/or modified CDS sequence (opt1) from hemagglutinin__InfluenzaA__AJI80474
augaaggccauccuggugguccuccuguacaccuucgccaccgcgaacgccgacacgcugugcaucggcuaccacgccaacaacagcaccgacaccguggacaccgugcucgagaagaacgucacggugacccacuccaucaaccugcuggaggacaagcacaacgggaagcucugcaagcugcgcggcguggcgccccugcaccucgggaagugcaacaucgccggcuggauccuggggaacccggagugcgagagccuguccaccgccagcuccuggagcuacaucgucgagaccuccagcuccgacaacggcacgugcuaccccggcgacuucaucaacuacgaggagcuccgggagcagcugagcuccgugagcuccuucgagcgcuucgagaucuuccccaagaccagcuccuggcccaaccacgacagcaacaagggggugaccgccgccugcccgcacgccggcgcgaaguccuucuacaagaaccugaucuggcucgucaagaaggggaacagcuaccccaagcugucccagagcuacaucaacgacaagggcaaggaggugcuggugcucugggggauccaccaccccagcaccacggccgaccagcagucccuguaccagaacgccgacgccuacgucuucgugggcaccagccgguacuccaagaaguucaagcccgagaucgccauccgcccgaaggugcgggaccaggagggccgcaugaacuacuacuggacccuggucgagcccggggacaagaucaccuucgaggcgacgggcaaccucguggugccccgguacgccuucaccauggagcgcaacgccgggagcggcaucaucaucuccgacacccccguccacgacugcaacaccacgugccagaccccggagggcgccaucaacaccagccugcccuuccagaacauccaccccaucaccaucgggaagugccccaaguacgugaaguccacgaagcugcggcucgccaccggccugcgcaacgugccgagcauccagucccgggggcuguucggcgcgaucgccggguucaucgagggcggcuggaccgggauggucgacggcugguacggguaccaccaccagaacgagcagggcagcggguacgccgccgaccucaaguccacccagaacgccaucgacaagaucacgaacaaggugaacagcgugaucgagaagaugaacacccaguucaccgcggucggcaaggaguucaaccaccuggagaagcgcaucgagaaccugaacaagaagguggacgacggcuuccucgacaucuggaccuacaacgccgagcugcugguccuccuggagaacgagcggacgcuggacuaccacgacuccaacgugaagaaccucuacgagaaggugcgcaaccagcugaagaacaacgccaaggagaucgggaacggcugcuucgaguucuaccacaagugcgacaacacgugcauggagagcgucaagaacgggaccuacgacuaccccaaguacuccgaggaggccaagcugaaccgggagaagaucgacggcgugaagcucgagagcacccgcaucuaccagauccuggccaucuacuccaccguggcgagcucccugguccucguggugagccugggggccaucagcuucuggaugugcuccaacggcagccugcagugccggaucugcaucuga

SEQ ID NO: 76856 - RNA, 1701 nt, Artificial Sequence; identical to SEQ ID NO: 76855
  derived and/or modified CDS sequence (opt1) from hemagglutinin__InfluenzaA__AJI80485

SEQ ID NO: 76857 - RNA, 1701 nt, Artificial Sequence; identical to SEQ ID NO: 74064
  derived and/or modified CDS sequence (opt1) from hemagglutinin__InfluenzaA__AJI80496

SEQ ID NO: 76858 - RNA, 1701 nt, Artificial Sequence; identical to SEQ ID NO: 76667
  derived and/or modified CDS sequence (opt1) from hemagglutinin__InfluenzaA__AJI80507

SEQ ID NO: 76859 - RNA, 1701 nt, Artificial Sequence; identical to SEQ ID NO: 74064
  derived and/or modified CDS sequence (opt1) from hemagglutinin__InfluenzaA__AJI80518

SEQ ID NO: 76860 - RNA, 1701 nt, Artificial Sequence; identical to SEQ ID NO: 72156
  derived and/or modified CDS sequence (opt1) from hemagglutinin__InfluenzaA__AJJ98765

SEQ ID NO: 76861 - RNA, 1701 nt, Artificial Sequence
  derived and/or modified CDS sequence (opt1) from hemagglutinin__InfluenzaA__AJJ98777
augaagaccaucaucgcccugagcuacauccucugccugguguucgcccagaagcugcccggcaacgacaacuccaccgcgacgcucugccuggggcaccacgccgucccgaacggcaccaucgugaagaccaucaccaacgaccagaucgaggugacgaacgccaccgagcugguccagagcuucuccaccggggagaucugcaacagcccccaccagauccucgacggcgagaacugcacccugaucgacgcccugcucggggacccccagugcgacggcuuccagaacaagaagugggaccuguucguggagcgcuccaaggccuacagcaacugcuaccccuacgacgugccggacuacgcgucccugcggagccucgucgccuccagcggcacgcuggaguucaacaacgaguccuucaacuggaccggggugacccagaacggcaccagcuccgccugcauccgccggagcaacaacuccuucuucagccgccugaacuggcucacgcaccugaaguucaaguaccccgcccugaacgugaccaugcccaacaacgaggaguucgacaagcucuacaucuggggcguccaccaccccgggaccgacaacgaccagaucuuccuguacgcgcaggccuccgggcggaucaccgugagcacgaagcgcucccagcagaccgugaucccgaacaucggcagccggccccgcguccggaacauccccagccgcaucuccaucuacuggaccaucgugaagcccggcgacauccugcucaucaacagcaccgggaaccugaucgccccgcggggcuacuucaagauccgcuccggcaagagcuccaucaugcggagcgacgcccccaucgggaagugcaacuccgagugcaucacgcccaacggcagcauccccaacgacaagccguuccagaacgugaaccgcaucaccuacggggccugcccccgguacgucaagcagaacacccugaagcucgcgaccggcaugcgcaacgugcccgagaagcagacgcgggggaucuucggcgccaucgccggguucaucgagaacggcugggagggcaugguggacgggugguacggcuuccgccaccagaacuccgaggggaucggccaggccgccgaccucaagagcacccaggcggccaucgaccagaucaacgggaagcugaaccggcugaucggcaagaccaacgagaaguuccaccagaucgagaaggaguucuccgaggucgagggccgcauccaggaccuggagaaguacguggaggacaccaagaucgaccuguggagcuacaacgccgagcuccugguggcccuggagaaccagcacacgaucgaccucaccgacuccgagaugaacaagcuguucgagaagaccaagaagcagcugcgggagaacgccgaggacauggggaacggcugcuucaagaucuaccacaagugcgacaacgcgugcaucgggagcauccgcaacggcaccuacgaccacgacgucuaccgcgacgaggcccucaacaaccgguuccagaucaaggggguggagcugaaguccggcuacaaggacuggauccuguggaucagcuucgccaucuccugcuuccuccugugcguggcccugcucggcuucaucaugugggccugccagaaggggaacauccgcugcaacaucugcaucuga

SEQ ID NO: 76862 - RNA, 1701 nt, Artificial Sequence; identical to SEQ ID NO: 73477
  derived and/or modified CDS sequence (opt1) from hemagglutinin__InfluenzaA__AJJ98789

SEQ ID NO: 76863 - RNA, 1701 nt, Artificial Sequence
  derived and/or modified CDS sequence (opt1) from hemagglutinin__InfluenzaA__AJJ98801
augaagaccaucaucgcccugagcuacauccucugccugguguucgcccagaagcugcccggcaacgacaacuccaccgcgacgcucugccuggggcaccacgccgucccgaacggcaccaucgugaagaccaucaccaacgaccagaucgaggugacgaacgccaccgagcugguccagaacagcuccaucggggagaucugcgacagcccccaccagauccucgacggcgagaacugcacccugaucgacgcccugcucggggacccccagugcgacggcuuccagaacaagaagugggaccuguucguggagcgcaacaaggccuacuccaacugcuaccccuacgacgugccggacuacgcgagccugcggucccucgucgccagcuccggcacccuggaguucaacaacgagagcuucaacuggacgggggugacccagaacggcaccuccagcgccugcauccgccgguccaacaacagcuucuucucccgccugaacuggcucacccaccugaacuucaaguaccccgcccugaacgugacgaugcccaacaacgagcaguucgacaagcucuacaucuggggcguccaccaccccgggaccgacaaggaccagaucuuccuguacgcgcagagcuccgggcggaucaccgugagcaccaagcgcucccagcaggccgugaucccgaacaucggcagccggccccgcauccggaacauccccagccgcaucuccaucuacuggacgaucgucaagcccggcgacauccugcucaucaacagcaccgggaaccugaucgccccgcggggcuacuucaagauccgcuccggcaagagcuccaucaugcggagcgacgcccccaucgggaagugcaaguccgagugcaucacccccaacggcagcauccccaacgacaagccguuccagaacgugaaccgcaucaccuacggggccugcccccgguacgugaagcaguccacgcugaagcucgcgaccggcaugcgcaacguccccgagaagcagacccgggggaucuucggcgccaucgccggguucaucgagaacggcugggagggcaugguggacgggugguacggcuuccgccaccagaacagcgaggggcggggccaggccgccgaccugaaguccacccaggcggccaucgaccagaucaacgggaagcugaaccgccucaucggcaagacgaacgagaaguuccaccagaucgagaaggaguucagcgagguggagggccggauccaggaccuggagaaguacgucgaggacaccaagaucgaccugugguccuacaacgccgagcuccugguggcccuggagaaccagcacaccaucgaccucaccgacagcgagaugaacaagcuguucgagaagacgaagaagcagcugcgcgagaacgccgaggacauggggaacggcugcuucaagaucuaccacaagugcgacaacgcgugcaucggguccauccgcaacggcaccuacgaccacgacguguaccgggacgaggcccucaacaaccgcuuccagaucaagggggucgagcucaagagcggcuacaaggacuggauccuguggaucuccuucgccaucagcugcuuccugcugugcguggcccugcucggcuucaucaugugggccugccagaaggggaacauccggugcaacaucugcaucuga

SEQ ID NO: 76864 - RNA, 1701 nt, Artificial Sequence
  derived and/or modified CDS sequence (opt1) from hemagglutinin__InfluenzaA__AJJ98813
augaagaccaucaucgcccugagcuacauccucugccugguguucgcccagaagcugcccggcaacgacaacuccaccgcgacgcucugccuggggcaccacgccgucccgaacggcaccaucgugaagaccaucaccaacgaccgcaucgaggugacgaacgccaccgagcugguccagaacagcuccaucggggagaucugcgacagcccccaccagauccucgacggcgagaacugcacccugaucgacgcccugcucggggacccccagugcgacggcuuccagaacaagaagugggaccuguucguggagcgguccaaggccuacagcaacugcuaccccuacgacgugccggacuacgcgucccugcgcagccucgucgccuccagcggcacccuggaguucaacaacgaguccuucaacuggacgggggugacccagaacggcaccagcuccgccugcauccggcgcagcaacuccagcuucuucucccggcugaacuggcucacccaccugaacuucaaguaccccgcccugaacgugacgaugcccaacaacgagcaguucgacaagcucuacaucuggggcguccaccaccccgggaccgacaaggaccagaucuuccuguacgcgcagagcuccgggcgcaucaccgugagcaccaagcggagccagcaggccguggucccgaacaucggcucccgcccccggauccgcaacauccccagccggaucuccaucuacuggacgaucgugaagcccggcgacauccugcucaucaacagcaccgggaaccugaucgccccgcgcggcuacuucaagauccgguccggcaagagcuccaucaugcgcagcgacgcccccaucgggaagugcaaguccgagugcaucacccccaacggcagcauccccaacgacaagccguuccagaacgugaaccggaucaccuacggggccugcccccgcuacgucaagcaguccacgcugaagcucgcgaccggcaugcggaacgugcccgagaagcagacccgcgggaucuucggcgccaucgccggguucaucgagaacggcugggagggcaugguggacgggugguacggcuuccggcaccagaacagcgaggggcgcggccaggccgccgaccugaaguccacccaggcggccaucgaccagaucaacgggaagcugaaccggcucaucggcaagacgaacgagaaguuccaccagaucgagaaggaguucagcgaggucgagggccgcauccaggaccuggagaaguacguggaggacaccaagaucgaccugugguccuacaacgccgagcuccugguggcccuggagaaccagcacaccaucgaccucaccgacagcgagaugaacaagcuguucgagaagacgaagaagcagcugcgcgagaacgccgaggacauggggaacggcugcuucaagaucuaccacaagugcgacaacgcgugcaucggguccauccggaacggcaccuacgaccacgacgucuaccgcgacgaggcccucaacaaccgguuccagaucaaggggguggagcucaagagcggcuacaaggacuggauccuguggaucuccuucgccaucagcugcuuccugcugugcguggcccugcucggcuucaucaugugggccugccagaaggggaacauccgcugcaacaucugcaucuga

SEQ ID NO: 76865 - RNA, 1701 nt, Artificial Sequence
  derived and/or modified CDS sequence (opt1) from hemagglutinin__InfluenzaA__AJJ98825
augaagaccaucaucgcccugagcuacauccucugccugguguucgcccaggagcugcccggcaacgacaacuccaccgcgacgcucugccuggggcaccacgccgucccgaacggcaccaucgugaagaccaucaccaacgaccgcaucgaggugacgaacgccaccgagcugguccagaacagcuccaucggggagaucugcgacagcccccaccagauccucgacggcgagaacugcacccugaucgacgcccugcucggggacccccagugcgacggcuuccagaacaagaagugggaccuguucguggagcgguccaaggccuacagcaacugcuaccccuacgacgugccggacuacgcgucccugcgcagccucgucgccuccagcggcacccuggaguucaacaacgaguccuucaacuggacgggggugacccagaacggcaccagcuccgccugcauccggcgcagcaacaacuccuucuucagccggcugaacuggcucacccaccugaacuucaaguaccccgcccugaacgugacgaugcccaacaacgagcaguucgacaagcucuacaucuggggcguccaccaccccgggaccgacaaggaccagaucuuccuguacgcgcaguccagcgggcgcaucaccguguccaccaagcggagccagcaggccgugaucccgaacaucggcagccgccaccggauccgcaacauccccucccggaucagcaucuacuggacgaucgucaagcccggcgacauccugcucaucaacuccaccgggaaccugaucgcgccccgcggcuacuucaagauccggagcgggaaguccagcaucaugcgcuccgacgccccgaucggcaagugcaagagcgagugcaucacccccaacggcuccauccccaacgacaagcccuuccagaacgugaaccggaucaccuacggggccugcccgcgcuacgugaagcagagcacgcugaagcucgccaccggcaugcggaacguccccgagaagcagacccgcgggaucuucggcgccaucgccggguucaucgagaacggcugggagggcaugguggacgggugguacggcuuccggcaccagaacuccgaggggcgcggccaggccgccgaccucaagagcacccaggcggccaucgaccagaucaacgggaagcugaaccggcugaucggcaagacgaacgagaaguuccaccagaucgagaaggaguucuccgagguggagggccgcauccaggaccuggagaaguacgucgaggacaccaagaucgaccuguggagcuacaacgccgagcuccugguggcccuggagaaccagcacaccaucgaccucaccgacuccgagaugaacaagcuguucgagaagacgaagaagcagcugcgcgagaacgccgaggacauggggaacggcugcuucaagaucuaccacaagugcgacaacgcgugcaucgggagcauccggaacggcaccuacgaccacgacguguaccgcgacgaggcccucaacaaccgguuccagaucaagggggucgagcugaaguccggcuacaaggacuggauccuguggaucagcuucgccaucuccugcuuccuccugugcguggcccugcucggcuucaucaugugggccugccagaaggggaacauccgcugcaacaucugcaucuga

SEQ ID NO: 76866 - RNA, 1701 nt, Artificial Sequence
  derived and/or modified CDS sequence (opt1) from hemagglutinin__InfluenzaA__AJJ98837
augaagaccaucaucgcccugagcuacauccucugccugguguucgcccagaagcugcccggcaacgacaacuccaccgcgacgcucugccuggggcaccacgccgucccgaacggcaccaucgugaagaccaucaccaacgaccagaucgaggugacgaacgccaccgagcugguccagagcuccagcaccggggagaucugcaacagcccccaccagauccucgacggcgagaacugcacccugaucgacgcccugcucggggacccccagugcgacggcuuccagaacaagaagugggaccuguucguggagcgcagcaaggcccacuccaacugcuaccccuacgacgugccggacuacgcgagccugcggucccucgucgccagcuccggcacgcuggaguucaacaacgagagcuucaacuggaccggggugacccagaacggcaccuccagcgccugcauccgccgguccaacaacagcuucuucucccgccugaacuggcucacgcaccugaacuucaaguaccccgcccugaacgugaccaugcccaacaacgagcaguucgacaagcucuacaucuggggcguccaccaccccgggaccgacaaggaccagaucuuccuguacgcgcaggccagcgggcggaucaccguguccacgaagcgcagccagcaggccgugaucccgaacaucggcagccggccccgcguccggaacauccccucccgcgugagcaucuacuggaccaucgugaagcccggcgacauccugcucaucaacuccaccgggaaccugaucgccccgcggggcuacuucaagauccgcagcgggaaguccagcaucaugcgguccgacgcccccaucggcaagugcaacagcgcgugcaucacccccaacggcuccauccccaacgacaagccguuccagaacgucaaccgcaucacguacggggccugcccccgguacgugaagcagagcacccugaagcucgccaccggcaugcgcaacgugcccgagaagcagacccgggggaucuucggcgccaucgccggguucaucgagaacggcugggagggcauggucgacgggugguacggcuuccgccaccagaacuccgaggggcggggccaggcggccgaccugaaguccacgcaggccgccaucgaccagaucaacgggaagcugaaccgccucaucggcaagaccaacgagaaguuccaccagaucgagaaggaguucuccgagguggagggccggauccaggaccuggagaaguacguggaggacaccaagaucgaccuguggagcuacaacgccgagcuccuggucgcgcuggagaaccagcacaccaucgaccucacggacuccgagaugaacaagcuguucgagaagaccaagaagcagcugcgcgagaacgccgaggacauggggaacggcugcuucaagaucuaccacaagugcgacaacgccugcaucgggagcauccgcaacggcaccuacgaccacgacguguaccgggacgaggcccucaacaaccgcuuccagaucaaggggguggagcugaaguccggcuacaaggacuggauccuguggaucagcuucgccaucuccugcuuccuccugugcgucgcgcugcucggcuucaucaugugggccugccagaaggggaacauccggugcaacaucugcaucuga

SEQ ID NO: 76867 - RNA, 1701 nt, Artificial Sequence
  derived and/or modified CDS sequence (opt1) from hemagglutinin__InfluenzaA__AJJ98849
augaagaccaucaucgcccugagcuacauccucugccugguguucgcccaggagcugcccggcaacgacaacuccaccgcgacgcucugccuggggcaccacgccgucccgaacggcaccaucgugaagaccaucaccaacgaccagaucgaggugacgaacgccaccgagcugguccagagcuccagcaccggggagaucugcaacagcccccaccagauccucgacggcgagaacugcacccugaucgacgcccugcucggggacccccagugcgacggcuuccagaacaagaagugggaccuguucguggagcgcagcaaggcccacuccaacugcuaccccuacgacgugccggacuacgcgagccugcggucccucgucgccagcuccggcacgcuggaguucaacaacgagagcuucaacuggaccggggugacccagaacggcaccuccagcgccugcauccgccgguccaacaacagcuucuucucccgccugaacuggcucacgcaccugaacuucaaguaccccgcccugaacgugaccaugcccaacaacgagcaguucgacaagcucuacaucuggggcguccaccaccccgggaccgacaaggaccagaucuuccuguacgcgcaggccagcgggcggaucaccguguccacgaagcgcagccagcaggccgugaucccgaacaucggcagccggcugcgcguccggaacauccccucccgcgugagcaucuacuggaccaucgugaagcccggcgacauccuccugaucaacuccaccgggaaccugaucgcgccccggggcuacuucaagauccgcagcgggaaguccagcaucaugcgguccgacgccccgaucggcaagugcaacagcgccugcaucacccccaacggcuccauccccaacgacaagcccuuccagaacgucaaccgcaucacguacggggccugcccgcgguacgugaagcagaacacccucaagcuggccaccggcaugcgcaacgugcccgagaagcagacccgggggaucuucggcgccaucgccggguucaucgagaacggcugggagggcauggucgacgggugguacggcuuccgccaccagaacagcgaggggcggggccaggcggccgaccugaaguccacgcaggccgccaucgaccagaucaacgggaagcucaaccgccugaucggcaagaccaacgagaaguuccaccagaucgagaaggaguucagcgagguggagggccggauccaggaccuggagaaguacguggaggacaccaagaucgaccucugguccuacaacgccgagcugcuggucgcgcucgagaaccagcacaccaucgaccugacggacagcgagaugaacaagcuguucgagaagaccaagaagcagcuccgcgagaacgccgaggacauggggaacggcugcuucaagaucuaccacaagugcgacaacgccugcaucggguccauccgcaacggcaccuacgaccacgacguguaccgggacgaggcccugaacaaccgcuuccagaucaaggggguggagcugaaguccggcuacaaggacuggauccucuggaucuccuucgccaucagcugcuuccugcugugcgucgcgcuccugggcuucaucaugugggccugccagaaggggaacauccggugcaacaucugcaucuga

SEQ ID NO: 76868 - RNA, 1701 nt, Artificial Sequence
  derived and/or modified CDS sequence (opt1) from hemagglutinin__InfluenzaA__AJJ98861
augaagaccaucaucgcccugagcuacauccucugccugguguucgcccagaagcugcccggcaacgacaacuccaccgcgacgcucugccuggggcaccacgccgucccgaacggcaccaucgugaagaccaucaccaacgaccagaucgaggugacgaacgccaccgagcugguccagaucagcuccaccggggagaucugcgacagcccccaccagauccucgacggcgagaacugcacccugaucgacgcccugcucggggacccccagugcgacggcuuccagaacaagaagugggaccuguucguggagcgcuccaaggccuacagcaacugcuaccccuacgacgugccggacuacgcgucccugcggagccucgucgccuccagcggcacgcuggaguucaacaacgaguccuucaacuggaccggggugacccagaacggcaccagcuccgccugcauccgccggagcaacaacuccuucuucagccgccugaacuggcucacgcaccugaaguucaaguaccccgcccugaacgugaccaugcccaacaacgagcaguucgacaagcucuacaucuggggcguccaccaccccgggaccgacaacgaccagaucuuccuguacgcgcaggccuccgggcggaucaccgugagcacgaagcgcucccagcagaccgugaucccgaacaucggcagccggccccgcguccggaacauccccagccgcaucuccaucuacuggaccaucgugaagcccggcgacauccugcucaucaacagcaccgggaaccugaucgccccgcggggcuacuucaagauccgcuccggcaagagcuccaucaugaaguccgacgcccccaucgggaagugcaacagcgagugcaucacgcccaacggcagcauccccaacgacaagccguuccagaacgugaaccggaucaccuacggggccugcccccgcuacgucaagcagaacacccugaagcucgcgaccggcaugcggaacgugcccgagaagcagacgcgcgggaucuucggcgccaucgccggguucaucgagaacggcugggagggcaugguggacgggugguacggcuuccggcaccagaacuccgaggggcgcggccaggccgccgaccucaagagcacccaggcggccaucgaccagaucaacgggaagcugaaccggcugaucggcaagaccaacgagaaguuccaccagaucgagaaggaguucuccgaggucgagggccgcauccaggaccuggagaaguacguggaggacaccaagaucgaccuguggagcuacaacgccgagcuccugguggcccuggagaaccagcacacgaucgaccucaccgacuccgagaugaacaagcuguucgagaagaccaagaagcagcugcgggagaacgccgaggacauggggaacggcugcuucaagaucuaccacaagugcgacaacgcgugcaucgggagcauccgcaacggcaccuacgaccacgacgucuaccgcgacgaggcccucaacaaccgguuccagaucaaggggguggagcugaaguccggcuacaaggacuggauccuguggaucagcuucgccaucuccugcuuccuccugugcguggcccugcucggcuucaucaugugggccugccagaaggggaacauccgcugcaacaucugcaucuga

SEQ ID NO: 76869 - RNA, 1701 nt, Artificial Sequence
  derived and/or modified CDS sequence (opt1) from hemagglutinin__InfluenzaA__AJJ98873
augaagaccaucaucgcccugagcuacucccucugccugguguucgcccagaagcugcccggcaacgacaacagcaccgcgacgcucugccuggggcaccacgccgucccgaacggcaccaucgugaagaccaucaccaacgaccagaucgaggugacgaacgccaccgagcugguccaguccagcuccaccggggagaucugcgacagcccccaccagauccucgacggcgagaacugcacccugaucgacgcccugcucggggacccccagugcgacggcuuccagaacaagaagugggaccuguucguggagcgcuccaaggccuacagcaacugcuaccccuacgacgugccggacuacgcgucccugcggagccucgucgccuccagcggcacgcuggaguucaacaacgaguccuucaacuggaccggggugacccagaacggcaccagcuccgccugcauccgcaagagcaacaacuccuucuucagccggcugaacuggcucacgcaccugaaguucaaguaccccgcccugaacgugaccaugcccaacaacgagcaguucgacaagcucuacaucuggggcguccaccaccccgggaccgacaacgaccagaucuuccuguacgcgcaggccuccgggcgcaucaccgugagcacgaagcggagccagcagaccgugaucccgaacaucggcucccgcccccggguccgcaacauccccagccggaucuccaucuacuggaccaucgugaagcccggcgacauccugcucaucaacagcaccgggaaccugaucgccccgcgcggcuacuucaagauccgguccggcaagagcuccaucaugcgcagcgacgcccccaucgggaagugcaacuccgagugcaucacgcccaacggcagcauccccaacgacaagccguuccagaacgugaaccggaucaccuacggggccugcccccgcuacgucaagcagaacacccugaagcucgcgaccggcaugcggaacgugcccgagaagcagacgcgcgggaucuucggcgccaucgccggguucaucgagaacggcugggagggcaugguggacgggugguacggcuuccggcaccagaacuccgaggggcgcggccaggccgccgaccucaagagcacccaggcggccaucgaccagaucaacgggaagcugaaccggcugaucggcaagaccaacgagaaguuccaccagaucgagaaggaguucuccgaggucgagggccgcauccaggaccuggagaaguacguggaggacaccaagaucgaccuguggagcuacaacgccgagcuccugguggcccuggagaaccagcacacgaucgaccucaccgacuccgagaugaacaagcuguucgagaagaccaagaagcagcugcgggagaacgccgaggacauggggaacggcugcuucaagaucuaccacaagugcgacaacgcgugcaucgggagcauccgcaacggcaccuacgaccacgacgucuaccgcgacgaggcccucaacaaccgguuccagaucaaggggguggagcugaaguccggcuacaaggacuggauccuguggaucagcuucgccaucuccugcuuccuccugugcguggcccugcucggcuucaucaugugggccugccagaaggggaacauccgcugcaacaucugcaucuga

SEQ ID NO: 76870 - RNA, 1701 nt, Artificial Sequence
  derived and/or modified CDS sequence (opt1) from hemagglutinin__InfluenzaA__AJJ98885
augaagaccaucaucgcccugagcaacauccucugccugguguucgcccagaagcugcccggcaacgacaacuccaccgcgacgcucugccuggggcaccacgccgucccgaacggcaccaucgugaagaccaucaccaacgaccagaucgaggugacgaacgccaccgagcugguccagagcuccagcaccggggagaucugcgacagcccccaccagauccucgacggcgagaacugcacccugaucgacgcccugcucggggacccccagugcgacggcuuccagaacaagaagugggaccuguucguggagcgcagcaaggccuacuccaacugcuaccccuacgacgugccggacuacgcgagccugcggucccucgucgccagcuccggcacgcuggaguucaacaacgagagcuucaacuggaccggggugacccagaacggcaccuccagcgccugcauccgccgguccaacaacagcuucuucucccgccugaacuggcucacgcaccugaaguucaaguaccccgcccugaacgugaccaugcccaacaaggagaaguucgacaagcucuacaucuggggcguccaccaccccgggaccgacaacgaccagaucuuccuguacgcgcaggccagcgggcggaucaccguguccacgaagcgcagccagcagaccgugaucccgaacaucggcagccggccccgcguccggaacauccccucccgcaucagcaucuacuggaccaucgugaagcccggcgacauccugcucaucaacuccaccgggaaccugaucgccccgcggggcuacuucaagauccgcagcgggaaguccagcaucaugcgguccgacgcccccaucggcaagugcaacagcgagugcaucacgcccaacggcuccauccccaacgacaagccguuccagaacgugaaccgcaucaccuacggggccugcccccgguacgucaagcagaacacccugaagcucgcgaccggcaugcgcaacgugcccgagaagcagacgcgggggaucuucggcgccaucgccggguucaucgagaacggcugggagggcaugguggacgggugguacggcuuccgccaccagaacagcgaggggaucggccaggccgccgaccugaaguccacccaggcggccaucgaccagaucaacgggaagcugaaccggcucaucggcaagaccaacgagaaguuccaccagaucgagaaggaguucagcgaggucgagggccgcauccaggaccuggagaaguacguggaggacaccaagaucgaccugugguccuacaacgccgagcuccugguggcccuggagaaccagcacacgaucgaccucaccgacagcgagaugaacaagcuguucgagaagaccaagaagcagcugcgggagaacgccgaggacauggggaacggcugcuucaagaucuaccacaagugcgacaacgcgugcaucggguccauccgcaacggcaccuacgaccacgacgucuaccgcgacgaggcccucaacaaccgguuccagaucaaggggguggagcugaaguccggcuacaaggacuggauccuguggaucuccuucgccaucagcugcuuccuccugugcguggcccugcucggcuucaucaugugggccugccagaaggggaacauccgcugcaacaucugcaucuga

SEQ ID NO: 76871 - RNA, 1701 nt, Artificial Sequence
  derived and/or modified CDS sequence (opt1) from hemagglutinin__InfluenzaA__AJJ98897
augaagaccaucaucgcccugagcuacauccucugccugguguucgcccagaagcugcccggcaacgacaacuccaccgcgacgcucugccuggggcaccacgccgucccgaacggcaccaucgugaagaccaucaccaacgaccagaucgaggugacgaacgccaccgagcugguccagagcuccagcaccggggagaucugcgacagcccccaccagauccucgacggcgagaacugcacccugaucgacgcccugcucggggacccccagugcgacggcuuccagaacaagaagugggaccuguucguggagcgcagcaaggccuacuccaacugcuaccccuacgacgugccggacuacgcgagccugcggucccucgucgccagcuccggcacgcuggaguucaacaacgagagcuucaacuggaccggggugacccagaacggcaccuccagcgccugcauccgccgguccaacagcuccuucuucagccgccugaacuggcucacgcaccugaaguucaaguaccccgcccugaacgugaccaugcccaacaacgagaaguucgacaagcucuacaucuggggcguccaccaccccgggaccgacaacgaccagaucuuccuguacgcgcaggccuccgggcggaucaccgugagcacgaagcgcagccagcagaccgugaucccgaacaucggcucccggccccgcguccggaacauccccagccgcaucuccaucuacuggaccaucgugaagcccggcgacauccugcucaucaacagcaccgggaaccugaucgccccgcggggcuacuucaagauccgcuccgggaaguccuccaucaugcggagcgacgcccccaucggcaagugcaacuccgagugcaucacgcccaacggcagcauccccaacgacaagccguuccagaacgugaaccgcaucaccuacggggccugcccccgguacgucaagcagaacacccugaagcucgcgaccggcaugcgcaacgugcccgagaagcagacgcgggggaucuucggcgccaucgccggguucaucgagaacggcugggagggcaugguggacgggugguacggcuuccgccaccagaacuccgaggggaucggccaggccgccgaccucaagagcacccaggcggccaucgaccagaucaacgggaagcugaaccggcugaucggcaagaccaacgagaaguuccaccagaucgagaaggaguucuccgaggucgagggccgcauccaggaccuggagaaguacguggaggacaccaagguggaccuguggagcuacaacgccgagcuccuggucgcccuggagaaccagcacacgaucgaccucaccgacuccgagaugaacaagcuguucgagaagaccaagaagcagcugcgggagaacgccgaggacauggggaacggcugcuucaagaucuaccacaagugcgacaacgcgugcaucgggagcauccgcaacggcaccuacgaccacgacguguaccgcgacgaggcccucaacaaccgguuccagaucaaggggguggagcugaaguccggcuacaaggacuggauccuguggaucagcuucgccaucuccugcuuccuccugugcgucgcccugcucggcuucaucaugugggccugccagaaggggaacauccgcugcaacaucugcaucuga

SEQ ID NO: 76872 - RNA, 1701 nt, Artificial Sequence; identical to SEQ ID NO: 75794
  derived and/or modified CDS sequence (opt1) from hemagglutinin__InfluenzaA__AJJ98909

SEQ ID NO: 76873 - RNA, 1701 nt, Artificial Sequence
  derived and/or modified CDS sequence (opt1) from hemagglutinin__InfluenzaA__AJJ98921
augaagaccaucaucgcccugagcuacauccucugccugguguucgcccagaagcugcccggcaaggacaacuccaccgcgacgcucugccuggggcaccacgccgucccgaacggcaccaucgugaagaccaucaccaacgaccagaucgaggugacgaacgccaccgagcugguccagagcuccagcaccggggagaucugcaacagcccccaccagauccucgacggcgagaacugcacccugaucgacgcccugcucggggacccccagugcgacggcuuccagaacaagaagugggaccuguucguggagcgcagcaaggccuacuccaacugcuaccccuacgacgugccggacuacgcgagccugcggucccucgucgccagcuccggcacgcuggaguucaacaacgagagcuucaacuggaccggggugaagcagaacggcaccuccagcgccugcauccgccgguccaacagcuccuucuucagccgccugaacuggcucacccaccugaacuucaaguaccccgcccugaacgugacgaugcccaacaacgagcaguucgacaagcucuacaucuggggcguccaccaccccgggaccgacaaggaccagaucuuccuguacgcgcaguccagcgggcggaucaccgugagcaccaagcgcucccagcaggccgugaucccgaacaucggcagccggccccgcauccggaacauccccucccgcaucagcaucuacuggacgaucgucaagcccggcgacauccugcucaucaacuccaccgggaaccugaucgccccgcggggcuacuucaagauccgcagcgggaaguccagcaucaugcgguccgacgcccccaucggcaagugcaacagcgagugcaucacccccaacggcuccauccccaacgacaagccguuccagaacgugaaccgcaucaccuacggggccugcccccgguacgugaagcagagcacgcugaagcucgcgaccggcaugcgcaacguccccgagaagcagacccgggggaucuucggcgccaucgccggguucaucgagaacggcugggagggcaugguggacgggugguacggcuuccgccaccagaacuccgaggggcggggccaggccgccgaccugaaguccacccaggcggccaucgaccagaucaacgggaagcugaaccgccucaucggcaagacgaacgagaaguuccaccagaucgagaaggaguucuccgagguggagggccggauccaggaccuggagaaguacgucgaggacaccaagaucgaccuguggagcuacaacgccgagcuccugguggcccuggagaaccagcacaccaucgaccucaccgacuccgagaugaacaagcuguucgagaagacgaagaagcagcugcgcgagaacgccgaggacauggggaacggcugcuucaagaucuaccacaagugcgacaacgcgugcaucgggagcauccgcaacggcaccuacaaccacgacguguaccgggacgaggcccucaacaaccgcuuccagaucaagggggucgagcugaaguccggcuacaaggacuggauccuguggaucagcuucgccaucagcugcuuccuccugugcguggcccugcucggcuucaucaugugggccugccagaaggggaacauccggugcaacaucugcaucuga

SEQ ID NO: 76874 - RNA, 1701 nt, Artificial Sequence; identical to SEQ ID NO: 73477
  derived and/or modified CDS sequence (opt1) from hemagglutinin__InfluenzaA__AJJ98933

SEQ ID NO: 76875 - RNA, 1701 nt, Artificial Sequence; identical to SEQ ID NO: 71006
  derived and/or modified CDS sequence (opt1) from hemagglutinin__InfluenzaA__AJJ98945

SEQ ID NO: 76876 - RNA, 1701 nt, Artificial Sequence
  derived and/or modified CDS sequence (opt1) from hemagglutinin__InfluenzaA__AJJ98957
augaagaccaucaucgcccugagcuacauccucugccugguguucgcccagaagcugcccggcaacgacaacuccaccgcgacgcucugccuggggcaccacgccgucccgaacggcaccaucgugaagaccaucaccaacgaccagaucgaggugacgaacgccaccgagcugguccagagcuccagcaccggggagaucugcgacagcccccaccagauccucgacggcgagaacugcacccugaucgacgcccugcucggggacccccagugcgacggcuuccagaacaagaagugggaccuguucguggagcgcagcaaggccuacuccaacugcuaccccuacgacgugccggacuacgcgagccugcggucccucgucgccagcuccggcacgcuggaguucaacaacgagagcuucaacuggaccggggugacccagaacggcaccuccagcgccugcauccgccgguccaacaacagcuucuucucccgccugaacuggcucacgcacagcaaguucaaguaccccgcccugaacgugaccaugcccaacaacgagcaguucgacaagcuguacaucuggggcguccaccaccccgggaccgacaacgaccagaucuuccucuacgcgcaggccuccgggcggaucaccgugagcacgaagcgcagccagcagaccgugaucccgaacaucggcucccggccccgcguccggaacauccccagccgcaucuccaucuacuggaccaucgugaagcccggcgacauccugcugaucaacagcaccgggaaccucaucgccccgcggggcuacuucaagauccgcuccgggaaguccuccaucaugcggagcgacgcccccaucggcaagugcaacuccgagugcaucacgcccaacggcagcauccccaacgacaagccguuccagaacgugaaccgcaucaccuacggggccugcccccgguacgucaagcagaacacccugaagcuggcgaccggcaugcgcaacgugcccgagaagcagacgcgggggaucuucggcgccaucgccggguucaucgagaacggcugggagggcaugguggacgggugguacggcuuccgccaccagaacuccgaggggcggggccaggccgccgaccucaagagcacccaggcggccaucgaccagaucaacgggaagcugaaccgccugaucggcaagaccaacgagaaguuccaccagaucgagaaggaguucuccgaggucgagggccggauccaggaccucgagaaguacguggaggacaccaagaucgaccuguggagcuacaacgccgagcugcucguggcccuggagaaccagcacacgaucgaccugaccgacuccgagaugaacaagcuguucgagaagaccaagaagcagcuccgcgagaacgccgaggacauggggaacggcugcuucaagaucuaccacaagugcgacaacgcgugcaucgggagcauccgcaacggcaccuacgaccacgacgucuaccgggacgaggcccugaacaaccgcuuccagaucaaggggguggagcucaaguccggcuacaaggacuggauccuguggaucagcuucgccaucuccugcuuccugcucugcguggcccugcugggcuucaucaugugggccugccagaaggggaacauccggugcaacaucugcaucuga

SEQ ID NO: 76877 - RNA, 1701 nt, Artificial Sequence; identical to SEQ ID NO: 66458
  derived and/or modified CDS sequence (opt1) from hemagglutinin__InfluenzaA__AJJ98969

SEQ ID NO: 76878 - RNA, 1701 nt, Artificial Sequence
  derived and/or modified CDS sequence (opt1) from hemagglutinin__InfluenzaA__AJJ98981
augaagaccaucaucgcccugagcuacauccucugccugguguucgcccagaagcugcccggcaacgacaacuccaccgcgacgcucugccuggggcaccacgccgucccgaacggcaccaucgugaagaccaucaccaacgaccgcaucgaggugacgaacgccaccgagcugguccagaacagcuccaucggggagaucugcgacagcccccaccacauccucgacggcgagaacugcacccugaucgacgcccugcucggggacccccagugcgacggcuuccagaacaagaagugggaccuguucguggagcgguccaaggccuacagcaacugcuaccccuacgacgugccggacuacgcgucccugcgcagccucgucgccuccagcggcacccuggaguucaacaacgaguccuucaacuggacgggggugacccagaacggcaccagcuccgccugcauccggcgcagcaacuccagcuucuucucccggcugaacuggcucacccaccugaacuucaaguaccccgcccugaacgugacgaugcccaacaacgagcaguucgacaagcucuacaucuggggcguccaccaccccgggaccgacaaggaccagaucuuccuguacgcgcagagcuccgggcgcaucaccgugagcaccaagcggagccagcaggccgugaucccgaacaucggcucccgcccccggauccgcaacguccccagccggaucuccaucuacuggacgaucgugaagcccggcgacauccugcucaucaacagcaccgggaaccugaucgccccgcgcggcuacuucaagauccgguccggcaagagcuccaucaugcgcagcgacgcccccaucgggaagugcaaguccgagugcaucacccccaacggcagcauccccaacgacaagccguuccagaacgugaaccggaucaccuacggggccugcccccgcuacgucaagcaguccacgcugaagcucgcgaccggcaugcggaacgugcccgagaagcagacccgcgggaucuucggcgccaucgccggguucaucgagaacggcugggagggcaugguggacgggugguacggcuuccggcaccagaacagcgaggggcgcggccaggccgccgaccugaaguccacccaggcggccaucgaccagaucaacgggaagcugaaccggcucaucggcaagacgaacgagaaguuccaccagaucgagaaggaguucagcgaggucgagggccgcauccaggaccuggagaaguacguggaggacaccaagaucgaccugugguccuacaacgccgagcuccugguggcccuggagaaccagcacaccaucgaccucaccgacagcgagaugaacaagcuguucgagaagacgaagaagcagcugcgcgagaacgccgaggacauggggaacggcugcuucaagaucuaccacaagugcgacaacgcgugcaucggguccauccggaacggcaccuacgaccacaacgucuaccgcgacgaggcccucaacaaccgguuccagaucaaggggguggagcucaagagcggcuacaaggacuggauccuguggaucuccuucgccaucagcugcuuccugcugugcguggcccugcucggcuucaucaugugggccugccagaaggggaacauccgcugcaacaucugcaucuga

SEQ ID NO: 76879 - RNA, 1701 nt, Artificial Sequence
  derived and/or modified CDS sequence (opt1) from hemagglutinin__InfluenzaA__AJJ98993
augaagaccaucaucgcccugagcuacauccucugccugguguucgcccagaagcugcccggcaacgacaacuccaccgcgacgcucugccuggggcaccacgccgucccgaacggcaccaucgugaagaccaucaccaacgaccagaucgaggugacgaacgccaccgagcugguccagaacagcuccaucggggagaucugcgacaacccccaccagauccucgacggcgagaacugcacccugaucgacgcccugcucggggacccccagugcgacggcuuccagaacaagaagugggaccuguucguggagcgcagcaaggccuacuccaacugcuaccccuacgacgugccggacuacgcgagccugcggucccucgucgccagcuccggcacccuggaguucaacaacgagagcuucaacuggacgggggugacccagaacggcaccuccagcgccugcaugcgccgguccaacagcuccuucuucagccgccugaacuggcucacccaccugaacuucaaguaccccgcccugaacgugacgaugcccaacaacgagcaguucgacaagcucuacaucuggggcguccaccaccccgggaccgacaaggaccagaucuuccuguacgcgcaguccagcgggcggaucaccguguccaccaagcgcagccagcaggccgugaucccgaacaucggcagccggccccgcauccggaacauccccucccgcaucagcaucuacuggacgaucgucaagcccggcgacauccugcucaucaacuccaccgggaaccugaucgccccgcggggcuacuucaagauccgcagcgggaaguccagcaucaugcgguccgacgcccccaucggcaagugcaacagcgagugcaucacccccaacggcuccauccccaacgacaagccguuccagaacgugaaccgcaucaccuacggggccugcccccgguacgugaagcagagcacgcugaagcucgcgaccggcaugcgcaacguccccgagaagcagacccgggggaucuucggcgccaucgccggguucaucgagaacggcugggagggcaugguggacgggugguacggcuuccgccaccagaacuccgaggggcggggccaggccgccgaccucaagagcacccaggcggccaucgaccagaucaacgggaagcugaaccgccugaucggcaagacgaacgagaaguuccaccagaucgagaaggaguucuccgagguggagggccggauccaggaccuggagaaguacgucgaggacaccaagaucgaccuguggagcuacaacgccgagcuccugguggcccuggagaaccagcacaccaucgaccucaccgacuccgagaugaacaagcuguucgagaagacgaagaagcagcugcgcgagaacgccgaggacauggggaacggcugcuucaagaucuaccacaagugcgacaacgcgugcaucgggagcauccgcaacggcaccuacgaccacgacguguaccgggacgaggcccucaacaaccgcuuccagaucaagggggucgagcugaaguccggcuacaaggacuggauccuguggaucagcuucgccaucuccugcuuccuccugugcguggcccugcucggcuucaucaugugggccugccagaaggggaacauccggugcaacaucugcaucuga

SEQ ID NO: 76880 - RNA, 1701 nt, Artificial Sequence
  derived and/or modified CDS sequence (opt1) from hemagglutinin__InfluenzaA__AJJ99005
augaagaccaucaucgcccugagcuacauccucugccugguguucgcccagaagcugcccggcaacgacaacuccaccgcgacgcucugccuggggcaccacgccgucccgaacggcaccaucgugaagaccaucaccaacgaccagaucgaggugacgaacgccaccgagcugguccagagcuccagcaccggggagaucugcaacagcccccaccagauccucgacggcgagaacugcacccugaucgacgcccugcucggggacccccagugcgacggcuuccagaacaagaagugggaccuguucguggagcgcagcaaggcccacuccaacugcuaccccuacgacgugccggacuacgcgagccugcggucccucgucgccagcuccggcacgcuggaguucaacaacgagagcuucaacuggaucggggugacccagaacggcaccuccagcgccugcauccgccgguccaacaacagcuucuucucccgccugaacuggcucacccaccugaacuucaaguaccccgcccugaacgugacgaugcccaacaacgagcaguucgacaagcucuacaucuggggcguccaccaccccgggaccgacaaggaccagaucuuccuguacgcgcaggccagcgggcggaucaccguguccaccaagcgcagccagcaggccgugaucccgaacaucggcagccggccccgcguccggaacauccccucccgcgugagcaucuacuggacgaucgugaagcccggcgacauccugcucaucaacuccaccgggaaccugaucgccccgcggggcuacuucaagauccgcagcgggaaguccagcaucaugcgguccgacgcccccaucggcaagugcaacagcgcgugcaucacccccaacggcuccauccccaacgacaagccguuccagaacgucaaccgcaucaccuacggggccugcccccgguacgugaagcagaacacgcugaagcucgccaccggcaugcgcaacgugcccgagaagcagacccgggggaucuucggcgccaucgccggguucaucgagaacggcugggagggcauggucgacgggugguacggcuuccgccaccagaacagcgaggggcggggccaggcggccgaccugaaguccacccaggccgccaucgaccagaucaacgggaagcugaaccgccucaucggcaagacgaacgagaaguuccaccagaucgagaaggaguucagcgagguggagggccggauccaggaccuggagaaguacguggaggacaccaagaucgaccugugguccuacaacgccgagcuccuggucgcgcuggagaaccagcacaccaucgaccucaccgacagcgagaugaacaagcuguucgagaagacgaagaagcagcugcgcgagaacgccgaggacauggggaacggcugcuucaagaucuaccacaagugcgacaacgccugcaucggguccauccgcaacggcaccuacgaccacgacguguaccgggacgaggcccucaacaaccgcuuccagaucaaggggguggagcugaaguccggcuacaaggacuggauccuguggaucuccuucgccaucagcugcuuccuccugugcgucgcgcugcucggcuucaucaugugggccugccagaaggggaacauccggugcaacaucugcaucuga

SEQ ID NO: 76881 - RNA, 1701 nt, Artificial Sequence; identical to SEQ ID NO: 67435
  derived and/or modified CDS sequence (opt1) from hemagglutinin__InfluenzaA__AJJ99017

SEQ ID NO: 76882 - RNA, 1701 nt, Artificial Sequence
  derived and/or modified CDS sequence (opt1) from hemagglutinin__InfluenzaA__AJJ99029
augaagaccaucaucgcccugagcuacauccucugccugguguucgcccagaagcugcccggcaacgacaacuccaccgcgacgcucugccuggggcaccacgccgucccgaacggcaccaucgugaagaccaucaccaacgaccagaucgaggugacgaacgccaccgagcugguccagagcuccagcaccggggagaucugcgacagcccccaccagauccucgacggcgagaacugcacccugaucgacgcccugcucggggacccccagugcgacggcuuccagaacaagaagugggaccuguucaucgagcgcagcaaggccuacuccaacugcuaccccuacgacgugccggacuacgcgagccugcggucccucguggccagcuccggcacgcuggaguucaacaacgagagcuucaacuggaccggggucacccagaacggcaccuccagcuccugcauccgccggagcaacaacuccuucuucagccgccugaacuggcucacgcaccugaaguucaaguaccccgcccugaacgugaccaugcccaacaacgagcaguucgacaagcucuacaucuggggcgugcaccaccccgggaccgacaacgaccagaucuuccuguacgcccaggcguccgggcggaucaccgucagcacgaagcgcagccagcagaccgugaucccgaacaucggcucccggccccgcgugcggaacauccccagccgcaucuccaucuacuggaccaucgucaagcccggcgacauccugcucaucaacagcaccgggaaccugaucgccccgcggggcuacuucaagauccgcuccgggaaguccuccaucaugcggagcgacgcccccaucggcaagugcaacuccgagugcaucacgcccaacggcagcauccccaacgacaagccguuccagaacgugaaccgcaucaccuacggggccugcccccgguacgugaagcagaacacccugaagcucgccaccggcaugcgcaacguccccgagaagcagacgcgggggaucuucggcgcgaucgccggguucaucgagaacggcugggagggcaugguggacgggugguacggcuuccgccaccagaacuccgaggggcggggccaggccgccgaccucaagagcacccaggccgcgaucgaccagaucaacgggaagcugaaccgccugaucggcaagaccaacgagaaguuccaccagaucgagaaggaguucuccgagguggagggccggauccaggaccuggagaaguacgucgaggacaccaagaucgaccuguggagcuacaacgccgagcuccugguggcccuggagaaccagcacacgaucgaccucaccgacuccgagaugaacaagcuguucgagaagaccaagaagcagcugcgcgagaacgccgaggacauggggaacggcugcuucaagaucuaccacaagugcgacaacgccugcaucgggagcauccgcaacggcaccuacgaccacaacguguaccgggacgaggcgcucaacaaccgcuuccagaucaagggggucgagcugaaguccggcuacaaggacuggauccuguggaucagcuucgccaucuccugcuuccuccugugcguggcccugcucggcuucaucaugugggccugccagaaggggaacauccggugcaacaucugcaucuga

SEQ ID NO: 76883 - RNA, 1701 nt, Artificial Sequence
  derived and/or modified CDS sequence (opt1) from hemagglutinin__InfluenzaA__AJJ99041
augaagaccaucaucgcccugagcuacauccucugccugguguucgcccagaagcugcccggcaacgacaacuccaccgcgacgcucugccuggggcaccacgccgucccgaacggcaccaucgugaagaccaucaccaacgaccagaucgaggugacgaacgccaccgagcugguccagagcuccagcaccggggagaucugcgacagcccccaccagauccucgacggcgagaacugcacccugaucgacgcccugcucggggacccccagugcgacggcuuccagaacaagaagugggaccuguucguggagcgcuccaaggccuacuccaacugcuaccccuacgacgugccggacuacgcgagccugcggucccucgucgccagcuccggcacgcuggaguucaacaacgagagcuucaacuggaccggggugacccagaacggcaccuccagcgccugcaagcgcggguccgacaacagcuucuucucccggcugaacuggcucacgcaccugaaguucaaguaccccgcccugaacgugaccaugcccaacaacgagaaguucgacaagcucuacaucuggggcguccaccaccccgggaccgacaacgaccagaucuucccguacgcgcaggccagcggccgcaucaccguguccacgaagcggagccagcagaccgugauccccaacaucggcagccgcccccggguccgcaacauccccucccggaucagcaucuacuggaccaucgugaagccgggggacauccugcugaucaacuccaccggcaaccucaucgcgccccgcggguacuucaagauccggagcggcaaguccagcaucaugcgcuccgacgcccccaucggcaagugcaacagcgggugcaucacgcccaacggcuccaucccgaacgacaagcccuuccagaacgugaaccggaucaccuacggggccugcccccgcuacgucaagcagagcacccugaagcuggccaccggcaugcggaacgugcccgagaagcagacgcgcgggaucuucggcgccaucgccggcuucaucgagaacgggugggagggcaugguggacgggugguacggcuuccggcaccagaacuccgaggggaucggccaggccgccgaccucaagagcacccaggcggccaucaaccagaucaacggcaagcugaaccgccugaucgggaagaccaacgagaaguuccaccagaucgagaaggaguucuccgaggucgagggccggauccaggaccucgagaaguacguggaggacaccaagaucgaccuguggagcuacaacgccgagcugcucguggcccuggagaaccagcacacgaucgaccugaccgacuccgagaugaacaagcuguucgagcgcaccaagaagcagcuccgggagaacgccgaggacauggggaacggcugcuucaagaucuaccacaagugcgacaacgcgugcaucgggagcauccgcaacggcaccuacgaccacgacgucuaccgcgacgaggcccugaacaaccgguuccagaucaagggcguggagcucaaguccggguacaaggacuggauccuguggaucagcuucgccaucuccugcuuccugcucugcguggcccugcugggcuucaucaugugggccugccagaaggggaacauccgcugcaacaucugcaucuga

SEQ ID NO: 76884 - RNA, 1701 nt, Artificial Sequence; identical to SEQ ID NO: 73882
  derived and/or modified CDS sequence (opt1) from hemagglutinin__InfluenzaA__AJJ99053

SEQ ID NO: 76885 - RNA, 1701 nt, Artificial Sequence; identical to SEQ ID NO: 73882
  derived and/or modified CDS sequence (opt1) from hemagglutinin__InfluenzaA__AJJ99065

SEQ ID NO: 76886 - RNA, 1701 nt, Artificial Sequence
  derived and/or modified CDS sequence (opt1) from hemagglutinin__InfluenzaA__AJJ99089
augaagaccaucaucgcccugagcuacauccucugccugguguucgcccagaagcugcccggcaacgacaacuccaccgcgacgcucugccuggggcaccacgccgucccgaacggcaccaucgugaagaccaucaccaacgaccgcaucgaggugacgaacgccaccgagcugguccagaacagcuccaucggggagaucugcgacagcccccaccagauccucgacggcgagaacugcacccugaucgacgcccugcucggggacccccagugcgacggcuuccagaacaagaagugggaccuguucguggagcggaacaaggccuacuccaacugcuaccccuacgacgugccggacuacgcgagccugcgcucccucgucgccagcuccggcacccuggaguucaacaacgagagcuucaacuggacgggggugacccagaacggcaccuccagcgccugcauccggcgcuccaacagcuccuucuucagccggcugaacuggcucacccaccugaacuucaaguaccccgcccugaacgugacgaugcccaacaacgagcaguucgacaagcucuacaucuggggcguccaccaccccgggaccgacaaggaccagaucuuccuguacgcgcaguccagcgggcgcaucaccguguccaccaagcggagccagcaggccgugaucccgaacaucggcagccgcccccggauccgcaacauccccucccggaucagcaucuacuggacgaucgucaagcccggcgacauccugcucaucaacuccaccgggaaccugaucgccccgcgcggcuacuucaagauccggagcgggaaguccagcaucaugcgcuccgacgcccccaucggcaagugcaagagcgagugcaucacccccaacggcuccauccccaacgacaagccguuccagaacgugaaccggaucaccuacggggccugcccccgcuacgugaagcagagcacgcugaagcucgcgaccggcaugcggaacguccccgagaagcagacccgcgggaucuucggcgccaucgccggguucaucgagaacggcugggagggcaugguggacgggugguacggcuuccggcaccagaacuccgaggggcgcggccaggccgccgaccucaagagcacccaggcggccaucgaccagaucaacgggaagcugaaccggcugaucggcaagacgaacgagaaguuccaccagaucgagaaggaguucuccgagguggagggccgcauccaggaccuggagaaguacgucgaggacaccaagaucgaccuguggagcuacaacgccgagcuccugguggcccuggagaaccagcacaccaucgaccucaccgacuccgagaugaacaagcuguucgagaagacgaagaagcagcugcgcgagaacgccgaggacauggggaacggcugcuucaagaucuaccacaagugcgacaacgcgugcaucgggagcauccggaacggcaccuacgaccacgacguguaccgcgacgaggcccucaacaaccgguuccagaucaagggggucgagcugaaguccggcuacaaggacuggauccuguggaucagcuucgccaucuccugcuuccuccugugcguggcccugcucggcuucaucaugugggccugccagaaggggaacauccgcugcaacaucugcaucuga

SEQ ID NO: 76887 - RNA, 1701 nt, Artificial Sequence; identical to SEQ ID NO: 73572
  derived and/or modified CDS sequence (opt1) from hemagglutinin__InfluenzaA__AJJ99101

SEQ ID NO: 76888 - RNA, 1701 nt, Artificial Sequence; identical to SEQ ID NO: 73477
  derived and/or modified CDS sequence (opt1) from hemagglutinin__InfluenzaA__AJJ99113

SEQ ID NO: 76889 - RNA, 1701 nt, Artificial Sequence
  derived and/or modified CDS sequence (opt1) from hemagglutinin__InfluenzaA__AJJ99125
augaagaccaucaucgcccugagcuacauccucugcaugguguucgcccagaagcugcccggcaacgacaacuccaccgcgacgcugugccucgggcaccacgccgucccgaacggcaccaucgugaagaccaucaccaacgaccagaucgaggugacgaacgccaccgagcugguccagagcuccagcaccggggagaucugcaacagcccccaccagauccuggacggcgagaacugcacccucaucgacgcccugcugggggacccccagugcgacggcuuccagaacaagaagugggaccucuucguggagcgcagcaaggcccacuccaacugcuaccccuacgacgugccggacuacgcgagccugcggucccuggucgccagcuccggcacgcucgaguucaacaacgagagcuucaacuggaccggggugacccagaacggcaccuccagcgccugcauccgccgguccagcaacuccuucuucagccgccugaacuggcugacgcaccucaacuucaaguaccccgcccugaacgugaccaugcccaacaacgagcaguucgacaagcuguacaucuggggcguccaccaccccgggaccgacaaggaccagaucuuccucuacgcgcaggccuccgggcggaucaccgugagcacgaagcgcagccagcaggccgugaucccgaacaucggcucccggccccgcguccggaacauccccagccgcguguccaucuacuggaccaucgugaagcccggcgacauccugcugaucaacagcaccgggaaccucaucgccccgcggggcuacuucaagauccgcuccgggaaguccuccaucaugcggagcgacgcccccaucggcaagugcaacuccgcgugcaucacccccaacggcagcauccccaacgacaagccguuccagaacgucaaccgcaucacguacggggccugcccccgguacgugaagcagaacacccugaagcuggccaccggcaugcgcaacgugcccgagaagcagacccgggggaucuucggcgccaucgccggguucaucgagaacggcugggagggcauggucgacgggugguacggcuuccgccaccagaacuccgaggggcggggccaggcggccgaccucaagagcacgcaggccgccaucgaccagaucaacgggaagcugaaccgccugaucggcaagaccaacgagaaguuccaccagaucgagaaggaguucuccgagguggagggccggauccaggaccucgagaaguacguggaggacaccaagaucgaccuguggagcuacaacgccgagcugcucgucgcgcuggagaaccagcacaccaucgaccugacggacuccgagaugaacaagcuguucgagaagaccaagaagcagcuccgcgagaacgccgaggacauggggaacggcugcuucaagaucuaccacaagugcgacaacgccugcaucgggagcauccgcaacggcaccuacgaccacgacguguaccgggacgaggcccugaacaaccgcuuccagaucaaggggguggagcucaaguccggcuacaaggacuggauccuguggaucagcuucgccaucuccugcuuccugcucugcgucgcgcugcugggcuucaucaugugggccugccagaaggggaacauccggugcaacaucugcaucuga

SEQ ID NO: 76890 - RNA, 1701 nt, Artificial Sequence
  derived and/or modified CDS sequence (opt1) from hemagglutinin__InfluenzaA__AJJ99137
augaagaccaucaucgcccugagcuacauccucugccugguguucgcccagaagcugcccggcaacgacaacuccaccgcgacgcucugccuggggcaccacgccgucccgaacggcaccaucgugaagaccaucaccaacgaccagaucgaggugacgaacgccaccgagcugguccagagcuccagcaccggggagaucugcaacagcccccaccagauccucgacggcgagaacugcacccugaucgacgcccugcucggggacccccagugcgacggcuuccagaacaagaagugggaccuguucguggagcgcagcaaggcccacuccaacugcuaccccuacgacgugccggacuacgcgagccugcggucccucgucgccagcuccggcacgcuggaguucaacaacgagagcuucaacuggaccggggugacccagaacggcaccuccagcgccugcauccgccgguccaacaacagcuucuucucccgccugaacuggcucacgcaccugaacuucaaguaccccgcccugaacgugaccaugcccaacaacgagcaguucgacaagcucuacaucuggggcguccaccaccccgggaccgacaaggaccagaucuuccuguacgcgcaggccagcgggcggaucaccguguccacgaagcgcagccagcaggccgugaucccgaacaucggcagccggccccgcguccggaacauccccucccgcgugagcaucuacuggaccaucgugaagcccggcgacauccugcucaucaacuccaccgggaaccugaucgccccgcggggcuacuucaagauccgcagcgggaaguccagcaucaugcgguccgacgcccccaucggcaagugcaacagcgcgugcaucacccccaacggcuccauccccaacgacaagccguuccagaacgucaaccgcaucacguacggggccugcccccgguacgugaagcagaacacccugaagcucgccaccggcaugcgcaacgugcccgagaagcagacccgggggaucuucggcgccaucgccggguucaucgagaacggcugggagggcauggucgacgggugguacggcuuccgccaccagaacagcgaggggcggggccaggcggccgaccugaaguccacgcaggccgccaucgaccagaucaacgggaagcugaaccgccucaucggcaagaccaacgagaaguuccaccagaucgagaaggaguucagcgagguggagggccggauccaggaccuggagaaguacguggaggacaccaagaucgaccugugguccuacaacgccgagcuccuggucgcgcuggagaaccagcacaccaucgaccucacggacagcgagaugaacaagcuguucgagaagaccaagaagcagcugcgcgagaacgccgaggacauggggaacggcugcuucaagaucuaccacaagugcgacaacgccugcaucguguccauccgcaacgggaccuacgaccacgacguguaccgggacgaggcccucaacaaccgcuuccagaucaagggcgucgagcugaaguccggguacaaggacuggauccuguggaucuccuucgccaucagcugcuuccuccugugcguggcgcugcucggcuucaucaugugggccugccagaagggcaacauccggugcaacaucugcaucuga

SEQ ID NO: 76891 - RNA, 1701 nt, Artificial Sequence
  derived and/or modified CDS sequence (opt1) from hemagglutinin__InfluenzaA__AJJ99149
augaagaccaucaucgcccugagcuacauccucugccugguguucgcccagaaguuccccggcaacgacaacuccaccgcgacgcugugccucgggcaccacgccgucccgaacggcaccaucgugaagaccaucaccaacgaccagaucgaggugacgaacgccaccgagcugguccagagcuccagcaccggggagaucugcgacagcccccaccagauccuggacggcaagaacugcacccucaucgacgcccugcugggggacccccagugcgacggcuuccagaacaagaagugggaccucuucguggagcgcagcaaggccuacuccaacugcuaccccuacgacaugccggacuacgcgagccugcggucccugguggccagcuccggcacgcucgaguucaacaacgagagcuucaacuggaccggggucacccagaacggcaccuccagcgccugcauccgccgguccaacagcuccuucuucagccgccugaacuggcugacgcaccucaacuucaaguaccaggcccugaacgugaccaugcccaacaacgagcaguucgacaagcuguacaucuggggcgugcaccaccccgggaccgacaaggaccagaucuuccucuacgcgcaggccuccgggcggaucaccgucagcacgaagcgcagccagcagaccgugauccccaacaucggcucccggccgcgcgugcggaacauccccagccgcaucuccaucuacuggaccaucgucaagcccggcgacauccugcugaucaacagcaccgggaaccucaucgcgccccggggcuacuucaagauccaguccgggaaguccuccaucaugcgcagcgacgccccgaucggcaagugcaacuccgagugcaucacgcccaacggcagcauccccaacgacaagcccuuccagaacgugaaccggaucaccuacggggccugcccgcgcuacgugaagcagaacacccugaagcuggccaccggcaugcggaacguccccgagaagcagacgcgcgggaucuucggcgccaucgccggguucaucgagaacggcugggagggcaugguggacgggugguacggcuuccggcaccagaacuccgaggggcgcggccaggccgccgaccucaagagcacccaggcggccaucgaccagaucaacgggaagcugaaccggcugaucggcaagaccaacgagaaguuccaccagaucgagaaggaguucuccgagguggagggccgcauccaggaccucgagaaguacgucgaggacaccaagaucgaccuguggagcuacaacgccgagcugcucguggcccuggagaaccagcacacgaucgaccugaccgacuccgagaugaacaagcuguucgagaagaccaagaagcagcuccgggagaacgccgaggacauggggaacggcugcuucaagaucuaccacaagugcgacaacgcgugcaucgggagcauccgcaacggcaccuacgaccacgacguguaccgcgacgaggcccugaacaaccgguuccagaucaagggggucgagcucaaguccggcuacaaggacuggauccuguggaucagcuucgccaucuccugcuuccugcucugcguggcccugcugggcuucaucaugugggccugccagaaggggaacauccgcugcaacaucugcaucuga

SEQ ID NO: 76892 - RNA, 1701 nt, Artificial Sequence
  derived and/or modified CDS sequence (opt1) from hemagglutinin__InfluenzaA__AJJ99161
augaagaccaucaucgcccugagcuacauccucugccugguguucgcccagaagcugcccggcaacgacaacuccaccgcgacgcucugccuggggcaccacgccgucccgaacggcaccaucgugaagaccaucaccaacgaccagaucgaggugacgaacgccaccgagcugguccagagcuccagcaccggggagaucugcgacagcccccaccagauccucgacggcgagaacugcacccugaucgacgcccugcucggggacccccagugcgacggcuuccagaacaagaagugggaccuguucguggagcgcagcaaggccuacuccaacugcuaccccuacgacgugccggacuacgcgagccugcggucccucgucgccagcuccggcacgcuggaguucaacaacgagagcuucaacuggaccggggugacccagaacggcaccuccagcgccugcauccgccgguccaacaacagcuucuucucccgccugaacuggcucacgcaccugaaguucaaguaccccgcccugaacgugaccaugcccaacaacgagcaguucgacaagcucuacaucuggggcguccaccaccccgggaccgacaacgaccagaucuuccuguacgcgcaggccagcgggcggaucaccguguccacgaagcgcagccagcagaccgugaucccgaacaucggcagccggccccgcguccgggacauccccucccgcaucagcaucuacuggaccaucgugaagcccggcgacauccugcucaucaacuccaccgggaaccugaucgccccgcggggcuacuucaagauccgcagcgggaaguccagcaucaugcgguccgacgcccccaucggcaagugcaacagcgagugcaucacgcccaacggcuccauccccaacgacaagccguuccagaacgugaaccgcaucaccuacggggccugcccccgguacgucaagcagaacacccugaagcucgcgaccggcaugcgcaacgugcccgagaagcagacgcgggggaucuucggcgccaucgccggguucaucgagaacggcugggagggcaugguggacgggugguacggcuuccgccaccagaacagcgaggggcggggccaggccgccgaccugaaguccacccaggcggccaucgaccagaucaacgggaagcugaaccgccucaucggcaagaccaacgagaaguuccaccagaucgagaaggaguucagcgaggucgagggccggauccaggaccuggagaaguacguggaggacaccaagaucgaccugugguccuacaacgccgagcuccugguggcccuggagaaccagcacacgaucgaccucaccgacagcgagaugaacaagcuguucgagaagaccaagaagcagcugcgcgagaacgccgaggacauggggaacggcugcuucaagaucuaccacaagugcgacaacgcgugcaucggguccauccgcaacggcaccuacgaccacgacgucuaccgggacgaggcccucaacaaccgcuuccagaucaaggggguggagcugaaguccggcuacaaggacuggauccuguggaucuccuucgccaucagcugcuuccuccugugcguggcccugcucggcuucaucaugugggccugccagaaggggaacauccggugcaacaucugcaucuga

SEQ ID NO: 76893 - RNA, 1701 nt, Artificial Sequence
  derived and/or modified CDS sequence (opt1) from hemagglutinin__InfluenzaA__AJJ99173
augaagaccaucaucgcccugagcuacauccucugccugguguucgcccagaagcugcccggcaacgacaacuccaccgcgacgcucugccuggggcaccacgccgucccgaacggcaccaucgugaagaccaucaccaacgaccagaucgaggugacgaacgccaccgagcugguccagagcuccagcaccggggagaucugcaacagcccccaccagauccucgacggcgagaacugcacccugaucgacgcccugcucggggacccccagugcgacggcuuccagaacaagaagugggaccuguucguggagcgcagcaaggccuacuccaacugcuaccccuacgacgugccggacuacgcgagccugcggucccucgucgccagcuccggcacgcuggaguucaacaacgagagcuucaacuggaccggggugacccagaacggcaccuccagcgccugcauccgccgguccaacagcuccuucuucagccgccugaacuggcucacgcaccugaaguucaaguaccccgcccugaacgugaccaugcccaacaacgagcaguucgacaagcucuacaucuggggcguccaccaccccgggaccgacaacgaccagaucuuccuguacgcgcaggccuccgggcggaucaccgugagcacgaagcgcagccagcagaccgugaucccgaacaucggcucccggccccgcguccggaacauccccagccgcaucuccaucuacuggaccaucgugaagcccggcgacauccugcucaucaacagcaccgggaaccugaucgccccgcggggcuacuucaagauccgcuccgggaaguccuccaucaugcggagcgacgcccccaucggcaagugcaacuccgagugcaucacgcccaacggcagcauccccaacgacaagccguuccagaacgugaaccgcaucaccuacggggccugcccccgguacgucaagcagaacacccugaagcucgcgaccggcaugcgcaacgugcccgagaagcagacgcgggggaucuucggcgccaucgccggguucaucgagaacggcugggagggcaugguggacgggugguacggcuuccgccaccagaacuccgaggggcggggccaggccgccgaccucaagagcacccaggcggccaucgaccagaucaacgggaagcugaaccgccugaucggcaagaccaacgagaaguuccaccagaucgagaaggaguucuccgaggucgagggccggauccaggaccuggagaaguacguggaggacaccaagaucgaccuguggagcuacaacgccgagcuccugguggcccuggagaaccagcacacgaucgaccucaccgacuccgagaugaacaagcuguucgagaagaccaagaagcagcugcgcgagaacgccgaggacauggggaacggcugcuuccgcaucuaccacaagugcgacaacgcgugcaucgggagcauccggaacggcaccuacgaccacgacgucuaccgcgacgaggcccucaacaaccgguuccagaucaaggggguggagcugaaguccggcuacaaggacuggauccuguggaucagcuucgccaucuccugcuuccuccugugcguggcccugcucggcuucaucaugugggccugccagaaggggaacauccgcugcaacaucugcaucuga

SEQ ID NO: 76894 - RNA, 1701 nt, Artificial Sequence
  derived and/or modified CDS sequence (opt1) from hemagglutinin__InfluenzaA__AJJ99185
augaagaccaucaucgcccugagcuacauccucugccugguguucgcccagaagcugcccggcaacgacaacuccaccgcgacgcucugccuggggcaccacgccgucccgaacggcaccaucgugaagaccaucaccaacgaccagaucgaggugacgaacgccaccgagcugguccagagcuccagcaccggggagaucugcgacagcccccaccagauccucgacggcgagaacugcacccugaucgacgcccugcucggggacccccagugcgacggcuuccagaacaagaagugggaccuguucguggagcgcagcaaggccuacuccaacugcuaccccuacgacgugccggacuacgcgagccugcggucccucgucgccagcuccggcacgcuggaguucaacaacgagagcuucaacuggaccggggugacccagaacggcaccuccagcgccugcauccgcaaguccaacaacagcuucuucucccggcugaacuggcucacgcaccugaaguucaaguaccccgcccugaacgugaccaugcccaacaacgagcaguucgacaagcucuacaucuggggcguccaccaccccgggaccgacaacgaccagaucuuccuguacgcgcaggccagcgggcgcaucaccguguccacgaagcggagccagcagaccgugaucccgaacaucggcagccgcccccggguccgcaacauccccucccggaucagcaucuacuggaccaucgugaagcccggcgacauccugcucaucaacuccaccgggaaccugaucgccccgcgcggcuacuucaagauccggagcgggaaguccagcaucaugcgcgccgacgcccccaucggcaagugcaacuccgagugcaucacgcccaacggcagcauccccaacgacaagccguuccagaacgugaaccggaucaccuacggggcgugcccccgcuacgucaagcagaacacccugaagcucgccaccggcaugcggaacgugcccgagaagcagacgcgcgggaucuucggcgccaucgccggguucaucgagaacggcugggagggcaugguggacgggugguacggcuuccggcaccagaacuccgaggggcgcggccaggccgcggaccugaaguccacccaggccgccaucgaccagaucaacgggaagcugaaccggcucaucggcaagaccaacgagaaguuccaccagaucgagaaggaguucuccgaggucgagggccgcauccaggaccuggagaaguacguggaggacaccaagaucgaccuguggagcuacaacgccgagcuccugguggcccuggagaaccagcacacgaucgaccucaccgacuccgagaugaacaagcuguucgagaagaccaagaagcagcugcgggagaacgcggaggacauggggaacggcugcuucaagaucuaccacaagugcgacaacgccugcaucgggagcauccgcaacggcaccuacgaccacgacgucuaccgcgacgaggcccucaacaaccgguuccagaucaaggggguggagcugaaguccggcuacaaggacuggauccuguggaucagcuucgccaucuccugcuuccuccugugcguggcccugcucggcuucaucaugugggcgugccagaaggggaacauccgcugcaacaucugcaucuga

SEQ ID NO: 76895 - RNA, 1701 nt, Artificial Sequence; identical to SEQ ID NO: 72832
  derived and/or modified CDS sequence (opt1) from hemagglutinin__InfluenzaA__AJJ99197

SEQ ID NO: 76896 - RNA, 1701 nt, Artificial Sequence
  derived and/or modified CDS sequence (opt1) from hemagglutinin__InfluenzaA__AJJ99209
augaagaccaucaucgcccugagcuacauccucugccugguguucgcccagaagcugcccggcaacgacaacuccaccgcgacgcucugccuggggcaccacgccgucccgaacggcaccaucgugaagaccaucaccaacgaccagaucgaggugacgaacgccaccgagcugguccagagcuccagcaccgggggcaucugcgacagcccccaccagauccucgacggggagaacugcacccugaucgacgcccugcucggcgacccccagugcgacggcuuccagaacaagaagugggaccuguucguggagcgcagcaaggccuacuccaacugcuaccccuacgacgugccggacuacgcgagccugcggucccucgucgccagcuccgggacgcuggaguucaacaacgagagcuucaacuggaccggcgugacccagaacgggaccuccagcgccugcaagcgcaaguccgacaacagcuucuucucccggcugaacuggcucacgcaccugaaguucaaguaccccgcccugaacgugaccaugcccaacaacgaggaguucgacaagcucuacaucuggggcguccaccaccccgggaccgacaacgaccagaucuuccuguacgcgcaggccagcggccgcaucaccguguccacgaagcggagccagcagaccgugaucccgaacaucggcagccgcccccggguccgcaacauccccucccggaucagcaucuacuggaccaucgugaagcccggggacauccugcucaucaacuccaccggcaaccugaucgccccgcgcggguacuucaagauccggagcggcaaguccagcaucaugcgcuccgacgcccccaucggcaagugcaacagcgagugcaucacgcccaacggguccauccccaacgacaagccguuccagaacgugaaccggaucaccuacggcgccugcccccgcuacgucaagcagagcacccugaagcucgcgaccgggaugcggaacgugcccgagaagcagacgcgcggcaucuucggggccaucgccggcuucaucgagaacggcugggaggggaugguggacggcugguacggguuccggcaccagaacuccgagggcaucgggcaggccgccgaccugaaguccacccaggcggccaucaaccagaucaacggcaagcugaaccgccucaucggcaagaccaacgagaaguuccaccagaucgagaaggaguucuccgaggucgaggggcggauccaggaccuggagaaguacguggaggacaccaagaucgaccuguggagcuacaacgccgagcuccugguggcccuggagaaccagcacacgaucgaccucaccgacuccgagaugaacaagcuguucgagcgcaccaagaagcagcugcgggagaacgccgaggacaugggcaacgggugcuucaagaucuaccacaagugcgacaacgcgugcaucggcagcauccgcaacgggaccuacgaccacgacgucuaccgcgacgaggcccucaacaaccgguuccagaucaagggcguggagcugaaguccggcuacaaggacuggauccuguggaucagcuucgccauguccugcuuccuccugugcguggcccugcucggguucaucaugugggccugccagaagggcaacauccgcugcaacaucugcaucuga

SEQ ID NO: 76897 - RNA, 1701 nt, Artificial Sequence
  derived and/or modified CDS sequence (opt1) from hemagglutinin__InfluenzaA__AJJ99221
augaagaccaucaucgcccugagcuacauccucugccugguguucgcccagaagcugcccggcaacgacaacuccaccgcgacgcucugccuggggcaccacgccgucccgaacggcaccaucgugaagaccaucaccaacgaccagaucgaggugacgaacgccaccgagcugguccagagcuccagcaccggggagaucugcgacagcccccaccagauccucgacggcgagaacugcacccugaucgacgcccugcucggggacccccagugcgacggcuuccagaacaagaagugggaccuguucguggagcgcagcaaggccuacuccaacugcuaccccuacgacgugccggacuacgcgagccugcggucccucgucgccagcuccggcacgcuggaguucaacaacgagagcuucaacuggaccggggugacccagaacggcaccuccagcgccugcauccgccgguccaacagcuccuucuucagccgccugaacuggcucacgcaccugaaguucaaguaccccgcccugaacgugaccaugcccaacaacgagaaguucgacaagcucuacaucuggggcguccaccaccccgggaccgacaacgaccagaucuuccuguacgcgcaggccuccgggcggaucaccgugagcacgaagcgcagccagcagaccgugaucccgaacaucggcucccggccccgcguccggaacauccccagccgcaucuccaucuacuggaccaucgugaagcccggcgacauccugcucaucaacagcaccgggaaccugaucgccccgcggggcuacuucaagauccaguccgggaaguccuccaucaugcgcagcgacgcccccaucggcaagugcaacuccgagugcaucacgcccaacggcagcauccccaacgacaagccguuccagaacgugaaccggaucaccuacggggccugcccccgcuacgucaagcagaacacccugaagcucgcgaccggcaugcggaacgugcccgagaagcagacgcgcgggaucuucggcgccaucgccggguucaucgagaacggcugggagggcaugguggacgggugguacggcuuccggcaccagaacuccgaggggaucggccaggccgccgaccucaagagcacccaggcggccaucgaccagaucaacgggaagcugaaccgccugaucggcaagaccaacgagaaguuccaccagaucgagaaggaguucuccgaggucgagggccggauccaggaccuggagaaguacguggaggacaccaagaucgaccuguggagcuacaacgccgagcuccugguggcccuggagaaccagcacacgaucgaccucaccgacuccgagaugaacaagcuguucgagaagaccaagaagcagcugcgcgagaacgccgaggacauggggaacggcugcuucaagaucuaccacaagugcgacaacgcgugcaucgggagcauccggaacggcaccuacgaccacgacgucuaccgcgacgaggcccucaacaaccgcuuccagaucaaggggguggagcugaaguccggcuacaaggacuggauccuguggaucagcuucgccaucuccugcuuccuccugugcguggcccugcucggcuucaucaugugggccugccagaaggggaacauccggugcaacaucugcaucuga

SEQ ID NO: 76898 - RNA, 1701 nt, Artificial Sequence; identical to SEQ ID NO: 65939
  derived and/or modified CDS sequence (opt1) from hemagglutinin__InfluenzaA__AJJ99233

SEQ ID NO: 76899 - RNA, 1701 nt, Artificial Sequence
  derived and/or modified CDS sequence (opt1) from hemagglutinin__InfluenzaA__AJJ99244
augaaggccauccugguggucaugcucuacaccuucgccaccgcgaacgccgacacgcugugcaucggcuaccacgccaacaacagcaccgacaccguggacaccgugcuggagaagaacgucacggugacccacuccgugaaccuccuggaggacaagcacaacgggaagcugugcaagcuccgcggcgucgcgccccugcaccuggggaagugcaacaucgccggcuggauccucgggaacccggagugcgagagccuguccaccgccagcuccuggagcuacaucguggagaccuccggcagcgacaacggcacgugcuaccccggggacuucaucgacuacgaggagcugcgggagcagcucuccagcguguccagcuucgagcgcuucgagaucuuccccaagaccuccagcuggcccaaccacgacuccaacaagggcgucaccgccgccugcccgcacgccggggcgaagggcuucuacaagaaccugaucuggcuggugaagaaggggaacagcuaccccaagcucuccaagagcuacaucaacgacaagggcaaggaggugcugguccuguggggcauccaccaccccuccaccacggccgaccagcagagccucuaccagaacgccgacaccuacguguucguggggaccagccgguacuccaagaaguucaagcccgagaucgccauccgcccgaagguccgggaccaggagggccgcaugaacuacuacuggacccugguggagcccggggacaagaucacguucgaggccaccggcaaccugguggucccccgguacgcguucgccauggagcgcaacgccggcagcgggaucaucaucuccgacacccccgugcacgacugcaacaccacgugccagaccccgaagggcgccaucaacaccagccuccccuuccagaacauccaccccaucaccaucgggaagugccccaaguacgugaaguccacgaagcugcggcuggccaccggccuccgcaacgucccgagcauccagucccgggggcuguucggcgcgaucgccggcuucaucgagggcggguggaccgggaugguggacggcugguacggguaccaccaccagaacgagcagggcagcggcuacgccgccgaccugaaguccacccagaacgccaucgacaagaucacgaacaaggugaacagcgucaucgagaagaugaacacccaguucaccgcgguggggaaggaguucaaccaccucgagaagcgcaucgagaaccugaacaagaaggucgacgacggcuuccuggacaucuggaccuacaacgccgagcuccuggugcugcucgagaacgagcggacgcuggacuaccacgacuccaacgugaagaaccuguacgagaagguccgcaaccagcucaagaacaacgccaaggagaucgggaacggcugcuucgaguucuaccacaagugcgacaacacgugcauggagagcgugaagaacgggaccuacgacuaccccaaguacuccgaggaggccaagcugaaccgggaggagaucgacggcgugaagcuggagagcacccgcaucuaccagauccucgccaucuacuccaccgucgcgagcucccuggugcugguggucagccucggcgccaucuccuucuggaugugcagcaacgggagccugcagugccggaucugcaucuga

SEQ ID NO: 76900 - RNA, 1701 nt, Artificial Sequence
  derived and/or modified CDS sequence (opt1) from hemagglutinin__InfluenzaA__AJJ99255
augaaggccauccuggugguccuccuguacaccuucgccaccgcgaacgccgacacgcugugcaucggcuaccacgccaacaacagcaccgacaccguggacaccgugcucgagaagaacgucacggugacccacuccgugaaccugcuggaggacaaccacaacgggaagcucugcaagcugcgcggcgucgcgccccugcaccucgggaagugcaacaucgccggcuggauccuggggaacccggagugcgagagccuguccaccgccagcuccuggagcuacaucguggagaccuccagcuccgacaacggcacgugcuaccccggcgacuucaucaacuacgaggagcuccgggagcagcugagcuccgugagcuccuucgagcgcuucgagaucuuccccaagaccagcuccuggcccaaccacgacagcaacaagggggucaccgccgccugcccgcgggccggcgcgaaguccuucuacaagaaccugaucuggcucgugaagaaggggaacagcuaccccaagcuguccaagagcuacaucaacgacaagggcaaggaggugcuggucaugugggggauccaccaccccagcaccacggccgaccagcagucccucuaccagaacgccgacgccuacguguucgugggcaccagccgcuacuccaaggaguucaagcccgagaucgccauccggccgaagguccgcgaccaggagggccggaugaacuacuacuggacccugguggagcccggggacaagaucaccuucgaggcgacgggcaaccugcucgugccccgcuacgccuucgccauggagcggaacgccgggagcggcaucaucaucuccgacacccccguccacgacugcaacacgaccugccagaccccgaagggcgccaucaacaccagccugcccuuccagaacauccaccccaucaccaucgggaagugccccaaguacgugaaguccaccaagcugcgccucgcgacgggccugcggaacgugccgagcauccagucccgcgggcuguucggcgccaucgccggguucaucgagggcggcuggaccgggauggucgacggcugguacggguaccaccaccagaacgagcagggcagcggguacgccgccgaccucaaguccacccagaacgcgaucgacaagaucaccaacaaggugaacagcgugaucgagaagaugaacacgcaguucaccgccgucggcaaggaguucaaccaccuggagaagcggaucgagaaccugaacaagaagguggacgacggcuuccucgacaucuggaccuacaacgccgagcugcugguccuccuggagaacgagcgcacccuggacuaccacgacuccaacgugaagaaccucuacgagaaggugcggaaccagcugaagaacaacgccaaggagaucgggaacggcugcuucgaguucuaccacaagugcgacaacacgugcauggagagcgucaagaacgggaccuacgacuaccccaaguacuccgaggaggccaagcugaaccgcgaggagaucgacggcgugaagcucgagagcacccggaucuaccagauccuggcgaucuacuccaccguggccagcucccugguccucguggugagccugggggccaucagcuucuggaugugcuccaacggcagccugcagugccgcaucugcaucuga

SEQ ID NO: 76901 - RNA, 1698 nt, Artificial Sequence
  derived and/or modified CDS sequence (opt1) from hemagglutinin__InfluenzaA__AJJ99267
augaaggugaagcugcucguccugcugugcaccuucaccgccacguacgccgacaccaucugcaucggcuaccacgcgaacaacagcaccgacaccguggacacggugcucgagaagaacgucaccgugacccacuccgugaaccugcuggagaacagccacaacgggaagcucugccugcugaagggcaucgcgccccuccagcuggggaacugcuccgucgccggcuggauccuggggaacccggagugcgagcuccugaucagcaaggaguccuggagcuacaucguggagaagcccaaccccgagaacgggaccugcuaccccggccacuucgccgacuacgaggagcugcgcgagcagcucuccagcguguccagcuucgagcgguucgagaucuucccgaaggaguccagcuggcccaaccacacgaucaccggggucuccgccagcugcucccacaacggcgagagcuccuucuaccgcaaccugcuguggcucaccgggaagaacggccuguaccccaaccugagcaaguccuacgccaacaacaaggagaaggaggugcucgugcuguggggcguccaccacccgcccaacaucggcgaccagaaggcccuguaccacaccgagaacgccuacgugagcguggucagcucccacuacagccggaaguucacgcccgagaucgccaagcgccccaaggugcgggaccaggagggccgcaucaacuacuacuggacccuccuggagcccggggacaccaucaucuucgaggcgaacggcaaccugaucgccccgcgguacgccuucgcccucucccgcggguucggcagcggcaucaucaacuccaacgcccccauggacaagugcgacgcgaagugccagacgccccagggggccaucaacagcucccugcccuuccagaacgugcacccggucaccaucggcgagugccccaaguacgugcggagcgccaagcugcgcauggugaccgggcuccggaacauccccuccauccagagccgcggccuguucggggccaucgccggcuucaucgagggcggguggaccggcauggucgacgggugguacggcuaccaccaccagaacgagcagggguccggcuacgcggccgaccagaaguccacccagaacgccaucaacggcaucacgaacaaggugaacagcgugaucgagaagaugaacacccaguucaccgccgucgggaaggaguucaacaagcuggagcggcgcauggagaaccucaacaagaagguggacgacggcuucaucgacaucuggaccuacaacgccgagcugcugguccuccuggagaacgagcggacgcuggacuuccacgacagcaacgugaagaaccucuacgagaaggugaagucccagcugaagaacaacgcgaaggagaucgggaacggcugcuucgaguucuaccacaagugcaacgacgagugcauggagagcgucaagaacgggaccuacgacuaccccaaguacuccgaggagagcaagcugaaccgcgagaagaucgacggcgugaagcucgaguccaugggcguguaccagauccuggccaucuacagcaccgucgccagcucccuggugcuccuggugagccugggggccgucuccuucuggaugugcagcaacggcucccuccagugccgggugugcaucuga

SEQ ID NO: 76902 - RNA, 1701 nt, Artificial Sequence; identical to SEQ ID NO: 71074
  derived and/or modified CDS sequence (opt1) from hemagglutinin__InfluenzaA__AJJ99278

SEQ ID NO: 76903 - RNA, 1701 nt, Artificial Sequence; identical to SEQ ID NO: 71077
  derived and/or modified CDS sequence (opt1) from hemagglutinin__InfluenzaA__AJJ99289

SEQ ID NO: 76904 - RNA, 1698 nt, Artificial Sequence
  derived and/or modified CDS sequence (opt1) from hemagglutinin__InfluenzaA__AJJ99301
augaaggugaagcugcucguccugcugugcaccuucaccgccacguacgccgacaccaucugcaucggcuaccacgcgaacaacagcaccgacaccguggacacggugcucgagaagaacgucaccgugacccacuccgugaaccugcuggagaacagccacaacgggaagcucugccugcugaagggcaucgcgccccuccagcuggggaacugcuccgucgccggcuggauccuggggaacccggagugcgagagccucaucuccaaggagagcugguccuacaucguggagaagcccaaccccgagaacgggaccugcuaccccggccacuucgccgacuacgaggagcugcgcgagcagcugagcuccgugagcuccuucgagcgguucgagaucuucccgaaggagagcuccuggcccaaccacacggucaccggggugagcgccuccugcagccacaacggcgaguccagcuucuaccgcaaccuccuguggcugaccgggaagaacggccucuaccccaaccuguccaagagcuacgccaacaacaaggagaaggaggugcugguccucuggggcgugcaccacccgcccaacaucggcgaccagaaggcccuguaccacaccgagaacgccuacgugagcgucguguccagccacuacucccggaaguucacgcccgagaucgccaagcgccccaaggugcgggaccaggagggccgcaucaacuacuacuggacccugcucgagcccggggacaccaucaucuucgaggcgaacggcaaccugaucgccccgcgguacgccuucgcccugagccgcggguucggcuccggcaucaucaacagcaacgcccccauggacaagugcgacgcgaagugccagacgccccagggggccaucaacuccagccuccccuuccagaacguccacccggugaccaucggcgagugccccaaguacgugcgguccgccaagcugcgcauggucaccgggcugcggaacauccccagcauccagucccgcggccucuucggggccaucgccggcuucaucgagggcggguggaccggcaugguggacgggugguacggcuaccaccaccagaacgagcaggggagcggcuacgcggccgaccagaaguccacccagaacgccaucaacggcaucacgaacaaggugaacagcgucaucgagaagaugaacacccaguucaccgccguggggaaggaguucaacaagcuggagcggcgcauggagaaccugaacaagaaggucgacgacggcuucaucgacaucuggaccuacaacgccgagcuccuggugcugcucgagaacgagcggacgcuggacuuccacgacuccaacgugaagaaccuguacgagaaggucaagagccagcucaagaacaacgcgaaggagaucgggaacggcugcuucgaguucuaccacaagugcaacgacgagugcauggaguccgugaagaacgggaccuacgacuaccccaaguacagcgaggaguccaagcugaaccgcgagaagaucgacggcgugaagcuggagagcaugggcgucuaccagauccucgccaucuacagcaccguggccuccagccuggugcugcucgucucccugggggccaucagcuucuggaugugcuccaacggcagccugcagugccggaucugcaucuga

SEQ ID NO: 76905 - RNA, 1698 nt, Artificial Sequence
  derived and/or modified CDS sequence (opt1) from hemagglutinin__InfluenzaA__AJJ99324
augaaggugaagcugcucguccugcugugcaccuucaccgccacguacgccgacaccaucugcaucggcuaccacgcgaacaacagcaccgacaccguggacacggugcucgagaagaacgucaccgugacccacuccgugaaccugcuggagaacagccacaacgggaagcucugccugcugaagggcaucgcgccccuccagcuggggaacugcuccgucgccggcuggauccuggggaacccggagugcgagcuccugaucagcaaggaguccuggagcuacaucguggagaagcccaaccccgagaacgggaccugcuaccccggccacuucgccgacuacgaggagcugcgcgagcagcucuccagcguguccagcuucgagcgguucgagaucuucccgaaggaguccagcuggcccaaccacacggucaccgggguguccgccagcugcucccacaacggcgagaacagcuucuaccgcaaccugcuguggcucaccgggaaguccggccuguaccccaaccugagcaaguccuacgccaacaacaaggagaaggaggugcucguccuguggggcgugcaccacccgcccaacaucgccgaccagaagacccuguaccacacggagaacgccuacgugagcgucgugagcucccacuacagccggaaguucacccccgagaucgccaagcgccccaaggugcgggaccaggagggccgcaucaacuacuacuggacccuccuggagcccggcgacaccaucaucuucgaggcgaacgggaaccugaucgccccgcgguacgccuucgcccucucccgcggcuucgggagcggcaucaucaacuccaacgcccccauggacaagugcgacgcgaagugccagacgccccagggcgccaucaacagcucccugcccuuccagaacguccacccggugaccaucggggagugccccaaguacgugcggagcgccaagcugcgcauggucaccggccuccggaacauccccuccauccagagccgcgggcuguucggcgccaucgccggguucaucgagggcggcuggaccgggaugguggacggcugguacggguaccaccaccagaacgagcagggcuccggguacgcggccgaccagaaguccacgcagaacgccaucaacggcaucaccaacaaggugaacagcgucaucgagaagaugaacacccaguucaccgccgugggcaaggaguucaacaagcuggagcggcgcauggagaaccucaacaagaaggucgacgacggguucaucgacaucuggacguacaacgccgagcugcuggugcuccuggagaacgagcggacccuggacuuccacgacagcaacgugaagaaccucuacgagaaggucaagucccagcugaagaacaacgcgaaggagaucggcaacgggugcuucgaguucuaccacaagugcaacgacgagugcauggagagcgugaagaacggcaccuacgacuaccccaaguacuccgaggagagcaagcugaaccgcgagaagaucgacggggugaagcucgaguccaugggcgucuaccagauccuggccaucuacagcaccguggccagcucccuggugcuccuggucagccugggcgccaucuccuucuggaugugcagcaacgggucccuccagugccggaucugcaucuga

SEQ ID NO: 76906 - RNA, 1701 nt, Artificial Sequence
  derived and/or modified CDS sequence (opt1) from hemagglutinin__InfluenzaA__AJJ99335
auggaggccauccuggugguccuccuguacaccuucgccaccgcgaacgccgacacgcugugcaucggcuaccacgccaacaacagcaccgacaccguggacaccgugcucgagaagaacgucacggugacccacuccgugaaccugcuggaggacaagcacaacgggaagcucugcaagcugcgcggcgucgcgccccugcaccucgggaagugcaacaucgccggcuggauccuggggaacccggagugcgagagccuguccaccgccagcuccuggagcuacaucguggagaccuccagcuccaacaacggcacgugcuaccccggcgacuucaucgacuacgaggagcuccgggagcagcugagcuccgugagcuccuucgagcgcuucgagaucuuccccaagaccagcuccuggcccaaccacgacagcaacaagggggucaccgccgccugcccgcacgccggcgcgaaguccuucuacaagaaccugaucuggcucgugaagaaggggaacagcuaccccaagcuguccaagagcuacaucaacgacaagggcaaggaggugcugguccucugggggauccaccaccccagcaccuccgccgaccagcagagccuguaccagaacgccgacgccuacguguucgugggcuccagccgguacuccaagaaguucaagcccgagaucgccauccgcccgaagguccgggaccaggagggccgcaugaacuacuacuggacgcugguggagcccggggacaagaucaccuucgaggcgaccggcaaccucguggucccccgguacgccuucgccauggagcgcaacgccgggagcggcaucaucaucuccgacacccccgugcacgacugcaacacgaccugccagaccccgaacggcgccaucaacaccagccugcccuuccacaacauccaccccaucacgaucgggaagugccccaaguacgugaaguccaccaagcugcggcucgcgaccggccugcgcaacgucccgagcauccagucccgggggcuguucggcgccaucgccggguucaucgagggcggcuggaccgggaugguggacggcugguacggguaccaccaccagaacgagcagggcagcggguacgccgccgaccucaaguccacgcagaacgcgaucgacgagaucaccaacaaggugaacagcgucaucgagaagaugaacacccaguucaccgccgugggcaaggaguucaaccaccuggagaagcgcaucgagaaccugaacaagaaggucgacgacggcuuccucgacaucuggacguacaacgccgagcugcuggugcuccuggagaacgagcggacccuggacuaccacgacuccaacgugaagaaccucuacgagaagguccgcagccagcugaagaacaacgccaaggagaucgggaacggcugcuucgaguucuaccacaagugcgacaacacgugcauggaguccgugaagaacgggaccuacgacuaccccaaguacagcgaggaggccaagcugaaccgggaggagaucgacggcgugaagcucgaguccacccgcaucuaccagauccuggcgaucuacagcaccgucgccagcucccuggugcucguggucagccugggggccaucuccuucuggaugugcagcaacggcucccugcagugccggaucugcaucuga

SEQ ID NO: 76907 - RNA, 1701 nt, Artificial Sequence; identical to SEQ ID NO: 68809
  derived and/or modified CDS sequence (opt1) from hemagglutinin__InfluenzaA__AJJ99357

SEQ ID NO: 76908 - RNA, 1701 nt, Artificial Sequence; identical to SEQ ID NO: 70848
  derived and/or modified CDS sequence (opt1) from hemagglutinin__InfluenzaA__AJJ99368

SEQ ID NO: 76909 - RNA, 1701 nt, Artificial Sequence; identical to SEQ ID NO: 70459
  derived and/or modified CDS sequence (opt1) from hemagglutinin__InfluenzaA__AJJ99379

SEQ ID NO: 76910 - RNA, 1701 nt, Artificial Sequence
  derived and/or modified CDS sequence (opt1) from hemagglutinin__InfluenzaA__AJJ99390
auggaggccauccuggugguccuccuguacaccuucgccaccgcgaacgccgacacgcugugcaucggcuaccacgccaacaacagcaccgacaccguggacaccgugcucgagaagaacgucacggugacccacuccgugaaccugcuggaggacaagcacaacgggaagcucugcaagcugcgcggcgucgcgccccugcaccucgggaagugcaacaucgccggcuggauccuggggaacccggagugcgagagccuguccaccgccagcuccuggagcuacaucguggagaccuccagcuccgacaacggcacgugcuaccccggcgacuucaucgacuacgaggagcuccgggagcagcugagcuccgugagcuccuucgagcgcuucgagaucuuccccaagaccagcuccuggcccaaccacgacagcaacaagggggucaccgccgccugcccgcacgccggcgcgaaguccuucuacaagaaccugaucuggcucgugaagaaggggaacagcuaccccaagcuguccaagagcuacaucaacgacaagggcaaggaggugcugguccucugggggauccaccaccccagcaccuccgccgaccagcagagccuguaccagaacgccgacgccuacguguucgugggcuccagccgguacuccaagaaguucaagcccgagaucgccauccgcccgaagguccgggaccaggagggccgcaugaacuacuacuggacgcugguggagcccggggacaagaucaccuucgaggcgaccggcaaccucguggucccccgguacgccuucgccauggagcgcaacgccgggagcggcaucaucaucuccgacacccccgugcacgacugcaacacgaccugccagaccccgaagggcgccaucaacaccagccugcccuuccacaacauccaccccaucacgaucgggaagugccccaaguacgugaaguccaccaagcugcggcucgcgaccggccugcgcaacgucccgagcauccagucccgggggcuguucggcgccaucgccggguucaucgagggcggcuggaccgggaugguggacggcugguacggguaccaccaccagaacgagcagggcagcggguacgccgccgaccucaaguccacgcagaacgcgaucgacaagaucaccaacaaggugaacagcgucaucgagaagaugaacacccaguucaccgccgugggcaaggaguucaaccaccuggagaagcgcaucgagaaccugaacaagaaggucgacgacggcuuccucgacaucuggacguacaacgccgagcugcuggugcuccuggagaacgagcggacccuggacuaccacgacuccaacgugaagaaccucuacgagaagguccgcagccagcugaagaacaacgccaaggagaucgggaacggcugcuucgaguucuaccacaagugcgacaacacgugcauggaguccgugaagaacgggaccuacgacuaccccaaguacagcgaggaggccaagcugaaccgggaggagaucgacggcgugaagcucgaguccacccgcaucuaccagauccuggcgaucuacagcaccgucgccagcucccuggugcucguggucagccugggggccaucuccuucuggaugugcagcaacggcucccugcagugccggaucugcaucuga

SEQ ID NO: 76911 - RNA, 1701 nt, Artificial Sequence; identical to SEQ ID NO: 68809
  derived and/or modified CDS sequence (opt1) from hemagglutinin__InfluenzaA__AJJ99401

SEQ ID NO: 76912 - RNA, 1698 nt, Artificial Sequence
  derived and/or modified CDS sequence (opt1) from hemagglutinin__InfluenzaA__AJJ99413
augaaggugaagcugcucguccugcugugcaccuucaccgccacguacgccgacaccaucugcaucggcuaccacgcgaacaacagcaccgacaccguggacacggugcucgagaagaacgucaccgugacccacuccgugaaccugcuggagaacagccacaacgggaagcucugccugcugaagggcaucgcgccccuccagcuggggaacugcuccgucgccggcuggauccuggggaacccggagugcgagcuccugaucagcaaggaguccuggagcuacaucguggagaagcccaaccccgagaacgggaccugcuaccccggccacuucgccgacuacgaggagcugcgcgagcagcucuccagcguguccagcuucgagcgguucgagaucuucccgaaggaguccagcuggcccaaccacacggucaccgggguguccgccagcugcucccacaacggcgagaacagcuucuaccgcaaccugcuguggcucaccgggaagaacggccuguaccccaaccuguccaagagcuacgccaacaacaaggagaaggaggugcucguccuguggggcgugcaccacccgcccaacaucgccgaccagaagacccuguaccacacggagaacgccuacguguccgucgugagcagccacuacucccggaaguucacccccgagaucgccaagcgccccaaggugcgggaccaggagggccgcaucaacuacuacuggacccuccuggagcccggcgacaccaucaucuucgaggcgaacgggaaccugaucgccccgcgguacgccuucgcccucagccgcggcuucggguccggcaucaucaacagcaacgccuccauggacaagugcgacgcgaagugccagacgccccagggcgccaucaacagcucccugcccuuccagaacguccaccccgugaccaucggggagugcccgaaguacgugcggagcgccaagcugcgcauggucaccggccuccggaacauccccuccauccagagccgcgggcuguucggcgccaucgccggguucaucgagggcggcuggaccgggaugguggacggcugguacggguaccaccaccagaacgagcagggcuccggguacgcggccgaccagaaguccacgcagaacgccaucaacggcaucaccaacaaggugaacagcgucaucgagaagaugaacacccaguucaccgccgugggcaaggaguucaacaagcuggagcggcgcauggagaaccucaacaagaaggucgacgacggguucaucgacaucuggacguacaacgccgagcugcuggugcuccuggagaacgagcggacccuggacuuccacgacagcaacgugaagaaccucuacgagaaggucaagucccagcugaagaacaacgcgaaggagaucggcaacgggugcuucgaguucuaccacaagugcaacgacgagugcauggagagcgugaagaacggcaccuacgacuaccccaaguacuccgaggagagcaagcugaaccgcgagaagaucgacggggugaagcucgaguccaugggcgucuaccagauccuggccaucuacagcaccguggccagcucccuggugcuccuggucagccugggcgccaucuccuucuggaugugcagcaacgggucccuccagugccggaucugcaucuga

SEQ ID NO: 76913 - RNA, 1698 nt, Artificial Sequence; identical to SEQ ID NO: 67650
  derived and/or modified CDS sequence (opt1) from hemagglutinin__InfluenzaA__AJJ99425

SEQ ID NO: 76914 - RNA, 1698 nt, Artificial Sequence
  derived and/or modified CDS sequence (opt1) from hemagglutinin__InfluenzaA__AJJ99437
augaaggugaagcugcucguccugcugugcaccuucaccgccacguacgccgacaccaucugcaucggcuaccacgcgaacaacagcaccgacaccguggacacggugcucgagaagaacgucaccgugacccacuccgugaaccugcuggagaacagccacaacgggaagcucugccugcugaagggcaucgcgccccuccagcuggggaacugcuccgucgccggcuggauccuggggaacccggagugcgagcuccugaucagcaaggaguccuggagcuacaucguggagaagcccaaccccgagaacgggaccugcuaccccggccacuucgccgacuacgaggagcugcgcgagcagcucuccagcguguccagcuucgagcgguucgagaucuucccgaaggaguccagcuggcccaaccacacggucaccgggguguccgccagcugcucccacaacggcgagaacagcuucuaccgcaaccugcuguggcucaccgggaagaacggccuguaccccucccugagcaaguccuacgccaacaacaaggagaaggaggugcucguccuguggggcgugcaccacccgcccaacaucgccgaccagaagacccuguaccacacggagaacgccuacgugagcgucgugagcucccacuacagccggaaguucacccccgagaucgccaagcgccccaaggugcgggaccaggagggccgcaucaacuacuacuggacccuccuggagcccggcgacaccaucaucuucgaggcgaacgggaaccugaucgccccgcgguacgccuucgcccucucccgcggcuucgggagcggcaucaucaacuccaacgcccccauggacaagugcgacgcgaagugccagacgccccagggcgccaucaacagcucccugcccuuccagaacguccacccggugaccaucggggagugccccaaguacgugcggagcgccaagcugcgcauggucaccggccuccggaacauccccuccauccagagccgcgggcuguucggcgccaucgccggguucaucgagggcggcuggaccgggaugguggacggcugguacggguaccaccaccagaacgagcagggcuccggguacgcggccgaccagaaguccacgcagaacgccaucaacggcaucaccaacaaggugaacagcgucaucgagaagaugaacacccaguucaccgccgugggcaaggaguucaacaagcuggagcggcgcauggagaaccucaacaagaaggucgacgacggguucaucgacaucuggacguacaacgccgagcugcuggugcuccuggagaacgagcggacccuggacuuccacgacagcaacgugaagaaccucuacgagaaggucaagucccagcugaagaacaacgcgaaggagaucggcaacgggugcuucgaguucuaccacaagugcaacgacgagugcauggagagcgugaagaacggcaccuacgacuaccccaaguacuccgaggagagcaagcugaaccgcgagaagaucgacggggugaagcucgaguccaugggcgucuaccagauccuggccaucuacagcaccguggccagcucccuggugcuccuggucagccugggcgccaucuccuucuggaugugcagcaacgggucccuccagugccggaucugcaucuga

SEQ ID NO: 76915 - RNA, 1698 nt, Artificial Sequence
  derived and/or modified CDS sequence (opt1) from hemagglutinin__InfluenzaA__AJJ99449
augaaggugaagcugcucguccugcugugcaccuucaccgccacguacgccgacaccaucugcaucggcuaccacgcgaacaacagcaccgacaccguggacacggugcucgagaagaacgucaccgugacccacuccgugaaccugcuggagaacagccacaacgggaagcucugccugcugaagggcaucgcgccccuccagcuggggaacugcuccgucgccggcuggauccuggggaacccggagugcgagcuccugaucagcaaggaguccuggagcuacaucguggagaagcccaaccccgagaacgggaccugcuaccccggccacuucgccgacuacgaggagcugcgcgagcagcucuccagcguguccagcuucgagcgguucgagaucuucccgaaggaguccagcuggcccaaccacacggucaccgggguguccgccagcugcucccacaacggcgagagcuccuucuaccgcaaccugcuguggcucaccgggaagaacggccuguaccccaaccugagcaaguccuacgccaacaacaaggagaaggaggugcucguccuguggggcgugcaccacccgcccaacaucggcgaccagaaggcccuguaccacaccgagaacgccuacgugagcgucgugagcucccacuacagccggaaguucacgcccgagaucgccaagcgccccaaggugcgggaccaggagggccgcaucaacuacuacuggacccuccuggagcccggggacaccaucaucuucgaggcgaacggcaaccugaucgccccgcgguacgccuucgcccucucccgcggguucggcagcggcaucaucaacuccaacgcccccauggggaagugcgacgcgaagugccagacgccccagggcgccaucaacagcucccugcccuuccagaacguccacccggugaccaucggggagugccccaaguacgugcggagcgccaagcugcgcauggucaccggccuccggaacauccccuccauccagagccgcgggcuguucggcgccaucgccggcuucaucgagggcggguggaccgggaugguggacggcugguacggguaccaccaccagaacgagcagggcuccggcuacgcggccgaccagaaguccacccagaacgccaucaacgggaucacgaacaaggugaacagcgucaucgagaagaugaacacccaguucaccgccgugggcaaggaguucaacaagcuggagcggcgcauggagaaccucaacaagaaggucgacgacggguucaucgacaucuggaccuacaacgccgagcugcuggugcuccuggagaacgagcggacgcuggacuuccacgacagcaacgugaagaaccucuacgagaaggucaagucccagcugaagaacaacgcgaaggagaucggcaacgggugcuucgaguucuaccacaagugcaacgacgagugcauggagagcgugaagaacggcaccuacgacuaccccaaguacuccaaggagagcaagcugaaccgcgagaagaucgacggcgugaagcucgaguccaugggggucuaccagauccuggccaucuacagcaccguggccagcucccuggugcuccuggucagccugggcgccaucuccuucuggaugugcagcaacgggucccuccagugccggaucugcaucuga

SEQ ID NO: 76916 - RNA, 1698 nt, Artificial Sequence; identical to SEQ ID NO: 66512
  derived and/or modified CDS sequence (opt1) from hemagglutinin__InfluenzaA__AJJ99461

SEQ ID NO: 76917 - RNA, 1701 nt, Artificial Sequence
  derived and/or modified CDS sequence (opt1) from hemagglutinin__InfluenzaA__AJJ99483
augaaggccauccugcucgugcugcuguacaccuucgccaccgcgaacgccgacacgcucugcaucggcuaccacgccaacaacagcaccgacaccgucgacaccgugcuggagaagaacgugacggucacccacuccgugaaccugcucgaggacaagcacaacgggaagcugugcaagcugcgcggcguggcgccccuccaccuggggaagugcaacaucgccggcuggauccuggggaacccggagugcgagagccucuccaccgccagcuccuggagcuacaucgucgagaccuccagcuccgacaacggcacgugcuaccccggcgacuucaucaacuacgaggagcugcgggagcagcugagcuccgugagcuccuucgagcgcuucgagaucuuccccaagaccagcuccuggcccaaccacgacagcaacaagggggugaccgccgccugcccgcgggccggcgcgaaguccuucuacaagaaccucaucuggcuggucaagaaggggaacagcuaccccaagcuguccaagagcuacaucaacgacaagggcaaggaggugcucgugcugugggggauccaccaccccagcaccacggccgaccagcagucccuguaccagaacgccgacgccuacgucuucgugggcaccagccgcuacuccaagaaguucaagcccgagaucgccauccggccgaaggugcgcgaccaggagggccggaugaacuacuacuggacccucgucgagcccggggacaagaucaccuucgaggcgacgggcaaccugcuggugccccgcuacgccuucgccauggagcggaacgccgggagcggcaucaucaucuccgacacccccgugcacgacugcaacacgaccugccagaccccgaagggcgccaucaacaccagccuccccuuccagaacauccaccccaucaccaucgggaagugccccaaguacgucaaguccaccaagcugcgccuggcgacgggccuccggaacgugccgagcauccagucccgcgggcuguucggcgccaucgccggguucaucgagggcggcuggaccgggaugguggacggcugguacggguaccaccaccagaacgagcagggcagcggguacgccgccgaccugaaguccacccagaacgcgaucgacaagaucaccaacaaggucaacagcgugaucgagaagaugaacacgcaguucaccgccgugggcaaggaguucaaccaccucgagaagcggaucgagaaccugaacaagaaggucgacgacggcuuccuggacaucuggaccuacaacgccgagcuccuggugcugcucgagaacgagcgcacccuggacuaccacgacuccaacgucaagaaccuguacgagaaggugcggaaccagcucaagaacaacgccaaggagaucgggaacggcugcuucgaguucuaccacaagugcgacaacacgugcauggagagcgugaagaacgggaccuacgacuaccccaaguacuccgaggaggccaagcugaaccgcgaggagaucgacggcgucaagcuggagagcacccggaucuaccagauccucgcgaucuacuccaccguggccagcucccuggugcuggucgugagccucggggccaucagcuucuggaugugcuccaacggcagccugcagugccgcaucugcaucuga

SEQ ID NO: 76918 - RNA, 1701 nt, Artificial Sequence; identical to SEQ ID NO: 71077
  derived and/or modified CDS sequence (opt1) from hemagglutinin__InfluenzaA__AJJ99494

SEQ ID NO: 76919 - RNA, 1701 nt, Artificial Sequence
  derived and/or modified CDS sequence (opt1) from hemagglutinin__InfluenzaA__AJJ99505
augaaggccauccuggugguccuccuguacaccuucgccaccgcgaacgccgacacgcugugcaucggcuaccacgccaacaacagcaccgacaccguggacaccgugcucgagaagaacgucacggugacccacuccgugaaccugcuggaggacaagcacaacgggaagcucugcaagcugcgcggcgucgcgccccugcaccucgggaagugcaacaucgccggcuggauccuggggaacccggagugcgagagccuguccaccgccagcuccuggagcuacaucguggagaccuccagcuccgacaacggcacgugcuaccccggcgacuucaucaacuacgaggagcuccgggagcagcugagcuccgugagcuccuucgagcgcuucgagaucuuccccaagaccagcuccuggcccaaccacgacagcaacaagggggucaccgccgccugcccgcacgccggcgcgaaguccuucuacaagaaccugaucuggcucgugaagaaggggaacagcuaccccaagcuguccaagagcuacaucaacgacaagggcaaggaggugcugguccucugggggauccaccaccccagcaccuccgccgaccagcagagccuguaccagaacgccgacgccuacguguucgugggcacguccaaguacagcaagaaguucaagcccgagaucgccguccggccgaaggugcgcgaccaggagggccggaugaacuacuacuggacccugguggagcccggggacaagaucaccuucgaggcgaccggcaaccuccuggucccccgcuacgccuucgccauggagcggaacgccggguccggcaucaucaucagcgacacgcccgugcacgacugcaacacgaccugccagaccccgaagggcgccaucaacaccucccugcccuuccagaacauccaccccaucaccaucgggaagugccccaaguacgucaagagcaccaagcuccgccuggcgaccggccugcggaacgugccguccauccagagccgcgggcuguucggcgccaucgccggguucaucgagggcggcuggacggggaugguggacggcugguacggguaccaccaccagaacgagcagggcuccggguacgccgccgaccucaagagcacccagaacgcgaucgacaagaucaccaacaaggugaacuccgucaucgagaagaugaacacccaguucacggccgugggcaagggcuucaaccaccuggagaagcggaucgagaaccucaacaagaaggucgacgacggguuccuggacaucuggaccuacaacgccgagcugcucgugcugcuggagaacgagcgcacccucgacuaccacgacagcaacgugaagaaccuguacgagaagguccggucccagcugaagaacaacgccaaggagaucggcaacgggugcuucgaguucuaccacaagugcgacaacacgugcauggagagcgugaagaacggcaccuacgacuaccccaaguacuccgaggaggccaagcucaaccgcgaggagaucgacggggugaagcuggagagcacccggaucuaccagauccuggcgaucuacuccaccgucgccagcagccucgugcugguggucucccugggcgccaucagcuucuggaugugcuccaacggcagccuccagugccgcaucugcaucuga

SEQ ID NO: 76920 - RNA, 1701 nt, Artificial Sequence; identical to SEQ ID NO: 66935
  derived and/or modified CDS sequence (opt1) from hemagglutinin__InfluenzaA__AJJ99516

SEQ ID NO: 76921 - RNA, 1701 nt, Artificial Sequence
  derived and/or modified CDS sequence (opt1) from hemagglutinin__InfluenzaA__AJJ99527
augaaggccauccugcucgugcugcuguacaccuucgccaccgcgaacgccgacacgcucugcaucggcuaccacgccaacaacagcaccgacaccgucgacaccgugcuggagaagaacgugacggucacccacuccgugaaccugcucgaggacaagcacaacgggaagcugugcaagcugcgcggcguggcgccccuccaccuggggaagugcaacaucgccggcuggauccuggggaacccggagugcgagagccucuccaccgccagcuccuggagcuacaucgucgagaccuccagcuccgacaacggcacgugcuaccccggcgacuucaucaacuacgaggagcugcgggagcagcugagcuccgugagcuccuucgagcgcuucgagaucuuccccaagaccagcuccuggcccaaccacgacagcaacaagggggugaccgccgccugcccgcgggccggcgcgaaguccuucuacaagaaccucaucuggcuggucaagaaggggaacagcuaccccaagcuguccaagagcuacaucaacgacaagggcaaggaggugcucgugcugugggggauccaccaccccagcaccacggccgaccagcagucccuguaccagaacgccgacgccuacgucuucgugggcaccagccgcuacuccaagaaguucaagcccgagaucgccauccggccgaaggugcgcgaccaggagggccggaugaacuacuacuggacccucgucgagcccggggacaagaucaccuucgaggcgacgggcaaccugcuggugccccgcuacgccuucgccauggagcggaacgccgggagcggcaucaucaucuccgacacccccgugcacgacugcaacacgaccugccagaccccgaagggcgccaucaacaccagccuccccuuccagaacauccaccccaucaccaucgggaagugccccaaguacgucaaguccaccaagcugcgccuggcgacgggccuccggaacgugccgagcauccagucccgcgggcuguucggcgccaucgccggguucaucgagggcggcuggaccgggaugguggacggcugguacggguaccaccaccagaacgagcagggcagcggguacgccgccgaccugaaguccacccagaacgucaucgacaagaucaccaacaaggugaacagcgugaucgagaagaugaacacgcaguucaccgcggucggcaaggaguucaaccaccucgagaagcggaucgagaaccugaacaagaagguggacgacggcuuccuggacaucuggaccuacaacgccgagcuccugguccugcucgagaacgagcgcacccuggacuaccacgacuccaacgugaagaaccuguacgagaaggugcggaaccagcucaagaacaacgccaaggagaucgggaacggcugcuucgaguucuaccacaagugcgacaacacgugcauggagagcgucaagaacgggaccuacgacuaccccaaguacuccgaggaggccaagcugaaccgcgaggagaucgacggcgugaagcuggagagcacccggaucuaccagauccucgccaucuacuccaccguggcgagcucccugguccugguggugagccucggggccaucagcuucuggaugugcuccaacggcagccugcagugccgcaucugcaucuga

SEQ ID NO: 76922 - RNA, 1701 nt, Artificial Sequence
  derived and/or modified CDS sequence (opt1) from hemagglutinin__InfluenzaA__AJJ99538
augaaggccauccuggugguccuccuguacaccuucgccaccgcgaacgccgacacgcugugcaucggcuaccacgccaacaacagcaccgacaccguggacaccgugcucgagaagaacgucacggugacccacuccgugaaccugcuggaggacaagcacaacgggaagcucugcaagcugcgcggcgucgcgccccugcaccucgggaagugcaacaucgccggcuggauccuggggaacccggagugcgagagccuguccaccgccagcuccuggagcuacaucguggagaccuccagcuccgacaacggcacgugcuaccccggcgacuucaucgacuacgaggagcuccgggagcagcugagcuccgugagcuccuucgagcgcuucgagaucuuccccaagaccagcuccuggcccaaccacgacagcaacaagggggucaccgccgccugcccgcacgccggcgcgaaguccuucuacaagaaccugaucuggcucgugaagaaggggaacagcuaccccaagcuguccaagagcuacaucaacgacaagggcaaggaggugcugguccucugggggauccaccaccccagcaccacggccgaccagcagucccuguaccagaacgccgacaccuacguguucgugggcaccagccgguacuccaagaaguucaagcccgagaucgccauccgcccgaagguccgggaccaggagggccgcaugaacuacuacuggacccugguggagcccggggacaagaucacguucgaggccaccggcaaccucguggucccccgguacgcguucgccauggagcgcaacgccgggagcggcaucaucaucuccgacacccccgugcacgacugcaacaccacgugccagaccccgaagggcgccaucaacaccagccugcccuuccagaacauccaccccaucaccaucgggaagugccccaaguacgugaaguccacgaagcugcggcucgccaccggccugcgcaacgucccgagcauccagucccgggggcuguucggcgcgaucgccggguucaucgagggcggcuggaccgggaugguggacggcugguacggguaccaccaccagaacgagcagggcagcggguacgccgccgaccucaaguccacccagaacgccaucgacaagaucacgaacaaggugaacagcgucaucgagaagaugaacacccaguucaccgcggugggcaaggaguucaaccaccuggagaagcgcaucgagaaccugaacaagaaggucgacgacggcuuccucgacaucuggaccuacaacgccgagcugcuggugcuccuggagaacgagcggacgcuggacuaccacgacuccaacgugaagaaccucuacgagaagguccgcaaccagcugaagaacaacgccaaggagaccgggaacggcugcuucgaguucuaccacaagugcgacaacacgugcauggagagcgugaagaacgggaccuacgacuaccccaaguacuccgaggaggccaagcugaaccgggagaagaucgacggcgugaagcucgagagcacccgcaucuaccagauccuggccaucuacuccaccgucgcgagcucccuggugcucguggucagccugggggccaucagcuucuggaugugcuccaacggcagccugcagugccggaucugcaucuga

SEQ ID NO: 76923 - RNA, 1701 nt, Artificial Sequence
  derived and/or modified CDS sequence (opt1) from hemagglutinin__InfluenzaA__AJJ99549
augaaggccauccuggugguccuccuguacaccuucgccaccgcgaacgccgacacgcugugcaucggcuaccacgccaacaacagcaccgacaccguggacaccgugcucgagaagaacgucacggugacccacuccgugaaccugcuggaggacaagcacaacgggaagcucugcaagcugcgcggcgucgcgccccugcaccucgggaagugcaacaucgccggcuggauccuggggaacccggagugcgagagccuguccaccgccagcuccuggagcuacaucguggagaccuccagcuccgacaacggcacgugcuaccccggcgacuucaucgacuacgaggagcuccgggagcagcugagcuccgugagcuccuucgagcgcuucgagaucuuccccaagaccagcuccuggcccaaccacgacagcaacaagggggucaccgccgccugcccgcacgccggcgcgaagggguucuacaagaaccugaucuggcucgugaagaagggcaacuccuaccccaagcugagcaaguccuacaucaacgacaaggggaaggaggugcugguccucuggggcauccaccaccccagcaccacggccgaccagcagagccuguaccagaacgccgacaccuacguguucgugggcaccucccgguacagcaagaaguucaagcccgagaucgccauccgcccgaagguccgggaccaggaggggcgcaugaacuacuacuggacccugguggagcccggcgacaagaucacguucgaggccaccgggaaccucguggucccccgguacgcguucgccauggagcgcaacgccggcuccggcaucaucaucagcgacacccccgugcacgacugcaacaccacgugccagaccccgaagggggccaucaacaccucccugcccuuccagaacauccaccccaucaccaucggcaagugccccaaguacgucaagagcacgaagcugcggcucgccaccgggcugcgcaacgugccguccauccagagccggggccuguucggggcgaucgccggcuucaucgagggcggguggaccggcaugguggacgggugguacggcuaccaccaccagaacgagcagggguccggcuacgccgccgaccucaagagcacccagaacgccaucgacaagaucacgaacaaggugaacuccgucaucgagaagaugaacacccaguucaccgcggugggcaaggaguucaaccaccuggagaagcgcaucgagaaccugaacaagaaggucgacgacggguuccucgacaucuggaccuacaacgccgagcugcuggugcuccuggagaacgagcggacgcuggacuaccacgacagcaacgugaagaaccucuacgagaagguccgcaaccagcugaagaacaacgccaaggagaucggcaacgggugcuucgaguucuaccacaagugcgacaacaugugcauggaguccgugaagaacggcaccuacgacuaccccaaguacagcgaggaggccaagcugaaccgggaggagaucgacggggugaagcucgaguccacccgcaucuaccagauccuggccaucuacagcaccgcggccuccagccugguccucguggugucccugggcgccaucagcuucuggaugugcagcaacggcucccugcagugccggaucugcaucuga

SEQ ID NO: 76924 - RNA, 1701 nt, Artificial Sequence; identical to SEQ ID NO: 71113
  derived and/or modified CDS sequence (opt1) from hemagglutinin__InfluenzaA__AJJ99560

SEQ ID NO: 76925 - RNA, 1701 nt, Artificial Sequence
  derived and/or modified CDS sequence (opt1) from hemagglutinin__InfluenzaA__AJJ99571
augaaggccauccuggugguccuccuguacaccuucgccaccgcgaacgccgacacgcugugcaucggcuaccacgccaacaacagcaccgacaccguggacaccgugcucgagaagaacgucacggugacccacuccgugaaccugcuggaggacaagcacaacgggaagcucugcaagcugcgcggcgucgcgccccugcaccucgggaagugcaacaucgccggcuggauccuggggaacccggagugcgagagccuguccaccgccagcuccuggagcuacaucguggagaccuccagcuccgacaacggcacgugcuaccccggcgacuucaucgacuacgaggagcuccgggagcagcugagcuccgugagcuccuucgagcgcuucgagaucuuccccaagaccagcuccuggcccaaccacgacagcaacaagggggucaccgccgccugcccgcacgccggcgcgaaguccuucuacaagaaccugaucuggcucgugaagaaggggaacagcuaccccaagcuguccaagagcuacaucaacgacaagggcaaggaggugcugguccucugggggauccaccaccccagcaccacggccgaccagcagucccuguaccagaacgccgacaccuacguguucgugggcaccagccgguacuccaagaaguucaagcccgagaucgccauccgcccgaagguccgggaccaggagggccgcaugaacuacuacuggacccugguggagcccggggacaagaucacguucgaggccaccggcaaccucguggucccccgguacgcguucgccauggagcgcaacgccgggagcggcaucaucaucuccgacacccccgugcacgacugcaacaccacgugccagaccccgaagggcgccaucaacaccagccugcccuuccagaacauccaccccaucaccaucgggaagugccccaaguacgugaaguccacgaagcugcggcucgccaccggccugcgcaacgucccgagcauccagucccgggggcuguucggcgcgaucgccggguucaucgagggcggcuggaccgggaugguggacggcugguacggguaccaccaccagaacgagcagggcagcggguacgccgccgaccucaaguccacccagaacgccaucgacaagaucacgaacaaggugaacagcgucaucgagaagaugaacauccaguucaccgcggugggcaaggaguucaaccaccuggagaagcgcaucgagaaccugaacaagaaggucgacgacggcuuccucgacaucuggaccuacaacgccgagcugcuggugcuccuggagaacgagcggacccuggacuaccacgacuccaacgugaagaaccucuacgagaagguccgcaaccagcugaagaacaacgccaaggagaucgggaacggcugcuucgaguucuaccacaagugcgacaacacgugcauggagagcgugaagaacgggaccuacgacuaccccaaguacuccgaggaggccaagcugaaccgggaggagaucgacggcgugaagcucgagagcacccgcaucuaccagauccuggccaucuacuccaccgucgcgagcucccuggugcucguggucagccugggggccaucagcuucuggaugugcuccaacggcagccugcagugccggaucugcaucuga

SEQ ID NO: 76926 - RNA, 1701 nt, Artificial Sequence
  derived and/or modified CDS sequence (opt1) from hemagglutinin__InfluenzaA__AJJ99582
augaaggccauccuggugguccuccuguacaccuucgccaccgcgaacgccgacacgcugugcaucggcuaccacgccaacaacagcaccgacaccguggacaccgugcucgagaagaacgucacggugacccacuccgugaaccugcuggaggacaagcacaacgggaagcucugcaagcugcgcggcgucgcgccccugcaccucgggaagugcaacaucgccggcuggauccuggggaacccggagugcgagagccuguccaccgccagcuccuggagcuacaucguggagaccuccagcuccgacaacggcacgugcuaccccggcgacuucaucgacuacgaggagcuccgggagcagcugagcuccgugagcuccuucgagcgcuucgagaucuuccccaagaccagcuccuggcccaaccacgacagcaacaagggggucaccgccgccugcccgcacgccggcgcgaaguccuucuacaagaaccugaucuggcucgugaagaaggggaacagcuaccccaagcuguccaagagcuacaucaacgacaagggcaaggaggugcugguccucugggggauccaccaccccagcaccuccgccgaccagcagagccuguaccagaacgccgacgccuacguguucgugggcacgucccgguacagcaagaaguucaagcccgagaucgccauccgcccgaagguccgggaccaggagggccgcaugaacuacuacuggacccugguggagcccggggacaagaucaccuucgaggcgaccggcaaccucguggucccccgguacgccuucgccauggagcgcaacgccggguccggcaucaucaucagcgacacgcccgugcacgacugcaacacgaccugccagaccccgaacggcgccaucaacaccucccugcccuuccagaacauccaccccaucaccaucgggaagugccccaaguacgucaagagcaccaagcugcggcucgcgaccggccugcgcaacgugccguccauccagagccgggggcuguucggcgccaucgccggguucaucgagggcggcuggacggggaugguggacggcugguacggguaccaccaccagaacgagcagggcuccggguacgccgccgaccucaagagcacccagaacgcgaucgacaagaucaccaacaaggugaacuccgucaucgagaagaugaacacccaguucacggccgugggcaaggaguucaaccaccuggagaagcgcaucgagaaccugaacaagaaggucgacgacggcuuccucgacaucuggaccuacaacgccgagcugcuggugcuccuggagaacgagcggacccuggacuaccacgacagcaacgugaagaaccucuacgagaagguccgcucccagcugaagaacaacgccaaggagaucgggaacggcugcuucgaguucuaccacaagugcgacaacacgugcauggagagcgugaagaacgggaccuacgacuaccccaaguacuccgaggaggccaagcugaaccgggaggagaucgacggcgugaagcucgagagcacccgcaucuaccagauccuggcgaucuacuccaccgucgccagcagccuggugcucguggucucccugggggccaucagcuucuggaugugcuccaacggcagccugcagugccggaucugcaucuga

SEQ ID NO: 76927 - RNA, 1701 nt, Artificial Sequence; identical to SEQ ID NO: 66935
  derived and/or modified CDS sequence (opt1) from hemagglutinin__InfluenzaA__AJJ99593

SEQ ID NO: 76928 - RNA, 1701 nt, Artificial Sequence
  derived and/or modified CDS sequence (opt1) from hemagglutinin__InfluenzaA__AJJ99604
augaaggccauccuggugguccuccuguacaccuucgccaccgcgaacgccgacacgcugugcaucggcuaccacgccaacaacagcaccgacaccguggacaccgugcucgagaagaacgucacggugacccacuccgugaaccugcuggaggacaagcacaacgggaagcucugcaagcugcgcggcgucgcgccccugcaccucgggaagugcaacaucgccggcuggauccuggggaacccggagugcgagagccuguccaccgccagcuccuggagcuacaucguggagaccuccagcuccgacaacggcacgugcuaccccggcgacuucaucgacuacgaggagcuccgggagcagcugagcuccgugagcuccuucgagcgcuucgagaucuuccccaagaccagcuccuggcccaaccacgacagcaacaagggggucaccgccgccugcccgcacgccggcgcgaaguccuucuacaagaaccugaucuggcucgugaagaaggggaacagcuaccccaagcuguccaagagcuacaucaacgacaagggcaaggaggugcugguccucugggggauccaccaccccagcaccuccgccgaccagcagagccuguaccagaacgccgacgccuacguguucgugggcacgucccgguacagcaagaaguucaagcccgagaucgccauccgcccgcggguccgcgaccaggagggccggaugaacuacuacuggacccugguggagcccggggacaagaucaccuucgaggcgaccggcaaccucguggucccccgcuacgccuucgccauggagcgggacgccggguccggcaucaucaucagcgacacgcccgugcacgacugcaacacgaccugccagaccccgaagggcgccaucaacaccucccugcccuuccagaacauccaccccaucaccaucgggaagugccccaaguacgucaagagcaccaagcugcgccucgcgaccggccugcggaacgugccguccauccagagccgcgggcuguucggcgccaucgccggguucaucgagggcggcuggacggggaugguggacggcugguacggguaccaccaccagaacgagcagggcuccggguacgccgccgaccucaagagcacccagaacgcgaucgacgagaucaccaacaaggugaacuccgucaucgagaagaugaacacccaguucacggccgugggcaaggaguucaaccaccuggagaagcggaucgagaaccugaacaagaagaucgacgacggcuuccucgacaucuggaccuacaacgccgagcugcugguccuccuggagaacgagcgcacccuggacuaccacgacagcaacgugaagaaccucuacgagaaggugcggucccagcugaagaacaacgccaaggagaucgggaacggcugcuucgaguucuaccacaagugcgacaacacgugcauggagagcgucaagaacgggaccuacgacuaccccaaguacuccgaggaggccaagcugaaccgcgaggagaucgacggcgugaagcucgagagcacccggaucuaccagauccuggcgaucuacuccaccguggccagcagccugguccucguggugucccugggggccaucagcuucuggaugugcuccaacggcagccugcagugccgcaucugcaucuga

SEQ ID NO: 76929 - RNA, 1698 nt, Artificial Sequence
  derived and/or modified CDS sequence (opt1) from hemagglutinin__InfluenzaA__AJJ99616
augaaggugaagcugcucguccugcugugcaccuucaccgccacguacgccgacaccaucugcaucggcuaccacgcgaacaacagcaccgacaccguggacacggugcucgagaagaacgucaccgugacccacuccgugaaccugcuggagaacagccacaacgggaagcucugccugcugaagggcaucgcgccccuccagcuggggaacugcuccgucgccggcuggauccuggggaacccggagugcgagcuccugaucagcaaggaguccuggagcuacaucguggagaagcccaaccccgagaacgggaccugcuaccccggccacuucgccgacuacgaggagcugcgcgagcagcucuccagcguguccagcuucgagcgguucgagaucuucccgaaggaguccagcuggcccaaccacacggucaccgggguguccgccagcugcucccacaacggcgagaacagcuucuaccgcaaccugcuguggcucaccgggaagaacggccuguaccccaaccuguccaagagcuacgccaacaacaaggagaaggaggugcucguccuguggggcgugcaccacccgcccaacaucgccaaccagaagacccuguaccacacggagaacgccuacguguccgucgugagcagccacuacucccggaagcucacccccgagaucgccaagcgccccaaggugcgggaccaggagggccgcaucaacuacuacuggacccugcuggagcccggcgacaccaucaucuucgaggcgaacgggaaccucaucgccccgcgguacgccuucgcccugagccgcggcuucggguccggcaucaucaacagcaacgcccccauggacaagugcgacgcgaagugccagacgccccagggcgccaucaacuccagccugcccuuccagaacguccacccggugaccaucggggagugccccaaguacgugcgguccgccaagcuccgcauggucaccggccugcggaacauccccagcauccagucccgcgggcuguucggcgccaucgccggguucaucgagggcggcuggaccgggaugguggacggcugguacggguaccaccaccagaacgagcagggcagcggguacgcggccgaccagaaguccacgcagaacgccaucaacggcaucaccaacaaggugaacagcgucaucgagaagaugaacacccaguucaccgccgugggcaaggaguucaacaagcucgagcggcgcauggagaaccugaacaagaaggucgacgacggguucaucgacaucuggacguacaacgccgagcugcucgugcugcuggagaacgagcggacccucgacuuccacgacuccaacgugaagaaccuguacgagaaggucaagagccagcugaagaacaacgcgaaggagaucggcaacgggugcuucgaguucuaccacaagugcaacgacgagugcauggaguccgugaagaacggcaccuacgacuaccccaaguacagcgaggaguccaagcucaaccgcgagaagaucgacggggugaagcuggagagcaugggcgucuaccagauccuggccaucuacuccaccguggccagcagccucgugcugcuggucucccucggcgccaucagcuucuggaugugcuccaacgggagccugcagugccggaucugcaucuga

SEQ ID NO: 76930 - RNA, 1698 nt, Artificial Sequence; identical to SEQ ID NO: 67650
  derived and/or modified CDS sequence (opt1) from hemagglutinin__InfluenzaA__AJJ99628

SEQ ID NO: 76931 - RNA, 1698 nt, Artificial Sequence
  derived and/or modified CDS sequence (opt1) from hemagglutinin__InfluenzaA__AJJ99640
augaaggugaagcugcucguccugcugugcaccuucaccgccacguacgccgacaccaucugcaucggcuaccacgcgaacaacagcaccgacaccguggacacggugcucgagaagaacgucaccgugacccacuccgugaaccugcuggagaacagccacaacgggaagcucugccugcugaagggcaucgcgccccuccagcuggggaacugcuccgucgccggcuggauccuggggaacccggagugcgagcuccugaucagcaaggaguccuggagcuacaucguggagaagcccaaccccgagaacgggaccugcuaccccggccacuucgccgacuacgaggagcugcgcgagcagcucuccagcguguccagcuucgagcgguucgagaucuucccgaaggaguccagcuggcccaaccacacggucaccgggguguccgccagcugcucccacaacggcgagaacagcuucuaccgcaaccugcuguggcucaccgggaagaacggccuguaccccaaccuguccaagagcuacgccaacaacaaggagaaggaggugcucguccuguggggcgugcaccacccgcccaacaucgccaaccagaagacccuguaccacacggagaacgccuacguguccgucgugagcagccacuacucccggaaguucacccccgagaucgccaagcgccccaaggugcgggaccaggagggccgcaucaacuacuacuggacccuccuggagcccggcgacaccaucaucuucgaggcgaacgggaaccugaucgccccgcgguacgccuucgcccucagccgcggcuucggguccggcaucaucaacagcaacgcccccauggacaagugcgacgcgaagugccagacgccccagggcgccaucaacuccagccugcccuuccagaacguccacccggugaccaucggggagugccccaaguacgugcgguccgccaagcugcgcauggucaccggccuccggaacauccccagcauccagucccgcgggcuguucggcgccguggccggguucaucgagggcggcuggaccgggaugguggacggcugguacggguaccaccaccagaacgagcagggcagcggguacgcggccgaccagaaguccacgcagaacgccaucaacggcaucaccaacaaggucaacagcgugaucgagaagaugaacacccaguucaccgccgucggcaaggaguucaacaagcuggagcggcgcauggagaaccucaacaagaagguggacgacggguucaucgacaucuggacguacaacgccgagcugcuggugcuccuggagaacgagcggacccuggacuuccacgacuccaacgucaagaaccucuacgagaaggucaagagccagcugaagaacaacgcgaaggagaucggcaacgggugcuucgaguucuaccacaagugcaacgacgagugcauggaguccgugaagaacggcaccuacgacuaccccaaguacagcgaggaguccaagcugaaccgcgagaagaucgacggggugaagcucgagagcaugggcguguaccagauccuggccaucuacuccaccguggccagcagccugguccuccuggugucccugggcgccaucagcuucuggaugugcuccaacgggagccuccagugccggaucugcaucuga

SEQ ID NO: 76932 - RNA, 1698 nt, Artificial Sequence; identical to SEQ ID NO: 67650
  derived and/or modified CDS sequence (opt1) from hemagglutinin__InfluenzaA__AJJ99652

SEQ ID NO: 76933 - RNA, 1698 nt, Artificial Sequence
  derived and/or modified CDS sequence (opt1) from hemagglutinin__InfluenzaA__AJJ99664
augaaggccaagcugcucgugcugcugugcaccuucaccgccacguacgcggacaccaucugcaucggcuaccacgccaacaacagcaccgacaccgucgacacggugcucgagaagaacgugaccgucacccacuccgugaaccugcuggagaacagccacaacgggaagcucugccugcugaagggcaucgcgccccuccagcuggggaacugcuccaucgccggcuggauccuggggaacccggagugcgagcuccugaucagcaaggaguccuggagcuacaucguggagaagcccaaccccgagaacgggaccugcuaccccggccacuucgccgacuacgaggagcugcgcgagcagcucuccagcgucuccagcuucgagcgguucgagaucuucccgaaggaguccagcuggcccaaccacacggugaccgggguguccgccagcugcucccacaacggcgagagcuccuucuaccgcaaccugcuguggcucaccgggaagaacggccuguaccccaaccugagcaaguccuacgccaacaacaaggagaaggagguccucgugcuguggggcgugcaccacccgcccaacaucggcgaccagaaggcccuguaccacaccgagaacgccuacgucagcguggugagcucccacuacagccggaaguucacgcccgagaucgcgaagcgccccaagguccgggaccaggagggccgcaucaacuacuacuggacccuccuggagcccggggacaccaucaucuucgaggccaacggcaaccugaucgccccgcgguacgccuucgcccucucccgcggguucggcagcggcaucaucaacuccaacgcgcccauggacaagugcgacgccaagugccagacgccccagggggccaucaacagcucccugcccuuccagaacgugcacccggugaccaucggcgagugccccaaguacguccggagcgccaagcugcgcauggugaccgggcuccggaacauccccuccauccagagccgcggccuguucggggccaucgcgggcuucaucgagggcggguggaccggcaugguggacgggugguacggcuaccaccaccagaacgagcagggguccggcuacgccgccgaccagaaguccacccagaacgccaucaacggcaucacgaacaaggucaacagcgugaucgagaagaugaacacccaguucaccgccguggggaaggaguucaacaagcuggagcggcgcauggagaaccucaacaagaaggucgacgacggcuucaucgacaucuggaccuacaacgcggagcugcuggugcuccuggagaacgagcggacgcuggacuuccacgacagcaacgucaagaaccucuacgagaaggugaagucccagcugaagaacaacgccaaggagaucgggaacggcugcuucgaguucuaccacaagugcaacgacgagugcauggagagcgugaagaacgggaccuacgacuaccccaaguacuccgaggagagcaagcugaaccgcgagaagaucgacggcgucaagcucgaguccaugggcguguaccagauccuggccaucuacagcaccguggccagcucccugguccuccuggugagccugggggccaucuccuucuggaugugcagcaacggcucccuccagugccggaucugcaucuga

SEQ ID NO: 76934 - RNA, 1701 nt, Artificial Sequence
  derived and/or modified CDS sequence (opt1) from hemagglutinin__InfluenzaA__AJJ99675
augaaggccauccugcucgugcugcuguacaccuucgccaccgcgaaggccgacacgcucugcaucggcuaccacgccaacaacagcaccgacaccgucgacaccgugcuggagaagaacgugacggucacccacuccgugaaccugcucgaggacaagcacaacgggaagcugugcaagcugcgcggcguggcgccccuccaccuggggaagugcaacaucgccggcuggauccuggggaacccggagugcgagagccucuccaccgccagcuccuggagcuacaucgucgagaccuccagcuccgacaacggcacgugcuaccccggcgacuucaucaacuacgaggagcugcgggagcagcugagcuccgugagcuccuucgagcgcuucgagaucuuccccaagaccagcuccuggcccaaccacgacagcaacaagggggugaccgccgccugcccgcgggccggcgcgaaguccuucuacaagaaccucaucuggcuggucaagaaggggaacagcuaccccaagcuguccaagagcuacaucaacgacaagggcaaggaggugcucgugcugugggggauccaccaccccagcaccacggccgaccagcagucccuguaccagaacgccgacgccuacgucuucgugggcaccagccgcuacuccaagaaguucaagcccgagaucgccauccggccgaaggugcgcgaccaggagggccggaugaacuacuacuggacccucgucgagcccggggacaagaucaccuucgaggcgacgggcaaccugcuggugccccgcuacgccuucgccauggagcggaacgccgggagcggcaucaucaucuccgacacccccgugcacgacugcaacacgaccugccagaccccgaagggcgccaucaacaccagccuccccuuccagaacauccaccccaucaccaucgggaagugccccaaguacgucaaguccaccaagcugcgccuggcgacgggccuccggaacgugccgagcauccagucccgcgggcuguucggcgccaucgccggguucaucgagggcggcuggaccgggaugguggacggcugguacggguaccaccaccagaacgagcagggcagcggguacgccgccgaccugaaguccacccagaacgcgaucgacaagaucaccgacaaggucaacagcgugaucgagaagaugaacacgcaguucaccgccgugggcaaggaguucaaccaccucgagaagcggaucgagaaccugaacaagaaggucgacgacggcuuccuggacaucuggaccuacaacgccgagcuccuggugcugcucgagaacgagcgcacccuggacuaccacgacuccaacgucaagaaccuguacgagaaggugcggaaccagcucaagaacaacgccaaggagaucgggaacggcugcuucgaguucuaccacaagugcgacaacacgugcauggagagcgugaagaacgggaccuacgacuaccccaaguacuccgaggaggccaagcugaaccgcgaggagaucgacggcgucaagcuggagagcacccggaucuaccagauccucgcgaucuacuccaccguggccagcucccuggugcuggucgugagccucggggccaucagcuucuggaugugcuccaacggcagccugcagugccgcaucugcaucuga

SEQ ID NO: 76935 - RNA, 1701 nt, Artificial Sequence
  derived and/or modified CDS sequence (opt1) from hemagglutinin__InfluenzaA__AJJ99686
augaccgccauccugcucgugcugcuguacaccuucgccacggcgaacgccgacacccucugcaucggcuaccacgccaacaacagcaccgacaccgucgacacggugcuggagaagaacgugaccgucacccacuccgugaaccugcucgaggacaagcacaacgggaagcugugcaagcugcgcggcguggcgccccuccaccuggggaagugcaacaucgccggcuggauccuggggaacccggagugcgagagccucuccaccgccagcuccuggagcuacaucgucgagacguccagcuccgacaacgggaccugcuaccccggcgacuucaucaacuacgaggagcugcgggagcagcugagcuccgugagcuccuucgagcgcuucgagaucuuccccaagaccagcuccuggcccaaccacgacagcaacaagggcgugaccgccgccugcccgcgggccggcgcgaaguccuucuacaagaaccucaucuggcuggucaagaaggggaacagcuaccccaagcuguccaagagcuacaucaacgacaagggcaaggaggugcucgugcugugggggauccaccaccccagcacgaccgccgaccagcagucccuguaccagaacgccgacgccuacgucuucgugggcaccagccgcuacuccaagaaguucaagcccgagaucgccauccggccgaaggugcgcgaccaggagggccggaugaacuacuacuggacccucgucgagcccggggacaagaucacguucgaggcgaccggcaaccugcuggugccccgcuacgccuucgccauggagcggaacgccgggagcggcaucaucaucuccgacacccccgugcacgacugcaacaccacgugccagaccccgaagggcgccaucaacaccagccuccccuuccagaacauccaccccaucaccaucgggaagugccccaaguacgucaaguccacgaagcugcgccuggcgaccggccuccggaacgugccgagcauccagucccgcgggcuguucggcgccaucgccggguucaucgagggcggcuggaccgggaugguggacggcugguacggguaccaccaccagaacgagcagggcagcggguacgccgccgaccugaaguccacccagaacgcgaucgacaagaucacgaacaaggucaacagcgugaucgagaagaugaacacccaguucaccgccgugggcaaggaguucaaccaccucgagaagcggaucgagaaccugaacaagaaggucgacgacggcuuccuggacaucuggaccuacaacgccgagcuccuggugcugcucgagaacgagcgcacgcuggacuaccacgacuccaacgucaagaaccuguacgagaaggugcggaaccagcucaagaacaacgccaaggagaucgggaacggcugcuucgaguucuaccacaagugcgacaacacgugcauggagagcgugaagaacgggaccuacgacuaccccaaguacuccgaggaggccaagcugaaccgcgaggagaucgacggcgucaagcuggagagcacccggaucuaccagauccucgcgaucuacuccaccguggccagcucccuggugcuggucgugagccucggggccaucagcuucuggaugugcuccaacggcagccugcagugccgcaucugcaucuga

SEQ ID NO: 76936 - RNA, 1701 nt, Artificial Sequence
  derived and/or modified CDS sequence (opt1) from hemagglutinin__InfluenzaA__AJJ99697
augaaggccauccuggugguccuccuguacaccuucgccaccgcgaacgccgacacgcugugcaucggcuaccacgccaacaacagcaccgacaccguggacaccgugcucgagaagaacgucacggugacccacuccgugaaccugcuggaggacaagcacaacgggaagcucugcaagcugcgcggcgucgcgccccugcaccucgggaagugcaacaucgccggcuggauccuggggaacccggagugcgagagccuguccaccgccagcuccuggagcuacaucguggagaccuccagcuccgacaacggcacgugcuaccccggcgacuucaucgacuacgaggagcuccgggagcagcugagcuccgugagcuccuucgagcgcuucgagaucuuccccaagaccagcuccuggcccaaccacgacagcaacaagggggucaccgccgccugcccgcacgccggcgcgaaguccuucuacaagaaccugaucuggcucgugaagaaggggaacagcuaccccaagcuguccaagagcuacaucaacgacaagggcaaggaggugcugguccucugggggauccaccaccccagcaccacggccgaccagcagucccuguaccagaacgccgacaccuacguguucgugggcaccagccgguacuccaagaaguucaagcccgagaucgccauccgcccgaagguccgggaccaggagggccgcaugaacuacuacuggacccugguggagcccggggacaagaucacguucgaggccaccggcaaccucguggucccccgguacgcguucgugauggagcgcaacgccgggagcggcaucaucaucuccgacacccccgugcacgacugcaacaccacgugccagaccccgaagggcgccaucaacaccagccugcccuuccagaacauccaccccaucaccaucgggaagugccccaaguacgucaaguccacgaagcugcggcucgccaccggccugcgcaacgugccgagcauccagucccgggggcuguucggcgccaucgcgggguucaucgagggcggcuggaccgggaugguggacggcugguacggguaccaccaccagaacgagcagggcagcggguacgccgccgaccucaaguccacccagaacgccaucgacaagaucacgaacaaggucaacagcgugaucgagaagaugaacacccaguucaccgccgucggcaaggaguucaaccaccuggagaagcgcaucgagaaccugaacaagaagguggacgacggcuuccucgacaucuggaccuacaacgcggagcugcuggugcuccuggagaacgagcggacgcuggacuaccacgacuccaacgucaagaaccucuacgagaaggugcgcaaccagcugaagaacaacgccaaggagaccgggaacggcugcuucgaguucuaccacaagugcgacaacacgugcauggagagcgugaagaacgggaccuacgacuaccccaaguacuccgaggaggccaagcugaaccgggagaagaucgacggcgucaagcucgagagcacccgcaucuaccagauccuggccaucuacuccaccguggccagcucccuggugcucgucgugagccugggggcgaucagcuucuggaugugcuccaacggcagccugcagugccggaucugcaucuga

SEQ ID NO: 76937 - RNA, 1701 nt, Artificial Sequence
  derived and/or modified CDS sequence (opt1) from hemagglutinin__InfluenzaA__AJJ99708
augaaggccauccuggugguccuccuguacaccuucgccaccgcgaacgccgacacgcugugcaucggcuaccacgccaacaacagcaccgacaccguggacaccgugcucgagaagaacgucacggugacccacuccgugaaccugcuggaggacaagcacaacgggaagcucugcaagcugcgcggcgucgcgccccugcaccucgggaagugcaacaucgccggcuggauccuggggaacccggagugcgagagccuguccaccgccagcuccuggagcuacaucguggagaccuccagcuccgacaacggcacgugcuaccccggcgacuucaucgacuacgaggagcuccgggagcagcugagcuccgugagcuccuucgagcgcuucgagaucuuccccaagaccagcuccuggcccgaccacgacagcaacaagggggucaccgccgccugcccgcacgccggcgcgaaguccuucuacaagaaccugaucuggcucgugaagaaggggaacagcuaccccaagcuguccaagagcuacaucaacgacaagggcaaggaggugcugguccucugggggauccaccaccccagcaccacggccgaccagcagucccuguaccagaacgccgacaccuacguguucgugggcaccagccgguacuccaagaaguucaagcccgagaucgccauccgcccgaagguccgggaccaggagggccgcaugaacuacuacuggacccugguggagcccggggacaagaucacguucgaggccaccggcaaccucguggucccccgguacgcguucgugauggagcgcaacgccgggagcggcaucaucaucuccgacacccccgugcacgacugcaacaccacgugccagaccccgaagggcgccaucaacaccagccugcccuuccagaacauccaccccaucaccaucgggaagugccccaaguacgucaaguccacgaagcugcggcucgccaccggccugcgcaacgugccgagcauccagucccgggggcuguucggcgccaucgcgggguucaucgagggcggcuggaccgggaugguggacggcugguacggguaccaccaccagaacgagcagggcagcggguacgccgccgaccucaaguccacccagaacgccaucgacaagaucacgaacaaggucaacagcgugaucgagaagaugaacacccaguucaccgccgucggcaaggaguucaaccaccuggagaagcgcaucgagaaccugaacaagaagguggacgacggcuuccucgacaucuggaccuacaacgcggagcugcuggugcuccuggagaacgagcggacgcuggacuaccacgacuccaacgucaagaaccucuacgagaaggugcgcaaccagcugaagaacaacgccaaggagaccgggaacggcugcuucgaguucuaccacaagugcgacaacacgugcauggagagcgugaagaacgggaccuacgacuaccccaaguacuccgaggaggccaagcugaaccgggagaagaucgacggcgucaagcucgagagcacccgcaucuaccagauccuggccaucuacuccaccguggccagcucccuggugcucgucgugagccugggggcgaucagcuucuggaugugcuccaacggcagccugcagugccggaucugcaucuga

SEQ ID NO: 76938 - RNA, 1701 nt, Artificial Sequence
  derived and/or modified CDS sequence (opt1) from hemagglutinin__InfluenzaA__AJJ99719
augaaggccauccugguggucaugcucuacaccuucgccaccgcgaacgccgacacgcugugcaucggcuaccacgccaacaacagcaccgacaccguggacaccgugcuggagaagaacgucacggugacccacuccgugaaccuccuggaggacaagcacaacgggaagcugugcaagcuccgcggcgucgcgccccugcaccuggggaagugcaacaucgccggcuggauccucgggaacccggagugcgagagccuguccaccgccagcuccuggagcuacaucguggagaccuccagcuccgacaacggcacgugcuaccccggcgacuucaucgacuacgaggagcugcgggagcagcucagcuccgugagcuccuucgagcgcuucgagaucuuccccaagaccagcuccuggcccaaccacgacagcaacaagggggucaccgccgccugcccgcacgccggcgcgaagggguucuacaagaaccugaucuggcuggugaagaagggcaacuccuaccccaagcucagcaaguccuacaucaacgacaaggggaaggaggugcugguccuguggggcauccaccaccccagcaccacggccgaccagcagagccucuaccagaacgccgacaccuacguguucgugggcaccucccgguacagcaagaaguucaagcccgagaucgccauccgcccgaagguccgggaccaggaggggcgcaugaacuacuacuggacccugguggagcccggcgacaagaucacguucgaggccaccgggaaccugguggucccccgguacgcguucgccauggagcgcaacgccggcuccggcaucaucaucagcgacacccccgugcacgacugcaacaccacgugccagaccccgaagggggccaucaacaccucccuccccuuccagaacauccaccccaucaccaucggcaagugccccaaguacgucaagagcacgaagcugcggcuggccaccgggcuccgcaacgugccguccauccagagccggggccuguucggggcgaucgccggcuucaucgagggcggguggaccggcaugguggacgggugguacggcuaccaccaccagaacgagcagggguccggcuacgccgccgaccucaagagcacccagaacgccaucgacaagaucacgaacaaggugaacuccgucaucgagaagaugaacacccaguucaccgcggugggcaaggaguucaaccaccuggagaagcgcaucgagaaccugaacaagaaggucgacgacggguuccuggacaucuggaccuacaacgccgagcuccuggugcugcucgagaacgagcggacgcuggacuaccacgacagcaacgugaagaaccuguacgagaagguccgcaaccagcucaagaacaacgccaaggagaucggcaacgggugcuucgaguucuaccacaagugcgacaacacgugcauggaguccgugaagaacggcaccuacgacuaccccaaguacagcgaggaggccaagcugaaccgggaggagaucgagggggugaagcuggaguccacccgcaucuaccagauccucgccaucuacagcaccgucgcguccagccuggugcugguggucucccucggcgccaucagcuucuggaugugcagcaacggcucccugcagugccggaucugcaucuga

SEQ ID NO: 76939 - RNA, 1701 nt, Artificial Sequence
  derived and/or modified CDS sequence (opt1) from hemagglutinin__InfluenzaA__AJJ99730
augaaggccauccugguggucaugcucuacaccuucgccaccgcgaacgccgacacgcugugcaucggcuaccacgccaacaacagcaccgacaccguggacaccgugcuggagaagaacgucacggugacccacuccgugaaccuccuggaggacaagcacaacgggaagcugugcaagcuccgcggcgucgcgccccugcaccuggggaagugcaacaucgccggcuggauccucgggaacccggagugcgagagccuguccaccgccagcuccuggagcuacaucguggagaccuccagcuccgacaacggcacgugcuaccccggcgacuucaucgacuacgaggagcugcgggagcagcucagcuccgugagcuccuucgagcgcuucgagaucuuccccaagaccagcuccuggcccaaccacgacagcaacaagggggucaccgccgccugcccgcacgccggcgcgaagggguucuacaagaaccugaucuggcuggugaagaagggcaacuccuaccccaagcucagcaaguccuacaucaacgacaaggggaaggaggugcugguccuguggggcauccaccaccccagcaccacggccgaccagcagagccucuaccagaacgccgacaccuacguguucgugggcaccucccgguacagcaagaaguucaagcccgagaucgccauccgcccgaagguccgggaccaggaggggcgcaugaacuacuacuggacccugaucgagcccggcgacaagaucacguucgaggccaccgggaaccugguggugccccgguacgcguucgccauggagcgcaacgccggcuccggcaucaucaucagcgacacccccguccacgacugcaacaccacgugccagaccccgaagggggccaucaacaccucccuccccuuccagaacauccaccccaucaccaucggcaagugccccaaguacgucaagagcacgaagcugcggcuggccaccgggcuccgcaacgugccguccauccagagccggggccuguucggggcgaucgccggcuucaucgagggcggguggaccggcaugguggacgggugguacggcuaccaccaccagaacgagcagggguccggcuacgccgccgaccucaagagcacccagaacgccaucgacaagaucacgaacaaggugaacuccgugaucgagaagaugaacacccaguucaccgcggucggcaaggaguucaaccaccuggagaagcgcaucgagaaccugaacaagaagguggacgacggguuccuggacaucuggaccuacaacgccgagcuccugguccugcucgagaacgagcggacgcuggacuaccacgacagcaacgugaagaaccuguacgagaaggugcgcaaccagcucaagaacaacgccaaggagaucggcaacgggugcuucgaguuccaccacaagugcgacaacacgugcauggaguccgucaagaacggcaccuacgacuaccccaaguacagcgaggaggccaagcugaaccgggaggagaucgacggggugaagcuggaguccacccgcaucuaccagauccucgccaucuacagcaccguggcguccagccugguccugguggugucccucggcgccaucagcuucuggaugugcagcaacggcucccugcagugccggaucugcaucuga

SEQ ID NO: 76940 - RNA, 1701 nt, Artificial Sequence; identical to SEQ ID NO: 71066
  derived and/or modified CDS sequence (opt1) from hemagglutinin__InfluenzaA__AJJ99741

SEQ ID NO: 76941 - RNA, 1701 nt, Artificial Sequence; identical to SEQ ID NO: 67857
  derived and/or modified CDS sequence (opt1) from hemagglutinin__InfluenzaA__AJJ99752

SEQ ID NO: 76942 - RNA, 1701 nt, Artificial Sequence; identical to SEQ ID NO: 66693
  derived and/or modified CDS sequence (opt1) from hemagglutinin__InfluenzaA__AJJ99763

SEQ ID NO: 76943 - RNA, 1698 nt, Artificial Sequence
  derived and/or modified CDS sequence (opt1) from hemagglutinin__InfluenzaA__AJJ99775
augaaggugaagcugcucguccugcugugcaccuucaccgccacguacgccgacaccaucugcaucggcuaccacgcgaacaacagcaccgacaccguggacacggugcucgagaagaacgucaccgugacccacuccgugaaccugcuggagaacagccacaacgggaagcucugccugcugaagggcaucgcgccccuccagcuggggaacugcuccgucgccggcuggauccuggggaacccggagugcgagcuccugaucagcaaggaguccuggagcuacaucguggagaagcccaaccccgagaacgggaccugcuaccccggccacuucgccgacuacgaggagcugcgcgagcagcucuccagcguguccagcuucgagcgguucgagaucuucccgaaggaguccagcuggcccaaccacacggucaccgggguguccgccagcugcucccacaacggcgagaacagcuucuaccgcaaccugcuguggcucaccgggaagaacggccuguaccccaaccuguccaagagcuacgccaacaacaaggagaaggaggugcucguccuguggggcgugcaccacccgcccaacaucgccgaccagaagacccuguaccacacggagaacgccuacguguccgucgugagcagccacuacucccggaaguucacccccgagaucgccaagcgccccaaggugcgggaccaggagggccgcaucaacuacuacuggacccuccuggagcccggcgacaccaucaucuucgaggcgaacgggaaccugaucgccccgcgguacgccuucgcccucagccgcggcuucggguccggcaucaucaacagcaacgcccccacggacaagugcgacgcgaagugccagacgccccagggcgccaucaacuccagccugcccuuccagaacguccacccggugaccaucggggagugccccaaguacgugcgguccgccaagcugcgcauggucaccggccuccggaacauccccagcauccagucccgcgggcuguucggcgccaucgccggguucaucgagggcggcuggaccgggaugguggacggcugguacggguaccaccaccagaacgagcagggcagcggguacgcggccgaccagaaguccacccagaacgccaucaacggcaucaccaacaaggugaacagcgucaucgagaagaugaacacccaguucacggccgugggcaaggaguucaacaagcuggagcggcgcauggagaaccucaacaagaaggucgacgacggguucaucgacaucuggaccuacaacgccgagcugcuggugcuccuggagaacgagcggacccuggacuuccacgacuccaacgugaagaaccucuacgagaaggucaagagccagcugaagaacaacgcgaaggagaucggcaacgggugcuucgaguucuaccacaagugcaacgacgagugcauggaguccgugaagaacggcaccuacgacuaccccaaguacagcgaggaguccaagcugaaccgcgagaagaucgacggggugaagcucgagagcaugggcgucuaccagauccuggccaucuacuccacgguggccagcagccuggugcuccuggucucccugggcgccaucagcuucuggaugugcuccaacgggagccuccagugccggaucugcaucuga

SEQ ID NO: 76944 - RNA, 1701 nt, Artificial Sequence
  derived and/or modified CDS sequence (opt1) from hemagglutinin__InfluenzaA__AJJ99786
augaaggccauccuggugguccuccuguacaccuucgccaccgcgaacgccgacacgcugugcaucggcuaccacgccaacaacagcaccgacaccguggacaccgugcucgagaagaacgucacggugacccacuccgugaaccugcuggaggacaagcacaacgggaagcucugcaagcugcgcggcgucgcgccccugcaccucgggaagugcaacaucgccggcuggauccuggggaacccggagugcgagagccuguccaccgccagcuccuggagcuacaucguggagaccuccagcuccgacaacggcacgugcuaccccggcgacuucaucgacuacgaggagcuccgggagcagcugagcuccgugagcuccuucgagcgcuucgagaucuuccccaagaccagcuccuggcccaaccacgacagcaacaagggggucaccgccgccugcccgcacgccggcgcgaaguccuucuacaagaaccugaucuggcucgugaagaaggggaacagcuaccccaagcuguccaagagcuacaucaacgacaagggcaaggaggugcugguccucugggggauccaccaccccagcaccuccgccgaccagcagagccuguaccagaacgccgacgccuacguguucgugggcacgucccgguacagcaagaaguucaagcccgagaucgccauccgcccgaagguccgggaccaggagggccgcaugaacuacuacuggacccugguggagcccggggacaagaucaccuucgaggcgaccggcaaccucguggucccccgguacgccuucgccauggagcgcgacgccggguccggcaucaucaucagcgacacgcccgugcacgacugcaacacgaccugccagaccccgaagggcgccaucaacaccucccugcccuuccagaacauccaccccaucaccaucgggaagugccccaaguacgucaagagcaccaagcugcggcucgcgaccggccugcgcaacaucccguccauccagagccgggggcuguucggcgccaucgccggguucaucgagggcggcuggacggggaugguggacggcugguacggguaccaccaccagaacgagcagggcuccggguacgccgccgaccucaagagcacccagaacgcgaucgacgagaucaccaacaaggugaacuccgugaucgagaagaugaacacccaguucacggccgucggcaaggaguucaaccaccuggagaagcgcaucgagaaccugaacaagaagaucgacgacggcuuccucgacaucuggaccuacaacgccgagcugcuggugcuccuggagaacgagcggacccuggacuaccacgacagcaacgucaagaaccucuacgagaaggugcgcucccagcugaagaacaacgccaaggagaucgggaacggcugcuucgaguucuaccacaagugcgacaacacgugcauggagagcgugaagaacgggaccuacgacuaccccaaguacuccgaggaggccaagcugaaccgggaggagaucgacggcgucaagcucgagagcacccgcaucuaccagauccuggcgaucuacuccgccguggccagcagccuggugcucgucgugucccugggggccaucagcuucuggaugugcuccaacggcagccugcagugccggaucugcaucuga

SEQ ID NO: 76945 - RNA, 1698 nt, Artificial Sequence
  derived and/or modified CDS sequence (opt1) from hemagglutinin__InfluenzaA__AJJ99798
augaaggugaagcugcucguccugcugugcaccuucaccgccacguacgccgacaccaucugcaucggcuaccacgcgaacaacagcaccgacaccguggacacggugcucgagaagaacgucaccgugacccacuccgugaaccugcuggagaacagccacaacgggaagcucugccugcugaagggcaucgcgccccuccagcuggggaacugcuccgucgccggcuggauccuggggaacccggagugcgagcuccugaucagcaaggaguccuggagcuacaucguggagcgccccaaccccgagaacgggaccugcuaccccggccacuucgccgacuacgaggagcugcgggagcagcucuccagcguguccagcuucgagcgcuucgagaucuucccgaaggaguccagcuggcccaaccacacggucaccgggguguccgccagcugcucccacaacggcgagaacagcuucuaccggaaccugcuguggcucaccgggaagaacggccuguaccccaaccuguccaagagcuacgccaacaacaaggagaaggaggugcucguccuguggggcgugcaccacccgcccaacaucgccaaccagaagacccuguaccacacggagaacgccuacguguccgucgugagcagccacuacucccgcaaguucacccccgagaucgccaagcggcccaaggugcgcgaccaggagggccggaucaacuacuacuggacccuccuggagcccggcgacaccaucauguucgaggcgaacgggaaccugaucgccccgcgcuacgccuucgcccucagccggggcuucggguccggcaucaucaacagcaacgcccccauggacaagugcgacgcgaagugccagacgccccagggcgccaucaacuccagccugcccuuccagaacguccacccggugaccaucggggagugccccaaguacgugcgcuccgccaagcugcggauggucaccggccuccgcaacauccccagcauccagucccgggggcuguucggcgccaucgccggguucaucgagggcggcuggaccgggaugguggacggcugguacggguaccaccaccagaacgagcagggcagcggguacgcggccgaccagaaguccacgcagaacgccaucaacggcaucaccaacaaggugaacagcgucaucgagaagaugaacacccaguucaccgccgugggcaaggaguucaacaagcuggagcgccggauggagaaccucaacaagaaggucgacgacggguucaucgacaucuggacguacaacgccgagcugcuggugcuccuggagaacgagcgcacccuggacuuccacgacuccaacgugaagaaccucuacgagaaggucaagagccagcugaagaacaacgcgaaggagaucggcaacgggugcuucgaguucuaccacaagugcaacgacgagugcauggaguccgugaagaacggcaccuacgacuaccccaaguacagcgaggaguccaagcugaaccgggagaagaucgacggggugaagcucgagagcaugggcgucuaccagauccuggccaucuacuccaccguggccagcagccuggugcuccuggucucccugggcgccaucagcuucuggaugugcuccaacgggagccuccagugccgcaucugcaucuga

SEQ ID NO: 76946 - RNA, 1698 nt, Artificial Sequence; identical to SEQ ID NO: 66512
  derived and/or modified CDS sequence (opt1) from hemagglutinin__InfluenzaA__AJJ99810

SEQ ID NO: 76947 - RNA, 1698 nt, Artificial Sequence
  derived and/or modified CDS sequence (opt1) from hemagglutinin__InfluenzaA__AJJ99822
augaaggugaagcugcucguccugcugugcaccuucaccgccacguacgccgacaccaucugcaucggcuaccacgcgaacaacagcaccgacaccguggacacggugcucgagaagaacgucaccgugacccacuccgugaaccugcuggagaacagccacaacgggaagcucugccugcugaagggcaucgcgccccuccagcuggggaacugcuccgucgccggcuggauccuggggaacccggagugcgagcuccugaucagcaaggaguccuggagcuacaucguggagaagcccaaccccgagaacgggaccugcuaccccggccacuucgccgacuacgaggagcugcgcgagcagcucuccagcguguccagcuucgagcgguucgagaucuucccgaaggaguccagcuggcccaaccacacggucaccgggguguccgccagcugcucccacaacggcgagagcuccuucuaccgcaaccugcuguggcucaccgggaagaacggccuguaccccaaccugagcaaguccuacgccaacaacaaggagaaggaggugcucguccuguggggcgugcaccacccgcccaacaucggcgaccagaaggcccuguaccacaccgagaacgccuacgugagcgucgugagcucccacuacagccggaaguucacgcccgagaucgccaagcgccccaaggugcgggaccaggagggccgcaucaacuacuacuggacccuccuggagcccggggacaccaucaucuucgaggcgaacggcaaccugaucgccccgcgguacgccuucgcccucucccgcggguucggcagcggcaucaucaacuccaacgcccccauggacaagugcgacgcgaagugccagacgccccagggggccaucaacagcucccugcccuuccagaacguccacccggugaccaucggcgagugccccaaguacgugcggagcgccaagcugcgcauggucaccgggcuccggaacauccccuucauccagucccgcggccuguucggggccaucgccggcuucaucgagggcggguggaccggcaugguggacgggugguacggcuaccaccaccagaacgagcaggggagcggcuacgcggccgaccagaaguccacccagaacgccaucaacggcaucacgaacaaggugaacagcgucaucgagaagaugaacacccaguucaccgccguggggaaggaguucaacaagcuggagcggcgcauggagaaccucaacaagaaggucgacgacggcuucaucgacaucuggaccuacaacgccgagcugcuggugcuccuggagaacgagcggacgcuggacuuccacgacuccaacgugaagaaccucuacgagaaggucaagagccagcugaagaacaacgcgaaggagaucgggaacggcugcuucgaguucuaccacaagugcaacgacgagugcauggaguccgugaagaacgggaccuacgacuaccccaaguacagcgaggaguccaagcugaaccgcgagaagaucgacggcgugaagcucgagagcaugggcgucuaccagauccuggccaucuacuccaccguggccagcagccuggugcuccuggucucccugggggccaucagcuucuggaugugcuccaacggcagccuccagugccggaucugcaucuga

SEQ ID NO: 76948 - RNA, 1701 nt, Artificial Sequence
  derived and/or modified CDS sequence (opt1) from hemagglutinin__InfluenzaA__AJJ99833
augaaggccauccugcucgugcugcuguacaccuucgccaccgcgaacgccgacacgcucugcaucggcuaccacgccaacaacagcaccgacaccgucgacaccgugcuggagaagaacgugacggucacccacuccgugaaccugcucgaggacaagcacaacgggaagcugugcaagcugcgcggcguggcgccccuccaccuggggaagugcaacaucgccggcuggauccuggggaacccggagugcgagagccucuccaccgccagcuccuggagcuacaucgucgagaccuccagcuccgacaacggcacgugcuaccccggcgacuucaucaacuacgaggagcugcgggagcagcugagcuccgugagcuccuucgagcgcuucgagaucuuccccaagaccagcuccuggcccaaccacgacagcaacaagggggugaccgccgccugcccgcgggccggcgcgaaguccuucuacaagaaccucaucuggcuggucaagaaggggaacagcuaccugaagcucuccaagagcuacaucaacgacaagggcaaggaggugcuggugcugugggggauccaccaccccagcaccacggccgaccagcagucccucuaccagaacgccgacgccuacgucuucgugggcaccagccgcuacuccaagaaguucaagcccgagaucgccauccggcccaaggugcgcgaccaggagggccggaugaacuacuacuggacccuggucgagccgggggacaagaucaccuucgaggcgacgggcaaccugcucgugccccgcuacgccuucgccauggagcggaacgccgggagcggcaucaucaucuccgacacccccgugcacgacugcaacacgaccugccagacccccaagggcgccaucaacaccagccugccguuccagaacauccaccccaucaccaucgggaagugccccaaguacgucaaguccaccaagcugcgccucgcgacgggccugcggaacgugcccagcauccagucccgcgggcuguucggcgccaucgccggguucaucgagggcggcuggaccgggaugguggacggcugguacggguaccaccaccagaacgagcagggcagcggguacgccgccgaccucaaguccacccagaacgcgaucgacaagaucaccaacaaggucaacagcgugaucgagaagaugaacacgcaguucaccgccgugggcaaggaguucaaccaccuggagaagcggaucgagaaccugaacaagaaggucgacgacggcuuccucgacaucuggaccuacaacgccgagcugcuggugcuccuggagaacgagcgcacccuggacuaccacgacuccaacgucaagaaccucuacgagaaggugcggaaccagcugaagaacaacgccaaggagaucgggaacggcugcuucgaguucuaccacaagugcgacaacacgugcauggagagcgugaagaacgggaccuacgacuacccgaaguacuccgaggaggccaagcugaaccgcgaggagaucgacggcgucaagcucgagagcacccggaucuaccagauccuggcgaucuacuccaccguggccagcucccuggugcucgucgugagccugggggccaucagcuucuggaugugcuccaacggcagccugcagugccgcaucugcaucuga

SEQ ID NO: 76949 - RNA, 1701 nt, Artificial Sequence; identical to SEQ ID NO: 70848
  derived and/or modified CDS sequence (opt1) from hemagglutinin__InfluenzaA__AJJ99844

SEQ ID NO: 76950 - RNA, 1701 nt, Artificial Sequence
  derived and/or modified CDS sequence (opt1) from hemagglutinin__InfluenzaA__AJJ99855
augaaggccauccuggugguccuccuguacaccuucgccaccgcgaacgccgacacgcugugcaucggcuaccacgccaacaacagcaccgacaccguggacaccgugcucgagaagaacgucacggugacccacuccgugaaccugcuggaggacaagcacaacgggaagcucugcaagcugcgcggcgucgcgccccugcaccucgggaagugcaacaucgccggcuggauccuggggaacccggagugcgagagccuguccaccgccagcuccuggagcuacaucguggagaccuccagcuccgacaacggcacgugcuaccccggcgacuucaucgacuacgaggagcuccgggagcagcugagcuccgugagcuccuucgagcgcuucgagaucuuccccaagaccagcuccuggcccaaccacgacagcaacaagggggucaccgccgccugcccgcacgccggcgcgaaguccuucuacaagaaccugaucuggcucgugaagaaggggaacagcuaccccaagcuguccaagagcuacaucaacgacaagggcaaggaggugcugguccucugggggauccaccaccccagcaccacggccgaccagcagucccuguaccagaacgccgacaccuacguguucgugggcaccagccgguacuccaagaaguucaagcccgagaucgccauccgcccgaagguccgggaccaggagggccgcaugaacuacuacuggacccugguggagcccggggacaagaucacguucgaggccaccggcaaccucguggucccccgguacgcguucgccauggagcgcaacgccgggagcggcaucaucaucuccgacacccccgugcacgacugcaacaccacgugccagaccccgaagggcgccaucaacaccagccugcccuuccagaacauccaccccaucaccaucgggaagugccccaaguacgugaaguccacgaagcugcggcucgccaccggccugcgcaacgucccgagcauccagucccgggggcuguucggcgcgaucgccggguucaucgagggcggcuggaccgggaugguggacggcugguacggguaccaccaccagaacgagcagggcagcggguacgccgccgaccucaaguccacccagaacgccaucgacaagaucacgaacaaggugaacagcgucaucgagaagaugaacacccaguucaccgcggugggcaaggaguucaaccaccuggagaagcgcaucgagaaccugaacaagaaggucgacgacggcuuccucgacaucuggaccuacaacgccgagcugcuggugcuccuggagaacgagcggacgcuggacuaccacgacuccaacgugaagaaccucuacgagaagguccgcaaccagcugaagaacaacgccaaggagaucgggaacggcugcuucgaguucuaccacaagugcgacagcacgugcauggaguccgugaagaacgggaccuacgacuaccccaaguacagcgaggaggccaagcugaaccgggaggagaucgacggcgugaagcucgaguccacccgcaucuaccagauccuggccaucuacagcaccgucgcguccagccuggugcucguggucagccugggggccaucuccuucuggaugugcagcaacggcucccugcagugccggaucugcaucuga

SEQ ID NO: 76951 - RNA, 1701 nt, Artificial Sequence
  derived and/or modified CDS sequence (opt1) from hemagglutinin__InfluenzaA__AJJ99866
augaaggccauccuggugguccuccuguacaccuucgccaccgcgaacgccgacacgcugugcaucggcuaccacgccaacaacagcaccgacaccguggacaccgugcucgagaagaacgucacggugacccacuccgugaaccugcuggaggacaagcacaacgggaagcucugcaagcugaagggcgucgcgccccugcaccucgggaagugcaacaucgccggcuggauccuggggaacccggagugcgagagccuguccaccgccagcuccuggagcuacaucguggagaccuccagcuccgacaacggcacgugcuaccccggcgacuucaucgacuacgaggagcuccgcgagcagcugagcuccgugagcuccuucgagcgguucgagaucuuccccaagaccagcuccuggcccaaccacgacagcaacaagggggucaccgccgccugcccgcacgccggcgcgaaguccuucuacaagaaccugaucuggcucgugaagaaggggaacagcuaccccaagcuguccaagagcuacaucaacgacaagggcaaggaggugcugguccucugggggauccaccaccccagcaccuccgccgaccagcagagccuguaccagaacgccgacgccuacguguucgugggcacgucccgcuacagcaagaaguucaagcccgagaucgccauccggccgaagguccgcgaccaggagggccggaugaacuacuacuggacccugguggagcccggggacaagaucaccuucgaggcgaccggcaaccucguggucccccgcuacgccuucgccauggagcggaacgccggguccggcaucaucaucagcgacacgcccgugcacgacugcaacacgaccugccagaccccgaagggcgccaucaacaccucccugcccuuccagaacauccaccccaucaccaucgggaagugccccaaguacgucaagagcaccaagcugcgccucgcgaccggccugcggaacgugccguccauccagagccgcgggcuguucggcgccaucgccggguucaucgagggcggcuggacggggaugguggacggcugguacggguaccaccaccagaacgagcagggcuccggguacgccgccgaccucaagagcacccagaacgcgaucgacgagaucaccaacaaggugaacuccgucaucgagaagaugaacacccaguucacggccgugggcaaggaguucaaccaccuggagaagcggaucgagaaccugaacaagaaggucgacgacggcuuccucgacaucuggaccuacaacgccgagcugcuggugcuccuggagaacgagcgcacccuggacuaccacgacagcaacgugaagaaccucuacgagaagguccggucccagcugaagaacaacgccaaggagaucgggaacggcugcuucgaguucuaccacaagugcgacaacacgugcauggagagcgugaagaacgggaccuacgacuaccccaaguacuccgaggaggccaagcugaaccgcgaggagaucgacggcgugaagcucgagagcacccggaucuaccagauccuggcgaucuacuccaccgucgccagcagccuggugcucguggucucccugggggccaucagcuucuggaugugcuccaacggcagccugcagugccgcaucugcaucuga

SEQ ID NO: 76952 - RNA, 1701 nt, Artificial Sequence
  derived and/or modified CDS sequence (opt1) from hemagglutinin__InfluenzaA__AJJ99877
auggaggccauccuggugguccuccuguacaccuucgccaccgcgaacgccgacacgcugugcaucggcuaccacgccaacaacagcaccgacaccguggacaccgugcucgagaagaacgucacggugacccacuccgugaaccugcuggaggacaagcacaacgggaagcucugcaagcugcgcggcgucgcgccccugcaccucgggaagugcaacaucgccggcuggauccuggggaacccggagugcgagagccuguccaccgccagcuccuggagcuacaucguggagaccuccagcuccgacaacggcacgugcuaccccggcgacuucaucgacuacgaggagcuccgggagcagcugagcuccgugagcuccuucgagcgcuucgagaucuuccccaagaccagcuccuggcccaaccacgacagcaacaagggggucaccgccgccugcccgcacgccggcgcgaaguccuucuacaagaaccugaucuggcucgugaagaaggggaacagcuaccccaagcuguccaagagcuacaucaacgacaagggcaaggaggugcugguccucugggggauccaccaccccagcaccuccgccgaccagcagagccuguaccagaacgccgacgccuacguguucgugggcuccagccgguacuccaagaaguucaagcccgagaucgccauccgcccgaagguccgggaccaggagggccgcaugaacuacuacuggacgcugguggagcccggggacaagaucaccuucgaggcgaccggcaaccucguggucccccgguacgccuucgccauggagcgcaacgccgggagcggcaucaucaucuccgacacccccgugcacgacugcaacacgaccugccagaccccgaagggcgccaucaacaccagccugcccuuccacaacauccaccccaucacgaucgggaagugccccaaguacgugaaguccaccaagcugcggcucgcgaccggccugcgcaacgucccgagcauccagucccgggggcuguucggcgccaucgccggguucaucgagggcggcuggaccgggaugguggacggcugguacggguaccaccaccagaacgagcagggcagcggguacgccgccgaccucaaguccacgcagaacgcgaucgacgagaucaccaacaaggugaacagcgucaucgagaagaugaacacccaguucaccgccgugggcaaggaguucaaccaccuggagaagcgcaucgagaaccugaacaagaaggucgacgacggcuuccucgacaucuggacguacaacgccgagcugcuggugcuccuggagaacgagcggacccuggacuaccacgacuccaacgugcgcaaccucuacgagaagguccggagccagcugaagaacaacgccaaggagaucgggaacggcugcuucgaguucuaccacaagugcgacaacacgugcauggaguccgugaagaacgggaccuacgacuaccccaaguacagcgaggaggccaagcugaaccgcgaggagaucgacggcgugaagcucgaguccacccggaucuaccagauccuggcgaucuacagcaccgucgccagcucccuggugcucguggucagccugggggccaucuccuucuggaugugcagcaacggcucccugcagugccgcaucugcaucuga

SEQ ID NO: 76953 - RNA, 1701 nt, Artificial Sequence
  derived and/or modified CDS sequence (opt1) from hemagglutinin__InfluenzaA__AJJ99888
augaaggccauccuggugguccuccuguacaccuucgccaccgcgaacgccgacacgcugugcaucggcuaccacgccaacaacagcaccgacaccguggacaccgugcucgagaagaacgucacggugacccacuccgugaaccugcuggaggacaagcacaacgggaagcucugcaagcugcgcggcgucgcgccccugcaccucgggaagugcaacaucgccggcuggauccuggggaacccggagugcgagagccuguccaccgccagcuccuggagcuacaucguggagaccuccagcuccgacaacggcacgugcuaccccggcgacuucaucgacuacgaggagcuccgggagcagcugagcuccgugagcuccuucgagcgcuucgagaucuuccccaagaccagcuccuggcccaaccacgacagcaacaagggggucaccgccgccugcccgcacgccggcgcgaagggguucuacaagaaccugaucuggcucgugaagaagggcaacuccuaccccaagcugagcaaguccuacaucaacgacaaggggaaggaggugcugguccucuggggcauccaccaccccagcaccagcgccgaccagcagucccuguaccagaacgccgacgccuacguguucgugggcacgagccgguacuccaagaaguucaagcccgagaucgccauccgcccgaagguccgggaccaggaggggcgcaugaacuacuacuggacccugguggagcccggcgacaagaucaccuucgaggcgaccgggaaccucguggucccccgguacgccuucgccauggagcgcgacgccggcagcggcaucaucaucuccgacacgcccgugcacgacugcaacacgaccugccagaccccgaagggggccaucaacaccagccugcccuuccagaacauccaccccaucaccaucggcaagugccccaaguacgugaaguccaccaagcugcggcucgcgaccgggcugcgcaacgucccgagcauccagucccggggccuguucggggccaucgccggcuucaucgagggcggguggacgggcaugguggacgggugguacggcuaccaccaccagaacgagcaggggagcggcuacgccgccgaccucaaguccacccagaacgcgaucgacgagaucaccaacaaggugaacagcgucaucgagaagaugaacacccaguucacggccgugggcaaggaguucaaccaccuggagaagcgcaucgagaaccugaacaagaagaucgacgacggguuccucgacaucuggaccuacaacgccgagcugcugguccuccuggagaacgagcggacccuggacuaccacgacuccaacgugaagaaccucuacgagaaggugcgcagccagcugaagaacaacgccaaggagaucggcaacgggugcuucgaguucuaccacaagugcgacaacacgugcauggaguccgucaagaacggcaccuacgacuaccccaaguacagcgaggaggccaagcugaaccgggaggagaucgacggggugaagcucgaguccacccgcaucuaccagauccuggcgaucuacagcaccguggccuccagccugguccucguggugagccugggcgccaucuccuucuggaugugcagcaacggcucccugcagugccggaucugcaucuga

SEQ ID NO: 76954 - RNA, 1701 nt, Artificial Sequence
  derived and/or modified CDS sequence (opt1) from hemagglutinin__InfluenzaA__AJJ99899
augaaggccauccuggugguccuccuguacaccuucgccaccgcgaacgccgacacgcugugcaucggcuaccacgccaacaacagcaccgacaccguggacaccgugcucgagaagaacgucacggugacccacuccgugaaccugcuggaggacaagcacaacgggaagcucugcaagcugcgcggcgucgcgccccugcaccucgggaagugcaacaucgccggcuggauccuggggaacccggagugcgagagccuguccaccgccagcuccuggagcuacaucguggagaccuccagcuccgacaacggcacgugcuaccccggcgacuucaucaacuacgaggagcuccgggagcagcugagcuccgugagcuccuucgagcgcuucgagaucuuccccaagaccagcuccuggcccaaccacgacagcaacaagggggucaccgccgccugcccgcgggccggcgcgaaguccuucuacaagaaccugaucuggcucgugaagaaggggaacagcuaccccaaccuguccaagagcuacaucaacgacaagggcaaggaggugcugguccucugggggauccaccaccccagcaccacggccgaccagcagucccuguaccagaacgccgacgccuacguguucgugggcaccagccgcuacuccaagaaguucaagcccgagaucgccauccggccgaagguccgcgaccaggagggccggaugaacuacuacuggacccugcucgagcccggggacaagaucaccuucgaggcgacgggcaaccugcuggugccccgcuacgccuucgccauggagcggaacgccgggagcggcaucaucaucuccgacacccccgugcacgacugcaacacgaccugccagaccccgaagggcgccaucaacaccagccuccccuuccagaacauccaccccaucaccaucgggaagugccccaaguacgucaaguccaccaagcugcgccuggcgacgggccuccggaacgugccgagcauccagucccgcgggcuguucggcgccaucgccggguucaucgagggcggcuggaccgggaugguggacggcugguacggguaccaccaccagaacggccaggggagcggcuacgccgccgaccugaaguccacccagaacgcggucgacaagaucaccaacaaggugaacagcgugaucgagaagaugaacacgcaguucaccgccgucggcaaggaguucaaccaccucgagaagcggaucgagaaccugaacaagaagguggacgacggguuccuggacaucuggaccuacaacgccgagcuccugguccugcucgagaacgagcgcacccuggacuaccacgacuccaacgugaagaaccuguacgagaaggugcggaaccagcucaagaacaacgccaaggagaucggcaacgggugcuucgaguucuaccacaagugcgacaacacgugcauggagagcgucaagaacggcaccuacgacuaccccaaguacuccgaggaggccaagcugaaccgcgaggagaucgacggggugaagcuggagagcacccggaucuaccagauccucgcgaucuacuccaccguggccagcucccugguccugguggugagccucggcgccaucagcuucuggaugugcuccaacggcagccugcagugccgcaucugcaucuga

SEQ ID NO: 76955 - RNA, 1701 nt, Artificial Sequence
  derived and/or modified CDS sequence (opt1) from hemagglutinin__InfluenzaA__AJJ99910
augaaggccauccuggugguccuccuguacaccuucgccaccgcgaacgccgacacgcugugcaucggcuaccacgccaacaacagcaccgacaccguggacaccgugcucgagaagaacgucacggugacccacuccgugaaccugcuggaggacaagcacaacgggaagcucugcaagcugcgcggcgucgcgccccugcaccucgggaagugcaacaucgccggcuggauccuggggaacccggagugcgagagccuguccaccgccagcuccuggagcuacaucguggagaccuccagcuccgacaacggcacgugcuaccccggcgacuucaucgacuacgaggagcuccgggagcagcugagcuccgugagcuccuucgagcgcuucgagaucuuccccaagaccagcuccuggcccaaccacgacagcgacaagggggucaccgccgccugcccgcacgccggcgcgaaguccuucuacaagaaccugaucuggcucgugaagaaggggaacagcuaccccaagcuguccaagagcuacaucaacgacaagggcaaggaggugcugguccucugggggauccaccaccccagcaccacggccgaccagcagucccuguaccagaacgccgacaccuacguguucgugggcaccagccgguacuccaagaaguucaagcccgagaucgccauccgcccgaagguccgggaccaggagggccgcaugaacuacuacuggacccugguggagcccggggacaagaucacguucgaggccaccggcaaccucguggucccccgguacgcguucgccauggagcgcaacgccgggagcggcaucaucaucuccgacacccccgugcacgacugcaacaccacgugccagaccccgaagggcgccaucaacaccagccugcccuuccagaacauccaccccaucaccaucgggaagugccccaaguacgugaaguccacgaagcugcggcucgccaccggccugcgcaacgucccgagcauccagucccgggggcuguucggcgcgaucgccggguucaucgagggcggcuggaccgggaugguggacggcugguacggguaccaccaccagaacgagcagggcagcggguacgccgccgaccucaaguccacccagaacgccaucgacaagaucacgaacaaggugaacagcgucaucgagaagaugaacacccaguucaccgcggugggcaaggaguucaaccaccuggagaagcgcaucgagaaccugaacaagaaggucgacgacggcuuccucgacaucuggaccuacaacgccgagcugcuggugcuccuggagaacgagcggacgcuggacuaccacgacuccaacgugaagaaccucuacgagaagguccgcaaccagcugaagaacaacgccaaggagaccgggaacggcugcuucgaguucuaccacaagugcgacaacacgugcauggagagcgugaagaacgggaccuacgacuaccccaaguacuccgaggaggccaagcugaaccgggagaagaucgacggcgugaagcucgagagcacccgcaucuaccagauccuggccaucuacuccaccgucgcgagcucccuggugcucguggucagccugggggccaucagcuucuggaugugcuccaacggcagccugcagugccggaucugcaucuga

SEQ ID NO: 76956 - RNA, 1701 nt, Artificial Sequence; identical to SEQ ID NO: 70848
  derived and/or modified CDS sequence (opt1) from hemagglutinin__InfluenzaA__AJJ99921

SEQ ID NO: 76957 - RNA, 1701 nt, Artificial Sequence
  derived and/or modified CDS sequence (opt1) from hemagglutinin__InfluenzaA__AJJ99932
augaaggccauccuggugguccuccuguacaccuucgccaccgcgaacgccgacacgcugugcaucggcuaccacgccaacaacagcaccgacaccguggacaccgugcucgagaagaacgucacggugacccacuccgugaaccugcuggaggacaagcacaacgggaagcucugcaagcugcgcggcgucgcgccccugcaccucgggaagugcgacaucgccggcuggauccuggggaacccggagugcgagagccuguccaccgccagcuccuggagcuacaucguggagaccuccagcuccgacaacggcacgugcuaccccggcgacuucaucgacuacgaggagcuccgggagcagcugagcuccgugagcuccuucgagcgcuucgagaucuuccccaagaccagcuccuggcccaaccacgacagcaacaagggggucaccgccgccugcccgcacgccggcgcgaaguccuucuacaagaaccugaucuggcucgugaagaaggggaacagcuaccccaagcuguccaagagcuacaucaacgacaagggcaaggaggugcugguccucugggggauccaccaccccagcaccacggccgaccagcagucccuguaccagaacgccgacgccuacguguucgugggcaccagccgguacuccaagaaguucaagcccgagaucgccauccgcccgaagguccgggaccaggagggccgcaugaacuacuacuggacccugguggagcccggggacaagaucaccuucgaggcgacgggcaaccucguggucccccgguacgccuucgccauggagcgcaacgccgggagcggcaucaucaucuccgacacccccgugcacgacugcaacacgaccugccagaccccgaagggcgccaucaacaccagccugcccuuccagaacauccaccccaucaccaucgggaagugccccaaguacgugaaguccaccaagcugcggcucgcgacgggccugcgcaacgucccgagcauccagucccgggggcuguucggcgccaucgccggguucaucgagggcggcuggaccgggaugguggacggcugguacggguaccaccaccagaacgagcagggcagcggguacgccgccgaccucaaguccacccagaacgcgaucgacaagaucaccaacaaggugaacagcgucaucgagaagaugaacacgcaguucaccgccgugggcaaggaguucaaccaccuggagaagcgcaucgagaaccugaacaagaaggucgacgacggcuuccucgacaucuggaccuacaacgccgagcugcuggugcuccuggagaacgagcggacccuggacuaccacgacuccaacgugaagaaccucuacgagaagguccgcaaccagcugaagaacaacgccaaggagaucgggaacggcugcuucgaguucuaccacaagugcgacaacacgugcauggagagcgugaagaacgggaccuacgacuaccccaaguacuccgaggaggccaagcugaaccgggaggagaucgacggcgugaagcucgagagcacccgcaucuaccagauccuggcgaucuacuccaccgucgccagcucccuggugcucguggucagccugggggccaucagcuucuggaugugcuccaacggcagccugcagugccggaucugcaucuga

SEQ ID NO: 76958 - RNA, 1701 nt, Artificial Sequence; identical to SEQ ID NO: 70478
  derived and/or modified CDS sequence (opt1) from hemagglutinin__InfluenzaA__AJJ99943

SEQ ID NO: 76959 - RNA, 1701 nt, Artificial Sequence
  derived and/or modified CDS sequence (opt1) from hemagglutinin__InfluenzaA__AJJ99954
augaaggccauccuggugguccuccuguacaccuucgccaccgcgaacgccgacacgcugugcaucggcuaccacgccaacaacagcaccgacaccguggacaccgugcucgagaagaacgucacggugacccacuccgugaaccugcuggaggacaagcacaacgggaagcucugcaagcugcgcggcgucgcgccccugcaccucgggaagugcaacaucgccggcuggauccuggggaacccggagugcgagagccuguccaccgccagcuccuggagcuacaucguggagaccuccagcuccgacaacggcacgugcuaccccggcgacuucaucgacuacgaggagcuccgggagcagcugagcuccgugagcuccuucgagaaguucgagaucuuccccaagaccagcuccuggcccaaccacgacagcaacaagggggucaccgccgccugcccgcacgccggcgcgaaguccuucuacaagaaccugaucuggcucgugaagaaggggaacagcuaccccaagcuguccaagagcuacaucaacgacaagggcaaggaggugcugguccucugggggauccaccaccccagcaccuccgccgaccagcagagccuguaccagaacgccgacgccuacguguucgugggcacgucccgcuacagcaagaaguucaagcccgagaucgccauccggccgaagguccgcgaccaggagggccggaugaacuacuacuggacccugguggagcccggggacaagaucaccuucgaggcgaccggcaaccucguggucccccgcuacgccuucgccauggagcggaacgccggguccggcaucaucacgagcgacacccccgugcacgacugcaacacgaccugccagaccccgaagggcgccaucaacaccucccugcccuuccagaacauccaccccaucaccaucgggaacugccccaaguacgucaagagcaccaagcugcgccucgcgacgggccugcggaacgugccguccauccagagccgcgggcuguucggcgccaucgccggguucaucgagggcggcuggaccgggaugguggacggcugguacggguaccaccaccagaacgagcagggcuccggguacgccgccgaccucaagagcacccagaacgcgaucgacaagaucaccaacaaggugaacuccgucaucgagaagaugaacacgcaguucaccgccgugggcaaggaguucaaccaccuggagaagcggaucgagaaccugaacaagaaggucgacgacggcuuccucgacaucuggaccuacaacgccgagcugcuggugcuccuggagaacgagcgcacccuggacuaccacgacagcaacgugaagaaccucuacgagaagguccggucccagcugaagaacaacgccaaggagaucgggaacggcugcuucgaguucuaccacaagugcgacaacacgugcauggagagcgugaagaacgggaccuacgacuaccccaaguacuccgaggaggccaagcugaaccgcgaggagaucgacggcgugaagcucgagagcacccggaucuaccagauccuggcgaucuacuccaccgucgccagcagccuggugcucguggucucccugggggccaucagcuucuggaugugcuccaacggcagccugcagugccgcaucugcaucuga

SEQ ID NO: 76960 - RNA, 1701 nt, Artificial Sequence; identical to SEQ ID NO: 66935
  derived and/or modified CDS sequence (opt1) from hemagglutinin__InfluenzaA__AJJ99965

SEQ ID NO: 76961 - RNA, 1698 nt, Artificial Sequence
  derived and/or modified CDS sequence (opt1) from hemagglutinin__InfluenzaA__AJJ99989
augaaggugaagcugcucguccugcugugcaccuucaccgccacguacgccgacaccaucugcaucggcuaccacgcgaacaacagcaccgacaccguggacacggugcucgagcgcaacgucaccgugacccacuccgugaaccugcuggagaacagccacaacgggaagcucugccugcugaagggcaucgcgccccuccagcuggggaacugcuccgucgccggcuggauccuggggaacccggagugcgagcuccugaucagcaaggaguccuggagcuacaucguggagaagcccaaccccgagaacgggaccugcuaccccggccacuucgccgacuacgaggagcugcgggagcagcucuccagcguguccagcuucgagcgcuucgagaucuucccgaaggaguccagcuggcccaaccacacggucaccgggguguccgccagcugcucccacaacggcgagagcuccuucuaccggaaccugcuguggcucaccgggaagaacggccuguaccccaaccugagcaaguccuacgccaacaacaaggagaaggaggugcucguccuguggggcgugcaccacccgcccaacaucggcgaccagaaggcccuguaccacaccgagaacgccuacgugagcgucgugagcucccacuacagcaagaaguucacgcccgagaucgccaagcgccccaaggugcgggaccaggagggccgcaucaacuacuacuggacccuccuggagcccggggacaccaucaucuucgaggcgaacggcaaccugaucgccccgcgguacgccuucgcccucucccgcggguucggcagcggcaucaucaacuccaacgcccccauggacaagugcgacgcgaagugccagacgccccagggggccaucaacagcucccugcccuuccagaacguccacccggugaccaucggcgagugccccaaguacgugcggagcgccaagcugcgcauggucaccgggcuccggaacauccccuccauccagagccgcggccuguucggggccaucgccggcuucaucgagggcggguggaccggcaugguggacgggugguacggcuaccaccaccagaacgagcagggguccggcuacgcggccgaccagcggagcacccagaacgccaucaacggcaucacgaacaaggugaacuccgucaucgagaagaugaacacccaguucaccgccguggggaaggaguucaacaagcuggagcgccggauggagaaccucaacaagaaggucgacgacggcuucaucgacaucuggaccuacaacgccgagcugcuggugcuccuggagaacgagcgcacgcuggacuuccacgacagcaacgugaagaaccucuacgagaaggucaagucccagcugaagaacaacgcgaaggagaucgggaacggcugcuucgaguucuaccacaagugcaacgacgagugcauggagagcgugaagaacgggaccuacgacuaccccaaguacuccgaggagagcaagcugaaccgggagaagaucgacggcgugaagcucgaguccaugggcgucuaccagauccuggccaucuacagcaccguggccagcucccuggugcuccuggucagccugggggccaucuccuucuggaugugcagcaacggcucccuccagugccgcaucugcaucuga

SEQ ID NO: 76962 - RNA, 1701 nt, Artificial Sequence
  derived and/or modified CDS sequence (opt1) from hemagglutinin__InfluenzaA__AJK00001
augaaggccauccuggugguccuccuguacaccuucgccaccgcgaacgccgacacgcugugcaucggcuaccacgccaacaacagcaccgacaccguggacaccgugcucgagaagaacgucacggugacccacuccgugaaccugcuggaggacaagcacaacgggaagcucugcaagcugcgcggcgucgcgccccugcaccucgggaagugcaacaucgccggcuggauccuggggaacccggagugcgagagccuguccaccgccagcuccuggagcuacaucguggagaccuccagcuccgacaacggcacgugcuaccccggcgacuucaucaacuacgaggagcuccgggagcagcugagcuccgugagcuccuucgagcgcuucgagaucuuccccaagaccagcuccuggcccaaccacgacagcaacaagggggucaccgccgccugcccgcgggccggcgagaaguccuucuacaagaaccugaucuggcucgugaagaaggggaacagcuaccccaagcuguccaagagcuacaucaacgacaagggcaaggaggugcugguccucugggggauccaccaccccagcaccacggcggaccagcagucccuguaccagaacgccgacgccuacguguucgugggcaccagccgcuacuccaagaaguucaagcccgagaucgccauccggccgaagguccgcgaccaggagggccggaugaacuacuacuggacccugguggagcccggggacaagaucaccuucgaggccacgggcaaccuccuggugccccgcuacgcguucgccauggagcggaacgccgggagcggcaucaucaucuccgacacccccguccacgacugcaacacgaccugccagaccccgaagggcgccaucaacaccagccugcccuuccagaacauccaccccaucaccaucgggaagugccccaaguacgugaaguccaccaagcuccgccuggccacgggccugcggaacgugccgagcauccagucccgcggccucuucggggcgaucgccggguucaucgagggcggcuggaccgggauggucgacggcugguacggguaccaccaccagaacgagcagggcagcggguacgccgccgaccugaaguccacccagaacgccaucgacaagaucaccaacaaggugaacagcgugaucgagaagaugaacacgcaguucaccgcggucggcaaggaguucaaccaccuggagaagcggaucgagaaccucaacaagaagguggacgacggcuuccuggacaucuggaccuacaacgccgagcugcucguccugcuggagaacgagcgcacccucgacuaccacgacuccaacgugaagaaccuguacgagaaggugcggaaccagcugaagaacaacgccaaggagaucgggaacggcugcuucgaguucuaccacaagugcgacaacacgugcauggagagcgucaagaacgggaccuacgacuaccccaaguacuccgaggaggccaagcucaaccgcgagaagaucgacggcgugaagcuggagagcacccggaucuaccagauccuggccaucuacuccaccguggcgagcucccucguccugguggugagccugggggccaucagcuucuggaugugcuccaacggcagccuccagugccgcaucugcaucuga

SEQ ID NO: 76963 - RNA, 1701 nt, Artificial Sequence
  derived and/or modified CDS sequence (opt1) from hemagglutinin__InfluenzaA__AJK00012
augaaggccauccuggugguccuccugugcaccuucgccaccgcgaacgccgacacgcugugcaucggcuaccacgccaacaacagcaccgacaccguggacaccgugcucgagaagaacgucacggugacccacuccgugaaccugcuggaggacaagcacaacgggaagcucugcaagcugcgcggcgucgcgccccugcaccucgggaagugcaacaucgccggcuggauccuggggaacccggagugcgagagccuguccaccgccagcuccuggagcuacaucguggagaccuccagcuccgacaacggcacgugcuaccccggcgacuucaucgacuacgaggagcuccgggagcagcugagcuccgugagcuccuucgagcgcuucgagaucuuccccaagaccagcuccuggcccaaccacgacagcaacaagggggucaccgccgccugcccgcacgccggcgcgaagggguucuacaagaaccugaucuggcucgugaagaagggcaacuccuaccccaagcugagcaaguccuacaucaacgacaaggggaaggaggugcugguccucuggggcauccaccaccccagcaccacggccgaccagcagagccuguaccagaacgccgacaccuacguguucgugggcaccucccgguacagcaagaaguucaagcccgagaucgccauccgcccgaagguccgggaccaggaggggcgcaugaacuacuacuggacccugguggagcccggcgacaagaucacguucgaggccaccgggaaccucguggucccccgguacgcguucgccauggagcgcaacgccggcuccggcaucaucaucagcgacaccaccgugcacgacugcaacacgaccugccagacccccaagggggccaucaacaccucccugccguuccagaacauccaccccaucacgaucggcaagugccccaaguacgucaagagcaccaagcugcggcucgccaccgggcugcgcaacgugcccuccauccagagccggggccuguucggggcgaucgccggcuucaucgagggcggguggaccggcaugguggacgggugguacggcuaccaccaccagaacgagcagggguccggcuacgccgccgaccucaagagcacgcagaacgccaucgacaagaucaccaacaaggugaacuccgucaucgagaagaugaacacccaguucaccgcggugggcaaggaguucaaccaccuggagaagcgcaucgagaaccugaacaagaaggucgacgacggguuccucgacaucuggacguacaacgccgagcugcuggugcuccuggagaacgagcggacccuggacuaccacgacagcaacgugaagaaccucuacgagaagguccgcaaccagcugaagaacaacgccaaggagaucggcgacgggugcuucgaguucuaccacaagugcgacaacacgugcauggaguccgugaagaacggcaccuacgacuacccgaaguacagcgaggaggccaagcugaaccgggagaagaucgacggggugaagcucgaguccacccgcaucuaccagauccuggccaucuacagcaccgucgcguccagccuggugcucguggucucccugggcgccaucagcuucuggaugugcagcaacggcucccugcagugccggaucugcaucuga

SEQ ID NO: 76964 - RNA, 1701 nt, Artificial Sequence
  derived and/or modified CDS sequence (opt1) from hemagglutinin__InfluenzaA__AJK00023
augaaggccauccuggugguccuccuguacaccuucgccaccgcgaacgccgacacgcugugcaucggcuaccacgccaacaacagcaccgacaccguggacaccgugcucgagaagaacgucacggugacccacuccgugaaccugcuggaggacaagcacaacgggaagcucugcaagcugcgcggcgucgcgccccugcaccucgggaagugcaacaucgccggcuggauccuggggaacccggagugcgagagccuguccaccgccagcuccuggagcuacaucguggagaccuccagcuccgacaacggcacgugcuaccccggcgacuucaucaacuacgaggagcuccgggagcagcugagcuccgugagcuccuucgagcgcuucgagaucuuccccaagaccagcuccuggcccaaccacgacagcaacaagggggucaccgccgccugcccgcgggccggcgcgaaguccuucuacaagaaccugaucuggcucgugaagaaggggaacagcuaccccaagcuguccaagagcuacaucaacgacaagggcaaggaggugcugguccucugggggauccaccaccccagcaccacggccgaccagcagucccuguaccagaacgccgacgccuacguguucgugggcaccagccgcuacuccaagaaguucaagcccgagaucgccauccggccgaagguccgcgaccaggagggccggaugaacuacuacuggacccugguggagcccggggacaagaucaccuucgaggcgacgggcaaccuccuggugccccgcuacgccuucgccauggagcggaacgccgggagcggcaucaucaucuccgacacccccguccacgacugcaacacgaccugccagaccccgaagggcgccaucaacaccagccugcccuuccagaacauccaccccaucaccaucgggaagugccccaaguacgugaaguccaccaagcuccgccuggcgacgggccugcggaacgugccgagcauccagucccgcggccucuucggggccaucgccggguucaucgagggcggcuggaccgggauggucgacggcugguacggguaccaccaccagaacgagcagggcagcggguacgccgccgaccugaaguccacccagaacgcgaucgacaagaucaccaacaaggugaacagcgugaucgagaagaugaacacgcaguucaccgccgucggcaaggaguucaaccaccuggagaagcggaucgagaaccucaacaagaagguggacgacggcuuccuggacaucuggaccuacaacgccgagcugcucguccugcuggagaacgagcgcacccucgacuaccacgacuccaacgugaagaaccuguacgagaaggugcggaaccagcugaagaacaacgccaaggagaucgggaacggcugcuucgaguucuaccacaagugcgacaacacgugcauggagagcgucaagaacgggaccuacgacuaccccaaguacuccgaggaggccaagcucaaccgcgaggagaucgacggcgugaagcuggagagcacccggaucuaccagauccuggcgaucuacuccaccguggccagcucccucguccugguggugagccugggggccaucagcuucuggaugugcuccaacggcagccuccagugccgcaucugcaucuga

SEQ ID NO: 76965 - RNA, 1701 nt, Artificial Sequence; identical to SEQ ID NO: 70848
  derived and/or modified CDS sequence (opt1) from hemagglutinin__InfluenzaA__AJK00034

SEQ ID NO: 76966 - RNA, 1701 nt, Artificial Sequence; identical to SEQ ID NO: 71066
  derived and/or modified CDS sequence (opt1) from hemagglutinin__InfluenzaA__AJK00045

SEQ ID NO: 76967 - RNA, 1701 nt, Artificial Sequence; identical to SEQ ID NO: 71066
  derived and/or modified CDS sequence (opt1) from hemagglutinin__InfluenzaA__AJK00056

SEQ ID NO: 76968 - RNA, 1701 nt, Artificial Sequence; identical to SEQ ID NO: 66935
  derived and/or modified CDS sequence (opt1) from hemagglutinin__InfluenzaA__AJK00067

SEQ ID NO: 76969 - RNA, 1698 nt, Artificial Sequence
  derived and/or modified CDS sequence (opt1) from hemagglutinin__InfluenzaA__AJK00079
augaaggugaagcugcucguccugcugugcaccuucaccgccacguacgccgacaccaucugcaucggcuaccacgcgaacaacagcaccgacaccguggacacggugcucgagaagaacgucaccgugacccacuccgugaaccugcuggagaacagccacaacgggaagcucugccugcugaagggcaucgcgccccuccagcuggggaacugcuccgucgccggcuggauccuggggaacccggagugcgagcuccugaucagcaaggaguccuggagcuacaucguggagaagcccaaccccgagaacgggaccugcuaccccggccacuucgccgacuacgaggagcugcgcgagcagcucuccagcguguccagcuucgagcgguucgagaucuucccgaaggaguccagcuggcccaaccacacggucaccgggguguccgccagcugcucccacaacggcgagaacagcuucuaccgcaaccugcuguggcucacccggaagaacgggcuguaccccaaccuguccaagagcuacgccaacaacaaggagaaggaggugcucguccuguggggcgugcaccacccgcccaacaucgccgaccagaagacccuguaccacacggagaacgccuacguguccgucgugagcagccacuacucccgcaaguucacccccgagaucgccaagcggcccaaggugcgcgaccaggaggggcggaucaacuacuacuggacccuccuggagcccggcgacaccaucaucuucgaggcgaacggcaaccugaucgccccgcgcuacgccuucgcccucagccggggguucggcuccgggaucaucaacagcaacgcccccauggacaagugcgacgcgaagugccagacgccccagggcgccaucaacuccagccugcccuuccagaacguccacccggugaccaucggcgagugccccaaguacgugcgcuccgccaagcugcggauggucaccgggcuccgcaacauccccagcauccagucccggggccuguucggggccaucgccggcuucaucgagggcggcuggaccggcaugguggacgggugguacggcuaccaccaccagaacgagcaggggagcggcuacgcggccgaccagaaguccacgcagaacgccaucaacgggaucaccaacaaggugaacagcgucaucgagaagaugaacacccaguucaccgccgugggcaaggaguucaacaagcuggagcgccggauggagaaccucaacaagaaggucgacgacggcuucaucgacaucuggacguacaacgccgagcugcuggugcuccuggagaacgagcgcacccuggacuuccacgacuccaacgugaagaaccucuacgagaaggucaagagccagcugaagaacaacgcgaaggagaucgggaacggcugcuucgaguucuaccacaagugcaacgacgagugcauggaguccgugaagaacgggaccuacgacuaccccaaguacagcgaggaguccaagcugaaccgggagaagaucgacggcgugaagcucgagagcaugggggucuaccagauccuggccaucuacuccaccguggccagcagccuggugcuccuggucucccugggcgccaucagcuucuggaugugcuccaacggcagccuccagugccgcaucugcaucuga

SEQ ID NO: 76970 - RNA, 1698 nt, Artificial Sequence
  derived and/or modified CDS sequence (opt1) from hemagglutinin__InfluenzaA__AJK00091
augaaggugaagcugcucguccugcugugcaccuucaccgccacguacgccgacaccaucugcaucggcuaccacgcgaacaacagcaccgacaccguggacacggugcucgagaagaacgucaccgugacccacuccgugaaccugcuggagaacagccacaacgggaagcucugccugcugaagggcaucgcgccccuccagcuggggaacugcuccgucgccggcuggauccuggggaacccggagugcgagcuccugaucagcaaggaguccuggagcuacaucguggagaagcccaaccccgagaacgggaccugcuaccccggccacuucgccgacuacgaggagcugcgcgagcagcucuccagcguguccagcuucgagcgguucgagaucuucccgaaggaguccagcuggcccaaccacacgaucaccggggucuccgccagcugcucccacaacggcgagagcuccuucuaccgcaaccugcuguggcucaccgggaagaacggccuguaccccaaccugagcaaguccuacgccaacaacaaggagaaggaggugcucgugcuguggggcguccaccacccgcccaacaucggcgugcagaaggcccuguaccacaccgagaacgccuacgugagcgucgugagcucccacuacagccggaaguucacgcccgagaucgccaagcgccccaaggugcgggaccaggagggccgcaucaacuacuacuggacccuccuggagcccggggacaccaucaucuucgaggcgaacggcaaccugaucgccccgcgguacgccuucgcccucucccgcggguucggcagcggcaucaucaacuccaacgcccccauggacaagugcgacgcgaagugccagacgccccagggggccaucaacagcucccugcccuuccagaacguccacccggugaccaucggcgagugccccaaguacgugcggagcgccaagcugcgcauggucaccgggcuccggaacauccccuccauccagagccgcggccuguucggggccaucgccggcuucaucgagggcggguggaccggcaugguggacgggugguacggcuaccaccaccagaacgagcagggguccggcuacgcggccgaccagaaguccacccagaacgccaucaacggcaucacgaacaaggugaacagcgucaucgagaagaugaacacccaguucaccgccguggggaaggaguucaacaagcuggagcggcgcauggagaaccucaacaagaaggucgacgacggcuucaucgacaucuggaccuacaacgccgagcugcuggugcuccuggagaacgagcggacgcuggacuuccacgacagcaacgugaagaaccucuacgagaaggucaagucccagcugaagaacaacgcgaaggagaucgggaacggcugcuucgaguucuaccacaagugcaacgacgagugcauggagagcgugaagaacgggaccuacgacuaccccaaguacuccgaggagagcaagcugaaccgcgagaagaucgacggcgugaagcucgaguccaugggcgucuaccagauccuggccaucuacagcaccguggccagcucccuggugcuccuggucagccugggggccguguccuucuggaugugcagcaacggcucccuccagugccgggugugcaucuga

SEQ ID NO: 76971 - RNA, 1698 nt, Artificial Sequence; identical to SEQ ID NO: 66512
  derived and/or modified CDS sequence (opt1) from hemagglutinin__InfluenzaA__AJK00103

SEQ ID NO: 76972 - RNA, 1701 nt, Artificial Sequence; identical to SEQ ID NO: 70944
  derived and/or modified CDS sequence (opt1) from hemagglutinin__InfluenzaA__AJK00114

SEQ ID NO: 76973 - RNA, 1701 nt, Artificial Sequence
  derived and/or modified CDS sequence (opt1) from hemagglutinin__InfluenzaA__AJK00125
augaaggccauccuggugguccuccuguacaccuucgccaccgcgaacgccgacacgcugugcaucggcuaccacgccaacaacagcaccgacaccguggacaccgugcucgagaagaacgucacggugacccacuccgugaaccugcuggaggacaagcacaacgggaagcucugcaagcugcgcgaggucgcgccccugcaccucggcaagugcaacaucgccggguggauccugggcaacccggagugcgagagccuguccaccgcgagcuccuggagcuacaucguggagaccuccagcuccgacaacgggacgugcuaccccggcgacuucaucgacuacgaggagcuccgggagcagcugagcuccgugagcuccuucgagcgcuucgagaucuuccccaagaccaacagcuggcccaaccacgacuccaacaagggcgucaccgccgccugcccgcacgccggggccaagagcuucuacaagaaccugaucuggcucgugaagaagggcaacuccuaccccaagcugagcaaguccuacaucaacgacaaggggaaggaggugcugguccucuggggcauccaccaccccagcaccagcgccgaccagcagucccuguaccagaacgccgacgccuacguguucguggggacgagccgguacuccaagaaguucaagcccgagaucgccauccgcccgaagguccgggaccaggagggccgcaugaacuacuacuggacccugguggagcccggcgacaagaucaccuucgaggcgaccgggaaccucguggucccccgguacgccuucgccauggagcgcaacgccggcagcgggaucaucaucuccgacacgcccguguacgacugcaacacgaccugccagaccccgaagggcgccaucaacaccagccugcccuuccagaacauccaccccaucaccaucggcaagugccccaaguacgugaaguccaccaagcugcggcucgcgaccgggcugcgcaacgucccgagcauccagucccggggccuguucggggccaucgccggcuucaucgagggcggguggacgggcaugguggacgggugguacggcuaccaccaccagaacgagcaggggagcggcuacgccgccgaccucaaguccacccagaacgcgaucgacgagaucaccaacaaggugaacagcgucaucgagaagaugaacacccaguucacggccguggggaaggaguucaaccaccuggagaagcgcaucgagaaccugaacaagaaggucgacgacggcuuccucgacaucuggaccuacaacgccgagcugcuggugcuccuggagaacgagcggacccuggacuaccacgacuccaacgugaagaaccucuacgagaagguccgcagccagcugaagaacaacgccaaggagaucggcaacgggugcuucgaguucuaccacaagugcgacaacacgugcauggaguccgugaagaacggcaccuacgacuaccccaaguacagcgaggaggccaagcugaaccgggagaagaucgacggggugaagcucgaguccacccgcaucuaccagauccuggcgaucuacagcaccgucgccuccagccuggugcucguggucagccugggcgccaucuccuucuggaugugcagcaacgggucccugcagugccggaucugcaucuga

SEQ ID NO: 76974 - RNA, 1701 nt, Artificial Sequence; identical to SEQ ID NO: 66693
  derived and/or modified CDS sequence (opt1) from hemagglutinin__InfluenzaA__AJK00136

SEQ ID NO: 76975 - RNA, 1704 nt, Artificial Sequence
  derived and/or modified CDS sequence (opt1) from hemagglutinin__InfluenzaA__AJK00166
auggagaagaucgugcugcuccuggccaucgucagccuggugaaguccgaccagaucugcaucggcuaccacgccaacaacagcaccgagcaggucgacaccaucauggagaagaacgugacggugacccacgcgcaggacauccucgagaagacccacaacgggaagcugugcgaccuggacggcgugaagccccucauccugcgcgacugcuccgucgccggguggcugcucggcaacccgaugugcgacgaguucaucaacgugcccgaguggagcuacaucguggagaaggccaaccccgccaacgaccugugcuaccccgggaacuucaacgacuacgaggagcugaagcaccuccugucccggaucaaccacuucgagaagauccagaucauccccaagagcuccuggagcgaccacgaggccuccagcggcgucuccagcgcgugcccguaccagggcaagcccuccuucuuccgcaacgugguguggcugaucaagaagaacaacaccuaccccacgaucaagcggagcuacaacaacaccaaccaggaggaccuccugauccugugggggauccaccacuccaacgacgccgccgagcagaccaagcucuaccagaacccgaccacguacaucagcgucggcaccuccacccugaaccagcgccuggugcccaagaucgccacccggagcaaggugaacgggcaguccggccgcauggacuucuucuggacgauccucaagcccaacgacgcgaucaacuucgagagcaacgggaacuucaucgcccccgaguacgccuacaagaucgucaagaagggcgacagcgccaucaugaaguccgagguggaguacggcaacugcaacaccaagugccagaccccgaucggggccaucaacagcuccaugcccuuccacaacauccacccccugaccaucggcgagugccccaaguacgucaagagcaacaagcuggugcucgcgacggggcugcggaacuccccgcugcgcgagcggcgccggaagcgcggccucuucggcgccaucgccggguucaucgagggcggguggcagggcaugguggacgggugguacggcuaccaccacagcaacgagcagggcuccggguacgccgccgacaaggagagcacccagaaggcgaucgacggcgugaccaacaaggucaacuccaucaucgacaagaugaacacccaguucgaggccguggggcgggaguucaacaaccuggagcgccggaucgagaaccugaacaagaagauggaggacggcuuccucgacguguggacguacaacgccgagcugcugguccucauggagaacgagcgcacccuggacuuccacgacagcaacgugaagaaccuguacgacaagguccggcuccagcugcgcgacaacgccaaggagcuggggaacggcugcuucgaguucuaccacaagugcgacaacgagugcauggaguccgugcggaacggcaccuacgacuacccccaguacagcgaggaggcccgccucaagcgggaggagaucuccggggugaagcuggagagcaucggcaccuaccagauccuguccaucuacagcacggucgcguccagccucgcccuggccaucaugguggccgggcugucccucuggaugugcagcaacggcagccugcagugccgcaucugcaucuga

SEQ ID NO: 76976 - RNA, 1707 nt, Artificial Sequence
  derived and/or modified CDS sequence (opt1) from hemagglutinin__InfluenzaA__AJK00177
auggagaagaucgugcugcuccuggccgucgugagccuggugcgcuccgaccagaucugcaucggcuaccacgccaacaacagcaccgagcaggucgacaccaucauggagaagaacgugacggugacccacgcgcaggacauccucgagaagacccacaacgggaagcugugcgaccuggacggcgucaagccccucauccugcgggacugcuccguggccggguggcugcucggcaacccgaugugcgacgaguucaucaacgugcccgaguggagcuacaucgucgagaaggccaaccccgccaacgaccugugcuaccccgggaaccugaacgacuacgaggagcucaagcaccuccugucccgcaucaaccacuucgagaagauccagaucauccccaagagcuccuggagcgaccacgaggccucccugggcgugagcuccgcgugcccguaccagggcacccccagcuucuuccggaacguggucuggcugaucaagaagaacaacacguaccccaccaucaagcgcuccuacaacaacaccaaccaggaggaccugcucauccugugggggauccaccacagcaacgacgaggccgagcagaucaagcuguaccagaacccgaccacguacguguccgugggcaccagcacccucaaccagcggcugguccccaagaucgccacccgcuccaaggugaacgggcagagcggccggauggacuucuucuggacgauccugaagcccgacgacgccaucaacuucgaguccaacgggaacuucaucgcgcccgaguacgccuacaagaucgugaagaagggcgacagcgccaucaugaaguccgaggucgaguacggcaacugcaacaccaagugccagaccccgaucggggccaucaacagcagcaugcccuuccacaacauccacccccucaccaucggcgagugccccaaguacgugaaguccaacaagcuggugcuggccacggggcuccgcaacagcccgcugcgggagaagcgccggcgcaagcggggccuguucggcgcgaucgccggguucaucgagggcggguggcagggcauggucgacgggugguacggcuaccaccacuccaacgagcagggcagcggguacgccgccgacaaggaguccacccagaaggccaucgacggcgugaccaacaaggugaacagcaucaucgacaagaugaacacccaguucgaggcggucgggcgcgaguucaacaaccucgagcggcgcaucgagaaccugaacaagaagauggaggacggcuuccuggacguguggacguacaacgccgagcuccugguccugauggagaacgagcggacccucgacuuccacgacuccaacgugaagaaccuguacgacaaggugcgccugcagcuccgggacaacgccaaggagcuggggaacggcugcuucgaguucuaccacaagugcgacaacgagugcauggagagcguccgcaacggcaccuacgacuacccccaguacuccgaggaggcccggcugaagcgcgaggagaucagcggggugaagcucgaguccaucggcaucuaccagauccugagcaucuacuccaccguggccagcucccuggcgcucgccaucauggucgccgggcugagccuguggaugugcuccaacggcagccuccagugccgcaucugcaucuga

SEQ ID NO: 76977 - RNA, 1704 nt, Artificial Sequence
  derived and/or modified CDS sequence (opt1) from hemagglutinin__InfluenzaA__AJK00188
auggagaagaucgugcugcuccuggccgucgugagccuggugcgcuccgaccagaucugcaucggcuaccacgccaacaacagcaccgagcaggucgacaccaucauggagaagaacgugacggugacccacgcgcaggacauccucgagaagacccacaacgggaagcugugcgaccuggacggcgucaagccccucauccugcgggacugcuccguggccggguggcugcucggcaacccgaugugcgacgaguucaucaacgugcccgaguggagcuacaucgucgagaaggccaaccccgccaacgaccugugcuaccccgggaaccugaacgacuacgaggagcucaagcaccuccugucccgcaucaaccacuucgagaagauccagaucauccccaagagcuccuggagcgaccacgaggccucccugggcgugagcuccgcgugcccguaccagggcacccccagcuucuuccggaacguggucuggcugaucaagaagaacaacacguaccccaccaucaagcgcuccuacaacaacaccaaccaggaggaccugcucauccugugggggauccaccacagcaacgacgaggccgagcagaucaagcuguaccagaacccgaccacguacaucuccgugggcaccagcacccucaaccagcggcuggugcccaagaucgccacccgcuccaaggucaacgggcagagcggccggauggacuucuucuggacgauccugaagcccgacgacgccaucaacuucgaguccaacgggaacuucaucgcgcccgaguacgccuacaagaucgugaagaagggcgacagcgccaucaugaaguccgagguggaguacggcaacugcaacaccaagugccagaccccgaucggggccaucaacagcagcaugcccuuccacaacauccacccccucaccaucggcgagugccccaaguacgucaaguccaacaagcuggugcuggccacggggcuccgcaacagcccgcugcgggagaagcgccggaagcgcggccuguucggcgcgaucgccggguucaucgagggcggguggcagggcaugguggacgggugguacggcuaccaccacuccaacgagcagggcagcggguacgccgccgacaaggaguccacccagaaggccaucgacggcgucaccaacaaggugaacagcaucaucgacaagaugaacacccaguucgaggcgguggggcgggaguucaacaaccucgagcgccggaucgagaaccugaacaagaagauggaggacggcuuccuggacgucuggacguacaacgccgagcuccuggugcugauggagaacgagcgcacccucgacuuccacgacuccaacgucaagaaccuguacgacaaggugcggcugcagcuccgcgacaacgccaaggagcuggggaacggcugcuucgaguucuaccacaagugcgacaacgagugcauggagagcgugcggaacggcaccuacgacuacccccaguacuccgaggaggcccgccugaagcgggaggagaucagcggggucaagcucgaguccaucggcaccuaccagauccugagcaucuacuccacgguggccagcucccuggcgcucgccaucaugguggccgggcugagccuguggaugugcuccaacggcagccuccagugccgcaucugcaucuga

SEQ ID NO: 76978 - RNA, 1704 nt, Artificial Sequence
  derived and/or modified CDS sequence (opt1) from hemagglutinin__InfluenzaA__AJK00207
auggagaagaucgugcugcuccuggccaucgucagccuggugcgcuccgaccagaucugcaucggcuaccacgccaacaacagcaccgagcaggucgacaccaucauggagaagaacgugacggugacccacgcgcaggacauccucgagaagacccacaacgggaagcugugcgaccuggacggcgugaagccccucauccugcgggacugcuccgucgccggguggcugcucggcaacccgaugugcgacgaguucaucaacgugcccgaguggagcuacaucguggagaaggccaaccccgccaacgaccugugcuaccccgggaacuucaacgacuacgaggagcugaagcaccuccugucccgcaucaaccacuucgagaagauccagaucauccccaagagcuccuggagcgaccacgaggccuccagcggcgucuccagcgcgugcccguaccagggcacccccuccuucuuccggaacgugguguggcugaucaagaagaacaacacguaccccaccaucaagcgcagcuacaacaacaccucccaggaggaccuccugguccugugggggauccaccacagcaacgacgccaccgagcagaugaagcucuaccagaacccgacgaccuacguguccgugggcaccagcacccugaaccagcggcugguccccaagaucgccacgcgcuccaaggugaacgggcagagcggccggauggacuucuucuggaccauccucaagagcaacgacgccaucaacuucgaguccaacgggaacuucaucgcgcccgaguacgccuacaagaucgugaagaagggcgacagcgccaucaugaaguccgaggucgaguacggcaacugcagcaccaagugccagacccccaucggggccaucaacuccagcaugccguuccacaacauccacccccugacgaucggcgagugccccaaguacgugaaguccaacaagcuggugcucgccaccgggcugcgcaacagcccccugcgggagcgccggcgcaagcggggccucuucggcgcgaucgccggguucaucgagggcggguggcagggcauggucgacgggugguacggcuaccaccacuccaacgagcagggcagcggguacgccgccgacaaggaguccacccagaaggccaucgacggcgugaccaacaaggugaacagcaucaucgacaagaugaacacgcaguucgaggcggucgggcgcgaguucaacaaccuggagcggcgcaucgagaaccugaacaagaagauggaggacggcuuccucgacguguggaccuacaacgccgagcugcugguccucauggagaacgagcggacccuggacuuccacgacuccaacgugaagaaccuguacgacaaggugcgccuccagcugcgggacaacaccaaggagcuggggaacggcugcuucgaguucuaccacaagugcgacaacgagugcauggagagcguccgcaacggcacguacgacuacccgcaguacuccgaggaggcccggcucaagcgcgaggagaucagcggggugaagcuggaguccaucggcaccuaccagauccugagcaucuacuccaccguggccagcagccucgcccuggcgaucauggucgccgggcugucccucuggaugugcagcaacggcucccugcagugccgcaucugcaucuga

SEQ ID NO: 76979 - RNA, 1704 nt, Artificial Sequence
  derived and/or modified CDS sequence (opt1) from hemagglutinin__InfluenzaA__AJK00218
auggagaagaucgugcuguuccucgccaucgucagccuggugcgcuccgaccagaucugcaucggcuaccacgccaacaacagcaccgagcaggucgacaccaucauggagaagaacgugacggugacccacgcgcaggacauccuggagaagacccacaacgggaagcucugcgaccuggacggcgugaagccccugauccuccgggacugcuccgucgccggguggcugcugggcaacccgaugugcgacgaguucaucaacgugcccgaguggagcuacaucguggagaaggccaaccccgccaacgaccucugcuaccccgggaacuucaacgacuacgaggagcugaagcaccuccugucccgcaucaaccacuucgagaagauccggaucauccccaagagcuccuggccggaccacgaggccagcuccggcgucagcuccgcgugccccuaccagggcacccccagcuucuuccgcaacaucguguggcugaucaagaagaacaacacguacccgaccaucaagcgguccuacaacaacaccagccaggaggaccugcucgugcugugggggauccaccacuccagcgacgccaccgagcagaucaagcuguaccagaaccccacgaccuacgucuccgugggcaccagcacccucaaccagcgccuggugcccaagaucgccacgcgguccaaggucaacgggcagagcggccgcauggacuucuucuggaccauccucaagagcaacgacgccaucaacuucgaguccaacgggaacuucaucgcgcccgaguacgccuacaagaucgugaagaagggcgacagcgccaucaugaaguccgagguggaguacggcaacugcagcaccaagugccagaccccgaucggggccaucaacuccagcaugcccuuccacaacauccacccccugacgaucggcgagugccccaaguacgucaaguccaacaagcuggugcuggccaccgggcuccggaacagcccgcugcgcgagcggcgccggaagcgcggccuguucggcgcgaucgccggguucaucgagggcggguggcagggcaugguggacgggugguacggcuaccaccacuccaacgagcagggcagcggguacgccgccgacaaggaguccacccagaaggccaucgacggcgucaccaacaaggugaacagcaucaucgacaagaugaacacgcaguucgaggcgguggggcgggaguucaacaaccucgagcgccggaucgagaaccugaacaagaagauggaggacggcuuccuggacgucuggaccuacaacgccgagcuccuggugcugauggagaacgagcgcacccucgacuuccacgacuccaacgucaagaaccuguacgacaaggugcggcugcagcuccgcgacaacgccaaggagcuggggaacggcugcuucgaguucuaccacaagugcgacaacgagugcauggagagcgugcggaacggcaccuacgacuacccccaguacuccgaggaggcccgccugaagcgcgaggagaucagcggggucaagcucgaguccaucggcacguaccagauccugagcaucuacuccaccgccgcgagcagccuggcccucgccaucaugguggccgggcugucccuguggaugugcagcaacggcucccuccagugccggaucugcaucuga

SEQ ID NO: 76980 - RNA, 1704 nt, Artificial Sequence
  derived and/or modified CDS sequence (opt1) from hemagglutinin__InfluenzaA__AJK00239
auggagaagaucgugcugcuccuggccaucgucagccuggugcgcuccgaccagaucugcaucggcuaccacgccaacaacagcaccgagcaggucgacaccaucauggagaagaacgugacggugacccacgcgcaggacauccucgagaagacccacaacgggaagcugugcgaccuggacggcgugaagccccucauccugcgggacugcuccgucgccggguggcugcucggcaacccgaugugcgacgaguucaucaacgugcccgaguggagcuacaucguggagaaggccaaccccgccaacgaccugugcuaccccgggaacuucaacgacuacgaggagcugaagcaccuccugucccgcaucaaccacuucgagaagauccagaucauccccaagagcuccuggagcgaccacgaggccuccagcggcgucuccagcgcgugcccguaccagggcacccccuccuucuuccggaacgugguguggcugaucaagaagaacaacacguaccccaccaucaagcgcagcuacaacaacaccucccaggaggaccuccugguccugugggggauccaccacagcaacgacgccaccgagcagaugaagcucuaccagaacccgacgaccuacguguccgugggcaccagcacccugaaccagcggcugguccccaagaucgccacgcgcuccaaggugaacgggcagagcggccggauggacuucuucuggaccauccucaagagcaacgacgccaucaacuucgaguccaacgggaacuucaucgcgcccgaguacgccuacaagaucgugaagaagggcgacagcgccaucaugaaguccgaggucgaguacggcaacugcagcaccaagugccagacccccaucggggccaucaacuccagcaugccguuccacaacauccacccccugacgaucggcgagugccccaaguacgugaaguccaacaagcuggugcucgccaccgggcugcgcaacagcccccugcgggagcgccggcgcaagcggggccucuucggcgcgaucgccggguucaucgagggcggguggcagggcauggucgacgggugguacggcuaccaccacuccaacgagcagggcagcggguacgccgccgacaaggaguccacccagaaggccaucgacggcgugaccaacaaggugaacagcaucaucgacaagaugaacacgcaguucgaggcggucgggcgcgaguucaacaaccuggagcggcgcaucgagaaccugaacaagaagauggaggacggcuuccucgacguguggaccuacaacgccgagcugcugguccucauggagaacgagcggacccuggacuuccacgacuccaacgugaagaaccuguacgacaaggugcgccuccagcugcgggacaacgccaaggagcuggggaacggcugcuucgaguucuaccacaagugcgacaacgagugcauggagagcguccgcaacggcaccuacgacuacccgcaguacuccgaggaggcccggcucaagcgcgaggagaucagcggggugaagcuggaguccaucggcacguaccagauccugagcaucuacuccaccguggccagcagccucgcgcuggccaucauggucgccgggcugucccucuggaugugcagcaacggcucccugcagugccgcaucugcaucuga

SEQ ID NO: 76981 - RNA, 1704 nt, Artificial Sequence
  derived and/or modified CDS sequence (opt1) from hemagglutinin__InfluenzaA__AJS18468
auggagaagaucgugcugcuccuggccgucgugagccuggugaaguccgaccagaucugcaucggcuaccacgccaacaacagcaccgagcaggucgacaccaucauggagaagaacgugacggugacccacgcgcaggacauccucgagaagacccacaacgggcgccugugcgaccugaacggcgucaagccccucauccugaaggacugcuccguggccggguggcugcucggcaacccgaugugcgacgaguucauccgggugcccgaguggagcuacaucgucgagcgcgccaaccccgccaacgaccugugcuaccccgggaaccugaacgacuacgaggagcucaagcaccuccugucccggaucaaccacuucgagaagacccugaucauccccaagagcuccuggccgaaccacgagacgagccugggcguguccgccgcgugccccuaccagggcgugcccagcuucuuccgcaacgucguguggcugaccaagaagaacgacgccuacccgaccaucaagauguccuacaacaacaccaaccgggaggaccuccugauccugugggggauccaccacagcaacaacgccgccgagcagacgaaccucuacaagaaccccaccaccuacguguccgucggcaccagcacgcugaaccagcgccuggugcccaagaucgcgacccggucccaggugaacgggcagcgcggccggauggacuucuucuggaccauccucaagcccaacgacgccauccacuucgagagcaacgggaacuucaucgccccggaguacgccuacaagaucgucaagaagggcgacuccaccaucaugaaguccgagauggaguacggccacugcaacacgaagugccagacccccaucggggccaucaacuccagcaugcccuuccacaacauccacccccugaccaucggcgagugcccgaaguacgucaagagcaacaagcuggugcucgcgaccgggcugcgcaacagcccccugcgggagcgccggcgcaagcggggccucuucggcgccaucgccggguucaucgagggcggguggcagggcaugguggacgggugguacggcuaccaccacagcaacgagcagggcuccggguacgccgccgaccgcgagagcacgcagaaggcgaucgacggcgugaccaacaaggugaacuccaucaucgacaagaugaacacccaguucgaggccgucgggcgggaguucaacaaccuggagcgccggaucgagaaccugaacaagaagauggaggacggcuuccucgacguguggaccuacaacgccgagcugcugguccucauggagaacgagcgcacgcuggacuuccacgacagcaacgugaagaaccuguacgacaaggugcggcuccagcugcgcgacaacgccaaggagcuggggaacggcugcuucgaguucuaccacaagugcgacaacgagugcauggaguccguccgcaacggcaccuacgacuacccccaguacagcgaggaggcccggcucaagcgcgaggagaucuccggggugaagcuggagagcaucggcaccuaccagauccuguccaucuacagcaccguggcguccagccucacgcuggccaucaucgucgccgggcugucccucuggaugugcagcaacggcucccugcagugccggaucugcaucuga

SEQ ID NO: 76982 - RNA, 1704 nt, Artificial Sequence
  derived and/or modified CDS sequence (opt1) from hemagglutinin__InfluenzaA__AJS18479
auggagaagaucgugcugcuccuggccgucgugagccuggugaaguccgaccagaucugcaucggcuaccacgccaacaacagcaccgagcaggucgacaccaucauggagaagaacgugacggugacccacgcgcaggacauccucgagaagacccacaacgggcgccugugcgaccugaacggcgucaagccccucauccugaaggacugcuccguggccggguggcugcucggcaacccgaugugcgacgaguucauccgggugcccgaguggagcuacaucgucgagcgcgccaaccccgccaacgaccugugcuaccccgggaaccugaacgacuacgaggagcucaagcaccuccugucccggaucaaccacuucgagaagacccugaucauccccaagagcuccuggccgaaccacgagacgagccugggcguguccgccgcgugccccuaccagggcaugcccagcuucuuccgcaacguggucuggcugaccaagaagaacgacaccuacccgaccaucaagauguccuacaacaacacgaaccgggaggaccuccugauccugugggggauccaccacagcaacaacgccgccgagcagaccaaccucuacaagaaccccaccaccuacguguccgugggcacggccacccugaaccagcgccugguccccaagaucgcgacccggagccaggugaacgggcagcgcggccggauggacuucuucuggaccauccucaagcccaacgacgccauccacuucgaguccaacgggaacuucaucgccccggaguacgccuacaagaucgugaagaagggcgacagcacgaucaugaaguccgagauggaguacggccacugcaacaccaagugccagacccccaucggggccaucaacagcuccaugcccuuccacaacauccacccccugaccaucggcgagugcccgaaguacgucaagagcaacaagcuggugcucgcgacggggcugcgcaacagcccccugcgggagcgccggcgcaagcggggccucuucggcgccaucgccggguucaucgagggcggguggcagggcaugguggacgggugguacggcuaccaccacuccaacgagcagggcagcggguacgccgccgaccgcgaguccacccagaaggcgaucgacggcgucaccaacaaggugaacagcaucaucgacaagaugaacacccaguucgaggccguggggcgggaguucaacaaccuggagcgccggaucgagaaccugaacaagaagauggaggacggcuuccucgacgucuggacguacaacgccgagcugcuggugcucauggagaacgagcgcacccuggacuuccacgacuccaacgucaagaaccuguacgacaaggugcggcuccagcugcgcgacaacgccaaggagcuggggaacggcugcuucgaguucuaccacaagugcgacaacgagugcauggagagcgugcgcaacggcaccuacgacuacccccaguacuccgaggaggcccggcucaagcgcgaggagaucagcggggucaagcuggaguccaucggcaccuaccagauccugagcaucuacuccacgguggcgagcucccucgcccuggccaucaucguggccgggcugagccucuggaugugcuccaacggcagccugcagugccggaucugcaucuga

SEQ ID NO: 76983 - RNA, 1704 nt, Artificial Sequence
  derived and/or modified CDS sequence (opt1) from hemagglutinin__InfluenzaA__AJY79339
auggagaagaucgugcugcuccuggccaucgucagcaucgugaaguccgaccagaucugcaucggcuaccacgccaacaacagcaccgagcaggucgacaccaucauggagaagaacgugacggugacccacgcgcaggacauccuggagaagacccacaacgggaagcucugcaaccuggacggcgugaagccccugauccuccgcgacugcuccgucgccggguggcugcugggcaacccgaugugcgacgaguuccucaacgugcccgaguggagcuacaucguggagaagaucaaccccgccaacgaccugugcuaccccgggaaccugaacgacuacgaggagcucaagcaccuccugucccggaucaaccacuucgagaagauccagaucaucccgaaggacagcugguccgaccacgaggccagcggcgucuccagcgccugccccuaccagggccgcuccagcuucuuccggaacgugguguggcugaccaagaagaacgacgcguaccccacgaucaagaaguccuacaacaacaccaaccaggaggaccugcugguccucugggggauccaccaccccaacgacgccgccgagcagacccgccuguaccagaacccgaccacguacaucagcgugggcaccuccacccugaaccagcggcucgugcccaagaucgccacccgcagcaaggucaacgggcaguccggccggauggaguucuucuggacgauccucaagagcaacgacgcgaucaacuucgaguccaacgggaacuucaucgcccccgagaacgccuacaagaucgugaagaagggcgacagcaccaucaugaaguccgagcuggaguacuccaacugcaacaccaagugccagacccccaucggcgccaucaacagcuccaugccguuccacaacauccacccccugacgaucggggagugccccaaguacgucaagagcaaccgccuggugcuggccaccggccuccggaacagcccccagggggagaagcgccggaagaagcgcggccuguucggcgcgaucgccggguucaucgagggcggguggcagggcaugguggacgggugguacggcuaccaccacagcaacgagcagggcuccggguacgccgccgacaaggagagcacccagcgggccaucgacggcgugaccaacaaggucaacuccaucaucgacaagaugaacacgcaguucgaggcgguggggcgcgaguucaacaaccuggagcggcgcaucgagaaccucaacaagaagauggaggacggcuuccuggacguguggaccuacaacgccgagcugcucguccugauggagaacgagcggacccuggacuuccacgacagcaacgugaagaaccucuacgacaagguccgccugcagcugcgggacaacgccaaggagcucgggaacggcugcuucgaguucuaccaccgcugcgacaacgagugcauggaguccgugcggaacggcaccuacgacuacccgcaguacagcgaggaggcccgccugaagcgcgaggagaucuccggggugaagcuggagagcaucggcacguaccagauccucuccaucuacagcaccgucgccuccagccuggcgcuggccaucaugguggccgggcucucccuguggaugugcagcaacggcagccugcagugccggaucugcaucuga

SEQ ID NO: 76984 - RNA, 1704 nt, Artificial Sequence
  derived and/or modified CDS sequence (opt1) from hemagglutinin__InfluenzaA__AJY79341
auggagaagaucgugcugcuccuggccaucgucagcaucgugaaguccgaccagaucugcaucggcuaccacgccaacaacagcaccgagcaggucgacaccaucauggagaagaacgugacggugacccacgcgcaggacauccuggagaagacccacaacgggaagcucugcaaccuggacggcgugaagccccugauccuccgcgacugcuccgucgccggguggcugcugggcaacccgaugugcgacgaguuccucaacgugcccgaguggagcuacaucguggagaagaucaaccccgccaacgaccugugcuaccccgggaacuucaacgacuacgaggagcugaagcaccuccugucccggaucaaccacuucgagaagauccagaucaucccgaaggacagcugguccgaccacgagaccagcggcgucuccagcgccugccccuaccagggccgcuccagcuucuuccggaacgugguguggcugacgaagaagaacgacgccuaccccaccaucaagaaguccuacaacaacaccaaccaggaggaccuccugguccugugggggauccaccaccccaacgacgcggccgagcagacccgccucuaccagaacccgacgaccuacaucagcgugggcaccuccacccugaaccagcggcuggugcccaagaucgccacgcgcagcaaggucaacgggcagaacggccggauggaguucuucuggaccauccucaaguccaacgacgccaucaacuucgagagcaacgggaacuucaucgcgcccgagaacgccuacaagaucgugaagaagggcgacuccaccaucaugcgcagcgagcuggaguacagcaacugcaacaccaagugccagacgcccaucggcgccaucaacuccagcaugccguuccacaacauccacccccugaccaucggggagugccccaaguacgugaaguccaaccggcucguccuggccaccggccugcgcaacagcccccagggggagaagcggcgcaagaagcggggccucuucggcgccaucgcgggguucaucgagggcggguggcagggcaugguggacgggugguacggcuaccaccacuccaacgagcagggcagcggguacgccgccgacaaggaguccacccagcgcgccaucgacggcgugacgaacaaggucaacagcaucaucgacaagaugaacacccaguucgaggccguggggcgggaguucaacaaccuggagcgccggaucgagaaccugaacaagaagauggaggacggcuuccucgacguguggaccuacaacgcggagcugcugguccucauggagaacgagcgcacccuggacuuccacgacuccaacgugaagaaccuguacgacaagguccggcuccagcugcgcgacaacgccaaggagcuggggaacggcugcuucgaguucuaccaccggugcgacaacgagugcauggagagcgugcgcaacggcacguacgacuacccgcaguacuccgaggaggcccgccucaagcgggaggagaucagcggggugaagcuggaguccaucggcaccuaccagauccugagcaucuacuccaccgucgccagcucccucgcccuggcgaucaugguggccgggcugagccucuggaugugcuccaacggcagccugcagugccgcaucugcaucuga

SEQ ID NO: 76985 - RNA, 1704 nt, Artificial Sequence
  derived and/or modified CDS sequence (opt1) from hemagglutinin__InfluenzaA__AJY79342
auggagaagaucgugcugcuccuggccaucgucagcaucgugaaguccgaccagaucugcaucggcuaccacgccaacaacagcaccgagcaggucgacaccaucauggagaagaacgugacggugacccacgcgcaggacauccuggagaagacccacaacgggaagcucugcaaccuggacggcgugaagccccugauccuccgcgacugcuccgucgccggguggcugcugggcaacccgaugugcgacgaguuccucaacgugcccgaguggagcuacaucguggagaagaucaaccccgccaacgaccugugcuaccccgggaacuucaacgacuacgaggagcugaagcaccuccugucccggaucaaccacuucgagaagauccagaucaucccgaaggacagcugguccgaccacgaggccagcggcgucuccagcgccugccccuaccagggccgcuccagcuucuuccggaacgugguguggcugaccaagaagaacgacgcguaccccacgaucaagaaguccuacaacaacaccaaccaggaggaccuccugguccugugggggauccaccaccccaacgacgccgccgagcagacccgccucuaccagaacccgaccacguacaucagcgugggcaccuccacccugaaccagcggcuggugcccaagaucgccacccgcagcaaggucaacgggcaguccggccggauggaguucuucuggacgauccucaagagcaacgacgcgaucaacuucgaguccaacgggaacuucaucgcccccgagaacgccuacaagaucgugaagaagggcgacagcaccaucaugaaguccgagcuggaguacuccaacugcaacaccaagugccagacccccaucggcgccaucaacagcuccaugccguuccacaacauccacccccugacgaucggggagugccccaaguacgucaagagcaaccgccucgugcuggccaccggccugcggaacagcccccagggggagaagcgccggaagaagcgcggccucuucggcgcgaucgccggguucaucgagggcggguggcagggcaugguggacgggugguacggcuaccaccacagcaacgagcagggcuccggguacgccgccgacaaggagagcacccagcgggccaucgacggcgugaccaacaaggucaacuccaucaucgacaagaugaacacgcaguucgaggcgguggggcgcgaguucaacaaccuggagcggcgcaucgagaaccugaacaagaagauggaggacggcuuccucgacguguggaccuacaacgccgagcugcugguccucauggagaacgagcggacccuggacuuccacgacagcaacgugaagaaccuguacgacaagguccgccuccagcugcgggacaacgccaaggagcuggggaacggcugcuucgaguucuaccaccgcugcgacaacgagugcauggaguccgugcggaacggcaccuacgacuacccgcaguacagcgaggaggcccgccucaagcgcgaggagaucuccggggugaagcuggagagcaucggcacguaccagauccuguccaucuacagcaccgucgccuccagccucgcgcuggccaucaugguggccgggcugucccucuggaugugcagcaacggcagccugcagugccggaucugcaucuga

SEQ ID NO: 76986 - RNA, 1704 nt, Artificial Sequence
  derived and/or modified CDS sequence (opt1) from hemagglutinin__InfluenzaA__AJY79343
auggagaagaucgugcugcuccuggccaucgucagcaucgugaaguccgaccagaucugcaucggcuaccacgccaacaacagcaccgagcaggucgacaccaucauggagaagaacgugacggugacccacgcgcaggacauccuggagaagacccacaacgggaagcucugcaaccuggacggcgugaagccccugauccuccgcgacugcuccgucgccggguggcugcugggcaacccgaugugcgacgaguuccucaacgugcccgaguggagcuacaucguggagaagaucaaccccgccaacgaccugugcuaccccgggaacuucaacgacuacgaggagcugaagcaccuccugucccggaucaaccacuucgagaagauccagaucaucccgaaggacagcugguccgaccacgaggccagcggcgucuccagcgccugccccuaccagggccgcuccagcuucuuccggaacgugguguggcugaccaagaagaacgacgcguaccccacgaucaagaaguccuacaacaacaccaaccaggaggaccuccugguccugugggggauccaccaccccaacgacgccgccgagcagacccgccucuaccagaacccgaccacguacaucagcgugggcaccuccacccugaaccagcggcuggugcccaagaucgccacccgcagcaaggucaacgggcaguccggccggauggaguucuucuggacgauccucaagagcaacgacgcgaucaacuucgaguccaacgggaacuucaucgcccccgagaacgccuacaagaucgugaagaagggcgacagcaccaucaugaaguccgagcuggaguacuccaacugcaacaccaagugccagacccccaucggcgccaucaacagcuccaugccguuccacaacauccacccccugacgaucggggagugccccaaguacgucaagagcaaccgccucgugcuggccaccggccugcggaacagcccccagggggagaagcgccggaagaagcgcggccucuucggcgcgaucgccggguucaucgagggcggguggcagggcaugguggacgggugguacggcuaccaccacagcaacgagcagggcuccggguacgccgccgacaaggagagcacccagcgggccaucgacggcgugaccaacaaggucaacuccaucaucgacaagaugaacacgcaguucgaggcgguggggcgcgaguucaacaaccuggagcggcgcaucgagaaccugaacaagaagauggaggacggcuuccucgacguguggaccuacaacgccgagcugcugguccucauggagaacgagcggacccuggacuuccacgacagcaacgugaagaaccuguacgacaagguccgccuccagcugcgggacaacgccaaggagcuggggaacggcugcuucgaguucuaccaccgcugcgacgacgagugcauggaguccgugcggaacggcaccuacgacuacccgcaguacagcgaggaggcccgccucaagcgcgaggagaucuccggggugaagcuggagagcaucggcacguaccagauccuguccaucuacagcaccgucgccuccagccucgcgcuggccaucaugguggccgggcugucccucuggaugugcagcaacggcagccugcagugccggaucugcaucuga

SEQ ID NO: 76987 - RNA, 1704 nt, Artificial Sequence
  derived and/or modified CDS sequence (opt1) from hemagglutinin__InfluenzaA__AJY79345
auggagaagaucgugcugcuccuggccaucgucagcaucgugaaguccgaccagaucugcaucggcuaccacgccaacaacagcaccgagcaggucgacaccaucauggagaagaacgugacggugacccgcgcgcaggacauccuggagaagacccacaacgggaagcucugcaaccuggacggcgugaagccccugauccuccgggacugcuccgucgccggguggcugcugggcaacccgaugugcgacgaguuccucaacgugcccgaguggagcuacaucguggagaagaucaaccccgccaacgaccugugcuaccccgggaacuucaacgacuacgaggagcugaagcaccuccugucccgcaucaaccacuucgagaagauccagaucaucccgaaggacagcugguccgaccacgaggccagcggcgucuccagcgccugccccuaccagggccgguccagcuucuuccgcaacgugguguggcugaccaagaagaacgacgcguaccccacgaucaagaaguccuacaacaacaccaaccaggaggaccuccugguccugugggggauccaccaccccaacgacgccgccgagcagacccggcucuaccagaacccgaccacguacaucagcgugggcaccuccacccugaaccagcgccuggugcccaagaucgccacccggagcaaggucaacgggcaguccggccgcauggaguucuucuggacgauccucaagagcaacgacgcgaucaacuucgaguccaacgggaacuucaucgcccccgagaacgccuacaagaucgugaagaagggcgacagcaccaucaugaaguccgagcuggaguacuccaacugcaacaccaagugccagacccccaucggcgccaucaacagcuccaugccguuccacaacauccacccccugacgaucggggagugccccaaguacgucaagagcaaccggcucgugcuggccaccggccugcgcaacagcccccagggggagaagcggcgcaagaagcggggccucuucggcgcgaucgccggguucaucgagggcggguggcagggcaugguggacgggugguacggcuaccaccacagcaacgagcagggcuccggguacgccgccgacaaggagagcacccagcgcgccaucgacggcgugaccaacaaggucaacuccaucaucgacaagaugaacacgcaguucgaggcgguggggcgggaguucaacaaccuggagcgccggaucgagaaccugaacaagaagauggaggacggcuuccucgacguguggaccuacaacgccgagcugcugguccucauggagaacgagcgcacccuggacuuccacgacagcaacgugaagaaccuguacgacaagguccggcuccagcugcgcgacaacgccaaggagcuggggaacggcugcuucgaguucuaccaccggugcgacaacgagugcauggaguccgugcgcaacggcaccuacgacuacccgcaguacagcgaggaggcccgccucaagcgggaggagaucuccggggugaagcuggagagcaucggcacguaccagauccuguccaucuacagcaccgucgccuccagccucgcgcuggccaucaugguggccgggcugucccucuggaugugcagcaacggcagccugcagugccgcaucugcaucuga

SEQ ID NO: 76988 - RNA, 1701 nt, Artificial Sequence; identical to SEQ ID NO: 76465
  derived and/or modified CDS sequence (opt1) from hemagglutinin__InfluenzaA__AKA54643

SEQ ID NO: 76989 - RNA, 1701 nt, Artificial Sequence
  derived and/or modified CDS sequence (opt1) from hemagglutinin__InfluenzaA__AKA54650
augaagaccaucaucgcccugagcuacauccucugccugguguucacccagaagauccccggcaacgacaacuccacggccacccugugccucgggcaccacgcggucccgaacggcaccaucgugaagaccaucacgaacgaccgcaucgaggugaccaacgccaccgagcugguccagaacagcuccaucggggagaucugcgacagcccccaccagauccuggacggcgagaacugcacccucaucgacgcccugcugggggacccccagugcgacggcuuccagaacaagaagugggaccucuucguggagcgguccaaggccuacagcaacugcuaccccuacgacgugccggacuacgccucccugcgcagccuggucgcguccagcggcacgcucgaguucaacaacgaguccuucaacuggaccggggugacccagaacggcaccagcuccgccugcauccggcgcagcuccagcuccuucuucagccggcugaacuggcugacgcaccucaacuacaaguaccccgcccugaacgugaccaugcccaacaacgagcaguucgacaagcuguacaucuggggcguccaccaccccgggaccgacaaggaccagaucuuccucuacgcccaguccagcgggcgcaucaccgugagcacgaagcggucccagcaggcggugaucccgaacaucggcagccgcccccggauccgcgacauccccucccggaucagcaucuacuggaccaucgucaagcccggcgacauccugcugaucaacuccaccgggaaccucaucgccccgcgcggcuacuucaagauccggagcgggaaguccagcaucaugcgcuccgacgcccccaucggcaagugcaagagcgagugcaucacccccaacggcuccauccccaacgacaagccguuccagaacgugaaccggaucacguacggggccugcccccgcuacgugaagcacagcacccugaagcuggccaccggcaugcggaacguccccgagaagcagacccgcgggaucuucggcgcgaucgccggguucaucgagaacggcugggagggcaugguggacgggugguacggcuuccggcaccagaacuccgaggggcgcggccaggccgccgaccucaagagcacgcaggccgcgaucgaccagaucaacgggaagcugaaccggcugaucggcaagaccaacgagaaguuccaccagaucgagaaggaguucuccgagguggagggccgcauccaggaccucgagaaguacgucgaggacaccaagaucgaccuguggagcuacaacgccgagcugcucguggcccuggagaaccagcacaccaucgaccugacggacuccgagaugaacaagcuguucgagaagaccaagaagcagcuccgcgagaacgccgaggacauggggaacggcugcuucaagaucuaccacaagugcgacaacgccugcaucgggagcauccggaacggcaccuacgaccacaacguguaccgcgacgaggcgcugaacaaccgguuccagaucaagggggucgagcucaaguccggcuacaaggacuggauccuguggaucagcuucgccaucagcugcuuccugcucugcguggcccugcugggcuucaucaugugggccugccagaaggggaacauccgcugcaacaucugcaucuga

SEQ ID NO: 76990 - RNA, 1701 nt, Artificial Sequence
  derived and/or modified CDS sequence (opt1) from hemagglutinin__InfluenzaA__AKA54651
augaagaccaucaucgccuucagcugcauccugugccagaucuccgcccagaagcuccccggcagcgacaacuccauggcgacccugugccuggggcaccacgccgugccgaacggcacgcucgucaagaccaucaccgacgaccagaucgaggugaccaacgccacggagcuggugcagagcaccuccaagggggagaucugcagcagcccccaccagauccuggacggcaagaacugcacccucaucgacgcccugcugggggacccccacugcgacgacuuccagaacaagaagugggaccucuucgucgagcgcagcaccgccuacuccaacugcuaccccuacuacgugccggacuacgcgagccugcggucccugguggccagcuccggcacgcucgaguucacccaggagagcuucaacuggaccggcgucgcccaggacggggccuccuacagcugccgccgggaguccgagaacagcuucuucucccgccugaacuggcuguacagccucaacuacaaguaccccgcgcugaacgugaccaugcccaacaacgacaaguucgacaagcuguacaucuggggcgugcaccaccccgggacggacaaggaccagaccagccucuacauccaggccuccggccgggucaccgugagcaccaaguggucccagcagacggugaucccgaacaucgggagccgccccuggauccggggcgucuccagcaucaucuccaucuacuggaccaucgugaagcccggcgacauccugcugaucaacagcaccgggaaccucaucgcgccccgcggcuacuucaagauccaguccgggaaguccuccaucaugcggagcgacgcccacaucggcaacugcaacuccgagugcaucaccccgaacggcagcauccccaacgacaagcccuuccagaacgugaaccgcaucacguacggggccugcccccgguacgucaagcagaacacccugaagcuggccaccggcaugcgcaacgugccggagaagcagacccgggggaucuucggcgccaucgccggguucaucgagaacggcugggagggcaugguggacgggugguacggcuuccgccaccagaacuccgaggggacgggccaggccgccgaccucaagagcacccaggcggccaucaaccagaucaccgggaagcugaaccgggucaucaagaagaccaacgagaaguuccaccagaucgagaaggaguucuccgagguggagggccgcauccaggaccuggagcgguacguggaggacacgaagaucgaccucuggagcuacaacgccgagcugcuggucgcccucgagaaccagcacaccaucgaccugaccgacuccgagaugaacaagcuguucgagcgcacccggaagcagcuccgcgagaacgccgaggacaugggcaacgggugcuucaagaucuaccacaagugcgacaacgcgugcaucggcagcauccggaacgggacguacgaccacgacguguaccgcgacgaggccgugaacaaccgcuuccagaucaagggcguccagcugaagcugggguacaaggacuggauccucuggaucagcuucgccaucuccugcuuccugcugugcgccgugcuccugggcuucaucaugugggccugccagaagggcaacauccggugcaacaucugcaucuga

SEQ ID NO: 76991 - RNA, 1701 nt, Artificial Sequence
  derived and/or modified CDS sequence (opt1) from hemagglutinin__InfluenzaA__AKA59351
augaaggccauccuggugauccuccuguacaccuucgccgcggccaacgccgacaccaucugcaucggcuaccacgccaacaacagcacggacaccgucgacaccgugcuggagaagaacgugaccgucacgcacuccguggaccuccuggaggacaagcacaacgggcgccugugcaagcuccggggcguggcgccccugcaccuggggaagugcaacaucgccggcuggauccucgggaacccggagugcgagagccuguccaccgccagcuccuggagcuacaucgucgagaccuccagcuccgacaacgggaccugcuaccccggcgacuucaucgacuacgaggagcugcgcgagcagcucagcuccgugagcuccuucgagcgguucgagaucuuccccaagacgagcuccuggcccaaccacgagagcaacaagggggugaccgccgccugcccgcaggcgggcgccaaguccuucuacaagaaccugaucuggcuggucaagaaggagaacagcuaccccaagcucuccaagagcuacaucaacgacaaggggaaggaggugcuggugcuguggggcauccaccaccccagcaccuccgccgaccagcagagccucuaccagaacgccgacgccuacgucuucguggggaccucccgcuacagcaagaaguucaagcccgagaucgcgauccggccgaaggugcgcgaccaggagggccggaugaacuacuacuggacgcuggucgagcccggcgacaagaucaccuucgaggccaccgggaaccugguggugccccgcuacgccuucgccauggagcggaacgccggcuccgggaucaucaucagcgacacccccguccacgacugcaacacgaccugccagaccccgaagggcgcgaucaacaccucccuccccuuccagaacauccaccccaucacgaucggcaagugccccaaguacgucaagagcaccaagcugcgccuggccaccgggcuccggaacgugccguccauccagagccgcggccuguucggggccaucgccggcuucaucgagggcggcuggaccggcaugguggacgggugguacggcuaccaccaccagaacgagcagggguccggcuacgccgcggaccucaagagcacgcagaacgccaucgacgagaucaccaacaaggugaacuccgugaucgagaagaugaacacccaguucaccgccgucgggaaggaguucaaccaccuggagaagcggaucgagaaccugaacaagaagguggacgacggcuuccuggacaucuggacguacaacgccgagcuccugguccugcucgagaacgagcgcacccuggacuaccacgacagcaacgugaagaaccuguacgagaaggugcggucccagcucaagaacaacgccaaggagaucggcaacgggugcuucgaguucuaccacaagugcgacaacacgugcauggagagcgucaagaacggcaccuacgacuaccccaaguacuccgaggaggcgaagcugaaccgcgaggagaucgacggggugaagcuggagagcacccggaucuaccagauccucgccaucuacuccaccguggccagcagccugguccugguggugucccucggcgccaucagcuucuggaugugcuccaacgggagccugcagugccgcaucugcaucuga

SEQ ID NO: 76992 - RNA, 1701 nt, Artificial Sequence
  derived and/or modified CDS sequence (opt1) from hemagglutinin__InfluenzaA__AKA59353
augaaggccauccuggugguccuccuguacaccuucgccaccgcgaacgccgacacgcugugcaucggcuaccacgccaacaacagcaccgacaccguggacaccgugcucgagaagaacgucacggugacccacuccgugaaccugcuggaggacaagcacaacgggaagcucugcaagcugcgcggcgucgcgccccugcaccucggggagugcaacaucgccggcuggauccuggggaacccggagugcgagagccuguccaccgccagcuccuggagcuacaucguggagacccccuccagcaacaacggcacgugcuaccccggcgacuucaucgacuacgaggagcuccgggagcagcuguccagcguguccagcuucgagcgcuucgagaucuuccccaacaccuccagcuggccgaaccacgacuccagcaagggggucaccgccgccugcccccacgccggcgcgaaguccuucuacaagaaccugaucuggcucgugaagaaggggaacagcuaccccaagcuguccaagagcuacaucaacgacaagggcaaggaggugcugguccucugggggauccaccaccccagcaccuccgccgaccagcagaagcuguaccagaacgaggacgccuacguguucgugggcacgagccgguacuccaagaaguucaagccggagaucgccauccgccccaagguccgggaccaggagggccgcaugaacuacuacuggacccugguggagcccggggacaagaucaccuucgaggccaccggcaacaucguggucccccgguacgcguucgccauggagcgcaacgccgggagcggcaucaucaucuccgacacgccggugcacaacugcaacacgaccugccagacccccaagggcgccaucaacaccagccuccccuuccagaacgugcaccccaucaccaucgggaagugcccgaaguacgucaaguccaccaagcugcggcuggccaccggccuccgcaacgugcccagcauccagucccgggggcuguucggcgcgaucgccggguucaucgagggcggcuggacggggaugguggacggcugguacggguaccaccaccagaacgagcagggcagcggguucgccgccgaccugaaguccacccagaacgccaucgacggcaucaccaacaaggucaacagcgugaucgagaagaugaacacccaguucacggcggucggcaaggaguucaaccaccucgagaagcgcaucgagaaccugaaccggaagaucgacgacggguuccuggacaucuggaccuacaacgccgagcuccugauccugcucgagaacgagcgcacccuggacuaccacgacuccaacgugcggaaccuguacgagaaggugcgcagccagcucaagaacaacgccaaggagaucggcaacgggugcuucgaguucuaccacaagugcgacaacacgugcauggaguccgucaagaacggcaccuacgacuaccccaaguacagcgaggaggccaagcugaaccgggaggagaucgacggggugaagcuggaguccacccgcaucuaccagauccucgccaucuacagcaccguggcguccagccugguccugaucgugagccucggcgccaucuccuucuggaugugcagcaacggcucccugcagugccggaucugcaucuga

SEQ ID NO: 76993 - RNA, 1701 nt, Artificial Sequence
  derived and/or modified CDS sequence (opt1) from hemagglutinin__InfluenzaA__AKA59355
augaaggccauccuggugguccuccuguacaccuucgccaccgcgaacgccgacacgcugugcaucggcuaccacgccaacaacagcaccgacaccguggacaccgugcucgagaagaacgucacggugacccacuccgugaaccugcuggaggacaagcacaacgggaagcucugcaagcugcgcggcgucgcgccccugcaccucgggaagugcaacaucgccggcuggauccuggggaacccggagugcgagagccuguccaccgccagcuccuggagcuacaucguggagaccuccagcuccgacaacggcacgugcuaccccggcgacuucaucgacuacgaggagcuccgggagcagcugagcuccgugagcuccuucgagcgcuucgagaucuuccccaagaccagcuccuggcccaaccacgacagcaacaagggggucaccgccgccugcccgcacgccggcgcgcgguccuucuacaagaaccugaucuggcucgugaagaaggggaacagcuaccccaagcugaaccaguccuacaucaacgacaagggcaaggaggugcugguccucugggggauccaccacccgcccaccagcgccgaccagcagagccuguaccagaacgccgacgccuacguguucgugggcacgucccgcuacagcaagaaguucaagcccgagaucgccauccggcccaagguccgcgaccaggagggccggaugaacuacuacuggacccugguggagcccggggacaagaucaccuucgaggcgaccggcaaccucguggucccccgcuacgccuucgccauggagcggaacgccggguccggcaucaucaucagcgacacgccggugcacgacugcaacacgaccugccagacccccaagggcgccaucaacaccucccugcccuuccagaacauccaccccaucaccaucgggaagugcccgaaguacgucaagagcaccaagcugcgccucgcgaccggccugcggaacgugcccuccauccagagccgcgggcuguucggcgccaucgccggguucaucgagggcggcuggacggggaugguggacggcugguacggguaccaccaccagaacgagcagggcuccggguacgccgccgaccucaagagcacccagaacgcgaucgacgagaucaccaacaaggugaaccuggucaucgagaagaugaacacccaguucacggccgugggcaaggaguucucccaccuggagaagcggaucgagaaccucaacaagaaggucgacgacggcuuccuggacaucuggaccuacaacgccgagcugcucgugcugcuggagaacgagcgcacccucgacuaccacgacagcaacgugaagaaccuguacgagaagauccggucccagcugaagaacaacgccaaggagaucgggaacggcugcuucgaguucuaccacaagugcgacaacacgugcauggagagcgucaagaacgggaccuacgacuaccccaaguacuccgaggaggccaagcucaaccgcgaggagaucgacggcgugaagcuggagagcacccggguguaccagauccuggcgaucuacuccaccgucgccagcucccucgugcugguggucagccugggggccaucagcuucuggaugugcuccaacggcagccuccagugccgcaucugcaucuga

SEQ ID NO: 76994 - RNA, 1701 nt, Artificial Sequence
  derived and/or modified CDS sequence (opt1) from hemagglutinin__InfluenzaA__AKE37137
augaaggcccgccuggugguccuccuguacaccuucgccaccgcgaacgccgacacgcugugcaucggcuaccacgccaacaacagcaccgacaccguggacaccgugcucgagaagaacgucacggugacccacuccgugaaccugcuggaggacaagcacaacgggaagcucugcaagcugcggggcgucgcgccccugcaccucgggaagugcaacaucgccggcuggauccuggggaacccggagugcgagagccuguccaccgcgagcuccuggagcuacaucguggagaccuccagcuccgacaacggcacgugcuaccccggcgacuucaucgacuacgaggagcuccgcgagcagcugagcuccgugagcuccuucgagcgguucgagaucuuccccaagaccagcuccuggcccaaccacgacccgaacaagggggucaccgccgccugcccccacgccggcgccaagagcuucuacaagaaccugaucuggcucgugaagaaggggaacuccuaccccaagcugagcaccuccuacaucaacgacaagggcaaggaggugcugguccucugggggauccaccaccccagcacgagcgccgaccagcagucccuguaccagaacgccgacgccuacgccuucgugggcaccagccgcuacuccaagaaguucaagccggagaucgcgauccggcccaaggugcgcgaccgggagggccgcaugaacuacuacuggacccuggucgagcccggggacaagaucaccuucgaggccacgggcaaccucguggugccccgguacgccuucgccauggagcgcaacgccgggagcggcaucaucaucuccgacaccagcguccacgacugcaacacgaccugccagaccccgaagggcgcgaucaacaccucccugcccuuccagaacgugcaccccaucaccaucgggaagugccccaaguacgucaagagcaccaagcugcggcucgccacgggccugcgcaacgugccguccauccagagccgggggcuguucggcgccaucgccggguucaucgagggcggcuggaccgggaugguggacggcugguacggguaccaccaccagaacgagcagggcuccggguacgccgcggaccucaagagcacccagaacgccuucgacgagaucaccaacaaggugaacuccgucaucgagaagaugaacacgcaguucaccgccgugggcaaggaguucaaccaccuggagaagcgcaucgagaaccugaacaagaaggucgacgacggcuuccucgacaucuggaccuacaacgccgagcugcuggugcuccuggagaacgagcggacccuggacuaccacgacagcaacgugaagaaccucuacgagaagguccgcucccagcugaagaacaacgccaaggagaucgggaacggcugcuucgaguucuaccacaagugcgacaacacgugcauggagagcgugaagaacgggaccuacgacuaccccaaguacuccgaggaggcgaagcugaaccgggaggagaucgacggcgugaagcucgagagcacccgcaucuaccagauccuggccaucuacuccaccgucgccagcagccuggugcucguggucucccugggggccaucagcuucuggaugugcuccaacggcagccugcagugccggaucugcaucuga

SEQ ID NO: 76995 - RNA, 1701 nt, Artificial Sequence
  derived and/or modified CDS sequence (opt1) from hemagglutinin__InfluenzaA__AKS48035
auggagaagauggugcugcuccuggccgucgugagccuggugaaguccgaccagaucugcaucggcuaccacgccaacaacagcaccgagcaggucgacaccaucauggagaagaacgugacggugacccacgcgcaggacauccucgagaagacccacaacgggcgccugugcgaccugaacggcgucaagccccucauccugaaggacugcuccguggccggguggcugcucggcaacccgaugugcgacgaguucauccgggugcccgaguggagcuacaucgucgagcgcgccaaccccgccaacgaccugugcuaccccgggaaccugaacgacuacgaggagcucaagcaccuccugucccggaucaaccacuucgagaagacccugaucauccccaagagcuccuggccgaaccacacgagcuccggcgugagcgccgcgugccccuaccagggcaugcccuccuucuuccgcaacguggucuggcugaccaagaagaacgacgccuacccgaccaucaagaugagcuacaacaacaccuaccgggaggaccugcucauccugugggggauccaccacuccaacaacgccgccgagcagacgaaccuguacaagaaccccaccaccuacgugagcgugggcaccuccacgcucaaccagcgccuggagcccaagaucgcgacccggagccaggucaacgggcagcgcggccggauggacuucuucuggaccauccugaagcccaacgacgccauccacuucgaguccaacgggaacuucaucgccccggaguacgccuacaagaucgugaagaagggcgacagcaccaucaugaaguccgagauggaguacggccacugcaacacgaagugccagacccccaucggggccaucaacagcagcaugcccuuccacaacauccacccccucaccaucggcgagugcccgaaguacgugaaguccaacaagcugguccuggcgaccgggcuccgcaacagcccccugcgggagcgccggcgcaagcggggccuguucggcgccaucgccggguucaucgagggcggguggcagggcaugguggacgggugguacggcuaccaccacuccaacgagcagggcagcggguacgccgccgaccgcgaguccacgcagaaggcgaucgacggcgugaccaacaaggucaacagcaucaucgacaagaugaacacccaguucgaggccguggggcgggaguucaacaaccucgagcgccggaucgagaaccugaacaagaagauggaggacggcuuccuggacguguggaccuacaacgccgagcuccugguccugauggagaacgagcgcacgcucgacuuccacgacuccaacgugaagaaccuguacgacaagguccggcugcagcuccgcgacaacgccaaggagcuggggaacggcugcuucgaguucuaccacaagugcgacaacgagugcauggagagcgugcgcaacggcaccuacgacuacccccaguacuccgaggaggcccggcugaagcgcgaggagaucagcggggugaagcucgaguccaucggcaccuaccagauccugagcaucuacuccaccgucgcgagcucccuggcccucgccaucaucguggccgggcugagccuguggaugugcuccaacggcagccuccagugccggaucugcaucuga

SEQ ID NO: 76996 - RNA, 1701 nt, Artificial Sequence
  derived and/or modified CDS sequence (opt1) from hemagglutinin__InfluenzaA__ALA08472
augaagaccaucaucgcccugagcuacauccucugccugguguucgcccagaagauccccggcaacgacaacuccaccgcgacgcugugccucgggcaccacgccgucccgaacggcaccaucgugaagaccaucaccaacgaccgcaucgaggugacgaacgccaccgagcugguccagaacagcuccaucggggagaucugcgacagcccccaccagauccuggacggcgagaacugcacccucaucgacgcccugcugggggacccccagugcgacggcuuccagaacaagaagugggaccucuucguggagcgguccaaggccuacagcaacugcuaccccuacgacgugccggacuacgcgucccugcgcagccuggucgccuccagcggcacccucgaguucaacaacgaguccuucaacuggacgggggugacccagaacggcaccagcuccgccugcauccggcgcagcuccagcuccuucuucagccggcugaacuggcugacccaccucaacuacacguaccccgcccugaacgugaccaugcccaacaacgagcaguucgacaagcuguacgucuggggcgugcaccaccccgggaccgacaaggaccagaucuuccucuacgcgcaguccagcgggcgcaucaccgugagcacgaagcggucccagcaggccgucaucccgaacaucggcagccgcccccggauccgcgacauccccucccggaucagcaucuacuggaccaucgugaagcccggcgacauccugcugaucaacuccaccgggaaccucaucgccccgcgcggcuacuucaagauccggagcgggaaguccagcaucaugcgcuccgacgcccccaucggcaagugcaagagcgagugcaucacccccaacggcuccauccccaacgacaagccguuccagaacgugaaccggaucacguacggggccugcccccgcuacgucaagcacagcacccugaagcuggcgaccggcaugcggaacgugcccgagaagcagacccgcgggaucuucggcgccaucgccggguucaucgagaacggcugggagggcaugguggacgggugguacggcuuccggcaccagaacuccgaggggcgcggccaggccgccgaccucaagagcacgcaggcggccaucgaccagaucaacgggaagcugaaccggcugaucggcaagaccaacgagaaguuccaccagaucgagaaggaguucuccgaggucgagggccgcauccaggaccucgagaaguacguggaggacaccaagaucgaccuguggagcuacaacgccgagcugcucguggcccuggagaaccagcacaccaucgaccugacggacuccgagaugaacaagcuguucgagaagaccaagaagcagcuccgcgagaacgccgaggacauggggaacggcugcuucaagaucuaccacaagugcgacaacgcgugcaucgggagcauccggaacggcaccuacgaccacaacgucuaccgcgacgaggcccugaacaaccgguuccagaucaaggggguggagcucaaguccggcuacaaggacuggauccuguggaucagcuucgccaucagcugcuuccugcucugcguggcccugcugggcuucaucaugugggccugccagaaggggaacauccgcugcaacaucugcaucuga

SEQ ID NO: 76997 - RNA, 1701 nt, Artificial Sequence; identical to SEQ ID NO: 76465
  derived and/or modified CDS sequence (opt1) from hemagglutinin__InfluenzaA__ALA08475

SEQ ID NO: 76998 - RNA, 1701 nt, Artificial Sequence
  derived and/or modified CDS sequence (opt1) from hemagglutinin__InfluenzaA__ALA08478
augaagaccaucaucgcccugagcuacauccucugccugguguucgcccagaagcugcccggcaacgacaacuccaccgcgacgcucugccuggggcaccacgccgucccgaacggcaccaucgugaagaccaucaccaacgaccgcaucgaggugacgaacgccaccgagcugguccagaacagcuccaucggggagaucugcgacagcccccaccagauccucgacggcaagaacugcacccugaucgacgcccugcucggggacccccagugcgacggcuuccagaacaagcggugggaccuguucguggagcgcuccaaggccuacagcaacugcuaccccuacgacgugccggacuacgcgucccugcggagccucgucgccuccagcggcacccuggaguucaacgacgaguccuucaacugggccggggugacgcagaacggcaccagcuccgccugcauccgcgggagcaacuccagcuucuucucccggcugaacuggcucacccacagcaacuucaaguaccccgcgcugaacgugaccaugcccaacaacgagcaguucgacaagcuguacaucuggggcguccaccaccccgggacggacaaggaccagaucuuccucuacgcccaguccagcggccgcaucaccgugagcaccaagcggucccagcaggccgugaucccgaacaucggcagccgcccccggauccgcaacauccccucccggaucagcaucuacuggaccaucgucaagcccggggacauccugcugaucaacuccacgggcaaccucaucgccccgcgcggguacuucaagauccagagcggcaaguccagcaucaugcgguccgacgcccccaucggcaagugcaagagcgagugcaucacccccaacggguccauccccaacgacaagccguuccagaacgugaaccgcaucaccuacggcgcgugcccccgguacgugaagcagagcacccugaagcuggccacggggaugcgcaacguccccgagaagcagacccggggcaucuucggggccaucgccggcuucaucgagaacggcugggaggggaugaaggacggcugguacggguuccgccaccagaacuccgagggccgggggcaggccgcggaccucaagagcacccaggccgccaucgaccagaucaacggcaagcugaaccgccugaucggcaagaccaacgagaaguuccaccagaucgagaaggaguucuccgagguggaggggcggauccaggaccucgagaaguacguggaggacacgaagaucgaccuguggagcuacaacgccgagcugcucgucgcccuggagaaccagcacaccaucgaccugaccgacuccgagaugaacaagcuguucgagaagaccaagaagcagcuccgcgagaacgcggaggacaugggcaacgggugcuucaagaucuaccacaagugcgacaacgccugcaucggcagcauccgcaacgggacguacgaccacgacguguaccgggacgaggcccugaacaaccgcuuccagaucaagggcguggagcucaaguccggcuacaaggacuggauccuguggaucagcuucgccaucagcugcuuccugcucugcgucgcccugcugggguucaucaugugggcgugccagaagggcaacauccggugcaacaucugcaucuga

SEQ ID NO: 76999 - RNA, 1701 nt, Artificial Sequence; identical to SEQ ID NO: 74018
  derived and/or modified CDS sequence (opt1) from hemagglutinin__InfluenzaA__ALA08479

SEQ ID NO: 77000 - RNA, 1701 nt, Artificial Sequence
  derived and/or modified CDS sequence (opt1) from hemagglutinin__InfluenzaA__ALA08481
augaagaccaucaucgcccugagcuacauccucugccugguguucgcccagaagcugcccggcaacgacaacuccaccgcgacgcucugccuggggcaccacgccgucccgaacggcaccaucgugaagaccaucaccaacgaccgcaucgaggugacgaacgccaccgagcugguccagaacagcuccaucggggagaucugcgacagcccccaccagauccucgacggcgagaacugcacccugaucgacgcccugcucggggacccccagugcgacggcuuccagaacaagaagugggaccuguucguggagcgguccaaggcccacagcaacugcuaccccuacgacgugccggacuacgcgucccugcgcagccucgucgccuccagcggcacccuggaguucaacaacgaguccuucaacugggccggggugacgcagaacggcaccagcuccagcugcauccggggguccaacagcuccuucuucagccgccugaacuggcucacccaccugaacuccaaguaccccgcccugaacgugaccaugcccaacaacgagcaguucgacaagcucuacaucuggggcguccaccaccccgggacggacaaggaccagaucuuccuguacgcgcagagcagcggccggaucaccguguccaccaagcgcagccagcaggccgugaucccgaacaucggcucccggccccgcauccgggacauccccagccgcaucuccaucuacuggaccaucgucaagcccggggacauccugcucaucaacagcacgggcaaccugaucgccccgcggggguacuucaagauccgcuccggcaagagcuccaucaugcggagcgacgcccccaucggcaagugcaaguccgagugcaucacccccaacgggagcauccccaacgacaagccguuccagaacgugaaccgcaucaccuacggcgccugcccccgguacgugaagcaguccacccugaagcucgcgacggggaugcgcaacguccccgagcggcagacccgcggcaucuucggggccaucgccggcuucaucgagaacggcugggaggggaugguggacggcugguacggguuccggcaccagaacagcgagggccgcgggcaggccgccgaccugaaguccacccaggcggccaucgaccagaucaacggcaagcugaaccggcucaucggcaagaccaacgagaaguuccaccagaucgagaaggaguucagcgagguggaggggcgcauccaggaccuggagaaguacgucgaggacacgaagaucgaccugugguccuacaacgccgagcuccugguggcccuggagaaccagcacaccaucgaccucaccgacagcgagaugaacaagcuguucgagaagaccaagaagcagcugcgcgagaacgccgaggacaugggcaacgggugcuucaagaucuaccacaagugcgacaacgcgugcaucggcuccauccggaacgggacguacgaccacgacguguaccgcgacgaggcccucaacaaccgguuccagaucaagggcgucgagcucaagagcggcuacaaggacuggauccuguggaucagcuucgccaucuccugcuuccugcugugcguggcccugcucggguucaucaugugggccugccagaagggcaacauccgcugcaacaucugcaucuga

SEQ ID NO: 77001 - RNA, 1701 nt, Artificial Sequence; identical to SEQ ID NO: 77000
  derived and/or modified CDS sequence (opt1) from hemagglutinin__InfluenzaA__ALA08482

SEQ ID NO: 77002 - RNA, 1701 nt, Artificial Sequence
  derived and/or modified CDS sequence (opt1) from hemagglutinin__InfluenzaA__ALA08483
augaagaccaucaucggccugagcuacauccucugccugguguucgcccagaagcugcccgggaacgacaacuccaccgccacgcucugccugggccaccacgcggucccgaacgggaccaucgugaagaccaucaccaacgaccgcaucgaggugacgaacgccaccgagcugguccagaacagcuccaucggcgagaucugcgacagcccccaccagauccucgacggggagaacugcacccugaucgacgcccugcucggcgacccccagugcgacggcuuccagaacaagaagugggaccuguucguggagcgguccaaggccuacagcaacugcuaccccuacgacgugccggacuacgccucccugcgcagccucgucgcguccagcgggacccuggaguucaacaacgaguccuucaacugggccggcgugacgcagaacgggaccagcuccagcugcauccggggcuccaacagcuccuucuucagccgccugaacuggcucacccaccugaacuccaaguaccccgcccugaacgugaccaugcccaacaacgagcaguucgacaagcucuacaucuggggcguccaccaccccgggacggacaaggaccagaucuuccuguacgcccagagcagcggccggaucaccguguccaccaagcgcagccagcaggcggugaucccgaacaucgggucccggccccgcauccgggacauccccagccgcaucuccaucuacuggaccaucgucaagcccggcgacauccugcucaucaacagcacggggaaccugaucgccccgcggggcuacuucaagauccgcuccggcaagagcuccaucaugcggagcgacgcccccaucgggaagugcaaguccgagugcaucacccccaacggcagcauccccaacgacaagccguuccagaacgugaaccgcaucaccuacggggccugcccccgguacgugaagcaguccacccugaagcucgccacgggcaugcgcaacguccccgagcggcagacccgcgggaucuucggcgcgaucgccggcuucaucgagaacgggugggagggcaugguggacgggugguacggcuuccggcaccagaacagcgaggggcgcggccaggccgccgaccugaaguccacccaggccgcgaucgaccagaucaacggcaagcugaaccggcucaucgggaagaccaacgagaaguuccaccagaucgagaaggaguucagcgagguggagggccgcauccaggaccuggagaaguacgucgaggacacgaagaucgaccugugguccuacaacgccgagcuccugguggcccuggagaaccagcacaccaucgaccucaccgacagcgagaugaacaagcuguucgagaagaccaagaagcagcugcgcgagaacgccgaggacauggggaacggcugcuucaagaucuaccacaagugcgacaacgccugcaucggguccauccggaacggcacguacgaccacgacguguaccgcgacgaggcgcucaacaaccgguuccagaucaagggcgucgagcucaagagcggguacaaggacuggauccuguggaucagcuucgccaucuccugcuuccugcugugcguggcccugcucggcuucaucaugugggccugccagaaggggaacauccgcugcaacaucugcaucuga

SEQ ID NO: 77003 - RNA, 1701 nt, Artificial Sequence
  derived and/or modified CDS sequence (opt1) from hemagglutinin__InfluenzaA__ALA08484
augaagaccaucaucgcccugagcuacauccucugccugguguucgcccagaagauccccggcaacgacaacuccaccgcgacgcugugccucgggcaccacgccgucccgaacggcaccaucgugaagaccaucaccaacgaccgcaucgaggugacgaacgccaccgagcugguccagaacagcuccaucggggagaucugcgacagcccccaccagauccuggacggcgagaacugcacccucaucgacgcccugcugggggacccccagugcgacggcuuccagaacaagaagugggaccucuucguggagcgguccaaggccuacagcaacugcuaccccuacgacgugccggacuacgcgucccugcgcagccuggucgccuccagcggcacccucgaguucaacaacgaguccuucaacuggacgggggugacccagaacggcaccagcuccgccugcauccggcgcagcuccagcuccuucuucagccggcugaacuggcugacccaccucaacuacacguaccccgcccugaacgugaccaugcccaacaacgagcaguucgacaagcuguacaucuggggcguccaccaccccgggaccgacaaggaccagaucuuccucuacgcgcaguccagcgggcgcaucaccaucagcacgaagcggucccagcaggccgugaucccgaacaucggcagccgcccccggauccgcgacauccccucccggaucagcaucuacuggaccaucgugaagcccggcgacauccugcugaucaacuccaccgggaaccucaucgccccgcgcggcuacuucaagauccggagcgggaaguccagcaucaugcgcuccgacgcccccaucggcaagugcaagagcgagugcaucacccccaacggcuccauccccaacgacaagccguuccagaacgucaaccggaucacguacggggccugcccccgcuacgugaagcacagcacccugaagcuggcgaccggcaugcggaacgugcccgagaagcagacccgcgggaucuucggcgccaucgccggguucaucgagaacggcugggagggcauggucgacgggugguacggcuuccggcaccagaacuccgaggggcgcggccaggccgccgaccucaagagcacgcaggcggccaucgaccagaucaacgggaagcugaaccggcugaucggcaagaccaacgagaaguuccaccagaucgagaaggaguucuccgagguggagggccgcauccaggaccucgagaaguacguggaggacaccaagaucgaccuguggagcuacaacgccgagcugcucgucgcccuggagaaccagcacaccaucgaccugacggacuccgagaugaacaagcuguucgagaagaccaagaagcagcuccgcgagaacgccgaggacauggggaacggcugcuucaagaucuaccacaagugcgacaacgcgugcaucgggagcauccggaacggcaccuacgaccacaacguguaccgcgacgaggcccugaacaaccgguuccagaucaaggggguggagcucaaguccggcuacaaggacuggauccuguggaucagcuucgccaucagcugcuuccugcucugcgucgcccugcugggcuucaucaugugggccugccagaaggggaacauccgcugcaacaucugcaucuga

SEQ ID NO: 77004 - RNA, 1701 nt, Artificial Sequence
  derived and/or modified CDS sequence (opt1) from hemagglutinin__InfluenzaA__ALA08488
augaagaccaucaucgcccugagcuacauccucugccugguguucgcccagaagauccccggcaacgggaacuccaccgcgacgcugugccucggccaccacgccgucccgaacgggaccaucgugaagaccaucaccaacgaccgcaucgaggugacgaacgccaccgagcugguccagaacagcuccaucggcgagaucugcgacagcccccaccagauccuggacggggagaacugcacccucaucgacgcccugcugggcgacccccagugcgacggcuuccagaacaagaagugggaccucuucguggagcgguccaaggccuacagcaacugcuaccccuacgacgugccggacuacgcgucccugcgcagccuggucgccuccagcgggacccucgaguucaacaacgaguccuucaacuggacgggcgugacccagaacgggaccagcuccgccugcauccggcgcagcuccagcuccuucuucagccggcugaacuggcugacccaccucaacuacacguaccccgcccugaacgugaccaugcccaacaacgagcaguucgacaagcuguacaucuggggcguccaccaccccgggaccgacaaggaccagaucuuccucuacgcgcaguccagcggccgcaucaccgugagcacgaagcggucccagcaggccgugaucccgaacaucggcagccgcccccggauccgcgacauccccucccggaucagcaucuacuggaccaucgucaagcccggggacauccugcugaucaacuccaccggcaaccucaucgccccgcgcggguacuucaagauccggagcggcaaguccagcaucaugcgcuccgacgcccccaucggcaagugcaagagcgagugcaucacccccaacggguccauccccaacgacaagccguuccagaacgugaaccggaucacguacggcgccugcccccgcuacgugaagcacagcacccugaagcuggcgaccgggaugcggaacguccccgagaagcagacccgcggcaucuucggggccaucgccggcuucaucgagaacggcugggaggggaugguggacggcugguacggguuccggcaccagaacuccgagggccgcgggcaggccgccgaccucaagagcacgcaggcggccaucgaccagaucaacggcaagcugaaccggcugaucggcaagaccaacgagaaguuccaccagaucgagaaggaguucuccgagguggaggggcgcauccaggaccucgagaaguacgucgaggacaccaagaucgaccuguggagcuacaacgccgagcugcucguggcccuggagaaccagcacaccaucgaccugacggacuccgagaugaacaagcuguucgagaagaccaagaagcagcuccgcgagaacgccgaggacaugggcaacgggugcuucaagaucuaccacaagugcgacaacgcgugcaucggcagcauccggaacgggaccuacgaccacaacguguaccgcgacgaggcccugaacaaccgguuccagaucaagggcgucgagcucaaguccggcuacaaggacuggauccuguggaucagcuucgccaucagcugcuuccugcucugcguggcccugcugggguucaucaugugggccugccagaagggcaacauccgcugcaacaucugcaucuga

SEQ ID NO: 77005 - RNA, 1701 nt, Artificial Sequence
  derived and/or modified CDS sequence (opt1) from hemagglutinin__InfluenzaA__ALA08490
augaagaccaucaucgcccugagcuacauccucugccugguguucgcccagaagauccccggcaacgacaacuccaccgcgacgcugugccucgggcaccacgccgucccgaacggcaccaucgugaagaccaucaccaacgaccgcaucgaggugacgaacgccaccgagcugguccagaacagcuccaucggggagaucugcgacagcccccaccagauccuggacggcgagaacugcacccucaucgacgcccugcugggggacccccagugcgacggcuuccagaacaagaagugggaccucuucguggagcgguccaaggccuacagcaacugcuaccccuacgacgugccggacuacgcgucccugcgcagccuggucgccuccagcggcacccucgaguucaacaacgaguccuucaacuggacgggggugacccagaacggcaccagcuccgccugcauccggcgcagcuccagcuccuucuucagccggcugaacuggcugacccaccucaacuacacguaccccgcccugaacgugaccaugcccaacaacgagcaguucgacaagcuguacaucuggggcguccaccaccccgggaccgacaaggaccagaucuuccucuacgcgcaguccagcgggcgcaucaccgugagcacgaagcggucccagcaggccgugaucccgaacaucggcagccgcccccggauccgcgacauccccucccggaucagcaucuacuggaccaucgucaagcccggcgacauccugcugaucaacuccaccgggaaccucaucgccccgcgcggcuacuucaagauccggagcgggaaguccagcaucaugcgcuccgacgcccccaucggcaagugcaagagcgagugcaucacccccaacggcuccauccccaacgacaagccguuccagaacgugaaccggaucacguacggggccugcccccgcuacgugaagcacagcacccugaagcuggcgaccggcaugcggaacguccccgagaagcagacccgcgggaucuucggcgccaucgccggguucaucgagaacggcugggagggcaugguggacgggugguacggcuuccggcaccagaacuccgaggggcgcggccaggccgccgaccucaagagcacgcaggcggccaucgaccagaucaacgggaagcugaaccggcugaucggcaagaccaacgagaaguuccaccagaucgagaaggaguucuccgagguggagggccgcauccaggaccucgagaaguacgucgaggacaccaagaucgaccuguggagcuacaacgccgagcugcucguggcccuggagaaccagcacaccaucgaccugacggacuccgagaugaacaagcuguucgagaagaccaagaagcagcuccgcgagaacgccgaggacauggggaacggcugcuucaagaucuaccacaagugcgacaacgcgugcaucgggagcauccggaacggcaccuacgaccacaacguguaccgcgacgaggcccugaacaaccgguuccagaucaaggggaucgagcucaaguccggcuacaaggacuggauccuguggaucagcuucgccaucagcugcuuccugcucugcgucgcccugcugggcuucaucaugugggccugccagaaggggaacauccgcugcaacaucugcaucuga

SEQ ID NO: 77006 - RNA, 1701 nt, Artificial Sequence
  derived and/or modified CDS sequence (opt1) from hemagglutinin__InfluenzaA__ALA08491
augaagaccaucaucgcccugagcuacauccucugccugguguucgcccagaagcugcccggcaacgacaacuccaccgcgacgcucugccuggggcaccacgccgucccgaacggcaccaucgugaagaccaucaccaacgaccgcaucgaggugacgaacgccaccgagcugguccagaacagcuccaucggggagaucugcgacagcccccaccagauccucgacggcgagaacugcacccugaucgacgcccugcucggggacccccagugcgacggcuuccagaacaagaagugggaccuguucguggagcgguccaaggccuacagcaacugcuaccccuacgacgugccggacuacgcgucccugcgcagccucgucgccuccagcggcacccuggaguucaacaacgaguccuucaacugggccggggugacgcagaacggcaccagcuccgccugcauccgggggagcaacuccagcuucuucucccgccugaacuggcucacccaccugaacuucaaguaccccgcgcugaacaugaccaugcccaacaacgagcaguucgacaagcucuacaucuggggcgugcaccaccccgggacggacaaggaccagaucuuccuguacgcccagagcuccggccggaucaccgucagcaccaagcgcagccagcaggccgugaucccgaacaucggcucccggccccgcauccggaacauccccagccgcaucuccaucuacuggaccaucgugaagcccggggacauccugcucaucaacagcacgggcaaccugaucgccccgcggggguacuucaagauccgcuccggcaagagcuccaucaugcggagcgacgcccccaucggcaagugcaaguccgagugcaucacccccaacgggagcauccccaacgacaagccguuccagaacgucaaccgcaucaccuacggcgcgugcccccgguacgugaagcaguccacccugaagcucgccacggggaugcgcaacgugcccgagaagcagacccggggcaucuucggggccaucgccggcuucaucgagaacggcugggaggggaugaaggacggcugguacggguuccgccaccagaacagcgagggccgggggcaggccgcggaccugaaguccacccaggccgccaucgaccagaucaacggcaagcugaaccgccucaucggcaagaccaacgagaaguuccaccagaucgagaaggaguucagcgaggucgaggggcggauccaggaccuggagaaguacguggaggacacgaagaucgaccugugguccuacaacgccgagcuccugguggcccuggagaaccagcacaccaucgaccucaccgacagcgagaugaacaagcuguucgagaagaccaagaagcagcugcgcgagaacgcggaggacaugggcaacgggugcuucaagaucuaccacaagugcgacaacgccugcaucggcuccauccgcaacgggacguacgaccacgacgucuaccgggacgaggcccucaacaaccgcuuccagaucaagggcguggagcucaagagcggcuacaaggacuggauccuguggaucuccuucgccaucagcugcuuccugcugugcguggcccugcucggguucaucaugugggcgugccagaagggcaacauccggugcaacaucugcaucuga

SEQ ID NO: 77007 - RNA, 1701 nt, Artificial Sequence; identical to SEQ ID NO: 77005
  derived and/or modified CDS sequence (opt1) from hemagglutinin__InfluenzaA__ALA08492

SEQ ID NO: 77008 - RNA, 1701 nt, Artificial Sequence
  derived and/or modified CDS sequence (opt1) from hemagglutinin__InfluenzaA__ALA08493
augaagaccaucaucgcccugagcuacauccucugccugguguucgcccagaagauccccggcaacgacaacuccaccgcgacgcugugccucgggcaccacgccgucccgaacggcaccaucgugaagaccaucaccaacgaccgcaucgaggugacgaacgccaccgagcugguccagaacagcuccaucggggagaucugcgacagcccccaccagauccuggacggcgagaacugcacccucaucgacgcccugcugggggacccccagugcgacggcuuccagaacaagaagugggaccucuucguggagcgguccaaggccuacagcaacugcuaccccuacgacgugccggacuacgcgucccugcgcagccuggucgccuccagcggcacccucgaguucaacaacgaguccuucaacuggacgggggugacccagaacggcaccagcuccgccugcauccggcgcagcuccagcuccuucuucagccggcugaacuggcugacccaccucaacuacacguaccccgcccugaacgugaccaugcccaacaacgagcaguucgacaagcuguacaucuggggcguccaccaccccgggaccgacaaggaccagaucuuccucuacgcgcaguccagcgggcgcaucaccgugagcacgaagcggucccagcaggccgugaucccgaacaucggcagccgcccccggauccgcgacauccccucccggaucagcaucuacuggaccaucgucaagcccggcgacauccugcugaucaacuccaccgggaaccucaucgccccgcgcggcuacuucaagauccggagcgggaaguccagcaucaugcgcuccgacgcccccaucggcaagugccggagcgagugcaucacccccaacggcuccauccccaacgacaagccguuccagaacgugaaccgcaucacguacggggccugcccccgguacgugaagcacagcacccugaagcuggcgaccggcaugcgcaacguccccgagaagcagacccgggggaucuucggcgccaucgccggguucaucgagaacggcugggagggcaugguggacgggugguacggcuuccgccaccagaacuccgaggggcggggccaggccgccgaccucaagagcacgcaggcggccaucgaccagaucaacgggaagcugaaccgccugaucggcaagaccaacgagaaguuccaccagaucgagaaggaguucuccgagguggagggccgcauccaggaccucgagaaguacgucgaggacaccaagaucgaccuguggagcuacaacgccgagcugcucguggcccuggagaaccagcacaccaucgaccugacggacuccgagaugaacaagcuguucgagaagaccaagaagcagcuccgggagaacgccgaggacauggggaacggcugcuucaagaucuaccacaagugcgacaacgcgugcaucgggagcauccgcaacggcaccuacgaccacaacguguaccgggacgaggcccugaacaaccgcuuccagaucaaggggaucgagcucaaguccggcuacaaggacuggauccuguggaucagcuucgccaucagcugcuuccugcucugcgucgcccugcugggcuucaucaugugggccugccagaaggggaacauccggugcaacaucugcaucuga

SEQ ID NO: 77009 - RNA, 1701 nt, Artificial Sequence
  derived and/or modified CDS sequence (opt1) from hemagglutinin__InfluenzaA__ALA08494
augaagaccaucaucgcccugagcuacauccucugccugguguucgcccagaagauccccggcaacgacaacuccaccgcgacgcugugccucgggcaccacgccgucccgaacggcaccaucgugaagaccaucaccaacgaccgcaucgaggugacgaacgccaccgagcugguccagaacagcuccaucggggagaucugcgacagcccccaccagauccuggacggcgagaacugcacccucaucgacgcccugcugggggacccccagugcgacggcuuccagaacaagaagugggaccucuucguggagcgguccaaggccuacagcaacugcuaccccuacgacgugccggacuacgcgucccugcgcagccuggucgccuccagcggcacccucgaguucaacaacgaguccuucaacuggacgggggugacccagaacggcaccagcuccgccugcauccggcgcagcuccagcuccuucuucagccggcugaacuggcugacccaccucaacuacacguaccccgcccugaacgugaccaugcccaacaacgagcaguucgacaagcuguacaucuggggcguccaccaccccgggaccgacaaggaccagaucuuccucuacgcgcaguccagcgggcgcaucaccgugagcacgaagggcucccagcaggccgugaucccgaacaucggcagccggccccgcauccgggacauccccucccgcaucagcaucuacuggaccaucgucaagcccggggacauccugcugaucaacuccaccggcaaccucaucgccccgcggggguacuucaagauccgcagcggcaaguccagcaucaugcgguccgacgcccccaucggcaagugcaagagcgagugcaucacccccaacggguccauccccaacgacaagccguuccagaacgugaaccgcaucacguacggcgccugcccccgguacgugaagcacagcacccugaagcuggcgaccgggaugcgcaacguccccgagaagcagacccggggcaucuucggggccaucgccggcuucaucgagaacggcugggaggggaugguggacggcugguacggguuccgccaccagaacuccgagggccgggggcaggccgccgaccucaagagcacgcaggcggccaucgaccagaucaacggcaagcugaaccgccugaucggcaagaccaacgagaaguuccaccagaucgagaaggaguucuccgagguggaggggcggauccaggaccucgagaaguacgucgaggacaccaagaucgaccuguggagcuacaacgccgagcugcucguggcccuggagaaccagcacaccaucgaccugacggacuccgagaugaacaagcuguucgagaagaccaagaagcagcuccgcgagaacgccgaggacaugggcaacgggugcuucaagaucuaccacaagugcgacaacgcgugcaucggcagcauccgcaacgggaccuacgaccacaacguguaccgggacgaggcccugaacaaccgcuuccagaucaagggcgucgagcucaaguccggcuacaaggacuggauccuguggaucagcuucgccaucagcugcuuccugcucugcguggcccugcugggguucaucaugugggccugccagaagggcaacauccggugcaacaucugcaucuga

SEQ ID NO: 77010 - RNA, 1701 nt, Artificial Sequence; identical to SEQ ID NO: 77009
  derived and/or modified CDS sequence (opt1) from hemagglutinin__InfluenzaA__ALA08495

SEQ ID NO: 77011 - RNA, 1701 nt, Artificial Sequence; identical to SEQ ID NO: 77009
  derived and/or modified CDS sequence (opt1) from hemagglutinin__InfluenzaA__ALA08496

SEQ ID NO: 77012 - RNA, 1701 nt, Artificial Sequence; identical to SEQ ID NO: 76465
  derived and/or modified CDS sequence (opt1) from hemagglutinin__InfluenzaA__ALA08497

SEQ ID NO: 77013 - RNA, 1701 nt, Artificial Sequence; identical to SEQ ID NO: 76465
  derived and/or modified CDS sequence (opt1) from hemagglutinin__InfluenzaA__ALA08498

SEQ ID NO: 77014 - RNA, 1701 nt, Artificial Sequence
  derived and/or modified CDS sequence (opt1) from hemagglutinin__InfluenzaA__ALA08499
augaagaccaucaucgcccugagcuacauccucugccugguguucgcccagaagcugcccgagaacgacaacuccaccgcgacgcucugccugggccaccacgccgucccgaacgggaccaucgugaagaccaucaccagcgaccgcaucgaggugacgaacgccaccgagcugguccagaacuccagcaucggcgagaucugcgacagcccccaccagauccucgacgggaagaacugcacccugaucgacgcccugcucggcgacccccagugcgacggguuccagaacaagaagugggaccuguucguggagcggagcaaggccuacuccaacugcuaccccuacgacgugccggacuacgcgagccugcgcucccucgucgccagcuccggcacccuggaguucaacgacgagagcuucaacugggccggcgugacgcagaacgggaccuccagcgccugcauccggggcuccaacagcuccuucuucagccgccugaacuggcucacccacuccaacuucaaguaccccgcgcugaacgugaccaugcccaacaacgagcaguucgacaagcuguacaucuggggcguccaccaccccgggacggacaaggaccagaucuuccucuacgcccagagcagcgggcggaucaccguguccaccaagcgcagccagcaggccgugaucccgaacaucggcucccggccccgcauccgggacauccccagccgcaucuccaucuacuggaccaucgucaagcccggcgacauccugcugaucaacagcacggggaaccucaucgccccgcggggcuacuucaagauccgcuccgggaaguccuccaucaugcggagcgacgcccccaucggcaagugcaaguccgagugcaucacccccaacggcagcauccccaacgacaagccguuccagaacgugaaccgcaucaccuacggggcgugcccccgguacgugaagcaguccacccugaagcuggccacgggcaugcgcaacguccccgagaagcagacccgggggaucuucggcgccaucgccggguucaucgagaacggcugggagggcaugaaggacgggugguacggcuuccgccaccagaacagcgaggggcggggccaggccgcggaccucaaguccacccaggccgccaucgaccagaucaacgggaagcugaaccgccugaucggcaagaccaacgagaaguuccaccagaucgagaaggaguucagcgagguggagggccggauccaggaccucgagaaguacguggaggacacgaaggucgaccugugguccuacaacgccgagcugcucguggcccuggagaaccagcacaccaucgaccugaccgacagcgagaugaacaagcuguucgagaagaccaagaagcagcuccgcgagaacgcggaggacauggggaacggcugcuucaagaucuaccacaagugcgacaacgccugcaucggguccauccgcaacggcacguacgaccacgacguguaccgggacgaggcccugaacaaccgcuuccagaucaagggggucgagcucaagagcggcuacaaggacuggauccuguggaucagcuucgccaucuccugcuuccugcucugcguggcccugcugggcuucaucaugugggcgugccagaaggggaacauccggugcaacaucugcaucuga

SEQ ID NO: 77015 - RNA, 1701 nt, Artificial Sequence; identical to SEQ ID NO: 76998
  derived and/or modified CDS sequence (opt1) from hemagglutinin__InfluenzaA__ALA08501

SEQ ID NO: 77016 - RNA, 1701 nt, Artificial Sequence
  derived and/or modified CDS sequence (opt1) from hemagglutinin__InfluenzaA__ALA08502
augaagaccaucaucgcccugagcuacauccucugccugguguucgcccagaagcugcccgagaacgacaacuccaccgcgacgcucugccugggccaccacgccgucccgaacgggaccaucgugaagaccaucaccagcgaccgcaucgaggugacgaacgccaccgagcugguccagaacuccagcaucggcgagaucugcgacagcccccaccagauccucgacgggaagaacugcacccugaucgacgcccugcucggcgacccccagugcgacggguuccagaacaagaagugggaccuguucguggagcggagcaaggccuacuccaacugcuaccccuacgacgugccggacuacgcgagccugcgcucccucgucgccagcuccggcacccuggaguucaacgacgagagcuucaacugggccggcgugacgcagaacgggaccuccagcgccugcauccggggcuccaacagcuccuucuucagccgccugaacuggcucacccacuccaacuucaaguaccccgcgcugaacgugaccaugcccaacaacgagcaguucgacaagcuguacaucuggggcguccaccaccccgggacggacaaggaccagaucuuccucuacgcccagagcagcgggcggaucaccguguccaccaagcgcagccagcaggccgugaucccgaacaucggcucccggccccgcauccggaacauccccagccgcaucuccaucuacuggaccaucgucaagcccggcgacauccugcugaucaacagcacggggaaccucaucgccccgcggggcuacuucaagauccgcuccgggaaguccuccaucaugcggagcgacgcccccaucggcaagugcaaguccgagugcaucacccccaacggcagcauccccaacgacaagccguuccagaacgugaaccgcaucaccuacggggcgugcccccgguacgugaagcaguccacccugaagcuggccacgggcaugcgcaacguccccgagaagcagacccgggggaucuucggcgccaucgccggguucaucgagaacggcugggagggcaugaaggacgggugguacggcuuccgccaccagaacagcgaggggcggggccaggccgcggaccucaaguccacccaggccgccaucgaccagaucaacgggaagcugaaccgccugaucggcaagaccaacgagaaguuccaccagaucgagaaggaguucagcgagguggagggccggauccaggaccucgagaaguacguggaggacacgaaggucgaccugugguccuacaacgccgagcugcucguggcccuggagaaccagcacaccaucgaccugaccgacagcgagaugaacaagcuguucgagaagaccaagaagcagcuccgcgagaacgcggaggacauggggaacggcugcuucaagaucuaccacaagugcgacaacgccugcaucggguccauccgcaacggcacguacgaccacgacguguaccgggacgaggcccugaacaaccgcuuccagaucaagggggucgagcucaagagcggcuacaaggacuggauccuguggaucagcuucgccaucuccugcuuccugcucugcguggcccugcugggcuucaucaugugggcgugccagaaggggaacauccggugcaacaucugcaucuga

SEQ ID NO: 77017 - RNA, 1701 nt, Artificial Sequence; identical to SEQ ID NO: 77016
  derived and/or modified CDS sequence (opt1) from hemagglutinin__InfluenzaA__ALA08503

SEQ ID NO: 77018 - RNA, 1701 nt, Artificial Sequence; identical to SEQ ID NO: 76465
  derived and/or modified CDS sequence (opt1) from hemagglutinin__InfluenzaA__ALA08504

SEQ ID NO: 77019 - RNA, 1701 nt, Artificial Sequence; identical to SEQ ID NO: 76465
  derived and/or modified CDS sequence (opt1) from hemagglutinin__InfluenzaA__ALA08505

SEQ ID NO: 77020 - RNA, 1701 nt, Artificial Sequence; identical to SEQ ID NO: 76465
  derived and/or modified CDS sequence (opt1) from hemagglutinin__InfluenzaA__ALA08506

SEQ ID NO: 77021 - RNA, 1701 nt, Artificial Sequence; identical to SEQ ID NO: 76465
  derived and/or modified CDS sequence (opt1) from hemagglutinin__InfluenzaA__ALA08507

SEQ ID NO: 77022 - RNA, 1701 nt, Artificial Sequence
  derived and/or modified CDS sequence (opt1) from hemagglutinin__InfluenzaA__ALA08508
augaagaccaucaucgcccugagcuacauccucugccugguguucgcccagaagcugcccgagaacgacaacuccaccgcgacgcucugccugggccaccacgccgucccgaacgggaccaucgugaagaccaucaccagcgaccgcaucgaggugacgaacgccaccgagcugguccagaacuccagcaucggcgagaucugcgacagcccccaccagauccucgacgggaagaacugcacccugaucgacgcccugcucggcgacccccagugcgacggguuccagaacaagaagugggaccuguucguggagcggagcaaggccuacuccaacugcuaccccuacgacgugccggacuacgcgagccugcgcucccucgucgccagcuccggcacccuggaguucaacgacgagagcuucaacugggccggcgugacgcagaacgggaccuccagcgccugcauccggggcuccaacagcuccuucuucagccgccugaacuggcucacccacuccaacuucaaguaccccgcgcugaacgugaccaugcccaacaacgagcaguucgacaagcuguacaucuggggcguccaccaccccgggacggacaaggaccagaucuuccucuacgcccagagcagcgggcggaucaccguguccaccaagcgcagccagcaggccgugaucccgaacaucggcucccggccccgcauccggaacauccccagccgcaucuccaucuacuggaccaucgucaagcccggcgacauccugcugaucaacagcacggggaaccucaucgccccgcggggcuacuucaagauccgcuccgggaaguccuccaucaugcggagcgacgcccccaucggcaagugcaaguccgagugcaucacccccaacggcagcauccccaacgacaagccguuccagaacgugaaccgcaucaccuacggggcgugcccccgguacgugaagcaguccacccugaagcuggccacgggcaugcgcaacguccccgagaagcagacccgggggaucuucggcgccaucgccggguucaucgagaacggcugggagggcaugaaggacgggugguacggcuuccgccaccagaacagcgaggggcggggccaggccgcggaccucaaguccacccaggccgccaucgaccagaucaacgggaagcugaaccgccugaucggcaagaccaacgagaaguuccaccagaucgagaaggaguucagcgagguggagggccggauccaggaccucgagaaguacguggaggacacgaagaucgaccugugguccuacaacgccgagcugcucgucgcccuggagaaccagcacaccaucgaccugaccgacagcgagaugaacaagcuguucgagaagaccaagaagcagcuccgcgagaacgcggaggacauggggaacggcugcuucaagaucuaccacaagugcgacaacgccugcaucggguccauccgcaacggcacguacgaccacgacguguaccgggacgaggcccugaacaaccgcuuccagaucaaggggguggagcucaagagcggcuacaaggacuggauccuguggaucagcuucgccaucuccugcuuccugcucugcgucgcccugcugggcuucaucaugugggcgugccagaaggggaacauccggugcaacaucugcaucuga

SEQ ID NO: 77023 - RNA, 1701 nt, Artificial Sequence; identical to SEQ ID NO: 76465
  derived and/or modified CDS sequence (opt1) from hemagglutinin__InfluenzaA__ALA08509

SEQ ID NO: 77024 - RNA, 1701 nt, Artificial Sequence; identical to SEQ ID NO: 76465
  derived and/or modified CDS sequence (opt1) from hemagglutinin__InfluenzaA__ALA08510

SEQ ID NO: 77025 - RNA, 1701 nt, Artificial Sequence
  derived and/or modified CDS sequence (opt1) from hemagglutinin__InfluenzaA__ALA08511
augaagaccaucaucgcccugagcuacauccucugccugguguucgcccagaagauccccggcaacgacaacuccaccgcgacgcugugccucgggcaccacgccgucccgaacggcaccaucgugaagaccaucaccaacgaccgcaucgaggugacgaacgccaccgagcugguccagaacagcuccaucggggagaucugcgacagcccccaccagauccuggacggcgagaacugcacccucaucgacgcccugcugggggacccccagugcgacggcuuccagaacaagaagugggaccucuucguggagcgguccaaggccuacagcaacugcuaccccuacgacgugccggacuacgcgucccugcgcagccuggucgccuccagcggcacccucgaguucaacaacgaguccuucaacuggacgggggugacccagaacggcaccagcuccagcugcauccggcgcuccagcuccagcuucuucucccggcugaacuggcugacccaccucaacuacacguaccccgcccugaacgugaccaugcccaacaacgagcaguucgacaagcuguacaucuggggcguccaccaccccagcaccgacaaggaccagaucuuccucuacgcccagagcuccgggcgcaucaccgugagcacgaagcggucccagcaggcggugaucccgaacaucgggagccgcccccggauccgcgacauccccucccggaucagcaucuacuggaccaucgucaagcccggcgacauccugcugaucaacuccaccggcaaccucaucgccccgcgcggguacuucaagauccggagcggcaaguccagcaucaugcgcuccgacgcccccaucgggaagugcaagagcgagugcaucacccccaacggcuccauccccaacgacaagccguuccagaacgugaaccggaucacguacggcgccugcccccgcuacgugaagcacagcacccugaagcuggccaccgggaugcggaacguccccgagaagcagacccgcggcaucuucggggcgaucgccggcuucaucgagaacgggugggagggcaugguggacggcugguacggguuccggcaccagaacuccgagggccgcgggcaggccgccgaccucaagagcacgcaggccgcgaucgaccagaucaacggcaagcugaaccggcugaucgggaagaccaacgagaaguuccaccagaucgagaaggaguucuccgagguggagggccgcauccaggaccucgagaaguacgucgaggacaccaagaucgaccuguggagcuacaacgccgagcugcucguggcccuggagaaccagcacaccaucgaccugacggacuccgagaugaacaagcuguucgagaagaccaagaagcagcuccgcgagaacgccgaggacaugggcaacgggugcuucaagaucuaccacaagugcgacaacgccugcaucggcagcauccggaacgggaccuacgaccacaacguguaccgcgacgaggcgcugaacaaccgguuccagaucaagggcgucgagcucaagagcggguacaaggacuggauccuguggaucuccuucgccaucagcugcuuccugcucugcguggcccugcugggcuucaucaugugggccugccagaagggcaacauccgcugcaacaucugcaucuga

SEQ ID NO: 77026 - RNA, 1701 nt, Artificial Sequence; identical to SEQ ID NO: 76465
  derived and/or modified CDS sequence (opt1) from hemagglutinin__InfluenzaA__ALA08512

SEQ ID NO: 77027 - RNA, 1701 nt, Artificial Sequence; identical to SEQ ID NO: 76465
  derived and/or modified CDS sequence (opt1) from hemagglutinin__InfluenzaA__ALA08514

SEQ ID NO: 77028 - RNA, 1701 nt, Artificial Sequence; identical to SEQ ID NO: 76465
  derived and/or modified CDS sequence (opt1) from hemagglutinin__InfluenzaA__ALA08515

SEQ ID NO: 77029 - RNA, 1701 nt, Artificial Sequence; identical to SEQ ID NO: 76465
  derived and/or modified CDS sequence (opt1) from hemagglutinin__InfluenzaA__ALA08516

SEQ ID NO: 77030 - RNA, 1701 nt, Artificial Sequence; identical to SEQ ID NO: 77022
  derived and/or modified CDS sequence (opt1) from hemagglutinin__InfluenzaA__ALA08517

SEQ ID NO: 77031 - RNA, 1701 nt, Artificial Sequence; identical to SEQ ID NO: 76465
  derived and/or modified CDS sequence (opt1) from hemagglutinin__InfluenzaA__ALA08519

SEQ ID NO: 77032 - RNA, 1701 nt, Artificial Sequence
  derived and/or modified CDS sequence (opt1) from hemagglutinin__InfluenzaA__ALA08520
augaagaccaucaucgcccugagcuacauccucugccugguguucgcccagaagauccccggcaacgacaacuccaccgcgacgcugugccucgggcaccacgccgucccgaacggcaccaucgugaagaccaucaccaacgaccgcaucgaggugacgaacgccaccgagcugguccagaacagcuccaucggggagaucugcgacagcccccaccagauccuggacggcgagaacugcacccucaucgacgcccugcugggggacccccagugcgacggcuuccagaacaagaagugggaccucuucguggagcgguccaaggccuacagcaacugcuaccccuacgacgugccggacuacgcgucccugcgcagccuggucgccuccagcggcacccucgaguucaacaacgaguccuucaacuggacgggggugacccagaacggcaccagcuccgccugcauccggcgcagcuccagcuccuucuucagccggcugaacuggcugacccaccucaacuacacguaccccgcccugaacgugaccaugcccaacaacgagcaguucgacaagcuguacaucuggggcguccaccaccccgggaccgacaaggaccagaucuuccucuacgcgcagccguccgggcgcaucaccgugagcacgaagcggagccagcaggccgugauccccaacaucggcucccgcccccggauccgcgacauccccagccggaucuccaucuacuggaccaucgucaagccgggcgacauccugcugaucaacagcaccgggaaccucaucgcgccccgcggcuacuucaagauccggaacgggaaguccagcaucaugcgcuccgacgcccccaucggcaagugcaagagcgagugcaucacccccaacggcuccaucccgaacgacaagcccuuccagaacgugaaccggaucacguacggggccugcccccgcuacgugaagcacagcacccugaagcuggccaccggcaugcggaacguccccgagaagcagacccgcgggaucuucggcgccaucgccggguucaucgagaacggcugggagggcaugguggacgggugguacggcuuccggcaccagaacuccgaggggcgcggccaggccgccgaccucaagagcacgcaggcggccaucgaccagaucaacgggaagcugaaccggcugaucggcaagaccaacgagaaguuccaccagaucgagaaggaguucuccgagguggagggccgcauccaggaccucgagaaguacgucgaggacaccaagaucgaccuguggagcuacaacgccgagcugcucguggcccuggagaaccagcacaccaucgaccugacggacuccgagaugaacaagcuguucgagaagaccaagaagcagcuccgcgagaacgccgaggacauggggaacggcugcuucaagaucuaccacaagugcgacaacgcgugcaucgggagcauccggaacggcaccuacgaccacaacguguaccgcgacgaggcccugaacaaccgguuccagaucaagggggucgagcucaaguccggcuacaaggacuggauccuguggaucagcuucgccaucuccugcuuccugcucugcguggcccugcugggcuucaucaugugggccugccagaaggggaacauccgcugcaacaucugcaucuga

SEQ ID NO: 77033 - RNA, 1701 nt, Artificial Sequence; identical to SEQ ID NO: 74162
  derived and/or modified CDS sequence (opt1) from hemagglutinin__InfluenzaA__ALA08522

SEQ ID NO: 77034 - RNA, 1701 nt, Artificial Sequence
  derived and/or modified CDS sequence (opt1) from hemagglutinin__InfluenzaA__ALA08523
augaagaccaucaucgcccugagcuacauccucugccugguguucgcccagaagauccccggcaacgacaacuccaccgcgacgcugugccucgggcaccacgccgucccgaacggcaccaucgugaagaccaucaccaacgaccgcaucgaggugacgaacgccaccgagcugguccagaacagcuccaucggggagaucugcgacagcccccaccagauccuggacggcgagaacugcacccucaucgacgcccugcugggggacccccagugcgacggcuuccagaacaagaagugggaccucuucguggagcgguccaaggccuacagcaacugcuaccccuacgacgugccggacuacgcgucccugcgcagccuggucgccuccagcggcacccucgaguucaacaacgaguccuucaacuggacgggggugacccagaacggcaccagcuccgccugcauccggcgcagcuccagcuccuucuucagccggcugaacuggcugacccaccucaacuacacguaccccgcccugaacgugaccaugcccaacaacgagcaguucgacaagcuguacaucuggggcguccaccaccccgggaccgacaaggaccagaucuuccucuacgcgcaguccagcgggcgcaucaccgugagcacgaagcggucccagcaggccgugaucccgaacaucggcagccgcccccggauccgcgacauccccucccggaucagcaucuacuggaccaucgucaagcccggcgacauccugcugaucaacuccaucgggaaccucaucgccccgcgcggcuacuucaagauccggagcgggaaguccagcaucaugcgcuccgacgcccccaucggcaagugcaagagcgagugcaucacccccaacggcuccauccccaacgacaagccguuccagaacgugaaccggaucaccuacggggccugcccccgcuacgugaagcacagcacgcugaagcuggcgaccggcaugcggaacguccccgagaagcagacccgcgggaucuucggcgccaucgccggguucaucgagaacggcugggagggcaugguggacgggugguacggcuuccggcaccagaacuccgaggggcgcggccaggccgccgaccucaagagcacccaggcggccaucgaccagaucaacgggaagcugaaccggcugaucggcaagacgaacgagaaguuccaccagaucgagaaggaguucuccgagguggagggccgcauccaggaccucgagaaguacgucgaggacaccaagaucgaccuguggagcuacaacgccgagcugcucguggcccuggagaaccagcacaccaucgaccugaccgacuccgagaugaacaagcuguucgagaagacgaagaagcagcuccgcgagaacgccgaggacauggggaacggcugcuucaagaucuaccacaagugcgacaacgcgugcaucgggagcauccggaacggcaccuacgaccacaacguguaccgcgacgaggcccugaacaaccgguuccagaucaagggggucgagcucaaguccggcuacaaggacuggauccuguggaucagcuucgccaucagcugcuuccugcucugcguggcccugcugggcuucaucaugugggccugccagaaggggaacauccgcugcaacaucugcaucuga

SEQ ID NO: 77035 - RNA, 1701 nt, Artificial Sequence
  derived and/or modified CDS sequence (opt1) from hemagglutinin__InfluenzaA__ALA08524
augaagaccaucaucgcccugagcuacauccucugcaugguguucgcccagaagauccccggcaacgacaacuccaccgcgacgcugugccuggggcaccacgccgucccgaacggcaccaucgugaagaccaucaccaacgaccgcaucgaggugacgaacgccaccgagcucguccagaacagcuccaucggggagaucugcgacagcccccaccagauccuggacggcgagaacugcacccugaucgacgcccuccugggggacccccagugcgacggcuuccagaacaagaagugggaccuguucguggagcgguccaaggccuacagcaacugcuaccccuacgacgugccggacuacgcgucccuccgcagccuggucgccuccagcggcacccuggaguucaacaacgaguccuucaacuggacgggggugacccagaacggcaccagcuccgccugcauccggcgcagcuccagcuccuucuucagccggcucaacuggcugacccaccugaacuacacguaccccgcccucaacgugaccaugcccaacaacgagcaguucgacaagcuguacaucuggggcguccaccaccccgggaccgacaaggaccagaucuuccuguacgcgcaguccagcgggcgcaucaccgugagcacgaagcggucccagcaggccgugaucccgaacaucggcagccgccuccggauccgcgacauccccucccggaucagcaucuacuggaccaucgucaagcccggcgacauccugcugaucaacuccaccgggaaccucaucgcgccccgcggcuacuucaagauccggagcgggaaguccagcaucaugcgcuccgacgccccgaucggcaagugcaagagcgagugcaucacccccaacggcuccauccccaacgacaagcccuuccagaacgugaaccggaucacguacggggccugcccgcgcuacgugaagcacagcacccugaagcuggccaccggcaugcggaacguccccgagaagcagacccgcgggaucuucggcgccaucgccggguucaucgagaacggcugggagggcaugguggacgggugguacggcuuccggcaccagaacuccgaggggcgcggccaggccgccgaccucaagagcacgcaggcggccaucgaccagaucaacgggaagcugaaccggcugaucggcaagaccaacgagaaguuccaccagaucgagaaggaguucuccgagguggagggccgcauccaggaccucgagaaguacgucgaggacaccaagaucgaccuguggagcuacaacgccgagcugcucguggcccuggagaaccagcacaccaucgaccugacggacuccgagaugaacaagcuguucgagaagaccaagaagcagcuccgcgagaacgccgaggacauggggaacggcugcuucaagaucuaccacaagugcgacaacgcgugcaucgggagcauccggaacggcaccuacgaccacaacguguaccgcgacgaggcccugaacaaccgguuccagaucaagggggucgagcucaaguccggcuacaaggacuggauccuguggaucagcuucgccaucagcugcuuccugcucugcguggcccugcugggcuucaucaugugggccugccagaaggggaacauccgcugcaacaucugcaucuga

SEQ ID NO: 77036 - RNA, 1701 nt, Artificial Sequence; identical to SEQ ID NO: 76465
  derived and/or modified CDS sequence (opt1) from hemagglutinin__InfluenzaA__ALA08525

SEQ ID NO: 77037 - RNA, 1701 nt, Artificial Sequence; identical to SEQ ID NO: 76465
  derived and/or modified CDS sequence (opt1) from hemagglutinin__InfluenzaA__ALA08526

SEQ ID NO: 77038 - RNA, 1701 nt, Artificial Sequence; identical to SEQ ID NO: 77022
  derived and/or modified CDS sequence (opt1) from hemagglutinin__InfluenzaA__ALA08527

SEQ ID NO: 77039 - RNA, 1701 nt, Artificial Sequence
  derived and/or modified CDS sequence (opt1) from hemagglutinin__InfluenzaA__ALA08528
augaagaccaucaucgcccugagcuacauccucugccugguguucgcccagaagcugcccgagaacgacaacuccaccgcgacgcucugccugggccaccacgccgucccgaacgggaccaucgugaagaccaucaccagcgaccgcaucgaggugacgaacgccaccgagcugguccagaacuccagcaucggcgagaucugcgacagcccccaccagauccucgacgggaagaacugcacccugaucgacgcccugcucggcgacccccagugcgacggguuccagaacaagaagugggaccuguucguggagcggagcaaggccuacuccaacugcuaccccuacgacgugccggacuacgcgagccugcgcucccucgucgccagcuccggcacccuggaguucaacgacgagagcuucaacugggccggcgugacgcagaacgggaccuccagcgccugcauccggggcuccaacagcuccuucuucagccgccugaacuggcucacccacuccaacuucaaguaccccgcgcugaacgugaccaugcccaacaacgagcaguucgacaagcuguacaucuggggcguccaccaccccgggacggacaaggaccagaucuaccucuacgcccagagcagcgggcggaucaccguguccaccaagcgcagccagcaggccgugaucccgaacaucggcucccggccccgcauccggaacauccccagccgcaucuccaucuacuggaccaucgucaagcccggcgacauccugcugaucaacagcacggggaaccucaucgccccgcggggcuacuucaagauccgcuccgggaaguccuccaucaugcggagcgacgcccccaucggcaagugcaaguccgagugcaucacccccaacggcagcauccccaacgacaagccguuccagaacgugaaccgcaucaccuacggggcgugcccccgguacgugaagcaguccacccugaagcuggccacgggcaugcgcaacguccccgagaagcagacccgggggaucuucggcgccaucgccggguucaucgagaacggcugggagggcaugaaggacgggugguacggcuuccgccaccagaacagcgaggggcggggccaggccgcggaccucaaguccacccaggccgccaucgaccagaucaacgggaagcugaaccgccugaucggcaagaccaacgagaaguuccaccagaucgagaaggaguucagcgagguggagggccggauccaggaccucgagaaguacguggaggacacgaagaucgaccugugguccuacaacgccgagcugcucgucgcccuggagaaccagcacaccaucgaccugaccgacagcgagaugaacaagcuguucgagaagaccaagaagcagaugcgcgagaacgcggaggacauggggaacggcugcuucaagaucuaccacaagugcgacaacgccugcaucggguccauccgcaacggcacguacgaccacgacguguaccgggacgaggcccugaacaaccgcuuccagaucaaggggguggagcucaagagcggcuacaaggacuggauccucuggaucagcuucgccaucuccugcuuccugcugugcgucgcccuccugggcuucaucaugugggcgugccagaaggggaacauccggugcaacaucugcaucuga

SEQ ID NO: 77040 - RNA, 1701 nt, Artificial Sequence; identical to SEQ ID NO: 76465
  derived and/or modified CDS sequence (opt1) from hemagglutinin__InfluenzaA__ALA08529

SEQ ID NO: 77041 - RNA, 1701 nt, Artificial Sequence; identical to SEQ ID NO: 76465
  derived and/or modified CDS sequence (opt1) from hemagglutinin__InfluenzaA__ALA08530

SEQ ID NO: 77042 - RNA, 1701 nt, Artificial Sequence
  derived and/or modified CDS sequence (opt1) from hemagglutinin__InfluenzaA__ALA08531
augaagaccaucaucgcccugagcuacauccucugccugguguucgcccagaagcugcccgagaacgacaacuccaccgcgacgcucugccugggccaccacgccgucccgaacgggaccaucgugaagaccaucaccagcgaccgcaucgaggugacgaacgccaccgagcugguccagaacuccagcaucggcgagaucugcgacagcccccaccagauccucgacgggaagaacugcacccugaucgacgcccugcucggcgacccccagugcgacggguuccagaacaagaagugggaccuguucguggagcggagcaaggccuacuccaacugcuaccccuacgacgugccggacuacgcgagccugcgcucccucgucgccagcuccggcacccuggaguucaacgacgagagcuucaacugggccggcgugacgcagaacgggaccuccagcgccugcauccggggcuccaacagcuccuucuucagccgccugaacuggcucacccacuccaacuucaaguaccccgcgcugaacgugaccaugcccaacaacgagcaguucgacaagcuguacaucuggggcguccaccaccccgggacggacaaggaccagaucuuccucuacgcccagagcagcgggcggaucaccguguccaccaagcgcagccagcaggccgugaucccgaacaucggcucccggccccgcauccggaacauccccagccgcaucuccaucuacuggaccaucgucaagcccggcgacauccugcugaucaacagcacggggaaccucaucgccccgcggggcuacuucaagauccgcuccgggaaguccuccaucaugcggagcgacgcccccaucggcaagugcaaguccgagugcaucacccccaacggcagcauccccaacgacaagccguuccagaacgugaaccgcaucaccuacggggcgugcccccgguacgugaagcaguccacccugaagcuggccacgggcaugcgcaacguccccgagaagcagacccgggggaucuucggcgccaucgccggguucaucgagaacggcugggagggcaugaaggacgggugguacggcuuccgccaccagaacagcgaggggcggggccaggccgcggaccucaaguccacccaggccgccaucgaccagaucaacgggaagcugaaccgccugaucggcaagaccaacgagaaguuccaccagaucgagaaggaguucagcgagguggagggccggauccaggaccucgagaaguacguggaggacacgaagaucgaccugugguccuacaacgccgagcugcucgucgcccuggagaaccagcacaccaucgaccugaccgacagcgagaugaacaagcuguucgagaagaccaagaagcagcuccgcgagaacgcggaggacauggggaacggcugcuucaagaucuaccacaagugcgacaacgccugcaucggguccauccgcaacggcacguacaaccacgacguguaccgggacgaggcccugaacaaccgcuuccagaucaaggggguggagcucaagagcggcuacaaggacuggauccuguggaucagcuucgccaucuccugcuuccugcucugcgucgcccugcugggcuucaucaugugggcgugccagaaggggaacauccggugcaacaucugcaucuga

SEQ ID NO: 77043 - RNA, 1701 nt, Artificial Sequence; identical to SEQ ID NO: 76465
  derived and/or modified CDS sequence (opt1) from hemagglutinin__InfluenzaA__ALA08532

SEQ ID NO: 77044 - RNA, 1701 nt, Artificial Sequence; identical to SEQ ID NO: 76465
  derived and/or modified CDS sequence (opt1) from hemagglutinin__InfluenzaA__ALA08533

SEQ ID NO: 77045 - RNA, 1701 nt, Artificial Sequence; identical to SEQ ID NO: 76465
  derived and/or modified CDS sequence (opt1) from hemagglutinin__InfluenzaA__ALA08534

SEQ ID NO: 77046 - RNA, 1701 nt, Artificial Sequence; identical to SEQ ID NO: 76465
  derived and/or modified CDS sequence (opt1) from hemagglutinin__InfluenzaA__ALA08535

SEQ ID NO: 77047 - RNA, 1701 nt, Artificial Sequence; identical to SEQ ID NO: 77022
  derived and/or modified CDS sequence (opt1) from hemagglutinin__InfluenzaA__ALA08536

SEQ ID NO: 77048 - RNA, 1701 nt, Artificial Sequence; identical to SEQ ID NO: 77022
  derived and/or modified CDS sequence (opt1) from hemagglutinin__InfluenzaA__ALA08537

SEQ ID NO: 77049 - RNA, 1701 nt, Artificial Sequence; identical to SEQ ID NO: 77022
  derived and/or modified CDS sequence (opt1) from hemagglutinin__InfluenzaA__ALA08538

SEQ ID NO: 77050 - RNA, 1701 nt, Artificial Sequence; identical to SEQ ID NO: 76465
  derived and/or modified CDS sequence (opt1) from hemagglutinin__InfluenzaA__ALA08539

SEQ ID NO: 77051 - RNA, 1701 nt, Artificial Sequence; identical to SEQ ID NO: 77022
  derived and/or modified CDS sequence (opt1) from hemagglutinin__InfluenzaA__ALA08540

SEQ ID NO: 77052 - RNA, 1701 nt, Artificial Sequence; identical to SEQ ID NO: 77022
  derived and/or modified CDS sequence (opt1) from hemagglutinin__InfluenzaA__ALA08541

SEQ ID NO: 77053 - RNA, 1701 nt, Artificial Sequence; identical to SEQ ID NO: 77022
  derived and/or modified CDS sequence (opt1) from hemagglutinin__InfluenzaA__ALA08542

SEQ ID NO: 77054 - RNA, 1701 nt, Artificial Sequence
  derived and/or modified CDS sequence (opt1) from hemagglutinin__InfluenzaA__ALA08543
augaagaccaucaucgcccugagcuacauccucugccugguguucgcccagaagauccccggcaacgacaacuccaccgcgacgcugugccucgggcaccacgccgucccgaacggcaccaucgugaagaccaucaccaacgaccgcaucgaggugacgaacgccaccgagcugguccagaacagcuccaucggggagaucugcgacagcccccaccagauccuggacggcgagaacugcacccucaucgacgcccugcugggggacccccagugcgacggcuuccagaacaagaagugggaccucuucguggagcgguccaaggccuacagcaacugcuaccccuacgacgugccggacuacgcgucccugcgcagccuggucgccuccagcggcacccucgaguucaacaacgaguccuucaacuggacgggggugacccagaacggcaccagcuccgccugcauccggcgcagcuccagcuccuucuucagccggcugaacuggcugacccaccucaacuacacguaccccgcccugaacgugaccaugcccaacaacgagcaguucgacaagcuguacaucuggggcguccaccaccccgggaccgacaaggaccagaucuuccucuacgcgcaguccagcgggcgcaucaccgugagcacgaagcggucccagcaggccgccaucccgaacaucggcagccgcccccggauccgcgacauccccucccggaucagcaucuacuggaccaucgugaagcccggcgacauccugcugaucaacuccaccgggaaccucaucgccccgcgcggcuacuucaagauccggagcgggaaguccagcaucaugcgcuccgacgcccccaucggcaagugcaagagcgagugcaucacccccaacggcuccauccccaacgacaagccguuccagaacgucaaccggaucacguacggggcgugcccccgcuacgugaagcacagcacccugaagcuggccaccggcaugcggaacgugcccgagaagcagacccgcgggaucuucggcgccaucgccggguucaucgagaacggcugggagggcauggucgacgggugguacggcuuccggcaccagaacuccgaggggcgcggccaggccgcggaccucaagagcacgcaggccgccaucgaccagaucaacgggaagcugaaccggcugaucggcaagaccaacgagaaguuccaccagaucgagaaggaguucuccgagguggagggccgcauccaggaccucgagaaguacguggaggacaccaagaucgaccuguggagcuacaacgccgagcugcucgucgcccuggagaaccagcacaccaucgaccugacggacuccgagaugaacaagcuguucgagaagaccaagaagcagcuccgcgagaacgcggaggacauggggaacggcugcuucaagaucuaccacaagugcgacaacgccugcaucgggagcauccggaacggcaccuacgaccacaacguguaccgcgacgaggcccugaacaaccgguuccagaucaaggggguggagcucaaguccggcuacaaggacuggauccuguggaucagcuucgccaucagcugcuuccugcucugcgucgcccugcugggcuucaucaugugggcgugccagaaggggaacauccgcugcaacaucugcaucuga

SEQ ID NO: 77055 - RNA, 1701 nt, Artificial Sequence; identical to SEQ ID NO: 76465
  derived and/or modified CDS sequence (opt1) from hemagglutinin__InfluenzaA__ALA08545

SEQ ID NO: 77056 - RNA, 1701 nt, Artificial Sequence; identical to SEQ ID NO: 76465
  derived and/or modified CDS sequence (opt1) from hemagglutinin__InfluenzaA__ALA08546

SEQ ID NO: 77057 - RNA, 1701 nt, Artificial Sequence
  derived and/or modified CDS sequence (opt1) from hemagglutinin__InfluenzaA__ALA08548
augaagaccaucaucgcccugagcuacauccucugccugguguucgcccagaagcugcccgagaacgacaacuccaccgcgacgcucugccugggccaccacgccgucccgaacgggaccaucgugaagaccaucaccagcgaccgcaucgaggugacgaacgccaccgagcugguccagaacuccagcaucggcgagaucugcgacagcccccaccagauccucgacgggaagaacugcacccugaucgacgcccugcucggcgacccccagugcgacggguuccagaacaagaagugggaccuguucguggagcggagcaaggccuacuccaacugcuaccccuacgacgugccggacuacgcgagccugcgcucccucgucgccagcuccggcacccuggaguucaacgacgagagcuucaacugggccggcguggcccagaacgggacguccagcgcgugcauccggggcuccaacagcuccuucuucagccgccugaacuggcucacccacuccaacuucaaguaccccgcccugaacgugaccaugcccaacaacgagcaguucgacaagcuguacaucuggggcguccaccaccccgggaccgacaaggaccagaucuuccucuacgcccagagcagcgggcggaucacgguguccaccaagcgcagccagcaggccgugaucccgaacaucggcucccggccccgcauccggaacauccccagccgcaucuccaucuacuggaccaucgucaagcccggcgacauccugcugaucaacagcaccgggaaccucaucgccccgcggggcuacuucaagauccgcuccgggaaguccuccaucaugcggagcgacgcgcccaucggcaagugcaaguccgagugcaucacgcccaacggcagcauccccaacgacaagccguuccagaacgugaaccgcaucaccuacggggccugcccccgguacgugaagcaguccacccugaagcuggccaccggcaugcgcaacguccccgagaagcagacgcgggggaucuucggcgccaucgccggguucaucgagaacggcugggagggcaugaaggacgggugguacggcuuccgccaccagaacagcgaggggcggggccaggcggccgaccucaaguccacccaggccgccaucgaccagaucaacgggaagcugaaccgccugaucggcaagaccaacgagaaguuccaccagaucgagaaggaguucagcgagguggagggccggauccaggaccucgagaaguacguggaggacaccaagaucgaccugugguccuacaacgccgagcugcucgucgcgcuggagaaccagcacacgaucgaccugaccgacagcgagaugaacaagcuguucgagaagaccaagaagcagcuccgcgagaacgccgaggacauggggaacggcugcuucaagaucuaccacaagugcgacaacgccugcaucggguccauccgcaacggcaccuacgaccacgacguguaccgggacgaggcccugaacaaccgcuuccagaucaaggggguggagcucaagagcggcuacaaggacuggauccuguggaucagcuucgccaucuccugcuuccugcucugcgucgcgcugcugggcuucaucaugugggccugccagaaggggaacauccggugcaacaucugcaucuga

SEQ ID NO: 77058 - RNA, 1701 nt, Artificial Sequence
  derived and/or modified CDS sequence (opt1) from hemagglutinin__InfluenzaA__ALA08549
augaagaccaucaucgcccugagcuacauccucugccugguguucgcccagaagauccccggcaacgacaacuccaccgcgacgcugugccucgggcaccacgccgucccgaacggcaccaucgugaagaccaucaccaacgaccgcaucgaggugacgaacgccaccgagcugguccagaacagcuccaccggggugaucugcgacagcccccaccagauccuggacggcgagaacugcacccucaucgacgcccugcugggggacccccagugcgacggcuuccagaacaagaagugggaccucuucguggagcgguccaaggccuacagcaacugcuaccccuacgacgucccggacuacgcgucccugcgcagccugguggccuccagcggcacgcucgaguucaacaacgaguccuucaacuggaccggggugacccagaacggcaccagcuccgccugcauccggcgcagcuccagcuccuucuucagccggcugaacuggcugacgcaccucaacuacaccuaccccgcccugaacgucaccaugcccaacaacgagcaguucgacaagcuguacaucuggggcgugcaccaccccgggaccgacaaggaccagaucuuccucuacgcgcaguccagcgggcgcaucacggugagcaccaagggcucccagcaggccgucaucccgaacaucggcagccggccccgcauccgggacauccccucccgcaucagcaucuacuggaccaucgugaagcccggggacauccugcugaucaacuccaccggcaaccucaucgccccgcggggguacuucaagauccgcagcggcaaguccagcaucaugcgguccgacgcccccaucggcaagugcaagagcgagugcaucacgcccaacggguccauccccaacgacaagccguuccagaacgugaaccgcaucaccuacggcgccugcccccgguacgucaagcacagcacccugaagcuggcgaccgggaugcgcaacgugcccgagaagcagacgcggggcaucuucggggccaucgccggcuucaucgagaacggcugggaggggaugguggacggcugguacggguuccgccaccagaacuccgagggccgggggcaggccgccgaccucaagagcacccaggcggccaucgaccagaucaacggcaagcugaaccgccugaucggcaagaccaacgagaaguuccaccagaucgagaaggaguucuccgaggucgaggggcggauccaggaccucgagaaguacguggaggacaccaagaucgaccuguggagcuacaacgccgagcugcucguggcccuggagaaccagcacacgaucgaccugaccgacuccgagaugaacaagcuguucgagaagacccgcaagcagcuccgcgagaacgccgaggacaugggcaacgggugcuucaagaucuaccacaagugcgacaacgcgugcaucggcagcauccggaacgggaccuacgaccacaacgucuaccgcgacgaggcccugaacaaccgguuccagaucaagggcguggagcucaaguccggcuacaaggacuggauccuguggaucagcuucgccaucagcugcuuccugcucugcguggcccugcugggguucaucaugugggccugccagaagggcaacauccgcugcaacaucugcaucuga

SEQ ID NO: 77059 - RNA, 1701 nt, Artificial Sequence; identical to SEQ ID NO: 77022
  derived and/or modified CDS sequence (opt1) from hemagglutinin__InfluenzaA__ALA08550

SEQ ID NO: 77060 - RNA, 1701 nt, Artificial Sequence
  derived and/or modified CDS sequence (opt1) from hemagglutinin__InfluenzaA__ALA08551
augaagaccaucaucgcccugagcuacauccucugccugguguucgcccagaagcugcucgagaacgacaacuccaccgcgacgcugugccugggccaccacgccguccccaacgggaccaucgugaagaccaucaccagcgaccgcaucgaggugacgaacgccaccgagcucguccagaacuccagcaucggcgagaucugcgacuccccgcaccagauccuggacgggaagaacugcacccugaucgacgcccuccugggcgacccccagugcgacggguuccagaacaagaagugggaccuguucguggagcggagcaaggccuacuccaacugcuaccccuacgacgugcccgacuacgcgagccuccgcucccuggucgccagcuccggcacccuggaguucaacgacgagagcuucaacugggccggcgugacgcagaacgggaccuccagcgccugcauccggggcuccaacagcuccuucuucagccgccucaacuggcugacccacuccaacuucaaguacccggcgcugaacgugaccaugcccaacaacgagcaguucgacaagcucuacaucuggggcguccaccaccccgggacggacaaggaccagaucuuccuguacgcccagagcagcgggcggaucaccguguccaccaagcgcagccagcaggccgugauccccaacaucggcucccggccgcgcauccggaacauccccagccgcaucuccaucuacuggaccaucgucaagcccggcgacauccugcucaucaacagcacggggaaccugaucgcgccccggggcuacuucaagauccgcuccggcaagagcuccaucaugcggagcgacgccccgaucgggaagugcaaguccgagugcaucacccccaacggcagcauccccaacgacaagcccuuccagaacgugaaccgcaucaccuacggggccugcccgcgguacgugaagcaguccacccugaagcucgccacgggcaugcgcaacguccccgagaagcagacccgggggaucuucggcgccaucgccggguucaucgagaacggcugggagggcaugaaggacgggugguacggcuuccgccaccagaacagcgaggggcggggccaggccgcggaccugaaguccacccaggccgccaucgaccagaucaacgggaagcugaaccgccucaucggcaagaccaacgagaaguuccaccagaucgagaaggaguucagcgagguggagggccggauccaggaccuggagaaguacguggaggacacgaagaucgaccugugguccuacaacgccgagcuccuggucgcccuggagaaccagcacaccaucgaccucaccgacagcgagaugaacaagcuguucgagaagaccaagaagcagcugcgcgagaacgcggaggacauggggaacggcugcuucaagaucuaccacaagugcgacaacgccugcaucggguccauccgcaacggcacguacgaccacaacguguaccgggacgaggcccucaacaaccgcuuccagaucaaggggguggagcucaagagcggcuacaaggacuggauccuguggaucagcuucgccaucuccugcuuccugcugugcgucgcccugcucggcuucaucaugugggcgugccagaaggggaacauccggugcaacaucugcaucuga

SEQ ID NO: 77061 - RNA, 1701 nt, Artificial Sequence; identical to SEQ ID NO: 77022
  derived and/or modified CDS sequence (opt1) from hemagglutinin__InfluenzaA__ALA08552

SEQ ID NO: 77062 - RNA, 1701 nt, Artificial Sequence; identical to SEQ ID NO: 77022
  derived and/or modified CDS sequence (opt1) from hemagglutinin__InfluenzaA__ALA08553

SEQ ID NO: 77063 - RNA, 1701 nt, Artificial Sequence
  derived and/or modified CDS sequence (opt1) from hemagglutinin__InfluenzaA__ALA08554
augaagaccaucaucgcccugagcuacauccucugccugguguucgcccagaagauccccggcaacgacaacuccaccgcgacgcugugccucgggcaccacgccgucccgaacggcaccaucgugaagaccaucaccaacgaccgcaucgaggugacgaacgccaccgagcugguccagaacagcuccaucggggagaucugcgacagcccccaccagauccuggacggcgagaacugcacccucaucgacgcccugcugggggacccccagugcgacggcuuccagaacaagaagugggaccucuucguggagcgguccaaggccuacagcaacugcuaccccuacgacgugccggacuacgcgucccugcgcagccuggucgccuccagcggcacccucgaguucaacaacgaguccuucaacuggacgggggugacccagaacggcaccagcuccgccugcauccggcgcagcuccagcuccuucuucagccggcugaacuggcugacccaccucaacuacacguaccccgcccugaacgugaccaugcccaacaacgagcaguucgacaagcuguacaucuggggcguccaccaccccgggaccgacaaggaccagaucuuccucuacgcgcaguccagcgggcgcaucaccgugagcacgaagcggucccagcaggccgugaucccgaacaucggcagccgcccccggauccgcgacauccccucccggaucagcaucuacuggaccaucgucaagcccggcgacauccugcugaucaacuccaccgggaaccucaucgccccgcgcggcuacuucaagauccggagcgggaaguccagcaucaugcgcuccgacgcccccaucggcaagugcaagagcgagugcaucacccccaacggcuccauccccaacgacaagccguuccagaacgugaaccggaucacguacggggccugcccccgcuacgugaagcacagcacccugaagcuggcgaccggcaugcggaacguccccgagaagcagacccgcgggaucuucggcgccaucgccggguucaucgagaacggcugggagggcaugguggacgggugguacggcuuccggcaccagaacuccgaggggcgcggccaggccgccgaccucaagagcacgcaggcggccaucgaccagaucaacgggaagcugaaccggcugaucggcaagaccaacgagaaguuccaccagaucgagaaggaguucuccgagguggagggccgcauccaggaccucgagaaguacgucgaggacaccaagaucgaccuguggagcuacaacgccgagcugcucguggcccuggagaaccagcacaccaucgaccugacggacuccgagaugaacaagcuguucgagaagaccaagaagcagcuccgcgagaacgccgaggacauggggaacggcugcuucaagaucuaccacaagugcgacaacgcgugcaucgggagcauccggaacggcaccuacgaccacaacguguaccgcgacgaggcccugaacaaccgguuccagaucaagggggucgagcucauguccggcuacaaggacuggauccuguggaucagcuucgccaucagcugcuuccugcucugcguggcccugcugggcuucaucaugugggccugccagaaggggaacauccgcugcaacaucugcaucuga

SEQ ID NO: 77064 - RNA, 1701 nt, Artificial Sequence
  derived and/or modified CDS sequence (opt1) from hemagglutinin__InfluenzaA__ALA08555
augaagaccaucaucgcccugagcuacauccucugccugguguucgcccagaagcugcccgagaacgacaacuccaccgcgacgcucugccugggccaccacgccgucccgaacgggaccaucgugaagaccaucaccagcgaccagaucgaggugacgaacgccaccgagcugguccagaacuccagcaucggcgagaucugcgacagcccccaccagauccucgacgggaagaacugcacccugaucgacgcccugcucggcgacccccagugcgacggguuccagaacaagaagugggaccuguucguggagcgcuccaaggccuacuccaacugcuaccccuacgacgugccggacuacgcgagccugcggucccucgucgccagcuccggcacccuggaguucaacgacgagagcuucaacugggccggcgugacgcagaacgggaccuccagcgccugcauccgcggcuccaacagcuccuucuucagccggcugaacuggcucacccacuccaacuucaaguaccccgcgcugaacgugaccaugcccaacaacgagcaguucgacaagcuguacaucuggggcguccaccaccccgggacggacaaggaccagaucuuccucuacgcccagagcagcgggcgcaucaccguguccaccaagcggagccagcaggccgugaucccguccaucggcagccgcccccggauccgcaacauccccucccggaucagcaucuacuggaccaucgucaagcccggcgacauccugcugaucaacuccacggggaaccucaucgccccgcgcggcuacuucaagauccggagcgggaaguccagcaucaugcgcuccgacgcccccaucggcaagugcaagagcgagugcaucacccccaacggcuccauccccaacgacaagccguuccagaacgugaaccggaucaccuacggggcgugcccccgcuacgugaagcagagcacccugaagcuggccacgggcaugcggaacguccccgagaagcagacccgcgggaucuucggcgccaucgccggguucaucgagaacggcugggagggcaugaaggacgggugguacggcuuccggcaccagaacuccgaggggcgcggccaggccgcggaccucaagagcacccaggccgccaucgaccagaucaacgggaagcugaaccggcugaucggcaagaccaacgagaaguuccaccagaucgagaaggaguucuccgagguggagggccgcauccaggaccucgagaaguacguggaggacacgaagaucgaccuguggagcuacaacgccgagcugcucgucgcccuggagaaccagcacaccaucgaccugaccgacuccgagaugaacaagcuguucgagaagaccaagaagcagcuccgggagaacgcggaggacauggggaacggcugcuucaagaucuaccacaagugcgacaacgccugcaucgggagcauccgcaacggcacguacgaccacaacguguaccgcgacgaggcccugaacaaccgguuccagaucaaggggguggagcucaagagcggcuacaaggacuggauccuguggaucuccuucgccaucagcugcuuccugcucugcgucgcccugcugggcuucaucaugugggcgugccagaaggggaacauccgcugcaacaucugcaucuga

SEQ ID NO: 77065 - RNA, 1701 nt, Artificial Sequence
  derived and/or modified CDS sequence (opt1) from hemagglutinin__InfluenzaA__ALA08556
augaagaccaucaucgcccugagcuacauccucugccugguguucgcccagaagauccccggcaacgacaacuccaccgcgacgcugugccucgggcaccacgccgucccgaacggcaccaucgugaagaccaucaccaacgaccgcaucgaggugacgaacgccaccgagcugguccagaacagcuccaucggggagaucugcgacagcccccaccagauccuggacggcgagaacugcacccucaucgacgcccugcugggggacccccagugcgacggcuuccagaacaagaagugggaccucuucguggagcgguccaaggccuacagcaacugcuaccccuacgacgugccggacuacgcgucccugcgcagccuggucgccuccagcggcacccucgaguucaacaacgaguccuucaacuggacggggaucacccagaacggcaccagcuccgccugcauccggcgcagcuccagcuccuucuucagccggcugaacuggcugacccaccucaacuacacguaccccgcccugaacgugaccaugcccaacaacgagcaguucgacaagcuguacaucuggggcgugcaccaccccgggaccgacaaggaccagaucuuccucuacgcgcaguccagcgggcgcaucaccgucagcacgaagcggucccagcaggccgugaucccgaacaucggcagccgcccccggauccgcgacauccccucccggaucagcaucuacuggaccaucgugaagcccggcgacauccugcugaucaacuccaccgggaaccucaucgccccgcgcggcuacuucaagauccggagcgggaaguccagcaucaugcgcuccgacgcccccaucggcaagugcaagagcgagugcaucacccccaacggcuccauccccaacgacaagccguuccagaacgucaaccggaucacguacggggccugcccccgcuacgugaagcacagcacccugaagcuggcgaccggcaugcggaacgugcccgagaagcagacccgcgggaucuucggcgccaucgccggguucaucgagaacggcugggagggcauggucgacgggugguacggcuuccggcaccagaacuccgaggggcgcggccaggccgccgaccucaagagcacgcaggcggccaucgaccagaucaacgggaagcugaaccggcugaucggcaagaccaacgagaaguuccaccagaucgagaaggaguucuccgagguggagggccgcauccaggaccucgagaaguacguggaggacaccaagaucgaccuguggagcuacaacgccgagcugcucgucgcccuggagaaccagcacaccaucgaccugacggacuccgagaugaacaagcuguucgagaagaccaagaagcagcuccgcgagaacgccgaggacauggggaacggcugcuucaagaucuaccacaagugcgacaacgcgugcaucgggagcauccggaacggcaccuacgaccacaacguguaccgcgacgaggcccugaacaaccgguuccagaucaaggggguggagcucaaguccggcuacaaggacuggauccuguggaucagcuucgccaucagcugcuuccugcucugcgucgcccugcugggcuucaucaugugggccugccagaaggggaacauccgcugcaacaucugcaucuga

SEQ ID NO: 77066 - RNA, 1701 nt, Artificial Sequence; identical to SEQ ID NO: 77022
  derived and/or modified CDS sequence (opt1) from hemagglutinin__InfluenzaA__ALA08557

SEQ ID NO: 77067 - RNA, 1701 nt, Artificial Sequence; identical to SEQ ID NO: 77022
  derived and/or modified CDS sequence (opt1) from hemagglutinin__InfluenzaA__ALA08558

SEQ ID NO: 77068 - RNA, 1701 nt, Artificial Sequence
  derived and/or modified CDS sequence (opt1) from hemagglutinin__InfluenzaA__ALA08559
augaagaccaucaucgcccugagcuacauccucugccugguguucgcccagaagauccccggcaacgacaacuccaccgcgacgcugugccucgggcaccacgccgucccgaacggcaccaucgugaagaccaucaccaacgaccgcaucgaggugacgaacgccaccgagcugguccagaacagcuccaucggggagaucugcgacagcccccaccagauccuggacggcgagaacugcacccucaucgacgcccugcugggggacccccagugcgacggcuuccagaacaagaagugggaccucuucguggagcgguccaaggccuacagcaacugcuaccccuacgacgugccggacuacgcgucccugcgcagccuggucgccuccagcggcacccucgaguucaacaacgaguccuucaacuggacgggggugacccagaacggcaccagcuccgccugcauccggcgcagcuccagcuccuucuucagccggcugaacuggcugacccaccucaacuacacguaccccgcccugaacgugaccaugcccaacaacgagcaguucgacaagcuguacaucuggggcguccaccaccccgggaccgacaaggaccagaucuuccucuacgcgcgcuccagcgggcggaucaccgugagcacgaagggcucccagcaggccgugaucccgaacaucggcagccgcccccggauccgcgacauccccucccggaucagcaucuacuggaccaucgucaagcccggggacauccugcugaucaacuccgccggcaaccucaucgccccgcgcggguacuucaagauccggagcggcaaguccagcaucaugcgcuccgacgcccccaucggcaagugcaagagcgagugcaucacccccaacggguccauccccaacgacaagccguuccagaacgugaaccggaucaccuacggcgcgugcccccgcuacgugaagcacagcacgcugaagcuggccaccgggaugcggaacguccccgagaagcagacccgcggcaucuucggggccaucgccggcuucaucgagaacggcugggaggggaugguggacggcugguacggguuccggcaccagaacuccgagggccgcgggcaggccgcggaccucaagagcacccaggccgccaucgaccagaucaacggcaagcugaaccggcugaucggcaagacgaacgagaaguuccaccagaucgagaaggaguucuccgagguggaggggcgcauccaggaccucgagaaguacgucgaggacaccaagaucgaccuguggagcuacaacgccgagcugcucguggcccuggagaaccagcacaccaucgaccugaccgacuccgagaugaacaagcuguucgagaagacgaagaagcagcuccgcgagaacgcggaggacaugggcaacgggugcuucaagaucuaccacaagugcgacaacgccugcaucggcagcauccggaacgggaccuacgaccacaacguguaccgcgacgaggcccugaacaaccgguuccagaucaagggcgucgagcucaaguccggcuacaaggacuggauccuguggaucagcuucgccaucagcugcuuccugcucugcguggcccugcugggguucaucaugugggcgugccagaagggcaacauccgcugcaacaucugcaucuga

SEQ ID NO: 77069 - RNA, 1701 nt, Artificial Sequence; identical to SEQ ID NO: 76465
  derived and/or modified CDS sequence (opt1) from hemagglutinin__InfluenzaA__ALA08560

SEQ ID NO: 77070 - RNA, 1701 nt, Artificial Sequence
  derived and/or modified CDS sequence (opt1) from hemagglutinin__InfluenzaA__ALA08561
augaagaccaucaucgcccugagcuacauccucugccugguguucgcccagaagauccccggcaacgacaacuccaccgcgacgcugugccucgggcaccacgccgucccgaacggcaccaucgugaagaccaucaccaacgaccgcaucgaggugacgaacgccaccgagcugguccagaacagcuccaucggggagaucugcgacagcccccaccagauccuggacggcgagaacugcacccucaucgacgcccugcugggggacccccagugcgacggcuuccagaacaagaagugggaccucuucguggagcgguccaaggccuacagcaacugcuaccccuacgacgugccggacuacgcgucccugcgcagccuggucgccuccagcggcacccucgaguucaacaacgaguccuucaacuggacgggggugacccagaacggcaccagcuccgccugcauccggcgcagcuccagcuccuucuucagccggcugaacuggcugacccaccucaacuacaaguaccccgcccugaacgugacgaugcccaacaaggagcaguucgacaagcuguacaucuggggcguccaccaccccgggaccgacaaggaccagaucuuccucuacgcgcaguccagcgggcgcaucaccgugagcaccaagcggucccagcaggccgugaucccgaacaucggcagccgcccccggauccgcgacauccccucccggaucagcaucuacuggacgaucgucaagcccggcgacauccugcugaucaacuccaccgggaaccucaucgccccgcgcggcuacuucaagauccggagcgggaaguccagcaucaugcgcuccgacgcccccaucggcaagugcaagagcgagugcaucacccccaacggcuccauccccaacgacaagccguuccagaacgugaaccggaucaccuacggggccugcccccgcuacgugaagcacagcacgcugaagcuggcgaccggcaugcggaacguccccgagaagcagacccgcgggaucuucggcgccaucgccggguucaucgagaacggcugggagggcaugguggacgggugguacggcuuccggcaccagaacuccgaggggcgcggccaggccgccgaccucaagagcacccaggcggccaucgaccagaucaacgggaagcugaaccggcugaucggcaagacgaacgagaaguuccaccagaucgagaaggaguucuccgagguggagggccgcauccaggaccucgagaaguacgucgaggacaccaagaucgaccuguggagcuacaacgccgagcugcucguggcccuggagaaccagcacaccaucgaccugaccgacuccgagaugaacaagcuguucgagaagacgaagaagcagcuccgcgagaacgccgaggacauggggaacggcugcuucaagaucuaccacaagugcgacaacgcgugcaucgggagcauccggaacggcaccuacgaccacaacguguaccgcgacgaggcccugaacaaccgguuccagaucaagggggucgagcucaaguccggcuacaaggacuggauccuguggaucagcuucgccaucagcugcuuccugcucugcguggcccugcugggcuucaucaugugggccugccagaaggggaacauccgcugcaacaucugcaucuga

SEQ ID NO: 77071 - RNA, 1701 nt, Artificial Sequence
  derived and/or modified CDS sequence (opt1) from hemagglutinin__InfluenzaA__ALA08563
augaagaccaucaucgcccugagcuacauccucugccugguguucgcccagaagauccccggcaacgacaacuccaccgcgacgcugugccucgggcaccacgccgucccgaacggcaccaucgugaagaccaucaccaacgaccgcaucgaggugacgaacgccaccgagcugguccagaacagcuccaucggggagaucugcgacagcccccaccagauccuggacggcgagaacugcacccucaucgacgcccugcugggggacccccagugcgacggcuuccagaacaagaagugggaccucuucguggagcgguccaaggccuacagcaacugcuaccccuacgacgugccggacuacgcgucccugcgcagccuggucgccuccagcggcacccucgaguucaacaacgaguccuucaacuggacgggggugacccagaacggcaccagcuccgccugcauccggcgcagcuccagcuccuucuucagccggcugaacuggcugacccaccucaacuacacguaccccgcccugaacgugaccaugcccaacaacgagcaguucgacaagcuguacaucuggggcguccaccaccccgggaccgacaaggaccagaucuuccucuacgcgcaguccagcgggcgcaucaccgugagcacgaagcggucccagcaggccgugaucccgaacaucggcagccgcccccggauccgcgacauccccucccggaucagcaucuacuggaccaucgucaagcccggcgacauccugcugaucaacuccaccgggaaccucaucgccccgcgcggcuacuucaagauccugagcgggaaguccagcaucaugcgguccgacgcccccaucggcaagugcaagagcgagugcaucacccccaacggcuccauccccaacgacaagccguuccagaacgugaaccgcaucacguacggggccugcccccgguacgugaagcacagcacccugaagcucgcgaccggcaugcgcaacguccccgagaagcagacccgggggaucuucggcgccaucgccggguucaucgagaacggcugggagggcaugguggacgggugguacggcuuccgccaccagaacuccgaggggcggggccaggccgccgaccucaagagcacgcaggcggccaucgaccagaucaacgggaagcugaaccgccugaucggcaagaccaacgagaaguuccaccagaucgagaaggaguucuccgagguggagggccggauccaggaccuggagaaguacgucgaggacaccaagaucgaccuguggagcuacaacgccgagcuccugguggcccuggagaaccagcacaccaucgaccucacggacuccgagaugaacaagcuguucgagaagaccaagaagcagcugcgcgagaacgccgaggacauggggaacggcugcuucaagaucuaccacaagugcgacaacgcgugcaucgggagcauccgcaacggcaccuacgaccacaacguguaccgggacgaggcccucaacaaccgcuuccagaucaagggggucgagcugaaguccggcuacaaggacuggauccuguggaucagcuucgccaucagcugcuuccuccugugcguggcccugcucggcuucaucaugugggccugccagaaggggaacauccggugcaacaucugcaucuga

SEQ ID NO: 77072 - RNA, 1701 nt, Artificial Sequence
  derived and/or modified CDS sequence (opt1) from hemagglutinin__InfluenzaA__ALA08571
augaagaccaucaucgcccugagcuacauccucugccugguguucgcccagaagauccccggcaacgacaacuccaccgcgacgcugugccucgggcaccacgccgucccgaacggcaccaucgugaagaccaucaccaacgaccgcaucgaggugacgaacgccaccgagcugguccagaacagcuccaucggggagaucugcgacagcccccaccagauccuggacggcgagaacugcacccucaucgacgcccugcugggggacccccagugcgacggcuuccagaacaagaagugggaccucuucguggagcgguccaaggccuacagcaacugcuaccccuacgacgugccggacuacgcgucccugcgcagccuggucgccuccagcggcacccucgaguucaacaacgaguccuucaacuggacgggggugacccagaacggcaccagcuccgccugcauccggcgcagcuccagcuccuucuucagccggcugaacuggcugacccaccucaacuacacguaccccgcccugaacgugaccaugcccaacaacgagcaguucgacaagcuguacaucuggggcguccaccaccccgggaccgacaaggaccagaucuuccucuacgcgcaguccagcgggcgcaucaccgugagcacgaagcggucccagcaggccgugaucccgaacaucggcagccgcccccggauccgcgacauccccucccggaucagcaucuacuggaccaucgucaagcccggcgacauccugcugaucaacuccaccgggaaccucaucgccccgcgcggcuacuucaagauccggagcgggaaguccagcaucaugcgcuccgacgcccccaucggcaagugcaagagcgagugcaucacccccaacggcuccauccccaacgacaagccguuccagaacgugaaccggaucacguacggggccugcccccgcuacgugaagcacagcacccugaagcuggcgaccggcaugcggaacguccccgagaagcagacccgcgggaucuucggcgccaucgccggguucaucgagaacggcugggagggcaugguggacgggugguacggcuuccggcaccagaacuccgaggggcgcggccaggccgccgaccucaagagcacgcaggcggccaucgaccagaucaacgggaagcugaaccggcugaucggcaagaccaacgagaaguuccaccagaucgagaaggaguucuccgagguggagggccgcauccaggaccucgagaaguacgucgaggacaccaagaucgaccuguggagcuacaacgccgagcugcucguggcccuggagaaccagcacaccaucgaccugacggacuccgagaugaacaagcuguucgagaagaccaagaagcagcuccgcgagaacgccgaggacauggggaacggcugcuucaagaucuaccacaagugcgacaacgcgugcaucgggagcauccggaacggcaccuacgaccacaacguguaccgcgacgaggcccugaacaaccgguuccagaucaagggggucgagcucaaguccggcuacaaggacuggauccuguggaucagcuucgccaccagcugcuuccugcucugcguggcccugcugggcuucaucaugugggccugccagaaggggaacauccgcugcaacaucugcaucuga

SEQ ID NO: 77073 - RNA, 1701 nt, Artificial Sequence; identical to SEQ ID NO: 77008
  derived and/or modified CDS sequence (opt1) from hemagglutinin__InfluenzaA__ALA08572

SEQ ID NO: 77074 - RNA, 1701 nt, Artificial Sequence; identical to SEQ ID NO: 77005
  derived and/or modified CDS sequence (opt1) from hemagglutinin__InfluenzaA__ALA08573

SEQ ID NO: 77075 - RNA, 1701 nt, Artificial Sequence
  derived and/or modified CDS sequence (opt1) from hemagglutinin__InfluenzaA__ALA08574
augaagaccaucaucgcccugagcuacauccucugccugguguucgcccagaagauccccggcaacgacaacuccaccgcgacgcugugccucgggcaccacgccgucccgaacggcaccaucgugaagaccaucaccaacgaccgcaucgaggugacgaacgccaccgagcugguccagaacagcuccaucggggagaucugcgacagcccccaccagauccuggacggcgagaacugcacccucaucgacgcccugcugggggacccccagugcgacggcuuccagaacaagaagugggaccucuucguggagcgguccaaggccuacagcaacugcuaccccuacgacgugccggacuacgcgucccugcgcagccuggucgccuccagcggcacccucgaguucaacaacgaguccuucaacuggacgggggugacccagaacggcaccagcuccgccugcauccggcgcagcuccagcuccuucuucagccggcugaacuggcugacccaccucaacuacacguaccccgcccugaacgugaccaugcccaacaacgagcaguucgacaagcuguacaucuggggcguccaccaccccgggaccgacaaggaccagaucuuccucuacgcgcaguccagcgggcgcaucaccgugagcacgaagcggucccagcaggccgugaucccgaacaucggcagccgcccccggauccgcgacauccccucccggaucagcaucuacuggaccaucgucaagcccggcgacauccugcugaucaacuccaccgggaaccucaucgccccgcgcggcuacuucaagauccggagcgggaaguccagcaucaugcgcuccgacgcccccaucggcaagugcaagagcgagugcaucacccccaacggcuccauccccaacgacaagccguuccagaacgugaaccggaucacguacggggccugcccccgcuacgugaagcacagcacccugaagcuggcgaccggcaugcggaacguccccgagaagcagacccgcgggaucuucggcgccaucgccggguucaucgagaacggcugggagggcaugguggacgggugguacggcuuccggcaccagaacuccgaggggcgcggccaggccgccgaccucaagagcacgcaggcggccaucgaccagaucuccgggaagcugaaccggcugaucggcaagaccaacgagaaguuccaccagaucgagaaggaguucagcgagguggagggccgcauccaggaccucgagaaguacgucgaggacaccaagaucgaccugugguccuacaacgccgagcugcucguggcccuggagaaccagcacaccaucgaccugacggacagcgagaugaacaagcuguucgagaagaccaagaagcagcuccgcgagaacgccgaggacauggggaacggcugcuucaagaucuaccacaagugcgacaacgcgugcaucggguccauccggaacggcaccuacgaccacaacguguaccgcgacgaggcccugaacaaccgguuccagaucaagggggucgagcucaagagcggcuacaaggacuggauccuguggaucagcuucgccaucuccugcuuccugcucugcguggcccugcugggcuucaucaugugggccugccagaaggggaacauccgcugcaacaucugcaucuga

SEQ ID NO: 77076 - RNA, 1701 nt, Artificial Sequence
  derived and/or modified CDS sequence (opt1) from hemagglutinin__InfluenzaA__ALA08575
augaagaccaucaucgcccugagcuacauccucugccugguguucgcccagaagauccccggcaacgacaacuccaccgcgacgcugugccucgggcaccacgccgucccgaacggcaccaucgugaagaccaucaccaacgaccgcaucgaggugacgaacgccaccgagcugguccagaacagcuccaucggggagaucugcgacagcccccaccagauccuggacggcgagaacugcacccucaucgacgcccugcugggggacccccagugcgacggcuuccagaacaagaagugggaccucuucguggagcgguccaaggccuacagcaacugcuaccccuacgacgugccggacuacgcgucccugcgcagccuggucgccuccagcggcacccucgaguucaacaacgaguccuucaacuggacgggggugacccagaacggcaccagcuccgccugcauccggcgcagcuccagcuccuucuucagccggcugaacuggcugacccaccucaacuacacguaccccgcccugaacgugaccaugcccaacaacgagcaguucgacaagcuguacaucuggggcguccaccaccccgggaccgacaaggaccagaucuuccucuacgcgcaguccagcgggcgcaucaccgugagcacgaagcggucccagcaggccgugaucccgaacaucggcagccgcccccggauccgcgacauccccucccggaucagcaucuacuggaccaucgucaagcccggcgacauccugcugaucaacuccaccgggaaccucaucgccccgcgcggcuacuucaagauccggagcgggaaguccagcaucaugcgcuccgacgcccccaucggcaagugcaagagcgagugcaucacccccaacggcuccauccccaacgacaagccguuccagaacgugaaccggaucacguacggggccugcccccgcuacgugaagcagagcacccugaagcuggcgaccggcaugcggaacguccccgagaagcagacccgcgggaucuucggcgccaucgccggguucaucgagaacggcugggagggcaugguggacgggugguacggcuuccggcaccagaacuccgaggggcgcggccaggccgccgaccucaagagcacgcaggcggccaucgaccagaucaacgggaagcugaaccggcugaucggcaagaccaacgagaaguuccaccagaucgagaaggaguucuccgagguggagggccgcauccaggaccucgagaaguacgucgaggacaccaagaucgaccuguggagcuacaacgccgagcugcucguggcccuggagaaccagcacaccaucgaccugacggacuccgagaugaacaagcuguucgagaagaccaagaagcagcuccgcgagaacgccgaggacauggggaacggcugcuucaagaucuaccacaagugcgacaacgcgugcaucgggagcauccggaacggcaccuacgaccacaacguguaccgcgacgaggcccugaacaaccgguuccagaucaagggggucgagcucaaguccggcuacaaggacuggauccuguggaucagcuucgccaucagcugcuuccugcucugcguggcccugcugggcuucaucaugugggccugccagaaggggaacauccgcugcaacaucugcaucuga

SEQ ID NO: 77077 - RNA, 1701 nt, Artificial Sequence; identical to SEQ ID NO: 76465
  derived and/or modified CDS sequence (opt1) from hemagglutinin__InfluenzaA__ALA08576

SEQ ID NO: 77078 - RNA, 1701 nt, Artificial Sequence; identical to SEQ ID NO: 76465
  derived and/or modified CDS sequence (opt1) from hemagglutinin__InfluenzaA__ALA08577

SEQ ID NO: 77079 - RNA, 1701 nt, Artificial Sequence
  derived and/or modified CDS sequence (opt1) from hemagglutinin__InfluenzaA__ALA08579
augaagaccaucaucgcccugagcuacauccucugccugaucuucgcccagaagauccccggcaacgacaacuccaccgcgacgcugugccucgggcaccacgccgugccgaacggcaccaucgucaagaccaucaccaacgaccgcaucgaggugacgaacgccaccgagcuggugcagaacagcuccaucggggagaucugcgacagcccccaccagauccuggacggcgagaacugcacccucaucgacgcccugcugggggacccccagugcgacggcuuccagaacaagaagugggaccucuucgucgagcgguccaaggccuacagcaacugcuaccccuacgacgugccggacuacgcgucccugcgcagccugguggccuccagcggcacccucgaguucaacaacgaguccuucaacuggacgggggucacccagaacggcaccagcuccgccugcauccgcaagagcuccagcuccuucuucagccggcugaacuggcugacccaccucaacuacacguaccccgcccugaacgugaccaugcccaacaacgagcaguucgacaagcuguacaucuggggcgugcaccaccccgggaccgacaaggaccagaucuuccucuacgcgcgguccagcgggcgcaucaccgucagcacgaagcggucccagcaggccgugaucccgaacaucggcagccgcccccggauccgcgacauccccucccggaucagcaucuacuggaccaucgugaagcccggcgacauccugcugaucaacuccaccgggaaccucaucgccccgcgcggcuacuucaagauccggagcgggaaguccagcaucaugcgcuccgacgcccccaucggcaagugcaagagcgagugcaucacccccaacggcuccauccccaacgacaagccguuccagaacgucaaccggaucacguacggggccugcccccgcuacgugaagcacagcacccugaagcuggcgaccggcaugcggaacgugcccgagaagcagacccgcgggaucuucggcgccaucgccggguucaucgagaacggcugggagggcauggucgacgggugguacggcuuccggcaccagaacuccgaggggcgcggccaggccgccgaccucaagagcacgcaggcggccaucgaccagaucaacgggaagcugaaccggcugaucggcaagaccaacgagaaguuccaccagaucgagaaggaguucuccgagguggagggccgcauccaggaccucgagaaguacguggaggacaccaagaucgaccuguggagcuacaacgccgagcugcucgucgcccuggagaaccagcacaccaucgaccugacggacuccgagaugaacaagcuguucgagaagaccaagaagcagcuccgcgagaacgccgaggacauggggaacggcugcuucaagaucuaccacaagugcgacaacgcgugcaucgggagcauccggaacggcaccuacgaccacaacguguaccgcgacgaggcccugaacaaccgguuccagaucaaggggguggagcucaaguccggcuacaaggacuggauccuguggaucagcuucgccaucagcugcuuccugcucugcgucgcccugcugggcuucaucaugugggccugccagaaggggaacauccgcugcaacaucugcaucuga

SEQ ID NO: 77080 - RNA, 1701 nt, Artificial Sequence
  derived and/or modified CDS sequence (opt1) from hemagglutinin__InfluenzaA__ALA08580
augaagaccaucaucgcccugagcuacauccucugccugguguucgcccagaagauccccggcaacgacaacuccaccgcgacgcugugccucgggcaccacgccgucccgaacggcaccaucgugaagaccaucaccaacgaccgcaucgaggugacgaacgccaccgagcugguccagaacagcuccaucggggagaucugcgacagcccccaccagauccuggacggcgagaacugcacccucaucgacgcccugcugggggacccccagugcgacggcuuccagaacaagaagugggaccucuucguggagcgguccaaggccuacagcaacugcuaccccuacgacgugccggacuacgcgucccugcgcagccuggucgccuccagcggcacccucgaguucaacaacgaguccuucaacuggacgggggugacccagaacggcaccagcuccgccugcauccggcgcagcuccagcuccuucuucagccggcugaacuggcugacccaccucaacuacacguaccccgcccugaacgugaccaugcccaacaacgagcaguucgacaagcuguacaucuggggcguccaccaccccgggaccgacaaggaccagaucuuccucuacgcgcgcuccagcgggcggaucaccgugagcacgaagggcucccagcaggccgugaucccgaacaucggcagccgcccccggauccgcgacauccccucccggaucagcaucuacuggaccaucgucaagcccggggacauccugcugaucaacuccaccggcaaccucaucgccccgcgcggguacuucaagauccggagcggcaaguccagcaucaugcgcuccgacgcccccaucggcaagugcaagagcgagugcaucacccccaacggguccauccccaacgacaagccguuccagaacgugaaccggaucacguacggcgccugcccccgcuacgugaagcacagcacccugaagcuggcgaccgggaugcggaacguccccgagaagcagacccgcggcaucuucggggccaucgccggcuucaucgagaacggcugggaggggaugguggacggcugguacggguuccggcaccagaacuccgagggccgcgggcaggccgccgaccucaagagcacgcaggcggccaucgaccagaucaacggcaagcugaaccggcugaucggcaagaccaacgagaaguuccaccagaucgagaaggaguucuccgagguggaggggcgcauccaggaccucgagaaguacgucgaggacaccaagaucgaccuguggagcuacaacgccgagcugcucguggcccuggagaaccagcacaccaucgaccugacggacuccgagaugaacaagcuguucgagaagaccaagaagcagcuccgcgagaacgccgaggacaugggcaacgggugcuucaagaucuaccacaagugcgacaacgcgugcaucggcagcauccggaacgggaccuacgaccacaacguguaccgcgacgaggcccugaacaaccgguuccagaucaagggcgucgagcucaaguccggcuacaaggacuggauccuguggaucagcuucgccaucagcugcuuccugcucugcguggcccugcugggguucaucaugugggccugccagaagggcaacauccgcugcaacaucugcaucuga

SEQ ID NO: 77081 - RNA, 1701 nt, Artificial Sequence
  derived and/or modified CDS sequence (opt1) from hemagglutinin__InfluenzaA__ALA08582
augaagaccaucaucgcccugagcuacauccucugccugguguucgcccagaagcugcccgagaacgacaacuccaccgcgacgcucugccugggccaccacgccgucccgaacgggaccaucgugaagaccaucaccaacgaccgcaucgaggugacgaacgccaccgagcugguccagaacagcuccaucggcgagaucugcgacagcccccaccagauccucgacgggaagaacugcacccugaucgacgcccugcucggcgacccccagugcgacggguuccagaacaagaagugggaccuguucguggagcgguccaaggccuacagcaacugcuaccccuacgacgugccggacuacgcgucccugcgcagccucgucgccuccagcggcacccuggaguucaacgacgaguccuucaacugggccggcgugacgcagaacgggaccagcuccgccugcauccggggcagcaacuccagcuucuucucccgccugaacuggcucacccacagcaacuucaaguaccccgcgcugaacgugaccaugcccaacaacgagcaguucgacaagcuguacaucuggggcguccaccaccccgggacggacaaggaccagaucuuccucuacgcccaguccagcgggcggaucaccgugagcaccaagcgcucccagcaggccgugaucccgaacaucggcagccggccccgcauccggaacauccccucccgcaucagcaucuacuggaccaucgucaagcccggcgacauccugcugaucaacuccacggggaaccucaucgccccgcggggcuacuucaagauccgcagcgggaaguccagcaucaugcgguccgacgcccccaucggcaagugcaagagcgagugcaucacccccaacggcuccauccccaacgacaagccguuccagaacgugaaccgcaucaccuacggggcgugcccccgguacgugaagcagagcacccugaagcuggccacgggcaugcgcaacguccccgagaagcagacccgggggaucuucggcgccaucgccggguucaucgagaacggcugggagggcaugaaggacgggugguacggcuuccgccaccagaacuccgaggggcggggccaggccgcggaccucaagagcacccaggccgccaucgaccagaucaacgggaagcugaaccgccugaucggcaagaccaacgagaaguuccaccagaucgagaaggaguucuccgagguggagggccggauccaggaccucgagaaguacguggaggacacgaagaucgaccuguggagcuacaacgccgagcugcucgucgcccuggagaaccagcacaccaucgaccugaccgacuccgagaugaacaagcuguucgagaagaccaagaagcagcuccgcgagaacgcggaggacauggggaacggcugcuucaagaucuaccacaagugcgacaacgccugcaucgggagcauccgcaacggcacguacgaccacgacguguaccgggacgaggcccugaacaaccgcuuccagaucaaggggguggagcucaaguccggcuacaaggacuggauccuguggaucagcuucgccaucagcugcuuccugcucugcgucgcccugcugggcuucaucaugugggcgugccagaaggggaacauccggugcaacaucugcaucuga

SEQ ID NO: 77082 - RNA, 1701 nt, Artificial Sequence; identical to SEQ ID NO: 77081
  derived and/or modified CDS sequence (opt1) from hemagglutinin__InfluenzaA__ALA08583

SEQ ID NO: 77083 - RNA, 1701 nt, Artificial Sequence; identical to SEQ ID NO: 77081
  derived and/or modified CDS sequence (opt1) from hemagglutinin__InfluenzaA__ALA08584

SEQ ID NO: 77084 - RNA, 1701 nt, Artificial Sequence; identical to SEQ ID NO: 77081
  derived and/or modified CDS sequence (opt1) from hemagglutinin__InfluenzaA__ALA08585

SEQ ID NO: 77085 - RNA, 1701 nt, Artificial Sequence; identical to SEQ ID NO: 76465
  derived and/or modified CDS sequence (opt1) from hemagglutinin__InfluenzaA__ALA08586

SEQ ID NO: 77086 - RNA, 1701 nt, Artificial Sequence; identical to SEQ ID NO: 77081
  derived and/or modified CDS sequence (opt1) from hemagglutinin__InfluenzaA__ALA08587

SEQ ID NO: 77087 - RNA, 1701 nt, Artificial Sequence; identical to SEQ ID NO: 76465
  derived and/or modified CDS sequence (opt1) from hemagglutinin__InfluenzaA__ALA08588

SEQ ID NO: 77088 - RNA, 1701 nt, Artificial Sequence; identical to SEQ ID NO: 76465
  derived and/or modified CDS sequence (opt1) from hemagglutinin__InfluenzaA__ALA08589

SEQ ID NO: 77089 - RNA, 1701 nt, Artificial Sequence; identical to SEQ ID NO: 77081
  derived and/or modified CDS sequence (opt1) from hemagglutinin__InfluenzaA__ALA08590

SEQ ID NO: 77090 - RNA, 1701 nt, Artificial Sequence; identical to SEQ ID NO: 76465
  derived and/or modified CDS sequence (opt1) from hemagglutinin__InfluenzaA__ALA08591

SEQ ID NO: 77091 - RNA, 1701 nt, Artificial Sequence; identical to SEQ ID NO: 77022
  derived and/or modified CDS sequence (opt1) from hemagglutinin__InfluenzaA__ALA08592

SEQ ID NO: 77092 - RNA, 1701 nt, Artificial Sequence
  derived and/or modified CDS sequence (opt1) from hemagglutinin__InfluenzaA__ALA08594
augaagaccaucaucgcccugagcuacauccucugccugguguucgcccagaagcugcccgagaacgacaacuccaccgcgacgcucugccugggccaccacgccgucccgaacgggaccaucgugaagaccaucaccagcgaccgcaucgaggugacgaacgccaccgagcugguccagaacuccagcaucggcgagaucugcgacagcccccaccagauccucgacgggaagaacugcacccugaucgacgcccugcucggcgacccccagugcgacggguuccagaacaagaagugggaccuguucguggagcggagcaaggccuacuccaacugcuaccccuacgacgugccggacuacgcgagccugcgcucccucgucgccagcuccggcacccuggaguucaacgacgagagcuucaacugggccggcgugacgcagaacgggaccuccagcgccugcauccggggcuccaacagcuccuucuucagccgccugaacuggcucacccacuccaacuucaaguaccccgcgcugaacgugaccaugcccaacaacgagcaguucgacaagcuguacaucuggggcguccaccaccccgggacggacaaggaccagaucuuccucuacgcccagagcagcgggcggaucaccguguccaccaagcgcagccagcaggccgugaucccgaacaucggcucccggccccgcauccggaacauccccagccgcaucuccaucuacuggaccaucgucaagcccggcgacauccugcugaucaacagcacggggaaccucaucgccccgcggggcuacuucaagauccgcuccgggaaguccuccaucaugcggagcgacgcccccaucggcaagugcaaguccgagugcaucacccccaacggcagcauccccaacgacaagccguuccagaacgugaaccgcaucaccuacggggcgugcccccgguacgugaagcaguccacccugaagcuggccacgggcaugcgcaacguccccgagaagcagacccgggggaucuucggcgccaucgccggguucaucgagaacggcugggagggcaugaaggacgggugguacggcuuccgccaccagaacagcgaggggcggggccaggccgcggaccucaaguccacccaggccgccaucgaccagaucaacgggaagcugaaccgccugaucggcaagaccaacgagaaguuccaccagaucgagaaggaguucagcgagguggagggccggauccaggaccucgagaaguacguggaggacacgaagaucgaccugugguccuacaacgccgagcugcucgucgcccuggagaaccagcacaccaucgaccugaccgacagcgagaugaacaagcuguucgagaagaccaagaagcagcuccgcgagaacgcggaggacauggggaacggcugcuucaagaucuaccacaagugcgacaacgccugcaucggguccauccgcaacggcacguacgaccacgacguguaccgggacgaggcccugaacaaccgcuuccagaucaaggggguggagcucaagagcggcuacaaggacuggauccuguggaucagcuucgccauguccugcuuccugcucugcgucgcccugcugggcuucaucaugugggcgugccagaaggggaacauccggugcaacaucugcaucuga

SEQ ID NO: 77093 - RNA, 1701 nt, Artificial Sequence; identical to SEQ ID NO: 76465
  derived and/or modified CDS sequence (opt1) from hemagglutinin__InfluenzaA__ALA08595

SEQ ID NO: 77094 - RNA, 1701 nt, Artificial Sequence; identical to SEQ ID NO: 76465
  derived and/or modified CDS sequence (opt1) from hemagglutinin__InfluenzaA__ALA08596

SEQ ID NO: 77095 - RNA, 1701 nt, Artificial Sequence
  derived and/or modified CDS sequence (opt1) from hemagglutinin__InfluenzaA__ALA08597
augaagaccaucaucgcccugagcuacauccucugccugguguucgcccagaagauccccggcaacgacaacuccaccgcgacgcugugccucgggcaccacgccgucccgaacggcaccaucgugaagaccaucaccaacgaccgcaucgaggugacgaacgccaccgagcugguccagaacagcuccaucggggagaucugcgacagcccccaccagauccuggacggcgagaacugcacccucaucgacgcccugcugggggacccccagugcgacggcuuccagaacaagaagugggaccucuucguggagcgguccaaggccuacagcaacugcuaccccuacgacgugccggacuacgcgucccugcgcagccuggucgccuccagcggcacccucgaguucaacaacgaguccuucaacuggacgggggugacccagaacggcaccagcuccgccugcauccggcgcagcuccagcuccuucuucagccggcugaacuggcugacccaccucaacuacacguaccccgcccugaacgugaccaugcccaacaacgagcaguucgacaagcuguacaucuggggcguccaccaccccgggaccgacaaggaccagaucuuccucuacgcgcaguccagcgggcgcaucaccgugagcacgaagcggucccagcaggccgugaucccgaacaucggcagccgcccccggauccgcgacauccccucccggaucagcaucuacuggaccaucgucaagcccggcgacauccugcugaucaacuccaccgggaaccucaucgccccgcgcggcuacuucaagauccggagcgggaaguccagcaucaugcgcuccgacgcccccaucggcaagugcaagagcgagugcaucacccccaacggcuccauccccaacgacaagccguuccagaacgugaaccggaucacguacggggccugcccccgcuacgugaagcacagcacccugaagcuggcgaccggcaugcggaacguccccgagaagcagacccgcgggaucuucggcgccaucgccggguucaucgagaacggcugggagggcaugguggacgggugguacggcuuccggcaccagaacuccgaggggcgcggccaggccgccgaccucaagagcacgcaggcggccaucgaccagaucaacgggaagcugaaccggcugaucggcaagaccaacgagaaguuccaccagaucgagaaggaguucuccgagguggagggccgcauccaggaccucgagaaguacgucgaggacaccaagaucgaccuguggagcuacaacgccgagcugcucguggcccuggagaaccagcacaccaucgaccugacggacuccgagaugaacaagcuguucgagaagaccaagaagcagcuccgcgagaacgccgaggacauggggaacggcugcuucaagaucuaccacaagugcgacaacgcgugcaucgggagcauccggaacggcaccuacgaccacaacguguaccgcgacgaggcccugaacaaccgguuccagaucaagggggucgagcucaaguccggcuacaaggacuggauccuguggaucagcuucgccaucagcugcuuccugcucugcguggcccugcugggcuucaucaugugggccugccagaacgggaacauccgcugcaacaucugcaucuga

SEQ ID NO: 77096 - RNA, 1701 nt, Artificial Sequence
  derived and/or modified CDS sequence (opt1) from hemagglutinin__InfluenzaA__ALA08598
augaagaccaucaucgccagcuccuacauccugugccucguguucgcccagaagauccccggcaacgacaacagcaccgcgacgcugugccuggggcaccacgccgucccgaacggcaccaucgugaagaccaucaccaacgaccgcaucgaggugacgaacgccaccgagcucguccagaacuccagcaucggggagaucugcgacagcccccaccagauccuggacggcgagaacugcacccugaucgacgcccuccugggggacccccagugcgacggcuuccagaacaagaagugggaccuguucguggagcggagcaaggccuacuccaacugcuaccccuacgacgugccggacuacgcgagccuccgcucccuggucgccagcuccggcacccuggaguucaacaacgagagcuucaacuggacgggggugacccagaacggcaccuccagcgccugcauccggcgcuccagcuccagcuucuucucccggcucaacuggcugacccaccugaacuacacguaccccgcccucaacgugaccaugcccaacaacgagcaguucgacaagcuguacaucuggggcguccaccaccccgggaccgacaaggaccagaucuuccuguacgcgcagagcagcgggcgcaucaccguguccacgaagcggagccagcaggccgugaucccgaacaucggcucccgcccccggauccgcgacauccccagccggaucuccaucuacuggaccaucgucaagcccggcgacauccuccugaucaacagcaccgggaaccugaucgccccgcgcggcuacuucaagauccgguccgggaaguccuccaucaugcgcagcgacgcccccaucggcaagugcaaguccgagugcaucacccccaacggcagcauccccaacgacaagccguuccagaacgugaaccggaucacguacggggccugcccccgcuacgugaagcacuccacccucaagcuggcgaccggcaugcggaacguccccgagaagcagacccgcgggaucuucggcgccaucgccggguucaucgagaacggcugggagggcaugguggacgggugguacggcuuccggcaccagaacagcgaggggcgcggccaggccgccgaccugaaguccacgcaggcggccaucgaccagaucaacgggaagcucaaccggcugaucggcaagaccaacgagaaguuccaccagaucgagaaggaguucagcgagguggagggccgcauccaggaccuggagaaguacgucgaggacaccaagaucgaccucugguccuacaacgccgagcugcugguggcccucgagaaccagcacaccaucgaccugacggacagcgagaugaacaagcuguucgagaagaccaagaagcagcuccgcgagaacgccgaggacauggggaacggcugcuucaagaucuaccacaagugcgacaacgcgugcaucggguccauccggaacggcaccuacgaccacaacguguaccgcgacgaggcccugaacaaccgguuccagaucaagggggucgagcucaagagcggcuacaaggacuggauccuguggaucagcuucgccaucuccugcuuccugcugugcguggcccuccugggcuucaucaugugggccugccagaaggggaacauccgcugcaacaucugcaucuga

SEQ ID NO: 77097 - RNA, 1701 nt, Artificial Sequence; identical to SEQ ID NO: 76465
  derived and/or modified CDS sequence (opt1) from hemagglutinin__InfluenzaA__ALA08599

SEQ ID NO: 77098 - RNA, 1701 nt, Artificial Sequence
  derived and/or modified CDS sequence (opt1) from hemagglutinin__InfluenzaA__ALA08600
augaagaccaucaucgcccugagcuacauccucugccugguguucgcccagaagauccccggcaacgacaacuccaccgcgacgcugugccucgggcaccacgccgucccgaacggcaccaucgugaagaccaucaccaacgaccgcaucgaggugacgaacgccaccgagcugguccagaacagcuccaucggggagaucugcgacagcccccaccagauccuggacggcgagaacugcacccucaucgacgcccugcugggggacccccagugcgacggcuuccagaacaagaagugggaccucuucguggagcgguccaaggccuacagcaacugcuaccccuacgacgugccggacuacgcgucccugcgcagccuggucgccuccagcggcacccucgaguucaacaacgaguccuucaacuggacgggggugacccagaacggcaccagcuccgccugcauccggcgcagcuccagcuccuucuucagccggcugaacuggcugacccaccucaacuaccgcuaccccgcccugaacgugacgaugcccaacaacgagcaguucgacaagcuguacaucuggggcguccaccaccccgggaccgacaaggaccagaucucccucuacgcgcagagcagcgggcggaucaccguguccaccaagcgcagccagcaggccgugaucccgaacaucggcucccggccccgcauccgggacauccccagccgcaucuccaucuacuggacgaucgucaagcccggcgacauccugcugaucaacagcaccgggaaccucaucgccccgcggggcuacuucaagauccgcuccggcaagagcuccaucaugcggagcgacgcccccaucgggaagugcaaguccgagugcaucacccccaacggcagcauccccaacgacaagccguuccagaacgugaaccgcaucaccuacggggccugcccccgguacgugaagcacuccacgcugaagcuggcgaccggcaugcgcaacguccccgagaagcagacccgggggaucuucggcgccaucgccggguucaucgagaacggcugggagggcaugguggacgggugguacggcuuccgccaccagaacagcgaggggcggggccaggccgccgaccucaaguccacccaggcggccaucgaccagaucaacgggaagcugaaccgccugaucggcaagacgaacgagaaguuccaccagaucgagaaggaguucagcgagguggagggccgcauccaggaccucgagaaguacgucgaggacaccaagaucgaccugugguccuacaacgccgagcugcucguggcccuggagaaccagcacaccaucgaccugaccgacagcgagaugaacaagcuguucgagaagacgaagaagcagcuccgggagaacgccgaggacauggggaacggcugcuucaagaucuaccacaagugcgacaacgcgugcaucggguccauccgcaacggcaccuacgaccacaacguguaccgggacgaggcccugaacaaccgcuuccagaucaagggggucgagcucaagagcggcuacaaggacuggauccuguggaucagcuucgccaucuccugcuuccugcucugcguggcccugcugggcuucaucaugugggccugccagaaggggaacauccggugcaacaucugcaucuga

SEQ ID NO: 77099 - RNA, 1701 nt, Artificial Sequence; identical to SEQ ID NO: 76465
  derived and/or modified CDS sequence (opt1) from hemagglutinin__InfluenzaA__ALA08601

SEQ ID NO: 77100 - RNA, 1701 nt, Artificial Sequence
  derived and/or modified CDS sequence (opt1) from hemagglutinin__InfluenzaA__ALA08602
augaagaccaucaucgcccugagcuacauccucugccugguguucgcccagaagauccccggcaacgacaacuccaccgcgacgcugugccucgggcaccacgccgucccgaacggcaccaucgugaagaccaucaccaacgaccgcaucgaggugacgaacgccaccgagcugguccagaacagcuccaucggggagaucugcgacagcccccaccagauccuggacggcgagaacugcacccucaucgacgcccugcugggggacccccagugcgacgacuuccagaacaagaagugggaccucuucguggagcgguccaaggccuacagcaacugcuaccccuacgacgugccggacuacgcgucccugcgcagccuggucgccuccagcggcacccucgaguucaacaacgaguccuucaacuggacgggcgugacccagaacgggaccagcuccgccugcauccggcgcagcuccagcuccuucuucagccggcugaacuggcugacccaccucaacuacacguaccccgcccugaacgugaccaugcccaacaacgagcaguucgacaagcuguacaucuggggcguccaccaccccgggaccgacaaggaccagaucucccucuacgcgcagagcagcggccgcaucaccguguccacgaagcggagccagcaggccgugaucccgaacaucgggucccgcccccggauccgcgacauccccagccggaucuccaucuacuggaccaucgucaagcccggcgacauccugcugaucaacagcaccggcaaccucaucgccccgcgcggguacuucaagauccgguccggcaagagcuccaucaugcgcagcgacgcccccaucgggaagugcaaguccgagugcaucacccccaacggcagcauccccaacgacaagccguuccagaacgugaaccggaucacguacggcgccugcccccgcuacgugaagcacuccacccugaagcuggcgaccgggaugcggaacguccccgagaagcagacccgcggcaucuucggggccaucgccggcuucaucgagaacgggugggagggcaugguggacggcugguacggguuccggcaccagaacagcgagggccgcgggcaggccgccgaccucaaguccacgcaggcggccaucgaccagaucaacggcaagcugaaccggcugaucgggaagaccaacgagaaguuccaccagaucgagaaggaguucagcgagguggagggccgcauccaggaccucgagaaguacgucgaggacaccaagaucgaccugugguccuacaacgccgagcugcucguggcccuggagaaccagcacaccaucgaccugacggacagcgagaugaacaagcuguucgagaagaccaagaagcagcuccgcgagaacgccgaggacaugggcaacgggugcuucaagaucuaccacaagugcgacaacgcgugcaucggcuccauccggaacgggaccuacgaccacaacguguaccgcgacgaggcccugaacaaccgguuccagaucaagggcgucgagcucaagagcggguacaaggacuggauccuguggaucagcuucgccaucuccugcuuccugcucugcguggcccugcugggcuucaucaugugggccugccagaagggcaacauccgcugcaacaucugcaucuga

SEQ ID NO: 77101 - RNA, 1701 nt, Artificial Sequence
  derived and/or modified CDS sequence (opt1) from hemagglutinin__InfluenzaA__ALA08603
augaagaccaucaucgcccugagcuacauccucugccugguguucgcccagaagauccccggcaacgacaacuccaccgcgacgcugugccucgggcaccacgccgucccgaacggcaccaucgugaagaccaucaccaacgaccgcaucgaggugacgaacgccaccgagcugguccagaacagcuccaucggggagaucugcgacagcccccaccagauccuggacggcgagaacugcacccucaucgacgcccugcugggggacccccagugcgacggcuuccagaacaagaagugggaccucuucguggagcgguccaaggccuacagcaacugcuaccccuacgacgugccggacuacgcgucccugcgcagccuggucgccuccagcggcacccucgaguucaacaacgaguccuucaacuggacgggggugacccagaacggcaccagcuccgccugcauccggcgcagcuccagcuccuucuucagccggcugaacuggcugacccaccucaacuacaucuaccccgcccugaacgugacgaugcccaacaacgagcaguucgacaagcuguacaucuggggcguccaccaccccgggaccgacaaggaccagaucuuccucuacgcgcaguccagcgggcgcaucaccgugagcaccaagcggucccagcaggccgugaucccgaacaucggcagccgcccccggauccgcgacauccccucccggaucagcaucuacuggacgaucgucaagcccggcgacauccugcugaucaacuccaccgggaaccucaucgccccgcgcggcuacuucaagauccggagcgggaaguccagcaucaugcgcuccgacgcccccaucggcaagugcaagagcgagugcaucacccccaacggcuccauccccaacgacaagccguuccagaacgugaaccggaucaccuacggggccugcccccgcuacgugaagcacagcacgcugaagcuggcgaccggcaugcggaacguccccgagaagcagacccgcgggaucuucggcgccaucgccggguucaucgagaacggcugggagggcaugguggacgggugguacggcuuccggcaccagaacuccgaggggcgcggccaggccgccgaccucaagagcacccaggcggccaucgaccagaucaacgggaagcugaaccggcugaucggcaagacgaacgagaaguuccaccagaucgagaaggaguucuccgagguggagggccgcauccaggaccucgagaaguacgucgaggacaccaagaucgaccuguggagcuacaacgccgagcugcucguggcccuggagaaccagcacaccaucgaccugaccgacuccgagaugaacaagcuguucgagaagacgaagaagcagcuccgcgagaacgccgaggacauggggaacggcugcuucaagaucuaccacaagugcgacaacgcgugcaucgggagcauccggaacggcaccuacgaccacaacguguaccgcgacgaggcccugaacaaccgguuccagaucaagggggucgagcucaaguccggcuacaaggacuggauccuguggaucagcuucgccaucagcugcuuccugcucugcguggcccugcugggcuucaucaugugggccugccagaaggggaacauccgcugcaacaucugcaucuga

SEQ ID NO: 77102 - RNA, 1701 nt, Artificial Sequence; identical to SEQ ID NO: 76465
  derived and/or modified CDS sequence (opt1) from hemagglutinin__InfluenzaA__ALA08605

SEQ ID NO: 77103 - RNA, 1701 nt, Artificial Sequence; identical to SEQ ID NO: 76465
  derived and/or modified CDS sequence (opt1) from hemagglutinin__InfluenzaA__ALA08606

SEQ ID NO: 77104 - RNA, 1701 nt, Artificial Sequence; identical to SEQ ID NO: 77080
  derived and/or modified CDS sequence (opt1) from hemagglutinin__InfluenzaA__ALA08607

SEQ ID NO: 77105 - RNA, 1701 nt, Artificial Sequence
  derived and/or modified CDS sequence (opt1) from hemagglutinin__InfluenzaA__ALA08609
augaagaccaucaucgcccugggcuacauccucugccugguguucgcccagaagauccccgggaacgacaacagcaccgcgacgcugugccucggccaccacgccgucccgaacgggaccaucgugaagaccaucaccaacgaccgcaucgaggugacgaacgccaccgagcugguccagaacuccagcaucggcgagaucugcgacagcccccacaagauccuggacggggagaacugcacccucaucgacgcccugcugggcgacccccagugcgacggcuuccagaacaagaagugggaccucuucguggagcgguccaaggccuacuccaacugcuaccccuacgacgugccggacuacgcgagccugcgcucccuggucgccagcuccgggacccucgaguucaacaacgagagcuucaacuggacgggcgugacccagaacgggaccuccagcgccugcauccggcgcuccagcuccagcuucuucucccggcugaacuggcugacccaccucaacuacacguaccccgcccugaacgugaccaugcccaacaacgagcaguucgacaagcuguacaucuggggcguccaccaccccgggaccgacaaggaccagaucuuccucuacgcgcagagcuccggccgcaucaccgugagcacgaagcggagccagcaggccgugaucccgaacaucggcucccgcccccggauccgcgacauccccagccggaucuccaucuacuggaccaucgucaagcccggggacauccugcugaucaacagcaccggcaaccucaucgccccgcgcggguacuucaagauccgguccggcaagagcuccaucaugcgcagcgacgcccccaucggcaagugcaaguccgagugcaucacccccaacgggagcauccccaacgacaagccguuccagaacgugaaccggaucacguacggcgccugcccccgcuacgugaagcacuccacccugaagcuggcgaccgggaugcggaacguccccgagaagcagacccgcggcaucuucggggccaucgccggcuucaucgagaacggcugggaggggaugguggacggcugguacggguuccggcaccagaacagcgagggccgcgggcaggccgccgaccucaaguccacgcaggcggccaucgaccagaucaacggcaagcugaaccggcugaucggcaagaccaacgagaaguuccaccagaucgagaaggaguucagcgagguggaggggcgcauccaggaccucgacaaguacgucgaggacaccaagaucgaccugugguccuacaacgccgagcugcucguggcccuggagaaccagcacaccaucgaccugacggacagcgagaugaacaagcuguucgagaagaccaagaagcagcuccgcgagaacgccgaggacaugggcaacgggugcuucaagaucuaccacaagugcgacaacgcgugcaucggcuccauccggaacgggaccuacgaccacaacguguaccgcgacgaggcccugaacaaccgguuccagaucaagggcgucgagcucaagagcggcuacaaggacuggauccuguggaucuccuucgccaucagcugcuuccugcucugcguggcccugcugggguucaucaugugggccugccagaagggcaacauccgcugcaacaucugcaucuga

SEQ ID NO: 77106 - RNA, 1701 nt, Artificial Sequence; identical to SEQ ID NO: 77022
  derived and/or modified CDS sequence (opt1) from hemagglutinin__InfluenzaA__ALA08610

SEQ ID NO: 77107 - RNA, 1701 nt, Artificial Sequence
  derived and/or modified CDS sequence (opt1) from hemagglutinin__InfluenzaA__ALA08611
augaagaucaucaucgcccugagcuacauccucugccugguguucgcccagaagauccccggcaacgacaacuccaccgcgacccugugccucgggcaccacgccgucccgaacggcacgaucgugaagaccaucaccaacgaccgcaucgaggugaccaacgccacggagcugguccagaacagcuccaucggggagaucugcgacagcccccaccggauccuggacggcgagaacugcacccucaucgacgcccugcugggggacccccagugcgacggcuuccagaacaagaagugggaccucuucguggagcgcuccaaggccuacagcaacugcuaccccuacgacgugccggacuacgcgucccugcggagccuggucgccuccagcggcacccucgaguucaacaacgaguccuucaacuggaccggggugacgcagaacggcaccagcuccgccugcauccgccggagcuccagcuccuucuucagccgccugaacuggcugacccaccucaacuacaccuaccccgcccugaacgugacgaugcccaacaacgagcaguucgacaagcuguacaucuggggcguccaccaccccgggaccgacaaggaccagaucuuccucuacgcgcaguccagcgggcggaucaccgugagcaccaagcgcucccagcaggccgugaucccgaacaucggcagccggccccgcauccgggacauccccucccgcaucagcaucuacuggacgaucgucaagcccggcgacauccugcugaucaacuccaccgggaaccucaucgccccgcggggcuacuucaagauccgcagcgggaaguccagcaucaugcgguccgacgcccccaucggcaagugcaagagcgagugcaucacccccaacggcuccauccccaacgacaagccguuccagaacgugaaccgcaucaccuacggggccugcccccgguacgugaagcacagcacgcugaagcuggcgaccggcaugcgcaacguccccgagaagcagacccgggggaucuucggcgccaucgccggguucaucgagaacggcugggagggcaugguggacgggugguacggcuuccgccaccagaacuccgaggggcggggccaggccgccgaccucaagagcacccaggcggccaucgaccagaucaacgggaagcugaaccgccugaucggcaagacgaacgagaaguuccaccagaucgagaaggaguucuccgagguggagggccgcauccaggaccucgagaaguacgucgaggacaccaagaucgaccuguggagcuacaacgccgagcugcucguggcccuggagaaccagcacaccaucgaccugaccgacuccgagaugaacaagcuguucgagaagacgaagaagcagcuccgggagaacgccgaggacauggggaacggcugcuucaagaucuaccacaagugcgacaacgcgugcaucgggagcauccgcaacggcaccuacgaccacaacguguaccgggacgaggcccugaacaaccgcuuccagaucaagggggucgagcucaaguccggcuacaaggacuggauccuguggaucagcuucgccaucagcugcuuccugcucugcguggcccugcugggcuucaucaugugggccugccagaaggggaacauccggugcaacaucugcaucuga

SEQ ID NO: 77108 - RNA, 1701 nt, Artificial Sequence; identical to SEQ ID NO: 77080
  derived and/or modified CDS sequence (opt1) from hemagglutinin__InfluenzaA__ALA08612

SEQ ID NO: 77109 - RNA, 1701 nt, Artificial Sequence; identical to SEQ ID NO: 76465
  derived and/or modified CDS sequence (opt1) from hemagglutinin__InfluenzaA__ALA08614

SEQ ID NO: 77110 - RNA, 1701 nt, Artificial Sequence; identical to SEQ ID NO: 76465
  derived and/or modified CDS sequence (opt1) from hemagglutinin__InfluenzaA__ALA08615

SEQ ID NO: 77111 - RNA, 1701 nt, Artificial Sequence; identical to SEQ ID NO: 76465
  derived and/or modified CDS sequence (opt1) from hemagglutinin__InfluenzaA__ALA08616

SEQ ID NO: 77112 - RNA, 1701 nt, Artificial Sequence; identical to SEQ ID NO: 77005
  derived and/or modified CDS sequence (opt1) from hemagglutinin__InfluenzaA__ALA08617

SEQ ID NO: 77113 - RNA, 1701 nt, Artificial Sequence
  derived and/or modified CDS sequence (opt1) from hemagglutinin__InfluenzaA__ALA08619
augaagaccgugaucgcccugagcuacauccucugccuggucuucgcccagaagauccccggcaacgacaacuccaccgcgacgcugugccucgggcaccacgccgugccgaacggcaccaucgugaagaccaucaccaacgaccgcaucgaggucacgaacgccaccgagcuggugcagaacagcuccaucggggagaucugcgacagcccccaccagauccuggacggcgagaacugcacccucaucgacgcccugcugggggacccccagugcgacggcuuccagaacaagaagugggaccucuucguggagcgguccaaggccuacagcaacugcuaccccuacgacgucccggacuacgcgucccugcgcagccugaucgccuccagcggcacccucgaguucaacaacgaguccuucaacuggacgggggugacccagaacggcaccagcuccgccugcauccgcaagagcuccagcuccuucuucagccggcugaacuggcugacccaccucaacuacacguaccccgcccugaacgugaccaugcccaacaacgagcaguucgacaagcuguacaucuggggcguccaccaccccgggaccgacaaggaccagaucuuccucuacgcgcgguccagcgggcgcaucaccgugagcacgaagcggucccagcaggccgugaucccgaacaucggcagccgcccccggauccgcgacauccccucccggaucagcaucuacuggaccaucgucaagcccggcgacauccugcugaucaacuccaccgggaaccucaucgccccgcgcggcuacuucaagauccggagcgggaaguccagcaucaugcgcuccgacgcccccaucggcaagugcaagagcgagugcaucacccccaacggcuccauccccaacgagaagccguuccagaacgugaaccggaucacguacggggccugcccccgcuacgugaagcacagcacccugaagcuggcgaccggcaugcggaacguccccgagaagcagacccgcgggaucuucggcgccaucgccggguucaucgagaacggcugggagggcaugguggacgggugguacggcuuccggcaccagaacuccgaggggcgcggccaggccgccgaccucaagagcacgcaggcggccaucgaccagaucaacgggaagcugaaccggcugaucggcaagaccaacgagaaguuccaccagaucgagaaggaguucuccgagguggagggccgcauccaggaccucgagaaguacgucgaggacaccaagaucgaccuguggagcuacaacgccgagcugcucguggcccuggagaaccagcacaccaucgaccugacggacuccgagaugaacaagcuguucgagaagaccaagaagcagcuccgcgagaacgccgaggacauggggaacggcugcuucaagaucuaccacaagugcgacaacgcgugcaucgggagcauccggaacggcaucuacgaccacaacguguaccgcgacgaggcccugaacaaccgguuccagaucaagggggucgagcucaaguccggcuacaaggacuggauccuguggaucagcuucgccaucagcugcuuccugcucugcguggcccugcugggcuucaucaugugggccugccagaaggggaacauccgcugcaacaucugcaucuga

SEQ ID NO: 77114 - RNA, 1701 nt, Artificial Sequence; identical to SEQ ID NO: 77080
  derived and/or modified CDS sequence (opt1) from hemagglutinin__InfluenzaA__ALA08620

SEQ ID NO: 77115 - RNA, 1701 nt, Artificial Sequence; identical to SEQ ID NO: 77071
  derived and/or modified CDS sequence (opt1) from hemagglutinin__InfluenzaA__ALA08621

SEQ ID NO: 77116 - RNA, 1701 nt, Artificial Sequence
  derived and/or modified CDS sequence (opt1) from hemagglutinin__InfluenzaA__ALA08622
augaagaccaucaucgcccugagcuacauccucugccugguguucgcccagaagauccccggcaacgacaacuccaccgcgacgcugugccucgggcaccacgccgucccgaacggcaccaucgugaagaccaucaccaacgaccgcaucgaggugacgaacgccaccgagcugguccagaacagcuccaucggggagaucugcgacagcccccaccagauccuggacggcgagaacugcacccucaucgacgcccugcugggggacccccagugcgacggcuuccagaacaagaagugggaccucuucguggagcgguccaaggccuacagcaacugcuaccccuacgacgugccggacuacgcgucccugcgcagccuggucgccuccagcggcacccucgaguucaacaacgaguccuucaacuggacgggggugacccagaacggcaccagcuccgccugcauccggcgcagcuccagcuccuucuucagccggcugaacuggcugacccaccucaacuacaaguaccccgcccugaacgugacgaugcccaacaacgagcaguucgacaagcuguacaucuggggcguccaccaccccgggaccgacaaggaccagaucuuccucuacgcgcaguccagcgggcgcaucaccgugagcaccaagcggucccagcaggccgugaucccgaacaucggcagccgcccccggauccgcgacauccccucccggaucagcaucuacuggacgaucgucaagcccggcgacauccugcugaucaacuccaccgggaaccucaucgccccgcgcggcuacuucaagauccggagcgggaaguccagcaucaugcgcuccgacgcccccaucggcaagugcaagagcgagugcaucacccccaacggcuccauccccaacgacaagccguuccagaacgugaaccggaucaccuacggggccugcccccgcuacgugaagcacagcacgcugaagcuggcgaccggcaugcggaacguccccgagaagcagacccgcgggaucuucggcgccaucgccggguucaucgagaacggcugggagggcaugguggacgggugguacggcuuccggcaccagaacuccgaggggcgcggccaggccgccgaccucaagagcacccaggcggccaucgaccagaucaacgggaagcugaaccggcugaucggcaagacgaacgagaaguuccaccagaucgagaaggaguucuccgagguggagggccgcauccaggaccucgagaaguacgucgaggacaccaagaucgaccuguggagcuacaacgccgagcugcucguggcccuggagaaccagcacaccaucgaccugaccgacuccgagaugaacaagcuguucgagaagacgaagaagcagcuccgcgagaacgccgaggacauggggaacggcugcuucaagaucuaccacaagugcgacaacgcgugcaucgggagcauccggaacggcaccuacgaccacaacguguaccgcgacgaggcccugaacaaccgguuccagaucaagggggucgagcucaaguccggcuacaaggacuggauccuguggaucagcuucgccaucagcugcuuccugcucugcguggcccugcugggcuucaucaugugggccugccagaaggggaacauccgcugcaacaucugcaucuga

SEQ ID NO: 77117 - RNA, 1701 nt, Artificial Sequence; identical to SEQ ID NO: 76465
  derived and/or modified CDS sequence (opt1) from hemagglutinin__InfluenzaA__ALA08623

SEQ ID NO: 77118 - RNA, 1701 nt, Artificial Sequence; identical to SEQ ID NO: 77071
  derived and/or modified CDS sequence (opt1) from hemagglutinin__InfluenzaA__ALA08624

SEQ ID NO: 77119 - RNA, 1701 nt, Artificial Sequence; identical to SEQ ID NO: 76465
  derived and/or modified CDS sequence (opt1) from hemagglutinin__InfluenzaA__ALA08625

SEQ ID NO: 77120 - RNA, 1701 nt, Artificial Sequence; identical to SEQ ID NO: 76465
  derived and/or modified CDS sequence (opt1) from hemagglutinin__InfluenzaA__ALA08626

SEQ ID NO: 77121 - RNA, 1701 nt, Artificial Sequence; identical to SEQ ID NO: 76465
  derived and/or modified CDS sequence (opt1) from hemagglutinin__InfluenzaA__ALA08627

SEQ ID NO: 77122 - RNA, 1701 nt, Artificial Sequence; identical to SEQ ID NO: 77009
  derived and/or modified CDS sequence (opt1) from hemagglutinin__InfluenzaA__ALA08629

SEQ ID NO: 77123 - RNA, 1701 nt, Artificial Sequence
  derived and/or modified CDS sequence (opt1) from hemagglutinin__InfluenzaA__ALA08630
augaagaccaucaucgcccugagcuacauccucugccugguguucgcccagaagauccccggcaacgacaacuccaccgcgacgcugugccucgggcaccacgccgucccgaacggcaccaucgugaagaccaucaccaacgaccgcaucgaggugacgaacgccaccgagcugguccagaacagcuccaucggggagaucugcgacagcccccaccagauccuggacggcgagaacugcacccucaucgacgcccugcugggggacccccagugcgacggcuuccagaacaagaagugggaccucuucguggagcgguccaaggccuacagcaacugcuaccccuacgacgugccggacuacgcgucccugcgcagccuggucgccuccagcggcacccucgaguucaacaacgaguccuucaacuggacgggggugacccagaacggcaccagcuccgccugcauccgcaagagcuccagcuccuucuucagccggcugaacuggcugacccaccucaacuacacguaccccgcccugaacgugaccaugcccaacaacgagcaguucgacaagcuguacaucuggggcguccaccaccccgggaccgacaaggaccagaucuuccucuacgcgcgguccagcgggcgcaucaccgugagcacgaagcggucccagcaggccgugaucccgaacaucggcagccgcccccggauccgcgacauccccucccggaucagcaucuacuggaccaucgucaagcccggcgacauccugcugaucaacuccaccgggaaccucaucgccccgcgcggcuacuucaagauccggagcgggaaguccagcaucaugcgcuccgacgcccccaucggcaagugcaagagcgagugcaucacccccaacggcuccauccccaacgacaagccguuccagaacgugaaccggaucacguacggggccugcccccgcuacgugaagcacagcacccugaagcuggcgaccggcaugcggaacguccccgagaagcagacccgcgggaucuucggcgccaucgccggguucaucgagaacggcugggagggcaugguggacgggugguacggcuuccggcaccagaacuccgaggggcgcggccaggccgccgaccucaagagcacgcaggcggccaucgaccagaucaacgggaagcugaaccggcugaucggcaagaccaacgagaaguuccaccagaucgagaaggaguucuccgagguggagggccgcauccaggaccucgagaaguacgucgaggacaccaagaucgaccuguggagcuacaacgccgagcugcucguggcccuggagaaccagcacaccaucgaccugacggacuccgagaugaacaagcuguucgagaagaccaagaagcagcuccgcgagaacgccgaggacauggggaacggcugcuucaagaucuaccacaagugcgacaacgcgugcaucgggagcauccggaacggcaccuacgaccacaacguguaccgcgacgaggcccugaacaaccgguuccagaucaagggggucgagcucaaguccggcuacaaggacuggauccuguggaucagcuucgccaucagcugcuuccugcucugcguggcccugcugggcuucaucaugugggccugccagaaggggaacauccgcugcaacaucugcaucuga

SEQ ID NO: 77124 - RNA, 1701 nt, Artificial Sequence
  derived and/or modified CDS sequence (opt1) from hemagglutinin__InfluenzaA__ALA08631
augaagaccaucaucgcccugagcuacauccucugccugguguucgcccagaagauccccggcaacgacaacuccaccgcgacgcugugccucgggcaccacgccgucccgaacggcaccaucgugaagaccaucaccaacgaccgcaucgaggugacgaacgccaccgagcugguccagaacagcuccaucggggagaucugcgacagcccccaccagauccuggacggcgagaacugcacccucaucgacgcccugcugggggacccccagugcgacggcuuccagaacaagaagugggaccucuucguggagcgguccaaggccuacagcaacugcuaccccuacgacgugccggacuacgcgucccugcgcagccuggucgccuccagcggcacccucgaguucaacaacgaguccuucaacuggacgggggugacccagaacggcaccagcuccgccugcauccggcgcagcuccagcuccuucuucagccggcugaacuggcugacccaccucaacuacacguaccccgcccugaacgugaccaugcccaacaaggagcaguucgacaagcuguacaucuggggcguccaccaccccgggaccgacaaggaccagaucuuccucuacgcgcaguccagcgggcgcaucaccgugagcacgaagcggucccagcaggccgugaucccgaacaucggcagccgcccccggauccgcgacauccccucccggaucagcaucuacuggaccaucgucaagcccggcgacauccugcugaucaacuccaccgggaaccucaucgccccgcgcggcuacuucaagauccggagcgggaaguccagcaucaugcgcuccgacgcccccaucggcaagugcaagagcgagugcaucacccccaacggcuccauccccaacgacaagccguuccagaacgugaaccggaucacguacggggccugcccccgcuacgugaagcacagcacccugaagcuggcgaccggcaugcggaacguccccgagaagcagacccgcgggaucuucggcgccaucgccggguucaucgagaacggcugggagggcaugguggacgggugguacggcuuccggcaccagaacuccgaggggcgcggccaggccgccgaccucaagagcacgcaggcggccaucgaccagaucaacgggaagcugaaccggcugaucggcaagaccaacgagaaguuccaccagaucgagaaggaguucuccgagguggagggccgcauccaggaccucgagaaguacgucgaggacaccaagaucgaccuguggagcuacaacgccgagcugcucguggcccuggagaaccagcacaccaucgaccugacggacuccgagaugaacaagcuguucgagaagaccaagaagcagcuccgcgagaacgccgaggacauggggaacggcugcuucaagaucuaccacaagugcgacaacgcgugcaucgggagcauccggaacggcaccuacgaccacaacguguaccgcgacgaggcccugaacaaccgguuccagaucaagggggucgagcucaaguccggcuacaaggacuggauccuguggaucagcuucgccaucagcugcuuccugcucugcguggcccugcugggcuucaucaugugggccugccagaaggggaacauccgcugcaacaucugcaucuga

SEQ ID NO: 77125 - RNA, 1701 nt, Artificial Sequence
  derived and/or modified CDS sequence (opt1) from hemagglutinin__InfluenzaA__ALA08632
augaagaccaucaucgcccugagcuacauccucugccugguguucgcccagaagauccccggcaacgacaacuccaccgcgacgcugugccucgggcaccacgccgucccgaacggcaccaucgugaagaccaucaccaacgaccgcaucgaggugacgaacgccaccgagcugguccagaacagcuccaucggggagaucugcgacagcccccaccagauccuggacggcgagaacugcacccucaucgacgcccugcugggggacccccagugcgacggcuuccagaacaagaagugggaccucuucguggagcgguccaaggccuacagcaacugcuaccccuacgacgugccggacuacgcgucccugcgcagccuggucgccuccagcggcacccucgaguucaacaacgaguccuucaacuggacgggggugacccagaacggcaccagcuccgccugcauccggcgcagcuccagcuccuucuucagccggcugaacuggcugacccaccucaacuacacguaccccgcccugaacgugaccaugcccaacaacgagcaguucgacaagcuguacaucuggggcguccaccaccccgggaccgacaaggaccagaucuuccucuacgcgcaguccagcgggcgcaucaccgugagcacgaagggcucccagcaggccgugaucccgaacgucggcagccggccccgcauccgggacauccccucccgcaucagcaucuacuggaccaucgugaagcccggggacauccugcugaucaacuccaccggcaaccucaucgccccgcggggguacuucaagauccgcagcggcaaguccagcaucaugcgguccgacgcccccaucggcaagugcaagagcgagugcaucacccccaacggguccauccccaacgacaagccguuccagaacgugaaccgcaucacguacggcgccugcccccgguacgucaagcacagcacccugaagcuggcgaccgggaugcgcaacgugcccgagaagcagacccggggcaucuucggggccaucgccggcuucaucgagaacggcugggaggggaugguggacggcugguacggguuccgccaccagaacuccgagggccgggggcaggccgccgaccucaagagcacgcaggcggccaucgaccagaucaacggcaagcugaaccgccugaucggcaagaccaacgagaaguuccaccagaucgagaaggaguucuccgaggucgaggggcggauccaggaccucgagaaguacguggaggacaccaagaucgaccuguggagcuacaacgccgagcugcucguggcccuggagaaccagcacaccaucgaccugacggacuccgagaugaacaagcuguucgagaagaccaagaagcagcuccgcgagaacgccgaggacaugggcaacgggugcuucaagaucuaccacaagugcgacaacgcgugcaucggcagcauccgcaacgggaccuacgaccacaacgucuaccgggacgaggcccugaacaaccgcuuccagaucaagggcguggagcucaaguccggcuacaaggacuggauccuguggaucagcuucgccaucagcugcuuccugcucugcguggcccugcugggguucaucaugugggccugccagaagggcaacauccggugcaacaucugcaucuga

SEQ ID NO: 77126 - RNA, 1701 nt, Artificial Sequence; identical to SEQ ID NO: 77022
  derived and/or modified CDS sequence (opt1) from hemagglutinin__InfluenzaA__ALA08634

SEQ ID NO: 77127 - RNA, 1701 nt, Artificial Sequence; identical to SEQ ID NO: 76465
  derived and/or modified CDS sequence (opt1) from hemagglutinin__InfluenzaA__ALA08635

SEQ ID NO: 77128 - RNA, 1701 nt, Artificial Sequence
  derived and/or modified CDS sequence (opt1) from hemagglutinin__InfluenzaA__ALA08636
augaagaccaucaucgcccugagcuacauccucugccugguguucgcccagaagauccccggcaacgacaacuccaccgcgacgcugugccucgggcaccacgccgucccgaacggcaccaucgugaagaccaucaccaacgaccgcaucgaggugacgaacgccaccgagcugguccagaacagcuccaucggggagaucugcgacagcccccaccagauccuggacggcgagaacugcacccucaucgacgcccugcugggggacccccagugcgacggcuuccagaacaagaagugggaccucuucguggagcgguccaaggccuacagcaacugcuaccccuacgacgugccggacuacgcgucccugcgcagccuggucgccuccagcggcacccucgaguucaacaacgaguccuucaacuggacgggggugacccagaacggcaccagcuccgccugcauccggcgcagcuccagcuccuucuucagccggcugaacuggcugacccaccucaacuacacguaccccgcccugaacgugaccaugcccaacaacgagcaguucgacaagcuguacaucugggggauccaccaccccggcaccgacaaggaccagaucuuccucuacgcgcaguccagcgggcgcaucaccgucagcacgaagcggucccagcaggccgugaucccgaacaucggcagccgcccccggauccgcgacauccccucccggaucagcaucuacuggaccaucgugaagcccggcgacauccugcugaucaacuccaccgggaaccucaucgccccgcgcggcuacuucaagauccggagcgggaaguccagcaucaugcgcuccgacgcccccaucggcaagugcaagagcgagugcaucacccccaacggcuccauccccaacgacaagccguuccagaacgucaaccggaucacguacggggccugcccccgcuacgugaagcacagcacccugaagcuggcgaccggcaugcggaacgugcccgagaagcagacccgcgggaucuucggcgccaucgccggguucaucgagaacggcugggagggcauggucgacgggugguacggcuuccggcaccagaacuccgaggggcgcggccaggccgccgaccucaagagcacgcaggcggccaucgaccagaucaacgggaagcugaaccggcugaucggcaagaccaacgagaaguuccaccagaucgagaaggaguucuccgagguggagggccgcauccaggaccucgagaaguacguggaggacaccaagaucgaccuguggagcuacaacgccgagcugcucgucgcccuggagaaccagcacaccaucgaccugacggacuccgagaugaacaagcuguucgagaagaccaagaagcagcuccgcgagaacgccgaggacauggggaacggcugcuucaagaucuaccacaagugcgacaacgcgugcaucgggagcauccggaacggcaccuacgaccacaacguguaccgcgacgaggcccugaacaaccgguuccagaucaaggggguggagcucaaguccggcuacaaggacuggauccuguggaucagcuucgccaucagcugcuuccugcucugcgucgcccugcugggcuucaucaugugggccugccagaaggggaacauccgcugcaacaucugcaucuga

SEQ ID NO: 77129 - RNA, 1701 nt, Artificial Sequence; identical to SEQ ID NO: 77022
  derived and/or modified CDS sequence (opt1) from hemagglutinin__InfluenzaA__ALA08637

SEQ ID NO: 77130 - RNA, 1701 nt, Artificial Sequence
  derived and/or modified CDS sequence (opt1) from hemagglutinin__InfluenzaA__ALA08638
augaagaccaucaucgcccugagcuacauccucugccugguguucgcccagaagauccccggcaacgacaacuccaccgcgacgcugugccucgggcaccacgccgucccgaacggcaccaucgugaagaccaucaccaacgaccgcaucgaggugacgaacgccaccgagcugguccagaacagcuccaucggggagaucugcgacagcccccaccagauccuggacggcgagaacugcacccucaucgacgcccugcugggggacccccagugcgacggcuuccagaacaagaagugggaccucuucguggagcgguccaaggccuacagcaacugcuaccccuacgacgugccggacuacgcgucccugcgcagccuggucgccuccagcggcacccucgaguucaacaacgaguccuucaacuggacgggggugacccagaacggcaccagcuccgccugcauccgggggagcaacuccagcuucuucucccgccugaacuggcugacccacagcaacuucaaguaccccgcccucaacgugacgaugcccaacaacgagcaguucgacaagcuguacaucuggggcguccaccaccccgggaccgacaaggaccagaucuuccuguacgcgcaguccagcggccggaucaccgugagcaccaagcgcucccagcaggccgugaucccgaacaucggcagccggccccgcauccgggacauccccucccgcaucagcaucuacuggacgaucgucaagcccggggacauccuccugaucaacuccaccggcaaccugaucgccccgcggggguacuucaagauccgcagcggcaaguccagcaucaugcgguccgacgcccccaucggcaagugcaagagcgagugcaucacccccaacggguccauccccaacgacaagccguuccagaacgugaaccgcaucaccuacggcgccugcccccgguacgugaagcacagcacgcucaagcuggcgaccgggaugcgcaacguccccgagaagcagacccggggcaucuucggggccaucgccggcuucaucgagaacggcugggaggggaugguggacggcugguacggguuccgccaccagaacuccgagggccgggggcaggccgccgaccucaagagcacccaggcggccaucgaccagaucaacggcaagcugaaccgccugaucggcaagacgaacgagaaguuccaccagaucgagaaggaguucuccgagguggaggggcggauccaggaccuggagaaguacgucgaggacaccaagaucgaccucuggagcuacaacgccgagcugcugguggcccucgagaaccagcacaccaucgaccugaccgacuccgagaugaacaagcuguucgagaagacgaagaagcagcuccgcgagaacgccgaggacaugggcaacgggugcuucaagaucuaccacaagugcgacaacgcgugcaucggcagcauccgcaacgggaccuacgaccacaacguguaccgggacgaggcccugaacaaccgcuuccagaucaagggcgucgagcugaaguccggcuacaaggacuggauccucuggaucagcuucgccaucagcugcuuccugcugugcguggcccuccugggguucaucaugugggccugccagaagggcaacauccggugcaacaucugcaucuga

SEQ ID NO: 77131 - RNA, 1701 nt, Artificial Sequence; identical to SEQ ID NO: 77022
  derived and/or modified CDS sequence (opt1) from hemagglutinin__InfluenzaA__ALA08639

SEQ ID NO: 77132 - RNA, 1701 nt, Artificial Sequence; identical to SEQ ID NO: 77022
  derived and/or modified CDS sequence (opt1) from hemagglutinin__InfluenzaA__ALA08640

SEQ ID NO: 77133 - RNA, 1701 nt, Artificial Sequence; identical to SEQ ID NO: 77022
  derived and/or modified CDS sequence (opt1) from hemagglutinin__InfluenzaA__ALA08641

SEQ ID NO: 77134 - RNA, 1701 nt, Artificial Sequence; identical to SEQ ID NO: 77022
  derived and/or modified CDS sequence (opt1) from hemagglutinin__InfluenzaA__ALA08642

SEQ ID NO: 77135 - RNA, 1701 nt, Artificial Sequence; identical to SEQ ID NO: 77022
  derived and/or modified CDS sequence (opt1) from hemagglutinin__InfluenzaA__ALA08643

SEQ ID NO: 77136 - RNA, 1701 nt, Artificial Sequence; identical to SEQ ID NO: 76465
  derived and/or modified CDS sequence (opt1) from hemagglutinin__InfluenzaA__ALA08644

SEQ ID NO: 77137 - RNA, 1701 nt, Artificial Sequence
  derived and/or modified CDS sequence (opt1) from hemagglutinin__InfluenzaA__ALA08645
augaagaccaucaucgcccugagcuacauccucugccugguguucgcccagaagcugcccgagaacgacaacuccaccgcgacgcucugccugggccaccacgccgucccgaacgggaccaucgugaagaccaucaccagcgaccgcaucgaggugacgaacgccaccgagcugguccagaacuccagcaucggcgagaucugcgacagcccccaccagauccucgacgggaagaacugcacccugaucgacgcccugcucggcgacccccagugcgacggguuccagaacaagaagugggaccuguucguggagcggagcaaggccuacuccaacugcuaccccuacgacgugccggacuacgcgagccugcgcucccucgucgccagcuccggcacccuggaguucaacgacgagagcuucaacugggccggcgugacgcagaacgggaccuccagcgccugcauccggggcuccaacagcuccuucuucagccgccugaacuggcucacccacuccaacuucaaguaccccgcgcugaacgugaccaugcccaacaacgagcaguucgacaagcuguacaucuggggcguccaccaccccgggacggacaaggaccagaucuuccucuacgcccagagcagcgggcggaucaccguguccaccaagcgcagccagcaggccgugaucccgaacaucggcucccggccccgcauccggaacauccccagccgcaucuccaucuacuggaccaucgucaagcccggcgacauccugcugaucaacagcacggggaaccucaucgccccgcggggcuacuucaagauccgcuccgggaaguccuccaucaugcggagcgacgcccccaucggcaagugcaaguccgagugcaucacccccaacggcagcauccccaacgacaagccguuccagaacgugaaccgcaucaccuacggggcgugcccccgguacgugaagcaguccacccugaagcuggccacgggcaugcgcaacguccccgagaagcagacccgggggaucuucggcgccaucgccggguucaucgagaacggcugggagggcaugaaggacgggugguacggcuuccgccaccagaacagcgaggggcggggccaggccgcggaccucaaguccacccaggccgccaucgaccagaucaacgggaagcugaaccgccugaucggcaagaccaacgagaaguuccaccagaucgagaaggaguucagcgagguggagggccggauccaggaccucgagaaguacguggaggacacgaagaucgacaucugguccuacaacgccgagcugcuggucgcccucgagaaccagcacaccaucgaccugaccgacagcgagaugaacaagcuguucgagaagaccaagaagcagcuccgcgagaacgcggaggacauggggaacggcugcuucaagaucuaccacaagugcgacaacgccugcaucggguccauccgcaacggcacguacgaccacgacguguaccgggacgaggcccugaacaaccgcuuccagaucaaggggguggagcucaagagcggcuacaaggacuggauccuguggaucagcuucgccaucuccugcuuccugcugugcgucgcccuccugggcuucaucaugugggcgugccagaaggggaacauccggugcaacaucugcaucuga

SEQ ID NO: 77138 - RNA, 1701 nt, Artificial Sequence; identical to SEQ ID NO: 76465
  derived and/or modified CDS sequence (opt1) from hemagglutinin__InfluenzaA__ALA08646

SEQ ID NO: 77139 - RNA, 1701 nt, Artificial Sequence; identical to SEQ ID NO: 76465
  derived and/or modified CDS sequence (opt1) from hemagglutinin__InfluenzaA__ALA08647

SEQ ID NO: 77140 - RNA, 1701 nt, Artificial Sequence; identical to SEQ ID NO: 77022
  derived and/or modified CDS sequence (opt1) from hemagglutinin__InfluenzaA__ALA08648

SEQ ID NO: 77141 - RNA, 1701 nt, Artificial Sequence
  derived and/or modified CDS sequence (opt1) from hemagglutinin__InfluenzaA__ALA08650
augaagaccaucaucgcccugagcuacauccucugccugguguucgcccagaagauccccggcaacgacaacuccaccgcgacgcugugccucgggcaccacgccgucccgaacggcaccaucgugaagaccaucaccaacgagcgcaucgaggugacgaacgccaccgagcugguccagaacagcuccaucggggagaucugcgacagcccccaccagauccuggacggcgagaacugcacccucaucgacgcccugcugggggacccccagugcgacggcuuccagaacaagaagugggaccucuucguggagcgguccaaggccuacagcaacugcuaccccuacgacgugccggacuacgcgucccugcgcagccuggucgccuccagcggcacccucgaguucaacaacgaguccuucaacuggacgggggugacccagaacggcaccagcuccgccugcauccggcgcagcuccagcuccuucuucagccggcugaacuggcugacccaccucaacuacacguaccccgcccugaacgugaccaugcccaacaacgagcaguucgacaagcuguacaucuggggcguccaccaccccgggaccgacaaggaccagaucuuccucuacgcgcaguccagcgggcgcaucaccgugagcacgaagcggucccagcaggccgugaucccgaacaucggcagccgcccccggauccgcgacauccccucccggaucagcaucuacuggaccaucgucaagcccggcgacauccugcugaucaacuccaccgggaaccucaucgccccgcgcggcuacuucaagauccggagcgggaaguccagcaucaugcgcuccgacgcccccaucggcaagugcaagagcgagugcaucacccccaacggcuccauccccaacgacaagccguuccagaacgugaaccggaucacguacggggccugcccccgcuacgugaagcacagcacccugaagcuggcgaccggcaugcggaacguccccgagaagcagacccgcgggaucuucggcgccaucgccggguucaucgagaacggcugggagggcaugguggacgggugguacggcuuccggcaccagaacuccgaggggcgcggccaggccgccgaccucaagagcacgcaggcggccaucgaccagaucaacgggaagcugaaccggcugaucggcaagaccaacgagaaguuccaccagaucgagaaggaguucuccgagguggagggccgcauccaggaccucgagaaguacgucgaggacaccaagaucgaccuguggagcuacaacgccgagcugcucguggcccuggagaaccagcacaccaucgaccugacggacuccgagaugaacaagcuguucgagaagaccaagaagcagcuccgcgagaacgccgaggacauggggaacggcugcuucaagaucuaccacaagugcgacaacgcgugcaucgggagcauccggaacggcaccuacgaccacaacguguaccgcgacgaggcccugaacaaccgguuccagaucaagggggucgagcucaaguccggcuacaaggacuggauccuguggaucagcuucgccaucagcugcuuccugcucugcguggcccugcugggcuucaucaugugggccugccagaaggggaacauccgcugcaacaucugcaucuga

SEQ ID NO: 77142 - RNA, 1701 nt, Artificial Sequence; identical to SEQ ID NO: 77022
  derived and/or modified CDS sequence (opt1) from hemagglutinin__InfluenzaA__ALA08652

SEQ ID NO: 77143 - RNA, 1701 nt, Artificial Sequence; identical to SEQ ID NO: 76465
  derived and/or modified CDS sequence (opt1) from hemagglutinin__InfluenzaA__ALA08653

SEQ ID NO: 77144 - RNA, 1701 nt, Artificial Sequence
  derived and/or modified CDS sequence (opt1) from hemagglutinin__InfluenzaA__ALA08654
augaagaccaucaucgcccugagcuacauccucugccugguguucgcccagaagauccccggcaacgacaacuccaccgcgacgcugugccucgggcaccacgccgucccgaacggcaccaucgugaagaccaucaccaacgaccgcaucgaggugacgaacgccaccgagcugguccagaacagcuccaucggggagaucugcgacagcccccaccagauccuggacggcgagaacugcacccucaucgacgcccugcugggggacccccagugcgacggcuuccagaacaagaagugggaccucuucguggagcgguccaaggccuacagcaacugcuaccccuacgacgugccggacuacgcgucccugcgcagccuggucgccuccagcggcacccucgaguucaacaacgaguccuucaacuggacgggggugacccagaacggcaccagcuccgccugcauccggcgcagcuccagcuccuucuucagccggcugaacuggcugacccaccucaacuacacguaccccgcccugaacgugaccaugcccaacaacgagcaguucgacaagcuguacaucuggggcguccaccaccccgggaccgacaaggaccagaucuuccucuacgcgcaguccagcgggcgcaucaccgugagcacgaagcggucccagcaggccgugaucccgaacaucggcagccgcccccggauccgcgacauccccucccggaucagcaucuacuggaccaucgucaagcccggcgacauccugcugaucaacuccaccgggaaccucaucgccccgcgcggcuacuucaagauccggagcgggaaguccagcaucaugcgcuccgacgcccccaucggcaagugcaagagcgagugcaucacccccaacggcuccauccccaacgacaagccguuccagaacgugaaccggaucacguacggggccugcccccgcuacgugaagcacagcacccugaagcuggcgaccggcaugcggaacguccccgagaagcagacccgcgggaucuucggcgccaucgccggguucaucgagaacggcugggagggcaugguggacgggugguacggcuuccggcaccagaacuccgaggggcgcggccaggccgccgaccucaagagcacgcaggcggccaucgaccagaucaacgggaagcugaaccggcugaucggcaagaccaacgagaaguuccaccagaucgagaaggaguucuccgagguggagggccgcauccaggaccucgagaaguacgucgaggacaccaagaucgaccuguggagcuacaacgccgagcugcucguggcccuggagaaccagcacaccaucgaccugacggacuccgagaugaacaagcuguucgagaagaccaagaagcagcuccgcgagaacgccgaggacauggggaacggcugcuucaagaucuaccacaagugcgacaacgcgugcaucgggagcauccggaacggcaccuacgaccacaacguguaccgcgacgaggcccugaacaaccgguuccagaucaagggggucgagcucaaguccggcuacaaggacuggauccuguggaucagcuucgccaagagcugcuuccugcucugcguggcccugcugggcuucaucaugugggccugccagaaggggaacauccgcugcaacaucugcaucuga

SEQ ID NO: 77145 - RNA, 1701 nt, Artificial Sequence; identical to SEQ ID NO: 77022
  derived and/or modified CDS sequence (opt1) from hemagglutinin__InfluenzaA__ALA08655

SEQ ID NO: 77146 - RNA, 1701 nt, Artificial Sequence; identical to SEQ ID NO: 77022
  derived and/or modified CDS sequence (opt1) from hemagglutinin__InfluenzaA__ALA08656

SEQ ID NO: 77147 - RNA, 1701 nt, Artificial Sequence
  derived and/or modified CDS sequence (opt1) from hemagglutinin__InfluenzaA__ALA08657
augaagaccaucaucgcccugagcuacauccucugccugguguucgcccagaagcugcccgagaacgacaacuccaccgcgacgcucugccugggccaccacgccgucccgaacgggaccaucgugaagaccaucaccagcgaccgcaucgaggugacgaacgccaccgagcugguccagaacuccagcaucggcgagaucugcgacagcccccaccagauccucgacgggaagaacugcacccugaucgacgcccugcucggcgacccccagugcgacggguuccagaacaagaagugggaccuguucaucgagcggagcaaggccuacuccaacugcuaccccuacgacgugccggacuacgcgagccugcgcucccucguggccagcuccggcacccuggaguucaacgacgagagcuucaacugggccggcgucacgcagaacgggaccuccagcgccugcauccggggcuccaacagcuccuucuucagccgccugaacuggcucacccacuccaacuucaaguaccccgcgcugaacgugaccaugcccaacaacgagcaguucgacaagcuguacaucuggggcgugcaccaccccgggacggacaaggaccagaucuuccucuacgcccagagcagcgggcggaucaccgucuccaccaagcgcagccagcaggccgugaucccgaacaucggcucccggccccgcauccggaacauccccagccgcaucuccaucuacuggaccaucgugaagcccggcgacauccugcugaucaacagcacggggaaccucaucgccccgcggggcuacuucaagauccgcuccgggaaguccuccaucaugcggagcgacgcccccaucggcaagugcaaguccgagugcaucacccccaacggcagcauccccaacgacaagccguuccagaacgucaaccgcaucaccuacggggcgugcccccgguacgugaagcaguccacccugaagcuggccacgggcaugcgcaacgugcccgagaagcagacccgggggaucuucggcgccaucgccggguucaucgagaacggcugggagggcaugaaggacgggugguacggcuuccgccaccagaacagcgaggggcggggccaggccgcggaccucaaguccacccaggccgccaucgaccagaucaacgggaagcugaaccgccugaucggcaagaccaacgagaaguuccaccagaucgagaaggaguucagcgaggucgagggccggauccaggaccucgagaaguacguggaggacacgaagaucgaccugugguccuacaacgccgagcugcucguggcccuggagaaccagcacaccaucgaccugaccgacagcgagaugaacaagcuguucgagaagaccaagaagcagcuccgcgagaacgcggaggacauggggaacggcugcuucaagaucuaccacaagugcgacaacgccugcaucggguccauccgcaacggcacguacgaccacgacgucuaccgggacgaggcccugaacaaccgcuuccagaucaaggggguggagcucaagagcggcuacaaggacuggauccuguggaucagcuucgccaucuccugcuuccugcucugcguggcccugcugggcuucaucaugugggcgugccagaaggggaacauccggugcaacaucugcaucuga

SEQ ID NO: 77148 - RNA, 1701 nt, Artificial Sequence; identical to SEQ ID NO: 77022
  derived and/or modified CDS sequence (opt1) from hemagglutinin__InfluenzaA__ALA08658

SEQ ID NO: 77149 - RNA, 1701 nt, Artificial Sequence; identical to SEQ ID NO: 77009
  derived and/or modified CDS sequence (opt1) from hemagglutinin__InfluenzaA__ALA08659

SEQ ID NO: 77150 - RNA, 1701 nt, Artificial Sequence
  derived and/or modified CDS sequence (opt1) from hemagglutinin__InfluenzaA__ALA08660
augaagaccaucaucgcccugagcuacauccucugccugguguucgcccagaagauccccggcaacgacaacuccaccgcgacgcugugccucgggcaccacgccgucccgaacggcaccaucgugaagaccaucaccaacgaccgcaucgaggugacgaacgccaccgagcugguccagaacagcuccaucggggagaucugcgacagcccccaccagauccuggacggcgagaacugcacccucaucgacgcccugcugggggacccccagugcgacggcuuccagaacaagaagugggaccucuucguggagcgguccaaggccuacagcaacugcuaccccuacgacgugccggacuacgcgucccugcgcagccuggucgccuccagcggcacccucgaguucaacaacgaguccuucaacuggacgggggugacccagaacggcaccagcuccgccugcauccggcgcagcuccagcuccuucuucagccggcugaacuggcugacccaccucaacuacacguaccccgcccugaacgugaccaugcccaacaacgagcaguucgacaagcuguacaucuggggcguccaccaccccgggaccgacaaggaccagaucuuccucuacgcgcaguccagcgggcgcaucaccgugagcacgaagcggucccagcaggccgugaucccgaacaucggcagccgcccccggauccgcgacauccccucccggaucagcaucuacuggaccaucgucaagcccggcgacauccugcugaucaacuccaccgggaaccucaucgccccgcgcggcuacuucaagauccggagcgggaaguccagcaucaugcgcuccgacgcccccaucggcaagugcaagagcgagugcaucacccccaacggcuccauccccaacgacaagccguuccagaacgugaaccggaucacguacggggccugcccccgcuacgugaagcacggcacccugaagcuggcgaccgggaugcggaacguccccgagaagcagacccgcggcaucuucggggccaucgccggcuucaucgagaacggcugggaggggaugguggacggcugguacggguuccggcaccagaacagcgagggccgcgggcaggccgccgaccucaaguccacgcaggcggccaucgaccagaucaacggcaagcugaaccggcugaucggcaagaccaacgagaaguuccaccagaucgagaaggaguucagcgagguggaggggcgcauccaggaccucgagaaguacgucgaggacaccaagaucgaccugugguccuacaacgccgagcugcucguggcccuggagaaccagcacaccaucgaccugacggacagcgagaugaacaagcuguucgagaagaccaagaagcagcuccgcgagaacgccgaggacaugggcaacgggugcuucaagaucuaccacaagugcgacaacgcgugcaucggcuccauccggaacgggaccuacgaccacaacguguaccgcgacgaggcccugaacaaccgguuccagaucaagggcgucgagcucaagagcggcuacaaggacuggauccuguggaucuccuucgccaucagcugcuuccugcucugcguggcccugcugggguucaucaugugggccugccagaagggcaacauccgcugcaacaucugcaucuga

SEQ ID NO: 77151 - RNA, 1701 nt, Artificial Sequence
  derived and/or modified CDS sequence (opt1) from hemagglutinin__InfluenzaA__ALA08662
augaagaccaucaucgcccugagcuacauccucugccugguguucgcccagaagauccccggcaacgacaacuccaccgcgacgcugugccucgggcaccacgccgucccgaacggcaccaucgugaagaccaucaccaacgaccgcaucgaggugacgaacgccaccgagcugguccagaacagcuccaucggggagaucugcgacagcccccaccagauccuggacggcgagaacugcacccucaucgacgcccugcugggggacccccagugcgacggcuuccagaacaagaagugggaccucuucguggagcgguccaaggccuacagcaacugcuaccccuacgacgugccggacuacgcgucccugcgcagccuggucgccuccagcggcacccucgaguucaacaacgaguccuucaacuggacgggggugacccagaacggcaccagcuccgccugcauccggcgcagcuccagcuccuucuucagccggcugaacuggcugacccaccucaacuacacguaccccgcccugaacgugaccaugcccaacaacgagcaguucgacaagcuguacaucuggggcguccaccaccccgggaccgacaaggaccagaucuuccucuacgcgcaguccagcgggcgcaucaccgugagcacgaagcggucccagcaggccgugaucccgaacaucggcagccgcccccggauccgcgacauccccucccggaucagcaucuacuggaccaucgucaagcccggcgacauccugcugaucaacuccaccgggaaccucaucgccccgcgcggcuacuucaagauccugagcgggaaguccagcaucaugcgguccgacgcccccaucggcaagugcaagagcgagugcaucacccccaacggcuccauccccaacgacaagccguuccagaacgugaaccgcaucacguacggggccugcccccgguacgugaagcacagcacccugaagcucgcgaccggcaugcgcaacguccccgagaagcagacccgggggaucuucggcgccaucgccggguucaucgagaacggcugggagggcaugguggacgggugguacggcuuccgccaccagaacuccgaggggcggggccaggccgccgaccucaagagcacgcaggcggccaucgaccagaucaacgggaagcugaaccgccugaucggcaagaccaacgagaaguuccaccagaucgagaaggaguucuccgagguggagggccggauccaggaccuggagaaguacgucgaggacagcaagaucgaccugugguccuacaacgccgagcuccugguggcccuggagaaccagcacaccaucgaccucaccgacagcgagaugaacaagcuguucgagaagacgaagaagcagcugcgcgagaacgccgaggacauggggaacggcugcuucaagaucuaccacaagugcgacaacgcgugcaucggguccauccgcaacggcaccuacgaccacaacguguaccgggacgaggcccucaacaaccgcuuccagaucaagggggucgagcucaagagcggcuacaaggacuggauccuguggaucagcuucgccaucuccugcuuccugcugugcguggcccugcucggcuucaucaugugggccugccagaaggggaacauccggugcaacaucugcaucuga

SEQ ID NO: 77152 - RNA, 1701 nt, Artificial Sequence; identical to SEQ ID NO: 77123
  derived and/or modified CDS sequence (opt1) from hemagglutinin__InfluenzaA__ALA08663

SEQ ID NO: 77153 - RNA, 1701 nt, Artificial Sequence; identical to SEQ ID NO: 77151
  derived and/or modified CDS sequence (opt1) from hemagglutinin__InfluenzaA__ALA08665

SEQ ID NO: 77154 - RNA, 1701 nt, Artificial Sequence
  derived and/or modified CDS sequence (opt1) from hemagglutinin__InfluenzaA__ALA08666
augaagaccaucaucgcccugagcuacauccucugccugguguucgcccagaagcugcccggcaacgacaacuccaccgcgacgcucugccuggggcaccacgccgucccgaacggcaccaucgugaagaccaucaccaacgaccgcaucgaggugacgaacgccaccgagcugguccagaacagcuccaucggggagaucugcgacagcccccaccagauccucgacggcgagaacugcacccugaucgacgcccugcucggggacccccagugcgacggcuuccagaacaagaagugggaccuguucguggagcgguccaaggccuacagcaacugcuaccccuacgacgugccggacuacgcgucccugcgcagccucgucgccuccagcggcacccuggaguucaacaacgaguccuucaacugggccggggugacgcagaacggcaccagcuccgccugcauccgggggagcaacuccagcuucuucucccgccugaacuggcucacccaccugaacuucaaguaccccgcgcugaacgugaccaugcccaacaacgagcaguucgacaagcucuacaucuggggcguccaccaccccgggacggacaaggaccagaucuuccuguacgcccagagcuccggccggaucaccgugagcaccaagcgcagccagcaggccgugaucccgaacaucggcucccggccccgcauccggaacauccccagccgcaucuccaucuacuggaccaucgucaagcccggggacauccugcucaucaacagcacgggcaaccugaucgccccgcggggguacuucaagauccgcuccggcaagagcuccaucaugcggagcgacgcccccaucggcaagugcaaguccgagugcaucacccccaacgggagcauccccaacgacaagccguuccagaacgugaaccgcaucaccuacggcgcgugcccccgguacgugaagcaguccacccugaagcucgccacggggaugcgcaacguccccgagaagcagacccggggcaucuucggggccaucgccggcuucaucgagaacggcugggaggggaugguggacggcugguacggguuccgccaccagaacagcgagggccgggggcaggccgcggaccugaaguccacccaggccgccaucgaccagaucaacggcaagcugaaccgccucaucggcaagaccaacgagaaguuccaccagaucgagaaggaguucagcgagguggaggggcggauccaggaccuggagaaguacgucgaggacacgaagaucgaccugugguccuacaacgccgagcuccugguggcccuggagaaccagcacaccaucgaccucaccgacagcgagaugaacaagcuguucgagaagaccaagaagcagcugcgcgagaacgcggaggacaugggcaacgggugcuucaagaucuaccacaagugcgacaacgccugcaucggcuccauccgcaacgggacguacgaccacgacguguaccgggacgaggcccucaacaaccgcuuccagaucaagggcgucgagcucaagagcggcuacaaggacuggauccuguggaucuccuucgccaugagcugcuuccugcugugcguggcccugcucggguucaucaugugggcgugccagaagggcaacauccggugcaacaucugcaucuga

SEQ ID NO: 77155 - RNA, 1701 nt, Artificial Sequence
  derived and/or modified CDS sequence (opt1) from hemagglutinin__InfluenzaA__ALA08667
augaagaccaucaucgcccugagcuacauccucugccugguguucgcccagaagauccccggcaacgacaacuccaccgcgacgcugugccucgggcaccacgccgucccgaacggcaccaucgugaagaccaucaccaacgaccgcaucgaggugacgaacgccaccgagcugguccagaacagcuccaucggggagaucugcgacagcccccaccagauccuggacggcgagaacugcacccucaucgacgcccugcugggggacccccagugcgacggcuuccagaacaagaagugggaccucuucguggagcgguccaaggccuacagcaacugcuaccccuacgacgugccggacuacgcgucccugcgcagccuggucgccuccagcggcacccucgaguucaacaacgaguccuucaacuggacgggggugacccagaacggcaccagcuccgccugcauccgcaagagcuccagcuccuucuucagccggcugaacuggcugacccaccucaacuacaaguaccccgcccugaacgugacgaugcccaacaacgagcaguucgacaagcuguacaucuggggcguccaccaccccgggaccgacaaggaccagaucuuccucuacgcgcgguccagcgggcgcaucaccgugagcaccaagcggucccagcaggccgugaucccgaacaucggcagccgcccccggauccgcgacauccccucccggaucagcaucuacuggacgaucgucaagcccggcgacauccugcugaucaacuccaccgggaaccucaucgccccgcgcggcuacuucaagauccggagcgggaaguccagcaucaugcgcuccgacgcccccaucggcaagugcaagagcgagugcaucacccccaacggcuccauccccaacgacaagccguuccagaacgugaaccggaucaccuacggggccugcccccgcuacgugaagcacagcacgcugaagcuggcgaccggcaugcggaacguccccgagaagcagacccgcgggaucuucggcgccaucgccggguucaucgagaacggcugggagggcaugguggacgggugguacggcuuccggcaccagaacuccgaggggcgcggccaggccgccgaccucaagagcacccaggcggccaucgaccagaucaacgggaagcugaaccggcugaucggcaagacgaacgagaaguuccaccagaucgagaaggaguucuccgagguggagggccgcauccaggaccucgagaaguacgucgaggacaccaagaucgaccuguggagcuacaacgccgagcugcucguggcccuggagaaccagcacaccaucgaccugaccgacuccgagaugaacaagcuguucgagaagacgaagaagcagcuccgcgagaacgccgaggacauggggaacggcugcuucaagaucuaccacaagugcgacaacgcgugcaucgggagcauccggaacggcaccuacgaccacaacguguaccgcgacgaggcccugaacaaccgguuccagaucaagggggucgagcucaaguccggcuacaaggacuggauccuguggaucagcuucgccaucagcugcuuccugcucugcguggcccugcugggcuucaucaugugggccugccagaaggggaacauccgcugcaacaucugcaucuga

SEQ ID NO: 77156 - RNA, 1701 nt, Artificial Sequence
  derived and/or modified CDS sequence (opt1) from hemagglutinin__InfluenzaA__ALA08668
augaagaccaucaucgcccugagcuacauccucugccugguguucgcccagaagauccccggcaacgacaacuccaccgcgacgcugugccucgggcaccacgccgucccgaacggcaccaucgugaagaccaucaccaacgaccgcaucgaggugacgaacgccaccgagcugguccagaacagcuccaucggggagaucugcgacagcccccaccagauccuggacggcgagaacugcacccucaucgacgcccugcugggggacccccagugcgacggcuuccagaacaagaagugggaccucuucguggagcgguccaaggccuacagcaacugcuaccccuacgacgugccggacuacgcgucccugcgcagccuggucgccuccagcggcacccucgaguucaacaacgaguccuucaacuggacgggggugacccagaacggcaccagcuccgccugcauccggcgcagcuccagcuccuucuucagccggcugaacuggcugacccaccucaacuacacguaccccgcccugaacgugaccaugcccaacaacgagcaguucgacaagcuguacaucuggggcguccaccaccccgggaccgacaaggaccagaucuuccucuacgcgcaguccagcgggcgcaucaccgugagcacgaagcggucccagcaggccgugaucccgaacaucggcagccgcccccggauccgcgacauccccucccggaucagcaucuacuggaccaucgucaagcccggcgacauccugcugaucaacuccaccgggaaccucaucgccccgcgcggcuacuucaagauccggagcgggaaguccagcaucaugcgcuccgacgcccccaucggcaagugcaagagcgagugcaucacccccaacggcuccauccccaacgacaagccguuccagaacgugaaccggaucacguacggggccugcccccgcuacgugaagcacagcacccugaagcuggcgaccggcaugcggaacguccccgagaagcagacccgcgggaucuucggcgccaucgccggguucaucgagaacggcugggagggcaugguggacgggugguacggcuuccggcaccagaacuccgaggggcgcggccaggccgccgaccucaagagcacgcaggcggccaucgaccagaucaacgggaagcugaaccggcugaucggcaagaccaacgagaaguuccaccagaucgagaaggaguucuccgagguggagggccgcauccaggaccucgagaaguacgucgaggacaccaagaucgaccuguggagcuacaacgccgagcugcucguggcccuggagaaccagcacaccaucgaccugacggacuccgagaugaacaagcuguucgagaagaccaagaagcagcuccgcgagaacgccgaggacauggggaacggcugcuucaagaucuaccacaagugcgacaacgcgugcaucgggagcauccggaacggcaccuacgaccacaacguguaccgcgacgaggccaucaacaaccgguuccagaucaagggggucgagcugaaguccggcuacaaggacuggauccucuggaucagcuucgccaucagcugcuuccugcugugcguggcccuccugggcuucaucaugugggccugccagaaggggaacauccgcugcaacaucugcaucuga

SEQ ID NO: 77157 - RNA, 1701 nt, Artificial Sequence; identical to SEQ ID NO: 77123
  derived and/or modified CDS sequence (opt1) from hemagglutinin__InfluenzaA__ALA08669

SEQ ID NO: 77158 - RNA, 1701 nt, Artificial Sequence; identical to SEQ ID NO: 77016
  derived and/or modified CDS sequence (opt1) from hemagglutinin__InfluenzaA__ALA08670

SEQ ID NO: 77159 - RNA, 1701 nt, Artificial Sequence; identical to SEQ ID NO: 77123
  derived and/or modified CDS sequence (opt1) from hemagglutinin__InfluenzaA__ALA08671

SEQ ID NO: 77160 - RNA, 1701 nt, Artificial Sequence; identical to SEQ ID NO: 77123
  derived and/or modified CDS sequence (opt1) from hemagglutinin__InfluenzaA__ALA08672

SEQ ID NO: 77161 - RNA, 1701 nt, Artificial Sequence; identical to SEQ ID NO: 77016
  derived and/or modified CDS sequence (opt1) from hemagglutinin__InfluenzaA__ALA08673

SEQ ID NO: 77162 - RNA, 1701 nt, Artificial Sequence; identical to SEQ ID NO: 77123
  derived and/or modified CDS sequence (opt1) from hemagglutinin__InfluenzaA__ALA08674

SEQ ID NO: 77163 - RNA, 1701 nt, Artificial Sequence; identical to SEQ ID NO: 76465
  derived and/or modified CDS sequence (opt1) from hemagglutinin__InfluenzaA__ALA08675

SEQ ID NO: 77164 - RNA, 1701 nt, Artificial Sequence; identical to SEQ ID NO: 77123
  derived and/or modified CDS sequence (opt1) from hemagglutinin__InfluenzaA__ALA08676

SEQ ID NO: 77165 - RNA, 1701 nt, Artificial Sequence; identical to SEQ ID NO: 77123
  derived and/or modified CDS sequence (opt1) from hemagglutinin__InfluenzaA__ALA08677

SEQ ID NO: 77166 - RNA, 1701 nt, Artificial Sequence; identical to SEQ ID NO: 77123
  derived and/or modified CDS sequence (opt1) from hemagglutinin__InfluenzaA__ALA08678

SEQ ID NO: 77167 - RNA, 1701 nt, Artificial Sequence; identical to SEQ ID NO: 77123
  derived and/or modified CDS sequence (opt1) from hemagglutinin__InfluenzaA__ALA08679

SEQ ID NO: 77168 - RNA, 1701 nt, Artificial Sequence; identical to SEQ ID NO: 77123
  derived and/or modified CDS sequence (opt1) from hemagglutinin__InfluenzaA__ALA08680

SEQ ID NO: 77169 - RNA, 1701 nt, Artificial Sequence; identical to SEQ ID NO: 77022
  derived and/or modified CDS sequence (opt1) from hemagglutinin__InfluenzaA__ALA08681

SEQ ID NO: 77170 - RNA, 1701 nt, Artificial Sequence; identical to SEQ ID NO: 77101
  derived and/or modified CDS sequence (opt1) from hemagglutinin__InfluenzaA__ALA08682

SEQ ID NO: 77171 - RNA, 1701 nt, Artificial Sequence; identical to SEQ ID NO: 77022
  derived and/or modified CDS sequence (opt1) from hemagglutinin__InfluenzaA__ALA08683

SEQ ID NO: 77172 - RNA, 1701 nt, Artificial Sequence
  derived and/or modified CDS sequence (opt1) from hemagglutinin__InfluenzaA__ALA08684
augaagaccaucaucgcccugagccacauccucugccugguguucgcccagaagauccccggcaacgacaacuccaccgcgacgcugugccucgggcaccacgccgucccgaacggcaccaucgugaagaccaucaccaacgaccgcaucgaggugacgaacgccaccgagcugguccagaacagcuccaucggggagaucugcgacagcccccaccagauccuggacggcgagaacugcacccucaucgacgcccugcugggggacccccagugcgacggcuuccagaacaagaagugggaccucuucguggagcgguccaaggccuacagcaacugcuaccccuacgacgugccggacuacgcgucccugcgcagccuggucgccuccagcggcacccucgaguucaacaacgaguccuucaacuggacgggggugacccagaacggcaccagcuccgccugcauccggcgcagcuccagcuccuucuucagccggcugaacuggcugacccaccucaacuacaaguaccccgcccugaacgugacgaugcccaacaacgagcaguucgacaagcuguacaucuggggcguccaccaccccgggaccgacaaggaccagaucuuccucuacgcgcaguccagcgggcgcaucaccgugagcaccaagggcucccagcaggccgugaucccgaacaucggcagccggccccgcauccgggacauccccucccgcaucagcaucuacuggacgaucgucaagcccggggacauccugcugaucaacuccaccggcaaccucaucgccccgcggggguacuucaagauccgcagcggcaaguccagcaucaugcgguccgacgcccccaucggcaagugcaagagcgagugcaucacccccaacggguccauccccaacgacaagccguuccagaacgugaaccgcaucaccuacggcgccugcccccgguacgugaagcacagcacgcugaagcuggcgaccgggaugcgcaacguccccgagaagcagacccggggcaucuucggggccaucgccggcuucaucgagaacggcugggaggggaugguggacggcugguacggguuccgccaccagaacuccgagggccgggggcaggccgccgaccucaagagcacccaggcggccaucgaccagaucaacggcaagcugaaccgccugaucggcaagacgaacgagaaguuccaccagaucgagaaggaguucuccgagguggaggggcggauccaggaccucgagaaguacgucgaggacaccaagaucgaccuguggagcuacaacgccgagcugcucguggcccuggagaaccagcacaccaucgaccugaccgacuccgagaugaacaagcuguucgagaagacgaagaagcagcuccgcgagaacgccgaggacaugggcaacgggugcuucaagaucuaccacaagugcgacaacgcgugcaucggcagcauccgcaacgggaccuacgaccacaacguguaccgggacgaggcccugaacaaccgcuuccagaucaagggcaucgagcucaaguccggcuacaaggacuggauccuguggaucagcuucgccaucagcugcuuccugcucugcgucgcccugcugggguucaucaugugggccugccagaagggcaacauccggugcaacaucugcaucuga

SEQ ID NO: 77173 - RNA, 1701 nt, Artificial Sequence; identical to SEQ ID NO: 76465
  derived and/or modified CDS sequence (opt1) from hemagglutinin__InfluenzaA__ALA08686

SEQ ID NO: 77174 - RNA, 1701 nt, Artificial Sequence
  derived and/or modified CDS sequence (opt1) from hemagglutinin__InfluenzaA__ALA08687
augaagaccaucaucgcccugagcuacauccucugccugguguucgcccagaagauccccggcaacgacaacuccaccgcgacgcugugccucgggcaccacgccgucccgaacggcaccaucgugaagaccaucaccaacgaccgcaucgaggugacgaacgccaccgagcugguccagaacagcuccaucggggagaucugcgacagcccccaccagauccuggacggcgagaacugcacccucaucgacgcccugcugggggacccccagugcgacggcuuccagaacaagaagugggaccucuucguggagcgguccaaggccuacagcaacugcuaccccuacgacgugccggacuacgcgucccugcgcagccugaucgccuccagcggcacccucgaguucaacaacgaguccuucaacuggacgggggucacccagaacggcaccagcuccgccugcauccggcgcagcuccagcuccuucuucagccggcugaacuggcugacccaccucaacuacacguaccccgcccugaacgugaccaugcccaacaacgagcaguucgacaagcuguacaucuggggcgugcaccaccccgggaccgacaaggaccagaucuuccucuacgcgcaguccagcgggcgcaucaccgucagcacgaagcggucccagcaggccgugaucccgaacaucggcagccgcccccggauccgcgacauccccucccggaucagcaucuacuggaccaucgugaagcccggcgacauccugcugaucaacuccaccgggaaccucaucgccccgcgcggcuacuucaagauccggagcgggaaguccagcaucaugcgcuccgacgcccccaucggcaagugcaagagcgagugcaucacccccaacggcuccauccccaacgacaagccguuccagaacgucaaccggaucacguacggggccugcccccgcuacgugaagcacagcacccugaagcuggcgaccggcaugcggaacgugcccgagaagcagacccgcgggaucuucggcgccaucgccggguucaucgagaacggcugggagggcauggucgacgggugguacggcuuccggcaccagaacuccgaggggcgcggccaggccgccgaccucaagagcacgcaggcggccaucgaccagaucaacgggaagcugaaccggcugaucggcaagaccaacgagaaguuccaccagaucgagaaggaguucuccgagguggagggccgcauccaggaccucgagaaguacguggaggacaccaagaucgaccuguggagcuacaacgccgagcugcucgucgcccuggagaaccagcacaccaucgaccugacggacuccgagaugaacaagcuguucgagaagaccaagaagcagcuccgcgagaacgccgaggacauggggaacggcugcuucaagaucuaccacaagugcgacaacgcgugcaucgggagcauccggaacggcaccuacgaccacaacguguaccgcgacgaggcccugaacaaccgguuccagaucaaggggguggagcucaaguccggcuacaaggacuggauccuguggaucagcuucgccaucagcugcuuccugcucugcgucgcccugcugggcuucaucaugugggccugccagaaggggaacauccgcugcaacaucugcaucuga

SEQ ID NO: 77175 - RNA, 1701 nt, Artificial Sequence; identical to SEQ ID NO: 77116
  derived and/or modified CDS sequence (opt1) from hemagglutinin__InfluenzaA__ALA08688

SEQ ID NO: 77176 - RNA, 1701 nt, Artificial Sequence; identical to SEQ ID NO: 76465
  derived and/or modified CDS sequence (opt1) from hemagglutinin__InfluenzaA__ALE31612

SEQ ID NO: 77177 - RNA, 1701 nt, Artificial Sequence
  derived and/or modified CDS sequence (opt1) from hemagglutinin__InfluenzaA__ALE31613
augaagaccaucaucgcccugagcuacauccucugccugguguucgcccagaagauccccggcaacgacaacuccaccgcgacgcugugccucgggcaccacgccgucccgaacggcaccaucgugaagaccaucaccaacgaccgcaucgaggugacgaacgccaccgagcugguccagaacagcuccaucggggagaucugcgacagcccccaccagauccuggacggcgagaacugcacccucaucgacgcccugcugggggacccccagugcgacggcuuccagaacaagaagugggaccucuucguggagcgguccaaggccuacagcaacugcuaccccuacgacgugccggacuacgcgucccugcgcagccuggucgccuccagcggcacccucgaguucaacaacgaguccuucaacuggacgggggugacccagaacggcaccagcuccgccugcauccggcgcagcuccagcuccuucuucagccggcugaacuggcugacccaccucaacuacacguaccccgcccugaacgugaccaugcccaacaacgagcaguucgacaagcuguacaucuggggcguccaccaccccgggaccgacaaggaccagaucuuccucuacgcgcaguccagcgggcgcaucaccgugagcacgaagggcucccagcaggccgugaucccgaacaucggcagccggccccgcauccgggacauccccucccgcaucagcaucuacuggaccaucgucaagcccggggacauccugcugaucuccagcaccggcaaccucaucgccccgcggggguacuucaagauccgcuccggcaagagcuccaucaugcggagcgacgcccccaucggcaagugcaaguccgagugcaucacccccaacgggagcauccccaacgacaagccguuccagaacgugaaccgcaucacguacggcgccugcccccgguacgugaagcacuccacccugaagcuggcgaccgggaugcgcaacguccccgagaagcagacccggggcaucuucggggccaucgccggcuucaucgagaacggcugggaggggaugguggacggcugguacggguuccgccaccagaacagcgagggccgggggcaggccgccgaccucaaguccacgcaggcggccaucgaccagaucaacggcaagcugaaccgccugaucggcaagaccaacgagaaguuccaccagaucgagaaggaguucagcgagguggaggggcggauccaggaccucgagaaguacgucgaggacaccaagaucgaccugugguccuacaacgccgagcugcucguggcccuggagaaccagcacaccaucgaccugacggacagcgagaugaacaagcuguucgagaagaccaagaagcagcuccgcgagaacgccgaggacaugggcaacgggugcuucaagaucuaccacaagugcgacaacgcgugcaucggcuccauccgcaacgggaccuacgaccacaacguguaccgggacgaggcccugaacaaccgcuuccagaucaagggcgucgagcucaagagcggcuacaaggacuggauccuguggaucagcuucgccaucuccugccugcuccugugcguggcccugcucggguucaucaugugggccugccagaagggcaacauccggugcaacaucugcaucuga

SEQ ID NO: 77178 - RNA, 1701 nt, Artificial Sequence
  derived and/or modified CDS sequence (opt1) from hemagglutinin__InfluenzaA__ALE31614
augaagaccaucaucgcccugagcuacauccucugccugguguucgcccagaagauccccggcaacgacaacuccaccgcgacgcugugccucgggcaccacgccgucccgaacggcaccaucgugaagaccaucaccaacgaccgcaucgaggugacgaacgccaccgagcugguccagaacagcuccaucgggaagaucugcgacagcccccaccagauccuggacggcgagaacugcacccucaucgacgcccugcugggggacccccagugcgacggcuuccagaacaagaagugggaccucuucguggagcgguccaaggccuacagcaacugcuaccccuacgacgugccggacuacgcgucccugcgcagccuggucgccuccagcggcacccucgaguucaacaacgaguccuucaacuggacgggggugacccagaacggcaccagcuccgccugcauccggcgcagcuccagcuccuucuucagccggcugaacuggcugacccaccucaacuacacguaccccgcccugaacgugaccaugcccaacaacgagcaguucgacaagcuguacaucuggggcguccaccaccccgggaccgacaaggaccagaucuuccucuacgcgcaguccagcgggcgcaucaccgugagcacgaagcggucccagcaggccgugaucccgaacaucggcagccgcccccggauccgcgacauccccucccggaucagcaucuacuggaccaucgucaagcccggcgacauccugcugaucaacuccaccgggaaccucaucgccccgcgcggcuacuucaagauccggagcgggaaguccagcaucaugcgcuccgacgcccccaucggcaagugcaagagcgagugcaucacccccaacggcuccauccccaacgacaagccguuccagaacgugaaccggaucacguacggggccugcccccgcuacgugaagcacagcacccugaagcuggcgaccggcaugcggaacguccccgagaagcagacccgcgggaucuucggcgccaucgccggguucaucgagaacggcugggagggcaugguggacgggugguacggcuuccggcaccagaacuccgaggggcgcggccaggccgccgaccucaagagcacgcaggcggccaucgaccagaucaacgggaagcugaaccggcugaucggcaagaccaacgagaaguuccaccagaucgagaaggaguucuccgagguggagggccgcauccaggaccucgagaaguacgucgaggacaccaagaucgaccuguggagcuacaacgccgagcugcucguggcccuggagaaccagcacaccaucgaccugacggacuccgagaugaacaagcuguucgagaagaccaagaagcagcuccgcgagaacgccgaggacauggggaacggcugcuucaagaucuaccacaagugcgacaacgcgugcaucgggagcauccggaacggcaccuacgaccacaacguguaccgcgacgaggcccugaacaaccgguuccagaucaagggggucgagcucaaguccggcuacaaggacuggauccuguggaucagcuucgccaucagcugcuuccugcucugcguggcccugcugggcuucaucaugugggccugccagaaggggaacauccgcugcaacaucugcaucuga

SEQ ID NO: 77179 - RNA, 1701 nt, Artificial Sequence
  derived and/or modified CDS sequence (opt1) from hemagglutinin__InfluenzaA__ALE31615
augaagaccaucaucgcccugagcuacauccucugccugguguucgcccagaagcugcccggcaacgacaacuccaccgcgacgcucugccuggggcaccacgccgucccgaacggcaccaucgugaagaccaucaccaacgaccgcaucgaggugacgaacgccaccgagcugguccagaacagcuccaucggggagaucugcgacagcccccaccagauccucgacggcgagaacugcacccugaucgacgcccugcucggggacccccagugcgacggcuuccagaacaagaagugggaccuguucguggagcgguccaaggccuacagcaacugcuaccccuacgacgugccggacuacgcgucccugcgcagccucgucgccuccagcggcacccuggaguucaacaacgaguccuucaacugggccggggugacgcagaacggcaccagcuccgccugcauccgggggagcaacuccagcuucuucucccgccugaacuggcucacccaccugaacuucaaguaccccgcgcugaacgugaccaugcccaacaacgagcaguucgacaagcucuacaucuggggcguccaccaccccgggacggacaaggaccagaucuuccuguacgcccagagcuccggccggaucaccgugagcaccaagcgcagccagcaggccgugaucccgaacaucggcucccggccccgcauccggaacauccccagccgcaucuccaucuacuggaccaucgucaagcccggggacauccugcucaucaacagcacgggcaaccugaucgccccgcggggguacuucaagauccgcuccggcaagagcuccaucaugcggagcgacgcccccaucggcaagugcaaguccgagugcaucacccccaacgggagcauccccaacgacaagccguuccagaacgugaaccgcaucaccuacggcgcgugcccccgguacgugaagcaguccacccugaagcucgccacggggaugcgcaacguccccgagaagcagacccggggcaucuucggggccaucgccggcuucaucgagaacggcugggaggggaugguggacggcugguacggguuccgccaccagaacagcgagggccgggggcaggccgcggaccugaaguccacccaggccgccaucgaccagaucaacggcaagcugaaccgccucaucggcaagaccaacgagaaguuccaccagaucgagaaggaguucagcgagguggaggggcggauccaggaccuggagaaguacgucgaggacacgaagaucgaccugugguccuacaacgccgagcuccugguggcccuggagaaccagcacaccaucgaccucaccgacagcgagaugaacaagcuguucgagaagaccaagaagcagcugcgcgagaacgcggaggacaugggcaacgggugcuucaagaucuaccacaagugcgacaacgccugcaucgaguccauccgcaacggcacguacgaccacgacguguaccgggacgaggcccucaacaaccgcuuccagaucaagggggucgagcucaagagcggcuacaaggacuggauccuguggaucuccuucgccaucagcugcuuccugcugugcguggcccugcucggcuucaucaugugggcgugccagaaggggaacauccggugcaacaucugcaucuga

SEQ ID NO: 77180 - RNA, 1701 nt, Artificial Sequence; identical to SEQ ID NO: 76465
  derived and/or modified CDS sequence (opt1) from hemagglutinin__InfluenzaA__ALE31616

SEQ ID NO: 77181 - RNA, 1701 nt, Artificial Sequence; identical to SEQ ID NO: 76465
  derived and/or modified CDS sequence (opt1) from hemagglutinin__InfluenzaA__ALE31617

SEQ ID NO: 77182 - RNA, 1701 nt, Artificial Sequence; identical to SEQ ID NO: 76465
  derived and/or modified CDS sequence (opt1) from hemagglutinin__InfluenzaA__ALE31618

SEQ ID NO: 77183 - RNA, 1701 nt, Artificial Sequence; identical to SEQ ID NO: 77123
  derived and/or modified CDS sequence (opt1) from hemagglutinin__InfluenzaA__ALE31619

SEQ ID NO: 77184 - RNA, 1701 nt, Artificial Sequence; identical to SEQ ID NO: 76465
  derived and/or modified CDS sequence (opt1) from hemagglutinin__InfluenzaA__ALE31620

SEQ ID NO: 77185 - RNA, 1701 nt, Artificial Sequence
  derived and/or modified CDS sequence (opt1) from hemagglutinin__InfluenzaA__ALE31622
augaagaccaucaucgcccugagcuacauccucugccugguguucgcccagaagauccccggcaacgacaacuccaccgcgacgcugugccucgggcaccacgccgucccgaacggcaccaucgugaagaccaucaccaacgaccgcaucgaggugacgaacgccaccgagcugguccagaacagcuccaucggggagaucugcgacagcccccaccagauccuggacggcgagaacugcacccucaucgacgcccugcugggggacccccagugcgacggcuuccagaacaagaagugggaccucuucguggagcgguccaaggccuacagcaacugcuaccccuacgacgugccggacuacgcgucccugcgcagccuggucgccuccagcggcacccucgaguucaacaacgaguccuucaacuggacgggggugacccagaacggcaccagcuccgccugcauccggcgcagcuccagcuccuucuucagccggcugaacuggcugacccaccucaacuacacguaccccgcccugaacgugaccaugcccaacaacgagcaguucgacaagcuguacaucuggggcguccaccaccccgggaccgacaaggaccagaucuuccucuacgcgcaguccagcgggcgcaucaccgugagcacgaagcggucccagcaggccgugaucccgaacaucggcagccgcccccggauccgcgacauccccucccggaucagcaucuacuggaccaucgucaagcccggcgacauccugcugaucaacuccaccgggaaccucaucgccccgcgcggcuacuucaagauccggagcgggaaguccagcaucaugcgcuccgacgugcccaucggcaagugcaagagcgagugcaucacccccaacggcuccauccccaacgacaagccguuccagaacgugaaccggaucacguacggggccugcccccgcuacgucaagcacagcacccugaagcuggccaccggcaugcggaacgugcccgagaagcagacccgcgggaucuucggcgcgaucgccggguucaucgagaacggcugggagggcaugguggacgggugguacggcuuccggcaccagaacuccgaggggcgcggccaggccgccgaccucaagagcacgcaggccgcgaucgaccagaucaacgggaagcugaaccggcugaucggcaagaccaacgagaaguuccaccagaucgagaaggaguucuccgaggucgagggccgcauccaggaccucgagaaguacguggaggacaccaagaucgaccuguggagcuacaacgccgagcugcucguggcccuggagaaccagcacaccaucgaccugacggacuccgagaugaacaagcuguucgagaagaccaagaagcagcuccgcgagaacgccgaggacauggggaacggcugcuucaagaucuaccacaagugcgacaacgccugcaucgggagcauccggaacggcaccuacgaccacaacgucuaccgcgacgaggcgcugaacaaccgguuccagaucaaggggguggagcucaaguccggcuacaaggacuggauccuguggaucagcuucgccaucagcugcuuccugcucugcguggcccugcugggcuucaucaugugggccugccagaaggggaacauccgcugcaacaucugcaucuga

SEQ ID NO: 77186 - RNA, 1701 nt, Artificial Sequence; identical to SEQ ID NO: 76465
  derived and/or modified CDS sequence (opt1) from hemagglutinin__InfluenzaA__ALE31623

SEQ ID NO: 77187 - RNA, 1701 nt, Artificial Sequence; identical to SEQ ID NO: 76465
  derived and/or modified CDS sequence (opt1) from hemagglutinin__InfluenzaA__ALE31625

SEQ ID NO: 77188 - RNA, 1701 nt, Artificial Sequence; identical to SEQ ID NO: 76465
  derived and/or modified CDS sequence (opt1) from hemagglutinin__InfluenzaA__ALE31626

SEQ ID NO: 77189 - RNA, 1701 nt, Artificial Sequence; identical to SEQ ID NO: 76465
  derived and/or modified CDS sequence (opt1) from hemagglutinin__InfluenzaA__ALE31627

SEQ ID NO: 77190 - RNA, 1701 nt, Artificial Sequence; identical to SEQ ID NO: 76465
  derived and/or modified CDS sequence (opt1) from hemagglutinin__InfluenzaA__ALE31628

SEQ ID NO: 77191 - RNA, 1701 nt, Artificial Sequence; identical to SEQ ID NO: 76465
  derived and/or modified CDS sequence (opt1) from hemagglutinin__InfluenzaA__ALE31629

SEQ ID NO: 77192 - RNA, 1701 nt, Artificial Sequence; identical to SEQ ID NO: 76465
  derived and/or modified CDS sequence (opt1) from hemagglutinin__InfluenzaA__ALE31632

SEQ ID NO: 77193 - RNA, 1701 nt, Artificial Sequence
  derived and/or modified CDS sequence (opt1) from hemagglutinin__InfluenzaA__ALE31634
augaagaccaucaucgcccugagcuacauccucugccuggugcuggcccagaagauccccggcaacgacaacuccaccgcgacgcucugccuggggcaccacgccgucccgaacggcaccaucgugaagaccaucaccaacgaccgcaucgaggugacgaacgccaccgagcugguccagaacagcuccaucggggagaucugcgacagcccccaccagauccucgacggcgagaacugcacccugaucgacgcccugcucggggacccccagugcgacggcuuccagaacaagaagugggaccuguucguggagcgguccaaggccuacagcaacugcuaccccuacgacgugccggacuacgcgucccugcgcagccucgucgccuccagcggcacccuggaguucaacaacgaguccuucaacuggacgggggugacccagaacggcaccagcuccgccugcauccggcgcagcuccagcuccuucuucagccggcugaacuggcucacccaccugaacuacacguaccccgcccugaacgugaccaugcccaacaacgagcaguucgacaagcucuacaucuggggcguccaccaccccgggaccgacaaggaccagaucuuccuguacgcgcaguccagcgggcgcaucaccgugagcacgaagcggucccagcaggccgugaucccgaacaucggcagccgcccccggauccgcgacauccccucccggaucagcaucuacuggaccaucgucaagcccggcgacauccugcucaucaacuccaccgggaaccugaucgccccgcgcggcuacuucaagauccggagcgggaaguccagcaucaugcgcuccgacgcccccaucggcaagugcaagagcgagugcaucacccccaacggcuccauccccaacgacaagccguuccagaacgugaaccggaucacguacggggccugcccccgcuacgugaagcacagcacccugaagcucgcgaccggcaugcggaacguccccgagaagcagacccgcgggaucuucggcgccaucgccggguucaucgagaacggcugggagggcaugguggacgggugguacggcuuccggcaccagaacuccgaggggcgcggccaggccgccgaccucaagagcacgcaggcggccaucgaccagaucaacgggaagcugaaccggcugaucggcaagaccaacgagaaguuccaccagaucgagaaggaguucuccgagguggagggccgcauccaggaccuggagaaguacgucgaggacaccaagaucgaccuguggagcuacaacgccgagcuccugguggcccuggagaaccagcacaccaucgaccucacggacuccgagaugaacaagcuguucgagaagaccaagaagcagcugcgcgagaacgccgaggacauggggaacggcugcuucaagaucuaccacaagugcgacaacgcgugcaucgggagcauccggaacggcaccuacgaccacaacguguaccgcgacgaggcccucaacaaccgguuccagaucaagggggucgagcugaaguccggcuacaaggacuggauccuguggaucagcuucgccaucagcugcuuccuccugugcguggcccugcucggcuucaucaugugggccugccagaaggggaacauccgcugcaacaucugcaucuga

SEQ ID NO: 77194 - RNA, 1701 nt, Artificial Sequence; identical to SEQ ID NO: 76465
  derived and/or modified CDS sequence (opt1) from hemagglutinin__InfluenzaA__ALE31635

SEQ ID NO: 77195 - RNA, 1701 nt, Artificial Sequence; identical to SEQ ID NO: 76465
  derived and/or modified CDS sequence (opt1) from hemagglutinin__InfluenzaA__ALE31636

SEQ ID NO: 77196 - RNA, 1701 nt, Artificial Sequence
  derived and/or modified CDS sequence (opt1) from hemagglutinin__InfluenzaA__ALE31638
augaagaccaucaucgcccugagcuacauccucugccugguguucgcccagaagauccccggcaacgacaacuccaccgcgacgcugugccucgggcaccacgccgucccgaacggcaccaucgugaagaccaucaccaacgaccgcaucgaggugacgaacgccaccgagcugguccagaacagcuccaucggggagaucugcgacagcccccaccagauccuggacggcgagaacugcacccucaucgacgcccugcugggggacccccagugcgacggcuuccagaacaagaagugggaccucuucguggagcgguccaaggccuacagcaacugcuaccccuacgacgugccggacuacgcgucccugcgcagccuggucgccuccagcggcacccucgaguucaacaacgaguccuucaacuggacgggggugacccagaacggcaccagcuccgccugcauccggcgcagcuccagcuccuucuucagccggcugaacuggcugacccaccucaacuacacguaccccgcccugaacgugaccaugcccaacaacgagcaguucgacaagcuguacaucuggggcguccaccaccccgggaccgacaaggaccagaucuuccucuacgcgcaguccagcgggcgcaucaccgugagcacgaagcggucccagcaggccgugaucccgaacaucggcagccgcccccggauccgcgacauccccucccggaucagcaucuacuggaccaucgucaagcccggcgacauccugcugaucaacuccaccgggaaccucaucgccccgcgcggcuacuucaagauccggagcgggaaguccagcaucaugcgcuccgacgcccccaucggcaagugcaagagcgagugcaucacccccaacggcuccauccccaacgggaagccguuccagaacgugaaccggaucacguacggcgccugcccccgcuacgugaagcacagcacccugaagcuggcgaccgggaugcggaacguccccgagaagcagacccgcggcaucuucggggccaucgccggcuucaucgagaacggcugggaggggaugguggacggcugguacggguuccggcaccagaacuccgagggccgcgggcaggccgccgaccucaagagcacgcaggcggccaucgaccagaucaacggcaagcugaaccggcugaucggcaagaccaacgagaaguuccaccagaucgagaaggaguucuccgagguggaggggcgcauccaggaccucgagaaguacgucgaggacaccaagaucgaccuguggagcuacaacgccgagcugcucguggcccuggagaaccagcacaccaucgaccugacggacuccgagaugaacaagcuguucgagaagaccaagaagcagcuccgcgagaacgccgaggacaugggcaacgggugcuucaagaucuaccacaagugcgacaacgcgugcaucggcagcauccggaacgggaccuacgaccacaacguguaccgcgacgaggcccugaacaaccgguuccagaucaagggcgucgagcucaaguccggcuacaaggacuggauccuguggaucagcuucgccaucagcugcuuccugcucugcguggcccugcugggguucaucaugugggccugccagaagggcaacauccgcugcaacaucugcaucuga

SEQ ID NO: 77197 - RNA, 1701 nt, Artificial Sequence; identical to SEQ ID NO: 76465
  derived and/or modified CDS sequence (opt1) from hemagglutinin__InfluenzaA__ALE31639

SEQ ID NO: 77198 - RNA, 1701 nt, Artificial Sequence; identical to SEQ ID NO: 77016
  derived and/or modified CDS sequence (opt1) from hemagglutinin__InfluenzaA__ALE31640

SEQ ID NO: 77199 - RNA, 1701 nt, Artificial Sequence; identical to SEQ ID NO: 77022
  derived and/or modified CDS sequence (opt1) from hemagglutinin__InfluenzaA__ALE31641

SEQ ID NO: 77200 - RNA, 1701 nt, Artificial Sequence; identical to SEQ ID NO: 77022
  derived and/or modified CDS sequence (opt1) from hemagglutinin__InfluenzaA__ALE31642

SEQ ID NO: 77201 - RNA, 1701 nt, Artificial Sequence
  derived and/or modified CDS sequence (opt1) from hemagglutinin__InfluenzaA__ALE31643
augaagaccaucaucgcccugagcuacauccucugccugguguucgcccagaagcugcccgagaacgacaacuccaccgcgacgcucugccugggccaccacgccgucccgaacgggaccaucgugaagaccaucaccagcgaccgcaucgaggugacgaacgccaccgagcugguccagaacuccagcaucggcgagaucugcgacagcccccaccagauccucgacgggaagaacugcacccugaucgacgcccugcucggcgacccccagugcgacggguuccagaacaagaagugggaccuguucguggagcggagcaccgccuacuccaacugcuaccccuacgacgugccggacuacgcgagccugcgcucccucgucgccagcuccggcacgcuggaguucaacgacgagagcuucaacugggccggcgugacccagaacgggaccuccagcgccugcauccggggcuccaacagcuccuucuucagccgccugaacuggcucacccacuccaacuucaaguaccccgcgcugaacgugacgaugcccaacaacgagcaguucgacaagcuguacaucuggggcguccaccaccccgggaccgacaaggaccagaucuuccucuacgcccagagcagcgggcggaucaccguguccaccaagcgcagccagcaggccgugaucccgaacaucggcucccggccccgcauccggaacauccccagccgcaucuccaucuacuggacgaucgucaagcccggcgacauccugcugaucaacagcaccgggaaccucaucgccccgcggggcuacuucaagauccgcuccgggaaguccuccaucaugcggagcgacgcccccaucggcaagugcaaguccgagugcaucacccccaacggcagcauccccaacgacaagccguuccagaacgugaaccgcaucaccuacggggcgugcccccgguacgugaagcaguccacgcugaagcuggccaccggcaugcgcaacguccccgagaagcagacccgggggaucuucggcgccaucgccggguucaucgagaacggcugggagggcaugaaggacgggugguacggcuuccgccaccagaacagcgaggggcggggccaggccgcggaccucaaguccacccaggccgccaucgaccagaucaacgggaagcugaaccgccugaucggcaagacgaacgagaaguuccaccagaucgagaaggaguucagcgagguggagggccggauccaggaccucgagaaguacguggaggacaccaagaucgaccugugguccuacaacgccgagcugcucgucgcccuggagaaccagcacaccaucgaccugaccgacagcgagaugaacaagcuguucgagaagacgaagaagcagcuccgcgagaacgcggaggacauggggaacggcugcuucaagaucuaccacaagugcgacaacgccugcaucggguccauccgcaacggcaccuacgaccacgacguguaccgggacgaggcccugaacaaccgcuuccagaucaaggggguggagcucaagagcggcuacaaggacuggauccuguggaucagcuucgccaucuccugcuuccugcucugcgucgcccugcugggcuucaucaugugggcgugccagaaggggaacauccggugcaacaucugcaucuga

SEQ ID NO: 77202 - RNA, 1701 nt, Artificial Sequence; identical to SEQ ID NO: 76465
  derived and/or modified CDS sequence (opt1) from hemagglutinin__InfluenzaA__ALE31644

SEQ ID NO: 77203 - RNA, 1701 nt, Artificial Sequence; identical to SEQ ID NO: 76465
  derived and/or modified CDS sequence (opt1) from hemagglutinin__InfluenzaA__ALE31645

SEQ ID NO: 77204 - RNA, 1701 nt, Artificial Sequence; identical to SEQ ID NO: 76465
  derived and/or modified CDS sequence (opt1) from hemagglutinin__InfluenzaA__ALE31646

SEQ ID NO: 77205 - RNA, 1701 nt, Artificial Sequence; identical to SEQ ID NO: 77022
  derived and/or modified CDS sequence (opt1) from hemagglutinin__InfluenzaA__ALE31647

SEQ ID NO: 77206 - RNA, 1701 nt, Artificial Sequence
  derived and/or modified CDS sequence (opt1) from hemagglutinin__InfluenzaA__ALE31648
augaagaccaucaucgcccugagcuacauccucugccugguguucgcccagaagauccccggcaacgacaacuccaccgcgacgcugugccucgggcaccacgccgucccgaacggcaccaucgugaagaccaucaccaacgaccgcaucgaggugacgaacgccaccgagcugguccagaacagcuccaucggggagaucugcgacagcccccaccagauccuggacggcgagaacugcacccucaucgacgcccugcugggggacccccagugcgacggcuuccagaacaagaagugggaccucuucguggagcgguccaaggccuacagcaacugcuaccccuacgacgugccggacuacgcgucccugcgcagccuggucgccuccagcggcacccucgaguucaacaacgaguccuucaacuggacgggggugacccagaacggcaccagcuccgccugcauccggcgcagcuccagcuccuucuucagccggcugaacuggcugacccaccucaacuacacguaccccgcccugaacgugaccaugcccaacaacgagcaguucgacaagcuguacaucuggggcguccaccaccccgggaccgacaaggaccagaucuuccucuacgcgcagccguccgggcgcaucaccgugagcacgaagcggagccagcaggccgugauccccaacaucggcucccgcccccggauccgcgacauccccagccggaucuccaucuacuggaccaucgucaagccgggcgacauccugcugaucaacagcaccgggaaccucaucgcgccccgcggcuacuucaagauccgguccggcaagagcuccaucaugcgcagcgacgcccccaucgggaagugcaaguccgagugcaucacccccaacggcagcaucccgaacgacaagcccuuccagaacgugaaccggaucacguacggggccugcccccgcuacgugaagcacuccacccugaagcuggccaccggcaugcggaacguccccgagaagcagacccgcgggaucuucggcgccaucgccggguucaucgagaacggcugggagggcaugguggacgggugguacggcuuccggcaccagaacagcgaggggcgcggccaggccgccgaccucaaguccacgcaggcggccaccgaccagaucaacgggaagcugaaccggcugaucggcaagaccaacgagaaguuccaccagaucgagaaggaguucagcgagguggagggccgcauccaggaccucgagaaguacgucgaggacaccaagaucgaccugugguccuacaacgccgagcugcucguggcccuggagaaccagcacacgaucgaccugaccgacagcgagaugaacaagcuguucgagaagaccaagaagcagcuccgcgagaacgccgaggacauggggaacggcugcuucaagaucuaccacaagugcgacaacgcgugcaucggguccauccggaacggcaccuacgaccacaacguguaccgcgacgaggcccugaacaaccgguuccagaucaagggggucgagcucaagagcggcuacaaggacuggauccuguggaucuccuucgccaucagcugcuuccugcucugcguggcccugcugggcuucaucaugugggccugccagaaggggaacauccgcugcaacaucugcaucuga

SEQ ID NO: 77207 - RNA, 1701 nt, Artificial Sequence; identical to SEQ ID NO: 76465
  derived and/or modified CDS sequence (opt1) from hemagglutinin__InfluenzaA__ALE31649

SEQ ID NO: 77208 - RNA, 1701 nt, Artificial Sequence; identical to SEQ ID NO: 77022
  derived and/or modified CDS sequence (opt1) from hemagglutinin__InfluenzaA__ALE31650

SEQ ID NO: 77209 - RNA, 1701 nt, Artificial Sequence
  derived and/or modified CDS sequence (opt1) from hemagglutinin__InfluenzaA__ALE31652
augaagaccaucaucgcccugagcuacauccucugccugguguucgcccagaagauccccggcaacgacaacuccaccgcgacgcugugccucgggcaccacgccgucccgaacggcaccaucgugaagaccaucaccaacgaccgcaucgaggugacgaacgccaccgagcugguccagaacagcuccaucggggagaucugcgacagcccccaccagauccuggacggcgagaacugcacccucaucgacgcccugcugggggacccccagugcgacggcuuccagaacaagaagugggaccucuucguggagcgguccaaggccuacagcaacugcuaccccuacgacgugccggacuacgcgucccugcgcagccuggucgccuccagcggcacccucgaguucaacaacgaguccuucaacuggacgggggugacccagaacggcaccagcuccgccugcauccggcgcagcuccagcuccuucuucagccggcugaacuggcugacccaccucaacuacaaguaccccgcccugaacgugacgaugcccaacaacgagcaguucgacaagcuguacaucuggggcguccaccaccccgggaccgacaaggaccagaucucccucuacgcgcagagcagcgggcgcaucaccguguccaccaagcggagccagcaggccgugaucccgaacaucggcucccgcccccggauccgcgacauccccagccggaucuccaucuacuggacgaucgucaagcccggcgacauccugcugaucaacagcaccgggaaccucaucgccccgcgcggcuacuucaagauccgguccggcaagagcuccaucaugcgcagcgacgcccccaucgggaagugcaaguccgagugcaucacccccaacggcagcauccccaacgacaagccguuccagaacgugaaccggaucaccuacggggccugcccccgcuacgugaagcacuccacgcugaagcuggcgaccggcaugcggaacguccccgagaagcagacccgcgggaucuucggcgccaucgccggguucaucgagaacggcugggagggcaugguggacgggugguacggcuuccggcaccagaacagcgaggggcgcggccaggccgccgaccucaaguccacccaggcggccaucgaccagaucaacgggaagcugaaccggcugaucggcaagacgaacgagaaguuccaccagaucgagaaggaguucagcgagguggagggccgcauccaggaccucgagaaguacgucgaggacaccaagaucgaccugugguccuacaacgccgagcugcucguggcccuggagaaccagcacaccaucgaccugaccgacagcgagaugaacaagcuguucgagaagacgaagaagcagcuccgcgagaacgccgaggacauggggaacggcugcuucaagaucuaccacaagugcgacaacgcgugcaucggguccauccggaacggcaccuacgaccacaacguguaccgcgacgaggcccugaacaaccgguuccagaucaagggggucgagcucaagagcggcuacaaggacuggauccuguggaucagcuucgccaucuccugcuuccugcucugcguggcccugcugggcuucaucaugugggccugccagaaggggaacauccgcugcaacaucugcaucuga

SEQ ID NO: 77210 - RNA, 1701 nt, Artificial Sequence; identical to SEQ ID NO: 77116
  derived and/or modified CDS sequence (opt1) from hemagglutinin__InfluenzaA__ALE31653

SEQ ID NO: 77211 - RNA, 1701 nt, Artificial Sequence; identical to SEQ ID NO: 76465
  derived and/or modified CDS sequence (opt1) from hemagglutinin__InfluenzaA__ALE31654

SEQ ID NO: 77212 - RNA, 1701 nt, Artificial Sequence; identical to SEQ ID NO: 76465
  derived and/or modified CDS sequence (opt1) from hemagglutinin__InfluenzaA__ALE31655

SEQ ID NO: 77213 - RNA, 1701 nt, Artificial Sequence
  derived and/or modified CDS sequence (opt1) from hemagglutinin__InfluenzaA__ALE31656
augaagaccaucaucgcccugagcuacauccucugccugguguucgcccagaagauccccggcaacgacaacuccaccgcgacgcugugccucgggcaccacgccgucccgaacggcaccaucgugaagaccaucaccaacgaccgcaucgaggugacgaacgccaccgagcugguccagaacagcuccaucggggagaucugcgacagcccccaccagauccuggacggcgagaacugcacccucaucgacgcccugcugggggacccccagugcgacggcuuccagaacaagaagugggacaucuucguggagcgguccaaggccuacagcaacugcuaccccuacgacgugccggacuacgcgucccuccgcagccuggucgccuccagcggcacccuggaguucaacaacgaguccuucaacuggacgggggugacccagaacggcaccagcuccgccugcauccggcgcagcuccagcuccuucuucagccggcucaacuggcugacccaccugaacuacacguaccccgcccucaacgugaccaugcccaacaacgagcaguucgacaagcuguacaucuggggcguccaccaccccgggaccgacaaggaccagaucuuccuguacgcgcaguccagcgggcgcaucaccgugagcacgaagcggucccagcaggccgugaucccgaacaucggcagccgcccccggauccgcgacauccccucccggaucagcaucuacuggaccaucgucaagcccggcgacauccuccugaucaacuccaccgggaaccugaucgccccgcgcggcuacuucaagauccggagcgggaaguccagcaucaugcgcuccgacgcccccaucggcaagugcaagagcgagugcaucacccccaacggcuccauccccaacgacaagccguuccagaacgugaaccggaucacguacggggccugcccccgcuacgugaagcacagcacccucaagcuggcgaccggcaugcggaacguccccgagaagcagacccgcgggaucuucggcgccaucgccggguucaucgagaacggcugggagggcaugauggacgggugguacggcuuccggcaccagaacuccgaggggcgcggccaggccgccgaccucaagagcacgcaggcggccaucgaccagaucaacgggaagcugaaccggcugaucggcaagaccaacgagaaguuccaccagaucgagaaggaguucuccgagguggagggccgcauccaggaccuggagaaguacguggaggacaccaagaucgaccucuggagcuacaacgccgagcugcuggucgcccucgagaaccagcacaccaucgaccugacggacuccgagaugaacaagcuguucgagaagaccaagaagcagcuccgcgagaacgccgaggacauggggaacggcugcuucaagaucuaccacaagugcgacaacgcgugcaucgggagcauccggaacggcaccuacgaccacaacguguaccgcgacgaggcccugaacaaccgguuccagaucaaggggguggagcugaaguccggcuacaaggacuggauccucuggaucagcuucgccaucagcugcuuccugcugugcgucgcccuccugggcuucaucaugugggccugccagaaggggaacauccgcugcaacaucugcaucuga

SEQ ID NO: 77214 - RNA, 1701 nt, Artificial Sequence
  derived and/or modified CDS sequence (opt1) from hemagglutinin__InfluenzaA__ALE31657
augaagaccaucaucgcccugagcuacauccucugccugguguccgcccagaagauccccggcaacgacaacagcaccgcgacgcugugccucgggcaccacgccgucccgaacggcaccaucgugaagaccaucaccaacgaccgcaucgaggugacgaacgccaccgagcugguccagaacuccagcaucggggagaucugcgacagcccccaccagauccuggacggcgagaacugcacccucaucgacgcccugcugggggacccccagugcgacggcuuccagaacaagaagugggaccucuucguggagcggagcaaggccuacuccaacugcuaccccuacgacgugccggacuacgcgagccugcgcucccuggucgccagcuccggcacccucgaguucaacaacgagagcuucaacuggacgggggugacccagaacggcaccuccagcgccugcauccggcgcuccagcuccagcuucuucucccggcugaacuggcugacccaccucaacuacacguaccccgcccugaacgugaccaugcccaacaacgagcaguucgacaagcuguacaucuggggcguccaccaccccgggaccgacaaggaccagaucuuccucuacgcgcagagcagcgggcgcaucaccguguccacgaagcggagccagcaggccgugaucccgaacaucggcucccgcccccggauccgcgacauccccagccggaucuccaucuacuggaccaucgucaagcccggcgacauccugcugaucaacagcaccgggaaccucaucgccccgcgcggcuacuucaagauccgguccgggaaguccuccaucaugcgcagcgacgcccccaucggcaagugcaaguccgagugcaucacccccaacggcagcauccccaacgacaagccguuccagaacgugaaccggaucacguacggggccugcccccgcuacgugaagcacuccacccugaagcuggcgaccggcaugcggaacguccccgagaagcagacccgcgggaucuucggcgccaucgccggguucaucgagaacggcugggagggcaugguggacgggugguacggcuuccggcaccagaacagcgaggggcgcggccaggccgccgaccucaaguccacgcaggcggccaucgaccagaucaacgggaagcugaaccggcugaucggcaagaccaacgagaaguuccaccagaucgagaaggaguucagcgagguggagggccgcauccaggaccucgagaaguacgucgaggacaccaagaucgaccugugguccuacaacgccgagcugcucguggcccuggagaaccagcacaccaucgaccugacggacagcgagaugaacaagcuguucgagaagaccaagaagcagcuccgcgagaacgccgaggacauggggaacggcugcuucaagaucuaccacaagugcgacaacgcgugcaucggguccauccggaacggcaccuacgaccacaacguguaccgcgacgaggcccugaacaaccgguuccagaucaagggggucgagcucaagagcggcuacaaggacuggauccuguggaucagcuucgccaucuccugcuuccugcucugcguggcccugcugggcuucaucaugugggccugccagaaggggaacauccgcugcaacaucugcaucuga

SEQ ID NO: 77215 - RNA, 1701 nt, Artificial Sequence; identical to SEQ ID NO: 76465
  derived and/or modified CDS sequence (opt1) from hemagglutinin__InfluenzaA__ALE31658

SEQ ID NO: 77216 - RNA, 1701 nt, Artificial Sequence; identical to SEQ ID NO: 77080
  derived and/or modified CDS sequence (opt1) from hemagglutinin__InfluenzaA__ALE31659

SEQ ID NO: 77217 - RNA, 1701 nt, Artificial Sequence; identical to SEQ ID NO: 77009
  derived and/or modified CDS sequence (opt1) from hemagglutinin__InfluenzaA__ALE31660

SEQ ID NO: 77218 - RNA, 1701 nt, Artificial Sequence
  derived and/or modified CDS sequence (opt1) from hemagglutinin__InfluenzaA__ALE31661
augaagaccaucaucgcccugagcuacauccucugccugguguucgcccagaagauccccggcaacgacaacuccaccgcgacgcugugccucgggcaccacgccgucccgaacggcaccaucgugaagaccaucaccaacgaccgcaucgaggugacgaacgccaccgagcugguccagaacagcuccaucggggagaucugcgacagcccccaccagauccuggacggcgagaacugcacccucaucgacgcccugcugggggacccccagugcgacggcuuccagaacaagaagugggaccucuucguggagcgguccaaggccuacagcaacugcuaccccuacgacgugccggacuacgcgucccugcgcagccuggucgccuccagcggcacccucgaguucaacaacgaguccuucaacuggacgggggugacccagaacggcaccagcuccgccugcauccggcgcagcuccagcuccuucuucagccggcugaacuggcugacccaccucaacuacacguaccccgcccugaacgugaccaugcccaacaacgagcaguucgacaagcuguacaucuggggcguccaccaccccgggaccgacaaggaccagaucuuccucuacgcgcaguccagcgggcgcaucaccgugagcacgaagaagucccagcaggccgugaucccgaacaucggcagccggccccgcauccgggacauccccucccgcaucagcaucuacuggaccaucgucaagcccggcgacauccugcugaucaacuccaccgggaaccucaucgccccgcggggcuacuucaagauccgcagcgggaaguccagcaucaugcgguccgacgcccccaucggcaagugcaagagcgagugcaucacccccaacggcuccauccccaacgacaagccguuccagaacgugaaccgcaucacguacggggccugcccccgguacgugaagcacagcacccugaagcuggcgaccggcaugcgcaacguccccgagaagcagacccgggggaucuucggcgccaucgccggguucaucgagaacggcugggagggcaugguggacgggugguacggcuuccgccaccagaacuccgaggggcggggccaggccgccgaccucaagagcacgcaggcggccaucgaccagaucaacgggaagcugaaccgccugaucggcaagaccaacgagaaguuccaccagaucgagaaggaguucuccgagguggagggccggauccaggaccucgagaaguacgucgaggacaccaagaucgaccuguggagcuacaacgccgagcugcucguggcccuggagaaccagcacaccaucgaccugacggacuccgagaugaacaagcuguucgagaagaccaagaagcagcuccgcgagaacgccgaggacauggggaacggcugcuucaagaucuaccacaagugcgacaacgcgugcaucgggagcauccgcaacggcaccuacgaccacaacguguaccgggacgaggcccugaacaaccgcuuccagaucaagggggucgagcucaaguccggcuacaaggacuggauccuguggaucagcuucgccaucagcugcuuccugcucugcguggcccugcugggcuucaucaugugggccugccagaaggggaacauccggugcaacaucugcaucuga

SEQ ID NO: 77219 - RNA, 1701 nt, Artificial Sequence
  derived and/or modified CDS sequence (opt1) from hemagglutinin__InfluenzaA__ALE31662
augaagaccaucaucgcccugagcuacauccucugccugguguucgcccagaagauccccggcaacgacaacuccaccgcgacgcugugccucgggcaccacgccgucccgaacggcaccaucgugaagaccaucgccaacgaccgcaucgaggugaccaacgccacggagcugguccagaacagcuccaucggggagaucugcgacagcccccaccagauccuggacggcgagaacugcacccucaucgacgcccugcugggggacccccagugcgacggcuuccagaacaagaagugggaccucuucguggagcgguccaaggcguacagcaacugcuaccccuacgacgugccggacuacgccucccugcgcagccuggucgccuccagcggcacccucgaguucaacaacgaguccuucaacuggaccggggugacgcagaacggcaccagcuccgccugcauccggcgcagcuccagcuccuucuucagccggcugaacuggcugacccaccucaacuacaccuaccccgcgcugaacgugacgaugcccaacaacgagcaguucgacaagcuguacaucuggggcguccaccaccccgggaccgacaaggaccagaucuuccucuacgcccaguccagcgggcgcaucaccgugagcaccaagggcucccagcaggccgugaucccgaacaucggcagccggccccgcauccgggacauccccucccgcaucagcaucuacuggacgaucgucaagcccggggacauccugcugaucaacuccaccggcaaccucaucgccccgcggggguacuucaagauccgcagcggcaaguccagcaucaugcgguccgacgcccccaucggcaagugcaagagcgagugcaucacccccaacggguccauccccaacgacaagccguuccagaacgugaaccgcaucaccuacggcgcgugcccccgguacgugaagcacagcacgcugaagcuggccaccgggaugcgcaacguccccgagaagcagacccggggcaucuucggggccaucgccggcuucaucgagaacggcugggaggggaugguggacggcugguacggguuccgccaccagaacuccgagggccgggggcaggccgcggaccucaagagcacccaggccgccaucgaccagaucaacggcaagcugaaccgccugaucggcaagacgaacgagaaguuccaccagaucgagaaggaguucuccgagguggaggggcggauccaggaccucgagaaguacgucgaggacaccaagaucgaccuguggagcuacaacgccgagcugcucguggcccuggagaaccagcacaccaucgaccugaccgacuccgagaugaacaagcuguucgagaagacgaagaagcagcuccgcgagaacgcggaggacaugggcaacgggugcuucaagaucuaccacaagugcgacaacgccugcaucggcagcauccgcaacgggaccuacgaccacaacguguaccgggacgaggcccugaacaaccgcuuccagaucaagggcgucgagcucaaguccggcuacaaggacuggauccuguggaucagcuucgccaucagcugccugcuccugugcguggcccugcucggguucaucaugugggcgugccagaagggcaacauccggugcaacaucugcaucuga

SEQ ID NO: 77220 - RNA, 1701 nt, Artificial Sequence; identical to SEQ ID NO: 76451
  derived and/or modified CDS sequence (opt1) from hemagglutinin__InfluenzaA__ALE31663

SEQ ID NO: 77221 - RNA, 1701 nt, Artificial Sequence
  derived and/or modified CDS sequence (opt1) from hemagglutinin__InfluenzaA__ALE31666
augaagaccaucaucgcccugagcuacauccucugccugguguucgcccagaagauccccggcaacgacaacuccaccgcgacgcugugccucgggcaccacgccgucccgaacggcaccaucgugaagaccaucaccaacgaccgcaucgaggugacgaacgccaccgagcugguccagaacagcuccaucggggagaucugcgacagcccccaccagauccuggacggcgagaacugcacccucaucgacgcccugcugggggacccccagugcgacggcuuccagaacaagaagugggaccucuucguggagcgguccaaggccuacagcaacugcuaccccuacgacgugccggacuacgcgucccugcgcagccuggucgccuccagcggcacccucgaguucaacaacgaguccuucaacuggacgggggugacccagaacggcaccagcuccgccugcauccgcaagagcuccagcuccuucuucagccggcugaacuggcugacccaccucaaguacacguaccccgcccugaacgugaccaugcccaacaacgagcaguucgacaagcuguacaucuggggcguccaccaccccgggaccgacaaggaccagaucuuccucuacgcgcgguccagcgggcgcaucaccgugagcacgaagcggucccagcaggccgugaucccgaacaucggcagccgcccccggauccgcgacauccccucccggaucagcaucuacuggaccaucgucaagcccggcgacauccugcugaucaacuccaccgggaaccucaucgccccgcgcggcuacuucaagauccggagcgggaaguccagcaucaugcgcuccgacgcccccaucggcaagugcaagagcgagugcaucacccccaacggcuccauccccaacgacaagccguuccagaacgugaaccggaucacguacggggccugcccccgcuacgugaagcacagcacccugaagcuggcgaccggcaugcggaacguccccgagaagcagacccgcgggaucuucggcgccaucgccggguucaucgagaacggcugggagggcaugguggacgggugguacggcuuccggcaccagaacuccgaggggcgcggccaggccgccgaccucaagagcacgcaggcggccaucgaccagaucaacgggaagcugaaccggcugaucggcaagaccaacgagaaguuccaccagaucgagaaggaguucuccgagguggagggccgcauccaggaccucgagaaguacgucgaggacaccaagaucgaccuguggagcuacaacgccgagcugcucguggcccuggagaaccagcacaccaucgaccugacggacuccgagaugaacaagcuguucgagaagaccaagaagcagcuccgcgagaacgccgaggacauggggaacggcugcuucaagaucuaccacaagugcgacaacgcgugcaucgggagcauccggaacggcaccuacgaccacaacguguaccgcgacgaggcccugaacaaccgguuccagaucaagggggucgagcucaaguccggcuacaaggacuggauccuguggaucagcuucgccaucagcugcuuccugcucugcguggcccugcugggcuucaucaugugggccugccagaaggggaacauccgcugcaacaucugcaucuga

SEQ ID NO: 77222 - RNA, 1701 nt, Artificial Sequence
  derived and/or modified CDS sequence (opt1) from hemagglutinin__InfluenzaA__ALE31667
augaagaccaucaucgcccugagcuacauccucugccugguguucgcccagaagauccccggcaacgacaacuccaccgcgacgcugugccucgggcaccacgccguccugaacggcaccaucgugaagaccaucaccaacgaccgcaucgaggugacgaacgccaccgagcugguccagaacagcuccaucggggagaucugcgacagcccgcaccagauccucgacggcgagaacugcacccugaucgacgcccugcucggggacccccagugcgacggcuuccagaacaagaagugggaccuguucguggagcgguccaaggccuacagcaacugcuaccccuacgacgugcccgacuacgcgucccugcgcagccucgucgccuccagcggcacccuggaguucaacaacgaguccuucaacuggacgggggugacccagaacggcaccagcuccgccugcauccgcaagagcuccagcuccuucuucagccggcugaacuggcucacccaccugaacuacacguacccggcccugaacgugaccaugcccaacaacgagcaguucgacaagcucuacaucuggggcguccaccaccccgggaccgacaaggaccagaucuuccuguacgcgcgguccagcgggcgcaucaccgugagcacgaagcggucccagcaggccgugauccccaacaucggcagccgcccgcggauccgcgacauccccucccggaucagcaucuacuggaccaucgucaagcccggcgacauccugcucaucaacuccaccgggaaccugaucgcgccccgcggcuacuucaagauccggagcgggaaguccagcaucaugcgcuccgacgccccgaucggcaagugcaagagcgagugcaucacccccaacggcuccauccccaacgacaagcccuuccagaacgugaaccggaucacguacggggccugcccgcgcuacgugaagcacagcacccugaagcucgccaccggcaugcggaacguccccgagaagcagacccgcgggaucuucggcgccaucgccggguucaucgagaacggcugggagggcaugguggacgggugguacggcuuccggcaccagaacuccgaggggcgcggccaggccgccgaccucaagagcacgcaggcggccaucgaccagaucaacgggaagcugaaccggcugaucggcaagaccaacgagaaguuccaccagaucgagaaggaguucuccgagguggagggccgcauccaggaccuggagaaguacgucgaggacaccaagaucgaccuguggagcuacaacgccgagcuccugguggcccuggagaaccagcacaccaucgaccucacggacuccgagaugaacaagcuguucgagaagaccaagaagcagcugcgcgagaacgccgaggacauggggaacggcugcuucaagaucuaccacaagugcgacaacgcgugcaucgggagcauccggaacggcaccuacgaccacaacguguaccgcgacgaggcccucaacaaccgguuccagaucaagggggucgagcugaaguccggcuacaaggacuggauccuguggaucagcuucgccaucagcugcuuccuccugugcguggcccugcucggcuucaucaugugggccugccagaaggggaacauccgcugcaacaucugcaucuga

SEQ ID NO: 77223 - RNA, 1701 nt, Artificial Sequence; identical to SEQ ID NO: 76465
  derived and/or modified CDS sequence (opt1) from hemagglutinin__InfluenzaA__ALE31668

SEQ ID NO: 77224 - RNA, 1701 nt, Artificial Sequence; identical to SEQ ID NO: 76465
  derived and/or modified CDS sequence (opt1) from hemagglutinin__InfluenzaA__ALE31669

SEQ ID NO: 77225 - RNA, 1701 nt, Artificial Sequence
  derived and/or modified CDS sequence (opt1) from hemagglutinin__InfluenzaA__ALE31670
augaagaccaucaucgcccugagcuacauccucugccugguguucgcccagaagcugcccgagaacgacaacuccaccgcgacgcucugccugggccaccacgccgucccgaacgggaccaucgugaagaccaucaccagcgaccgcaucgaggugacgaacgccaccgagcugguccagaacuccagcaucggcgagaucugcgacagcccccaccagauccucgacgggaagaacugcacccugaucgacgcccugcucggcgacccccagugcgacggguuccagaacaagaagugggaccuguucguggagcggagcaaggccuacuccaacugcuaccccuacgacgugccggacuacgcgagccugcgcucccucgucgccagcuccggcacccuggaguucaacgacgagagcuucaacugggccggcgugacgcagaacgggaccuccagcgccugcauccggggcuccaacagcuccuucuucagccgccugaacuggcucacccacuccaacuucaaguaccccgcgcugaacgugaccaugcccaacaacgagcaguucgacaagcuguacaucuggggcguccaccaccccgggacggacaaggaccagaucuuccucuacgcccagagcagcgggcggaucaccguguccaccaagcgcagccagcaggccgugaucccgaacaucggcucccggccccgcauccggaacauccccagccgcaucuccaucuacuggaccaucgucaagcccggcgacauccugcugaucaacagcacggggaaccucaucgccccgcggggcuacuucaagauccgcuccgggaaguccuccaucaugcggagcgacgcccccaucggcaagugcaaguccgagugcaucacccccaacggcagcauccccaacgacaagccguuccagaacgugaaccgcaucaccuacggggcgugcccccgguacgugaagcaguccacccugaagcuggccacgggcaugcgcaacguccccgagaagcagacccgggggaucuucggcgccaucgccggguucaucgagaacggcugggagggcaugaaggacgggugguacggcuuccgccaccagaacagcgaggggcggggccaggccgcggaccucaaguccacccaggccgccaucgaccagaucaacgggaagcugaaccgccugaucggcaagaccaacgagaaguuccaccagaucgagaaggaguucagcgagguggagggccggauccaggaccucgagaaguacguggaggacacgaagaucgaccugugguccuacaacgccgagcugcucgucgcccuggagaaccagcacaccaucgaccugaccgacagcgagaugaacaagcuguucgagaagaccaagaagcagaugcgcgagaacgcggaggacauggggaacggcugcuucaagaucuaccacaagugcgacaacgccugcaucggguccauccgcaacggcacguacgaccacgacguguaccgggacgaggcccugaacaaccgcuuccagaucaaggggguggagcucaagagcggcuacaaggacuggauccucuggaucagcuucgccaucuccugcuuccugcugugcgucgcccuccugggcuucaucaugugggcgugccagaaggggaacauccggugcaacaucugcaucuga

SEQ ID NO: 77226 - RNA, 1701 nt, Artificial Sequence; identical to SEQ ID NO: 76465
  derived and/or modified CDS sequence (opt1) from hemagglutinin__InfluenzaA__ALE31671

SEQ ID NO: 77227 - RNA, 1701 nt, Artificial Sequence; identical to SEQ ID NO: 76465
  derived and/or modified CDS sequence (opt1) from hemagglutinin__InfluenzaA__ALE31672

SEQ ID NO: 77228 - RNA, 1701 nt, Artificial Sequence; identical to SEQ ID NO: 77022
  derived and/or modified CDS sequence (opt1) from hemagglutinin__InfluenzaA__ALE31673

SEQ ID NO: 77229 - RNA, 1701 nt, Artificial Sequence
  derived and/or modified CDS sequence (opt1) from hemagglutinin__InfluenzaA__ALE31674
augaagaccaucaucgcccugagcuacauccucugccugguguucgcccagaagauccccggcaacgacaacuccaccgcgacgcugugccucgggcaccacgccgucccgaacggcaccaucgugaagaccaucaccaacgaccgcaucgaggugacgaacgccaccgagcugguccagaacagcuccaucggggagaucugcgacagcccccaccagauccuggacggcgagaacugcacccucaucgacgcccugcugggggacccccagugcgacggcuuccagaacaagaagugggaccucuucguggagcgguccaaggccuacagcaacugcuaccccuacgacgugccggacuacgcgucccugcgcagccuggucgccuccagcggcacccucgaguucaacaacgaguccuucaacuggacgggggugacccagaacggcaccagcuccgccugcauccggcgcagcuccagcuccuucuucagccggcugaacuggcugacccaccucaacuacacguaccccgcccugaacgugaccaugcccaacaacgagcaguucgacaagcuguacaucuggggcguccaccaccccgggaccgacaaggaccagaucuuccucuacgcgcacuccagcgggcgcaucaccgugagcacgaagcggucccagcaggccgugaucccgaacaucggcagccgcccccggauccgcgacauccccucccggaucagcaucuacuggaccaucgucaagcccggcgacauccugcugaucaacuccaccgggaaccucaucgccccgcgcggcuacuucaagauccggagcgggaaguccagcaucaugcgcuccgacgcccccaucggcaagugcaagagcgagugcaucacccccaacggcuccauccccaacgacaagccguuccagaacgugaaccggaucacguacggggccugcccccgcuacgugaagcacagcacccugaagcuggcgaccggcaugcggaacguccccgagaagcagacccgcgggaucuucggcgccaucgccggguucaucgagaacggcugggagggcaugguggacgggugguacggcuuccggcaccagaacuccgaggggcgcggccaggccgccgaccucaagagcacgcaggcggccaucgaccagaucaacgggaagcugaaccggcugaucggcaagaccaacgagaaguuccaccagaucgagaaggaguucuccgagguggagggccgcauccaggaccucgagaaguacgucgaggacaccaagaucgaccuguggagcuacaacgccgagcugcucguggcccuggagaaccagcacaccaucgaccugacggacuccgagaugaacaagcuguucgagaagaccaagaagcagcuccgcgagaacgccgaggacauggggaacggcugcuucaagaucuaccacaagugcgacaacgcgugcaucgggagcauccggaacggcaccuacgaccacaacguguaccgcgacgaggcccugaacaaccgguuccagaucaagggggucgagcucaaguccggcuacaaggacuggauccuguggaucagcuucgccaucagcugcuuccugcucugcguggcccugcugggcuucaucaugugggccugccagaaggggaacauccgcugcaacaucugcaucuga

SEQ ID NO: 77230 - RNA, 1701 nt, Artificial Sequence
  derived and/or modified CDS sequence (opt1) from hemagglutinin__InfluenzaA__ALE31675
augaagaccaucaucgcccugagcuacauccucugccugguguucgcccagaagauccccggcaacgacaacuccaccgcgacgcugugccucgggcaccacgccgucccgaacggcaccaucgugaagaccaucaccaacgaccgcaucgaggugacgaacgccaccgagcugguccagaacagcuccaucggggagaucugcaacagcccccaccagauccuggacggcgagaacugcacccucaucgacgcccugcugggggacccccagugcgacggcuuccagaacaagaagugggaccucuucguggagcgguccaaggccuacagcaacugcuaccccuacgacgugccggacuacgcgucccugcgcagccuggucgccuccagcggcacccucgaguucaacaacgaguccuucaacuggacgggggugacccagaacggcaccagcuccgccugcauccggcgcagcuccagcuccuucuucagccggcugaacuggcugacccaccucaacuacacguaccccgcccugaacgugaccaugcccaacaacgagcaguucgacaagcuguacaucuggggcguccaccaccccgggaccgacaaggaccagaucuuccucuacgcgcaguccagcgggcgcaucaccgugagcacgaagggcucccagcaggccgugaucccgaacaucggcagccggccccgcauccgggacauccccucccgcaucagcaucuacuggaccaucgucaagcccggggacauccugcugaucaacuccaccggcaaccucaucgccccgcggggguacuucaagauccgcagcggcaaguccagcaucaugcgguccgacgcccccaucggcaagugcaagagcgagugcaucacccccaacggguccauccccaacgacaagccguuccagaacgugaaccgcaucacguacggcgccugcccccgguacgugaagcacagcacccugaagcuggcgaccgggaugcgcaacguccccgagaagcagacccggggcaucuucggggccaucgccggcuucaucgagaacggcugggaggggaugguggacggcugguacggguuccgccaccagaacuccgagggccgggggcaggccgccgaccucaagagcacgcaggcggccaucgaccagaucaacggcaagcugaaccgccugaucggcaagaccaacgagaaguuccaccagaucgagaaggaguucuccgagguggaggggcggauccaggaccucgagaaguacgucgaggacaccaagaucgaccuguggagcuacaacgccgagcugcucguggcccuggagaaccagcacaccaucgaccugacggacuccgagaugaacaagcuguucgagaagaccaagaagcagcuccgcgagaacgccgaggacaugggcaacgggugcuucaagaucuaccacaagugcgacaacgcgugcaucggcagcauccgcaacgggaccuacgaccacaacguguaccgggacgaggcccugaacaaccgcuuccagaucaagggcgucgagcucaaguccggcuacaaggacuggauccuguggaucagcuucgccaucagcugcuuccugcucugcguggcccugcugggguucaucaugugggccugccagaagggcaacauccggugcaacaucugcaucuga

SEQ ID NO: 77231 - RNA, 1701 nt, Artificial Sequence
  derived and/or modified CDS sequence (opt1) from hemagglutinin__InfluenzaA__ALE31676
augaagaccaucaucgcccugagcuacauccucugccugguguucgcccagaagauccccggcaacgacaacuccaccgcgacgcugugccucgggcaccacgccgucccgaacggcaccaucgugaagaccaucaccaacgaccgcaucgaggugacgaacgccaccgagcugguccagaacagcuccaucggggagaucugcgacagcccccaccagauccuggacggcgagaacugcacccucaucgacgcccugcugggggacccccagugcgacggcuuccagaacaagaagugggaccucuucguggagcgguccaaggccuacagcaacugcuaccccuacgacgugccggacuacgcgucccugcgcagccuggucgccuccagcggcacccucgaguucaacaacgaguccuucaacuggacgggggugacccagaacggcaccagcuccgccugcauccggcgcagcuccagcuccuucuucagccggcugaacuggcugacccaccucaacuacacguaccccgcccugaacgugaccaugcccaacaacgagcaguucgacaagcuguacaucuggggcguccaccaccccgggaccgacaaggaccagaucuuccucuacgcgcaguccagcgggcgcaucaccgugagcacgaagcggucccagcaggccgugaucccgaacaucggcagccgccccaagauccgggacauccccucccgcaucagcaucuacuggaccaucgucaagcccggcgacauccugcugaucaacuccaccgggaaccucaucgccccgcggggcuacuucaagauccugagcgggaaguccagcaucaugcgcuccgacgcccccaucggcaagugcaagagcgagugcaucacccccaacggcuccauccccaacgacaagccguuccagaacgugaaccggaucacguacggggccugcccccgcuacgugaagcacagcacccugaagcucgcgaccggcaugcggaacguccccgagaagcagacccgcgggaucuucggcgccaucgccggguucaucgagaacggcugggagggcaugguggacgggugguacggcuuccggcaccagaacuccgaggggcgcggccaggccgccgaccucaagagcacgcaggcggccaucgaccagaucaacgggaagcugaaccggcugaucggcaagaccaacgagaaguuccaccagaucgagaaggaguucuccgagguggagggccgcauccaggaccuggagaaguacgucgaggacagcaagaucgaccugugguccuacaacgccgagcuccugguggcccuggagaaccagcacaccaucgaccucaccgacagcgagaugaacaagcuguucgagaagacgaagaagcagcugcgggagaacgccgaggacauggggaacggcugcuucaagaucuaccacaagugcgacaacgcgugcaucggguccauccgcaacggcaccuacgaccacaacguguaccgcgacgaggcccucaacaaccgguuccagaucaagggggucgagcucaagagcggcuacaaggacuggauccuguggaucagcuucgccaucuccugcuuccugcugugcguggcccugcucggcuucaucaugugggccugccagaaggggaacauccgcugcaacaucugcaucuga

SEQ ID NO: 77232 - RNA, 1701 nt, Artificial Sequence; identical to SEQ ID NO: 77123
  derived and/or modified CDS sequence (opt1) from hemagglutinin__InfluenzaA__ALE31677

SEQ ID NO: 77233 - RNA, 1701 nt, Artificial Sequence; identical to SEQ ID NO: 76465
  derived and/or modified CDS sequence (opt1) from hemagglutinin__InfluenzaA__ALE31678

SEQ ID NO: 77234 - RNA, 1701 nt, Artificial Sequence; identical to SEQ ID NO: 76465
  derived and/or modified CDS sequence (opt1) from hemagglutinin__InfluenzaA__ALE31679

SEQ ID NO: 77235 - RNA, 1701 nt, Artificial Sequence; identical to SEQ ID NO: 77081
  derived and/or modified CDS sequence (opt1) from hemagglutinin__InfluenzaA__ALE31680

SEQ ID NO: 77236 - RNA, 1701 nt, Artificial Sequence; identical to SEQ ID NO: 77080
  derived and/or modified CDS sequence (opt1) from hemagglutinin__InfluenzaA__ALE31681

SEQ ID NO: 77237 - RNA, 1701 nt, Artificial Sequence; identical to SEQ ID NO: 76465
  derived and/or modified CDS sequence (opt1) from hemagglutinin__InfluenzaA__ALE31682

SEQ ID NO: 77238 - RNA, 1701 nt, Artificial Sequence; identical to SEQ ID NO: 76465
  derived and/or modified CDS sequence (opt1) from hemagglutinin__InfluenzaA__ALE31683

SEQ ID NO: 77239 - RNA, 1701 nt, Artificial Sequence; identical to SEQ ID NO: 76465
  derived and/or modified CDS sequence (opt1) from hemagglutinin__InfluenzaA__ALE31684

SEQ ID NO: 77240 - RNA, 1701 nt, Artificial Sequence; identical to SEQ ID NO: 76465
  derived and/or modified CDS sequence (opt1) from hemagglutinin__InfluenzaA__ALE31685

SEQ ID NO: 77241 - RNA, 1701 nt, Artificial Sequence; identical to SEQ ID NO: 76465
  derived and/or modified CDS sequence (opt1) from hemagglutinin__InfluenzaA__ALE31686

SEQ ID NO: 77242 - RNA, 1701 nt, Artificial Sequence
  derived and/or modified CDS sequence (opt1) from hemagglutinin__InfluenzaA__ALE31687
augaagaccaucaucgcccugagcuacauccucugccugguguucgcccagaagauccccggcaacgacaacuccaccgcgacgcugugccucgggcaccacgccgucccgaacggcaccaucgugaagaccaucaccaacgaccgcaucgaggugacgaacgccaccgagcugguccagaacagcuccaucggggagaucugcgacagcccccaccagauccuggacggcgagaacugcacccucaucgacgcccugcugggggacccccagugcgacggcuuccagaacaagaagugggaccucuucguggagcgguccaaggccuacagcaacugcuaccccuacgacgugccggacuacgcgucccugcgcagccuggucgccuccagcggcacccucgaguucaacaacgaguccuucaacuggacgggggugacccagaacggcaccagcuccgccugcauccggcgcagcuccagcuccuucuucagccggcugaacuggcugacccaccucaacuacacguaccccgcccugaacgugaccaugcccaacaacgagcaguucgacaagcuguacaucuggggcguccaccaccccgggaccgacaaggaccagaucuuccucuacgcgcaguccagcgggcgcaucaccgugagcacgaagcggucccagcaggccgugaucccgaacaucggcagccgcccccggauccgcgacauccccucccggaucagcaucuacuggaccaucgucaagcccggcgacauccugcugaucaacuccaccgggaaccucaucgccccgcgcggcuacuucaagauccggagcgggaaguccagcaucaugcgcuccgacgcccccaucggcaagugcaagagcgagugcaucacccccaacggcuccauccccaacgacaagccguuccagaacgugaaccggaucacguacggggccugcccccgcuacgugaagcacagcacccugaagcuggcgaccggcaugcggaacguccccgagaagcagacccgcgggaucuucggcgccaucgccggguucaucgagaacggcugggagggcaugguggacgggugguacggcuuccggcaccagaacuccgaggggcgcggccaggccgccgaccucaagagcacgcaggcggccaucgaccagaucaacgggaagcugaaccggcugaucggcaagaccaacgagaaguuccaccagaucgagaaggaguucuccgagguggagggccgcauccaggaccucgagaaguacgucgaggacaccaagaucgaccuguggagcuacaacgccgagcugcucguggcccuggagaaccagcacaccaucgaccugacggacuccgagaugaacaagcuguucgagaagaccaagaagcagcuccgcgagaacgccgaggacauggggaacggcugcuucaagaucuaccacaagugcgacaacgcgugcaucgagagcauccggaacgggaccuacgaccacaacguguaccgcgacgaggcccugaacaaccgguuccagaucaagggcgucgagcucaaguccggguacaaggacuggauccuguggaucagcuucgccaucagcugcuuccugcucugcguggcccugcugggcuucaucaugugggccugccagaagggcaacauccgcugcaacaucugcaucuga

SEQ ID NO: 77243 - RNA, 1701 nt, Artificial Sequence
  derived and/or modified CDS sequence (opt1) from hemagglutinin__InfluenzaA__ALE31688
augaagaccaccaucgcccugagcuacauccucugccugguguucgcccagaagcugcccgagaacgacaacuccacggcgacccucugccugggccaccacgccgucccgaacgggaccaucgugaagaccaucacgagcgaccgcaucgaggugaccaacgccaccgagcugguccagaacuccagcaucggcgagaucugcgacagcccccaccagauccucgacgggaagaacugcacccugaucgacgcccugcucggcgacccccagugcgacggguuccagaacaagaagugggaccuguucguggagcggagcaaggccuacuccaacugcuaccccuacgacgugccggacuacgcgagccugcgcucccucgucgccagcuccggcacgcuggaguucaacgacgagagcuucaacugggccggcgugacccagaacgggaccuccagcgccugcauccggggcuccaacagcuccuucuucagccgccugaacuggcucacccacuccaacuucaaguaccccgcgcugaacgugacgaugcccaacaacgagcaguucgacaagcuguacaucuggggcguccaccaccccgggaccgacaaggaccagaucuuccucuacgcccagagcagcgggcggaucaccguguccaccaagcgcagccagcaggccgugaucccgaacaucggcucccggccccgcauccggaacauccccagccgcaucuccaucuacuggacgaucgucaagcccggcgacauccugcugaucaacagcaccgggaaccucaucgccccgcggggcuacuucaagauccgcuccgggaaguccuccaucaugcggagcgacgcccccaucggcaagugcaaguccgagugcaucacccccaacggcagcauccccaacgacaagccguuccagaacgugaaccgcaucaccuacggggcgugcccccgguacgugaagcaguccacgcugaagcuggccaccggcaugcgcaacguccccgagaagcagacccgggggaucuucggcgccaucgccggguucaucgagaacggcugggagggcaugaaggacgggugguacggcuuccgccaccagaacagcgaggggcggggccaggccgcggaccucaaguccacccaggccgccaucgaccagaucaacgggaagcugaaccgccugaucggcaagacgaacgagaaguuccaccagaucgagaaggaguucagcgagguggagggccggauccaggaccucgagaaguacguggaggacaccaagaucgaccugugguccuacaacgccgagcugcucgucgcccuggagaaccagcacaccaucgaccugaccgacagcgagaugaacaagcuguucgagaagacgaagaagcagcuccgcgagaacgcggaggacauggggaacggcugcuucaagaucuaccacaagugcgacaacgccugcaucggguccauccgcaacggcaccuacgaccacgacguguaccgggacgaggcccugaacaaccgcuuccagaucaaggggguggagcucaagagcggcuacaaggacuggauccuguggaucagcuucgccaucuccugcuuccugcucugcgucgcccugcugggcuucaucaugugggcgugccagaaggggaacauccggugcaacaucugcaucuga

SEQ ID NO: 77244 - RNA, 1701 nt, Artificial Sequence; identical to SEQ ID NO: 76465
  derived and/or modified CDS sequence (opt1) from hemagglutinin__InfluenzaA__ALE31689

SEQ ID NO: 77245 - RNA, 1701 nt, Artificial Sequence
  derived and/or modified CDS sequence (opt1) from hemagglutinin__InfluenzaA__ALE31690
augaagaccaucaucgcccugagcugcauccucugccugguguucgcccagaagcugcccggcaacgacaacuccaccgcgacgcucugccuggggcaccacgccgucccgaacggcaccaucgugaagaccaucaccaacgaccgcaucgaggugacgaacgccaccgagcugguccagaacagcuccaucggggagaucugcgacagcccccaccagauccucgacggcgagaacugcacccugaucgacgcccugcucggggacccccagugcgacggcuuccagaacaagaagugggaccuguucguggagcgguccaaggccuacagcaacugcuaccccuacgacgugccggacuacgcgucccugcgcagccucgucgccuccagcggcacccuggaguucaacaacgaguccuucaacugggccggggugacgcagaacggcaccagcuccagcugcauccggggguccaacagcuccuucuucagccgccugaacuggcucacccaccugaacuccaaguaccccgcccugaacgugaccaugcccaacaacgagcaguucgacaagcucuacaucuggggcguccaccaccccgggacggacaaggaccagaucuuccuguacgcgcagagcagcggccggaucaccguguccaccaagcgcagccagcaggccgugaucccgaacaucggcucccggccccgcauccgggacauccccagccgcaucuccaucuacuggaccaucgucaagcccggggacauccugcucaucaacagcacgggcaaccugaucgccccgcggggguacuucaagauccgcuccggcaagagcuccaucaugcggagcgacgcccccaucggcaagugcaaguccgagugcaucacccccaacgggagcauccccaacgacaagccguuccagaacgugaaccgcaucaccuacggcgccugcccccgguacgugaagcaguccacccugaagcucgcgacggggaugcgcaacguccccgagcggcagacccgcggcaucuucggggccaucgccggcuucaucgagaacggcugggaggggaugguggacggcugguacggguuccggcaccagaacagcgagggccgcgggcaggccgccgaccugaaguccacccaggcggccaucgaccagaucaacggcaagcugaaccggcucaucggcaagaccaacgagaaguuccaccagaucgagaaggaguucagcgagguggaggggcgcauccaggaccuggagaaguacgucgaggacacgaagaucgaccugugguccuacaacgccgagcuccugguggcccuggagaaccagcacaccaucgaccucaccgacagcgagaugaacaagcuguucgagaagaccaagaagcagcugcgcgagaacgccgaggacaugggcaacgggugcuucaagaucuaccacaagugcgacaacgcgugcaucggcuccauccggaacgggacguacgaccacaacguguaccgcgacgaggcccucaacaaccgguuccagaucaagggcgucgagcucaagagcggcuacaaggacuggauccuguggaucagcuucgccaucuccugcuuccugcugugcguggcccugcucggguucaucaugugggccugccagaagggcaacauccgcugcaacaucugcaucuga

SEQ ID NO: 77246 - RNA, 1701 nt, Artificial Sequence; identical to SEQ ID NO: 74018
  derived and/or modified CDS sequence (opt1) from hemagglutinin__InfluenzaA__ALE31691

SEQ ID NO: 77247 - RNA, 1701 nt, Artificial Sequence
  derived and/or modified CDS sequence (opt1) from hemagglutinin__InfluenzaA__ALE31692
augaagaccaucaucgcccugagcuacauccucugccugguguucgcccagaagauccccggcaacgacaacuccaccgcgacgcugugccucgggcaccacgccgucccgaacggcaccaucgugaagaccaucaccaacgaccgcaucgaggugacgaacgccaccgagcugguccagaacagcuccaucggggagaucugcgacagcccccaccagauccuggacggcgagaacugcacccucaucgacgcccugcugggggacccccagugcgacggcuuccagaacaagaagugggaccucuucguggagcgguccaaggccuacagcaacugcuaccccuacgacgugccggacuacgcgucccugcgcagccuggucgccuccagcggcacccucgaguucaacaacgaguccuucaacuggacgggggugacccagaacggcaccagcuccgccugcauccgcaagagcuccagcuccuucuucagccggcugaacuggcugacccaccucaacuacacguaccccgcccugaacgugaccaugcccaacaacgagcaguucgacaagcuguacaucuggggcguccaccaccccgggaccgacaaggaccagaucuuccucuacgcgcgguccagcgggcgcaucaccgugagcacgaagcggucccagcaggccgugaucccgaacaucggcuaccgcccccggauccgcgacauccccagccggaucuccaucuacuggaccaucgucaagcccggcgacauccugcugaucaacagcaccgggaaccucaucgccccgcgcggcuacuucaagauccgguccggcaagagcuccaucaugcgcagcgacgcccccaucgggaagugcaaguccgagugcaucacccccaacggcagcauccccaacgacaagccguuccagaacgugaaccggaucacguacggggccugcccccgcuacgugaagcacuccacccugaagcuggcgaccggcaugcggaacguccccgagaagcagacccgcgggaucuucggcgccaucgccggguucaucgagaacggcugggagggcaugguggacgggugguacggcuuccggcaccagaacagcgaggggcgcggccaggccgccgaccucaaguccacgcaggcggccaucgaccagaucaacgggaagcugaaccggcugaucggcaagaccaacgagaaguuccaccagaucgagaaggaguucagcgagguggagggccgcauccaggaccucgagaaguacgucgaggacaccaagaucgaccugugguccuacaacgccgagcugcucguggcccuggagaaccagcacaccaucgaccugacggacagcgagaugaacaagcuguucgagaagaccaagaagcagcuccgcgagaacgccgaggacauggggaacggcugcuucaagaucuaccacaagugcgacaacgcgugcaucggguccauccggaacggcaccuacgaccacaacguguaccgcgacgaggcccugaacaaccgguuccagaucaagggggucgagcucaagagcggcuacaaggacuggauccuguggaucuccuucgccaucagcugcuuccugcucugcguggcccugcugggcuucaucaugugggccugccagaaggggaacauccgcugcaacaucugcaucuga

SEQ ID NO: 77248 - RNA, 1701 nt, Artificial Sequence; identical to SEQ ID NO: 77247
  derived and/or modified CDS sequence (opt1) from hemagglutinin__InfluenzaA__ALE31693

SEQ ID NO: 77249 - RNA, 1701 nt, Artificial Sequence; identical to SEQ ID NO: 76465
  derived and/or modified CDS sequence (opt1) from hemagglutinin__InfluenzaA__ALE31694

SEQ ID NO: 77250 - RNA, 1701 nt, Artificial Sequence; identical to SEQ ID NO: 77247
  derived and/or modified CDS sequence (opt1) from hemagglutinin__InfluenzaA__ALE31695

SEQ ID NO: 77251 - RNA, 1701 nt, Artificial Sequence; identical to SEQ ID NO: 77123
  derived and/or modified CDS sequence (opt1) from hemagglutinin__InfluenzaA__ALE31696

SEQ ID NO: 77252 - RNA, 1701 nt, Artificial Sequence; identical to SEQ ID NO: 77247
  derived and/or modified CDS sequence (opt1) from hemagglutinin__InfluenzaA__ALE31697

SEQ ID NO: 77253 - RNA, 1701 nt, Artificial Sequence
  derived and/or modified CDS sequence (opt1) from hemagglutinin__InfluenzaA__ALE31698
augaagaccaucaucgcccugagcuacauccucugcaugguguucgcccagaagauccccggcaacgacaacuccaccgcgacgcugugccuggggcaccacgccgucccgaacggcaccaucgugaagaccaucaccaacgaccgcaucgaggugacgaacgccaccgagcucguccagaacagcuccaucggggagaucugcgacagcccccaccagauccuggacggcgagaacugcacccugaucgacgcccuccugggggacccccagugcgacggcuuccagaacaagaagugggaccuguucguggagcgguccaaggccuacagcaacugcuaccccuacgacgugccggacuacgcgucccuccgcagccuggucgccuccagcggcacccuggaguucaacaacgaguccuucaacuggacgggggugacccagaacggcaccagcuccgccugcauccggcgcagcuccagcuccuucuucagccggcucaacuggcugacccaccugaacuacacguaccccgcccucaacgugaccaugcccaacaacgagcaguucgacaagcuguacaucuggggcguccaccaccccgggaccgacaaggaccagaucuuccuguacgcgcaguccagcgggcgcaucaccgugagcacgaagcggucccagcaggccgugaucccgaacaucggcagccgcccccggauccgcgacauccccucccggaucagcaucuacuggaccaucgucaagcccggcgacauccuccugaucaacuccaccgggaaccugaucgccccgcgcggcuacuucaagauccggagcgggaaguccagcaucaugcgcuccgacgcccccaucggcaagugcaagagcgagugcaucacccccaacggcuccauccccaacgacaagccguuccagaacgugaaccggaucacguacggggccugcccccgcuacgugaagcacagcacccucaagcuggcgaccggcaugcggaacguccccgagaagcagacccgcgggaucuucggcgccaucgccggguucaucgagaacggcugggagggcaugguggacgggugguacggcuuccggcaccagaacuccgaggggcgcggccaggccgccgaccucaagagcacgcaggcggccaucgaccagaucaacgggaagcugaaccggcugaucggcaagaccaacgagaaguuccaccagaucgagaaggaguucuccgagguggagggccgcauccaggaccuggagaaguacgucgaggacaccaagaucgaccucuggagcuacaacgccgagcugcugguggcccucgagaaccagcacaccaucgaccugacggacuccgagaugaacaagcuguucgagaagaccaagaagcagcuccgcgagaacgccgaggacauggggaacggcugcuucaagaucuaccacaagugcgacaacgcgugcaucgggagcauccggaacggcaccuacgaccacaacguguaccgcgacgaggcccugaacaaccgguuccagaucaagggggucgagcugaaguccggcuacaaggacuggauccucuggaucagcuucgccaucagcugcuuccugcugugcguggcccuccugggcuucaucaugugggccugccagaaggggaacauccgcugcaacaucugcaucuga

SEQ ID NO: 77254 - RNA, 1701 nt, Artificial Sequence
  derived and/or modified CDS sequence (opt1) from hemagglutinin__InfluenzaA__ALE31699
augaagaccaucaucgcccugagcuacauccucugccugguguucgcccagaagauccccggcaacgacaacuccaccgcgacgcugugccucgggcaccacgccgucccgaacggcaccaucgugaagaccaucaccaacgaccgcaucgaggugacgaacgccaccgagcugguccagaacagcuccaucggggagaucugcgacagcccccaccagauccuggacggcgagaacugcacccucaucgacgcccugcugggggacccccagugcgacggcuuccagaacaagaagugggaccucuucguggagcgguccaaggccuacagcaacugcuaccccuacgacgugccgaacuacgcgucccugcgcagccuggucgccuccagcggcacccucgaguucaacaacgaguccuucaacuggacgggggugacccagaacggcaccagcuccgccugcauccggcgcagcuccagcuccuucuucagccggcugaacuggcugacccaccucaacuacgccuaccccgcgcugaacgugacgaugcccaacaacgagcaguucgacaagcuguacaucuggggcguccaccaccccgggaccgacaaggaccagaucuuccucuacgcccaguccagcgggcgcaucaccgugagcaccaagcggucccagcaggccgugaucccgaacaucggcagccgcccccggauccgcgacauccccucccggaucagcaucuacuggacgaucgucaagcccggcgacauccugcugaucaacuccaccgggaaccucaucgccccgcgcggcuacuucaagauccggagcgggaaguccagcaucaugcgcuccgacgcccccaucggcaagugcaagagcgagugcaucacccccaacggcuccauccccaacgacaagccguuccagaacgugaaccggaucaccuacggggcgugcccccgcuacgugaagcacagcacgcugaagcuggccaccggcaugcggaacguccccgagaagcagacccgcgggaucuucggcgccaucgccggguucaucgagaacggcugggagggcaugguggacgggugguacggcuuccggcaccagaacuccgaggggcgcggccaggccgcggaccucaagagcacccaggccgccaucgaccagaucaacgggaagcugaaccggcugaucggcaagacgaacgagaaguuccaccagaucgagaaggaguucuccgagguggagggccgcauccaggaccucgagaaguacgucgaggacaccaagaucgaccuguggagcuacaacgccgagcugcucguggcccuggagaaccagcacaccaucgaccugaccgacuccgagaugaacaagcuguucgagaagacgaagaagcagcuccgcgagaacgcggaggacauggggaacggcugcuucaagaucuaccacaagugcgacaacgccugcaucgggagcauccggaacggcaccuacgaccacaacguguaccgcgacgaggcccugaacaaccgguuccagaucaagggggucgagcucaaguccggcuacaaggacuggauccuguggaucagcuucgccaucagcugcuuccugcucugcguggcccugcugggcuucaucaugugggcgugccagaaggggaacauccgcugcaacaucugcaucuga

SEQ ID NO: 77255 - RNA, 1701 nt, Artificial Sequence; identical to SEQ ID NO: 76465
  derived and/or modified CDS sequence (opt1) from hemagglutinin__InfluenzaA__ALE31700

SEQ ID NO: 77256 - RNA, 1701 nt, Artificial Sequence; identical to SEQ ID NO: 76465
  derived and/or modified CDS sequence (opt1) from hemagglutinin__InfluenzaA__ALE31701

SEQ ID NO: 77257 - RNA, 1701 nt, Artificial Sequence; identical to SEQ ID NO: 77022
  derived and/or modified CDS sequence (opt1) from hemagglutinin__InfluenzaA__ALE31702

SEQ ID NO: 77258 - RNA, 1701 nt, Artificial Sequence; identical to SEQ ID NO: 76465
  derived and/or modified CDS sequence (opt1) from hemagglutinin__InfluenzaA__ALE31703

SEQ ID NO: 77259 - RNA, 1701 nt, Artificial Sequence; identical to SEQ ID NO: 76465
  derived and/or modified CDS sequence (opt1) from hemagglutinin__InfluenzaA__ALE31704

SEQ ID NO: 77260 - RNA, 1701 nt, Artificial Sequence; identical to SEQ ID NO: 77022
  derived and/or modified CDS sequence (opt1) from hemagglutinin__InfluenzaA__ALE31705

SEQ ID NO: 77261 - RNA, 1701 nt, Artificial Sequence
  derived and/or modified CDS sequence (opt1) from hemagglutinin__InfluenzaA__ALE31706
augaagaccaucaucgcccugagcuacauccucugccugguguucgcccagaagauccccggcaacgacaacuccaccgcgacgcugugccucgggcaccacgccgucccgaacggcaccaucgugaagaccaucaccaacgaccgcaucgaggugacgaacgccaccgagcugguccagaacagcuccaucggggagaucugcgacagcccccaccagauccuggacggcgagaacugcacccucaucgacgcccugcugggggacccccagugcgacggcuuccagaacaagaagugggaccucuucguggagcgguccaaggccuacagcaacugcuaccccuacgacgugccggacuacgcgucccugcgcagccuggucgccuccagcggcacccucgaguucaacaacgaguccuucaacuggacgggggugacccagaacggcaccagcuccgccugcauccggcgcagcuccagcuccuucuucagccggcugaacuggcugacccaccucaacuacacguaccccgcccugaacgugaccaugcccaacaacgagcaguucgacaagcuguacaucuggggcguccaccaccccgggaccgacaaggaccagaucuuccucuacgcgcaguccagcgggcgcaucaccgugagcacgaagggcucccagcaggccgugaucccgaacaucggcagccggccccgcauccgggacauccccucccgcaucagcaucuacuggaccaucgucaagcccggggacauccugcugaucaacuccaccggcaaccucaucgccccgcggggguacuucaagauccgcagcggcaaguccagcaucaugcgguccgacgcccccaucggcaagugcaagagcgagugcaucacccccaacggguccauccccaacgacaagccguuccagaacgugaaccgcaucacguacggcgccugcccccgguacgugaagcacagcacccugaagcuggcgaccgggaugcgcaacguccccgagaagcagacccggggcaucuucggggccaucgccggcuucaucgagaacggcugggaggggaugguggacggcugguacggguuccgccaccagaacuccgagggccgggggcaggccgccgaccucaagagcacgcaggcggccaucgaccagaucaacggcaagcugaaccgccugaucggcaagaccaacgagaaguuccaccagaucgagaaggaguucuccgagguggaggggcggauccaggaccucgagaaguacgucgaggacaccaagaucgaccuguggagcuacaacgccgagcugcucguggcccuggagaaccagcacaccaucgaccugacggacuccgagaugaacaagcuguucgagaagaccaagaagcagcuccgcgagaacgccgaggacaugggcaacgggugcuucaagaucuaccacaagugcgacaacgcgugcaucggcagcauccgcaacgggaccuacgaccacaacguguaccgggacgaggcccugaacaaccgcuuccagaucaagggcgucgagcucaaguccggcuacaaggacuggauccuguggaucagcuucgccaucagcugccugcuccugugcguggcccugcucggguucaucaugugggccugccagaagggcaacauccggugcaacaucugcaucuga

SEQ ID NO: 77262 - RNA, 1701 nt, Artificial Sequence; identical to SEQ ID NO: 77151
  derived and/or modified CDS sequence (opt1) from hemagglutinin__InfluenzaA__ALE31707

SEQ ID NO: 77263 - RNA, 1701 nt, Artificial Sequence; identical to SEQ ID NO: 77151
  derived and/or modified CDS sequence (opt1) from hemagglutinin__InfluenzaA__ALE31708

SEQ ID NO: 77264 - RNA, 1701 nt, Artificial Sequence; identical to SEQ ID NO: 76451
  derived and/or modified CDS sequence (opt1) from hemagglutinin__InfluenzaA__ALE31709

SEQ ID NO: 77265 - RNA, 1701 nt, Artificial Sequence
  derived and/or modified CDS sequence (opt1) from hemagglutinin__InfluenzaA__ALE31710
augaagaccaucaucgcccugagcuacauccucugccugguguucgcccagaagauccccggcaacgacaacuccaccgcgacgcugugccucgggcaccacgccgucccgaacggcaccaucgugaagaccaucaccaacgaccgcaucgaggugacgaacgccaccgagcugguccagaacagcuccaucggggagaucugcgacagcccccaccagauccuggacggcgagaacugcacccucaucgacgcccugcugggggacccccagugcgacggcuuccagaacaagaagugggaccucuucguggagcgguccaaggccuacagcaacugcuaccccuacgacgugccggacuacgcgucccugcgcagccuggucgccuccagcggcacccucgaguucaacaacgaguccuucaacuggacgggggugacccagaacggcaccagcuccgccugcauccggcgcagcuccagcuccuucuucagccggcugaacuggcugacccaccucaacuacacguaccccgcccugaacgugaccaugcccaacaacgagcaguucgacaagcuguacaucuggggcguccaccaccccgggaccgacaaggaccagaucuuccucuacgcgcaguccagcgggcgcaucaccgugagcacgaagcggucccagcaggccgugaucccgaacaucggcagccgccugcggauccgcgacauccccucccggaucagcaucuacuggaccaucgucaagcccggcgacauccugcucaucaacuccaccgggaaccugaucgcgccccgcggcuacuucaagauccugagcgggaaguccagcaucaugcgguccgacgccccgaucggcaagugcaagagcgagugcaucacccccaacggcuccauccccaacgacaagcccuuccagaacgugaaccgcaucacguacggggccugcccgcgguacgugaagcacagcacccucaagcuggccaccggcaugcgcaacguccccgagaagcagacccgggggaucuucggcgccaucgccggguucaucgagaacggcugggagggcaugguggacgggugguacggcuuccgccaccagaacuccgaggggcggggccaggccgccgaccucaagagcacgcaggcggccaucgaccagaucaacgggaagcugaaccgccugaucggcaagaccaacgagaaguuccaccagaucgagaaggaguucuccgagguggagggccggauccaggaccuggagaaguacgucgaggacagcaagaucgaccucugguccuacaacgccgagcugcugguggcccucgagaaccagcacaccaucgaccugaccgacagcgagaugaacaagcuguucgagaagacgaagaagcagcuccgcgagaacgccgaggacauggggaacggcugcuucaagaucuaccacaagugcgacaacgcgugcaucggguccauccgcaacggcaccuacgaccacaacguguaccgggacgaggcccugaacaaccgcuuccagaucaagggggucgagcucaagagcggcuacaaggacuggauccuguggaucagcuucgccaucuccugcuuccugcugugcguggcccuccugggcuucaucaugugggccugccagaaggggaacauccggugcaacaucugcaucuga

SEQ ID NO: 77266 - RNA, 1701 nt, Artificial Sequence; identical to SEQ ID NO: 77151
  derived and/or modified CDS sequence (opt1) from hemagglutinin__InfluenzaA__ALE31711

SEQ ID NO: 77267 - RNA, 1701 nt, Artificial Sequence; identical to SEQ ID NO: 77009
  derived and/or modified CDS sequence (opt1) from hemagglutinin__InfluenzaA__ALE31712

SEQ ID NO: 77268 - RNA, 1701 nt, Artificial Sequence
  derived and/or modified CDS sequence (opt1) from hemagglutinin__InfluenzaA__ALE31713
augaagaccaucaucgcccugagcuacauccucugccugguguucgcccagaagauccccggcaacgacaacuccaccgcgacgcugugccucgggcaccacgccgucccgaacggcaccaucgugaagaccaucaccaacgaccgcaucgaggugacgaacgccaccgagcugguccagaacagcuccaucggggagaucugcgacagcccccaccagauccuggacggcgagaacugcacccucaucgacgcccugcugggggacccccagugcgacggcuuccagaacaagaagugggaccucuucguggagcgguccaaggccuacagcaacugcuaccccuacgacgugccggacuacgcgucccugcgcagccuggucgccuccagcggcacccucgaguucaacaacgaguccuucaacuggacgggggugacccagaacggcaccagcuccgccugcauccgcaagagcuccagcuccuucuucagccggcugaacuggcugacccaccucaacuacacguaccccgcccugaacgugaccaugcccaacaacgagcaguucgacaagcuguacaucugggggauccaccaccccggcaccgacaaggaccagaucuuccucuacgcgcgguccagcgggcgcaucaccgucagcacgaagcggucccagcaggccgugaucccgaacaucggcagccgcccccggauccgcgacauccccucccggaucagcaucuacuggaccaucgugaagcccggcgacauccugcugaucaacuccaccgggaaccucaucgccccgcgcggcuacuucaagauccggagcgggaaguccagcaucaugcgcuccgacgcccccaucggcaagugcaagagcgagugcaucacccccaacggcuccauccccaacgacaagccguuccagaacgucaaccggaucacguacggggccugcccccgcuacgugaagcacagcacccugaagcuggcgaccggcaugcggaacauccccgagaagcagaccaaggggaucuucggcgccaucgccggguucaucgagaacggcugggagggcaugguggacgggugguacggcuuccgccaccagaacuccgaggggcggggccaggccgccgaccucaagagcacgcaggcggccaucgaccagaucaacgggaagcugaaccgccugaucggcaagaccaacgagaaguuccaccagaucgagaaggaguucuccgaggucgagggccggauccaggaccucgagaaguacguggaggacaccaagaucgaccuguggagcuacaacgccgagcugcucguggcccuggagaaccagcacaccaucgaccugacggacuccgagaugaacaagcuguucgagaagaccaagaagcagcuccgcgagaacgccgaggacauggggaacggcugcuucaagaucuaccacaagugcgacaacgcgugcaucgggagcauccgcaacggcaccuacgaccacaacgucuaccgggacgaggcccugaacaaccgcuuccagaucaaggggguggagcucaaguccggcuacaaggacuggauccuguggaucagcuucgccaccagcugcuuccugcucugcguggcccugcugggcuucaucaugugggccugccagaaggggaacauccggugcaacaucugcaucuga

SEQ ID NO: 77269 - RNA, 1701 nt, Artificial Sequence; identical to SEQ ID NO: 77123
  derived and/or modified CDS sequence (opt1) from hemagglutinin__InfluenzaA__ALE31714

SEQ ID NO: 77270 - RNA, 1701 nt, Artificial Sequence; identical to SEQ ID NO: 77123
  derived and/or modified CDS sequence (opt1) from hemagglutinin__InfluenzaA__ALE31715

SEQ ID NO: 77271 - RNA, 1701 nt, Artificial Sequence; identical to SEQ ID NO: 77151
  derived and/or modified CDS sequence (opt1) from hemagglutinin__InfluenzaA__ALE31716

SEQ ID NO: 77272 - RNA, 1701 nt, Artificial Sequence
  derived and/or modified CDS sequence (opt1) from hemagglutinin__InfluenzaA__ALE31717
augaagaccaucaucgcccugagcuacauccucugccugguguucgcccagaagauccccggcaacgacaacuccaccgcgacgcugugccucgggcaccacgccgucccgaacggcaccaucgugaagaccaucaccaacgaccgcaucgaggugacgaacgccaccgagcugguccagaacagcuccaucggggagaucugcgacagcccccaccagauccuggacggcgagaacugcacccucaucgacgcccugcugggggacccccagugcgacggcuuccagaacaagaagugggaccucuucguggagcgguccaaggccuacagcaacugcuaccccuacgacgugccggacuacgcgucccugcgcagccuggucgccuccagcggcacccucgaguucaacaacgaguccuucaacuggacgggggugacccagaacggcaccagcuccgccugcauccgcaagagcuccagcuccuucuucagccggcugaacuggcugacccaccucaacuacaaguaccccgcccugaacgugacgaugcccaacaacgagcaguucgacaagcuguacaucuggggcguccaccaccccgggaccgacaaggaccagaucuuccucuacgcgcgguccagcgggcgcaucaccgugagcaccaagacgucccagcaggccgugaucccgaacaucggcagccggccccgcauccgggacauccccucccgcaucagcaucuacuggaccaucgucaagcccggcgacauccugcugaucaacuccaccgggaaccucaucgccccgcggggcuacuucaagauccgcagcgggaaguccagcaucaugcgguccgacgcccccaucggcaagugcaagagcgagugcaucacccccaacggcuccauccccaacgacaagccguuccagaacgugaaccgcacgaccuacggggccugcccccgguacgugaagcacagcacccugaagcuggcgaccggcaugcgcaacguccccgagaagcagacgcgggggaucuucggcgccaucgccggguucaucgagaacggcugggagggcaugguggacgggugguacggcuuccgccaccagaacuccgaggggcggggccaggccgccgaccucaagagcacccaggcggccaucgaccagaucaacgggaagcugaaccgccugaucggcaagaccaacgagaaguuccaccagaucgagaaggaguucuccgagguggagggccggauccaggaccucgagaaguacgucgaggacaccaagaucgaccuguggagcuacaacgccgagcugcucguggcccuggagaaccagcacacgaucgaccugaccgacuccgagaugaacaagcuguucgagaagaccaagaagcagcuccgcgagaacgccgaggacauggggaacggcugcuucaagaucuaccacaagugcgacaacgcgugcaucgggagcauccgcaacggcaccuacgaccacaacguguaccgggacgaggcccugaacaaccgcuuccagaucaagggggucgagcucaaguccggcuacaaggacuggauccuguggaucagcuucgccaucagcugcuuccugcucugcguggcccugcugggcuucaucaugugggccugccagaaggggaacauccggugcaacaucugcaucuga

SEQ ID NO: 77273 - RNA, 1701 nt, Artificial Sequence; identical to SEQ ID NO: 77123
  derived and/or modified CDS sequence (opt1) from hemagglutinin__InfluenzaA__ALE31718

SEQ ID NO: 77274 - RNA, 1701 nt, Artificial Sequence
  derived and/or modified CDS sequence (opt1) from hemagglutinin__InfluenzaA__ALE31719
augaagaccaucaucgcccugagcuacauccucugccugguguucgcccagaagauccccggcaacgacaacuccaccgcgacgcugugccucgggcaccacgccgucccgaacggcaccaucgugaagaccaucaccaacgaccgcaucgaggugacgaacgccaccgagcugguccagaacagcuccaucggggagaucugcgacagcccccaccagauccuggacggcgagaacugcacccucaucgacgcccugcugggggacccccagugcgacggcuuccagaacaagaagugggaccucuucguggagcgguccaaggccuacagcaacugcuaccccuacgacgugccggacuacgcgucccugcgcagccuggucgccuccagcggcacccucgaguucaacaacgaguccuucaacuggacgggggugacccagaacggcaccagcuccgccugcauccgcaagagcuccagcuccuucuucagccggcugaacuggcugacccaccucaacuacacguaccccgcccugaacgugaccaugcccaacaacgagcaguucgacaagcuguacaucuggggcguccaccaccccgggaccgacaaggaccagaucuuccucuacgcgcgguccagcgggcgcaucaccgugagcacgaagcggucccagcaggccgugaucccgaacaucggcagccgcccccggauccgcgacauccccucccggaucagcaucuacuggaccaucgucaagcccggcgacauccugcugaucaacuccaccgggaaccucaucgccccgcgcggcuacuucaagauccggagcgggaaguccagcaucaugcgcuccgacgcccccaucggcaagugcaagagcgagugcaucacccccaacggcuccauccccaacgacaagccguuccagaacgugaaccggaucacguacggggccugcccccgcuacgugaagcacagcacccugaagcuggcgaccggcaugcggaacauccccgagaagcagacccgcgggaucuucggcgccaucgccggguucaucgagaacggcugggagggcauggucgacgggugguacggcuuccggcaccagaacuccgaggggcgcggccaggccgccgaccucaagagcacgcaggcggccaucgaccagaucaacgggaagcugaaccggcugaucggcaagaccaacgagaaguuccaccagaucgagaaggaguucuccgagguggagggccgcauccaggaccucgagaaguacguggaggacaccaagaucgaccuguggagcuacaacgccgagcugcucgucgcccuggagaaccagcacaccaucgaccugacggacuccgagaugaacaagcuguucgagaagaccaagaagcagcuccgcgagaacgccgaggacauggggaacggcugcuucaagaucuaccacaagugcgacaacgcgugcaucgggagcauccggaacggcaccuacgaccacaacguguaccgcgacgaggcccugaacaaccgguuccagaucaaggggguggagcucaaguccggcuacaaggacuggauccuguggaucagcuucgccaucagcugcuuccugcucugcgucgcccugcugggcuucaucaugugggccugccagaaggggaacauccgcugcaacaucugcaucuga

SEQ ID NO: 77275 - RNA, 1701 nt, Artificial Sequence; identical to SEQ ID NO: 77009
  derived and/or modified CDS sequence (opt1) from hemagglutinin__InfluenzaA__ALE31720

SEQ ID NO: 77276 - RNA, 1701 nt, Artificial Sequence; identical to SEQ ID NO: 77022
  derived and/or modified CDS sequence (opt1) from hemagglutinin__InfluenzaA__ALE31721

SEQ ID NO: 77277 - RNA, 1701 nt, Artificial Sequence; identical to SEQ ID NO: 77245
  derived and/or modified CDS sequence (opt1) from hemagglutinin__InfluenzaA__ALE31722

SEQ ID NO: 77278 - RNA, 1701 nt, Artificial Sequence
  derived and/or modified CDS sequence (opt1) from hemagglutinin__InfluenzaA__ALE31723
augaagaccaucaucgcccugagcuacauccucugccugguguucgcccagaagauccccggcaacgacaacuccaccgcgacgcugugccucgggcaccacgccgucccgaacggcaccaucgugaagaccaucaccaacgaccgcaucgaggugacgaacgccaccgagcugguccagaacagcuccaucggggagaucugcgacagcccccaccagauccuggacggcgagaacugcacccucaucgacgcccugcugggggacccccagugcgacggcuuccagaacaagaagugggaccucuucguggagcgguccaaggccuacagcaacugcuaccccuacgacgugccggacuacgcgucccugcgcagccuggucgccuccagcggcacccucgaguucaacaacgaguccuucaacuggacgggggugacccagaacggcaccagcuccgccugcauccgcaagagcuccagcuccuucuucagccggcugaacuggcugacccaccucaacuacacguaccccgcccugaacgugaccaugcccaacaacgagcaguucgacaagcuguacaucuggggcguccaccaccccgggaccgacaaggaccagaucuuccucuacgcgcgguccagcgggcgcaucaccgugagcacgaagcggucccagcaggccgugaucccgaacaucggcagccgcccccggauccgcgacauccccucccggaucagcaucuacuggaccaucgucaagcccggcgacauccugcugaucaacuccaccgggaaccucaucgccccgcgcggcuacuucaagauccggagcgggaaguccagcaucaugcgcuccgacgcccccaucggcaagugcaagagcgagugcaccacgcccaacggcuccauccccaacgacaagccguuccagaacgugaaccggaucaccuacggggccugcccccgcuacgugaagcacagcacccugaagcuggcgaccggcaugcggaacguccccgagaagcagacgcgcgggaucuucggcgccaucgccggguucaucgagaacggcugggagggcaugguggacgggugguacggcuuccggcaccagaacuccgaggggcgcggccaggccgccgaccucaagagcacccaggcggccaucgaccagaucaacgggaagcugaaccggcugaucggcaagaccaacgagaaguuccaccagaucgagaaggaguucuccgagguggagggccgcauccaggaccucgagaaguacgucgaggacaccaagaucgaccuguggagcuacaacgccgagcugcucguggcccuggagaaccagcacacgaucgaccugaccgacuccgagaugaacaagcuguucgagaagaccaagaagcagcuccgcgagaacgccgaggacauggggaacggcugcuucaagaucuaccacaagugcgacaacgcgugcaucgggagcauccggaacggcaccuacgaccacaacguguaccgcgacgaggcccugaacaaccgguuccagaucaagggggucgagcucaaguccggcuacaaggacuggauccuguggaucagcuucgccaucagcugcuuccugcucugcguggcccugcugggcuucaucaugugggccugccagaaggggaacauccgcugcaacaucugcaucuga

SEQ ID NO: 77279 - RNA, 1701 nt, Artificial Sequence; identical to SEQ ID NO: 76465
  derived and/or modified CDS sequence (opt1) from hemagglutinin__InfluenzaA__ALE31724

SEQ ID NO: 77280 - RNA, 1701 nt, Artificial Sequence; identical to SEQ ID NO: 76465
  derived and/or modified CDS sequence (opt1) from hemagglutinin__InfluenzaA__ALE31725

SEQ ID NO: 77281 - RNA, 1701 nt, Artificial Sequence; identical to SEQ ID NO: 76465
  derived and/or modified CDS sequence (opt1) from hemagglutinin__InfluenzaA__ALE31726

SEQ ID NO: 77282 - RNA, 1701 nt, Artificial Sequence; identical to SEQ ID NO: 76465
  derived and/or modified CDS sequence (opt1) from hemagglutinin__InfluenzaA__ALE31727

SEQ ID NO: 77283 - RNA, 1701 nt, Artificial Sequence
  derived and/or modified CDS sequence (opt1) from hemagglutinin__InfluenzaA__ALE31728
augaagaccaucaucgcccugagcuacauccucugccugguguucgcccagaagauccccggcaacgacaacuccaccgcgacgcugugccucgggcaccacgccgucccgaacggcaccaucgugaagaccaucaccaacgaccgcaucgaggugacgaacgccaccgagcugguccagaacagcuccaucggggagaucugcgacagcccccaccagauccuggacggcgagaacugcacccucaucgacgcccugcugggggacccccagugcgacggcuuccagaacaagaagugggaccucuucguggagcgguccaaggccuacagcaacugcuaccccuacgacgugccggacuacgcgucccugcgcagccuggucgccuccagcggcacccucgaguucaacaacgaguccuucaacuggacgggggugacccagaacggcaccagcuccgccugcauccggcgcagcuccagcuccuucuucagccggcugaacuggcugacccaccucaacuacacguaccccgcccugaacgugaccauccccaacaacgagcaguucgacaagcuguacaucuggggcguccaccaccccgggaccgacaaggaccagaucuuccucuacgcgcaguccagcgggcgcaucaccgugagcacgaagcggucccagcaggccgugaucccgaacaucggcagccgcccccggauccgcgacauccccucccggaucagcaucuacuggaccaucgucaagcccggcgacauccugcugaucaacuccaccgggaaccucaucgccccgcgcggcuacuucaagauccggagcgggaaguccagcaucaugcgcuccgacgcccccaucggcaagugcaagagcgagugcaucacccccaacggcuccauccccaacgacaagccguuccagaacgugaaccggaucacguacggggccugcccccgcuacgugaagcacagcacccugaagcuggcgaccggcaugcggaacguccccgagaagcagacccgcgggaucuucggcgccaucgccggguucaucgagaacggcugggagggcaugguggacgggugguacggcuuccggcaccagaacuccgaggggcgcggccaggccgccgaccucaagagcacgcaggcggccaucgaccagaucaacgggaagcugaaccggcugaucggcaagaccaacgagaaguuccaccagaucgagaaggaguucuccgagguggagggccgcauccaggaccucgagaaguacgucgaggacaccaagaucgaccuguggagcuacaacgccgagcugcucguggcccuggagaaccagcacaccaucgaccugacggacuccgagaugaacaagcuguucgagaagaccaagaagcagcuccgcgagaacgccgaggacauggggaacggcugcuucaagaucuaccacaagugcgacaacgcgugcaucgggagcauccggaacggcaccuacgaccacaacguguaccgcgacgaggcccugaacaaccgguuccagaucaagggggucgagcucaaguccggcuacaaggacuggauccuguggaucagcuucgccaucagcugcuuccugcucugcguggcccugcugggcuucaucaugugggccugccagaaggggaacauccgcugcaacaucugcaucuga

SEQ ID NO: 77284 - RNA, 1701 nt, Artificial Sequence
  derived and/or modified CDS sequence (opt1) from hemagglutinin__InfluenzaA__ALE31729
augaagaccaucaucgcccugagcuacauccucugccugguguucgcccagaagauccccggcaacgacaacuccaccgcgacgcugugccucgggcaccacgccgucccgaacggcaccaucgugaagaccaucaccaacgaccgcaucgaggugacgaacgccaccgagcugguccagaacagcuccaucggggagaucugcgacagcccccaccagaucaucgacggcgagaacugcacccugaucgacgcccuccugggggacccccagugcgacggcuuccagaacaagaagugggaccuguucguggagcgguccaaggccuacagcaacugcuaccccuacgacgugccggacuacgcgucccuccgcagccuggucgccuccagcggcacccuggaguucaacaacgaguccuucaacuggacgggggugacccagaacggcaccagcuccgccugcauccggcgcagcuccagcuccuucuucagccggcucaacuggcugacccaccugaacuacacguaccccgcccucaacgugaccaugcccaacaacgagcaguucgacaagcuguacaucuggggcguccaccaccccgggaccgacaaggaccagaucuuccuguacgcgcaguccagcgggcgcaucaccgugagcacgaagcggucccagcaggccgugaucccgaacaucggcagccgcccccggauccgcgacauccccucccggaucagcaucuacuggaccaucgucaagcccggcgacauccuccugaucaacuccaccgggaaccugaucgccccgcgcggcuacuucaagauccggagcgggaaguccagcaucaugcgcuccgacgcccccaucggcaagugcaagagcgagugcaucacccccaacggcuccauccccaacgacaagccguuccagaacgugaaccggaucacguacggggccugcccccgcuacgugaagcacagcacccucaagcuggcgaccggcaugcggaacguccccgagaagcagacccgcgggaucuucggcgccaucgccggguucaucgagaacggcugggagggcaugguggacgggugguacggcuuccggcaccagaacuccgaggggcgcggccaggccgccgaccucaagagcacgcaggcggccaucgaccagaucaacgggaagcugaaccggcugaucggcaagaccaacgagaaguuccaccagaucgagaaggaguucuccgagguggagggccgcauccaggaccuggagaaguacgucgaggacaccaagaucgaccucuggagcuacaacgccgagcugcugguggcccucgagaaccagcacaccaucgaccugacggacuccgagaugaacaagcuguucgagaagaccaagaagcagcuccgcgagaacgccgaggacauggggaacggcugcuucaagaucuaccacaagugcgacaacgcgugcaucgggagcauccggaacggcaccuacgaccacaacguguaccgcgacgaggcccugaacaaccgguuccagaucaagggggucgagcugaaguccggcuacaaggacuggauccucuggaucagcuucgccaucagcugcuuccugcugugcguggcccuccugggcuucaucaugugggccugccagaaggggaacauccgcugcaacaucugcaucuga

SEQ ID NO: 77285 - RNA, 1701 nt, Artificial Sequence; identical to SEQ ID NO: 76465
  derived and/or modified CDS sequence (opt1) from hemagglutinin__InfluenzaA__ALE31730

SEQ ID NO: 77286 - RNA, 1701 nt, Artificial Sequence
  derived and/or modified CDS sequence (opt1) from hemagglutinin__InfluenzaA__ALE31731
augaagaccaucaucgcccugagcuacauccucugccagguguucgcccagaagauccccggcaacgacaacuccaccgcgacgcugugccuggggcaccacgccgucccgaacggcaccaucgugaagaccaucaccaacgaccgcaucgaggugacgaacgccaccgagcucguccagaacagcuccaucggggagaucugcgacagcccccaccagauccuggacggcgagaacugcacccugaucgacgcccuccugggggacccccagugcgacggcuuccagaacaagaagugggaccuguucguggagcgguccaaggccuacagcaacugcuaccccuacgacgugccggacuacgcgucccuccgcagccuggucgccuccagcggcacccuggaguucaacaacgaguccuucaacuggacgggggugacccagaacggcaccagcuccgccugcauccgcaagagcuccagcuccuucuucagccggcucaacuggcugacccaccugaacuacacguaccccgcccucaacgugaccaugcccaacaacgagcaguucgacaagcuguacaucuggggcguccaccaccccgggaccgacaaggaccagaucuuccuguacgcgcgguccagcgggcgcaucaccgugagcacgaagcggucccagcaggccgugaucccgaacaucggcagccgcccccggauccgcgacauccccucccggaucagcaucuacuggaccaucgucaagcccggcgacauccuccugaucaacuccaccgggaaccugaucgccccgcgcggcuacuucaagauccggagcgggaaguccagcaucaugcgcuccgacgcccccaucggcaagugcaagagcgagugcaucacccccaacggcuccauccccaacgacaagccguuccagaacgugaaccggaucacguacggggccugcccccgcuacgugaagcacagcacccucaagcuggcgaccggcaugcggaacguccccgagaagcagacccgcgggaucuucggcgccaucgccggguucaucgagaacggcugggagggcaugguggacgggugguacggcuuccggcaccagaacuccgaggggcgcggccaggccgccgaccucaagagcacgcaggcggccaucgaccagaucaacgggaagcugaaccggcugaucggcaagaccaacgagaaguuccaccagaucgagaaggaguucuccgagguggagggccgcauccaggaccuggagaaguacgucgaggacaccaagaucgaccucuggagcuacaacgccgagcugcugguggcccucgagaaccagcacaccaucgaccugacggacuccgagaugaacaagcuguucgagaagaccaagaagcagcuccgcgagaacgccgaggacauggggaacggcugcuucaagaucuaccacaagugcgacaacgcgugcaucgggagcauccggaacggcaccuacgaccacaacguguaccgcgacgaggcccugaacaaccgguuccagaucaagggggucgagcugaaguccggcuacaaggacuggauccucuggaucagcuucgccaucagcugcuuccugcugugcguggcccuccugggcuucaucaugugggccugccagaaggggaacauccgcugcaacaucugcaucuga

SEQ ID NO: 77287 - RNA, 1701 nt, Artificial Sequence; identical to SEQ ID NO: 77123
  derived and/or modified CDS sequence (opt1) from hemagglutinin__InfluenzaA__ALE31732

SEQ ID NO: 77288 - RNA, 1701 nt, Artificial Sequence; identical to SEQ ID NO: 77123
  derived and/or modified CDS sequence (opt1) from hemagglutinin__InfluenzaA__ALE31733

SEQ ID NO: 77289 - RNA, 1701 nt, Artificial Sequence
  derived and/or modified CDS sequence (opt1) from hemagglutinin__InfluenzaA__ALE31734
augaagaccaucaucgcccugagcuacauccucugccugguguucgcccagaagauccccggcaacgacaacuccaccgcgacgcugugccucgggcaccacgccgucccgaacggcaccaucgugaagaccaucaccaacgaccgcaucgaggugacgaacgccaccgagcugguccagaacagcuccaucggggagaucugcgacagcccccaccagauccuggacggcgagaacugcacccucaucgacgcccugcugggggacccccagugcgacggcuuccagaacaagaagugggaccucuucguggagcgguccaaggccuacagcaacugcuaccccuacgacgugccggacuacgcgucccugcgcagccuggucgccuccagcggcacccucgaguucaacaacgaguccuucaacuggacgggggugacccagaacggcaccagcuccgccugcauccgcaagagcuccagcuccuucuucagccggcugaacuggcugacccaccucaaguacacguaccccgcccugaacgugaccaugcccaacaacgagcaguucgacaagcuguacaucuggggcguccaccaccccgggaccgacaaggaccagaucuuccucuacgcgcgguccagcgggcgcaucaccgugagcacgaagcggucccagcaggccgugaucccgaacaucggcuuccgcccccggauccgcgacauccccagccggaucuccaucuacuggaccaucgucaagcccggcgacauccugcugaucaacagcaccgggaaccucaucgccccgcgcggcuacuucaagauccgguccggcaagagcuccaucaugcgcagcgacgcccccaucgggaagugcaaguccgagugcaucacccccaacggcagcauccccaacgacaagccguuccagaacgugaaccggaucacguacggggccugcccccgcuacgugaagcacuccacccugaagcuggcgaccggcaugcggaacguccccgagaagcagacccgcgggaucuucggcgccaucgccggguucaucgagaacggcugggagggcaugguggacgggugguacggcuuccggcaccagaacagcgaggggcgcggccaggccgccgaccucaaguccacgcaggcggccaucgaccagaucaacgggaagcugaaccggcugaucggcaagaccaacgagaaguuccaccagaucgagaaggaguucagcgagguggagggccgcauccaggaccucgagaaguacgucgaggacaccaagaucgaccugugguccuacaacgccgagcugcucguggcccuggagaaccagcacaccaucgaccugacggacagcgagaugaacaagcuguucgagaagaccaagaagcagcuccgcgagaacgccgaggacauggggaacggcugcuucaagaucuaccacaagugcgacaacgcgugcaucggguccauccggaacggcaccuacgaccacaacguguaccgcgacgaggcccugaacaaccgguuccagaucaagggggucgagcucaagagcggcuacaaggacuggauccuguggaucuccuucgccaucagcugcuuccugcucugcguggcccugcugggcuucaucaugugggccugccagaaggggaacauccgcugcaacaucugcaucuga

SEQ ID NO: 77290 - RNA, 1701 nt, Artificial Sequence; identical to SEQ ID NO: 77123
  derived and/or modified CDS sequence (opt1) from hemagglutinin__InfluenzaA__ALE31735

SEQ ID NO: 77291 - RNA, 1701 nt, Artificial Sequence; identical to SEQ ID NO: 77022
  derived and/or modified CDS sequence (opt1) from hemagglutinin__InfluenzaA__ALE31736

SEQ ID NO: 77292 - RNA, 1701 nt, Artificial Sequence; identical to SEQ ID NO: 77022
  derived and/or modified CDS sequence (opt1) from hemagglutinin__InfluenzaA__ALE31737

SEQ ID NO: 77293 - RNA, 1701 nt, Artificial Sequence
  derived and/or modified CDS sequence (opt1) from hemagglutinin__InfluenzaA__ALE31738
augaagaccaucaucgcccugagcuacauccucugccugguguucgcccagaagauccccggcaacgacaacuccaccgcgacgcugugccucgggcaccacgccgucccgaacggcaccaucgugaagaccaucaccaacgaccgcaucgaggugacgaacgccaccgagcugguccagaacagcuccaucggggagaucugcgacagcccccaccagauccuggacggcgagaacugcacccucaucgacgcccugcugggggacccccagugcgacggcuuccagaacaagaagugggaccucuucguggagcgguccaaggccuacagcaacugcuaccccuacgacgugccggacuacgcgucccugcgcagccuggucgccuccagcggcacccucgaguucaacaacgaguccuucaacuggacgggggugacccagaacggcaccagcuccgccugcauccggcgcagcuccagcuccuucuucagccggcugaacuggcugacccaccucaacuacaaguaccccgcccugaacgugacgaugcccaacaacgagcaguucgacaagcuguacaucuggggcguccaccaccccgggaccgacaaggaccagaucuuccucuacgcgcaguccagcgggcgcaucaccgugagcaccaagggcucccagcaggccgugaucccgaacaucggcagccggccccgcauccgggacauccccucccgcaucagcaucuacuggacgaucgucaagcccggggacauccugcugaucaacuccaccggcaaccucaucgccccgcggggguacuucaagauccgcagcggcaaguccagcaucaugcgguccgacgcccccaucggcaagugcaagagcgagugcaucacccccaacggguccauccccaacgacaagccguuccagaacgugaaccgcaucaccuacggcgccugcccccgguacgugaagcacagcacgcugaagcuggcgaccgggaugcgcaacguccccgagaagcagacccggggcaucuucggggccaucgccggcuucaucgagaacggcugggaggggaugguggacggcugguacggguuccgccaccagaacuccgagggccgggggcaggccgccgaccucaagagcacccaggcggccaucgaccagaucaacggcaagcugaaccgccugaucggcaagacgaacgagaaguuccaccagaucgagaaggaguucuccgagguggaggggcggauccaggaccucgagaaguacgucgaggacaccaagaucgaccuguggagcuacaacgccgagcugcucguggcccuggagaaccagcacaccaucgaccugaccgacuccgagaugaacaagcuguucgagaagacgaagaagcagcuccgcgagaacgccgaggacaugggcaacgggugcuucaagaucuaccacaagugcgacaacgcgugcaucggcagcauccgcaacgggaccuacgaccacaacguguaccgggacgaggcccugaacaaccgcuuccagaucaagggcgucgagcucaaguccggcuacaaggacuggauccuguggaucagcuucgccaucagcugcuuccugcucugcguggcccugcugggguucaucaugugggccugccagaagggcaacauccggugcaacaucugcaucuga

SEQ ID NO: 77294 - RNA, 1701 nt, Artificial Sequence; identical to SEQ ID NO: 76465
  derived and/or modified CDS sequence (opt1) from hemagglutinin__InfluenzaA__ALE31739

SEQ ID NO: 77295 - RNA, 1701 nt, Artificial Sequence
  derived and/or modified CDS sequence (opt1) from hemagglutinin__InfluenzaA__ALE31741
augaagaccaucaucgcccugagcuacauccucugccugguguucgcccagaagcugcccgagaacgacaacuccaccgcgacgcucugccugggccaccacgccgucccgaacgggaccaucgugaagaccaucaccagcgaccgcaucgaggugacgaacgccaccgagcugguccagaacuccagcaucuccgagaucugcgacagcccccaccagauccucgacggcaagaacugcacccugaucgacgcccugcucggggacccccagugcgacggcuuccagaacaagaagugggaccuguucguggagcgguccaaggccuacagcaacugcuaccccuacgacgugccggacuacgcgucccugcgcagccucgucgccuccagcgggacccuggaguucaacgacgaguccuucaacugggccggcgugacgcagaacggcaccagcuccgccugcauccgggggagcaacuccagcuucuucucccgccugaacuggcucacccacagcaacuucaaguaccccgcgcugaacgugaccaugcccaacaacgagcaguucgacaagcuguacaucuggggcguccaccaccccgggacggacaaggaccagaucuuccucuacgcccagagcuccggccggaucaccgugagcaccaagcgcucccagcaggccgugaucccgaacaucgggagccggccccgcauccggaacauccccucccgcaucagcaucuacuggaccaucgucaagcccggcgacauccugcugaucaacuccacgggcaaccucaucgccccgcggggguacuucaagauccgcagcggcaaguccagcaucaugcgguccgacgcccccaucgggaagugcaagagcgagugcaucacccccaacggcuccauccccaacgacaagccguuccagaacgugaaccgcaucaccuacggcgcgugcccccgguacgugaagcagagcacccugaagcuggccacggggaugcgcaacguccccgagaagcagacccggggcaucuucggggccaucgccggcuucaucgagaacgggugggagggcaugaaggacggcugguacggguuccgccaccagaacuccgagggccgggggcaggccgcggaccucaagagcacccaggccgccaucgaccagaucaacggcaagcugaaccgccugaucgggaagaccaacgagaaguuccaccagaucgagaaggaguucuccgagguggagggccggauccaggaccucgagaaguacguggaggacacgaagaucgaccuguggagcuacaacgccgagcugcucgucgcccuggagaaccagcacaccaucgaccugaccgacuccgagaugaacaagcuguucgagaagaccaagaagcagcuccgcgagaacgcggaggacaugggcaacgggugcuucaagaucuaccacaagugcgacaacgccugcaucggcagcauccgcaacgggacguacgaccacgacguguaccgggacgaggcccugaacaaccgcuuccagaucaagggcguggagcucaagagcggguacaaggacuggauccuguggaucuccuucgccaucagcugcuuccugcucugcgucgcccugcugggcuucaucaugugggcgugccagaagggcaacauccggugcaacaucugcaucuga

SEQ ID NO: 77296 - RNA, 1701 nt, Artificial Sequence
  derived and/or modified CDS sequence (opt1) from hemagglutinin__InfluenzaA__ALE31742
augaagaccaucaucgcccugagcuacauccucugccugggcuucgcccagaagauccccgggaacgacaacuccaccgcgacgcugugccucggccaccacgccgugccgaacgggaccaucgucaagaccaucaccaacgaccgcaucgaggugacgaacgccaccgagcuggugcagaacagcuccaucggcgagaucugcgacagcccccaccagauccuggacggggagaacugcacccucaucgacgcccugcugggcgacccccagugcgacggcuuccagaacaagaagugggaccucuucgucgagcgguccaaggccuacagcaacugcuaccccuacgacgugccggacuacgcgucccugcgcagccugguggccuccagcgggacccucgaguucaacaacgaguccuucaacuggacgggcgucacccagaacgggaccagcuccgccugcauccggcgcagcuccagcuccuucuucagccggcugaacuggcugacccaccucaacuacacguaccccgcccugaacgugaccaugcccaacaacgagcaguucgacaagcuguacaucuggggcgugcaccaccccgggaccgacaaggaccagaucuuccucuacgcgcaguccagcggccgcaucaccgucagcacgaagcggucccagcaggccgugaucccgaacaucggcagccgcccccggauccgcgacauccccucccggaucagcaucuacuggaccaucgugaagcccggggacauccugcugaucaacuccaccggcaaccucaucgccccgcgcggguacuucaagauccggagcggcaaguccagcaucaugcgcuccgacgcccccaucggcaagugcaagagcgagugcaucacccccaacggguccauccccaacgacaagccguuccagaacgucaaccgggugacguacggcgccugcccccgcuacgugaagcacagcacccugaagcuggcgaccgggaugcggaacguccccgagaagcagacccgcggcaucuucggggccaucgccggcuucaucgagaacggcugggaggggaugguggacggcugguacggguuccggcaccagaacuccgagggccgcgggcaggccgccgaccucaagagcacgcaggcggccaucgaccagaucaacggcaagcugaaccggcugaucggcaagaccaacgagaaguuccaccagaucgagaaggaguucuccgagguggaggggcgcauccaggaccucgagaaguacgucgaggacaccaagaucgaccuguggagcuacaacgccgagcugcucguggcccuggagaaccagcacaccaucgaccugacggacuccgagaugaacaagcuguucgagaagaccaagaagcagcuccgcgagaacgccgaggacaugggcaacgggugcuucaagaucuaccacaagugcgacaacgcgugcaucggcagcauccggaacgggaccuacgaccacaacguguaccgcgacgaggcccugaacaaccgguuccagaucaagggcgucgagcucaaguccggcuacaaggacuggauccuguggaucagcuucgccaucagcugcuuccugcucugcguggcccugcugggguucaucaugugggccugccagaagggcaacauccgcugcaacaucugcaucuga

SEQ ID NO: 77297 - RNA, 1701 nt, Artificial Sequence; identical to SEQ ID NO: 77022
  derived and/or modified CDS sequence (opt1) from hemagglutinin__InfluenzaA__ALE31743

SEQ ID NO: 77298 - RNA, 1701 nt, Artificial Sequence; identical to SEQ ID NO: 76465
  derived and/or modified CDS sequence (opt1) from hemagglutinin__InfluenzaA__ALE31744

SEQ ID NO: 77299 - RNA, 1701 nt, Artificial Sequence
  derived and/or modified CDS sequence (opt1) from hemagglutinin__InfluenzaA__ALE31745
augaagaccaucaucgcccugagcuacauccucugccugguguucgcccagaagcugcccggcaacgacaacuccaccgcgacgcucugccuggggcaccacgccgucccgaacggcaccaucgugaagaccaucaccaacgaccgcaucgaggugacgaacgccaccgagcugguccagaacagcuccaucggggagaucugcgacagcccccaccagauccucgacggcaagaacugcacccugaucgacgcccugcucggggacccccagugcgacggcuuccagaacaagcggugggaccuguucguggagcgcuccaaggccuacagcaacugcuaccccuacgacgugccggacuacgcgucccugcggagccucgucgccuccagcggcacccuggaguucaacgacgaguccuucaacugggccggggugacgcagaacggcaccagcuccgccugcauccgcgggagcaacuccagcuucuucucccggcugaacuggcucacccacagcaacuucaaguaccccgcgcugaacgugaccaugcccaacaacgagcaguucgacaagcuguacaucuggggcguccaccaccccgggacggacaaggaccagaucuuccucuacgcccaguccagcggccgcaucaccgugagcaccaagcggucccagcaggccgugaucccgaacaucggcagccgccugcggauccgcaacauccccucccggaucagcaucuacuggaccaucgucaagcccggggacauccugcucaucaacuccacgggcaaccugaucgcgccccgcggguacuucaagauccagagcggcaaguccagcaucaugcgguccgacgccccgaucggcaagugcaagagcgagugcaucacccccaacggguccauccccaacgacaagcccuuccagaacgugaacaagaucaccuacggcgccugcccgcgcuacgugaagcagagcacccugaagcucgccacggggaugcggaacguccccgagaagcagacccgcggcaucuucggggccaucgccggcuucaucgagaacggcugggaggggaugaaggacggcugguacggguuccggcaccagaacuccgagggccgcgggcaggccgcggaccucaagagcacccaggccgccaucgaccagaucaacggcaagcugaaccggcugaucggcaagaccaacgagaaguuccaccagaucgagaaggaguucuccgagguggaggggcgcauccaggaccuggagaaguacguggaggacacgaagaucgaccuguggagcuacaacgccgagcuccuggucgcccuggagaaccagcacaccaucgaccucaccgacuccgagaugaacaagcuguucgagaagaccaagaagcagcugcgggagaacgcggaggacaugggcaacgggugcuucaagaucuaccacaagugcgacaacgccugcaucggcagcauccgcaacgggacguacgaccacgacguguaccgcgacgaggcccucaacaaccgguuccagaucaagggcguggagcugaaguccggcuacaaggacuggauccuguggaucagcuucgccaucagcugcuuccuccugugcgucgcccugcucggguucaucaugugggcgugccagaagggcaacauccgcugcaacaucugcaucuga

SEQ ID NO: 77300 - RNA, 1701 nt, Artificial Sequence
  derived and/or modified CDS sequence (opt1) from hemagglutinin__InfluenzaA__ALE31747
augaagaccaucaucgcccugagcuacauccucugccugguguucgcccagaagcugcccggcaacgacaacuccaccgcgacgcucugccuggggcaccacgccgucccgaacggcaccaucgugaagaccaucaccaacgaccgcaucgaggugacgaacgccaccgagcugguccagaacagcuccaucggggagaucugcgacagcccccaccagauccucgacggcaagaacugcacccugaucgacgcccugcucggggacccccagugcgacggcuuccagaacaagcggugggaccuguucguggagcgcuccaaggccuacagcaacugcuaccccuacgacgugccggacuacgcgucccugcggagccucgucgccuccagcggcacccuggaguucaacgacgaguccuucaacugggccggggugacgcagaacggcaccagcuccgccugcauccgcgggagcaacuccagcuucuucucccggcugaacuggcucacccacagcaacuucaaguaccccgcgcugaacgugaccaugcccaacaacgagcaguucgacaagcuguacaucuggggcguccaccaccccgggacggacaaggaccagaucuuccucuacgcccaguccagcggccgcaucaccgugagcaccaagcggucccagcaggccgugaucccgaacaucggcagccgcccccggauccgcaacauccccucccggaucagcaucuacuggaccaucgucaagcccggggacauccugcugaucaacuccacgggcaaccucaucgccccgcgcggguacuucaagauccagagcggcaaguccagcaucaugcgguccgacgcccccaucggcaagugcaagagcgagugcaucacccccaacggguccauccccaacgacaagccguuccagaacgugaaccgcaucaccuacggcgcgugcccccgguacgugaagcagagcacccugaagcuggccacggggaugcgcaacguccccgagaagcagacccggggcaucuucggggccaucgccggcuucaucgagaacggcugggaggggaugaaggacggcugguacggguuccgccaccagaacuccgagggccgggggcaggccgcggaccucaagagcacccaggccgccaucgaccagaucaacggcaagcugaaccgccugaucggcaagaccaacgagaaguuccaccagaucgagaaggaguucuccgagguggaggggcgggugcaggaccucgagaaguacgucgaggacacgaagaucgaccuguggagcuacaacgccgagcugcucguggcccuggagaaccagcacaccaucgaccugaccgacuccgagaugaacaagcuguucgagaagaccaagaagcagcuccgcgagaacgcggaggacaugggcaacgggugcuucaagaucuaccacaagugcgacaacgccugcaucggcagcauccgcaacgggacguacgaccacgacguguaccgggacgaggcccugaacaaccgcuuccagaucaagggcgucgagcucaaguccggcuacaaggacuggauccuguggaucagcuucgccaucagcugcuuccugcucugcguggcccugcugggguucaucaugugggcgugccagaagggcaacauccggugcaacaucugcaucuga

SEQ ID NO: 77301 - RNA, 1701 nt, Artificial Sequence; identical to SEQ ID NO: 77022
  derived and/or modified CDS sequence (opt1) from hemagglutinin__InfluenzaA__ALE31748

SEQ ID NO: 77302 - RNA, 1701 nt, Artificial Sequence; identical to SEQ ID NO: 76465
  derived and/or modified CDS sequence (opt1) from hemagglutinin__InfluenzaA__ALE31749

SEQ ID NO: 77303 - RNA, 1701 nt, Artificial Sequence; identical to SEQ ID NO: 77009
  derived and/or modified CDS sequence (opt1) from hemagglutinin__InfluenzaA__ALE31750

SEQ ID NO: 77304 - RNA, 1701 nt, Artificial Sequence
  derived and/or modified CDS sequence (opt1) from hemagglutinin__InfluenzaA__ALE31751
augaagaccaucaucgcccugagcuacauccucugccugguguucgcccagaagauccccggcaacgacaacuccaccgcgacgcugugccucgggcaccacgccgucccgaacggcaccaucgugaagaccaucaccaacgaccgcaucgaggugacgaacgccaccgagcugguccagaacagcuccaucggggagaucugcgacagcccccaccagauccuggacggcgagaacugcacccucaucgacgcccugcugggggacccccagugcgacggcuuccagaacaagaagugggaccucuucguggagcgguccaaggccuacagcaacugcuaccccuacgacgugccggacuacgcgucccugcgcagccuggucgccuccagcggcacccucgaguucaacaacgaguccuucaacuggacgggggugacccagaacggcaccagcuccgccugcauccggcgcagcuccagcuccuucuucagccggcugaacuggcugacccaccucgacuacacguaccccgcccugaacgugaccaugcccaacaacgagcaguucgacaagcuguacaucuggggcguccaccaccccgggaccgacaaggaccagaucuuccucuacgcgcaguccagcgggcgcaucaccgugagcacgaagcggucccagcaggccgugaucccgaacaucggcagccgcccccggauccgcgacauccccucccggaucagcaucuacuggaccaucgucaagcccggcgacauccugcugaucaacuccaccgggaaccucaucgccccgcgcggcuacuucaagauccggagcgggaaguccagcaucaugcgcuccgacgcccccaucggcaagugcaagagcgagugcaucacccccaacggcuccauccccaacgacaagccguuccagaacgugaaccggaucacguacggggccugcccccgcuacgugaagcacagcacccugaagcuggcgaccggcaugcggaacguccccgagaagcagacccgcgggaucuucggcgccaucgccggguucaucgagaacggcugggagggcaugguggacgggugguacggcuuccggcaccagaacuccgaggggcgcggccaggccgccgaccucaagagcacgcaggcggccaucgaccagaucaacgggaagcugaaccggcugaucggcaagaccaacgagaaguuccaccagaucgagaaggaguucuccgagguggagggccgcauccaggaccucgagaaguacgucgaggacaccaagaucgaccuguggagcuacaacgccgagcugcucguggcccuggagaaccagcacaccaucgaccugacggacuccgagaugaacaagcuguucgagaagaccaagaagcagcuccgcgagaacgccgaggacauggggaacggcugcuucaagaucuaccacaagugcgacaacgcgugcaucgggagcauccggaacggcaccuacgaccacaacguguaccgcgacgaggcccugaacaaccgguuccagaucaagggggucgagcucaaguccggcuacaaggacuggauccuguggaucagcuucgccaucagcugcuuccugcucugcguggcccugcugggcuucaucaugugggccugccagaaggggaacauccgcugcaacaucugcaucuga

SEQ ID NO: 77305 - RNA, 1701 nt, Artificial Sequence; identical to SEQ ID NO: 76465
  derived and/or modified CDS sequence (opt1) from hemagglutinin__InfluenzaA__ALE31752

SEQ ID NO: 77306 - RNA, 1701 nt, Artificial Sequence; identical to SEQ ID NO: 77009
  derived and/or modified CDS sequence (opt1) from hemagglutinin__InfluenzaA__ALE31753

SEQ ID NO: 77307 - RNA, 1701 nt, Artificial Sequence; identical to SEQ ID NO: 76465
  derived and/or modified CDS sequence (opt1) from hemagglutinin__InfluenzaA__ALE31754

SEQ ID NO: 77308 - RNA, 1701 nt, Artificial Sequence
  derived and/or modified CDS sequence (opt1) from hemagglutinin__InfluenzaA__ALE31755
augaagaccaucaucgcccugagcuacauccucugccugguguucgcccagaagcugcccgagaacgacaacuccaccgcgacgcucugccugggccaccacgccgucccgaacgggaccaucgugaagaccaucaccagcgaccagaucgaggugacgaacgccaccgagcugguccagaacuccagcaucggcgagaucugcgacagcccccaccagauccucgacgggaagaacugcacccugaucgacgcccugcucggcgacccccagugcgacggguuccagaacaagaagugggaccuguucguggagcgcagcaaggccuacuccaacugcuaccccuacgacgugccggacuacgcgagccugcggucccucgucgccagcuccggcacccuggaguucaacgacgagagcuucaacugggccggcgugacgcagaacgggaccuccagcgccugcauccgcggcuccaacagcuccuucuucagccggcugaacuggcucacccacuccaacuucaaguaccccgcgcugaacgugaccaugcccaacaacgagcaguucgacaagcuguacaucuggggcguccaccaccccgggacggacaaggaccagaucuuccucuacgcccagagcagcgggcgcaucaccguguccaccaagcggagccagcaggccgugaucccgaacaucggcucccgcccccggauccgcaacauccccagccggaucuccaucuacuggaccaucgucaagcccggcgacauccugcugaucaacagcacggggaaccucaucgccccgcgcggcuacuucaagauccgguccgggaaguccuccaucaugcgcagcgacgcccccaucggcaagugcaaguccgagugcaucacccccaacggcagcauccccaacgacaagccguuccagaacgugaaccggaucaccuacggggcgugcccccgcuacgugaagcaguccacccugaagcuggccacgggcaugcggaacguccccgagaagcagacccgcgggaucuucggcgccaucgccggguucaucgagaacggcugggagggcaugaaggacgggugguacggcuuccggcaccagaacagcgaggggcgcggccaggccgcggaccucaaguccacccaggccgccaucgaccagaucaacgggaagcugaaccggcugaucggcaagaccaacgagaaguuccaccagaucgagaaggaguucagcgagguggagggccgcauccaggaccucgagaaguacguggaggacacgaagaucgaccugugguccuacaacgccgagcugcucgucgcccuggagaaccagcacaccaucgaccugaccgacagcgagaugaacaagcuguucgagaagaccaagaagcagcuccgggagaacgcggaggacauggggaacggcugcuucaagaucuaccacaagugcgacaacgccugcaucggguccauccgcaacggcacguacgaccacaacguguaccgcgacgaggcccugaacaaccgguuccagaucaaggggguggagcucaagagcggcuacaaggacuggauccuguggaucagcuucgccaucuccugcuuccugcucugcgucgcccugcugggcuucaucaugugggcgugccagaaggggaacauccgcugcaacaucugcaucuga

SEQ ID NO: 77309 - RNA, 1701 nt, Artificial Sequence; identical to SEQ ID NO: 77009
  derived and/or modified CDS sequence (opt1) from hemagglutinin__InfluenzaA__ALE31756

SEQ ID NO: 77310 - RNA, 1701 nt, Artificial Sequence; identical to SEQ ID NO: 76465
  derived and/or modified CDS sequence (opt1) from hemagglutinin__InfluenzaA__ALE31757

SEQ ID NO: 77311 - RNA, 1701 nt, Artificial Sequence
  derived and/or modified CDS sequence (opt1) from hemagglutinin__InfluenzaA__ALE31758
augaagaccaucaucgcccugagcuacauccucugccugguguucgcccagaagauccccggcaacgacaacuccaccgcgacgcugugccucgggcaccacgccgucccgaacggcaccaucgugaagaccaucaccaacgaccgcaucgaggugacgaacgccaccgagcugguccagaacagcuccaucggggagaucugcgacagcccccaccagauccuggacggcgagaacugcacccucaucgacgcccugcugggggacccccagugcgacggcuuccagaacaagaagugggaccucuucguggagcgguccaaggccuacagcaacugcuaccccuacgacgugccggacuacgcgucccugcgcagccuggucgccuccagcggcacccucgaguucaacaacgaguccuucaacuggacgggggugacccagaacggcaccagcuccgccugcauccggcgcagcuccagcuccuucuucagccggcugaacuggcugacccaccucaacuacacguaccccgcccugaacgugaccaugcccaacaacgagcaguucgacaagcuguacaucuggggcguccaccaccccgggaccgacaaggaccagaucuuccucuacgcgcaguccagcgggcgcaucaccgugagcacgaagcggucccagcaggccgugaucccgaacaucggcagccgcccccggauccgcgacauccccucccggaucagcaucuacuggaccaucgucaagcccggcgacauccugcugaucaacuccaccgggaaccucguggccccgcgcggcuacuucaagauccggagcgggaaguccagcaucaugcgcuccgacgcccccaucggcaagugcaagagcgagugcaucacccccaacggcuccauccccaacgacaagccguuccagaacgugaaccggaucacguacggggccugcccccgcuacgucaagcacagcacccugaagcuggcgaccggcaugcggaacgugcccgagaagcagacccgcgggaucuucggcgccaucgccggguucaucgagaacggcugggagggcaugguggacgggugguacggcuuccggcaccagaacuccgaggggcgcggccaggccgccgaccucaagagcacgcaggcggccaucgaccagaucaacgggaagcugaaccggcugaucggcaagaccaacgagaaguuccaccagaucgagaaggaguucuccgaggucgagggccgcauccaggaccucgagaaguacguggaggacaccaagaucgaccuguggagcuacaacgccgagcugcucguggcccuggagaaccagcacaccaucgaccugacggacuccgagaugaacaagcuguucgagaagaccaagaagcagcuccgcgagaacgccgaggacauggggaacggcugcuucaagaucuaccacaagugcgacaacgcgugcaucgggagcauccggaacggcaccuacgaccacaacgucuaccgcgacgaggcccugaacaaccgguuccagaucaaggggguggagcucaaguccggcuacaaggacuggauccuguggaucagcuucgccaucagcugcuuccugcucugcguggcccugcugggcuucaucaugugggccugccagaaggggaacauccgcugcaacaucugcaucuga

SEQ ID NO: 77312 - RNA, 1701 nt, Artificial Sequence
  derived and/or modified CDS sequence (opt1) from hemagglutinin__InfluenzaA__ALE31759
augaagaccaucaucgcccugagcuacauccucugccugguguucgcccagaagcugcccggcaacgacaacuccaccgcgacgcucugccuggggcaccacgccgucccgaacggcaccaucgugaagaccaucaccaacgaccgcaucgaggugacgaacgccaccgagcugguccagaacagcuccaucggggagaucugcgacagcccccaccagauccucgacggcaagaacugcacccugaucgacgcccugcucggggacccccagugcgacggcuuccagaacaagcggugggaccuguucguggagcgcuccaaggccuacagcaacugcuaccccuacgacgugccggacuacgcgucccugcggagccucgucgccuccagcggcacccuggaguucaacgacgaguccuucaacugggccggggugacgcagaacggcaccagcuccgccugcauccgcgggagcaacuccagcuucuucucccggcugaacuggcucacccacagcaacuucaaguaccccgcgcugaacgugaccaugcccaacaacgagcaguucgacaagcuguacaucuggggcguccaccaccccgggacggacaaggaccagaucuuccucuacgcccaguccagcggccgcgugaccgugagcaccaagcggucccagcaggccgucaucccgaacaucggcagccgcccccggauccgcaacauccccucccggaucagcaucuacuggaccaucgugaagcccggggacauccugcugaucaacuccacgggcaaccucaucgccccgcgcggguacuucaagauccagagcggcaaguccagcaucaugcgguccgacgcccccaucggcaagugcaagagcgagugcaucacccccaacggguccauccccaacaacaagccguuccagaacgugaaccgcaucaccuacggcgcgugcccccgguacgucaagcagagcacccugaagcuggccacggggaugcgcaacgugcccgagaagcagacccggggcaucuucggggccaucgccggcuucaucgagaacggcugggaggggaugaaggacggcugguacggguuccgccaccagaacuccgagggccgggggcaggccgcggaccucaagagcacccaggccgccaucgaccagaucaacggcaagcugaaccgccugaucggcaagaccaacgagaaguuccaccagaucgagaaggaguucuccgagguggaggggcggauccaggaccucgagaaguacgucgaggacacgaagaucgaccuguggagcuacaacgccgagcugcucguggcccuggagaaccagcacaccaucgaccugaccgacuccgagaugaacaagcuguucgagaagaccaagaagcagcuccgcgagaacgcggaggacaugggcaacgggugcuucaagaucuaccacaagugcgacaacgccugcaucggcagcauccgcaacgggacguacgaccacgacguguaccgggacgaggcccugaacaaccgcuuccagaucaagggcgucgagcucaaguccggcuacaaggacuggauccuguggaucagcuucgccaucagcugcuuccugcucugcguggcccugcugggguucaucaugugggcgugccagaagggcaacauccggugcaacaucugcaucuga

SEQ ID NO: 77313 - RNA, 1701 nt, Artificial Sequence
  derived and/or modified CDS sequence (opt1) from hemagglutinin__InfluenzaA__ALE31760
augaagaccaucaucgcccugagcuacauccucugccugguguucgcccagaagauccccggcaacgacaacuccaccgcgacgcugugccucgggcaccacgccgucccgaacggcaccaucgugaagaccaucaccaacgaccgcaucgaggugacgaacgccaccgagcugguccagaacagcuccaucggggagaucugcgacagcccccaccagauccuggacggcgagaacugcacccucaucgacgcccugcugggggacccccagugcgacggcuuccagaacaagaagugggaccucuucguggagcgguccaaggccuacagcaacugcuaccccuacgacgugccggacuacgcgucccugcgcagccuggucgccuccagcggcacccucgaguucaacaacgaguccuucaacuggacgggggugacccagaacggcaccagcuccgccugcauccggcgcagcuccagcuccuucuucagccggcugaacuggcugacccaccucaacuacacguaccccgcccugaacgugaccaugcccaacaacgagcaguucgacaagcuguacaucuggggcguccaccaccccgggaccgacaaggaccagaucuuccucuacgcgcaguccagcgggcgcaucaccgugagcacgaagcggucccagcaggccgugaucccgaacaucggcuaccgcccccggauccgcgacauccccagccggaucuccaucuacuggaccaucgucaagcccggcgacauccugcugaucaacagcaccgggaaccucaucgccccgcgcggcuacuucaagauccgguccggcaagagcuccaucaugcgcagcgacgcccccaucgggaagugcaaguccgagugcaucacccccaacggcagcauccccaacgacaagccguuccagaacgugaaccggaucacguacggggccugcccccgcuacgugaagcacuccacccugaagcuggcgaccggcaugcggaacguccccgagaagcagacccgcgggaucuucggcgccaucgccggguucaucgagaacggcugggagggcaugguggacgggugguacggcuuccggcaccagaacagcgaggggcgcggccaggccgccgaccucaaguccacgcaggcggccaucgaccagaucaacgggaagcugaaccggcugaucggcaagaccaacgagaaguuccaccagaucgagaaggaguucagcgagguggagggccgcauccaggaccucgagaaguacgucgaggacgccaagaucgaccugugguccuacaacgccgagcugcucguggcccuggagaaccagcacaccaucgaccugaccgacagcgagaugaacaagcuguucgagaagacgaagaagcagcuccgcgagaacgcggaggacauggggaacggcugcuucaagaucuaccacaagugcgacaacgccugcaucggguccauccggaacggcaccuacgaccacaacguguaccgcgacgaggcccugaacaaccgguuccagaucaagggggucgagcucaagagcggcuacaaggacuggauccuguggaucuccuucgccaucagcugcuuccugcucugcguggcccugcugggcuucaucaugugggcgugccagaaggggaacauccgcugcaacaucugcaucuga

SEQ ID NO: 77314 - RNA, 1701 nt, Artificial Sequence; identical to SEQ ID NO: 77009
  derived and/or modified CDS sequence (opt1) from hemagglutinin__InfluenzaA__ALE31761

SEQ ID NO: 77315 - RNA, 1701 nt, Artificial Sequence; identical to SEQ ID NO: 76465
  derived and/or modified CDS sequence (opt1) from hemagglutinin__InfluenzaA__ALE31762

SEQ ID NO: 77316 - RNA, 1701 nt, Artificial Sequence; identical to SEQ ID NO: 77071
  derived and/or modified CDS sequence (opt1) from hemagglutinin__InfluenzaA__ALE31763

SEQ ID NO: 77317 - RNA, 1701 nt, Artificial Sequence; identical to SEQ ID NO: 77123
  derived and/or modified CDS sequence (opt1) from hemagglutinin__InfluenzaA__ALE31764

SEQ ID NO: 77318 - RNA, 1701 nt, Artificial Sequence; identical to SEQ ID NO: 76465
  derived and/or modified CDS sequence (opt1) from hemagglutinin__InfluenzaA__ALE31765

SEQ ID NO: 77319 - RNA, 1701 nt, Artificial Sequence
  derived and/or modified CDS sequence (opt1) from hemagglutinin__InfluenzaA__ALE31774
augaagaccaucaucgcccugagcuacauccucugccugguguucgcccagaagauccccggcaacgacaacuccaccgcgacgcugugccucgggcaccacgccgucccgaacggcaccaucgugaagaccaucaccaacgaccgcaucgaggugacgaacgccaccgagcugguccagaacagcuccaucggggagaucugcgacagcccccaccagauccuggacggcgagaacugcacccucaucgacgcccugcugggggacccccagugcgacggcuuccagaacaagaagugggaccucuucguggagcgguccaaggccuacagcaacugcuaccccuacgacgugccggacuacgcgucccugcgcagccuggucgccuccagcggcacccucgaguucaacaacgaguccuucaacuggacgggggugacccagaacggcaccagcuccgccugcauccggcgcagcuccagcuccuucuucagccggcugaacuggcugacccaccucaacuacacguaccccgcccugaacgugaccaugcccaacaacgagcaguucgacaagcuguacaucuggggcguccaccaccccgggaccgacaaggaccagguguuccucuacgcgcaguccagcgggcgcaucaccgugagcacgaagcggucccagcaggccgucaucccgaacaucggcagccgcccccggauccgcgacauccccucccggaucagcaucuacuggaccaucgugaagcccggcgacauccugcugaucaacuccaccgggaaccucaucgccccgcgcggcuacuucaagauccggagcgggaaguccagcaucaugcgcuccgacgcccccaucggcaagugcaagagcgagugcaucacccccaacggcuccauccccaacgacaagccguuccagaacgugaaccggaucacguacggggccugcccccgcuacgucaagcacagcacccugaagcuggcgaccggcaugcggaacgugcccgagaagcagacccgcgggaucuucggcgccaucgccggguucaucgagaacggcugggagggcaugguggacgggugguacggcuuccggcaccagaacuccgaggggcgcggccaggccgccgaccucaagagcacgcaggcggccaucgaccagaucaacgggaagcugaaccggcugaucggcaagaccaacgagaaguuccaccagaucgagaaggaguucuccgaggucgagggccgcauccaggaccucgagaaguacguggaggacaccaagaucgaccuguggagcuacaacgccgagcugcucguggcccuggagaaccagcacaccaucgaccugacggacuccgagaugaacaagcuguucgagaagaccaagaagcagcuccgcgagaacgccgaggacauggggaacggcugcuucaagaucuaccacaagugcgacaacgcgugcaucgggagcauccggaacggcaccuacgaccacaacgucuaccgcgacgaggcccugaacaaccgguuccagaucaaggggguggagcucaaguccggcuacaaggacuggauccuguggaucagcuucgccaucagcugcuuccugcucugcguggcccugcugggcuucaucaugugggccugccagaaggggaacauccgcugcaacaucugcaucuga

SEQ ID NO: 77320 - RNA, 1701 nt, Artificial Sequence
  derived and/or modified CDS sequence (opt1) from hemagglutinin__InfluenzaA__ALE31775
augaagaccaucaucgcccugagcuacauccucugccugguguucgcccagaagauccccggcaacgacaacuccaccgcgacgcugugccucgggcaccacgccgucccgaacggcaccaucgugaagaccaucaccaacgaccgcaucgaggugacgaacgccaccgagcugguccagaacagcuccaucggggagaucugcgacagcccccaccagauccuggacggcgagaacugcacccucaucgacgcccugcugggggacccccagugcgacggcuuccagaacaagaagugggaccucuucguggagcgguccaaggccuacagcaacugcuaccccuacgacgugccggacuacgcgucccugcgcagccuggucgccuccagcggcacccucgaguucaacaacgaguccuucaacuggacgggggugacccagaacggcaccagcuccgccugcauccgcaagagcuccagcuccuucuucagccggcugaacuggcugacccaccucaacuacacguaccccgcccugaacgugaccaugcccaacaacgagcaguucgacaagcuguacaucuggggcguccaccaccccgggaccgacaaggaccagaucuuccucuacgcgcgguccagcgggcgcaucaccgugagcacgaagcggucccagcaggccgugaucccgaacaucggcagccgcccccggauccgcgacauccccucccggaucagcaucuacuggaccaucgucaagcccggcgacauccugcugaucaacuccaccgggaaccucaucgccccgcgcggcuacuucaagauccggagcgggaaguccagcaucaugcgcuccgacgcccccaucggcaagugcaagagcgagugcaucacccccaacggcuccauccccaacgacaagccguuccagaacgugaaccggaucacguacggggccugcccccgcuacgugaagcacagcacccugaagcuggcgaccggcaugcggaacguccccgagaagcagacccgcgggaucuucggcgccaucgccggguucaucgagaacggcugggagggcaugguggacgggugguacggcuuccggcaccagaacuccgaggggcgcggccaggccgccgaccucaagagcacgcaggcggccaucgaccagaucaacgggaagcugaaccggcugaucggcaagaccaacgagaaguuccaccagaucgagaaggaguucuccgagguggagggccgcauccaggaccucgagaaguacgucgaggacaccaagaucgaccuguggagcuacaacgccgaguuccugguggcccucgagaaccagcacaccaucgaccugacggacuccgagaugaacaagcuguucgagaagaccaagaagcagcuccgcgagaacgccgaggacauggggaacggcugcuucaagaucuaccacaagugcgacaacgcgugcaucgggagcauccggaacggcaccuacgaccacaacguguaccgcgacgaggcccugaacaaccgguuccagaucaagggggucgagcugaaguccggcuacaaggacuggauccucuggaucagcuucgccaucagcugcuuccugcugugcguggcccuccugggcuucaucaugugggccugccagaaggggaacauccgcugcaacaucugcaucuga

SEQ ID NO: 77321 - RNA, 1701 nt, Artificial Sequence
  derived and/or modified CDS sequence (opt1) from hemagglutinin__InfluenzaA__ALE31776
augaagaccaucaucgcccugagcuacauccucugccugguguucgcccagaagcugcccgagaacgacaacuccaccgcgacgcucugccugggccaccacgccgucccgaacgggaccaucgugaagaccaucaccagcgaccgcaucgaggugacgaacgccaccgagcugguccagaacuccagcaucggcgagaucugcgacagcccccaccagauccucgacgggaagaacugcacccugaucgacgcccugcucggcgacccccagugcgacggguuccagaacaagaagugggaccuguucguggagcggagcaaggccuacuccaacugcuaccccuacgacgugccggacuacgcgagccugcgcucccucgucgccagcuccggcacccuggaguucaacgacgagagcuucaacugggccggcgugacgcagaacgggaccuccagcgccugcauccggggcuccaacagcuccuucuucagccgccugaacuggcucacccacuccaacuucaaguaccccgcgcugaacgugaccaugcccaacaacgagcaguucgacaagcuguacaucuggggcguccaccaccccgggacggacaaggaccagaucuuccucuacgcccagagcagcgggcggaucaccguguccaccaagcgcagccagcaggccgugaucccgaacaucggcucccggccccgcauccggaacauccccagccgcaucuccaucuacuggaccaucgucaagcccggcgacauccugcugaucaacagcacggggaaccucaucgccccgcggggcuacuucaagauccgcuccgggaaguccuccaucaugcggagcgacgccuccaucggcaagugcaagagcgagugcaucacccccaacggcuccauccccaacgacaagcccuuccagaacgugaaccgcaucaccuacggggcgugcccgcgguacgugaagcagagcacccugaagcuggccacgggcaugcgcaacguccccgagaagcagacccgggggaucuucggcgccaucgccggguucaucgagaacggcugggagggcaugaaggacgggugguacggcuuccgccaccagaacuccgaggggcggggccaggccgcggaccucaagagcacccaggccgccaucgaccagaucaacgggaagcugaaccgccugaucggcaagaccaacgagaaguuccaccagaucgagaaggaguucuccgagguggagggccggauccaggaccucgagaaguacguggaggacacgaagaucgaccuguggagcuacaacgccgagcugcucgucgcccuggagaaccagcacaccaucgaccugaccgacuccgagaugaacaagcuguucgagaagaccaagaagcagcuccgcgagaacgcggaggacauggggaacggcugcuucaagaucuaccacaagugcgacaacgccugcaucgggagcauccgcaacggcacguacgaccacgacguguaccgggacgaggcccugaacaaccgcuuccagaucaaggggguggagcucaagagcggcuacaaggacuggauccuguggaucuccuucgccaucagcugcuuccugcucugcgucgcccugcugggcuucaucaugugggcgugccagaaggggaacauccggugcaacaucugcaucuga

SEQ ID NO: 77322 - RNA, 1701 nt, Artificial Sequence
  derived and/or modified CDS sequence (opt1) from hemagglutinin__InfluenzaA__ALE31777
augaagaccaucaucgcccugagcuacauccucugccugguguucgcccagaagauccccggcaacgacaacuccaccgcgacgcugugccucgggcaccacgccgucccgaacggcaccaucgugaagaccaucaccaacgaccgcaucgaggugacgaacgccaccgagcugguccagaacagcuccaucggggagaucugcgacagcccccaccagauccuggacggcgagaacugcacccucaucgacgcccugcugggggacccccagugcgacggcuuccagaacaagaagugggaccucuucguggagcgguccaaggccuacagcaacugcuaccccuacgacgugccggacuacgcgucccugcgcagccuggucgccuccagcggcacccucgaguucaacaacgaguccuucaacuggacgggggugacccagaacggcaccagcuccgccugcauccggcgcagcuccagcuccuucuucagccggcugaacuggcugacccaccucaacuacacguaccccgcccugaacgugaccaugcccaacaacgagcaguucgacaagcuguacaucuggggcguccaccaccccgggaccgacaaggaccagaucuuccucuacgcgcaguccagcgggcgcaucaccgugagcacgaagcggucccagcaggccguggucccgaacaucggcagccgcccccggauccgcgacauccccucccggaucagcaucuacuggaccaucgugaagcccggcgacauccugcugaucaacuccaccgggaaccucaucgccccgcgcggcuacuucaagauccggagcgggaaguccagcaucaugcgcuccgacgcccccaucggcaagugcaagagcgagugcaucacccccaacggcuccauccccaacgacaagccguuccagaacgugaaccggaucacguacggggccugcccccgcuacgucaagcacagcacccugaagcuggcgaccggcaugcggaacgugcccgagaagcagacccgcgggaucuucggcgccaucgccggguucaucgagaacggcugggagggcaugguggacgggugguacggcuuccggcaccagaacuccgaggggcgcggccaggccgccgaccucaagagcacgcaggcggccaucgaccagaucaacgggaagcugaaccggcugaucggcaagaccaacgagaaguuccaccagaucgagaaggaguucuccgaggucgagggccgcauccaggaccucgagaaguacguggaggacaccaagaucgaccuguggagcuacaacgccgagcugcucguggcccuggagaaccagcacaccaucgaccugacggacuccgagaugaacaagcuguucgagaagaccaagaagcagcuccgcgagaacgccgaggacauggggaacggcugcuucaagaucuaccacaagugcgacaacgcgugcaucgggagcauccggaacggcaccuacgaccacaacgucuaccgcgacgaggcccugaacaaccgguuccagaucaaggggguggagcucaaguccggcuacaaggacuggauccuguggaucagcuucgccaucagcugcuuccugcucugcguggcccugcugggcuucaucaugugggccugccagaaggggaacauccgcugcaacaucugcaucuga

SEQ ID NO: 77323 - RNA, 1701 nt, Artificial Sequence; identical to SEQ ID NO: 77071
  derived and/or modified CDS sequence (opt1) from hemagglutinin__InfluenzaA__ALE31778

SEQ ID NO: 77324 - RNA, 1701 nt, Artificial Sequence; identical to SEQ ID NO: 76465
  derived and/or modified CDS sequence (opt1) from hemagglutinin__InfluenzaA__ALE31779

SEQ ID NO: 77325 - RNA, 1701 nt, Artificial Sequence
  derived and/or modified CDS sequence (opt1) from hemagglutinin__InfluenzaA__ALE31780
augaagaccaucaucgcccugagcuacauccucugccugguguucgcccagaagauccccggcaacgacaacuccaccgcgacgcugugccucgggcaccacgccgucccgaacggcaccaucgugaagaccaucaccaacgaccgcaucgaggugacgaacgccaccgagcugguccagaacagcuccaucggggagaucugcgacagcccccaccagauccuggacggcgagaacugcacccucaucgacgcccugcugggggacccccagugcgacggcuuccagaacaagaagugggaccucuucguggagcgguccaaggcccacagcaacugcuaccccuacgacgugccggacuacgcgucccugcgcagccuggucgccuccagcggcacccucgaguucaacaacgaguccuucaacuggacgggggugacccagaacggcaccagcuccgccugcauccggcgcagcuccagcuccuucuucagccggcugaacuggcugacccaccucaacuacacguaccccgcccugaacgugaccaugcccaacaacgagcaguucgacaagcuguacaucuggggcguccaccaccccgggaccgacaaggaccagaucuuccucuacgcgcaguccagcgggcgcaucaccgugagcacgaagcggucccagcaggccgugaucccgaacaucggcagccgcccccggauccgcgacauccccucccggaucagcaucuacuggaccaucgucaagcccggcgacauccugcugaucaacuccaccgggaaccucaucgccccgcgcggcuacuucaagauccggagcgggaaguccagcaucaugcgcaccgacgcccccaucggcaagugcaaguccgagugcaucacgcccaacggcagcauccccaacgacaagccguuccagaacgugaaccggaucaccuacggggccugcccccgcuacgugaagcacuccacccugaagcuggcgaccggcaugcggaacguccccgagaagcagacgcgcgggaucuucggcgccaucgccggguucaucgagaacggcugggagggcaugguggacgggugguacggcuuccggcaccagaacagcgaggggcgcggccaggccgccgaccucaaguccacccaggcggccaucgaccagaucaacgggaagcugaaccggcugaucggcaagaccaacgagaaguuccaccagaucgagaaggaguucagcgagguggagggccgcauccaggaccucgagaaguacgucgaggacaccaagaucgaccugugguccuacaacgccgagcugcucguggcccuggagaaccagcacacgaucgaccugaccgacagcgagaugaacaagcuguucgagaagaccaagaagcagcuccgcgagaacgccgaggacauggggaacggcugcuucaagaucuaccacaagugcgacaacgcgugcaucggguccauccggaacggcaccuacgaccacaacguguaccgcgacgaggcccugaacaaccgguuccagaucaagggggucgagcucaagagcggcuacaaggacuggauccuguggaucuccuucgccaucagcugcuuccugcucugcguggcccugcugggcuucaucaugugggccugccagaaggggaacauccgcugcaacaucugcaucuga

SEQ ID NO: 77326 - RNA, 1701 nt, Artificial Sequence
  derived and/or modified CDS sequence (opt1) from hemagglutinin__InfluenzaA__ALE31781
augaagaccaucaucgcccugagcuacauccucugccugguguucgcccagaagauccccggcaacgacaacuccaccgcgacgcugugccucgggcaccacgccgucccgaacggcaccaucgugaagaccaucaccaacgaccgcaucgaggugacgaacgccaccgagcugguccagaacagcuccaucggggagaucugcggcagcccccaccagauccuggacggggagaacugcacccucaucgacgcccugcugggcgacccccagugcgacggcuuccagaacaagaagugggaccucuucguggagcgguccaaggccuacagcaacugcuaccccuacgacgugccggacuacgcgucccugcgcagccuggucgccuccagcgggacccucgaguucaacaacgaguccuucaacuggacgggcgugacccagaacgggaccagcuccgccugcauccgcaagagcuccagcuccuucuucagcaagcugaacuggcugacccaccucaacuacacguaccccgcccugaacgugaccaugcccaacaacgagcaguucgacaagcuguacaucuggggcguccaccaccccgggaccgacaaggaccagaucuuccucuacgcgcgguccagcggccggaucaccgugagcacgaagcgcucccagcaggccgugaucccgaacaucggcagccggccccgcauccgggacauccccucccgcaucagcaucuacuggaccaucgucaagcccggggacauccugcugaucaacuccaccggcaaccucaucgccccgcggggguacuucaagauccgcagcggcaaguccagcaucaugcgguccgacgcccccaucggcaagugcaagagcgagugcaucacccccaacggguccauccccaacgacaagccguuccagaacgugaaccgcaucacguacggcgccugcccccgguacgugaagcacagcacccugaagcuggcgaccgggaugcgcaacguccccgagaagcagacccggggcaucuucggggccaucgccggcuucaucgagaacggcugggaggggaugguggacggcugguacggguuccgccaccagaacuccgagggccgggggcaggccgccgaccucaagagcacgcaggcggccaucgaccagaucaacggcaagcugaaccgccugaucggcaagaccaacgagaaguuccaccagaucgagaaggaguucuccgagguggaggggcggauccaggaccucgagaaguacgucgaggacaccaagaucgaccuguggagcuacaacgccgagcugcucguggcccuggagaaccagcacaccaucgaccugacggacuccgagaugaacaagcuguucgagaagaccaagaagcagcuccgcgagaacgccgaggacaugggcaacgggugcuucaagaucuaccacaagugcgacaacgcgugcaucggcagcauccgcaacgggaccuacgaccacaacguguaccgggacgaggcccugaacaaccgcuuccagaucaagggcgucgagcucaaguccggcuacaaggacuggauccuguggaucagcuucgccaucagcugcuuccugcucugcguggcccugcugggguucaucaugugggccugccagaagggcaacauccggugcaacaucugcaucuga

SEQ ID NO: 77327 - RNA, 1701 nt, Artificial Sequence
  derived and/or modified CDS sequence (opt1) from hemagglutinin__InfluenzaA__ALE31782
augaagaccaucaucgcccugagcuacauccucugccugguguucgcccagaagauccccggcaacgacaacuccaccgcgacgcugugccucgggcaccacgccgucccgaacggcaccaucgugaagaccaucaccaacgaccgcaucgaggugacgaacgccaccgagcugguccagaacagcuccaucggggagaucugcgacagcccccaccagauccuggacggcgagaacugcacccucaucgacgcccugcugggggacccccagugcgacggcuuccagaacaagaagugggaccucuucguggagcgguccaaggccuacagcaacugcuaccccuacgacgugccggacuacgucucccugcgcagccugguggcguccagcggcacccucgaguucaacaacgaguccuucaacuggacgggggugacccagaacggcaccagcuccgccugcauccggcgcagcuccagcuccuucuucagccggcugaacuggcugacccaccucaacuacacguaccccgcccugaacgucaccaugcccaacaacgagcaguucgacaagcuguacaucuggggcgugcaccaccccgggaccgacaaggaccagaucuuccucuacgcccaguccagcgggcgcaucaccgugagcacgaagcggucccagcaggcggucaucccgaacaucggcagccgcccccggauccgcgacauccccucccggaucagcaucuacuggaccaucgugaagcccggcgacauccugcugaucaacuccaccgggaaccucaucgccccgcgcggcuacuucaagauccggagcgggaaguccagcaucaugcgcuccgacgcccccaucggcaagugcaagagcgagugcaucacccccaacggcuccauccccaacgacaagccguuccagaacgugaaccggaucacguacggggccugcccccgcuacgucaagcagagcacccugaagcuggccaccggcaugcggaacgugcccgagaagcagacccgcgggaucuucggcgcgaucgccggguucaucgagaacggcugggagggcaugguggacgggugguacggcuuccggcaccagaacuccgaggggcgcggccaggccgccgaccucaagagcacgcaggccgcgaucgaccagaucaacgggaagcugaaccggcugaucggcaagaccaacgagaaguuccaccagaucgagaaggaguucuccgaggucgagggccgcauccaggaccucgagaaguacguggaggacaccaagaucgaccuguggagcuacaacgccgagcugcucguggcccuggagaaccagcacaccaucgaccugacggacuccgagaugaacaagcuguucgagaagaccaagaagcagcuccgcgagaacgccgaggacauggggaacggcugcuucaagaucuaccacaagugcgacaacgccugcaucgggagcauccggaacggcaccuacgaccacaacgucuaccgcgacgaggcgcugaacaaccgguuccagaucaaggggguggagcucaaguccggcuacaaggacuggauccuguggaucagcuucgccaucagcugcuuccugcucugcguggcccugcugggcuucaucaugugggccugccagaaggggaacauccgcugcaacaucugcaucuga

SEQ ID NO: 77328 - RNA, 1701 nt, Artificial Sequence
  derived and/or modified CDS sequence (opt1) from hemagglutinin__InfluenzaA__ALE31783
augaagaccaucaucgcccugagcuacauccucugccugguguucgcccagaagauccccggcaacgacaacuccaccgcgacgcugugccucgggcaccacgccgucccgaacggcaccaucgugaagaccaucaccaacgaccgcaucgaggugacgaacgccaccgagcugguccagaacagcuccaucggggagaucugcgacagcccccaccagauccuggacggcgagaacugcacccucaucgacgcccugcugggggacccccagugcgacggcuuccagaacaagaagugggaccucuucguggagcgguccaaggccuacagcaacugcuaccccuacgacgugccggacuacgcgucccugcgcagccuggucgccuccagcggcacccucgaguucaacaacgaguccuucaacuggacgggggugacccagaacggcaccagcuccgccugcauccggcgcagcuccagcuccuucuucagccggcugaacuggcugacccaccucaacuacacguaccccgcccugaacgugaccguccccaacaacgagcaguucgacaagcuguacaucuggggcgugcaccaccccgggaccgacaaggaccagaucuuccucuacgcgcaguccagcgggcgcaucaccgugagcacgaagcggucccagcaggccgucaucccgaacaucggcagccgcccccggauccgcgacauccccucccggaucagcaucuacuggaccaucgugaagcccggcgacauccugcugaucaacuccaccgggaaccucaucgccccgcgcggcuacuucaagauccggagcgggaaguccagcaucaugcgcuccgacgcccccaucggcaagugcaagagcgagugcaucacccccaacggcuccauccccaacgacaagccguuccagaacgugaaccggaucacguacggggccugcccccgcuacgucaagcacagcacccugaagcuggcgaccggcaugcggaacgugcccgagaagcagacccgcgggaucuucggcgccaucgccggguucaucgagaacggcugggagggcaugguggacgggugguacggcuuccggcaccagaacuccgaggggcgcggccaggccgccgaccucaagagcacgcaggcggccaucgaccagaucaacgggaagcugaaccggcugaucggcaagaccaacgagaaguuccaccagaucgagaaggaguucuccgaggucgagggccgcauccaggaccucgagaaguacguggaggacaccaagaucgaccuguggagcuacaacgccgagcugcucguggcccuggagaaccagcacaccaucgaccugacggacuccgagaugaacaagcuguucgagaagaccaagaagcagcuccgcgagaacgccgaggacauggggaacggcugcuucaagaucuaccacaagugcgacaacgcgugcaucgggagcauccggaacggcaccuacgaccacaacgucuaccgcgacgaggcccugaacaaccgguuccagaucaaggggguggagcucaaguccggcuacaaggacuggauccuguggaucagcuucgccaucagcugcuuccugcucugcguggcccugcugggcuucaucaugugggccugccagaaggggaacauccgcugcaacaucugcaucuga

SEQ ID NO: 77329 - RNA, 1701 nt, Artificial Sequence; identical to SEQ ID NO: 77081
  derived and/or modified CDS sequence (opt1) from hemagglutinin__InfluenzaA__ALE31784

SEQ ID NO: 77330 - RNA, 1701 nt, Artificial Sequence; identical to SEQ ID NO: 76465
  derived and/or modified CDS sequence (opt1) from hemagglutinin__InfluenzaA__ALE31785

SEQ ID NO: 77331 - RNA, 1701 nt, Artificial Sequence; identical to SEQ ID NO: 77071
  derived and/or modified CDS sequence (opt1) from hemagglutinin__InfluenzaA__ALE31786

SEQ ID NO: 77332 - RNA, 1701 nt, Artificial Sequence; identical to SEQ ID NO: 77123
  derived and/or modified CDS sequence (opt1) from hemagglutinin__InfluenzaA__ALE31787

SEQ ID NO: 77333 - RNA, 1701 nt, Artificial Sequence; identical to SEQ ID NO: 76565
  derived and/or modified CDS sequence (opt1) from hemagglutinin__InfluenzaA__ALE31788

SEQ ID NO: 77334 - RNA, 1701 nt, Artificial Sequence; identical to SEQ ID NO: 76465
  derived and/or modified CDS sequence (opt1) from hemagglutinin__InfluenzaA__ALE31789

SEQ ID NO: 77335 - RNA, 1701 nt, Artificial Sequence; identical to SEQ ID NO: 77080
  derived and/or modified CDS sequence (opt1) from hemagglutinin__InfluenzaA__ALE31790

SEQ ID NO: 77336 - RNA, 1701 nt, Artificial Sequence; identical to SEQ ID NO: 77201
  derived and/or modified CDS sequence (opt1) from hemagglutinin__InfluenzaA__ALE31791

SEQ ID NO: 77337 - RNA, 1701 nt, Artificial Sequence; identical to SEQ ID NO: 77101
  derived and/or modified CDS sequence (opt1) from hemagglutinin__InfluenzaA__ALE31792

SEQ ID NO: 77338 - RNA, 1701 nt, Artificial Sequence
  derived and/or modified CDS sequence (opt1) from hemagglutinin__InfluenzaA__ALE31793
augaagaccaucaucgcccugagcuacauccucugccugguguucgcccagaagauccccggcaacgacaacuccaccgcgacgcugugccucgggcaccacgccgucccgaacggcaccaucgugaagaccaucaccaacgaccgcaucgaggugacgaacgccaccgagcugguccagaacagcuccaucggggagaucugcgacagcccccaccagauccuggacggcgagaacugcacccucaucgacgcccugcugggggacccccagugcgacggcuuccagaacaagaagugggaccucuucguggagcgguccaaggccuacagcaacugcuaccccuacgacgugccggacuacgcgucccugcgcagccuggucgccuccagcggcacccucgaguucaacaacgaguccuucaacuggacgggggugacccagaacggcaccagcuccgccugcauccggcgcagcuccagcuccuucuucagccggcugaacuggcugacccaccucaacuacacguaccccgcccugaacgugaccaugcccaacaacgagcaguucgacaagcuguacaucuggggcguccaccaccccgggaccgacaaggaccagaucucccucuacgcgcagagcagcgggcgcaucaccguguccacgaagcggagccagcaggccgugaucccgaacaucggcucccgcccccggauccgcgacauccccagccggaucuccaucuacuggaccaucgucaagcccggcgacauccugcugaucaacagcaccgggaaccucaucgccccgcgcggcuacuucaagauccgguccggcaagagcuccaucaugcgcagcgacgcccccaucgggaagugcaaguccgagugcaucacccccaacggcagcauccccaacgacaagccguuccagaacgugaaccggaucacguacggggccugcccccgcuacgugaagcacuccacccugaagcuggcgaccggcaugcggaacguccccgagaagcagacccgcgggaucuucggcgccaucgccggguucaucgagaacggcugggagggcaugguggacgggugguacggcuuccggcaccagaacagcgaggggcgcggccaggccgccgaccucaaguccacgcaggcggccaucgaccagaucaacgggaagcugaaccggcugaucggcaagaccaacgagaaguuccaccagaucgagaaggaguucagcgagguggagggccgcauccaggaccucgagaaguacgucgaggacaccaagaucgaccugugguccuacaacgccgagcugcucguggcccuggagaaccagcacaccaucgaccugacggacagcgagaugaacaagcuguucgagaagaccaagaagcagcuccgcgagaacgccgaggacauggggaacggcugcuucaagaucuaccacaagugcgacaacgcgugcaucggguccauccggaacggcaccuacgaccacaacguguaccgcgacgaggcccugaacaaccgguuccagaucaagggggucgagcucaagagcggcuacaaggacuggauccuguggaucagcuucgccaucuccugcuuccugcucugcguggcccugcugggcuucaucaugugggccugccagaaggggaacauccgcugcaacaucugcaucuga

SEQ ID NO: 77339 - RNA, 1701 nt, Artificial Sequence; identical to SEQ ID NO: 76465
  derived and/or modified CDS sequence (opt1) from hemagglutinin__InfluenzaA__ALE31794

SEQ ID NO: 77340 - RNA, 1701 nt, Artificial Sequence; identical to SEQ ID NO: 76465
  derived and/or modified CDS sequence (opt1) from hemagglutinin__InfluenzaA__ALE31795

SEQ ID NO: 77341 - RNA, 1701 nt, Artificial Sequence; identical to SEQ ID NO: 76465
  derived and/or modified CDS sequence (opt1) from hemagglutinin__InfluenzaA__ALE31796

SEQ ID NO: 77342 - RNA, 1701 nt, Artificial Sequence; identical to SEQ ID NO: 77123
  derived and/or modified CDS sequence (opt1) from hemagglutinin__InfluenzaA__ALE31797

SEQ ID NO: 77343 - RNA, 1701 nt, Artificial Sequence; identical to SEQ ID NO: 77123
  derived and/or modified CDS sequence (opt1) from hemagglutinin__InfluenzaA__ALE31798

SEQ ID NO: 77344 - RNA, 1701 nt, Artificial Sequence; identical to SEQ ID NO: 76465
  derived and/or modified CDS sequence (opt1) from hemagglutinin__InfluenzaA__ALE31799

SEQ ID NO: 77345 - RNA, 1701 nt, Artificial Sequence; identical to SEQ ID NO: 77071
  derived and/or modified CDS sequence (opt1) from hemagglutinin__InfluenzaA__ALE31800

SEQ ID NO: 77346 - RNA, 1701 nt, Artificial Sequence; identical to SEQ ID NO: 76465
  derived and/or modified CDS sequence (opt1) from hemagglutinin__InfluenzaA__ALE31801

SEQ ID NO: 77347 - RNA, 1701 nt, Artificial Sequence; identical to SEQ ID NO: 76465
  derived and/or modified CDS sequence (opt1) from hemagglutinin__InfluenzaA__ALE31802

SEQ ID NO: 77348 - RNA, 1701 nt, Artificial Sequence; identical to SEQ ID NO: 77071
  derived and/or modified CDS sequence (opt1) from hemagglutinin__InfluenzaA__ALE31803

SEQ ID NO: 77349 - RNA, 1701 nt, Artificial Sequence; identical to SEQ ID NO: 77022
  derived and/or modified CDS sequence (opt1) from hemagglutinin__InfluenzaA__ALE31805

SEQ ID NO: 77350 - RNA, 1701 nt, Artificial Sequence
  derived and/or modified CDS sequence (opt1) from hemagglutinin__InfluenzaA__ALE31806
augaagaccaucaucgcccugagcuacauccucugccugguguucgcccagaagauccccggcaacgacaacuccaccgcgacgcugugccucgggcaccacgccgucccgaacggcaccaucgugaagaccaucaccaacgaccgcaucgaggugacgaacgccaccgagcugguccagaacagcuccaucggggagaucugcgacagcccccaccagauccuggacggcgagaacugcacccucaucgacgcccugcugggggacccccagugcgacggcuuccagaacaagaagugggaccucuucguggagcgguccaaggccuacagcaacugcuaccccuacgacgugccggacuacgcgucccugcgcagccuggucgccuccagcggcacccucgaguucaacaacgaguccuucaacuggacgggggugacccagaacggcaccagcuccgccugcauccggcgcagcuccagcuccuucuucagccggcugaacuggcugacccaccucaacuacacguaccccgcccugaacgugaccaugcccaacaacgagcaguucgacaagcuguacaucuggggcguccaccaccccgggaccgacaaggaccagaucuuccucuacgcgcaguccagcgggcgcaucaccgugagcacgaagcggucccagcaggccgugaucccgaacaucggcagccgcccccggauccgcgacauccccucccggaucagcaucuacuggaccaucgucaagcccggcgacacccugcugaucaacuccaccgggaaccucaucgccccgcgcggcuacuucaagauccggagcgggaaguccagcaucaugcgcuccgacgcccccaucggcaagugcaagagcgagugcaucacgcccaacggcuccauccccaacgacaagccguuccagaacgugaaccggaucaccuacggggccugcccccgcuacgugaagcacagcacccugaagcuggcgaccggcaugcggaacguccccgagaagcagacgcgcgggaucuucggcgccaucgccggguucaucgagaacggcugggagggcaugguggacgggugguacggcuuccggcaccagaacuccgaggggcgcggccaggccgccgaccucaagagcacccaggcggccaucgaccagaucaacgggaagcugaaccggcugaucggcaagaccaacgagaaguuccaccagaucgagaaggaguucuccgagguggagggccgcauccaggaccucgagaaguacgucgaggacaccaagaucgaccuguggagcuacaacgccgagcugcucguggcccuggagaaccagcacacgaucgaccugaccgacuccgagaugaacaagcuguucgagaagaccaagaagcagcuccgcgagaacgccgaggacauggggaacggcugcuucaagaucuaccacaagugcgacaacgcgugcaucgggagcauccggaacggcaccuacgaccacaacguguaccgcgacgaggcccugaacaaccgguuccagaucaagggggucgagcucaaguccggcuacaaggacuggauccuguggaucagcuucgccaucagcugcuuccugcucugcguggcccugcugggcuucaucaugugggccugccagaaggggaacauccgcugcaacaucugcaucuga

SEQ ID NO: 77351 - RNA, 1701 nt, Artificial Sequence
  derived and/or modified CDS sequence (opt1) from hemagglutinin__InfluenzaA__ALE31807
augaagaccaucaucgcccugagcuacauccucugccugguguucgcccagaagcugcccggcaacgacaacuccaccgcgacgcucugccuggggcaccacgccgucccgaacggcaccaucgugaagaccaucaccaacgaccgcaucgaggugacgaacgccaccgagcugguccagaacagcuccaucggggagaucugcgacagcccccaccagauccucgacggcgagaacugcacccugaucgacgcccugcucggggacccccagugcgacggcuuccagaacaagaagugggaccuguucguggagcgguccaaggccuacagcaacugcuaccccuacgacgugccggacuacgcgucccugcgcagccucgucgccuccagcggcacccuggaguucaacaacgaguccuucaacuggacgggggugacccagaacggcaccagcuccgccugcauccggcgcagcuccagcuccuucuucagccggcugaacuggcucacccaccugaacuucacguaccccgcccugaacgugaccaugcccaacaacgagcaguucgacaagcucuacgucuggggcgugcaccaccccgggaccgacaaggaccagaucuuccuguacgcgcaguccagcgggcgcaucaccgugagcacgaagcggucccagcaggccgucaucccgaacaucggcagccgcccccggauccgcaacauccccucccggaucagcaucuacuggaccaucgugaagcccggcgacauccugcucaucaacuccaccgggaaccugaucgccccgcgcggcuacuucaagauccggagcgggaaguccagcaucaugcgcuccgacgcccccaucggcaagugcaagagcgagugcaucacccccaacggcuccauccccaacgacaagccguuccagaacgugaaccggaucacguacggggccugcccccgcuacgucaagcacagcacccugaagcucgcgaccggcaugcggaacgugcccgagaagcagacccgcgggaucuucggcgccaucgccggguucaucgagaacggcugggagggcaugguggacgggugguacggcuuccggcaccagaacuccgaggggcgcggccaggccgccgaccucaagagcacgcaggcggccaucgaccagaucaacgggaagcugaaccggcugaucggcaagaccaacgagaaguuccaccagaucgagaaggaguucuccgaggucgagggccgcauccaggaccuggagaaguacguggaggacaccaagaucgaccuguggagcuacaacgccgagcuccugguggcccuggagaaccagcacaccaucgaccucacggacuccgagaugaacaagcuguucgagaagaccaagaagcagcugcgcgagaacgccgaggacauggggaacggcugcuucaagaucuaccacaagugcgacaacgcgugcaucgggagcauccggaacggcaccuacgaccacaacgucuaccgcgacgaggcccucaacaaccgguuccagaucaaggggguggagcugaaguccggcuacaaggacuggauccuguggaucagcuucgccaucagcugcuuccuccugugcguggcccugcucggcuucaucaugugggccugccagaaggggaacauccgcugcaacaucugcaucuga

SEQ ID NO: 77352 - RNA, 1701 nt, Artificial Sequence
  derived and/or modified CDS sequence (opt1) from hemagglutinin__InfluenzaA__ALE31808
augaagaccaucaucgcccugggcuacauccucugccugguguucgcccagaagauccccgggaacgacaacagcaccgcgacgcugugccucggccaccacgccgucccgaacgggaccaucgugaagaccaucaccaacgaccgcaucgaggugacgaacgccaccgagcugguccagaacuccagcaucggcgagaucugcgacagcccccacaagauccuggacggggagaacugcacccucaucgacgcccugcugggcgacccccagugcgacggcuuccagaacaagaagugggaccucuucguggagcgguccaaggccuacuccaacugcuaccccuacgacgugccggacuacgcgagccugcgcucccuggucgccagcuccgggacccucgaguucaacaacgagagcuucaacuggacgggcgugacccagaacgggaccuccagcgccugcauccggcgcuccagcuccagcuucuucucccggcugaacuggcugacccaccucaacuacacguaccccgcccugaacgugaccaugcccaacaacgagcaguucgacaagcuguacaucuggggcguccaccaccccgggaccgacaaggaccagaucuuccucuacgcgcagagcuccggccgcaucaccgugagcacgaagcggagccagcaggccgugaucccgaacaucggcucccgcccccggauccgcgacauccccagccggaucuccaucuacuggaccaucgucaagcccggggacauccugcugaucaacagcaccggcaaccucaucgccccgcgcggguacuucaagauccgguccggcaagagcuccaucaugcgcagcgacgcccccaucggcaagugcaaguccgagugcaucacccccaacgggagcauccccaacgacaagccguuccagaacgugaaccggaucacguacggcgccugcccccgcuacgugaagcacuccacccugaagcuggcgaccgggaugcggaacguccccgagaagcagacccgcggcaucuucggggccaucgccggcuucaucgagaacggcugggaggggaugguggacggcugguacggguuccggcaccagaacagcgagggccgcgggcaggccgccgaccucaaguccacgcaggcggccaucgaccagaucaacggcaagcugaaccggcugaucggcaagaccaacgagaaguuccaccagaucgagaaggaguucagcgagguggaggggcgcauccaggaccucgagaaguacgucgaggacaccaagaucgaccugugguccuacaacgccgagcugcucguggcccuggagaaccagcacaccaucgaccugacggacagcgagaugaacaagcuguucgagaagaccaagaagcagcuccgcgagaacgccgaggacaugggcaacgggugcuucaagaucuaccacaagugcgacaacgcgugcaucggcuccauccggaacgggaccuacgaccacaacguguaccgcgacgaggcccugaacaaccgguuccagaucaagggcgucgagcucaagagcggcuacaaggacuggauccuguggaucuccuucgccaucagcugcuuccugcucugcguggcccugcugggguucaucaugugggccugccagaagggcaacauccgcugcaacaucugcaucuga

SEQ ID NO: 77353 - RNA, 1701 nt, Artificial Sequence; identical to SEQ ID NO: 76465
  derived and/or modified CDS sequence (opt1) from hemagglutinin__InfluenzaA__ALE31810

SEQ ID NO: 77354 - RNA, 1701 nt, Artificial Sequence; identical to SEQ ID NO: 76465
  derived and/or modified CDS sequence (opt1) from hemagglutinin__InfluenzaA__ALE31812

SEQ ID NO: 77355 - RNA, 1701 nt, Artificial Sequence
  derived and/or modified CDS sequence (opt1) from hemagglutinin__InfluenzaA__ALE31814
augaagaccaucaucgcccugagcuacauccucugccugguguucgcccagaagcugcccggcaacgacaacuccaccgcgacgcucugccuggggcaccacgccgucccgaacggcaccaucgugaagaccaucaccaacgaccgcaucgaggugacgaacgccaccgagcugguccagaacagcuccaucggggagaucugcgacagcccccaccagauccucgacggcaagaacugcacccugaucgacgcccugcucggggacccccagugcgacggcuuccagaacaagaagugggaccuguucguggagcgguccaaggcccacagcaacugcuaccccuacgacgugccggacuacgcgucccugcgcagccucgucgccuccagcggcacccuggaguucaacaacgaguccuucaacugggccggggugacgcagaacggcaccagcuccagcugcauccggggguccaacagcuccuucuucagccgccugaacuggcucacccaccugaacuccaaguaccccgcccugaacgugaccaugcccaacaacgagcaguucgacaagcucuacaucuggggcguccaccaccccgggacggacaaggaccagaucuuccuguacgcgcagccgagcggccggaucaccgugagcaccaagcgcucccagcaggccgugauccccaacaucggcagccggccccgcauccgggacauccccucccgcaucagcaucuacuggaccaucgucaagccgggggacauccugcucaucaacuccacgggcaaccugaucgcgccccggggguacuucaagauccgcagcggcaaguccagcaucaugcgguccgacgcccccaucggcaagugcaagagcgagugcaucacccccaacggguccaucccgaacgacaagcccuuccagaacgugaaccgcaucaccuacggcgccugcccccgguacgugaagcagagcacccugaagcucgccacggggaugcgcaacguccccgagcggcagacccgcggcaucuucggggccaucgccggcuucaucgagaacggcugggaggggaugguggacggcugguacggguuccggcaccagaacuccgagggccgcgggcaggccgccgaccucaagagcacccaggcggccaucgaccagaucaacggcaagcugaaccggcugaucggcaagaccaacgagaaguuccaccagaucgagaaggaguucuccgagguggaggggcgcauccaggaccuggagaaguacgucgaggacacgaagaucgaccuguggagcuacaacgccgagcuccugguggcccuggagaaccagcacaccaucgaccucaccgacuccgagaugaacaagcuguucgagaagaccaagaagcagcugcgcgagaacgccgaggacaugggcaacgggugcuucaagaucuaccacaagugcgacaacgcgugcaucggcagcauccggaacgggacguacgaccacgacguguaccgcgacgaggcccucaacaaccgguuccagaucaagggcgucgagcugaaguccggcuacaaggacuggauccuguggaucagcuucgccaucagcugcuuccuccugugcguggcccugcucggguucaucaugugggccugccagaagggcaacauccgcugcaacaucugcaucuga

SEQ ID NO: 77356 - RNA, 1701 nt, Artificial Sequence; identical to SEQ ID NO: 77355
  derived and/or modified CDS sequence (opt1) from hemagglutinin__InfluenzaA__ALE31815

SEQ ID NO: 77357 - RNA, 1701 nt, Artificial Sequence; identical to SEQ ID NO: 76465
  derived and/or modified CDS sequence (opt1) from hemagglutinin__InfluenzaA__ALE31818

SEQ ID NO: 77358 - RNA, 1701 nt, Artificial Sequence
  derived and/or modified CDS sequence (opt1) from hemagglutinin__InfluenzaA__ALE31819
augaagaccaucaucgcccugagcuacauccucugccugguguucgcccagaagauccccggcaacgacaacuccaccgcgacgcugugccucgggcaccacgccgucccgaacggcaccaucgugaagaccaucaccaacgaccgcaucgaggugacgaacgccaccgagcugguccagaacagcuccaucggggagaucugcgacagcccccaccagauccuggacggcgagaacugcacccucaucgacgcccugcugggggacccccagugcgacggcuuccagaacaagaagugggaccucuucguggagcgguccaaggccuacagcaacugcuaccccuacgacgugccggacuacgcgucccugcgcagccuggucgccuccagcggcacccucgaguucaacaacgaguccuucaacuggacgggggugacccagaacggcaccagcuccgccugcauccgggggagcuccagcuccuucuucagccgccugaacuggcugacccaccucaacuacacguaccccgcccugaacgugaccaugcccaacaaggagcaguucgacaagcuguacaucuggggcguccaccaccccgggaccgacaaggaccagaucuuccucuacgcgcaguccagcggccggaucaccgugagcacgaagcgcucccagcaggccgugaucccgaacaucggcagccggccccgcauccgggacauccccucccgcaucagcaucuacuggaccaucgucaagcccggggacauccugcugaucaacuccaccggcaaccucaucgccccgcggggguacuucaagauccgcagcggcaaguccagcaucaugcgguccgacgcccccaucggcaagugcaagagcgagugcaucacccccaacggguccauccccaacgacaagccguuccagaacgugaaccgcaucacguacggcgccugcccccgguacgugaagcacagcacccugaagcuggcgaccgggaugcgcaacguccccgagaagcagacccggggcaucuucggggccaucgccggcuucaucgagaacggcugggaggggaugguggacggcugguacggguuccgccaccagaacuccgagggccgggggcaggccgccgaccucaagagcacgcaggcggccaucgaccagaucaacggcaagcugaaccgccugaucggcaagaccaacgagaaguuccaccagaucgagaaggaguucuccgagguggaggggcggauccaggaccucgagaaguacgucgaggacaccaagaucgaccuguggagcuacaacgccgagcugcucguggcccuggagaaccagcacaccaucgaccugacggacuccgagaugaacaagcuguucgagaagaccaagaagcagcuccgcgagaacgccgaggacaugggcaacgggugcuucaagaucuaccacaagugcgacaacgcgugcaucggcagcauccgcaacgggaccuacgaccacaacguguaccgggacgaggcccugaacaaccgcuuccagaucaagggcgucgagcucaaguccggcuacaaggacuggauccuguggaucagcuucgccaucagcugcuuccugcucugcguggcccugcugggguucaucaugugggccugccagaagggcaacauccggugcaacaucugcaucuga

SEQ ID NO: 77359 - RNA, 1701 nt, Artificial Sequence; identical to SEQ ID NO: 77009
  derived and/or modified CDS sequence (opt1) from hemagglutinin__InfluenzaA__ALE31820

SEQ ID NO: 77360 - RNA, 1701 nt, Artificial Sequence
  derived and/or modified CDS sequence (opt1) from hemagglutinin__InfluenzaA__ALE31821
augaagaccaucaucgcccugagcuacacccucugccugguguucgcccagaagauccccggcaacgacaacuccacggcgacccugugccucgggcaccacgccgucccgaacggcaccaucgugaagaccaucacgaacgaccgcaucgaggugaccaacgccaccgagcugguccagaacagcuccaucggggagaucugcgacagcccccaccagauccuggacggcgagaacugcacccucaucgacgcccugcugggggacccccagugcgacggcuuccagaacaagaagugggaccucuucguggagcgguccaaggcccacagcaacugcuaccccuacgacgugccggacuacgcgucccugcgcagccuggucgccuccagcggcacgcucgaguucaacaacgaguccuucaacuggaccggggugacccagaacggcaccagcuccgccugcauccggcgcagcuccagcuccuucuucagccggcugaacuggcugacgcaccucaacuacaccuaccccgcccugaacgugaccaugcccaacaacgagcaguucgacaagcuguacaucuggggcguccaccaccccgggaccgacaaggaccagaucuuccucuacgcgcaguccagcgggcgcaucacggugagcaccaagcggucccagcaggccgugaucccgaacaucggcagccgcccccggauccgcgacauccccucccggaucagcaucuacuggaccaucgucaagcccggcgacauccugcugaucaacuccaccgggaaccucaucgccccgcgcggcuacuucaagauccggagcgggaaguccagcaucaugcgcuccgacgcccccaucggcaagugcaagagcgagugcaucacgcccaacggcuccauccccaacgacaagccguuccagaacgugaaccggaucaccuacggggccugcccccgcuacgugaagcacagcacccugaagcuggcgaccggcaugcggaacguccccgagaagcagacgcgcgggaucuucggcgccaucgccggguucaucgagaacggcugggagggcaugguggacgggugguacggcuuccggcaccagaacuccgaggggcgcggccaggccgccgaccucaagagcacccaggcggccaucgaccagaucaacgggaagcugaaccggcugaucggcaagaccaacgagaaguuccaccagaucgagaaggaguucuccgagguggagggccgcauccaggaccucgagaaguacgucgaggacaccaagaucgaccuguggagcuacaacgccgagcugcucguggcccuggagaaccagcacacgaucgaccugaccgacuccgagaugaacaagcuguucgagaagaccaagaagcagcuccgcgagaacgccgaggacauggggaacggcugcuucaagaucuaccacaagugcgacaacgcgugcaucgggagcauccggaacggcaccuacgaccacaacguguaccgcgacgaggcccugaacaaccgguuccagaucaagggggucgagcucaaguccggcuacaaggacuggauccuguggaucagcuucgccaucagcugcuuccugcucugcguggcccugcugggcuucaucaugugggccugccagaaggggaacauccgcugcaacaucugcaucuga

SEQ ID NO: 77361 - RNA, 1701 nt, Artificial Sequence; identical to SEQ ID NO: 77101
  derived and/or modified CDS sequence (opt1) from hemagglutinin__InfluenzaA__ALE31822

SEQ ID NO: 77362 - RNA, 1701 nt, Artificial Sequence; identical to SEQ ID NO: 77009
  derived and/or modified CDS sequence (opt1) from hemagglutinin__InfluenzaA__ALE31823

SEQ ID NO: 77363 - RNA, 1701 nt, Artificial Sequence; identical to SEQ ID NO: 76465
  derived and/or modified CDS sequence (opt1) from hemagglutinin__InfluenzaA__ALE31824

SEQ ID NO: 77364 - RNA, 1701 nt, Artificial Sequence
  derived and/or modified CDS sequence (opt1) from hemagglutinin__InfluenzaA__ALE31825
augaagaccaucaucgcccugagcuacauccucugccugguguucgcccagaagauccccggcaacgacaacuccaccgcgacgcugugccucgggcaccacgccgucccgaacggcaccaucgugaagaccaucaccaacgaccgcaucgaggugacgaacgccaccgagcugguccagaacagcuccaucggggagaucugcgacagcccccaccagauccuggacggcgagaacugcacccucaucgacgcccugcugggggacccccagugcgacggcuuccagaacaagaagugggaccucuucguggagcgguccaaggccuacagcaacugcuaccccuacgacgugccggacuacgcgucccugcgcagccuggucgccuccagcggcacccucgaguucaacaacgaguccuucaacuggacgggggugacccagaacggcaccagcuccgccugcauccggcgcagcuccagcuccuucuucagccggcugaacuggcugacccaccucaacuaccgcuaccccgcccugaacgugacgaugcccaacaacgagcaguucgacaagcuguacaucuggggcguccaccaccccgggaccgacaaggaccagaucuuccucuacgcgcaguccagcgggcggaucaccgugagcaccaagcgcucccagcaggccgugaucccgaacaucggcagccggccccgcauccgggacauccccucccgcaucagcaucuacuggacgaucgucaagcccggcgacauccugcugaucaacuccaccgggaaccucaucgccccgcggggcuacuucaagauccgcagcgggaaguccagcaucaugcgguccgacgcccccaucggcaagugcaagagcgagugcaucacccccaacggcuccauccccaacgacaagccguuccagaacgugaaccgcaucaccuacggggccugcccccgguacgugaagcacagcacgcugaagcuggcgaccggcaugcgcaacguccccgagaagcagacccgggggaucuucggcgccaucgccggguucaucgagaacggcugggagggcaugguggacgggugguacggcuuccgccaccagaacuccgaggggcggggccaggccgccgaccucaagagcacccaggcggccaucgaccagaucaacgggaagcugaaccgccugaucggcaagacgaacgagaaguuccaccagaucgagaaggaguucuccgagguggagggccgcauccaggaccucgagaaguacgucgaggacaccaagaucgaccuguggagcuacaacgccgagcugcucguggcccuggagaaccagcacaccaucgaccugaccgacuccgagaugaacaagcuguucgagaagacgaagaagcagcuccgggagaacgccgaggacauggggaacggcugcuucaagaucuaccacaagugcgacaacgcgugcaucgggagcauccgcaacggcaccuacgaccacaacguguaccgggacgaggcccugaacaaccgcuuccagaucaagggggucgagcucaaguccggcuacaaggacuggauccuguggaucagcuucgccaucagcugcuuccugcucugcguggcccugcugggcuucaucaugugggccugccagaaggggaacauccggugcaacaucugcaucuga

SEQ ID NO: 77365 - RNA, 1701 nt, Artificial Sequence; identical to SEQ ID NO: 76465
  derived and/or modified CDS sequence (opt1) from hemagglutinin__InfluenzaA__ALE31826

SEQ ID NO: 77366 - RNA, 1701 nt, Artificial Sequence; identical to SEQ ID NO: 76465
  derived and/or modified CDS sequence (opt1) from hemagglutinin__InfluenzaA__ALE31827

SEQ ID NO: 77367 - RNA, 1701 nt, Artificial Sequence; identical to SEQ ID NO: 76465
  derived and/or modified CDS sequence (opt1) from hemagglutinin__InfluenzaA__ALE31828

SEQ ID NO: 77368 - RNA, 1701 nt, Artificial Sequence; identical to SEQ ID NO: 77022
  derived and/or modified CDS sequence (opt1) from hemagglutinin__InfluenzaA__ALE31829

SEQ ID NO: 77369 - RNA, 1701 nt, Artificial Sequence
  derived and/or modified CDS sequence (opt1) from hemagglutinin__InfluenzaA__ALE31830
augaagaccaucaucgcccugagcuacauccucugccugguguucgcccagaagauccccggcaacgacaacuccaccgcgacgcugugccucgggcaccacgccgucccgaacggcaccaucgugaagaccaucaccaacgaccgcaucgaggugacgaacgccaccgagcugguccagaacagcuccaucggggagaucugcgacagcccccaccagauccuggacggcgagaacugcacccucaucgacgcccugcugggggacccccagugcgacggcuuccagaacaagaagugggaccucuucguggagcgguccaaggccuacagcaacugcuaccccuacgacgugccggacuacgcgucccugcgcagccuggucgccuccagcggcacccucgaguucaacaacgaguccuucaacuggacgggggugacccagaacggcaccagcuccgccugcauccggcgcagcuccagcuccuucuucagccggcugaacuggcugacccaccucaacuacacguaccccgcccugaacgugaccaugcccaacaacgagcaguucgacaagcuguacaucuggggcguccaccaccccgggaccgacaaggaccagaucuuccucuacgcgcaguccagcgggcgcaucaccgugagcacgaagcggucccagcaggccgugaucccgaacaucggcagccgcccccggauccgcgacauccccucccggaucagcaucuacuggaccaucgucaagcccggcgacauccugcugaucaacuccaccgggaaccucaucgccccgcgcggcuacuucaagauccggagcgggaaguccagcaucaugcgcuccgacgcccccaucggcaagugcaagagcgagugcaucacccccaacggcuccauccccaacgacaagccguuccagaacgugaaccggaucacguacggggccugcccccgcuacgugaagcacagcacccugaagcuggcgaccggcaugcggaacguccccgagaagcagacccgcgggaucuucggcgccaucgccggguucaucgagaacggcugggagggcaugguggacgggugguacggcuuccggcaccagaacuccgaggggcgcggccaggccgccgaccucaagagcacgcaggcggccaucgaccagaucaacgggaagcugaaccggcugaucggcaagaccaacgagaaguuccaccagaucgagaaggaguucuccgagguggagggccgcauccaggaccucgagaaguacgucgaggacaccaagaucgaccuguggagcuacaacgccgagcugcucguggcccuggagaaccagcacaccaucgacaucacggacuccgagaugaacaagcuguucgagaagaccaagaagcagcuccgcgagaacgccgaggacauggggaacggcugcuucaagaucuaccacaagugcgacaacgcgugcaucgggagcauccggaacggcaccuacgaccacaacguguaccgcgacgaggcccugaacaaccgguuccagaucaagggggucgagcugaaguccggcuacaaggacuggauccucuggaucagcuucgccaucagcugcuuccugcugugcguggcccuccugggcuucaucaugugggccugccagaaggggaacauccgcugcaacaucugcaucuga

SEQ ID NO: 77370 - RNA, 1701 nt, Artificial Sequence
  derived and/or modified CDS sequence (opt1) from hemagglutinin__InfluenzaA__ALE31832
augaagaacaucaucgcccugagcuacauccucugccugguguucgcccagaagauccccggcaacgacaacuccaccgcgacccugugccucgggcaccacgccgucccgaacggcacgaucgugaagaccaucaccaacgaccgcaucgaggugaccaacgccacggagcugguccagaacagcuccaucggggagaucugcgacagcccccaccagauccuggacggcgagaacugcacccucaucgacgcccugcugggggacccccagugcgacggcuuccagaacaagaagugggaccucuucguggagcgguccaaggccuacagcaacugcuaccccuacgacgugccggacuacgcgucccugcgcagccuggucgccuccagcggcacccucgaguucaacaacgaguccuucaacuggaccggggugacgcagaacggcaccagcuccgccugcauccggcgcagcaacuccagcuucuucucccggcugaacuggcugacccaccucaacuacaccuaccccgcccugaacgugacgaugcccaacaacgagcaguucgacaagcuguacaucuggggcguccaccaccccgggaccgacaaggaccagaucuuccucuacgcgcagagcuccgggcgcaucaccgugagcaccaagcggagccagcaggccgugaucccgaacaucggcucccgcccccggauccgcgacauccccagccggaucuccaucuacuggacgaucgucaagcccggcgacauccugcugaucaacagcaccgggaaccucaucgccccgcgcggcuacuucaagauccgguccggcaagagcuccaucaugcgcagcgacgcccccaucgggaagugcaaguccgagugcaucacccccaacggcagcauccccaacgacaagccguuccagaacgugaaccggaucaccuacggggccugcccccgcuacgugaagcacuccacgcugaagcuggcgaccggcaugcggaacguccccgagaagcagacccgcgggaucuucggcgccaucgccggguucaucgagaacggcugggagggcaugguggacgggugguacggcuuccggcaccagaacagcgaggggcgcggccaggccgccgaccucaaguccacccaggcggccaucgaccagaucaacgggaagcugaaccggcugaucggcaagacgaacgagaaguuccaccagaucgagaaggaguucagcgagguggagggccgcauccaggaccucgagaaguacgucgaggacaccaagaucgaccugugguccuacaacgccgagcugcucguggcccuggagaaccagcacaccaucgaccugaccgacagcgagaugaacaagcuguucgagaagacgaagaagcagcuccgcgagaacgccgaggacauggggaacggcugcuucaagaucuaccacaagugcgacaacgcgugcaucggguccauccggaacggcaccuacgaccacaacguguaccgcgacgaggcccugaacaaccgguuccagaucaagggggucgagcucaagagcggcuacaaggacuggauccuguggaucuccuucgccaucagcugcuuccugcucugcguggcccugcugggcuucaucaugugggccugccagaaggggaacauccgcugcaacaucugcaucuga

SEQ ID NO: 77371 - RNA, 1701 nt, Artificial Sequence
  derived and/or modified CDS sequence (opt1) from hemagglutinin__InfluenzaA__ALE31833
augaagaccaucaucgcccugagcuacauccucugccugguguccgcccagaagauccccggcaacgacaacagcaccgcgacgcugugccucgggcaccacgccgucccgaacggcaccaucgugaagaccaucaccaacgaccgcaucgaggugacgaacgccaccgagcugguccagaacuccagcaucggggagaucugcaacagcccccaccagauccuggacggcgagaacugcacccucaucgacgcccugcugggggacccccagugcgacggcuuccagaacaagaagugggaccucuucguggagcggagcaaggccuacuccaacugcuaccccuacgacgugccggacuacgcgagccugcgcucccuggucgccagcuccggcacccucgaguucaacaacgagagcuucaacuggacgggggugacccagaacggcaccuccagcgccugcauccggcgcuccagcuccagcuucuucucccggcugaacuggcugacccaccucaacuacacguaccccgcccugaacgugaccaugcccaacaacgagcaguucgacaagcuguacaucuggggcguccaccaccccgggaccgacaaggaccagaucuuccucuacgcgcagagcagcgggcgcaucaccguguccacgaagcggagccagcaggccgugaucccgaacaucggcucccgcccccggauccgcgacauccccagccggaucuccaucuacuggaccaucgucaagcccggcgacauccugcugaucaacagcaccgggaaccucaucgccccgcgcggcuacuucaagauccgguccgggaaguccuccaucaugcgcagcgacgcccccaucggcaagugcaaguccgagugcaucacccccaacggcagcauccccaacgacaagccguuccagaacgugaaccggaucacguacggggccugcccccgcuacgugaagcacuccacccugaagcuggcgaccggcaugcggaacguccccgagaagcagacccgcgggaucuucggcgccaucgccggguucaucgagaacggcugggagggcaugguggacgggugguacggcuuccggcaccagaacagcgaggggcgcggccaggccgccgaccucaaguccacgcaggcggccaucgaccagaucaacgggaagcugaaccggcugaucggcaagaccaacgagaaguuccaccagaucgagaaggaguucagcgagguggagggccgcauccaggaccucgagaaguacgucgaggacaccaagaucgaccugugguccuacaacgccgagcugcucguggcccuggagaaccagcacaccaucgaccugacggacagcgagaugaacaagcuguucgagaagaccaagaagcagcuccgcgagaacgccgaggacauggggaacggcugcuucaagaucuaccacaagugcgacaacgcgugcaucggguccauccggaacggcaccuacgaccacaacguguaccgcgacgaggcccugaacaaccgguuccagaucaagggggucgagcucaagagcggcuacaaggacuggauccuguggaucagcuucgccaucuccugcuuccugcucugcguggcccugcugggcuucaucaugugggccugccagaaggggaacauccgcugcaacaucugcaucuga

SEQ ID NO: 77372 - RNA, 1701 nt, Artificial Sequence
  derived and/or modified CDS sequence (opt1) from hemagglutinin__InfluenzaA__ALE31834
augaagaccaucaucgcccugagcuacauccucugccugguguucgcccagaagcugcccggcaacgacaacuccaccgcgacgcucugccuggggcaccacgccgucccgaacggcaccaucgugaagaccaucaccaacgaccgcaucgaggugacgaacgccaccgagcugguccagaacagcuccaucggggagaucugcgacagcccccaccagauccucgacggcgagaacugcacccugaucgacgcccugcucggggacccccagugcgacggcuuccagaacaagaagugggaccuguucguggagcgguccaaggcccacagcaacugcuaccccuacgacgugccggacuacgcgucccugcgcagccucgucgccuccagcggcacccuggaguucaacaacgaguccuucaacugggccggggugacgcagaacggcaccagcuccagcugcauccggggguccaacagcuccuucuucagccgccugaacuggcucacccaccugaacuccaaguaccccgcccugaacgugaccaugcccaacaacgagcaguucgacaagcucuacaucuggggcguccaccaccccgggacggacaaggaccagaucuuccuguacgcgcagagcagcggccggaucaccguguccaccaagcgcagccagcaggccgugaucccgaacaucggcucccggccccgcauccgggacauccccagccgcaucuccaucuacuggaccaucgucaagcccggggacauccugcucaucaacagcacgggcaaccugaucgccccgcggggguacuucaagauccgcuccggcaagagcuccaucaugcggagcgacgcccccaucggcaagugcaaguccgagugcaucacccccaacgggagcauccccaacgacaagccguuccagaacgugaaccgcaucaccuacggcgccugcccccgguacgugaagcaguccacccugaagcucgcgacggggaugcgcaacguccccgagaagcagacccggggcaucuucggggccaucgccggcuucaucgagaacggcugggaggggaugguggacggcugguacggguuccgccaccagaacagcgagggccgggggcaggccgccgaccugaaguccacccaggcggccaucgaccagaucaacggcaagcugaaccgccucaucggcaagaccaacgagaaguuccaccagaucgagaaggaguucagcgagguggaggggcggauccaggaccuggagaaguacgucgaggacacgaagaucgaccugugguccuacaacgccgagcuccugguggcccuggagaaccagcacaccaucgaccucaccgacagcgagaugaacaagcuguucgagaagaccaagaagcagcugcgcgagaacgccgaggacaugggcaacgggugcuucaagaucuaccacaagugcgacaacgcgugcaucggcuccauccgcaacgggacguacgaccacgacguguaccgggacgaggcccucaacaaccgcuuccagaucaagggcgucgagcucaagagcggcuacaaggacuggauccuguggaucagcuucgccaucuccugcuuccugcugugcguggcccugcucggguucaucaugugggccugccagaagggcaacauccggugcaacaucugcaucuga

SEQ ID NO: 77373 - RNA, 1701 nt, Artificial Sequence; identical to SEQ ID NO: 77123
  derived and/or modified CDS sequence (opt1) from hemagglutinin__InfluenzaA__ALE31835

SEQ ID NO: 77374 - RNA, 1701 nt, Artificial Sequence; identical to SEQ ID NO: 76465
  derived and/or modified CDS sequence (opt1) from hemagglutinin__InfluenzaA__ALE31836

SEQ ID NO: 77375 - RNA, 1701 nt, Artificial Sequence
  derived and/or modified CDS sequence (opt1) from hemagglutinin__InfluenzaA__ALE31837
augaagaccaucaucgcccugagcuacauccucugccugguguacgcccagaagauccccggcaacgacaacuccaccgcgacgcugugccucgggcaccacgccgucccgaacggcaccaucgugaagaccaucaccaacgaccgcaucgaggugacgaacgccaccgagcugguccagaacagcuccaucggggagaucugcgacagcccccaccagauccuggacggcgagaacugcacccucaucgacgcccugcugggggacccccagugcgacggcuuccagaacaagaagugggaccucuucguggagcgguccaaggccuacagcaacugcuaccccuacgacgugccggacuacgcgucccugcgcagccuggucgccuccagcggcacccucgaguucaacaacgaguccuucaacuggacgggggugacccagaacggcaccagcuccgccugcauccggcgcagcuccagcuccuucuucagccggcugaacuggcugacccaccucaacuacacguaccccgcccugaacgugaccaugcccaacaacgagcaguucgacaagcuguacaucuggggcguccaccaccccgggaccgacaaggaccagaucuuccucuacgcgcaguccagcgggcgcaucaccgugagcacgaagcggucccagcaggccgugaucccgaacaucggcagccgcccccggauccgcgacauccccucccggaucagcaucuacuggaccaucgucaagcccggcgacauccugcugaucaacuccaccgggaaccucaucgccccgcgcggcuacuucaagauccggagcgggaaguccagcaucaugcgcuccgacgcccccaucggcaagugcaagagcgagugcaucacccccaacggcuccauccccaacgacaagccguuccagaacgugaaccggaucacguacggggccugcccccgcuacgugaagcacagcacccugaagcuggcgaccggcaugcggaacguccccgagaagcagacccgcgggaucuucggcgccaucgccggguucaucgagaacggcugggagggcaugguggacgggugguacggcuuccggcaccagaacuccgaggggcgcggccaggccgccgaccucaagagcacgcaggcggccaucgaccagaucaacgggaagcugaaccggcugaucggcaagaccaacgagaaguuccaccagaucgagaaggaguucuccgagguggagggccgcauccaggaccucgagaaguacgucgaggacaccaagaucgaccuguggagcuacaacgccgagcugcucguggcccuggagaaccagcacaccaucgaccugacggacuccgagaugaacaagcuguucgagaagaccaagaagcagcuccgcgagaacgccgaggacauggggaacggcugcuucaagaucuaccacaagugcgacaacgcgugcaucgggagcauccggaacggcaccuacgaccacaacguguaccgcgacgaggcccugaacaaccgguuccagaucaagggggucgagcucaaguccggcuacaaggacuggauccuguggaucagcuucgccaucagcugcuuccugcucugcguggcccugcugggcuucaucaugugggccugccagaaggggaacauccgcugcaacaucugcaucuga

SEQ ID NO: 77376 - RNA, 1701 nt, Artificial Sequence; identical to SEQ ID NO: 76465
  derived and/or modified CDS sequence (opt1) from hemagglutinin__InfluenzaA__ALE31838

SEQ ID NO: 77377 - RNA, 1701 nt, Artificial Sequence; identical to SEQ ID NO: 76465
  derived and/or modified CDS sequence (opt1) from hemagglutinin__InfluenzaA__ALE31839

SEQ ID NO: 77378 - RNA, 1701 nt, Artificial Sequence
  derived and/or modified CDS sequence (opt1) from hemagglutinin__InfluenzaA__ALE31840
augaagaccaucaucgcccugagcuacauccucugccugguguucgcccagaagauccccggcaacgacaacuccaccgcgacgcugugccucgggcaccacgccgucccgaacggcaccaucgugaagaccaucaccaacgaccgcaucgaggugacgaacgccaccgagcugguccagaacagcuccaucggggagaucugcgacagcccccaccagauccuggacggcgagaacugcacccucaucgacgcccugcugggggacccccagugcgacggcuuccagaacaagaagugggaccucuucguggagcgguccaaggccuacagcaacugcuaccccuacgacgugccggacuacgcgucccugcgcagccuggucgccuccagcggcacccucgaguucaacaacgaguccuucaacuggacgggggugacccagaacggcaccagcuccgccugcauccggcgcagcuccagcuccuucuucagccggcugaacuggcugacccaccucaacuacacguaccccgcccugaacgugaccaugcccaacaacgagcaguucgacaagcuguacaucuggggcguccaccaccccgggaccgacaaggaccagaucuuccucuacgcgcaguccagcgggcgcaucaccgugagcacgaagcggucccagcaggccgugaucccgaacaucggcagccgccugcggauccgcgacauccccucccggaucagcaucuacuggaccaucgucaagcccggcgacauccugcucaucaacuccaccgggaaccugaucgcgccccgcggcuacuucaagauccggagcgggaaguccagcaucaugcgcuccgacgccccgaucggcaagugcaagagcgagugcaucacccccaacggcuccauccccaacgacaagcccuuccagaacgugaaccggaucacguacggggccugcccgcgcuacgugaagcacagcacccugaagcucgccaccggcaugcggaacguccccgagaagcagacccgcgggaucuucggcgccaucgccggguucaucgagaacggcugggagggcaugguggacgggugguacggcuuccggcaccagaacuccgaggggcgcggccaggccgccgaccucaagagcacgcaggcggccaucgaccagaucaacgggaagcugaaccggcugaucggcaagaccaacgagaaguuccaccagaucgagaaggaguucuccgagguggagggccgcauccaggaccuggagaaguacgucgaggacaccaagaucgaccuguggagcuacaacgccgagcuccugguggcccuggagaaccagcacaccaucgaccucacggacuccgagaugaacaagcuguucgagaagaccaagaagcagcugcgcgagaacgccgaggacauggggaacggcugcuucaagaucuaccacaagugcgacaacgcgugcaucgggagcauccggaacggcaccuacgaccacaacguguaccgcgacgaggcccucaacaaccgguuccagaucaagggggucgagcugaaguccggcuacaaggacuggauccuguggaucagcuucgccaucagcugcuuccuccugugcguggcccugcucggcuucaucaugugggccugccagaaggggaacauccgcugcaacaucugcaucuga

SEQ ID NO: 77379 - RNA, 1701 nt, Artificial Sequence; identical to SEQ ID NO: 76465
  derived and/or modified CDS sequence (opt1) from hemagglutinin__InfluenzaA__ALE31842

SEQ ID NO: 77380 - RNA, 1701 nt, Artificial Sequence
  derived and/or modified CDS sequence (opt1) from hemagglutinin__InfluenzaA__ALE31843
augcagaccaucaucgcccugagcuacauccucugccugguguucgcccagaagauccccggcaacgacaacuccaccgcgacgcugugccucgggcaccacgccgucccgaacggcaccaucgugaagaccaucaccaacgaccgcaucgaggugacgaacgccaccgagcugguccagaacagcuccaucggggagaucugcgacagcccccaccagauccuggacggcgagaacugcacccucaucgacgcccugcugggggacccccagugcgacggcuuccagaacaagaagugggaccucuucguggagcgguccaaggccuacagcaacugcuaccccuacgacgugccggacuacgcgucccugcgcagccuggucgccuccagcggcacccucgaguucaacaacgaguccuucaacuggacgggggugacccagaacggcaccagcuccgccugcauccgcaagagcuccagcuccuucuucagccggcugaacuggcugacccaccucaacuacacguaccccgcccugaacgugaccaugcccaacaacgagcaguucgacaagcuguacaucuggggcguccaccaccccgggaccgacaaggaccagaucuuccucuacgcgcaguccagcgggcggaucaccgugagcacgaagcgcucccagcaggccgugaucccgaacaucggcagccggccccgcauccgggacauccccucccgcaucagcaucuacuggaccaucgucaagcccggcgacauccugcugaucaacuccaccgggaaccucaucgccccgcggggcuacuucaagauccugagcgggaaguccagcaucaugcgcuccgacgcccccaucggcaagugcaagagcgagugcaucacccccaacggcuccauccccaacgacaagccguuccagaacgugaaccggaucacguacggggccugcccccgcuacgugaagcacagcacccugaagcucgcgaccggcaugcggaacguccccgagaagcagacccgcgggaucuucggcgccaucgccggguucaucgagaacggcugggagggcaugguggacgggugguacggcuuccggcaccagaacuccgaggggcgcggccaggccgccgaccucaagagcacgcaggcggccaucgaccagaucaacgggaagcugaaccggcugaucggcaagaccaacgagaaguuccaccagaucgagaaggaguucuccgagguggagggccgcauccaggaccuggagaaguacgucgaggacaccaagaucgaccuguggagcuacaacgccgagcuccugguggcccuggagaaccagcacaccaucgaccucacggacuccgagaugaacaagcuguucgagaagaccaagaagcagcugcgggagaacgccgaggacauggggaacggcugcuucaagaucuaccacaagugcgacaacgcgugcaucgggagcauccgcaacggcaccuacgaccacaacguguaccgcgacgaggcccucaacaaccgguuccagaucaagggggucgagcugaaguccggcuacaaggacuggauccuguggaucagcuucgccaucagcugcuuccuccugugcguggcccugcucggcuucaucaugugggccugccagaaggggaacauccgcugcaacaucugcaucuga

SEQ ID NO: 77381 - RNA, 1701 nt, Artificial Sequence; identical to SEQ ID NO: 77022
  derived and/or modified CDS sequence (opt1) from hemagglutinin__InfluenzaA__ALE31844

SEQ ID NO: 77382 - RNA, 1701 nt, Artificial Sequence; identical to SEQ ID NO: 76998
  derived and/or modified CDS sequence (opt1) from hemagglutinin__InfluenzaA__ALE31846

SEQ ID NO: 77383 - RNA, 1701 nt, Artificial Sequence; identical to SEQ ID NO: 76465
  derived and/or modified CDS sequence (opt1) from hemagglutinin__InfluenzaA__ALE31847

SEQ ID NO: 77384 - RNA, 1701 nt, Artificial Sequence; identical to SEQ ID NO: 76465
  derived and/or modified CDS sequence (opt1) from hemagglutinin__InfluenzaA__ALE31848

SEQ ID NO: 77385 - RNA, 1701 nt, Artificial Sequence
  derived and/or modified CDS sequence (opt1) from hemagglutinin__InfluenzaA__ALE31850
augaagaccaucaucgcccugagcuacauccucugccugguguucgcccagaagcugcccggcaacgacaacuccaccgcgacgcucugccuggggcaccacgccgucccgaacggcaccaucgugaagaccaucaccaacgaccgcaucgaggugacgaacgccaccgagcugguccagaacagcuccaucggggagaucugcgacagcccccaccagauccucgacggcgagaacugcacccugaucgacgcccugcucggggacccccagugcgacggcuuccagaacaagaagugggaccuguucguggagcgguccaaggccuacagcaacugcuaccccuacgacgugccggacuacgcgucccugcgcagccucgucgccuccagcggcacccuggaguucaacaacgaguccuucaacugggccggggugacgcagaacggcaccagcuccagcugcauccggggguccaacagcuccuucuucagccgccugaacuggcucacccaccugaacuccaaguaccccgcccugaacgugaccaugcccaacaacgagcaguucgacaagcucuacaucuggggcguccaccaccccgggacggacaaggaccagaucuuccuguacgcgcagccgagcggccggaucaccgugagcaccaagcgcucccagcaggccgugauccccaacaucggcagccggccccgcauccgggacauccccucccgcaucagcaucuacuggaccaucgucaagccgggggacauccugcucaucaacuccacgggcaaccugaucgcgccccggggguacuucaagauccgcagcggcaaguccagcaucaugcgguccgacgcccccaucggcaagugcaagagcgagugcaucacccccaacggguccaucccgaacgacaagcccuuccagaacgugaaccgcgugaccuacggcgccugcccccgguacgucaagcagagcacccugaagcucgccacggggaugcgcaacgugcccgagcggcagacccgcggcaucuucggggccaucgccggcuucaucgagaacggcugggaggggaugguggacggcugguacggguuccggcaccagaacuccgagggccgcgggcaggccgccgaccucaagagcacccaggcggccaucgaccagaucaacggcaagcugaaccggcugaucggcaagaccaacgagaaguuccaccagaucgagaaggaguucuccgaggucgaggggcgcauccaggaccuggagaaguacguggaggacacgaagaucgaccuguggagcuacaacgccgagcuccugguggcccuggagaaccagcacaccaucgaccucaccgacuccgagaugaacaagcuguucgagaagaccaagaagcagcugcgcgagaacgccgaggacaugggcaacgggugcuucaagaucuaccacaagugcgacaacgcgugcaucggcagcauccggaacgggacguacgaccacgacgucuaccgcgacgaggcccucaacaaccgguuccagaucaagggcguggagcugaaguccggcuacaaggacuggauccuguggaucagcuucgccaucagcugcuuccuccugugcguggcccugcucggguucaucaugugggccugccagaagggcaacauccgcugcaacaucugcaucuga

SEQ ID NO: 77386 - RNA, 1701 nt, Artificial Sequence
  derived and/or modified CDS sequence (opt1) from hemagglutinin__InfluenzaA__ALE31851
augaagaccaucaucgcccugagcuacauccucugccugguguucgcccagaagauccccggcaacgacaacuccaccgcgacgcugugccucgggcaccacgccgucccgaacggcaccaucgugaagaccaucaccaacgaccgcaucgaggugacgaacgccaccgagcugguccagaacagcuccaucggggagaucugcgacagcccccaccagauccuggacggcgagaacugcacccucaucgacgcccugcugggggacccccagugcgacggcuuccagaacaagaagugggaccucuucguggagcgguccaaggccuacagcaacugcuaccccuacgacgugccggacuacgcgucccugcgcagccuggucgccuccagcggcacccucgaguucaacaacgaguccuucaacuggacgggggugacccagaacggcaccagcuccgccugcauccgcaagagcuccagcuccuucuucagccggcugaacuggcugacccaccucaacuacacguaccccgcccugaacgugaccaugcccaacaacgagcaguucgacaagcuguacaucuggggcguccaccaccccgggaccgacaaggaccagaucuuccucuacgcgcgguccagcgggcgcaucaccgugagcacgaagcggucccagcaggccgugaucccgaacaucggcagccgcccccggauccgcgacauccccucccggaucagcaucuacuggaccaucgucaagcccggcgacauccugcugaucaacuccaucgggaaccucaucgccccgcgcggcuacuucaagauccggagcgggaaguccagcaucaugcgcuccgacgcccccaucggcaagugcaagagcgagugcaucacccccaacggcuccauccccaacgacaagccguuccagaacgugaaccggaucaccuacggggccugcccccgcuacgugaagcacagcacgcugaagcuggcgaccggcaugcggaacguccccgagaagcagacccgcgggaucuucggcgccaucgccggguucaucgagaacggcugggagggcaugguggacgggugguacggcuuccggcaccagaacuccgaggggcgcggccaggccgccgaccucaagagcacccaggcggccaucgaccagaucaacgggaagcugaaccggcugaucggcaagacgaacgagaaguuccaccagaucgagaaggaguucuccgagguggagggccgcauccaggaccucgagaaguacgucgaggacaccaagaucgaccuguggagcuacaacgccgagcugcucguggcccuggagaaccagcacaccaucgaccugaccgacuccgagaugaacaagcuguucgagaagacgaagaagcagcuccgcgagaacgccgaggacauggggaacggcugcuucaagaucuaccacaagugcgacaacgcgugcaucgggagcauccggaacggcaccuacgaccacaacguguaccgcgacgaggcccugaacaaccgguuccagaucaagggggucgagcucaaguccggcuacaaggacuggauccuguggaucagcuucgccaucagcugcuuccugcucugcguggcccugcugggcuucaucaugugggccugccagaaggggaacauccgcugcaacaucugcaucuga

SEQ ID NO: 77387 - RNA, 1701 nt, Artificial Sequence; identical to SEQ ID NO: 77009
  derived and/or modified CDS sequence (opt1) from hemagglutinin__InfluenzaA__ALE31852

SEQ ID NO: 77388 - RNA, 1701 nt, Artificial Sequence
  derived and/or modified CDS sequence (opt1) from hemagglutinin__InfluenzaA__ALE31853
augaagaccaucaucgcccugagcuacauccucugccugguguucacccagaagauccccggcaacgacaacuccacggccacccugugccucgggcaccacgcggucccgaacggcaccaucgugaagaccaucacgaacgaccgcaucgaggugaccaacgccaccgagcugguccagaacagcuccaucggggagaucugcgacagcccccaccagauccuggacggcgagaacugcacccucaucgacgcccugcugggggacccccagugcgacggcuuccagaacaagaagugggaccucuucguggagcgguccaaggccuacagcaacugcuaccccuacgacgugccggacuacgccucccugcgcagccuggucgcguccagcggcacgcucgaguucaacaacgaguccuucaacuggaccggggugacccagaacggcaccagcuccgccugcauccggcgcagcuccagcuccuucuucagccggcugaacuggcugacgcaccucaacuacaccuaccccgcccugaacgugaccaugcccaacaacgagcaguucgacaagcuguacaucuggggcguccaccaccccgggaccgacaaggaccagaucuuccucuacgcccaguccagcgggcgcaucacggugagcaccaagcggucccagcaggcggugaucccgaacaucggcagccgcccccggauccgcgacauccccucccggaucagcaucuacuggaccaucgucaagcccggcgacauccugcugaucaacuccaccgggaaccucaucgccccgcgcggcuacuucaagauccggagcgggaaguccagcaucaugcgcuccgacgcccccaucggcaagugcaagagcgagugcaucacgcccaacggcuccauccccaacgacaagccguuccagaacgugaaccggaucaccuacggggccugcccccgcuacgugaagcacagcacccugaagcuggccaccggcaugcggaacguccccgagaagcagacgcgcgggaucuucggcgcgaucgccggguucaucgagaacggcugggagggcaugguggacgggugguacggcuuccggcaccagaacuccgaggggcgcggccaggccgccgaccucaagagcacccaggccgcgaucgaccagaucaacgggaagcugaaccggcugaucggcaagaccaacgagaaguuccaccagaucgagaaggaguucuccgagguggagggccgcauccaggaccucgagaaguacgucgaggacaccaagaucgaccuguggagcuacaacgccgagcugcucguggcccuggagaaccagcacacgaucgaccugaccgacuccgagaugaacaagcuguucgagaagaccaagaagcagcuccgcgagaacgccgaggacauggggaacggcugcuucaagaucuaccacaagugcgacaacgccugcaucgggagcauccggaacggcaccuacgaccacaacguguaccgcgacgaggcgcugaacaaccgguuccagaucaagggggucgagcucaaguccggcuacaaggacuggauccuguggaucagcuucgccaucagcugcuuccugcucugcguggcccugcugggcuucaucaugugggccugccagaaggggaacauccgcugcaacaucugcaucuga

SEQ ID NO: 77389 - RNA, 1701 nt, Artificial Sequence
  derived and/or modified CDS sequence (opt1) from hemagglutinin__InfluenzaA__ALE31854
augaagaccaucaucgcccugagcuacauccucugccugguguucgcccagaagauccccggcaacgacaacuccaccgcgacgcugugccucgggcaccacgccgucccgaacggcaccaucgugaagaccaucaccaacgaccgcaucgaggugacgaacgccaccgagcugguccagaacagcuccaucggggagaucugcgacagcccccaccagauccuggacggcgagaacugcacccucaucgacgcccugcugggggacccccagugcgacggcuuccagaacaagaagugggaccucuucguggagcgguccaaggccuacagcaacugcuaccccuacgacgugccggacuacgcgucccugcgcagccuggucgccuccagcggcacccucgaguucaacaacgaguccuucaacuggacgggggugacccagaacggcaccagcuccgccugcauccggcgcagcuccagcuccuucuucagccggcugaacuggcugacccaccucaacuacacguaccccgcccugaacgugaccaugcccaacaacgagcaguucgacaagcuguacaucuggggcguccaccaccccgggaccgacaaggaccagaucuuccucuacgcgcgcuccagcgggcggaucaccgugagcacgaagggcucccagcaggccgugaucccgaacaucggcagccgcccccggauccgcgacauccccucccggaucagcaucuacuggaccaucgucaagcccggggacauccugcugaucaacuccaccggcaaccucaucgccccgcgcggguacuucaagauccggagcggcaaguccagcaucaugcgcuccgacgcccccaucggccggugcaagagcgagugcaucacccccaacggguccauccccaacgacaagccguuccagaacgugaaccgcaucacguacggcgccugcccccgguacgugaagcacagcacccugaagcuggcgaccgggaugcgcaacguccccgagaagcagacccggggcaucuucggggccaucgccggcuucaucgagaacggcugggaggggaugguggacggcugguacggguuccgccaccagaacuccgagggccgggggcaggccgccgaccucaagagcacgcaggcggccaucgaccagaucaacggcaagcugaaccgccugaucggcaagaccaacgagaaguuccaccagaucgagaaggaguucuccgagguggaggggcgcauccaggaccucgagaaguacgucgaggacaccaagaucgaccuguggagcuacaacgccgagcugcucguggcccuggagaaccagcacaccaucgaccugacggacuccgagaugaacaagcuguucgagaagaccaagaagcagcuccgggagaacgccgaggacaugggcaacgggugcuucaagaucuaccacaagugcgacaacgcgugcaucggcagcauccgcaacgggaccuacgaccacaacguguaccgggacgaggcccugaacaaccgcuuccagaucaagggcgucgagcucaaguccggcuacaaggacuggauccuguggaucagcuucgccaucagcugcuuccugcucugcguggcccugcugggguucaucaugugggccugccagaagggcaacauccggugcaacaucugcaucuga

SEQ ID NO: 77390 - RNA, 1701 nt, Artificial Sequence; identical to SEQ ID NO: 77151
  derived and/or modified CDS sequence (opt1) from hemagglutinin__InfluenzaA__ALE31855

SEQ ID NO: 77391 - RNA, 1701 nt, Artificial Sequence; identical to SEQ ID NO: 76465
  derived and/or modified CDS sequence (opt1) from hemagglutinin__InfluenzaA__ALE31856

SEQ ID NO: 77392 - RNA, 1701 nt, Artificial Sequence; identical to SEQ ID NO: 76465
  derived and/or modified CDS sequence (opt1) from hemagglutinin__InfluenzaA__ALE31857

SEQ ID NO: 77393 - RNA, 1701 nt, Artificial Sequence
  derived and/or modified CDS sequence (opt1) from hemagglutinin__InfluenzaA__ALE31858
augaagaccaucaucgcccugagcuacauccucugccugguguucgcccagaagauccccggcaacgacaacuccaccgcgacgcugugccucgggcaccacgccgucccgaacggcaccaucgugaagaccaucaccaacgaccgcaucgaggugacgaacgccaccgagcugguccagaacagcuccaucggggagaucugcgacagcccccaccagauccuggacggcgagaacugcacccucaucgacgcccugcugggggacccccagugcgacggcuuccagaacaagaagugggaccucuucguggagcgguccaaggccuacagcaacugcuaccccuacgacgugccggacuacgcgucccugcgcagccuggucgccuccagcggcacccucgaguucaacaacgaguccuucaacuggacgggggugacccagaacggcaccagcuccgccugcauccggcgcagcuccagcuccuucuucagccggcugaacuggcugacccaccucaaguacacguaccccgcccugaacgugaccaugcccaacaacgagcaguucgacaagcuguacaucuggggcguccaccaccccgggaccgacaaggaccagaucuuccucuacgcgcaguccagcgggcgcaucaccgugagcacgaagcggucccagcaggccgugaucccgaacaucggcagccgcccccggauccgcgacauccccucccggaucagcaucuacuggaccaucgucaagcccggcgacauccugcugaucaacuccaccgggaaccucaucgccccgcgcggcuacuucaagauccggagcgggaaguccagcaucaugcgcuccgacgcccccaucggcaagugcaagagcgagugcaucacccccaacggcuccauccccaacgacaagccguuccagaacgugaaccggaucacguacggggccugcccccgcuacgugaagcacagcacccugaagcuggcgaccggcaugcggaacguccccgagaagcagacccgcgggaucuucggcgccaucgccggguucaucgagaacggcugggagggcaugguggacgggugguacggcuuccggcaccagaacuccgaggggcgcggccaggccgccgaccucaagagcacgcaggcggccaucgaccagaucaacgggaagcugaaccggcugaucggcaagaccaacgagaaguuccaccagaucgagaaggaguucuccgagguggagggccgcauccaggaccucgagaaguacgucgaggacaccaagaucgaccuguggagcuacaacgccgagcugcucguggcccuggagaaccagcacaccaucgaccugacggacuccgagaugaacaagcuguucgagaagaccaagaagcagcuccgcgagaacgccgaggacauggggaacggcugcuucaagaucuaccacaagugcgacaacgcgugcaucgggagcauccggaacggcaccuacgaccacaacguguaccgcgacgaggcccugaacaaccgguuccagaucaagggggucgagcucaaguccggcuacaaggacuggauccuguggaucagcuucgccaucagcugcuuccugcucugcguggcccugcugggcuucaucaugugggccugccagaaggggaacauccgcugcaacaucugcaucuga

SEQ ID NO: 77394 - RNA, 1701 nt, Artificial Sequence
  derived and/or modified CDS sequence (opt1) from hemagglutinin__InfluenzaA__ALE31859
augaagaccaucaucgcccugagcuacauccucugccugguguucgcccagaagauccccggcaacgacaacuccaccgcgacgcugugccucgggcaccacgccgucccgaacggcaccaucgugaagaccaucaccaacgaccgcaucgaggugacgaacgccaccgagcugguccagaacagcuccaucggggagaucugcgacagcccccaccagauccuggacggcgagaacugcacccucaucgacgcccugcugggggacccccagugcgacggcuuccagaacaagaagugggaccucuucguggagcgguccaaggccuacagcaacugcuaccccuacgacgugccggacuacgcgucccugcgcagccuggucgccuccagcggcacccucgaguucaacaacgaguccuucaacuggacgggggugacccagaacggcaccagcuccgccugcacccggcgcagcuccagcuccuucuucagccggcugaacuggcugacgcaccucaacuacaccuaccccgcccugaacgugaccaugcccaacaacgagcaguucgacaagcuguacaucuggggcguccaccaccccgggaccgacaaggaccagaucuuccucuacgcgcaguccagcgggcgcaucacggugagcaccaagcggucccagcaggccgugaucccgaacaucggcagccgcccccggauccgcgacauccccucccggaucagcaucuacuggaccaucgucaagcccggcgacaugcugcugaucaacuccaccgggaaccucaucgccccgcgcggcuacuucaagauccggagcgggaaguccagcaucaugcgcuccgacgcccccaucggcaagugcaagagcgagugcaucacgcccaacggcuccauccccaacgacaagccguuccagaacgugaaccggaucaccuacggggccugcccccgcuacgugaagcacagcacccugaagcuggcgaccggcaugcggaacguccccgagaagcagacgcgcgggaucuucggcgccaucgccggguucaucgagaacggcugggagggcaugguggacgggugguacggcuuccggcaccagaacuccgaggggcgcggccaggccgccgaccucaagagcacccaggcggccaucgaccagaucaacgggaagcugaaccggcugaucggcaagaccaacgagaaguuccaccagaucgagaaggaguucuccgagguggagggccgcauccaggaccucgagaaguacgucgaggacaccaagaucgaccuguggagcuacaacgccgagcugcucguggcccuggagaaccagcacacgaucgaccugaccgacuccgagaugaacaagcuguucgagaagaccaagaagcagcuccgcgagaacgccgaggacauggggaacggcugcuucaagaucuaccacaagugcgacaacgcgugcaucgggagcauccggaacggcaccuacgaccacaacguguaccgcgacgaggcccugaacaaccgguuccagaucaagggggucgagcucaaguccggcuacaaggacuggauccuguggaucagcuucgccaucagcugcuuccugcucugcguggcccugcugggcuucaucaugugggccugccagaaggggaacauccgcugcaacaucugcaucuga

SEQ ID NO: 77395 - RNA, 1701 nt, Artificial Sequence
  derived and/or modified CDS sequence (opt1) from hemagglutinin__InfluenzaA__ALE31860
augaagaccaucaucgcccugagcuacauccucugccugguguucgcccagaagauccccggcaacgacaacuccaccgcgacgcugugccucgggcaccacgccgucccgaacggcaccaucgugaagaccaucaccaacgaccgcaucgaggugacgaacgccaccgagcugguccagaacagcuccaucgggaagaucugcgacagcccccaccagauccuggacggcgagaacugcacccucaucgacgcccugcugggggacccccagugcgacggcuuccagaacaagaagugggaccucuucguggagcgguccaaggccuacagcaacugcuaccccuacgacgugccggacuacgcgucccugcgcagccuggucgccuccagcggcacccucgaguucaacaacgaguccuucaacuggacgggggugacccagaacggcaccagcuccgccugcauccggcgcagcuccagcuccuucuucagccggcugaacuggcugacccaccucaacuacacguaccccgcccugaacgugaccaugcccaacaacgagcaguucgacaagcuguacaucuggggcguccaccaccccgggaccgacaaggaccagaucuuccucuacgcgcaguccagcgggcgcaucaccgugagcacgaagcggucccagcaggccgugaucccgaacaucggcagccgcccccggauccgcgacauccccucccggaucagcaucuacuggaccaucgucaagcccggcgacauccugcugaucaacuccaccgggaaccucaucgccccgcgcggcuacuucaagauccggagcggggaguccagcaucaugcgcuccgacgcccccaucggcaagugcaagagcgagugcaucacccccaacggcuccauccccaacgacaagccguuccagaacgugaaccggaucacguacggggccugcccccgcuacgugaagcacagcacccugaagcuggcgaccggcaugcggaacguccccgagaagcagacccgcgggaucuucggcgccaucgccggguucaucgagaacggcugggagggcaugguggacgggugguacggcuuccggcaccagaacuccgaggggcgcggccaggccgccgaccucaagagcacgcaggcggccaucgaccagaucaacgggaagcugaaccggcugaucggcaagaccaacgagaaguuccaccagaucgagaaggaguucuccgagguggagggccgcauccaggaccucgagaaguacgucgaggacaccaagaucgaccuguggagcuacaacgccgagcugcucguggcccuggagaaccagcacaccaucgaccugacggacuccgagaugaacaagcuguucgagaagaccaagaagcagcuccgcgagaacgccgaggacauggggaacggcugcuucaagaucuaccacaagugcgacaacgcgugcaucgggagcauccggaacggcaccuacgaccacaacguguaccgcgacgaggcccugaacaaccgguuccagaucaagggggucgagcucaaguccggcuacaaggacuggauccuguggaucagcuucgccaucagcugcuuccugcucugcguggcccugcugggcuucaucaugugggccugccagaaggggaacauccgcugcaacaucugcaucuga

SEQ ID NO: 77396 - RNA, 1701 nt, Artificial Sequence; identical to SEQ ID NO: 76465
  derived and/or modified CDS sequence (opt1) from hemagglutinin__InfluenzaA__ALE31861

SEQ ID NO: 77397 - RNA, 1701 nt, Artificial Sequence
  derived and/or modified CDS sequence (opt1) from hemagglutinin__InfluenzaA__ALE31862
augaagaugaucaucgcccugagcuacauccucugccugguguucgcccagaagauccccggcaacgacaacuccaccgcgacccugugccucgggcaccacgccgucccgaacggcacgaucgugaagaccaucaccaacgaccgcaucgaggugaccaacgccacggagcugguccagaacagcuccaucggggagaucugcgacagcccccaccagauccuggacggcgagaacugcacccucaucgacgcccugcugggggacccccagugcgacggcuuccagaacaagaagugggaccucuucguggagcgguccaaggccuacagcaacugcuaccccuacgacgugccggacuacgcgucccugcgcagccuggucgccuccagcggcacccucgaguucaacaacgaguccuucaacuggaccggggugacgcagaacggcaccagcuccgccugcauccgcaagagcuccagcuccuucuucagccggcugaacuggcugacccaccucaacuacaccuaccccgcccugaacgugacgaugcccaacaacgagcaguucgacaagcuguacaucuggggcguccaccaccccgggaccgacaaggaccagaucuuccucuacgcgcgguccagcgggcgcaucaccgugagcaccaagcggucccagcaggccgugaucccgaacaucggcagccgcccccggauccgcgacauccccucccggaucagcaucuacuggacgaucgucaagcccggcgacauccugcugaucaacuccaccgggaaccucaucgccccgcgcggcuacuucaagauccggagcgggaaguccagcaucaugcgcuccgacgcccccaucggcaagugcaagagcgagugcaucacccccaacggcuccauccccaacgacaagccguuccagaacgugaaccggaucaccuacggggccugcccccgcuacgugaagcacagcacgcugaagcuggcgaccggcaugcggaacguccccgagaagcagacccgcgggaucuucggcgccaucgccggguucaucgagaacggcugggagggcaugguggacgggugguacggcuuccggcaccagaacuccgaggggcgcggccaggccgccgaccucaagagcacccaggcggccaucgaccagaucaacgggaagcugaaccggcugaucggcaagacgaacgagaaguuccaccagaucgagaaggaguucuccgagguggagggccgcauccaggaccucgagaaguacgucgaggacaccaagaucgaccuguggagcuacaacgccgaguuccugguggcccucgagaaccagcacaccaucgaccugaccgacuccgagaugaacaagcuguucgagaagacgaagaagcagcuccgcgagaacgccgaggacauggggaacggcugcuucaagaucuaccacaagugcgacaacgcgugcaucgggagcauccggaacggcaccuacgaccacaacguguaccgcgacgaggcccugaacaaccgguuccagaucaagggggucgagcugaaguccggcuacaaggacuggauccucuggaucagcuucgccaucagcugcuuccugcugugcguggcccuccugggcuucaucaugugggccugccagaaggggaacauccgcugcaacaucugcaucuga

SEQ ID NO: 77398 - RNA, 1701 nt, Artificial Sequence; identical to SEQ ID NO: 77123
  derived and/or modified CDS sequence (opt1) from hemagglutinin__InfluenzaA__ALE31863

SEQ ID NO: 77399 - RNA, 1701 nt, Artificial Sequence; identical to SEQ ID NO: 77123
  derived and/or modified CDS sequence (opt1) from hemagglutinin__InfluenzaA__ALE31865

SEQ ID NO: 77400 - RNA, 1701 nt, Artificial Sequence; identical to SEQ ID NO: 77123
  derived and/or modified CDS sequence (opt1) from hemagglutinin__InfluenzaA__ALE31866

SEQ ID NO: 77401 - RNA, 1701 nt, Artificial Sequence
  derived and/or modified CDS sequence (opt1) from hemagglutinin__InfluenzaA__ALE31867
augaagaccaucaucgcccugagcuacauccucugccugguguucgcccagaagauccccggcaacgacaacuccaccgcgacgcugugccucgggcaccacgccgucccgaacggcaccaucgugaagaccaucaccaacgaccgcaucgaggugacgaacgccaccgagcugguccagaacagcuccaucggggagaucugcgacagcccccaccagauccuggacggcgagaacugcacccucaucgacgcccugcugggggacccccagugcgacggcuuccagaacaagaagugggaccucuucguggagcgguccaaggccuacagcaacugcuaccccuacgacgugccggacuacgcgucccugcgcagccuggucgccuccagcggcacccucgaguucaacaacgaguccuucaacuggacgggggugacccagaacggcaccagcuccgccugcauccgcaagagcuccagcuccuucuucagccggcugaacuggcugacccaccucaacuacacguaccccgcccugaacgugaccaugcccaacaacgagcaguucgacaagcuguacaucuggggcguccaccaccccgggaccgacaaggaccagaucuuccucuacgcgcgguccagcgggcgcaucaccgugagcacgaagcggucccagcaggccgugaucccgaacaucggcagccgcccccggauccgcgacauccccucccggaucagcaucuacuggaccaucgucaagcccggcgacauccugcugaucaacuccaccgggaaccucaucgccccgcgcggcuacuucaagauccggagcgggaaguccagcaucaugcgcuccgacgcccccaucggcaagugcaagagcgagugcaucacccccaacggcuccauccccaacgacaagccguuccagaacgugaaccggaucacguacggggccugcccccgcuacgugaagcacagcacccugaagcuggcgaccggcaugcggaacguccccgagaagcagacccgcgggaucuucggcgccaucgccggguucaucgagaacggcugggagggcaugguggacgggugguacggcuuccggcaccagaacuccgaggggcgcggccaggccgccgaccucaagagcacgcaggcggccaucgaccagaucaacgggaagcugaaccggcugaucggcaagaccaacgagaaguuccaccagaucgagaaggaguucuccgagguggagggccgcauccaggaccucgagaaguacgucgaggacaccaagaucgaccuguggagcuacaacgccgagcugcucguggcccuggagaaccagcacaccaucgaccugacggacuccgagaugaacaagcuguucgagaagaccaagaagcagcuccgcgagaacgccgaggacauggggaacggcugcuucaagaucuaccacaagugcgacaacgcgugcaucgggagcauccggaacggcaccuacgaccacaacguguaccgcgacgaggcccugaacaaccgguuccagaucaagggggucgagcucaaguccggcuacaaggacuggauccuguggaucagcuucgccaucagcugcuuccugcucugcguggcccugcugggcuucaucaugugggccugccagaacgggaacauccgcugcaacaucugcaucuga

SEQ ID NO: 77402 - RNA, 1701 nt, Artificial Sequence; identical to SEQ ID NO: 76465
  derived and/or modified CDS sequence (opt1) from hemagglutinin__InfluenzaA__ALE31868

SEQ ID NO: 77403 - RNA, 1701 nt, Artificial Sequence; identical to SEQ ID NO: 77401
  derived and/or modified CDS sequence (opt1) from hemagglutinin__InfluenzaA__ALE31869

SEQ ID NO: 77404 - RNA, 1701 nt, Artificial Sequence; identical to SEQ ID NO: 77401
  derived and/or modified CDS sequence (opt1) from hemagglutinin__InfluenzaA__ALE31870

SEQ ID NO: 77405 - RNA, 1701 nt, Artificial Sequence
  derived and/or modified CDS sequence (opt1) from hemagglutinin__InfluenzaA__ALE31871
augaagaccaucaucgcccugagcuacauccucugccugguguucgcccagaagauccccggcaacgacaacuccaccgcgacgcugugccucgggcaccacgccgucccgaacggcaccaucgugaagaccaucaccaacgaccgcaucgaggugacgaacgccaccgagcugguccagaacagcuccaucggggagaucugcaacagcccccaccagauccuggacggcgagaacugcacccucaucgacgcccugcugggggacccccagugcgacggcuuccagaacaagaagugggaccucuucguggagcgguccaaggccuacagcaacugcuaccccuacgacgugccggacuacgcgucccugcgcagccuggucgccuccagcggcacccucgaguucaacaacgaguccuucaacuggacgggggugacccagaacggcaccagcuccgccugcauccgcaagagcuccagcuccuucuucagccggcugaacuggcugacccaccucaacuacacguaccccgcccugaacgugaccaugcccaacaacgagcaguucgacaagcuguacaucuggggcguccaccaccccgggaccgacaaggaccagaucuuccucuacgcgcgguccagcgggcgcaucaccgugagcacgaagcggucccagcaggccgugaucccgaacaucggcagccgcccccggauccgcgacauccccucccggaucagcaucuacuggaccaucgucaagcccggcgacauccugcugaucaacuccaccgggaaccucaucgccccgcgcggcuacuucaagauccggagcgggaaguccagcaucaugcgcuccgacgcccccaucggcaagugcaagagcgagugcaucacccccaacggcuccauccccaacgacaagccguuccagaacgugaaccggaucacguacggggccugcccccgcuacgugaagcacagcacccugaagcuggcgaccggcaugcggaacguccccgagaagcagacccgcgggaucuucggcgccaucgccggguucaucgagaacggcugggagggcaugguggacgggugguacggcuuccggcaccagaacuccgaggggcgcggccaggccgccgaccucaagagcacgcaggcggccaucgaccagaucaacgggaagcugaaccggcugaucggcaagaccaacgagaaguuccaccagaucgagaaggaguucuccgagguggagggccgcauccaggaccucgagaaguacgucgaggacaccaagaucgaccuguggagcuacaacgccgagcugcucguggcccuggagaaccagcacaccaucgaccugacggacuccgagaugaacaagcuguucgagaagaccaagaagcagcuccgcgagaacgccgaggacauggggaacggcugcuucaagaucuaccacaagugcgacaacgcgugcaucgggagcauccggaacggcaccuacgaccacaacguguaccgcgacgaggcccugaacaaccgguuccagaucaagggggucgagcucaaguccggcuacaaggacuggauccuguggaucagcuucgccaucagcugcuuccugcucugcguggcccugcugggcuucaucaugugggccugccagaaggggaacauccgcugcaacaucugcaucuga

SEQ ID NO: 77406 - RNA, 1701 nt, Artificial Sequence; identical to SEQ ID NO: 76451
  derived and/or modified CDS sequence (opt1) from hemagglutinin__InfluenzaA__ALE31872

SEQ ID NO: 77407 - RNA, 1701 nt, Artificial Sequence; identical to SEQ ID NO: 76465
  derived and/or modified CDS sequence (opt1) from hemagglutinin__InfluenzaA__ALE31873

SEQ ID NO: 77408 - RNA, 1701 nt, Artificial Sequence
  derived and/or modified CDS sequence (opt1) from hemagglutinin__InfluenzaA__ALE31874
augaagaccaucaucgcccugagcuacauccucugccugguguucgcccagaagcugcccggcaacgacaacuccgcggccacccucugccuggggcaccacgccgucccgaacggcacgaucgugaagaccaucaccaacgaccgcaucgaggugaccaacgccacggagcugguccagaacagcuccaucggggagaucugcgacagcccccaccagauccucgacggcgagaacugcacccugaucgacgcccugcucggggacccccagugcgacggcuuccagaacaagaagugggaccuguucguggagcgguccaaggcgcacagcaacugcuaccccuacgacgugccggacuacgccucccugcgcagccucgucgccuccagcggcacccuggaguucaacaacgaguccuucaacugggccggggugacccagaacggcacgagcuccagcugcauccggggguccaacagcuccuucuucagccgccugaacuggcucacccaccugaacuccaaguaccccgcgcugaacgugaccaugcccaacaacgagcaguucgacaagcucuacaucuggggcguccaccaccccgggaccgacaaggaccagaucuuccuguacgcccagagcagcggccggaucacgguguccaccaagcgcagccagcaggccgugaucccgaacaucggcucccggccccgcauccgggacauccccagccgcaucuccaucuacuggaccaucgucaagcccggggacauccugcucaucaacagcaccggcaaccugaucgccccgcggggguacuucaagauccgcuccggcaagagcuccaucaugcggagcgacgcccccaucggcaagugcaaguccgagugcaucacgcccaacgggagcauccccaacgacaagccguuccagaacgugaaccgcaucaccuacggcgcgugcccccgguacgugaagcaguccacccugaagcucgccaccgggaugcgcaacguccccgagaagcagacgcggggcaucuucggggccaucgccggcuucaucgagaacggcugggaggggaugguggacggcugguacggguuccgccaccagaacagcgagggccgggggcaggccgcggaccugaaguccacccaggccgccaucgaccagaucaacggcaagcugaaccgccucaucggcaagaccaacgagaaguuccaccagaucgagaaggaguucagcgagguggaggggcggauccaggaccuggagaaguacgucgaggacaccaagaucgaccugugguccuacaacgccgagcuccugguggcccuggagaaccagcacacgaucgaccucaccgacagcgagaugaacaagcuguucgagaagaccaagaagcagcugcgcgagaacgcggaggacaugggcaacgggugcuucaagaucuaccacaagugcgacaacgccugcaucggcuccauccgcaacgggaccuacgaccacgacguguaccgggacgaggcccucaacaaccgcuuccagaucaagggcgucgagcucaagagcggcuacaaggacuggauccuguggaucagcuucgccaucuccugcuuccugcugugcguggcccugcucggguucaucaugugggcgugccagaagggcaacauccggugcaacaucugcaucuga

SEQ ID NO: 77409 - RNA, 1701 nt, Artificial Sequence; identical to SEQ ID NO: 77408
  derived and/or modified CDS sequence (opt1) from hemagglutinin__InfluenzaA__ALE31875

SEQ ID NO: 77410 - RNA, 1701 nt, Artificial Sequence; identical to SEQ ID NO: 77408
  derived and/or modified CDS sequence (opt1) from hemagglutinin__InfluenzaA__ALE31876

SEQ ID NO: 77411 - RNA, 1701 nt, Artificial Sequence
  derived and/or modified CDS sequence (opt1) from hemagglutinin__InfluenzaA__ALE31877
augaagaccaucaucgcccugagcuacauccucugccugguguucgcccagaagcugcccgagaacgacaacuccaccgcgacgcucugccugggccaccacgccgucccgaacgggaccaucgugaagaccaucaccagcgaccgcaucgaggugacgaacgccaccgagcugguccagaacuccagcaucggcgagaucugcgacagcccccaccagauccucgacgggaagaacugcacccugaucgacgcccugcucggcgacccccagugcgacggguuccagaacaagaagugggaccuguucguggagcggagcaaggccuacuccaacugcuaccccuacgacgugccggacuacgcgagccugcgcucccucgucgccagcuccggcacccuggaguucaacgacgagagcuucaacugggccggcgugacgcagaacgggaccuccagcgccugcauccggggcuccaacagcuccuucuucagccgccugaacuggcucacccacuccaacuucaaguaccccgcgcugaacgugaccaugcccaacaacgagcaguucgacaagcuguacaucuggggcguccaccaccccgggacggacaaggaccagaucuuccucuacgcccagagcagcgggcggaucaccguguccaccaagcgcagccagcaggccgugaucccgaacaucggcucccggccccgcauccggaacauccccagccgcaucuccaucuacuggaccaucgucaagcccggcgacauccugcugaucaacagcacggggaaccucaucgccccgcggggcuacuucaagauccgcuccgggaaguccuccaucaugcggagcgacgcccccaucggcaagugcaaguccgagugcaucacccccaacggcagcauccccaacgacaagccguuccagaacgugaaccgcaucaccuacggggcgugcccccgguacgugaagcaguccacccugaagcuggccacgggcaugcgcaacguccccgagaagcagacccgggggaucuucggcgccaucgccggguucaucgagaacggcugggagggcaugaaggacgggugguacggcuuccgccaccagaacagcgaggggcggggccaggccgcggaccucaaguccacccaggccgccaucgaccagaucaacgggaagcugaaccgccugaucggcaagaccaacgagaaguuccaccagaucgagaaggaguucagcgagguggagggccggauccaggaccucgagaaguacguggaggacacgaagaucgaccugugguccuacaacgccgagcugcucgucgcccuggagaaccagcacaccaucgaccugaccgacagcgagaucaacaagcuguucgagaagaccaagaagcagcuccgcgagaacgcggaggacauggggaacggcugcuucaagaucuaccacaagugcgacaacgccugcaucggguccauccgcaacggcacguacgaccacgacguguaccgggacgaggcccugaacaaccgcuuccagaucaaggggguggagcucaagagcggcuacaaggacuggauccuguggaucagcuucgccaucuccugcuuccugcucugcgucgcccugcugggcuucaucaugugggcgugccagaaggggaacauccggugcaacaucugcaucuga

SEQ ID NO: 77412 - RNA, 1701 nt, Artificial Sequence; identical to SEQ ID NO: 76465
  derived and/or modified CDS sequence (opt1) from hemagglutinin__InfluenzaA__ALE31878

SEQ ID NO: 77413 - RNA, 1701 nt, Artificial Sequence; identical to SEQ ID NO: 76465
  derived and/or modified CDS sequence (opt1) from hemagglutinin__InfluenzaA__ALE31879

SEQ ID NO: 77414 - RNA, 1701 nt, Artificial Sequence; identical to SEQ ID NO: 76465
  derived and/or modified CDS sequence (opt1) from hemagglutinin__InfluenzaA__ALE31880

SEQ ID NO: 77415 - RNA, 1701 nt, Artificial Sequence
  derived and/or modified CDS sequence (opt1) from hemagglutinin__InfluenzaA__ALE31881
augaagaccaucaucgcccugagccacauccucugccugguguucgcccagaagauccccggcaacgacaacuccaccgcgacgcugugccucgggcaccacgccgucccgaacggcaccaucgugaagaccaucaccaacgaccgcaucgaggugacgaacgccaccgagcugguccagaacagcuccaucggggagaucugcgacagcccccaccagauccuggacggcgagaacugcacccucaucgacgcccugcugggggacccccagugcgacggcuuccagaacaagaagugggaccucuucguggagcgguccaaggccuacagcaacugcuaccccuacgacgugccggacuacgcgucccugcgcagccuggucgccuccagcggcacccucgaguucaacaacgaguccuucaacuggacgggggugacccagaacggcaccagcuccgccugcauccggcgcagcuccagcuccuucuucagccggcugaacuggcugacccaccucaacuacacguaccccgcccugaacgugaccaugcccaacaacgagcaguucgacaagcuguacaucuggggcguccaccaccccgggaccgacaaggaccagaucuuccucuacgcgcaguccagcgggcgcaucaccgugagcacgaagcggucccagcaggccgugaucccgaacaucggcagccgcccccggauccgcgacauccccucccggaucagcaucuacuggaccaucgucaagcccggcgacauccugcugaucaacuccaccgggaaccucguggccccgcgcggcuacuucaagauccggagcgggaaguccagcaucaugcgcuccgacgcccccaucggcaagugcaagagcgagugcaucacccccaacggcuccauccccaacgacaagccguuccagaacgugaaccggaucacguacggggccugcccccgcuacgucaagcacagcacccugaagcuggcgaccggcaugcggaacgugcccgagaagcagacccgcgggaucuucggcgccaucgccggguucaucgagaacggcugggagggcaugguggacgggugguacggcuuccggcaccagaacuccgaggggcgcggccaggccgccgaccucaagagcacgcaggcggccaucgaccagaucaacgggaagcugaaccggcugaucggcaagaccaacgagaaguuccaccagaucgagaaggaguucuccgaggucgagggccgcauccaggaccucgagaaguacguggaggacaccaagaucgaccuguggagcuacaacgccgagcugcucguggcccuggagaaccagcacaccaucgaccugacggacuccgagaugaacaagcuguucgagaagaccaagaagcagcuccgcgagaacgccgaggacauggggaacggcugcuucaagaucuaccacaagugcgacaacgcgugcaucgggagcauccggaacggcaccuacgaccacaacgucuaccgcgacgaggcccugaacaaccgguuccagaucaaggggaucgagcucaaguccggcuacaaggacuggauccuguggaucagcuucgccaucagcugcuuccugcucugcguggcccugcugggcuucaucaugugggccugccagaaggggaacauccgcugcaacaucugcaucuga

SEQ ID NO: 77416 - RNA, 1701 nt, Artificial Sequence; identical to SEQ ID NO: 76465
  derived and/or modified CDS sequence (opt1) from hemagglutinin__InfluenzaA__ALE31882

SEQ ID NO: 77417 - RNA, 1701 nt, Artificial Sequence; identical to SEQ ID NO: 76465
  derived and/or modified CDS sequence (opt1) from hemagglutinin__InfluenzaA__ALE31888

SEQ ID NO: 77418 - RNA, 1701 nt, Artificial Sequence; identical to SEQ ID NO: 76465
  derived and/or modified CDS sequence (opt1) from hemagglutinin__InfluenzaA__ALE31889

SEQ ID NO: 77419 - RNA, 1701 nt, Artificial Sequence; identical to SEQ ID NO: 77123
  derived and/or modified CDS sequence (opt1) from hemagglutinin__InfluenzaA__ALE31890

SEQ ID NO: 77420 - RNA, 1701 nt, Artificial Sequence; identical to SEQ ID NO: 77123
  derived and/or modified CDS sequence (opt1) from hemagglutinin__InfluenzaA__ALE31891

SEQ ID NO: 77421 - RNA, 1701 nt, Artificial Sequence; identical to SEQ ID NO: 76465
  derived and/or modified CDS sequence (opt1) from hemagglutinin__InfluenzaA__ALE31892

SEQ ID NO: 77422 - RNA, 1701 nt, Artificial Sequence; identical to SEQ ID NO: 76465
  derived and/or modified CDS sequence (opt1) from hemagglutinin__InfluenzaA__ALE31893

SEQ ID NO: 77423 - RNA, 1701 nt, Artificial Sequence; identical to SEQ ID NO: 77071
  derived and/or modified CDS sequence (opt1) from hemagglutinin__InfluenzaA__ALE31894

SEQ ID NO: 77424 - RNA, 1701 nt, Artificial Sequence; identical to SEQ ID NO: 76451
  derived and/or modified CDS sequence (opt1) from hemagglutinin__InfluenzaA__ALE31895

SEQ ID NO: 77425 - RNA, 1701 nt, Artificial Sequence; identical to SEQ ID NO: 76465
  derived and/or modified CDS sequence (opt1) from hemagglutinin__InfluenzaA__ALE31896

SEQ ID NO: 77426 - RNA, 1701 nt, Artificial Sequence; identical to SEQ ID NO: 76465
  derived and/or modified CDS sequence (opt1) from hemagglutinin__InfluenzaA__ALE31897

SEQ ID NO: 77427 - RNA, 1701 nt, Artificial Sequence; identical to SEQ ID NO: 76465
  derived and/or modified CDS sequence (opt1) from hemagglutinin__InfluenzaA__ALE31898

SEQ ID NO: 77428 - RNA, 1701 nt, Artificial Sequence
  derived and/or modified CDS sequence (opt1) from hemagglutinin__InfluenzaA__ALE31899
augaagaccaucaucgcccugagcuacauccucugccugguguucgcccagaagauccccggcaacgacaacuccaccgcgacgcugugccucgggcaccacgccgucccgaacggcaccaucgugaagaccaucaccaacgaccgcaucgaggugacgaacgccaccgagcugguccagaacagcuccaucggggagaucugcgacagcccccaccagauccuggacggcgagaacugcacccucaucgacgcccugcugggggacccccagugcgacggcuuccagaacaagaagugggaccucuucguggagcgguccaaggccuacagcaacugcuaccccuacgacgugccggacuacgcgucccugcgcagccuggucgccuccagcggcacccucgaguucaacaacgaguccuucaacuggacgggggugacccagaacggcaccagcuccgccugcauccgcaagagcuccagcuccuucuucagccggcugaacuggcugacccaccucaacuacacguaccccgcccugaacgugaccaugcccaacaacgagcaguucgacaagcuguacaucuggggcguccaccaccccgggaccgacaaggaccagaucuuccucuacgcgcgguccagcgggcgcaucaccgugagcacgaagcggucccagcaggccgugaucccgaacaucggcagccgcccccggauccgcgacauccccucccggaucagcaucuacuggaccaucgucaagcccggcgacauccugcugaucaacuccaccgggaaccucaucgccccgcgcggcuacuucaagauccggagcgggaaguccagcaugaugcgcuccgacgcccccaucggcaagugcaagagcgagugcaucacccccaacggcuccauccccaacgacaagccguuccagaacgugaaccggaucacguacggggccugcccccgcuacgugaagcacagcacccugaagcuggcgaccggcaugcggaacguccccgagaagcagacccgcgggaucuucggcgccaucgccggguucaucgagaacggcugggagggcaugguggacgggugguacggcuuccggcaccagaacuccgaggggcgcggccaggccgccgaccucaagagcacgcaggcggccaucgaccagaucaacgggaagcugaaccggcugaucggcaagaccaacgagaaguuccaccagaucgagaaggaguucuccgagguggagggccgcauccaggaccucgagaaguacgucgaggacaccaagaucgaccuguggagcuacaacgccgagcugcucguggcccuggagaaccagcacaccaucgaccugacggacuccgagaugaacaagcuguucgagaagaccaagaagcagcuccgcgagaacgccgaggacauggggaacggcugcuucaagaucuaccacaagugcgacaacgcgugcaucgggagcauccggaacggcaccuacgaccacaacguguaccgcgacgaggcccugaacaaccgguuccagaucaagggggucgagcucaaguccggcuacaaggacuggauccuguggaucagcuucgccaucagcugcuuccugcucugcguggcccugcugggcuucaucaugugggccugccagaaggggaacauccgcugcaacaucugcaucuga

SEQ ID NO: 77429 - RNA, 1701 nt, Artificial Sequence; identical to SEQ ID NO: 77071
  derived and/or modified CDS sequence (opt1) from hemagglutinin__InfluenzaA__ALE31901

SEQ ID NO: 77430 - RNA, 1701 nt, Artificial Sequence
  derived and/or modified CDS sequence (opt1) from hemagglutinin__InfluenzaA__ALE31902
augaagaccaucaucgcccugagcuacauccucugccugguguucgcccagaagauccccggcaacgacaacuccaccgcgacgcugugccucgggcaccacgccgucccgaacggcaccaucgugaagaccaucaccaacgaccgcaucgaggugacgaacgccaccgagcugguccagaacagcuccaucggggagaucugcgacagcccccaccagauccuggacggcgagaacugcacccucaucgacgcccugcugggggacccccagugcgacggcuuccagaacaagaagugggaccucuucguggagcgguccaaggccuacagcaacugcuaccccuacgacgugccggacuacgcgucccugcgcagccuggucgccuccagcggcacccucgaguucaacaacgaguccuucaacuggacgggggugacccagaacggcaccagcuccgccugcauccggcgcagcuccagcuccuucuucagccggcugaacuggcugacccaccucaacuacacguaccccgcccugaacgugaccaugcccaacaacgagcaguucgacaagcuguacaucuggggcguccaccaccccgggaccgacaaggaccagaucuuccucuacgcgcaguccagcgggcgcaucaccgugagcacgaagcggucccagcaggccgugaucccgaacaucggcagccgcccccggauccgcgacauccccucccggaucagcaucuacuggaccaucgucaagcccggcgacauccugcugaucaacuccaccgggaaccucaucgccccgcgcggcuacuucaagauccggagcgggaaguccagcaucaugcgcuccgacgcccccaucggcaagugcaagagcgagugcaucacccccaacggcuccauccccaacgacaagccguuccagaacgugaaccggaucacguacggggccugcccccgcuacgugaagcacagcacccugaagcuggcgaccggcaugcggaacguccccgagaagcagacccgcgggaucuucggcgccaucgccggguucaucgagaacggcugggagggcaugguggacgggugguacggcuuccggcaccagaacuccgaggggcgcggccaggccgccgaccucaagagcacgcaggcggccaucgaccagaucaacgggaagcugaaccggcugaucggcaagaccaacgagaaguuccaccagaucgagaaggaguucuccgagguggagggccgcauccaggaccucgagaaguacgucgaggacaccaagaucgaccuguggagcuacaacgccgagcugcucguggcccuggagaaccagcacaccaucgaccugacggacuccgagaugaacaagcuguucgagcgcaccaagaagcagcuccgggagaacgccgaggacauggggaacggcugcuucaagaucuaccacaagugcgacaacgcgugcaucgggagcauccgcaacggcaccuacgaccacaacguguaccgggacgaggcccugaacaaccgcuuccagaucaagggggucgagcucaaguccggcuacaaggacuggauccuguggaucagcuucgccaucagcugcuuccugcucugcguggcccugcugggcuucaucaugugggccugccagaaggggaacauccggugcaacaucugcaucuga

SEQ ID NO: 77431 - RNA, 1701 nt, Artificial Sequence; identical to SEQ ID NO: 76465
  derived and/or modified CDS sequence (opt1) from hemagglutinin__InfluenzaA__ALE31903

SEQ ID NO: 77432 - RNA, 1701 nt, Artificial Sequence; identical to SEQ ID NO: 76465
  derived and/or modified CDS sequence (opt1) from hemagglutinin__InfluenzaA__ALE31904

SEQ ID NO: 77433 - RNA, 1701 nt, Artificial Sequence
  derived and/or modified CDS sequence (opt1) from hemagglutinin__InfluenzaA__ALE31905
augaagaccaucaucgcccugggcuacauccucugccugggguucgcccagaagauccccggcaacgacaacagcaccgcgacgcugugccucgggcaccacgccgugccgaacggcaccaucgucaagaccaucaccaacgaccgcaucgaggugacgaacgccaccgagcuggugcagaacuccagcaucggggagaucugcgacagcccccacaagauccuggacggcgagaacugcacccucaucgacgcccugcugggcgacccccagugcgacggguuccagaacaagaagugggaccucuucgucgagcgguccaaggccuacuccaacugcuaccccuacgacgugccggacuacgcgagccugcgcucccugguggccagcuccggcacccucgaguucaacaacgagagcuucaacuggacgggggucacccagaacggcaccuccagcgccugcauccggcgcuccagcuccagcuucuucucccggcugaacuggcugacccaccucaacuacacguaccccgcccugaacgugaccaugcccaacaacgagcaguucgacaagcuguacaucuggggcgugcaccaccccgggaccgacaaggaccagaucuuccucuacgcgcagagcuccggccgcaucaccgucagcacgaagcggagccagcaggccgugaucccgaacaucgggucccgcccccggauccgcgacauccccagccggaucuccaucuacuggaccaucgugaagcccggcgacauccugcugaucaacagcaccgggaaccucaucgccccgcgcggcuacuucaagauccgguccggcaagagcuccaucaugcgcagcgacgcccccaucgggaagugcaaguccgagugcaucacccccaacggcagcauccccaacgacaagccguuccagaacgucaaccggaucacguacggggccugcccccgcuacgugaagcacuccacccugaagcuggcgaccggcaugcggaacgugcccgagaagcagacccgcgggaucuucggcgccaucgccggcuucaucgagaacgggugggagggcauggucgacgggugguacggcuuccggcaccagaacagcgaggggcgcggccaggccgccgaccucaaguccacgcaggcggccaucgaccagaucaacggcaagcugaaccggcugaucgggaagaccaacgagaaguuccaccagaucgagaaggaguucagcgagguggagggccgcauccaggaccucgagaaguacguggaggacaccaagaucgaccugugguccuacaacgccgagcugcucgucgcccuggagaaccagcacaccaucgaccugacggacagcgagaugaacaagcuguucgagaagaccaagaagcagcuccgcgagaacgccgaggacauggggaacggcugcuucaagaucuaccacaagugcgacaacgcgugcaucggguccauccggaacggcaccuacgaccacaacguguaccgcgacgaggcccugaacaaccgguuccagaucaagggcguggagcucaagagcggguacaaggacuggauccuguggaucuccuucgccaucagcugcuuccugcucugcgucgcccugcugggcuucaucaugugggccugccagaaggggaacauccgcugcaacaucugcaucuga

SEQ ID NO: 77434 - RNA, 1701 nt, Artificial Sequence; identical to SEQ ID NO: 76465
  derived and/or modified CDS sequence (opt1) from hemagglutinin__InfluenzaA__ALE31906

SEQ ID NO: 77435 - RNA, 1701 nt, Artificial Sequence
  derived and/or modified CDS sequence (opt1) from hemagglutinin__InfluenzaA__ALE31907
augaagaccaucaucgcccugagcuacauccucugccugguguucgcccagaagauccccggcaacgacaacuccaccgcgacgcugugccucgggcaccacgccgucccgaacggcaccaucgugaagaccaucaccaacgaccgcaucgaggugacgaacgccaccgagcugguccagaacagcuccaucggggagaucugcgacagcccccaccagauccuggacggcgagaacugcacccucaucgacgcccugcugggggacccccagugcgacggcuuccagaacaagaagugggaccucuucguggagcgguccaaggccuacagcaacugcuaccccuacgacgugccggacuacgcgucccugcgcagccuggucgccuccagcggcacccucgaguucaacaacgaguccuucaacuggacgggggugacccagaacggcaccagcuccgccugcauccggcgcagcuccagcuccuucuucagccggcugaacuggcugacccaccucaacuacaaguaccccgcccugaacgugacgaugcccaacaacgagcaguucgacaagcuguacaucuggggcguccaccaccccgggaccgacaaggaccagaucuuccucuacgcgcaguccagcgggcgcaucaccgugagcaccaagcggucccagcaggccgugaucccgaacaucggcagccgcccccggauccgcgacauccccucccggaucagcaucuacuggacgaucgucaaguccggcgacauccugcugaucaacagcaccgggaaccucaucgcgccccgcggcuacuucaagauccgguccggcaagagcuccaucaugcgcagcgacgccccgaucgggaagugcaaguccgagugcaucacccccaacggcagcauccccaacgacaagcccuuccagaacgugaaccggaucaccuacggggccugcccgcgcuacgugaagcacuccacgcugaagcuggccaccggcaugcggaacguccccgagaagcagacccgcgggaucuucggcgccaucgccggguucaucgagaacggcugggagggcaugguggacgggugguacggcuuccggcaccagaacagcgaggggcgcggccaggccgccgaccucaaguccacccaggcggccaucgaccagaucaacgggaagcugaaccggcugaucggcaagacgaacgagaaguuccaccagaucgagaaggaguucagcgagguggagggccgcauccaggaccucgagaaguacgucgaggacaccaagaucgaccugugguccuacaacgccgagcugcucguggcccuggagaaccagcacaccaucgaccugaccgacagcgagaugaacaagcuguucgagaagacgaagaagcagcuccgcgagaacgccgaggacauggggaacggcugcuucaagaucuaccacaagugcgacaacgcgugcaucggguccauccggaacggcaccuacgaccacaacguguaccgcgacgaggcccugaacaaccgguuccagaucaagggggucgagcucaagagcggcuacaaggacuggauccuguggaucagcuucgccaucuccugcuuccugcucugcguggcccugcugggcuucaucaugugggccugccagaaggggaacauccgcugcaacaucugcaucuga

SEQ ID NO: 77436 - RNA, 1701 nt, Artificial Sequence; identical to SEQ ID NO: 76465
  derived and/or modified CDS sequence (opt1) from hemagglutinin__InfluenzaA__ALE31908

SEQ ID NO: 77437 - RNA, 1701 nt, Artificial Sequence
  derived and/or modified CDS sequence (opt1) from hemagglutinin__InfluenzaA__ALE31909
augaagaccaucaucgcccugagcuacauccucugccugguguucgcccagaagauccccggcaacgacaacuccaccgcgacgcugugccucgggcaccacgccgucccgaacggcaccaucgugaagaccaucaccaacgaccgcaucgaggugacgaacgccaccgagcugguccagaacagcuccaucggggagaucugcgacagcccccaccagauccuggacggcgagaacugcacccucaucgacgcccugcugggggacccccagugcgacggcuuccagaacaagaagugggaccucuucguggagcgguccaaggccuacagcaacugcuaccccuacgacgugccggacuacgcgucccugcgcagccuggucgccuccagcggcacccucgaguucaacaacgaguccuucaacuggacgggggugacccagaacggcaccagcuccgccugcauccggcgcagcuccagcuccuucuucagccggcugaacuggcugacccaccucaacuacacguaccccgcccugaacgugaccaugcccaacaacgagcaguucgacaagcuguacaucuggggcguccaccaccccgggaccgacaaggaccagaucuuccucuacgcgcaguccagcgggcgcaucaccgugagcacgaagcggucccagcaggccgugaucccgaacaucggcagccgcccccggauccgcgacauccccucccggaucagcaucuacuggaccaucgucaaguccggcgacauccugcugaucaacagcaccgggaaccucaucgcgccccgcggcuacuucaagauccgguccggcaagagcuccaucaugcgcagcgacgccccgaucgggaagugcaaguccgagugcaucacccccaacggcagcauccccaacgacaagcccuuccagaacgugaaccggaucacguacggggccugcccgcgcuacgugaagcacuccacccugaagcuggccaccggcaugcggaacguccccgagaagcagacccgcgggaucuucggcgccaucgccggguucaucgagaacggcugggagggcaugguggacgggugguacggcuuccggcaccagaacagcgaggggcgcggccaggccgccgaccucaaguccacgcaggcggccaucgaccagaucaacgggaagcugaaccggcugaucggcaagaccaacgagaaguuccaccagaucgagaaggaguucagcgagguggagggccgcauccaggaccucgagaaguacgucgaggacaccaagaucgaccugugguccuacaacgccgagcugcucguggcccuggagaaccagcacaccaucgaccugacggacagcgagaugaacaagcuguucgagaagaccaagaagcagcuccgcgagaacgccgaggacauggggaacggcugcuucaagaucuaccacaagugcgacaacgcgugcaucggguccauccggaacggcaccuacgaccacaacguguaccgcgacgaggcccugaacaaccgguuccagaucaagggggucgagcucaagagcggcuacaaggacuggauccuguggaucagcuucgccaucuccugcuuccugcucugcguggcccugcugggcuucaucaugugggccugccagaaggggaacauccgcugcaacaucugcaucuga

SEQ ID NO: 77438 - RNA, 1701 nt, Artificial Sequence; identical to SEQ ID NO: 76465
  derived and/or modified CDS sequence (opt1) from hemagglutinin__InfluenzaA__ALE31910

SEQ ID NO: 77439 - RNA, 1701 nt, Artificial Sequence; identical to SEQ ID NO: 77388
  derived and/or modified CDS sequence (opt1) from hemagglutinin__InfluenzaA__ALE31912

SEQ ID NO: 77440 - RNA, 1701 nt, Artificial Sequence
  derived and/or modified CDS sequence (opt1) from hemagglutinin__InfluenzaA__ALE31913
augaagaccaucaucgcccugggcuacauccucugccugguguucgcccagaagauccccgggaacgacaacagcaccgcgacgcugugccucggccaccacgccgucccgaacgggaccaucgugaagaccaucaccaacgaccgcaucgaggugacgaacgccaccgagcugguccagaacuccagcaucggcgagaucugcgacagcccccacaagauccuggacggggagaacugcacccucaucgacgcccugcugggcgacccccagugcgacggcuuccagaacaagaagugggaccucuucguggagcgguccaaggccuacuccaacugcuaccccuacgacgugccggacuacgcgagccugcgcucccuggucgccagcuccgggacccucgaguucaacaacgagagcuucaacuggacgggcgugacccagaacgggaccuccagcgccugcauccggcgcuccagcuccagcuucuucucccggcugaacuggcugacccaccucaacuacacguaccccgcccugaacgugaccaugcccaacaacgagcaguucgacaagcuguacaucuggggcguccaccaccccgggaccgacaaggaccagaucuuccucuacgcgcagagcuccggccgcaucaccgugagcacgaagcggagccagcaggccgugaucccgaacaucggcucccgcccccggauccgcgacauccccagccggaucuccaucuacuggaccaucgucaagcccggggacauccugcugaucaacagcaccggcaaccucaucgccccgcgcggguacuucaagauccgguccggcaagagcuccaucaugcgcagcgacgcccccaucggcaagugcaaguccgagugcaucacccccaacgggagcauccccaacgacaagccguuccagaacgugaaccggaucacguacggcgccugcccccgcuacgugaagcacuccacccugaagcuggcgaccgggaugcggaacguccccgagaagcagacccgcggcaucuucggggccaucgccggcuucaucgagaacggcugggaggggaugguggacggcugguacggguuccggcaccagaacagcgagggccgcgggcaggccgccgaccucaaguccacgcaggcggccaucgaccagaucaacggcaagcugaaccggcugaucggcaagaccaacgagaaguuccaccagaucgagaaggaguucagcgagguggaggggcgcauccaggaccucgagaaguacgucgaggacaccaagaucgaccugugguccuacaacgccgagcugcucguggcccuggagaaccagcacaccaucgaccugacggacagcgagaugaacaagcuguucgagaagaccaagaagcagcuccgcgagaacgccgaggacaugggcaacgggugcuucaagaucuaccacaagugcgacaacgcgugcaucgaguccauccggaacggcaccuacgaccacaacguguaccgcgacgaggcccugaacaaccgguuccagaucaagggggucgagcucaagagcggcuacaaggacuggauccuguggaucuccuucgccaucagcugcuuccugcucugcguggcccugcugggcuucaucaugugggccugccagaaggggaacauccgcugcaacaucugcaucuga

SEQ ID NO: 77441 - RNA, 1701 nt, Artificial Sequence; identical to SEQ ID NO: 76465
  derived and/or modified CDS sequence (opt1) from hemagglutinin__InfluenzaA__ALE31914

SEQ ID NO: 77442 - RNA, 1701 nt, Artificial Sequence
  derived and/or modified CDS sequence (opt1) from hemagglutinin__InfluenzaA__ALE31915
augaagaccaucaucgcccugagcuacauccucugccugguguucgcccagaagauccccggcaacgacaacuccaccgcgacgcugugccucgggcaccacgccgucccgaacggcaccaucgugaagaccaucaccaacgaccgcaucgaggugacgaacgccaccgagcugguccagaacagcuccaucggggagaucugcgacagcccccaccagauccuggacggcgagaacugcacccucaucgacgcccugcugggggacccccagugcgacggcuuccagaacaagaagugggaccucuucguggagcgguccaaggccuacagcaacugcuaccccuacgacgugccggaguacgcgucccugcgcagccuggucgccuccagcggcacccucgaguucaacaacgaguccuucaacuggacgggggugacccagaacggcaccagcuccgccugcauccggcgcagcuccagcuccuucuucagccggcugaacuggcugacccaccucaacuacacguaccccgcccugaacgugaccaugcccaacaacgagcaguucgacaagcuguacaucuggggcguccaccaccccgggaccgacaaggaccagaucuuccucuacgcgcaguccagcgggcgcaucaccgugagcacgaagcggucccagcaggccgugaucccgaacaucggcagccgcccccggauccgcgacauccccucccggaucagcaucuacuggaccaucgucaagcccggcgacauccugcugaucaacuccaccgggaaccucaucgccccgcgcggcuacuucaagauccggagcgggaaguccagcaucaugcgcuccgacgcccccaucggcaagugcaagagcgagugcaucacccccaacggcuccauccccaacgacaagccguuccagaacgugaaccggaucacguacggggccugcccccgcuacgugaagcacagcacccugaagcuggcgaccggcaugcggaacguccccgagaagcagacccgcgggaucuucggcgccaucgccggguucaucgagaacggcugggagggcaugguggacgggugguacggcuuccggcaccagaacuccgaggggcgcggccaggccgccgaccucaagagcacgcaggcggccaucgaccagaucaacgggaagcugaaccggcugaucggcaagaccaacgagaaguuccaccagaucgagaaggaguucuccgagguggagggccgcauccaggaccucgagaaguacgucgaggacaccaagaucgaccuguggagcuacaacgccgagcugcucguggcccuggagaaccagcacaccaucgaccugacggacuccgagaugaacaagcuguucgagaagaccaagaagcagcuccgcgagaacgccgaggacauggggaacggcugcuucaagaucuaccacaagugcgacaacgcgugcaucgggagcauccggaacggcaccuacgaccacaacguguaccgcgacgaggcccugaacaaccgguuccagaucaagggggucgagcucaaguccggcuacaaggacuggauccuguggaucagcuucgccaucagcugcuuccugcucugcguggcccugcugggcuucaucaugugggccugccagaaggggaacauccgcugcaacaucugcaucuga

SEQ ID NO: 77443 - RNA, 1701 nt, Artificial Sequence; identical to SEQ ID NO: 76465
  derived and/or modified CDS sequence (opt1) from hemagglutinin__InfluenzaA__ALE31916

SEQ ID NO: 77444 - RNA, 1701 nt, Artificial Sequence; identical to SEQ ID NO: 76465
  derived and/or modified CDS sequence (opt1) from hemagglutinin__InfluenzaA__ALE31917

SEQ ID NO: 77445 - RNA, 1701 nt, Artificial Sequence; identical to SEQ ID NO: 76998
  derived and/or modified CDS sequence (opt1) from hemagglutinin__InfluenzaA__ALE31918

SEQ ID NO: 77446 - RNA, 1701 nt, Artificial Sequence; identical to SEQ ID NO: 77123
  derived and/or modified CDS sequence (opt1) from hemagglutinin__InfluenzaA__ALE31920

SEQ ID NO: 77447 - RNA, 1701 nt, Artificial Sequence; identical to SEQ ID NO: 76465
  derived and/or modified CDS sequence (opt1) from hemagglutinin__InfluenzaA__ALE31921

SEQ ID NO: 77448 - RNA, 1701 nt, Artificial Sequence; identical to SEQ ID NO: 76465
  derived and/or modified CDS sequence (opt1) from hemagglutinin__InfluenzaA__ALE31922

SEQ ID NO: 77449 - RNA, 1701 nt, Artificial Sequence; identical to SEQ ID NO: 77009
  derived and/or modified CDS sequence (opt1) from hemagglutinin__InfluenzaA__ALE31923

SEQ ID NO: 77450 - RNA, 1701 nt, Artificial Sequence; identical to SEQ ID NO: 76465
  derived and/or modified CDS sequence (opt1) from hemagglutinin__InfluenzaA__ALE31924

SEQ ID NO: 77451 - RNA, 1701 nt, Artificial Sequence; identical to SEQ ID NO: 76465
  derived and/or modified CDS sequence (opt1) from hemagglutinin__InfluenzaA__ALE31925

SEQ ID NO: 77452 - RNA, 1701 nt, Artificial Sequence
  derived and/or modified CDS sequence (opt1) from hemagglutinin__InfluenzaA__ALE31926
augaagaccaucaucgcccugagcuacauccucugccugguguucgcccagaagauccccggcaacgacaacuccaccgcgacgcugugccucgggcaccacgccgucccgaacggcaccaucgugaagaccaucaccaacgaccgcaucgaggugacgaacgccaccgagcugguccagaacagcuccaucggggagaucugcgacagcccccaccagauccuggacggcgagaacugcacccucaucgacgcccugcugggggacccccagugcgacggcuuccagaacaagaagugggaccucuucguggagcgguccaaggccuacagcaacugcuaccccuacgacgugccggacuacgcgucccugcgcagccuggucgccuccagcggcacccucgaguucaacaacgagggguucaacuggacgggcgugacccagaacgggaccuccagcgccugcauccggcgcuccagcuccagcuucuucucccggcugaacuggcugacccaccucaacuacaaguaccccgcccugaacgugacgaugcccaacaacgagcaguucgacaagcuguacaucuggggcguccaccaccccgggaccgacaaggaccagaucuuccucuacgcgcagagcuccggccgcaucaccgugagcaccaagcggagccagcaggccgugaucccgaacaucggcucccgcccccggauccgcgacauccccagccggaucuccaucuacuggacgaucgucaagcccggggacauccugcugaucaacagcaccggcaaccucaucgccccgcgcggguacuucaagauccgguccggcaagagcuccaucaugcgcagcgacgcccccaucggcaagugcaaguccgagugcaucacccccaacgggagcauccccaacgacaagccguuccagaacgugaaccggaucaccuacggcgccugcccccgcuacgugaagcacuccacgcugaagcuggcgaccgggaugcggaacguccccgagaagcagacccgcggcaucuucggggccaucgccggcuucaucgagaacggcugggaggggaugguggacggcugguacggguuccggcaccagaacagcgagggccgcgggcaggccgccgaccucaaguccacccaggcggccaucgaccagaucaacggcaagcugaaccggcugaucggcaagacgaacgagaaguuccaccagaucgagaaggaguucagcgagguggaggggcgcauccaggaccucgagaaguacgucgaggacaccaagaucgaccugugguccuacaacgccgagcugcucguggcccuggagaaccagcacaccaucgaccugaccgacagcgagaugaacaagcuguucgagaagacgaagaagcagcuccgcgagaacgccgaggacaugggcaacgggugcuucaagaucuaccacaagugcgacaacgcgugcaucggcuccauccggaacgggaccuacgaccacaacguguaccgcgacgaggcccugaacaaccgguuccagaucaagggcgucgagcucaagagcggcuacaaggacuggauccuguggaucuccuucgccaucagcugcuuccugcucugcguggcccugcugggguucaucaugugggccugccagaagggcaacauccgcugcaacaucugcaucuga

SEQ ID NO: 77453 - RNA, 1701 nt, Artificial Sequence; identical to SEQ ID NO: 76465
  derived and/or modified CDS sequence (opt1) from hemagglutinin__InfluenzaA__ALE31927

SEQ ID NO: 77454 - RNA, 1701 nt, Artificial Sequence
  derived and/or modified CDS sequence (opt1) from hemagglutinin__InfluenzaA__ALE31928
augaagaccaucaucgcccugagcuacauccucugccugguguucgcccagaagcugcccggcaacgacaacuccaccgcgacgcucugccuggggcaccacgccgucccgaacggcaccaucgugaagaccaucaccaacgaccgcaucgaggugacgaacgccaccgagcugguccagaacagcuccaucggggagaucugcgacagcccccaccagauccucgacggcgagaacugcacccugaucgacgcccugcucggggacccccagugcgacggcuuccagaacaagaagugggaccuguucguggagcgguccaaggccuacagcaacugcuaccccuacgacgugccggacuacgcgucccugcgcagccucgucgccuccagcggcacccuggaguucaacaacgaguccuucaacugggccggggugacgcagaacggcaccagcuccgccugcauccgggggagcaacuccagcuucuucucccgccugaacuggcucacccacagcaacuucaaguaccccgcgcugaacgugaccaugcccaacaacgagcaguucgacaagcuguacaucuggggcguccaccaccccgggacggacaaggaccagaucuuccucuacgcccaguccagcggccggaucaccgugagcaccaagcgcucccagcaggccgugaucccgaacaucggcagccggccccgcauccgggacauccccucccgcaucagcaucuacuggaccaucgucaagcccggggacauccugcugaucaacuccacgggcaaccucaucgccccgcggggguacuucaagauccgcagcggcaaguccagcaucaugcgguccgacgcccccaucggcaagugcaagagcgagugcaucacccccaacggguccauccccaacgacaagccguuccagaacgugaaccgcaucaccuacggcgcgugcccccgguacgugaagcagagcacccugaagcuggccacggggaugcgcaacguccccgagaagcagacccggggcaucuucggggccaucgccggcuucaucgagaacggcugggaggggaugguggacggcugguacggguuccgccaccagaacuccgagggccgggggcaggccgcggaccucaagagcacccaggccgccaucgaccagaucaacggcaagcugaaccgccugaucggcaagaccaacgagaaguuccaccagaucgagaaggaguucuccgagguggaggggcggauccaggaccucgagaaguacgucgaggacacgaagaucgaccuguggagcuacaacgccgagcugcucguggcccuggagaaccagcacaccaucgaccugaccgacuccgagaugaacaagcuguucgagaagaccaagaagcagcuccgcgagaacgcggaggacaugggcaacgggugcuucaagaucuaccacaagugcgacaacgccugcaucggcagcauccgcaacgggacguacgaccacgacguguaccgggacgaggcccugaacaaccgcuuccagaucaagggcgucgagcucaaguccggcuacaaggacuggauccuguggaucagcuucgccaucagcugcuuccugcucugcguggcccugcugggguucaucaugugggcgugccagaagggcaacauccggugcaacaucugcaucuga

SEQ ID NO: 77455 - RNA, 1701 nt, Artificial Sequence; identical to SEQ ID NO: 77101
  derived and/or modified CDS sequence (opt1) from hemagglutinin__InfluenzaA__ALE31930

SEQ ID NO: 77456 - RNA, 1701 nt, Artificial Sequence; identical to SEQ ID NO: 76465
  derived and/or modified CDS sequence (opt1) from hemagglutinin__InfluenzaA__ALE31931

SEQ ID NO: 77457 - RNA, 1701 nt, Artificial Sequence; identical to SEQ ID NO: 76465
  derived and/or modified CDS sequence (opt1) from hemagglutinin__InfluenzaA__ALE31932

SEQ ID NO: 77458 - RNA, 1701 nt, Artificial Sequence
  derived and/or modified CDS sequence (opt1) from hemagglutinin__InfluenzaA__ALE31933
augaagaccaucaucgcccugagcuacauccucugccugguguacgcccagaagauccccggcaacgacaacuccaccgcgacgcugugccucgggcaccacgccgucccgaacggcaccaucgugaagaccaucaccaacgaccgcaucgaggugacgaacgccaccgagcugguccagaacagcuccaucggggagaucugcgacagcccccaccagauccuggacggcgagaacugcacccucaucgacgcccugcugggggacccccagugcgacggcuuccagaacaagaagugggaccucuucguggagcgguccaaggccuacagcaacugcuaccccuacgacgugccggacuacgcgucccugcgcagccuggucgccuccagcggcacccucgaguucaacaacgaguccuucaacuggacgggggugacccagaacggcaccagcuccgccugcauccggcgcagcuccagcuccuucuucagccggcugaacuggcugacccaccucaaguacacguaccccgcccugaacgugaccaugcccaacaacgagcaguucgacaagcuguacaucuggggcguccaccaccccgggaccgacaaggaccagaucuuccucuacgcgcaguccagcgggcgcaucaccgugagcacgaagcggucccagcaggccgugaucccgaacaucggcagccgcccccggauccgcgacauccccucccggaucagcaucuacuggaccaucgucaagcccggcgacauccugcugaucaacuccaccgggaaccucaucgccccgcgcggcuacuucaagauccggagcgggaaguccagcaucaugcgcuccgacgcccccaucggcaagugcaagagcgagugcaucacccccaacggcuccauccccaacgacaagccguuccagaacgugaaccggaucacguacggggccugcccccgcuacgugaagcacagcacccugaagcuggcgaccggcaugcggaacguccccgagaagcagacccgcgggaucuucggcgccaucgccggguucaucgagaacggcugggagggcaugguggacgggugguacggcuuccggcaccagaacuccgaggggcgcggccaggccgccgaccucaagagcacgcaggcggccaucgaccagaucaacgggaagcugaaccggcugaucggcaagaccaacgagaaguuccaccagaucgagaaggaguucuccgagguggagggccgcauccaggaccucgagaaguacgucgaggacaccaagaucgaccuguggagcuacaacgccgagcugcucguggcccuggagaaccagcacaccaucgaccugacggacuccgagaugaacaagcuguucgagaagaccaagaagcagcuccgcgagaacgccgaggacauggggaacggcugcuucaagaucuaccacaagugcgacaacgcgugcaucgggagcauccggaacggcaccuacgaccacaacguguaccgcgacgaggcccugaacaaccgguuccagaucaagggggucgagcucaaguccggcuacaaggacuggauccuguggaucagcuucgccaucagcugcuuccugcucugcguggcccugcugggcuucaucaugugggccugccagaaggggaacauccgcugcaacaucugcaucuga

SEQ ID NO: 77459 - RNA, 1701 nt, Artificial Sequence
  derived and/or modified CDS sequence (opt1) from hemagglutinin__InfluenzaA__ALE31934
augaagaccaucaucgcccugagcuacauccucugccugguguucgcccagaagauccccggcaacgacaacuccaccgcgacgcugugccucgggcaccacgccgucccgaacggcaccaucgugaagaccaucaccaacgaccgcaucgaggugacgaacgccaccgagcugguccagaacagcuccaucggggagaucugcgacagcccccaccagauccuggacggcgagaacugcacccucaucgacgcccugcugggggacccccagugcgacggcuuccagaacaagaagugggaccucuucguggagcgguccaaggccuacagcaacugcuaccccuacgacgugccggacuacgcgucccugcgcagccuggucgccuccagcggcacccucgaguucaacaacgaguccuucaacuggacgggggugacccagaacggcaccagcuccgccugcauccgcaagagcuccagcuccuucuucagccggcugaacuggcugacccaccucaacuacacguaccaggcccugaacgugaccaugcccaacaacgagcaguucgacaagcuguacaucuggggcguccaccaccccgggaccgacaaggaccagaucuuccucuacgcgcgguccagcgggcgcaucaccgugagcacgaagcggucccagcaggccgugauccccaacaucggcagccgcccgcggauccgcgacauccccucccggaucagcaucuacuggaccaucgucaagcccggcgacauccugcugaucaacuccaccgggaaccucaucgcgccccgcggcuacuucaagauccggagcgggaaguccagcaucaugcgcuccgacgccccgaucggcaagugcaagagcgagugcaucacccccaacggcuccauccccaacgacaagcccuuccagaacgugaaccggaucacguacggggccugcccgcgcuacgugaagcacagcacccugaagcuggccaccggcaugcggaacauccccgagaagcagacccgcgggaucuucggcgccaucgccggguucaucgagaacggcugggagggcauggucgacgggugguacggcuuccggcaccagaacuccgaggggcgcggccaggccgccgaccucaagagcacgcaggcggccaucgaccagaucaacgggaagcugaaccggcugaucggcaagaccaacgagaaguuccaccagaucgagaaggaguucuccgagguggagggccgcauccaggaccucgagaaguacguggaggacaccaagaucgaccuguggagcuacaacgccgagcugcucgucgcccuggagaaccagcacaccaucgaccugacggacuccgagaugaacaagcuguucgagaagaccaagaagcagcuccgcgagaacgccgaggacauggggaacggcugcuucaagaucuaccacaagugcgacaacgcgugcaucgggagcauccggaacggcaccuacgaccacaacguguaccgcgacgaggcccugaacaaccgguuccagaucaaggggguggagcucaaguccggcuacaaggacuggauccuguggaucagcuucgccaucagcugcuuccugcucugcgucgcccugcugggcuucaucaugugggccugccagaaggggaacauccgcugcaacaucugcaucuga

SEQ ID NO: 77460 - RNA, 1701 nt, Artificial Sequence; identical to SEQ ID NO: 76465
  derived and/or modified CDS sequence (opt1) from hemagglutinin__InfluenzaA__ALE31935

SEQ ID NO: 77461 - RNA, 1701 nt, Artificial Sequence; identical to SEQ ID NO: 77247
  derived and/or modified CDS sequence (opt1) from hemagglutinin__InfluenzaA__ALE31936

SEQ ID NO: 77462 - RNA, 1701 nt, Artificial Sequence
  derived and/or modified CDS sequence (opt1) from hemagglutinin__InfluenzaA__ALE31937
augaagaccaucaucgcccugagcuacauccucugccugguguucgcccagaagcugcccgagaacgacaacuccaccgcgacgcucugccugggccaccacgccgucccgaacgggaccaucgugaagaccaucaccaacgaccgcaucgaggugacgaacgccaccgagcugguccagaacagcuccaucggcgagaucugcgacagcccccaccagauccucgacggggagaacugcacccugaucgacgcccugcucggcgacccccagugcgacggguuccagaacaagaagugggaccuguucguggagcgguccaaggccuacagcaacugcuaccccuacgacgugccggacuacgcgucccugcgcagccucgucgccuccagcggcacccuggaguucaacaacgaguccuucaacugggccggcgugacgcagaacgggaccagcuccagcugcauccggggcuccaacagcuccuucuucagccgccugaacuggcucacccaccugaacuccaaguaccccgcccugaacgugaccaugcccaacaacgagcaguucgacaagcucuacaucuggggcguccaccaccccgggacggacaaggaccagaucuuccuguacgcgcagccgagcgggcggaucaccgugagcaccaagcgcucccagcaggccgugauccccaacaucggcagccggccccgcauccgggacauccccucccgcaucagcaucuacuggaccaucgucaagccgggcgacauccugcucaucaacuccacggggaaccugaucgcgccccggggcuacuucaagauccgcagcgggaaguccagcaucaugcgguccgacgcccccaucggcaagugcaagagcgagugcaucacccccaacggcuccaucccgaacgacaagcccuuccagaacgugaaccgcaucaccuacggggccugcccccgguacgugaagcagagcacccugaagcucgccacgggcaugcgcaacguccccgagcggcagacccgcgggaucuucggcgccaucgccggguucaucgagaacggcugggagggcaugguggacgggugguacggcuuccggcaccagaacuccgaggggcgcggccaggccgccgaccucaagagcacccaggcggccaucgaccagaucaacgggaagcugaaccggcugaucggcaagaccaacgagaaguuccaccagaucgagaaggaguucuccgagguggagggccgcauccaggaccuggagaaguacgucgaggacacgaagaucgaccuguggagcuacaacgccgagcuccugguggcccuggagaaccagcacaccaucgaccucaccgacuccgagaugaacaagcuguucgagaagaccaagaagcagcugcgcgagaacgccgaggacauggggaacggcugcuucaagaucuaccacaagugcgacaacgcgugcaucgggagcauccggaacggcacguacgaccacgacguguaccgcgacgaggcccucaacaaccgguuccagaucaagggggucgagcugaaguccggcuacaaggacuggauccuguggaucagcuucgccaucagcugcuuccuccugugcguggcccugcucggcuucaucaugugggccugccagaaggggaacauccgcugcaacaucugcaucuga

SEQ ID NO: 77463 - RNA, 1701 nt, Artificial Sequence; identical to SEQ ID NO: 76465
  derived and/or modified CDS sequence (opt1) from hemagglutinin__InfluenzaA__ALE31938

SEQ ID NO: 77464 - RNA, 1701 nt, Artificial Sequence; identical to SEQ ID NO: 77071
  derived and/or modified CDS sequence (opt1) from hemagglutinin__InfluenzaA__ALE31939

SEQ ID NO: 77465 - RNA, 1701 nt, Artificial Sequence; identical to SEQ ID NO: 76465
  derived and/or modified CDS sequence (opt1) from hemagglutinin__InfluenzaA__ALE31941

SEQ ID NO: 77466 - RNA, 1701 nt, Artificial Sequence; identical to SEQ ID NO: 77022
  derived and/or modified CDS sequence (opt1) from hemagglutinin__InfluenzaA__ALE31943

SEQ ID NO: 77467 - RNA, 1701 nt, Artificial Sequence
  derived and/or modified CDS sequence (opt1) from hemagglutinin__InfluenzaA__ALE31944
augaagaccaucaucgcccugagcuacauccucugccugguguucgcccagaagcugcccgagaacgacaacuccaccgcgacgcucugccugggccaccacgccgucccgaacgggaccaucgugaagaccaucaccagcgaccgcaucgaggugacgaacgccaccgagcugguccagaacuccagcaucggcgagaucugcgacagcccccaccagauccucgacgggaagaacugcacccugaucgacgcccugcucggcgacccccagugcgacggguuccagaacaagaagugggaccuguucguggagcggagcaaggccuacuccaacugcuaccccuacgacgugccggacuacgcgagccugcgcucccucgucgccagcuccggcacccuggaguucaacgacgagagcuucaacugggccggcgugacgcagaacgggaccuccagcgccugcauccggggcuccaacagcuccuucuucagccgccugaacuggcucacccacuccaacuucaaguaccccgcgcugaacgugaccaugcccaacaacgagcaguucgacaagcuguacaucuggggcguccaccaccccgggacggacaaggaccagaucuuccucuacgcccagagcagcgggcggaucaccguguccaccaagcgcagccagcaggccgugaucccgaacaucggcucccggccccgcauccgggacauccccagccgcaucuccaucuacuggaccaucgucaagcccggcgacauccugcugaucaacagcacggggaaccucaucgccccgcggggcuacuucaagauccgcuccgggaaguccuccaucaugcggagcgacgcccccaucggcaagugcaaguccgagugcaucacccccaacggcagcauccccaacgacaagccguuccagaacgugaaccgcaucaccuacggggcgugcccccgguacgugaagcaguccacccugaagcuggccacgggcaugcgcaacguccccgagaagcagacccgggggaucuucggcgccaucgccggguucaucgagaacggcugggagggcaugaaggacgggugguacggcuuccgccaccagaacagcgaggggcggggccaggccgcggaccucaaguccacccaggccgccaucgaccagaucaacgggaagcugaaccgccugaucggcaagaccaacgagaaguuccaccagaucgagaaggaguucagcgagguggagggccggauccaggaccucgagaaguacguggaggacacgaagaucgaccugugguccuacaacgccgagcugcucgucgcccuggagaaccagcacaccaucgaccugaccgacagcgagaugaacaagcuguucgagaagaccaagaagcagcuccgcgagaacgcggaggacauggggaacggcugcuucaagaucuaccacaagugcgacaacgccugcaucggguccauccgcaacggcacguacgaccacgacguguaccgggacgaggcccugaacaaccgcuuccagaucaaggggguggagcucaagagcggcuacaaggacuggauccuguggaucagcuucgccaucuccugcuuccugcucugcgucgcccugcugggcuucaucaugugggcgugccagaaggggaacauccggugcaacaucugcaucuga

SEQ ID NO: 77468 - RNA, 1701 nt, Artificial Sequence
  derived and/or modified CDS sequence (opt1) from hemagglutinin__InfluenzaA__ALE31945
augaagaccaucaucgcccugagcuacauccucugccugguguucgcccagaagauccccggcaacgacaacuccaccgcgacgcugugccucgggcaccacgccgucccgaacggcaccaucgugaagaccaucaccaacgaccgcaucgaggugacgaacgccaccgagcugguccagaacagcuccaucggggagaucugcgacagcccccaccagauccuggacggcgagaacugcacccucaucgacgcccugcugggggacccccagugcgacggcuuccagaacaagaagugggaccucuucguggagcgguccaaggccuacagcaacugcuaccccuacgacgugccggacuacgcgucccugcgcagccuggucgccuccagcggcacccucgaguucaacaacgaguccuucaacuggacgggggugacccagaacggcaccagcuccgccugcauccggcgcagcuccagcuccuucuucagccggcugaacuggcugacccaccucaacuacacguaccccgcccugaacgugaccaugcccaacaacgagcaguucgacaagcuguacaucuggggcguccaccaccccgggaccgacaaggaccagaucuuccucuacgcgcaguccagcgggcgcaucaccgugagcacgaagggcucccagcaggccgugaucccgaacgucggcagccggccccgcauccgggacauccccucccgcaucagcaucuacuggaccaucgugaagcccggggacauccugcugaucaacuccaccggcaaccucaucgccccgcggggguacuucaagauccgcagcggcaaguccagcaucaugcgguccgacgcccccaucggcaagugcaagagcgagugcaucacccccaacggguccauccccaacgacaagccguuccagaacgugaaccgcaucacguacggcgccugcccccgguacgucaagcacagcacccugaagcuggcgaccgggaugcgcaacgugcccgagaagcagacccggggcaucuucggggccaucgccggcuucaucgagaacggcugggaggggaugguggacggcugguacggguuccgccaccagaacuccgagggccgggggcaggccgccgaccucaagagcacgcaggcggccaucgaccagaucaacggcaagcugaaccgccugaucggcaagaccaacgagaaguuccaccagaucgagaaggaguucuccgaggucgaggggcggauccaggacaucgagaaguacguggaggacaccaagaucgaccucuggagcuacaacgccgagcugcugguggcccucgagaaccagcacaccaucgaccugacggacuccgagaugaacaagcuguucgagaagaccaagaagcagcuccgcgagaacgccgaggacaugggcaacgggugcuucaagaucuaccacaagugcgacaacgcgugcaucggcagcauccgcaacgggaccuacgaccacaacgucuaccgggacgaggcccugaacaaccgcuuccagaucaagggcguggagcugaaguccggcuacaaggacuggauccucuggaucagcuucgccaucagcugcuuccugcugugcguggcccuccugggguucaucaugugggccugccagaagggcaacauccggugcaacaucugcaucuga

SEQ ID NO: 77469 - RNA, 1701 nt, Artificial Sequence; identical to SEQ ID NO: 77123
  derived and/or modified CDS sequence (opt1) from hemagglutinin__InfluenzaA__ALE31946

SEQ ID NO: 77470 - RNA, 1701 nt, Artificial Sequence; identical to SEQ ID NO: 77123
  derived and/or modified CDS sequence (opt1) from hemagglutinin__InfluenzaA__ALE31947

SEQ ID NO: 77471 - RNA, 1701 nt, Artificial Sequence
  derived and/or modified CDS sequence (opt1) from hemagglutinin__InfluenzaA__ALE31948
augaagaccaucaucgcccugagcuacauccucugccugguguucgcccagaagauccccggcaacgacaacuccaccgcgacgcugugccucgggcaccacgccgucccgaacggcaccaucgugaagaccaucaccaacgaccgcaucgaggugacgaacgccaccgagcugguccagaacagcuccaucggggagaucugcgacagcccccaccagauccuggacggcgagaacugcacccucaucgacgcccugcugggggacccccagugcgacggcuuccagaacaagaagugggaccucuucguggagcgguccaaggccuacagcaacugcuaccccuacgacgugccggacuacgcgucccugcgcagccuggucgccuccagcggcacccucgaguucaacaacgaguccuucaacuggacgggggugacccagaacggcaccagcuccgccugcauccgcaagagcuccagcuccuucuucagccggcugaacuggcugacccaccucaacuacacguaccccgcccugaacgugaccaugcccaacaacgagcaguucgacaagcuguacaucuggggcguccaccaccccgggaccgacaaggaccagaucuuccucuacgcgcgguccagcgggcgcaucaccgugagcacgaagcggucccagcaggccgugaucccgaacaucggcagccgcccccggauccgcgacauccccucccggaucagcaucuacuggaccaucgucaagcccggcgacauccugcugaucaacuccaccgggaaccucaucgccccgcgcggcuacuucaagauccggagcgggaaguccagcaucaugcgcuccgacgcccccaucggcaagugcaagagcgagugcaucacccccaacggcuccauccccaacgacaagccguuccagaacgugaaccggaucacguacggggccugcccccgcuacgugaagcacagcacccugaagcuggcgaccggcaugcggaacguccccgagaagcagacccgcgggaucuucggcgccaucgccggguucaucgagaacggcugggagggcaugguggacgggugguacggcuuccggcaccagaacuccgaggggcgcggccaggccgccgaccucaagagcacgcaggcggccaucgaccagaucaacgggaagcugaaccggcuggugggcaagaccaacgagaaguuccaccagaucgagaaggaguucuccgaggucgagggccgcauccaggaccucgagaaguacguggaggacaccaagaucgaccuguggagcuacaacgccgaguuccugguggcccucgagaaccagcacaccaucgaccugacggacuccgagaugaacaagcuguucgagaagaccaagaagcagcuccgcgagaacgccgaggacauggggaacggcugcuucaagaucuaccacaagugcgacaacgcgugcaucgggagcauccggaacggcaccuacgaccacaacgucuaccgcgacgaggcccugaacaaccgguuccagaucaaggggguggagcugaaguccggcuacaaggacuggauccucuggaucagcuucgccaucagcugcuuccugcugugcguggcccuccugggcuucaucaugugggccugccagaaggggaacauccgcugcaacaucugcaucuga

SEQ ID NO: 77472 - RNA, 1701 nt, Artificial Sequence; identical to SEQ ID NO: 77123
  derived and/or modified CDS sequence (opt1) from hemagglutinin__InfluenzaA__ALE31949

SEQ ID NO: 77473 - RNA, 1701 nt, Artificial Sequence; identical to SEQ ID NO: 76465
  derived and/or modified CDS sequence (opt1) from hemagglutinin__InfluenzaA__ALE31950

SEQ ID NO: 77474 - RNA, 1701 nt, Artificial Sequence; identical to SEQ ID NO: 77009
  derived and/or modified CDS sequence (opt1) from hemagglutinin__InfluenzaA__ALE31951

SEQ ID NO: 77475 - RNA, 1701 nt, Artificial Sequence; identical to SEQ ID NO: 76465
  derived and/or modified CDS sequence (opt1) from hemagglutinin__InfluenzaA__ALE31952

SEQ ID NO: 77476 - RNA, 1701 nt, Artificial Sequence
  derived and/or modified CDS sequence (opt1) from hemagglutinin__InfluenzaA__ALE31953
augaagaccaucaucgcccugagcuacauccucugccugguguucgcccagaagauccccggcaacgacaacuccaccgcgacgcugugccucgggcaccacgccgucccgaacggcaccaucgugaagaccaucaccaacgaccgcaucgaggugacgaacgccaccgagcugguccagaacagcuccaucggggagaucugcgacagcccccaccagauccuggacggcgagaacugcacccucaucgacgcccugcugggggacccccagugcgacggcuuccagaacaagaagugggaccucuucguggagcgguccaaggccuacagcaacugcuaccccuacgacgugccggacuacgcgucccugcgcagccuggucgccuccagcggcacccucgaguucaacaacgaguccuucaacuggacgggggugacccagaacggcaccagcuccgccugcauccgcaagagcuccagcuccuucuucagccggcugaacuggcugacccaccucaacuacacguaccccgcccugaacgugaccaugcccaacaacgagcaguucgacaagcuguacaucuggggcguccaccaccccgggaccgacaaggaccagaucuuccucuucgcgcgguccagcgggcgcaucaccgugagcacgaagcggucccagcaggccgugaucccgaacaucggcagccgcccccggauccgcgacauccccucccggaucagcaucuacuggaccaucgucaagcccggcgacauccugcugaucaacuccaccgggaaccucaucgccccgcgcggcuacuucaagauccggagcgggaaguccagcaucaugcgcuccgacgcccccaucggcaagugcaagagcgagugcaucacccccaacggcuccauccccaacgacaagccguuccagaacgugaaccggaucacguacggggccugcccccgcuacgugaagcacagcacccugaagcuggcgaccggcaugcggaacguccccgagaagcagacccgcgggaucuucggcgccaucgccggguucaucgagaacggcugggagggcaugguggacgggugguacggcuuccggcaccagaacuccgaggggcgcggccaggccgccgaccucaagagcacgcaggcggccaucgaccagaucaacgggaagcugaaccggcugaucggcaagaccaacgagaaguuccaccagaucgagaaggaguucuccgagguggagggccgcauccaggaccucgagaaguacgucgaggacaccaagaucgaccuguggagcuacaacgccgagcugcucguggcccuggagaaccagcacaccaucgaccugacggacuccgagaugaacaagcuguucgagaagaccaagaagcagcuccgcgagaacgccgaggacauggggaacggcugcuucaagaucuaccacaagugcgacaacgcgugcaucgggagcauccggaacggcaccuacgaccacaacguguaccgcgacgaggcccugaacaaccgguuccagaucaagggggucgagcucaaguccggcuacaaggacuggauccuguggaucagcuucgccaucagcugcuuccugcucugcguggcccugcugggcuucaucaugugggccugccagaaggggaacauccgcugcaacaucugcaucuga

SEQ ID NO: 77477 - RNA, 1701 nt, Artificial Sequence
  derived and/or modified CDS sequence (opt1) from hemagglutinin__InfluenzaA__ALE31954
augaagaccaucaucgcccugagcuacauccucugccugguguucgcccagaagcugcccggcaacgacaacuccaccgcgacgcucugccuggggcaccacgccgucccgaacggcaccaucgugaagaccaucaccaacgaccgcaucgaggugacgaacgccaccgagcugguccagaacagcuccaucggggagaucugcgacagcccccaccagauccucgacggcaagaacugcacccugaucgacgcccugcucggggacccccagugcgacggcuuccagaacaagcggugggaccuguucguggagcgcuccaaggccuacagcaacugcuaccccuacgacgugccggacuacgcgucccugcggagccucgucgccuccagcggcacccuggaguucaacgacgaguccuucaacugggccggggugacgcagaacggcaccagcuccgccugcauccgcgggagcaacuccagcuucuucucccggcugaacuggcucacccacagcaacuucaaguaccccgcgcugaacgugaccaugcccaacaacgagcaguucgacaagcuguacaucuggggcguccaccaccccgggacggacaaggaccagaucuuccucuacgcccacuccagcggccgcaucaccgugagcaccaagcggucccagcaggccgugaucccgaacgucggcagccgcccccggauccgcaacauccccucccggaucagcaucuacuggaccaucgugaagcccggggacauccugcugaucaacuccacgggcaaccucaucgccccgcgcggguacuucaagauccagagcggcaaguccagcaucaugcgguccgacgcccccaucggcaagugcaagagcgagugcaucacccccaacggguccauccccaacgacaagccguuccagaacgugaaccgcaucaccuacggcgcgugcccccgguacgucaagcagagcacccugaagcuggccacggggaugcgcaacgugcccgagaagcagacccggggcaucuucggggccaucgccggcuucaucgagaacggcugggaggggaugaaggacggcugguacggguuccgccaccagaacuccgagggccgggggcaggccgcggaccucaagagcacccaggccgccaucgaccagaucaacggcaagcugaaccgccuggugggcaagaccaacgagaaguuccaccagaucgagaaggaguucuccgaggucgaggggcggauccaggaccucgagaaguacguggaggacacgaagaucgaccuguggagcuacaacgccgagcugcucguggcccuggagaaccagcacaccaucgaccugaccgacuccgagaugaacaagcuguucgagaagaccaagaagcagcuccgcgagaacgcggaggacaugggcaacgggugcuucaagaucuaccacaagugcgacaacgccugcaucggcagcauccgcaacgggacguacgaccacuacgucuaccgggacgaggcccugaacaaccgcuuccagaucaagggcguggagcucaaguccggcuacaaggacuggauccuguggaucagcuucgccaucagcugcuuccugcucugcguggcccugcugggguucaucaugugggcgugccagaagggcaacauccggugcaacaucugcaucuga

SEQ ID NO: 77478 - RNA, 1701 nt, Artificial Sequence; identical to SEQ ID NO: 76465
  derived and/or modified CDS sequence (opt1) from hemagglutinin__InfluenzaA__ALE31955

SEQ ID NO: 77479 - RNA, 1701 nt, Artificial Sequence
  derived and/or modified CDS sequence (opt1) from hemagglutinin__InfluenzaA__ALE31956
augaagaccaucaucgcccugagcuacauccucugccugguguucgcccagaagauccccggcaacgacaacuccaccgcgacgcugugccucgggcaccacgccgucccgaacggcaccaucgugaagaccaucaccaacgaccgcaucgaggugacgaacgccaccgagcugguccagaacagcuccaucggggagaucugcaacagcccccaccagauccuggacggcgagaacugcacccucaucgacgcccugcugggggacccccagugcgacggcuuccagaacaagaagugggaccucuucguggagcgguccaaggccuacagcaacugcuaccccuacgacgugccggacuacgcgucccugcgcagccuggucgccuccagcggcacccucgaguucaacaacgaguccuucaacuggacgggggugacccagaacggcaccagcuccgccugcauccggcgcagcuccagcuccuucuucagccggcugaacuggcugacccaccucaacuacacguaccccgcccugaacgugaccaugcccaacaacgagcaguucgacaagcuguacaucuggggcguccaccaccccgggaccgacaaggaccagaucuuccucuacgcgcaguccagcgggcgcaucaccgugagcacgaagcggucccagcaggccgugaucccgaacaucggcagccgcccccggauccgcgacauccccucccggaucagcaucuacuggaccaucgucaagcccggcgacauccugcugaucaacuccaccgggaaccucaucgccccgcgcggcuacuucaagauccggagcgggaaguccagcaucaugcgcuccgacgcccccaucggcaagugcaagagcgagugcaucacccccaacggcuccauccccaacgacaagccguuccagaacgugaaccggaucacguacggggccugcccccgcuacgugaagcacagcacccugaagcuggcgaccggcaugcggaacguccccgagaagcagacccgcgggaucuucggcgccaucgccggguucaucgagaacggcugggagggcaugguggacgggugguacggcuuccggcaccagaacuccgaggggcgcggccaggccgccgaccucaagagcacgcaggcggccaucgaccagaucaacgggaagcugaaccggcugaucggcaagaccaacgagaaguuccaccagaucgagaaggaguucuccgagguggagggccgcauccaggaccucgagaaguacgucgaggacaccaagaucgaccuguggagcuacaacgccgagcugcucguggcccuggagaaccagcacaccaucgaccugacggacuccgagaugaacaagcuguucgagaagaccaagaagcagcuccgcgagaacgccgaggacauggggaacggcugcuucaagaucuaccacaagugcgacaacgcgugcaucgggagcauccggaacggcaccuacgaccacaacguguaccgcgacgaggcccugaacaaccgguuccagaucaagggggucgagcucaaguccggcuacaaggacuggauccuguggaucagcuucgccaucagcugcuuccugcucugcguggcccugcugggcuucaucaugugggccugccagaaggggaacauccgcugcaacaucugcaucuga

SEQ ID NO: 77480 - RNA, 1701 nt, Artificial Sequence; identical to SEQ ID NO: 77071
  derived and/or modified CDS sequence (opt1) from hemagglutinin__InfluenzaA__ALE31957

SEQ ID NO: 77481 - RNA, 1701 nt, Artificial Sequence
  derived and/or modified CDS sequence (opt1) from hemagglutinin__InfluenzaA__ALE31958
augaagaccaucaucgcccugagcuacauccucugccugguguucgcccagaagauccccggcaacgacaacuccaccgcgacgcugugccucgggcaccacgccgucccgaacggcaccaucgugaagaccaucaccaacgaccgcaucgaggugacgaacgccaccgagcugguccagaacagcuccaucggggagaucugcgacagcccccaccagauccuggacggcgagaacugcacccucaucgacgcccugcugggggacccccagugcgacggcuuccagaacaagaagugggaccucuucguggagcgguccaaggccuacagcaacugcuaccccuacgacgugccggacuacgcgucccugcgcagccuggucgccuccagcggcacccucgaguucaacaacgaguccuucaacuggacgggggugacccagaacggcaccagcuccgccugcauccggcgcagcuccagcuccuucuucagccggcugaacuggcugacccaccucaacuacacguaccccgcccugaacgugaccaugcccaacaacgagcaguucgacaagcuguacaucuggggcguccaccaccccgggaccgacaaggaccagaucuuccucuacgcgcaguccagcgggcgcaucaccgugagcacgaagcggucccagcaggccgugaucccgaacaucggcagcaagccccgcauccgggacauccccucccgcaucagcaucuacuggaccaucgucaagcccggcgacauccugcugaucaacuccaccgggaaccucaucgccccgcggggcuacuucaagauccgcagcgggaaguccagcaucaugcgguccgacgcccccaucggcaagugcaagagcgagugcaucacccccaacggcuccauccccaacgacaagccguuccagaacgugaaccgcaucacguacggggccugcccccgguacgugaagcacagcacccugaagcuggcgaccggcaugcgcaacguccccgagaagcagacccgggggaucuucggcgccaucgccggguucaucgagaacggcugggagggcaugguggacgggugguacggcuuccgccaccagaacuccgaggggcggggccaggccgccgaccucaagagcacgcaggcggccaucgaccagaucaacgggaagcugaaccgccugaucggcaagaccaacgagaaguuccaccagaucgagaaggaguucuccgagguggagggccggauccaggaccucgagaaguacgucgaggacaccaagaucgaccuguggagcuacaacgccgagcugcucguggcccuggagaaccagcacaccaucgaccugacggacuccgagaugaacaagcuguucgagaagaccaagaagcagcuccgcgagaacgccgaggacauggggaacggcugcuucaagaucuaccacaagugcgacaacgcgugcaucgggagcauccgcaacggcaccuacgaccacaacguguaccgggacgaggcccugaacaaccgcuuccagaucaagggggucgagcucaaguccggcuacaaggacuggauccuguggaucagcuucgccaucagcugcuuccugcucugcguggcccugcugggcuucaucaugugggccugccagaaggggaacauccggugcaacaucugcaucuga

SEQ ID NO: 77482 - RNA, 1701 nt, Artificial Sequence
  derived and/or modified CDS sequence (opt1) from hemagglutinin__InfluenzaA__ALE31959
augaagaccaucaucgcccugagcuacauccucugccugguguucgcccagaagauccccggcaacgacaacuccaccgcgacgcugugccucgggcaccacgccgucccgaacggcaccaucgugaagaccaucaccaacgaccgcaucgaggugacgaacgccaccgagcugguccagaacagcuccaucggggagaucugcgacagcccccaccagauccuggacggcgagaacugcacccucaucgacgcccugcugggggacccccagugcgacggcuuccagaacaagaagugggaccucuucguggagcgguccaaggccuacagcaacugcuaccccuacgacgugccggacuacgcgucccugcgcagccuggucgccuccagcggcacccucgaguucaacaacgaguccuucaacuggacgggggugacccagaacggcaccagcuccgccugcauccgcaagagcuccagcuccuucuucagccggcugaacuggcugacccaccucaacuacgccuaccccgcgcugaacgugacgaugcccaacaacgagcaguucgacaagcuguacaucuggggcguccaccaccccgggaccgacaaggaccagaucuuccucuacgcccgguccagcgggcgcaucaccgugagcaccaagcggucccagcaggccgugaucccgaacaucggcagccgcccccggauccgcgacauccccucccggaucagcaucuacuggacgaucgucaagcccggcgacauccugcugaucaacuccaccgggaaccucaucgccccgcgcggcuacuucaagauccggagcgggaaguccagcaucaugcgcuccgacgcccccaucggcaagugcaagagcgagugcaucacccccaacggcuccauccccaacgacaagccguuccagaacgugaaccggaucaccuacggggcgugcccccgcuacgugaagcacagcacgcugaagcuggccaccggcaugcggaacguccccgagaagcagacccgcgggaucuucggcgccaucgccggguucaucgagaacggcugggagggcaugguggacgggugguacggcuuccggcaccagaacuccgaggggcgcggccaggccgcggaccucaagagcacccaggccgccaucgaccagaucaacgggaagcugaaccggcugaucggcaagacgaacgagaaguuccaccagaucgagaaggaguucuccgagguggagggccgcauccaggaccucgagaaguacgucgaggacaccaagaucgaccuguggagcuacaacgccgagcugcucguggcccuggagaaccagcacaccaucgaccugaccgacuccgagaugaacaagcuguucgagaagacgaagaagcagcuccgcgagaacgcggaggacauggggaacggcugcuucaagaucuaccacaagugcgacaacgccugcaucgggagcauccggaacggcaccuacgaccacaacguguaccgcgacgaggcccugaacaaccgguuccagaucaagggggucgagcucaaguccggcuacaaggacuggauccuguggaucagcuucgccaucagcugcuuccugcucugcguggcccugcugggcuucaucaugugggcgugccagaaggggaacauccgcugcaacaucugcaucuga

SEQ ID NO: 77483 - RNA, 1701 nt, Artificial Sequence; identical to SEQ ID NO: 76465
  derived and/or modified CDS sequence (opt1) from hemagglutinin__InfluenzaA__ALE31960

SEQ ID NO: 77484 - RNA, 1701 nt, Artificial Sequence; identical to SEQ ID NO: 76654
  derived and/or modified CDS sequence (opt1) from hemagglutinin__InfluenzaA__ALE31961

SEQ ID NO: 77485 - RNA, 1701 nt, Artificial Sequence
  derived and/or modified CDS sequence (opt1) from hemagglutinin__InfluenzaA__ALE31962
augaagaccaucaucgcccugagcuacauccucugccugguguucgcccagaagauccccggcaacgacaacuccaccgcgacgcugugccucgggcaccacgccgucccgaacggcaccaucgugaagaccaucaccaacgaccgcaucgaggugacgaacgccaccgagcugguccagaacagcuccaucggggagaucugcgacagcccccaccagauccuggacggcgagaacugcacccucaucgacgcccugcugggggacccccagugcgacggcuuccagaacaagaagugggaccucuucguggagcgguccaaggccuacagcaacugcuaccccuacgacgugccggacuacgcgucccugcgcagccuggucgccuccagcggcacccucgaguucaacaacgaguccuucaacuggacgggggugacccagaacggcaccagcuccgccugcauccggcgcagcuccagcuccuucuucagccggcugaacuggcugacccaccucaacuacacguaccccgcccugaacgugaccaugcccaacaacgagcaguucgacaagcuguacaucuggggcguccaccaccccgggaccgacaaggaccagaucuuccucuacgcgcaguccagcgggcgcaucaccgugagcacgaagcggucccagcaggccgugaucccgaacaucggcagccgcccccggauccgcgacauccccucccggaugagcaucuacuggaccaucgucaagcccggcgacauccugcugaucaacuccaccgggaaccucaucgccccgcgcggcuacuucaagauccggagcgggaaguccagcaucaugcgcuccgacgcccccaucggcaagugcaagagcgagugcaucacccccaacggcuccauccccaacgacaagccguuccagaacgugaaccggaucacguacggggccugcccccgcuacgugaagcacagcacccugaagcuggcgaccggcaugcggaacguccccgagaagcagacccgcgggaucuucggcgccaucgccggguucaucgagaacggcugggagggcaugguggacgggugguacggcuuccggcaccagaacuccgaggggcgcggccaggccgccgaccucaagagcacgcaggcggccaucgaccagaucaacgggaagcugaaccggcugaucggcaagaccaacgagaaguuccaccagaucgagaaggaguucuccgagguggagggccgcauccaggaccucgagaaguacgucgaggacaccaagaucgaccuguggagcuacaacgccgagcugcucguggcccuggagaaccagcacaccaucgaccugacggacuccgagaugaacaagcuguucgagaagaccaagaagcagcuccgcgagaacgccgaggacauggggaacggcugcuucaagaucuaccacaagugcgacaacgcgugcaucgggagcauccggaacggcaccuacgaccacaacguguaccgcgacgaggcccugaacaaccgguuccagaucaagggggucgagcucaaguccggcuacaaggacuggauccuguggaucagcuucgccaucagcugcuuccugcucugcguggcccugcugggcuucaucaugugggccugccagaaggggaacauccgcugcaacaucugcaucuga

SEQ ID NO: 77486 - RNA, 1701 nt, Artificial Sequence
  derived and/or modified CDS sequence (opt1) from hemagglutinin__InfluenzaA__ALE31963
augaagaccaucaucgcccugagcuacauccucugccugguguucgcccagaagauccccggcaacgacaacuccaccgcgacgcugugccucgggcaccacgccgucccgaacggcaccaucgugaagaccaucaccaacgaccgcaucgaggugacgaacgccaccgagcugguccagaacagcuccaucggggagaucugcgacagcccccaccagauccuggacggcgagaacugcacccucaucgacgcccugcugggggacccccagugcgacggcuuccagaacaagaagugggaccucuucguggagcgguccaaggccuacagcaacugcuaccccuacgacgugccggacuacgcgucccugcgcagccuggucgccuccagcggcacccucgaguucaacaacgaguccuucaacuggacgggggugacccagaacggcaccagcuccgccugcauccggcgcagcuccagcuccuucuucagccggcugaacuggcugacccaccucaacuacacguaccccgcccugaacgugaccaugcccaacaacgagcaguucgacaagcuguacaucuggggcguccaccaccccgggaccgacaaggaccagaccuuccucuacgcgcaguccagcgggcgcaucacggugagcaccaagcggucccagcaggccgugaucccgaacaucggcagccgcccccggauccgcgacauccccucccggaucagcaucuacuggaccaucgucaagcccggcgacauccugcugaucaacuccaccgggaaccucaucgccccgcgcggcuacuucaagauccggagcgggaaguccagcaucaugcgcuccgacgcccccaucggcaagugcaagagcgagugcaucacgcccaacggcuccauccccaacgacaagccguuccagaacgugaaccggaucaccuacggggccugcccccgcuacgugaagcacagcacccugaagcuggcgaccggcaugcggaacguccccgagaagcagacgcgcgggaucuucggcgccaucgccggguucaucgagaacggcugggagggcaugguggacgggugguacggcuuccggcaccagaacuccgaggggcgcggccaggccgccgaccucaagagcacccaggcggccaucgaccagaucaacgggaagcugaaccggcugaucggcaagaccaacgagaaguuccaccagaucgagaaggaguucuccgagguggagggccgcauccaggaccucgagaaguacgucgaggacaccaagaucgaccuguggagcuacaacgccgagcugcucguggcccuggagaaccagcacacgaucgaccugaccgacuccgagaugaacaagcuguucgagaagaccaagaagcagcuccgcgagaacgccgaggacauggggaacggcugcuucaagaucuaccacaagugcgacaacgcgugcaucgggagcauccggaacggcaccuacaaccacaacguguaccgcgacgaggcccugaacaaccgguuccagaucaagggggucgagcucaaguccggcuacaaggacuggauccuguggaucagcuucgccaucagcugcuuccugcucugcguggcccugcugggcuucaucaugugggccugccagaaggggaacauccgcugcaacaucugcaucuga

SEQ ID NO: 77487 - RNA, 1701 nt, Artificial Sequence
  derived and/or modified CDS sequence (opt1) from hemagglutinin__InfluenzaA__ALE31964
augaagaccaucaucgcccugagcuacauccucugccugguguucgcccagaagauccccggcaacgacaacuccaccgcgacgcugugccucgggcaccacgccgucccgaacggcaccaucgugaagaccaucaccaacgaccgcaucgaggugacgaacgccaccgagcugguccagaacagcuccaucggggagaucugcgacagcccccaccagauccuggacggcgagaacugcacccucaucgacgcccugcugggggacccccagugcgacggcuuccagaacaagaagugggaccucuucguggagcgguccaaggccuacagcaacugcuaccccuacuacgugccggacuacgcgucccugcgcagccuggucgccuccagcggcacccucgaguucaacaacgaguccuucaacuggacgggggugacccagaacggcaccagcuccgccugcauccggcgcagcuccagcuccuucuucagccggcugaacuggcugacccaccucaacuacacguaccccgcccugaacgugaccaugcccaacaacgagcaguucgacaagcuguacaucuggggcguccaccaccccgggaccgacaaggaccagaucuuccucuacgcgcaguccagcgggcgcaucaccgugagcacgaagcggucccagcaggccgugaucccgaacaucggcagccgcccccggauccgcgacauccccucccggaucagcaucuacuggaccaucgucaagcccggcgacauccugcugaucaacuccaccgggaaccucaucgccccgcgcggcuacuucaagauccagagcgggaaguccagcaucaugcgguccgacgcccccaucggcaagugcaagagcgagugcaucacccccaacggcuccauccccaacgacaagccguuccagaacgugaaccgcaucacguacggggccugcccccgguacgugaagcacagcacccugaagcuggcgaccggcaugcgcaacguccccgagaagcagacccgggggaucuucggcgccaucgccggguucaucgagaacggcugggagggcaugguggacgggugguacggcuuccgccaccagaacuccgaggggcggggccaggccgccgaccucaagagcacgcaggcggccaucgaccagaucaacgggaagcugaaccgccugaucggcaagaccaacgagaaguuccaccagaucgagaaggaguucuccgagguggagggccggauccaggaccucgagaaguacgucgaggacaccaagaucgaccuguggagcuacaacgccgagcugcucguggcccuggagaaccagcacaccaucgaccugacggacuccgagaugaacaagcuguucgagaagaccaagaagcagcuccgcgagaacgccgaggacauggggaacggcugcuucaagaucuaccacaagugcgacaacgcgugcaucgggagcauccgcaacggcaccuacgaccacaacguguaccgggacgaggcccugaacaaccgcuuccagaucaagggggucgagcucaaguccggcuacaaggacuggauccuguggaucagcuucgccaucagcugcuuccugcucugcguggcccugcugggcuucaucaugugggccugccagaaggggaacauccggugcaacaucugcaucuga

SEQ ID NO: 77488 - RNA, 1701 nt, Artificial Sequence; identical to SEQ ID NO: 76465
  derived and/or modified CDS sequence (opt1) from hemagglutinin__InfluenzaA__ALE31965

SEQ ID NO: 77489 - RNA, 1701 nt, Artificial Sequence; identical to SEQ ID NO: 77123
  derived and/or modified CDS sequence (opt1) from hemagglutinin__InfluenzaA__ALE31966

SEQ ID NO: 77490 - RNA, 1701 nt, Artificial Sequence; identical to SEQ ID NO: 77393
  derived and/or modified CDS sequence (opt1) from hemagglutinin__InfluenzaA__ALE31967

SEQ ID NO: 77491 - RNA, 1701 nt, Artificial Sequence; identical to SEQ ID NO: 77009
  derived and/or modified CDS sequence (opt1) from hemagglutinin__InfluenzaA__ALE31968

SEQ ID NO: 77492 - RNA, 1701 nt, Artificial Sequence; identical to SEQ ID NO: 77116
  derived and/or modified CDS sequence (opt1) from hemagglutinin__InfluenzaA__ALE31969

SEQ ID NO: 77493 - RNA, 1701 nt, Artificial Sequence; identical to SEQ ID NO: 76465
  derived and/or modified CDS sequence (opt1) from hemagglutinin__InfluenzaA__ALE31970

SEQ ID NO: 77494 - RNA, 1701 nt, Artificial Sequence
  derived and/or modified CDS sequence (opt1) from hemagglutinin__InfluenzaA__ALE31971
augaagaccaucaucgcccugagcuacauccucugccugguguucgcccagaagauccccggcaacgacaacuccaccgcgacgcugugccucgggcaccacgccgucccgaacggcaccaucgugaagaccaucaccaacgaccgcaucgaggugacgaacgccaccgagcugguccagaacagcuccaucggggagaucugcgacagcccccaccagauccuggacggcgagaacugcacccucaucgacgcccugcugggggacccccagugcgacggcuuccagaacaagaagugggaccucuucguggagcgguccaaggccuacagcaacugcuaccccuacgacgugccggacuacgcgucccugcgcagccuggucgccuccagcggcacccucgaguucaacaacgaguccuucaacuggacgggggugacccagaacggcaccagcuccgccugcauccggcgcagcuccagcuccuucuucagccggcugaacuggcugacccaccucaacuacgccuaccccgcgcugaacgugacgaugcccaacaacgagcaguucgacaagcuguacaucuggggcguccaccaccccgggaccgacaaggaccagaucuuccucuacgcccaguccagcgggcgcaucaccgugagcaccaagggcucccagcaggccgugaucccgaacaucggcagccggccccgcauccgggacauccccucccgcaucagcaucuacuggacgaucgucaagcccggggacauccugcugaucaacuccaccggcaaccucaucgccccgcggggguacuucaagauccgcagcggcaaguccagcaucaugcgguccgacgcccccaucggcaagugcaagagcgagugcaucacccccaacggguccauccccaacgacaagccguuccagaacgugaaccgcaucaccuacggcgcgugcccccgguacgugaagcacagcacgcugaagcuggccaccgggaugcgcaacguccccgagaagcagacccggggcaucuucggggccaucgccggcuucaucgagaacggcugggaggggaugguggacggcugguacggguuccgccaccagaacuccgagggccgggggcaggccgcggaccucaagagcacccaggccgccaucgaccagaucaacggcaagcugaaccgccugaucggcaagacgaacgagaaguuccaccagaucgagaaggaguucuccgagguggaggggcggauccaggaccucgagaaguacgucgaggacaccaagaucgaccuguggagcuacaacgccgagcugcucguggcccuggagaaccagcacaccaucgaccugaccgacuccgagaugaacaagcuguucgagaagacgaagaagcagcuccgcgagaacgcggaggacaugggcaacgggugcuucaagaucuaccacaagugcgacaacgccugcaucggcagcauccgcaacgggaccuacgaccacaacguguaccgggacgaggcccugaacaaccgcuuccagaucaagggcgucgagcucaaguccggcuacaaggacuggauccuguggaucagcuucgccaucagcugcuuccugcucugcguggcccugcugggguucaucaugugggcgugccagaagggcaacauccggugcaacaucugcaucuga

SEQ ID NO: 77495 - RNA, 1701 nt, Artificial Sequence; identical to SEQ ID NO: 77009
  derived and/or modified CDS sequence (opt1) from hemagglutinin__InfluenzaA__ALE31972

SEQ ID NO: 77496 - RNA, 1701 nt, Artificial Sequence; identical to SEQ ID NO: 77009
  derived and/or modified CDS sequence (opt1) from hemagglutinin__InfluenzaA__ALE31973

SEQ ID NO: 77497 - RNA, 1701 nt, Artificial Sequence; identical to SEQ ID NO: 76654
  derived and/or modified CDS sequence (opt1) from hemagglutinin__InfluenzaA__ALE31974

SEQ ID NO: 77498 - RNA, 1701 nt, Artificial Sequence; identical to SEQ ID NO: 77009
  derived and/or modified CDS sequence (opt1) from hemagglutinin__InfluenzaA__ALE31975

SEQ ID NO: 77499 - RNA, 1701 nt, Artificial Sequence; identical to SEQ ID NO: 76465
  derived and/or modified CDS sequence (opt1) from hemagglutinin__InfluenzaA__ALE31976

SEQ ID NO: 77500 - RNA, 1701 nt, Artificial Sequence; identical to SEQ ID NO: 76465
  derived and/or modified CDS sequence (opt1) from hemagglutinin__InfluenzaA__ALE31977

SEQ ID NO: 77501 - RNA, 1701 nt, Artificial Sequence
  derived and/or modified CDS sequence (opt1) from hemagglutinin__InfluenzaA__ALE31978
augaagaccaucaucgcccugagcuacauccucugccugguguucgcccagaagauccccggcaacgacaacuccaccgcgacgcugugccucgggcaccacgccgucccgaacggcaccaucgugaagaccaucaccaacgaccgcaucgaggugacgaacgccaccgagcugguccagaacagcuccaucggggagaucugcgacagcccccaccagauccuggacggcgagaacugcacccucaucgacgcccugcugggggacccccagugcgacggcuuccagaacaagaagugggaccucuucguggagcgguccaaggccuacagcaacugcuaccccuacgacgugccggacuacgcgucccugcgcagccuggucgccuccagcggcacccucgaguucaacaacgaguccuucaacuggacgggggugacccagaacggcaccagcuccgccugcauccgcaagagcuccagcuccuucuucagccggcugaacuggcugacccaccucaacuacacguaccccgcccugaacgugaccaugcccaacaacgagcaguucgacaagcuguacaucuggggcguccaccaccccgggaccgacaaggaccagaucuuccucuacgcgcgguccagcgggcgcaucaccgugagcacgaagcggucccagcaggccgugaucccgaacaucggcagccgcccccggauccgcgacauccccucccggaucagcaucuacuggaccaucgucaagcccggcgacauccugcugauccacuccaccgggaaccucaucgccccgcgcggcuacuucaagauccggagcgggaaguccagcaucaugcgcuccgacgcccccaucggcaagugcaagagcgagugcaucacccccaacggcuccauccccaacgacaagccguuccagaacgugaaccggaucacguacggggccugcccccgcuacgugaagcacagcacccugaagcuggcgaccggcaugcggaacguccccgagaagcagacccgcgggaucuucggcgccaucgccggguucaucgagaacggcugggagggcaugguggacgggugguacggcuuccggcaccagaacuccgaggggcgcggccaggccgccgaccucaagagcacgcaggcggccaucgaccagaucaacgggaagcugaaccggcugaucggcaagaccaacgagaaguuccaccagaucgagaaggaguucuccgagguggagggccgcauccaggaccucgagaaguacgucgaggacaccaagaucgaccuguggagcuacaacgccgagcugcucguggcccuggagaaccagcacaccaucgaccugacggacuccgagaugaacaagcuguucgagaagaccaagaagcagcuccgcgagaacgccgaggacauggggaacggcugcuucaagaucuaccacaagugcgacaacgcgugcaucgggagcauccggaacggcaccuacgaccacaacguguaccgcgacgaggcccugaacaaccgguuccagaucaagggggucgagcucaaguccggcuacaaggacuggauccuguggaucagcuucgccaucagcugcuuccugcucugcguggcccugcugggcuucaucaugugggccugccagaaggggaacauccgcugcaacaucugcaucuga

SEQ ID NO: 77502 - RNA, 1701 nt, Artificial Sequence; identical to SEQ ID NO: 76465
  derived and/or modified CDS sequence (opt1) from hemagglutinin__InfluenzaA__ALE31979

SEQ ID NO: 77503 - RNA, 1701 nt, Artificial Sequence
  derived and/or modified CDS sequence (opt1) from hemagglutinin__InfluenzaA__ALE31980
augaagaccaucaucgcccugagcuacauccucugccugguguucgcccagaagauccccggcaacgacaacuccaccgcgacgcugugccucgggcaccacgccgucccgaacggcaccaucgugaagaccaucaccaacgaccgcaucgaggugacgaacgccaccgagcugguccagaacagcuccaucggggagaucugcgacagcccccaccagauccuggacggcgagaacugcacccucaucgacgcccugcugggggacccccagugcgacggcuuccagaacaagaagugggaccucuucguggagcgguccaaggccuacagcaacugcuaccccuacgacgugccggacuacgcgucccugcgcagccuggucgccuccagcggcacccucgaguucaacaacgaguccuucaacuggacgggggugacccagaacggcaccagcuccgccugcauccggcgcagcuccagcuccuucuucagccggcugaacuggcugacccaccucaacuacacguaccccgcccugaacgugaccaugcccaacaacgagcaguucgacaagcuguacaucuggggcguccaccaccccgggaccgacaaggaccagaucuuccucuacgcgcaguccagcgggcgcaucaccgugagcacgaagcggucccagcaggccgugaucccgaacaucggcagccgcccccggauccgcgacauccccucccggaucagcaucuacuggaccaucgucaagcccggcgacauccugcugaucaacuccaccgggaaccucaucgccccgcgcggcuacuucaagauccggagcgggaaguccagcaucaugcgcuccgacgcccccaucggcaagugcaagagcgagugcaucacccccaacggcuccauccccaacgacaagccguuccagaacgugaaccggaucacguacggggccugcccccgcuacgugaagcacagcacccugaagcuggcgaccggcaugcggaacguccccgagaagcagacccgcgggaucuucggcgccaucgccggguucaucgagaacggcugggagggcaugguggacgggugguacggcuuccggcaccagaacuccgaggggcgcggccaggccgccgaccucaagagcacgcaggcggccaucgaccagaucaacgggaagcugaaccggcugaucggcaagaccaacgagaaguuccaccagaucgagaaggaguucuccgagguggagggccgcauccaggaccucgagaaguacgucgaggacaccaagaucgaccuguggagcuacaacgccgagcugcucguggcccuggagaaccagcacaccaucgaccugacggacuccgagaugaacaagcuguucgagaagaccaagaagcagcuccgcgagaacgccgaggacauggggaacggcugcuucaagaucuaccacaagugcgacaacgcgugcaucgggagcauccggaacggcaccuacgaccacaacguguaccgcgacgaggcccugaacaaccgguuccagaucaagggggucgagcucaaguccgaguacaaggacuggauccuguggaucagcuucgccaucagcugcuuccugcucugcguggcccugcugggcuucaucaugugggccugccagaagggcaacauccgcugcaacaucugcaucuga

SEQ ID NO: 77504 - RNA, 1701 nt, Artificial Sequence; identical to SEQ ID NO: 76465
  derived and/or modified CDS sequence (opt1) from hemagglutinin__InfluenzaA__ALE31981

SEQ ID NO: 77505 - RNA, 1701 nt, Artificial Sequence; identical to SEQ ID NO: 77005
  derived and/or modified CDS sequence (opt1) from hemagglutinin__InfluenzaA__ALE31995

SEQ ID NO: 77506 - RNA, 1701 nt, Artificial Sequence
  derived and/or modified CDS sequence (opt1) from hemagglutinin__InfluenzaA__ALE31996
augaagaccaucaucgcccugagcuacauccucugccugguguucgcccagaagauccccggcaacgacaacuccaccgcgacgcugugccucgggcaccacgccgucccgaacggcaccaucgugaagaccaucaccaacgaccgcaucgaggugacgaacgccaccgagcugguccagaacagcuccaucggggagaucugcgacagcccccaccagauccuggacggcgagaacugcacccucaucgacgcccugcugggggacccccagugcgacggcuuccagaacaagaagugggaccucuucguggagcgguccaaggccuacagcaacugcuaccccuacgacgugccggacuacgcgucccugcgcagccuggucgccuccagcggcacccucgaguucaacaacgaguccuucaacuggacgggggugacccagaacggcaccagcuccgccugcauccggcgcagcuccagcuccuucuucagccggcugaacuggcugacccaccucaacuacacguaccccgcccugaacgugaccaugcccaacaacgagcaguucgacaagcuguacaucuggggcguccaccaccccgggaccgacaaggaccagaucuuccucuacgcgcaguccagcgggcgcaucaccgugagcacgaagcggucccagcaggccgugaucccgaacaucggcagccgcccccggauccgcgacauccccucccggaucagcaucuacuggaccaucgucaagcccggcgacauccugcugaucaacuccaccgggaaccucaucgccccgcgcggcuacuucaagauccggagcgggaaguccagcaucaugcgcuccgacgcccccaucggcaagugcaagagcgagugcaucacccccaacggcuccauccccaacgacaagccguuccagaacgugaaccgggugacguacggggccugcccccgcuacgucaagcacagcacccugaagcuggcgaccggcaugcggaacgugcccgagaagcagacccgcgggaucuucggcgccaucgccggguucaucgagaacggcugggagggcaugguggacgggugguacggcuuccggcaccagaacuccgaggggcgcggccaggccgccgaccucaagagcacgcaggcggccaucgaccagaucaacgggaagcugaaccggcugaucggcaagaccaacgagaaguuccaccagaucgagaaggaguucuccgaggucgagggccgcauccaggaccucgagaaguacguggaggacaccaagaucgaccuguggagcuacaacgccgagcugcucguggcccuggagaaccagcacaccaucgaccugacggacuccgagaugaacaagcuguucgagaagaccaagaagcagcuccgcgagaacgccgaggacauggggaacggcugcuucaagaucuaccacaagugcgacaacgcgugcaucgggagcauccggaacggcaccuacgaccacaacgucuaccgcgacgaggcccugaacaaccgguuccagaucaaggggguggagcucaaguccggcuacaaggacuggauccuguggaucagcuucgccaucagcugcuuccugcucugcguggcccugcugggcuucaucaugugggccugccagaaggggaacauccgcugcaacaucugcaucuga

SEQ ID NO: 77507 - RNA, 1701 nt, Artificial Sequence
  derived and/or modified CDS sequence (opt1) from hemagglutinin__InfluenzaA__ALE31997
augaagaccaucaucgcccugagcuacauccucugccugguguucgcccagaagauccccggcaacgacaacuccaccgcgacgcugugccucgggcaccacgccgucccgaacggcaccaucgugaagaccaucaccaacgaccgcaucgaggugacgaacgccaccgagcugguccagaacagcuccaucggggagaucugcgacagcccccaccagauccuggacggcgagaacugcacccucaucgacgcccugcugggggacccccagugcgacggcuuccagaacaagaagugggaccucuucaucgagcgguccaaggccuacagcaacugcuaccccuacgacgugccggacuacgcgucccugcgcagccugguggccuccagcggcacccucgaguucaacaacgaguccuucaacuggacgggggucacccagaacggcaccagcuccgccugcauccggcgcagcuccagcuccuucuucagccggcugaacuggcugacccaccucaacuacacguaccccgcccugaacgugaccaugcccaacaacgagcaguucgacaagcuguacaucuggggcgugcaccaccccgggaccgacaaggaccagaucuuccucuacgcgcaguccagcgggcgcaucaccgucagcacgaagcggucccagcaggccgugaucccgaacaucggcagccgcccccggauccgcgacauccccucccggaucagcaucuacuggaccaucgugaagcccggcgacauccugcugaucaacuccaccgggaaccucaucgccccgcgcggcuacuucaagauccggagcgggaaguccagcaucaugcgcuccgacgcccccaucggcaagugcaagagcgagugcaucacccccaacggcuccauccccaacgacaagccguuccagaacgucaaccggaucacguacggggccugcccccgcuacgugaagcacagcacccugaagcuggcgaccggcaugcggaacgugcccgagaagcagacccgcgggaucuucggcgccaucgccggguucaucgagaacggcugggagggcauggucgacgggugguacggcuuccggcaccagaacuccgaggggcgcggccaggccgccgaccucaagagcacgcaggcggccaucgaccagaucaacgggaagcugaaccggcugaucggcaagaccaacgagaaguuccaccagaucgagaaggaguucuccgagguggagggccgcauccaggaccucgagaaguacguggaggacaccaagaucgaccuguggagcuacaacgccgagcugcucgucgcccuggagaaccagcacaccaucgaccugacggacuccgagaugaacaagcuguucgagaagaccaagaagcagcuccgcgagaacgccgaggacauggggaacggcugcuucaagaucuaccacaagugcgacaacgcgugcaucgggagcauccggaacggcaccuacgaccacaacguguaccgcgacgaggcccugaacaaccgguuccagaucaaggggguggagcucaaguccggcuacaaggacuggauccuguggaucagcuucgccaucagcugcuuccugcucugcgucgcccugcugggcuucaucaugugggccugccagaaggggaacauccgcugcaacaucugcaucuga

SEQ ID NO: 77508 - RNA, 1701 nt, Artificial Sequence; identical to SEQ ID NO: 76465
  derived and/or modified CDS sequence (opt1) from hemagglutinin__InfluenzaA__ALE31998

SEQ ID NO: 77509 - RNA, 1701 nt, Artificial Sequence
  derived and/or modified CDS sequence (opt1) from hemagglutinin__InfluenzaA__ALE31999
augaagaccaucaucgcccugagcuacauccucugccugguguucgcccagaagauccccggcaacgacaacuccaccgcgacgcugugccucgggcaccacgccgucccgaacggcaccaucgugaagaccaucaccaacgaccgcaucgaggugacgaacgccaccgagcugguccagaacagcuccaucggggagaucugcgacagcccccaccagauccuggacggcgagaacugcacccucaucgacgcccugcugggggacccccagugcgacggcuuccagaacaagaagugggaccucuucguggagcgguccaaggccuacagcaacugcuaccccuacgacgugccggacuacgcgucccugcgcagccuggucgccuccagcggcacccucgaguucaacaacgaguccuucaacuggacgggggugacccagaacggcaccagcuccgccugcauccggcgcagcuccagcuccuucuucagccggcugaacuggcugacccaccuccacuacacguaccccgcccugaacgugaccaugcccaacaacgagcaguucgacaagcuguacaucuggggcguccaccaccccgggaccgacaaggaccagaucuuccucuacgcgcaguccagcgggcgcaucaccgugagcacgaagcggucccagcaggccgugaucccgaacaucggcagccgcccccggauccgcgacauccccucccggaucagcaucuacuggaccaucgucaagcccggcgacauccugcugaucaacuccaccgggaaccucaucgccccgcgcggcuacuucaagauccggagcgggaaguccagcaucaugcgcuccgacgcccccaucggcaagugcaagagcgagugcaucacccccaacggcuccauccccaacgacaagccguuccagaacgugaaccggaucacguacggggccugcccccgcuacgugaagcacagcacccugaagcuggcgaccggcaugcggaacguccccgagaagcagacccgcgggaucuucggcgccaucgccggguucaucgagaacggcugggagggcaugguggacgggugguacggcuuccggcaccagaacuccgaggggcgcggccaggccgccgaccucaagagcacgcaggcggccaucgaccagaucaacgggaagcugaaccggcugaucggcaagaccaacgagaaguuccaccagaucgagaaggaguucuccgagguggagggccgcauccaggaccucgagaaguacgucgaggacaccaagaucgaccuguggagcuacaacgccgagcugcucguggcccuggagaaccagcacaccaucgaccugacggacuccgagaugaacaagcuguucgagaagaccaagaagcagcuccgcgagaacgccgaggacauggggaacggcugcuucaagaucuaccacaagugcgacaacgcgugcaucgggagcauccggaacggcaccuacgaccacaacguguaccgcgacgaggcccugaacaaccgguuccagaucaagggggucgagcucaaguccggcuacaaggacuggauccuguggaucagcuucgccaucagcugcuuccugcucugcguggcccugcugggcuucaucaugugggccugccagaaggggaacauccgcugcaacaucugcaucuga

SEQ ID NO: 77510 - RNA, 1701 nt, Artificial Sequence
  derived and/or modified CDS sequence (opt1) from hemagglutinin__InfluenzaA__ALE32000
augaagaccaucaucgcccugagccacauccucugccugguguucgcccagaagcugcccgagaacgacaacuccaccgcgacgcucugccugggccaccacgccgucccgaacgggaccaucgugaagaccaucaccagcgaccgcaucgaggugacgaacgccaccgagcugguccagaacuccagcaucggcgagaucugcgacagcccccaccagauccucgacgggaagaacugcacccugaucgacgcccugcucggcgacccccagugcgacggguuccagaacaagaagugggaccuguucguggagcggagcaaggccuacuccaacugcuaccccuacgacgugccggacuacgcgagccugcgcucccucgucgccagcuccggcacccuggaguucaacgacgagagcuucaacugggccggcgugacgcagaacgggaccuccagcgccugcauccggggcuccaacagcuccuucuucagccgccugaacuggcucacccacuccaacuucaaguaccccgcgcugaacgugaccaugcccaacaacgagcaguucgacaagcuguacaucuggggcguccaccaccccgggacggacaaggaccagaucuuccucuacgcccagagcagcgggcggaucaccguguccaccaagcgcagccagcaggccgugaucccgaacaucggcucccggccccgcauccggaacauccccagccgcaucuccaucuacuggaccaucgucaagcccggcgacauccugcugaucaacagcacggggaaccucaucgccccgcggggcuacuucaagauccgcuccgggaaguccuccaucaugcggagcgacgcccccaucggcaagugcaaguccgagugcaucacccccaacggcagcauccccaacgacaagccguuccagaacgugaaccgcaucaccuacggggcgugcccccgguacgugaagcaguccacccugaagcuggccacgggcaugcgcaacguccccgagaagcagacccgggggaucuucggcgccaucgccggguucaucgagaacggcugggagggcaugaaggacgggugguacggcuuccgccaccagaacagcgaggggcggggccaggccgcggaccucaaguccacccaggccgccaucgaccagaucaacgggaagcugaaccgccugaucggcaagaccaacgagaaguuccaccagaucgagaaggaguucagcgagguggagggccggauccaggaccucgagaaguacguggaggacacgaagaucgaccugugguccuacaacgccgagcugcucgucgcccuggagaaccagcacaccaucgaccugaccgacagcgagaugaacaagcuguucgagaagaccaagaagcagcuccgcgagaacgcggaggacauggggaacggcugcuucaagaucuaccacaagugcgacaacgccugcaucggguccauccgcaacggcacguacgaccacgacguguaccgggacgaggcccugaacaaccgcuuccagaucaaggggguggagcucaagagcggcuacaaggacuggauccuguggaucagcuucgccaucuccugcuuccugcucugcgucgcccugcugggcuucaucaugugggcgugccagaaggggaacauccggugcaacaucugcaucuga

SEQ ID NO: 77511 - RNA, 1701 nt, Artificial Sequence; identical to SEQ ID NO: 76465
  derived and/or modified CDS sequence (opt1) from hemagglutinin__InfluenzaA__ALE32001

SEQ ID NO: 77512 - RNA, 1701 nt, Artificial Sequence; identical to SEQ ID NO: 76465
  derived and/or modified CDS sequence (opt1) from hemagglutinin__InfluenzaA__ALE32002

SEQ ID NO: 77513 - RNA, 1701 nt, Artificial Sequence; identical to SEQ ID NO: 76565
  derived and/or modified CDS sequence (opt1) from hemagglutinin__InfluenzaA__ALE32003

SEQ ID NO: 77514 - RNA, 1701 nt, Artificial Sequence; identical to SEQ ID NO: 76465
  derived and/or modified CDS sequence (opt1) from hemagglutinin__InfluenzaA__ALE32004

SEQ ID NO: 77515 - RNA, 1701 nt, Artificial Sequence; identical to SEQ ID NO: 76465
  derived and/or modified CDS sequence (opt1) from hemagglutinin__InfluenzaA__ALE32005

SEQ ID NO: 77516 - RNA, 1701 nt, Artificial Sequence; identical to SEQ ID NO: 77009
  derived and/or modified CDS sequence (opt1) from hemagglutinin__InfluenzaA__ALE32006

SEQ ID NO: 77517 - RNA, 1701 nt, Artificial Sequence; identical to SEQ ID NO: 76465
  derived and/or modified CDS sequence (opt1) from hemagglutinin__InfluenzaA__ALE32007

SEQ ID NO: 77518 - RNA, 1701 nt, Artificial Sequence; identical to SEQ ID NO: 77016
  derived and/or modified CDS sequence (opt1) from hemagglutinin__InfluenzaA__ALE32008

SEQ ID NO: 77519 - RNA, 1701 nt, Artificial Sequence
  derived and/or modified CDS sequence (opt1) from hemagglutinin__InfluenzaA__ALE32009
augaagaccaucaucgcccugagcuacauccucugccugguguucgcccagaagcugcccgagaacgacaacuccaccgcgacgcucugccugggccaccacgccgucccgaacgggaccaucgugaagaccaucaccagcgaccgcaucgaggugacgaacgccaccgagcugguccagaacuccagcaucggcgagaucugcgacagcccccaccagauccucgacgggaagaacugcacccugaucgacgcccugcucggcgacccccagugcgacggguuccagaacaagaagugggaccuguucguggagcggagcaaggccuacuccaacugcuaccccuacgacgugccggacuacgcgagccugcgcucccucgucgccagcuccggcacccuggaguucaacgacgagagcuucaacugggccggcgugacgcagaacgggaccuccagcgccugcauccggggcuccaacagcuccuucuucagccgccugaacuggcucacccacuccaacuucaaguaccccgcgcugaacgugaccaugcccaacaacgagcaguucgacaagcuguacaucuggggcguccaccaccccgggacggacaaggaccagaucuuccucuacgcccagagcagcgggcggaucaccguguccaccaagcgcagccagcaggccgugaucccgaacaucggcucccggccccgcauccggaacauccccagccgcaucuccaucuacuggaccaucgucaagcccggcgacauccugcugaucaacagcacggggaaccucaucgccccgcggggcuacuucaagauccgcuccgggaaguccuccaucaugcggagcgacgcccccaucggcaagugcaaguccgagugcaucacccccaacggcagcauccccaacgacaagccguuccagaacgugaaccgcaucaccuacggggcgugcccccgguacgugaagcaguccacccugaagcuggccacgggcaugcgcaacguccccgagaagcagacccgggggaucuucggcgccaucgccggguucaucgagaacggcugggagggcaugaaggacgggugguacggcuuccgccaccagaacagcgaggggcggggccaggccgcggaccucaaguccacccaggccgccaucgaccagaucaacgggaagcugaaccgccugaucggcaagaccaacgagaaguuccaccagaucgagaaggaguucagcgagguggagggccggauccaggaccucgagaaguacguggaggacacgaagaucgaccugugguccuacaacgccgagcugcucgucgcccuggagaaccagcacaccaucgugcugaccgacagcgagaugaacaagcuguucgagaagaccaagaagcagcuccgcgagaacgcggaggacauggggaacggcugcuucaagaucuaccacaagugcgacaacgccugcaucggguccauccgcaacggcacguacgaccacgacguguaccgggacgaggcccugaacaaccgcuuccagaucaagggggucgagcucaagagcggcuacaaggacuggauccuguggaucagcuucgccaucuccugcuuccugcucugcguggcccugcugggcuucaucaugugggcgugccaggaggggaacauccggugcaacaucugcaucuga

SEQ ID NO: 77520 - RNA, 1701 nt, Artificial Sequence
  derived and/or modified CDS sequence (opt1) from hemagglutinin__InfluenzaA__ALE32010
augaagaccaucaucgcccugagcuacauccucugccuggccuucgcgcagaagauccccggcaacgacaacuccaccgccacgcugugccucgggcaccacgccgugccgaacggcaccaucgucaagaccaucaccaacgaccgcaucgaggugacgaacgccaccgagcuggugcagaacagcuccaucggggagaucugcgacagcccccaccagauccuggacggcgagaacugcacccucaucgacgcccugcugggggacccccagugcgacggcuuccagaacaagaagugggaccucuucgucgagcgguccaaggcguacagcaacugcuaccccuacgacgugccggacuacgccucccugcgcagccugguggccuccagcggcacccucgaguucaacaacgaguccuucaacuggacgggggucacccagaacggcaccagcuccgccugcauccggcgcagcuccagcuccuucuucagccggcugaacuggcugacccaccuccacuacacguaccccgcgcugaacgugaccaugcccaacaacgagcaguucgacaagcuguacaucuggggcgugcaccaccccgggaccgacaaggaccagaucuuccucuacgcccaguccagcgggcgcaucaccgucagcacgaagcggucccagcaggccgugaucccgaacaucggcagccgcccccggauccgcgacauccccucccggaucagcaucuacuggaccaucgugaagcccggcgacauccugcugaucaacuccaccgggaaccucaucgccccgcgcggcuacuucaagauccggagcgggaaguccagcaucaugcgcuccgacgcccccaucggcaagugcaagagcgagugcaucacccccaacggcuccauccccaacgacaagccguuccagaacgucaaccggaucacguacggggcgugcccccgcuacgugaagcacagcacccugaagcuggccaccggcaugcggaacgugcccgagaagcagacccgcgggaucuucggcgccaucgccggguucaucgagaacggcugggagggcauggucgacgggugguacggcuuccggcaccagaacuccgaggggcgcggccaggccgcggaccucaagagcacgcaggccgccaucgaccagaucaacgggaagcugaaccggcugaucggcaagaccaacgagaaguuccaccagaucgagaaggaguucuccgagguggagggccgcauccaggaccucgagaaguacguggaggacaccaagaucgaccuguggagcuacaacgccgagcugcucgucgcccuggagaaccagcacaccaucgaccugacggacuccgagaugaacaagcuguucgagaagaccaagaagcagcuccgcgagaacgcggaggacauggggaacggcugcuucaagaucuaccacaagugcgacaacgccugcaucgggagcauccggaacggcaccuacgaccacaacguguaccgcgacgaggcccugaacaaccgguuccagaucaaggggguggagcucaaguccggcuacaaggacuggauccuguggaucagcuucgccaucagcugcuuccugcucugcgucgcccugcugggcuucaucaugugggcgugccagaaggggaacauccgcugcaacaucugcaucuga

SEQ ID NO: 77521 - RNA, 1701 nt, Artificial Sequence; identical to SEQ ID NO: 77479
  derived and/or modified CDS sequence (opt1) from hemagglutinin__InfluenzaA__ALE32011

SEQ ID NO: 77522 - RNA, 1701 nt, Artificial Sequence; identical to SEQ ID NO: 77022
  derived and/or modified CDS sequence (opt1) from hemagglutinin__InfluenzaA__ALE32012

SEQ ID NO: 77523 - RNA, 1701 nt, Artificial Sequence; identical to SEQ ID NO: 76465
  derived and/or modified CDS sequence (opt1) from hemagglutinin__InfluenzaA__ALE32013

SEQ ID NO: 77524 - RNA, 1701 nt, Artificial Sequence
  derived and/or modified CDS sequence (opt1) from hemagglutinin__InfluenzaA__ALE32014
augaagaccaucaucgcccugagcuacauccucugccugguguucgcccagaagauccccggcaacgacaacuccaccgcgacgcugugccucgggcaccacgccgucccgaacggcaccaucgugaagaccaucaccaacgaccgcaucgaggugacgaacgccaccgagcugguccagaacagcuccaucggggagaucugcgacagcccccaccagauccuggacggcgagaacugcacccucaucgacgcccugcugggggacccccagugcgacggcuuccagaacaagaagugggaccucuucguggagcgguccaaggccuacagcaacugcuaccccuacgacgugccggacuacgcgucccugcgcagccuggucgccuccagcggcacccucgaguucaacaacgaguccuucaacuggacgggggugacccagaacggcaccagcuccgccugcauccgcaagagcuccagcuccuucuucagccggcugaacuggcugacccagcucaacuacacguaccccgcccugaacgugaccaugcccaacaacgagcaguucgacaagcuguacaucuggggcguccaccaccccgggaccgacaaggaccagaucuuccucuacgcgcaguccagcgggcggaucaccgugagcacgaagcgcucccagcaggccgugaucccgaacaucggcagccggccccgcauccgggacauccccucccgcaucagcaucuacuggaccaucgucaagcccggcgacauccugcugaucaacuccaccgggaaccucaucgccccgcggggcuacuucaagauccgcagcgggaaguccagcaucaugcgguccgacgcccccaucggcaagugcaagagcgagugcaucacccccaacggcuccauccccaacgacaagccguuccagaacgugaaccgcaucacguacggggccugcccccgguacgugaagcacagcacccugaagcuggcgaccggcaugcgcaacguccccgagaagcagacccgggggaucuucggcgccaucgccggguucaucgagaacggcugggagggcaugguggacgggugguacggcuuccgccaccagaacuccgaggggcggggccaggccgccgaccucaagagcacgcaggcggccaucgaccagaucaacgggaagcugaaccgccugaucggcaagaccaacgagaaguuccaccagaucgagaaggaguucuccgagguggagggccggauccaggaccucgagaaguacgucgaggacaccaagaucgaccuguggagcuacaacgccgagcugcucguggcccuggagaaccagcacaccaucgaccugacggacuccgagaugaacaagcuguucgagaagaccaagaagcagcuccgcgagaacgccgaggacauggggaacggcugcuucaagaucuaccacaagugcgacaacgcgugcaucgggagcauccgcaacggcaccuacgaccacaacguguaccgggacgaggcccugaacaaccgcuuccagaucaagggggucgagcucaaguccggcuacaaggacuggauccuguggaucagcuucgccaucagcugcuuccugcucugcguggcccugcugggcuucaucaugugggccugccagaaggggaacauccggugcaacaucugcaucuga

SEQ ID NO: 77525 - RNA, 1701 nt, Artificial Sequence; identical to SEQ ID NO: 77350
  derived and/or modified CDS sequence (opt1) from hemagglutinin__InfluenzaA__ALE32015

SEQ ID NO: 77526 - RNA, 1701 nt, Artificial Sequence; identical to SEQ ID NO: 76465
  derived and/or modified CDS sequence (opt1) from hemagglutinin__InfluenzaA__ALE32016

SEQ ID NO: 77527 - RNA, 1701 nt, Artificial Sequence; identical to SEQ ID NO: 76465
  derived and/or modified CDS sequence (opt1) from hemagglutinin__InfluenzaA__ALE32017

SEQ ID NO: 77528 - RNA, 1701 nt, Artificial Sequence; identical to SEQ ID NO: 76465
  derived and/or modified CDS sequence (opt1) from hemagglutinin__InfluenzaA__ALE32018

SEQ ID NO: 77529 - RNA, 1701 nt, Artificial Sequence; identical to SEQ ID NO: 77009
  derived and/or modified CDS sequence (opt1) from hemagglutinin__InfluenzaA__ALE32020

SEQ ID NO: 77530 - RNA, 1701 nt, Artificial Sequence; identical to SEQ ID NO: 77116
  derived and/or modified CDS sequence (opt1) from hemagglutinin__InfluenzaA__ALE32021

SEQ ID NO: 77531 - RNA, 1701 nt, Artificial Sequence; identical to SEQ ID NO: 77196
  derived and/or modified CDS sequence (opt1) from hemagglutinin__InfluenzaA__ALE32022

SEQ ID NO: 77532 - RNA, 1701 nt, Artificial Sequence; identical to SEQ ID NO: 76465
  derived and/or modified CDS sequence (opt1) from hemagglutinin__InfluenzaA__ALE32023

SEQ ID NO: 77533 - RNA, 1701 nt, Artificial Sequence
  derived and/or modified CDS sequence (opt1) from hemagglutinin__InfluenzaA__ALE32024
augaagaccaucaucgcccugagcuacauccucugccugguguucgcccagaagcugcccggcaacgacaacuccaccgcgacgcucugccuggggcaccacgccgucccgaacggcaccaucgugaagaccaucaccaacgaccgcaucgaggugacgaacgccaccgagcugguccagaacagcuccaucggggagaucugcgacagcccccaccagauccucgacggcaagaacugcacccugaucgacgcccugcucggggacccccagugcgacggcuuccagaacaagcggugggaccuguucguggagcgcuccaaggccuacagcaacugcuaccccuacgacgugccggacuacgcgucccugcggagccucgucgccuccagcggcacccuggaguucaacgacgaguccuucaacugggccggggugacgcagaacggcaagagcuccgccugcauccgcgggagcaacuccagcuucuucucccggcugaacuggcucacccacagcaacuucaaguaccccgcgcugaacgugaccaugcccaacaacgagcaguucgacaagcuguacaucuggggcguccaccaccccgggaccgacaaggaccagaucuuccucuacgcccacuccagcggccgcaucacggugagcaccaagcggucccagcaggccgugaucccgaacaucggcagccgcccccggauccgcaacauccccucccggaucagcaucuacuggaccaucgucaagcccggggacauccugcugaucaacuccaccggcaaccucaucgccccgcgcggguacuucaagauccagagcggcaaguccagcaucaugcgguccgacgcccccaucggcaagugcaagagcgagugcaucacgcccaacggguccauccccaacgacaagccguuccagaacgugaaccgcaucaccuacgggaccugcccccgguacgugaagcagagcacccugaagcuggcgacgggcaugcgcaacguccccgagaagcagacccggggcaucuucggggccaucgccggcuucaucgagaacggcugggaggggaugaaggacggcugguacggguuccgccaccagaacuccgagggccgggggcaggccgccgaccucaagagcacccaggcggccaucgaccagaucaacggcaagcugaaccgccugaucggcaagaccaacgagaaguuccaccagaucgagaaggaguucuccgagguggaggggcggauccaggaccucgagaaguacguggaggacacgaagaucgaccuguggagcuacaacgccgagcugcucgucgcccuggagaaccagcacaccaucgaccugaccgacuccgagaugaacaagcuguucgagaagaccaagaagcagcuccgcgagaacgccgaggacaugggcaacgggugcuucaagaucuaccacaagugcgacaacgcgugcaucggcagcauccgcaacgggacguacgaccacuacguguaccgggacgaggcccugaacaaccgcuuccagaucaagggcguggagcucaaguccggcuacaaggacuggauccuguggaucagcuucgccaucagcugcuuccugcucugcgucgcccugcugggguucaucaugugggccugccagaagggcaacauccggugcaacaucugcaucuga

SEQ ID NO: 77534 - RNA, 1701 nt, Artificial Sequence
  derived and/or modified CDS sequence (opt1) from hemagglutinin__InfluenzaA__ALE32025
augaagaccaucaucgcccugagcuacauccucugccugguguucgcccagaagauccccggcaacgacaacuccaccgcgacgcugugccucgggcaccacgccgucccgaacggcaccaucgugaagaccaucaccaacgaccgcaucgaggugacgaacgccaccgagcugguccagaacagcuccaucggggagaucugcgacagcccccaccagauccuggacggcgagaacugcacccucaucgacgcccugcugggggacccccagugcgacggcuuccagaacaagaagugggaccucuucguggagcgguccaaggccuacagcaacugcuaccccuacgacgugccggacuacgcgucccugcgcagccuggucgccuccagcggcacccucgaguucaacaacgaguccuucaacuggacgggggugacccagaacggcaccagcuccgccugcauccgcaagagcuccagcuccuucuucagccggcugaacuggcugacccaccucaacuacacguaccccgcccugaacgugaccaugcccaacaacgagcaguucgacaagcuguacaucuggggcguccaccaccccgggaccgacaaggaccagaucuuccucuacgcgcgguccagcgggcgcaucaccgugagcacgaagcggucccagcaggccgugaucccgaacaucggcagccgcccccggauccgcgacauccccucccggaucagcaucuacuggaccaucgucaaguccggcgacauccugcugaucaacagcaccgggaaccucaucgcgccccgcggcuacuucaagauccgguccggcaagagcuccaucaugcgcagcgacgccccgaucgggaagugcaaguccgagugcaucacccccaacggcagcauccccaacgacaagcccuuccagaacgugaaccggaucacguacggggccugcccgcgcuacgugaagcacuccacccugaagcuggccaccggcaugcggaacguccccgagaagcagacccgcgggaucuucggcgccaucgccggguucaucgagaacggcugggagggcaugguggacgggugguacggcuuccggcaccagaacagcgaggggcgcggccaggccgccgaccucaaguccacgcaggcggccaucgaccagaucaacgggaagcugaaccggcugaucggcaagaccaacgagaaguuccaccagaucgagaaggaguucagcgagguggagggccgcauccaggaccucgagaaguacgucgaggacaccaagaucgaccugugguccuacaacgccgagcugcucguggcccuggagaaccagcacaccaucgaccugacggacagcgagauguccaagcuguucgagaagaccaagaagcagcuccgcgagaacgccgaggacauggggaacggcugcuucaagaucuaccacaagugcgacaacgcgugcaucgggagcauccggaacggcaccuacgaccacaacguguaccgcgacgaggcccugaacaaccgguuccagaucaagggggucgagcucaagagcggcuacaaggacuggauccuguggaucuccuucgccaucagcugcuuccugcucugcguggcccugcugggcuucaucaugugggccugccagaaggggaacauccgcugcaacaucugcaucuga

SEQ ID NO: 77535 - RNA, 1701 nt, Artificial Sequence; identical to SEQ ID NO: 76465
  derived and/or modified CDS sequence (opt1) from hemagglutinin__InfluenzaA__ALE32026

SEQ ID NO: 77536 - RNA, 1701 nt, Artificial Sequence; identical to SEQ ID NO: 77009
  derived and/or modified CDS sequence (opt1) from hemagglutinin__InfluenzaA__ALE32027

SEQ ID NO: 77537 - RNA, 1701 nt, Artificial Sequence
  derived and/or modified CDS sequence (opt1) from hemagglutinin__InfluenzaA__ALE32028
augaagaccaucaucgcccugagccacauccucugccugguguucgcccagaagauccccggcaacgacaacuccaccgcgacgcugugccucgggcaccacgccgucccgaacggcaccaucgugaagaccaucaccaacgaccgcaucgaggugacgaacgccaccgagcugguccagaacagcuccaucggggagaucugcgacagcccccaccagauccuggacggcgagaacugcacccucaucgacgcccugcugggggacccccagugcgacggcuuccagaacaagaagugggaccucuucguggagcgguccaaggccuacagcaacugcuaccccuacgacgugccggacuacgcgucccugcgcagccuggucgccuccagcggcacccucgaguucaacaacgaguccuucaacuggacgggggugacccagaacggcaccagcuccgccugcauccggcgcagcuccagcuccuucuucagccggcugaacuggcugacccaccucaacuacacguaccccgcccugaacgugaccaugcccaacaacgagcaguucgacaagcuguacaucuggggcguccaccaccccgggaccgacaaggaccagaucuuccucuacgcgcaguccagcgggcgcaucaccgugagcacgaagcggucccagcaggccgugaucccgaacaucggcagccgcccccggauccgcgacauccccucccggaucagcaucuacuggaccaucgucaagcccggcgacauccugcugaucaacuccaccgggaaccucaucgccccgcgcggcuacuucaagauccggagcgggaaguccagcaucaugcgcuccgacgcccccaucggcaagugcaagagcgagugcaucacccccaacggcuccauccccaacgacaagccguuccagaacgugaaccggaucacguacggggccugcccccgcuacgugaagcacagcacccugaagcuggcgaccggcaugcggaacguccccgagaagcagacccgcgggaucuucggcgccaucgccggguucaucgagaacggcugggagggcaugauggacgggugguacggcuuccggcaccagaacuccgaggggcgcggccaggccgccgaccucaagagcacgcaggcggccaucgaccagaucaacgggaagcugaaccggcugaucggcaagaccaacgagaaguuccaccagaucgagaaggaguucuccgagguggagggccgcauccaggaccucgagaaguacguggaggacaccaagaucgaccuguggagcuacaacgccgagcugcucgucgcccuggagaaccagcacaccaucgaccugacggacuccgagaugaacaagcuguucgagaagaccaagaagcagcuccgcgagaacgccgaggacauggggaacggcugcuucaagaucuaccacaagugcgacaacgcgugcaucgggagcauccggaacggcaccuacgaccacaacguguaccgcgacgaggcccugaacaaccgguuccagaucaaggggguggagcucaaguccggcuacaaggacuggauccuguggaucagcuucgccaucagcugcuuccugcucugcgucgcccugcugggcuucaucaugugggccugccagaaggggaacauccgcugcaacaucugcaucuga

SEQ ID NO: 77538 - RNA, 1701 nt, Artificial Sequence; identical to SEQ ID NO: 77116
  derived and/or modified CDS sequence (opt1) from hemagglutinin__InfluenzaA__ALE32029

SEQ ID NO: 77539 - RNA, 1701 nt, Artificial Sequence
  derived and/or modified CDS sequence (opt1) from hemagglutinin__InfluenzaA__ALE32030
augaagaccaucaucgcccugagccacauccucugccugguguucgcccagaagauccccggcaacgacaacuccaccgcgacgcugugccucgggcaccacgccgucccgaacggcaccaucgugaagaccaucaccaacgaccgcaucgaggugacgaacgccaccgagcugguccagaacagcuccaucggggagaucugcgacagcccccaccagauccuggacggcgagaacugcacccucaucgacgcccugcugggggacccccagugcgacggcuuccagaacaagaagugggaccucuucguggagcgguccaaggccuacagcaacugcuaccccuacgacgugccggacuacgcgucccugcgcagccuggucgccuccagcggcacccucgaguucaacaacgaguccuucaacuggacgggggugacccagaacggcaccagcuccgccugcauccggcgcagcuccagcuccuucuucagccggcugaacuggcugacccaccucaacuacaucuaccccgcccugaacgugacgaugcccaacaacgagcaguucgacaagcuguacaucuggggcguccaccaccccgggaccgacaaggaccagaucuuccucuacgcgcaguccagcgggcgcaucaccgugagcaccaagcggucccagcaggccgugaucccgaacaucggcagccgcccccggauccgcgacauccccucccggaucagcaucuacuggacgaucgucaagcccggcgacauccugcugaucaacuccaccgggaaccucaucgccccgcgcggcuacuucaagauccggagcgggaaguccagcaucaugcgcuccgacgcccccaucggcaagugcaagagcgagugcaucacccccaacggcuccauccccaacgacaagccguuccagaacgugaaccggaucaccuacggggccugcccccgcuacgugaagcacagcacgcugaagcuggcgaccggcaugcggaacguccccgagaagcagacccgcgggaucuucggcgccaucgccggguucaucgagaacggcugggagggcaugauggacgggugguacggcuuccggcaccagaacuccgaggggcgcggccaggccgccgaccucaagagcacccaggcggccaucgaccagaucaacgggaagcugaaccggcugaucggcaagacgaacgagaaguuccaccagaucgagaaggaguucuccgagguggagggccgcauccaggaccucgagaaguacguggaggacaccaagaucgaccuguggagcuacaacgccgagcugcucgucgcccuggagaaccagcacaccaucgaccugaccgacuccgagaugaacaagcuguucgagaagacgaagaagcagcuccgcgagaacgccgaggacauggggaacggcugcuucaagaucuaccacaagugcgacaacgcgugcaucgggagcauccggaacggcaccuacgaccacaacguguaccgcgacgaggcccugaacaaccgguuccagaucaaggggguggagcucaaguccggcuacaaggacuggauccuguggaucagcuucgccaucagcugcuuccugcucugcgucgcccugcugggcuucaucaugugggccugccagaaggggaacauccgcugcaacaucugcaucuga

SEQ ID NO: 77540 - RNA, 1701 nt, Artificial Sequence
  derived and/or modified CDS sequence (opt1) from hemagglutinin__InfluenzaA__ALE32031
augaagaccaucaucgcccugagcuacauccucugccugguguucgcccagaagauccccggcaacgacaacuccaccgcgacgcugugccucgggcaccacgccgucccgaacggcaccaucgugaagaccaucaccaacgaccgcaucgaggugacgaacgccaccgagcugguccagaacagcuccaucggggagaucugcgacagcccccaccagauccuggacggcgagaacugcacccucaucgacgcccugcugggggacccccagugcgacggcuuccagaacaagaagugggaccucuucguggagcgguccaaggccuacagcaacugcuaccccuacgacgugccggacuacgcgucccugcgcagccuggucgccuccagcggcacccucgaguucaacaacgaguccuucaacuggacgggggugacccagaacggcaccagcuccgccugcauccggcgcagcuccagcuccuucuucagccggcugaacuggcugacccaccucaacuacacguaccccgcccugaacgugaccaugcccaacaacgagcaguucgacaagcuguacaucuggggcguccaccaccccgggaccgacaaggaccagaucuuccucuacgcgcaguccagcgggcgcaucaccgugagcacgaagcggucccagcaggccgugaucccgaacaucggcagccgcccccggauccgcgacauccccucccggaucagcaucuacuggaccaucgucaagcccggcgacauccugcugaucaacuccaccgggaaccucaucgccccgcgcggcuacuucaagauccggagcgggaaguccagcaucaugcgcuccgacgcccccaucggcaagugcaagagcgagugcaucacccccaacggcuccauccccaacgacaagccguuccagaacgugaaccggaucacguacggggccugcccccgcuacgugaagcacagcacccugaagcuggcgaccggcaugcggaacguccccgagaagcagacccgcgggaucuucggcgccaucgccggguucaucgagaacggcugggagggcaugauggacgggugguacggcuuccggcaccagaacuccgaggggcgcggccaggccgccgaccucaagagcacgcaggcggccaucgaccagaucaacgggaagcugaaccggcugaucggcaagaccaacgagaaguuccaccagaucgagaaggaguucuccgagguggagggccgcauccaggaccucgagaaguacguggaggacaccaagaucgaccuguggagcuacaacgccgagcugcucgucgcccuggagaaccagcacaccaucgaccugacggacuccgagaugaacaagcuguucgagaagaccaagaagcagcuccgcgagaacgccgaggacauggggaacggcugcuucaagaucuaccacaagugcgacaacgcgugcaucgggagcauccggaacggcaccuacgaccacaacguguaccgcgacgaggcccugaacaaccgguuccagaucaaggggguggagcucaaguccggcuacaaggacuggauccuguggaucagcuucgccaucagcugcuuccugcucugcgucgcccugcugggcuucaucaugugggccugccagaaggggaacauccgcugcaacaucugcaucuga

SEQ ID NO: 77541 - RNA, 1701 nt, Artificial Sequence
  derived and/or modified CDS sequence (opt1) from hemagglutinin__InfluenzaA__ALE32032
augaagaccaucaucgcccugagcuacauccucugccugguguucgcccagaagauccccggcaacgacaacuccaccgcgacgcugugccucgggcaccacgccgucccgaacggcaccaucgugaagaccaucaccaacgaccgcaucgaggugacgaacgccaccgagcugguccagaacagcuccaucggggagaucugcgacagcccccaccagauccuggacggcgagaacugcacccucaucgacgcccugcugggggacccccagugcgacggcuuccagaacaagaagugggaccucuucguggagcgguccaaggccuacagcaacugcuaccccuacgacgugccggacuacgcgucccugcgcagccuggucgccuccagcggcacccucgaguucaacaacgaguccuucaacuggacgggggugacccagaacggcaccagcuccgccugcauccggcgcagcuccagcuccuucuucagccggcugaacuggcugacccaccucaacuacacguaccccgcccugaacgugaccaugcccaacaacgagcaguucgacaagcuguacaucuggggcguccaccaccccgggaccgacaaggaccagaucuuccucuacgcgcaguccagcgggcgcaucgccgugagcaccaagcggucccagcaggccgugaucccgaacaucggcagccgcccccggauccgcgacauccccucccggaucagcaucuacuggacgaucgucaagcccggcgacauccugcugaucaacuccaccgggaaccucaucgccccgcgcggcuacuucaagauccggagcgggaaguccagcaucaugcgcuccgacgcccccaucggcaagugcaagagcgagugcaucacccccaacggcuccauccccaacgacaagccguuccagaacgugaaccggaucaccuacggggcgugcccccgcuacgugaagcacagcacgcugaagcuggccaccggcaugcggaacguccccgagaagcagacccgcgggaucuucggcgccaucgccggguucaucgagaacggcugggagggcaugauggacgggugguacggcuuccggcaccagaacuccgaggggcgcggccaggccgcggaccucaagagcacccaggccgccaucgaccagaucaacgggaagcugaaccggcugaucggcaagacgaacgagaaguuccaccagaucgagaaggaguucuccgagguggagggccgcauccaggaccucgagaaguacguggaggacaccaagaucgaccuguggagcuacaacgccgagcugcucgucgcccuggagaaccagcacaccaucgaccugaccgacuccgagaugaacaagcuguucgagaagacgaagaagcagcuccgcgagaacgcggaggacauggggaacggcugcuucaagaucuaccacaagugcgacaacgccugcaucgggagcauccggaacggcaccuacgaccacaacguguaccgcgacgaggcccugaacaaccgguuccagaucaaggggguggagcucaaguccggcuacaaggacuggauccuguggaucagcuucgccaucagcugcuuccugcucugcgucgcccugcugggcuucaucaugugggcgugccagaaggggaacauccgcugcaacaucugcaucuga

SEQ ID NO: 77542 - RNA, 1701 nt, Artificial Sequence; identical to SEQ ID NO: 76465
  derived and/or modified CDS sequence (opt1) from hemagglutinin__InfluenzaA__ALE32033

SEQ ID NO: 77543 - RNA, 1701 nt, Artificial Sequence
  derived and/or modified CDS sequence (opt1) from hemagglutinin__InfluenzaA__ALE32034
augaagaccaucaucgcccugggcuacauccucugccugguguucgcccagaagauccccgggaacgacaacagcaccgcgacgcugugccucggccaccacgccgucccgaacgggaccaucgugaagaccaucaccaacgaccgcaucgaggugacgaacgccaccgagcugguccagaacuccagcaucggcgagaucugcgacagcccccacaagauccuggacggggagaacugcacccucaucgacgcccugcugggcgacccccagugcgacggcuuccagaacaagaagugggaccucuucguggagcgguccaaggccuacuccaacugcuaccccuacgacgugccggacuacgcgagccugcgcucccuggucgccagcuccgggacccucgaguucaacaacgagagcuucaacuggacgggcgugacccagaacgggaccuccagcgccugcauccggcgcuccagcuccagcuucuucucccggcugaacuggcugacccaccucaaguacacguaccccgcccugaacgugaccaugcccaacaacgagcaguucgacaagcuguacaucuggggcguccaccaccccgggaccgacaaggaccagaucuuccucuacgcgcagagcuccggccgcaucaccgugagcacgaagcggagccagcaggccgugaucccgaacaucggcucccgcccccggauccgcgacauccccagccggaucuccaucuacuggaccaucgucaagcccggggacauccugcugaucaacagcaccggcaaccucaucgccccgcgcggguacuucaagauccgguccggcaagagcuccaucaugcgcagcgacgcccccaucggcaagugcaaguccgagugcaucacccccaacgggagcauccccaacgacaagccguuccagaacgugaaccggaucacguacggcgccugcccccgcuacgugaagcacuccacccugaagcuggcgaccgggaugcggaacguccccgagaagcagacccgcggcaucuucggggccaucgccggcuucaucgagaacggcugggaggggaugguggacggcugguacggguuccggcaccagaacagcgagggccgcgggcaggccgccgaccucaaguccacgcaggcggccaucgaccagaucaacggcaagcugaaccggcugaucggcaagaccaacgagaaguuccaccagaucgagaaggaguucagcgagguggaggggcgcauccaggaccucgagaaguacgucgaggacaccaagaucgaccugugguccuacaacgccgagcugcucguggcccuggagaaccagcacaccaucgaccugacggacagcgagaugaacaagcuguucgagaagaccaagaagcagcuccgcgagaacgccgaggacaugggcaacgggugcuucaagaucuaccacaagugcgacaacgcgugcaucggcuccauccggaacgggaccuacgaccacaacguguaccgcgacgaggcccugaacaaccgguuccagaucaagggcgucgagcucaagagcggcuacaaggacuggauccuguggaucuccuucgccaucagcugcuuccugcucugcguggcccugcugggguucaucaugugggccugccagaagggcaacauccgcugcaacaucugcaucuga

SEQ ID NO: 77544 - RNA, 1701 nt, Artificial Sequence; identical to SEQ ID NO: 77355
  derived and/or modified CDS sequence (opt1) from hemagglutinin__InfluenzaA__ALE32035

SEQ ID NO: 77545 - RNA, 1701 nt, Artificial Sequence
  derived and/or modified CDS sequence (opt1) from hemagglutinin__InfluenzaA__ALE32036
augaagaccaucaucgcccugggcuacauccucugccugguguucgcccagaagauccccgggaacgacaacagcaccgcgacgcugugccucggccaccacgccgucccgaacgggaccaucgugaagaccaucaccaacgaccgcaucgaggugacgaacgccaccgagcugguccagaacuccagcaucggcgagaucugcgacagcccccacaagauccuggacggggagaacugcacccucaucgacgcccugcugggcgacccccagugcgacggcuuccagaacaagaagugggaccucuucguggagcgguccaaggccuacuccaacugcuaccccuacgacgugccggacuacgcgagccugcgcucccuggucgccagcuccgggacccucgaguucaacaacgagagcuucaacuggacgggcgugacccagaacgggaccuccagcgccugcauccggcgcuccagcuccagcuucuucucccggcugaacuggcugacccaccuccacuacacguaccccgcccugaacgugaccaugcccaacaacgagcaguucgacaagcuguacaucuggggcguccaccaccccgggaccgacaaggaccagaucuuccucuacgcgcagagcuccggccgcaucaccgugagcacgaagcggagccagcaggccgugaucccgaacaucggcucccgcccccggauccgcgacauccccagccggaucuccaucuacuggaccaucgucaagcccggggacauccugcugaucaacagcaccggcaaccucaucgccccgcgcggguacuucaagauccgguccggcaagagcuccaucaugcgcagcgacgcccccaucggcaagugcaaguccgagugcaucacccccaacgggagcauccccaacgacaagccguuccagaacgugaaccggaucacguacggcgccugcccccgcuacgugaagcacuccacccugaagcuggcgaccgggaugcggaacguccccgagaagcagacccgcggcaucuucggggccaucgccggcuucaucgagaacggcugggaggggaugguggacggcugguacggguuccggcaccagaacagcgagggccgcgggcaggccgccgaccucaaguccacgcaggcggccaucgaccagaucaacggcaagcugaaccggcugaucggcaagaccaacgagaaguuccaccagaucgagaaggaguucagcgagguggaggggcgcauccaggaccucgagaaguacgucgaggacaccaagaucgaccugugguccuacaacgccgagcugcucguggcccuggagaaccagcacaccaucgaccugacggacagcgagaugaacaagcuguucgagaagaccaagaagcagcuccgcgagaacgccgaggacaugggcaacgggugcuucaagaucuaccacaagugcgacaacgcgugcaucggcuccauccggaacgggaccuacgaccacaacguguaccgcgacgaggcccugaacaaccgguuccagaucaagggcgucgagcucaagagcggcuacaaggacuggauccuguggaucuccuucgccaucagcugcuuccugcucugcguggcccugcugggguucaucaugugggccugccagaagggcaacauccgcugcaacaucugcaucuga

SEQ ID NO: 77546 - RNA, 1701 nt, Artificial Sequence
  derived and/or modified CDS sequence (opt1) from hemagglutinin__InfluenzaA__ALE32037
augaagaccaucaucgcccugagcuacauccucugccugguguucgcccagaagauccccggcaacgacaacuccaccgcgacgcugugccucgggcaccacgccgucccgaacggcaccaucgugaagaccaucaccaacgaccgcaucgaggugacgaacgccaccgagcugguccagaacagcuccaucggggagaucugcgacagcccccaccagauccuggacggcgagaacugcacccucaucgacgcccugcugggggacccccagugcgacggcuuccagaacaagaagugggaccucuucguggagcgguccaaggccuacagcaacugcuaccccuacgacgugccggacuacgcgucccugcgcagccuggucgccuccagcggcacccucgaguucaacaacgaguccuucaacuggacgggggugacccagaacggcaccagcuccgccugcauccggcgcagcuccagcuccuucuucagccggcugaacuggcugacccaccucaacuacaaguaccccgcccugaacgugacgaugcccaacaacgagcaguucgacaagcuguacaucuggggcguccaccaccccgggaccgacaaggaccagaucuuccucuacgcgcaguccagcgggcgcaucaccgugagcaccaagcggucccagcaggccgugaucccgaacaucggcagccgcccccggauccgcgacauccccucccggaucagcaucuacuggacgaucgucaagcccggcgacauccugcugaucaacuccaccgggaaccucaucgccccgcgcggcuacuucaagauccugagcgggaaguccagcaucaugcgguccgacgcccccaucggcaagugcaagagcgagugcaucacccccaacggcuccauccccaacgacaagccguuccagaacgugaaccgcaucaccuacggggccugcccccgguacgugaagcacagcacgcugaagcucgcgaccggcaugcgcaacguccccgagaagcagacccgggggaucuucggcgccaucgccggguucaucgagaacggcugggagggcaugguggacgggugguacggcuuccgccaccagaacuccgaggggcggggccaggccgccgaccucaagagcacccaggcggccaucgaccagaucaacgggaagcugaaccgccugaucggcaagacgaacgagaaguuccaccagaucgagaaggaguucuccgagguggagggccggauccaggaccuggagaaguacgucgaggacaccaagaucgaccuguggagcuacaacgccgagcuccugguggcccuggagaaccagcacaccaucgaccucaccgacuccgagaugaacaagcuguucgagaagacgaagaagcagcugcgcgagaacgccgaggacauggggaacggcugcuucaagaucuaccacaagugcgacaacgcgugcaucgggagcauccgcaacggcaccuacgaccacaacguguaccgggacgaggcccucaacaaccgcuuccagaucaagggggucgagcugaaguccggcuacaaggacuggauccuguggaucagcuucgccaucagcugcuuccuccugugcguggcccugcucggcuucaucaugugggccugccagaaggggaacauccggugcaacaucugcaucuga

SEQ ID NO: 77547 - RNA, 1701 nt, Artificial Sequence
  derived and/or modified CDS sequence (opt1) from hemagglutinin__InfluenzaA__ALE32038
augaagaccaucaucgcccugagcuacauccucugccugguguucgcccagaagauccccggcaacgacaacuccaccgcgacgcugugccucgggcaccacgccgucccgaacggcaccaucgugaagaccaucaccaacgaccgcaucgaggugacgaacgccaccgagcugguccagaacagcuccaucggggagaucugcgacagcccccaccagauccuggacggcgagaacugcacccucaucgacgcccugcugggggacccccagugcgacggcuuccagaacaagaagugggaccucuucguggagcgguccaaggccuacagcaacugcuaccccuacgacgugccggacuacgcgucccugcgcagccuggucgccuccagcggcacccucgaguucaacaacgaguccuucaacuggacgggggugacccagaacggcaccagcuccgccugcauccggcgcagcuccagcuccuucuucagccggcugaacuggcugacccaccucaacuacacguaccccgcccugaacgugaccaugcccaacaacgagcaguucgacaagcuguacaucuggggcguccaccaccccgggaccgacaaggaccagaucuuccucuacgcgcaguccagcgggcgcaucaccgugagcacgaagcggucccagcaggccgugaucccgaacaucggcagccgcccccggauccgcgacauccccucccggaucagcaucuacuggaccaucgucaagcccggcgacauccugcugaucaacuccaaggggaaccucaucgccccgcgcggcuacuucaagauccggagcgggaaguccagcaucaugcgcuccgacgcccccaucggcaagugcaagagcgagugcaucacccccaacggcuccauccccaacgacaagccguuccagaacgugaaccggaucaccuacggggccugcccccgcuacgugaagcacagcacgcugaagcuggcgaccggcaugcggaacguccccgagaagcagacccgcgggaucuucggcgccaucgccggguucaucgagaacggcugggagggcaugguggacgggugguacggcuuccggcaccucaacuccgaggggcgcggccaggccgccgaccucaagagcacccaggcggccaucgaccagaucaacgggaagcugaaccggcugaucggcaagacgaacgagaaguuccaccagaucgagaaggaguucuccgagguggagggccgcauccaggaccuggagaaguacgucgaggacaccaagaucgaccuguggagcuacaacgccgagcuccugguggcccuggagaaccagcacaccaucgaccucaccgacuccgagaugaacaagcuguucgagaagacgaagaagcagcugcgcgagaacgccgaggacauggggaacggcugcuucaagaucuaccacaagugcgacaacgcgugcaucgggagcauccggaacggcaccuacgaccacaacguguaccgcgacgaggcccucaacaaccgguuccagaucaagggggucgagcugaaguccggcuacaaggacuggauccuguggaucagcuucgccaucagcugcuuccuccugugcguggcccugcucggcuucaucaugugggccugccagaaggggaacauccgcugcaacaucugcaucuga

SEQ ID NO: 77548 - RNA, 1701 nt, Artificial Sequence; identical to SEQ ID NO: 77123
  derived and/or modified CDS sequence (opt1) from hemagglutinin__InfluenzaA__ALE32039

SEQ ID NO: 77549 - RNA, 1701 nt, Artificial Sequence
  derived and/or modified CDS sequence (opt1) from hemagglutinin__InfluenzaA__ALE32040
augaagaccaucaucgcccugagcuacauccucugccugguguucgcccagaagauccccggcaacgacaacuccaccgcgacgcugugccucgggcaccacgccgucccgaacggcaccaucgugaagaccaucaccaacgaccgcaucgaggugacgaacgccaccgagcugguccagaacagcuccaucggggagaucugcgacagcccccaccagauccuggacggcgagaacugcacccucaucgacgcccugcugggggacccccagugcgacggcuuccagaacaagaagugggaccucuucguggagcgguccaaggccuacagcaacugcuaccccuacgacgugccggacuacgcgucccugcgcagccuggucgccuccagcggcacccucgaguucaacaacgaguccuucaacuggacgggggugacccagaacggcaccagcuccgccugcauccggcgcagcuccagcuccuucuucagccggcugaacuggcugacccaccucaacuacacguaccccgcccugaacgugaccaugcccaacaacgagcaguucgacaagcuguacaucuggggcguccaccaccccgggaccgacaaggaccagaucuuccucuacgcgcaguccagcgggcgcaucaccgugagcacgaagcggucccagcaggccgugaucccgaacaucggcagccgcccccggauccgcgacauccccucccggaucagcaucuacuggaccaucgucaagcccggcgacauccugcugaucaacuccaccgggaaccucaucgccccgcgcggcuacuucaagauccggagcgggaccuccagcaucaugcgcuccgacgcccccaucggcaagugcaagagcgagugcaucacgcccaacggcuccauccccaacgacaagccguuccagaacgugaaccggaucaccuacggggccugcccccgcuacgugaagcacagcacccugaagcuggcgaccggcaugcggaacguccccgagaagcagacgcgcgggaucuucggcgccaucgccggguucaucgagaacggcugggagggcaugguggacgggugguacggcuuccggcaccagaacuccgaggggcgcggccaggccgccgaccucaagagcacccaggcggccaucgaccagaucaacgggaagcugaaccggcugaucggcaagaccaacgagaaguuccaccagaucgagaaggaguucuccgagguggagggccgcauccaggaccucgagaaguacgucgaggacaccaagaucgaccuguggagcuacaacgccgagcugcucguggcccuggagaaccagcacacgaucgaccugaccgacuccgagaugaacaagcuguucgagaagaccaagaagcagcuccgcgagaacgccgaggacauggggaacggcugcuucaagaucuaccacaagugcgacaacgcgugcaucgggagcauccggaacggcaccuacgaccacaacguguaccgcgacgaggcccugaacaaccgguuccagaucaagggggucgagcucaaguccggcuacaaggacuggauccuguggaucagcuucgccaucagcugcuuccugcucugcguggcccugcugggcuucaucaugugggccugccagaaggggaacauccgcugcaacaucugcaucuga

SEQ ID NO: 77550 - RNA, 1701 nt, Artificial Sequence; identical to SEQ ID NO: 76465
  derived and/or modified CDS sequence (opt1) from hemagglutinin__InfluenzaA__ALE32041

SEQ ID NO: 77551 - RNA, 1701 nt, Artificial Sequence; identical to SEQ ID NO: 76465
  derived and/or modified CDS sequence (opt1) from hemagglutinin__InfluenzaA__ALE32042

SEQ ID NO: 77552 - RNA, 1701 nt, Artificial Sequence
  derived and/or modified CDS sequence (opt1) from hemagglutinin__InfluenzaA__ALE32043
augaagaccaucaucgcccugagcuacauccucugccugguguucgcccagaagauccccggcaacgacaacuccaccgcgacgcugugccucgggcaccacgccgucccgaacggcaccaucgugaagaccaucaccaacgaccgcaucgaggugacgaacgccaccgagcugguccagaacagcuccaucggggagaucugcgacagcccccaccagauccuggacggcgagaacugcacccucaucgacgcccugcugggggacccccagugcgacggcuuccagaacaagaagugggaccucuucguggagcgguccaaggccuacagcaacugcuaccccuacgacgugccggacuacaccucccugcgcagccuggucgcguccagcggcacgcucgaguucaacaacgaguccuucaacuggaccggggugacccagaacggcaccagcuccgccugcauccggcgcagcuccagcuccuucuucagccggcugaacuggcugacgcaccucaacuacaccuaccccgcccugaacgugaccaugcccaacaacgagcaguucgacaagcuguacaucuggggcguccaccaccccgggaccgacaaggaccagaucuuccucuacgcccaguccagcgggcgcaucacggugagcaccaagcggucccagcaggcggugaucccgaacaucggcagccgcccccggauccgcgacauccccucccggaucagcaucuacuggaccaucgucaagcccggcgacauccugcugaucaacuccaccgggaaccucaucgccccgcgcggcuacuucaagauccggagcgggaaguccagcaucaugcgcuccgacgcccccaucggcaagugcaagagcgagugcaucacgcccaacggcuccauccccaacgacaagccguuccagaacgugaaccggaucaccuacggggccugcccccgcuacgugaagcacagcacccugaagcuggccaccggcaugcggaacguccccgagaagcagacgcgcgggaucuucggcgcgaucgccggguucaucgagaacggcugggagggcaugguggacgggugguacggcuuccggcaccagaacuccgaggggcgcggccaggccgccgaccucaagagcacccaggccgcgaucgaccagaucaacgggaagcugaaccggcugaucggcaagaccaacgagaaguuccaccagaucgagaaggaguucuccgagguggagggccgcauccaggaccucgagaaguacgucgaggacaccaagaucgaccuguggagcuacaacgccgagcugcucguggcccuggagaaccagcacacgaucgaccugaccgacuccgagaugaacaagcuguucgagaagaccaagaagcagcuccgcgagaacgccgaggacauggggaacggcugcuucaagaucuaccacaagugcgacaacgccugcaucgggagcauccggaacggcaccuacgaccacaacguguaccgcgacgaggcgcugaacaaccgguuccagaucaagggggucgagcucaaguccggcuacaaggacuggauccuguggaucagcuucgccaucagcugcuuccugcucugcguggcccugcugggcuucaucaugugggccugccagaaggggaacauccgcugcaacaucugcaucuga

SEQ ID NO: 77553 - RNA, 1701 nt, Artificial Sequence; identical to SEQ ID NO: 76465
  derived and/or modified CDS sequence (opt1) from hemagglutinin__InfluenzaA__ALE32044

SEQ ID NO: 77554 - RNA, 1701 nt, Artificial Sequence; identical to SEQ ID NO: 76465
  derived and/or modified CDS sequence (opt1) from hemagglutinin__InfluenzaA__ALE32045

SEQ ID NO: 77555 - RNA, 1701 nt, Artificial Sequence; identical to SEQ ID NO: 76465
  derived and/or modified CDS sequence (opt1) from hemagglutinin__InfluenzaA__ALE32046

SEQ ID NO: 77556 - RNA, 1701 nt, Artificial Sequence
  derived and/or modified CDS sequence (opt1) from hemagglutinin__InfluenzaA__ALE32047
augaagaccaucaucgcccugagcuacauccucugccugguguucgcccagaagauccccggcaacgacaacuccaccgcgacgcugugccucgggcaccacgccgucccgaacggcaccaucgugaagaccaucaccaacgaccgcaucgaggugacgaacgccaccgagcugguccagaacagcuccaucggggagaucugcgacagcccccaccaggugcuggacggcgagaacugcacccucaucgacgcccugcugggggacccccagugcgacggcuuccagaacaagaagugggaccucuucguggagcgguccaaggccuacagcaacugcuaccccuacgacgucccggacuacgcgucccugcgcagccugguggccuccagcggcacccucgaguucaacaacgaguccuucaacuggacgggggugacccagaacggcaccagcuccgccugcauccggcgcagcuccagcuccuucuucagccggcugaacuggcugacccaccucaacuacacguaccccgcccugaacgucaccaugcccaacaacgagcaguucgacaagcuguacaucuggggcgugcaccaccccgggaccgacaaggaccagaucuuccucuacgcgcaguccagcgggcgcaucaccgugagcacgaagcggucccagcaggccgucaucccgaacaucggcagccgcccccggauccgcgacauccccucccggaucagcaucuacuggaccaucgugaagcccggcgacauccugcugaucaacuccaccgggaaccucaucgccccgcgcggcuacuucaagauccggagcgggaaguccagcaucaugaucuccgacgcccccaucggcaagugcaagagcgagugcaucacccccaacggcuccauccccagcgacaagccguuccagaacgugaaccgcaucacguacggggccugcccccgguacgucaagcacuccacccugaagcuggcgaccggcaugcgcaacgugcccgagaagcagacccgggggaucuucggcgccaucgccggguucaucgagaacggcugggagggcaugguggacgggugguacggcuuccgccaccagaacagcgaggggcggggccaggccgccgaccucaaguccacgcaggcggccaucgaccagaucaacgggaagcugaaccgccugaucggcaagaccaacgagaaguuccaccagaucgagaaggaguucagcgaggucgagggccggauccaggaccucgagaaguacguggaggacaccaagaucgaccugugguccuacaacgccgagcugcucguggcccuggagaaccagcacaccaucgaccugacggacagcgagaugaacaagcuguucgagaagaccaagaagcagcuccgcgagaacgccgaggacauggggaacggcugcuucaagaucuaccacaagugcgacaacgcgugcaucggguccauccgcaacggcaccuacgaccacaacgucuaccgggacgaggcccugaacaaccgcuuccagaucaaggggguggagcucaagagcggcuacaaggacuggauccuguggaucagcuucgccaucuccugcuuccugcucugcguggcccugcugggcuucaucaugugggccugccagaaggggaacauccggugcaacaucugcaucuga

SEQ ID NO: 77557 - RNA, 1701 nt, Artificial Sequence; identical to SEQ ID NO: 76465
  derived and/or modified CDS sequence (opt1) from hemagglutinin__InfluenzaA__ALE32048

SEQ ID NO: 77558 - RNA, 1701 nt, Artificial Sequence; identical to SEQ ID NO: 77123
  derived and/or modified CDS sequence (opt1) from hemagglutinin__InfluenzaA__ALE32049

SEQ ID NO: 77559 - RNA, 1701 nt, Artificial Sequence
  derived and/or modified CDS sequence (opt1) from hemagglutinin__InfluenzaA__ALE32050
augaagaccaucaucgcccugagcuacauccucugccugguguucgcccagaagauccccggcaacgacaacuccaccgcgacgcugugccucgggcaccacgccgucccgaacggcaccaucgugaagaccaucaccaacgaccgcaucgaggugacgaacgccaccgagcugguccagaacagcuccaucggggagaucugcgacagcccccaccagauccuggacggcgagaacugcacccucaucgacgcccugcugggggacccccagugcgacggcuuccagaacaagaagugggaccucuucguggagcgguccaaggccuacagcaacugcuaccccuacgacgugccggacuacgcgucccugcgcagccuggucgccuccagcggcacccucgaguucaacaacgaguccuucaacuggacgggggugacccaggacggcaccagcuccgccugcauccggcgcagcuccagcuccuucuucagccggcugaacuggcugacccaccucaacuacacguaccccgcccugaacgugaccaugcccaacaacgagcaguucgacaagcuguacaucuggggcguccaccaccccgggaccgacaaggaccagaucuuccucuacgcgcaguccagcgggcgcaucaccgugagcacgaagcggucccagcaggccgugaucccgaacaucggcagccgcccccggauccgcgacauccccucccggaucagcaucuacuggaccaucgucaagcccggcgacauccugcugaucaacuccaccgggaaccucaucgccccgcgcggcuacuucaagauccggagcgggaaguccagcaucaugcgcuccgacgcccccaucggcaagugcaagagcgagugcaucacccccaacggcuccauccccaacgacaagccguuccagaacgugaaccggaucacguacggggccugcccccgcuacgugaagcacagcacccugaagcuggcgaccggcaugcggaacguccccgagaagcagacccgcgggaucuucggcgccaucgccggguucaucgagaacggcugggagggcaugguggacgggugguacggcuuccggcaccagaacuccgaggggcgcggccaggccgccgaccucaagagcacgcaggcggccaucgaccagaucaacgggaagcugaaccggcugaucggcaagaccaacgagaaguuccaccagaucgagaaggaguucuccgagguggagggccgcauccaggaccucgagaaguacgucgaggacaccaagaucgaccuguggagcuacaacgccgagcugcucguggcccuggagaaccagcacaccaucgaccugacggacuccgagaugaacaagcuguucgagaagaccaagaagcagcuccgcgagaacgccgaggacauggggaacggcugcuucaagaucuaccacaagugcgacaacgcgugcaucgggagcauccggaacggcaccuacgaccacaacguguaccgcgacgaggcccugaacaaccgguuccagaucaagggggucgagcucaaguccggcuacaaggacuggauccuguggaucagcuucgccaucagcugcuuccugcucugcguggcccugcugggcuucaucaugugggccugccagaaggggaacauccgcugcaacaucugcaucuga

SEQ ID NO: 77560 - RNA, 1701 nt, Artificial Sequence
  derived and/or modified CDS sequence (opt1) from hemagglutinin__InfluenzaA__ALE32051
augaagaccaucaucgcccugagcuacauccucugccugguguucgcccagaagauccccggcaacgacaacuccaccgcgacgcugugccucgggcaccacgccgucccgaacggcaccaucgugaagaccaucaccaacgaccgcaucgaggugacgaacgccaccgagcugguccagaacagcuccaucggggagaucugcgacagcccccaccagauccuggacggcgagaacugcacccucaucgacgcccugcugggggacccccagugcgacggcuuccagaacaagaagugggaccucuucguggagcgguccaaggccuacagcaacugcuaccccuacgacgugccggacuacgcgucccugcgcagccuggucgccuccagcggcacccucgaguucaacaacgaguccuucaacuggacgggggugacccagaacggcaccagcuccgccugcauccggcgcagcuccagcuccuucuucagccggcugaacuggcugacccaccucaacuacacguaccccgcccugaacgugaccaugcccaacaacgagcaguucgacaagcuguacaucuggggcguccaccaccccgggaccgacaaggaccagaucuuccucuacgcgcaguccagcgggcgcaucaccgugagcacgaagcggucccagcaggccgugaucccgaacaucggcagccgcccccggauccgcgacauccccucccggaucagcaucuacuggaccaucgucaagcccggcgacauccugcugaucaacuccaccgggaaccucaucgccccgcgcggcuacuucaagauccggagcgggaaguccagcaucaugcgcuccgacgcccccaucggcaagugcaagagcgagugcaucacccccaacggcuccauccccaacgacaagccguuccagaacgugaaccgggugacguacggggccugcccccgcuacgucaagcacagcacccugaagcuggcgaccggcaugcggaacgugcccgagaagcagacccgcgggaucuucggcgccaucgccggguucaucgagaacggcugggagggcaugguggacgggugguacggcuuccggcaccagaacuccgaggggcgcggccaggccgccgaccucaagagcacgcaggcggccaucgaccagaucaacgggaagcugaaccggcugaucggcaagaccaacgagaaguuccaccagaucgagaaggaguucuccgaggucgagggccgcauccaggaccucgagaaguacguggaggacaccaagaucgaccuguggagcuacaacgccgagcugcucguggcccuggagaaccagcacaccaucgaccugacggacuccgagaugaacaagcuguucgagaagaccaagaagcagcuccgcgagaacgccgaggacauggggaacggcugcuucaagaucuaccacaagugcgacaacgcgugcaucgggagcauccggaacggcaccuacgaccacaacgucuaccgcgacgaggcccugaucaaccgguuccagaucaaggggguggagcucaaguccggcuacaaggacuggauccuguggaucagcuucgccaucagcugcuuccugcucugcguggcccugcugggcuucaucaugugggccugccagaaggggaacauccgcugcaacaucugcaucuga

SEQ ID NO: 77561 - RNA, 1701 nt, Artificial Sequence; identical to SEQ ID NO: 76465
  derived and/or modified CDS sequence (opt1) from hemagglutinin__InfluenzaA__ALE32052

SEQ ID NO: 77562 - RNA, 1701 nt, Artificial Sequence; identical to SEQ ID NO: 76465
  derived and/or modified CDS sequence (opt1) from hemagglutinin__InfluenzaA__ALE32053

SEQ ID NO: 77563 - RNA, 1701 nt, Artificial Sequence
  derived and/or modified CDS sequence (opt1) from hemagglutinin__InfluenzaA__ALE32054
augaagaccaucaucgcccugagcuacauccucugccugguguucgcccagaagauccccggcaacgacaacuccaccgcgacgcugugccucgggcaccacgccgucccgaacggcaccaucgugaagaccaucaccaacgaccgcaucgaggugacgaacgccaccgagcugguccagaacagcuccaucggggagaucugcgagagcccccaccagauccuggacggcgagaacugcacccucaucgacgcccugcugggggacccccagugcgacggcuuccagaacaagaagugggaccucuucguggagcgguccaaggccuacagcaacugcuaccccuacgacgugccggacuacgcgucccugcgcagccuggucgccuccagcggcacccucgaguucaacaacgaguccuucaacuggacgggggugacccagaacggcaccagcuccgccugcauccggcgcagcuccagcuccuucuucagccggcugaacuggcugacccaccucaacuacacguaccccgcccugaacgugaccaugcccaacaacgagcaguucgacaagcuguacaucuggggcguccaccaccccgggaccgacaaggaccagaucuuccucuacgcgcaguccagcgggcgcaucaccgugagcacgaagggcucccagcaggccgugaucccgaacaucggcagccggccccgcauccgggacauccccucccgcaucagcaucuacuggaccaucgucaagcccggggacauccugcugaucaacuccaccggcaaccucaucgccccgcggggguacuucaagauccgcagcggcaaguccagcaucaugcgguccgacgcccccaucggcaagugcaagagcgagugcaucacccccaacggguccauccccaacgacaagccguuccagaacgugaaccgcaucacguacggcgccugcccccgguacgugaagcacagcacccugaagcuggcgaccgggaugcgcaacguccccgagaagcagacccggggcaucuucggggccaucgccggcuucaucgagaacggcugggaggggaugguggacggcugguacggguuccgccaccagaacuccgagggccgggggcaggccgccgaccucaagagcacgcaggcggccaucgaccagaucaacggcaagcugaaccgccugaucggcaagaccaacgagaaguuccaccagaucgagaaggaguucuccgagguggaggggcggauccaggaccucgagaaguacgucgaggacaccaagaucgaccuguggagcuacaacgccgagcugcucguggcccuggagaaccagcacaccaucgaccugacggacuccgagaugaacaagcuguucgagaagaccaagaagcagcuccgcgagaacgccgaggacaugggcaacgggugcuucaagaucuaccacaagugcgacaacgcgugcaucggcagcauccgcaacgggaccuacgaccacaacguguaccgggacgaggcccugaacaaccgcuuccagaucaagggcgucgagcucaaguccggcuacaaggacuggauccuguggaucagcuucgccaucagcugcuuccugcucugcguggcccugcugggguucaucaugugggccugccagaagggcaacauccggugcaaccacugcaucuga

SEQ ID NO: 77564 - RNA, 1701 nt, Artificial Sequence
  derived and/or modified CDS sequence (opt1) from hemagglutinin__InfluenzaA__ALE32055
augaagaccaucaucgcccugagcuacauccucugccugguguucgcccagaagauccccggcaacgacaacuccaccgcgacgcugugccucgggcaccacgccgucccgaacggcaccaucgugaagaccaucaccaacgaccgcaucgaggugacgaacgccaccgagcugguccagaacagcuccaucggggagaucugcgacagcccccaccagauccuggacggcgagaacugcacccucaucgacgcccugcugggggacccccagugcgacggcuuccagaacaagaagugggaccucuucguggagcgguccaaggccuacagcaacugcuaccccuacgacgugccggacuacgcgucccugcgcagccuggucgccuccagcggcacccucgaguucaacaacgaguccuucaacuggacgggggugacccagaacggcaccagcuccgccugcauccggcgcagcuccagcuccuucuucagccggcugaacuggcugacccaccucaacuacaaguaccccgcccugaacgugacgaugcccaacaacgagcaguucgacaagcuguacaucuggggcguccaccaccccgggaccgacaaggaccagaucuuccucuacgcgcaguccagcgggcgcaucaccgugagcaccaagcggucccagcaggccgugaucccgaacaucggcagccgcccccggauccgcgacauccccucccggaucagcaucuacuggacgaucgucaagcccggcgacauccugcugaucaacuccaccgggaaccucaucgccccgcgcggcuacuucaagauccggagcgggaaguccagcaucaugcgcuccgacgcccccaucggcaagugcaagagcgagugcaucacccccaacggcuccauccccaacgacaagccguuccagaacgugaaccggaucaccuacggggccugcccccgcuacgugaagcacagcacgcugaagcuggcgaccggcaugcggaacguccccgagaagcagacccgcgggaucuucggcgccaucgccggguucaucgagaacggcugggagggcaugguggacgggugguacggcuuccggcaccagaacuccgaggggcgcggccaggccgccgaccucaagagcacccaggcggccaucgaccagaucaacgggaagcugaaccggcugaucggcaagacgaacgagaaguuccaccagaucgagaaggaguucuccgagguggagggccgcauccaggaccucgagaaguacgucgaggacaccaagaucgaccuguggagcuacaacgccgagcugcucguggcccuggagaaccagcacaccaucgaccugaccgacuccgagaugaacaagcuguucgagaagacgaagaagcagcuccgcgagaacgccgaggacauggggaacggcugcuucaagaucuaccacaagugcgacaacgcgugcaucgggagcauccggaacggcaccuacgaccacaacguguaccgcgacgaggcccugaacaaccgguuccagaucaagggggucgagcucaaguccggcuacaaggacuggauccuguggaucagcuucgccaucagcugcuuccugcucugcguggcccugcugggcuucaucaugugggccugccagaacgggaacauccgcugcaacaucugcaucuga

SEQ ID NO: 77565 - RNA, 1701 nt, Artificial Sequence; identical to SEQ ID NO: 77116
  derived and/or modified CDS sequence (opt1) from hemagglutinin__InfluenzaA__ALE32056

SEQ ID NO: 77566 - RNA, 1701 nt, Artificial Sequence
  derived and/or modified CDS sequence (opt1) from hemagglutinin__InfluenzaA__ALE32057
augaagaccaucaucgcccugagcuacgugcucugccuggucuucgcccagaagauccccggcaacgacaacuccaccgcgacgcugugccucgggcaccacgccgugccgaacggcaccaucgugaagaccaucaccaacgaccgcaucgaggucacgaacgccaccgagcuggugcagaacagcuccaucggggagaucugcgacagcccccaccagauccuggacggcgagaacugcacccucaucgacgcccugcugggggacccccagugcgacggcuuccagaacaagaagugggaccucuucguggagcgguccaaggccuacagcaacugcuaccccuacgacgucccggacuacgcgucccugcgcagccugguggccuccagcggcacccucgaguucaacaacgaguccuucaacuggacgggggugacccagaacggcaccagcuccgccugcauccggcgcagcuccagcuccuucuucagccggcugaacuggcugacccaccucaacuacacguaccccgcccugaacgucaccaugcccaacaacgagcaguucgacaagcuguacaucuggggcgugcaccaccccgggaccgacaaggaccagaucuuccucuacgcgcaguccagcgggcgcaucaccgugagcacgaagcggucccagcaggccgucaucccgaacaucggcagccgcccccggauccgcgacauccccucccggaucagcaucuacuggaccaucgugaagcccggcgacauccugcugaucaacuccaccgggaaccucaucgccccgcgcggcuacuucaagauccggagcgggaaguccagcaucaugcgcuccgacgcccccaucggcaagugcaagagcgagugcaucacccccaacggcuccauccccaacgacaagccguuccagaacgugaaccggaucacguacggggccugcccccgcuacgucaagcacagcacccugaagcuggcgaccggcaugcggaacgugcccgagaagcagacccgcgggaucuucggcgccaucgccggguucaucgagaacggcugggagggcaugguggacgggugguacggcuuccggcaccagaacuccgaggggcgcggccaggccgccgaccucaagagcacgcaggcggccaucgaccagaucaacgggaagcugaaccggcugaucggcaagaccaacgagaaguuccaccagaucgagaaggaguucuccgaggucgagggccgcauccaggaccucgagaaguacguggaggacaccaagaucgaccuguggagcuacaacgccgagcugcucguggcccuggagaaccagcacaccaucgaccugacggacuccgagaugaacaagcuguucgagaagaccaagaagcagcuccgcgagaacgccgaggacauggggaacggcugcuucaagaucuaccacaagugcgacaacgcgugcaucgggagcauccggaacggcaccuacgaccacaacgucuaccgcgacgaggcccugaacaaccgguuccagaucaaggggguggagcucaaguccggcuacaaggacuggauccuguggaucagcuucgccaucagcugcuuccugcucugcguggcccugcugggcuucaucaugugggccugccagaaggggaacauccgcugcaacaucugcaucuga

SEQ ID NO: 77567 - RNA, 1701 nt, Artificial Sequence; identical to SEQ ID NO: 76465
  derived and/or modified CDS sequence (opt1) from hemagglutinin__InfluenzaA__ALE32058

SEQ ID NO: 77568 - RNA, 1701 nt, Artificial Sequence; identical to SEQ ID NO: 76465
  derived and/or modified CDS sequence (opt1) from hemagglutinin__InfluenzaA__ALE32059

SEQ ID NO: 77569 - RNA, 1701 nt, Artificial Sequence
  derived and/or modified CDS sequence (opt1) from hemagglutinin__InfluenzaA__ALE32060
augaagaccaucaucgcccugagcuacauccucugccugguguucgcccagaagauccccggcaacgacaacuccaccgcgacgcugugccucgggcaccacgccgucccgaacggcaccaucgugaagaccaucaccaacgaccgcaucgaggugacgaacgccaccgagcugguccagaacagcuccaucggggagaucugcgacagcccccaccagauccuggacggcgagaacugcacccucaucgacgcccugcugggggacccccagugcgacggcuuccagaacaagaagugggaccucuucguggagcgguccaaggccuacagcaacugcuaccccuacgacgugccggacuacgcgucccugcgcagccuggucgccuccagcggcacccucgaguucaacaacgaguccuucaacuggacgggggugacccagaacggcaccagcuccgccugcauccggcgcagcuccagcuccuucuucagccggcugaacuggcugacccaccucaacuacacguaccccgcccugaacgugaccaugcccaacaacgagcaguucgacaagcuguacaucuggggcguccaccaccccgggaccgacaaggaccagguguuccucuacgcgcaguccagcgggcgcaucaccgugagcacgaagcggucccagcaggccgucaucccgaacaucggcagccgcccccggauccgcgacauccccucccggaucagcaucuacuggaccaucgugaagcccggcgacauccugcugauccacuccaccgggaaccucaucgccccgcgcggcuacuucaagauccggagcgggaaguccagcaucaugcgcuccgacgcccccaucggcaagugcaagagcgagugcaucacccccaacggcuccauccccaacgacaagccguuccagaacgugaaccggaucacguacggggccugcccccgcuacgucaagcacagcacccugaagcuggcgaccggcaugcggaacgugcccgagaagcagacccgcgggaucuucggcgccaucgccggguucaucgagaacggcugggagggcaugguggacgggugguacggcuuccggcaccagaacuccgaggggcgcggccaggccgccgaccucaagagcacgcaggcggccaucgaccagaucaacgggaagcugaaccggcugaucggcaagaccaacgagaaguuccaccagaucgagaaggaguucuccgaggucgagggccgcauccaggaccucgagaaguacguggaggacaccaagaucgaccuguggagcuacaacgccgagcugcucguggcccuggagaaccagcacaccaucgaccugacggacuccgagaugaacaagcuguucgagaagaccaagaagcagcuccgcgagaacgccgaggacauggggaacggcugcuucaagaucuaccacaagugcgacaacgcgugcaucgggagcauccggaacggcaccuacgaccacaacgucuaccgcgacgaggcccugaacaaccgguuccagaucaaggggguggagcucaaguccggcuacaaggacuggauccuguggaucagcuucgccaucagcugcuuccugcucugcguggcccugcugggcuucaucaugugggccugccagaaggggaacauccgcugcaacaucugcaucuga

SEQ ID NO: 77570 - RNA, 1701 nt, Artificial Sequence
  derived and/or modified CDS sequence (opt1) from hemagglutinin__InfluenzaA__ALE32061
augaagaccaucaucgcccugagcuacauccucugccugguguucgcccagaagauccccggcaacgacaacuccaccgcgacgcugugccucgggcaccacgccgucccgaacggcaccaucgugaagaccaucaccaacgaccgcaucgaggugacgaacgccaccgagcugguccagaacagcuccaucggggagaucugcgacagcccccaccagauccuggacggcgagaacugcacccucaucgacgcccugcugggggacccccagugcgacggcuuccagaacaagaagugggaccucuucguggagcgguccaaggccuacagcaacugcuaccccuacgacgugccggacuacgcgucccugcgcagccuggucgccuccagcggcacccucgaguucaacaacgaguccuucaacuggacgggggugacccagaacggcaccagcuccgccugcauccggcgcagcuccagcuccuucuucagccggcugaacuggcugacccaccucaaguacacguaccccgcccugaacgugaccaugcccaacaacgagcaguucgacaagcuguacaucuggggcguccaccaccccgggaccgacaacgaccagaucuuccucuacgcgcgcuccagcgggcggaucaccgugagcacgaagggcucccagcaggccgugaucccgaacaucggcagccgcccccggauccgcgacauccccucccggaucagcaucuacuggaccaucgucaagcccggggacauccugcugaucaacuccaccggcaaccucaucgccccgcgcggguacuucaagauccggagcggcaaguccagcaucaugcgcuccgacgcccccaucggcaagugcaagagcgagugcaucacccccaacggguccauccccaacgacaagccguuccagaacgugaaccggaucacguacggcgccugcccccgcuacgugaagcacagcacccugaagcuggcgaccgggaugcggaacguccccgagaagcagacccgcggcaucuucggggccaucgccggcuucaucgagaacggcugggaggggaugguggacggcugguacggguuccggcaccagaacuccgagggccgcgggcaggccgccgaccucaagagcacgcaggcggccaucgaccagaucaacggcaagcugaaccggcugaucggcaagaccaacgagaaguuccaccagaucgagaaggaguucuccgagguggaggggcgcauccaggaccucgagaaguacgucgaggacaccaagaucgaccuguggagcuacaacgccgagcugcucguggcccuggagaaccagcacaccaucgaccugacggacuccgagaugaacaagcuguucgagaagaccaagaagcagcuccgcgagaacgccgaggacaugggcaacgggugcuucaagaucuaccacaagugcgacaacgcgugcaucggcagcauccggaacgggaccuacgaccacaacguguaccgcgacgaggcccugaacaaccgguuccagaucaagggcgucgagcucaaguccggcuacaaggacuggauccuguggaucagcuucgccaucagcugcuuccugcucugcguggcccugcugggguucaucaugugggccugccagaagggcaacauccgcugcaacaucugcaucuga

SEQ ID NO: 77571 - RNA, 1701 nt, Artificial Sequence
  derived and/or modified CDS sequence (opt1) from hemagglutinin__InfluenzaA__ALE32062
augaagaccaucaucgcccugagcuacauccucugccugguguucgcccagaagauccccggcaacgacaacuccaccgcgacgcugugccucgggcaccacgccgucccgaacggcaccaucgugaagaccaucaccaacgaccgcaucgaggugacgaacgccaccgagcugguccagaacagcuccaucggggagaucugcgacagcccccaccagauccuggacggcgagaacugcacccucaucgacgcccugcugggggacccccagugcgacggcuuccagaacaagaagugggaccucuucguggagcgguccaaggccuacagcaacugcuaccccuacgacgugccggacuacgcgucccugcgcagccuggucgccuccagcggcacccucgaguucaacaacgaguccuucaacuggacgggggugacccagaacggcaccagcuccgccugcauccggcgcagcuccagcuccuucuucagccggcugaacuggcugacccaccucaacuacacguaccccgcccugaacgugaccaugcccaacaacgagcaguucgacaagcuguacaucuggggcguccaccaccccgggaccgacaaggaccagaucuuccucuacgcgcaguccagcgggcgcaucaccgugagcacgaagcggucccagcaggccgugaucccgaacaucggcagccgcccccggauccgcgacauccccucccggaucagcaucuacuggaccaucgucaagcccggcgacauccugcugaucuacuccaccgggaaccucaucgccccgcgcggcuacuucaagauccggagcgggaaguccagcaucaugcgcuccgacgcccccaucggcaagugcaagagcgagugcaucacccccaacggcuccauccccaacgacaagccguuccagaacgugaaccggaucacguacggggccugcccccgcuacgugaagcacagcacccugaagcuggcgaccggcaugcggaacguccccgagaagcagacccgcgggaucuucggcgccaucgccggguucaucgagaacggcugggagggcaugguggacgggugguacggcuuccggcaccagaacuccgaggggcgcggccaggccgccgaccucaagagcacgcaggcggccaucgaccagaucaacgggaagcugaaccggcugaucggcaagaccaacgagaaguuccaccagaucgagaaggaguucuccgagguggagggccgcauccaggaccucgagaaguacgucgaggacaccaagaucgaccuguggagcuacaacgccgagcugcucguggcccuggagaaccagcacaccaucgaccugacggacuccgagaugaacaagcuguucgagaagaccaagaagcagcuccgcgagaacgccgaggacauggggaacggcugcuucaagaucuaccacaagugcgacaacgcgugcaucgggagcauccggaacggcaccuacgaccacaacguguaccgcgacgaggcccugaacaaccgguuccagaucaagggggucgagcucaaguccggcuacaaggacuggauccuguggaucagcuucgccaucagcugcuuccugcucugcguggcccugcugggcuucaucaugugggccugccagaaggggaacauccgcugcaacaucugcaucuga

SEQ ID NO: 77572 - RNA, 1701 nt, Artificial Sequence; identical to SEQ ID NO: 76465
  derived and/or modified CDS sequence (opt1) from hemagglutinin__InfluenzaA__ALE32063

SEQ ID NO: 77573 - RNA, 1701 nt, Artificial Sequence
  derived and/or modified CDS sequence (opt1) from hemagglutinin__InfluenzaA__ALE32064
augaagaccaucaucgcccugagcuacauccucugccugguguucgcccagaagauccccggcaacgacaacuccaccgcgacgcugugccucgggcaccacgccgucccgaacggcaccaucgugaagaccaucaccaacgaccgcaucgaggugacgaacgccaccgagcugguccagaacagcuccaucggggagaucugcgacagcccccaccagauccuggacggcgagaacugcacccucaucgacgcccugcugggggacccccagugcgacggcuuccagaacaagaagugggaccucuucguggagcgguccaaggccuacagcaacugcuaccccuacgacgugccggacuacgcgucccugcgcagccuggucgccuccagcggcacccucgaguucaacaacgaguccuucaacuggacgggggugacccagaacggcaccagcuccgccugcauccggcgcagcuccaacagcuucuucucccggcugaacuggcugacccaccucaacuacacguaccccgcccugaacgugaccaugcccaacaacgagcaguucgacaagcuguacaucuggggcguccaccaccccgggaccgacaaggaccagaucuuccucuacgcgcagagcuccgggcgcaucaccgugagcacgaagcggagccagcaggccgugaucccgaacaucggcucccgcccccggauccgcgacauccccagccggaucuccaucuacuggaccaucgucaagcccggcgacauccugcugaucaacagcaccgggaaccucaucgccccgcgcggcuacuucaagauccgguccggcaagagcuccaucaugcgcagcgacgcccccaucgggaagugcaaguccgagugcaucacccccaacggcagcauccccaacgacaagccguuccagaacgugaaccggaucacguacggggccugcccccgcuacgugaagcacuccacccugaagcuggcgaccggcaugcggaacguccccgagaagcagacccgcgggaucuucggcgccaucgccggguucaucgagaacggcugggagggcaugguggacgggugguacggcuuccggcaccagaacagcgaggggcgcggccaggccgccgaccucaaguccacgcaggcggccaucgaccagaucaacgggaagcugaaccggcugaucggcaagaccaacgagaaguuccaccagaucgagaaggaguucagcgagguggagggccgcauccaggaccucgagaaguacgucgaggacaccaagaucgaccugugguccuacaacgccgagcugcucguggcccuggagaaccagcacaccaucgaccugacggacagcgagaugaacaagcuguucgagaagaccaagaagcagcuccgcgagaacgccgaggacaucgggaacggcugcuucaagaucuaccacaagugcgacaacgcgugcaucggguccauccggaacggcaccuacgaccacaacguguaccgcgacgaggcccugaacaaccgguuccagaucaagggggucgagcucaagagcggcuacaaggacuggauccuguggaucuccuucgccaucagcugcuuccugcucugcguggcccugcugggcuucaucaugugggccugccagaaggggaacauccgcugcaacaucugcaucuga

SEQ ID NO: 77574 - RNA, 1701 nt, Artificial Sequence; identical to SEQ ID NO: 76465
  derived and/or modified CDS sequence (opt1) from hemagglutinin__InfluenzaA__ALE32065

SEQ ID NO: 77575 - RNA, 1701 nt, Artificial Sequence
  derived and/or modified CDS sequence (opt1) from hemagglutinin__InfluenzaA__ALE32066
augaagaccaucaucgcccugagcuacauccucugccugguguucgcccagaagauccccggcaacgacaacuccaccgcgacgcugugccucgggcaccacgccgucccgaacggcaccaucgugaagaccaucaccaacgaccgcaucgaggugacgaacgccaccgagcugguccagaacagcuccaucggggagaucugcgacagcccccaccagauccuggacggcgagaacugcacccucaucgacgcccugcugggggacccccagugcgacggcuuccagaacaagaagugggaccucuucguggagcgguccaaggccuacagcaacugcuaccccuacgacgugccggacuacgcgucccugcgcagccuggucgccuccagcggcacccucgaguucaacaacgaguccuucaacuggacgggggugacccagaacggcaccagcuccgccugcauccggcgcagcuccagcuccuucuucagccggcugaacuggcugacccaccucaacuacacguaccccgcccugaacguguccaugcccaacaacgagcaguucgacaagcuguacaucuggggcguccaccaccccgggaccgacaaggaccagaucuuccucuacgcgcagagcagcgggcgcaucaccguguccaccaagcggagccagcaggccgugaucccgaacaucggcucccgcccccggauccgcgacauccccagccggaucuccaucuacuggacgaucgucaagcccggcgacauccugcugaucaacagcaccgggaaccucaucgccccgcgcggcuacuucaagauccgguccggcaagagcuccaucaugcgcagcgacgcccccaucgggaagugcaaguccgagugcaucacccccaacggcagcauccccaacgacaagccguuccagaacgugaaccggaucaccuacggggccugcccccgcuacgugaagcacuccacgcugaagcuggcgaccggcaugcggaacguccccgagaagcagacccgcgggaucuucggcgccaucgccggguucaucgagaacggcugggagggcaugguggacgggugguacggcuuccggcaccagaacagcgaggggcgcggccaggccgccgaccucaaguccacccaggcggccaucgaccagaucaacgggaagcugaaccggcugaucggcaagacgaacgagaaguuccaccagaucgagaaggaguucagcgagguggagggccgcauccaggaccucgagaaguacgucgaggacaccaagaucgaccugugguccuacaacgccgagcugcucguggcccuggagaaccagcacaccaucgaccugaccgacagcgagaugaacaagcuguucgagaagacgaagaagcagcuccgcgagaacgccgaggacauggggaacggcugcuucaagaucuaccacaagugcgacaacgcgugcaucggguccauccggaacggcaccuacgaccacaacguguaccgcgacgaggcccugaacaaccgguuccagaucaagggggucgagcucaagagcggcuacaaggacuggauccuguggaucagcuucgccaucuccugcuuccugcucugcguggcccugcugggcuucaucaugugggccugccagaaggggaacauccgcugcaacaucugcaucuga

SEQ ID NO: 77576 - RNA, 1701 nt, Artificial Sequence; identical to SEQ ID NO: 77247
  derived and/or modified CDS sequence (opt1) from hemagglutinin__InfluenzaA__ALE32067

SEQ ID NO: 77577 - RNA, 1701 nt, Artificial Sequence; identical to SEQ ID NO: 76465
  derived and/or modified CDS sequence (opt1) from hemagglutinin__InfluenzaA__ALE32068

SEQ ID NO: 77578 - RNA, 1701 nt, Artificial Sequence; identical to SEQ ID NO: 76465
  derived and/or modified CDS sequence (opt1) from hemagglutinin__InfluenzaA__ALE32069

SEQ ID NO: 77579 - RNA, 1701 nt, Artificial Sequence
  derived and/or modified CDS sequence (opt1) from hemagglutinin__InfluenzaA__ALE32070
augaagaccaucaucgcccugagcuacauccucugccugguguucgcccagaagauccccggcaacgacaacuccaccgcgacgcugugccucgggcaccacgccgucccgaacggcaccaucgugaagaccaucaccaacgaccgcaucgaggugacgaacgccaccgagcugguccagaacagcuccaucggggagaucugcgacagcccccaccagauccuggacggcgagaacugcacccucaucgacgcccugcugggggacccccagugcgacggcuuccagaacaagaagugggaccucuucguggagcgguccaaggccuacagcaacugcuaccccuacgacgugccggacuacgcgucccugcgcagccuggucgccuccagcggcacccucgaguucaacaacgaguccuucaacuggacgggggugacccagaacggcaccagcuccgccugcauccggcgcagcuccagcuccuucuucagccggcugaacuggcugacccaccucaacuacacguaccccgcccugaacgugaccaugcccaacaacgagcaguucgacaagcuguacaucuggggcguccaccaccccgggaccgacaaggaccagaucuuccucuacgcgcaguccagcgggcgcaucaccgugagcacgaagcggucccagcaggccgugaucccgaacaucggcagccgcccccggauccgcgacauccccucccggaucagcaucuacuggaccaucgucaagcccggcgacauccugcugaucaacuccaccgggaaccucaucgccccgcgcggcuacuucaagauccggagcgggaaguccagcaucaugcgcuccgacgcccccaucggcaagugcaagagcgagugcaucacccccaacggcuccauccccaacgacaagccguuccagaacgugaaccggaucacguacggggugugcccccgcuacgucaagcacagcacccugaagcuggccaccggcaugcggaacgugcccgagaagcagacccgcgggaucuucggcgcgaucgccggguucaucgagaacggcugggagggcaugguggacgggugguacggcuuccggcaccagaacuccgaggggcgcggccaggccgccgaccucaagagcacgcaggccgcgaucgaccagaucaacgggaagcugaaccggcugaucggcaagaccaacgagaaguuccaccagaucgagaaggaguucuccgaggucgagggccgcauccaggaccucgagaaguacguggaggacaccaagaucgaccuguggagcuacaacgccgagcugcucguggcccuggagaaccagcacaccaucgaccugacggacuccgagaugaacaagcuguucgagaagaccaagaagcagcuccgcgagaacgccgaggacauggggaacggcugcuucaagaucuaccacaagugcgacaacgccugcaucgggagcauccggaacggcaccuacgaccacaacgucuaccgcgacgaggcgcugaacaaccgguuccagaucaaggggguggagcucaaguccggcuacaaggacuggauccuguggaucagcuucgccaucagcugcuuccugcucugcguggcccugcugggcuucaucaugugggccugccagaaggggaacauccgcugcaacaucugcaucuga

SEQ ID NO: 77580 - RNA, 1701 nt, Artificial Sequence; identical to SEQ ID NO: 76465
  derived and/or modified CDS sequence (opt1) from hemagglutinin__InfluenzaA__ALE32071

SEQ ID NO: 77581 - RNA, 1701 nt, Artificial Sequence; identical to SEQ ID NO: 77462
  derived and/or modified CDS sequence (opt1) from hemagglutinin__InfluenzaA__ALE32072

SEQ ID NO: 77582 - RNA, 1701 nt, Artificial Sequence
  derived and/or modified CDS sequence (opt1) from hemagglutinin__InfluenzaA__ALE32073
augaagaccaucaucgcccugagcuacauccucugccugguguucgcccagaagauccccggcaacgacaacuccaccgcgacgcugugccucgggcaccacgccgucccgaacggcaccaucgugaagaccaucaccaacgaccgcaucgaggugacgaacgccaccgagcugguccagaacagcuccaucggggagaucugcgacagcccccaccagauccuggacggcgagaacugcacccucaucgacgcccugcugggggacccccagugcgacggcuuccagaacaagaagugggaccucuucguggagcgguccaaggccuacagcaacugcuaccccuacgacgugccggacuacgcgucccugcgcagccuggucgccuccagcggcacccucgaguucaacaacgaguccuucaacuggacgggggugacccagaacggcaccagcuccgccugcauccgcaagagcuccagcuccuucuucagccggcugaacuggcugacccaccucaacuacacguaccccgcccugaacgugaccaugcccaacaacgagcaguucgacaagcuguacaucuggggcguccaccaccccgggaccgacaaggaccagaucuuccucuacgcgcaguccagcgggcggaucaccgugagcacgaagcgcucccagcaggccgugaucccgaacaucggcagccggccccgcauccgggacauccccucccgcaucagcaucuacuggaccaucgucaagcccggcgacauccugcugaucaacuccaccgggaaccucaucgccccgcggggcuacuucaagauccugagcgggaaguccagcaucaugcgcuccgacgcccccaucggcaagugcaagagcgagugcaucacccccaacggcuccauccccaacgacaagccguuccagaacgugaaccggaucacguacggggccugcccccgcuacgugaagcacagcacccugaagcucgcgaccggcaugcggaacguccccgagaagcagacccgcgggaucuucggcgccaucgccggguucaucgagaacggcugggagggcaugguggacgggugguacggcuuccggcaccagaacuccgaggggcgcggccaggccgccgaccucaagagcacgcaggcggccaucgaccagaucaacgggaagcugaaccggcugaucggcaagaccaacgagaaguuccaccagaucgagaaggaguucuccgagguggagggccgcauccaggaccuggagaaguacgucgaggacaccaagaucgaccuguggagcuacaacgccgagcuccugguggcccuggagaaccagcacaccaucgaccucacggacuccgagaugaacaagcuguucgagaagaccaagaagcagcugcgggagaacgccgaggacauggggaacggcugcuucaagaucuaccacaagugcgacaacgcgugcaucgggagcauccgcaacggcaccuacgaccacaacguguaccgcgacgaggcccucaacaaccgguuccagaucaagggggucgagcugaaguccggcuacaaggacuggauccuguggaucagcuucgccaucagcugcuuccuccugugcguggcccugcucggcuucaucaugugggccugccagaaggggaacauccgcugcaacaucugcaucuga

SEQ ID NO: 77583 - RNA, 1701 nt, Artificial Sequence
  derived and/or modified CDS sequence (opt1) from hemagglutinin__InfluenzaA__ALE32074
augaagaccaucaucgcccugagcuacauccucugccugguguucgcccagaagauccccggcaacgacaacuccaccgcgacgcugugccucgggcaccacgccgucccgaacggcaccaucgugaagaccaucaccaacgaccgcaucgaggugacgaacgccaccgagcugguccagaacagcuccaucggggagaucugcgacagcccccaccagauccuggacggcgagaacugcacccucaucgacgcccugcugggggacccccagugcgacggcuuccagaacaagaagugggaccucuucguggagcgguccaaggccuacagcaacugcuaccccuacgacgugccggacuacgcgucccugcgcagccuggucgccuccagcggcacccucgaguucaacaacgaguccuucaacuggacgggggugacccagaacggcaccagcuccagcugcauccggcgcuccagcuccagcuucuucucccggcugaacuggcugacccaccucaacuacacguaccccgcccugaacgugaccaugcccaacaacgagcaguucgacaagcuguacaucuggggcguccaccaccccgggaccgacaaggaccagaucuuccucuacgcccagagcagcgggcgcaucaccguguccacgaagcggagccagcaggcggugaucccgaacaucggcucccgcccccggauccgcgacauccccagccggaucuccaucuacuggaccaucgucaagcccggcgacauccugcugaucaacagcaccgggaaccucaucgccccgcgcggcuacuucaagauccuguccggcaagagcuccaucaugcggagcgacgcccccaucgggaagugcaaguccgagugcaucacccccaacggcagcauccccaacgacaagccguuccagaacgugaaccgcaucacguacggggccugcccccgguacgugaagcacuccacccugaagcucgccaccggcaugcgcaacguccccgagaagcagacccgggggaucuucggcgcgaucgccggguucaucgagaacggcugggagggcaugguggacgggugguacggcuuccgccaccagaacagcgaggggcggggccaggccgccgaccugaaguccacgcaggccgcgaucgaccagaucaacgggaagcugaaccgccucaucggcaagaccaacgagaaguuccaccagaucgagaaggaguucagcgagguggagggccggauccaggaccuggagaaguacgucgaggacaccaagaucgaccugugguccuacaacgccgagcuccugguggcccuggagaaccagcacaccaucgaccucacggacagcgagaugaacaagcuguucgagaagaccaagaagcagcugcgcgagaacgccgaggacauggggaacggcugcuucaagaucuaccacaagugcgacaacgccugcaucggguccauccgcaacggcaccuacgaccacaacguguaccgggacgaggcgcucaacaaccgcuuccagaucaagggggucgagcucaagagcggcuacaaggacuggauccuguggaucagcuucgccaucuccugcuuccugcugugcguggcccugcucggcuucaucaugugggccugccagaaggggaacauccggugcaacaucugcaucuga

SEQ ID NO: 77584 - RNA, 1701 nt, Artificial Sequence
  derived and/or modified CDS sequence (opt1) from hemagglutinin__InfluenzaA__ALE32075
augaagaccaucaucgcccugagcuacauccucugccugguguucgcccagaagcugcccgagaacgacaacuccaccgcgacgcucugccugggccaccacgccgucccgaacgggaccaucgugaagaccaucaccagcgaccgcaucgaggugacgaacgccaccgagcugguccagaacuccagcaucggcgagaucugcgacagcccccaccagauccucgacgggaagaacugcacccugaucgacgcccugcucggcgacccccagugcgacggguuccagaacaagaagugggaccuguucguggagcgguccaaggccuacuccaacugcuaccccuacgacgugccggacuacgcgagccugcgcucccucgucgccagcuccggcacccuggaguucaacgacgagagcuucaacugggccggcgugacgcagaacgggaccuccagcuccugcauccggggcagcaacuccagcuucuucucccgccugaacuggcucacccacagcaacuucaaguaccccgcccugaacgugaccaugcccaacaacgagcaguucgacaagcuguacaucuggggcguccaccaccccgggacggacaaggaccagaucuuccucuacgcgcagagcuccgggcggaucaccgugagcaccaagcgcucccagcaggccgugaucccgaacaucggcagccggccccgcauccggaacauccccucccgcaucagcaucuacuggaccaucgucaagcccggcgacauccugcugaucaacuccacggggaaccucaucgccccgcggggcuacuucaagauccgcagcgggaaguccagcaucaugcgguccgacgcccccaucggcaagugcaagagcgagugcaucacccccaacggcuccauccccaacgacaagccguuccagaacgugaaccgcaucaccuacggggccugcccccgguacgugaagcagagcacccugaagcuggcgacgggcaugcgcaacguccccgagaagcagacccgggggaucuucggcgccaucgccggguucaucgagaacggcugggagggcaugaaggacgggugguacggcuuccgccaccagaacuccgaggggcggggccaggccgccgaccucaagagcacccaggcggccaucgaccagaucaacgggaagcugaaccgccugaucggcaagaccaacgagaaguuccaccagaucgagaaggaguucuccgagguggagggccggauccaggaccucgagaaguacguggaggacacgaagaucgaccuguggagcuacaacgccgagcugcucgucgcccuggagaaccagcacaccaucgaccugaccgacuccgagaugaacaagcuguucgagaagaccaagaagcagcuccgcgagaacgccgaggacauggggaacggcugcuucaagaucuaccacaagugcgacaacgcgugcaucgggagcauccgcaacggcacguacgaccacgacguguaccgggacgaggcccugaacaaccgcuuccagaucaaggggguggagcucaagagcggcuacaaggacuggauccuguggaucuccuucgccaucagcugcuuccugcucugcgucgcccugcugggcuucaucaugugggccugccagaaggggaacauccggugcaacaucugcaucuga

SEQ ID NO: 77585 - RNA, 1701 nt, Artificial Sequence; identical to SEQ ID NO: 77022
  derived and/or modified CDS sequence (opt1) from hemagglutinin__InfluenzaA__ALE32076

SEQ ID NO: 77586 - RNA, 1701 nt, Artificial Sequence
  derived and/or modified CDS sequence (opt1) from hemagglutinin__InfluenzaA__ALE32077
augaagaccaucaucgcccugagcuacauccucugccugguguucgcccagaagauccccggcaacgacaacuccaccgcgacgcugugccucgggcaccacgccgucccgaacggcaccaucgugaagaccaucaccaacgaccgcaucgaggugacgaacgccaccgagcugguccagaacagcuccaucggggagaucugcgacagcccccaccagauccuggacggcgagaacugcacccucaucgacgcccugcugggggacccccagugcgacggcuuccagaacaagaagugggaccucuucguggagcgguccaaggcccacagcaacugcuaccccuacgacgugccggacuacgcgucccugcgcagccuggucgccuccagcggcacccucgaguucaacaacgaguccuucaacuggacgggggugacccagaacggcaccagcuccgccugcauccggcgcagcuccagcuccuucuucagccggcugaacuggcugacccaccucaacuacacguaccccgcccugaacgugaccaugcccaacaacgagcaguucgacaagcuguacaucuggggcguccaccaccccgggaccgacaaggaccagaucuuccucuacgcgcgcuccagcgggcggaucaccgugagcacgaagggcucccagcaggccgugaucccgaacaucggcagccgcccccggauccgcgacauccccucccggaucagcaucuacuggaccaucgucaagcccggggacauccugcugaucaacuccaccggcaaccucaucgccccgcgcggguacuucaagauccggagcggcaaguccagcaucaugcgcuccgacgcccccaucggcaagugcaagagcgagugcaucacccccaacggguccauccccaacgacaagccguuccagaacgugaaccggaucacguacggcgccugcccccgcuacgugaagcacagcacccugaagcuggcgaccgggaugcggaacguccccgagaagcagacccgcggcaucuucggggccaucgccggcuucaucgagaacggcugggaggggaugguggacggcugguacggguuccggcaccagaacuccgagggccgcgggcaggccgccgaccucaagagcacgcaggcggccaucgaccagaucaacggcaagcugaaccggcugaucggcaagaccaacgagaaguuccaccagaucgagaaggaguucuccgagguggaggggcgcauccaggaccucgagaaguacgucgaggacaccaagaucgaccuguggagcuacaacgccgagcugcucguggcccuggagaaccagcacaccaucgaccugacggacuccgagaugaacaagcuguucgagaagaccaagaagcagcuccgcgagaacgccgaggacaugggcaacgggugcuucaagaucuaccacaagugcgacaacgcgugcaucggcagcauccggaacgggaccuacgaccacaacguguaccgcgacgaggcccugaacaaccgguuccagaucaagggcgucgagcucaaguccggcuacaaggacuggauccuguggaucagcuucgccaucagcugcuuccugcucugcguggcccugcugggguucaucaugugggccugccagaagggcaacauccgcugcaacaucugcaucuga

SEQ ID NO: 77587 - RNA, 1701 nt, Artificial Sequence; identical to SEQ ID NO: 77123
  derived and/or modified CDS sequence (opt1) from hemagglutinin__InfluenzaA__ALE32078

SEQ ID NO: 77588 - RNA, 1701 nt, Artificial Sequence; identical to SEQ ID NO: 77009
  derived and/or modified CDS sequence (opt1) from hemagglutinin__InfluenzaA__ALE32079

SEQ ID NO: 77589 - RNA, 1701 nt, Artificial Sequence
  derived and/or modified CDS sequence (opt1) from hemagglutinin__InfluenzaA__ALE32080
augaagaccaucaucgcccugagcuacauccucugccugguguucgcccagaagauccccggcaacgacaacuccaccgcgacgcugugccucgggcaccacgccgucccgaacggcaccaucgugaagaccaucaccaacgaccgcaucgaggugacgaacgccaccgagcugguccagaacagcuccaucggggagaucugcgacagcccccaccagauccuggacggcgagaacugcacccucaucgacgcccugcugggggacccccagugcgacggcuuccagaacaagaagugggaccucuucguggagcgguccaaggccuacagcaacugcuaccccuacgacgugccggacuacgcgucccugcgcagccuggucgccuccagcggcacccucgaguucaacaacgaguccuucaacuggacgggggugacccagaacggcaccagcuccagcugcauccggcgcuccagcuccagcuucuucucccggcugaacuggcugacccaccucaacuacacguaccccgcccugaacgugaccaugcccaacaacgagcaguucgacaagcuguacaucuggggcguccaccaccccgggaccgacaaggaccagaucuuccucuacgcccagagcagcgggcgcaucaccguguccacgaagcggagccagcaggcggugaucccgaacaucggcucccgcccccggauccgcgacauccccagccggaucuccaucuacuggaccaucgucaagcccggcgacauccugcugaucaacagcaccgggaaccucaucgccccgcgcggcuacuucaagauccgguccggcaagagcuccaucaugcgcagcgacgcccccaucgggaagugcaaguccgagugcaucacccccaacggcagcauccccaacgacaagccguuccagaacgugaaccggaucacguacggggccugcccccgcuacgugaagcacuccacccugaagcuggccaccggcaugcggaacguccccgagaagcagacccgcgggaucuucggcgcgaucgccggguucaucgagaacggcugggagggcaugguggacgggugguacggcuuccggcaccagaacagcgaggggcgcggccaggccgccgaccucaaguccacgcaggccgcgaucgaccagaucaacgggaagcugaaccggcugaucggcaagaccaacgagaaguuccaccagaucgagaaggaguucagcgagguggagggccgcauccaggaccucgagaaguacgucgaggacaccaagaucgaccugugguccuacaacgccgagcugcucguggcccuggagaaccagcacaccaucgaccugacggacagcgagaugaacaagcuguucgagaagaccaagaagcagcuccgcgagaacgccgaggacauggggaacggcugcuucaagaucuaccacaagugcgacaacgccugcaucggguccauccggaacggcaccuacgaccacaacguguaccgcgacgaggcgcugaacaaccgguuccagaucaagggggucgagcucaagagcggcuacaaggacuggauccuguggaucagcuucgccaucuccugcuuccugcucugcguggcccugcugggcuucaucaugugggccugccagaaggggaacauccgcugcaacaucugcaucuga

SEQ ID NO: 77590 - RNA, 1701 nt, Artificial Sequence; identical to SEQ ID NO: 77123
  derived and/or modified CDS sequence (opt1) from hemagglutinin__InfluenzaA__ALE32081

SEQ ID NO: 77591 - RNA, 1701 nt, Artificial Sequence; identical to SEQ ID NO: 77123
  derived and/or modified CDS sequence (opt1) from hemagglutinin__InfluenzaA__ALE32082

SEQ ID NO: 77592 - RNA, 1701 nt, Artificial Sequence
  derived and/or modified CDS sequence (opt1) from hemagglutinin__InfluenzaA__ALE32083
augaagaccaucaucgcccugagcuacauccucugccugguguucgcccagaagauccccggcaacgacaacuccaccgcgacgcugugccucgggcaccacgccgucccgaacggcaccaucgugaagaccaucaccaacgaccgcaucgaggugacgaacgccaccgagcugguccagaacagcuccaucggggagaucugcgacagcccccaccagauccuggacggcgagaacugcacccucaucgacgcccugcugggggacccccagugcgacggcuuccagaacaagaagugggaccucuucguggagcgguccaaggccuacagcaacugcuaccccuacgacgugccggacuacgcgucccugcgcagccuggucgccuccagcggcacccucgaguucaacaacgaguccuucaacuggacgggggugacccagaacggcaccagcuccgccugcauccggcgcagcuccagcuccuucuucagccggcugaacuggcugacccaccucaacuacaaguaccccgcccugaacgugacgaugcccaacaacgagcaguucgacaagcuguacaucuggggcguccaccaccccgggaccgacaaggaccagaucuuccucuacgcgcgcuccagcgggcggaucaccgugagcaccaagggcucccagcaggccgugaucccgaacaucggcagccgcccccggauccgcgacauccccucccggaucagcaucuacuggacgaucgucaagcccggggacauccugcugaucaacuccaccggcaaccucaucgccccgcgcggguacuucaagauccggagcggcaaguccagcaucaugcgcuccgacgcccccaucggcaagugcaagagcgagugcaucacccccaacggguccauccccaacgacaagccguuccagaacgugaaccggaucaccuacggcgccugcccccgcuacgugaagcacagcacgcugaagcuggcgaccgggaugcggaacguccccgagaagcagacccgcggcaucuucggggccaucgccggcuucaucgagaacggcugggaggggaugguggacggcugguacggguuccggcaccagaacuccgagggccgcgggcaggccgccgaccucaagagcacccaggcggccaucgaccagaucaacggcaagcugaaccggcugaucggcaagacgaacgagaaguuccaccagaucgagaaggaguucuccgagguggaggggcgcauccaggaccucgagaaguacgucgaggacaccaagaucgaccuguggagcuacaacgccgagcugcucguggcccuggagaaccagcacaccaucgaccugaccgacuccgagaugaacaagcuguucgagcgcacgaagaagcagcuccgggagaacgccgaggacaugggcaacgggugcuucaagaucuaccacaagugcgacaacgcgugcaucggcagcauccgcaacgggaccuacgaccacaacguguaccgggacgaggcccugaacaaccgcuuccagaucaagggcgucgagcucaaguccggcuacaaggacuggauccuguggaucagcuucgccaucagcugcuuccugcucugcguggcccugcugggguucaucaugugggccugccagaagggcaacauccggugcaacaucugcaucuga

SEQ ID NO: 77593 - RNA, 1701 nt, Artificial Sequence; identical to SEQ ID NO: 77080
  derived and/or modified CDS sequence (opt1) from hemagglutinin__InfluenzaA__ALE32084

SEQ ID NO: 77594 - RNA, 1701 nt, Artificial Sequence; identical to SEQ ID NO: 77123
  derived and/or modified CDS sequence (opt1) from hemagglutinin__InfluenzaA__ALE32085

SEQ ID NO: 77595 - RNA, 1701 nt, Artificial Sequence
  derived and/or modified CDS sequence (opt1) from hemagglutinin__InfluenzaA__ALE32086
augaagaccaucaucgcccugagcuacauccucugccugguguucgcccagaagauccccggcaacgacaacuccaccgcgacgcugugccucgggcaccacgccgucccgaacggcaccaucgugaagaccaucaccaacgaccgcaucgaggugacgaacgccaccgagcugguccagaacagcuccaucggggagaucugcgacagcccccaccagauccuggacggcgagaacugcacccucaucgacgcccugcugggggacccccagugcgacggcuuccagaacaagaagugggaccucuucguggagcgguccaaggccuacagcaacugcuaccccuacgacgugccggacuacgcgucccugcgcagccuggucgccuccagcggcacccucgaguucaacaacgaguccuucaacuggacgggggugacccagaacggcaccagcuccgccugcauccgcaagagcuccagcuccuucuucagccggcugaacuggcugacccaccucaacuacacguaccccgcccugaacgugaccaugcccaacaacgagcaguucgacaagcuguacaucuggggcguccaccaccccgggaccgacaaggaccagaucuuccucuacgcgcgguccagcgggcgcaucaccgugagcacgaagcggucccagcaggccgugaucccgaacaucggcagccgcccccggauccgcgacauccccucccggaucagcaucuacuggaccaucgucaagcccggcgacauccugcugaucaacuccaccgggaaccucaucgccccgcgcggcuacuucaagauccggagcgggaaguccagcaucaugcgcuccgacgcccccaucagcaagugcaaguccgagugcaucacccccaacggcagcauccccaacgacaagccguuccagaacgugaaccggaucacguacggcgccugcccccgcuacgugaagcacuccacccugaagcuggcgaccgggaugcggaacguccccgagaagcagacccgcggcaucuucggggccaucgccggcuucaucgagaacgggugggagggcaugguggacggcugguacggguuccggcaccagaacagcgagggccgcgggcaggccgccgaccucaaguccacgcaggcggccaucgaccagaucaacggcaagcugaaccggcugaucgggaagaccaacgagaaguuccaccagaucgagaaggaguucagcgagguggagggccgcauccaggaccucgagaaguacgucgaggacaccaagaucgaccugugguccuacaacgccgagcugcucguggcccuggagaaccagcacaccaucgaccugacggacagcgagaugaacaagcuguucgagaagaccaagaagcagcuccgcgagaacgccgaggacaugggcaacgggugcuucaagaucuaccacaagugcgacaacgcgugcaucggcuccauccggaacgggaccuacgaccacaacguguaccgcgacgaggcccugaacaaccgguuccagaucaagggcgucgagcucaagagcggguacaaggacuggauccuguggaucagcuucgccaucuccugcuuccugcucugcguggcccugcugggcuucaucaugugggccugccagaagggcaacauccgcugcaacaucugcaucuga

SEQ ID NO: 77596 - RNA, 1701 nt, Artificial Sequence
  derived and/or modified CDS sequence (opt1) from hemagglutinin__InfluenzaA__ALE32087
augaagaccaucaucgcccugagcuacauccucugccugguguucgcccagaagauccccggcaacgacaacuccaccgcgacgcugugccucgggcaccacgccgucccgaacggcaccaucgugaagaccaucaccaacgaccgcaucgaggugacgaacgccaccgagcugguccagaacagcuccaucggggagaucugcgacagcccccaccagauccuggacggcgagaacugcacccucaucgacgcccugcugggggacccccagugcgacggcuuccagaacaagaagugggaccucuucguggagcgguccaaggccuacagcaacugcuaccccuacgacgugccggacuacgcgucccugcgcagccuggucgccuccagcggcacccucgaguucaacaacgaguccuucaacuggacgggggugacccagaacggcaccagcuccgccugcauccgcaagagcuccagcuccuucuucagccggcugaacuggcugacccaccucgacuacacguaccccgcccugaacgugaccaugcccaacaacgagcaguucgacaagcuguacaucuggggcguccaccaccccgggaccgacaaggaccagaucuuccucuacgcgcgguccagcgggcgcaucaccgugagcacgaagcggucccagcaggccgugaucccgaacaucggcagccgcccccggauccgcgacauccccucccggaucagcaucuacuggaccaucgucaagcccggcgacauccugcugaucaacuccaccgggaaccucaucgccccgcgcggcuacuucaagauccggagcgggaaguccagcaucaugcgcuccgacgcccccaucggcaagugcaagagcgagugcaucacccccaacggcuccauccccaacgacaagccguuccagaacgugaaccggaucacguacggggccugcccccgcuacgugaagcacagcacccugaagcuggcgaccggcaugcggaacguccccgagaagcagacccgcgggaucuucggcgccaucgccggguucaucgagaacggcugggagggcaugguggacgggugguacggcuuccggcaccagaacuccgaggggcgcggccaggccgccgaccucaagagcacgcaggcggccaucgaccagaucaacgggaaccugaaccggcugaucggcaagaccaacgagaaguuccaccagaucgagaaggaguucuccgagguggagggccgcauccaggaccucgagaaguacgucgaggacaccaagaucgaccuguggagcuacaacgccgagcugcucguggcccuggagaaccagcacaccaucgaccugacggacuccgagaugaacaagcuguucgagaagaccaagaagcagcuccgcgagaacgccgaggacauggggaacggcugcuucaagaucuaccacaagugcgacaacgcgugcaucgggagcauccggaacggcaccuacgaccacaacguguaccgcgacgaggcccugaacaaccgguuccagaucaagggggucgagcucaaguccggcuacaaggacuggauccuguggaucagcuucgccaucagcugcuuccugcucugcguggcccugcugggcuucaucaugugggccugccagaaggggaacauccgcugcaacaucugcaucuga

SEQ ID NO: 77597 - RNA, 1701 nt, Artificial Sequence
  derived and/or modified CDS sequence (opt1) from hemagglutinin__InfluenzaA__ALE32088
augaagaccaucaucgcccugagcuacauccucugccugguguucgcccagaagauccccggcaacgacaacuccaccgcgacgcugugccucgggcaccacgccgucccgaacggcaccaucgugaagaccaucaccaacgaccgcaucgaggugacgaacgccaccgagcugguccagaacagcuccaucggggagaucugcgacagcccccaccagauccuggacggcgagaacugcacccucaucgacgcccugcugggggacccccagugcgacggcuuccagaacaagaagugggaccucuucguggagcgguccaaggccuacagcaacugcuaccccuacgacgugccggacuacgcgucccugcgcagccuggucgccuccagcggcacccucgaguucaacaacgaguccuucaacuggacgggggugacccagaacggcaccagcuccgccugcauccgcaagagcuccagcuccuucuucagccggcugaacuggcugacccaccucaacuacacguaccccgcccugaacgugaccaugcccaacaacgagcaguucgacaagcuguacaucuggggcguccuccaccccgggaccgacaaggaccagaucuuccuguacgcgcgguccagcgggcgcaucaccgugagcacgaagcggucccagcaggccgugaucccgaacaucggcagccgcccccggauccgcgacauccccucccggaucagcaucuacuggaccaucgucaagcccggcgacauccugcucaucaacuccaccgggaaccugaucgccccgcgcggcuacuucaagauccggagcgggaaguccagcaucaugcgcuccgacgcccccaucggcaagugcaagagcgagugcaucacccccaacggcuccauccccaacgacaagccguuccagaacgugaaccggaucacguacggggccugcccccgcuacgugaagcacagcacccugaagcucgcgaccggcaugcggaacguccccgagaagcagacccgcgggaucuucggcgccaucgccggguucaucgagaacggcugggagggcaugguggacgggugguacggcuuccggcaccagaacuccgaggggcgcggccaggccgccgaccucaagagcacgcaggcggccaucgaccagaucaacgggaagcugaaccggcugaucggcaagaccaacgagaaguuccaccagaucgagaaggaguucuccgagguggagggccgcauccaggaccuggagaaguacgucgaggacaccaagaucgaccuguggagcuacaacgccgagcuccugguggcccuggagaaccagcacaccguggaccucacggacuccgagaugaacaagcuguucgagaagaccaagaagcagcugcgcgagaacgccgaggacauggggaacggcugcuucaagaucuaccacaagugcgacaacgcgugcaucgggagcauccggaacggcaccuacgaccacaacgucuaccgcgacgaggcccucaacaaccgguuccagaucaaggggguggagcugaaguccggcuacaaggacuggauccuguggaucagcuucgccaucagcugcuuccuccugugcguggcccugcucggcuucaucaugugggccugccagaaggggaacauccgcugcaacaucugcaucuga

SEQ ID NO: 77598 - RNA, 1701 nt, Artificial Sequence; identical to SEQ ID NO: 76465
  derived and/or modified CDS sequence (opt1) from hemagglutinin__InfluenzaA__ALE32089

SEQ ID NO: 77599 - RNA, 1701 nt, Artificial Sequence; identical to SEQ ID NO: 76465
  derived and/or modified CDS sequence (opt1) from hemagglutinin__InfluenzaA__ALE32090

SEQ ID NO: 77600 - RNA, 1701 nt, Artificial Sequence; identical to SEQ ID NO: 76465
  derived and/or modified CDS sequence (opt1) from hemagglutinin__InfluenzaA__ALE32091

SEQ ID NO: 77601 - RNA, 1701 nt, Artificial Sequence
  derived and/or modified CDS sequence (opt1) from hemagglutinin__InfluenzaA__ALE32092
augaagaccaucaucgcccugagcuacauccucugccugguguucgcccagaagauccccggcaacgacaacuccaccgcgacgcugugccucgggcaccacgccgucccgaacggcaccaucgugaagaccaucaccaacgaccgcaucgaggugacgaacgccaccgagcugguccagaacagcuccaucggggagaucugcgacagcccccaccagauccuggacggcgagaacugcacccucaucgacgcccugcugggggacccccagugcgacggcuuccagaacaagaagugggaccucuucguggagcgguccaaggccuacagcaacugcuaccccuacgacgugccggacuacgcgucccugcgcagccuggucgccuccagcggcacccucgaguucaacaacgaguccuucaacuggacgggggugacccagaacggcaccagcuccgccugcauccggcgcagcuccagcuccuucuucagccggcugaacuggcugacccaccucaacuacacguaccccgcccugaacgugaccaugcccaacaacgagcaguucgacaagcuguacaucuggggcguccaccaccccgggaccgacaaggaccagaucuuccucuacgcgcaguccagcgggcgcaucaccgugagcacgaagcggucccagcaggccgugaucccgaacaucggcagccgcccccggauccgcgacauccccucccggaucagcaucuacuggaccaucgucaagcccggcgacauccugcugaucaacuccaccgggaaccucaucgccccgcgcggcuacuucaagauccggagcgggaaguccagcaucaugcgcuccgacgcccccaucggcaagugccggagcgagugcaucacccccaacggcuccauccccaacgacaagccguuccagaacgugaaccgcaucacguacggggccugcccccgguacgugaagcacagcacccugaagcuggcgaccggcaugcgcaacguccccgagaagcagacccgggggaucuucggcgccaucgccggguucaucgagaacggcugggagggcaugguggacgggugguacggcuuccgccaccagaacuccgaggggcggggccaggccgccgaccucaagagcacgcaggcggccaucgaccagaucaacgggaagcugaaccgccugaucggcaagaccaacgagaaguuccaccagaucgagaaggaguucuccgagguggagggccgcauccaggaccucgagaaguacgucgaggacaccaagaucgaccuguggagcuacaacgccgagcugcucguggcccuggagaaccagcacaccaucgaccugacggacuccgagaugaacaagcuguucgagaagaccaagaagcagcuccgggagaacgccgaggacauggggaacggcugcuucaagaucuaccacaagugcgacaacgcgugcaucgggagcauccgcaacggcaccuacgagcacaacguguaccgggacgaggcccugaacaaccgcuuccagaucaagggggucgagcucaaguccggcuacaaggacuggauccuguggaucagcuucgccaucagcugcuuccugcucugcguggcccugcugggcuucaucaugugggccugccagaaggggaacauccggugcaacaucugcaucuga

SEQ ID NO: 77602 - RNA, 1701 nt, Artificial Sequence; identical to SEQ ID NO: 77071
  derived and/or modified CDS sequence (opt1) from hemagglutinin__InfluenzaA__ALE32093

SEQ ID NO: 77603 - RNA, 1701 nt, Artificial Sequence
  derived and/or modified CDS sequence (opt1) from hemagglutinin__InfluenzaA__ALE32094
augaagaccaucaucgcccugagcuacauccucugccugguguucgcccagaagauccccggcaacgacaacuccaccgcgacgcugugccucgggcaccacgccgucccgaacggcaccaucgugaagaccaucaccaacgaccgcaucgaggugacgaacgccaccgagcugguccagaacagcuccaucggggagaucugcgacagcccccaccagauccuggacggcgagaacugcacccucaucgacgcccugcugggggacccccagugcgacggcuuccagaacaagaagugggaccucuucguggagcgguccaaggccuacagcaacugcuaccccuacgacgugccggacuacgcgucccugcgcagccuggucgccuccagcggcacccucgaguucaacaacgaguccuucaacuggacgggggugacccagaacggcaccagcuccgccugcauccggcgcagcuccagcuccuucuucagccggcugaacuggcugacccaccucaacuacacguaccccgcccugaacgugaccaugcccaacaacgagcaguucgacaagcuguacaucuggggcguccaccaccccgggaccgacaaggaccagaucuuccucuacgcgcaguccagcgggcgcaucaccgugagcacgaagcggucccagcaggccgugaucccgaacaucggcagccgcccccggauccgcgacauccccucccggaucagcaucuacuggaccaucgucaagcccggcgacauccugcugaucaccuccaccgggaaccucaucgccccgcgcggcuacuucaagauccggagcgggaaguccagcaucaugcgcuccgacgcccccaucggcaagugcaagagcgagugcaucacgcccaacggcuccauccccaacgacaagccguuccagaacgugaaccggaucaccuacggggccugcccccgcuacgugaagcacagcacccugaagcuggcgaccggcaugcggaacguccccgagaagcagacgcgcgggaucuucggcgccaucgccggguucaucgagaacggcugggagggcaugguggacgggugguacggcuuccggcaccagaacuccgaggggcgcggccaggccgccgaccucaagagcacccaggcggccaucgaccagaucaacgggaagcugaaccggcugaucggcaagaccaacgagaaguuccaccagaucgagaaggaguucuccgagguggagggccgcauccaggaccucgagaaguacgucgaggacaccaagaucgaccuguggagcuacaacgccgagcugcucguggcccuggagaaccagcacacgaucgaccugaccgacuccgagaugaacaagcuguucgagaagaccaagaagcagcuccgcgagaacgccgaggacauggggaacggcugcuucaagaucuaccacaagugcgacaacgcgugcaucgggagcauccggaacggcaccuacgaccacaacguguaccgcgacgaggcccugaacaaccgguuccagaucaagggggucgagcucaaguccggcuacaaggacuggauccuguggaucagcuucgccaucagcugcuuccugcucugcguggcccugcugggcuucaucaugugggccugccagaaggggaacauccgcugcaacaucugcaucuga

SEQ ID NO: 77604 - RNA, 1701 nt, Artificial Sequence; identical to SEQ ID NO: 76465
  derived and/or modified CDS sequence (opt1) from hemagglutinin__InfluenzaA__ALE32095

SEQ ID NO: 77605 - RNA, 1701 nt, Artificial Sequence
  derived and/or modified CDS sequence (opt1) from hemagglutinin__InfluenzaA__ALE32096
augaagaccaucaucgcccugagcuacauccucugccugguguucgcccagaagauccccggcaacgacaacuccaccgcgacgcugugccucgggcaccacgccgucccgaacggcaccaucgugaagaccaucaccaacgaccgcaucgaggugacgaacgccaccgagcugguccagaacagcuccaucggggagaucugcgacagcccccaccagauccuggacggcgagaacugcacccucaucgacgcccugcugggggacccccagugcgacggcuuccagaacaagaagugggaccucuucguggagcgguccaaggccuacagcaacugcuaccccuacgacgugccggacuacgcgucccugcgcagccuggucgccuccagcggcacccucgaguucaacaacgaguccuucaacuggacgggggugacccagaacggcaccagcuccgccugcauccggcgcagcuccagcuccuucuucagccggcugaacuggcugacccaccucuccuacacguaccccgcccugaacgugaccaugcccaacaacgagcaguucgacaagcuguacaucuggggcguccaccaccccgggaccgacaaggaccagaucuuccucuacgcgcagagcagcgggcgcaucaccguguccacgaagcggagccagcaggccgugaucccgaacaucggcucccgcccccggauccgcgacauccccagccggaucuccaucuacuggaccaucgucaagcccggcgacauccugcugaucaacagcaccgggaaccucaucgccccgcgcggcuacuucaagauccgguccggcaagagcuccaucaugcgcagcgacgcccccaucgggaagugcaaguccgagugcaucacccccaacggcagcauccccaacgacaagccguuccagaacgugaaccggaucacguacggggccugcccccgcuacgugaagcacuccacccugaagcuggcgaccggcaugcggaacguccccgagaagcagacccgcgggaucuucggcgccaucgccggguucaucgagaacggcugggagggcaugguggacgggugguacggcuuccggcaccagaacagcgaggggcgcggccaggccgccgaccucaaguccacgcaggcggccaucgaccagaucaacgggaagcugaaccggcugaucggcaagaccaacgagaaguuccaccagaucgagaaggaguucagcgagguggagggccgcauccaggaccucgagaaguacgucgaggacaccaagaucgaccugugguccuacaacgccgagcugcucguggcccuggagaaccagcacaccaucgaccugacggacagcgagaugaacaagcuguucgagaagaccaagaagcagcuccgcgagaacgccgaggacauggggaacggcugcuucaagaucuaccacaagugcgacaacgcgugcaucggguccauccggaacggcaccuacgaccacaacguguaccgcgacgaggcccugaacaaccgguuccagaucaagggggucgagcucaagagcggcuacaaggacuggauccuguggaucagcuucgccaucuccugcuuccugcucugcguggcccugcugggcuucaucaugugggccugccagaaggggaacauccgcugcaacaucugcaucuga

SEQ ID NO: 77606 - RNA, 1701 nt, Artificial Sequence; identical to SEQ ID NO: 76465
  derived and/or modified CDS sequence (opt1) from hemagglutinin__InfluenzaA__ALE32097

SEQ ID NO: 77607 - RNA, 1701 nt, Artificial Sequence; identical to SEQ ID NO: 77071
  derived and/or modified CDS sequence (opt1) from hemagglutinin__InfluenzaA__ALE32099

SEQ ID NO: 77608 - RNA, 1701 nt, Artificial Sequence
  derived and/or modified CDS sequence (opt1) from hemagglutinin__InfluenzaA__ALE32100
augaagaccaucaucgcccugagcuacauccucugccugguguucgcccagaagauccccggcaacgacaacuccaccgcgacgcugugccucgggcaccacgccgucccgaacggcaccaucgugaagaccaucaccaacgaccgcaucgaggugacgaacgccaccgagcugguccagaacagcuccaucggggagaucugcgacagcccccaccagauccuggacggcgagaacugcacccucaucgacgcccugcugggggacccccagugcgacggcuuccagaacaagaagugggaccucuucguggagcgguccaaggccuacagcaacugcuaccccuacgacgugccggacuacgcgucccugcgcagccuggucgccuccagcggcacccucgaguucaacaacgaguccuucaacuggacgggggugacccagaacggcaccagcuccgccugcauccggcgcagcuccagcuccuucuucagccggcugaacuggcugacccaccucaacuacacguaccccgcccugaacgugaccaugcccaacaacgagcaguucgacaagcuguacaucuggggcguccaccaccccgggaccgacaaggaccagaucuuccucuacgcgcaguccagcgggcgcaucaccgugagcacgaagcggucccagcaggccgugaucccgaacaucggcagccgcccccggauccgcgacauccccucccggaucagcaucuacuggaccaucgucaagcccggcgacauccugcugaucaacuccaccgggaaccucaucgccccgcgcggcuacuucaagauccggagcgggaaguccagcaucaugcgcuccgacgcccccaucggcaagugcaagagcgagugcaucacccccaacggcuccauccccaacgacaagccguuccagaacgugaaccggaucacguacggggccugcccccgcuacgugaagcacagcacccugaagcuggcgaccggcaugcggaacguccccgagaagcagacccgcgggaucuucggcgccaucgccggguucaucgagaacggcugggagggcaugguggacgggugguacggcuuccggcaccagaacuccgaggggcgcggccaggccgccgaccucaagagcacgcaggcggccaucgaccagaucaacgggaagcugaaccggcugaucggcaagaccaacgagaaguuccaccagaucgagaaggaguucuccgagguggagggccgcauccaggaccucgagaaguacgucgaggacaccaagaucgaccuguggagcuacaacgccgaccugcucguggcccuggagaaccagcacaccaucgaccugacggacuccgagaugaacaagcuguucgagaagaccaagaagcagcuccgcgagaacgccgaggacauggggaacggcugcuucaagaucuaccacaagugcgacaacgcgugcaucgggagcauccggaacggcaccuacgaccacaacguguaccgcgacgaggcccugaacaaccgguuccagaucaagggggucgagcucaaguccggcuacaaggacuggauccuguggaucagcuucgccaucagcugcuuccugcucugcguggcccugcugggcuucaucaugugggccugccagaaggggaacauccgcugcaacaucugcaucuga

SEQ ID NO: 77609 - RNA, 1701 nt, Artificial Sequence
  derived and/or modified CDS sequence (opt1) from hemagglutinin__InfluenzaA__ALE32101
augaagaccaucaucgcccugagcuacauccucugccugguguucgcccagaagauccccggcaacgacaacuccaccgcgacgcugugccucgggcaccacgccgucccgaacggcaccaucgugaagaccaucaccaacgaccgcaucgaggugacgaacgccaccgagcugguccagaacagcuccaucggggagaucugcgacagcccccaccagauccuggacggcgagaacugcacccucaucgacgcccugcugggggacccccagugcgacggcuuccagaacaagaagugggaccucuucguggagcgguccaaggccuacagccagugcuaccccuacgacgugccggacuacgcgucccugcgcagccuggucgccuccagcggcacccucgaguucaacaacgaguccuucaacuggacgggggugacccagaacggcaccagcuccgccugcauccgcaagagcuccgggagcuucuucucccggcugaacuggcugacccaccucaaguacacguaccccgcccugaacgugaccaugcccaacaacgagcaguucgacaagcuguacaucuggggcguccaccaccccgggaccgacaaggaccagaucuuccucuacgcgcggagcuccggccgcaucaccgugagcacgaagcggagccagcaggccgugaucccgaacaucggcucccgcccccggauccgcgacauccccagccggaucuccaucuacuggaccaucgucaagcccggggacauccugcugaucaacagcaccggcaaccucaucgccccgcgcggguacuucaagauccgguccggcaagagcuccaucaugcgcagcgacgcccccaucggcaagugcaaguccgagugcaucacccccaacgggagcauccccaacgacaagccguuccagaacgugaaccggaucacguacggcgccugcccccgcuacgugaagcacuccacccugaagcuggcgaccgggaugcggaacguccccgagaagcagacccgcggcaucuucggggccaucgccggcuucaucgagaacggcugggaggggaugguggacggcugguacggguuccggcaccagaacagcgagggccgcgggcaggccgccgaccucaaguccacgcaggcggccaucgaccagaucaacggcaagcugaaccggcugaucggcaagaccaacgagaaguuccaccagaucgagaaggaguucagcgagguggaggggcgcauccaggaccucgagaaguacgucgaggacaccaagaucgaccugugguccuacaacgccgagcugcucguggcccuggagaaccagcacaccaucgaccugacggacagcgagaugaacaagcuguucgagaagaccaagaagcagcuccgcgagaacgccgaggacaugggcaacgggugcuucaagaucuaccacaagugcgacaacgcgugcaucggcuccauccggaacgggaccuacgaccacaacguguaccgcgacgaggcccugaacaaccgguuccagaucaagggcgucgagcucaagagcggcuacaaggacuggauccuguggaucuccuucgccaucagcugcuuccugcucugcguggcccugcugggguucaucaugugggccugccagaagggcaacauccgcugcaacaucugcaucuga

SEQ ID NO: 77610 - RNA, 1701 nt, Artificial Sequence
  derived and/or modified CDS sequence (opt1) from hemagglutinin__InfluenzaA__ALE32102
augaagaccaucaucgcccugagcuacauccucugccugguguucgcccagaagauccccggcaacgacaacuccaccgcgacgcugugccucgggcaccacgccgucccgaacggcaccaucgugaagaccaucaccaacgaccgcaucgaggugacgaacgccaccgagcugguccagaacagcuccaucggggagaucugcgacagcccccaccagauccuggacggcgagaacugcacccucaucgacgcccugcugggggacccccagugcgacggcuuccagaacaagaagugggaccucuucguggagcgguccaaggccuacagcaacugcuaccccuacgacgugccggacuacgcgucccugcgcagccuggucgccuccagcggcacccucgaguucaacaacgaguccuucaacuggacgggggugacccagaacggcaccagcuccgccugcauccgcaagagcuccagcuccuucuucagccggcugaacuggcugacccaccucaaguacacguaccccgcccugaacgugaccaugcccaacaacgagcaguucgacaagcuguacaucuggggcguccaccaccccgggaccgacaaggaccagaucuuccucuacgcgcgguccagcgggcgcaucaccgugagcacgaagcggucccagcaggccgugaucccgaacaucggcagccgcccccggauccgcgacauccccucccggaucagcaucuacuggaccaucgucaagcccggcgacauccugcugaucaacuccaccgggaaccucaucgccccgcgcggcuacuucaagauccggagcgggaaguccagcaucaugcgcuccgacgcccccaucggcaagugcaagagcgagugcaucacccccaacggcuccauccccaacgacaagccguuccagaacgugaaccggaucacguacggggccugcccccgcuacgugaagcacagcacccugaagcuggcgaccggcaugcggaacguccccgagaagcagacccgcgggaucuucggcgccaucgccggguucaucgagaacggcugggagggcaugguggacgggugguacggcuuccggcaccagaacuccgaggggcgcggccaggccgccgaccucaagagcacgcaggcggccaucgaccagaucaacgggaagcugaaccggcugaucggcaagaccaacgagaaguuccaccagaucgagaaggaguucuccgagguggagggccgcauccaggaccucgagaaguacgucgaggacaccaagaucgaccuguggagcuacaacgccgagcugcucguggcccuggagaaccagcacaccaucgaccugacggacuccgagaugaacaagcuguucgagaagaccaagaagcagcuccgcgagaacgccgaggacauggggaacggcugcuucaagaucuaccacaagugcgacaacgcgugcaucgggagcauccggaacggcaccuacgaccacaacguguaccgcgacgaggcccuguccaaccgguuccagaucaagggggucgagcucaagagcggcuacaaggacuggauccuguggaucagcuucgccaucuccugcuuccugcucugcguggcccugcugggcuucaucaugugggccugccagaaggggaacauccgcugcaacaucugcaucuga

SEQ ID NO: 77611 - RNA, 1701 nt, Artificial Sequence; identical to SEQ ID NO: 77178
  derived and/or modified CDS sequence (opt1) from hemagglutinin__InfluenzaA__ALE32103

SEQ ID NO: 77612 - RNA, 1701 nt, Artificial Sequence
  derived and/or modified CDS sequence (opt1) from hemagglutinin__InfluenzaA__ALE32104
augaagaccaucaucgcccugagcuacauccucugccugguguucgcccagaagauccccggcaacgacaacuccaccgcgacgcugugccucgggcaccacgccgucccgaacggcaccaucgugaagaccaucaccaacgaccagaucgaggugacgaacgccaccgagcugguccagaacagcuccaucggggagaucugcgacagcccccaccagauccuggacggcgagaacugcacccucaucgacgcccugcugggggacccccagugcgacggcuuccagaacaagaagugggaccucuucguggagcgcuccaaggccuacagcaacugcuaccccuacgacgugccggacuacgcgucccugcggagccuggucgccuccagcggcacccucgaguucaacaacgaguccuucaacuggacgggggugacccagaacggcaccagcuccgccugcauccgccggagcuccagcuccuucuucagccgccugaacuggcugacccaccucaacuacacguaccccgcccugaacgugaccaugcccaacaacgagcaguucgacaagcuguacaucuggggcguccaccaccccgggaccgacaaggaccagaucuuccucuacgcgcaguccagcgggcggaucaccgugagcacgaagcgcucccagcaggccgugaucccgaacaucggcagccggccccgcauccgggacauccccucccgcaucagcaucuacuggaccaucgucaagcccggcgacauccugcugaucaacuccaccgggaaccucaucgccccgcggggcuacuucaagauccgcagcgggaaguccagcaucaugcgguccgacgcccccaucggcaagugcaagagcgagugcaucacccccaacggcuccauccccaacgacaagccguuccagaacgugaaccgcaucacguacggggccugcccccgguacgugaagcacagcacccugaagcuggcgaccggcaugcgcaacguccccgagaagcagacccgggggaucuucggcgccaucgccggguucaucgagaacggcugggagggcaugguggacgggugguacggcuuccgccaccagaacuccgaggggcggggccaggccgccgaccucaagagcacgcaggcggccaucgaccagaucaacgggaagcugaaccgccugaucggcaagaccaacgagaaguuccaccagaucgagaaggaguucuccgagguggagggccggauccaggaccucgagaaguacgucgaggacaccaagaucgaccuguggagcuacaacgccgagcugcucguggcccuggagaaccagcacaccaucgaccugacggacuccgagaugaacaagcuguucgagaagaccaagaagcagcuccgcgagaacgccgaggacauggggaacggcugcuucaagaucuaccacaagugcgacaacgcgugcaucgggagcauccgcaacggcaccuacgaccacaacguguaccgggacgaggcccugaacaaccgcuuccagaucaagggggucgagcucaaguccggcuacaaggacuggauccuguggaucagcuucgccaucagcugcuuccugcucugcguggcccugcugggcuucaucaugugggccugccagaaggggaacauccggugcaacaucugcaucuga

SEQ ID NO: 77613 - RNA, 1701 nt, Artificial Sequence; identical to SEQ ID NO: 77123
  derived and/or modified CDS sequence (opt1) from hemagglutinin__InfluenzaA__ALE32105

SEQ ID NO: 77614 - RNA, 1701 nt, Artificial Sequence; identical to SEQ ID NO: 77123
  derived and/or modified CDS sequence (opt1) from hemagglutinin__InfluenzaA__ALE32106

SEQ ID NO: 77615 - RNA, 1701 nt, Artificial Sequence; identical to SEQ ID NO: 77178
  derived and/or modified CDS sequence (opt1) from hemagglutinin__InfluenzaA__ALE32107

SEQ ID NO: 77616 - RNA, 1701 nt, Artificial Sequence; identical to SEQ ID NO: 77408
  derived and/or modified CDS sequence (opt1) from hemagglutinin__InfluenzaA__ALE32108

SEQ ID NO: 77617 - RNA, 1701 nt, Artificial Sequence; identical to SEQ ID NO: 77022
  derived and/or modified CDS sequence (opt1) from hemagglutinin__InfluenzaA__ALE32109

SEQ ID NO: 77618 - RNA, 1701 nt, Artificial Sequence; identical to SEQ ID NO: 77009
  derived and/or modified CDS sequence (opt1) from hemagglutinin__InfluenzaA__ALE32110

SEQ ID NO: 77619 - RNA, 1701 nt, Artificial Sequence; identical to SEQ ID NO: 76465
  derived and/or modified CDS sequence (opt1) from hemagglutinin__InfluenzaA__ALE32111

SEQ ID NO: 77620 - RNA, 1701 nt, Artificial Sequence
  derived and/or modified CDS sequence (opt1) from hemagglutinin__InfluenzaA__ALE32112
augaagaccaucaucgcccugagcuacauccucugccugguguucgcccagaagauccccggcaacgacaacuccaccgcgacgcugugccucgggcaccacgccgucccgaacggcaccaucgugaagaccaucaccaacgaccgcaucgaggugacgaacgccaccgagcugguccagaacagcuccaucggggagaucugcgacagcccccaccagauccuggacggcgagaacugcacccucaucgacgcccugcugggggacccccagugcgacggcuuccagaacaagaagugggaccucuucguggagcgguccaaggccuacagcaacugcuaccccuacgacgugccggacuacgcgucccugcgcagccuggucgccuccagcggcacccucgaguucaacaacgaguccuucaacuggacgggggugacccagaacggcaccagcuccgccugcauccggcgcagcuccagcuccuucuucagccggcugaacuggcugacccaccucaacuacgccuaccccgcgcugaacgugacgaugcccaacaacgagcaguucgacaagcuguacaucuggggcguccaccaccccgggaccgacaaggaccagaucuuccucuacgcccaguccagcgggcgcaucaccgugagcaccaagcggucccagcaggccgugaucccgaacaucggcagccgcccccggauccgcgacauccccucccggaucagcaucuacuggacgaucgucaagcccggcgacauccugcugaucaacuccaccgggaaccucaucgccccgcgcggcuacuucaagauccggagcgggaaguccagcaucaugcgcuccgacgcccccaucggcaagugcaagagcgagugcaucacccccaacggcuccauccccaacgacaagccguuccagaacgugaaccggaucaccuacggggcgugcccccgcuacgugaagcacagcacgcugaagcuggccaccggcaugcggaacguccccgagaagcagacccgcgggaucuucggcgccaucgccggguucaucgagaacggcugggagggcaugguggacgggugguacggcuuccggcaccagaacuccgaggggcgcggccaggccgcggaccucaagagcacccaggccgccaucgaccagaucaacgggaagcugaaccggcugaucggcaagacgaacgagaaguuccaccagaucgagaaggaguucuccgagguggagggccgcauccaggaccucgagaaguacgucgaggacaccaagaucgaccuguggagcuacaacgccgagcugcucguggcccuggagaaccagcacaccaucgaccugaccgacuccgagaugaacaagcuguucgagaagacgaagaagcagcuccgcgagaacgcggaggacauggggaacggcugcuucaagaucuaccacaagugcgacaacgccugcaucgggagcauccggaacggcaccuacgaccacaacguguaccgcgacgaggcccugaacaaccgguuccagaucaagggggucgagcucaaguccggcuacaaggacuggauccuguggaucagcuucgccaucagcugcuuccugcucugcguggcccugcugggcuucaucaugugggcgugccagaaggggaacauccgcugcaacaucugcaucuga

SEQ ID NO: 77621 - RNA, 1701 nt, Artificial Sequence
  derived and/or modified CDS sequence (opt1) from hemagglutinin__InfluenzaA__ALE32113
augaagaccaucaucgcccugagcuacauccucugccugguguucgcccagaagauccccggcaacgacaacuccaccgcgacgcugugccucgggcaccacgccgucccgaacggcaccguggugaagaccaucaccaacgaccgcaucgaggucacgaacgccaccgagcuggugcagaacagcuccaucggggagaucugcgacagcccccaccagauccuggacggcgagaacugcacccucaucgacgcccugcugggggacccccagugcgacggcuuccagaacaagaagugggaccucuucguggagcgguccaaggccuacagcaacugcuaccccuacgacgucccggacuacgcgucccugcgcagccugguggccuccagcggcacccucgaguucaacaacgaguccuucaacuggacgggggugacccagaacggcaccagcuccgccugcauccgggggagcuccagcuccuucuucagccgccugaacuggcugacccaccucaacuacacguaccccgcccugaacgucaccaugcccaacaacgagcaguucgacaagcuguacaucuggggcgugcaccaccccgggaccgacaaggaccagaucuuccucuacgcgcaguccagcggccggaucaccgugagcacgaagcgcucccagcaggccgucaucccgaacaucggcagccggccccgcauccgggacauccccucccgcaucagcaucuacuggaccaucgugaagcccggggacauccugcugaucaacuccaccggcaaccucaucgccccgcggggguacuucaagaugcgcagcggcaaguccagcaucaugcgguccgacgcccccaucggcaagugcaagagcgagugcaucacccccaacggguccauccccaacgacaagccguuccagaacgugaaccgcaucacguacggcgccugcccccgguacgucaagcacagcacccugaagcuggcgaccgggaugcgcaacgugcccgagaagcagacccggggcaucuucggggccaucgccggcuucaucgagaacggcugggaggggaugguggacggcugguacggguuccgccaccagaacuccgagggccgggggcaggccgccgaccucaagagcacgcaggcggccaucgaccagaucaacggcaagcugaaccgccugaucggcaagaccaacgagaaguuccaccagaucgagaaggaguucuccgaggucgaggggcggauccaggaccucgagaaguacguggaggacaccaagaucgaccuguggagcuacaacgccgagcugcucguggcccuggagaaccagcacaccaucgaccugacggacuccgagaugaacaagcuguucgagaagaccaagaagcagcuccgcgagaacgccgaggacaugggcaacgggugcuucaagaucuaccacaagugcgacaacgcgugcaucggcagcauccgcaacgggaccuacgaccacaacgucuaccgggacgaggcccugaacaaccgcuuccagaucaagggcguggagcucaaguccggcuacaaggacuggauccuguggaucagcuucgccaucagcugcuuccugcucugcguggcccugcugggguucaucaugugggccugccagaagggcaacauccggugcaacaucugcaucuga

SEQ ID NO: 77622 - RNA, 1701 nt, Artificial Sequence; identical to SEQ ID NO: 77009
  derived and/or modified CDS sequence (opt1) from hemagglutinin__InfluenzaA__ALE32114

SEQ ID NO: 77623 - RNA, 1701 nt, Artificial Sequence; identical to SEQ ID NO: 77009
  derived and/or modified CDS sequence (opt1) from hemagglutinin__InfluenzaA__ALE32115

SEQ ID NO: 77624 - RNA, 1701 nt, Artificial Sequence
  derived and/or modified CDS sequence (opt1) from hemagglutinin__InfluenzaA__ALE32116
augaagaccaucaucgcccugagcuacauccucugccugguguucgcccagaagauccccggcaacgacaacuccaccgcgacgcugugccucgggcaccacgccgucccgaacggcaccaucgugaagaccaucaccaacgaccgcaucgaggugacgaacgccaccgagcugguccagaacagcuccaucggggagaucugcgacagcccccaccagauccuggacggcgagaacugcacccucaucgacgcccugcugggggacccccagugcgacggcuuccagaacaagaagugggaccucuucguggagcgguccaaggccuacagcaacugcuaccccuacgacgugccggacuacgcgucccugcgcagccuggucgccuccagcggcacccucgaguucaacaacgaguccuucaacuggacgggggugacccagaacggcaccagcuccgccugcauccggcgcagcuccagcuccuucuucagccggcugaacuggcugacccaccucaacuacacguaccccgcccugaacgugaccaugcccaacaacgagcaguucgacaagcuguacaucuggggcguccaccaccccgggaccgacaaggaccagaucuuccucuacgcgcaguccagcgggcgcaucaccgugagcacgaagcggucccagcaggccgugaucccgaacaucggcagccgcccccggauccgcgacauccccucccggaucagcaucuacuggaccaucgucaagcccggcgacauccugcugaucaacuccaccgggaaccucaucgccccgcgcggcuacuucaagauccggagcgggaaguccagcaucaugcgcuccgacgcccccaucggcaagugcaagagcgagugcaucacccccaacggcuccauccccaacgacaagccguuccagaacgugaaccggaucacguacggggccugcccccgcuacgugaagcacagcacccugaagcuggcgaccggcaugcggaacguccccgagaagcagacccgcgggaucuucggcgccaucgccggguucaucgagaacggcugggagggcaugguggacgggugguacggcuuccggcaccagaacuccgaggggcgcggccaggccgccgaccucaagagcacgcaggcggccaucgaccagaucaacgggaagcugaaccggcugaucggcaagaccaacgagaaguuccaccagaucgagaaggaguucuccgagguggagggccgcauccaggaccucgagaaguacgucgaggacaccaagaucgaccuguggagcuacaacgccgagcugcucguggcccuggagaaccagcacaccaucgaccugacggacuccgagaugaacaagcuguucgagaagaccaagaagcagcuccgcgagaacgccgaggacauggggaacggcugcuucaagaucuaccacaagugcgacaacgcgugcaucgggagcauccggaacggcaccuacgaccacaacguguaccgcgacgaggcccugaacaaccgguuccagaucaagggggucgagcucaaguccggcuacaaggacuggauccuguggaucagcuucgccaucagcugcuuccugcucugcguggcccugcugggcuucaucaugugggccugccagaaggggaacgugcgcugcaacaucugcaucuga

SEQ ID NO: 77625 - RNA, 1701 nt, Artificial Sequence
  derived and/or modified CDS sequence (opt1) from hemagglutinin__InfluenzaA__ALE32117
augaagaccaucaucgcccugagcuacauccucugccugguguucgcccagaagauccccggcaacgacaacuccaccgcgacgcugugccucgggcaccacgccgucccgaacggcaccaucgugaagaccaucaccaacgaccgcaucgaggugacgaacgccaccgagcugguccagaacagcuccaucggggagaucugcgacagcccccaccagauccuggacggcgagaacugcacccucaucgacgcccugcugggggacccccagugcgacggcuuccagaacaagaagugggaccucuucguggagcgguccaaggccuacagcaacugcuaccccuacgacgugccggacuacgcgucccugcgcagccuggucgccuccagcggcacccucgaguucaacaacgaguccuucaacuggacgggggugacccagaacggcaccagcuccgccugcauccggcgcagcuccagcuccuucuucagccggcugaacuggcugacccaccucaacuacacguaccccgcccugaacgugaccaugcccaacaacgagcaguucgacaagcuguacaucuggggcguccaccaccccgggaccgacaaggaccagaucuuccucuacgcgcaguccagcgggcgcaucaccgugagcacgaagcggucccagcaggccgugaucccgaacaucggcagccgcccccggauccgcgacauccccucccggaucagcaucuacuggaccaucgucaagcccggcgacauccugcugaucaacuccaccgggaaccucaucgccccgcgcggcuacuucaagauccggagcgggaaguccagcaucaugcgcuccgacgcccccaucggcaagugcaagagcgagugcaucacccccaacggcuccauccccaacgacaagccguuccagaacgugaaccggaucacguacggggccugcccccgcuacgugaagcacagcacccugaagcuggcgaccggcaugcggaacguccccgagaagcagacccgcgggaucuucggcgccaucgccggguucaucgagaacggcugggagggcaugguggacgggugguacggcuuccggcaccagaacuccgaggggcgcggccaggccgccgacuucaagagcacgcaggcggccaucgaccagaucaacgggaagcucaaccggcugaucggcaagaccaacgagaaguuccaccagaucgagaaggaguucuccgagguggagggccgcauccaggaccuggagaaguacgucgaggacaccaagaucgaccucuggagcuacaacgccgagcugcugguggcccucgagaaccagcacaccaucgaccugacggacuccgagaugaacaagcuguucgagaagaccaagaagcagcuccgcgagaacgccgaggacauggggaacggcugcuucaagaucuaccacaagugcgacaacgcgugcaucgggagcauccggaacggcaccuacgaccacaacguguaccgcgacgaggcccugaacaaccgguuccagaucaagggggucgagcugaaguccgaguacaaggacuggauccucuggaucagcuucgccaucagcugcuuccugcugugcguggcccuccugggcuucaucaugugggccugccagaagggcaacauccgcugcaacaucugcaucuga

SEQ ID NO: 77626 - RNA, 1701 nt, Artificial Sequence; identical to SEQ ID NO: 77071
  derived and/or modified CDS sequence (opt1) from hemagglutinin__InfluenzaA__ALE32118

SEQ ID NO: 77627 - RNA, 1701 nt, Artificial Sequence; identical to SEQ ID NO: 66693
  derived and/or modified CDS sequence (opt1) from hemagglutinin__InfluenzaA__ALM06086

SEQ ID NO: 77628 - RNA, 1701 nt, Artificial Sequence; identical to SEQ ID NO: 74064
  derived and/or modified CDS sequence (opt1) from hemagglutinin__InfluenzaA__ALM06087

SEQ ID NO: 77629 - RNA, 1701 nt, Artificial Sequence
  derived and/or modified CDS sequence (opt1) from hemagglutinin__InfluenzaA__ALM06088
augaaggccauccuggugguccuccuguacaccuucgccaccgcgaacgccgacacgcugugcaucggcuaccacgccaacaacagcaccgacaccguggacaccgugcucgagaagaacgucacggugacccacuccgugaaccugcuggaggacaagcacaacgggaagcucugcaagcugcgcggcgucgcgccccugcaccucgggaagugcaacaucgccggcuggauccuggggaacccggagugcgagagccuguccaccgccagcuccuggagcuacaucguggagaccuccagcuccgacaacggcacgugcuaccccggcgacuucaucaacuacgaggagcuccgggagcagcugagcuccgugagcuccuucgagcgcuucgagaucuuccccaagaccagcuccuggcccaaccacgacagcaacaagggggucaccgccgccugcccgcacgccggcgcgaaguccuucuacaagaaccugaucuggcucgugaagaaggggaacagcuaccccaagcugucccagagcuacaucaacgacaagggcaaggaggugcugguccucugggggauccaccaccccagcaccacggccgaccagcagucccuguaccagaacgccgacgccuacguguucgugggcaccagccgguacuccaagaaguucaagcccgagaucgccauccgcccgaagguccggggccaggaggggcgcaugaacuacuacuggacccugguggagcccggcgacaagaucaccuucgaggcgacggggaaccucguggucccccgguacgccuucaccauggagcgcaacgccggcagcggcaucaucaucuccgacacccccgugcacgacugcaacaccacgugccagaccccggagggggccaucaacaccagccugcccuuccagaacauccaccccaucaccaucggcaagugccccaaguacgugaaguccacgaagcugcggcucgccaccgggcugcgcaacgucccgagcauccagucccggggccuguucggggcgaucgccggcuucaucgagggcggguggaccggcaugguggacgggugguacggcuaccaccaccagaacgagcaggggagcggcuacgccgccgaccucaaguccacccagaacgccaucgacaagaucacgaacaaggugaacagcgucaucgagaagaugaacacccaguucaccgcggugggcaaggaguucaaccaccuggagaagcgcaucgagaaccugaacaagaaggucgacgacggguuccucgacaucuggaccuacaacgccgagcugcuggugcuccuggagaacgagcggacgcuggacuaccacgacuccaacgugaagaaccucuacgagaagguccgcaaccagcugaagaacaacgccaaggagaucggcaacgggugcuucgaguucuaccacaagugcgacaacacgugcauggagagcgugaagaacggcaccuacgacuaccccaaguacuccgaggaggccaagcugaaccgggagaagaucgacggggugaagcucgagagcacccgcaucuaccagauccuggccaucuacuccaccgucgcgagcucccuggugcucguggucagccugggcgccaucagcuucuggaugugcuccaacggcagccugcagugccggaucugcaucuga

SEQ ID NO: 77630 - RNA, 1701 nt, Artificial Sequence; identical to SEQ ID NO: 74064
  derived and/or modified CDS sequence (opt1) from hemagglutinin__InfluenzaA__ALM06089

SEQ ID NO: 77631 - RNA, 1701 nt, Artificial Sequence
  derived and/or modified CDS sequence (opt1) from hemagglutinin__InfluenzaA__ALN39661
augaagaccaucaucgcccugagcuacauccucugccugguguucgcccagaagauccccggcaacgacaacuccaccgcgacgcugugccucgggcaccacgccgucccgaacggcaccaucgugaagaccaucaccaacgaccgcaucgaggugacgaacgccaccgagcugguccagaacagcuccaucggggagaucugcgacagcccccaccagauccuggacggcgagaacugcacccucaucgacgcccugcugggggacccccagugcgacggcuuccagaacaagaagugggaccucuucguggagcgguccaaggccuacagcaacugcuaccccuacgacgugccggacuacgcgucccugcgcagccuggucgccuccagcggcacccucgaguucaacaacgaguccuucaacuggacgggggugacccagaacggcaccagcuccgccugcauccggcgcagcuccagcuccuucuucagccggcugaacuggcugacccaccucaacuacacguaccccgcccugaacgugaccaugcccaacaacgagcaguucgacaagcuguacaucuggggcguccaccaccccgggaccgacaaggaccagaucuuccucuacgcgcaguccagcgggcgcaucaccgugagcacgaagcggucccagcaggccgugaucccgaacaucggcagccgcccccggauccgcgacauccccucccggaucagcaucuacuggaccaucgucaagcccggcgacauccugcugaucaacuccaccgggaaccucaucgccccgcgcggcuacuucaagauccggagcgggaaguccagcaucaugcgcuccgacgcccccaucggcaagugcaagagcgagugcaucacccccaacggcuccauccccaacgacaagccguuccagaacgugaaccggaucacguacggggccugcccccgcuacgugaagcacagcacccugaagcuggcgaccggcaugcggaacguccccgagaagcagacccgcgggaucuucggcgccaucgccggguucaucgagaacggcugggagggcaugguggacgggugguacggcuuccggcaccagaacuccgaggggcgcggccaggccgccgaccucaagagcacgcaggcggccaucgaccagaucaacgggaagcugaaccggcugaucggcaagaccaacgagaaguuccaccagaucgagaaggaguucuccgagguggagggccgcauccaggaccucgagaaguacgucgaggacaccaagaucgaccuguggagcuacaacgccgagcugcucguggcccuggagaaccagcacaccaucgaccugacggacuccgagaugaacaagcuguucgagaagaccaagaagcagcuccgcgagaacgccgaggacauggggaacggcugcuucaagaucuaccacaagugcgacaacgcgugcaucgggagcauccggaacggcaccuacgaccacaacguguaccgcgacgaggcccugaacaaccgguuccagaucaagggggucgagcucaaguccggcuacaaggacuggauccuguggaucagcuucgccaucagcugcuuccugcucugcaucgcccugcugggcuucaucaugugggccugccagaaggggaacauccgcugcaacaucugcaucuga

SEQ ID NO: 77632 - RNA, 1701 nt, Artificial Sequence; identical to SEQ ID NO: 76998
  derived and/or modified CDS sequence (opt1) from hemagglutinin__InfluenzaA__ALN39662

SEQ ID NO: 77633 - RNA, 1701 nt, Artificial Sequence; identical to SEQ ID NO: 76465
  derived and/or modified CDS sequence (opt1) from hemagglutinin__InfluenzaA__ALN39663

SEQ ID NO: 77634 - RNA, 1701 nt, Artificial Sequence
  derived and/or modified CDS sequence (opt1) from hemagglutinin__InfluenzaA__ALN39664
augaagaccaucaucgcccugagcuacauccucugccugguguucgcccagaagcugcccggcaacgacaacuccaccgcgacgcucugccuggggcaccacgccgucccgaacggcaccaucgugaagaccaucaccaacgaccgcaucgaggugacgaacgccaccgagcugguccagaacagcuccaucggggagaucugcgacagcccccaccagauccucgacggcgagaacugcacccugaucgacgcccugcucggggacccccagugcgacggcuuccagaacaagaagugggaccuguucguggagcgguccaaggccuacagcaacugcuaccccuacgacgugccggacuacgcgucccugcgcagccucgucgccuccagcggcacccuggaguucaacaacgaguccuucaacugggccggggugacgcagaacggcaccagcuccagcugcauccggggguccaacagcuccuucuucagccgccugaacuggcucacccaccugaacuccaaguaccccgcccugaacgugaccaugcccaacaacgagcaguucgacaagcucuacaucuggggcguccaccaccccgggacggacaaggaccagaucuuccuguacgcgcagccgagcggccgggugaccgugagcaccaagcgcucccagcaggccgucauccccaacaucggcagccggccccgcauccgggacauccccucccgcaucagcaucuacuggaccaucgugaagccgggggacauccugcucaucaacuccacgggcaaccugaucgcgccccggggguacuucaagauccgcagcggcaaguccagcaucaugcgguccgacgcccccaucggcaagugcaagagcgagugcaucacccccaacggguccaucccgaacgacaagcccuuccagaacgugaaccgcaucaccuacggcgccugcccccgguacgucaagcagagcacccugaagcucgccacggggaugcgcaacgugcccgagcggcagacccgcggcaucuucggggccaucgccggcuucaucgagaacggcugggaggggaugguggacggcugguacggguuccggcaccagaacuccgagggccgcgggcaggccgccgaccucaagagcacccaggcggccaucgaccagaucaacggcaagcugaaccggcugaucggcaagaccaacgagaaguuccaccagaucgagaaggaguucuccgaggucgaggggcgcauccaggaccuggagaaguacguggaggacacgaagaucgaccuguggagcuacaacgccgagcuccugguggcccuggagaaccagcacaccaucgaccucaccgacuccgagaugaacaagcuguucgagaagaccaagaagcagcugcgcgagaacgccgaggacaugggcaacgggugcuucaagaucuaccacaagugcgacaacgcgugcaucggcagcauccggaacgggacguacgaccacgacgucuaccgcgacgaggcccucaacaaccgguuccagaucaagggcguggagcugaaguccggcuacaaggacuggauccuguggaucagcuucgccaucagcugcuuccuccugugcguggcccugcucggguucaucaugugggccugccagaagggcaacauccgcugcaacaucugcaucuga

SEQ ID NO: 77635 - RNA, 1701 nt, Artificial Sequence; identical to SEQ ID NO: 76465
  derived and/or modified CDS sequence (opt1) from hemagglutinin__InfluenzaA__ALN39665

SEQ ID NO: 77636 - RNA, 1701 nt, Artificial Sequence; identical to SEQ ID NO: 77071
  derived and/or modified CDS sequence (opt1) from hemagglutinin__InfluenzaA__ALN39666

SEQ ID NO: 77637 - RNA, 1701 nt, Artificial Sequence
  derived and/or modified CDS sequence (opt1) from hemagglutinin__InfluenzaA__ALN39667
augaagaccaucaucgcccugagcuacauccucugccugguguucgcccagaagcugcccggcaacgacaacuccaccgcgacgcucugccuggggcaccacgccgucccgaacggcaccaucgugaagaccaucaccaacgaccgcaucgaggugacgaacgccaccgagcugguccagaacagcuccaucggggagaucugcaacagcccccaccagauccucgacggcgagaacugcacccugaucgacgcccugcucggggacccccagugcgacggcuuccagaacaagaagugggaccuguucguggagcgguccaaggccuacagcaacugcuaccccuacgacgugccggacuacgcgucccugcgcagccucgucgccuccagcggcacccuggaguucaacaacgaguccuucaacugggccggggugacgcagaacggcaccagcuccgccugcauccgggggagcaacuccagcuucuucucccgccugaacuggcucacccacagcaacuucaaguaccccgcgcugaacgugaccaugcccaacaacgagcaguucgacaagcuguacaucuggggcguccaccaccccgggacggacaaggaccagaucuuccucuacgcccaguccagcggccggaucaccgugagcaccaagcgcucccagcaggccgugaccccgaacaucggcagccggccccgcauccggaacauccccucccgcaucagcaucuacuggacgaucgucaagcccggggacauccugcugaucaacuccaccggcaaccucaucgccccgcggggguacuucaagauccgcagcggcaaguccagcaucaugcgguccgacgcccccaucggcaagugcaagagcgagugcaucacccccaacggguccauccccaacgacaagccguuccagaacgugaaccgcaucaccuacggcgcgugcccccgguacgugaagcagagcacgcugaagcuggccaccgggaugcgcaacguccccgagaagcagacccggggcaucuucggggccaucgccggcuucaucgagaacggcugggaggggaugaaggacggcugguacggguuccgccaccagaacuccgagggccgggggcaggccgcggaccucaagagcacccaggccgccaucgaccagaucaacggcaagcugaaccgccugaucggcaagacgaacgagaaguuccaccagaucgagaaggaguucuccgagguggaggggcggauccaggaccucgagaaguacguggaggacaccaagaucgaccuguggagcuacaacgccgagcugcucgucgcccuggagaaccagcacaccaucgaccugaccgacuccgagaugaacaagcuguucgagaagacgaagaagcagcuccgcgagaacgcggaggacaugggcaacgggugcuucaagaucuaccacaagugcgacaacgccugcaucggcagcauccgcaacgggaccuacgaccacgacguguaccggaacgaggcccugaacaaccgcuuccagaucaagggcguggagcucaaguccggcuacaaggacuggauccuguggaucagcuucgccaucagcugcuuccugcucugcgucgcccugcugggguucaucaugugggcgugccagaagggcaacauccggugcaacaucugcaucuga

SEQ ID NO: 77638 - RNA, 1701 nt, Artificial Sequence; identical to SEQ ID NO: 77540
  derived and/or modified CDS sequence (opt1) from hemagglutinin__InfluenzaA__ALN39668

SEQ ID NO: 77639 - RNA, 1701 nt, Artificial Sequence
  derived and/or modified CDS sequence (opt1) from hemagglutinin__InfluenzaA__ALN39669
augaagaccaucaucgcccugagcuacauccucugccugguguucgcccagaagauccccggcaacgacaacuccaccgcgacgcugugccucgggcaccacgccgucccgaacggcaccaucgugaagaccaucaccaacgaccgcaucgaggugacgaacgccaccgagcugguccagaacagcuccaucggggagaucugcgacagcccccaccagauccuggacggcgagaacugcacccucaucgacgcccugcugggggacccccagugcgacggcuuccagaacaagaagugggaccucuucguggagcgguccaaggccuacagcaacugcuaccccuacgacgugccggacuacgcgucccugcgcagccuggucgccuccagcggcacccucgaguucaacaacgaguccuucaacuggacgggggugacccagaacggcaccagcuccgccugcauccggcgcagcuccagcuccuucuucagccggcugaacuggcugacccaccucaacuacacguaccccgcccugaacgugaccaugcccaacaacgagcaguucgacaagcuguacaucuggggcguccaccaccccgggaccgacaaggaccagaucuuccucuacgcgcagcuguccgggcgcaucaccgugagcacgaagcggagccagcaggccgugaucccgaacaucggcucccgcccccggauccgcgacauccccagccggaucuccaucuacuggaccaucgucaagcccggcgacauccugcucaucaacagcaccgggaaccugaucgccccgcgcggcuacuucaagauccgguccggcaagagcuccaucaugcgcagcgacgcccccaucgggaagugcaaguccgagugcaucacccccaacggcagcauccccaacgacaagccguuccagaacgugaaccggaucacguacggggccugcccccgcuacgugaagcacuccacccugaagcucgcgaccggcaugcggaacguccccgagaagcagacccgcgggaucuucggcgccaucgccggguucaucgagaacggcugggagggcaugguggacgggugguacggcuuccggcaccagaacagcgaggggcgcggccaggccgccgaccugaaguccacgcaggcggccaucgaccagaucaacgggaagcugaaccggcucaucggcaagaccaacgagaaguuccaccagaucgagaaggaguucagcgagguggagggccgcauccaggaccuggagaaguacgucgaggacaccaagaucgaccugugguccuacaacgccgagcuccugguggcccuggagaaccagcacaccaucgaccucacggacagcgagaugaacaagcuguucgagaagaccaagaagcagcugcgcgagaacgccgaggacauggggaacggcugcuucaagaucuaccacaagugcgacaacgcgugcaucggguccauccggaacggcaccuacgaccacaacguguaccgcgacgaggcccucaacaaccgguuccagaucaagggggucgagcucaagagcggcuacaaggacuggauccuguggaucuccuucgccaucagcugcuuccugcugugcguggcccugcucggcuucaucaugugggccugccagaaggggaacauccgcugcaacaucugcaucuga

SEQ ID NO: 77640 - RNA, 1701 nt, Artificial Sequence; identical to SEQ ID NO: 76465
  derived and/or modified CDS sequence (opt1) from hemagglutinin__InfluenzaA__ALN39670

SEQ ID NO: 77641 - RNA, 1701 nt, Artificial Sequence
  derived and/or modified CDS sequence (opt1) from hemagglutinin__InfluenzaA__ALN39671
augaagaccaucaucgcccugagcuacauccucugccugguguucgcccagaagauccccggcaacgacaacuccaccgcgacgcugugccucgggcaccacgccgucccgaacggcaccaucgugaagaccaucaccaacgaccgcaucgaggugacgaacgccaccgagcugguccagaacagcuccaucggggagaucugcgacagcccccaccagauccuggacggcgagaacugcacccucaucgacgcccugcugggggacccccagugcgacggcuuccagaacaagaagugggaccucuucguggagcgguccaaggccuacagcaacugcuaccccuacgacgugccggacuacgcgucccugcgcagccuggucgccuccagcggcacccucgaguucaacaacgaguccuucaacuggacgggggugacccagaacggcaccagcuccgccugcauccggcgcagcuccagcuccuucuucagccggcugaacuggcugacccaccucaacuacacguaccccgcccugaacgugaccaugcccaacaacgagcaguucgacaagcuguacaucuggggcguccaccaccccgggaccgacaaggaccagaucuuccucuacgcgcaguccagcgggcgcaucaccgugagcacgaagcggucccagcaggccgugaucccgaacaucggcagccgcccccggauccgcgacauccccucccggaucagcaucuacuggaccaucgucaagcccggcgacauccugcugaucaacuccaccgggaaccucaucgccccgcgcggcuacuucaagauccggagcgggaaguccagcaucaugcgcuccgacgcccccaucggcaagugcaagagcgagugcaucacccccaacggcuccauccccaacgacaagccguuccagaacgugaaccggaucacguacggggccugcccccgcuacgugaagcacagcacccugaagcuggcgaccggcaugcggaacguccccgagaagcagacccgcgggaucuucggcgccaucgccggguucaucgagaacggcugggagggcaugguggacgggugguacggcuuccggcaccagaacuccgaggggcgcggccaggccgccgaccucaagagcacgcaggcggccaucgaccagaucaacgggaagcugaaccggcugaucggcaagaccaacgagaaguuccaccagaucgagaaggaguucuccgagguggagggccgcauccaggaccucgagaaguacgucgaggacaccaagaucgaccuguggagcuacaacgccgagcugcucguggcccuggagaaccagcacaccaucgaccugacggacuccgagaugaacaagcuguucgagaagacccgcaagcagcuccgggagaacgccgaggacauggggaacggcugcuucaagaucuaccacaagugcgacaacgcgugcaucgggagcauccgcaacggcaccuacgaccacaacguguaccgggacgaggcccugaacaaccgcuuccagaucaagggggucgagcucaaguccggcuacaaggacuggauccuguggaucagcuucgccaucagcugcuuccugcucugcguggcccugcugggcuucaucaugugggccugccagaaggggaacauccggugcaacaucugcaucuga

SEQ ID NO: 77642 - RNA, 1701 nt, Artificial Sequence; identical to SEQ ID NO: 76465
  derived and/or modified CDS sequence (opt1) from hemagglutinin__InfluenzaA__ALN39672

SEQ ID NO: 77643 - RNA, 1701 nt, Artificial Sequence
  derived and/or modified CDS sequence (opt1) from hemagglutinin__InfluenzaA__ALN39673
augaagaccaucaucgcccugagcuacauccucugccugguguucgcccagaagauccccggcaacgacaacuccaccgcgacgcugugccucgggcaccacgccgucccgaacggcaccaucgugaagaccaucaccaacgaccgcaucgaggugacgaacgccaccgagcugguccagaacagcuccaucggggagaucugcgacagcccccaccagauccuggacggcgagaacugcacccucaucgacgcccugcugggggacccccagugcgacggcuuccagaacaagaagugggaccucuucguggagcgguccaaggccuacagcaacugcuaccccuacgacgugccggacuacgcgucccugcgcagccuggucgccuccagcggcacccucgaguucaacaacgaguccuucaacuggacgggggugacccagaacggcaccagcuccgccugcauccggcgcagcuccagcuccuucuucagccggcugaacuggcugacccaccucaacuacacguaccccgcccugaacgugaccaugcccaacaacgagcaguucgacaagcuguacaucuggggcguccaccaccccgggaccgacaaggaccagaucuuccucuacgcgcaguccagcgggcgcaucaccgugagcacgaagcggucccagcaggccgugaucccggacaucggcagccgcccccggauccgcgacauccccucccggaucagcaucuacuggaccaucgucaagcccggcgacauccugcugaucaacuccaccgggaaccucaucgccccgcgcggcuacuucaagauccggagcgggaaguccagcaucaugcgcuccgacgcccccaucggcaagugcaagagcgagugcaucacccccaacggcuccauccccaacgacaagccguuccagaacgugaaccggaucacguacggggccugcccccgcuacgugaagcacagcacccugaagcuggcgaccggcaugcggaacguccccgagaagcagacccgcgggaucuucggcgccaucgccggguucaucgagaacggcugggagggcaugguggacgggugguacggcuuccggcaccagaacuccgaggggcgcggccaggccgccgaccucaagagcacgcaggcggccaucgaccagaucaacgggaagcugaaccggcugaucggcaagaccaacgagaaguuccaccagaucgagaaggaguucuccgagguggagggccgcauccaggaccucgagaaguacgucgaggacaccaagaucgaccuguggagcuacaacgccgagcugcucguggcccuggagaaccagcacaccaucgaccugacggacuccgagaugaacaagcuguucgagaagaccaagaagcagcuccgcgagaacgccgaggacauggggaacggcugcuucaagaucuaccacaagugcgacaacgcgugcaucgggagcauccggaacggcaccuacgaccacaacguguaccgcgacgaggcccugaacaaccgguuccagaucaagggggucgagcucaaguccggcuacaaggacuggauccuguggaucagcuucgccaucagcugcuuccugcucugcguggcccugcugggcuucaucaugugggccugccagaaggggaacauccgcugcaacaucugcaucuga

SEQ ID NO: 77644 - RNA, 1701 nt, Artificial Sequence; identical to SEQ ID NO: 77005
  derived and/or modified CDS sequence (opt1) from hemagglutinin__InfluenzaA__ALN39674

SEQ ID NO: 77645 - RNA, 1701 nt, Artificial Sequence; identical to SEQ ID NO: 76465
  derived and/or modified CDS sequence (opt1) from hemagglutinin__InfluenzaA__ALN39675

SEQ ID NO: 77646 - RNA, 1701 nt, Artificial Sequence
  derived and/or modified CDS sequence (opt1) from hemagglutinin__InfluenzaA__ALN39676
augaagaccaucaucgcccugagcugcauccucugccugguguucgcccagaagcugcccggcaacgacaacuccaccgcgacgcucugccuggggcaccacgccgucccgaacggcaccaucgugaagaccaucaccaacgaccgcaucgaggugacgaacgccaccgagcugguccagaacagcuccaucggggagaucugcgacagcccccaccagauccucgacggcgagaacugcacccugaucgacgcccugcucggggacccccagugcgacggcuuccagaacaagaagugggaccuguucguggagcgguccaaggccuacagcaacugcuaccccuacgacgugccggacuacgcgucccugcgcagccucgucgccuccagcggcacccuggaguucaacaacgagaacuucaacugggccggggugacgcagaacggcaccuccagcuccugcauccgggggagcaacuccagcuucuucucccgccugaacuggcucacccaccugaacagcaaguaccccgcccugaacgugaccaugcccaacaacgagcaguucgacaagcucuacaucuggggcguccaccaccccgggacggacaaggaccagaucuuccuguacgcgcaguccagcggccggaucaccgugagcaccaagcgcucccagcaggccgugaucccgaacaucggcagccggccccgcauccgggacauccccucccgcaucagcaucuacuggaccaucgucaagcccggggacauccugcucaucaacuccacgggcaaccugaucgccccgcggggguacuuccgcauccggagcggcaaguccagcaucaugcgcuccgacgcccccaucggcaagugcaagagcgagugcaucacccccaacggguccauccccaacgacaagccguuccagaacgugaaccggaucaccuacggcgccugcccccgcuacgugaagcagaacacccugaagcucgcgacggggaugcggaacguccccgagcgccagacccggggcaucuucggggccaucgccggcuucaucgagaacggcugggaggggaugguggacggcugguacggguuccgccaccagaacagcgagggccgggggcaggccgccgaccugaaguccacccagagcgcgaucgaccagaucaacggcaagcugaaccgccucaucggcaagaccaacgagaaguuccaccagaucgagaaggaguucuccgagguggaggggcgcauccaggaccuggagaaguacgucgaggacacgaagaucgaccuguggagcuacaacgccgagcuccugguggcccuggagaaccagcacaccaucgaccucaccgacuccgagaugaacaagcuguucgagaagaccaagaagcagcugcgggagaacgccgaggacaugggcaacgggugcuucaagaucuaccacaagugcgacaacgccugcaucggcagcauccgcaacgggacguacgaccacgacguguaccgggacgaggcgcucaacaaccgcuuccagaucaagggcgucgagcugaaguccggcuacaaggacuggauccuguggaucagcuucgccaucagcugcuuccuccugugcguggcccugcucggguucaucaugugggccugccagaagggcaacauccggugcaacaucugcaucuga

SEQ ID NO: 77647 - RNA, 1701 nt, Artificial Sequence
  derived and/or modified CDS sequence (opt1) from hemagglutinin__InfluenzaA__ALN39677
augaagaccaucaucgcccugggcuacauccucugccugguguucgcccagaagauccccgggaacgacaacagcaccgcgacgcugugccucggccaccacgccgucccgaacgggaccaucgugaagaccaucaccaacgaccgcaucgaggugacgaacgccaccgagcugguccagaacuccagcaucggcgagaucugcgacagcccccacaagauccuggacggggagaacugcacccucaucgacgcccugcugggcgacccccagugcgacggcuuccagaacaagaagugggaccucuucguggagcgguccaaggccuacuccaacugcuaccccuacgacgugccggacuacgcgagccugcgcucccuggucgccagcuccgggacccucgaguucaacaacgagagcuucaacuggacgggcgugacccagaacgggaccuccagcgccugcauccggcgcuccagcuccagcuucuucucccggcugaacuggcugacccaccucaacuacgccuaccccgcgcugaacgugacgaugcccaacaacgagcaguucgacaagcuguacaucuggggcguccaccaccccgggaccgacaaggaccagaucuuccucuacgcccagagcuccggccgcaucaccgugagcaccaagcggagccagcaggccgugaucccgaacaucggcucccgcccccggauccgcgacauccccagccggaucuccaucuacuggacgaucgucaagcccggggacauccugcugaucaacagcaccggcaaccucaucgccccgcgcggguacuucaagauccgguccggcaagagcuccaucaugcgcagcgacgcccccaucggcaagugcaaguccgagugcaucacccccaacgggagcauccccaacgacaagccguuccagaacgugaaccggaucaccuacggcgcgugcccccgcuacgugaagcacuccacgcugaagcuggccaccgggaugcggaacguccccgagaagcagacccgcggcaucuucggggccaucgccggcuucaucgagaacggcugggaggggaugguggacggcugguacggguuccggcaccagaacagcgagggccgcgggcaggccgcggaccucaaguccacccaggccgccaucgaccagaucaacggcaagcugaaccggcugaucggcaagacgaacgagaaguuccaccagaucgagaaggaguucagcgagguggaggggcgcauccaggaccucgagaaguacgucgaggacaccaagaucgaccugugguccuacaacgccgagcugcucguggcccuggagaaccagcacaccaucgaccugaccgacagcgagaugaacaagcuguucgagaagacgaagaagcagcuccgcgagaacgcggaggacaugggcaacgggugcuucaagaucuaccacaagugcgacaacgccugcaucggcuccauccggaacgggaccuacgaccacaacguguaccgcgacgaggcccugaacaaccgguuccagaucaagggcgucgagcucaagagcggcuacaaggacuggauccuguggaucuccuucgccaucagcugcuuccugcucugcguggcccugcugggguucaucaugugggcgugccagaagggcaacauccgcugcaacaucugcaucuga

SEQ ID NO: 77648 - RNA, 1701 nt, Artificial Sequence; identical to SEQ ID NO: 77352
  derived and/or modified CDS sequence (opt1) from hemagglutinin__InfluenzaA__ALN39678

SEQ ID NO: 77649 - RNA, 1701 nt, Artificial Sequence
  derived and/or modified CDS sequence (opt1) from hemagglutinin__InfluenzaA__ALN39679
augaagaccaucaucgcccugggcuacauccucugccugguguucgcccagaagauccccgggaacgacaacagcaccgcgacgcugugccucggccaccacgccgucccgaacgggaccguggugaagaccaucaccaacgaccgcaucgaggucacgaacgccaccgagcuggugcagaacuccagcaucggcgagaucugcgacagcccccacaagauccuggacggggagaacugcacccucaucgacgcccugcugggcgacccccagugcgacggcuuccagaacaagaagugggaccucuucguggagcgguccaaggccuacuccaacugcuaccccuacgacgucccggacuacgcgagccugcgcucccugguggccagcuccgggacccucgaguucaacaacgagagcuucaacuggacgggcgugacccagaacgggaccuccagcgccugcauccggcgcuccagcuccagcuucuucucccggcugaacuggcugacccaccucaacuacacguaccccgcccugaacgucaccaugcccaacaacgagcaguucgacaagcuguacaucuggggcgugcaccaccccgggaccgacaaggaccagaucuuccucuacgcgcagagcuccggccgcaucaccgugagcacgaagcggagccagcaggccgucaucccgaacaucggcucccgcccccggauccgcgacauccccagccggaucuccaucuacuggaccaucgugaagcccggggacauccugcugaucaacagcaccggcaaccucaucgccccgcgcggguacuucaagauccgguccggcaagagcuccaucaugcgcagcgacgcccccaucggcaagugcaaguccgagugcaucacccccaacgggagcauccccaacgacaagccguuccagaacgugaaccggaucacguacggcgccugcccccgcuacgucaagcacuccacccugaagcuggcgaccgggaugcggaacgugcccgagaagcagacccgcggcaucuucggggccaucgccggcuucaucgagaacggcugggaggggaugguggacggcugguacggguuccggcaccagaacagcgagggccgcgggcaggccgccgaccucaaguccacgcaggcggccaucgaccagaucaacggcaagcugaaccggcugaucggcaagaccaacgagaaguuccaccagaucgagaaggaguucagcgaggucgaggggcgcauccaggaccucgagaaguacguggaggacaccaagaucgaccugugguccuacaacgccgagcugcucguggcccuggagaaccagcacaccaucgaccugacggacagcgagaugaacaagcuguucgagaagaccaagaagcagcuccgcgagaacgccgaggacaugggcaacgggugcuucaagaucuaccacaagugcgacaacgcgugcaucggcuccauccggaacgggaccuacgaccacaacgucuaccgcgacgaggcccugaacaaccgguuccagaucaagggcguggagcucaagagcggcuacaaggacuggauccuguggaucuccuucgccaucagcugcuuccugcucugcguggcccugcugggguucaucaugugggccugccagaagggcaacauccgcugcaacaucugcaucuga

SEQ ID NO: 77650 - RNA, 1701 nt, Artificial Sequence; identical to SEQ ID NO: 77352
  derived and/or modified CDS sequence (opt1) from hemagglutinin__InfluenzaA__ALN39680

SEQ ID NO: 77651 - RNA, 1701 nt, Artificial Sequence; identical to SEQ ID NO: 77352
  derived and/or modified CDS sequence (opt1) from hemagglutinin__InfluenzaA__ALN39681

SEQ ID NO: 77652 - RNA, 1701 nt, Artificial Sequence; identical to SEQ ID NO: 77352
  derived and/or modified CDS sequence (opt1) from hemagglutinin__InfluenzaA__ALN39682

SEQ ID NO: 77653 - RNA, 1701 nt, Artificial Sequence; identical to SEQ ID NO: 77352
  derived and/or modified CDS sequence (opt1) from hemagglutinin__InfluenzaA__ALN39683

SEQ ID NO: 77654 - RNA, 1701 nt, Artificial Sequence; identical to SEQ ID NO: 77352
  derived and/or modified CDS sequence (opt1) from hemagglutinin__InfluenzaA__ALN39684

SEQ ID NO: 77655 - RNA, 1701 nt, Artificial Sequence; identical to SEQ ID NO: 77352
  derived and/or modified CDS sequence (opt1) from hemagglutinin__InfluenzaA__ALN39685

SEQ ID NO: 77656 - RNA, 1701 nt, Artificial Sequence
  derived and/or modified CDS sequence (opt1) from hemagglutinin__InfluenzaA__ALN39686
augaagaccaucaucgcccugggcuacauccucugccuggccuucgcgcagaagauccccgggaacgacaacagcaccgccacgcugugccucggccaccacgccgugccgaacgggaccaucgucaagaccaucaccaacgaccgcaucgaggugacgaacgccaccgagcuggugcagaacuccagcaucggcgagaucugcgacagcccccacaagauccuggacggggagaacugcacccucaucgacgcccugcugggcgacccccagugcgacggcuuccagaacaagaagugggaccucuucgucgagcgguccaaggcguacuccaacugcuaccccuacgacgugccggacuacaccagccugcgcucccugguggccagcuccgggacgcucgaguucaacaacgagagcuucaacuggaccggcgucacccagaacgggaccuccagcgccugcauccggcgcuccagcuccagcuucuucucccggcugaacuggcugacgcaccucaacuacaccuaccccgcccugaacgugaccaugcccaacaacgagcaguucgacaagcuguacaucuggggcgugcaccaccccgggaccgacaaggaccagaucuuccucuacgcgcagagcuccggccgcaucacggucagcaccaagcggagccagcaggccgugaucccgaacaucggcucccgcccccggauccgcgacauccccagccggaucuccaucuacuggaccaucgugaagcccggggacauccugcugaucaacagcaccggcaaccucaucgccccgcgcggguacuucaagauccgguccggcaagagcuccaucaugcgcagcgacgcccccaucggcaagugcaaguccgagugcaucacgcccaacgggagcauccccaacgacaagccguuccagaacgucaaccggaucaccuacggcgccugcccccgcuacgugaagcacuccacccugaagcuggcgaccgggaugcggaacgugcccgagaagcagacgcgcggcaucuucggggccaucgccggcuucaucgagaacggcugggaggggauggucgacggcugguacggguuccggcaccagaacagcgagggccgcgggcaggccgccgaccucaaguccacccaggcggccaucgaccagaucaacggcaagcugaaccggcugaucggcaagaccaacgagaaguuccaccagaucgagaaggaguucagcgagguggaggggcgcauccaggaccucgagaaguacguggaggacaccaagaucgaccugugguccuacaacgccgagcugcucgucgcccuggagaaccagcacacgaucgaccugaccgacagcgagaugaacaagcuguucgagaagaccaagaagcagcuccgcgagaacgccgaggacaugggcaacgggugcuucaagaucuaccacaagugcgacaacgcgugcaucggcuccauccggaacgggaccuacgaccacaacguguaccgcgacgaggcccugaacaaccgguuccagaucaagggcguggagcucaagagcggcuacaaggacuggauccuguggaucuccuucgccaucagcugcuuccugcucugcgucgcccugcugggguucaucaugugggccugccagaagggcaacauccgcugcaacaucugcaucuga

SEQ ID NO: 77657 - RNA, 1701 nt, Artificial Sequence; identical to SEQ ID NO: 77352
  derived and/or modified CDS sequence (opt1) from hemagglutinin__InfluenzaA__ALN39687

SEQ ID NO: 77658 - RNA, 1701 nt, Artificial Sequence
  derived and/or modified CDS sequence (opt1) from hemagglutinin__InfluenzaA__ALN39688
augaagaccaucaucgcccugggcuacauccucugccugguguucgcccagaagauccccgggaacgacaacagcaccgcgacgcugugccucggccaccacgccgucccgaacgggaccaucgugaagaccaucaccaacgaccgcaucgaggugacgaacgccaccgagcugguccagaacuccagcaucggcgagaucugcgacagcccccacaagauccuggacggggagaacugcacccucaucgacgcccugcugggcgacccccagugcgacggcuuccagaacaagaagugggaccucuucguggagcgguccaaggccuacuccaacugcuaccccuacgacgugccggacuacgcgagccugcgcucccuggucgccagcuccgggacccucgaguucaacaacgagagcuucaacuggacgggcgugacccagaacgggaccuccagcgccugcauccggcgcuccagcuccagcuucuucucccggcugaacuggcugacccaccucaacuacaucuaccccgcccugaacgugacgaugcccaacaacgagcaguucgacaagcuguacaucuggggcguccaccaccccgggaccgacaaggaccagaucuuccucuacgcgcagagcuccggccgcaucaccgugagcaccaagcggagccagcaggccgugaucccgaacaucggcucccgcccccggauccgcgacauccccagccggaucuccaucuacuggacgaucgucaagcccggggacauccugcugaucaacagcaccggcaaccucaucgccccgcgcggguacuucaagauccgguccggcaagagcuccaucaugcgcagcgacgcccccaucggcaagugcaaguccgagugcaucacccccaacgggagcauccccaacgacaagccguuccagaacgugaaccggaucaccuacggcgccugcccccgcuacgugaagcacuccacgcugaagcuggcgaccgggaugcggaacguccccgagaagcagacccgcggcaucuucggggccaucgccggcuucaucgagaacggcugggaggggaugguggacggcugguacggguuccggcaccagaacagcgagggccgcgggcaggccgccgaccucaaguccacccaggcggccaucgaccagaucaacggcaagcugaaccggcugaucggcaagacgaacgagaaguuccaccagaucgagaaggaguucagcgagguggaggggcgcauccaggaccucgagaaguacgucgaggacaccaagaucgaccugugguccuacaacgccgagcugcucguggcccuggagaaccagcacaccaucgaccugaccgacagcgagaugaacaagcuguucgagaagacgaagaagcagcuccgcgagaacgccgaggacaugggcaacgggugcuucaagaucuaccacaagugcgacaacgcgugcaucggcuccauccggaacgggaccuacgaccacaacguguaccgcgacgaggcccugaacaaccgguuccagaucaagggcgucgagcucaagagcggcuacaaggacuggauccuguggaucuccuucgccaucagcugcuuccugcucugcguggcccugcugggguucaucaugugggccugccagaagggcaacauccgcugcaacaucugcaucuga

SEQ ID NO: 77659 - RNA, 1701 nt, Artificial Sequence
  derived and/or modified CDS sequence (opt1) from hemagglutinin__InfluenzaA__ALN39689
augaagaccaucaucgcccugggcuacauccucugccugguguucgcccagaagauccccgggaacgacaacagcaccgcgacgcugugccucggccaccacgccgucccgaacgggaccaucgugaagaccaucaccaacgaccgcaucgaggugacgaacgccaccgagcugguccagaacuccagcaucggcgagaucugcgacagcccccacaagauccuggacggggagaacugcacccucaucgacgcccugcugggcgacccccagugcgacggcuuccagaacaagaagugggaccucuucguggagcgguccaaggccuacuccaacugcuaccccuacgacgugccggacuacgcgagccugcgcucccuggucgccagcuccgggacccucgaguucaacaacgagagcuucaacuggacgggcgugacccagaacgggaccuccagcgccugcauccggcgcuccagcuccagcuucuucucccggcugaacuggcugacccaccucaacuacacguaccccgcccugaacgugaccaugcccaacaacgagcaguucgacaagcuguacaucuggggcguccaccaccccgggaccgacaaggaccagaucuuccucuacgcgcagagcuccggccgcaucaccgugagcacgaagcggagccagcaggccgugaucccgaacaucggcucccgcccccggauccgcgacauccccagccggaucuccaucuacuggaccaucgucaagcccggggacauccugcugauccacagcaccggcaaccucaucgccccgcgcggguacuucaagauccgguccggcaagagcuccaucaugcgcagcgacgcccccaucggcaagugcaaguccgagugcaucacccccaacgggagcauccccaacgacaagccguuccagaacgugaaccggaucacguacggcgccugcccccgcuacgugaagcacuccacccugaagcuggcgaccgggaugcggaacguccccgagaagcagacccgcggcaucuucggggccaucgccggcuucaucgagaacggcugggaggggaugguggacggcugguacggguuccggcaccagaacagcgagggccgcgggcaggccgccgaccucaaguccacgcaggcggccaucgaccagaucaacggcaagcugaaccggcugaucggcaagaccaacgagaaguuccaccagaucgagaaggaguucagcgagguggaggggcgcauccaggaccucgagaaguacgucgaggacaccaagaucgaccugugguccuacaacgccgagcugcucguggcccuggagaaccagcacaccaucgaccugacggacagcgagaugaacaagcuguucgagaagaccaagaagcagcuccgcgagaacgccgaggacaugggcaacgggugcuucaagaucuaccacaagugcgacaacgcgugcaucggcuccauccggaacgggaccuacgaccacaacguguaccgcgacgaggcccugaacaaccgguuccagaucaagggcgucgagcucaagagcggcuacaaggacuggauccuguggaucuccuucgccaucagcugcuuccugcucugcguggcccugcugggguucaucaugugggccugccagaagggcaacauccgcugcaacaucugcaucuga

SEQ ID NO: 77660 - RNA, 1701 nt, Artificial Sequence
  derived and/or modified CDS sequence (opt1) from hemagglutinin__InfluenzaA__ALN39690
augaagaccaucaucgcccugagcuacauccucugccugguguucgcccagaagcugcccggcaacgacaacuccaccgcgacgcucugccuggggcaccacgccgucccgaacggcaccaucgugaagaccaucaccaacgaccgcaucgaggugacgaacgccaccgagcugguccagaacagcuccaucggggagaucugcgacagcccccaccagauccucgacggcaagaacugcacccugaucgacgcccugcucggggacccccagugcgacggcuuccagaacaagaagugggaccuguucguggagcgguccaaggcccacagcaacugcuaccccuacgacgugccggacuacgcgucccugcgcagccucgucgccuccagcggcacccuggaguucaacaacgaguccuucaacugggccggggugacgcagaacggcaccagcuccagcugcauccggggguccaacagcuccuucuucagccgccugaacuggcucacccaccugaacuccaucuaccccgcccugaacgugaccaugcccaacaacgagcaguucgacaagcucuacaucuggggcguccaccaccccgggacggacaaggaccagaucuuccuguacgcgcagagcagcggccggaucaccguguccaccaagcgcagccagcaggccgugaucccgaacaucggcucccggccccgcauccgggacauccccagccgcaucuccaucuacuggaccaucgucaagcccggggacauccugcucaucaacagcacgggcaaccugaucgccccgcggggguacuucaagauccgcuccggcaagagcuccaucaugcggagcgacgcccccaucggcaagugcaaguccgagugcaucacccccaacgggagcauccccaacgacaagccguuccagaacgugaaccgcaucaccuacggcgccugcccccgguacgugaagcaguccacccugaagcucgcgacggggaugcgcaacguccccgagcggcagacccgcggcaucuucggggccaucgccggcuucaucgagaacggcugggaggggaugguggacggcugguacggguuccggcaccagaacagcgagggccgcgggcaggccgccgaccugaaguccacccaggcggccaucgaccagaucaacggcaagcugaaccggcucaucggcaagaccaacgagaaguuccaccagaucgagaaggaguucagcgagguggaggggcgcauccaggaccuggagaaguacgucgaggacacgaagaucgaccugugguccuacaacgccgagcuccugguggcccuggagaaccagcacaccaucgaccucaccgacagcgagaugaacaagcuguucgagaagaccaagaagcagcugcgcgagaacgccgaggacaugggcaacgggugcuucaagaucuaccacaagugcgacaacgcgugcaucggcuccauccggaacgggacguacgaccacaacguguaccgcgacgaggcccucaacaaccgguuccagaucaagggcgucgagcucaagagcggcuacaaggacuggauccuguggaucagcuucgccaucuccugcuuccugcugugcguggcccugcucggguucaucaugugggccugccagaagggcaacauccgcugcaacaucugcaucuga

SEQ ID NO: 77661 - RNA, 1701 nt, Artificial Sequence
  derived and/or modified CDS sequence (opt1) from hemagglutinin__InfluenzaA__ALN39691
augaagaccaucaucgcccugagcuacauccucugccugguguucgcccagaagcugcccggcaacgacaacuccaccgcgacgcucugccuggggcaccacgccgucccgaacggcaccaucgugaagaccaucaccaacgaccgcaucgaggugacgaacgccaccgagcugguccagaacagcuccaucggggagaucugcgacagcccccaccagauccucgacggcaagaacugcacccugaucgacgcccugcucggggacccccagugcgacggcuuccagaacaagaagugggaccuguucguggagcgguccaaggcccacagcaacugcuaccccuacgacgugccggacuacgcgucccugcgcagccucgucgccuccagcggcacccuggaguucaacaacgaguccuucaacugggccggggugacgcagaacggcaccagcuccagcugcauccggggguccaacagcuccuucuucagccgccugaacuggcucacccaccugaacuccaaguaccccgcccugaacgugaccaugcccaacaacgagcaguucgacaagcucuacaucuggggcguccaccaccccgggacggacaaggaccagaucuuccuguacgcgcagccgagcggccggaucaccgugagcaccaagcgcucccagcaggccgugauccccaacaucggcagccggccccgcauccgggacauccccucccgcaucagcaucuacuggaccaucgucaagccgggggacauccugcucaucaacuccacgggcaaccugaucgcgccccggggguacuucaagauccgcagcggcaaguccagcaucaugcgguccgacgcccccaucggcaagugcaagagcgagugcaucacccccaacggguccaucccgaacgacaagcccuuccagaacgugaaccgcaucaccuacggcgccugcccccgguacgugaagcagagcacccugaagcucgccacggggaugcgcaacguccccgagaagcagacccggggcaucuucggggccaucgccggcuucaucgagaacggcugggaggggaugaaggacggcugguacggguuccgccaccagaacuccgagggccgggggcaggccgccgaccucaagagcacccaggcggccaucgaccagaucaacggcaagcugaaccgccugaucggcaagaccaacgagaaguuccaccagaucgagaaggaguucuccgagguggaggggcggauccaggaccuggagaaguacguggaggacacgaagaucgaccuguggagcuacaacgccgagcuccuggucgcccuggagaaccagcacaccaucgaccucaccgacuccgagaugaacaagcuguucgagaagaccaagaagcagcugcgcgagaacgccgaggacaugggcaacgggugcuucaagaucuaccacaagugcgacaacgcgugcaucggcagcauccgcaacgggacguacgaccacgacguguaccgggacgaggcccucaacaaccgcuuccagaucaagggcguggagcugaaguccggcuacaaggacuggauccuguggaucagcuucgccaucagcugcuuccuccugugcgucgcccugcucggguucaucaugugggccugccagaagggcaacauccggugcaacaucugcaucuga

SEQ ID NO: 77662 - RNA, 1701 nt, Artificial Sequence; identical to SEQ ID NO: 77352
  derived and/or modified CDS sequence (opt1) from hemagglutinin__InfluenzaA__ALN39692

SEQ ID NO: 77663 - RNA, 1701 nt, Artificial Sequence; identical to SEQ ID NO: 77352
  derived and/or modified CDS sequence (opt1) from hemagglutinin__InfluenzaA__ALN39693

SEQ ID NO: 77664 - RNA, 1701 nt, Artificial Sequence; identical to SEQ ID NO: 77352
  derived and/or modified CDS sequence (opt1) from hemagglutinin__InfluenzaA__ALN39694

SEQ ID NO: 77665 - RNA, 1701 nt, Artificial Sequence; identical to SEQ ID NO: 77352
  derived and/or modified CDS sequence (opt1) from hemagglutinin__InfluenzaA__ALN39695

SEQ ID NO: 77666 - RNA, 1701 nt, Artificial Sequence; identical to SEQ ID NO: 77352
  derived and/or modified CDS sequence (opt1) from hemagglutinin__InfluenzaA__ALN39696

SEQ ID NO: 77667 - RNA, 1701 nt, Artificial Sequence; identical to SEQ ID NO: 77022
  derived and/or modified CDS sequence (opt1) from hemagglutinin__InfluenzaA__ALN39697

SEQ ID NO: 77668 - RNA, 1701 nt, Artificial Sequence
  derived and/or modified CDS sequence (opt1) from hemagglutinin__InfluenzaA__ALN39698
augaagaccaucaucgcccugagccacauccucugccugguguucgcccagaagauccccggcaacgacaacuccaccgcgacgcugugccucgggcaccacgccgucccgaacggcaccaucgugaagaccaucaccaacgaccgcaucgaggugacgaacgccaccgagcugguccagaacagcuccaucggggagaucugcgacagcccccaccagauccuggacggcgagaacugcacccucaucgacgcccugcugggggacccccagugcgacggcuuccagaacaagaagugggaccucuucguggagcgguccaaggccuacagcaacugcuaccccuacgacgugccggacuacgcgucccugcgcagccuggucgccuccagcggcacccucgaguucaacaacgaguccuucaacuggacgggggugacccagaacggcaccagcuccgccugcauccggcgcagcuccagcuccuucuucagccggcugaacuggcugacccaccucaacuacacguaccccgcccugaacgugaccaugcccaacaacgagcaguucgacaagcuguacaucuggggcguccaccaccccgggaccgacaaggaccagaucuuccucuacgcgcaguccagcgggcgcaucaccgugagcacgaagcggucccagcaggccgugaucccgaacaucggcagccgcccccggauccgcgacauccccucccggaucagcaucuacuggaccaucgucaagcccggcgacauccugcugaucaacuccaccgggaaccucaucgccccgcgcggcuacuucaagauccggagcgggaaguccagcaucaugcgcuccgacgcccccaucggcaagugcaagagcgagugcaucacccccaacggcuccauccccaacgacaagccguuccagaacgugaaccggaucacguacggggccugcccccgcuacgugaagcacagcacccugaagcuggcgaccggcaugcggaacguccccgagaagcagacccgcgggaucuucggcgccaucgccggguucaucgagaacggcugggagggcaugauggacgggugguacggcuuccggcaccagaacuccgaggggcgcggccaggccgccgaccucaagagcacgcaggcggccaucgaccagaucaacgggaagcugaaccggcugaucggcaagaccaacgagaaguuccaccagaucgagaaggaguucuccgagguggagggccgcauccaggaccucgagaaguacguggaggacaccaagaucgaccuguggagcuacaacgccgagcugcucgucgcccuggagaaccagcacaccaucgaccugacggacuccgagaugaacaagcuguucgagaagaccaagaagcagcuccgcgagaacgccgaggacauggggaacggcugcuucaagaucuaccacaagugcgacaacgcgugcauggggagcauccggaacggcaccuacgaccacaacguguaccgcaacgaggcccugaacaaccgguuccagaucaaggggguggagcucaaguccggcuacaaggacuggauccuguggaucagcuucgccaucagcugcuuccugcucugcgucgcccugcugggcuucaucaugugggccugccagaaggggaacauccgcugcaacaucugcaucuga

SEQ ID NO: 77669 - RNA, 1701 nt, Artificial Sequence
  derived and/or modified CDS sequence (opt1) from hemagglutinin__InfluenzaA__ALN39700
augaagaccaucaucgcccugagcuacauccucugccugguguucgcccagaagauccccggcaacgacaacuccaccgcgacgcugugccucgggcaccacgccgucccgaacggcaccaucgugaagaccaucaccaacgaccgcaucgaggugacgaacgccaccgagcugguccagaacagcuccaucggggagaucugcgacagcccccaccagauccuggacggcgagaacugcacccucaucgacgcccugcugggggacccccagugcgacggcuuccagaacaagaagugggaccucuucguggagcgguccaaggccuacagcaacugcuaccccuacgacgugccggacuacgcgucccugcgcagccuggucgccuccagcggcacccucgaguucaacaacgaguccuucaacuggacgggggugacccagaacggcaccagcuccgccugcauccggcgcagcuccagcuccuucuucagccggcugaacuggcugacccaccucaacuacacguaccccgcccugaacgugaccaugcccaacaacgagcaguucgacaagcuguacaucuggggcguccaccaccccgggaccgacaaggaccagaucuuccucuacgcgcaguccagcgggcgcaucaccgugagcacgaagcggucccagcaggccgugaucccgaacaucggcagccgcccccggauccgcgacauccccucccggaucagcaucuacuggaccaucgucaagcccggcgacauccugcugaucaacuccaccgggaaccucaucgccccgcgcggcuacuucaagauccggagcgggaaguccagcaucaugcgcuccgacgcccccaucggcaagugcaagagcgagugcaucacccccaacggcuccauccccaacgacaagccguuccagaacgugaaccggaucacguacggggccugcccccgcuacgugaagcacagcacccugaagcuggcgaccggcaugcggaacguccccgagaagcagacccgcgggaucuucggcgccaucgccggguucaucgagaacggcugggagggcaugguggacgggugguacggcuuccggcaccagaacuccgaggggcgcggccaggccgccgaccucaagagcacgcaggcggccaucgaccagaucaacgggaagcugaaccggcugaucggcaagaccaacgagaaguuccaccagaucgagaaggaguucuccgagguggagggccgcauccaggaccucgagaaguacgucgaggacaccaagaucgaccuguggagcuacaacgccgagcugcucguggcccuggagaaccagcacaccaucgaccugacggacuccgagaugaacaagcuguucgagaagaccaagaagcagcuccgcgagaacgccgaggacauggggaacggcugcuucaagaucuaccacaagugcgacaacgcgugcaucgggagcauccggaacggcaccuacgaccacaacguguaccgcgacgaggcccugaacaaccgguuccagaucaagggggucgagcucaaguccggcuacaaggacuggauccuguggaucagcuucgccaucagcugcuuccugcucugcguggcccugcugggcuucaucaugugggccugccagaaggggaacaucaagugcaacaucugcaucuga

SEQ ID NO: 77670 - RNA, 1701 nt, Artificial Sequence; identical to SEQ ID NO: 77071
  derived and/or modified CDS sequence (opt1) from hemagglutinin__InfluenzaA__ALN39701

SEQ ID NO: 77671 - RNA, 1701 nt, Artificial Sequence
  derived and/or modified CDS sequence (opt1) from hemagglutinin__InfluenzaA__ALN39702
augaagaccaucaucgcccugagcuacauccucugccugguguucgcccagaagauccccggcaacgacaacuccaccgcgacgcugugccucgggcaccacgccgucccgaacggcaccaucgugaagaccaucaccaacgaccgcaucgaggugacgaacgccaccgagcugguccagaacagcuccaucggggagaucugcgacagcccccaccagauccuggacggcgagaacugcacccucaucgacgcccugcugggggacccccagugcgacggcuuccagaacaagaagugggaccucuucguggagcgguccaaggccuacagcaacugcuaccccuacgacgugccggacuacgcgucccugcgcagccuggucgccuccagcggcacccucgaguucaacaacgaguccuucaacuggacgggggugacccagaacggcaccagcuccgccugcauccgcaagagcuccagcuccuucuucagccggcugaacuggcugacccaccucaacuacacguaccccgcccugaacgugaccaugcccaacaacgagcaguucgacaagcuguacaucuggggcguccaccaccccgggaccgacaaggaccagaucuuccucuacgcgcgguccagcgggcgcaucaccgugagcacgaagcggucccagcaggccgugaucccgaacaucggcagccgcccccggauccgcgacauccccucccggaucagcaucuacuggaccaucgucaagcccggcgacauccugcugaucaacuccaccgggaaccucaucgccccgcgcggcuacuucaagauccggagcgggaaguccagcaucaugcgcuccgacgcccccaucggcaagugcaagagcgagugcaucacccccaacggcuccauccccaacgacaagccguuccagaacgugaaccggaucacguacggggccugcccccgcuacgugaagcacagcacccugaagcuggcgaccggcaugcggaacguccccgagaagcagacccgcgggaucuucggcgccaucgccggguucaucgagaacggcugggagggcaugguggacgggugguacggcuuccggcaccagaacuccgaggggcgcggccaggccgccgaccucaagagcacgcaggcggccaucgaccagaucaacgggaagcugaaccggcugaucggcaagaccaacgagaaguuccaccagaucgagaaggaguucuccgagguggagggccgcauccaggaccucgagaaguacgucgaggacaccaagaucgaccuguggagcuacaacgccgagcugcucguggcccuggagaaccagcacaccaucgaccugacggacuccgagaugaacaagcuguucgagaagaccaagaagcagcuccgcgagaacgccgaggacauggggaacggcugcuucaagaucuaccacaagugcgacaacgcgugcaucgggagcauccggaacggcaccuacgaccacaacguguaccgcgacgaggcccugaacaaccgguuccagaucaagggggucgagcucaaguccggcuacaaggacuggauccuguggaucagcuucgccaucagcugcuuccugcucugcguggcccugcugggcuucaucaugugggccugccagaaggggaacauccgcugcuccaucugcaucuga

SEQ ID NO: 77672 - RNA, 1701 nt, Artificial Sequence
  derived and/or modified CDS sequence (opt1) from hemagglutinin__InfluenzaA__ALN39703
augaagaccaucaucgcccugagcuacauccucugccugguguucgcccagaagauccccggcaacgacgacuccaccgcgacgcugugccucgggcaccacgccgucccgaacggcaccaucgugaagaccaucaccaacgaccgcaucgaggugacgaacgccaccgagcugguccagaacagcuccaucggggagaucugcgacagcccccaccagauccuggacggcgagaacugcacccucaucgacgcccugcugggggacccccagugcgacggcuuccagaacaagaagugggaccucuucguggagcgguccaaggccuacagcaacugcuaccccuacgacgugccggacuacgcgucccugcgcagccuggucgccuccagcggcacccucgaguucaacaacgaguccuucaacuggacgggggugacccagaacggcaccagcuccgccugcauccggcgcagcuccagcuccuucuucagccggcugaacuggcugacccaccucaacuacacguaccccgcccugaacgugaccaugcccaacaacgagcaguucgacaagcuguacaucuggggcguccaccaccccgggaccgacaaggaccagaucuuccucuacgcgcaguccagcgggcgcaucaccgugagcacgaagcggucccagcaggccgugaucccgaacaucggcagccgcccccggauccgcgacauccccucccggaucagcaucuacuggaccaucgucaagcccggcgacauccugcugaucaacuccaccgggaaccucaucgccccgcgcggcuacuucaagauccggagcgggaaguccagcaucaugcgcuccgacgcccccaucggcaagugcaagagcgagugcaucacccccaacggcuccauccccaacgacaagccguuccagaacgugaaccggaucacguacggggccugcccccgcuacgugaagcacagcacccugaagcuggcgaccggcaugcggaacguccccgagaagcagacccgcgggaucuucggcgccaucgccggguucaucgagaacggcugggagggcaugguggacgggugguacggcuuccggcaccagaacuccgaggggcgcggccaggccgccgaccucaagagcacgcaggcggccaucgaccagaucaacgggaagcugaaccggcugaucggcaagaccaacgagaaguuccaccagaucgagaaggaguucuccgagguggagggccgcauccaggaccucgagaaguacgucgaggacaccaagaucgaccuguggagcuacaacgccgagcugcucguggcccuggagaaccagcacaccaucgaccugacggacuccgagaugaacaagcuguucgagaagaccaagaagcagcuccgcgagaacgccgaggacauggggaacggcugcuucaagaucuaccacaagugcgacaacgcgugcaucgggagcauccggaacggcaccuacgaccacaacguguaccgcgacgaggcccugaacaaccgguuccagaucaagggggucgagcucaaguccggcuacaaggacuggauccuguggaucagcuucgccaucagcugcuuccugcucugcguggcccugcugggcuucaucaugugggccugccagaaggggaacauccgcugcaacaucugcaucuga

SEQ ID NO: 77673 - RNA, 1701 nt, Artificial Sequence; identical to SEQ ID NO: 77071
  derived and/or modified CDS sequence (opt1) from hemagglutinin__InfluenzaA__ALN39704

SEQ ID NO: 77674 - RNA, 1701 nt, Artificial Sequence; identical to SEQ ID NO: 76465
  derived and/or modified CDS sequence (opt1) from hemagglutinin__InfluenzaA__ALN39705

SEQ ID NO: 77675 - RNA, 1701 nt, Artificial Sequence
  derived and/or modified CDS sequence (opt1) from hemagglutinin__InfluenzaA__ALN39706
augaagaccaucaucgcccugagcuacauccucugccugguguucgcccagaagcugcccggcaacgacaacuccaccgcgacgcucugccuggggcaccacgccgucccgaacggcaugaucgugaagaccaucaccaacgaccgcaucgaggugaccaacgccacggagcugguccagaacagcuccaucggggagaucugcgacagcccccaccagauccucgacggcaagaacugcacccugaucgacgcccugcucggggacccccagugcgacgacuuccagaacaagcggugggaccuguucguggagcgcuccaaggccuacagcaacugcuaccccuacgacgugccggacuacgcgucccugcggagccucgucgccuccagcggcacccuggaguucaacgacgaguccuucaacugggccggcgugacccagaacgggacgagcuccgccugcauccgcggcagcaacuccagcuucuucucccggcugaacuggcucacccacagcaacuucaaguaccccgcgcugaacgugaccaugcccaacaacgagcaguucgacaagcuguacaucuggggcguccaccaccccgggaccgacaaggaccagaucuuccucuacgcccaguccagcgggcgcaucacggugagcaccaagcggucccagcaggccgugaucccgaacaucggcagccgcccccggauccgcaacauccccucccggaucagcaucuacuggaccaucgucaagcccggcgacauccugcugaucaacuccaccgggaaccucaucgccccgcgcggcuacuucaagauccagagcgggaaguccagcaucaugcgguccgacgcccccaucggcaagugcaagagcgagugcaucacgcccaacggcuccauccccaacgacaagccguuccagaacgugaaccgcaucaccuacggggcgugcccccgguacgugaagcagagcacccugaagcuggccaccggcaugcgcaacguccccgagaagcagacgcgggggaucuucggcgccaucgccggguucaucgagaacggcugggagggcaugaaggacgggugguacggcuuccgccaccagaacuccgaggggcggggccaggccgcggaccucaagagcacccaggccgccaucgaccagaucaacgggaagcugaaccgccugaucggcaagaccaacgagaaguuccaccagaucgagaaggaguucuccgagguggagggccggauccaggaccucgagaaguacguggaggacaccaagaucgaccuguggagcuacaacgccgagcugcucgucgcccuggagaaccagcacacgaucgaccugaccgacuccgagaugaacaagcuguucgagaagaccaagaagcagcuccgcgagaacgcggaggacauggggaacggcugcuucaagaucuaccacaagugcgacaacgccugcaucgggagcauccgcaacggcaccuacgaccacgacguguaccgggacgaggcccugaacaaccgcuuccagaucaaggggguggagcucaaguccggcuacaaggacuggauccuguggaucagcuucgccaucagcugcuuccugcucugcgucgcccugcugggcuucaucaugugggcgugccagaaggggaacauccggugcaacaucugcaucuga

SEQ ID NO: 77676 - RNA, 1701 nt, Artificial Sequence; identical to SEQ ID NO: 76465
  derived and/or modified CDS sequence (opt1) from hemagglutinin__InfluenzaA__ALN39707

SEQ ID NO: 77677 - RNA, 1701 nt, Artificial Sequence; identical to SEQ ID NO: 77071
  derived and/or modified CDS sequence (opt1) from hemagglutinin__InfluenzaA__ALN39708

SEQ ID NO: 77678 - RNA, 1701 nt, Artificial Sequence
  derived and/or modified CDS sequence (opt1) from hemagglutinin__InfluenzaA__ALN39709
augaagaccaucaucgcccugagcuacauccucugccugguguucgcccagaagcugcccggcaacgacaacuccaccgcgacgcucugccuggggcaccacgccgucccgaacggcaccaucgugaagaccaucaccaacgaccgcaucgaggugacgaacgccaccgagcugguccagaacagcuccaucggggagaucugcgacagcccccaccagauccucgacggcgagaacugcacccugaucgacgcccugcucggggacccccagugcgacggcuuccagaacaagaagugggaccuguucguggagcgguccaaggccuacagcaacugcuaccccuacgacgugccggacuacgcgucccugcgcagccucgucgccuccagcggcacccuggaguucaacaacgaguccuucaacugggccggggugacgcagaacggcaccagcuccagcugcaugcggggguccaacagcuccuucuucagccgccugaacuggcucacccaccugaacuccaaguaccccgcccugaacgugaccaugcccaacaacgagcaguucgacaagcucuacaucuggggcguccaccaccccgggacggacaaggaccagaucuuccuguacgcgcagagcagcggccggaucaccguguccaccaagcgcagccagcaggccgugaccccgaacaucggcucccggccccgcauccgggacauccccagccgcaucuccaucuacuggacgaucgucaagcccggggacauccugcucaucaacagcaccggcaaccugaucgccccgcggggguacuucaagauccgcuccggcaagagcuccaucaugcggagcgacgcccccaucggcaagugcaaguccgagugcaucacccccaacgggagcauccccaacgacaagccguuccagaacgugaaccgcaucaccuacggcgccugcccccgguacgugaagcaguccacgcugaagcucgcgaccgggaugcgcaacguccccgagcggcagacccgcggcaucuucggggccaucgccggcuucaucgagaacggcugggaggggaugguggacggcugguacggguuccggcaccagaacagcgagggccgcgggcaggccgccgaccugaaguccacccaggcggccaucgaccagaucaacggcaagcugaaccggcucaucggcaagacgaacgagaaguuccaccagaucgagaaggaguucagcgagguggaggggcgcauccaggaccuggagaaguacgucgaggacaccaagaucgaccugugguccuacaacgccgagcuccugguggcccuggagaaccagcacaccaucgaccucaccgacagcgagaugaacaagcuguucgagaagacgaagaagcagcugcgcgagaacgccgaggacaugggcaacgggugcuucaagaucuaccacaagugcgacaacgcgugcaucggcuccauccggaacgggaccuacgaccacgacguguaccgcgacgaggcccucaacaaccgguuccagaucaagggcgucgagcucaagagcggcuacaaggacuggauccuguggaucagcuucgccaucuccugcuuccugcugugcguggcccugcucggguucaucaugugggccugccagaagggcaacauccgcugcaacaucugcaucuga

SEQ ID NO: 77679 - RNA, 1701 nt, Artificial Sequence; identical to SEQ ID NO: 77395
  derived and/or modified CDS sequence (opt1) from hemagglutinin__InfluenzaA__ALN39710

SEQ ID NO: 77680 - RNA, 1701 nt, Artificial Sequence; identical to SEQ ID NO: 77071
  derived and/or modified CDS sequence (opt1) from hemagglutinin__InfluenzaA__ALN39711

SEQ ID NO: 77681 - RNA, 1701 nt, Artificial Sequence; identical to SEQ ID NO: 76465
  derived and/or modified CDS sequence (opt1) from hemagglutinin__InfluenzaA__ALN39712

SEQ ID NO: 77682 - RNA, 1701 nt, Artificial Sequence
  derived and/or modified CDS sequence (opt1) from hemagglutinin__InfluenzaA__ALN39713
augaagaccaucaucgcccugagcuacauccucugccugguguucgcccagaagauccccggcaacgacaacuccaccgcgacgcugugccucgggcaccacgccgucccgaacggcaccaucgugaagaccaucaccaacgaccgcaucgaggugacgaacgccaccgagcugguccagaacagcuccaucggggagaucugcgacagcccccaccagauccuggacggcgagaacugcacccucaucgacgcccugcugggggacccccagugcgacggcuuccagaacaagaagugggaccucuucguggagcgguccaaggccuacagcaacugcuaccccuacgacgugccggacuacgcgucccugcgcagccuggucgccuccagcggcacccucgaguucaacaacgaguccuucaacuggacgggggugacccagaacggcaccagcuccgccugcauccgggggagcuccagcuccuucuucagccgccugaacuggcugacccaccucaacuacacguaccccgcccugaacgugaccaugcccaacaacgagcaguucgacaagcuguacaucuggggcguccaccaccccgggaccgacaaggaccagaucuuccucuacgcgcaguccagcggccggaucaccgugagcacgaagcgcucccagcaggccgugaucccgaacaucggcagccggccccgcauccgggacauccccucccgcaucagcaucuacuggaccaucgucaagcccggggacauccugcugaucaacuccaccggcaaccucaucgccccgcggggguacuucaagauccgcagcggcaaguccagcaucaugcgguccgacgcccccaucggcaagugcaagagcgagugcaucacccccaacggguccauccccaacgacaagccguuccagaacgugaaccgcaucacguacggcgccugcccccgguacgugaagcacagcacccugaagcuggcgaccgggaugcgcaacguccccgagaagcagacccggggcaucuucggggccaucgccggcuucaucgagaacggcugggaggggaugguggacggcugguacggguuccgccaccagaacuccgagggccgggggcaggccgccgaccucaagagcacgcaggcggccaucgaccagaucaacggcaagcugaaccgccugaucggcaagaccaacgagaaguuccaccagaucgagaaggaguucuccgagguggaggggcggauccaggaccucgagaaguacgucgaggacaccaagaucgaccuguggagcuacaacgccgagcugcucguggcccuggagaaccagcacaccaucgaccugacggacuccgagaugaacaagcuguucgagaagaccaagaagcagcuccgcgagaacgccgaggacaugggcaacgggugcuucaagaucuaccacaagugcgacaacgcgugcaucggcagcauccgcaacgggaccuacgaccacaacguguaccgggacgaggcccugaacaaccgcuuccagaucaagggcgucgagcucaaguccggcuacaaggacuggauccuguggaucagcuucgccaucagcugcuuccugcucugcguggcccugcugggguucaucaugugggccugccagaagggcaacauccggugcaacaucugcaucuga

SEQ ID NO: 77683 - RNA, 1701 nt, Artificial Sequence
  derived and/or modified CDS sequence (opt1) from hemagglutinin__InfluenzaA__ALN39714
augaagaccaucaucgcccugagcuacauccucugccugguguucgcccagaagauccccggcaacgacaacuccaccgcgacgcugugccucgggcaccacgccgucccgaacggcaccaucgugaagaccaucaccaacgaccgcaucgaggugacgaacgccaccgagcugguccagaacagcuccaucggggagaucugcgacagcccccaccagauccuggacggcgagaacugcacccucaucgacgcccugcugggggacccccagugcgacggcuuccagaacaagaagugggaccucuucguggagcgguccaaggccuacagcaacugcuaccccuacgacgugccggacuacgcgucccugcgcagccuggucgccuccagcggcacccucgaguucaacaacgaguccuucaacugggccggggugacgcagaacggcaccagcuccagcugcauccggggguccaacagcuccuucuucagccgccugaacuggcugacccaccucaacuccaaguaccccgcccugaacgugaccaugcccaacaacgagcaguucgacaagcuguacaucuggggcguccaccaccccgggacggacaaggaccagaccuuccucuacgcgcagccgagcggccggaucaccgugagcaccaagcgcucccagcaggccgugauccccaacaucggcagccggccccgcauccgggacauccccucccgcaucagcaucuacuggacgaucgucaagccgggggacauccugcugaucaacuccaccggcaaccucaucgcgccccggggguacuucaagauccgcagcggcaaguccagcaucaugcgguccgacgcccccaucggcaagugcaagagcgagugcaucacccccaacggguccaucccgaacgacaagcccuuccagaacgugaaccgcaucaccuacggcgccugcccccgguacgugaagcagagcacgcugaagcuggccaccgggaugcgcaacguccccgagcggcagacccgcggcaucuucggggccaucgccggcuucaucgagaacggcugggaggggaugguggacggcugguacggguuccggcaccagaacuccgagggccgcgggcaggccgccgaccucaagagcacccaggcggccaucgaccagaucaacggcaagcugaaccggcugaucggcaagacgaacgagaaguuccaccagaucgagaaggaguucuccgagguggaggggcgcauccaggaccucgagaaguacgucgaggacaccaagaucgaccuguggagcuacaacgccgagcugcucguggcccuggagaaccagcacaccaucgaccugaccgacuccgagaugaacaagcuguucgagaagacgaagaagcagcuccgcgagaacgccgaggacaugggcaacgggugcuucaagaucuaccacaagugcgacaacgcgugcaucggcagcauccggaacgggaccuacgaccacgacguguaccgcgacgaggcccugaacaaccgguuccagaucaagggcgucgagcucaaguccggcuacaaggacuggauccuguggaucagcuucgccaucagcugcuuccugcucugcguggcccugcugggguucaucaugugggccugccagaagggcaacauccgcugcaacaucugcaucuga

SEQ ID NO: 77684 - RNA, 1701 nt, Artificial Sequence; identical to SEQ ID NO: 77123
  derived and/or modified CDS sequence (opt1) from hemagglutinin__InfluenzaA__ALN39715

SEQ ID NO: 77685 - RNA, 1701 nt, Artificial Sequence; identical to SEQ ID NO: 76465
  derived and/or modified CDS sequence (opt1) from hemagglutinin__InfluenzaA__ALN39716

SEQ ID NO: 77686 - RNA, 1701 nt, Artificial Sequence; identical to SEQ ID NO: 76465
  derived and/or modified CDS sequence (opt1) from hemagglutinin__InfluenzaA__ALN39717

SEQ ID NO: 77687 - RNA, 1701 nt, Artificial Sequence; identical to SEQ ID NO: 77503
  derived and/or modified CDS sequence (opt1) from hemagglutinin__InfluenzaA__ALN39718

SEQ ID NO: 77688 - RNA, 1701 nt, Artificial Sequence; identical to SEQ ID NO: 76465
  derived and/or modified CDS sequence (opt1) from hemagglutinin__InfluenzaA__ALN39734

SEQ ID NO: 77689 - RNA, 1701 nt, Artificial Sequence
  derived and/or modified CDS sequence (opt1) from hemagglutinin__InfluenzaA__ALN39735
augaagaccaucaucgcccugagcuacauccucugccugguguucgcccagaagauccccggcaacgacaacuccaccgcgacgcugugccucgggcaccacgccgucccgaacggcaccaucgugaagaccaucaccgacgaccgcaucgaggugacgaacgccaccgagcugguccagaacagcuccaucggggagaucugcgacagcccccaccagauccuggacggcgagaacugcacccucaucgacgcccugcugggggacccccagugcgacggcuuccagaacaagaagugggaccucuucguggagcgguccaaggccuacagcaacugcuaccccuacgacgugccggacuacgcgucccugcgcagccuggucgccuccagcggcacccucgaguucaacaacgaguccuucaacuggacgggggugacccagaacggcaccagcuccgccugcauccggcgcagcuccagcuccuucuucagccggcugaacuggcugacccaccucaacuacacguaccccgcccugaacgugaccaugcccaacaacgagcaguucgacaagcuguacaucuggggcguccaccaccccgggaccgacaaggaccagaucuuccucuacgcgcaguccagcgggcgcaucaccgugagcacgaagcggucccagcaggccgugaucccgaacaucggcagccgcccccggauccgcgacauccccucccggaucagcaucuacuggaccaucgucaagcccggcgacauccugcugaucaacuccaccgggaaccucaucgccccgcgcggcuacuucaagauccggagcgggaaguccagcaucaugcgcuccgacgcccccaucggcaagugcaagagcgagugcaucacccccaacggcuccauccccaacgacaagccguuccagaacgugaaccggaucacguacggggccugcccccgcuacgugaagcacagcacccugaagcuggcgaccggcaugcggaacguccccgagaagcagacccgcgggaucuucggcgccaucgccggguucaucgagaacggcugggagggcaugguggacgggugguacggcuuccggcaccagaacuccgaggggcgcggccaggccgccgaccucaagagcacgcaggcggccaucgaccagaucaacgggaagcugaaccggcugaucggcaagaccaacgagaaguuccaccagaucgagaaggaguucuccgagguggagggccgcauccaggaccucgagaaguacgucgaggacaccaagaucgaccuguggagcuacaacgccgagcugcucguggcccuggagaaccagcacaccaucgaccugacggacuccgagaugaacaagcuguucgagaagaccaagaagcagcuccgcgagaacgccgaggacauggggaacggcugcuucaagaucuaccacaagugcgacaacgcgugcaucgggagcauccggaacggcaccuacgaccacaacguguaccgcgacgaggcccugaacaaccgguuccagaucaagggggucgagcucaaguccggcuacaaggacuggauccuguggaucagcuucgccaucagcugcuuccugcucugcguggcccugcugggcuucaucaugugggccugccagaaggggaacauccgcugcaacaucugcaucuga

SEQ ID NO: 77690 - RNA, 1701 nt, Artificial Sequence
  derived and/or modified CDS sequence (opt1) from hemagglutinin__InfluenzaA__ALN39736
augaagaccaucaucgcccugagcuacauccucugccugguguucgcccagaagauccccggcaacgacaacuccaccgcgacgcugugccucgggcaccacgccgucccgaacggcaccaucgugaagaccaucaccaacgaccgcaucgaggugacgaacgccaccgagcugguccagaacagcuccaucggggagaucugcgacagcccccaccagauccuggacggcgagaacugcacccucaucgacgcccugcugggggacccccagugcgacggcuuccagaacaagaagugggaccucuucguggagcgguccaaggccuacagcaacugcuaccccuacgacgugccggacuacgcgucccugcgcagccuggucgccuccagcggcacccucgaguucaacaacgaguccuucaacuggacgggggugacccagaacggcaccagcuccgccugcauccggcgcagcuccagcuccuucuucagccggcugaacuggcugacccaccucaacuacacguaccccgcccugaacgugaccaugcccaacaacgagcaguucgacaagcuguacaucuggggcguccaccaccccgggaccgacaaggaccagaucuuccucuacgcgcagccguccgggcgcaucaccgugagcacgaagcggagccagcaggccgugauccccaacaucggcucccgcccccggauccgcgacauccccagccggaucuccaucuacuggaccaucgucaagccgggcgacauccugcugaucaacagcaccgggaaccucaucgcgccccgcggcuacuucaagauccgcgggggcaaguccagcaucaugcgguccgacgcccccaucggcaagugcaagagcgagugcaucacccccaacggguccaucccgaacgacaagcccuuccagaacgugaaccggaucacguacggcgccugcccccgcuacgugaagcacagcacccugaagcuggccaccgggaugcggaacguccccgagaagcagacccgcggcaucuucggggccaucgccggcuucaucgagaacggcugggaggggaugguggacggcugguacggguuccggcaccagaacuccgagggccgcgggcaggccgccgaccucaagagcacgcaggcggccaucgaccagaucaacggcaagcugaaccggcugaucggcaagaccaacgagaaguuccaccagaucgagaaggaguucuccgagguggaggggcgcauccagaaccucgagaaguacgucgaggacaccaagaucgaccuguggagcuacaacgccgagcugcucguggcccuggagaaccagcacaccaucgaccugacggacuccgagaugaacaagcuguucgagaagaccaagaagcagcuccgcgagaacgccgaggacaugggcaacgggugcuucaagaucuaccacaagugcgacaacgcgugcaucggcagcauccggaacgggaccuacgaccacaacguguaccgcgacgaggcccugaacaaccgguuccagaucaagggcgucgagcucaaguccggcuacaaggacuggauccuguggaucagcuucgccaucuccugcuuccugcucugcguggcccugcugggguucaucaugugggccugccagaagggcaacauccgcugcaacaucugcaucuga

SEQ ID NO: 77691 - RNA, 1701 nt, Artificial Sequence; identical to SEQ ID NO: 77071
  derived and/or modified CDS sequence (opt1) from hemagglutinin__InfluenzaA__ALN39737

SEQ ID NO: 77692 - RNA, 1701 nt, Artificial Sequence
  derived and/or modified CDS sequence (opt1) from hemagglutinin__InfluenzaA__ALN39738
augaagaccaucaucgcccugagcuacauccucugccugguguucgcccagaagauccccggcaacgacaacuccaccgcgacgcugugccucgggcaccacgccgucccgaacggcaccaucgugaagaccaucaccaacgaccgcaucgaggugacgaacgccaccgagcugguccagaacagcuccaucggggagaucugcgacagcccccaccagauccuggacggcgagaacugcacccucaucgacgcccugcugggggacccccucugcgacggcuuccagaacaagaagugggaccuguucguggagcgguccaaggccuacagcaacugcuaccccuacgacgugccggacuacgcgucccugcgcagccucgucgccuccagcggcacccuggaguucaacaacgaguccuucaacuggacgggggugacccagaacggcaccagcuccgccugcauccggcgcagcuccagcuccuucuucagccggcugaacuggcucacccaccugaacuacacguaccccgcccugaacgugaccaugcccaacaacgagcaguucgacaagcucuacaucuggggcguccaccaccccgggaccgacaaggaccagaucuuccuguacgcgcaguccagcgggcgcaucaccgugagcacgaagcggucccagcaggccgugaucccgaacaucggcagccgcccccggauccgcgacauccccucccggaucagcaucuacuggaccaucgucaagcccggcgacauccugcucaucaacuccaccgggaaccugaucgccccgcgcggcuacuucaagauccggagcgggaaguccagcaucaugcgcuccgacgcccccaucggcaagugcaagagcgagugcaucacccccaacggcuccauccccaacgacaagccguuccagaacgugaaccggaucacguacggggccugcccccgcuacgugaagcacagcacccugaagcucgcgaccggcaugcggaacguccccgagaagcagacccgcgggaucuucggcgccaucgccggguucaucgagaacggcugggagggcaugguggacgggugguacggcuuccggcaccagaacuccgaggggcgcggccaggccgccgaccucaagagcacgcaggcggccaucgaccagaucaacgggaagcugaaccggcugaucggcaagaccaacgagaaguuccaccagaucgagaaggaguucuccgagguggagggccgcauccaggaccuggagaaguacgucgaggacaccaagaucgaccuguggagcuacaacgccgagcuccugguggcccuggagaaccagcacaccaucgaccucacggacuccgagaugaacaagcuguucgagaagaccaagaagcagcugcgcgagaacgccgaggacauggggaacggcugcuucaagaucuaccacaagugcgacaacgcgugcaucgggagcauccggaacggcaccuacgaccacaacguguaccgcgacgaggcccucaacaaccgguuccagaucaagggggucgagcugaaguccggcuacaaggacuggauccuguggaucagcuucgccaucagcugcuuccuccugugcguggcccugcucggcuucaucaugugggccugccagaaggggaacauccgcugcaacaucugcaucuga

SEQ ID NO: 77693 - RNA, 1701 nt, Artificial Sequence
  derived and/or modified CDS sequence (opt1) from hemagglutinin__InfluenzaA__ALN39739
augaagaccaucaucgcccugggcuacauccucugccugguguucgcccagaagauccccgggaacgacaacagcaccgcgacgcugugccucggccaccacgccgucccgaacgggaccaucgugaagaccaucaccaacgaccgcaucgaggugacgaacgccaccgagcugguccagaacuccagcaucggcgagaucugcgacagcccccacaagauccuggacggggagaacugcacccucaucgacgcccugcugggcgacccccagugcgacggcuuccagaacaagaagugggaccucuucguggagcgguccaaggccuacuccaacugcuaccccuacgacgugccggacuacgcgagccugcgcucccuggucgccagcuccgggacccucgaguucaacaacgagagcuucaacuggacgggcgugacccagaacgggaccuccagcgccugcauccggcgcuccagcuccagcuucuucucccggcugaacuggcugacccaccucgacuacacguaccccgcccugaacgugaccaugcccaacaacgagcaguucgacaagcuguacaucuggggcguccaccaccccgggaccgacaaggaccagaucuuccucuacgcgcagagcuccggccgcaucaccgugagcacgaagcggagccagcaggccgugaucccgaacaucggcucccgcccccggauccgcgacauccccagccggaucuccaucuacuggaccaucgucaagcccggggacauccugcugaucaacagcaccggcaaccucaucgccccgcgcggguacuucaagauccgguccggcaagagcuccaucaugcgcagcgacgcccccaucggcaagugcaaguccgagugcaucacccccaacgggagcauccccaacgacaagccguuccagaacgugaaccggaucacguacggcgccugcccccgcuacgugaagcacuccacccugaagcuggcgaccgggaugcggaacguccccgagaagcagacccgcggcaucuucggggccaucgccggcuucaucgagaacggcugggaggggaugguggacggcugguacggguuccggcaccagaacagcgagggccgcgggcaggccgccgaccucaaguccacgcaggcggccaucgaccagaucaacggcaagcugaaccggcugaucggcaagaccaacgagaaguuccaccagaucgagaaggaguucagcgagguggaggggcgcauccaggaccucgagaaguacgucgaggacaccaagaucgaccugugguccuacaacgccgagcugcucguggcccuggagaaccagcacaccaucgaccugacggacagcgagaugaacaagcuguucgagaagaccaagaagcagcuccgcgagaacgccgaggacaugggcaacgggugcuucaagaucuaccacaagugcgacaacgcgugcaucggcuccauccggaacgggaccuacgaccacaacguguaccgcgacgaggcccugaacaaccgguuccagaucaagggcgucgagcucaagagcggcuacaaggacuggauccuguggaucuccuucgccaucagcugcuuccugcucugcguggcccugcugggguucaucaugugggccugccagaagggcaacauccgcugcaacaucugcaucuga

SEQ ID NO: 77694 - RNA, 1701 nt, Artificial Sequence
  derived and/or modified CDS sequence (opt1) from hemagglutinin__InfluenzaA__ALN39740
augaagaccaucaucgcccugagcuacauccucugccugguguucgcccagaagauccccggcaacgacaacuccaccgcgacgcugugccucgggcaccacgccgucccgaacggcaccaucgugaagaccaucaccaacgaccgcaucgaggugacgaacgccaccgagcugguccagaacagcuccaucggggagaucugcgacagcccccaccagauccuggacggcgagaacugcacccucaucgacgcccugcugggggacccccagugcgacggcuuccagaacaagaagugggaccucuucguggagcgguccaaggccuacagcaacugcuaccccuacgacgugccggacuacgcgucccugcgcagccuggucgccuccagcggcacccucgaguucaacaacgaguccuucaacuggacgggggugacccagaacggcaccagcuccgccugcauccgcaagagcuccagcuccuucuucagccggcugaacuggcugacccaccucaacuacacguaccccgcccugaacgugaccguccccaacaacgagcaguucgacaagcuguacaucuggggcgugcaccaccccgggaccgacaaggaccagaucuuccucuacgcgcgguccagcgggcgcaucaccgugagcacgaagcggucccagcaggccgucaucccgaacaucggcuaccgcccccggauccgcgacauccccagccggaucuccaucuacuggaccaucgugaagcccggcgacauccugcugaucaacagcaccgggaaccucaucgccccgcgcggcuacuucaagauccgguccggcaagagcuccaucaugcgcagcgacgcccccaucgggaagugcaaguccgagugcaucacccccaacggcagcauccccaacgacaagccguuccagaacgugaaccggaucacguacggggccugcccccgcuacgucaagcacuccacccugaagcuggcgaccggcaugcggaacgugcccgagaagcagacccgcgggaucuucggcgccaucgccggguucaucgagaacggcugggagggcaugguggacgggugguacggcuuccggcaccagaacagcgaggggcgcggccaggccgccgaccucaaguccacgcaggcggccaucgaccagaucaacgggaagcugaaccggcugaucggcaagaccaacgagaaguuccaccagaucgagaaggaguucagcgaggucgagggccgcauccaggaccucgagaaguacguggaggacaccaagaucgaccugugguccuacaacgccgagcugcucguggcccuggagaaccagcacaccaucgaccugacggacagcgagaugaacaagcuguucgagaagaccaagaagcagcuccgcgagaacgccgaggacauggggaacggcugcuucaagaucuaccacaagugcgacaacgcgugcaucggguccauccggaacggcaccuacgaccacaacgucuaccgcgacgaggcccugaacaaccgguuccagaucaaggggguggagcucaagagcggcuacaaggacuggauccuguggaucuccuucgccaucagcugcuuccugcucugcguggcccugcugggcuucaucaugugggccugccagaaggggaacauccgcugcaacaucugcaucuga

SEQ ID NO: 77695 - RNA, 1701 nt, Artificial Sequence; identical to SEQ ID NO: 76465
  derived and/or modified CDS sequence (opt1) from hemagglutinin__InfluenzaA__ALN39741

SEQ ID NO: 77696 - RNA, 1701 nt, Artificial Sequence
  derived and/or modified CDS sequence (opt1) from hemagglutinin__InfluenzaA__ALN39742
augaagaccaucaucgcccugagcuacauccucugccugguguucgcccagaagauccccggcaacgacaacuccaccgcgacgcugugccucgggcaccacgccgucccgaacggcaccaucgugaagaccaucaccaacgaccgcaucgaggugacgaacgccaccgagcugguccagaacagcuccaucggggagaucugcgacagcccccaccagauccuggacggcgagaacugcacccucaucgacgcccugcugggggacccccagugcgacggcuuccagaacaagaagugggaccucuucguggagcgguccaaggccuacagcaacugcuaccccuacgacgugccggacuacgcgucccugcgcagccuggucgccuccagcggcacccucgaguucaacaacgaguccuucaacuggacgggggugacccagaacggcaccagcuccgccugcauccggcgcagcuccagcuccuucuucagccggcugaacuggcugacccaccucaacuacacguaccccgcccugaacgugaccaugcccaacaacgagcaguucgacaagcuguacaucuggggcguccaccaccccgggaccgacaaggaccagaucuuccucuacgcgcaguccagcgggcgcaucaccgugagcacgaagcggucccagcaggccgugaucccgaacaucggcagccgcccccggauccgcgacauccccucccggaucagcaucuacuggaccaucgucaagcccggcgacauccugcugaucaacuccaccgggaaccucaucgccccgcgcggcuacuucaagauccggagcgggaaguccagcaucaugcgcuccgacgcccccaucggcaagugcaagagcgagugcaucacccccaacggcuccauccccaacgacaagccguuccagaacgugaaccggaucacguacggggacugcccccgcuacgugaagcacagcacccugaagcuggccaccggcaugcggaacguccccgagaagcagacccgcgggaucuucggcgcgaucgccggguucaucgagaacggcugggagggcaugguggacgggugguacggcuuccggcaccagaacuccgaggggcgcggccaggccgccgaccucaagagcacgcaggccgcgaucgaccagaucaacgggaagcugaaccggcugaucggcaagaccaacgagaaguuccaccagaucgagaaggaguucuccgagguggagggccgcauccaggaccucgagaaguacgucgaggacaccaagaucgaccuguggagcuacaacgccgagcugcucguggcccuggagaaccagcacaccaucgaccugacggacuccgagaugaacaagcuguucgagaagaccaagaagcagcuccgcgagaacgccgaggacauggggaacggcugcuucaagaucuaccacaagugcgacaacgccugcaucgggagcauccggaacggcaccuacgaccacaacguguaccgcgacgaggcgcugaacaaccgguuccagaucaagggggucgagcucaaguccggcuacaaggacuggauccuguggaucagcuucgccaucagcugcuuccugcucugcguggcccugcugggcuucaucaugugggccugccagaaggggaacauccgcugcaacaucugcaucuga

SEQ ID NO: 77697 - RNA, 1701 nt, Artificial Sequence
  derived and/or modified CDS sequence (opt1) from hemagglutinin__InfluenzaA__ALN39743
augaagaccaucaucgcccugagcuacauccucugccugguguucgcccagaagauccccggcaacgacaacuccaccgcgacgcugugccucgggcaccacgccgucccgaacggcaccaucgugaagaccaucaccaacgaccgcaucgaggugacgaacgccaccgagcugguccagaacagcuccaucggggagaucugcgacagcccccaccagauccuggacggcgagaacugcacccucaucgacgcccugcugggggacccccagugcgacggcuuccagaacaagaagugggaccucuucguggagcgguccaaggccuacagcaacugcuaccccuacgacgugccggacuacgcgucccugcgcagccuggucgccuccagcggcacccucgaguucaacaacgaguccuucaacuggacgggggugacccagaacggcaccagcuccgccugcauccgcaagagcuccagcuccuucuucagccggcugaacuggcugacccaccucaacuacaucuaccccgcccugaacgugacgaugcccaacaacgagcaguucgacaagcuguacaucuggggcguccaccaccccgggaccgacaaggaccagaucuuccucuacgcgcaguccagcgggcggaucaccgugagcaccaagcgcucccagcaggccgugaucccgaacaucggcagccggccccgcauccgggacauccccucccgcaucagcaucuacuggacgaucgucaagcccggcgacauccugcugaucaacuccaccgggaaccucaucgccccgcggggcuacuucaagauccgcagcgggaaguccagcaucaugcgguccgacgcccccaucggcaagugcaagagcgagugcaucacccccaacggcuccauccccaacgacaagccguuccagaacgugaaccgcaucaccuacggggccugcccccgguacgugaagcacagcacgcugaagcuggcgaccggcaugcgcaacguccccgagaagcagacccgggggaucuucggcgccaucgccggguucaucgagaacggcugggagggcaugguggacgggugguacggcuuccgccaccagaacuccgaggggcggggccaggccgccgaccucaagagcacccaggcggccaucgaccagaucaacgggaagcugaaccgccugaucggcaagacgaacgagaaguuccaccagaucgagaaggaguucuccgagguggagggccggauccaggaccucgagaaguacgucgaggacaccaagaucgaccuguggagcuacaacgccgagcugcucguggcccuggagaaccagcacaccaucgaccugaccgacuccgagaugaacaagcuguucgagaagacgaagaagcagcuccgcgagaacgccgaggacauggggaacggcugcuucaagaucuaccacaagugcgacaacgcgugcaucgggagcauccgcaacggcaccuacgaccacaacguguaccgggacgaggcccugaacaaccgcuuccagaucaagggggucgagcucaaguccggcuacaaggacuggauccuguggaucagcuucgccaucagcugcuuccugcucugcguggcccugcugggcuucaucaugugggccugccagaaggggaacauccggugcaacaucugcaucuga

SEQ ID NO: 77698 - RNA, 1701 nt, Artificial Sequence
  derived and/or modified CDS sequence (opt1) from hemagglutinin__InfluenzaA__ALN39744
augaagaccaucaucgcccugagcuacauccucugccugguguucgcccagaagauccccggcaacgacaacuccaccgcgacgcugugccucgggcaccacgccgucccgaacggcaccaucgugaagaccaucaccaacgaccgcaucgaggugacgaacgccaccgagcugguccagaacagcuccaucggggagaucugcgacagcccccaccagauccuggacggcgagaacugcacccucaucgacgcccugcugggggacccccagugcgacggcuuccagaacaagaagugggaccucuucguggagcgguccaaggccuacagcaacugcuaccccuacgacgugccggacuacgcgucccugcgcagccuggucgccuccagcggcacccucgaguucaacaacgaguccuucaacuggacgggggugacccagaacggcaccagcuccgccugcauccgcaagagcuccagcuccuucuucagccggcugaacuggcugacccaccucaacuacacguaccccgcccugaacgugaccaugcccaacaacgagcaguucgacaagcuguacaucuggggcguccaccaccccgggaccgacaaggaccagaucuuccucuacgcgcaguccagcgggcggaucaccgugagcacgaagcgcucccagcaggccgugaucccgaacaucggcagccggccccgcauccgggacauccccucccgcaucagcaucuacuggaccaucgucaagcccggcgacauccugcugaucaacuccaccgggaaccucaucgccccgcggggcuacuucaagauccgcagcgggaaguccagcaucaugcgguccgacgcccccaucggcaagugcaagagcgagugcaucacccccaacggcuccauccccaacgacaagccguuccagaacgugaaccgcaucacguacggggccugcccccgguacgugaagcacagcacccugaagcuggcgaccggcaugcgcaacguccccgagaagcagacccgggggaucuucggcgccaucgccggguucaucgagaacggcugggagggcaugguggacgggugguacggcuuccgccaccagaacuccgaggggcggggccaggccgccgaccucaagagcacgcaggcggccaucgaccagaucaacgggaagcugaaccgccugaucggcaagaccaacgagaaguuccaccagaucgagaaggaguucuccgagguggagggccggauccaggaccucgagaaguacgucgaggacaccaagaucgaccuguggagcuacaacgccgagcugcucguggcccuggagaaccagcacaccaucgaccugacggacuccgagaugaacaagcuguucgagaagaccaagaagcagcuccgcgagaacgccgaggacauggggaacggcugcuucaagaucuaccacaagugcgacaacgcgugcaucgggagcauccgcaacggcaccuacgaccacaacguguaccgggacgaggcccugaacaaccgcuuccagaucaagggggucgagcucaaguccggcuacaaggacuggauccuguggaucagcuucgccaucagcugcuuccugcucugcguggcccugcugggcuucaucaugugggccugccagaaggggaacauccggugcaacaucugcaucuga

SEQ ID NO: 77699 - RNA, 1701 nt, Artificial Sequence
  derived and/or modified CDS sequence (opt1) from hemagglutinin__InfluenzaA__ALN39745
augaagaccaucaucgcccugagcuacauccucugccugguguucgcccagaagauccccggcaacgacaacuccaccgcgacgcugugccucgggcaccacgccgucccgaacggcaccaucgugaagaccaucaccaacgaccgcaucgaggugacgaacgccaccgagcugguccagaacagcuccaucggggagaucugcgacagcccccaccagauccuggacggcgagaacugcacccucaucgacgcccugcugggggacccccagugcgacggcuuccagaacaagaagugggaccucuucguggagcgguccaaggccuacagcaacugcuaccccuacgacgugccggacuacgcgucccugcgcagccuggucgccuccagcggcacccucgaguucaacaacgaguccuucaacuggacgggggugacccagaacggcaccagcuccgccugcauccgcaagagcuccagcuccuucuucagccggcugaacuggcugacccaccucaacuacaaguaccccgcccugaacgugacgaugcccaacaacgagcaguucgacaagcuguacaucuggggcguccaccaccccgggaccgacaaggaccagaucuuccucuacgcgcaguccagcgggcggaucaccgugagcaccaagcgcucccagcaggccgugaucccgaacaucggcagccggccccgcauccgggacauccccucccgcaucagcaucuacuggacgaucgucaagcccggcgacauccugcugaucaacuccaccgggaaccucaucgccccgcggggcuacuucaagauccgcagcgggaaguccagcaucaugcgguccgacgcccccaucggcaagugcaagagcgagugcaucacccccaacggcuccauccccaacgacaagccguuccagaacgugaaccgcaucaccuacggggccugcccccgguacgugaagcacagcacgcugaagcuggcgaccggcaugcgcaacguccccgagaagcagacccgggggaucuucggcgccaucgccggguucaucgagaacggcugggagggcaugguggacgggugguacggcuuccgccaccagaacuccgaggggcggggccaggccgccgaccucaagagcacccaggcggccaucgaccagaucaacgggaagcugaaccgccugaucggcaagacgaacgagaaguuccaccagaucgagaaggaguucuccgagguggagggccggauccaggaccucgagaaguacgucgaggacaccaagaucgaccuguggagcuacaacgccgagcugcucguggcccuggagaaccagcacaccaucgaccugaccgacuccgagaugaacaagcuguucgagaagacgaagaagcagcuccgcgagaacgccgaggacauggggaacggcugcuucaagaucuaccacaagugcgacaacgcgugcaucgggagcauccgcaacggcaccuacgaccacaacguguaccgggacgaggcccugaacaaccgcuuccagaucaagggggucgagcucaaguccggcuacaaggacuggauccuguggaucagcuucgccaucagcugcuuccugcucugcguggcccugcugggcuucaucaugugggccugccagaaggggaacauccggugcaacaucugcaucuga

SEQ ID NO: 77700 - RNA, 1701 nt, Artificial Sequence; identical to SEQ ID NO: 77698
  derived and/or modified CDS sequence (opt1) from hemagglutinin__InfluenzaA__ALN39746

SEQ ID NO: 77701 - RNA, 1701 nt, Artificial Sequence; identical to SEQ ID NO: 77393
  derived and/or modified CDS sequence (opt1) from hemagglutinin__InfluenzaA__ALN39747

SEQ ID NO: 77702 - RNA, 1701 nt, Artificial Sequence
  derived and/or modified CDS sequence (opt1) from hemagglutinin__InfluenzaA__ALN39748
augaagaccaucaucgcccugagcuacauccucugccugguguucgcccagaagauccccggcaacgacaacuccaccgcgacgcugugccucgggcaccacgccgucccgaacggcaccaucgugaagaccaucaccaacgaccgcaucgaggugacgaacgccaccgagcugguccagaacagcuccaucggggagaucugcgacagcccccaccagauccuggacggcgagaacugcacccucaucgacgcccugcugggggacccccagugcgacggcuuccagaacaagaagugggaccucuucguggagcgguccaaggccuacagcaacugcuaccccuacgacgugccggacuacgcgucccugcgcagccuggucgccuccagcggcacccucgaguucaacaacgaguccuucaacuggacgggggugacccagaacggcaccagcuccgccugcauccggcgcagcuccagcuccuucuucagccggcugaacuggcugacccaccucaacuacgccuaccccgcgcugaacgugacgaugcccaacaacgagcaguucgacaagcuguacaucuggggcguccaccaccccgggaccgacaaggaccagaucuuccucuacgcccaguccagcgggcgcaucaccgugagcaccaagcggucccagcaggccgugaucccgaacaucggcagccgcccccggauccgcgacauccccucccggaucagcaucuacuggacgaucgucaagcccggcgacauccugcugaucaacuccaccgggaaccucaucgccccgcgcggcuacuucaagauccugagcgggaaguccagcaucaugcgguccgacgcccccaucggcaagugcaagagcgagugcaucacccccaacggcuccauccccaacgacaagccguuccagaacgugaaccgcaucaccuacggggcgugcccccgguacgugaagcacagcacgcugaagcucgccaccggcaugcgcaacguccccgagaagcagacccgggggaucuucggcgccaucgccggguucaucgagaacggcugggagggcaugguggacgggugguacggcuuccgccaccagaacuccgaggggcggggccaggccgcggaccucaagagcacccaggccgccaucgaccagaucaacgggaagcugaaccgccugaucggcaagacgaacgagaaguuccaccagaucgagaaggaguucuccgagguggagggccggauccaggaccuggagaaguacgucgaggacaccaagaucgaccuguggagcuacaacgccgagcuccugguggcccuggagaaccagcacaccaucgaccucaccgacuccgagaugaacaagcuguucgagaagacgaagaagcagcugcgcgagaacgcggaggacauggggaacggcugcuucaagaucuaccacaagugcgacaacgccugcaucgggagcauccgcaacggcaccuacgaccacaacguguaccgggacgaggcccucaacaaccgcuuccagaucaagggggucgagcugaaguccggcuacaaggacuggauccuguggaucagcuucgccaucagcugcuuccuccugugcguggcccugcucggcuucaucaugugggcgugccagaaggggaacauccggugcaacaucugcaucuga

SEQ ID NO: 77703 - RNA, 1701 nt, Artificial Sequence
  derived and/or modified CDS sequence (opt1) from hemagglutinin__InfluenzaA__ALN39749
augaagaccaucaucgcccugagcuacauccucugccugguguucgcccagaagcugcccggcaacgacaacuccaccgcgacgcucugccuggggcaccacgccgucccgaacggcaccaucgugaagaccaucaccaacgaccgcaucgaggugacgaacgccaccgagcugguccagaacagcuccaucggggagaucugcaacagcccccaccagauccucgacggcgagaacugcacccugaucgacgcccugcucggggacccccagugcgacggcuuccagaacaagaagugggaccuguucguggagcgguccaaggccuacagcaacugcuaccccuacgacgugccggacuacgcgucccugcgcagccucgucgccuccagcggcacccuggaguucaacaacgaguccuucaacugggccggggugacgcagaacggcaccagcuccagcugcauccggggguccaacagcuccuucuucagccgccugaacuggcucacccaccugaacuccaaguaccccgcccugaacgugaccaugcccaacaacgagcaguucgacaagcucuacaucuggggcguccaccaccccgggacggacaaggaccagaucuuccuguacgcgcagccgagcggccggaucaccgugagcaccaagcgcucccagcaggccgugauccccaacaucggcagccggccccgcauccgggacauccccucccgcaucagcaucuacuggaccaucgucaagccgggggacauccugcucaucaacuccacgggcaaccugaucgcgccccggggguacuucaagauccgcagcggcaaguccagcaucaugcgguccgacgcccccaucggcaagugcaagagcgagugcaucacccccaacggguccaucccgaacgacaagcccuuccagaacgugaaccgcaucaccuacggcgccugcccccgguacgugaagcagagcacccugaagcucgccacggggaugcgcaacguccccgagcggcagacccgcggcaucuucggggccaucgccggcuucaucgagaacggcugggaggggaugguggacggcugguacggguuccggcaccagaacuccgagggccgcgggcaggccgccgaccucaagagcacccaggcggccaucgaccagaucaacggcaagcugaaccggcugaucggcaagaccaacgagaaguuccaccagaucgagaaggaguucuccgagguggaggggcgcauccaggaccuggagaaguacgucgaggacacgaagaucgaccuguggagcuacaacgccgagcuccugguggcccuggagaaccagcacaccaucgaccucaccgacuccgagaugaacaagcuguucgagaagaccaagaagcagcugcgcgagaacgccgaggacaugggcaacgggugcuucaagaucuaccacaagugcgacaacgcgugcaucggcagcauccggaacgggacguacgaccacgacguguaccgcgacgaggcccucaacaaccgguuccagaucaagggcgucgagcugaaguccggcuacaaggacuggauccuguggaucagcuucgccaucagcugcuuccuccugugcguggcccugcucggguucaucaugugggccugccagaagggcaacauccgcugcaacaucugcaucuga

SEQ ID NO: 77704 - RNA, 1701 nt, Artificial Sequence; identical to SEQ ID NO: 76465
  derived and/or modified CDS sequence (opt1) from hemagglutinin__InfluenzaA__ALN39750

SEQ ID NO: 77705 - RNA, 1701 nt, Artificial Sequence; identical to SEQ ID NO: 76465
  derived and/or modified CDS sequence (opt1) from hemagglutinin__InfluenzaA__ALN39789

SEQ ID NO: 77706 - RNA, 1701 nt, Artificial Sequence; identical to SEQ ID NO: 76995
  derived and/or modified CDS sequence (opt1) from hemagglutinin__InfluenzaA__ALO75895

SEQ ID NO: 77707 - RNA, 1701 nt, Artificial Sequence
  derived and/or modified CDS sequence (opt1) from hemagglutinin__InfluenzaA__ALO75907
auggagaagaucgugcugcuccuggccaucgucagccuggugaagggcgaccagaucugcaucggguaccacgccaacaacuccaccgagcaggucgacaccaucauggagaagaacgugacggugacccacgcgcaggacauccucgagaagacccacaacggcaagcugugcgaccugaacggggugaagccccucauccugaaggacugcagcgucgccggcugguuccuggggaaccgcaugugcgacgaguucauccgggugccggagugguccuacaucguggagcgcgccaaccccgccaacgaccucugcuaccccggcaaccugaacgacuacgaggagcugaagcaccuccugagccggaucaaccacuucgagaagacccugaucauccccaaguccagcuggccgaaccacacguccagcggcgucuccgccgcgugccccuaccaggggaugcccagcuucuuccgcaacgugguguggcucaccaagaagaacgacgccuaccccaccaucaagauguccuacaacaacaccuaccgggaggaccugcugauccucuggggcauccaccacagcaacaacgccgccgagcagacgaaccuguacaagaacccgaccaccuacgucuccguggggaccagcacgcugaaccagcgccucgagcccaagaucgcgacccggucccaggugaacggccagcgcgggcggauggacuucuucuggaccauccugaagcccaacgacgccauccacuucgagagcaacggcaacuucaucgcccccgaguacgccuacaagaucgucaagaagggcgacuccaccaucaugaaguccgagauggaguacgggcacugcaacacgaagugccagaccccgaucggcgccaucaacagcagcaugcccuuccacaacauccacccccugaccaucggggagugccccaaguacgucaagagcaacaagcucgugcuggcgaccggccugcgcaacuccccgcuccgggagcgccggcgcaagcggggccuguucggggccaucgccggcuucaucgagggcggguggcaggggaugguggacggcugguacggcuaccaccacagcaacgagcagggguccggcuacgccgccgaccgcgagagcacgcagaaggcgaucgacggggugaccaacaaggugaacuccaucaucgacaagaugaacacccaguucgaggccgucggccgggaguucaacaaccuggagcgccggaucgagaaccucaacaagaagauggaggacggguuccuggacguguggaccuacaacgccgagcugcucgugcugauggagaacgagcgcacgcuggacuuccacgacagcaacgucaagaaccucuacgacaaggugcggcugcagcugcgcgacaacgccaaggagcucggcaacggcugcuucgaguucuaccacaagugcgacaacgagugcauggaguccguccgcaacgggaccuacgacuacccccuguacagcgaggaggcccggcugaagcgcgaggagaucuccggcgugaagcucgagagcaucgggaccuaccagauccuguccaacuacagcaccguggcguccagccuggcccucgccaucaucgucgccggccugucccuguggaugugcagcaacgggucccuccagugccggaucugcaucuga

SEQ ID NO: 77708 - RNA, 1701 nt, Artificial Sequence
  derived and/or modified CDS sequence (opt1) from hemagglutinin__InfluenzaA__ALO75919
auggagaagaucgugcugcuccuggccaucgucagccuggugaagggcgaccagaucugcaucggguaccacgccaacaacuccaccgagcaggucgacaccaucauggagaagaacgugacggugacccacgcgcaggacauccucgagaagacccacaacggcaagcugugcgaccugaacggggugaagccccucauccugaaggacugcagcgucgccggcuggcugcacgggaaccgcaugugcgacgaguucauccgggugccggagugguccuacaucguggagcgcgccaaccccgccaacgaccucugcuaccccggcaaccugaacgacuacgaggagcugaagcaccuccugagccggaucaaccacuucgagaagacccugaucauccccaaguccagcuggccgaaccacacguccagcggcgucuccgccgcgugccccuaccaggggaugcccagcuucuuccgcaacgugguguggcucaccaagaagaacgacgccuaccccaccaucaagauguccuacaacaacaccuaccgggaggaccugcugauccucuggggcauccaccacagcaacaacgccgccgagcagacgaaccuguacaagaacccgaccaccuacgucuccguggggaccagcacgcugaaccagcgccucgagcccaagaucgcgacccggucccaggugaacggccagcgcgggcggauggacuucuucuggaccauccugaagcccaacgacgccauccacuucgagagcaacggcaacuucaucgcccccgaguacgccuacaagaucgucaagaagggcgacuccaccaucaugaaguccgagauggaguacgggcacugcaacacgaagugccagaccccgaucggcgccaucaacagcagcaugcccuuccacaacauccacccccugaccaucggggagugccccaaguacgucaagagcaacaagcucgugcuggcgaccggccugcgcaacuccccgcuccgggagcgccggcgcaagcggggccuguucggggccaucgccggcuucaucgagggcggguggcaggggaugguggacggcugguacggcuaccaccacagcaacgagcagggguccggcuacgccgccgaccgcgagagcacgcagaaggcgaucgacggggugaccaacaaggugaacuccaucaucgacaagaugaacacccaguucgaggccgucggccgggaguucaacaaccuggagcgccggaucgagaaccucaacaagaagauggaggacggguuccuggacguguggaccuacaacgccgagcugcucgugcugauggagaacgagcgcacgcuggacuuccacgacagcaacgucaagaaccucuacgacaaggugcggcugcagcugcgcgacaacgccaaggagcucggcaacggcugcuucgaguucuaccacaagugcgacaacgagugcauggaguccguccgcaacgggaccuacgacuacccccuguacagcgaggaggccucccugaagcgggaggagaucagcggcgugaagcucgaguccaucgggaccuaccagauccugagcaucuacuccaccguggcgagcucccuggcccucgccaucaucgucgccggccugagccuguggaugugcuccaacgggagccuccagugccgcaucugcaucuga

SEQ ID NO: 77709 - RNA, 1683 nt, Artificial Sequence
  derived and/or modified CDS sequence (opt1) from hemagglutinin__InfluenzaA__ALT20080
auggagaccgugagccugaucaccauccuccuggucgccacgguguccaacgccgacaagaucugcaucggcuaccagagcaccaacuccaccgagaccguggacacgcugaccgagaacaacguccccgugacccacgcgaaggagcuccugcacaccgagcacaacgggaugcugugcgccacgagccucggccagccgcugauccuggacacgugcaccaucgaggggcucaucuacggcaaccccuccugcgaccugagccuggaggggcgcgagugguccuacaucguggagcggcccagcgccgucaacggccucugcuaccccggcaacguggagaaccuggaggagcugcgcucccucuucagcuccgcccggagcuaccagcgcauccagaucuucccggacaccaucuggaacguguccuacgacgggaccagcaccgccugcuccggcagcuucuaccgguccaugcgcuggcugacccggaagaacggggacuaccccauccaggacgcgcaguacaccaacaaccagggcaagaacauccuguucaugugggggaucaaccacccgcccacggacaccacccagcgcgaccucuacacccggacggacaccaccaccagcgucgccacggaggagaucaaccgcaucuucaagccccugaucggcccccggccccuggugaacggccucauggggcgcaucgacuacuacugguccgugcugaagcccggccagacccugcggaucaagagcgacgggaaccucaucgccccgugguucggccacauccugagcggcgagucccacgggcgcauccugaagaccaaccucaagcggggcagcugcaccguccagugccagacggagaagggcgggcugaacaccacccugcccuuccagaacguguccaaguacgccuucgggaacugcagcaaguacaucggcaucaagucccucaagcuggcggugggccugcgcaacguccccagccgguccagccgcggccucuucggggccaucgccggguucaucgagggcgggugguccggccugguggccggcugguacggguuccagcacagcaacgaccagggcguggggauggccgcggaccgggacuccacccagaaggccaucgacaagaucacgagcaaggucaacaacaucguggacaagaugaacaagcaguacgagaucaucgaccacgaguucuccgagguggagacccgccugaacaugaucaacaacaagaucgacgaccagauccaggacaucugggccuacaacgccgagcuccugguccugcucgagaaccagaagacccuggacgagcacgacgccaacgugaacaaccuguacaacaaggugaagcgggcgcucggcagcaacgccgucgaggacgggaagggcugcuucgagcuguaccacaagugcgacgaccagugcauggagaccauccgcaacggcacguacaaccgccggaaguaccaggaggaguccaagcuggagcgccagaagaucgagggggugaagcucgagagcgagggcaccuacaagauccugaccaucuacuccaccgucgccagcucccuggugaucgccaugggguucgccgcguuccucuucugggccaugagcaacggcagcugccggugcaacaucugcaucuga

SEQ ID NO: 77710 - RNA, 1701 nt, Artificial Sequence
  derived and/or modified CDS sequence (opt1) from hemagglutinin__InfluenzaA__ALT66860
augaaggccauccuggugguccuccuguacaccuucaccacggccaacgcggacacccugugcaucggcuaccacgccaacaacagcaccgacaccguggacacggugcucgagaagaacgucaccgugacccacuccgugaaccugcuggaggacaagcacaacgggaagcucugcaagcugcgcggcgucgcgccccugcaccucgggaagugcaacaucgccggcuggauccuggggaacccggagugcgagagccuguccaccgccagcuccuggagcuacaucguggagacguccaacagcgacaacgggaccugcuaccccggcgacuucaucaacuacgaggagcuccgggagcagcuguccagcguguccagcuucgagcgcuucgagaucuuccccaagaccuccagcuggcccaaccacgacuccaacaagggcgucaccgccgccugcccgcacgccggcgccaagagcuucuacaagaaccugaucuggcucgugaagaaggggaacuccuaccccaagcugaaccagagcuacaucaacgacaagggcaaggaggugcugguccucugggggauccaccaccccuccacgaccgcggaccagcagagccuguaccagaacgccgacgccuacguguucgugggcaccagccgguacuccaagaaguucaagcccgagaucgccacccgcccgaagguccgggaccaggagggccgcaugaacuacuacuggacgcugguggagcccggggacaagaucaccuucgaggccaccggcaaccucguggucccccgguacgcguucaccauggagcgcaacgccgggagcggcaucaucaucuccgacacgcccgugcacgacugcaacacgaccugccagaccccggagggcgccaucaacaccagccugcccuuccagaacauccaccccaucaccaucgggaagugccccaaguacgugaaguccaccaagcugcggcucgccaccggccugcgcaacgucccgagcauccagucccgggggcuguucggcgccaucgcgggguucaucgagggcggcuggacggggaugguggacggcugguacggguaccaccaccagaacgagcagggcagcggguacgccgccgaccucaaguccacccagaacgccaucgacaagaucaccaacaaggugaacagcgucaucgagaagaugaacacccaguucacggccgugggcaaggaguucaaccaccuggagaagcgcaucgagaaccugaacaagaaggucgacgacggcuuccucgacaucuggaccuacaacgcggagcugcuggugcuccuggagaacgagcggacccuggacuaccacgacuccaacgugaagaaccucuacgagaagguccgcaaccagcugaagaacaacgccaaggagaucgggaacggcugcuucgaguucuaccacaagugcgacaacacgugcauggagagcgugaagaacgggaccuacgacuaccccaaguacuccgaggaggccaagcugaaccgggagaagaucgacggcgugaagcucgagagcacccgcaucuaccagauccuggccaucuacuccaccgucgccagcucccuggugcucguggucagccugggggcgaucuccuucuggaugugcagcaacggcagccugcagugccggaucugcaucuga

SEQ ID NO: 77711 - RNA, 1701 nt, Artificial Sequence
  derived and/or modified CDS sequence (opt1) from hemagglutinin__InfluenzaA__AMA65391
augaaggccauccuggugguccuccuguacaccuucaccacggccaacgcggacacccugugcaucggcuaccacgccaacaacagcaccgacaccguggacacggugcucgagaagaacgucaccgugacccacuccgugaaccugcuggaggacaagcacaacgggaagcucugcaagcugcgcggcgucgcgccccugcaccucgggaagugcaacaucgccggcuggauccuggggaacccggagugcgagagccuguccaccgccagcuccuggagcuacaucguggagacguccaacagcgacaacgggaccugcuaccccggcgacuucaucaacuacgaggagcuccgggagcagcuguccagcguguccagcuucgagcgcuucgagaucuuccccaagaccuccagcuggcccaaccacgacuccaacaagggcgucaccgccgccugcccgcacgccggcgccaagagcuucuacaagaaccugaucuggcucgugaagaaggggaacuccuaccccaagcugaaccagagcuacaucaacgacaagggcaaggaggugcugguccucugggggauccaccaccccuccacgaccgcggaccagcagagccuguaccagaacgccgacgccuacguguucgugggcaccagccgguacuccaagaaguucaagcccgagaucgccacccgcccgaagguccggggccaggaggggcgcaugaacuacuacuggacgcugguggagcccggcgacaagaucaccuucgaggccaccgggaaccucguggucccccgguacgcguucaccauggagcgcaacgccggcagcggcaucaucaucuccgacacgcccgugcacgacugcaacacgaccugccagaccccggagggggccaucaacaccagccugcccuuccagaacauccaccccaucaccaucggcaagugccccaaguacgugaaguccaccaagcugcggcucgccaccgggcugcgcaacgucccgagcauccagucccggggccuguucggggccaucgcgggcuucaucgagggcggguggacgggcaugguggacgggugguacggcuaccaccaccagaacgagcaggggagcggcuacgccgccgaccucaaguccacccagaacgccaucgacaagaucaccaacaaggugaacagcgucaucgagaagaugaacacccaguucacggccgugggcaaggaguucaaccaccuggagaagcgcaucgagaaccugaacaagaaggucgacgacggguuccucgacaucuggaccuacaacgcggagcugcuggugcuccuggagaacgagcggacccuggacuaccacgacuccaacgugaagaaccucuacgagaagguccgcaaccagcugaagaacaacgccaaggagaucggcaacgggugcuucgaguucuaccacaagugcgacaacacgugcauggagagcgugaagaacggcaccuacgacuaccccaaguacuccgaggaggccaagcugaaccgggagaagaucgacggggugaagcucgagagcacccgcaucuaccagauccuggccaucuacuccaccgucgccagcucccuggugcucguggucuuccugggcgcgaucagcuucuggaugugcuccaacggcagccugcagugccggaucugcaucuga

SEQ ID NO: 77712 - RNA, 1701 nt, Artificial Sequence
  derived and/or modified CDS sequence (opt1) from hemagglutinin__InfluenzaA__AMA65393
augaaggccauccuggugguccuccuguacaccuucaccacggccaacgcggacacccugugcaucggcuaccacgccaacaacagcaccgacaccguggacacggugcucgagaagaacgucaccgugacccacuccgugaaccugcuggaggacaagcacaacgggaagcucugcaagcugcgcggcgucgcgccccugcaccucgggaagugcaacaucgccggcuggauccuggggaacccggagugcgagagccuguccaccgccagcuccuggagcuacaucguggagacguccaacagcgacaacgggaccugcuaccccggcgacuucaucaacuacgaggagcuccgggagcagcuguccagcguguccagcuucgagcgcuucgagaucuuccccaagaccuccagcuggcccaaccacgacuccaacaagggcgucaccgccgccugcccgcacgccggcgccaagagcuucuacaagaaccugaucuggcucgugaagaaggggaacuccuaccccaagcugaaccagagcuacaucaacgacaagggcaaggaggugcugguccucugggggauccaccaccccuccacgaccgcggaccagcagagccuguaccagaacgccgacgccuacguguucgugggcaccagccgguacuccaagaaguucaagcccgagaucgccacccgcccgaagguccgggaccaggagggccgcaugaacuacuacuggacgcugguggagcccggggacaagaucaccuucgaggccaccggcaaccucguggucccccgguacgcguucaccauggagcgcaacgccgggagcggcaucaucaucuccgacacgcccgugcacgacugcaacacgaccugccagaccccggagggcgccaucaacaccagccugcccuuccagaacauccaccccaucaccaucgggaagugccccaaguacgugaaguccaccaagcugcggcucgccaccggccugcgcaacgucccgagcauccagucccgggggcuguucggcgccaucgcgggguucaucgagggcggcuggacggggaugguggacggcugguacggguaccaccaccagaacgagcagggcagcggguacgccgccgaccucaaguccacccagaacgccaucgacaagaucaccaacaaggugaacagcgucaucgagaagaugaacacccaguucacggccgugggcaaggaguucaaccaccuggagaagcgcaucgagaaccugaacaagaaggucgacgacggcuuccucgacaucuggaccuacaacgcggagcugcuggugcuccuggagaacgagcggacccuggacuaccacgacuccaacgugaagaaccucuacgagaagguccgcaaccagcugaagaacaacgccaaggagaucgggaacggcugcuucgaguucuaccacaagugcgacaacacgugcauggagagcgugaagaacgggaccuacgacuaccccaaguacuccgaggaggccaagcugaaccgggagaagaucgacggcgugaagcucgagagcacccgcaucuaccagauccuggccaucuacucccccgucgccagcucccuggugcucguggucuuccugggggcgaucagcuucuggaugugcuccaacggcagccugcagugccggaucugcaucuga

SEQ ID NO: 77713 - RNA, 1701 nt, Artificial Sequence
  derived and/or modified CDS sequence (opt1) from hemagglutinin__InfluenzaA__BAA02768
augaaggccaagcugcucgugcugcugugcgccuucaccgcgaccgacgccgacacgaucugcaucggcuaccacgccaacaacagcaccgacaccgucgacaccgugcucgagaagaacgugacggucacccacuccgugaaccugcuggaggacagccacaacgggaagcucugccgccugaagggcaucgcgccccugcagcucgggaacugcuccaucgccggcuggauccuggggaacccggagugcgagagccuguucuccaaggagagcugguccuacaucgccgagacccccaacagcgagaacgggaccugcuaccccggcuacuucgccgacuacgaggagcuccgggagcagcuguccagcguguccagcuucgagcgcuucgagaucuuccccaaggaguccagcuggccgaaccacacggucaccaagggggugaccgccuccugcagccacaacggcaaguccagcuucuaccggaaccugcucuggcugaccgggaagaacggccuguaccccaaccucuccaagagcuacgugaacaacaaggagaaggagguccuggugcuguggggcgugcaccaccccagcaacaucggcgaccagcgcgccaucuaccacacggagaacgcguacgucuccguggugagcucccacuacagccggcgcuucacccccgagaucgccaagcggccgaagguccgcggccaggaggggcggaucaacuacuacuggacccuccuggagcccggcgacaccaucaucuucgaggccaacgggaaccugaucgcccccugguacgccuucgcgcucucccgcggcuucggcagcgggaucaucacguccaacgccagcauggacgagugcgacgccaagugccagacgccccagggcgccaucaacuccagccugccguuccagaacgugcaccccgugaccaucggggagugccccaaguacguccgguccaccaagcugcgcauggugaccggccuccggaacauccccagcauccagucccgcgggcuguucggcgccaucgcgggcuucaucgagggcggguggaccgggaugaucgacggcugguacggguaccaccaccagaacgagcagggcagcggcuacgccgccgaccagaaguccacccagaacgccaucaacgggaucaccaacaaggugaacagcgucaucgagaagaugaacacgcaguucaccgccgugggcaaggaguucaacaagcuggagcggcgcauggaguaccucaacaagaagguggacgacggguuccuggacaucuggaccuacaacgcggagcugcucguccugcuggagaacgagcggacccucgacuuccacgacuccaacgugaagaaccuguacgagaaggucaagagccagcugaagaacaacgccaaggagaucggcuacgggugcuucgaguucuaccacaagugcaacaacgagugcauggaguccgugaagaacggcacguacgacuacccgaaguacagcgaggagagcaagcucaaccgcgagaagaucgacggcgugaagcuggaguccaugggggucuaccagauccuggccaucuacagcaccguggccuccagccucgugcugcuggucucccucggcgccaucagcuucuggaugugcuccaacgggagccugcagugccggaucugcaucuga

SEQ ID NO: 77714 - RNA, 1701 nt, Artificial Sequence
  derived and/or modified CDS sequence (opt1) from hemagglutinin__InfluenzaA__BAA02769
augaaggccaagcugcucgugcugcugugcgccuucaccgcgaccgacgccgacacgaucugcaucggcuaccacgccaacaacagcaccgacaccgucgacaccgugcucgagaagaacgugacggucacccacuccgugaaccugcuggaggacagccacaacgggaagcucugccgccugaagggcaucgcgccccugcagcucgggaacugcuccaucgccggcuggauccuggggaacccggagugcgagagccuguucuccaaggagagcugguccuacaucgccgagacccccaacagcgagaacgggaccugcuaccccggcuacuucgccgacuacgaggagcuccgggagcagcuguccagcguguccagcuucgagcgcuucgagaucuuccccaaggaguccagcuggccgaaccacacggucaccaagggggugaccgccuccugcagccacaacggcaaguccagcuucuaccggaaccugcucuggcugaccgggaagaacggccuguaccccaaccucuccaagagcuacgugaacaacaaggagaaggagguccuggugcuguggggcgugcaccaccccagcaacauccgcgaccagcgggccaucuaccacacggagaacgcguacgucuccguggugagcucccacuacagccgccgguucacccccgagaucgccaagcgcccgaagguccgggaccaggagggccgcaucaacuacuacuggacccuccuggagcccggcgacaccaucaucuucgaggccaacgggaaccugaucgcccccugguacgccuucgcgcucucccggggcuucgggagcggcaucaucacguccaacgccagcauggacgagugcgacgccaagugccagacgccccagggcgccaucaacuccagccugccguuccagaacgugcaccccgugaccaucggggagugccccaaguacguccgcuccaccaagcugcggauggugaagggccuccgcaacauccccagcauccagucccgggggcuguucggcgccaucgcgggguucaucgagggcggcuggaccgggaugaucgacggcugguacggguaccaccaccagaacgagcagggcagcggguacgccgccgaccagaaguccacccagaacgccaucaacggcaucaccaacaaggugaacagcgucaucgagaagaugaacacccaguucacggccgugggcaaggaguucaacaagcuggagcgccggauggaguaccucaacaagaagguggacgacggguuccuggacaucuggaccuacaacgcggagcugcucguccugcuggagaacgagcgcacccucgacuuccacgacuccaacgugaagaaccuguacgagaaggucaagagccagcugaagaacaacgccaaggagaucggcuacgggugcuucgaguucuaccacaagugcaacaacgagugcauggaguccgugaagaacggcaccuacgacuacccgaaguacagcgaggagagcaagcucaaccgggagaagaucgacggggugaagcuggaguccaugggcgucuaccagauccuggccaucuacagcacgguggccuccagccucgugcugcuggucucccucggcgccaucagcuucuggaugugcuccaacgggagccugcagugccgcaucugcaucuga

SEQ ID NO: 77715 - RNA, 1689 nt, Artificial Sequence
  derived and/or modified CDS sequence (opt1) from hemagglutinin__InfluenzaA__BAC43764
auggccaucaucuaccugauccuccuguucaccgccgugcgcggcgaccagaucugcaucggguaccacgcgaacaacagcaccgagaaggucgacacgauccuggagcggaacgugaccgugacccacgccaagaacauccucgagaagacccacaacggcaagcugugcaagcugaacgggaucccgccccucgagcugggcgacugcuccaucgccggguggcugcucggcaaccccgagugcgaccgccugcugaucguccccgaguggagcuacaucauggagaaggagaacccccgggacggccucugcuacccgggguccuucaacgacuacgaggagcugaagcaccuccugagcuccgugaagcacuucgagaaggugaagauccugcccaaggaccgcuggacgcagcacaccaccaccggcgggagccgggccugcgccgucuccggcaaccccagcuucuuccgcaacaugguguggcugacgaagaagggguccaacuaccccguggcgaagggcagcuacaacaacaccuccggcgagcagaugcucaucaucuggggcguccaccacccgaucgacgagaccgagcagaucacccuguaccagaacguggggacguacgugagcgucgggaccuccacccugaacaagcggagcacccccgagaucgccacgcgccccaaggugaacggccucggcucccggauggaguucagcuggacccugcuggacaugugggacaccaucaacuucgaguccaccgggaaccucaucgcccccgaguacggcuucaagaucagcaagcgcggguccagcggcaucaugaagacggaggggacccuggagaacugcgagaccaagugccagaccccgcugggcgccaucaacacgacccuccccuuccacaacgugcacccccugaccaucggcgagugccccaaguacgucaagagcgagaagcuggugcucgcgaccgggcugcggaacgugccgcagaucgagucccgcggccuguucggggccaucgccggcuucaucgagggcggguggcagggcauggucgacgggugguacggcuaccaccacagcaacgaccagggguccggcuacgccgccgacaaggagagcacgcagaaggcguucgacgggaucaccaacaaggugaacuccgugaucgagaagaugaacacccaguucgaggccgucggcaaggaguucagcaaccucgagcggcgccuggagaaccugaacaagaagauggaggacggcuuccucgacguguggaccuacaacgccgagcugcuggugcucauggagaacgagcggacgcuggacuuccacgacuccaacgucaagaaccuguacgacaaggugcgcaugcagcuccgggacaacgucaaggagcuggggaacggcugcuucgaguucuaccacaagugcgacgacgagugcaugaacagcgugaagaacgggaccuacgacuaccccaaguacgaggaggaguccaagcugaaccgcaacgagaucaagggcgugaagcucagcuccaugggcgucuaccagauccuggccaucuacgccaccguggcggggagccugucccucgccaucaugauggccggcaucagcuucuggaugugcuccaacgggagccugcaguuccggaucugcaucuga

SEQ ID NO: 77716 - RNA, 1707 nt, Artificial Sequence
  derived and/or modified CDS sequence (opt1) from hemagglutinin__InfluenzaA__BAE07201
auggagaagaucgugcugcuguucgccaucgucagccuggugaaguccgaccagaucugcaucggcuaccacgccaacaacagcaccgagcaggucgacaccaucauggagaagaacgugacggugacccacgcgcaggacauccuggagaagacccacaacgggaagcucugcgaccuggacggcgugaagccccugauccuccgcgacugcuccgucgccggguggcugcugggcaacccgaugugcgacgaguucaucaacgugcccgaguggagcuacaucguggagaaggccaaccccgccaacgaccucugcuaccccggggacuucaacgacuacgaggagcugaagcaccuccucucccggaucaaccacuucgagaagauccagaucaucccgaagaacagcugguccagccacgaggccucccugggcgucagcuccgcgugccccuaccagggcaagagcuccuucuuccgcaacgugguguggcugaucaagaagaacaacgccuaccccaccaucaagcggagcuacaacaacacgaaccaggaggaccuccugguccugugggggauccaccaccccaacgacgccgccgagcagacccgccucuaccagaacccgaccaccuacaucuccgugggcacgagcacccugaaccagcggcuggugcccaagaucgcgacccgcuccaaggucaacgggcagaacggccggauggaguucuucuggaccauccucaagcccaacgacgccaucaacuucgagagcaacgggaacuucaucgcccccgaguacgccuacaagaucgugaagaagggcgacuccgccaucaugaaguccgagcuggaguacggcaacugcaacacgaagugccagaccccgaugggggcgaucaacagcagcaugcccuuccacaacauccacccccugaccaucggcgagugccccaaguacgucaagagcaaccgccucgugcuggccaccgggcugcggaacuccccgcagcgcgagcggcgccggaagaagcgcggccucuucggcgccaucgccggguucaucgagggcggguggcagggcaugguggacgggugguacggcuaccaccacagcaacgagcagggcuccggguacgccgcggacaaggagagcacgcagaaggccaucgacggcgugaccaacaaggucaacuccaucaucgacaagaugaacacccaguucgaggccguggggcgggaguucaacaaccuggagcgccggaucgagaaccugaacaagaagauggaggacggcuuccucgacguguggaccuacaacgccgagcugcugguccucauggagaacgagcgcacgcuggacuuccacgacagcaacgugaagaaccuguacgacaagguccggcuccagcugcgcgacaacgccaaggagcuggggaacggcugcuucgaguucuaccacaagugcgacaacgagugcauggaguccgugcggaacggcaccuacgacuacccccaguacagcgaggaggcgcgccucaagcgcgaggagaucuccggggugaagcuggagagcaucggcaccuaccagauccuguccaucuacagcaccgucgccuccagccucgcccuggccaucaugguggccgggcugucccucuggaugugcagcaacggcucccugcagugccggaucugcaucuga

SEQ ID NO: 77717 - RNA, 1701 nt, Artificial Sequence
  derived and/or modified CDS sequence (opt1) from hemagglutinin__InfluenzaA__BAH95823
augaaggccauccuggugguccuccuguacaccuucgccaccgcgaacgccgacacgcugugcaucggcuaccacgccaacaacagcaccgacaccguggacaccgugcucgagaagaacgucacggugacccacuccgugaaccugcuggaggacaagcacaacgggaagcucugcaagcugcgcggcgucgcgccccugcaccucgggaagugcaacaucgccggcuggauccuggggaacccggagugcgagagccuguccaccgccagcuccuggagcuacaucguggagaccuccagcuccgacaacggcacgugcuaccccggcgacuucaucgacuacgaggagcuccgggagcagcugagcuccgugagcuccuucgagcgcuucgagaucuuccccaagaccagcuccuggcccaaccacgacagcaacaagggggucaccgccgccugcccgcacgccggcgcgaaguccuucuacaagaaccugaucuggcucgugaagaaggggaacagcuaccccaagcuguccaagagcuacaucaacgacaagggcaaggaggugcugguccucugggggauccaccaccccagcaccuccgccgaccagcagagccuguaccagaacgccgacgccuacguguucgugggcuccagccgguacuccaagaaguucaagcccgagaucgccauccgcccgaagguccgggaccaggagggccgcaugaacuacuacuggacgcugguggagcccggggacaagaucaccuucgaggcgaccggcaaccucguggucccccgguacgccuucgccauggagcgcaacgccgggagcggcaucaucaucuccgacacccccgugcacgacugcaacacgaccugccagaccccgaagggcgccaucaacaccagccugcccuuccagaacauccaccccaucacgaucgggaagugccccaagcacgugaaguccaccaagcugcggcucgcgaccggccugcgcaacgucccgagcauccagucccgggggcuguucggcgccaucgccggguucaucgagggcggcuggaccgggaugguggacggcugguacggguaccaccaccagaacgagcagggcagcggguacgccgccgaccucaaguccacgcagaacgcgaucgacgagaucaccaacaaggugaacagcgucaucgagaagaugaacacccaguucaccgccgugggcaaggaguucaaccaccuggagaagcgcaucgagaaccugaacaagaaggucgacgacggcuuccucgacaucuggacguacaacgccgagcugcuggugcuccuggagaacgagcggacccuggacuaccacgacuccaacgugaagaaccucuacgagaagguccgcagccagcugaagaacaacgccaaggagaucgggaacggcugcuucgaguucuaccacaagugcgacaacacgugcauggaguccgugaagaacgggaccuacgacuaccccaaguacagcgaggaggccaagcugaaccgggaggagaucgacggcgugaagcucgaguccacccgcaucuaccagauccuggcgaucuacagcaccgucgccagcucccuggugcucguggucagccugggggccaucuccuucuggaugugcagcaacggcucccugcagugccggaucugcaucuga

SEQ ID NO: 77718 - RNA, 1701 nt, Artificial Sequence; identical to SEQ ID NO: 66680
  derived and/or modified CDS sequence (opt1) from hemagglutinin__InfluenzaA__BAH95824

SEQ ID NO: 77719 - RNA, 1707 nt, Artificial Sequence
  derived and/or modified CDS sequence (opt1) from hemagglutinin__InfluenzaA__BAJ07997
auggagaagaucgugcugcuguucgccaucgucagccuggugaaguccgaccagaucugcaucggcuaccacgccaacaacagcaccgagcaggucgacaccaucauggagaagaacgugacggugacccacgcgcaggacauccuggagaagacccacaacgggaagcucugcgaccuggacggcgugaagccccugauccuccgcgacugcuccgucgccggguggcugcugggcaacccgaugugcgacgaguucaucaacgugcccgaguggagcuacaucguggagaaggccaaccccgccaacgaccucugcuaccccggggacuucaacgacuacgaggagcugaagcaccuccucucccggaucaaccacuucgagaagauccagaucaucccgaagaacagcugguccagccacgaggccucccugggcgucagcuccgcgugccccuaccagggcaagagcuccuucuuccgcaacgugguguggcugaucaagaagaacaacgccuaccccaccaucaagcggagcuacaacaacacgaaccaggaggaccuccugguccugugggggauccaccaccccaacgacgccgccgagcagacccgccucuaccagaacccgaccaccuacaucuccgugggcacgagcacccugaaccagcggcuggugcccaagaucgcgacccgcuccaaggucaacgggcagagcggccggauggaguucuucuggaccauccucaagcccaacgacgccaucaacuucgaguccaacgggaacuucaucgcccccgaguacgccuacaagaucgugaagaagggcgacagcgccaucaugaaguccgagcuggaguacggcaacugcaacacgaagugccagaccccgaugggggcgaucaacagcagcaugcccuuccacaacauccacccccugaccaucggcgagugccccaaguacgugaaguccaaccgccucguccuggccaccgggcugcggaacagcccgcagcgcgagcggcgccggaagaagcgcggccucuucggcgccaucgccggguucaucgagggcggguggcagggcaugguggacgggugguacggcuaccaccacuccaacgagcagggcagcggguacgccgcggacaaggaguccacgcagaaggccaucgacggcgugaccaacaaggucaacagcaucaucgacaagaugaacacccaguucgaggccguggggcgggaguucaacaaccuggagcgccggaucgagaaccugaacaagaagauggaggacggcuuccucgacguguggaccuacaacgccgagcugcugguccucauggagaacgagcgcacgcuggacuuccacgacuccaacgugaagaaccuguacgacaagguccggcuccagcugcgcgacaacgccaaggagcuggggaacggcugcuucgaguucuaccacaagugcgacaacgagugcauggagagcgugcggaacggcaccuacgacuacccccaguacuccgaggaggcgcgccucaagcgcgaggagaucagcggggugaagcuggaguccaucggcaccuaccagauccugagcaucuacuccaccgucgccagcucccucgcccuggccaucaugguggccgggcugagccucuggaugugcuccaacggcagccugcagugccggaucugcaucuga

SEQ ID NO: 77720 - RNA, 1701 nt, Artificial Sequence
  derived and/or modified CDS sequence (opt1) from hemagglutinin__InfluenzaA__BAJ39949
augaaggccauccuggugguccuccuguacaccuucgccaccgcgaacgccgacacgcugugcaucggcuaccacgccaacaacagcaccgacaccguggacaccgugcucgagaagaacgucacggugacccacuccgugaaccugcuggaggacaagcacaacgggaagcucugcaagcugcgcggcgucgcgccccugcaccucgggaagugcaacaucgccggcuggauccuggggaacccggagugcgagagccuguccaccgccagcuccuggagcuacaucguggagaccuccagcuccgacaacggcacgugcuaccccggcgacuucaucgacuacgaggagcuccgggagcagcugagcuccgugagcuccuucgagcgcuucgagaucuuccccaagaccagcuccuggcccaaccacgacagcaacaagggggucaccgccgccugcccgcacgccggcgcgaaguccuucuacaagaaccugaucuggcucgugaagaaggggaacagcuaccccaagcuguccaagagcuacaucaacgacaagggcaaggaggugcugguccucugggggauccaccaccccagcaccuccgccgaccagcagagccuguaccagaacgccgacacguacguguucgugggcaccucccgguacagcaagaaguucaagcccgagaucgccauccgcccgaagguccgggaccaggagggccgcaugaacuacuacuggacccugguggagcccggggacaagaucaccuucgaggccacgggcaaccucguggucccccgguacgcguucgccauggagcgcaacgccggguccggcaucaucaucagcgacacccccgugcacgacugcaacacgaccugccagaccccgaagggcgccaucaacaccucccugcccuuccagaacauccaccccaucaccaucgggaagugccccaaguacgucaagagcaccaagcugcggcucgccacgggccugcgcaacgugccguccauccagagccgggggcuguucggcgcgaucgccggguucaucgagggcggcuggaccgggaugguggacggcugguacggguaccaccaccagaacgagcagggcuccggguacgccgccgaccucaagagcacccagaacgccaucgacgagaucaccaacaaggugaacuccgucaucgagaagaugaacacgcaguucaccgcggugggcaaggaguucaaccaccuggagaagcgcaucgagaaccugaacaagaaggucgacgacggcuuccucgacaucuggaccuacaacgccaagcugcuggugcuccugaagaacgagcggacccuggacuaccacgacagcaacgugaagaaccucuacgagaagguccgcucccagcugaagaacaacgccaaggagaucgggaacggcugcuucgaguucuaccacaagugcgacaacacgugcauggagagcgugaagaacgggaccuacgacuaccccaaguacuccgaggaggccaagcugaaccgggaggagaucgacggcgugaagcucgagagcacccgcaucuaccagauccuggccaucuacuccaccgucgcgagcagccuggugcucguggucucccugggggccaucagcuucuggaugugcuccaacggcagccugcagugccggaucugcaucuga

SEQ ID NO: 77721 - RNA, 1701 nt, Artificial Sequence
  derived and/or modified CDS sequence (opt1) from hemagglutinin__InfluenzaA__BAJ39950
augaaggccauccuggugguccuccuguacaccuucgccaccgcgaacgccgacacgcugugcaucggcuaccacgccaacaacagcaccgacaccguggacaccgugcucgagaagaacgucacggugacccacuccgugaaccugcuggaggacaagcacaacgggaagcucugcaagcugcgcggcgucgcgccccugcaccucgggaagugcaacaucgccggcuggauccuggggaacccggagugcgagagccuguccaccgccagcuccuggagcuacaucgccgagaccuccagcuccgacaacggcacgugcuaccccggcgacuucaucgacuacgaggagcuccgggagcagcugagcuccgugagcuccuucgagcgcuucgagaucuuccccaagaccagcuccuggcccaaccacgacagcaacaagggggugaccgccgccugcccgcacgcgggcgccaaguccuucuacaagaaccugaucuggcucgucaagaaggggaacagcuaccccaagcuguccaagagcuacaucaacgacaagggcaaggaggugcuggugcucugggggauccaccaccccagcaccuccgccgaccagcagagccuguaccagaacgccgacgccuacgucuucgugggcacgucccgguacagcaagaaguucaagcccgagaucgcgauccgcccgaaggugcgggaccaggagggccgcaugaacuacuacuggacccuggucgagcccggggacaagaucaccuucgaggccaccggcaaccucguggugccccgguacgccuucgccauggagcgcaacgccggguccggcaucaucaucagcgacacgcccguccacgacugcaacacgaccugccagaccccgaagggcgcgaucaacaccucccugcccuuccagaacauccaccccaucaccaucgggaagugccccaaguacgucaagagcaccaagcugcggcucgccaccggccugcgcaacgugccguccauccagagccgggggcuguucggcgccaucgccggguucaucgagggcggcuggacggggaugguggacggcugguacggguaccaccaccagaacgagcagggcuccggguacgccgcggaccucaagagcacccagaacgccaucgacgagaucaccaacaaggugaacuccgugaucgagaagaugaacacccaguucacggccgucggcaaggaguucaaccaccuggagaagcgcaucgagaaccugaacaagaagguggacgacggcuuccucgacaucuggaccuacaacgccgagcugcugguccuccuggagaacgagcggacccuggacuaccacgacagcaacgugaagaaccucuacgagaaggugcgcucccagcugaagaacaacgccaaggagaucgggaacggcugcuucgaguucuaccacaagugcgacaacacgugcauggagagcgucaagaacgggaccuacgacuaccccaaguacuccgaggaggcgaagcugaaccgggaggagaucgacggcgugaagcucgagagcacccgcaucuaccagauccuggccaucuacuccaccguggccagcagccugguccucguggugucccugggggccaucagcuucuggaugugcuccaacggcagccugcagugccggaucugcaucuga

SEQ ID NO: 77722 - RNA, 1701 nt, Artificial Sequence
  derived and/or modified CDS sequence (opt1) from hemagglutinin__InfluenzaA__BAJ39951
augaaggccauccuggugguccuccuguacaccuucgccaccgcgaacgccgacacgcugugcaucggcuaccacgccaacaacagcaccgacaccguggacaccgugcucgagaagaacgucacggugacccacuccgugaaccugcuggaggacaagcacaacgggaagcucugcaagcugcgcggcgucgcgccccugcaccucgggaagugcaacaucgccggcuggauccuggggaacccggagugcgagagccuguccaccgccagcuccuggagcuacaucguggagaccuccagcuccgacaacggcacgugcuaccccggcgacuucaucgacuacgaggagcuccgggagcagcugagcuccgugagcuccuucgagcgcuucgagaucuuccccaagaccagcuccuggcccaaccacgacagcaacaagggggucaccgccgccugcccgcacgccggcgcgaaguccuucuacaagaaccugaucuggcucgugaagaaggggaacagcuaccccaagcuguccaagagcuacaucaacgacaagggcaaggaggugcugguccucugggggauccaccaccccagcaccuccgccgaccagcagagccuguaccagaacgccgacacguacguguucgugggcaccucccgguacagcaagaaguucaagcccgagaucgccauccgcccgaagguccgggaccaggagggccgcaugaacuacuacuggacccugguggagcccggggacaagaucaccuucgaggccacgggcaaccucguggucccccgguacgcguucgccauggagcgcaacgccggguccggcaucaucaucagcgacacccccgugcacgacugcaacacgaccugccagaccccgaagggcgccaucaacaccucccugcccuuccagaacauccaccccaucaccaucgggaagugccccaaguacgucaagagcaccaagcugcggcucgccacgggccugcgcaacgugccguccuuccagagccgggggcuguucggcgcgaucgccggguucaucgagggcggcuggaccgggaugguggacggcugguacggguaccaccaccagaacgagcagggcuccggguacgccgccgaccucaagagcacccagaacgccaucgacgagaucaccaacaaggugaacuccgucaucgagaagaugaacacgcaguucaccgcggugggcaaggaguucaaccaccuggagaagcgcaucgagaaccugaacaagaaggucgacgacggcuuccucgacaucuggaccuacaacgccgagcugcuggugcuccuggagaacgagcggacccuggacuaccacgacagcaacgugaagaaccucuacgagaagguccgcucccagcugaagaacaacgccaaggagaucgggaacggcugcuucgaguucuaccacaagugcgacaacacgugcauggagagcgugaagaacgggaccuacgacuaccccaaguacuccgaggaggccaagcugaaccgggaggagaucgacggcgugaagcucgagagcacccgcaucuaccagauccuggccaucuacuccaccgucgcgagcagccuggugcucguggucucccugggggccaucagcuucuggaugugcuccaacggcagccugcagugccggaucugcaucuga

SEQ ID NO: 77723 - RNA, 1701 nt, Artificial Sequence; identical to SEQ ID NO: 73296
  derived and/or modified CDS sequence (opt1) from hemagglutinin__InfluenzaA__BAJ39952

SEQ ID NO: 77724 - RNA, 1701 nt, Artificial Sequence
  derived and/or modified CDS sequence (opt1) from hemagglutinin__InfluenzaA__BAJ39953
augaaggccauccuggugguccuccuguacaccuucgccaccgcgaacgccgacacgcugugcaucggcuaccacgccaacaacagcaccgacaccguggacaccgugcucgagaagaacgucacggugacccacuccgugaaccugcuggaggacaagcacaacgggaagcucugcaagcugcgcggcgucgcgccccugcaccucgggaagugcaacaucgccggcuggauccuggggaacccggagugcgagagccuguccaccgccagcuccuggagcuacaucguggagaccuccagcuccgacaacggcacgugcuaccccggcgacuucaucgacuacgaggagcuccgggagcagcugagcuccgugagcuccuucgagcgcuucgagaucuuccccaagaccagcuccuggcccaaccacgacagcaacaagggggucaccgccgccugcccgcacgccggcgcgaaguccuucuacaagaaccugaucuggcucgugaagaaggggaacagcuaccccaagcuguccaagagcuacaucaacgacaagggcaaggaggugcugguccucugggggauccaccaccccagcaccuccgccgaccagcagagccuguaccagaacgccgacacguacguguucgugggcaccucccgguacagcaagaaguucaagcccgagaucgccauccgcccgaagguccgggaccaggagggccgcaugaacuacuacuggacccugguggagcccggggacaagaucaccuucgaggccacgggcaaccucguggucccccgguacgcguucgccauggagcgcaacgccggguccggcaucaucaucagcgacacccccgugcacgacugcaacacgaccugccagaccccgaagggcgccaucaacaccucccugcccuuccagaacauccaccccaucaccaucgggaagugccccaaguacgucaagagcaccaagcugcggcucgccacgggccugcgcaacgugccguccauccagagccgggggcuguucggcgcgaucgccggguucaucgagggcggcuggaccgggaugguggacggcugguacggguaccaccaccagaacgagcagggcuccggguacgccgccgaccucaagagcacccagaacgccaucgacgagaucaccaacaaggugaacuccgucaucgagaagaugaacacgcaguucaccgcggugggcaaggaguucaaccaccuggagaagcgcaucgagaaccugaacaagaaggucgacgacggcuuccucgacaucuggaccuacaacgccaagcugcuggugcuccuggagaacgagcggacccuggacuaccacgacagcaacgugaagaaccucuacgagaagguccgcucccagcugaagaacaacgccaaggagaucgggaacggcugcuucgaguucuaccacaagugcgacaacacgugcauggagagcgugaagaacgggaccuacgacuaccccaaguacuccgaggaggccaagcugaaccgggaggagaucgacggcgugaagcucgagagcacccgcaucuaccagauccuggccaucuacuccaccgucgcgagcagccuggugcucguggucucccugggggccaucagcuucuggaugugcuccaacggcagccugcagugccggaucugcaucuga

SEQ ID NO: 77725 - RNA, 1701 nt, Artificial Sequence; identical to SEQ ID NO: 73296
  derived and/or modified CDS sequence (opt1) from hemagglutinin__InfluenzaA__BAJ39954

SEQ ID NO: 77726 - RNA, 1701 nt, Artificial Sequence
  derived and/or modified CDS sequence (opt1) from hemagglutinin__InfluenzaA__BAJ39955
augaaggccauccuggugguccuccuguacaccuucgccaccgcgaacgccgacacgcugagcaucggcuaccacgccaacaacuccaccgacaccguggacaccgugcucgagaagaacgucacggugacccacagcgugaaccugcuggaggacaagcacaacgggaagcucugcaagcugcgcggcgucgcgccccugcaccucgggaagugcaacaucgccggcuggauccuggggaacccggagugcgagucccugagcaccgcguccagcugguccuacaucguggagaccagcuccagcgacaacggcacgugcuaccccggcgacuucaucgacuacgaggagcuccgggagcagcuguccagcguguccagcuucgagcgcuucgagaucuuccccaagaccuccagcuggcccaaccacgacuccaacaagggggucaccgccgccugcccgcacgccggcgccaagagcuucuacaagaaccugaucuggcucgugaagaaggggaacuccuaccccaagcugagcaagagcuacaucaacgacaagggcaaggaggugcugguccucugggggauccaccaccccuccaucagcgccgaccagcagucccuguaccagaacgccgacaccuacguguucgugggcacgagccgguacuccaagaaguucaagcccgagaucgccauccgcccgaagguccgggaccaggagggccgcaugaacuacuacuggacccugguggagcccggggacaagaucaccuucgaggccaccggcaaccucguggucccccgguacgcguucgccauggagcgcaacgccgggagcggcaucaucaucuccgacacgcccgugcacgacugcaacacgaccugccagaccccgaagggcgccaucaacaccagccugcccuuccagaacauccaccccaucaccaucgggaagugccccaaguacgugaaguccaccaagcugcggcucgccaccggccugcgcaacgucccgagcauccagucccgggggcuguucggcgcgaucgccggguucaucgagggcggcuggacggggaugguggacggcugguacggguaccaccaccagaacgagcagggcagcggguacgccgccgaccucaaguccacccagaacgccaucgacgagaucaccaacaaggugaacagcgucaucgagaagaugaacacccaguucacggcggugggcaaggaguucaaccaccuggagaagcgcaucgagaaccugaacaagaaggucgacgacggcuuccucgacaucuggaccuacaacgccgagcugcuggugcuccuggagaacgagcggacccuggacuaccacgacuccaacgugaagaaccucuacgagaagguccgcagccagcugaagaacaacgccaaggagaucgggaacggcugcuucgaguucuaccacaagugcgacaacacgugcauggaguccgugaagaacgggaccuacgacuaccccaaguacagcgaggaggccaagcugaaccgggaggagaucgacggcgugaagcucgaguccacccgcaucuaccagauccuggccaucuacagcaccgucgcgagcucccuggugcucguggucagccugggggccaucuccuucuggaugugcagcaacggcucccugcagugcaagaucugcaucuga

SEQ ID NO: 77727 - RNA, 1701 nt, Artificial Sequence; identical to SEQ ID NO: 77721
  derived and/or modified CDS sequence (opt1) from hemagglutinin__InfluenzaA__BAJ39956

SEQ ID NO: 77728 - RNA, 1701 nt, Artificial Sequence; identical to SEQ ID NO: 73296
  derived and/or modified CDS sequence (opt1) from hemagglutinin__InfluenzaA__BAJ39957

SEQ ID NO: 77729 - RNA, 1701 nt, Artificial Sequence
  derived and/or modified CDS sequence (opt1) from hemagglutinin__InfluenzaA__BAJ39958
augaaggccauccuggugguccuccuguacaccuucgccaccgcgaacgccgacacgcugugcaucggcuaccacgccaacaacagcaccgacaccguggacaccgugcucgagaagaacgucacggugacccacuccgugaaccugcuggaggacaagcacaacgggaagcucugcaagcugcgcggcgucgcgccccugcaccucgggaagugcaacaucgccggcuggauccuggggaacccggagugcgagagccuguccaccgccagcuccuggagcuacaucguggagaccuccagcuccgacaacggcacgugcuaccccggcgacuucaucgacuacgaggagcuccgggagcagcugagcuccgugagcuccuucgagcgcuucgagaucuuccccaagaccagcuccuggcccaaccacgacagcaacaagggggucaccgccgccugcccgcacgccggcgcgaaguccuucuacaagaaccugaucuggcucgugaagaaggggaacagcuaccccaagcuguccaagagcuacaucaacgacaagggcaaggaggugcugguccucugggggauccaccaccccagcaccuccgccgaccagcagagccuguaccagaacgccgacgccuacguguucgugggcacgucccgguacagcaagaaguucaagcccgagaucgccauccgcccgaagguccgggaccaggagggccgcaugaacuacuacuggacccugguggagcccggggacaagaucaccuucgaggcgaccggcaaccucguggucccccgguacgccuucgccauggagcgcaacgccggguccggcaucaucaucagcgacacgcccgugcacgacugcaacacgaccugccagaccccgaagggcgccaucaacaccucccugcccuuccagaacauccaccccaucaccaucgggaagugccccaaguacgucaagagcaccaagcugcggcucgcgaccggccugcgcaacgugccguccauccagagccgggggcuguucggcgccaucgccggguucaucgagggcggcuggacggggaugguggacggcugguacggguaccaccaccagaacgagcagggcuccggguacgccgccgaccucaagagcacccagaacgcgaucgacgagaucaccaacaaggugaacuccgucaucgagaagaugaacacccaguucacggccgugggcaaggaguucaaccaccuggagaagcgcaucgagaaccugaacaagaaggucgacgacggcuuccucgacaucuggaccuacaacgccgagcugcuggugcuccuggagaacgagcggacccuggacuaccacgacagcaacgugaagaaccucuacgagaaggucaagucccagcugaagaacaacgccaaggagaucgggaacggcugcuucgaguucuaccacaagugcgacaacacgugcauggagagcgugaagaacgggaccuacgacuaccccaaguacuccaaggaggccaagcugaaccgcgagaagaucgacggcgugaagcucgagagcacccggaucuaccagauccuggcgaucuacuccaccgucgccagcagccuggugcucguggucucccugggggccaucagcuucuggaugugcuccaacggcagccugcagugccgcaucugcaucuga

SEQ ID NO: 77730 - RNA, 1701 nt, Artificial Sequence
  derived and/or modified CDS sequence (opt1) from hemagglutinin__InfluenzaA__BAJ39959
augaaggccauccuggugguccuccuguacaccuucgccaccgcgaacgccgacacgcugugcaucggcuaccacgccaacaacagcaccgacaccguggacaccgugcucgagaagaacgucacggugacccacuccgugaaccugcuggaggacaagcacaacgggaagcucugcaagcugcgcggcgucgcgccccugcaccucgggaagugcaacaucgccggcuggauccuggggaacccggagugcgagagccuguccaccgccagcuccuggagcuacaucguggagaccuccagcuccgacaacggcacgugcuaccccggcgacuucaucgacuacgaggagcuccgggagcagcugagcuccgugagcuccuucgagcgcuucgagaucuuccccaagaccagcuccuggcccaaccacgacagcaacaagggggucaccgccgccugcccgcacgccggcgcgaaguccuucuacaagaaccugaucuggcucgugaagaaggggaacagcuaccccaagcuguccaagagcuacaucaacgacaagggcaaggaggugcugguccucugggggauccaccaccccagcaccuccgccgaccagcagagccuguaccagaacgccgacgccuacguguucgugggcacgucccgguacagcaagaaguucaagcccgagaucgccauccgcccgaagguccgggaccaggagggccgcaugaacuacuacuggacccugguggagcccggggacaagaucaccuucgaggcgaccggcaaccucguggucccccgguacgccuucgccauggagcgcaacgccggguccggcaucaucaucagcgacacgcccgugcacgacugcaacacgaccugccagaccccgaagggcgccaucaacaccucccugcccuuccagaacauccaccccaucaccaucgggaagugccccaaguacgucaagagcaccaagcugcggcucgcgaccggccugcgcaacgugccguucauccagucccgggggcuguucggcgccaucgccggguucaucgagggcggcuggacggggaugguggacggcugguacggguaccaccaccagaacgagcagggcagcggguacgccgccgaccucaaguccacccagaacgcgaucgacgagaucaccaacaaggugaacagcgucaucgagaagaugaacacccaguucacggccgugggcaaggaguucaaccaccuggagaagcgcaucgagaaccugaacaagaaggucgacgacggcuuccucgacaucuggaccuacaacgccgagcugcuggugcuccuggagaacgagcggacccuggacuaccacgacuccaacgugaagaaccucuacgagaaggucaagagccagcugaagaacaacgccaaggagaucgggaacggcugcuucgaguucuaccacaagugcgacaacacgugcauggaguccgugaagaacgggaccuacgacuaccccaaguacagcaaggaggccaagcugaaccgcgaggagaucgacggcgugaagcucgaguccacccggaucuaccagauccuggcgaucuacagcaccgucgccuccagccuggugcucguggucagccugggggccaucuccuucuggaugugcagcaacggcucccugcagugccgcaucugcaucuga

SEQ ID NO: 77731 - RNA, 1701 nt, Artificial Sequence; identical to SEQ ID NO: 66693
  derived and/or modified CDS sequence (opt1) from hemagglutinin__InfluenzaA__BAJ39960

SEQ ID NO: 77732 - RNA, 1701 nt, Artificial Sequence; identical to SEQ ID NO: 67322
  derived and/or modified CDS sequence (opt1) from hemagglutinin__InfluenzaA__BAJ39961

SEQ ID NO: 77733 - RNA, 1701 nt, Artificial Sequence
  derived and/or modified CDS sequence (opt1) from hemagglutinin__InfluenzaA__BAJ39962
augaaggccauccuggugguccuccuguacaccuucgccaccgcgaacgccgacacgcugugcaucggcuaccacgccaacaacagcaccgacaccguggacaccgugcucgagaagaacgucacggugacccacuccgugaaccugcuggaggacaagcacaacgggaagcucugcaagcugcgcggcgucgcgccccugcaccucgggaagugcaacaucgccggcuggauccuggggaacccggagugcgagagccuguccaccgccagcuccuggagcuacaucgccgagaccuccagcuccgacaacggcacgugcuaccccggcgacuucaucgacuacgaggagcuccgggagcagcugagcuccgugagcuccuucgagcgcuucgagaucuuccccaagaccagcuccuggcccaaccacgacagcaacaagggggugaccgccgccugcccgcacgcgggcgccaaguccuucuacaagaaccugaccuggcucgucaagaaggggaacagcuaccccaagcuguccaagagcuacaucaacgacaagggcaaggaggugcuggugcucugggggauccaccaccccagcacguccgccgaccagcagagccuguaccagaacgccgacgccuacgucuucgugggcaccucccgguacagcaagaaguucaagcccgagaucgcgauccgcccgaaggugcgggaccaggagggccgcaugaacuacuacuggacccuggucgagcccggggacaagaucaccuucgaggccacgggcaaccucguggugccccgguacgccuucgccauggagcgcaacgccggguccggcaucaucaucagcgacacccccguccacgacugcaacacgaccugccagaccccgaagggcgcgaucaacaccucccugcccuuccagaacauccaccccaucaccaucgggaagugccccaaguacgucaagagcaccaagcugcggcucgccacgggccugcgcaacgugccguucauccagucccgggggcuguucggcgccaucgccggguucaucgagggcggcuggaccgggaugguggacggcugguacggguaccaccaccagaacgagcagggcagcggguacgccgcggaccucaaguccacccagaacgccaucgacgagaucaccaacaaggugaacagcgugaucgagaagaugaacacgcaguucaccgccgucggcaaggaguucaaccaccuggagaagcgcaucgagaaccugaacaagaagguggacgacggcuuccucgacaucuggaccuacaacgccgagcugcugguccuccuggagaacgagcggacccuggacuaccacgacuccaacgugaagaaccucuacgagaaggucaagagccagcugaagaacaacgccaaggagaucgggaacggcugcuucgaguucuaccacaagugcgacaacacgugcauggaguccgugaagaacgggaccuacgacuaccccaaguacagcaaggaggcgaagcugaaccgcgaggagaucgacggcgugaagcucgaguccacccggaucuaccagauccuggccaucuacagcaccguggccuccagccugguccucguggugagccugggggccaucuccuucuggaugugcagcaacggcucccugcagugccgcaucugcaucuga

SEQ ID NO: 77734 - RNA, 1701 nt, Artificial Sequence; identical to SEQ ID NO: 66693
  derived and/or modified CDS sequence (opt1) from hemagglutinin__InfluenzaA__BAJ39963

SEQ ID NO: 77735 - RNA, 1701 nt, Artificial Sequence; identical to SEQ ID NO: 73296
  derived and/or modified CDS sequence (opt1) from hemagglutinin__InfluenzaA__BAJ39964

SEQ ID NO: 77736 - RNA, 1701 nt, Artificial Sequence; identical to SEQ ID NO: 66693
  derived and/or modified CDS sequence (opt1) from hemagglutinin__InfluenzaA__BAJ39965

SEQ ID NO: 77737 - RNA, 1701 nt, Artificial Sequence; identical to SEQ ID NO: 66693
  derived and/or modified CDS sequence (opt1) from hemagglutinin__InfluenzaA__BAJ39966

SEQ ID NO: 77738 - RNA, 1701 nt, Artificial Sequence
  derived and/or modified CDS sequence (opt1) from hemagglutinin__InfluenzaA__BAJ39967
augaaggccauccuggugguccuccuguacaccuucgccaccgcgaacgccgacacgcugugcaucggcuaccacgccaacaacagcaccgacaccguggacaccgugcucgagaagaacgucacggugacccacuccgugaaccugcuggaggacaagcacaacgggaagcucugcaagcugcgcggcgucgcgccccugcaccucgggaagugcaacaucgccggcuggauccuggggaacccggagugcgagcugcucagcaccgcguccagcugguccuacaucguggagaccagcuccagcgacaacggcacgugcuaccccggcgacuucaucgacuacgaggagcugcgggagcagcuguccagcguguccagcuucgagcgcuucgagaucuuccccaagaccuccagcuggcccaaccacgacuccgacaagggggucaccgccgccugcccgcacgccggcgccaagagcuucuacaagaaccucaucuggcuggugaagaaggggaacuccuaccccaagcugagcaaguccuacaucaacgacaagggcaaggaggugcucguccugugggggauccaccaccccagcaccagcgccgaccagcagucccuguaccagaacgccgacgccuacguguucgugggcacgagccgguacuccaagaaguucaagcccgagaucgccauccgcccgaagguccgggaccaggagggccgcaugaacuacuacuggacccucguggagcccggggacaagaucaccuucgaggcgaccggcaaccugguggucccccgguacgccuucgccauggagcgcaacgccgggagcggcaucaucaucuccgacacgcccgugcacgacugcaacacgaccugccagaccccgaagggcgccaucaacaccagccugcccuuccagaacauccaccccaucaccaucgggaagugccccaaguacgugaaguccaccaagcuccggcuggcgaccggccugcgcaacgucccgagcauccagucccggggccucuucggggccaucgccggguucaucgagggcggcuggacggggaugguggacggcugguacggguaccaccaccagaacgagcagggcagcggguacgccgccgaccugaaguccacccagaacgcgaucgacgagaucaccaacaaggugaacagcgucaucgagaagaugaacacccaguucacggcccugggcaaggaguucaaccaccucgagaagaagaucgagaaccugaacaagaagguggacgacggcuuccuggacaucuggaccuacaacgccgagcuccugguccugcucgagaacgagcgcacccuggacuaccacgacuccaacgugaagaaccuguacgagaaggugcggagccagcucaagaacaacgccaaggagaucgggaacggcugcuucgaguucuaccacaagugcgacaacacgugcauggaguccgucaagaacgggaccuacgacuaccccaaguacagcgaggaggccaagcugaaccgcgaggagaucgacggcgugaagcuggaguccacccggaucuaccagauccucgcgaucuacagcaccguggccuccagccugguccugguggugagccucggggccaucuccuucuggaugugcagcaacggcucccugcagugccgcaucugcaucuga

SEQ ID NO: 77739 - RNA, 1701 nt, Artificial Sequence; identical to SEQ ID NO: 72221
  derived and/or modified CDS sequence (opt1) from hemagglutinin__InfluenzaA__BAJ39968

SEQ ID NO: 77740 - RNA, 1701 nt, Artificial Sequence; identical to SEQ ID NO: 73296
  derived and/or modified CDS sequence (opt1) from hemagglutinin__InfluenzaA__BAJ39969

SEQ ID NO: 77741 - RNA, 1701 nt, Artificial Sequence; identical to SEQ ID NO: 66693
  derived and/or modified CDS sequence (opt1) from hemagglutinin__InfluenzaA__BAJ39970

SEQ ID NO: 77742 - RNA, 1701 nt, Artificial Sequence; identical to SEQ ID NO: 66693
  derived and/or modified CDS sequence (opt1) from hemagglutinin__InfluenzaA__BAJ39971

SEQ ID NO: 77743 - RNA, 1701 nt, Artificial Sequence; identical to SEQ ID NO: 67322
  derived and/or modified CDS sequence (opt1) from hemagglutinin__InfluenzaA__BAJ39972

SEQ ID NO: 77744 - RNA, 1701 nt, Artificial Sequence
  derived and/or modified CDS sequence (opt1) from hemagglutinin__InfluenzaA__BAJ39973
augaaggccauccuggugguccuccuguacaccuucgccaccgcgaacgccgacacgcugugcaucggcuaccacgccaacaacagcaccgacaccguggacaccgugcucgagaagaacgucacggugacccacuccgugaaccugcuggaggacaagcacaacgggaagcucugcaagcugcgcggcgucgcgccccugcaccucgggaagugcaacaucgccggcuggauccuggggaacccggagugcgagagccuguccaccgccagcuccuggagcuacaucguggagaccuccagcuccgacaacggcacgugcuaccccggcgacuucaucgacuacgaggagcuccgggagcagcugagcuccgugagcuccuucgagcgcuucgagaucuuccccaagaccagcuccuggcccaaccacgacagcaacaagggggucaccgccgccugcccgcacgccggcgcgaaguccuucuacaagaaccugaucuggcucgugaagaaggggaacagcuaccccaagcuguccaagagcuacaucaacgacaagggcaaggaggugcugguccucugggggauccaccaccccagcaccuccgccgaccagcagagccuguaccagaacgccgacacguacguguucgugggcaccucccgguacagcaagaaguucaagcccgagaucgccauccgcccgaagguccgggaccaggagggccgcaugaacuacuacuggacccugguggagcccggggacaagaucaccuucgaggccacgggcaaccucguggucccccgguacgcguucgccauggagcgcaacgccggguccggcaucaucaucagcgacacccccgugcacgacugcaacacgaccugccagaccccgaagggcgccaucaacaccucccugcccuuccagaacauccaccccaucaccaucgggaagugccccaaguacgucaagagcaccaagcugcggcucgccacgggccugcgcaacgugccguccauccagagccgggggcuguucggcgcgaucgccggguucaucgagggcggcuggaccgggaugguggacggcugguacggguaccaccaccagaacgagcagggcuccggguacgccgccgaccucaagagcacccagaacgccaucgacgagaucaccaacaaggugaacuccgucaucgagaagaugaacacgcaguucaccgcggugggcaaggaguucaaccaccuggagaagcgcaucgagaaccugaacaagaaggucgacgacggcuuccucgacaucuggaccuacaacgccgagcugcuggugcuccuggagaacgagcggacccuggacuaccacgacagcaacgugaagaaccucuacgagaaggucaagucccagcugaagaacaacgccaaggagaucgggaacggcugcuucgaguucuaccacaagugcgacaacacgugcauggagagcgugaagaacgggaccuacgacuaccccaaguacuccgaggaggccaagcugaaccgcgaggagaucgacggcgugaagcucgagagcacccggaucuaccagauccuggccaucuacuccaccgucgcgagcagccuggugcucguggucucccugggggccaucagcuucuggaugugcuccaacggcagccugcagugccgcaucugcaucuga

SEQ ID NO: 77745 - RNA, 1701 nt, Artificial Sequence; identical to SEQ ID NO: 66693
  derived and/or modified CDS sequence (opt1) from hemagglutinin__InfluenzaA__BAJ39974

SEQ ID NO: 77746 - RNA, 1701 nt, Artificial Sequence; identical to SEQ ID NO: 67262
  derived and/or modified CDS sequence (opt1) from hemagglutinin__InfluenzaA__BAJ39975

SEQ ID NO: 77747 - RNA, 1701 nt, Artificial Sequence
  derived and/or modified CDS sequence (opt1) from hemagglutinin__InfluenzaA__BAJ39976
augaaggccauccuggugguccuccuguacaccuucgccaccgcgaacgccgacacgcugugcaucggcuaccacgccaacaacagcaccgacaccguggacaccgugcucgagaagaacgucacggugacccacuccgugaaccugcuggaggacaagcacaacgagaagcucugcaagcugcgcggggucgcgccccugcaccucggcaagugcaacaucgccggguggauccugggcaacccggagugcgagagccuguccaccgccagcuccuggagcuacaucguggagaccuccagcuccgacaacgggacgugcuaccccggcgacuucaucgacuacgaggagcuccgggagcagcugagcuccgugagcuccuucgagcgcuucgagaucuuccccaagaccagcuccuggcccaaccacgacagcaacaagggcgucaccgccgccugcccgcacgccggggcgaaguccuucuacaagaaccugaucuggcucgugaagaagggcaacagcuaccccaagcuguccaagagcuacaucaacgacaaggggaaggaggugcugguccucuggggcauccaccaccccagcaccuccgccgaccagcagagccuguaccagaacgccgacgccuacguguucguggggacgucccgguacagcaagaaguucaagcccgagaucgccauccgcccgaagguccgggaccaggagggccgcaugaacuacuacuggacccugguggagcccggcgacaagaucaccuucgaggcgaccgggaaccucguggucccccgguacgccuucgccauggagcgcaacgccggcuccgggaucaucaucagcgacacgcccgugcacgacugcaacacgaccugccagaccccgaagggcgccaucaacaccucccugcccuuccagaacauccaccccaucaccaucggcaagugccccaaguacgucaagagcaccaagcugcggcucgcgaccgggcugcgcaacgugccguccauccagagccggggccuguucggggccaucgccggcuucaucgagggcggguggacgggcaugguggacgggugguacggcuaccaccaccagaacgagcagggguccggcuacgccgccgaccucaagagcacccagaacgcgaucgacaagaucaccaacaaggugaacuccgucaucgagaagaugaacacccaguucacggccguggggaaggaguucaaccaccuggagaagcgcaucgagaaccugaacaagaaggucgacgacggcuuccucgacaucuggaccuacaacgccgagcugcuggugcuccuggagaacgagcggacccuggacuaccacgacagcaacgugaagaaccucuacgagaagguccgcucccagcugaagaacaacgccaaggagaucggcaacgggugcuucgaguucuaccacaagugcgacaacacgugcauggagagcgugaagaacggcaccuacgacuaccccaaguacuccgaggaggccaagcugaaccgggaggagaucgacggggugaagcucgagagcacccgcaucuaccagauccuggcgaucuacuccaccgucgccagcagccuggugcucguggucucccugggcgccaucaacuucuggaugugcagcaacgggucccugcagugccggaucugcaucuga

SEQ ID NO: 77748 - RNA, 1701 nt, Artificial Sequence; identical to SEQ ID NO: 66693
  derived and/or modified CDS sequence (opt1) from hemagglutinin__InfluenzaA__BAJ39977

SEQ ID NO: 77749 - RNA, 1701 nt, Artificial Sequence
  derived and/or modified CDS sequence (opt1) from hemagglutinin__InfluenzaA__BAJ39978
augaaggccauccuggugguccuccuguacaccuucgccaccgcgaacgccgacacgcugugcaucggcuaccacgccaacaacagcaccgacaccguggacaccgugcucgagaagaacgucacggugacccacuccgugaaccugcuggaggacaagcacaacgggaagcucugcaagcugcgcggcgucgcgccccugcaccucgggaagugcaacaucgccggcuggauccuggggaacccggagugcgagagccuguccaccgccagcuccuggagcuacaucguggagaccuccagcuccgacaacggcacgugcuaccccggcgacuucaucgacuacgaggagcuccgggagcagcugagcuccgugagcuccuucgagcgcuucgagaucuuccccaagaccagcuccuggcccaaccacgacagcaacaagggggucaccgccgccugcccgcacgccggcgcgaaguccuucuacaagaaccugaucuggcucgugaagaaggggaacagcuaccccaagcuguccaagagcuacaucaacgacaagggcaaggaggugcugguccucugggggauccaccaccccagcaccuccgccgaccagcagagccuguaccagaacgccgacgccuacguguucgugggcacgucccgguacagcaagaaguucaagcccgagaucgccauccgcccgaagguccgggagcaggagggccgcaugaacuacuacuggacccugguggagcccggggacaagaucaccuucgaggcgaccggcaaccucguggucccccgguacgccuucgccauggagcgcaacgccggguccggcaucaucaucagcgacacgcccgugcacgacugcaacacgaccugccagaccccgaagggcgccaucaacaccucccugcccuuccagaacauccacagcaucaccaucgggaagugccccaaguacgugaaguccaccaagcugcggcucgcgaccggccugcgcaacguccccagcauccagucccgggggcuguucggcgccaucgccggguucaucgagggcggcuggacggggaugguggacggcugguacggguaccaccaccagaacgagcagggcagcggguacgccgccgaccucaaguccacccagaacgcgaucgacgagaucaccaacaaggugaacagcgucaucgagaagaugaacacccaguucacggccgugggcaaggaguucaaccaccuggagaagcgcaucgagaaccugaacaagaaggucgacgacggcuuccucgacaucuggaccuacaacgccgagcugcuggugcuccuggagaacgagcggacccuggacuaccacgacuccaacgugaagaaccucuacgagaaggucaagagccagcugaagaacaacgccaaggagaucgggaacggcugcuucgaguucuaccacaagugcgacaacacgugcauggaguccgugaagaacgggaccuacgacuacccgaaguacagcgaggaggccaagcugaaccgcgagaagaucgacggcgugaagcucgaguccacccggaucuaccagauccuggcgaucuacagcaccgucgccagcucccuggugcucguggucagccugggggccaucuccuucuggaugugcagcaacggcucccugcagugccgcaucugcaucuga

SEQ ID NO: 77750 - RNA, 1701 nt, Artificial Sequence
  derived and/or modified CDS sequence (opt1) from hemagglutinin__InfluenzaA__BAJ39979
augaaggccauccuggugguccuccuguacaccuucgccaccgcgaacgccgacacgcugugcaucggcuaccacgccaacaacagcaccgacaccguggacaccgugcucgagaagaacgucacggugacccacuccgugaaccugcuggaggacaagcacaacgggaagcucugcaagcugcgcggcgucgcgccccugcaccucgggaagugcaacaucgccggcuggauccuggggaacccggagugcgagcugcucagcaccgcguccagcugguccuacaucguggagaccagcuccagcgacaacggcacgugcuaccccggcgacuucaucgacuacgaggagcugcgggagcagcuguccagcguguccagcuucgagcgcuucgagaucuuccccaagaccuccagcuggcccaaccacgacuccgacaagggggucaccgccgccugcccgcacgccggcgccaagagcuucuacaagaaccucaucuggcuggugaagaaggggaacuccuaccccaagcugagcaaguccuacaucaacgacaagggcaaggaggugcucguccugugggggauccaccaccccagcaccagcgccgaccagcagucccuguaccagaacgccgacgccuacguguucgugggcacgagccgguacuccaagaaguucaagcccgagaucgccauccgcccgaagguccgggaccaggagggccgcauggacuacuacuggacccucguggagcccggggacaagaucaccuucgaggcgaccggcaaccugguggucccccgguacgccuucgccauggagcgcaacgccgggagcggcaucaucaucuccgacacgcccgugcacaacugcaacacgaccugccagaccccgaagggcgccaucaacaccagccugcccuuccagaacauccaccccaucaccaucgggaagugccccaaguacgugaaguccaccaagcuccggcuggcgaccggccugcgcaacgucccgagcauccagucccggggccucuucggggccaucgccggguucaucgagggcggcuggacggggaugguggacggcugguacggguaccaccaccagaacgagcagggcagcggguacgccgccgaccugaaguccacccagaacgcgaucgacaagaucaccaacaaggugaacagcgucaucgagaagaugaacacccaguucacggccgugggcaaggaguucaaccaccuggagaaccgcaucgagaaccucaacaagaaggucgacgacggcuuccuggacaucuggaccuacaacgccgagcugcucgugcugcuggagaacgagcggacccucgacuaccacgacuccaacgugaagaaccuguacgagaagguccgcagccagcugaagaacaacgccaaggagaucgggaacggcugcuucgaguucuaccacaagugcgacaacacgugcauggaguccgugaagaacgggaccuacgacuaccccaaguacagcgaggaggccaagcucaaccgggaggagaucgacggcgugaagcuggaguccacccgcaucuaccagauccuggcgaucuacagcaccgucgccuccagccucgugcugguggucagccugggggccaucuccuucuggaugugcagcaacggcucccuccagugccggaucugcaucuga

SEQ ID NO: 77751 - RNA, 1701 nt, Artificial Sequence; identical to SEQ ID NO: 73296
  derived and/or modified CDS sequence (opt1) from hemagglutinin__InfluenzaA__BAJ39980

SEQ ID NO: 77752 - RNA, 1701 nt, Artificial Sequence
  derived and/or modified CDS sequence (opt1) from hemagglutinin__InfluenzaA__BAJ39981
augaaggccauccuggugguccuccuguacaccuucgccaccgcgaacgccgacacgcugugcaucggcuaccacgccaacaacagcaccgacaccguggacaccgugcucgagaagaacgucacggugacccacuccgugaaccugcuggaggacaagcacaacgggaagcucugcaagcugcgcggcgucgcgccccugcaccucgggaagugcaacaucgccggcuggauccuggggaacccggagugcgagagccuguccaccgccagcuccuggagcuacaucguggagaccuccagcuccgacaacggcacgugcuaccccggcgacuucaucgacuacgaggagcuccgggagcagcugagcuccgugagcuccuucgagcgcuucgagaucuuccccaagaccagcuccuggcccaaccacgacagcaacaagggggucaccgccgccugcccgcacgccggcgcgaaguccuucuacaagaaccugaucuggcucgugaagaaggggaacagcuaccccaagcuguccaagagcuacaucaacgacaagggcaaggaggugcugguccucugggggauccaccaccccagcaccuccgccgaccagcagagccuguaccagaacgccgacgccuacguguucgugggcacgucccgguacagcaagaaguucaagcccgagaucgccauccgcccgaagguccgggaccaggagggccgcaugaacuacuacuggacccugguggagcccggggacaagaucaccuucgaggcgaccggcaaccucguggucccccgguacgccuucgccauggagcgcaacgccggguccggcaucaucaucagcgacacgcccgugcacgacugcaacacgaccugccagaccccgaagggcgccaucaacaccucccugcccuuccagaacauccaccccaucaccaucgggaagugcagcaaguacgugaaguccaccaagcugcggcucgcgaccggccugcgcaacguccccagcauccagucccgggggcuguucggcgccaucgccggguucaucgagggcggcuggacggggaugguggacggcugguacggguaccaccaccagaacgagcagggcagcggguacgccgccgaccucaaguccacccagaacgcgaucgacgagaucaccaacaaggugaacagcgucaucgagaagaugaacacccaguucacggccgugggcaaggaguucaaccaccuggagaagcgcaucgagaaccugaacaagaaggucgacgacggcuuccucgacaucuggaccuacaacgccgagcugcuggugcuccuggagaacgagcggacccuggacuaccacgacuccaacgugaagaaccucuacgagaaggucaagagccagcugaagaacaacgccaaggagaucgggaacggcugcuucgaguucuaccacaagugcgacaacacgugcauggaguccgugaagaacgggaccuacgacuacccgaaguacagcaaggaggccaagcugaaccgcgagaagaucgacggcgugaagcucgaguccacccggaucuaccagauccuggcgaucuacagcaccgucgccagcucccuggugcucguggucagccugggggccaucuccuucuggaugugcagcaacggcucccugcagugccgcaucugcaucuga

SEQ ID NO: 77753 - RNA, 1701 nt, Artificial Sequence
  derived and/or modified CDS sequence (opt1) from hemagglutinin__InfluenzaA__BAJ39982
augaaggccauccuggugguccuccuguacaccuucgccaccgcgaacgccgccacgcugugcaucggcuaccacgccaacaacagcaccgacaccguggacacccuccuggagaagaacgugacggucacccacuccgugaaccugcucgaggacaagcacaacgggaagcugugcaagcugcgcggcguggcgccccuccaccuggggaagugcaacaucgccggcuggauccuggggaacccggagugcgagagccucuccaccgccagcuccuggagcuacaucgucgagaccuccagcuccgacaacggcacgugcuaccccggcgacuucaucgacuacgaggagcugcgggagcagcugagcuccgugagcuccuucgagcgcuucgagaucuuccccaagaccagcuccuggcccaaccacgacagcaacaagggggugaccgccgccugcccgcacgcgggcgccaaguccuucuacaagaaccucaucuggcuggucaagaaggggaacagcuaccccaagcuguccaagagcuacaucaacgacaagggcaaggaggugcucgugcugugggggauccaccaccccagcaccuccgccgaccagcagagccuguaccagaacgccgacgccuacgucuucgugggcacgucccgguacagcaagaaguucaagcccgagaucgcgauccgcccgaaggugcgggaccaggagggccgcaugaacuacuacuggacccucgucgagcccggggacaagaucaccuucgaggccaccggcaaccugguggugccccgguacgccuucgccauggagcgcaacgccggguccggcaucaucaucagcgacacgcccguccacgacugcaacacgaccugccagaccccgaagggcgcgaucaacaccucccugcccuuccagaacauccaccccaucaccaucgggaagugccccaaguacgucaagagcaccaagcuccggcuggccaccggccugcgcaacgugccguccauccagagccgggggcuguucggcgccaucgccggguucaucgagggcggcuggacggggaugguggacggcugguacggguaccaccaccagaacgagcagggcuccggguacgccgcggaccucaagagcacccagaacgccaucgacgagaucaccaacaaggugaacuccgugaucgagaagaugaacacccaguucacggccgucggcaaggaguucaaccaccuggagaagcgcaucgagaaccucaacaagaagguggacgacggcuuccuggacaucuggaccuacaacgccgagcugcucguccugcuggagaacgagcggacccucgacuaccacgacagcaacgugaagaaccuguacgagaaggugcgcucccagcugaagaacaacgccaaggagaucgggaacggcugcuucgaguucuaccacaagugcgacaacacgugcauggagagcgucaagaacgggaccuacgacuaccccaaguacuccgaggaggcgaagcucaaccgggaggagaucgacggcgugaagcuggagagcacccgcaucuaccagauccuggccaucuacuccaccguggccagcagccucguccugguggugucccugggggccaucagcuucuggaugugcuccaacggcagccuccagugccggaucugcaucuga

SEQ ID NO: 77754 - RNA, 1701 nt, Artificial Sequence; identical to SEQ ID NO: 77721
  derived and/or modified CDS sequence (opt1) from hemagglutinin__InfluenzaA__BAJ39983

SEQ ID NO: 77755 - RNA, 1701 nt, Artificial Sequence
  derived and/or modified CDS sequence (opt1) from hemagglutinin__InfluenzaA__BAJ39984
augaaggccauccuggugguccuccuguacaccuucgccaccgcgaacgccgacacgcugugcaucggcuaccacgccaacaacagcaccgacaccguggacaccgugcucgagaagaacgucacggugacccacuccgugaaccugcuggaggacaagcacaacgggaagcucugcaagcugcgcggcgucgcgccccugcaccucgggaagugcaacaucgccggcuggauccuggggaacccggagugcgagcugcucagcaccgcguccagcugguccuacaucguggagaccagcuccagcgacaacggcacgugcuaccccggcgacuucaucgacuacgaggagcugcgggagcagcuguccagcguguccagcuucgagcgcuucgagaucuuccccaagaccuccagcuggcccaaccacgacuccaacaagggggucaccgccgccugcccgcacgccggcgccaagagcuucuacaagaaccucaucuggcuggugaagaaggggaacuccuaccccaagcugagcaaguccuacaucaacgacaagggcaaggaggugcucguccugugggggauccaccaccccagcaccagcgccgaccagcagucccuguaccagaacgccgacgccuacguguucgugggcacgagccgguacuccaagaaguucaagcccgagaucgccauccgcccgaagguccgggaccaggagggccgcaugaacuacuacuggacccucguggagcccggggacaagaucaccuucgaggcgaccggcaaccugguggucccccgguacgccuucgccauggagcgcaacgccgggagcggcaucaucaucuccgacacgcccgugcacaacugcaacacgaccugccagaccccgaagggcgccaucaacaccagccugcccuuccagaacauccaccccaucaccaucgggaagugccccaaguacgugaaguccaccaagcuccggcuggcgaccggccugcgcaacgucccgagcauccagucccggggccucuucggggccaucgccggguucaucgagggcggcuggacggggaugguggacggcugguacggguaccaccaccagaacgagcagggcagcggguacgccgccgaccugaaguccacccagaacgcgaucgacaagaucaccaacaaggugaacagcgucaucgagaagaugaacacccaguucacggccgugggcaaggaguucaaccaccuggagaagcgcaucgagaaccucaacaagaaggucgacgacggcuuccuggacaucuggaccuacaacgccgagcugcucgugcugcuggagaacgagcggacccucgacuaccacgacuccaacgugaagaaccuguacgagaagguccgcagccagcugaagaacaacgccaaggagaucgggaacggcugcuucgaguucuaccacaagugcgacaacacgugcauggaguccgugaagaacgggaccuacgacuaccccaaguacagcgaggaggccaagcucaaccgggaggagaucgacggcgugaagcuggaguccacccgcaucuaccagauccuggcgaucuacagcaccgucgccuccagccucgugcugguggucagccugggggccaucuccuucuggaugugcagcaacggcucccuccagugccggaucugcaucuga

SEQ ID NO: 77756 - RNA, 1701 nt, Artificial Sequence; identical to SEQ ID NO: 66693
  derived and/or modified CDS sequence (opt1) from hemagglutinin__InfluenzaA__BAJ39985

SEQ ID NO: 77757 - RNA, 1701 nt, Artificial Sequence
  derived and/or modified CDS sequence (opt1) from hemagglutinin__InfluenzaA__BAJ39987
augaagaccauccuggugguccuccuguacaccuucgccacggccaacgcggacacccugugcaucggcuaccacgccaacaacagcaccgacaccguggacacggugcucgagaagaacgucaccgugacccacuccgugaaccugcuggaggacaagcacaacgggaagcucugcaagcugcgcggcgucgcgccccugcaccucgggaagugcaacaucgccggcuggauccuggggaacccggagugcgagagccuguccaccgccagcuccuggagcuacaucguggagacguccagcuccgacaacgggaccugcuaccccggcgacuucaucgacuacgaggagcuccgggagcagcugagcuccgugagcuccuucgagcgcuucgagaucuuccccaagaccagcuccuggcccaaccacgacagcaacaagggcgucaccgccgccugcccgcacgccggcgccaaguccuucuacaagaaccugaucuggcucgugaagaaggggaacagcuaccccaagcuguccaagagcuacaucaacgacaagggcaaggaggugcugguccucugggggauccaccaccccagcacguccgcggaccagcagagccuguaccagaacgccgacaccuacguguucgugggcaccucccgguacagcaagaaguucaagcccgagaucgccauccgcccgaagguccgggaccaggagggccgcaugaacuacuacuggacccugguggagcccggggacaagaucacguucgaggccaccggcaaccucguggucccccgguacgccuucgcgauggagcgcaacgccggguccggcaucaucaucagcgacacccccgugcacgacugcaacaccacgugccagaccccgaagggcgccaucaacaccucccugcccuuccagaacauccaccccaucaccaucgggaagugccccaaguacgucaagagcacgaagcugcggcucgccaccggccugcgcaacgugccguccauccagagccgggggcuguucggcgccaucgcgggguucaucgagggcggcuggaccgggaugguggacggcugguacggguaccaccaccagaacgagcagggcuccggguacgccgccgaccucaagagcacccagaacgccaucgacgagaucacgaacaaggugaacuccgucaucgagaagaugaacacccaguucaccgccgugggcaaggaguucaaccaccuggagaagcgcaucgagaaccugaacaagaaggucgacgacggcuuccucgacaucuggaccuacaacgcggagcugcuggugcuccuggagaacgagcggacgcuggacuaccacgacagcaacgugaagaaccucuacgagaagguccgcucccagcugaagaacaacgccaaggagaucgggaacggcugcuucgaguucuaccacaagugcgacaacacgugcauggagagcgugaagaacgggaccuacgacuaccccaaguacuccaaggaggccaagcugaaccgggaggagaucgacggcgugaagcucgagagcacccgcaucuaccagauccuggccaucuacuccaccgucgccagcagccuggugcucguggucucccugggggcgaucagcuucuggaugugcuccaacggcagccugcagugccggaucugcaucuga

SEQ ID NO: 77758 - RNA, 1701 nt, Artificial Sequence
  derived and/or modified CDS sequence (opt1) from hemagglutinin__InfluenzaA__BAJ39988
augaaggccauccuggugguccuccuguacaccuucgccaccgcgaacgccgacacgcugugcaucggcuaccacgccaacaacagcaccgacaccguggacaccgugcucgagaagaacgucacggugacccacuccgugaaccugcuggaggacaagcacaacgggaagcucugcaagcugcgcggcgucgcgccccugcaccucgggaagugcaacaucgccggcuggauccuggggaacccggagugcgagagccuguccaccgccagcuccuggagcuacaucguggagaccuccagcuccgacaacggcacgugcuaccccggcgacuucaucgacuacgaggagcuccgggagcagcugagcuccgugagcuccuucgagcgcuucgagaucuuccccaagaccagcuccuggcccaaccacgacagcaacaagggggucaccgccgccugcccgcacgccggcgcgaaguccuucuacaagaaccugaucuggcucgugaagaaggggaacagcuaccccaagcuguccaagagcuacaucaacgacaagggcaaggaggugcugguccucugggggauccaccaccccagcaccuccgccgaccagcagagcaucuaccagaacgccgacgccuacguguucgugggcacgucccgguacagcaagaaguucaagcccgagaucgccauccgcccgaagguccgggaccaggagggccgcaugaacuacuacuggacccugguggagcccggggacaagaucaccuucgaggcgaccggcaaccugguggucccccgguacgccuucgccauggagcgcaacgccggguccggcaucaucaucagcgacacgcccgugcacgacugcaacacgaccugccagaccccgaagggcgccaucaacaccucccuccccuuccagaacauccaccccaucaccaucgggaagugcagcaaguacgugaaguccaccaagcugcggcuggcgaccggccuccgcaacguccccagcauccagucccgggggcuguucggcgccaucgccggguucaucgagggcggcuggacggggaugguggacggcugguacggguaccaccaccagaacgagcagggcagcggguacgccgccgaccugaaguccacccagaacgcgaucgacgagaucaccaacaaggugaacagcgucaucgagaagaugaacacccaguucacggccgugggcaaggaguucaaccaccucgagaagcgcaucgagaaccugaacaagaaggucgacgacggcuuccuggacaucuggaccuacaacgccgagcuccuggugcugcucgagaacgagcggacccuggacuaccacgacuccaacgugaagaaccuguacgagaagguccgcagccagcucaagaacaacgccaaggagaucgggaacggcugcuucgaguucuaccacaagugcgacaacacgugcauggaguccgugaagaacgggaccuacgacuacccgaaguacagcgaggaggccaagcugaaccgggaggagaucgacggcgugaagcuggaguccacccgcaucuaccagauccucgcgaucuacagcaccgucgccagcucccuggugcugguggucagccucggggccaucuccuucuggaugugcagcaacggcucccugcagugccggaucugcaucuga

SEQ ID NO: 77759 - RNA, 1701 nt, Artificial Sequence; identical to SEQ ID NO: 68007
  derived and/or modified CDS sequence (opt1) from hemagglutinin__InfluenzaA__BAJ39989

SEQ ID NO: 77760 - RNA, 1701 nt, Artificial Sequence; identical to SEQ ID NO: 66693
  derived and/or modified CDS sequence (opt1) from hemagglutinin__InfluenzaA__BAJ39990

SEQ ID NO: 77761 - RNA, 1701 nt, Artificial Sequence; identical to SEQ ID NO: 66693
  derived and/or modified CDS sequence (opt1) from hemagglutinin__InfluenzaA__BAJ39993

SEQ ID NO: 77762 - RNA, 1701 nt, Artificial Sequence
  derived and/or modified CDS sequence (opt1) from hemagglutinin__InfluenzaA__BAJ39994
augaaggccauccuggugguccuccuguacaccuucgccaccgcgaacgccgacacgcugugcaucggcuaccacgccaacaacagcaccgacaccguggacaccgugcucgagaagaacgucacggugacccacuccgugaaccugcuggaggacaagcacaacgggaagcucugcaagcugcgcggcgucgcgccccugcaccucgggaagugcaacaucgccggcuggauccuggggaacccggagugcgagagccuguccaccgccagcuccuggagcuacaucguggagaccuccagcuccgacaacggcacgugcuaccccggcgacuucaucgacuacgaggagcuccgggagcagcugagcuccgugagcuccuucgagcgcuucgagaucuuccccaagaccagcuccuggcccaaccacgacagcaacaagggggucaccgccgccugcccgcacgccggcgcgaaguccuucuacaagaaccugaucuggcucgugaagaaggggaacagcuaccccaagcuguccaagagcuacaucaacgacaagggcaaggaggugcugguccucugggggauccaccaccccagcaccuccgccgaccagcagagccuguaccagaacgccgacacguacguguucgugggcaccucccgguacagcaagaaguucaagcccgagaucgccauccgcccgaagguccgggaccaggagggccgcaugaacuacuacuggacccugguggagcccggggacaagaucaccuucgaggccacgggcaaccucguggucccccgguacgcguucgccauggagcgcaacgccggguccggcaucaucaucagcgacacccccgugcacgacugcaacacgaccugccagaccccgaagggcgccaucaacaccucccugcccuuccagaacauccaccccaccaccaucgggaagugccccaaguacgucaagagcacgaagcugcggcucgccaccggccugcgcaacgugccguccauccagagccgggggcuguucggcgcgaucgccggguucaucgagggcggcuggaccgggaugguggacggcugguacggguaccaccaccagaacgagcagggcuccggguacgccgccgaccucaagagcacccagaacgccaucgacgagaucacgaacaaggugaacuccgucaucgagaagaugaacacccaguucaccgcggugggcaaggaguucaaccaccuggagaagcgcaucgagaaccugaacaagaaggucgacgacggcuuccucgacaucuggaccuacaacgccgagcugcuggugcuccuggagaacgagcggacgcuggacuaccacgacagcaacgugaagaaccucuacgagaaggucaagucccagcugaagaacaacgccaaggagaucgggaacggcugcuucgaguucuaccacaagugcgacaacacgugccuggagagcgugaagaacgggaccuacgacuaccccaaguacuccgaggaggccaagcucaaccgcgagaagaucgacggcgugaagcuggagagcacccggaucuaccagauccuggccaucuacuccaccgucgcgagcagccucgugcugguggucucccugggggccaucagcuucuggaugugcuccaacggcagccuccagugccgcaucugcaucuga

SEQ ID NO: 77763 - RNA, 1701 nt, Artificial Sequence; identical to SEQ ID NO: 66693
  derived and/or modified CDS sequence (opt1) from hemagglutinin__InfluenzaA__BAJ39996

SEQ ID NO: 77764 - RNA, 1701 nt, Artificial Sequence
  derived and/or modified CDS sequence (opt1) from hemagglutinin__InfluenzaA__BAJ39997
augaaggccauccuggugguccuccuguacaccuucgccaccgcgaacgccgacacgcugugcaucggcuaccacgccaacaacagcaccgacaccguggacaccgugcucgagaagaacgucacggugacccacuccgugaaccugcuggaggacaagcacaacgggaagcucugcaagcugcgcggcgucgcgccccugcaccucgggaagugcaacaucgccggcuggauccuggggaacccggagugcgagagccuguccaccgccagcuccuggagcuacaucguggagaccuccagcuccgacaacggcacgugcuaccccggcgacuucaucgacuacgaggagcuccgggagcagcugagcuccgugagcuccuucgagcgcuucgagaucuuccccaagaccagcuccuggcccaaccacgacagcaacaagggggucaccgccgccugcccgcacgccggcgcgaaguccuucuacaagaaccugaucuggcucgugaagaaggggaacagcuaccccaagcuguccaagagcuacaucaacgacaagggcaaggaggugcugguccucugggggauccaccaccccagcaccuccgccgaccagcagagccuguaccagaacgccgacacguacguguucgugggcaccucccgguacagcaagaaguucaagcccgagaucgccauccgcccgaagguccgggaccaggagggccgcaugaacuacuacuggacccugguggagcccggggacaagaucaccuucgaggccacgggcaaccucguggucccccgguacgcguucgccauggagcgcaacgccggguccggcaucaucaucagcgacacccccgugcacgacugcaacacgaccugccagaccccgaagggcgccaucaacaccucccugcccuuccagaacauccaccccaccaccaucgggaagugccccaaguacgucaagagcacgaagcugcggcucgccaccggccugcgcaacgugccguccauccagagccgggggcuguucggcgcgaucgccggguucaucgagggcggcuggaccgggaugguggacggcugguacggguaccaccaccagaacgagcagggcuccggguacgccgccgaccucaagagcacccagaacgccaucgacgagaucacgaacaaggugaacuccgucaucgagaagaugaacacccaguucaccgcggugggcaaggaguucaaccaccuggagaagcgcaucgagaaccugaacaagaaggucgacgacggcuuccucgacaucuggaccuacaacgccgagcugcuggugcuccuggagaacgagcggacgcuggacuaccacgacagcaacgugaagaaccucuacgagaagguccgcucccagcugaagaacaacgccaaggagaucgggaacggcugcuucgaguucuaccacaagugcgacaacacgugcauggagagcgugaagaacgggaccuacgacuaccccaaguacuccgaggaggccaagcugaaccgggaggagaucgacggcgugaagcucgagagcacccgcaucuaccagauccuggccaucuacuccaccgucgcgagcagccuggugcucguggucucccugggggccaucagcuucuggaugugcuccaacggcagccugcagugccggaucugcaucuga

SEQ ID NO: 77765 - RNA, 1701 nt, Artificial Sequence; identical to SEQ ID NO: 66693
  derived and/or modified CDS sequence (opt1) from hemagglutinin__InfluenzaA__BAJ39998

SEQ ID NO: 77766 - RNA, 1701 nt, Artificial Sequence
  derived and/or modified CDS sequence (opt1) from hemagglutinin__InfluenzaA__BAJ39999
augaaggccauccuggugguccuccuguacaccuucgccaccgcgaacgccgacacgcugugcaucggcuaccacgccaacaacagcaccgacaccguggacaccgugcucgagcgcaacgucacggugacccacuccgugaaccugcuggaggacaagcacaacgggaagcucugcaagcugcggggcgucgcgccccugcaccucgggaagugcaacaucgccggcuggauccuggggaacccggagugcgagagccuguccaccgccagcuccuggagcuacaucguggagaccuccagcuccgacaacggcacgugcuaccccggcgacuucaucgacuacgaggagcuccgcgagcagcugagcuccgugagcuccuucgagcgguucgagaucuuccccaagaccagcuccuggcccaaccacgacagcaacaagggggucaccgccgccugcccgcacgccggcgcgaaguccuucuacaagaaccugaucuggcucgugaagaaggggaacagcuaccccaagcuguccaagagcuacaucaacgacaagggcaaggaggugcugguccucugggggauccaccaccccagcaccuccgccgaccagcagagccuguaccagaacgccgacacguacguguucgugggcaccucccgcuacagcaagaaguucaagcccgagaucgccauccggccgaagguccgcgaccaggagggccggaugaacuacuacuggacccugguggagcccggggacaagaucaccuucgaggccacgggcaaccucguggucccccgcuacgcguucgccauggagcggaacgccggguccggcaucaucaucagcgacacccccgugcacgacugcaacacgaccugccagaccccgaagggcgccaucaacaccucccugcccuuccagaacauccaccccaucaccaucgggaagugccccaaguacgucaagagcaccaagcugcgccucgccacgggccugcggaacgugccguccauccagagccgcgggcuguucggcgcgaucgccggguucaucgagggcggcuggaccgggaugguggacggcugguacggguaccaccaccagaacgagcagggcuccggguacgccgccgaccucaagagcacccagaacgccaucgacgagaucaccaacaaggugaacuccgucaucgagaagaugaacacgcaguucaccgcggugggcaaggaguucaaccaccuggagaagcggaucgagaaccugaacaagaaggucgacgacggcuuccucgacaucuggaccuacaacgccgagcugcuggugcuccuggagaacgagcgcacccuggacuaccacgacagcaacgugaagaaccucuacgagaagguccggucccagcugaagaacaacgccaaggagaucgggaacggcugcuucgaguucuaccacaagugcgacaacacgugcauggagagcgugaagaacgggaccuacgacuaccccaaguacuccgaggaggccaagcugaaccgcgaggagaucgacggcgugaagcucgagagcacccggaucuaccagauccuggccaucuacuccaccgucgcgagcagccuggugcucguggucucccugggggccaucagcuucuggaugugcuccaacggcagccugcagugccgcaucugcaucuga

SEQ ID NO: 77767 - RNA, 1701 nt, Artificial Sequence
  derived and/or modified CDS sequence (opt1) from hemagglutinin__InfluenzaA__BAJ40000
augaagaccauccuggugguccuccuguacaccuucgccacggccaacgcggacacccugugcaucggcuaccacgccaacaacagcaccgacaccguggacacggugcucgagaagaacgucaccgugacccacuccgugaaccugcuggaggacaagcacaacgggaagcucugcaagcugcgcggcgucgcgccccugcaccucgggaagugcaacaucgccggcuggauccuggggaacccggagugcgagagccuguccaccgccagcuccuggagcuacaucguggagacguccagcuccgacaacgggaccugcuaccccggcgacuucaucgacuacgaggagcuccgggagcagcugagcuccgugagcuccuucgagcgcuucgagaucuuccccaagaccagcuccuggcccaaccacgacagcaacaagggcgucaccgccgccugcccgcacgccggcgccaaguccuucuacaagaaccugaucuggcucgugaagaaggggaacagcuaccccaagcuguccaagagcuacaucaacgacaagggcaaggaggugcugguccucugggggauccaccaccccagcacguccgcggaccagcagagccuguaccagaacgccgacaccuacguguucgugggcaccucccgguacagcaagaaguucaagcccgagaucgccauccgcccgaagguccgggaccaggagggccgcaugaacuacuacuggacccugguggagcccggggacaagaucacguucgaggccaccggcaaccucguggucccccgguacgccuucgcgauggagcgcaacgccggguccggcaucaucaucagcgacacccccgugcacgacugcaacaccacgugccagaccccgaagggcgccaucaacaccucccugcccuuccagaacauccaccccaucaccaucgggaagugccccaaguacgucaagagcacgaagcugcggcucgccaccggccugcgcaacgugccguccauccagagccgggggcuguucggcgccaucgcgggguucaucgagggcggcuggaccgggaugguggacggcugguacggguaccaccaccagaacgagcagggcuccggguacgccgccgaccucaagagcacccagaacgccaucgacgagaucacgaacaaggugaacuccgucaucgagaagaugaacacccaguucaccgccgugggcaaggaguucaaccaccuggagaagcgcaucgagaaccugaacaagaaggucgacgacggcuuccucgacaucuggaccuacaacgcggagcugcuggugcuccuggagaacgagcggacgcuggacuaccacgacagcaacgugaagaaccucuacgagaagguccgcucccagcugaagaacaacgccaaggagaucgggaacggcugcuucgaguucuaccacaagugcgacaacacgugcauggagagcgugaagaacgggaccuacgacuaccccaaguacuccgaggaggccaagcugaaccgggaggagaucgacggcgugaagcucgagagcacccgcaucuaccagauccuggccaucuacuccaccgucgccagcagccuggugcucguggucucccugggggcgaucagcuucuggaugugcuccaacggcagccugcagugccggaucugcaucuga

SEQ ID NO: 77768 - RNA, 1701 nt, Artificial Sequence; identical to SEQ ID NO: 71703
  derived and/or modified CDS sequence (opt1) from hemagglutinin__InfluenzaA__BAJ40001

SEQ ID NO: 77769 - RNA, 1701 nt, Artificial Sequence; identical to SEQ ID NO: 66693
  derived and/or modified CDS sequence (opt1) from hemagglutinin__InfluenzaA__BAJ40002

SEQ ID NO: 77770 - RNA, 1701 nt, Artificial Sequence; identical to SEQ ID NO: 71703
  derived and/or modified CDS sequence (opt1) from hemagglutinin__InfluenzaA__BAJ40003

SEQ ID NO: 77771 - RNA, 1701 nt, Artificial Sequence
  derived and/or modified CDS sequence (opt1) from hemagglutinin__InfluenzaA__BAJ40004
augaaggccauccuggugguccuccuguacaccuucgccaccgcgaacgccgacacgcugugcaucggcuaccacgccaacaacagcaccgacaccguggacaccgugcucgagaagaacgucacggugacccacuccgugaaccugcuggaggacaagcacaacgggaagcucugcaagcugcgcggcgucgcgccccugcaccucgggaagugcaacaucgccggcuggauccuggggaacccggagugcgagagccuguccaccgccagcuccuggagcuacaucguggagaccuccagcuccgacaacggcacgugcuaccccggcgacuucaucgacuacgaggagcuccgggagcagcugagcuccgugagcuccuucgagcgcuucgagaucuuccccaagaccagcuccuggcccaaccacgacagcaacaagggggagaccgccgccugcccgcacgccggcgcgaaguccuucuacaagaaccugaucuggcucgucaagaaggggaacagcuaccccaagcuguccaagagcuacaucaacgacaagggcaaggaggugcuggugcucugggggauccaccaccccagcaccuccgccgaccagcagagccuguaccagaacgccgacgccuacgucuucgugggcacgucccgguacagcaagaaguucaagcccgagaucgccauccgcccgaaggugcgggaccaggagggccgcaugaacuacuacuggacccuggucgagcccggggacaagaucaccuucgaggcgaccggcaaccucguggugccccgguacgccuucgccauggagcgcaacgccggguccggcaucaucaucagcgacacgcccguccacgacugcaacacgaccugccagaccccgaagggcgccaucaacaccucccugcccuuccagaacauccaccccaucaccaucgggaagugccccaaguacgucaagagcaccaagcugcggcucgcgaccggccugcgcaacgugccguccauccagagccgggggcuguucggcgccaucgccggguucaucgagggcggcuggacggggaugguggacggcugguacggguaccaccaccagaacgagcagggcuccggguacgccgccgaccucaagagcacccagaacgcgaucgacaagaucaccaacaaggugaacuccgugaucgagaagaugaacacccaguucacggccgucggcaaggaguucaaccaccuggagaagcgcaucgagaaccugaacaagaagguggacgacggcuuccucgacaucuggaccuacaacgccgagcugcugguccuccuggagaacgagcggacccuggacuaccacgacagcaacgugaagaaccucuacgagaaggugaagucccagcugaagaacaacgccaaggagaucgggaacggcugcuucgaguucuaccacaagugcgacaacacgugcauggagagcgucaagaacgggaccuacgacuaccccaaguacuccgaggaggccaagcugaaccgcgagaagaucgacggcgugaagcucgagagcacccggaucuaccagauccuggcgaucuacuccaccguggccagcagccugguccucguggugucccugggggccaucagcuucuggaugugcuccaacggcagccugcagugccgcaucugcaucuga

SEQ ID NO: 77772 - RNA, 1701 nt, Artificial Sequence
  derived and/or modified CDS sequence (opt1) from hemagglutinin__InfluenzaA__BAJ40006
augaaggccauccuggugguccuccuguacaccuucgccaccgcgaacgccgacacgcugugcaucggcuaccacgccaacaacagcaccgacaccguggacaccgugcucgagaagaacgucacggugacccacuccgugaaccugcuggaggacaagcacaacgggaagcucugcaagcugcgcggcgucgcgccccugcaccucgggaagugcaacaucgccggcuggauccuggggaacccggagugcgagagccuguccaccgccagcuccuggagcuacaucguggagaccuccagcuccgacaacggcacgugcuaccccggcgacuucaucgacuacgaggagcuccgggagcagcugagcuccgugagcuccuucgagcgcuucgagaucuuccccaagaccagcuccuggcccaaccacgacagcaacaagggggucaccgccgccugcccgcacgccggcgcgaaguccuucuacaagaaccugaucuggcucgugaagaaggggaacagcuaccccaagcuguccaagagcuacaucaacgacaagggccgggaggugcugguccucugggggauccaccaccccagcaccuccgccgaccagcagagccuguaccagaacgccgacacguacguguucgugggcaccucccgcuacagcaagaaguucaagcccgagaucgccauccggccgaagguccgcgaccaggagggccggaugaacuacuacuggacccugguggagcccggggacaagaucaccuucgaggccacgggcaaccucguggucccccgcuacgcguucgccauggagcggaacgccggguccggcaucaucaucagcgacacccccgugcacgacugcaacacgaccugccagaccccgaagggcgccaucaacaccucccugcccuuccagaacauccaccccaucaccaucgggaagugccccaaguacgucaagagcaccaagcugcgccucgccacgggccugcggaacgugccguccauccagagccgcgggcuguucggcgcgaucgccggguucaucgagggcggcuggaccgggaugguggacggcugguacggguaccaccaccagaacgagcagggcuccggguacgccgccgaccucaagagcacccagaacgccaucgacgagaucaccaacaaggugaacuccgucaucgagaagaugaacacgcaguucaccgcggugggcaaggaguucaaccaccuggagaagcggaucgagaaccugaacaagaaggucgacgacggcuuccucgacaucuggaccuacaacgccgagcugcuggugcuccuggagaacgagcgcacccuggacuaccacgacagcaacgugaagaaccucuacgagaagguccggucccagcugaagaacaacgccaaggagaucgggaacggcugcuucgaguucuaccacaagugcgacaacacgugcauggagagcgugaagaacgggaccuacgacuaccccaaguacuccgaggaggccaagcugaaccgcgaggagaucgacggcgugaagcucgagagcacccggaucuaccagauccuggccaucuacuccaccgucgcgagcagccuggugcucguggucucccugggggccaucagcuucuggaugugcuccaacggcagccugcagugccgcaucugcaucuga

SEQ ID NO: 77773 - RNA, 1701 nt, Artificial Sequence; identical to SEQ ID NO: 66693
  derived and/or modified CDS sequence (opt1) from hemagglutinin__InfluenzaA__BAJ40007

SEQ ID NO: 77774 - RNA, 1701 nt, Artificial Sequence
  derived and/or modified CDS sequence (opt1) from hemagglutinin__InfluenzaA__BAJ40008
augaaggccauccuggugguccuccuguacaccuucgccaccgcgaacgccgacacgcugugcaucggcuaccacgccaacaacagcaccgacaccguggacaccgugcucgagaagaacgucacggugacccacuccgugaaccugcuggaggacaagcacaacgggaagcucugcaagcugcgcggcgucgcgccccugcaccucgggaagugcaacaucgccggcuggauccuggggaacccggagugcgagagccuguccaccgccagcuccuggagcuacaucguggagaccuccagcuccgacaacggcacgugcuaccccggcgacuucaucgacuacgaggagcuccgggagcagcugagcuccgugagcuccuucgagcgcuucgagaucuuccccaagaccagcuccuggcccaaccacgacagcaacaagggggucaccgccgccugcccgcacgccggcgcgaaguccuucuacaagaaccugaucuggcucgugaagaaggggaacagcuaccccaagcuguccaagagcuacaucaacgacaagggcaaggaggugcugguccucugggggauccaccaccccagcaccuccgccgaccagcagagccuguaccagaacgccgacgccuacguguucgugggcacgucccgguacagcaagaaguucaagcccgagaucgccauccgcccgaagguccgggaccaggagggccgcaugaacuacuacuggacccugguggagcccggggacaagaucaccuucgaggcgaccggcaaccucguggucccccgguacgccuucgccauggagcgcaacgccggguccggcaucaucaucagcgacacgcccgugcacgacugcaacacgaccugccagaccccgaagggcgccaucaacaccucccugcccuuccagaacauccaccccaucaccaucgggaagugccccaaguacgucaagagcaccaagcugcggcucgcgaccggccugcgcaacgugccguccauccagagccgggggcuguucggcgccaucgccggguucaucgagggcggcuggacggggaugguggacggcugguacggguaccaccaccagaacgagcagggcuccggguacgccgccgaccucaagagcacccagaacgcgaucgacgagaucaccaacaaggugaacuccgucaucgagaagaugaacacccaguucacggccgugggcaaggaguucaaccaccuggagaagcgcaucgagaaccugaacaagaaggucgacgacggcuuccucgacaucuggaccuacaucgccgagcugcuggugcuccuggagaacgagcggacccuggacuaccacgacagcaacgugaagaaccucuacgagaagguccgcucccagcugaagaacaacgccaaggagaucgggaacggcugcuucgaguucuaccacaagugcgacaacacgugcauggagagcgugaagaacgggaccuacgacuaccccaaguacuccgaggaggccaagcugaaccgggaggagaucgacggcgugaagcucgagagcacccgcaucuaccagauccuggcgaucuacuccaccgucgccagcagccuggugcucguggucucccugggggccaucagcuucuggaugugcuccaacggcagccugcagugccggaucugcaucuga

SEQ ID NO: 77775 - RNA, 1701 nt, Artificial Sequence
  derived and/or modified CDS sequence (opt1) from hemagglutinin__InfluenzaA__BAJ40009
augaaggccauccuggugguccuccuguacaccuucgccaccgcgaacgccgacacgcugugcaucggcuaccacgccaacaacagcaccgacaccguggacaccgugcucgagaagaacgucacggugacccacuccgugaaccugcuggaggacaagcacaacgggaagcucugcaagcugcgcggcgucgcgccccugcaccucgggaagugcaacaucgccggcuggauccuggggaacccggagugcgagagccuguccaccgccagcuccuggagcuacaucguggagaccuccagcuccgacaacggcacgugcuaccccggcgacuucaucgacuacgaggagcuccgggagcagcugagcuccgugagcuccuucgagcgcuucgagaucuuccccaagaccagcuccuggcccaaccacgacagcgacaagggggucaccgccgccugcccgcacgccggcgcgaaguccuucuacaagaaccugaucuggcucgugaagaaggggaacagcuaccccaagcuguccaagagcuacaucaacgacaagggcaaggaggugcugguccucugggggauccaccaccccagcaccuccgccgaccagcagagccuguaccagaacgccgacgccuacguguucgugggcacgucccgguacagcaagaaguucaagcccgagaucgccauccgcccgaagguccgggaccaggagggccgcauggacuacuacuggacccugguggagcccggggacaagaucaccuucgaggcgaccggcaaccucguggucccccgguacgccuucgccauggagcgcaacgccggguccggcaucaucaucagcgacacgcccgugcacaacugcaacacgaccugccagaccccgaagggcgccaucaacaccucccugcccuuccagaacauccaccccaucaccaucgggaagugccccaaguacgucaagagcaccaagcugcggcucgcgaccggccugcgcaacgugccguccauccagagccgggggcuguucggcgccaucgccggguucaucgagggcggcuggacggggaugguggacggcugguacggguaccaccaccagaacgagcagggcuccggguacgccgccgaccucaagagcacccagaacgcgaucgacaagaucaccaacaaggugaacuccgucaucgagaagaugaacacccaguucacggccgugggcaaggaguucaaccaccuggagaaccgcaucgagaaccugaacaagaaggucgacgacggcuuccucgacaucuggaccuacaacgccgagcugcuggugcuccuggagaacgagcggacccuggacuaccacgacagcaacgugaagaaccucuacgagaagguccgcucccagcugaagaacaacgccaaggagaucgggaacggcugcuucgaguucuaccacaagugcgacaacacgugcauggagagcgugaagaacgggaccuacgacuaccccaaguacuccgaggaggccaagcugaaccgggaggagaucgacggcgugaagcucgagagcacccgcaucuaccagauccuggcgaucuacuccaccgucgccagcagccuggugcucguggucucccugggggccaucagcuucuggaugugcuccaacggcagccugcagugccggaucugcaucuga

SEQ ID NO: 77776 - RNA, 1701 nt, Artificial Sequence
  derived and/or modified CDS sequence (opt1) from hemagglutinin__InfluenzaA__BAJ40010
augaaggccauccuggugguccuccuguacaccuucgccaccgcgaacgccgacacgcugugcaucggcuaccacgccaacaacagcaccgacaccguggacaccgugcucgagaagaacgucacggugacccacuccgugaaccugcuggaggacaagcacaacgggaagcucugcaagcugcgcggcgucgcgccccugcaccucgggaagugcaacaucgccggcuggauccuggggaacccggagugcgagcugcucagcaccgcguccagcugguccuacaucguggagaccagcuccagcgacaacggcacgugcuaccccggcgacuucaucgacuacgaggagcugcgggagcagcuguccagcguguccagcuucgagcgcuucgagaucuuccccaagaccuccagcuggcccaaccacgacuccgacaagggggucaccgccgccugcccgcacgccggcgccaagagcuucuacaagaaccucaucuggcuggugaagaaggggaacuccuaccccaagcugagcaaguccuacaucaacgacaagggcaaggaggugcucguccugugggggauccaccaccccagcaccagcgccgaccagcagucccuguaccagaacgccgacgccuacguguucgugggcacgagccgguacuccaagaaguucaagcccgagaucgccauccgcccgaagguccgggaccaggagggccgcauggacuacuacuggacccucguggagcccggggacaagaucaccuucgaggcgaccggcaaccugguggucccccgguacgccuucgccauggagcgcaacgccgggagcggcaucaucaucuccgacacgcccgugcacaacugcaacacgaccugccagaccccgaagggcgccaucaacaccagccugcccuuccagaacauccaccccaucaccaucgggaagugccccaaguacgugaaguccaccaagcuccggcuggcgaccggccugcgcaacgucccgagcauccagucccggggccucuucggggccaucgccggguucaucgagggcggcuggacggggaugguggacggcugguacggguaccaccaccagaacgagcagggcagcggguacgccgccgaccugaaguccacccagaacgcgaucgacaagaucaccaacaaggugaacagcgucaucgagaagaugaacacccaguucacggccgugggcaaggaguucaaccaccuggagaagcgcaucgagaaccucaacaagaaggucgacgacggcuuccuggacaucuggaccuacaacgccgagcugcucgugcugcuggagaacgagcggacccucgacuaccacgacuccaacgugaagaaccuguacgagaagguccgcagccagcugaagaacaacgccaaggagaucgggaacggcugcuucgaguucuaccacaagugcgacaacacgugcauggaguccgugaagaacgggaccuacgacuaccccaaguacagcgaggaggccaagcucaaccgggaggagaucgacggcgugaagcuggaguccacccgcaucuaccagauccuggcgaucuacagcaccgucgccuccagccucgugcugguggucagccugggggccaucuccuucuggaugugcagcaacggcucccuccagugccggaucugcaucuga

SEQ ID NO: 77777 - RNA, 1701 nt, Artificial Sequence; identical to SEQ ID NO: 77766
  derived and/or modified CDS sequence (opt1) from hemagglutinin__InfluenzaA__BAJ40011

SEQ ID NO: 77778 - RNA, 1701 nt, Artificial Sequence
  derived and/or modified CDS sequence (opt1) from hemagglutinin__InfluenzaA__BAJ40012
augaaggccauccuggugguccuccuguacaccuucgccaccgcgaacgccgacacgcugugcaucggcuaccacgccaacaacagcaccgacaccguggacaccgugcucgagaagaacgucacggugacccacuccgugaaccugcuggaggacaagcacaacgggaagcucugcaagcugcgcggcgucgcgccccugcaccucgggaagugcaacaucgccggcuggauccuggggaacccggagugcgagagccuguccaccgccagcuccuggagcuacaucguggagaccuccagcuccgacaacggcacgugcuaccccggcgacuucaucgacuacgaggagcuccgggagcagcugagcuccgugagcuccuucgagcgcuucgagaucuuccccaagaccagcuccuggcccaaccacgacagcaacaagggggucaccgccgccugcccgcacgccggcgcgaaguccuucuacaagaaccugaucuggcucgugaagaaggggaacagcuaccccaagcuguccaagagcuacaucaacgacaagggcaaggaggugcugguccucugggggauccaccaccccagcaccuccgccgaccagcagagccuguaccagaacgccgacgccuacguguucgugggcacgucccgguacagcaagaaguucaagcccgagaucgccauccgcccgaagguccgggaccaggagggccgcaugaacuacuacuggacccugguggagcccggggacaagaucaccuucgaggcgaccggcaaccucguggucccccgguacgccuucgccauggagcgcaacgccggguccggcaucaucaucagcgacacgcccgugcacgacugcaacacgaccugccagaccccgaagggcgccaucaacaccucccugcccuuccagaacauccaccccaucaccaucgggaagugccccaaguacgucaagagcaccaagcugcggcucgcgaccggccugcgcaacgugccguccauccagagccgggggcuguucggcgccaucgccggguucaucgagggcggcuggacggggaugguggacggcugguacggguaccaccaccagaacgagcagggcuccggguacgccgccgaccucaagagcacccagaacgcgaucgacgagaucaccaacaaggugaacuccgucaucgagaagaugaacacccaguucacggccgugggcaaggaguucaaccaccuggagaagcgcaucgagaaccugaacaagaaggucgacgacggcuuccucgacaucuggaccuacaacgccgagcugcuggugcuccuggagaacgagcggacccuggacuaccacgacagcaacgugaagaaccucuacgagaagguccgcucccagcugaagaacaacgccaaggagaucgggaacggcugcuucgaguucuaccacaagugcgacaacacgugcauggagagcgugaagaacgggaccuacgacuaccccaaguacuccgaggaggccaagcugaaccgggaggagaucgacggcaucaagcucgagagcacccgcaucuaccagauccuggcgaucuacuccaccguggccagcagccugguccucguggugucccugggggccaucagcuucuggaugugcuccaacggcagccugcagugccggaucugcaucuga

SEQ ID NO: 77779 - RNA, 1701 nt, Artificial Sequence; identical to SEQ ID NO: 77766
  derived and/or modified CDS sequence (opt1) from hemagglutinin__InfluenzaA__BAJ40013

SEQ ID NO: 77780 - RNA, 1701 nt, Artificial Sequence; identical to SEQ ID NO: 77766
  derived and/or modified CDS sequence (opt1) from hemagglutinin__InfluenzaA__BAJ40014

SEQ ID NO: 77781 - RNA, 1701 nt, Artificial Sequence
  derived and/or modified CDS sequence (opt1) from hemagglutinin__InfluenzaA__BAJ40015
augaaggccauccuggugguccuccuguacaccuucgccaccgcgaacgccgacacgcugugcaucggcuaccacgccaacaacagcaccgacaccguggacaccgugcucgagaagaacgucacggugacccacuccgugaaccugcuggaggacaagcacaacgggaagcucugcaagcugcgcggcgucgcgccccugcaccucgggaagugcaacaucgccggcuggauccuggggaacccggagugcgagagccuguccaccgccagcuccuggagcuacaucguggagaccuccagcuccgacaacggcacgugcuaccccggcgacuucaucgacuacgaggagcuccgggagcagcugagcuccgugagcuccuucgagcgcuucgagaucuuccccaacaccagcuccuggcccaaccacgacagcaacaagggggucaccgccgccugcccgcacgccggcgcgaaguccuucuacaagaaccugaucuggcucgugaagaaggggaacagcuaccccaagcuguccaagagcuacaucaacgacaagggcaaggaggugcugguccucugggggauccaccaccccagcaccuccgccgaccagcagagccuguaccagaacgccgacacguacguguucgugggcaccucccgguacagcaagaaguucaagcccgagaucgccauccgcccgaagguccgggaccaggagggccgcaugaacuacuacuggacccugguggagcccggggacaagaucaccuucgaggccacgggcaaccucguggucccccgguacgcguucgccauggagcgcaacgccggguccggcaucaucaucagcgacacccccgugcacgacugcaacacgaccugccagaccccgaagggcgccaucaacaccucccugcccuuccagaacauccaccccaucaccaucgggaagugccccaaguacgucaagagcaccaagcugcggcucgccacgggccugcgcaacgugccguccauccagagccgggggcuguucggcgcgaucgccggguucaucgagggcggcuggaccgggaugguggacggcugguacggguaccaccaccagaacgagcagggcuccggguacgccgccgaccucaagagcacccagaacgccaucgacgagaucaccaacaaggugaacuccgucaucgagaagaugaacacgcaguucaccgcggugggcaaggaguucaaccaccuggagaagcgcaucgagaaccugaacaagaaggucgacgacggcuuccucgacaucuggaccuacaacgccgagcugcuggugcuccuggagaacgagcggacccuggacuaccacgacagcaacgugaagaaccucuacgagaagguccgcucccagcugaagaacaacgccaaggagaucgggaacggcugcuucgaguucuaccacaagugcgacaacacgugcauggagagcgugaagaacgggaccuacgacuaccccaaguacuccgaggaggccaagcugaaccgggaggagaucgacggcgugaagcucgagagcacccgcaucuaccagauccuggccaucuacuccaccgucgcgagcagccuggugcucguggucucccugggggccaucagcuucuggaugugcuccaacggcagccugcagugccggaucugcaucuga

SEQ ID NO: 77782 - RNA, 1701 nt, Artificial Sequence; identical to SEQ ID NO: 77766
  derived and/or modified CDS sequence (opt1) from hemagglutinin__InfluenzaA__BAJ40016

SEQ ID NO: 77783 - RNA, 1701 nt, Artificial Sequence
  derived and/or modified CDS sequence (opt1) from hemagglutinin__InfluenzaA__BAJ40017
augaaggccauccuggugguccuccuguacaccuucgccaccgcgaacgccgacacgcugugcaucggcuaccacgccaacaacagcaccgacaccguggacaccgugcucgagaagaacgucacggugacccacuccgugaaccugcuggaggacaagcacaacgggaagcucugcaagcugcgcggcgucgcgccccugcaccucgggaagugcaacaucgccggcuggauccuggggaacccggagugcgagagccuguccaccgcgagcuccuggagcuacaucguggagaccuccaacagcgacaacggcacgugcuaccccggcgacuucaucgacuacgaggagcuccgggagcagcuguccagcguguccagcuucgagcgcuucgagaucuuccccaagaccuccagcuggcccaaccacgacuccaacaagggggucaccgccgccugcccgcacgccggcgccaagagcuucuacaagaaccugaucuggcucgugaagaaggggaacuccuaccccaagcugagcaaguccuacaucaacgacaagggcaaggaggugcugguccucugggggauccaccaccccagcaccagcgccgaccagcagucccuguaccagaacgccgacgccuacguguucgugggcacgagccgguacuccaagaaguucaagcccgagaucgccauccgcccgaagguccgggaccaggagggccgcaugaacuacuacuggacccugguggagcccggggacaagaucaccuucgaggcgaccggcaaccucguggucccccgguacgccuucgccauggagcgcaacgccgggagcggcaucaucaucuccgacacgcccgugcacgacugcaacacgaccugccagaccccgaagggcgccaucaacaccagccugcccuuccagaacauccaccccaucaccaucgggaagugccccaaguacgugaaguccaccaagcugcggcucgcgaccggccugcgcaacgucccgagcauccagucccgggggcuguucggcgccaucgccggguucaucgagggcggcuggacggggaugguggacggcugguacggguaccaccaccagaacgagcagggcagcggguacgccgccgaccucaaguccacccagaaggcgaucgacgagaucaccaacaaggugaacagcgucaucgagaagaugaacacccaguucacggccgugggcaaggaguucaaccaccuggagaagcgcaucgagaaccugaacaagaaggucgacgacggcuuccucgacaucuggaccuacaacgccgagcugcuggugcuccuggagaacgagcggacccuggacuaccacgacuccaacgugaagaaccucuacgagaagguccgcagccagcugaagaacaacgccaaggagaucgggaacggcugcuucgaguucuaccacaagugcgacaacacgugcauggaguccgugaagaacgggaccuacgacuaccccaaguacagcgaggaggccaagcugaaccgggaggagaucgacggcgugaagcucgaguccacccgcaucuaccagauccuggcgaucuacagcaccgucgccuccagccuggugcucguggucagccugggggccaucuccuucuggaugugcagcaacggcucccugcagugccggaucugcaucuga

SEQ ID NO: 77784 - RNA, 1701 nt, Artificial Sequence; identical to SEQ ID NO: 67857
  derived and/or modified CDS sequence (opt1) from hemagglutinin__InfluenzaA__BAJ40018

SEQ ID NO: 77785 - RNA, 1701 nt, Artificial Sequence; identical to SEQ ID NO: 77772
  derived and/or modified CDS sequence (opt1) from hemagglutinin__InfluenzaA__BAJ40019

SEQ ID NO: 77786 - RNA, 1701 nt, Artificial Sequence; identical to SEQ ID NO: 77772
  derived and/or modified CDS sequence (opt1) from hemagglutinin__InfluenzaA__BAJ40020

SEQ ID NO: 77787 - RNA, 1701 nt, Artificial Sequence
  derived and/or modified CDS sequence (opt1) from hemagglutinin__InfluenzaA__BAJ40021
augaaggccauccuggugguccuccuguacaccuucgccaccgcgaacgccgacacgcugugcaucggcuaccacgccaacaacagcaccgacaccguggacaccgugcucgagaagaacgucacggugacccacuccgugaaccugcuggaggacaagcacaacgggaagcucugcaagcugcgcggcgucgcgccccugcaccucgggaagugcaacaucgccggcuggauccuggggaacccggagugcgagagccuguccaccgccagcuccuggagcuacaucguggagaccuccagcuccgacaacggcacgugcuaccccggcgacuucaucgacuacgaggagcuccgggagcagcugagcuccgugagcuccuucgagcgcuucgagaucuuccccaagaccagcuccuggcccaaccacgacagcaacaagggggagaccgccgccugcccgcacgccggcgcgaaguccuucuacaagaaccugaucuggcucgucaagaaggggaacagcuaccccaagcuguccaagagcuacaucaacgacaagggcaaggaggugcuggugcucugggggauccaccaccccagcaccuccgccgaccagcagagccuguaccagaacgccgacgccuacgucuucgugggcacgucccgguacagcaagaaguucaagcccgagaucgccauccgcccgaaggugcgggaccaggagggccgcaugaacuacuacuggacccuggucgagcccggggacaagaucaccuucgaggcgaccggcaaccucguggugccccgguacgccuucgccauggagcgcaacgccggguccggcaucaucaucagcgacacgcccguccacgacugcaacacgaccugccagaccccgaagggcgccaucaacaccucccugcccuuccagaacauccaccccaucaccaucgggaagugccccaaguacgucaagagcaccaagcugcggcucgcgaccggccugcgcaacgugccguccauccagagccgggggcuguucggcgccaucgccggguucaucgagggcggcuggacggggaugguggacggcugguacggguaccaccaccagaacgagcagggcuccggguacgccgccgaccucaagagcacccagaacgcgaucgacaagaucaccaacaaggugaacuccgugaucgagaagaugaacacccaguucacggccgucggcaaggaguucaaccaccuggagaagcgcaucgagaaccugaacaagaagguggacgacggcuuccucgacaucuggaccuacaacgccgagcugcugguccuccuggagaacgagcggacccuggacuaccacgacagcaacgugaagaaccucuacgagaaggugcgcucccagcugaagaacaacgccaaggagaucgggaacggcugcuucgaguucuaccacaagugcgacaacacgugcauggagagcgucaagaacgggaccuacgacuaccccaaguacuccgaggaggccaagcugaaccgggaggagaucgacggcgugaagcucgagagcacccgcaucuaccagauccuggcgaucuacuccaccguggccagcagccugguccucguggugucccugggggccaucagcuucuggaugugcuccaacggcagccugcagugccggaucugcaucuga

SEQ ID NO: 77788 - RNA, 1701 nt, Artificial Sequence; identical to SEQ ID NO: 67857
  derived and/or modified CDS sequence (opt1) from hemagglutinin__InfluenzaA__BAJ40023

SEQ ID NO: 77789 - RNA, 1701 nt, Artificial Sequence
  derived and/or modified CDS sequence (opt1) from hemagglutinin__InfluenzaA__BAJ40024
augaaggccauccuggugguccuccuguacaccuucgccaccgcgaacgccgacacgcugugcaucggcuaccacgccaacaacagcaccgacaccguggacaccgugcucgagaagaacgucacggugacccacuccgugaaccugcuggaggacaagcacaacgggaagcucugcaagcugcgcggcgucgcgccccugcaccucgggaagugcaacaucgccggcuggauccuggggaacccggagugcgagagccuguccaccgccagcuccuggagcuacaucguggagaccuccagcuccgacaacggcacgugcuaccccggcgacuucaucgacuacgaggagcuccgggagcagcugagcuccgugagcuccuucgagcgcuucgagaucuuccccaagaccagcuccuggcccaaccacgacagcaacaagggggucaccgccgccugcccgcacgccggcgcgaaguccuucuacaagaaccugaucuggcucgugaagaaggggaacagcuaccccaagcuguccaagagcuacaucaacgacaagggcaaggaggugcugguccucugggggauccaccaccccagcaccuccgccgaccagcagagccuguaccagaacgccgacacguacguguucgugggcaccucccgguacagcaagaaguucaagcccgagaucgccauccgcccgaagguccgggaccaggagggccgcaugaacuacuacuggacccugguggagcccggggacaagaucaccuucgaggccacgggcaaccucguggucccccgguacgcguucgccauggagcgcaacgccggguccggcaucaucaucagcgacacccccgugcacgacugcaacacgaccugccagaccccgaagggcgccaucaacaccucccugcccuuccagaacauccaccccaucaccaucgggaagugccccaaguacgucaagagcaccaagcugcggcucgccacgggccugcgcaacgugccguccauccagagccgggggcuguucggcgcgaucgccggguucaucgagggcggcuggaccgggaugguggacggcugguacggguaccaccaccagaacgagcagggcuccggguacgccgccgaccucaagagcacccagaacgccaucgacgagaucaccaacaaggugaacuccgucaucgagaagaugaacacgcaguucaccgcggugggcaaggaguucaaccaccuggagaagcgcaucgagaaccugaacaagaaggucgacgacggcuuccucgacaucuggaccuacaacgccgagcugcuggugcuccuggagaacgagcggacccuggacuaccacgacagcaacgugaagaaccucuacgagaagguccgcucccagcugaagaacaacgccaaggagaucgggaacggcugcuucgaguucuaccacaagugcgacaacacgugcauggagagcgugaagaacgggaccuacgacuaccccaaguacuccgaggaggccaagcugaaccgggagaagaucgacggcgugaagcucgagagcacccgcaucuaccagauccuggccaucuacuccaccgucgcgagcagccuggugcucguggucucccugggggccaucagcuucuggaugugcuccaacggcagccugcagugccggaucugcaucuga

SEQ ID NO: 77790 - RNA, 1701 nt, Artificial Sequence; identical to SEQ ID NO: 77766
  derived and/or modified CDS sequence (opt1) from hemagglutinin__InfluenzaA__BAJ40025

SEQ ID NO: 77791 - RNA, 1701 nt, Artificial Sequence; identical to SEQ ID NO: 67857
  derived and/or modified CDS sequence (opt1) from hemagglutinin__InfluenzaA__BAJ40026

SEQ ID NO: 77792 - RNA, 1701 nt, Artificial Sequence
  derived and/or modified CDS sequence (opt1) from hemagglutinin__InfluenzaA__BAJ40027
augaaggccauccuggugguccuccuguacaccuucgccaccgcgaacgccgacacgcugugcaucggcuaccacgccaacaacagcaccgacaccguggacaccgugcucgagaagaacgucacggugacccacuccgugaaccugcuggaggacaagcacaacgggaagcucugcaagcugcgcggcgucgcgccccugcaccucgggaagugcaacaucgccggcuggauccuggggaacccggagugcgagagccuguccaccgccagcuccuggagcuacaucguggagaccuccagcuccgacaacggcacgugcuaccccggcgacuucaucgacuacgaggagcuccgggagcagcugagcuccgugagcuccuucgagcgcuucgagaucuuccccaagaccagcuccuggcccaaccacgacagcaacaagggggagaccgccgccugcccgcacgccggcgcgaaguccuucuacaagaaccugaucuggcucgucaagaaggggaacagcuaccccaagcuguccaagagcuacaucaacgacaagggcaaggaggugcuggugcucugggggauccaccaccccagcaccuccgccgaccagcagagccuguaccagaacgccgacgccuacgucuucgugggcacgucccgguacagcaagaaguucaagcccgagaucgccauccgcccgaaggugcgggaccaggagggccgcaugaacuacuacuggacccuggucgagcccggggacaagaucaccuucgaggcgaccggcaaccucguggugccccgguacgccuucgccauggagcgcaacgccggguccggcaucaucaucagcgacacgcccguccacgacugcaacacgaccugccagaccccgaagggcgccaucaacaccucccugcccuuccagaacauccaccccaucaccaucgggaagugccccaaguacgucaagagcaccaagcugcggcucgcgaccggccugcgcaacgugccguccauccagagccgggggcuguucggcgccaucgccggguucaucgagggcggcuggacggggaugguggacggcugguacggguaccaccaccagaacgagcagggcuccggguacgccgccgaccucaagagcacccagaacgcgaucgacaagaucaccaacaaggugaacuccgugaucgagaagaugaacacccaguucacggccgucggcaaggaguucaaccaccuggagaagcgcaucgagaaccugaacaagaagguggacgacggcuuccucgacaucuggaccuacaacgccgagcugcugguccuccuggagaacgagcggacccuggacuaccacgacagcaacgugaagaaccucuacgagaaggugaagucccagcugaagaacaacgccaaggagaucgggaacggcugcuucgaguucuaccacaagugcgacaacacgugcauggagagcgucaagaacgggaccuacgacuaccccaaguacuccgaggaggccaagcugaaccgcgaggagaucgacggcgugaagcucgagagcacccggaucuaccagauccuggcgaucuacuccaccguggccagcagccugguccucguggugucccugggggccaucagcuucuggaugugcuccaacggcagccugcagugccgcaucugcaucuga

SEQ ID NO: 77793 - RNA, 1701 nt, Artificial Sequence
  derived and/or modified CDS sequence (opt1) from hemagglutinin__InfluenzaA__BAJ40028
augaaggccauccuggugguccuccuguacaccuucgccaccgcgaacgccgacacgcugugcaucggcuaccacgccaacaacagcaccgacaccguggacaccgugcucgagaagaacgucacggugacccacuccgugaaccugcuggaggacaagcacaacgggaagcucugcaagcugcgcggcgucgcgccccugcaccucgggaagugcaacaucgccggcuggauccuggggaacccggagugcgagagccuguccaccgccagcuccuggagcuacaucguggagaccuccagcuccgacaacggcacgugcuaccccggcgacuucaucgacuacgaggagcuccgggagcagcugagcuccgugagcuccuucgagcgcuucgagaucuuccccaagaccagcuccuggcccaaccacgacagcaacaagggggucaccgccgccugcccgcacgccggcgcgaaguccuucuacaagaaccugaucuggcucgugaagaaggggaacagcuaccccaagcuguccaagagcuacaucaacgacaagggcaaggaggugcugguccucugggggauccaccaccccagcaccuccgccgaccagcagagccuguaccagaacgccgacgccuacguguucgugggcacgucccgguacagcaagaaguucaagcccgagaucgccauccgcccgaagguccgggaccaggagggccgcaugaacuacuacuggacccugguggagcccggggacaagaucaccuucgaggcgaccggcaaccucguggucccccgguacgccuucgccauggagcgcaacgccggguccggcaucaucaucagcgacacgcccgugcacgacugcaacacgaccugccagaccccgaagggcgccaucaacaccucccugcccuuccagaacauccaccccaucaccaucgggaagugccccaaguacgucaagagcaccaagcugcggcucgcgaccggccugcgcaacgugccguccauccagagccgggggcuguucggcgccaucgccgccuucaucgagggcggguggacgggcaugguggacgggugguacggcuaccaccaccagaacgagcagggguccggcuacgccgcggaccucaagagcacccagaacgccaucgacaagaucaccaacaaggugaacuccgucaucgagaagaugaacacccaguucacggccguggggaaggaguucaaccaccuggagaagcgcaucgagaaccugaacaagaaggucgacgacggcuuccucgacaucuggaccuacaacgccgagcugcuggugcuccuggagaacgagcggacccuggacuaccacgacagcaacgugaagaaccucuacgagaagguccgcucccagcugaagaacaacgccaaggagaucggcaacgggugcuucgaguucuaccacaagugcgacaacacgugcauggagagcgugaagaacggcaccuacgacuaccccaaguacuccgaggaggcgaagcugaaccgggaggagaucgacggggugaagcucgagagcacccgcaucuaccagauccuggccaucuacuccaccgucgccagcagccuggugcucguggucucccugggcgccaucagcuucuggaugugcuccaacgggagccugcagugccggaucugcaucuga

SEQ ID NO: 77794 - RNA, 1701 nt, Artificial Sequence; identical to SEQ ID NO: 77766
  derived and/or modified CDS sequence (opt1) from hemagglutinin__InfluenzaA__BAJ40029

SEQ ID NO: 77795 - RNA, 1701 nt, Artificial Sequence
  derived and/or modified CDS sequence (opt1) from hemagglutinin__InfluenzaA__BAJ40030
augaaggccauccuggugguccuccuguacaccuucgccaccgcgaacgccgacacgcugugcaucggcuaccacgccaacaacagcaccgacaccguggacaccgugcucgagaagaacgucacggugacccacuccgugaaccugcuggaggacaagcacaacgggaagcucugcaagcugcgcggcgucgcgccccugcaccucgggaagugcaacaucgccggcuggauccuggggaacccggagugcgagagccuguccaccgccagcuccuggagcuacaucguggagaccuccagcuccgacaacggcacgugcuaccccggcgacuucaucgacuacgaggagcucaaggagcagcugagcuccgugagcuccuucgagcgguucgagaucuuccccaagaccagcuccuggcccaaccacgacagcaacaagggggucaccgccgccugcccgcacgccggcgcgaaguccuucuacaagaaccugaucuggcucgugaagaaggggaacagcuaccccaagcuguccaagagcuacaucaacgacaagggccgcgaggugcugguccucugggggauccaccaccccagcaccuccgccgaccagcagagccuguaccagaacgccgacacguacguguucgugggcaccucccgguacagcaagaaguucaagcccgagaucgccauccgcccgaagguccgggaccaggagggccgcaugaacuacuacuggacccugguggagcccggggacaagaucaccuucgaggccacgggcaaccucguggucccccgguacgcguucgccauggagcgcaacgccggguccggcaucaucaucagcgacacccccgugcacgacugcaacacgaccugccagaccccgaagggcgccaucaacaccucccugcccuuccagaacauccaccccaucaccaucgggaagugccccaaguacgucaagagcaccaagcugcggcucgccacgggccugcgcaacgugccguccauccagagccgggggcuguucggcgcgaucgccggguucaucgagggcggcuggaccgggaugguggacggcugguacggguaccaccaccagaacgagcagggcuccggguacgccgccgaccucaagagcacccagaacgccaucgacgagaucaccaacaaggugaacuccgucaucgagaagaugaacacgcaguucaccgcggugggcaaggaguucaaccaccuggagaagcgcaucgagaaccugaacaagaaggucgacgacggcuuccucgacaucuggaccuacaacgccgagcugcuggugcuccuggagaacgagcggacccuggacuaccacgacagcaacgugaagaaccucuacgagaagguccgcucccagcugaagaacaacgccaaggagaucgggaacggcugcuucgaguucuaccacaagugcgacaacacgugcauggagagcgugaagaacgggaccuacgacuaccccaaguacuccgaggaggccaagcugaaccgggaggagaucgacggcgugaagcucgagagcacccgcaucuaccagauccuggccaucuacuccaccgucgcgagcagccuggugcucguggucucccugggggccaucagcuucuggaugugcuccaacggcagccugcagugccggaucugcaucuga

SEQ ID NO: 77796 - RNA, 1701 nt, Artificial Sequence; identical to SEQ ID NO: 66693
  derived and/or modified CDS sequence (opt1) from hemagglutinin__InfluenzaA__BAJ40031

SEQ ID NO: 77797 - RNA, 1701 nt, Artificial Sequence; identical to SEQ ID NO: 77766
  derived and/or modified CDS sequence (opt1) from hemagglutinin__InfluenzaA__BAJ40032

SEQ ID NO: 77798 - RNA, 1701 nt, Artificial Sequence; identical to SEQ ID NO: 77795
  derived and/or modified CDS sequence (opt1) from hemagglutinin__InfluenzaA__BAJ40033

SEQ ID NO: 77799 - RNA, 1701 nt, Artificial Sequence
  derived and/or modified CDS sequence (opt1) from hemagglutinin__InfluenzaA__BAJ40034
augaaggccauccuggugguccuccuguacaccuucgccaccgcgaacgccgacacgcugugcaucggcuaccacgccaacaacagcaccgacaccguggacaccgugcucgagcgcaacgucacggugacccacuccgugaaccugcuggaggacaagcacaacgggaagcucugcaagcugcggggcgucgcgccccugcaccucgggaagugcaacaucgccggcuggauccuggggaacccggagugcgagagccuguccaccgccagcuccuggagcuacaucguggagaccuccagcuccgacaacggcacgugcuaccccggcgacuucaucgacuacgaggagcuccgcgagcagcugagcuccgugagcuccuucgagcgguucgagaucuuccccaagaccagcuccuggcccaaccacgacagcaacaagggggucaccgccgccugcccgcacgccggcgcgaaguccuucuacaagaaccugaucuggcucgugaagaaggggaacagcuaccccaagcuguccaagagcuacaucaacgacaagggcaaggaggugcugguccucugggggauccaccaccccagcaccuccgccgaccagcagagccuguaccagaacgccgacacguacguguucgugggcaccucccgcuacagcaagaaguucaagcccgagaucgccauccggccgaagguccgcgaccaggagggccggaugaacuacuacuggacccugguggagcccggggacaagaucaccuucgaggccacgggcaaccucguggucccccgcuacgcguucgccauggagcggaacgccggguccggcaucaucaucagcgacacccccgugcacgacugcaacacgaccugccagaccccgaagggcgccaucaacaccucccugcccuuccagaacauccaccccaucaccaucgggaagugccccaaguacgucaagagcaccaagcugcgccucgccacgggccugcggaacgugccguccauccagagccgcgggcuguucggcgcgaucgccggguucaucgagggcggcuggaccgggaugguggacggcugguacggguaccaccaccagaacgagcagggcuccggguacgccgccgaccucaagagcacccagaacgccaucgacgagaucaccaacaaggugaacuccgucaucgagaagaugaacacgcaguucaccgcggugggcaaggaguucaaccaccuggagaagcggaucgagaaccugaacaagaaggucgacgacggcuuccucgacaucuggaccuacaacgccgagcugcuggugcuccuggagaacgagcgcacccuggacuaccacgacagcaacgugaagaaccucuacgagaagguccggucccagcugaagaacaacgccaaggagaucgggaacggcugcuucgaguucuaccacaagugcgacaacacgugcauggagagcgugaagaacgggaccuacgacuaccccaaguacuccgaggaggccaagcugaaccgcgagaagaucgacggcgugaagcucgagagcacccggaucuaccagauccuggccaucuacuccaccgucgcgagcagccuggugcucguggucucccugggggccaucagcuucuggaugugcuccaacggcagccugcagugccgcaucugcaucuga

SEQ ID NO: 77800 - RNA, 1701 nt, Artificial Sequence
  derived and/or modified CDS sequence (opt1) from hemagglutinin__InfluenzaA__BAJ40035
augaaggccauccuggugguccuccuguacaccuucgccaccgcgaacgccgacacgcugugcaucggcuaccacgccaacaacagcaccgacaccguggacaccgugcucgagaagaacgucacggugacccacuccgugaaccugcuggaggacaagcacaacgggaagcucugcaagcugcgcggcgucgcgccccugcaccucgggaagugcaacaucgccggcuggauccuggggaacccggagugcgagagccuguccaccgccagcuccuggagcuacaucguggagaccuccagcuccgacaacggcacgugcuaccccggcgacuucaucgacuacgaggagcuccgggagcagcugagcuccgugagcuccuucgagcgcuucgagaucuuccccaagaccagcuccuggcccaaccacgacagcaacaagggggucaccgccgccugcccgcacgccggcgcgaaguccuucuacaagaaccugaucuggcucgugaagaaggggaacagcuaccccaagcuguccaagagcuacaucaacgacaagggcaaggaggugcugguccucugggggauccaccaccccagcaccuccgccgaccagcagagccuguaccagaacgccgacacguacguguucgugggcaccucccgguacagcaagaaguucaagcccgagaucgccauccgcccgaagguccgggaccaggagggccgcaugaacuacuacuggacccugguggagcccggggacaagaucaaguucgaggccaccggcaaccucguggucccccgguacgcguucgccauggagcgcaacgccggguccggcaucaucaucagcgacacgcccgugcacgacugcaacacgaccugccagaccccgaagggcgccaucaacaccucccugcccuuccagaacauccaccccaucaccaucgggaagugccccaaguacgucaagagcaccaagcugcggcucgccaccggccugcgcaacgugccguccauccagagccgggggcuguucggcgcgaucgccggguucaucgagggcggcuggacggggaugguggacggcugguacggguaccaccaccagaacgagcagggcuccggguacgccgccgaccucaagagcacccagaacgccaucgacgagaucaccaacaaggugaacuccgucaucgagaagaugaacacccaguucacggcggugggcaaggaguucaaccaccuggagaagcgcaucgagaaccugaacaagaaggucgacgacggcuuccucgacaucuggaccuacaacgccgagcugcuggugcuccuggagaacgagcggacccuggacuaccacgacagcaacgugaagaaccucuacgagaagguccgcaaccagcugaagaacaacgccaaggagaucgggaacggcugcuucgaguucuaccacaagugcgacaacacgugcauggaguccgugaagaacgggaccuacgacuaccccaaguacagcgaggaggccaagcugaaccgggaggagaucgacggcgugaagcucgaguccacccgcaucuaccagauccuggccaucuacagcaccgucgcguccagccuggugcucguggucagccugggggccaucuccuucuggaugugcagcaacggcucccugcagugccggaucugcaucuga

SEQ ID NO: 77801 - RNA, 1701 nt, Artificial Sequence
  derived and/or modified CDS sequence (opt1) from hemagglutinin__InfluenzaA__BAJ40036
augaaggccauccuggugguccucaucuacaccuucgccaccgcgaacgccgacacgcugugcaucggcuaccacgccaacaacagcaccgacaccguggacaccgugcuggagaagaacgucacggugacccacuccgugaaccuccuggaggacaagcacaacgggaagcugugcaagcuccgcggcgucgcgccccugcaccuggggaagugcaacaucgccggcuggauccucgggaacccggagugcgagagccuguccaccgccagcuccuggagcuacaucguggagaccuccagcuccgacaacggcacgugcuaccccggcgacuucaucgacuacgaggagcugcgggagcagcucagcuccgugagcuccuucgagcgcuucgagaucuuccccaagaccagcuccuggcccaaccacgacagcaacaagggggucaccgccgccugcccgcacgccggcgcgaaguccuucuacaagaaccugaucuggcuggugaagaaggggaacagcuaccccaagcucuccaagagcuacaucaacgacaagggcaaggaggugcugguccugugggggauccaccaccccagcaccuccgccgaccagcagagccucuaccagaacgccgacgccuacguguucgugggcacgucccgguacagcaagaaguucaagcccgagaucgccauccgcccgaagguccgggaccaggagggccgcaugaacuacuacuggaccaucguggagcccggggacaagaucaccuucgaggcgaccggcaaccugguggucccccgguacgccuucgccauggagcgcaacgccggguccggcaucaucaucagcgacacgcccgugcacgacugcaacacgaccugccagaccccgaagggcgccaucaacaccucccugcccuuccagaacauccaccccaucaccaucgggaagugccccaaguacgucaagagcaccaagcuccggcuggcgaccggccugcgcaacgugccguccauccagagccgggggcuguucggcgccaucgccggguucaucgagggcggcuggacggggaugguggacggcugguacggguaccaccaccagaacgagcagggcuccggguacgccgccgaccucaagagcacccagaacgcgaucgacgagaucaccaacaaggugaacuccgucaucgagaagaugaacacccaguucacggccgugggcaaggaguucaaccaccuggagaagcgcaucgagaaccucaacaagaaggucgacgacggcuuccuggacaucuggaccuacaacgccgagcugcucgugcugcuggagaacgagcggacccucgacuaccacgacagcaacgugaagaaccuguacgagaaggucaagucccagcugaagaacaacgccaaggagaucgggaacggcugcuucgaguucuaccacaagugcgacaacacgugcauggagagcgugaagaacgggaccuacgacuaccccaaguacuccgaggaggccaagcucaaccgcgaggagaucgacggcgugaagcuggagagcacccggaucuaccagauccuggcgaucuacuccaccgucgccagcagccucgugcugguggucucccugggggccaucagcuucuggaugugcuccaacggcagccuccagugccgcaucugcaucuga

SEQ ID NO: 77802 - RNA, 1701 nt, Artificial Sequence; identical to SEQ ID NO: 73296
  derived and/or modified CDS sequence (opt1) from hemagglutinin__InfluenzaA__BAJ40037

SEQ ID NO: 77803 - RNA, 1701 nt, Artificial Sequence
  derived and/or modified CDS sequence (opt1) from hemagglutinin__InfluenzaA__BAJ40038
augaaggccauccugcucgugcugcuguacaccuucgccaccgcgaacgccgacacgcucugcaucggcuaccacgccaacaacagcaccgacaccgucgacaccgugcuggagaagaacgugacggucacccacuccgugaaccugcucgaggacaagcacaacgggaagcugugcaagcugcgcggcguggcgccccuccaccuggggaagugcaacaucgccggcuggauccuggggaacccggagugcgagagccucuccaccgccagcuccuggagcuacaucgucgagaccuccagcuccgacaacggcacgugcuaccccggcgacuucaucgacuacgaggagcugcgggagcagcugagcuccgugagcuccuucgagcgcuucgagaucuuccccaagaccagcuccuggcccaaccacgacagcaacaagggggugaccgccgccugcccgcacgccggcgcgaaguccuucuacaagaaccucaucuggcuggucaagaaggggaacagcuaccccaagcuguccaagagcuacaucaacgacaagggcaaggaggugcucgugcugugggggauccaccaccccagcaccuccgccgaccagcagagccuguaccagaacgccgacacguacgucuucgugggcaccucccgguacagcaagaaguucaagcccgagaucgccauccgcccgaaggugcgggaccaggagggccgcaugaacuacuacuggaccaucgucgagcccggggacaagaucaccuucgaggccacgggcaaccucguggugccccgguacgcguucgccauggagcgcaacgccggguccggcaucaucaucagcgacacccccguccacgacugcaacacgaccugccagaccccgaagggcgccaucaacaccucccugcccuuccagaacauccaccccaucaccaucgggaagugccccaaguacgucaagagcaccaagcugcggcucgccacgggccugcgcaacgugccguccauccagagccgggggcuguucggcgcgaucgccggguucaucgagggcggcuggaccgggaugguggacggcugguacggguaccaccaccagaacgagcagggcuccggguacgccgccgaccucaagagcacccagaacgccaucgacgagaucaccaacaaggugaacuccgugaucgagaagaugaacacgcaguucaccgcggucggcaaggaguucaaccaccuggagaagcgcaucgagaaccugaacaagaagguggacgacggcuuccucgacaucuggaccuacaacgccgagcugcugguccuccuggagaacgagcggacccuggacuaccacgacagcaacgugaagaaccucuacgagaaggugcgcucccagcugaagaacaacgccaaggagaucgggaacggcugcuucgaguucuaccacaagugcgacaacacgugcauggagagcgucaagaacgggaccuacgacuaccccaaguacuccgaggaggccaagcugaaccgggaggagaucgacggcgugaagcucgagagcacccgcaucuaccagauccuggccaucuacuccaccguggcgagcagccugguccucguggugucccugggggccaucagcuucuggaugugcuccaacggcagccugcagugccggaucugcaucuga

SEQ ID NO: 77804 - RNA, 1701 nt, Artificial Sequence; identical to SEQ ID NO: 66693
  derived and/or modified CDS sequence (opt1) from hemagglutinin__InfluenzaA__BAJ40039

SEQ ID NO: 77805 - RNA, 1701 nt, Artificial Sequence
  derived and/or modified CDS sequence (opt1) from hemagglutinin__InfluenzaA__BAJ40040
augaaggccauccuggugguccuccuguacaccuucgccaccgcgaacgccgacacgcugugcaucggcuaccacgccaacaacagcaccgacaccguggacaccgugcucgagaagaacgucacggugacccacuccgugaaccugcuggaggacaagcacaacgggaagcucugcaagcugcgcggcgucgcgccccugcaccucgggaagugcaacaucgccggcuggauccuggggaacccggagugcgagagccuguccaccgccagcuccuggagcuacaucguggagaccuccagcuccgacaacggcacgugcuaccccggcgacuucaucgacuacgaggagcuccgggagcagcugagcuccgugagcuccuucgagcgcuucgagaucuuccccaagaccagcuccuggcccaaccacgacagcaacaagggggucaccgccgccugcccgcacgccggcgcgaaguccuucuacaagaaccugaucuggcucgugaagaaggggaacagcuaccccaagcuguccaagagcuacaucaacgacaagggccgggaggugcugguccucugggggauccaccaccccagcaccuccgccgaccagcagagccuguaccagaacgccgacacguacguguucgugggcaccucccgcuacagcaagaaguucaagcccgagaucgccauccggccgaagguccgcgaccaggagggccggaugaacuacuacuggacccugguggagcccggggacaagaucaccuucgaggccacgggcaaccucguggucccccgcuacgcguucgccauggagcggaacgccggguacggcaucaucaucuccgacacccccgugcacgacugcaacacgaccugccagaccccgaagggcgccaucaacaccagccugcccuuccagaacauccaccccaucaccaucgggaagugccccaaguacgugaaguccaccaagcugcgccucgccacgggccugcggaacgucccgagcauccagucccgcgggcuguucggcgcgaucgccggguucaucgagggcggcuggaccgggaugguggacggcugguacggguaccaccaccagaacgagcagggcagcggguacgccgccgaccucaaguccacccagaacgccaucgacgagaucaccaacaaggugaacagcgucaucgagaagaugaacacgcaguucaccgcggugggcaaggaguucaaccaccuggagaagcggaucgagaaccugaacaagaaggucgacgacggcuuccucgacaucuggaccuacaacgccgagcugcuggugcuccuggagaacgagcgcacccuggacuaccacgacuccaacgugaagaaccucuacgagaagguccggagccagcugaagaacaacgccaaggagaucgggaacggcugcuucgaguucuaccacaagugcgacaacacgugcauggaguccgugaagaacgggaccuacgacuaccccaaguacagcgaggaggccaagcugaaccgcgaggagaucgacggcgugaagcucgaguccacccggaucuaccagauccuggccaucuacagcaccgucgcguccagccuggugcucguggucagccugggggccaucuccuucuggaugugcagcaacggcucccugcagugccgcaucugcaucuga

SEQ ID NO: 77806 - RNA, 1701 nt, Artificial Sequence; identical to SEQ ID NO: 73296
  derived and/or modified CDS sequence (opt1) from hemagglutinin__InfluenzaA__BAJ40041

SEQ ID NO: 77807 - RNA, 1701 nt, Artificial Sequence
  derived and/or modified CDS sequence (opt1) from hemagglutinin__InfluenzaA__BAJ40042
augaaggccauccuggugguccuccuguacaccuucgccaccgcgaacgccgacacgcugugcaucggcuaccacgccaacaacagcaccgacaccguggacaccgugcucgagaagaacgucacggugacccacuccgugaaccugcuggaggacaagcacaacgggaagcucugcaagcugcgcggcgucgcgccccugcaccucgggaagugcaacaucgccggcuggauccuggggaacccggagugcgagagccuguccaccgccagcuccuggagcuacaucguggagaccuccagcuccgacaacggcacgugcuaccccggcgacuucaucgacuacgaggagcucaaggagccccugagcuccgugagcuccuucgagcgguucgagaucuuccccaagaccagcuccuggccgaaccacgacagcaacaagggggucaccgccgccugcccccacgccggcgcgaaguccuucuacaagaaccugaucuggcucgugaagaaggggaacagcuaccccaagcuguccaagagcuacaucaacgacaagggccgcgaggugcugguccucugggggauccaccaccccagcaccuccgccgaccggcagagccuguaccagaacgccgacacguacguguucgugggcaccucccgcuacagcaagaaguucaagccggagaucgccauccggcccaagguccgcgaccaggagggccggaugaacuacuacuggacccugguggagcccggggacaagaucaccuucgaggccacgggcaaccucguggucccccgcuacgcguucgccauggagcggaacgccggguccggcaucaucaucagcgacaccccggugcacgacugcaacacgaccugccagacccccaagggcgccaucaacaccucccugcccuuccagaacauccaccccaucaccaucgggaagugcccgaaguacgucaagagcaccaagcugcgccucgccacgggccugcggaacgugcccuccauccagagccgcgggcuguucggcgcgaucgccggguucaucgagggcggcuggaccgggaugguggacggcugguacggguaccaccaccagaacgagcagggcuccggguacgccgccgaccucaagagcacccagaacgccaucgacgagaucaccaacaaggugaacuccgucaucgagaagaugaacacgcaguucaccgcggugggcaaggaguucaaccaccuggagaagcggaucgagaaccugaacaagaaggucgacgacggcuuccucgacaucuggaccuacaacgccgagcugcuggugcuccuggagaacgagcgcacccuggacuaccacgacagcaacgugaagaaccucuacgagaagguccggucccagcugaagaacaacgccaaggagaucgggaacggcugcuucgaguucuaccacaagugcgacaacacgugcauggagagcgugaagaacgggaccuacgacuaccccaaguacuccgaggaggccaagcugaaccgcgaggagaucgacggcgugaagcucgagagcacccggaucuaccagauccuggccaucuacuccaccgucgcgagcagccuggugcucguggucucccugggggccaucagcuucuggaugugcuccaacggcagccugcagugccgcaucugcaucuga

SEQ ID NO: 77808 - RNA, 1701 nt, Artificial Sequence; identical to SEQ ID NO: 73296
  derived and/or modified CDS sequence (opt1) from hemagglutinin__InfluenzaA__BAJ40043

SEQ ID NO: 77809 - RNA, 1701 nt, Artificial Sequence
  derived and/or modified CDS sequence (opt1) from hemagglutinin__InfluenzaA__BAJ40044
augaaggccauccuggugguccuccuguacaccuucgccaccgcgaacgccgacacgcugugcaucggcuaccacgccaacaacagcaccgacaccguggacaccgugcucgagaagaacgucacggugacccacuccgugaaccugcuggaggacaagcacaacgggaagcucugcaagcugcgcggcgucgcgccccugcaccucgggaagugcaacaucgccggcuggauccuggggaacccggagugcgagagccuguccaccgccagcuccuggagcuacaucguggagaccuccagcuccgacaacggcacgugcuaccccggcgacuucaucgacuacgaggagcagaaggagcagcucagcuccgugagcuccuucgagcgguucgagaucuuccccaagaccagcuccuggcccaaccacgacagcaacaagggggucaccgccgccugcccgcacgccggcgcgaaguccuucuacaagaaccugaucuggcuggugaagaaggggaacagcuaccccaagcucuccaagagcuacaucaacgacaagggcaaggaggugcugguccugugggggauccaccaccccagcaccuccgccgaccagcagagccucuaccagaacgccgacgccuacguguucgugggcacgucccgcuacagcaagaaguucaagcccgagaucgccauccggccgaagguccgcgaccaggagggccggaugaacuacuacuggacccugguggagcccggggacaagaucaccuucgaggcgaccggcaaccugguggucccccgcuacgccuucgccauggagaucaacgccggguccggcaucaucaucagcgacacgcccgugcacgacugcaacacgaccugccagaccccgaagggcgccaucaacaccucccuccccuuccagaacauccaccccaucaccaucgggaagugccccaaguacgucaagagcaccaagcugcggcuggcgaccggccuccgcaacgugccguccauccagagccgggggcuguucggcgccaucgccggguucaucgagggcggcuggacggggaugguggacggcugguacggguaccaccaccagaacgagcagggcuccggguacgccgccgaccucaagagcacccagaacgcgaucgacaagaucaccaacaaggugaacuccgucaucgagaagaugaacacccaguucacggccgugggcaaggaguucaaccaccuggagaagcgcaucgagaaccugaacaagaaggucgacgacggcuuccuggacaucuggaccuacaacgccgagcuccuggugcugcucgagaacgagcggacccuggacuaccacgacagcaacgugaagaaccuguacgagaagguccgcucccagcucaagaacaacgccaaggagaucgggaacggcugcuucgaguucuaccacaagugcgacaacacgugcauggagagcgugaagaacgggaccuacgacuaccccaaguacuccgaggaggccaagcugaaccgggaggagaucgacggcgugaagcuggagagcacccgcaucuaccagauccucgcgaucuacuccaccgucgccagcagccuggugcugguggucucccucggggccaucagcuucuggaugugcuccaacggcagccugcagugccggaucugcaucuga

SEQ ID NO: 77810 - RNA, 1701 nt, Artificial Sequence; identical to SEQ ID NO: 77772
  derived and/or modified CDS sequence (opt1) from hemagglutinin__InfluenzaA__BAJ40045

SEQ ID NO: 77811 - RNA, 1701 nt, Artificial Sequence
  derived and/or modified CDS sequence (opt1) from hemagglutinin__InfluenzaA__BAJ40046
augaaggccauccuggugguccuccuguacaccuucgccaccgcgaacgccgacacgcugugcaucggcuaccacgccaacaacagcaccgacaccguggacaccgugcucgagaagaacgucacggugacccacuccgugaaccugcuggaggacaagcacaacgggaagcucugcaagcugcgcggcgucgcgccccugcaccucgggcggugcaacaucgccggcuggauccuggggaacccggagugcgagagccuguccaccgcgagcuccuggagcuacaucguggagaccuccaucagcgacaacggcacgugcuaccccggcgacuucaucgacuacgaggagcucaaggagcagcuguccagcguguccagcuucgagcgcuucgagaucuuccccaagaccuccagcuggcccaaccacgacuccaacaagggggucaccgccgccugcccgcacgccggcgccaagagcuucuacaagaaccugaucuggcucgugaagaaggggaacuccuaccccaagcugagcaaguccuacaucaacgacaagggcaaggaggugcugguccucugggggauccaccaccccagcaccagcgccgaccagcagucccuguaccagaacgccgacgccuacguguucgugggcacgagccgguacuccaagaaguucaagcccgagaucgccauccgcccgaagguccgggaccaggagggccgcaugaacuacuacuggacccugguggagcccggggacaagaucaccuucgaggcgaccggcaaccucguggucccccgguacgccuucgccauggagcgcaacgccgggagcggcaucaucaucuccgacacgcccgugcacgacugcaacacgaccugccagaccccgaagggcgccaucaacaccagccugcccuuccagaacauccaccccaucaccaucgggaagugccccaaguacgugaaguccaccaagcugcggcucgcgaccggccugcgcaacgucccgagcauccagucccgggggcuguucggcgccaucgccggguucaucgagggcggcuggacggggaugguggacggcugguacggguaccaccaccagaacgagcagggcagcggguacgccgccgaccucaaguccacccagaacgcgaucgacaagaucaccaacaaggugaacagcgucaucgagaagaugaacacccaguucacggccgugggcaaggaguucaaccaccuggagaagaagaucgagaaccugaacaagaaggucgacgacggcuuccucgacaucuggaccuacaacgccaagcugcuggugcuccuggagaacgagcgcacccuggacuaccacgacuccaacgugaagaaccucuacgagaagguccggagccagcugaagaacaacgccaaggagaucgggaacggcugcuucgaguucuaccacaagugcgacaacacgugcauggaguccgugaagaacgggaccuacgacuaccccaaguacagcgaggaggccaagcugaaccgcgaggagaucgacggcgugaagcucgaguccacccggaucuaccagauccuggcgaucuacagcaccgucgccuccagccuggugcucguggucagccugggggccaucuccuucuggaugugcagcaacggcucccugcagugccgcaucugcaucuga

SEQ ID NO: 77812 - RNA, 1701 nt, Artificial Sequence; identical to SEQ ID NO: 77795
  derived and/or modified CDS sequence (opt1) from hemagglutinin__InfluenzaA__BAJ40047

SEQ ID NO: 77813 - RNA, 1701 nt, Artificial Sequence; identical to SEQ ID NO: 77766
  derived and/or modified CDS sequence (opt1) from hemagglutinin__InfluenzaA__BAJ40048

SEQ ID NO: 77814 - RNA, 1701 nt, Artificial Sequence
  derived and/or modified CDS sequence (opt1) from hemagglutinin__InfluenzaA__BAJ40050
augaaggccauccuggugguccuccuguacaccuucgccaccgcgaacgccgacacgcugugcaucggcuaccacgccaacaacagcaccgacaccguggacaccgugcucgagaagaacgucacggugacccacuccgugaaccugcuggaggacaagcacaacgggaagcucugcaagcugcgcggcgucgcgccccugcaccucgggaagugcaacaucgccggcuggauccuggggaacccggagugcgagagccuguccaccgccagcuccuggagcuacaucguggagaccuccagcuccgacaacggcacgugcuaccccggcgacuucaucgacuacgaggagcucaaggagcagcugagcuccgugagcuccuucgagcgguucgagaucuuccccaagaccagcuccuggcccaaccacgacagcaacaagggggucaccgccgccugcccgcacgccggcgcgaaguccuucuacaagaaccugaucuggcucgugaagaaggggaacagcuaccccaagcuguccaagagcuacaucaacgacaagggcaaggaggugcugguccucugggggauccaccaccccagcaccuccgccgaccagcagagccuguaccagaacgccgacgccuacguguucgugggcacgucccgcuacagcaagaaguucaagcccgagaucgccauccggccgaagguccgcgaccaggagggccggaugaacuacuacuggacccugguggagcccggggacaagaucaccuucgaggcgaccggcaaccucguggucccccgcuacgccuucgccauggagcggaacgccggguccggcaucaucaucagcgacacgcccgugcacgacugcaacacgaccugccagaccccgaagggcgccaucaacaccucccugcccuuccagaacauccaccccaucaccaucgggaagugccccaaguacgucaagagcaccaagcugcgccucgcgaccggccugcggaacgugccguccauccagagccgcgggcuguucggcgccaucgccggguucaucgagggcggcuggacggggaugguggacggcugguacggguaccaccaccagaacgagcagggcuccggguacgccgccgaccucaagagcacccagaacgcgaucgacaagaucaccaacaaggugaacuccgucaucgagaagaugaacacccaguucacggccgugggcaaggaguucaaccaccuggagaagcggaucgagaaccugaacaagaaggucgacgacggcuuccucgacaucuggaccuacaacgccgagcugcuggugcuccuggagaacgagcgcacccuggacuaccacgacagcaacgugaagaaccucuacgagaagguccggucccagcugaagaacaacgccaaggagaucgggaacggcugcuucgaguucuaccacaagugcgacaacacgugcauggagagcgugaagaacgggaccuacgacuaccccaaguacuccgaggaggccaagcugaaccgcgaggagaucgacggcgugaagcucgagagcacccggaucuaccagauccuggcgaucuacuccaccgucgccagcagccuggugcucguggucucccugggggccaucagcuucuggaugugcuccaacggcagccugcagugccgcaucugcaucuga

SEQ ID NO: 77815 - RNA, 1701 nt, Artificial Sequence; identical to SEQ ID NO: 67857
  derived and/or modified CDS sequence (opt1) from hemagglutinin__InfluenzaA__BAJ40051

SEQ ID NO: 77816 - RNA, 1701 nt, Artificial Sequence
  derived and/or modified CDS sequence (opt1) from hemagglutinin__InfluenzaA__BAJ40052
augaaggccauccuggugguccuccuguacaccuucgccaccgcgaacgccgacacgcugugcaucggcuaccacgccaacaacagcaccgacaccguggacaccgugcucgagaagaacgucacggugacccacuccgugaaccugcuggaggacaagcacaacgggaagcucugcaagcugcgcggcgucgcgccccugcaccucgggaagugcaacaucgccggcuggauccuggggaacccggagugcgagagccuguccaccgccagcuccuggagcuacaucguggagaccuccagcuccgacaacggcacgugcuaccccggcgacuucaucgacuacgaggagcuccgggagcagcugagcuccgugagcuccuucgagcgcuucgagaucuuccccaagaccagcuccuggcccaaccacgacagcaacaagggggucaccgccgccugcccgcacgccggcgcgaaguccuucuacaagaaccugaucuggcucgugaagaaggggaacagcuaccccaagcuguccaagagcuacaucaacgacaagggccgggaggugcugguccucugggggauccaccaccccagcaccacggccgaccagcagucccuguaccagaacgccgacaccuacguguucgugggcaccagccgcuacuccaagaaguucaagcccgagaucgccauccggccgaagguccgcgaccaggagggccggaugaacuacuacuggacccugguggagcccggggacaagaucacguucgaggccaccggcaaccucguggucccccgcuacgcguucgccauggagcggaacgccgggagcggcaucaucaucuccgacacccccgugcacgacugcaacaccacgugccagaccccgaagggcgccaucaacaccagccugcccuuccagaacauccaccccaucaccaucgggaagugccccaaguacgugaaguccacgaagcugcgccucgccaccggccugcggaacgucccgagcauccagucccgcgggcuguucggcgcgaucgccggguucaucgagggcggcuggaccgggaugguggacggcugguacggguaccaccaccagaacgagcagggcagcggguacgccgccgaccucaaguccacccagaacgccaucgacgagaucacgaacaaggugaacagcgucaucgagaagaugaacacccaguucaccgcggugggcaaggaguucaaccaccuggagaagcggaucgagaaccugaacaagaaggucgacgacggcuuccucgacaucuggaccuacaacgccgagcugcuggugcuccuggagaacgagcgcacgcuggacuaccacgacuccaacgugaagaaccucuacgagaagguccggagccagcugaagaacaacgccaaggagaucgggaacggcugcuucgaguucuaccacaagugcgacaacacgugcauggaguccgugaagaacgggaccuacgacuaccccaaguacagcgaggaggccaagcugaaccgcgaggagaucgacggcgugaagcucgaguccacccggaucuaccagauccuggccaucuacagcaccgucgcguccagccuggugcucguggucagccugggggccaucuccuucuggaugugcagcaacggcucccugcagugccgcaucugcaucuga

SEQ ID NO: 77817 - RNA, 1701 nt, Artificial Sequence
  derived and/or modified CDS sequence (opt1) from hemagglutinin__InfluenzaA__BAJ40053
augaaggccauccuggugguccuccuguacaccuucgccaccgcgaacgccgacacgcugugcaucggcuaccacgccaacaacagcaccgacaccguggacaccgugcucgagaagaacgucacggugacccacuccgugaaccugcuggaggacaagcacaacgggaagcucugcaagcugcgcggcgucgcgccccugcaccucgggaagugcaacaucgccggcuggauccuggggaacccggagugcgagagccuguccaccgccagcuccuggagcuacaucguggagaccuccagcuccgacaacggcacgugcuaccccggcgacuucaucgacuacgaggagcuccgggagcagcugagcuccgugagcuccuucgagcgcuucgagaucuuccccaagaccagcuccuggcccaaccacgacagcaacaagggggucaccgccgccugcccgcacgccggcgcgaaguccuucuacaagaaccugaucuggcucgugaagaaggggaacagcuaccccaagcuguccaagagcuacaucaacgacaagggcaaggaggugcugguccucugggggauccaccaccccagcaccuccgccgaccagcagagccuguaccagaacgccgacacguacguguucgugggcaccucccgguacagcaagaaguucaagcccgagaucgccauccgcccgaagguccgggaccaggagggccgcaugaacuacuacuggacccugguggagcccggggacaagaucaccuucgaggccacgggcaaccucguggucccccgguacgcguucgccauggagcgcaacgccggguccggcaucaucaucagcgacacccccgugcacgacugcaacacgaccugccagaccccgaagggcgccaucaacaccucccugcccuuccagaacauccaccccaucaccaucgggaagugccccaaguacgucaagagcaccaagcugcggcucgccacgggccugcgcaacgugccguccauccagagccgggggcuguucggcgcgaucgccggguucaucgagggcggcuggaccgggaugguggacggcugguacggguaccaccaccagaacgagcagggcuccggguacgccgccgaccucaagagcacccagaacgccaucgacgagaucaccaacaaggugaacuccgucaucgagaagaugaacacgcaguucaccgcggugggcaaggaguucaaccaccuggagaagcgcaucgagaaccugaacaagaaggucgacgacggcuuccucgacaucuggaccuacaacgccgagcugcuggugcuccuggagaacgagcggacccuggacuaccacgacagcaacgugaagaaccucuacgagaagguccgcaaccagcugaagaacaacgccaaggagaucgggaacggcugcuucgaguucuaccacaagugcgacaacacgugcauggaguccgugaagaacgggaccuacgacuaccccaaguacagcgaggaggccaagcugaaccgggaggagaucgacggcgugaagcucgaguccacccgcaucuaccagauccuggccaucuacagcaccgucgcguccagccuggugcucguggucagccugggggccaucuccuucuggaugugcagcaacggcucccugcagugccggaucugcaucuga

SEQ ID NO: 77818 - RNA, 1701 nt, Artificial Sequence; identical to SEQ ID NO: 67857
  derived and/or modified CDS sequence (opt1) from hemagglutinin__InfluenzaA__BAJ40054

SEQ ID NO: 77819 - RNA, 1701 nt, Artificial Sequence
  derived and/or modified CDS sequence (opt1) from hemagglutinin__InfluenzaA__BAJ40055
augaaggccauccuggugguccuccuguacaccuucgccaccgcgaacgccgacacgcugugcaucggcuaccacgccaacaacagcaccgacaccguggacaccgugcucgagaagaacgucacggugacccacuccgugaaccugcuggaggacaagcacaacgggaagcucugcaagcugcgcggcgucgcgccccugcaccucgggaagugcaacaucgccggcuggauccuggggaacccggagugcgagagccuguccaccgccagcuccuggagcuacaucguggagaccuccagcuccgacaacggcacgugcuaccccggcgacuucaucgacuacgaggagcuccgggagcagcugagcuccgugagcuccuucgagcgcuucgagaucuuccccaagaccagcuccuggcccaaccacgacagcaacaagggggucaccgccgccugcccgcacgccggcgcgaaguccuucuacaagaaccugaucuggcucgugaagaaggggaacagcuaccccaagcuguccaagagcuacaucaacgacaagggcaaggaggugcugguccucugggggauccaccaccccagcaccuccacggaccagcagagccuguaccagaacgccgacaccuacguguucgugggcaccucccgguacagcaagaaguucaagcccgagaucgccauccgcccgaagguccgggaccaggagggccgcaugaacuacuacuggacccugguggagcccggggacaagaucacguucgaggccaccggcaaccucguggucccccgguacgccuucgcgauggagcgcaacgccggguccggcaucaucaucagcgacacccccgugcacgacugcaacaccaucugccagacgccgaagggcgccaucaacaccucccugcccuuccagaacauccaccccaucaccaucgggaagugccccaaguacgucaagagcaccaagcugcggcucgccacgggccugcgcaacgugccguccgugcagagccgggggcuguucggcgccaucgcgggguucaucgagggcggcuggaccgggaugguggacggcugguacggguaccaccaccagaacgagcagggcuccggguacgccgccgaccucaagagcacccagaacgccaucgacgagaucaccaacaaggucaacuccgugaucgagaagaugaacacgcaguucaccgccgucggcaaggaguucaaccaccuggagaagcgcaucgagaaccugaacaagaagguggacgacggcuuccucgacaucuggaccuacaacgcggagcugcuggugcuccuggagaacgagcggacccuggacuaccacgacagcaacgucaagaaccucuacgagaaggugcgcucccagcugaagaacaacgccaaggagaucgggaacggcugcuucgaguucuaccacaagugcgacaacacgugcauggagagcgugaagaacgggaccuacgacuaccccaaguacuccgaggaggccaagcugaaccgggaggagaucgacggcgucaagcucgagagcacccgcaucuaccagauccuggccaucuacuccaccguggccagcagccuggugcucgucgugucccugggggcgaucagcuucuggaugugcuccaacggcagccugcagugccggaucugcaucuga

SEQ ID NO: 77820 - RNA, 1701 nt, Artificial Sequence
  derived and/or modified CDS sequence (opt1) from hemagglutinin__InfluenzaA__BAJ40056
augaaggccauccuggugguccuccuguacaccuucgccaccgcgaacgccgacacgcugugcaucggcuaccacgccaacaacagcaccgacaccguggacaccgugcucgagaagaacgucacggugacccacuccgugaaccugcuggaggacaagcacaacgggaagcucugcaagcugcgcggcgucgcgccccugcaccucgggaagugcaacaucgccggcuggauccuggggaacccggagugcgagcugcucagcaccgcguccagcugguccuacaucguggagaccagcuccagcgacaacggcacgugcuaccccggcgacuucaucgacuacgaggagcugcgggagcagcuguccagcguguccagcuucgagcgcuucgagaucuuccccaagaccuccagcuggcccaaccacgacuccaacaagggggucaccgccgccugcccgcacgccggcgccaagagcuucuacaagaaccucaucuggcaggucaagaaggggaacuccuaccccaagcugagcaaguccuacaucaacgacaagggcaaggaggugcuggugcucugggggauccaccaccccagcaccagcgccgaccagcagucccuguaccagaacgccgacgccuacguguucgugggcacgagccgguacuccaagaaguucaagcccgagaucgccauccgcccgaagguccgggaccaggagggccgcaugaacuacuacuggacccugguggagcccggggacaagaucaccuucgaggcgaccggcaaccucguggucccccggcacgccuucgccauggagcgcaacgccgggagcggcaucaucaucuccgacacgcccgugcacaacugcaacacgaccugccagaccccgaagggcgccaucaacaccagccugcccuuccagaacauccaccccaucaccaucgggaagugccccaaguacgugaaguccccgaagcugcggcucgcgaccggccugcgcaacguccccagcauccagucccgggggcuguucggcgccaucgccggguucaucgagggcggcuggaccgggaugguggacggcugguacggguaccaccaccagaacgagcagggcagcggguacgccgccgaccucaaguccacgcagaacgcgaucgacaagaucaccaacaaggugaacagcgucaucgagaagaugaacacccaguucaccgccgugggcaaggaguucaaccaccuggagaagcgcaucgagaaccugaacaagaaggucgacgacggcuuccucgacaucuggacguacaacgccgagcugcuggugcuccuggagaacgagcggacccuggacuaccacgacuccuacgugaagaaccucuacgagaagguccgcagccagcugaagaacaacgccaaggagaucgggaacggcugcuucgaguucuaccacaagugcgacaacacgugcauggaguccgugaagaacgggaccuacgacuaccccaaguacagcgaggaggccaagcugaaccgggaggagaucgacggcgugaagcucgaguccacccgcaucuaccagauccuggcgaucuacagcaccgucgccuccagccuggugcucguggucagccugggggccaucuccuucuggaugugcagcaacggcucccugcagugccggaucugcaucuga

SEQ ID NO: 77821 - RNA, 1701 nt, Artificial Sequence
  derived and/or modified CDS sequence (opt1) from hemagglutinin__InfluenzaA__BAJ40057
augaaggccauccuggugguccuccuguacaccuucgccaccgcgaacgccgacacgcugugcaucggcuaccacgccaacaacagcaccgacaccguggacaccgugcucgagcgcaacgucacggugacccacuccgugaaccugcuggaggacaagcacaacgggaagcucugcaagcugcggggcgucgcgccccugcaccucgggaagugcaacaucgccggcuggauccuggggaacccggagugcgagagccuguccaccgccagcuccuggagcuacaucguggagaccuccagcuccgacaacggcacgugcuaccccggcgacuucaucgacuacgaggagcuccgcgagcagcugagcuccgugagcuccuucgagcgguucgagaucuuccccaagaccagcuccuggcccaaccacgacagcaacaagggggucaccgccgccugcccgcacgccggcgcgaaguccuucuacaagaaccugaucuggcucgugaagaaggggaacagcuaccccaagcuguccaagagcuacaucaacgacaagggcaaggaggugcugguccucugggggauccaccaccccagcaccuccgccgaccagcagagccuguaccagaacgccgacacguacguguucgugggcaccucccgcuacagcaagaaguucaagcccgagaucgccauccggccgaagguccgcgaccaggagggccggaugaacuacuacuggacccugguggagcccggggacaagaucaccuucgaggccacgggcaaccucguggucccccgcuacgcguucgccauggagcggaacgccggguccggcaucaucaucagcgacacccccgugcacgacugcaacacgaccugccagaccccgaagggcgccaucaacaccucccugcccuuccagaacauccaccccaucaccaucgggaagugccccaaguacgucaagagcaccaagcugcgccucgccacgggccugcggaacgugccguccauccagagccgcgggcuguucggcgcgaucgccggguucaucgagggcggcuggaccgggaugguggacggcugguacggguaccaccaccagaacgagcagggcuccggguacgccgccgaccucaagagcacccagaacgccaucgacgagaucaccaacgaggugaacuccgucaucgagaagaugaacacgcaguucaccgcggugggcaaggaguucaaccaccuggagaagcggaucgagaaccugaacaagaaggucgacgacggcuuccucgacaucuggaccuacaacgccgagcugcuggugcuccuggagaacgagcgcacccuggacuaccacgacagcaacgugaagaaccucuacgagaagguccggucccagcugaagaacaacgccaaggagaucgggaacggcugcuucgaguucuaccacaagugcgacaacacgugcauggagagcgugaagaacgggaccuacgacuaccccaaguacuccgaggaggccaagcugaaccgcgaggagaucgacggcgugaagcucgagagcacccggaucuaccagauccuggccaucuacuccaccgucgcgagcagccuggugcucguggucucccugggggccaucagcuucuggaugugcuccaacggcagccugcagugccgcaucugcaucuga

SEQ ID NO: 77822 - RNA, 1701 nt, Artificial Sequence; identical to SEQ ID NO: 73296
  derived and/or modified CDS sequence (opt1) from hemagglutinin__InfluenzaA__BAJ40058

SEQ ID NO: 77823 - RNA, 1701 nt, Artificial Sequence; identical to SEQ ID NO: 77766
  derived and/or modified CDS sequence (opt1) from hemagglutinin__InfluenzaA__BAJ40059

SEQ ID NO: 77824 - RNA, 1701 nt, Artificial Sequence; identical to SEQ ID NO: 67857
  derived and/or modified CDS sequence (opt1) from hemagglutinin__InfluenzaA__BAJ40060

SEQ ID NO: 77825 - RNA, 1701 nt, Artificial Sequence
  derived and/or modified CDS sequence (opt1) from hemagglutinin__InfluenzaA__BAJ40061
augaaggccauccuggugguccuccuguacaccuucgccaccgcgaacgccgacacgcugugcaucggcuaccacgccaacaacagcaccgacaccguggacaccgugcucgagaagaacgucacggugacccacuccgugaaccugcuggaggacaagcacaacgggaagcucugcaagcugcgcggcgucgcgccccugcaccucgggaagugcaacaucgccggcuggauccuggggaacccggagugcgagagccuguccaccgccagcuccuggagcuacaucguggagaccuccagcuccgacaacggcacgugcuaccccggcgacuucaucgacuacgaggagcuccgggagcagcugagcuccgugagcuccuucgagcgcuucgagaucuuccccaaggccagcuccuggcccaaccacgacagcaacaagggggucaccgccgccugcccgcacgcgggcgccaaguccuucuacaagaaccugaucuggcucgugaagaaggggaacagcuaccccaagcuguccaagagcuacaucaacgacaagggcaaggaggugcugguccucugggggauccaccaccccagcaccuccgccgaccagcagagccuguaccagaacgccgacgccuacguguucgugggcaccucccgguacagcaagaaguucaagcccgagaucgcgauccgcccgaagguccgggaccaggagggccgcaugaacuacuacuggacgcugguggagcccggggacaagaucaccuucgaggccaccggcaaccucguggucccccgguacgccuucgccauggagcgcaacgccggguccggcaucaucaucagcgacacccccgugcacgacugcaacacgaccugccagaccccgaagggcgcgaucaacaccucccugcccuuccagaacauccaccccaucacgaucgggaagugccccaaguacgucaagagcaccaagcugcggcucgccaccggccugcgcaacgugccguccauccagagccgggggcuguucggcgccaucgccggguucaucgagggcggcuggaccgggaugguggacggcugguacggguaccaccaccagaacgagcagggcuccggguacgccgcggaccucaagagcacgcagaacgccaucgacaagaucaccaacaaggugaacuccgucaucgagaagaugaacacccaguucaccgccgugggcaaggaguucaaccaccuggagaagcgcaucgagaaccugaacaagaaggucgacgacggcuuccucgacaucuggacguacaacgccgagcugcuggugcuccuggagaacgagcggacccuggacuaccacgacagcaacgugaagaaccucuacgagaagguccgcucccagcugaagaacaacgccaaggagaucgggaacggcugcuucgaguucuaccacaagugcgacaacacgugcauggagagcgugaagaacgggaccuacgacuaccccaaguacuccgaggaggcgaagcugaaccgggaggagaucgacggcgugaagcucgagagcacccgcaucuaccagauccuggccaucuacuccaccgucgccagcagccuggugcucguggucucccugggggccaucagcuucuggaugugcuccaacggcagccugcagugccggaucugcaucuga

SEQ ID NO: 77826 - RNA, 1701 nt, Artificial Sequence
  derived and/or modified CDS sequence (opt1) from hemagglutinin__InfluenzaA__BAJ40062
augaaggccauccuggugguccuccuguacaccuucgccaccgcgaacgccgacacgcugugcaucggcuaccacgccaacaacagcaccgacaccguggacaccgugcucgagaagaacgucacggugacccacuccgugaaccugcuggaggacaagcacaacgggaagcucugcaagcugcgcggcgucgcgccccugcaccucgggaagugcaacaucgccggcuggauccuggggaacccggagugcgagagccuguccaccgccagcuccuggagcuacaucguggagaccuccagcuccgacaacggcacgugcuaccccggcgacuucaucgacuacgaggagcuccgggagcagcugagcuccgugagcuccuucgagcgcuucgagaucuuccccaagaccagcuccuggcccaaccacgacagcaacaagggggucaccgccgccugcccgcacgccggcgcgaaguccuucuacaagaaccugaucuggcucgugaagaaggggaacagcuaccccaagcuguccaagagcuacaucaacgacaagggcaaggaggugcugguccucugggggauccaccaccccagcaccuccgccgaccagcagagccuguaccagaacgccgacacguacguguucgugggcaccucccgguacagcaagaaguucaagcccgagaucgccauccgcccgaagguccgggaccaggagggccgcaugaacuacuacuggacccugguggagcccggggacaagaucaccuucgaggccacgggcaaccucguggucccccgguacgcguucgccauggagcgcaacgccggguccggcaucaucaucagcgacacccccgugcacgacugcaacacgaccugccagaccccgaagggcgccaucaacaccucccugcccuuccagaacauccaccccaucaccaucgggaagugccccaaguacgucaagagcaccaagcugcggcucgccacgggccugcgcaacgugccguccauccagagccgggggcuguucggcgcgaucgccggguucaucgagggcggcuggaccgggaugguggacggcugguacggguaccaccaccagaacgagcagggcuccggguacgccgccgaccucaagagcacccagaacgccaucgacgagaucaccaacaaggugaacuccgucaucgagaagaugaacacgcaguucaccgcggugggcaaggaguucaaccaccuggagaagaagaucgagaaccugaacaagaaggucgacgacggcuuccucgacaucuggaccuacaacgccgagcugcuggugcuccuggagaacgagcgcacccuggacuaccacgacagcaacgugaagaaccucuacgagaagguccggucccagcugaagaacaacgccaaggagaucgggaacggcugcuucgaguucuaccacaagugcgacaacacgugcauggagagcgugaagaacgggaccuacgacuaccccaaguacuccgaggaggccaagcugaaccgcgaggagaucgacggcgugaagcucgagagcacccggaucuaccagauccuggccaucuacuccaccgucgcgagcagccuggugcucguggucucccugggggccaucagcuucuggaugugcuccaacggcagccugcagugcaagaucugcaucuga

SEQ ID NO: 77827 - RNA, 1701 nt, Artificial Sequence; identical to SEQ ID NO: 77825
  derived and/or modified CDS sequence (opt1) from hemagglutinin__InfluenzaA__BAJ40063

SEQ ID NO: 77828 - RNA, 1701 nt, Artificial Sequence; identical to SEQ ID NO: 73296
  derived and/or modified CDS sequence (opt1) from hemagglutinin__InfluenzaA__BAJ40064

SEQ ID NO: 77829 - RNA, 1707 nt, Artificial Sequence
  derived and/or modified CDS sequence (opt1) from hemagglutinin__InfluenzaA__BAK23398
auggagaagaucgugcugcuccuggccaucgucagccuggugaaguccgaccagaucugcaucggcuaccacgccaacaacagcaccgagcaggucgacaccaucauggagaagaacgugacggugacccacgcgcaggacauccucgagaagacccacaacgggaagcugugcgaccuggacggcgugaagccccucauccugcgcgacugcuccgucgccggguggcugcucggcaacccgaugugcgacgaguuccugaacgugcccgaguggagcuacaucguggagaagaucaaccccgucaacgaccugugcuaccccgggaacuucaacgacuacgaggagcucaagcaccuccugucccggaucaaccacuucgagaagauccagaucuuccccaagagcuccuggagcgaccacgaggccuccagcggcguguccagcgccugcccguaccagggccgcuccagcuucuuccggaacguggucuggcuggugaagaaggacaacgccuaccccaccaucaagaaguccuacaacaacacgaaccaggaggaccugcugauccucugggggauccaccaccccaacgacgcggccgagcagacccgccuguaccagaacccgaccaccuacaucagcgugggcacguccacccugaaccagcggcucguccccaagaucgccacccgcagcaaggugaacgggcaguccggccggaucgaguucuucuggaccauccucaagagcaacgacgugaucaacuucgagagcaacgggaacuucaucgcccccgagaacgcguacaagaucgucaagaagggcgacuccacgaucaugaaguccgagcuggaguacggcaacugcaacaccaagugccagacccccaucggggccaucaacagcagcaugccguuccacaacauccacccccugaccaucggcgagugccccaaguacgugaaguccaaccgccuggugcuggccacggggcuccggaacagcccccgcggcgagcggcgccggaagaagcgcggccuguucggggccaucgccggcuucaucgagggcggguggcaggggauggucgacggcugguacggcuaccaccacuccaacgagcaggggagcggcuacgcggccgacaaggaguccacccagaaggccaucgacggggugaccaacaaggugaacagcaucaucgacaagaugaacacccaguucgaggccgucggccgggaguucaacaaccuggagcgccggaucgagaaccucaacaagaagauggaggacggguuccuggacguguggacguacaacgccgagcugcucguccugauggagaacgagcgcacccuggacuuccacgacuccaacgugaagaaccucuacgacaaggugcggcugcagcugcgcgacaacgcgaaggagcucggcaacggcugcuucgaguucuaccaccggugcgacaacgagugcauggagagcgucaagaacgggaccuacgacuacccgcaguacuccgaggaggcccgccugaagcgcgaggagaucagcggcgugaagcuggaguccaucgggaccuaccagauccucagcaucuacuccacgguggccagcucccuggcccuggccaucaugauggcgggccucuuccuguggaugugcagcaacgggagccugcagugccggaucugcaucuga

SEQ ID NO: 77830 - RNA, 1707 nt, Artificial Sequence
  derived and/or modified CDS sequence (opt1) from hemagglutinin__InfluenzaA__BAK23400
auggagaagaucgugcugcuccuggccaucgucagccuggugaaguccgaccagaucugcaucggcuaccacgccaacaacagcaccgagcaggucgacaccaucauggagaagaacgugacggugacccacgcgcaggacauccucgagaagacccacaacgggaagcugugcgaccugaacggcgugaagccccucauccugcgcgacugcuccgucgccggguggcugcucggcaacccgaugugcgacgaguuccugaacgugcccgaguggagcuacaucguggagaagaucaaccccgccaacgaccugugcuaccccggggacuucaacgacuacgaggagcucaagcaccuccugucccggaucaaccacuucgagaagauccagaucauccccaagagcuccuggagcgaccacgaggccuccagcggcgucuccagcgccugcccguaccagggccgcuccagcuucuuccggaacgugguguggcugaucaagaaggacaacgcguaccccaccaucaagcgcuccuacaacaacacgaaccaggaggaccugcugguccucugggggauccaccaccccaacgacgccgccgagcagacccggcuguaccacaacccgaccaccuacaucagcgugggcacguccacccugaaccagcgccucgugcccaagaucgccacccggagcaaggucaacgggcaguccggccgcauggaguucuucuggaccauccugaagcccaacgacgcgaucaacuucgagagcaacgggaacuucaucgcccccgagaacgccuacaagaucgugaagaagggcgacagcacgaucaugaaguccgagcuggaguacggcaacugcaacaccaagugccagaccccgaucggggccaucaacagcuccaugcccuuccacaacauccacccccucaccaucggcgagugccccaaguacgucaagagcucccggcuggugcuggccacggggcuccgcaacagcccgcagggcaagucccggcgcaagaagcggggccuguucggggcgaucgccggcuucaucgagggcggguggcaggggaugguggacggcugguacggcuaccaccacagcaacgagcagggguccggcuacgccgccgacaaggagagcacccagcgcgccaucgacggggugaccaacaaggucaacuccaucaucgacaagaugaacacccaguucgaggcggugggccgggaguucaacaaccuggagcgccggaucgagaaccucaacaagaagauggaggacggguuccuggacguguggacguacaacgccgagcugcucguccugauggagaacgagcgcacccuggacuuccacgacagcaacgugaagaaccucuacgacaagguccggcugcagcugcgcgacaacgccaaggagcucggcaacggcugcuucgaguucuaccaccggugcgacaacgagugcauggaguccgugcgcaacgggaccuacgacuacccccaguacagcgaggaggcccgccugaagcgggaggagaucuccggcgugaagcuggagagcaucgggaucuaccagauccucuccaucuacagcaccgucgccuccagccuggcgcuggccaucaugguggccggccucuuccuguggaugugcagcaacgggucccugcagugccgcaucugcaucuga

SEQ ID NO: 77831 - RNA, 1707 nt, Artificial Sequence
  derived and/or modified CDS sequence (opt1) from hemagglutinin__InfluenzaA__BAK23401
auggagaagaucgugcugcuccuggccaucgucagccuggugaaguccgaccagaucugcaucggcuaccacgccaacaacagcaccgagcaggucgacaccaucauggagaagaacgugacggugacccacgcgcaggacauccucgagaagacccacaacgggaagcugugcgaccuggacggcgugaagccccucauccugcgcgacugcuccgucgccggguggcugcucggcaacccgaugugcgacgaguuccugaacgugagcgagugguccuacaucguggagaagaucaaccccgccaacgaccugugcuaccccgggaacuucaacaacuacgaggagcucaagcaccuccugagccggaucaaccgcuucgagaagauccagaucauccccaaguccagcuggccggaccacgaggccucccucggcgucagcuccgccugccccuaccagggcgggcccagcuucuaccggaacgugguguggcugaucaagaagaacaacaccuaccccaucaucaagaaguccuaccacaacacgaaccaggaggaccugcucguccuguggggcauccaccacccgaacgacgaggaggagcagacccgcaucuacaagaaccccaccaccuacaucagcguggggacguccacccugaaccagcggcucgugcccaagaucgcgacccgcagcaaggucaacggccaguccgggcggguggaguucuucuggaccauccucaagagcaacgacacgaucaacuucgaguccaacggcaacuucaucgcccccgagaacgccuacaagaucgugaagaagggcgacagcaccaucaugaaguccgagcuggaguacgggaacugcaacaccaagugccagaccccgaucggcgccaucaacagcagcaugcccuuccacaacauccacccccugacgaucggggagugccccaaguacgucaaguccaaccgccuggugcuggcgaccggccuccggaacagcccgcagggcgagcgccggcgcaagaagcgggggcuguucggcgccaucgccggguucaucgagggcggguggcagggcaugguggacggcugguacggguaccaccacuccaacgagcagggcagcggguacgccgccgacaaggaguccacccagaaggcgaucgacggcgucaccaacaaggugaacagcaucaucgacaagaugaacauccaguucgaggccguggggcgcgaguucaacaaccuggagcggcgcaucgagaaccucaacaagaagauggaggacggcuuccuggacgucuggacguacaacgccgagcugcucgugcugauggagaacgagcggacccuggacuuccacgacuccaacgucaagaaccucuacgacaaggugcgccugcagcugcgggacaacgccaaggagcucggcaacgggugcuucgaguucuaccaccgcugcgacaacgagugcauggagagcgugcggaacggcaccuacgacuacccccaguacuccgaggaggcccgccugaagcgcgaggagaucagcggggucaagcuggaguccaucggcaccuaccagauccucagcaucuacuccacgguggcgagcucccuggcccuggccaucaugguggccgggcuguuccuguggaugugcagcaacggcucccugcagugccggaucugcaucuga

SEQ ID NO: 77832 - RNA, 1707 nt, Artificial Sequence
  derived and/or modified CDS sequence (opt1) from hemagglutinin__InfluenzaA__BAK23402
auggagaagaucgugcugcuccuggccaucgucagccuggugaaguccgaccagaucugcaucggcuaccacgccaacaacagcaccgagcaggucgacaccaucauggagaagaacgugacggugacccacgcgcaggacauccucgagaagacccacaacgggaagcugugcgaccuggacggcgugaagccccucauccugcgcgacugcuccgucgccggguggcugcucggcaacccgaugugcgacgaguuccugaacgugcccgaguggagcuacaucguggagaagaucaaccccgccaacgaccugugcuaccccgggaacuucaacgacuacgaggagcucaagcaccuccugucccggaucaaccacuucgagaagauccagaucauccccaagagcuccuggagcaaccacgaggccuccagcggcgucuccagcgccugcccguaccagggccgcuccagcuucuuccggaacgugguguggcugaucaagaaggacaacgcguaccccaccaucaagaucuccuacaacaacacgaaccaggaggaccugcugguccucugggggauccaccaccccaacgacgccgccgagcagacccgccuguaccagaacccgaccaccuacaucagcgugggcacguccacccugaaccagcggcucgugcccaagaucgccacccgcagcaaggucaacgggcaguccggccggauggaguucuucuggaccauccucaagagcaacgacgcgaucaacuucgagagcaacgggaacuucaucgcccccgagaacgccuacaagaucgugaagaagggcgacuccacgaucaugaaguccgagcuggaguacggcaacugcaacaccaagugccagacccccaucggggccaucaacagcagcaugccguuccacaacacccacccccugacgaucggcgagugccccaaguacgugaaguccaaccgccugguccuggccaccgggcuccggaacagcccccacggcgagcgccggcgcaagaagcggggccuguucggggcgaucgccggcuucaucgagggcggguggcaggggaugguggacggcugguacggcuaccaccacuccaacgagcaggggagcggcuacgccgccgacaaggaguccacccagaaggccaucgacggggugaccaacaaggucaacagcaucaucgacaagaugaacacgcaguucgaggcggugggccgcgaguucaacaaccuggagcggcgcaucgagaaccucaacaagaagauggaggacggguuccuggacguguggaccuacaacgccgagcugcucguccugauggagaacgagcggacccuggacuuccacgacuccaacgugaagaaccucuacgacaagguccgccugcagcugcgggacaacgccaaggagcucggcaacggcugcuucgaguucuaccaccgcugcgacaacgagugcauggagagcgugcggaacgggaccuacgacuacccgcaguacuccgaggaggcccgccugaagcgcgaggagaucagcggcgugaagcuggaguccaucgggacguaccagauccucagcaucuacuccaccgucgccagcucccuggcgcuggccaucaugguggccggccucuuccuguggaugugcagcaacgggagccugcagugccggaucugcaucuga

SEQ ID NO: 77833 - RNA, 1707 nt, Artificial Sequence
  derived and/or modified CDS sequence (opt1) from hemagglutinin__InfluenzaA__BAK23403
auggagaagaucgugcugcuccuggccaucgucagccuggugaaguccgaccagaucugcaucggcuaccacgccaacaacagcaccgagcaggucgacaccaucauggagaagaacgugacggugacccacgcgcaggacauccucgagaagacccacaacgggaagcugugcgaccuggacggcgugaagccccucauccugcgcgacugcuccgucgccggguggcugcucggcaacccgaugugcgacgaguuccugaacgugcccgaguggagcuacaucguggagaagaucaaccccgccaacgaccugugcuaccccgggaacuucaacgacuacgaggagcucaagcaccuccugucccggaucaaccacuucgagaagauccagaucauccccaagagcuccuggagcaaccacgaggccuccagcggcgucuccagcgccugcccguaccagggccgcuccagcuucuuccggaacgugguguggcugaucaagaaggacaacgcguaccccaccaucaagaucuccuacaacaacacgaaccaggaggaccugcugguccucugggggauccaccaccccaacgacgccgccgagcagacccgccuguaccagaacccgaccaccuacaucagcgugggcacguccacccugaaccagcggcucgugcccaagaucgccacccgcagcaaggucaacgggcaguccggccggauggaguucuucuggaccauccucaagagcaacgacgcgaucaacuucgagagcaacgggaacuucaucgcccccgagaacgccuacaagaucgugaagaagggcgacuccacgaucaugaaguccgagcuggaguacggcaacugcaacaccaagugccagacccccaucggggccaucaacagcagcaugccguuccacaacauccacccccugaccaucggcgagugccccaaguacgugaaguccaaccgccugguccuggccacggggcuccggaacagcccccagggcgagcgccggcgcaagaagcggggccuguucggggcgaucgccggcuucaucgagggcggguggcaggggaugguggacggcugguacggcuaccaccacuccaacgagcaggggagcggcuacgccgccgacaaggaguccacccagaaggccaucgacggggugaccaacaaggucaacagcaucaucgacaagaugaacacccaguucgaggcggugggccgcgaguucaacaaccuggagcggcgcaucgagaaccucaacaagaagauggaggacggguuccuggacguguggacguacaacgccgagcugcucguccugauggagaacgagcggacccuggacuuccacgacuccaacgugaagaaccucuacgacaagguccgccugcagcugcgggacaacgccaaggagcucggcaacggcugcuucgaguucuaccaccgcugcgacaacgagugcauggagagcgugcggaacgggaccuacgacuacccgcaguacuccgaggaggcccgccugaagcgcgaggagaucagcggcgugaagcuggaguccaucgggaccuaccagauccucagcaucuacuccacggucgccagcucccuggcgcuggccaucaugguggccggccucuuccuguggaugugcagcaacgggagccugcagugccggaucugcaucuga

SEQ ID NO: 77834 - RNA, 1707 nt, Artificial Sequence
  derived and/or modified CDS sequence (opt1) from hemagglutinin__InfluenzaA__BAK23404
auggagaagaucgugcugcuccuggccaucgucagccuggugaaguccgaccagaucugcaucggcuaccacgccaacaacagcaccgagcaggucgacaccaucauggagaagaacgugacggugacccacgcgcaggacauccucgagaagacccacaacgggaagcugugcgaccuggacggcgugaagccccucauccugcgcgacugcuccgucgccggguggcugcucggcaacccgaugugcgacgaguuccugaacgugcccgaguggagcuacaucguggagaagaucaaccccgccaacgaccugugcuaccccgggaacuucaacgacuacgaggagcucaagcaccuccugucccggaucaaccacuucgagaagauccagaucauccccaagagcuccuggagcgaccacgaggccuccagcggcgucuccagcgccugcccguaccagggccgcuccagcuucuuccggaacgugguguggcugaucaagaaggacaacgcguaccccaccaucaagcgcuccuacaacaacacgaaccaggaggaccugcugguccucugggggauccaccaccccaacgacgccgccgagcagacccggcuguaccagaacccgaccaccuacaucagcgugggcacguccacccugaaccagcgccucgugcccaagaucgccacccggagcaaggucaacgggcaguccggccgcauggaguucuucuggaccauccucaagagcaacgacgcgaucaacuucgagagcaacgggaacuucaucgcccccgagaacgccuacaagaucgugaagaagggcgacuccacgaucaugaaguccgagcuggaguacggcaacugcaacaccaagugccagacccccaucggggccaucaacagcagcaugccguuccacaacauccacccccugaccaucggcgagugccccaaguacgugaaguccaaccggcugguccuggccacggggcuccgcaacagcccccagggcgagcggcgccggaagaagcgcggccuguucggggcgaucgccggcuucaucgagggcggguggcaggggaugguggacggcugguacggcuaccaccacuccaacgagcaggggagcggcuacgccgccgacaaggaguccacccagaaggccaucgacggggugaccaacaaggucaacagcaucaucgacaagaugaacacccaguucgaggcggugggccgggaguucaacaaccuggagcgccggaucgagaaccucaacaagaagauggaggacggguuccuggacguguggacguacaacgccgagcugcucguccugauggagaacgagcgcacccuggacuuccacgacuccaacgugaagaaccucuacgacaagguccggcugcagcugcgcgacaacgccaaggagcucggcaacggcugcuucgaguucuaccaccggugcgacaacgagugcauggagagcgugcgcaacgggaccuacgacuacccgcaguacuccgaggaggcccgccugaagcgggaggagaucagcggcgugaagcuggaguccaucgggaccuaccagauccucagcaucuacuccacggucgccagcucccuggcgcuggccaucaugguggccggccucuuccuguggaugugcagcaacgggagccugcagugccgcaucugcaucuga

SEQ ID NO: 77835 - RNA, 1707 nt, Artificial Sequence; identical to SEQ ID NO: 77834
  derived and/or modified CDS sequence (opt1) from hemagglutinin__InfluenzaA__BAK23405

SEQ ID NO: 77836 - RNA, 1707 nt, Artificial Sequence
  derived and/or modified CDS sequence (opt1) from hemagglutinin__InfluenzaA__BAK23406
auggagaagaucgugcugcuccuggccaucgucagccuggugaaguccgaccagaucugcaucggcuaccacgccaacaacagcaccgagcaggucgacaccaucauggagaagaacgugacggugacccacgcgcaggacauccucgagaagacccacaacgggaagcugugcgaccuggacggcgugaagccccucauccugcgcgacugcuccgucgccggguggcugcucggcaacccgaugugcgacgaguuccugaacgugcccgaguggagcuacaucguggagaagaucaaccccgucaacgaccugugcuaccccgggaacuucaacgacuacgaggagcucaagcaccuccugucccggaucaaccacuucgagaagauccagaucuuccccaagagcuccuggagcgaccacgaggccuccagcggcguguccagcgccugcccguaccagggccgcuccagcuucuuccggaacguggucuggcuggugaagaaggacaacgccuaccccaccaucaagaaguccuacaacaacacgaaccaggaggaccugcugauccucugggggauccaccaccccaacgacgcggccgagcagacccgccuguaccagaacccgaccaccuacaucagcgugggcacguccacccugaaccagcggcucguccccaagaucgccacccgcagcaaggugaacgggcaguccggccggaucgaguucuucuggaccauccucaagagcaacgacgugaucaacuucgagagcaacgggaacuucaucgcccccgagaacgcguacaagaucgucaagaagggcgacuccacgaucaugaaguccgagcuggaguacggcaacugcaacaccaagugccagacccccaucggggccaucaacagcagcaugccguuccacaacauccacccccugaccaucggcgagugccccaaguacgugaaguccaaccgccuggugcuggccacggggcuccggaacagcccccagggcgagcgccggcgcaagaagcggggccuguucggggccaucgccggcuucaucgagggcggguggcaggggauggucgacggcugguacggcuaccaccacuccaacgagcaggggagcggcuacgcggccgacaaggaguccacccagaaggccaucgacggggugaccaacaaggugaacagcaucaucgacaagaugaacacccaguucgaggccgucggccgcgaguucaacaaccuggagcggcgcaucgagaaccucaacaagaagauggaggacggguuccuggacguguggacguacaacgccgagcugcucguccugauggagaacgagcggacccuggacuuccacgacuccaacgugaagaaccucuacgacaaggugcgccugcagcugcgggacaacgcgaaggagcucggcaacggcugcuucgaguucuaccaccgcugcgacaacgagugcauggagagcgucaagaacgggaccuacgacuacccgcaguacuccgaggaggcccggcugaagcgcgaggagaucagcggcgugaagcuggaguccaucgggaccuaccagauccucagcaucuacuccacgguggccagcucccuggcccuggccaucaugauggcgggccucuuccuguggaugugcagcaacgggagccugcagugccgcaucugcaucuga

SEQ ID NO: 77837 - RNA, 1707 nt, Artificial Sequence
  derived and/or modified CDS sequence (opt1) from hemagglutinin__InfluenzaA__BAK23407
auggagaagaucgugcugcuccuggccaucgucagccuggugaaguccggccagaucugcaucggguaccacgccaacaacagcaccgagcaggucgacaccaucauggagaagaacgugacggugacccacgcgcaggacauccucgagaagacccacaacggcaagcugugcgaccuggacggggugaagccccucauccugcgcgacugcuccgucgccggcuggcugcucgggaacccgaugugcgacgaguuccugaacgugagcgagugguccuacaucguggagaagaucaaccccgccaacgaccugugcuaccccggcaacuucaacaacuacgaggagcucaagcaccuccugagccggaucaaccgcuucgagaagauccagaucauccccaaguccagcuggccggaccacgaggccucccugggcgucagcgccgcgugccccuaccagggcgggcccuccuucuaccggaacgugguguggcugaucaagaagaacaacaccuaccccacgaucgagaaguccuaccacaacaccaaccaggaggaccugcucguccugugggggauccaccacccgaacgacgaggccgagcagacccgcaucuacaagaaccccaccacguacaucagcgugggcaccagcacccugaaccagcggcucgugcccaagaucgccacccgcuccaaggucaacgggcagagcggccggguggaguucuucuggacgauccugaaguccaacgacaccaucaacuucgagagcaacggcaacuucaucgcccccgagaacgcguacaagaucgugaagaagggggacuccaccaucaugaaguccgagcuggaguacggcaacugcaacacccgcugccagacgccgaucggggccaucaacagcagcaugcccuuccacaacauccacccccucaccaucggcgagugccccaaguacgucaagagcaaccggcuggugcuggccaccggccuccgcaacuccccgcagggggagcggcgccggaagaagcgcggccuguucggggccaucgccggcuucaucgagggcggguggcagggcaugguggacgggugguacggcuaccaccacagcaacgagcagggguccggcuacgcggccgacaaggagagcacccagaaggccaucgacggggucacgaacaaggugaacuccaucaucgacaagaugaacacccaguucgaggccgugggccgggaguucaacaaccuggagcgccggaucgagaaccucaacaagaagauggaggacggcuuccuggacgucuggaccuacaacgccgagcugcucgugcugauggagaacgagcgcacccuggacuuccacgacagcaacgucaagaaccucuacgacaaggugcggcugcagcugcgcgacaacgcgaaggagcucgggaacggcugcuucgaguucuaccaccggugcgacaacgagugcauggaguccgugcgcaacgggacguacgacuacccccaguacagcgaggaggcccgccugaagcgggaggagaucuccggcgucaagcuggagagcaucgggaccuaccagauccucuccaucuacagcaccguggccuccagccuggcccuggccaucaugguggcgggccucuuccuguggaugugcuccaacggcagccugcagugccgcaucugcaucuga

SEQ ID NO: 77838 - RNA, 1707 nt, Artificial Sequence
  derived and/or modified CDS sequence (opt1) from hemagglutinin__InfluenzaA__BAK23408
auggagaagaucgugcugcuccuggccaucgucagccuggugaaguccgaccagaucugcaucggcuaccacgccaacaacagcaccgagcaggucgacaccaucauggagaagaacgugacggugacccacgcgcaggacauccucgagaagacccacaacgggaagcugugcgaccuggacggcgugaagccccucauccugcgcgacugcuccgucgccggguggcugcucggcaacccgaugugcgacgaguuccccaacgugagcgagugguccuacaucguggagaagaucaaccccgccaacgaccugugcuaccccgggaacuucaacaacuacgaggagcugaagcaccuccugagccggaucaaccgcuucgagaagauccagaucaucccgaaguccagcuggcccgaccacgaggccucccugggcgucagcuccgccugccaguaccagggcgggcccagcuucuaccggaacgugguguggcucaucaagaaggacaacgcguaccccaccaucaagaaguccuaccacaacacgaacaaggaggaccugcugguccucuggggcauccaccacccgaacaacgaggaggagcagaccaagcuguaccagaaccccaccaccuacaucagcguggggacguccacccugaaccagcgccucgugcccaagaucgccacccggagcaaggucaacggccaguccgggcgcguggaguucuucuggaccauccucaagagcaacgacgccaucaacuucgaguccaacggcaacuucaucgcccccgagaacgcguacaagaucgugaagaagggcgacagcacgaucaugaaguccgagcuggaguacgggaacuacaacaccaagugccagaccccgaucggcgccaucaacagcagcaugcccuuccacaacauccacccccucaccaucggggagugccccaaguacgucaaguccaaccggcuggugcuggccacgggccuccgcaacagcccgcagggcgagcggcgccggaagaagcgcgggcuguucggcgccaucgccggguucaucgagggcggguggcagggcaugguggacggcugguacggguaccaccacuccaacgagcagggcagcggguacgcggccgacaaggaguccacccagaaggccaucgacggcgucaccaacaaggugaacagcaucaucgacaagaugaacacccaguucgaggccguggggaaggaguucaacaaccuggagcggcgcaucgagaaccucaacaagaagauggaggacggcuuccuggacgucuggacguacaacgccgagcugcucgugcugauggagaacgagcggacccuggacuuccacgacuccaacgucaagaaccucuacgacaaggugcgccugcagcugcgggacaacgcgaaggagcucggcaacgggugcuucgaguucuaccaccgcugcgacaacgagugcauggagagcgugcggaacggcaccuacgacuacccccaguacuccgaggaggcccgccugaagcgggaggagaucagcggggucaagcuggaguccaucggcaccuaccagauccucagcaucuacuccacgguggccagcucccuggcccuggccaucaugguggcggggcuguuccuguggaugugcagcaacggcucccugcagugccgcaucugcaucuga

SEQ ID NO: 77839 - RNA, 1707 nt, Artificial Sequence
  derived and/or modified CDS sequence (opt1) from hemagglutinin__InfluenzaA__BAK23411
auggagaagaucgugcugcuccuggccaucgucagccuggugaaguccgaccagaucugcaucggcuaccacgccaacaacagcaccgagcaggucgacaccaucauggagaagaacgugacggugacccacgcgcaggacauccucgagaagacccacaacgggaagcugugcgaccuggacggcgugaagccccucauccugcgcgacugcuccgucgccggguggcugcucggcaacccgaugugcgacgaguuccugaacgugagcgagugguccuacaucguggagaagaucaaccccgccaacgaccugugcuaccccgggaacuucaacaacuacgaggagcucaagcaccuccugagccggaucaaccgcuucgagaagauccagaucauccccaaguccagcuggccggaccacgaggccucccugggcgucagcuccgccugccaguaccagggcgggcccagcuucuaccggaacgugguguggcugaucaagaaggacaacgcguaccccaccaucaagaaguccuaccacaacacgaacaaggaggaccugcucguccuguggggcauccaccaccccaacaacgaggaggagcagaccaagcuguaccagaacccgaccaccuacaucagcguggggacguccacccucaaccagcgccuggugcccaagaucgccacccggagcaaggucaacggccaguccgggcgcguggaguucuucuggaccauccucaagagcaacgacgccaucaacuucgaguccaacggcaacuucaucgcccccgagaacgcguacaagaucgugaagaagggcgacagcacgaucaugaaguccgagcuggaguacgggaacugcaacaccaagugccagacccccaucggcgccaucaacagcagcaugccguuccacaacauccacccccugaccaucggggagugccccaaguacgucaaguccaaccggcuggugcucgccacgggccugcgcaacagcccccagggcgagcggcgccggaagaagcgcgggcuguucggcgccaucgccggguucaucgagggcggguggcagggcaugguggacggcugguacggguaccaccacuccaacgagcagggcagcggguacgcggccgacaaggaguccacccagaaggccaucgacggcgucaccaacaaggugaacagcaucaucgacaagaugaacacccaguucgaggccguggggaaggaguucaacaaccucgagcggcgcaucgagaaccugaacaagaagauggaggacggcuuccuggacgucuggacguacaacgccgagcuccuggugcugauggagaacgagcggacccucgacuuccacgacuccaacgucaagaaccuguacgacaaggugcgccugcagcuccgggacaacgcgaaggagcugggcaacgggugcuucgaguucuaccaccgcugcgacaacgagugcauggagagcgugcggaacggcaccuacgacuacccgcaguacuccgaggaggcccgccugaagcgggaggagaucagcggggucaagcucgaguccaucggcaccuaccagauccugagcaucuacuccacgguggccagcucccuggcccucgccaucaugguggcggggcuguuccuguggaugugcagcaacggcucccuccagugccgcaucugcaucuga

SEQ ID NO: 77840 - RNA, 1707 nt, Artificial Sequence
  derived and/or modified CDS sequence (opt1) from hemagglutinin__InfluenzaA__BAK23412
auggagaagaucgugcugcuccuggccaucgucagccuggugaaguccgaccagaucugcaucggcuaccacgccaacaacagcaccgagcaggucgacaccaucauggagaagaacgugacggugacccacgcgcaggacauccucgagaagacccacaaggggaagcugugcgaccuggacggcgugaagccccucauccugcgcgacugcuccgucgccggguggcugcucggcaacccgaugugcgacgaguuccugaacgugagcgagugguccuacaucguggagaagaucaaccccgccaacgaccugugcuaccccgggaacuucaacaacuacgaggagcucaagcaccuccugagccggaucaaccgcuucgagaagauccagaucauccccaaguccagcuggccggaccacgaggccucccugggcgucagcuccgccugccaguaccagggcgggcccagcuucuaccggaacgugguguggcugaucaagaaggacaacaccuaccccacgaucaagaaguccuaccacaacaccaacaaggaggaccugcucguccuguggggcauccaccaccccaacaacgaggaggagcagaccaagcuguaccagaacccgaccacguacaucagcguggggaccuccacccucaaccagcgccuggugcccaagaucgcgacccggagcaaggucaacggccaguccgggcgcguggaguucuucuggacgauccucaagagcaacgacgccaucaacuucgaguccaacggcaacuucaucgcccccgagaacgccuacaagaucgugaagaagggcgacagcaccaucaugaaguccgagcuggaguacgggaacugcaacaccaagugccagacccccaucggcgcgaucaacagcagcaugccguuccacaacauccacccccugacgaucggggagugccccaaguacgucaaguccaaccggcuggugcucgccaccggccugcgcaacagcccccagggcgagcggcgccggaagaagcgcgggcuguucggcgccaucgccggguucaucgagggcggguggcagggcaugguggacggcugguacggguaccaccacuccaacgagcagggcagcggguacgccgcggacaaggaguccacccagaaggccaucgacggcgucaccaacaaggugaacagcaucaucgacaagaugaacacgcaguucgaggccguggggaaggaguucaacaaccucgagcggcgcaucgagaaccugaacaagaagauggaggacggcuuccuggacgucuggaccuacaacgccgagcuccuggugcugauggagaacgagcggacccucgacuuccacgacuccaacgucaagaaccuguacgacaaggugcgccugcagcuccgggacaacgccaaggagcugggcaacgggugcuucgaguucuaccaccgcugcgacaacgagugcauggagagcgugcggaacggcaccuacgacuacccgcaguacuccgaggaggcgcgccugaagcgggaggagaucagcggggucaagcucgaguccacgggcaccuaccagauccugagcaucuacuccaccguggccagcucccuggcccucgccaucaugguggccgggcuguuccuguggaugugcagcaacggcucccuccagugccgcaucugcaucuga

SEQ ID NO: 77841 - RNA, 1707 nt, Artificial Sequence
  derived and/or modified CDS sequence (opt1) from hemagglutinin__InfluenzaA__BAK23413
auggagaagaucgugcugcuccuggccaucgucagccuggugaaguccgaccagaucugcaucggcuaccacgccaacaacagcaccgagcaggucgacaccaucauggagaagaacgugacggugacccacgcgcaggacauccucgagaagacccacaacgggaagcugugcgaccuggacggcgugaagccccucauccugcgcgacugcuccgucgccggguggcugcucggcaacccgaugugcgacgaguuccugaacgugagcgagugguccuacaucguggagaagaucaaccccgccaacgaccugugcuaccccgggaacuucaacaacuacgaggagcucaagcaccuccugagccggaucaaccgcuucgagaagauccagaucauccccaaguccagcuggccggaccacgaggccucccugggcgucagcuccgccugccaguaccagggcgggcccagcuucuaccggaacgugguguggcugaucaagaaggacaacaccuaccccacgaucaagaaguccuaccacaacaccaacaaggaggaccugcucguccuguggggcauccaccaccccaacaacgaggaggagcagaccaagcuguaccagaacccgaccacguacaucagcguggggaccuccacccucaaccagcgccuggugcccaagaucgcgacccggagcaaggucaacggccaguccgggcgcguggaguucuucuggacgauccucaagagcaacgacgccaucaacuucgaguccaacggcaacuucaucgcccccgagaacgccuacaagaucgugaagaagggcgacagcaccaucaugaaguccgagcuggaguacgggaacugcaacaccaagugccagacccccaucggcgcgaucaacagcagcaugccguuccacaacauccacccccugacgaucggggagugccccaaguacgucaaguccaaccggcuggugcucgccaccggccugcgcaacagcccccagggcgagcggcgccggaagaagcgcgggcuguucggcgccaucgccggguucaucgagggcggguggcagggcaugguggacggcugguacggguaccaccacuccaacgagcagggcagcggguacgccgcggacaaggaguccacccagaaggccaucgacggcgucaccaacaaggugaacagcaucaucgacaagaugaacacgcaguucgaggccguggggaaggaguucaacaaccucgagcggcgcaucgagaaccugaacaagaagauggaggacggcuuccuggacgucuggaccuacaacgccgagcuccuggugcugauggagaacgagcggacccucgacuuccacgacuccaacgucaagaaccuguacgacaaggugcgccugcagcuccgggacaacgccaaggagcugggcaacgggugcuucgaguucuaccaccgcugcgacaacgagugcauggagagcgugcggaacggcaccuacgacuacccgcaguacuccgaggaggcgcgccugaagcgggaggagaucagcggggucaagcucgaguccaucggcacguaccagauccugagcaucuacuccaccguggccagcucccuggcccucgccaucaugguggccgggcuguuccuguggaugugcagcaacggcucccuccagugccgcaucugcaucuga

SEQ ID NO: 77842 - RNA, 1707 nt, Artificial Sequence; identical to SEQ ID NO: 77839
  derived and/or modified CDS sequence (opt1) from hemagglutinin__InfluenzaA__BAK23414

SEQ ID NO: 77843 - RNA, 1698 nt, Artificial Sequence
  derived and/or modified CDS sequence (opt1) from hemagglutinin__InfluenzaA__BAM65746
auggaggugaagcugcucguccugcugugcaccuucaccgccacguacgccgacaccaucugcaucggcuaccacgcgaacaacagcaccgacaccguggacacgcuccccgagaagaacgugaccgucacccacuccgugaaccugcuggaggacacccacaacgggaagcucugccugcugaagggcaucgccccgcuccagcuggggaacugcagcguggccggcuggauccuggggaaccccgagugcgagcuccugaucucccgcgagagcugguccuacaucgucgagaagcccaaccccgagaacggcaucugcuacccgggccacuucgccgacuacgaggagcugcgggagcagcucagcuccgugagcuccuucgagcgcuucgagaucuuccccaaggagagcuccuggcccaaccacacggccaccggggugagcgcguccugcagccacaacggcaaguccagcuucuacaagaaccugcuguggcucaccgucaagaacgggcuguaccccaaccuguccaagagcuacgccaacaacaaggagaaggaggugcucgugcuguggggcguccaccacccgaccaacaucggggaccagcgggcccuguaccacacggagaacgccuacguguccguggucagcagccacuacucccgccgguucacccccgagaucgcgaagcgccccaaggugcgggaccaggagggccgcaucaacuacuacuggacccuccuggagcccggcgacaccaucaucuucgaggccaacgggaaccugaucgccccgcgguacgccuucgcccucagccgcggcuucggguccggcaucaucaagagcaacgcgcccauggacgagugcaacgccaagugccagacgccccagggcgccaucaacuccagccugcccuuccagaacgugcacccggucaccaucggggagugccccaaguacgugcgguccaccaagcugcgcauggugaccggccuccggaacacgcccagcauccagucccgcgggcuguucggcgccaucgccggguucaucgagggcggcuggaccgggauggucgacggcugguacggguaccaccaccagaacgagcagggcagcggguacgcggccgaccagaaguccacccagaacgccaucaacggcaucaccaacaaggugaacagcgugaucgagaagaugaacacgcaguucaccgccgucgacaaggaguucaacaagcuggagcggcgcauggagaacuucaacaagaagguggacgacggcuucaucgacaucuggaccuacaacgccgagcuccugauccugcucgagaacgagcggacccuggacuuccacgacuccaacgucaagaaccuguacgagaaggucaagagccagcucaagaacaacgcgaaggagaucgggaacggcugcuucgaguucuaccacaagugcaacgacgagugcauggaguccgugaagaacgggacguacgacuaccccaaguacagcgaggaguccaagcugaaccgcgagaagaucgacggcgugaagcuggagagcauggggguguaccagauccucgccaucuacuccaccguggccagcagcaugguccugcuggugucccucggcgccaucagcuucuggaugugcuccaacggcagccugcagugccggaucugcaucuga

SEQ ID NO: 77844 - RNA, 1701 nt, Artificial Sequence; identical to SEQ ID NO: 76590
  derived and/or modified CDS sequence (opt1) from hemagglutinin__InfluenzaA__BAO79716

SEQ ID NO: 77845 - RNA, 1683 nt, Artificial Sequence
  derived and/or modified CDS sequence (opt1) from Hemagglutinin__InfluenzaA__CAB95856
auggagaccaucagccugaucaccauccuccugguggucacggccuccaacgccgacaagaucugcaucggccaccagagcaccaacuccaccgagaccguggacacgcugaccgagaccaacgugcccgucacccacgcgaaggagcuccugcacacggagcacaacgggaugcugugcgccaccagccucggccacccgcugauccuggacacgugcaccaucgaggggcucguguacggcaaccccuccugcgaccugcugcucgggggccgcgaguggagcuacaucguggagcgguccagcgccgucaacgggaccugcuaccccggcaacguggagaaccuggaggagcugcgcacccucuucuccagcgccuccagcuaccagcggauccagaucuuccccgacaccaccuggaacgugacguacaccggcaccucccgcgccugcagcggguccuucuaccggagcaugcgcuggcugacccagaaguccggcuucuacccgguccaggacgcgcaguacacgaacaaccggggcaagagcauccuguucgugugggggauccaccacccgcccaccuacaccgagcagaccaaccucuacauccgcaacgacacgaccaccuccgugaccacggaggaccugaaccggaccuucaagcccgucaucggcccccgcccccuggugaacgggcuccagggccggaucgacuacuacuggagcgugcugaagcccgggcagacccugcgcguccggagcaacggcaaccucaucgcccccugguacggccacgugcuguccgggggcagccacgggcgcauccugaagaccgaccucaagggcgggaacugcgugguccagugccagacggagaagggcggccugaacuccacccugccguuccacaacaucagcaaguacgccuucgggaccugccccaaguacgugcgggugaacucccucaagcuggccgucggccugcgcaacgugcccgcgcggagcucccgcggccucuucggggccaucgccggguucaucgagggcggcuggcccgggcugguggccggcugguacggguuccagcacagcaacgaccagggcgucgggauggccgcggaccgggacuccacccagaaggccaucgacaagaucacgagcaaggugaacaacaucgucgacaagaugaacaagcaguacgagaucaucgaccacgaguucuccgagguggagacccgccugaacaugaucaacaacaagaucgacgaccagauccaggacgugugggccuacaacgccgagcuccugguccugcucgagaaccagaagacccuggacgagcacgacgccaacgugaacaaccuguacaacaaggugaagcgggcgcucggcagcaacgccauggaggacggcaaggggugcuucgagcuguaccacaagugcgacgaccagugcauggagaccauccgcaacggcaccuacaaccgccggaaguaccgcgaggagucccggcuggagcgccagaagaucgagggggucaagcucgagagcgagggcacguacaagauccugaccaucuacuccaccguggccagcucccuggugcucgccaugggcuucgccgcguuccuguucugggccaugagcaacggguccugccggugcaacaucugcaucuga

SEQ ID NO: 77846 - RNA, 1683 nt, Artificial Sequence
  derived and/or modified CDS sequence (opt1) from Hemagglutinin__InfluenzaA__CAB95857
auggagaccaucagccugaucaccauccuccugguggucacggccuccaacgccgacaagaucugcaucggccaccagagcaccaacuccaccgagaccguggacacgcugaccgagaccaacgugcccgucacccacgcgaaggagcuccugcacacggagcacaacgggaugcugugcgccaccagccucggccacccgcugauccuggacacgugcaccaucgaggggcucguguacggcaaccccuccugcgaccugcugcucgaggggcgcgaguggagcuacaucguggagcgguccagcgccgucaacgggaccugcuaccccggcaacguggagaaccuggaggagcugcgcacccucuucuccagcgccuccagcuaccagcggauccagaucuuccccgacaccaccuggaacgugacguacaccggcaccucccgcgccugcagcggcuccuucuaccggagcaugcgcuggcugacccagaaguccggguucuacccgguccaggacgcgcaguacacgaacaaccggggcaagagcauccuguucgugugggggauccaccacccgcccaccuacaccgagcagaccaaccucuacauccgcaacgacacgaccaccuccgugaccacggaggaccugaaccggaccuucaagcccgucaucggcccccgcccccuggugaacggccuccaggggcggaucgacuacuacuggagcgugcugaagcccggccagacccugcgcguccggagcaacgggaaccucaucgcccccugguacggccacgugcuguccggcgggagccacggccgcauccugaagaccgaccucaaguccgggaacugcgugguccagugccagacggagaagggcgggcugaacagcacccugccguuccacaacaucuccaaguacgccuucgggaccugccccaaguacgugcgggugaacagccucaagcuggccgucggccugcgcaacgugcccgcgcgguccagccgcggccucuucggcgccaucgccggguucaucgagggcggguggcccggccugguggccggcugguacggguuccagcacuccaacgaccagggcgucgggauggccgcggaccgggacagcacccagaaggccaucgacaagaucacguccaaggugaacaacaucgucgacaagaugaacaagcaguacgagaucaucgaccacgaguucagcgagguggagacccgccugaacaugaucaacaacaagaucgacgaccagauccaggacgugugggccuacaacgccgagcuccugguccugcucgagaaccagaagacccuggacgagcacgacgccaacgugaacaaccuguacaacaaggugaagcgggcgcucggcuccaacgccauggaggacgggaagggcugcuucgagcuguaccacaagugcgacgaccagugcauggagaccauccgcaacggcaccuacaaccgccggaaguaccgcgaggagagccggcuggagcgccagaagaucgagggggucaagcucgaguccgagggcgccuacaagauccugacgaucuacagcaccguggccuccagccuggugcucgccaugggguucgcggccuuccuguucugggccauguccaacggcagcugccggugcaacaucugcaucuga

SEQ ID NO: 77847 - RNA, 1707 nt, Artificial Sequence
  derived and/or modified CDS sequence (opt1) from hemagglutinin__InfluenzaA__CBW54815
auggagaagaucgugcugcuccuggccaucgucagccuggugaaguccgaccagaucugcaucggcuaccacgccaacaacagcaccgagcaggucgacaccaucauggagaagaacgugacggugacccacgcgcaggacauccucgagaagacccacaacgggaagcugugcgaccuggacggcgugaagccccucauccugcgcgacugcuccgucgccggguggcugcucggcaacccgaugugcgacgaguuccccaacgugagcgagugguccuacaucguggagaagaccaaccccgccaacgaccugugcuaccccgggaacuucgacaacuacgaggagcugaagcaccuccugagccggaucaaccgcuucgagaagauccagaucaucccgaaguccagcuggcccgaccacgaggccucccugggcgucagcuccgccugccccuaccagggcgggcccagcuucuaccggaacgugguguggcucaucaagaagaacaacacguacccgaccaucaaggaguccuaccacaacaccaaccaggaggaccugcugguccucuggggcauccaccaccccaacgacgaggaggagcagacccgcaucuacaagaaccccacgaccuacaucagcguggggaccuccacccugaaccagcggcuggugcccaagaucgcgacgcgcagcaaggucaacggccaguccgggcggguggaguucuucuggaccauccucaagagcaacgacaccaucaacuucgaguccaacggcaacuucaucgccccggagaacgccuacaagaucgugaagaagggcgacagcaccaucaugaaguccgagcuggaguacgggaacugcuccacgaagugccagacccccaucggcgccaucaacagcuccaugcccuuccacaacauccacccccugaccaucggggagugcccgaaguacgucaagagcaaccgccucgugcuggcgaccggccugcggaacagcccccagggcgaggggcgccggaagaagcgcggccucuucggggccaucgccggcuucaucgagggcggguggcagggcaugguggacgggugguacggcuaccaccacagcaacgagcagggguccggcuacgccgccgacaaggagagcacgcagaaggcgaucgacggggucaccaacaaggugaacuccaucaucgacaagaugaacacccaguucgaggccgugggccgggaguucaacaaccuggagaagcgcaucgagaaccugaacaagaagauggaggacggcuuccucgacgucuggaccuacaacgccgagcugcuggugcucauggagaacgagcggacgcuggacuuccacgacagcaacgucaagaaccuguacgacaaggugcgccuccagcugcgggacaacgccaaggagcuggggaacggcugcuucgaguucuaccaccgcugcgacaacgagugcauggaguccgugcggaacgggaccuacgacuacccccaguacagcgaggaggcccgccucaagcgggaggagaucuccggcgucaagcuggagagcaucgggaccuaccagauccuguccaucuacagcaccguggcguccagccucgcccuggccaucaugguggccggccuguuccucuggaugugcuccaacggcagccugcagugccgcaucugcaucuga

SEQ ID NO: 77848 - RNA, 1707 nt, Artificial Sequence
  derived and/or modified CDS sequence (opt1) from hemagglutinin__InfluenzaA__CBW54817
auggagaagaucgugcugcuccuggccaucgucagccuggugaaguccgaccagaucugcaucggcuaccacgccaacaacagcaccgagcaggucgacaccaucauggagaagaacgugacggugacccacgcgcaggacauccucgagaagacccacaacgggaagcugugcgaccuggacggcgugaagccccucauccugcgcgacugcuccgucgccggguggcugcucggcaacccgaugugcgacgaguuccccaacgugagcgagugguccuacaucguggagaagaucaaccccgccaacgaccugugcuaccccgggaacuucaacaacuacgaggagcugaagcaccuccugagccggaucaaccgcuucgagaagauccagaucaucccgaaguccagcuggcccgaccacgaggccucccugggcgucagcuccgccugccccuaccagcggggccccagcuucuaccgcaacgugguguggcucaucaagaagaacgacaccuacccgacgaucaaggaguccuaccacaacaccaaccaggaggaccugcugguccucugggggauccaccaccccaacgacgaggaggagcagaagcggaucuacaagaaccccaccaccuacaucagcgugggcacguccacccugaaccagcgccuggugcccaagaucgcgacccggagcaaggucaacgggcaguccggccgcguggaguucuucuggaccauccucaagagcaacgacacgaucaacuucgaguccaacgggaacuucaucgccccggagaacgccuacaagaucgugaagaagggcgacagcaccaucaugaaguccgagcuggaguacggcaacugcagcaccaagugccagacccccaucggggccaucaacacgagcaugcccuuccacaacauccacccccugaccaucggcgagugcccgaaguacgucaaguccaaccggcucgugcuggcgaccgggcugcgcaacagcccccagggcgagggccggcgcaagaagcggggccucuucggggccaucgccggguucaucgagggcggguggcagggcaugguggacggcugguacggguaccaccacuccaacgagcagggcagcggguacgccgccgacaaggaguccacccagaaggcgaucgacggcgucacgaacaaggugaacagcaucaucgacaagaugaacacccaguucgaggccguggggcgcgaguucaacaaccuggagaagcggaucgagaaccugaacaagaagauggaggacggcuuccucgacgucuggaccuacaacgccgagcugcuggugcucauggagaacgagcgcacccuggacuuccacgacuccaacguccggaaccuguacgacaaggugcgccuccagcugcgggacaacgccaaggagcugggcaacgggugcuucgaguucuaccaccgcugcgacaacgagugcauggagagcgugcggaacggcacguacgacuacccccaguacuccgaggaggcccgccucaagcgcgaggagaucagcggggucaagcuggaguccaucggcaccuaccagauccugagcaucuacuccaccguggcgagcucccucgcccuggccaucaugguggccgggcuguuccucuggaugugcagcaacggcucccugcagugccggaucugcaucuga

SEQ ID NO: 77849 - RNA, 1707 nt, Artificial Sequence
  derived and/or modified CDS sequence (opt1) from hemagglutinin__InfluenzaA__CBW54818
auggagaagaucgugcugcuccuggccaucgucagccuggugaaguccgaccagaucugcaucggcuaccacgccaacaacagcaccgagcaggucgacaccaucauggagaagaacgugacggugacccacgcgcaggacauccucgagaagacccacaacgggaagcugugcgaccuggacggcgugaagccccucauccugcgcgacugcuccgucgccggguggcugcucggcaacccgaugugcgacgaguuccccaacgugagcgagugguccuacaucguggagaagaccaaccccgccaacgaccugugcuaccccgggaacuucaacaacuacgaggagcugaagcaccuccugagccggaucaaccgcuucgagaagaucaagaucaucccgaaguccagcuggcccgaccacgaggccucccugggcgucagcuccgccugccccuaccagggcgggcccagcuucuaccggaacgugguguggcucaucaagaagaacaacacguacccgaccaucaaggaguccuaccacaacaccaaccaggaggaccugcugguccucuggggcauccaccaccccaacgacgaggaggagcagacccgcaucuacaagaaccccacgaccuacaucagcguggggaccuccacccugaaccagcggcuggugcccaagaucgcgacgcgcagcaaggucaacggccaguccgggcggguggaguucuucuggaccauccucaagagcaacgacaccaucaacuucgaguccaacggcaacuucaucgccccggagaacgccuacaagaucgugaagaagggcgacagcaccaucaugaaguccgagcuggaguacgggaacugcuccacgaagugccagacccccgucggcgccaucaacagcuccaugcccuuccacaacauccacccccugaccaucggggagugcccgaaguacgucaagagcaaccgccucgugcuggcgaccggccugcggaacagcccccagggcgaggggcgccggaagaagcgcggccucuucggggccaucgccggcuucaucgagggcggguggcagggcaugguggacgggugguacggcuaccaccacagcaacgagcagggguccggcuacgccgccgaccgggagagcacgcagaaggcgaucgacggggugaccaacaaggugaacuccaucaucgacaagaugaacacccaguucgaggccgucggccgcgaguucaacaaccuggagaagcggaucgagaaccugaacaagaagauggaggacggcuuccucgacguguggaccuacaacgccgagcugcugguccucauggagaacgagcgcacgcuggacuuccacgacagcaacgugaagaaccuguacgacaaggugcggcuccagcugcgcgacaacgccaaggagcuggggaacggcugcuucgaguucuaccaccggugcgacaacgagugcauggaguccguccgcaacgggaccuacgacuacccccaguacagcgaggaggcccggcucaagcgcgaggagaucuccggcgugaagcuggagagcaucgggaccuaccagauccuguccaucuacagcaccguggcguccagccucgcccuggccaucaucgucgccggccugcuccuguggaugugcuccaacggcagccugcagugccgcaucugcaucuga

SEQ ID NO: 77850 - RNA, 1701 nt, Artificial Sequence
  derived and/or modified CDS sequence (opt1) from hemagglutinin__InfluenzaA__CCG47908
augaagaccgugaucgcccugagcuacgucuucugccucggcuucgggcagggccugcccgggaagggcaacaacaccgccacgcugugccucgggcaccacgcggugccgaacggcacccuggugaagaccaucaccgacgaccagaucgaggucacgaacgccaccgagcuggugcagaacuucuccaugggcaagaucugcaagaacccccaccgcauccucgacggggccaacugcacccugaucgacagccugcucggcgacccccacugcgacggguuccaggacgagaagugggaccuguucaucgagcgguccaaggccuucagcaacugcuaccccuacgacgugccggaguacaccucccugcgcagcaucaucgccuccagcggcacgcucgaguucaccaacgaggacuucaacuggaccggggucacccagaacggcggcuccagcgcgugcaagcgggggcccaacaacuccuucuucagccgccugaacuggcuguacaaguccggcaacacguaccccaugcucaacgugaccaugcccaacagcgacgacuucgacaagcuguacaucuggggcgugcaccacccguccaccgaccgggagcagaccaaccuguacauccaggccagcgggaagaucaucgucuccacgaagcgcagccagcagaccaucauccccaacaucggcucccggcccugggugcgcgggcucagcagccggaucuccaucuacuggaccaucgugaagcccggcgacauccugaucaucaacagcaacgggaaccugaucgccccgcgcggcuacuucaagauccagaccgggaaguccagcgucaugcgguccgacgcccccaucgacacgugcaacagcgagugcaucacccccaacggcuccauccccaacgacaagccguuccagaacgugaaccgcaucaccuacggcgcgugccccaaguacaucaagcagaacacccucaagcuggccacggggaugcggaacauccccgagcgccagacccggggcaucuucggggccaucgccggcuucaucgagaacgggugggagggcauggugaacggcugguacggguuccgccaccagaacagcgagggcaucgggcaggccgcggaccugaaguccacccaggccgccaucaaccagaucaacggcaagcucaaccgggucaucgagaagaccaacgagaaguuccaccagaucgagaaggaguucagcgagguggaggggcgcauccaggaccuggagcgguacguggaggacacgaagaucgaccugugguccuacaacgccgagcuccuggucgcccuggagaaccagcacaccaucgaccucaccgacagcgagaugaacaagcuguucgagaagacccgcaagcagcugcgggagaacgcggaggacaugggcaacggcugcuucaagaucuaccacaagugcgacaacuccugcauggagagcauccgcaacgggacguacgaccacaacgaguaccgcgacgaggccgugaacaaccgguuccagaucaaguccguggagcucaagagcggcuacaaggacuggauccuguggaucuccuucgccaucagcugcuuccugcucugcgccgucuggcugggguucaucaucugggccugccagaagggcaacauccgcugcaacaucugcaucuga

SEQ ID NO: 77851 - RNA, 1701 nt, Artificial Sequence
  derived and/or modified CDS sequence (opt1) from hemagglutinin__InfluenzaA_ _AAB39851
augaaggccauccugcucgugcugcugugcaccuucgccgcgaccaacgccgacacgcucugcaucggcuaccacgccaacaacagcaccgacaccgucgacaccgugcuggagaagaacgugacggucacccacuccgugaaccugcucgaggaccgccacaacgggaagcugugcaagcugggcgggaucgcgccccuccaccugggcaagugcaacaucgccgggcggcugcucggcaacccggagugcgagcugcugcucaccgugagcuccuggagcuacaucgucgagaccuccaagagcgacaacggcacgugcuaccccggggacuucaucaacuacgaggagcugcgcgagcagcuguccagcguguccagcuucgagcgguucgagaucuuccccaagaccuccagcuggcccaaccacgagaccaaccgcggcgugaccgccgccugcccguacgccggggccaacuccuucuaccggaaccucaucuggcuggucaagaaggagaacagcuaccccaagcuguccaagagcuacgugaacaacaagggcaaggaggugcucguccugugggggauccaccacccgcccacguccaccgaccagcagagccuguaccagaacgcggacgccuacguguucgugggcuccagcaaguacaaccgcaaguucaagcccgagaucgccgcccggcccaagguccgcggccaggccgggcggaugagcuacuacuggacccucaucgagcccggcgacaccaucacguucgaggcgaccgggaaccugguggugccccgcuacgccuucgccaugaaccggggcuccggcagcgggaucaucaucugggacgccccgguccacgacugcaacaccaagugccagacccccaagggcgccaucaacacgucccugcccuuccagaacauccaccccgugaccaucggggagugcccgaaguacgucaagagcaccaagcuccgcauggcgaccggccugcggaacgugcccuccauccagagccgcgggcuguucggcgccaucgccggcuucaucgagggcggguggacggggaugaucgacggcugguacggguaccaccaccagaacgagcagggcuccggcuacgccgccgaccagcggagcacccagaacgcgaucgacgggaucaccaacaaggugaacuccgugaucgagaagaugaacacccaguucacggccgucggcaaggaguucaaccaccucgagaagcgcaucgagaaccugaacaagaagguggacgacggguuccuggacaucuggaccuacaacgccgagcuccugguccugcucgagaacgagcggacccuggacuuccacgacagcaacgugaagaaccuguacgagaaggugcgcucccagcuccggaacaacgccaaggagaucggcaacgggugcuucgaguucuaccacaagugcgacgacacgugcauggagagcgucaagaacggcaccuacgacuaccccaaguacuccgaggagagcaagcugaaccgcgaggagaucgacggcgugaagcuggaguccacccggaucuaccagauccucgccaucuacagcaccguggcguccagccugguccugcucgugucccugggggccaucagcuucuggaugugcagcaacggcucccugcagugccgcaucugcaucuga

SEQ ID NO: 77852 - RNA, 1701 nt, Artificial Sequence
  derived and/or modified CDS sequence (opt1) from hemagglutinin__InfluenzaA__AAA43178
augaagaccaucaucgcccugagcuacaucuucugccucgcccugggccaggaccugcccgggaacgacaacuccaccgcgacgcucugccugggccaccacgccgugccgaacgggacccuggucaagaccaucaccgacgaccagaucgaggugacgaacgccaccgagcucgugcagagcuccagcaccggcaagaucugcaacaacccccaccgcauccuggacgggaucgacugcacccugaucgacgcccuccugggcgacccccacugcgacgucuuccagaacgagacgugggaccuguucguggagcgguccaaggccuucagcaacugcuaccccuacgacgugccggacuacgcgucccuccgcagccuggucgccuccagcggcacccuggaguucaucaccgagggguucaccuggacgggcgugacccagaacgggggcuccaacgccugcaagcgggggcccggcagcggcuucuucucccgccucaacuggcugaccaagagcggguccaccuaccccgugcugaacgucacgaugcccaacaacgacaacuucgacaagcucuacaucuggggcauccaccacccgagcaccaaccaggagcagaccucccuguacgugcaggccagcgggcgggugaccgucuccacgcgccggagccagcagaccaucauccccaacaucggcagccgccccugggugcggggccuguccagccgcaucuccaucuacuggaccaucgugaagcccggggacguccucgugaucaacagcaacggcaaccugaucgcgccgcggggguacuucaagaugcgcaccggcaaguccagcaucaugcgguccgacgcccccaucgacacgugcaucagcgagugcaucacccccaacggguccauccccaacgacaagccguuccagaacgugaacaagaucaccuacggcgccugccccaaguacgucaagcagaacacccugaagcucgccacgggcaugcgcaacgugcccgagaagcagacccgggggcuguucggcgccaucgcgggguucaucgagaacggcugggaggggaugaucgacggcugguacggcuuccgccaccagaacagcgaggggaccggccaggccgccgaccugaaguccacccaggccgccaucgaccagaucaacgggaagcucaaccgggugaucgagaagacgaacgagaaguuccaccagaucgagaaggaguucagcgaggucgagggccgcauccaggaccuggagaaguacguggaggacaccaagaucgaccugugguccuacaacgcggagcuccugguggcccuggagaaccagcacaccaucgaccucaccgacagcgagaugaacaagcuguucgagaagacgcggcgccagcugcgggagaacgccgaggagauggggaacggcugcuucaagaucuaccacaagugcgacaacgccugcaucgaguccauccgcaacggcaccuacgaccacgacgucuaccgcgacgaggcccucaacaaccgguuccagaucaaggggguggagcucaagagcggcuacaaggacuggauccuguggaucuccuucgcgaucagcugcuuccugcugugcgucgugcugcucggguucaucaugugggccugccagcgcggcaacauccggugcaacaucugcaucuga

SEQ ID NO: 77853 - RNA, 1689 nt, Artificial Sequence
  derived and/or modified CDS sequence (opt1) from hemagglutinin__InfluenzaA__AAA43185
auggccaucaucuaccugauccuccuguucaccgccgugcgcggcgaccagaucugcaucggguaccacgcgaacaacagcaccgagaaggucgacacgaaccuggagcggaacgugaccgugacccacgccaaggacauccucgagaagacccacaacggcaagcugugcaagcugaacgggaucccgccccucgagcugggcgacugcuccaucgccggguggcugcucggcaaccccgagugcgaccgccugcugagcguccccgagugguccuacaucauggagaaggagaacccccgggacggccucugcuacccggggagcuucaacgacuacgaggagcugaagcaccuccuguccagcgugaagcacuucgagaaggugaagauccugcccaaggaccgcuggacgcagcacaccaccaccggcgggucccgggccugcgccgucagcggcaaccccuccuucuuccgcaacaugguguggcugacgaaggaggggagcgacuaccccguggcgaagggcuccuacaacaacaccagcggcgagcagaugcucaucaucuggggcguccaccacccgaucgacgagaccgagcagcggacccuguaccagaacguggggacguacguguccgucgggaccagcacccugaacaagcgcuccacccccgagaucgccacgcggcccaaggugaacggccagggcgggcgcauggaguucagcuggacccuccuggacaugugggacaccaucaacuucgaguccaccggcaaccugaucgcccccgaguacggguucaagaucagcaagcggggcuccagcgggaucaugaagacggagggcacccucgagaacugcgagaccaagugccagaccccgcugggcgccaucaacacgacccugcccuuccacaacgugcacccccucaccaucggggagugccccaaguacgucaagagcgagaagcuggugcuggcgaccggccuccgcaacgugccgcagaucgagucccgggggcuguucggcgccaucgccggguucaucgagggcggcuggcaggggauggucgacggcugguacggguaccaccacagcaacgaccagggcuccggguacgccgccgacaaggagagcacgcagaaggcguucgacggcaucaccaacaaggugaacuccgugaucgagaagaugaacacccaguucgaggccgucggcaaggaguucgggaaccuggagcgccggcucgagaaccugaacaagcgcauggaggacggcuuccuggacguguggaccuacaacgccgagcuccuggugcugauggagaacgagcggacgcucgacuuccacgacagcaacgucaagaaccuguacgacaaggugcgcaugcagcugcgggacaacgucaaggagcucgggaacggcugcuucgaguucuaccacaagugcgacgacgagugcaugaacuccgugaagaacggcaccuacgacuaccccaaguacgaggaggagagcaagcugaaccgcaacgagaucaagggggugaagcuguccagcaugggcgucuaccagauccucgccaucuacgccaccguggcggggucccugagccuggccaucaugauggccggcaucuccuucuggaugugcagcaacgggucccuccagugccggaucugcaucuga

SEQ ID NO: 77854 - RNA, 1701 nt, Artificial Sequence
  derived and/or modified CDS sequence (opt1) from hemagglutinin__InfluenzaA__AAA43187
augaagaccaucaucgcccugagccacaucuucugccucgugcugggccaguaccugcccgggaacgacaacuccaccgccacgcucugccugggccaccacgcggucccgaacgggacccuggugaagaccaucaccaacgaccagaucgaggugacgaacgccaccgagcucguccagagcuccagcaccggcaagaucugcaacaacccccaccgcauccuggacgggaucgacugcacccugaucgacgcccuccugggcgacccccacugcgacggcuuccagaacgagacgugggaccuguucguggagcgguccaaggccuucagcaacugcuaccccuacgacgugccggacuacgccucccuccgcagccuggucgcguccagcgggacccuggaguucaucaccgagggcuucaccuggacgggggugacccagaacggcggguccaacgccugcaagcggggccccggcagcggguucuucucccgccucaacuggcugaccaagagcgaguccaccuaccccgugcugaacgucacgaugcccaacaacgacaacuucgacaagcucuacaucuggggcgugcaccacccgagcaccaaccaggagcagaccucccuguacgugcaggccagcgggcgggucaccguguccacgcgccggagccagcagaccaucauccccaacaucggcagccgccccugggugcggggccuguccagccgcaucuccaucuacuggaccaucgucaagcccggggacgugcucgugaucaacagcaacgccaaccugaucgcgccgcggggcuacuucaagaugcgcaccgggaaguccagcaucaugcgguccgacgcccccaucgacacgugcaucagcgagugcaucacccccaacggcuccauccccaacgacaagccguuccagaacgucaacaagaucaccuacggggccugccccaaguacgugaagcagaacacccugaagcucgccacgcgcaugcggaacgugcccgagaagcagacccgcggccuguucggcgccaucgcgggguucaucgagaacggcugggaggggaugaucgacggcugguacggguuccggcaccagaacagcgagggcaccggccaggccgccgaccugaaguccacccaggccgccaucgaccagaucaacgggaagcucaaccgcgucaucgagaagacgaacgagaaguuccaccagaucgagaaggaguucagcgagguggagggccggauccaggaccuggagaaguacguggaggacaccaagaucgaccugugguccuacaacgcggagcuccuggucgcccuggagaaccagcacaccaucgaccucaccgacagcgagaugaacaagcuguucgagaagacgcgccggcagcugcgcgagaacgccgaggacauggggaacggcugcuucaagaucuacgacaagugcgacaacgccugcaucgaguccauccgcaacgggaccuacgaccacgacguguaccgggacgaggcccucaacaaccgcuuccagaucaagggcgucgagcucaagagcggcuacaaggacuggauccuguggaucuccuucgcgaucagcugcuuccugcugugcguggugcugcucggguucaucaugugggccugccagcggggcaacauccgcugcaacaucugcaucuga

SEQ ID NO: 77855 - RNA, 1698 nt, Artificial Sequence
  derived and/or modified CDS sequence (opt1) from hemagglutinin__InfluenzaA__AAA43209
augaaggccaagcugcucgugcugcuguacgccuucgucgcgaccgacgccgacaccaucugcaucggcuaccacgccaacaacagcacggacaccguggacaccaucuucgagaagaacguggccgucacccacuccgugaaccuccuggaggaccgccacaacgggaagcugugcaagcucaagggcaucgcgccccugcagcuggggaagugcaacaucacgggcuggcuccuggggaacccggagugcgacagccugcuccccgcccgguccuggagcuacaucguggagacccccaacuccgagaacggcgccugcuaccccggcgacuucaucgacuacgaggagcugcgcgagcagcugagcuccgucagcucccucgagcgguucgagaucuucccgaaggagagcuccuggcccaaccacaccuucaacggggugaccgugagcugcucccaccgcggcaagagcuccuucuaccggaaccugcuguggcucacgaagaagggggacagcuaccccaagcugaccaacuccuacgucaacaacaagggcaaggaggugcuggugcucuggggcguccaccaccccagcuccagcgacgagcagcagagccuguacuccaacgggaacgccuacgugagcguggccuccagcaacuacaaccgccgguucaccccggagaucgcggcccgccccaaggucaaggaccagcacggccggaugaacuacuacuggacccugcucgagcccggggacacgaucaucuucgaggccaccggcaaccugaucgcccccugguacgccuucgcgcugucccgcggguucgagagcggcaucaucaccuccaacgccagcaugcacgagugcaacaccaagugccagacgccgcagggcuccaucaacagcaaccuccccuuccagaacauccaccccgugaccaucggggagugccccaaguacgugcgguccaccaagcugcgcauggucaccggccugcggaacaucccgagcauccaguaccgcggccucuucggggccaucgccggguucaucgagggcggcuggacggggaugaucgacggcugguacggguaccaccaccagaacgagcagggcuccggguacgccgcggaccagaaguccacccagaacgccaucaacggcaucaccaacaaggugaacagcgugaucgagaagaugaacacccaguucacggccgucggcaaggaguucaacaaccuggagaagcggauggagaaccugaacaagaagguggacgacggguuccucgacaucuggaccuacaacgccgagcugcuggugcuccuggagaacgagcgcacccuggacuuccacgaccucaacgucaagaaccuguacgagaaggucaagagccagcugaagaacaacgccaaggagaucggcaacgggugcuucgaguucuaccacaagugcgacaacgagugcauggaguccgugcggaacggcaccuacgacuaccccaaguacagcgaggaguccaagcucaaccgcgagaagaucgacggggugaagcuggagagcaugggcguguaccagauccuggcgaucuacagcacggucgccuccagccucgugcugcuggugucccucggcgccaucagcuucuggaugugcuccaacgggagccugcagugccggaucugcaucuga

SEQ ID NO: 77856 - RNA, 1683 nt, Artificial Sequence
  derived and/or modified CDS sequence (opt1) from hemagglutinin__InfluenzaA__AAC40998
augaacacccagauccugauccucgcccugguggccaucauccccaccaacgcggacaagaucugccugggccaccacgccgucagcaacggggccaaggugaacacgcucaccgagcgcggcguggaggucgugaacgccaccgagaccguggagcggacgaacgucccgcgcaucugcuccaaggggaagcggaccguggaccugggccagugcgggcugcucggcaccaucaccggcccgccccagugcgaccaguuccuggaguucagcgccgaccugaucaucgagcgccgggaggggaacgacgugugcuaccccggcaaguucgucaacgaggaggcgcuccgccagauccugcggaaguccgggggcaucgacaaggagacgaugggguucaccuacagcggcauccgcaccaacggcgccaccuccgccugccggcgcagcggguccagcuucuacgccgagaugaaguggcugcucuccaacacggacaacgcggccuucccccagaugaccaagagcuacaagaacauccggaaggaccccgcccugaucaucuggggcauccaccacuccgggagcaccgccgagcagaccaagcuguacggcuccggcaacaagcucaucacgguggggagcuccaacuaccagcagagcuucgugcccucccccggcgcccgcccgcaggucaacgggcagagcggccggaucgacuuccacuggcugaugcugaaccccaacgacaccgugaccuucuccuucaacggggcguucaucgcccccgaccgcgccagcuuccuccggggcaagagcaugggcauccaguccgaggugcaggucgacgccaacugcgagggggacugcuaccacagcggcgggaccauccuguccagccugcccuuccagaacaucaacucccgcacggugggcgagugcccgcgguacgugaagcaggagagccuccugcuggccaccgggaugaagaacguccccgagauccccaagggccgcggccucuucggggcgaucgccggcuucaucgagaacgggugggagggccugguggacgggugguacggcuuccggcaccagaacgcccagggcgaggggaccgccgccgacuacaaguccacccagagcgcgaucgaccagaucacgggcaagcugaaccgccucaucgagaagaccaaccagcaguucgagcugaucgacaacgaguucaccgagguggagaagcagaucgggaacgucaucaacuggacccgggacucccugacggagauguggagcuacaacgccgagcuccugguggccauggagaaccagcacaccaucgaccuggccgacuccgagaugaacaagcucuacgagcgcgugcgccggcagcugcgcgagaacgccgaggaggacggcaccggcugcuucgagaucuuccacaagugcgacgacgacugcauggcgagcauccggaacaacaccuacgaccacuccaaguaccgcgaggaggccauccagaaccggauccagaucgaccccgucaagcugagcuccggguacaaggacgugauccucugguucagcuucggcgccuccugcuucauccugcuggccaucgcgauggggcucgucuucaucugcgugaagaacggcaacaugcgcugcacgaucugcaucuga

SEQ ID NO: 77857 - RNA, 1683 nt, Artificial Sequence
  derived and/or modified CDS sequence (opt1) from hemagglutinin__InfluenzaA__AAC40999
augaacacccagauccugauccucgcccugguggccaucauccccaccaacgcggacaagaucugccugggccaccacgccgucagcaacgggacgaaggugaacacccucaccgagcgcggcguggaggucgugaacgccaccgagacgguggagcggaccaacgucccgcgcaucugcuccaaggggaagcggaccguggaccugggccagugcgggcugcucggcaccaucacgggcccgccccagugcgaccaguuccuggaguucagcgccgaccugaucaucgagcgccgggagggggacgacgugugcuaccccggcaaguucgucaacgaggaggcccuccgccagauccugcgggaguccgggggcaucgacaaggagaccaugggguucaccuacagcggcauccgcaccaacggcgcgacguccgccugccggcgcagcggguccagcuucuacgccgagaugaaguggcugcucuccaacaccgacaacgccgcguucccccagaugaccaagagcuacaagaacauccggaaggaccccgcccugaucaucuggggcauccaccacuccgggagcaccgccgagcagacgaagcuguacggcuccggcaacaagcucaucaccguggggagcuccaacuaccagcagagcuucgugcccauccccggcgcccgcccgcaggucaacgggcaguccggccggaucgacuuccacuggcugaugcugaaccccaacgacaccgugaccuucagcuucaacggggccuucaucgcgcccgaccgcgccuccuuccuccggggcaagagcaugggcauccagagcgaggugcaggucgacgccaacugcgagggggacugcuaccacuccggcgggacgauccugaacaaccugcccuuccagaacaucaacggccgcgccguggggaagugcccgcgguacgugaagcaggagagccuccugcuggccaccggcaugaagaacguccccgagauccccaagggccgcggccucuucggggcgaucgccggguucaucgagaacggcugggaggggcugguggacggcugguacggcuuccggcaccagaacgcccagggggagggcaccgccgccgacuacaaguccacccagagcgcgaucgaccagaucacggggaagcugaaccgccucaucgagaagaccaaccagcaguucgagcugaucgacaacgaguucaccgagguggagaagcagaucggcaacgucaucaacuggacccgggacuccaugacggagguguggagcuacaacgccgagcugcucguggccauggagaaccagcacaccaucgaccuggccgacuccgagaugaacaagcuguacgagcgcguccgccggcagcuccgcgagaacgccgaggaggacggcaccgggugcuucgagaucuuccacaagugcgacgacgacugcauggcgagcauccggaacaacaccuacgaccacuccaaguaccgcgaggaggccauccagaaccggauccagaucgaccccgugaagcugagcuccggcuacaaggacgucauccugugguucagcuucggggccuccugcuucauccuccuggccaucgcgaugggccugguguucaucugcgugaagaacgggaacaugcgcugcacgaucugcaucuga

SEQ ID NO: 77858 - RNA, 1698 nt, Artificial Sequence; identical to SEQ ID NO: 66512
  derived and/or modified CDS sequence (opt1) from hemagglutinin__InfluenzaA__ACA28844

SEQ ID NO: 77859 - RNA, 1698 nt, Artificial Sequence; identical to SEQ ID NO: 71817
  derived and/or modified CDS sequence (opt1) from hemagglutinin__InfluenzaA__ACA28844/m1

SEQ ID NO: 77860 - RNA, 1701 nt, Artificial Sequence; identical to SEQ ID NO: 73174
  derived and/or modified CDS sequence (opt1) from hemagglutinin__InfluenzaA__ACV82259

SEQ ID NO: 77861 - RNA, 1701 nt, Artificial Sequence; identical to SEQ ID NO: 73174
  derived and/or modified CDS sequence (opt1) from hemagglutinin__InfluenzaA__ACV82259/m1

SEQ ID NO: 77862 - RNA, 1701 nt, Artificial Sequence; identical to SEQ ID NO: 73174
  derived and/or modified CDS sequence (opt1) from hemagglutinin__InfluenzaA__ACV82259/m2

SEQ ID NO: 77863 - RNA, 1701 nt, Artificial Sequence; identical to SEQ ID NO: 66691
  derived and/or modified CDS sequence (opt1) from hemagglutinin__InfluenzaA__ACP41953

SEQ ID NO: 77864 - RNA, 1701 nt, Artificial Sequence; identical to SEQ ID NO: 76265
  derived and/or modified CDS sequence (opt1) from hemagglutinin__InfluenzaA__AFM72832

SEQ ID NO: 77865 - RNA, 1701 nt, Artificial Sequence
  derived and/or modified CDS sequence (opt1) from hemagglutinin__InfluenzaA__EPI516528
augaaggccauccuggugguccuccuguacaccuucgccaccgcgaacgccgacacgcugugcaucggcuaccacgccaacaacagcaccgacaccguggacaccgugcucgagaagaacgucacggugacccacuccgugaaccugcuggaggacaagcacaacgggaagcucugcaagcugcgcggcgucgcgccccugcaccucgggaagugcaacaucgccggcuggauccuggggaacccggagugcgagagccuguccaccgcgagcuccuggagcuacaucguggagacccccuccagcgacaacggcacgugcuaccccggcgacuucaucgacuacgaggagcuccgggagcagcuguccagcguguccagcuucgagcgcuucgagaucuuccccaagaccuccagcuggccgaaccacgacuccaacaagggggucaccgccgccugcccccacgccggcgccaagagcuucuacaagaaccugaucuggcucgugaagaaggggaacuccuaccccaagcugagcaaguccuacaucaacgacaagggcaaggaggugcugguccucugggggauccaccaccccagcaccagcgccgaccagcagucccuguaccagaacgccgacgccuacguguucgugggcagcucccgguacagcaagaaguucaagccggagaucgccauccgccccaagguccgggaccaggagggccgcaugaacuacuacuggacgcugguggagcccggggacaagaucaccuucgaggcgaccggcaaccucguggucccccgguacgccuucgccauggagcgcaacgccggguccggcaucaucaucagcgacaccccggugcacgacugcaacacgaccugccagacccccaagggcgccaucaacaccucccugcccuuccagaacauccaccccaucacgaucgggaagugcccgaaguacgucaagagcaccaagcugcggcucgcgaccggccugcgcaacauccccuccauccagagccgggggcuguucggcgccaucgccggguucaucgagggcggcuggaccgggaugguggacggcugguacggguaccaccaccagaacgagcagggcuccggguacgccgccgaccucaagagcacgcagaacgcgaucgacgagaucaccaacaaggugaacuccgugaucgagaagaugaacacccaguucaccgccgucggcaaggaguucaaccaccuggagaagcgcaucgagaaccugaacaagaagguggacgacggcuuccucgacaucuggacguacaacgccgagcugcugguccuccuggagaacgagcggacccuggacuaccacgacagcaacgugaagaaccucuacgagaaggugcgcucccagcugaagaacaacgccaaggagaucgggaacggcugcuucgaguucuaccacaagugcgacaacacgugcauggagagcgucaagaacgggaccuacgacuaccccaaguacuccgaggaggccaagcugaaccgggaggagaucgacggcgugaagcucgagagcacccgcaucuaccagauccuggcgaucuacuccaccguggccagcagccugguccucguggugucccugggggccaucagcuucuggaugugcuccaacggcagccugcacugccggaucugcgucuga

SEQ ID NO: 77866 - RNA, 1701 nt, Artificial Sequence
  derived and/or modified CDS sequence (opt1) from hemagglutinin__InfluenzaA__AGM53850
augaaggccauccuggugguccuccuguacaccuucgccaccgcgaacgccgacacgcugugcaucggcuaccacgccaacaacagcaccgacaccguggacaccgugcucgagaagaacgucacggugacccacuccgugaaccugcuggaggacaagcacaacgggaagcucugcaagcugcgcggcgucgcgccccugcaccucgggaagugcaacaucgccggcuggauccuggggaacccggagugcgagagccuguccaccgcgagcuccuggagcuacaucguggagacccccuccagcgacaacggcacgugcuaccccggcgacuucaucgacuacgaggagcuccgggagcagcuguccagcguguccagcuucgagcgcuucgagaucuuccccaagaccuccagcuggccgaaccacgacuccaacaagggggucaccgccgccugcccccacgccggcgccaagagcuucuacaagaaccugaucuggcucgugaagaaggggaacuccuaccccaagcugagcaaguccuacaucaacgacaagggcaaggaggugcugguccucugggggauccaccacccgcccaccagcgccgaccagcagagccuguaccagaacgccgacgccuacguguucgugggcuccagccgguacuccaagaaguucaagcccgagaucgccauccgccccaagguccgggaccaggagggccgcaugaacuacuacuggacgcugguggagcccggggacaagaucaccuucgaggcgaccggcaaccucguggucccgcgguacgccuucgccauggagcgcaacgccgggagcggcaucaucaucuccgacacccccgugcacgacugcaacacgaccugccagacccccaagggcgccaucaacaccagccugcccuuccagaacauccacccgaucacgaucgggaagugccccaaguacgugaaguccaccaagcugcggcucgcgaccggccugcgcaacauccccagcauccagucccgggggcuguucggcgccaucgccggguucaucgagggcggcuggaccgggauggucgacggcugguacggguaccaccaccagaacgagcagggcagcggguacgccgccgaccucaaguccacgcagaacgcgaucgacgagaucaccaacaaggugaacagcgugaucgagaagaugaacacccaguucaccgccgucggcaaggaguucaaccaccuggagaagcgcaucgagaaccugaacaagaagguggacgacggcuuccucgacaucuggacguacaacgccgagcugcugguccuccuggagaacgagcggacccuggacuaccacgacuccaacgugaagaaccucuacgagaaggugcgcagccagcugaagaacaacgccaaggagaucgggaacggcugcuucgaguucuaccacaagugcgacaacacgugcauggaguccgucaagaacgggaccuacgacuaccccaaguacagcgaggaggccaagcugaaccgggaggagaucgacggcgugaagcucgaguccacccgcaucuaccagauccuggcgaucuacagcaccguggccuccagccugguccucguggugagccugggggccaucuccuucuggaugugcagcaacggcucccugcagugccggaucugcaucuga

SEQ ID NO: 77867 - RNA, 1701 nt, Artificial Sequence
  derived and/or modified CDS sequence (opt1) from hemagglutinin__InfluenzaA__EPI731463
augaaggccauccuggugguccuccuguacaccuucgccaccgcgaacgccgacacgcugugcaucggcuaccacgccaacaacagcaccgacaccguggacaccgugcucgagaagaacgucacggugacccacuccgugaaccugcuggaggacaagcacaacgggaagcucugcaagcugcgcggcgucgcgccccugcaccucgggaagugcaacaucgccggcuggauccuggggaacccggagugcgagagccuguccaccgcgagcuccuggagcuacaucguggagacccccuccagcgacaacggcacgugcuaccccggcgacuucaucgacuacgaggagcuccgggagcagcuguccagcguguccagcuucgagcgcuucgagaucuuccccaacaccuccagcuggccgaaccacgacuccaacaagggggucaccgccgccugcccccacgccggcgccaagagcuucuacaagaaccugaucuggcucgugaagaaggggaacuccuaccccaagcugagcaaguccuacaucaacgacaagggcaaggaggugcugguccucugggggauccaccaccccagcaccagcgccgaccagcagucccuguaccagaacgccgacgccuacguguucgugggcagcucccgguacagcaagaaguucaagccggagaucgccauccgccccaagguccggggccaggaggggcgcaugaacuacuacuggacgcugguggagcccggcgacaagaucaccuucgaggcgaccgggaaccucguggucccccgguacgccuucgccauggagcgcaacgccggcuccggcaucaucaucagcgacaccccggugcacgacugcaacacgaccugccagacccccaagggggccaucaacaccucccugcccuuccagaacauccaccccaucacgaucggcaagugcccgaaguacgucaagagcaccaagcugcggcucgcgaccgggcugcgcaacauccccuccauccagagccggggccuguucggggccaucgccggcuucaucgagggcggguggaccggcaugguggacgggugguacggcuaccaccaccagaacgagcagggguccggcuacgccgccgaccucaagagcacgcagaacgcgaucgacgagaucaccaacaaggugaacuccgugaucgagaagaugaacacccaguucaccgccgucggcaaggaguucaaccaccuggagaagcgcaucgagaaccugaacaagaagguggacgacggguuccucgacaucuggacguacaacgccgagcugcugguccuccuggagaacgagcggacccuggacuaccacgacagcaacgugaagaaccucuacgagaaggugcgcucccagcugaagaacaacgccaaggagaucggcaacgggugcuucgaguucuaccacaagugcgacaacacgugcauggagagcgucaagaacggcaccuacgacuaccccaaguacuccgaggaggccaagcugaaccgggaggagaucgacggggugaagcucgagagcacccgcaucuaccagauccuggcgaucuacuccaccguggccagcagccugguccucguggugucccugggcgccaucagcuucuggaugugcuccaacggcagccugcagugccggaucugcaucuga

SEQ ID NO: 77868 - RNA, 1701 nt, Artificial Sequence; identical to SEQ ID NO: 68522
  derived and/or modified CDS sequence (opt1) from hemagglutinin__InfluenzaA__EPI696972

SEQ ID NO: 77869 - RNA, 1701 nt, Artificial Sequence; identical to SEQ ID NO: 77710
  derived and/or modified CDS sequence (opt1) from hemagglutinin__InfluenzaA__EPI662594

SEQ ID NO: 77870 - RNA, 1701 nt, Artificial Sequence
  derived and/or modified CDS sequence (opt1) from hemagglutinin__InfluenzaA__EPI685579
augaaggccauccuggugguccuccuguacaccuucaccacggccaacgcggacacccugugcaucggcuaccacgccaacaacagcaccgacaccguggacacggugcucgagaagaacgucaccgugacccacuccgugaaccugcuggaggacaagcacaacgggaagcucugcaagcugcgcggcgucgcgccccugcaccucgggaagugcaacaucgccggcuggauccuggggaacccggagugcgagagccuguccaccgccagcuccuggagcuacaucguggagacguccaacagcgacaacgggaccugcuaccccggcgacuucaucaacuacgaggagcuccgggagcagcuguccagcguguccagcuucgagcgcuucgagaucuuccccaagaccuccagcuggcccaaccacgacuccaacaagggcgucaccgccgccugcccgcacgccggcgccaagagcuucuacaagaaccugaucuggcucgugaagaaggggaacuccuaccccaagcugaaccagagcuacaucaacgacaagggcaaggaggugcugguccucugggggauccaccaccccuccacgaccgcggaccagcagagccuguaccagaacgccgacgccuacguguucgugggcaccagccgguacuccaagaaguucaagcccgagaucgccacccgcccgaagguccgggaccgcgagggccggaugaacuacuacuggacgcugguggagcccggggacaagaucaccuucgaggccaccggcaaccucguggucccccgcuacgcguucaccauggagcggaacgccgggagcggcaucaucaucuccgacacgcccgugcacgacugcaacacgaccugccagaccccggagggcgccaucaacaccagccugcccuuccagaacauccaccccaucaccaucgggaagugccccaaguacgugaaguccaccaagcugcgccucgccaccggccugcggaacgucccgagcauccagucccgcgggcuguucggcgccaucgcgggguucaucgagggcggcuggacggggaugguggacggcugguacggguaccaccaccagaacgagcagggcagcggguacgccgccgaccucaaguccacccagaacgccaucgacaagaucaccaacaaggugaacagcgucaucgagaagaugaacacccaguucacggccgugggcaaggaguucaaccaccuggagaagcggaucgagaaccugaacaagaaggucgacgacggcuuccucgacaucuggaccuacaacgcggagcugcuggugcuccuggagaacgagcgcacccuggacuaccacgacuccaacgugaagaaccucuacgagaagguccggaaccagcugaagaacaacgccaaggagaucgggaacggcugcuucgaguucuaccacaagugcgacaacacgugcauggagagcgugaagaacgggaccuacgacuaccccaaguacuccgaggaggccaagcugaaccgcgagaagaucgacggcgugaagcucgagagcacccggaucuaccagauccuggccaucuacuccaccgucgccagcucccuggugcucguggucagccugggggcgaucuccuucuggaugugcagcaacggcagccugcagugccgcaucugcaucuga

SEQ ID NO: 77871 - RNA, 1701 nt, Artificial Sequence
  derived and/or modified CDS sequence (opt1) from hemagglutinin__InfluenzaA__EPI830230
augaaggccauccuggugguccuccuguacaccuucaccacggccaacgcggacacccugugcaucggcuaccacgccaacaacagcaccgacaccguggacacggugcucgagaagaacgucaccgugacccacuccgugaaccugcuggaggacaagcacaacgggaagcucugcaagcugcgcggcgucgcgccccugcaccucgggaagugcaacaucgccggcuggauccuggggaacccggagugcgagagccuguccaccgccagcuccuggagcuacaucguggagacguccaacagcgacaacgggaccugcuaccccggcgacuucaucaacuacgaggagcuccgggagcagcuguccagcguguccagcuucgagcgcuucgagaucuuccccaagaccuccagcuggcccaaccacgacuccaacaagggcgucaccgccgccugcccgcacgccggcgccaagagcuucuacaagaaccugaucuggcucgugaagaaggggaacuccuaccccaagcugaaccagagcuacaucaacgacaagggcaaggaggugcugguccucugggggauccaccaccccuccacgaccgcggaccagcagagccuguaccagaacgccgacgccuacguguucgugggcaccagccgguacuccaagauguucaagcccgagaucgccacccgcccgaagguccgggaccgcgagggccggaugaacuacuacuggacgcugguggagcccggggacaagaucaccuucgaggccaccggcaaccucguggucccccgcuacgcguucaccauggagcggaacgccgggagcggcaucaucaucuccgacacgcccgugcacgacugcaacacgaccugccagaccccggagggcgccaucaacaccagccugcccuuccagaacauccaccccaucaccaucgggaagugccccaaguacgugaaguccaccaagcugcgccucgccaccggccugcggaacgucccgagcauccagucccgcgggcuguucggcgccaucgcgggguucaucgagggcggcuggacggggaugguggacggcugguacggguaccaccaccagaacgagcagggcagcggguacgccgccgaccucaaguccacccagaacgccaucgacaagaucaccaacaaggugaacagcgucaucgagaagaugaacacccaguucacggccgugggcaaggaguucaaccaccuggagaagcggaucgagaaccugaacaagaaggucgacgacggcuuccucgacaucuggaccuacaacgcggagcugcuggugcuccuggagaacgagcgcacccuggacuaccacgacuccaacgugaagaaccucuacgagaagguccggaaccagcugaagaacaacgccaaggagaucgggaacggcugcuucgaguucuaccacaagugcgacaacacgugcauggagagcgugaagaacgggaccuacgacuaccccaaguacuccgaggaggccaagcugaaccgcgagaagaucgacggcgugaagcucgagagcacccggaucuaccagauccuggccaucuacuccaccgucgccagcucccuggugcucguggucagccugggggcgaucuccuucuggaugugcagcaacggcagccugcagugccgcaucugcaucuga

SEQ ID NO: 77872 - RNA, 1701 nt, Artificial Sequence; identical to SEQ ID NO: 66680
  derived and/or modified CDS sequence (opt1) from hemagglutinin__InfluenzaA__ACQ45338

SEQ ID NO: 77873 - RNA, 1701 nt, Artificial Sequence; identical to SEQ ID NO: 66680
  derived and/or modified CDS sequence (opt1) from hemagglutinin__InfluenzaA__ACQ45338/m1

SEQ ID NO: 77874 - RNA, 1701 nt, Artificial Sequence; identical to SEQ ID NO: 66680
  derived and/or modified CDS sequence (opt1) from hemagglutinin__InfluenzaA__ACQ45338/m2

SEQ ID NO: 77875 - RNA, 1701 nt, Artificial Sequence; identical to SEQ ID NO: 66342
  derived and/or modified CDS sequence (opt1) from hemagglutinin__InfluenzaA__ACU79871

SEQ ID NO: 77876 - RNA, 1701 nt, Artificial Sequence
  derived and/or modified CDS sequence (opt1) from hemagglutinin__InfluenzaA__ACU79871/m1
augaagaccaucaucgcccugagcuacaucuucugccucgcccugggccaggaccugcccgggaacgacaacuccaccgcgacgcucugccugggccaccacgccgugccgaacgggacccuggucaagaccaucaccgacgaccagaucgaggugacgaacgccaccgagcucgugcagagcuccagcaccggcaagaucugcaacaacccccaccgcauccuggacgggaucgacugcacccugaucgacgcccuccugggcgacccccacugcgacgucuuccagaacgagacgugggaccuguucguggagcgguccaaggccuucagcaacugcuaccccuacgacgugccggacuacgcgucccuccgcagccuggucgccuccagcggcacccuggaguucaucaccgagggguucaccuggacgggcgugacccagaacgggggcuccaacgccugcaagcgggggcccggcagcggcuucuucucccgccucaacuggcugaccaagagcggguccaccuaccccgugcugaacgucacgaugcccaacaacgacaacuucgacaagcucuacaucuggggcgugcaccacccgagcaccaaccaggagcagaccucccuguacgugcaggccagcgggcgggucaccguguccacgcgccggagccagcagaccaucauccccaacaucgagagccgccccugggugcggggccaguccagccgcaucuccaucuacuggaccaucgucaagcccggcgacgugcuggugaucaacagcaacgggaaccucaucgcgccgcggggcuacuucaagaugcgcaccgggaaguccagcaucaugcgguccgacgcccccaucgacacgugcaucagcgagugcaucacccccaacggcuccauccccaacgacaagccguuccagaacgucaacaagaucaccuacggggccugccccaaguacgugaagcagaacacccugaagcuggccacgggcaugcgcaacgugcccgagaagcagacccggggccucuucggggccaucgcgggcuucaucgagaacgggugggagggcaugaucgacgggugguacggcuuccgccaccagaacagcgagggcaccgggcaggccgccgaccugaaguccacccaggccgccaucgaccagaucaacggcaaggucaaccggaucaucgagaagacgaacgagaaguuccaccagaucgagaaggaguucagcgagguggaggggcgcauccaggaccuggagaaguacguggaggacaccaagaucgaccucugguccuacaacgcggagcugcuggucgcccucgagaaccagcacaccaucgaccugaccgacagcgagaugaacaagcuguucgagaagacgcggcgccagcuccgggagaacgccgaggacaugggcaacgggugcuucaagaucuaccacaagugcgacaacgccugcaucgaguccauccgcagcggcaccuacgaccacgacguguaccgcgacgaggcccugaacaaccgguuccagaucaagggcgucgagcugaaguccggguacaaggacuggauccucuggaucagcuucgcgaucuccugcuuccugcugugcguggugcuccugggcuucaucaugugggccugccagcgcgggaacauccggugcaacaucugcaucuga

SEQ ID NO: 77877 - RNA, 1701 nt, Artificial Sequence
  derived and/or modified CDS sequence (opt1) from hemagglutinin__InfluenzaA__EPI643118
augaagaccaucaucgcccugagcuacauccucugccugguguucgcccagaagauccccggcaacgacaacuccaccgcgacgcugugccucgggcaccacgccgucccgaacggcaccaucgugaagaccaucaccaacgaccgcaucgaggugacgaacgccaccgagcugguccagaacagcuccaucggggagaucugcgacagcccccaccagauccuggacggcgagaacugcacccucaucgacgcccugcugggggacccccagugcgacggcuuccagaacaagaagugggaccucuucguggagcgguccaaggccuacagcaacugcuaccccuacgacgugccggacuacgcgucccugcgcagccuggucgccuccagcggcacccucgaguucaacaacgaguccuucaacuggacgggggugacccagaacggcaccagcuccgccugcauccggcgcagcuccagcuccuucuucagccggcugaacuggcugacccaccucaacuacaaguaccccgcccugaacgugacgaugcccaacaacgagcaguucgacaagcuguacaucuggggcguccaccaccccgggaccgacaaggaccagaucuucccguacgcgcaguccagcgggcgcaucaucgugagcaccaagcggucccagcaggccgugauccccaacaucggcagccgcccccggauccgcgacauccccucccggaucagcaucuacuggaccaucgucaagccgggcgacauccuccugaucaacuccacggggaaccugaucgcgccccgcggcuacuucaagcuccggagcgggaaguccagcaucaugcgcuccgacgcccccaucggcaagugcaagagcgagugcaucacccccaacggcuccaucccgaacgacaagcccuuccagaacgugaaccggaucaccuacggggccugcccccgcuacgugaagcacagcacccugaagcuggccacgggcaugcggaacguccccgagaagcagacccgcgggaucuucggcgccaucgccggguucaucgagaacggcugggagggcaugguggacgggugguacggcuuccggcaccagaacuccgaggggcgcggccaggccgccgaccucaagagcacccaggcggccaucgaccagaucaacgggaagcugaaccggcugaucggcaagaccaacgagaaguuccaccagaucgagaaggaguucuccgagguggagggccgcauccaggaccucgagaaguacgucgaggacacgaagaucgaccuguggagcuacaacgccgagcugcucguggcccuggagaaccagcacaccaucgaccugaccgacuccgagaugaacaagcuguucgagaagaccaagaagcagcuccgcgagaacgccgaggacauggggaacggcugcuucaagaucuaccacaagugcgacaacgcgugcaucgggagcauccggaacggcacguacgaccacaacguguaccgcgacgaggcccugaacaaccgguuccagaucaagggggucgagcucaaguccggcuacaaggacuggauccuguggaucagcuucgccaucagcugcuuccugcucugcguggcccugcugggcuucaucaugugggccugccagaaggggaacauccgcugcaacaucugcaucuga

SEQ ID NO: 77878 - RNA, 1701 nt, Artificial Sequence; identical to SEQ ID NO: 76465
  derived and/or modified CDS sequence (opt1) from hemagglutinin__InfluenzaA__EPI675798

SEQ ID NO: 77879 - RNA, 1701 nt, Artificial Sequence
  derived and/or modified CDS sequence (opt1) from hemagglutinin__InfluenzaA__EPI578430
augaagaccaucaucgcccugagcuacauccucugccugguguucgcccagaagauccccggcaacgacaacuccaccgcgacgcugugccucgggcaccacgccgucccgaacggcaccaucgugaagaccaucaccaacgaccgcaucgaggugacgaacgccaccgagcugguccagaacagcuccaucggggagaucugcgacagcccccaccagauccuggacggcgagaacugcacccucaucgacgcccugcugggggacccccagugcgacggcuuccagaacaagaagugggaccucuucguggagcgguccaaggccuacagcuccugcuaccccuacgacgugccggacuacgcgagccugcgcucccuggucgccagcuccggcacccucgaguucaacaacgagagcuucaacuggacgggggugacccagaacggcaccuccagcgccugcauccggcgcuccagcuccagcuucuucucccggcugaacuggcugacccaccucaacuacaaguaccccgcccugaacgugacgaugcccaacaacgagcaguucgacaagcuguacaucuggggcguccaccaccccgggaccgacaaggaccagaucuucccguacgcgcagagcagcgggcgcaucaccguguccaccaagcggagccagcaggccgugauccccaacaucggcucccgcccccggauccgcgacauccccagccggaucuccaucuacuggacgaucgucaagccgggcgacauccuccugaucaacagcaccgggaaccugaucgcgccccgcggcuacuucaagauccgguccggcaagagcuccaucaugcgcagcgacgcccccaucgggaagugcaaguccgagugcaucacccccaacggcagcaucccgaacgacaagcccuuccagaacgugaaccggaucaccuacggggccugcccccgcuacgugaagcacuccacgcucaagcuggccaccggcaugcggaacguccccgagaagcagacccgcgggaucuucggcgccaucgccggguucaucgagaacggcugggagggcaugguggacgggugguacggcuuccggcaccagaacagcgaggggcgcggccaggccgccgaccugaaguccacccaggcggccaucgaccagaucaacgggaagcucaaccggcugaucggcaagacgaacgagaaguuccaccagaucgagaaggaguucagcgagguggagggccgcauccaggaccuggagaaguacgucgaggacaccaagaucgaccucugguccuacaacgccgagcugcugguggcccucgagaaccagcacaccaucgaccugaccgacagcgagaugaacaagcuguucgagaagacgaagaagcagcuccgcgagaacgccgaggacauggggaacggcugcuucaagaucuaccacaagugcgacaacgcgugcaucggguccauccggaacggcaccuacgaccacaacguguaccgcgacgaggcccugaacaaccgguuccagaucaagggggucgagcucaagagcggcuacaaggacuggauccuguggaucagcuucgccaucuccugcuuccugcugugcguggcccuccugggcuucaucaugugggccugccagaaggggaacauccgcugcaacaucugcaucuga

SEQ ID NO: 77880 - RNA, 1701 nt, Artificial Sequence
  derived and/or modified CDS sequence (opt1) from hemagglutinin__InfluenzaA__EPI614406
augaagaccaucaucgcccugagcuacauccucugccugguguucgcccagaagauccccggcaacgacaacuccaccgcgacgcugugccucgggcaccacgccgucccgaacggcaccaucgugaagaccaucaccaacgaccgcaucgaggugacgaacgccaccgagcugguccagaacagcuccaucggggagaucugcgacagcccccaccagauccuggacggcgagaacugcacccucaucgacgcccugcugggggacccccagugcgacggcuuccagaacaagaagugggaccucuucguggagcgguccaaggccuacagcuccugcuaccccuacgacgugccggacuacgcgagccugcgcucccuggucgccagcuccggcacccucgaguucaacaacgagagcuucaacuggacgggggugacccagaacggcaccuccagcgccugcauccggcgcuccagcuccagcuucuucucccggcugaacuggcugacccaccucaacuacaaguaccccgcccugaacgugacgaugcccaacaacgagcaguucgacaagcuguacaucuggggcguccaccaccccgggaccgacaaggaccagaucuucccguacgcgcagagcagcgggcgcaucaccguguccaccaagcggagccagcaggccgugauccccaacaucggcucccgcccccggauccgcaacauccccagccggaucuccaucuacuggacgaucgucaagccgggcgacauccuccugaucaacagcaccgggaaccugaucgcgccccgcggcuacuucaagauccgguccggcaagagcuccaucaugcgcagcgacgcccccaucgggaagugcaaguccgagugcaucacccccaacggcagcaucccgaacgacaagcccuuccagaacgugaaccggaucaccuacggggccugcccccgcuacgugaagcacuccacgcucaagcuggccaccggcaugcggaacguccccgagaagcagacccgcgggaucuucggcgccaucgccggguucaucgagaacggcugggagggcaugguggacgggugguacggcuuccggcaccagaacagcgaggggcgcggccaggccgccgaccugaaguccacccaggcggccaucgaccagaucaacgggaagcucaaccggcugaucggcaagacgaacgagaaguuccaccagaucgagaaggaguucagcgagguggagggccgcauccaggaccuggagaaguacgucgaggacaccaagaucgaccucugguccuacaacgccgagcugcugguggcccucgagaaccagcacaccaucgaccugaccgacagcgagaugaacaagcuguucgagaagacgaagaagcagcuccgcgagaacgccgaggacauggggaacggcugcuucaagaucuaccacaagugcgacaacgcgugcaucggguccauccggaacggcaccuacgaccacaacguguaccgcgacgaggcccugaacaaccgguuccagaucaagggggucgagcucaagagcggcuacaaggacuggauccuguggaucagcuucgccaucuccugcuuccugcugugcguggcccuccugggcuucaucaugugggccugccagaaggggaacauccgcugcaacaucugcaucuga

SEQ ID NO: 77881 - RNA, 1695 nt, Artificial Sequence
  derived and/or modified CDS sequence (opt1) from hemagglutinin__InfluenzaA__ACU65077/m1
auggagaagaucgugcugcuguucgccaucgucagccuggugaaguccgaccagaucugcaucggcuaccacgccaacaacagcaccgagcaggucgacaccaucauggagaagaacgugacggugacccacgcgcaggacauccuggagaagacccacaacgggaagcucugcgaccuggacggcgugaagccccugauccuccgcgacugcuccgucgccggguggcugcugggcaacccgaugugcgacgaguucaucaacgugcccgaguggagcuacaucguggagaaggccaaccccgucaacgaccucugcuaccccggggacuucaacgacuacgaggagcugaagcaccuccucucccggaucaaccacuucgagaagauccagaucauccccaagagcuccuggagcucccacgaggccagccugggcguguccagcgccugcccguaccagggcaaguccagcuucuuccgcaacguggucuggcugaucaagaagaacuccaccuaccccacgaucaagcggagcuacaacaacaccaaccaggaggaccuccuggugcugugggggauccaccaccccaacgacgcggccgagcagaccaagcucuaccagaacccgaccacguacaucuccgugggcaccagcacccugaaccagcgccuggucccccggaucgccacccgcuccaaggugaacgggcagagcggccggauggaguucuucuggacgauccucaagcccaacgacgccaucaacuucgagagcaacgggaacuucaucgcgcccgaguacgccuacaagaucgugaagaagggcgacuccaccaucaugaaguccgagcuggaguacggcaacugcaacaccaagugccagaccccgaugggggccaucaacagcagcaugcccuuccacaacauccacccccugacgaucggcgagugccccaaguacgucaaguccaaccgccucgugcuggccaccgggcugcggaacagcccgcagcgcgagacccggggccucuucggcgccaucgcgggguucaucgagggcggguggcagggcaugguggacgggugguacggcuaccaccacuccaacgagcagggcagcggguacgccgccgacaaggaguccacccagaaggccaucgacggcgucacgaacaaggugaacagcaucaucgacaagaugaacacccaguucgaggccguggggcgcgaguucaacaaccuggagcggcgcaucgagaaccugaacaagaagauggaggacggcuuccucgacgucuggaccuacaacgcggagcugcuggugcucauggagaacgagcggacccuggacuuccacgacuccaacgucaagaaccuguacgacaaggugcgccuccagcugcgggacaacgccaaggagcuggggaacggcugcuucgaguucuaccacaagugcgacaacgagugcauggagagcgugcgcaacggcacguacgacuacccccaguacuccgaggaggcccggcucaagcgcgaggagaucagcggggucaagcuggaguccaucggcaucuaccagauccugagcaucuacuccaccguggccagcucccucgcccuggcgaucaugguggccgggcugagccucuggaugugcagcaacggcucccugcagugccggaucugcaucuga

SEQ ID NO: 77882 - RNA, 1695 nt, Artificial Sequence; identical to SEQ ID NO: 77881
  derived and/or modified CDS sequence (opt1) from hemagglutinin__InfluenzaA__ACU65077/m2

SEQ ID NO: 77883 - RNA, 1707 nt, Artificial Sequence; identical to SEQ ID NO: 64052
  derived and/or modified CDS sequence (opt1) from hemagglutinin__InfluenzaA__ABP51976

SEQ ID NO: 77884 - RNA, 1707 nt, Artificial Sequence; identical to SEQ ID NO: 64052
  derived and/or modified CDS sequence (opt1) from hemagglutinin__InfluenzaA__ABP51976/m1

SEQ ID NO: 77885 - RNA, 1695 nt, Artificial Sequence
  derived and/or modified CDS sequence (opt1) from hemagglutinin__InfluenzaA__ABW90125
auggagaagaucgugcugcuguucgccaucgucagccuggugaaguccgaccagaucugcaucggcuaccacgccaacaacagcaccgagcaggucgacaccaucauggagaagaacgugacggugacccacgcgcaggacauccuggagaagaagcacaacgggaagcucugcgaccuggacggcgugaagccccugauccuccgcgacugcuccgucgccggguggcugcugggcaacccgaugugcgacgaguucaucaacgugcccgaguggagcuacaucguggagaaggccaaccccgucaacgaccucugcuaccccggggacuucaacgacuacgaggagcugaagcaccuccucucccggaucaaccacuucgagaagauccagaucauccccaagagcuacugguccagccacgaggccucccugggcgugagcuccgccugcccguaccagggcaagagcuccuucuuccgcaacguggucuggcugaccaagaagaacagcaccuaccccacgaucaagcgguccuacaacaacaccaaccaggaggaccuccuggugcugugggggauccaccaccccaacgacgcggccgagcagaccaagcucuaccagaacccgaccacguacaucagcgugggcaccuccacccugaaccagcgccuggucccccggaucgccacccgcagcaaggugaacgggcaguccggccggauggaguucuucuggacgauccucaagcccaacgacgccaucaacuucgagagcaacgggaacuucaucgcgcccgaguacgccuacaagaucgugaagaagggcgacagcaccaucaugaaguccgagcuggaguacggcaacugcaacaccaagugccagaccccgaugggggccaucaacagcuccaugcccuuccacaacauccacccccugacgaucggcgagugccccaaguacgucaagagcaaccgccucgugcuggccaccgggcugcggaacuccccgcagcgcgagacccggggccucuucggcgccaucgcgggguucaucgagggcggguggcagggcaugguggacgggugguacggcuaccaccacagcaacgagcagggcuccggguacgccgccgacaaggagagcacccagaaggccaucgacggcgucacgaacaaggugaacuccaucaucgacaagaugaacacccaguucgaggccguggggcgcgaguucaacaaccuggagcggcgcaucgagaaccugaacaagaagauggaggacggcuuccucgacgucuggaccuacaacgcggagcugcuggugcucauggagaacgagcggacccuggacuuccacgacagcaacgucaagaaccuguacgacaaggugcgccuccagcugcgggacaacgccaaggagcuggggaacggcugcuucgaguucuaccacaagugcgacaacgagugcauggaguccgugcgcaacggcacguacgacuacccccaguacagcgaggaggcccggcucaagcgcgaggagaucuccggggucaagcuggagagcaucggcaucuaccagauccuguccaucuacagcaccguggccuccagccucgcccuggcgaucaugguggccgggcugucccucuggaugugcagcaacggcagccugcagugccggaucugcaucuga

SEQ ID NO: 77886 - RNA, 1695 nt, Artificial Sequence
  derived and/or modified CDS sequence (opt1) from hemagglutinin__InfluenzaA__ABW90126
auggagaagaucgugcugcuguucgccaucgucagccuggugaaguccgaccagaucugcaucggcuaccacgccaacaacagcaccgagcaggucgacaccaucauggagaagaacgugacggugacccacgcgcaggacauccuggagaagaagcacaacgggaagcucugcgaccuggacggcgugaagccccugauccuccgcgacugcuccgucgccggguggcugcugggcaacccgaugugcgacgaguucaucaacgugcccgaguggagcuacaucguggagaaggccaaccccgucaacgaccucugcuaccccggggacuucaacgacuacgaggagcugaagcaccuccucucccggaucaaccacuucgagaagauccagaucauccccaagagcuccuggagcucccacgaggccagccugggcguguccagcgccugcccguaccagggcaaguccagcuucuuccgcaacguggucuggcugaucaagaagaacuccaccuaccccaccaucaaggggagcuacaacaacacgaaccaggaggaccuccuggugcuguggggcauccaccaccccaacgacgcggccgagcagaccaagcucuaccagaacccgaccaccuacaucuccguggggacgagcacccugaaccagcggcuggucccccgcaucgccacccgguccaaggugaacggccagagcgggcgcauggaguucuucuggaccauccucaagcccaacgacgccaucaacuucgagagcaacggcaacuucaucgcgcccgaguacgccuacaagaucgugaagaagggcgacuccacgaucaugaaguccgagcuggaguacgggaacugcaacaccaagugccagaccccgaugggcgccaucaacagcagcaugcccuuccacaacauccacccccugaccaucggggagugccccaaguacgucaaguccaaccggcucgugcuggccacgggccugcgcaacagcccgcagcgggagacccgcggccucuucggggccaucgcgggcuucaucgagggcggguggcaggggaugguggacggcugguacggcuaccaccacuccaacgagcaggggagcggcuacgccgccgacaaggaguccacccagaaggccaucgacggggucaccaacaaggugaacagcaucaucgacaagaugaacacgcaguucgaggccgugggccgggaguucaacaaccuggagcgccggaucgagaaccugaacaagaagauggaggacggguuccucgacgucuggaccuacaacgcggagcugcuggugcucauggagaacgagcgcacccuggacuuccacgacuccaacgucaagaaccuguacgacaaggugcggcuccagcugcgcgacaacgccaaggagcugggcaacggcugcuucgaguucuaccacaagugcgacaacgagugcauggagagcgugcggaacgggaccuacgacuacccccaguacuccgaggaggcccgccucaagcgggaggagaucagcggcgucaagcuggaguccaucgggaucuaccagauccugagcaucuacuccacgguggccagcucccucgcccuggcgaucaugguggccggccugagccucuggaugugcagcaacgggucccugcagugccgcaucugcaucuga

SEQ ID NO: 77887 - RNA, 1695 nt, Artificial Sequence
  derived and/or modified CDS sequence (opt1) from hemagglutinin__InfluenzaA__ABW90127
auggagaagaucgugcugcuguucgccaucgucagccuggugaaguccgaccagaucugcaucggcuaccacgccaacaacagcaccgagcaggucgacaccaucauggagaagaacgugacggugacccacgcgcaggacauccuggagaagaagcacaacgggaagcucugcgaccuggacggcgugaagccccugauccuccgcgacugcuccgucgccggguggcugcugggcaacccgaugugcgacgaguucaucaacgugcccgaguggagcuacaucguggagaaggccaaccccgucaacgaccucugcuaccccggggacuucaacgacuacgaggagcugaagcaccuccucucccggaucaaccacuucgagaagauccagaucauccccaagagcuccuggagcucccacgaggccagccugggcguguccagcgccugcccguaccagggcgaguccagcuucuuccgcaacguggucuggcugaucaagaagaacuccaccuaccccaccaucaagcggagcuacaacaacacgaaccaggaggaccuccuggugcugugggggauccaccaccccaacgacgcggccgagcagaccaagcucuaccagaacccgaccaccuacaucuccgugggcacgagcacccugaaccagcgccuggucccccggaucgccacccgcuccaaggugaacgggcagagcggccggauggaguucuucuggaccauccucaagcccaacgacgccaucaacuucgagagcaacgggaacuucaucgcgcccgaguacgccuacaagaucgugaagaagggcgacuccacgaucaugaaguccgagcuggaguacggcaacugcaacaccaagugccagaccccgaugggggccaucaacagcagcaugcccuuccacaacauccacccccugaccaucggcgagugccccaaguacgucaaguccaaccgccucgugcuggccacggggcugcggaacagcccgcagcgcgagacccggggccucuucggcgccaucgcgggguucaucgagggcggguggcagggcaugguggacgggugguacggcuaccaccacuccaacgagcagggcagcggguacgccgccgacaaggaguccacccagaaggccaucgacggcgucaccaacaaggugaacagcaucaucgacaagaugaacacgcaguucgaggccguggggcgcgaguucaacaaccuggagcggcgcaucgagaaccugaacaagaagauggaggacggcuuccucgacgucuggaccuacaacgcggagcugcuggugcucauggagaacgagcggacccuggacuuccacgacuccaacgucaagaaccuguacgacaaggugcgccuccagcugcgggacaacgccaaggagcuggggaacggcugcuucgaguucuaccacaagugcgacaacgagugcauggagagcgugcgcaacggcaccuacgacuacccccaguacuccgaggaggcccggcucaagcgcgaggagaucagcggggucaagcuggaguccaucggcaucuaccagauccugagcaucuacuccacgguggccagcucccucgcccuggcgaucaugguggccgggcugagccucuggaugugcagcaacggcucccugcagugccggaucugcaucuga

SEQ ID NO: 77888 - RNA, 1695 nt, Artificial Sequence
  derived and/or modified CDS sequence (opt1) from hemagglutinin__InfluenzaA__ABW90128
auggagaagaucgugcugcuguucgccaucgucagccuggugaaguccgaccagaucugcaucggcuaccacgccaacaacagcaccgagcaggucgacaccaucauggagaagaacgugacggugacccacgcgcaggacauccuggagaagaagcacaacgggaagcucugcgaccuggacggcgugaagccccugauccuccgcgacugcuccgucgccggguggcugcugggcaacccgaugugcgacgaguucaucaacgugcccgaguggagcuacaucguggagaaggccaaccccgucaacgaccucugcuaccccggggacuucaacgacuacgaggagcugaagcaccuccucucccggaucaaccacuucgagaagauccagaucauccccaagagcuccuggagcucccacgaggccagccugggcguguccagcgccugcccguaccagggcaaguccagcuucuuccgcaacguggucuggcugaucgagaagaacuccaccuaccccaccaucaagcggagcuacaacaacacgaaccaggaggaccuccuggugcugugggggauccaccaccccaacgacgcggccgagcagaccaagcucuaccagaacccgaccaccuacaucuccgugggcacgagcacccugaaccagcgccuggucccccggaucgccacccgcuccaaggugaacgggcagagcggccggauggaguucuucuggaccauccucaagcccaacgacgccaucaacuucgagagcaacgggaacuucaucgcgcccgaguacgccuacaagaucgugaagaagggcgacuccacgaucaugaaguccgagcuggaguacggcaacugcaacaccaagugccagaccccgaugggggccaucaacagcagcaugcccuuccacaacauccacccccugaccaucggcgagugccccaaguacgucaaguccaaccgccucgugcuggccacggggcugcggaacagcccgcagcgcgagacccggggccucuucggcgccaucgcgggguucaucgagggcggguggcagggcaugguggacgggugguacggcuaccaccacuccaacgagcagggcagcggguacgccgccgacaaggaguccacccagaaggccaucgacggcgucaccaacaaggugaacagcaucaucgacaagaugaacacgcaguucgaggccguggggcgcgaguucaacaaccuggagcggcgcaucgagaaccugaacaagaagauggaggacggcuuccucgacgucuggaccuacaacgcggagcugcuggugcucauggagaacgagcggacccuggacuuccacgacuccaacgucaagaaccuguacgacaaggugcgccuccagcugcgggacaacgccaaggagcuggggaacggcugcuucgaguucuaccacaagugcgacaacgagugcauggagagcgugcgcaacggcaccuacgacuacccccaguacuccgaggaggcccggcucaagcgcgaggagaucagcggggucaagcuggaguccaucggcaucuaccagauccugagcaucuacuccacgguggccagcucccucgcccuggcgaucaugguggccgggcugagccucuggaugugcagcaacggcucccugcagugccggaucugcaucuga

SEQ ID NO: 77889 - RNA, 1695 nt, Artificial Sequence
  derived and/or modified CDS sequence (opt1) from hemagglutinin__InfluenzaA__ABW90129
auggagaagaucgugcugcuguucgccaucgucagccuggugaaguccgaccagaucugcaucggcuaccacgccaacaacagcaccgagcaggucgacaccaucauggagaagaacgugacggugacccacgcgcaggacauccuggagaagaagcacaacgggaagcucugcgaccuggacggcgugaagccccugauccuccgcgacugcuccgucgccggguggcugcugggcaacccgaugugcgacgaguucaucaacgugcccgaguggagcuacaucguggagaaggccaaccccgucaacgaccucugcuaccccggggacuucaacgacuacgaggagcugaagcaccuccucucccggaucaaccacuucgagaagauccagaucauccccaagagcuccuggagcucccacgaggccagccugggcguguccagcgccugcccguaccagggcaaguccagcuucuuccgcaacguggucuggcugaucaagaagaacuccgcguaccccaccaucaagcggagcuacaacaacaccaaccaggaggaccuccuggugcugugggggauccaccaccccaacgacgccgccgagcagacggagcucuaccagaacccgaccaccuacaucuccgugggcaccagcacgcugaaccagcgccuggucccccggaucgccacccgcuccaaggugaacgggcagagcggccggauggaguucuucuggaccauccucaagcccaacgacgcgaucaacuucgagagcaacgggaacuucaucgcccccgaguacgccuacaagaucgugaagaagggcgacuccaccaucaugaaguccgagcuggaguacggcaacugcaacacgaagugccagaccccgaugggggccaucaacagcagcaugcccuuccacaacauccacccccugaccaucggcgagugccccaaguacgucaaguccaaccgccucgugcuggccaccgggcugcggaacagcccgcagcgcgagacgcggggccucuucggcgcgaucgccggguucaucgagggcggguggcagggcaugguggacgggugguacggcuaccaccacuccaacgagcagggcagcggguacgccgccgacaaggaguccacccagaaggccaucgacggcgucaccaacaaggugaacagcaucaucgacaagaugaacacccaguucgaggcgguggggcgcgaguucaacaaccuggagcggcgcaucgagaaccugaacaagaagauggaggacggcuuccucgacgucuggacguacaacgccgagcugcuggugcucauggagaacgagcggacccuggacuuccacgacuccaacgucaagaaccuguacgacaaggugcgccuccagcugcgggacaacgccaaggagcuggggaacggcugcuucgaguucuaccacaagugcgacaacgagugcauggagagcgugcgcaacggcaccuacgacuacccccaguacuccgaggaggcccggcucaagcgcgaggagaucagcggggucaagcuggaguccaucggcaucuaccagauccugagcaucuacuccaccguggccagcucccucgcgcuggccaucaugguggccgggcugagccucuggaugugcagcaacggcucccugcagugccggaucugcaucuga

SEQ ID NO: 77890 - RNA, 1695 nt, Artificial Sequence
  derived and/or modified CDS sequence (opt1) from hemagglutinin__InfluenzaA__ABW90130
auggagaagaucgugcugcuguucgccaucgucagccuggugaaguccgaccagaucugcaucggcuaccacgccaacaacagcaccgagcaggucgacaccaucauggagaagaacgugacggugacccacgcgcaggacauccuggagaagaagcacaacgggaagcucugcgaccuggacggcgugaagccccugauccuccgcgacugcuccgucgccggguggcugcugggcaacccgaugugcgacgaguucaucaacgugcccgaguggagcuacaucguggagaaggccaaccccgucaacgaccucugcuaccccggggacuucaacgacuacgaggagcugaagcaccuccucucccggaucaaccacuucgagaagauccagaucauccccaagagcuccuggagcucccacgaggccagccugggcguguccagcgccugcccguaccagggcaaguucuccuucuuccgcaacguggucuggcugaucaagaagaacagcaccuaccccaccaucaagcgguccuacaacaacacgaaccaggaggaccuccuggugcugugggggauccaccaccccaacgacgcggccgagcagaccaagcucuaccagaacccgaccaccuacaucagcgugggcacguccacccugaaccagcgccuggucccccggaucgccacccgcagcaaggugaacgggcaguccggccggauggaguucuucuggaccauccucaagcccaacgacgccaucaacuucgagagcaacgggaacuucaucgcgcccgaguacgccuacaagaucgugaagaagggcgacagcacgaucaugaaguccgagcuggaguacggcaacugcaacaccaagugccagaccccgaugggggccaucaacagcuccaugcccuuccacaacauccacccccugaccaucggcgagugccccaaguacgucaagagcaaccgccucgugcuggccacggggcugcggaacuccccgcagcgcgagacccggggccucuucggcgccaucgcgggguucaucgagggcggguggcagggcaugguggacgggugguacggcuaccaccacagcaacgagcagggcuccggguacgccgccgacaaggagagcacccagaaggccaucgacggcgucaccaacaaggugaacuccaucaucgacaagaugaacacgcaguucgaggccguggggcgcgaguucaacaaccuggagcggcgcaucgagaaccugaacaagaagauggaggacggcuuccucgacgucuggaccuacaacgcggagcugcuggugcucauggagaacgagcggacccuggacuuccacgacagcaacgucaagaaccuguacgacaaggugcgccuccagcugcgggacaacgccaaggagcuggggaacggcugcuucgaguucuaccacaagugcgacaacgagugcauggaguccgugcgcaacggcaccuacgacuacccccaguacagcgaggaggcccggcucaagcgcgaggagaucuccggggucaagcuggagagcaucggcaucuaccagauccuguccaucuacagcacgguggccuccagccucgcccuggcgaucaugguggccgggcugucccucuggaugugcagcaacggcagccugcagugccggaucugcaucuga

SEQ ID NO: 77891 - RNA, 1695 nt, Artificial Sequence
  derived and/or modified CDS sequence (opt1) from hemagglutinin__InfluenzaA__ABW90132
auggagaagaucgugcugcuguucgccaucgucagccuggugaaguccgaccagaucugcaucggcuaccacgccaacaacagcaccgagcaggucgacaccaucauggagaagaacgugacggugacccacgcgcaggacauccuggagaagaagcacaacgggaagcucugcgaccuggacggcgugaagccccugauccuccgcgacugcuccgucgccggguggcugcugggcaacccgaugugcgacgaguucaucaacgugcccgaguggagcuacaucguggagaaggccaaccccgucaacgaccucugcuaccccggggacuucaacgacuacgaggagcugaagcaccuccucucccggaucaaccacuucgagaagauccagaucauccccaagagcuccuggagcucccacgaggccagccugggcguguccagcgccugcccguaccagggcaaguccagcuucuuccgcaacguggucuggcugaucaagaagaacuccaccuaccccaccaucaagcggagcuacaacaacacgaaccaggaggaccuccuggugcugugggggauccaccaccccaacaacgcggccgagcagaccgagcucuaccagaacccgaccaccuacaucuccgugggcacgagcacccugaaccagcgccuggucccccggaucgccacccgcuccaaggugaacgggcagagcggccggauggaguucuucuggaccauccucaagcccaacgacgccaucaacuucgagagcaacgggaacuucaucgcgcccgaguacgccuacaagaucgugaagaagggcgacuccacgaucaugaaguccgagcuggaguacggcaacugcaacaccaagugccagaccccgaugggggccaucaacagcagcaugcccuuccacaacauccacccccugaccaucggcgagugccccaaguacgucaaguccaaccgccucgugcuggccacggggcugcggaacagcccgcagcgcgagacccggggccucuucggcgccaucgcgggguucaucgagggcggguggcagggcaugguggacgggugguacggcuaccaccacuccaacgagcagggcagcggguacgccgccgacaaggaguccacccagaaggccaucgacggcgucaccaacaaggugaacagcaucaucgacaagaugaacacgcaguucgaggccguggggcgcgaguucaacaaccuggagcggcgcaucgagaaccugaacaagaagauggaggacggcuuccucgacgucuggaccuacaacgcggagcugcuggugcucauggagaacgagcggacccuggacuuccacgacuccaacgucaagaaccuguacgacaaggugcgccuccagcugcgggacaacgccaaggagcuggggaacggcugcuucgaguucuaccacaagugcgacaacgagugcauggagagcgugcgcaacggcaccuacgacuacccccaguacuccgaggaggcccggcucaagcgcgaggagaucagcggggucaagcuggaguccaucggcaucuaccagauccugagcaucuacuccacgguggccagcucccucgcccuggcgaucaugguggccgggcugagccucuggaugugcagcaacggcucccugcagugccggaucugcaucuga

SEQ ID NO: 77892 - RNA, 1695 nt, Artificial Sequence
  derived and/or modified CDS sequence (opt1) from hemagglutinin__InfluenzaA__ABW90133
auggagaagaucgugcugcuguucgccaucgucagccuggugaaguccgaccagaucugcaucggcuaccacgccaacaacagcaccgagcaggucgacaccaucauggagaagaacgugacggugacccacgcgcaggacauccuggagaagaagcacaacgggaagcucugcgaccuggacggcgugaagccccugauccuccgcgacugcuccgucgccggguggcugcugggcaacccgaugugcgacgaguucaucaacgugcccgaguggagcuacaucguggagaaggccaaccccgucaacgaccucugcuaccccggggacuucaacgacuacgaggagcugaagcaccuccucucccggaucaaccacuucgagaagauccagaucauccccaagagcuccuggagcucccacgaggccagccugggcguguccagcgccugccccuaccagggcaagcccuccuucuuccgcaacguggucuggcugaucaagaagaacagcaccuaccccaccaucaagcgguccuacaacaacacgaaccaggaggaccuccuggugcugugggggauccaccacccgaacgacgcggccgagcagaccaagcucuaccagaaccccaccaccuacaucagcgugggcacguccacccugaaccagcgccuggucccccggaucgccacccgcagcaaggugaacgggcaguccggccggauggaguucuucuggaccauccucaagcccaacgacgccaucaacuucgagagcaacgggaacuucaucgcgccggaguacgccuacaagaucgugaagaagggcgacagcacgaucaugaaguccgagcuggaguacggcaacugcaacaccaagugccagacccccaugggggccaucaacagcuccaugcccuuccacaacauccacccccugaccaucggcgagugcccgaaguacgucaagagcaaccgccucgugcuggccacggggcugcggaacuccccgcagcgcgagacccggggccucuucggcgccaucgcgggguucaucgagggcggguggcagggcaugguggacgggugguacggcuaccaccacagcaacgagcagggcuccggguacgccgccgacaaggagagcacccagaaggccaucgacggcgucaccaacaaggugaacuccaucaucgacaagaugaacacgcaguucgaggccguggggcgcgaguucaacaaccuggagcggcgcaucgagaaccugaacaagaagauggaggacggcuuccucgacgucuggaccuacaacgcggagcugcuggugcucauggagaacgagcggacccuggacuuccacgacagcaacgucaagaaccuguacgacaaggugcgccuccagcugcgggacaacgccaaggagcuggggaacggcugcuucgaguucuaccacaagugcgacaacgagugcauggaguccgugcgcaacggcaccuacgacuacccccaguacagcgaggaggcccggcucaagcgcgaggagaucuccggggucaagcuggagagcaucggcaucuaccagauccuguccaucuacagcacgguggccuccagccucgcccuggcgaucaugguggccgggcugucccucuggaugugcagcaacggcagccugcagugccggaucugcaucuga

SEQ ID NO: 77893 - RNA, 1695 nt, Artificial Sequence
  derived and/or modified CDS sequence (opt1) from hemagglutinin__InfluenzaA__ABW90134
auggagaagaucgugcugcuguucgccaucgucagccuggugaaguccgaccagaucugcaucggcuaccacgccaacaacagcaccgagcaggucgacaccaucauggagaagaacgugacggugacccacgcgcaggacauccuggagaagaagcacaacgggaagcucugcgaccuggacggcgugaagccccugauccuccgcgacugcuccgucgccggguggcugcugggcaacccgaugugcgacgaguucaucaacgugcccgaguggagcuacaucguggagaaggccaaccccgucaacgaccucugcuaccccggggacuucaacgacuacgaggagcugaagcaccuccucucccggaucaaccacuucgagaagauccagaucauccccaagagcuccuggagcucccacgaggccagccugggcguguccagcgccugcccguaccaggagaaguccagcuucuuccgcaacguggucuggcugaucaagaagaacuccaccuaccccaccaucaagcggagcuacaacaacacgaaccaggaggaccuccuggugcuguggggcauccaccaccccaacgacgcggccgagcagaccaagcucuaccagaacccgaccaccuacaucuccguggggacgagcacccugaaccagcgccuggucccccggaucgccacccgcuccaaggugaacggccagagcgggcggauggaguucuucuggaccauccucaagcccaacgacgccaucaacuucgagagcaacggcaacuucaucgcgcccgaguacgccuacaagaucgugaagaagggggacuccacgaucaugaaguccgagcuggaguacggcaacugcaacaccaagugccagaccccgaugggcgccaucaacagcagcaugcccuuccacaacauccacccccugaccaucggggagugccccaaguacgucaaguccaaccgccucgugcuggccacgggccugcggaacagcccgcagcgcgagacccggggccucuucggggccaucgcgggcuucaucgagggcggguggcaggggaugguggacggcugguacggguaccaccacuccaacgagcagggcagcggcuacgccgccgacaaggaguccacccagaaggccaucgacggggucaccaacaaggugaacagcaucaucgacaagaugaacacgcaguucgaggccgugggccgcgaguucaacaaccuggagcggcgcaucgagaaccugaacaagaagauggaggacggguuccucgacgucuggaccuacaacgcggagcugcuggugcucauggagaacgagcggacccuggacuuccacgacuccaacgucaagaaccuguacgacaaggugcgccuccagcugcgggacaacgccaaggagcugggcaacgggugcuucgaguucuaccacaagugcgacaacgagugcauggagagcgugcgcaacggcaccuacgacuacccccaguacuccgaggaggcccggcucaagcgcgaggagaucagcggcgucaagcuggaguccaucgggaucuaccagauccugagcaucuacuccacgguggccagcucccucgcccuggcgaucaugguggccggccugagccucuggaugugcagcaacgggucccugcagugccggaucugcaucuga

SEQ ID NO: 77894 - RNA, 1695 nt, Artificial Sequence
  derived and/or modified CDS sequence (opt1) from hemagglutinin__InfluenzaA__ABW90135
auggagaagaucgugcugcuguucgccaucgucagccuggugaaguccgaccagaucugcaucggcuaccacgccaacaacagcaccgagcaggucgacaccaucauggagaagaacgugacggugacccacgcgcaggacauccuggagaagaagcacaacgggaagcucugcgaccuggacggcgugaagccccugauccuccgcgacugcuccgucgccggguggcugcugggcaacccgaugugcgacgaguucaucaacgugcccgaguggagcuacaucguggagaaggccaaccccgucaacgaccucugcuaccccggggacuucaacgacuacgaggagcugaagcaccuccucucccggaucaaccacuucgagaagauccagaucauccccaagagcuccuggagcucccacgaggccagccugggcguguccagcgccugcccguaccagggcaaguccagcuucuuccgcaacguggucuggcugaucaacaagaacuccaccuaccccaccaucaagcggagcuacaacaacacgaaccaggaggaccuccuggugcugugggggauccaccaccccaacgacgcggccgagcagaccaagcucuaccagaacccgaccaccuacaucuccgugggcacgagcacccugaaccagcgccuggucccccggaucgccacccgcuccaaggugaacgggcagagcggccggauggaguucuucuggaccauccucaagcccaacgacgccaucaacuucgagagcaacgggaacuucaucgcgcccgaguacgccuacaagaucgugaagaagggcgacuccacgaucaugaaguccgagcuggaguacggcaacugcaacaccaagugccagaccccgaugggggccaucaacagcagcaugcccuuccacaacauccacccccugaccaucggcgagugccccaaguacgucaaguccaaccgccucgugcuggccacggggcugcggaacagcccgcagcgcgagacccggggccucuucggcgccaucgcgggguucaucgagggcggguggcagggcaugguggacgggugguacggcuaccaccacuccaacgagcagggcagcggguacgccgccgacaaggaguccacccagaaggccaucgacggcgucaccaacaaggugaacagcaucaucgacaagaugaacacgcaguucgaggccguggggcgcgaguucaacaaccuggagcggcgcaucgagaaccugaacaagaagauggaggacggcuuccucgacgucuggaccuacaacgcggagcugcuggugcucauggagaacgagcggacccuggacuuccacgacuccaacgucaagaaccuguacgacaaggugcgccuccagcugcgggacaacgccaaggagcuggggaacggcugcuucgaguucuaccacaagugcgacaacgagugcauggagagcgugcgcaacggcaccuacgacuacccccaguacuccgaggaggcccggcucaagcgcgaggagaucagcggggucaagcuggaguccaucggcaucuaccagauccugagcaucuacuccacgguggccagcucccucgcccuggcgaucaugguggccgggcugagccucuggaugugcagcaacggcucccugcagugccggaucugcaucuga

SEQ ID NO: 77895 - RNA, 1695 nt, Artificial Sequence
  derived and/or modified CDS sequence (opt1) from hemagglutinin__InfluenzaA__HB649491
auggagaagaucgugcugcuguucgccaucgucagccuggugaaguccgaccagaucugcaucggcuaccacgccaacaacagcaccgagcaggucgacaccaucauggagaagaacgugacggugacccacgcgcaggacauccuggagaagaagcacaacgggaagcucugcgaccuggacggcgugaagccccugauccuccgcgacugcuccgucgccggguggcugcugggcaacccgaugugcgacgaguucaucaacgugcccgaguggagcuacaucguggagaaggccaaccccgucaacgaccucugcuaccccggggacuucaacgacuacgaggagcugaagcaccuccucucccggaucaaccacuucgagaagauccagaucauccccaagagcuccuggagcucccacgaggccagccugggcguguccagcgccugcccguaccagggcaaguccagcuucuuccgcaacguggucuggcugaucaagaagaacuccaccuaccccaccaucaagcggagcuacaacaacacgaaccaggaggaccuccuggugcugugggggauccaccaccccaacgacgcggccgagcagaccaagcucuaccagaacccgaccaccuacaucuccgugggcacgagcacccugaaccagcgccuggucccccggaucgccacccgcuccaaggugaacgggcagagcggccggauggaguucuucuggaccauccucaagcccaacgacgccaucaacuucgagagcaacgggaacuucaucgcgcccgaguacgccuacaagaucgugaagaagggcgacuccacgaucaugaaguccgagcuggaguacggcaacugcaacaccaagugccagaccccgaugggggccaucaacagcagcaugcccuuccacaacauccacccccugaccaucggcgagugccccaaguacgucaaguccaaccgccucgugcuggccacggggcugcggaacagcccgcagcgcgagacccggggccucuucggcgccaucgcgggguucaucgagggcggguggcagggcaugguggacgggugguacggcuaccaccacuccaacgagcagggcagcggguacgccgccgacaaggaguccacccagaaggccaucgacggcgucaccaacaaggugaacagcaucaucgacaagaugaacacgcaguucgaggccguggggcgcgaguucaacaaccuggagcggcgcaucgagaaccugaacaagaagauggaggacggcuuccucgacgucuggaccuacaacgcggagcugcuggugcucauggagaacgagcggacccuggacuuccacgacuccaacgucaagaaccuguacgacaaggugcgccuccagcugcgggacaacgccaaggagcuggggaacggcugcuucgaguucuaccacaagugcgacaacgagugcauggagagcgugcgcaacggcaccuacgacuacccccaguacuccgaggaggcccggcucaagcgcgaggagaucagcggggucaagcuggaguccaucggcaucuaccagauccugagcaucuacuccacgguggccagcucccucgcccuggcgaucaugguggccgggcugagccucuggaugugcagcaacggcucccugcagugccggaucugcaucuga

SEQ ID NO: 77896 - RNA, 1683 nt, Artificial Sequence; identical to SEQ ID NO: 74012
  derived and/or modified CDS sequence (opt1) from hemagglutinin__InfluenzaA__EPI439507

SEQ ID NO: 77897 - RNA, 1701 nt, Artificial Sequence
  derived and/or modified CDS sequence (opt1) from hemagglutinin__InfluenzaA__EPI482777
augaaggccauccuggugguccuccuguacaccuucaccacggccaacgcggacacccugugcaucggcuaccacgccaacaacagcaccgacaccguggacacggugcucgagaagaacgucaccgugacccacuccgugaaccugcuggagaaccgccacaacgggaagcucugcaagcugcggggcgucgcgccccugcaccucgggaagugcaacaucgccggcuggcugcuggggaacccggagugcgagagccucuccaccgccagcuccuggagcuacaucguggagacguccaacagcgacaacgggaccugcuaccccggcgacuucaucaacuacgaggagcugcgcgagcagcuguccagcguguccagcuucgagcgguucgagaucuuccccaagaccuccagcuggcccaaccacgacaccaaccgcggcgucacggccgccugcccgcacgccggcgccaacuccuucuaccggaaccucguguggcuggugaagaaggggaacagcuaccccaagaucaacaaguccuacaucaacaacaaggagaaggagguccuggugcucugggcgauccaccaccccagcaccuccgccgaccagcagagccuguaccagaacgccgacgccuacguguucgucggcagcucccgcuacagccggaaguucgagcccgagaucgccacccgcccgaaggugcgggaccaggcggggcgcaugaacuacuacuggacccugguggagcccggcgacaagaucacguucgaggccaccggcaaccucgucgcgccccgguacgccuucgcccugaagcgcaacuccgggagcggcaucaucaucuccgacaccagcgugcacgacugcgacaccacgugccagacccccaacggggccaucaacaccucccugccguuccagaacauccaccccgugaccaucggcgagugccccaaguacgucaagagcacgaagcuccggauggccaccggccugcgcaacauccccuccauccagagccgggggcuguucggcgccaucgccggguucaucgagggcggguggaccggcaugaucgacggcugguacggguaccaccaccagaacgagcagggcuccggguacgccgcggaccucaagagcacccagaacgccaucgacggcaucacgaacaaggugaacuccgugaucgagaagaugaacacccaguucaccgccgucgggaaggaguucagccaccuggagcgccggaucgagaaccugaacaagaagguggacgacggcuuccucgacaucuggaccuacaacgccgagcugcugguccuccuggagaacgagcgcacgcuggacuaccacgacuccaacgugaagaaccucuacgagaaggugcggagccagcugaagaacaacgccaaggagaucggcaacgggugcuucgaguucuaccacaagugcgacgacaugugcauggaguccgucaagaacggcaccuacgacuacccgaaguacagcgaggaggcgaagcugaaccgcgaggagaucgacggggugaagcucgaguccacccggaucuaccagauccuggccaucuacagcaccguggccagcucccugguccucguggugagccugggcgccaucuccuucuggaugugcagcaacgggucccugcagugccgcaucugcaucuga

SEQ ID NO: 77898 - RNA, 1701 nt, Artificial Sequence; identical to SEQ ID NO: 69608
  derived and/or modified CDS sequence (opt1) from hemagglutinin__InfluenzaA__EPI745532

SEQ ID NO: 77899 - RNA, 1701 nt, Artificial Sequence
  derived and/or modified CDS sequence (opt1) from hemagglutinin__InfluenzaA__EPI278594
augaaggccauccuggugguccuccuguacaccuucgccaccgcgaacgccgacacgcugugcaucggcuaccacgccaacaacagcaccgacaccguggacaccgugcucgagaagaacgucacggugacccacuccgugaaccugcuggaggacaagcacaacgggaagcucugcaagcugcgcggcgucgcgccccugcaccucgggaagugcaacaucgccggcuggauccuggggaacccggagugcgagagccuguccaccgccagcuccuggagcuacaucguggagaccuccagcuccgacaacggcacgugcuaccccggcgacuucaucgacuacgaggagcuccgggagcagcugagcuccgugagcuccuucgagcgcuucgagaucuuccccaagaccagcuccuggcccgaccacgagagcaacaagggggucaccgccgccugcccgcacgccggcgcgaaguccuucuacaagaaccugaucuggcucgugaagaaggggaacagcuaccccaagcuguccaagagcuacaucaacgacaagggcaaggaggugcugguccucugggggauccaccaccccagcaccuccgccgaccagcagagccuguaccagaacgccgacgccuacguguucgugggcacgucccgguacagcaagaaguucaagcccgagaucgccauccgcccgaagguccgggaccaggagggccgcaugaacuacuacuggacccugguggagcccggggacaagaucaccuucgaggcgaccggcaaccucguggucccccgguacgccuucgccauggagcgcaacgccggguccggcaucaucaucagcgacacgcccgugcacgacugcaacacgaccugccagaccccgaagggcgccaucaacaccucccugcccuuccagaacauccaccccaucaccaucgggaagugccccaaguacgucaagagcaccaagcugcggcucgcgaccggccugcgcaacgugccguccauccagagccgggggcuguucggcgccaucgccggguucaucgagggcggcuggacggggaugguggacggcugguacggguaccaccaccagaacgagcagggcuccggguacgccgccgaccucaagagcacccagaacgcgaucgacaagaucaccaacaaggugaacuccgucaucgagaagaugaacacccaguucacggccgugggcaaggaguucaaccaccuggagaagcgcaucgagaaccugaacaagaaggucgacgacggcuuccucgacaucuggaccuacaacgccgagcugcuggugcuccuggagaacgagcggacccuggacuaccacgacagcaacgugaagaaccucuacgagaagguccgcucccagcugaagaacaacgccaaggagaucgggaacggcugcuucgaguucuaccacaagugcgacaacacgugcauggagagcgugaagaacgggaccuacgacuaccccaaguacuccgaggaggccaagcugaaccgggaggagaucgacggcgugaagcucgagagcacccgcaucuaccagauccuggcgaucuacuccaccgucgccagcagccuggugcucguggucucccugggggccaucagcuucuggaugugcuccaacggcagccugcagugccggaucugcaucuga

SEQ ID NO: 77900 - RNA, 1701 nt, Artificial Sequence
  derived and/or modified CDS sequence (opt1) from hemagglutinin__InfluenzaA__AEE69009
augaaggccauccuggugguccuccuguacaccuucgccaccgcgaacgccgacacgcugugcaucggcuaccacgccaacaacagcaccgacaccguggacaccgugcucgagaagaacgucacggugacccacuccgugaaccugcuggaggacaagcacaacgggaagcucugcaagcugcgcggcgucgcgccccugcaccucgggaagugcaacaucgccggcuggauccuggggaacccggagugcgagagccuguccaccgcgagcuccuggagcuacaucguggagacccccuccagcgacaacggcacgugcuaccccggcgacuucaucgacuacgaggagcuccgggagcagcuguccagcguguccagcuucgagcgcuucgagaucuuccccaagaccuccagcuggccgaaccacgacuccaacaagggggucaccgccgccugcccccacgccggcgccaagagcuucuacaagaaccugaucuggcucgugaagaaggggaacuccuaccccaagcugagcaaguccuacaucaacgacaagggcaaggaggugcugguccucugggggauccaccacccgcccaccagcgccgaccagcagagccuguaccagaacgccgacacguacguguucgugggcuccagccgguacuccaagaaguucaagcccgagaucgccauccgccccaagguccgggaccaggagggccgcaugaacuacuacuggacccugguggagcccggggacaagaucaccuucgaggccaccggcaaccucguggucccgcgguacgcguucgccauggagcgcaacgccgggagcggcaucaucaucuccgacacgcccgugcacgacugcaacacgaccugccagacccccaagggcgccaucaacaccagccugcccuuccagaacauccacccgaucaccaucgggaagugccccaaguacgugaaguccaccaagcugcggcucgccaccggccugcgcaacauccccagcauccagucccgggggcuguucggcgcgaucgccggguucaucgagggcggcuggacggggauggucgacggcugguacggguaccaccaccagaacgagcagggcagcggguacgccgccgaccucaaguccacccagaacgccaucgacgagaucaccaacaaggugaacagcgugaucgagaagaugaacacccaguucacggcggucggcaaggaguucaaccaccuggagaagcgcaucgagaaccugaacaagaagguggacgacggcuuccucgacaucuggaccuacaacgccgagcugcugguccuccuggagaacgagcggacccuggacuaccacgacuccaacgugaagaaccucuacgagaaggugcgcagccagcugaagaacaacgccaaggagaucgggaacggcugcuucgaguucuaccacaagugcgacaacacgugcauggaguccgucaagaacgggaccuacgacuaccccaaguacagcgaggaggccaagcugaaccgggaggagaucgacggcgugaagcucgaguccacccgcaucuaccagauccuggccaucuacagcaccguggcguccagccugguccucguggugagccugggggccaucuccuucuggaugugcagcaacggcucccugcagugccggaucugcaucuga

SEQ ID NO: 77901 - RNA, 1701 nt, Artificial Sequence; identical to SEQ ID NO: 66975
  derived and/or modified CDS sequence (opt1) from hemagglutinin__InfluenzaA__GQ280797

SEQ ID NO: 77902 - RNA, 1701 nt, Artificial Sequence; identical to SEQ ID NO: 66708
  derived and/or modified CDS sequence (opt1) from hemagglutinin__InfluenzaA__EPI178457

SEQ ID NO: 77903 - RNA, 1701 nt, Artificial Sequence; identical to SEQ ID NO: 66708
  derived and/or modified CDS sequence (opt1) from hemagglutinin__InfluenzaA__EPI176470

SEQ ID NO: 77904 - RNA, 1701 nt, Artificial Sequence
  derived and/or modified CDS sequence (opt1) from hemagglutinin__InfluenzaA__EPI280341
augaaggccauccuggugguccuccugcacaccuucgccaccgcgaacgccgacacgcugugcaucggcuaccacgccaacaacagcaccgacaccguggacaccgugcucgagaagaacgucacggugacccacuccgugaaccugcuggaggacaagcacaacgggaagcucugcaagcugcgcggcgucgcgccccugcaccucgggaagugcaacaucgccggcuggauccuggggaacccggagugcgagagccuguccaccgccagcuccuggagcuacaucguggagaccuccagcuccgacaacggcacgugcuaccccggcaacuucaucgacuacgaggagcuccgggagcagcugagcuccgugagcuccuucgagcgcuucgagaucuuccccaagaccagcuccuggcccgaccacgacagcaacaagggggucaccgccgccugcccgcacgccggcgcgaaguccuucuacaagaaccugaucuggcucgugaagaaggggaacagcuaccccacccuguccaagagcuacaucaacgacaagggcaaggaggugcugguccucugggggauccaccaccccagcacguccgccgaccagcagagccuguaccagaacgccgacgccuacguguucgugggcaccucccgguacagcaagaaguucaagcccgagaucgccauccgcccgaagguccggaaccaggagggccgcaugaacuacuacuggacccugguggagcccggggacaagaucaccuucgaggcgacgggcaaccucguggcgccccgguacgccuucgccauggagcgcaacgccggguccggcaucaucaucagcgacacccccguccacgacugcaacacgaccugccagaccccgaagggcgccaucaacaccucccugcccuuccagaacauccaccccaucaccaucgggaagugccccaaguacgucaagagcaccaagcugcggcucgccacgggccugcgcaacgugccguccauccagagccgggggcuguucggcgccaucgccggguucaucgagggcggcuggaccgggaugguggacggcugguacggguaccaccaccagaacgagcagggcuccggguacgccgcggaccucaagagcacccagaacgccaucgacaagaucaccaacaaggugaacuccgugaucgagaagaugaacacgcaguucaccgccgucggcaaggaguucaaccaccuggagaagcgcaucgagaaccugaacaagaagguggacgacggcuuccucgacaucuggaccuacaacgccgagcugcugguccuccuggagaacgagcggacccuggacuaccacgacagcaacgugaagaaccucuacgagaaggugcgcucccagcugaagaacaacgccaaggagaucgggaacggcugcuucgaguucuaccacaagugcgacaacacgugcauggagagcgucaagaacgggaccuacgacuaccccaaguacuccgaggaggcgaagcugaaccgggaggagaucgacggcgugaagcucgagagcacccgcaucuaccagauccuggccaucuacuccaccguggccagcagccugguccucguggugucccugggggccaucagcuucuggaugugcuccaacggcagccugcagugccggaucugcaucuga

SEQ ID NO: 77905 - RNA, 1701 nt, Artificial Sequence
  derived and/or modified CDS sequence (opt1) from hemagglutinin__InfluenzaA__EPI240319
augaaggccauccuggugguccuccuguacaccuucgccaccgcgaacgccgacacgcugugcaucggcuaccacgccaacaacagcaccgacaccguggacaccgugcucgagaagaacgucacggugacccacuccgugaacauccuggaggacaagcacaacgggaagcugugcaagcuccgcggcgucgcgccccugcaccuggggaagugcaacaucgccggcuggauccucgggaacccggagugcgagagccuguccaccgccagcuccuggagcuacaucguggagaccuccagcuccgacaacggcacgugcuaccccggcgacuucaucgacuacgaggagcugcgggagcagcucagcuccgugagcuccuucgagcgcuucgagaucuuccccaagaccagcuccuggcccaaccacgacagcaacaagggggucaccgccgccugcccgcacgccggcgcgaaguccuucuacaagaaccugaucuggcuggugaagaaggggaacagcuaccccaagcucuccaagagcuacaucaacgacaagggcaaggaggugcugguccugugggggauccaccaccccagcaccuccgccgaccagcagagccucuaccagaacgccgacgccuacguguucgugggcuccagccgguacuccaagaaguucaagcccgagaucgccauccgcccgaagguccgggaccgcgagggccggaugaacuacuacuggacgcugguggagcccggggacaagaucaccuucgaggcgaccggcaaccugguggucccccgcuacgccuucgccauggagcggaacgccgggagcggcaucaucaucuccgacacccccgugcacgacugcaacacgaccugccagaccccgaagggcgccaucaacaccagccuccccuuccagaacauccaccccaucacgaucgggaagugccccaaguacgugaaguccaccaagcugcgccuggcgaccggccuccggaacgucccgagcauccagucccgcgggcuguucggcgccaucgccggguucaucgagggcggcuggaccgggaugguggacggcugguacggguaccaccaccagaacgagcagggcagcggguacgccgccgaccugaaguccacgcagaacgcgaucgacgagaucaccaacaaggugaacagcgucaucgagaagaugaacacccaguucaccgccgugggcaaggaguucaaccaccucgagaagcggaucgagaaccugaacaagaaggucgacgacggcuuccuggacaucuggacguacaacgccgagcuccuggugcugcucgagaacgagcgcacccuggacuaccacgacuccaacgugaagaaccuguacgagaagguccggagccagcucaagaacaacgccaaggagaucgggaacggcugcuucgaguucuaccacaagugcgacaacacgugcauggaguccgugaagaacgggaccuacgacuaccccaaguacagcgaggaggccaagcugaaccgcgaggagaucgacggcgugaagcuggaguccacccggaucuaccagauccucgcgaucuacagcaccgucgccagcucccuggugcugguggucagccucggggccaucuccuucuggaugugcagcaacggcucccugcagugccgcaucugcaucuga

SEQ ID NO: 77906 - RNA, 1701 nt, Artificial Sequence; identical to SEQ ID NO: 66873
  derived and/or modified CDS sequence (opt1) from hemagglutinin__InfluenzaA__EPI183134

SEQ ID NO: 77907 - RNA, 1701 nt, Artificial Sequence
  derived and/or modified CDS sequence (opt1) from hemagglutinin__InfluenzaA__EPI368693
augaaggccauccuggugguccuccuguacaccuucgccaccgcgaacgccgacacgcugugcaucggcuaccacgccaacaacagcaccgacaccguggacaccgugcucgagaagaacgucacggugacccacuccgugaacauccuggaggacaagcacaacgggaagcugugcaagcuccgcggcgucgcgccccugcaccuggggaagugcaacaucgccggcuggauccucgggaacccggagugcgagagccuguccaccgccagcuccuggagcuacaucguggagaccuccagcuccgacaacggcacgugcuaccccggcgacuucaucgacuacgaggagcugcgggagcagcucagcuccgugagcuccuucgagcgcuucgagaucuuccccaagaccagcuccuggcccaaccacgacagcaacaagggggucaccgccuccugcccgcacgccggcgccaagagcuucuacaagaaccugaucuggcuggugaagaaggggaacuccuaccccaagcucagcaagagcuacaucaacgacaagggcaaggaggugcugguccugugggggauccaccaccccuccaccagcgcggaccagcagucccucuaccagaacgccgacgccuacguguucgugggcagcucccgguacagcaagaaguucaagcccgagaucgccauccgcccgaagguccggggccaggaggggcgcaugaacuacuacuggacgcugguggagcccggcgacaagaucaccuucgaggccaccgggaaccugguggucccccgguacgcguucgccauggagcgcaacgccggcuccggcaucaucaucagcgacacccccgugcacgacugcaacacgaccugccagaccccgaagggggccaucaacaccucccuccccuuccagaacauccaccccaucacgaucggcaagugccccaaguacgucaagagcaccaagcugcggcuggccaccgggcuccgcaacgugccguccauccagagccggggccuguucggggcgaucgccggcuucaucgagggcggguggaccggcaugguggacgggugguacggcuaccaccaccagaacgagcagggguccggcuacgccgccgaccucaagagcacgcagaacgccaucgacgagaucaccaacaaggugaacuccgucaucgagaagaugaacacccaguucaccgcggugggcaaggaguucaaccaccuggagaagcgcaucgagaaccugaacaagaaggucgacgacggguuccuggacaucuggacguacaacgccgagcuccuggugcugcucgagaacgagcggacccuggacuaccacgacagcaacgugaagaaccuguacgagaagguccgcucccagcucaagaacaacgccaaggagaucggcaacgggugcuucgaguucuaccacaagugcgacaacacgugcauggagagcgugaagaacggcaccuacgacuaccccaaguacuccgaggaggccaagcugaaccgggaggagaucgacggggugaagcuggagagcacccgcaucuaccagauccucgccaucuacagcaccgucgcguccagccuggugcugguggucucccucggcgccaucagcuucuggaugugcuccaacggcagccugcagugccggaucugcaucuga

SEQ ID NO: 77908 - RNA, 1701 nt, Artificial Sequence
  derived and/or modified CDS sequence (opt1) from hemagglutinin__InfluenzaA__EPI291788
augaaggccauccuggugguccuccuguacaccuucaccacggccaacgcggacacccugugcaucggcuaccacgccaacaacagcaccgacaccguggacacggugcucgagaagaacgucaccgugacccacuccgugaaccugcuggagaaccgccacaacgggaagcucugcaagcugcggggcgucgcgccccugcaccucgggaagugcaacaucgccggcuggcugcuggggaacccggagugcgagagccucuccaccgccagcuccuggagcuacaucguggagacguccaacagcgacaacgggaccugcuaccccggcgacuucaucaacuacgaggagcugcgcgagcagcuguccagcguguccagcuucgagcgguucgagaucuuccccaagaccuccagcuggcccaaccacgacaccaaccgcggcgucacggccgccugcccgcacgccggcaccaacuccuucuaccggaaccucaucuggcuggugaagaaggggaacagcuaccccaagaucaacaaguccuacaucaacaacaaggagaaggaggugcugguccucugggccauccaccaccccagcaccuccgcggaccagcagagccuguaccagaacgccgacgccuacguguucgugggcagcucccgcuacagccggaaguucgagcccgagaucgccacccgcccgaagguccgggaccaggccgggcgcaugaacuacuacuggacgcugguggagcccggcgacaagaucaccuucgaggcgaccggcaaccucguggucccccgguacgccuucgcccugaagcgcaacuccgggagcggcaucaucaucuccgacaccagcgugcacgacugcgacacgaccugccagacccccaacggggccaucaacaccucccugccguuccagaacauccaccccgugacgaucggcgagugccccaaguacgucaagagcaccaagcuccggauggccaccggccugcgcaacauccccuccauccagagccgggggcuguucggcgcgaucgccggguucaucgagggcggguggaccggcaugaucgacggcugguacggguaccaccaccagaacgagcagggcuccggguacgccgccgaccucaagagcacgcagaacgccaucgacggcaucaccaacaaggugaacuccgugaucgagaagaugaacacccaguucaccgcggucgggaaggaguucagccaccuggagcgccggaucgagaaccugaacaagaagguggacgacggcuuccucgacaucuggacguacaacgccgagcugcugguccuccuggagaacgagcgcacccuggacuaccacgacuccaacgugaagaaccucuacgagaaggugcggagccagcugaagaacaacgccaaggagaucggcaacgggugcuucgaguucuaccacaagugcgacgacacgugcauggaguccgucaagaacggcaccuacgacuacccgaaguacagcgaggaggccaagcugaaccgcgaggagaucgacggggugaagcucgaguccacccggaucuaccagauccuggccaucuacagcaccguggcgagcucccugguccucguggugagccugggcgccaucuccuucuggaugugcagcaacgggucccugcagugccgcaucugcaucuga

SEQ ID NO: 77909 - RNA, 1701 nt, Artificial Sequence
  derived and/or modified CDS sequence (opt1) from hemagglutinin__InfluenzaA__EPI482788
augaaggccauccuggugguccuccuguacaccuucaccacggccaacgcggacacccugugcaucggcuaccacgccaacaacagcaccgacaccguggacacggugcucgagaagaacgucaccgugacccacuccgugaaccugcuggagaaccgccacaacgggaagcucugcaagcugcggggcgucgcgccccugcaccucgggaagugcaacaucgccggcuggcugcuggggaacccggagugcgagagccucuccaccgccagcuccuggagcuacaucguggagacguccaacagcgacaacgggaccugcuaccccggcgacuucaucaacuacgaggagcugcgcgagcagcuguccagcguguccagcuucgagcgguucgagaucuuccccaagaccuccagcuggcccaaccacgacaccaaccgcggcgucacggccgccugcccgcacgccggcaccaacuccuucuaccggaaccucaucuggcuggugaagaaggggaacagcuaccccaagaucaacaaguccuacaucaacaacaaggagaaggaggugcugguccucugggccauccaccaccccagcaccuccgcggaccagcagagcaucuaccagaacgccgacgccuacguguucgugggcagcucccgcuacagccggaaguucgagcccgagaucgccacccgcccgaagguccgggaccaggccgggcgcaugaacuacuacuggacgcugguggagcccggcgacaagaucaccuucgaggcgaccggcaaccugguggucccccgguacgccuucgcccucaagcgcaacuccgggagcggcaucaucaucuccgacaccagcgugcacgacugcgacacgaccugccagacccccaacggggccaucaacaccucccugccguuccagaacauccaccccgugacgaucggcgagugccccaaguacgucaagagcaccaagcugcggauggccaccggccuccgcaacauccccuccauccagagccgggggcuguucggcgcgaucgccggguucaucgagggcggguggaccggcaugaucgacggcugguacggguaccaccaccagaacgagcagggcuccggguacgccgccgaccucaagagcacgcagaacgccaucgacggcaucaccaacaaggugaacuccgugaucgagaagaugaacacccaguucaccgcggucgggaaggaguucagccaccuggagcgccggaucgagaaccugaacaagaagguggacgacggcuuccuggacaucuggacguacaacgccgagcuccugguccugcucgagaacgagcgcacccuggacuaccacgacuccaacgugaagaaccuguacgagaaggugcggagccagcucaagaacaacgccaaggagaucggcaacgggugcuucgaguucuaccacaagugcgacgacacgugcauggaguccgucaagaacggcaccuacgacuacccgaaguacagcgaggaggccaagcugaaccgcgaggagaucgacggggugaagcuggaguccacccggaucuaccagauccucgccaucuacagcaccguggcgagcucccugguccugguggugagccucggcgccaucuccuucuggaugugcagcaacgggucccugcagugccgcaucugcaucuga

SEQ ID NO: 77910 - RNA, 1701 nt, Artificial Sequence
  derived and/or modified CDS sequence (opt1) from hemagglutinin__InfluenzaA__EPI178946/m1
augaaggccaucaucgugguccugcucuacaccuucgccaccgcggacgccgacacgcugugcaucggcuaccacgccaacaacagcaccgacaccguggacaccgugcuggagaagaacgucacggugacccacuccgugaaccuccuggagaacaagcacgacgggaagcugugcaagcuccgcggcgucgcgccccugcaccuggggaagugcaacaucgccggcuggcuccuggggaacccggagugcgagagccuguucaccgccuccagcugguccuacaucguggagacccccaacagcgacaacggcacgugcuaccccggcgacuucaucaacuacgaggagcuccgggagcaccuguccagcguguccagcuucgagcgcuucgagaucuuccccaaggccaacuccuggccgaaccacgacaccaacaagggggucaccgccgccugccccuacgcgggcgccaacagcuucuaccggaaccugaucuggcucgugaagaaggggaacuccuaccccaagcugagcaaguccuacaucaacaacaagaagaaggaggugcuggucaucuggggcauccaccacccgcccaccagcacggaccagcagacccucuaccagaacgccgacgccuacguguucgugggguccagcaaguacuccaagcgcuucaagcccgagaucgccgcgcggcccaagguccgcaaccaggccggccggaugaacuacuacuggacccugaucgagcccggcgacaccaucacguucgaggccaccgggaaccugguggugccgcgcuacgccuucgccaugaagcggggcagcgggagcggcaucaucgucuccgacgcgcccgugcacgacugcaacacgaccugccagacccccaagggcgccaucaacaccagccuccccuuccagaacauccacccggugaccaucggggagugccccaaguacgucaaguccaccaagcugcgcauggccacgggccugcggaacauccccagcauccagucccgcggccucuucggggccaucgccggguuccuggagggcggcuggaccgggaugaucgacggcugguacggguaccaccaccagaacgagcagggcagcggguacgcggccgaccagaaguccacccagaacgccaucgacggcaucaccaacaaggugaacagcaucaucgagaagaugaacacgcaguucaccgccgugggcaaggaguucaaccagcuggagaagcggaucgagucccucaacaacaaggucgacgacggguuccuggacaucuggaccuacaacgccgagaugcuggugcuccuggagaacgagcgcacccuggacuaccacgacagcaacgucaagaaccucuacgagaaggugcggucccagcugaagaacaacgcgaaggagaucggcaacgggugcuucgaguucuaccacaagugcgacaacacgugcauggagagcgugaagaacggcaccuacgacuaccccaaguacuccgaggaggccaagcugaaccgcgaggagaucgacggggucaagcucgagagcgcccggaucuaccagauccuggccaucuacuccaccguggcgagcucccuggugcuccuggucagccugggcgccguguccuucuggaugugcagcaacggcagccuccagugccgcaucugcaucuga

SEQ ID NO: 77911 - RNA, 1701 nt, Artificial Sequence
  derived and/or modified CDS sequence (opt1) from hemagglutinin__InfluenzaA__EPI482791/m2
augaaggccaucaucgugguccugcucuacaccuucgccaccgcggacgccgacacgcugugcaucggcuaccacgccaacaacagcaccgacaccguggacaccgugcuggagaagaacgucacggugacccacuccgugaaccuccuggagaacaagcacgacgggaagcugugcaagcuccgcggcgucgcgccccugcaccuggggaagugcaacaucgccggcuggcuccuggggaacccggagugcgagagccuguucaccgccuccagcugguccuacaucguggagacccccaacagcgacaacggcacgugcuaccccggcgacuucaucaacuacgaggagcuccgggagcaccuguccagcguguccagcuucgagcgcuucgagaucuuccccaaggccaacuccuggccgaaccacgagaccaacaagggggucaccgccgccugccccuacgcgggcgccaacagcuucuaccggaaccugaucuggcucgugaagaaggggaacuccuaccccaagcugagcaaguccuacaucaacaacaagaagaaggaggugcuggucaucuggggcauccaccacccgcccaccagcacggaccagcagacccucuaccagaacgccgacgccuacguguucgugggguccagcaaguacuccaagcgcuucaagcccgagaucgccgcgcggcccaagguccgcaaccaggccggccggaugaacuacuacuggacccugaucgagcccggcgacaccaucacguucgaggccaccgggaaccugguggugccgcgcuacgccuucgccaugaagcggggcagcgggagcggcaucaucgucuccgacgcgcccgugcacgacugcaacacgaccugccagacccccaagggcgccaucaacaccagccuccccuuccagaacauccacccggugaccaucggggagugccccaaguacgucaaguccaccaagcugcgcauggccacgggccugcggaacauccccagcauccagucccgcggccucuucggggccaucgccggguuccuggagggcggcuggaccgggaugaucgacggcugguacggguaccaccaccagaacgagcagggcagcggguacgcggccgaccagaaguccacccagaacgccaucgacggcaucaccaacaaggugaacagcaucaucgagaagaugaacacgcaguucaccgccgugggcaaggaguucaaccagcuggagaagcggaucgagucccucaacaacaaggucgacgacggguuccuggacaucuggaccuacaacgccgagaugcuggugcuccuggagaacgagcgcacccuggacuaccacgacagcaacgucaagaaccucuacgagaaggugcggucccagcugaagaacaacgcgaaggagaucggcaacgggugcuucgaguucuaccacaagugcgacaacacgugcauggagagcgugaagaacggcaccuacgacuaccccaaguacuccgaggaggccaagcugaaccgcgaggagaucgacggggucaagcucgagagcgcccggaucuaccagauccuggccaucuacuccaccguggcgagcucccuggugcuccuggucagccugggcgccguguccuucuggaugugcagcaacggcagccuccagugccgcaucugcaucuga

SEQ ID NO: 77912 - RNA, 1701 nt, Artificial Sequence
  derived and/or modified CDS sequence (opt1) from hemagglutinin__InfluenzaA__EPI291799
augaaggccauccuggugguccuccuguacaccuucaccacggccaacgcggacacccugugcaucggcuaccacgccaacaacagcaccgacaccguggacacggugcucgagaagaacgucaccgugacccacuccgugaaccugcuggagaaccgccacaacgggaagcucugcaagcugcggggcgucgcgccccugcaccucgggaagugcaacaucgccggcuggcugcuggggaacccggagugcgagagccucuccaccgccagcuccuggagcuacaucguggagacguccaacagcgacaacgggaccugcuaccccggcgacuucaucaacuacgaggagcugcgcgagcagcuguccagcguguccagcuucgagcgguucgagaucuuccccaagaccuccagcuggcccaaccacgacaccaaccgcggcgucacggccgccugcccgcacgccggcaccaacuccuucuaccggaaccucaucuggcuggugaagaaggggaacagcuaccccaagaucaacaaguccuacaucaacaacaaggagaaggaggugcugguccucugggccauccaccaccccagcaccuccgcggaccagcagagccuguaccagaacgccgacgccuacguguucgugggcagcucccgcuacagccggaaguucgagcccgagaucgccacccgcccgaagguccgggaccaggccgggcgcaugaacuacuacuggacgcugguggagcccggcgacaagaucaccuucgaggcgaccggcaaccucguggucccccgguacgccuucgcccugaagcgcaccuccgggagcggcaucaucaucuccgacacgagcgugcacgacugcgacacgaccugccagacccccaacggggccaucaacaccucccugccguuccagaacauccaccccgugaccaucggcgagugccccaaguacgucaagagcaccaagcuccggauggccaccggccugcgcaacauccccuccauccagagccgggggcuguucggcgcgaucgccggguucaucgagggcggguggacgggcaugaucgacggcugguacggguaccaccaccagaacgagcagggcuccggguacgccgccgaccucaagagcacccagaacgccaucgacggcaucaccaacaaggugaacuccgugaucgagaagaugaacacccaguucacggcggucgggaaggaguucagccaccuggagcgccggaucgagaaccugaacaagaagguggacgacggcuuccucgacaucuggaccuacaacgccgagcugcugguccuccuggagaacgagcgcacccuggacuaccacgacuccaacgugaagaaccucuacgagaaggugcggagccagcugaagaacaacgccaaggagaucggcaacgggugcuucgaguucuaccacaagugcgacgacacgugcauggaguccgucaagaacggcaccuacgacuacccgaaguacagcgaggaggccaagcugaaccgcgaggagaucgacggggugaagcucgaguccacccggaucuaccagauccuggccaucuacagcaccguggcgagcucccugguccucguggugagccugggcgccaucuccuucuggaugugcagcaacgggucccugcagugccgcaucugcaucuga

SEQ ID NO: 77913 - RNA, 1701 nt, Artificial Sequence
  derived and/or modified CDS sequence (opt1) from hemagglutinin__InfluenzaA__EPI482799
augaaggccauccuggugguccuccuguacaccuucaccacggccaacgcggacacccugugcaucggcuaccacgccaacaacagcaccgacaccguggacacggugcucgagaagaacgucaccgugacccacuccgugaaccugcuggagaaccgccacaacgggaagcucugcaagcugcggggcgucgcgccccugcaccucgggaagugcaacaucgccggcuggcugcuggggaacccggagugcgagagccucuccaccgccagcuccuggagcuacaucguggagacguccaacagcgacaacgggaccugcuaccccggcgacuucaucaacuacgaggagcugcgcgagcagcuguccagcguguccagcuucgagcgguucgagaucuuccccaagaccuccagcuggcccaaccacgagaccaaccgcggcgucacggccgccugcccgcacgccggcaccaacuccuucuaccggaaccucaucuggcuggugaagaaggggaacagcuaccccaagaucaacaaguccuacaucaacaacaaggagaaggaggugcugguccucugggccauccaccaccccagcaccuccgcggaccagcagagccuguaccagaacgccgacgccuacguguucgugggcagcucccgcuacagccggaaguucgagcccgagaucgccacccgcccgaagguccgggaccaggccgggcgcaugaacuacuacuggacgcugguggagcccggcgacaagaucaccuucgaggcgaccggcaaccucguggucccccgguacgccuucgcccugaagcgcaccuccgggagcggcaucaucaucuccgacacgagcgugcacgacugcgacacgaccugccagacccccaacggggccaucaacaccucccugccguuccagaacauccaccccgugaccaucggcgagugccccaaguacgucaagagcaccaagcuccggauggccaccggccugcgcaacauccccuccauccagagccgggggcuguucggcgcgaucgccggguucaucgagggcggguggacgggcaugaucgacggcugguacggguaccaccaccagaacgagcagggcuccggguacgccgccgaccucaagagcacccagaacgccaucgacggcaucaccaacaaggugaacuccgugaucgagaagaugaacacccaguucacggcggucgggaaggaguucagccaccuggagcgccggaucgagaaccugaacaagaagguggacgacggcuuccucgacaucuggaccuacaacgccgagcugcugguccuccuggagaacgagcgcacccuggacuaccacgacuccaacgugaagaaccucuacgagaaggugcggagccagcugaagaacaacgccaaggagaucggcaacgggugcuucgaguucuaccacaagugcgacgacacgugcauggaguccgucaagaacggcaccuacgacuacccgaaguacagcgaggaggccaagcugaaccgcgaggagaucgacggggugaagcucgaguccacccggaucuaccagauccuggccaucuacagcaccguggcgagcucccugguccucguggugagccugggcgccaucuccuucuggaugugcagcaacgggucccugcagugccgcaucugcaucuga

SEQ ID NO: 77914 - RNA, 1701 nt, Artificial Sequence
  derived and/or modified CDS sequence (opt1) from hemagglutinin__InfluenzaA__EPI291807
augaaggccaucaucgugguccugcucuacaccuucgccaccgcggacgccgacacgcugugcaucggcuaccacgccaacaacagcaccgacaccguggacaccgugcuggagaagaacgucacggugacccacuccgugaaccuccuggagaacaagcacgacgggaagcugugcaagcuccgcggcgucgcgccccugcaccuggggaagugcaacaucgccggcuggcuccuggggaacccggagugcgagagccuguucgccgccuccagcugguccuacaucguggagacccccaacagcgacaacgggaccugcuaccccggcgacuucaucaacuacgaggagcuccgggagcaccuguccagcguguccagcuucgagcgcuucgagaucuuccccaaggccaacuccuggccgaaccacgacacgaacaagggggucaccgccgcgugccccuacgccggcgccaacagcuucuaccggaaccugaucuggcucgugaagaaggggaacuccuaccccaagcugagcaaguccuacaucaacaacaagaagaaggaggugcuggucaucuggggcauccaccacccgcccaccagcaccgaccagcagacgcucuaccagaacgccgacgccuacguguucgugggguccagcaaguacuccaagcgcuucaagcccgagaucgcggcccggcccaagguccgcgaccaggccggccggauggacuacuacuggacccugaucgagcccggcgacaccaucaccuucgaggccacggggaaccugguggugccgcgcuacgccuucgcgaugaagcggggcagcgggagcggcaucaucgucuccgacgcccccgugcacgacugcaacacgaccugccagacccccaagggcgccaucaacaccagccuccccuuccagaacauccacccggugaccaucggggagugccccaaguacgucaaguccaccaagcugcgcauggccaccggccugcggaacauccccagcauccagucccgcggccucuucggcgccaucgcgggguucaucgagggcggcuggacggggaugaucgacggcugguacggguaccaccaccagaacgagcagggcagcggguacgccgccgaccagaaguccacccagaacgccaucgacggcaucaccaacaaggugaacagcaucaucgagaagaugaacacccaguucacggccgugggcaaggaguucucccagcuggagaagcggaucgagagccugaacaacaaggucgacgacggguuccucgacaucuggaccuacaacgcggagcugcuggugcuccuggagaacgagcgcacccuggacuaccacgacuccaacgucaagaaccucuacgagaaggugcggagccagcugaagaacaacgccaaggagaucggcaacgggugcuucgaguucuaccacaagugcgacaacacgugcauggaguccgugaagaacggcaccuacgacuaccccaaguacagcgaggaggccaagcugaaccgcgaggagaucgacggggucaagcucgaguccgcccggaucuaccagauccuggcgaucuacagcaccguggccuccagccuggugcuccuggucucccugggcgccgugagcuucuggaugugcagcaacggcucccuccagugccgcaucugcaucuga

SEQ ID NO: 77915 - RNA, 1701 nt, Artificial Sequence
  derived and/or modified CDS sequence (opt1) from hemagglutinin__InfluenzaA__EPI638970
augaaggccauccuggugguccuccuguacaccuucaccacggccaacgcggacacccugugcaucggcuaccacgccaacaacagcaccgacaccguggacacggugcucgagaagaacgucaccgugacccacuccgugaaccugcuggagaaccgccacaacgggaagcucugcaagcugcggggcgucgcgccccugcaccucgggaagugcaacaucgccggcuggauccuggggaacccggagugcgagagccuguccaccgccagcuccuggagcuacaucguggagacguccaacagcgagaacgggaccugcuaccccggcgacuucaucaacuacgaggagcuccgcgagcagcuguccagcguguccagcuucgagcgguucgagaucuuccccaagaccuccagcuggcccaaccacgacaccaacaagggcgucacggccgccugcccgcacuccggcaccaacagcuucuaccgcaaccugguguggcucgugcagaaggggaacuccuaccccaagaucaacaagagcuacaucaacaacaaggagaacgagguccuggugcugugggccauccaccaccccuccaccagcgccgaccagcagagccucuacaagaacgcggacgccuacguguucgucggcuccagccgguacucccgcaaguucgagcccgagaucgccacccggccgaaggugcgcgaccaggccgggcggaugaacuacuacuggacgcugguggagcccggcgacaagaucaccuucgaggccaccggcaaccuggucgcgccccgcuacgccuucacccucaagcggaacagcggguccggcaucaucaucagcgacacguccgugcacgacugcgacacgaccugccagacccccaacggggccaucaacaccagccugccguuccagaacauccaccccgugaccaucggcgagugccccaaguacgucaaguccaccaagcugcgcauggccaccggccuccggaacauccccagcauccagucccgcgggcuguucggcgccaucgcgggguucaucgagggcggguggacgggcaugaucgacggcugguacggguaccaccaccagaacgagcagggcagcggguacgccgccgaccugaaguccacccagaacgccaucgacggcaucaccaacaaggugaacagcgugaucgagaagaugaacacccaguucacggccgucgggaaggaguucucccaccucgagcggcgcaucgagaaccugaacaagaagguggacgacggcuuccuggacaucuggaccuacaacgcggagcuccugguccugcucgagaacgagcggacccuggacuaccacgacagcaacgugaagaaccuguacgagaaggugcgcucccagcucaagaacaacgccaaggagaucggcaacgggugcuucgaguucuaccacaagugcgacgacaugugcauggagagcgucaagaacggcaccuacgacuacccgaaguacuccgaggaggccaagcugaaccgggaggagaucgacggggugaagcuggagagcacgaagaucuaccagauccucgccaucuacagcaccguggccuccagccugguccugguggugucccucggcgcgaucagcuucuggaugugcuccaacgggagccugcagugccgcaucugcaucuga

SEQ ID NO: 77916 - RNA, 1701 nt, Artificial Sequence
  derived and/or modified CDS sequence (opt1) from hemagglutinin__InfluenzaA__ABI19015
augaaggccaucaucgugguccugcucuacaccuucgccaccgcggacgccgacacgcugugcaucggcuaccacgccaacaacagcaccgacaccguggacaccgugcuggagaagaacgucacggugacccacuccgugaaccuccuggagaacaagcacgacgggaagcugugcaagcuccgcggcaucgcgccccugcaccuggggaagugcaacaucgccggcuggauccucgggaacccggagugcgagagccuguucaccaccuccagcugguccuacaucgucgagacgcccaacagcgacaacgggaccugcuaccccggcgacuucaucaacuacgaggagcugcgggagcaccucuccagcguguccagcuucgagcgcuucgagaucuuccccaaggccaacuccuggccguaccacgacaccaacaagggcgugaccgccgccugccccuacgccggcgcgaacagcuucuaccggaaccugaucuggcuggucaagaaggggaacuccuaccccaagcucagcaaguccuacaucaacaacaagaagaaggaggugcuggugaucuggggcauccaccacccgcccacgagcaccgaccagcagacccuguaccagaacgccgacgccuacgucuucgugggguccagcaaguacuccaagcgcuucaagcccgagaucgccgcccggcccaaggugcgcgaccaggcgggccggauggacuacuacuggacccucaucgagcccggcgacacgaucaccuucgaggccaccgggaaccuggucgugccgcgcuacgccuucaccaugaagcggggcagcgggagcggcaucaucguguccgacgcccccguccacgacugcaacacgaccugccagacccccaagggcgccaucaacaccagccugcccuuccagaacauccacccggugacgaucggggagugccccaaguacgugaaguccaccaagcuccgcauggcgaccggccugcggaacauccccagcauccagucccgcgggcuguucggcgccaucgccggguucaucgagggcggcuggaccgggaugaucgacggcugguacggguaccaccaccagaacgagcagggcagcggguacgccgccgaccagaaguccacgcagaacgcgaucgacggcaucaccaacaaggucaacagcaucaucgagaagaugaacacccaguucaccgccgugggcaaggaguucucccagcucgagaagcggaucgagagccugaacaacaagguggacgacggguuccuggacaucuggacguacaacgccgagcuccugguccugcucgagaacgagcgcacccuggacuaccacgacuccaacgugaagaaccuguacgagaagguccggagccagcucaagaacaacgccaaggagaucggcaacgggugcuucgaguucuaccacaagugcgacgacacgugcauggaguccgugaagaacggcaccuacgacuaccccaaguacagcgaggaggccaagcugaaccgccaggagaucgacggggugaagcuggaguccgcgcggaucuaccagauccucgccaucuacagcaccgucgccuccagccuggugcugcucgugucccugggcgccgucagcuucuggaugugcagcaacggcucccugcagugccgcaucugcaucuga

SEQ ID NO: 77917 - RNA, 1701 nt, Artificial Sequence
  derived and/or modified CDS sequence (opt1) from hemagglutinin__InfluenzaA__EPI687790
augaaggccauccuggugguccuccuguacaccuucaccacggccaacgcggacacccugugcaucggcuaccacgccaacaacagcaccgacaccguggacacggugcucgagaagaacgucaccgugacccacuccgugaaccugcuggaggacaagcacaacgggaagcucugcaagcugggcggggucgcgccccugcaccucggcaagugcaacaucgccggguggauccugggcaacccggagugcgagagccuguccaccgccagcuccuggagcuacaucguggagacguccaacagcgacaacgggaccugcuaccccggcgacuucaucaacuacgaggagcuccgcgagcagcuguccagcguguccagcuucgagcgguucgagaucuuccccaagaccuccagcuggcccaaccacgacuccaacaagggcgucaccgccgccugcccgcacgccggggccaagagcuucuacaagaaccugaucuggcucgugaagaagggcaacuccuaccccaagcugaaccagagcuacaucaacgacaaggggaaggaggugcugguccucuggggcauccaccaccccuccacgaccgcggaccagcagagccuguaccagaacgccgacgccuacguguucgugggcaccagccgcuacuccaagaaguucaagcccgagaucgccacccggccgaagguccgcgaccaggaggggcggaugaacuacuacuggacgcugguggagcccggcgacaagaucaccuucgaggccaccgggaaccucguggucccccgcuacgcguucaccauggagcggaacgccggcagcggcaucaucaucuccgacacgcccgugcacgacugcaacacgaccugccagaccccggagggggccaucaacaccagccugcccuuccagaacauccaccccaucaccaucggcaagugccccaaguacgugaaguccaccaagcugcgccucgccaccgggcugcggaacgucccgagcauccagucccgcggccuguucggggccaucgcgggcuucaucgagggcggguggacgggcaugguggacgggugguacggcuaccaccaccagaacgagcaggggagcggcuacgccgccgaccucaaguccacccagaacgccaucgacaagaucaccaacaaggugaacagcgucaucgagaagaugaacacccaguucacggccgugggcaaggaguucaaccaccuggagaagcggaucgagaaccugaacaagaaggucgacgacggguuccucgacaucuggaccuacaacgcggagcugcuggugcuccuggagaacgagcgcacccuggacuaccacgacuccaacgugaagaaccucuacgagaagguccggaaccagcugaagaacaacgccaaggagaucggcaacgggugcuucgaguucuaccacaagugcgacaacacgugcauggagagcgugaagaacggcaccuacgacuaccccaaguacuccgaggaggccaagcugaaccgcgagaagaucgacggggugaagcucgagagcacccggaucuaccagauccuggccaucuacuccaccgucgccagcucccuggugcucguggucagccugggcgcgaucuccuucuggaugugcagcaacggcagccugcagugccgcaucugcaucuga

SEQ ID NO: 77918 - RNA, 1701 nt, Artificial Sequence
  derived and/or modified CDS sequence (opt1) from hemagglutinin__InfluenzaA__EPI841265
augaaggccauccuggugguccuccuguacaccuucaccacggccaacgcggacacccugugcaucggcuaccacgccaacaacagcaccgacaccguggacacggugcucgagaagaacgucaccgugacccacuccgugaaccugcuggaggacaagcacaacgggaagcucugcaagcugggcggggucgcgccccugcaccucggcaagugcaacaucgccggguggauccugggcaacccggagugcgagagccuguccaccgccagcuccuggagcuacaucguggagacguccaacagcgacaacgggaccugcuaccccggcgacuucaucaacuacgaggagcuccgcgagcagcuguccagcguguccagcuucgagcgguucgagaucuuccccaagaccuccagcuggcccaaccacgacuccaacaagggcgucaccgccgccugcccgcacgccggggccaagagcuucuacaagaaccugaucuggcucgugaagaagggcaacuccuaccccaagcugaaccagagcuacaucaacgacaaggggaaggaggugcugguccucuggggcauccaccaccccuccacgaccgcggaccagcagagcaucuaccagaacgccgacgccuacguguucgugggcaccagccgcuacuccaagaaguucaagcccgagaucgccacccggccgaagguccgcgaccaggaggggcggaucaacuacuacuggacgcugguggagcccggcgacaagaucaccuucgaggccaccgggaaccugguggucccccgcuacgcguucaccauggagcggaacgccggcagcggcaucaucaucuccaacacgcccgugcacgacugcaacacgaccugccagaccccggagggggccaucaacaccagccuccccuuccagaacauccaccccaucaccaucggcaagugccccaaguacgugaaguccaccaagcugcgccuggccaccgggcuccggaacgucccgagcauccagucccgcggccuguucggggccaucgcgggcuucaucgagggcggguggacgggcaugguggacgggugguacggcuaccaccaccagaacgagcaggggagcggcuacgccgccgaccugaaguccacccagaacgccaucgacaagaucaccaacaaggugaacagcgucaucgagaagaugaacacccaguucacggccgugggcaaggaguucaaccaccucgagaagcggaucgagaaccugaacaagaaggucgacgacggguuccuggacaucuggaccuacaacgcggagcuccuggugcugcucgagaacgagcgcacccuggacuaccacgacuccaacgugaagaaccuguacgagaagguccggaaccagcucaagaacaacgccaaggagaucggcaacgggugcuucgaguucuaccacaagugcgacaacacgugcauggagagcgugaagaacggcaccuacgacuaccccaaguacuccgaggaggccaagcugaaccgcgagaagaucgacggggugaagcuggagagcacccggaucuaccagauccucgccaucuacuccaccgucgccagcucccuggugcugguggucagccucggcgcgaucuccuucuggaugugcagcaacggcagccugcagugccgcaucugcaucuga

SEQ ID NO: 77919 - RNA, 1701 nt, Artificial Sequence
  derived and/or modified CDS sequence (opt1) from hemagglutinin__InfluenzaA__EPI291846
augaaggccaucaucgugguccugcucuacaccuucgccaccgcggacgccgacacgcugugcaucggcuaccacgccaacaacagcaccgacaccguggacaccgugcuggagaagaacgucacggugacccacuccgugaaccuccuggagaacaagcacgacgggaagcugugcaaccucaagggcgucgcgccccugcaccuggggaagugcaacaucgccggcuggcuccuggggaacccggagugcgagagccuguucaccgccuccagcugguccuacaucguggagacccccaacagcgacaacggcacgugcuaccccggcgacuucaucaacuacgaggagcuccgcgagcaccuguccagcguguccagcuucgagcgguucgagaucuuccccaaggucaacuccuggccgaaccacgacaccaacaagggggugaccgccgccugccccuacgccggcgcgaacagcuucuaccgcaaccugaucuggcucgugaagaaggggaacuccuaccccaagcugagcaaguccuacaucaacaacaagaagaaggagguccuggugaucuggggcauccaccacccgcccaccagcacggaccagcagacccucuaccagaacgccgacgccuacguguucgucggguccagcaaguacuccaagcgguucgagcccgagaucgccgcccgccccaaggugcggaaccaggcgggccgcaugaacuacuacuggacccugaucgagcccggcgacaccaucacguucgaggccaccgggaaccugguggucccgcgguacgccuucgccaugcgccggggcagcgggagcggcaucaucguguccgacgcccccgugcacgacugcaacacgaccugccagacccccaagggcgcgaucaacaccagccuccccuuccagaacauccacccggucaccaucggggagugccccaaguacgugaaguccaccaagcugcgcauggccacgggccugcggaacauccccagcauccagucccgcggccucuucggggccaucgccggguuccuggagggcggcuggaccgggaugaucgacggcugguacggguaccaccaccagaacgagcagggcagcggguacgccgcggaccagaaguccacccagaacgccaucgacggcaucaccaacaaggugaacagcaucaucgagaagaugaacacgcaguucaccgccgucggcaaggaguucucccagcuggagaagcggaucgagagccucaacaacaagguggacgacggguuccuggacaucuggaccuacaacgccgagaugcugguccuccuggagaacgagcgcacccuggacuaccacgacuccaacgugaagaaccucuacgagaaggugcggagccagcugaagaacaacgccaaggagaucggcaacgggugcuucgaguucuaccacaagugcgacaacacgugcauggaguccguccgcaacggcaccuacgacuaccccaaguacagcgaggaggcgaagcugaaccgggaggagaucgacggggugaagcucgaguccgcccgcaucuaccagauccuggccaucuacagcaccguggccuccagccugguccuccuggugucccugggcgcggugagcuucuggaugugcagcaacggcucccuccagugccggaucugcaucuga

SEQ ID NO: 77920 - RNA, 1695 nt, Artificial Sequence
  derived and/or modified CDS sequence (opt1) from hemagglutinin__InfluenzaA__EPI558121
augaaggccauccuggugguccuccuguacaccuucaccacggccaacgcggacacccugugcaucggcuaccacgccaacaacagcaccgacaccguggacacggugcucgagaagaacgucaccgugacccacuccgugaaccugcuggagaaccgccacaacgggaagcucugcaagcugcggggcgucgcgccccugcaccucgggaagugcaacaucgccggcuggcugcuggggaacccggagugcgagagccucuccaccgccagcuccuggagcuacaucguggagacguccaacagcgacaacgggaccugcuaccccggcgacuucaucaacuacgaggagcugcgcgagcagcuguccagcguguccagcuucgagcgguucgagaucuucccccagaccuccagcuggcccaaccacgacaccaaccgcggcgucacggccgccugcccgcacgccggcaccaacuccuucuaccggaaccucguguggcuggugaagaaggggaacagcuacuccaagaucaacaagagcuacaucaacaacaaggagaaggagguccuggugcucugggccauccaccaccccuccaccagcgcggaccagcagagccuguaccagaacgccgacgccuacguguucgucggcuccagccgcuacucccggaaguucgagcccgagaucgccacccgccccaaggugcgggaccaggccgggcgcaugaacuacuacuggacgcugguggagccgggcgacaagaucaccuucgaggcgaccggcaaccucgucgcgccccgguacgccuucgcccugaagcgcaacagcggguccggcaucaucaucagcgacaccuccgugcacgacugcgacacgaccugccagacccccaacggggccaucaacaccagccugcccuuccagaacauccacccggugacgaucggcgagugccccaaguacgucaaguccaccaagcuccggauggccaccggccugcgcaacauccccagcauccagucccgggggcuguucggcgccaucgccggguucaucgagggcggguggaccggcaugaucgacggcugguacggguaccaccaccagaacgagcagggcagcggguacgccgccgaccucaaguccacgcagaacgcgaucgacggcaucaccaacaaggugaacagcgugaucgagaagaugaacacccaguucaccgccgucgggaaggaguucucccaccuggagcgccggaucgagaaccugaacaagaagguggacgacggcuuccucgacaucuggacguacaacgccgagcugcugguccuccuggagaacgagcgcacccuggacuaccacgacagcaacgugaagaaccucuacgagaaggugcggucccagcugaagaacaacgccaaggagaucggcaacgggugcuucgaguucuaccacaagugcgacgacaugugcauggagagcgucaagaacggcaccuacgacuaccccaaguacuccgaggaggccaagcugaaccgcgaggagaucgacggggugaagcucgagagcacccggaucuaccagauccuggcgaucuacagcacgguggccuccagccugguccucguggugucccugggcgccaucagcuucuggaugugcuccaacgggagccugcagugccgcaucuga

SEQ ID NO: 77921 - RNA, 1701 nt, Artificial Sequence; identical to SEQ ID NO: 76465
  derived and/or modified CDS sequence (opt1) from hemagglutinin__InfluenzaA__EPI564139

SEQ ID NO: 77922 - RNA, 1701 nt, Artificial Sequence; identical to SEQ ID NO: 77710
  derived and/or modified CDS sequence (opt1) from hemagglutinin__InfluenzaA__EPI786706

SEQ ID NO: 77923 - RNA, 1701 nt, Artificial Sequence
  derived and/or modified CDS sequence (opt1) from hemagglutinin__InfluenzaA__EPI395313
augaaggccauccugaucgugcuccuguacaccuucaccacggccaacgcggacacccugugcaucggcuaccacgccaacaacagcaccgacaccgucgacacggugcucgagaagaacgugaccgucacccacuccgugaaccugcuggagaaccgccacaacgggaagcucugcaagcugcggggcguggcgccccugcaccucgggaagugcaacaucgccggcuggcugcuggggaacccggagugcgagagccucuccaccgccagcuccuggagcuacaucgucgagacguccaacagcgacaacgggaccugcuaccccggcgacuucaucaacuacgaggagcugcgcgagcagcuguccagcguguccagcuucgagcgguucgagaucuuccccaagaccuccagcuggcccaaccacgacaccaaccgcggcgugacggccgccugcccgcacgccggcaccaaguccuucuacaagaaccucaucuggaucgccaagaaggggaacagcuaccccaagaucaacaaguccuacaucaacaacaaggagaaggagguccuggugcugugggcgauccaccaccccagcaccuccgccgaccagcagagccucuaccagaacgccgacgccuacguguucgucggcagcucccgguacagccgcaaguucgagcccgagaucgccacccggccgaaggugcgcgaccaggcggggcggaugaacuacuacuggacgcugguggagcccggcgacaagaucaccuucgaggccaccggcaaccuggucgcgccccgcuacgccuucgcccucaagcggaacuccgggagcggcaucaucaucuccgacaccagcgugcacgacugcgacacgaccugccagacccccaacggggccaucaacaccucccugccguuccagaacauccaccccgugacgaucggcgagugccccaaguacgucaagagcaccaagcugcgcauggccaccggccuccggaacauccccuccauccagagccgcgggcuguucggcgccaucgccggguucaucgagggcggguggaccggcaugaucgacggcugguacggguaccaccaccagaacgagcagggcuccggguacgccgcggaccucaagagcacgcagaacgccaucgacggcaucaccaacaaggugaacuccgugaucgagaagaugaacacccaguucaccgccgucgggaaggaguucagccaccuggagcggcgcaucgagaaccugaacaagaagguggacgacggcuuccuggacaucuggacguacaacgccgagcuccuggugcugcucgagaacgagcggacccuggacuaccacgacuccaacgucaagaaccuguacgagaaggugcgcagccagcucaagaacaacgccaaggagaucggcaacgggugcuucgaguucuaccacaagugcgacgacaugugcauggaguccgucaagaacggcaccuacgacuacccgaaguacagcgaggaggcgaagcugaaccgggaggugaucgacggggugaagcuggaguccacccgcaucuaccagauccucgccaucuacgccacggucgccagcagccuggugcugguggucucccucggcgcgaucagcuucuggaugugcuccaacgggagccugcagugccggaucugcaucuga

SEQ ID NO: 77924 - RNA, 1701 nt, Artificial Sequence
  derived and/or modified CDS sequence (opt1) from hemagglutinin__InfluenzaA__EPI291696
augaaggccauccugcucgugcugcuguacaccuucaccgccgcgaacgccgacacgcucugcaucggcuaccacgccaacaacagcaccgacaccgucgacaccgugcuggagaagaacgugacggucacccacuccgugaaccugcucgagaaccgccacaacgggaagcugugcaagcugcggggcgugcccccgcuccaccuggggaagugcaacaucgccggcuggcugcucgggaaccccgagugcgagcugcuguucaccgccagcuccuggagcuacaucgucgagaccuccaacagcgacaacggcacgugcuaccccggcgacuucaucaacuacgaggagcuccgcgagcagcuguccagcguguccagcuucgagcgguucgagaucuuccccaaggcguccagcuggccggaccacgagaccaaccgcggggugaccgccgccugccccuacgccggcgcgaacuccuucuaccggaaccugaucuggcucgucaagaaggggaacagcuaccccaagcuguccaagagcuacgugaacaacaaggagaaggaggugcugguccucuggggcauccaccacccgcccaccuccacggaccagcagagccuguaccagaacgccgacgccuacguguucgugggguccagcaaguacaacaagaaguucaagcccgagauggccgcccgccccaagguccggggccaggcgggccgcaugaacuacuacuggacccugguggcccccggggacaccaucaccuucgaggccacgggcaaccucguggucccgcgguacgccuucgccaugaagcgcgggagcggcuccggcaucaucaucagcgacacccccgugcacgacugcaacacgaccugccagacccccaagggggcgaucaacaccucccugcccuuccagaacauccacccggugaccaucggcgagugccccaaguacgucaagagcaccaagcugcggauggccacggggcuccgcaacauccccuccauccagagccggggccuguucggggccaucgccggcuucaucgagggcggguggaccggcaugaucgacgggugguacggcuaccaccaccagaacgagcagggguccggcuacgccgcggaccgcaagagcacccagaacgccaucgacggcaucaccaacaaggugaacuccgugaucgagaagaugaacacgcaguucaccgccgucgggaaggaguucaaccaccuggagaagcggaucgagaaccucaacaagaagguggacgacggcuuccuggacgucuggaccuacaacgccgagcugcucgugcugcuggagaacgagcgcacccucgacuaccacgacagcaacgugaagaaccuguacgagaagguccggucccagcugaagaacaacgccaaggagaucgggaacggcugcuucgaguucuaccacaagugcgacgacacgugcauggagagcgugaagaacgggaccuacgacuaccccaaguacuccgaggagagcaagcucaaccgcgaggagaucgacggcgugaagcuggaguccacccggaucuaccagauccuggcgaucuacagcaccgucgccuccagccucgugcuguccgugagccugggcgccaucagcuucuggaugugcuccaacgggagccuccagugccgcaucugcaucuga

SEQ ID NO: 77925 - RNA, 1701 nt, Artificial Sequence; identical to SEQ ID NO: 73855
  derived and/or modified CDS sequence (opt1) from hemagglutinin__InfluenzaA__ACU80014

SEQ ID NO: 77926 - RNA, 1701 nt, Artificial Sequence; identical to SEQ ID NO: 66693
  derived and/or modified CDS sequence (opt1) from hemagglutinin__InfluenzaA__EPI177400

SEQ ID NO: 77927 - RNA, 1701 nt, Artificial Sequence; identical to SEQ ID NO: 67136
  derived and/or modified CDS sequence (opt1) from hemagglutinin__InfluenzaA__ACT36512

SEQ ID NO: 77928 - RNA, 1704 nt, Artificial Sequence
  derived and/or modified CDS sequence (opt1) from hemagglutinin__InfluenzaA__AJE30344
auggagaagaucgugcugcuccuggccgucaucagccuggugaaguccgaccagaucugcaucggcuaccacgccaacaacagcaccaagcaggucgacaccaucauggagaagaacgugacggugacccacgcgcaggacauccucgagaagacccacaacgggaagcugugcgaccugaacggcgugaagccccucauccugaaggacugcuccgucgccggguggcugcucggcaacccgaugugcgacgaguucauccgcgugcccgaguggagcuacaucguggagcgggccaaccccgccaacgaccugugcuaccccgggacccugaacgacuacgaggagcucaagcaccuccugucccgcaucaaccacuucgagaagaaccugaucaucccgcggagcuccuggcccaaccacgagacgagccugggcgucuccgccgcgugccccuaccagggcgccagcuccuucuuccgcaacgugguguggcugaucaagaagaacgacgccuaccccaccaucaagaucagcuacaacaacaccaaccgggaggaccuccugauccugugggggauccaccacuccaacaacgccgcggagcagaccaaccucuacaagaacccggacacguacgucagcgugggcaccuccacccugaaccagcgccuggugcccaagaucgccacccggagccaggucaacgggcaguccggccgcauggacuucuucuggacgauccucaagcccaacgacgccauccacuucgagagcaacgggaacuucaucgcccccgaguacgccuacaagaucgugaagaagggcgacuccaccaucaugaaguccgagauggaguacggccacugcaacaccaagugccagaccccgaucggggcgaucaacagcagcaugcccuuccacaacauccacccccugacgaucggcgagugccccaaguacgucaagagcaacaagcuggugcucgccaccgggcugcggaacuccccgcugcgcgagcggcgccggaagcgcggccucuucggcgccaucgccggguucaucgagggcggguggcagggcaugguggacgggugguacggcuaccaccacagcaacgagcagggcuccggguacgccgcggacaaggagagcacccagaaggccaucgacggcgugaccaacaaggucaacuccaucaucgacaagaugaacacgcaguucgaggccguggggcgggaguucaacaaccuggagcgccggaucgagaaccugaacaagaagauggaggacggcuuccucgacguguggaccuacaacgccgagcugcugguccucauggagaacgagcgcacccuggacuuccacgacagcaacgugaagaaccuguacgacaagguccggcuccagcugcgcgacaacgccaaggagcuggggaacggcugcuucgaguucuaccacaagugcgacaacgagugcauggaguccgugcggaacggcaccuacgacuaccccaaguacagcgaggaggcgauccucaagcgcgaggagaucuccggggugaagcuggagagcaucggcacguaccagauccuguccaucuacagcaccgucgccuccagccucgcccuggccaucaucguggccgggcugucccucuggaugugcagcaacggcucccugcagugccgcaucugcaucuga

SEQ ID NO: 77929 - RNA, 1701 nt, Artificial Sequence; identical to SEQ ID NO: 77908
  derived and/or modified CDS sequence (opt1) from hemagglutinin__InfluenzaA__EPI178948

SEQ ID NO: 77930 - RNA, 1701 nt, Artificial Sequence; identical to SEQ ID NO: 77908
  derived and/or modified CDS sequence (opt1) from hemagglutinin__InfluenzaA__EPI178949

SEQ ID NO: 77931 - RNA, 1701 nt, Artificial Sequence
  derived and/or modified CDS sequence (opt1) from hemagglutinin__InfluenzaA__EPI590132
augaaggccauccugaucgugcuccuguacaccuucaccacggccaacgcggacaagaucugcaucggcuaccacgccaacaacagcaccgacaccgucgacaccgugcuggagaagaacgugacggucacccacuccgugaaccuccuggagaacaagcacaacgggaagcugugcaagcuccgcggcguggcgccccugcaccuggggaagugcaacaucgccggcuggcuccuggggaacccggagugcgagagccuggccaccgccuccagcugguccuacaucgucgagaccagcuccagcaacaacggcacgugcuaccccggcgacuucaucaacuacgaggagcuccgggagcagcuguccagcguguccagcuucgagaaguucgagaucuuccccaagaccuccagcuggcccaaccacgagaccaacaagggggugaccgccgccugcccgcacgccggcacgaacuccuucuacaagaaccugaucuggcucgucaagaaggagaacagcuaccccaagaucaacaucuccuacaccaacaaccgcgggaaggaggugcuggugcugugggcgauccaccacccgcccaccagcaccgaccagcagucccucuaccagaacgccaacagcuacgucuucgugggcagcucccgguacagccgcaaguucgagcccgagaucgccacgcggcccaaggugcgcgggcaggccggccggaugaacuacuacuggacccuggucgagcccggcgacaagaucaccuucgaggccaccgggaaccugguggugccccgcuacgcguucgcccucaagcggaacuccggcagcgggaucaucaucuccgagacgccgguccacgacugcgacacgaccugccagacccccaacggcgccaucaacaccagccugcccuuccagaacauccaccccgugaccaucggcgagugcccgaaguacgugaaguccaccaagcugcgcauggccaccgggcuccggaacauccccagcauccagucccgcggccuguucggggccaucgcgggcuucaucgagggcggguggacgggcaugaucgacgggugguacggcuaccaccaccagaacgagcaggggagcggcuacgccgccgaccugaaguccacccagaacgccaucgacgggaucaccaacaaggucaacagcgugaucgagaagaugaacacccaguucacggccgugggcaaggaguucucccaccucgagcggcgcaucgagaaccugaacaagaaggucgacgacggcuucaucgacaucuggaccuacaacgcggagcugcucgugcugcuggagaacgagcggacccucgacuaccacgacagcaacgucaagacccuguacgagaaggugcgcucccagcugaagaacaacgccaaggagaucgggaacggcugcuucgaguucuaccacaagugcgacgacacgugcauggagagcgugaagaacgggaccuacgacuaccccaaguacuccgaggaggccaagcucaaccgggaggagaucgacggcaucaagcuggagagcacccgcaucuaccagauccuggccaucuacuccaccgucgccagcagccucgugcugguggucucccugggggcgaucagcuucuggaugugcuccaacggcagccuccagugccgggugugcaucuga

SEQ ID NO: 77932 - RNA, 1701 nt, Artificial Sequence; identical to SEQ ID NO: 65760
  derived and/or modified CDS sequence (opt1) from hemagglutinin__InfluenzaA__ABU80400

SEQ ID NO: 77933 - RNA, 1698 nt, Artificial Sequence
  derived and/or modified CDS sequence (opt1) from hemagglutinin__InfluenzaA__ABO21709
augaaggccaaccugcucgugcugcugugcgcccucgcggccgccgacgccgacaccaucugcaucggcuaccacgccaacaacagcaccgacacggucgacaccgugcuggagaagaacgugaccgucacccacuccgugaaccugcucgaggacagccacaacgggaagcugugccgccugaagggcaucgcgccccuccagcuggggaagugcaacaucgccggcuggcugcucgggaacccggagugcgacccccugcugcccgugcgguccuggagcuacaucgucgagacgcccaacuccgagaacggcaucugcuacccgggcgacuucaucgacuacgaggagcuccgcgagcagcugagcuccgugagcuccuucgagcgguucgagaucuuccccaaggagagcuccuggcccaaccacaacaccaacggggugaccgccgccugcagccacgagggcaaguccagcuucuaccgcaaccugcucuggcugaccgagaaggagggguccuaccccaagcugaagaacagcuacgucaacaagaagggcaaggaggugcucgugcugugggggauccaccacccgcccaacuccaaggagcagcagaaccuguaccagaacgagaacgcguacgucagcguggugacguccaacuacaaccggcgcuucacccccgagaucgccgagcggcccaagguccgcgaccaggccggccggaugaacuacuacuggacccuccugaagccgggcgacaccaucaucuucgaggccaacgggaaccugaucgcccccauguacgcguucgcccucagccgcggcuucgggagcggcaucaucacguccaacgccagcaugcacgagugcaacaccaagugccagacgccccugggcgccaucaacuccagccugcccuaccagaacauccacccggugaccaucggggagugccccaaguacgugcgguccgccaagcuccgcauggucaccggccugcggaacaaccccagcauccagucccgcgggcuguucggcgcgaucgccggguucaucgagggcggcuggaccgggaugaucgacggcugguacggguaccaccaccagaacgagcagggcagcggguacgccgccgaccagaaguccacccagaacgccaucaacggcaucaccaacaaggugaacacggugaucgagaagaugaacauccaguucaccgcggucggcaaggaguucaacaagcucgagaagcggauggagaaccugaacaagaagguggacgacggguuccuggacaucuggaccuacaacgccgagcuccuggugcugcucgagaacgagcgcacccuggacuuccacgacagcaacgucaagaaccuguacgagaaggugaagucccagcucaagaacaacgccaaggagaucggcaacgggugcuucgaguucuaccacaagugcgacaacgagugcauggagagcguccggaacggcacguacgacuaccccaaguacuccgaggagagcaagcugaaccgcgagaagguggacggggugaagcuggaguccaugggcaucuaccagauccucgccaucuacagcaccgucgccuccagccuggugcugcucgugucccugggcgcgaucagcuucuggaugugcagcaacgggucccugcagugccggaucugcaucuga

SEQ ID NO: 77934 - RNA, 1701 nt, Artificial Sequence; identical to SEQ ID NO: 66680
  derived and/or modified CDS sequence (opt1) from hemagglutinin__InfluenzaA__CAZ65588

SEQ ID NO: 77935 - RNA, 1701 nt, Artificial Sequence; identical to SEQ ID NO: 77710
  derived and/or modified CDS sequence (opt1) from hemagglutinin__InfluenzaA__EPI697744

SEQ ID NO: 77936 - RNA, 1701 nt, Artificial Sequence; identical to SEQ ID NO: 77870
  derived and/or modified CDS sequence (opt1) from hemagglutinin__InfluenzaA__EPI768525

SEQ ID NO: 77937 - RNA, 1701 nt, Artificial Sequence
  derived and/or modified CDS sequence (opt1) from hemagglutinin__InfluenzaA__EPI726930
augaaggccauccuggugguccuccuguacaccuucaccacggccaacgcggacacccugugcaucggcuaccacgccaacaacagcaccgacaccguggacacggugcucgagaagaacgucaccgugacccacuccgugaaccugcuggaggacaagcacaacgggaagcucugcaagcugcgcggcgucgcgccccugcaccucgggaagugcaacaucgccggcuggauccuggggaacccggagugcgagagccuguccaccgccagcuccuggagcuacaucguggagacguccaacagcgacaacgggaccugcuaccccggcgacuucaucaacuacgaggagcuccgggagcagcuguccagcguguccagcuucgagcgcuucgagaucuuccccaaggcguccagcuggcccaaccacgacuccaacaagggcgucaccgccgccugcccgcacgccggcgccaagagcuucuacaagaaccugaucuggcucgugaagaaggggaacuccuaccccaagcugaaccagagcuacaucaacgacaagggcaaggaggugcugguccucugggggauccaccaccccuccaccacggccgaccagcagagccuguaccagaacgccgacgccuacguguucgugggcaccagccgguacuccaagaaguucaagcccgagaucgccacccgcccgaagguccgggaccaggagggccgcaugaacuacuacuggacccugguggagcccggggacaagaucacguucgaggcgaccggcaaccucguggucccccgguacgccuucaccauggagcgcaacgccgggagcggcaucaucaucuccgacacccccgugcacgacugcaacacgaccugccagaccccggagggcgccaucaacaccagccugcccuuccagaacauccaccccaucacgaucgggaagugccccaaguacgugaaguccaccaagcugcggcucgccaccggccugcgcaacgucccgagcauccagucccgggggcuguucggcgcgaucgccggguucaucgagggcggcuggaccgggaugguggacggcugguacggguaccaccaccagaacgagcagggcagcggguacgccgccgaccucaaguccacgcagaacgccaucgacaagaucaccaacaaggugaacagcgucaucgagaagaugaacacccaguucaccgcggugggcaaggaguucaaccaccuggagaagcgcaucgagaaccugaacaagaaggucgacgacggcuuccucgacaucuggacguacaacgccgagcugcuggugcuccuggagaacgagcggacccuggacuaccacgacuccaacgugaagaaccucuacgagaagguccgcaaccagcugaagaacaacgccaaggagaucgggaacggcugcuucgaguucuaccacaagugcgacaacacgugcauggagagcgugaagaacgggaccuacgacuaccccaaguacuccgaggaggccaagcugaaccgggagaagaucgacggcgugaagcucgagagcacccgcaucuaccagauccuggccaucuacuccaccgucgcgagcucccuggugcucguggucagccugggggccaucuccuucuggaugugcagcaacggcagccugcagugccggaucugcaucuga

SEQ ID NO: 77938 - RNA, 1701 nt, Artificial Sequence
  derived and/or modified CDS sequence (opt1) from hemagglutinin__InfluenzaA__EPI813817
augaaggccauccuggugguccuccuguacaccuucaccacggccaacgcggacacccugugcaucggcuaccacgccaacaacagcaccgacaccguggacacggugcucgagaagaacgucaccgugacccacuccgugaaccugcuggaggacaagcacaacgggaagcucugcaagcugcgcggcgucgcgccccugcaccucgggaagugcaacaucgccggcuggauccuggggaacccggagugcgagagccuguccaccgccagcuccuggagcuacaucguggagacguccaacagcgacaacgggaccugcuaccccggcgacuucaucaacuacgaggagcuccgggagcagcuguccagcguguccagcuucgagcgcuucgagaucuuccccaaggcguccagcuggcccaaccacgacuccaacaagggggucaccgccgccugcccgcacgccggcgccaagagcuucuacaagaaccugaucuggcucgugaagaaggggaacuccuaccccaagcugaaccagagcuacaucaacgacaagggcaaggaggugcugguccucugggggauccaccaccccuccaccacggccgaccagcagagccuguaccagaacgccgacgccuacguguucgugggcaccagccgguacuccaagaaguucaagcccgagaucgccacccgcccgaagguccgggaccaggaggcgcgcaugaacuacuacuggacccugguggagcccggcgacaagaucacguucgaggccaccgggaaccucguggucccccgguacgccuucaccauggagcgcaacgccggcagcgggaucaucaucuccgacacccccgugcacgacugcaacacgaccugccagaccccggagggcgccaucaacaccagccugcccuuccagaacauccaccccaucacgaucggcaagugccccaaguacgugaaguccaccaagcugcggcucgcgaccgggcugcgcaacgucccgagcauccagucccggggccuguucggggccaucgccggcuucaucgagggcggcuggaccggcaugguggacgggugguacggcuaccaccaccagaacgagcaggggagcggcuacgccgccgaccucaaguccacgcagaacgcgaucgacaagaucaccaacaaggugaacagcgucaucgagaagaugaacacccaguucaccgccguggggaaggaguucaaccaccuggagaagcgcaucgagaaccugaacaagaaggucgacgacggcuuccucgacaucuggacguacaacgccgagcugcuggugcuccuggagaacgagcggacccuggacuaccacgacuccaacgugaagaaccucuacgagaagguccgcaaccagcugaagaacaacgccaaggagaucggcaacgggugcuucgaguucuaccacaagugcgacaacacgugcauggagagcgugaagaacggcaccuacgacuaccccaaguacuccgaggaggccaagcugaaccgggagaagaucgacggggugaagcucgagagcacccgcaucuaccagauccuggcgaucuacuccaccgucgccagcucccuggugcucguggucagccugggcgccaucuccuucuggaugugcagcaacgggagccugcagugccggaucugcaucuga

SEQ ID NO: 77939 - RNA, 1701 nt, Artificial Sequence
  derived and/or modified CDS sequence (opt1) from hemagglutinin__InfluenzaA__EPI466626
augaaggccauccuggugguccuccuguacaccuucgccaccgcgaacgccgacacgcugugcaucggcuaccacgccaacaacagcaccgacaccguggacaccgugcucgagaagaacgucacggugacccacuccgugaaccugcuggaggacaagcacaacgggaagcucugcaagcugcgcggcgucgcgccccugcaccucgggaagugcaacaucgccggcuggauccuggggaacccggagugcgagagccuguccaccgccagcuccuggagcuacaucguggagaccuccagcuccgacaacggcacgugcuaccccggcgacuucaucaacuacgaggagcuccgggagcagcugagcuccgugagcuccuucgagcgcuucgagaucuuccccaagaccagcuccuggcccaaccacgacagcaacaagggggucaccgccgccugcccgcacgccggcgcgaaguccuucuacaagaaccugaucuggcucgugaagaaggggaacagcuaccccaagcugucccagagcuacaucaacgacaagggcaaggaggugcugguccucugggggauccaccaccccagcaccacggccgaccagcagucccuguaccagaacgccgacgccuacguguucgugggcaccagccgguacuccaagaaguucaagcccgagaucgccauccgcccgaagguccgggaccaggagggccgcaugaacuacuacuggacccugguggagcccggggacaagaucaccuucgaggcgacgggcaaccucguggucccccgguacgccuucaccauggagcgcaacgccgggagcggcaucaucaucuccgacacccccgugcacgacugcaacaccacgugccagaccccggagggcgccaucaacaccagccugcccuuccagaacauccaccccaucaccaucgggaagugccccaaguacgugaaguccacgaagcugcggcucgccaccggccugcgcaacgucccgagcauccagucccgggggcuguucggcgcgaucgccggguucaucgagggcggcuggaccgggaugguggacggcugguacggguaccaccaccagaacgagcagggcagcggguacgccgccgaccucaaguccacccagaacgccaucgacaagaucacgaacaaggugaacagcgucaucgagaagaugaacacccaguucaccgcggugggcaaggaguucaaccaccuggagaagcgcaucgagaaccugaacaagaaggucgacgacggcuuccucgacaucuggaccuacaacgccgagcugcuggugcuccuggagaacgagcggacgcuggacuaccacgacuccaacgugaagaaccucuacgagaagguccgcaaccagcugaagaacaacgccaaggagaucgggaacggcugcuucgaguucuaccacaagugcgacaacacgugcauggagagcgugaagaacgggaccuacgacuaccccaaguacuccgaggaggccaagcugaaccgggagaagaucgacggcgugaagcucgagagcacccgcaucuaccagauccuggccaucuacuccaccgucgcgagcuccguggugcuggucgugagccucggggccaucagcuucuggaugugcuccaacggcagccugcagugccggaucugcaucuga

SEQ ID NO: 77940 - RNA, 1701 nt, Artificial Sequence
  derived and/or modified CDS sequence (opt1) from hemagglutinin__InfluenzaA__EPI541966
augaaggccauccuggugguccuccuguacaccuucgccaccgcgaacgccgacacgcugugcaucggcuaccacgccaacaacagcaccgacaccguggacaccgugcucgagaagaacgucacggugacccacuccgugaaccugcuggaggacaagcacaacgggaagcucugcaagcugcgcggcgucgcgccccugcaccucgggaagugcaacaucgccggcuggauccuggggaacccggagugcgagagccuguccaccgccagcuccuggagcuacaucguggagaccuccagcuccgacaacggcacgugcuaccccggcgacuucaucaacuacgaggagcuccgggagcagcugagcuccgugagcuccuucgagcgcuucgagaucuuccccaagaccagcuccuggcccaaccacgagagcaacaagggggucaccgccgccugcccgcacgccggcgcgaaguccuucuacaagaaccugaucuggcucgugaagaaggggaacagcuaccccaagcugucccagagcuacaucaacgacaagggcaaggaggugcugguccucugggggauccaccaccccagcaccacggccgaccagcagucccuguaccagaacgccgacgccuacguguucgugggcaccagccgguacuccaagaaguucaagcccgagaucgccauccgcccgaagguccgggaccaggagggccgcaugaacuacuacuggacccugguggagcccggggacaagaucaccuucgaggcgacgggcaaccucguggucccccgguacgccuucaccauggagcgcaacgccgggagcggcaucaucaucuccgacacccccgugcacgacugcaacaccacgugccagaccccggagggcgccaucaacaccagccugcccuuccagaacauccaccccaucaccaucgggaagugccccaaguacgugaaguccacgaagcugcggcucgccaccggccugcgcaacgucccgagcauccagucccgggggcuguucggcgcgaucgccggguucaucgagggcggcuggaccgggaugguggacggcugguacggguaccaccaccagaacgagcagggcagcggguacgccgccgaccucaaguccacccagaacgccaucgacaagaucacgaacaaggugaacagcgucaucgagaagaugaacacccaguucaccgcggugggcaaggaguucaaccaccuggagaagcgcaucgagaaccugaacaagaaggucgacgacggcuuccucgacaucuggaccuacaacgccgagcugcuggugcuccuggagaacgagcggacgcuggacuaccacgacuccaacgugaagaaccucuacgagaagguccgcaaccagcugaagaacaacgccaaggagaucgggaacggcugcuucgaguucuaccacaagugcgacaacacgugcauggagagcgugaagaacgggaccuacgacuaccccaaguacuccgaggaggccaagcugaaccgggagaagaucgacggcgugaagcucgagagcacccgcaucuaccagauccuggccaucuacuccaccgucgcgagcuccguggugcuggucgugagccucggggccaucagcuucuggaugugcuccaacggcagccugcagugccggaucugcaucuga

SEQ ID NO: 77941 - RNA, 1701 nt, Artificial Sequence
  derived and/or modified CDS sequence (opt1) from hemagglutinin__InfluenzaA__EPI652003
augaaggccauccuggugguccuccuguacaccuucgccaccgcgaacgccgacacgcugugcaucggcuaccacgccaacaacagcaccgacaccguggacaccgugcucgagaagaacgucacggugacccacuccgugaaccugcuggaggacaagcacaacgggaagcucugcaagcugcgcggcgucgcgccccugcaccucgggaagugcaacaucgccggcuggauccuggggaacccggagugcgagagccuguccaccgccagcuccuggagcuacaucguggagaccuccagcuccgacaacggcacgugcuaccccggcgacuucaucaacuacgaggagcuccgggagcagcugagcuccgugagcuccuucgagcgcuucgagaucuuccccaagaccagcuccuggcccaaccacgagagcaacaagggggucaccgccgccugcccgcacgccggcgcgaaguccuucuacaagaaccugaucuggcucgugaagaaggggaacagcuaccccaagcugucccagagcuacaucaacgacaagggcaaggaggugcugguccucugggggauccaccacccgcccaccacggccgaccagcagagccuguaccagaacgccgacgccuacguguucgugggcaccucccgguacagcaagaaguucaagcccgagaucgccauccgccccaagguccgggaccaggagggccgcaugaacuacuacuggacccugguggagcccggggacaagaucaccuucgaggcgacgggcaaccucguggucccccgguacgccuucaccauggagcgcaacgccggguccggcaucaucaucagcgacaccccggugcacgacugcaacaccacgugccagacccccgagggcgccaucaacaccucccugcccuuccagaacauccaccccaucaccaucgggaagugcccgaaguacgucaagagcacgaagcugcggcucgccaccggccugcgcaacgugcccuccauccagagccgggggcuguucggcgcgaucgccggguucaucgagggcggcuggaccgggaugguggacggcugguacggguaccaccaccagaacgagcagggcuccggguacgccgccgaccucaagagcacccagaacgccaucgacaagaucacgaacaaggugaacuccgucaucgagaagaugaacacccaguucaccgcggugggcaaggaguucaaccaccuggagaagcgcaucgagaaccugaacaagaaggucgacgacggcuuccucgacaucuggaccuacaacgccgagcugcuggugcuccuggagaacgagcggacgcuggacuaccacgacagcaacgugaagaaccucuacgagaagguccgcaaccagcugaagaacaacgccaaggagaucgggaacggcugcuucgaguucuaccacaagugcgacaacacgugcauggaguccgugaagaacgggaccuacgacuaccccaaguacagcgaggaggccaagcugaaccgggagaagaucgacggcgugaagcucgaguccacccgcaucuaccagauccuggccaucuacagcaccgucgcguccagcguggugcuggucgugucccucggggccaucagcuucuggaugugcagcaacggcucccugcagugccggaucugcaucuga

SEQ ID NO: 77942 - RNA, 1701 nt, Artificial Sequence
  derived and/or modified CDS sequence (opt1) from hemagglutinin__InfluenzaA__EPI291877
augaaggccaucaucgugguccugcucuacaccuucgccaccgcggacgccgacacgcugugcaucggcuaccacgccaacaacagcaccgacaccguggacaccgugcuggagaagaacgucacggugacccacuccgugaacauccucgagaacaagcacgacgggaagcugugcaagcugcgcggcgucgcgccccuccaccuggggaagugcaacaucgccggcuggcugcucgggaacccggagugcgagagccuguucgccgccuccagcugguccuacaucguggagacccccaacagcgacaacgggaccugcuaccccggcgacuucaucaacuacgaggagcugcgggagcaccucuccagcguguccagcuucgagcgcuucgagaucuuccccaaggccaacuccuggccgaaccacgacacgaacaagggcgucaccgccgcgugccccuacgccggcgccaacagcuucuaccggaaccugaucuggcuggugaagaaggggaacuccuaccccaagcucagcaaguccuacaucaacaacaagaagaaggaggugcuggucaucuggggcauccaccacccgcccaccagcaucgaccagcagacccuguaccagaacgccgacgccuacguguucgugggguccagcaaguacuccaagcgcuucaagcccgagaucgcggcccggcccaagguccgcgaccaggccggccggauggacuacuacuggacgcucaucgagcccggcgacaccaucaccuucgaggccaccgggaaccugguggugccgcgcuacgccuucgcgaugaagcggggcagcgggagcggcaucaucgucuccgacgcccccgugcacgacugcaacacgaccugccagacccccaagggcgccaucaacaccagccugcccuuccagaacauccacccggugacgaucggggagugccccaaguacgucaaguccaccaagcuccgcauggccaccggccugcggaacauccccagcauccagucccgcgggcuguucggcgccaucgcgggguucaucgagggcggcuggaccgggaugaucgacggcugguacggguaccaccaccagaacgagcagggcagcggguacgccgccgaccagaaguccacgcagaacgccaucgacggcaucaccaacaaggugaacagcaucaucgagaagaugaacacccaguucaccgccgugggcaaggaguucucccagcucgagaagcggaucgagagccugaacaacaaggucgacgacggguuccuggacaucuggacguacaacgcggagcuccuggugcugcucgagaacgagcgcacccuggacuaccacgacuccaacgucaagaaccuguacgagaaggugcggagccagcucaagaacaacgccaaggagaucggcaacgggugcuucgaguucuaccacaagugcgacaacacgugcauggaguccgugaagaacggcaccuacgacuaccccaaguacagcgaggaggccaagcugaaccgcgaggagaucgacgggaucaagcuggaguccgcccggaucuaccagauccucgcgaucuacagcaccgucgccuccagccuggugcugcucgugucccugggcgccgucagcuucuggaugugcagcaacggcucccugcagugccgcaucugcaucuga

SEQ ID NO: 77943 - RNA, 1701 nt, Artificial Sequence
  derived and/or modified CDS sequence (opt1) from hemagglutinin__InfluenzaA__ABR29595
augaaggccauccugcucgugcugcuguacaccuucaccgccgcgaacgccgacacgcucugcaucggcuaccacgccaacaacagcaccgacaccgucgacaccgugcuggagaagaacgugacggucacccacuccgugaaccugcucgaggaccgccacaacgggaagcugugcaagcugcggggcguggcgccccuccaccuggggaagugcaacaucgccggcuggcugcucgggaacccggagugcgagcugcuguucaccgccagcuccuggagcuacaucgucgagaccuccaacagcgacaacggcacgugcuaccccggcgacuucaucaacuacgaggagcuccgcgagcagcuguccagcguguccagcuucgagcgguucgagaucuuccccaaggccuccagcuggcccaaccacgagaccaaccgcggggugaccgccgccugcccguacgcgggcgccaacuccuucuaccggaaccugaucuggcucgucaagaaggggaacagcuaccccaagcuguccaagagcuacgugaacaacaaggagaaggaggugcugguccucuggggcauccaccacccgcccaccuccacggaccagcagagccuguaccagaacgccgacgccuacguguucgugggguccagcaaguacaacaagaaguucaagcccgagaucgccacccgccccaagguccggggccaggcgggccgcaugaacuacuacuggacccugguggagcccggggacaccaucacguucgaggccaccggcaaccucguggucccccgguacgccuucgccaugaagcgcgggagcggcuccggcaucaucaucagcgacaccccggugcacgacugcaacaccacgugccagacccccaagggggccaucaacaccucccugcccuuccagaacauccaccccgugaccaucggcgagugcccgaaguacgucaagagcacgaagcugcggauggcgaccgggcuccgcaacauccccuccauccagagccggggccuguucggggccaucgccggcuucaucgagggcggguggaccggcaugaucgacgggugguacggcuaccaccaccagaacgagcagggguccggcuacgccgccgaccgcaagagcacccagaacgcgaucgacggcaucacgaacaaggugaacuccgugaucgagaagaugaacacccaguucaccgccgucgggaaggaguucaaccaccuggagaagcggaucgagaaccucaacaagaagguggacgacggcuuccuggacgucuggaccuacaacgccgagcugcucgugcugcuggagaacgagcgcacgcucgacuaccacgacagcaacgugaagaaccuguacgagaagguccggucccagcugaagaacaacgccaaggagaucgggaacggcugcuucgaguucuaccacaagugcgacgacacgugcauggagagcgugaagaacgggaccuacgacuaccccaaguacuccgaggagagcaagcucaaccgcgaggagaucgacggcgugaagcuggaguccacccggaucuaccagauccuggccaucuacagcaccgucgcguccagccucgugcugcuggugucccucggcgccaucagcuucuggaugugcagcaacgggucccugcagugccgcaucugcaucuga

SEQ ID NO: 77944 - RNA, 1701 nt, Artificial Sequence
  derived and/or modified CDS sequence (opt1) from hemagglutinin__InfluenzaA__EPI291885
augaaggccaucaucgugguccugcuccacaccuucgccaccgcggacgccgacacccugugcaucggcuaccacgccaacaacagcaccgacaccguggacaccgugcuggagaagaacgucacggugacccacuccgugaaccuccuggagaccaagcacgacgggaagcugugcaaccucaagggcgucgcgccccugcaccuggggaagugcaacaucgccggcuggcuccuggggaacccggagugcgagagccuguucaccgccuccagcugguccuacaucguggagacgcccaacagcgacaacgggaccugcuaccccggcaacuucaucaacuacgaggagcuccgcgagcaccuguccagcguguccagcuucgagcgguucgagaucuuccccaaggccaacuccuggccgaaccacgacaccaacaagggggucaccgccgccugccccuacgcgggcgccaacagcuucuaccgcaaccugaucuggcucgugaagaaggggaacuccuaccccaagcugagcaaguccuacaucaacaacaagaagaaggaggugcuggucaucuggggcauccaccacccgcccacgagcaccgaccagcagacccucuaccagaacgccgacgccuacguguucgugggguccagcaaguacuccaagcgguucgagcccgagaucgccgcgcgccccaagguccggaaccaggccggccgcaugaacuacuacuggacccugaucgagcccggcgacacgaucaccuucgaggccaccgggaaccugguggugccgcgguacgccuucgccaugcgccggggcagcgggagcggcaucaucgucuccgacgcgcccgugcacgacugcaacaccacgugccagacccccaagggcgccaucaacaccagccuccccuuccagaacauccacccggugaccaucggggagugccccaaguacgucaaguccacgaagcugcgcauggccaccggccugcggaacauccccagcauccagucccgcggccucuucggcgccaucgccggguuccuggagggcggcuggaccgggaugaucgacggcugguacggguaccaccaccagaacgagcagggcagcggguacgcggccgaccagaaguccacccagaacgccaucgacggcaucacgaacaaggugaacagcaucaucgagaagaugaacacccaguucaccgccgugggcaaggaguucucccagcuggagaagcggaucgagagccucaacaacaaggucgacgacggguuccuggacaucuggaccuacaacgccgagaugcuggugcuccuggagaacgagcgcacgcuggacuaccacgacuccaacgucaagaaccucuacgagaaggugcggagccagcugaagaacaacgcgaaggagaucggcaacgggugcuucgaguucuaccacaagugcgacaacacgugcauggaguccgugaagaacggcaccuacgacuaccccaaguacagcgaggaggccaagcugaaccgcgaggagaucgacggggucaagcucgaguccgcccggaucuaccagauccuggccaucuacagcaccguggcguccagccuggugcuccuggucucccugggcgccgugagcuucuggaugugcagcaacggcucccuccagugccgcaucugcaucuga

SEQ ID NO: 77945 - RNA, 1701 nt, Artificial Sequence; identical to SEQ ID NO: 66680
  derived and/or modified CDS sequence (opt1) from hemagglutinin__InfluenzaA__EPI176515

SEQ ID NO: 77946 - RNA, 1701 nt, Artificial Sequence; identical to SEQ ID NO: 67136
  derived and/or modified CDS sequence (opt1) from hemagglutinin__InfluenzaA__EPI189182

SEQ ID NO: 77947 - RNA, 1701 nt, Artificial Sequence; identical to SEQ ID NO: 66928
  derived and/or modified CDS sequence (opt1) from hemagglutinin__InfluenzaA__EPI180574

SEQ ID NO: 77948 - RNA, 1701 nt, Artificial Sequence; identical to SEQ ID NO: 72733
  derived and/or modified CDS sequence (opt1) from hemagglutinin__InfluenzaA__EPI377499

SEQ ID NO: 77949 - RNA, 1701 nt, Artificial Sequence
  derived and/or modified CDS sequence (opt1) from hemagglutinin__InfluenzaA__EPI346916
augaaggccauccuggugguccuccuguacaccuucaccacggccaccgcggacacccugugcaucggcuaccacgccaacaacagcaccgacacgguggacaccgugcucgagaagaacgucaccgugacccacuccgugaaccugcuggagaaccgccacaacgggaagcucugcaagcugcggggcgucgcgccccugcaccucgggaagugcaacaucgccggcuggcugcuggggaacccggagugcgagagccucuccacggccagcuccuggagcuacaucguggagaccuccaacagcgacaacgggaccugcuaccccggcgacuucaucaacuacgaggagcugcgcgagcagcuguccagcguguccagcuucgagcgguucgagaucuuccccaagaccuccagcuggcccaaccacgacacgaaccgcggcgucaccgccgccugcccgcacgacggcaccaacuccuucuaccggaaccucaucuggcuggugaagaaggggaacagcuaccccaagaucaacaaguccuacaucaacaacaaggagaaggagauccuggugcucugggccauccaccaccccagcaccuccgccgaccagcagagccuguaccagaacgcggacgccuacgucuucgugggcagcucccgcuacagccggaaguucgagcccgagguggccacgcgcccgaagguccgggaccaggccgggcgcaugaacuacuacuggacccugguggagcccggcgacaagaucaccuucgaggccaccggcaaccucguggucccccgguacgcguucgcccugaagcgcaacuccgggagcggcaucaucaucuccgacacgagcgugcacgacugcgacaccaacugccagacccccaacggggccaucaacaccucccugccguuccagaacauccaccccgugacgaucggcgagugccccaaguacgucaagagcaccaagcuccggauggccaccggccugcgcaacauccccuccauccagagccgggggcuguucggcgccaucgcgggguucaucgagggcggguggaccggcaugaucgacggcugguacggguaccaccaccagaacgagcagggcuccggguacgccgccgaccucaagagcacgcagaacgccaucgacggcaucaccaacaaggugaacuccgugaucgagaagaugaacacccaguucaccgccgucgggaaggaguucagccaccuggagcgccggaucgagaaccugaacaagaagguggacgacggcuuccucgacaucuggacguacaacgcggagcugcugguccuccuggagaacgagcgcacccuggacuaccacgacuccaacgugaagaaccucuacgagaaggugcggagccagcugaagaacaacgccaaggagaucggcaacgggugcuucgaguucuaccacaagugcgacgacaugugcauggaguccgucaagaacggcaccuacgacuacccgaaguacagcgaggaggccaagcugaaccgcgaggagaucgacggggugaagcucgaguccacccggaucuaccagauccuggccaucuacagcacgguggccagcucccugguccucguggugagccugggcgcgaucuccuucuggaugugcagcaacgggucccugcagugccgcaucugcaucuga

SEQ ID NO: 77950 - RNA, 1689 nt, Artificial Sequence; identical to SEQ ID NO: 67307
  derived and/or modified CDS sequence (opt1) from hemagglutinin__InfluenzaA__ACV49600

SEQ ID NO: 77951 - RNA, 1701 nt, Artificial Sequence; identical to SEQ ID NO: 66353
  derived and/or modified CDS sequence (opt1) from hemagglutinin__InfluenzaA__BAF48361

SEQ ID NO: 77952 - RNA, 1701 nt, Artificial Sequence
  derived and/or modified CDS sequence (opt1) from hemagglutinin__InfluenzaA__EPI507594
augaagaccaucaucgcccugagcuacauccucugccugguguucgcccagaagcugcccggcaacgacaacuccaccgcgacgcucugccuggggcaccacgccgucccgaacggcaccaucgugaagaccaucaccaacgaccgcaucgaggugacgaacgccaccgagcugguccagaacagcuccaucggggagaucugcgacagcccccaccagauccucgacggcgagaacugcacccugaucgacgcccugcucggggacccccagugcgacggcuuccagaacaagaagugggaccuguucguggagcgguccaaggccuacagcaacugcuaccccuacgacgugccggacuacgcgucccugcgcagccucgucgccuccagcggcacccuggaguucaacaacgaguccuucaacugggccggggugacgcagaacggcaccagcuccgccugcaagcgggggagcaacuccagcuucuucucccgccugaacuggcucacccaccugaacuucaaguaccccgcgcugaacgugaccaugcccaacaacgagcaguucgacaagcucuacaucuggggcguccaccaccccgugacggacaaggaccagaucuuccuguacgcccagagcuccgggcggaucaccgugagcaccaagcgcagccagcaggccgucaucccgaacaucggcuuccggccccgcauccggaacauccccucccgcaucagcaucuacuggaccaucgugaagcccggcgacauccugcucaucaacuccacggggaaccugaucgccccgcggggcuacuucaagauccgcagcgggaaguccagcaucaugcgguccgacgcccccaucggcaagugcaagagcgagugcaucacccccaacggcuccauccccaacgacaagccguuccagaacgugaaccgcaucaccuacggggcgugcccccgguacgucaagcagagcacccugaagcucgccacgggcaugcgcaacgugcccgagaagcagacccgggggaucuucggcgccaucgccggguucaucgagaacggcugggagggcaugguggacgggugguacggcuuccgccaccagaacuucgaggggcggggccaggccgcggaccugaaguccacccaggccgccaucgaccagaucaacgggaagcugaaccgccucaucggcaagaccaacgagaaguuccaccagaucgagaaggaguucagcgaggucgagggccggauccaggaccuggagaaguacguggaggacacgaagaucgaccugugguccuacaacgccgagcuccugguggcccuggagaaccagcacaccaucgaccucaccgacagcgagaugaacaagcuguucgagaagaccaagaagcagcugcgcgagaacgcggaggacauggggaacggcugcuucaagaucuaccacaagugcgacaacgccugcaucggguccauccgcaacggcacguacgaccacgacgucuaccgggacgaggcccucaacaaccgcuuccagaucaaggggguggagcucaagagcggcuacaaggacuggauccuguggaucuccuucgccaucagcugcuuccugcugugcguggcccugcucggcuucaucaugugggcgugccagaaggggaacauccggugcaacaucugcaucuga

SEQ ID NO: 77953 - RNA, 1701 nt, Artificial Sequence
  derived and/or modified CDS sequence (opt1) from hemagglutinin__InfluenzaA__EPI461953
augaagaccaucaucgcccugagcuacauccucugccugguguucgcccagaagcugcccggcaacgacaacuccaccgcgacgcucugccuggggcaccacgccgucccgaacggcaccaucgugaagaccaucaccaacgaccgcaucgaggugacgaacgccaccgagcugguccagaacagcuccaucggggagaucugcgacagcccccaccagauccucgacggcgagaacugcacccugaucgacgcccugcucggggacccccagugcgacggcuuccagaacaagaagugggaccuguucguggagcgguccaaggccuacagcaacugcuaccccuacgacgugccggacuacgcgucccugcgcagccucgucgccuccagcggcacccuggaguucaacaacgaguccuucaacugggccggggugacgcagaacggcaccagcuccgccugcauccgggggagcaacuccagcuucuucucccgccugaacuggcucacccaccugaacuucaaguaccccgcgcugaacgugaccaugcccaacaacgagcaguucgacaagcucuacaucuggggcguccaccaccccgggacggacaaggaccagaucuuccuguacgcccagagcuccggccggaucaccgugagcaccaagcgcagccagcaggccgugaucccgaacaucggcucccggccccgcauccggaacauccccagccgcaucuccaucuacuggaccaucgucaagcccggggacauccugcucaucaacagcacgggcaaccugaucgccccgcggggguacuucaagauccgcuccggcaagagcuccaucaugcggagcgacgcccccaucggcaagugcaaguccgagugcaucacccccaacgggagcauccccaacgacaagccguuccagaacgugaaccgcaucaccuacggcgcgugcccccgguacgugaagcaguccacccugaagcucgccacggggaugcgcaacguccccgagaagcagacccggggcaucuucggggccaucgccggcuucaucgagaacggcugggaggggaugguggacggcugguacggguuccgccaccagaacuucgagggccgggggcaggccgcggaccucaagagcacccaggccgccaucgaccagaucaacggcaagcugaaccgccugaucggcaagaccaacgagaaguuccaccagaucgagaaggaguucuccgagguggaggggcggauccaggaccuggagaaguacgucgaggacacgaagaucgaccuguggagcuacaacgccgagcuccugguggcccuggagaaccagcacaccaucgaccucaccgacuccgagaugaacaagcuguucgagaagaccaagaagcagcugcgcgagaacgcggaggacaugggcaacgggugcuucaagaucuaccacaagugcgacaacgccugcaucggcagcauccgcaacgggacguacgaccacgacguguaccgggacgaggcccucaacaaccgcuuccagaucaagggcgucgagcugaaguccggcuacaaggacuggauccuguggaucagcuucgccaucuccugcuuccuccugugcguggcccugcucggguucaucaugugggcgugccagaagggcaacauccggugcaacaucugcaucuga

SEQ ID NO: 77954 - RNA, 1701 nt, Artificial Sequence
  derived and/or modified CDS sequence (opt1) from hemagglutinin__InfluenzaA__EPI461953/m1
augaagaccaucaucgcccugagcuacauccucugccugguguucgcccagaagcugcccggcaacgacaacuccaccgcgacgcucugccuggggcaccacgccgucccgaacggcaccaucgugaagaccaucaccaacgaccgcaucgaggugacgaacgccaccgagcugguccagaacagcuccaucggggagaucugcgacagcccccaccagauccucgacggcgagaacugcacccugaucgacgcccugcucggggacccccagugcgacggcuuccagaacaagaagugggaccuguucguggagcgguccaaggccuacagcaacugcuaccccuacgacgugccggacuacgcgucccugcgcagccucgucgccuccagcggcacccuggaguucaacaacgaguccuucaacugggccggggugacgcagaacggcaccagcuccgccugcaagcgggggagcaacuccagcuucuucucccgccugaacuggcucacccaccugaacuucaaguaccccgcgcugaacgugaccaugcccaacaacgagcaguucgacaagcucuacaucuggggcguccaccaccccgugacggacaaggaccagaucuuccuguacgcccagagcuccgggcggaucaccgugagcaccaagcgcagccagcaggccgucaucccgaacaucggcuaccggccccgcauccggaacauccccucccgcaucagcaucuacuggaccaucgugaagcccggcgacauccugcucaucaacuccacggggaaccugaucgccccgcggggcuacuucaagauccgcagcgggaaguccagcaucaugcgguccgacgcccccaucggcaagugcaagagcgagugcaucacccccaacggcuccauccccaacgacaagccguuccagaacgugaaccgcaucaccuacggggcgugcccccgguacgucaagcagagcacccugaagcucgccacgggcaugcgcaacgugcccgagaagcagacccgggggaucuucggcgccaucgccggguucaucgagaacggcugggagggcaugguggacgggugguacggcuuccgccaccagaacuucgaggggcggggccaggccgcggaccugaaguccacccaggccgccaucgaccagaucaacgggaagcugaaccgccucaucggcaagaccaacgagaaguuccaccagaucgagaaggaguucagcgaggucgagggccggauccaggaccuggagaaguacguggaggacacgaagaucgaccugugguccuacaacgccgagcuccugguggcccuggagaaccagcacaccaucgaccucaccgacagcgagaugaacaagcuguucgagaagaccaagaagcagcugcgcgagaacgcggaggacauggggaacggcugcuucaagaucuaccacaagugcgacaacgccugcaucggguccauccgcaacggcacguacgaccacgacgucuaccgggacgaggcccucaacaaccgcuuccagaucaaggggguggagcucaagagcggcuacaaggacuggauccuguggaucuccuucgccaucagcugcuuccugcugugcguggcccugcucggcuucaucaugugggcgugccagaaggggaacauccggugcaacaucugcaucuga

SEQ ID NO: 77955 - RNA, 1701 nt, Artificial Sequence
  derived and/or modified CDS sequence (opt1) from hemagglutinin__InfluenzaA__EPI668105
augaagaccaucaucgcccugagcuacauccucugccugguguucgcccagaagauccccggcaacgacaacuccaccgcgacgcugugccucgggcaccacgccgucccgaacggcaccaucgugaagaccaucaccaacgaccgcaucgaggugacgaacgccaccgagcugguccagaacagcuccaucggggagaucugcgacagcccccaccagauccuggacggcgagaacugcacccucaucgacgcccugcugggggacccccagugcgacggcuuccagaacaagaagugggaccucuucguggagcgguccaaggccuacagcaacugcuaccccuacgacgugccggacuacgcgucccugcgcagccuggucgccuccagcggcacccucgaguucaacaacgaguccuucaacuggacgggggugacccagaacggcaccagcuccgccugcauccgggggagcuccagcuccuucuucagccgccugaacuggcugacccaccucaacuacaaguaccccgcccugaacgugacgaugcccaacaacgagcaguucgacaagcuguacaucuggggcguccaccaccccgggaccgacaaggaccagaucuucccguacgcgcaguccagcggccggaucaccgugagcaccaagcgcucccagcaggccgugauccccaacaucggcagccggccccgcauccgggggauccccucccgcaucagcaucuacuggacgaucgucaagccgggcgacauccuccugaucaacuccaccgggaaccugaucgcgccccggggcuacuucaagauccgcagcggcaaguccagcaucaugcgguccgacgcccccaucgggaagugcaagagcgagugcaucacccccaacggcuccaucccgaacgacaagcccuuccagaacgugaaccgcaucaccuacggggccugcccccgguacgugaagcacagcacgcucaagcuggccaccggcaugcgcaacguccccgagaagcagacccgggggaucuucggcgccaucgccggcuucaucgagaacgggugggagggcaugguggacgggugguacggcuuccgccaccagaacuccgaggggcggggccaggccgccgaccucaagagcacccaggcggccaucgaccagaucaacggcaagcugaaccgccugaucgggaagacgaacgagaaguuccaccagaucgagaaggaguucuccgagguggagggccggauccaggaccuggagaaguacgucgaggacaccaagaucgaccucuggagcuacaacgccgagcugcugguggcccucgagaaccagcacaccaucgaccugaccgacuccgagaugaacaagcuguucgagaagacgaagaagcagcuccgcgagaacgccgaggacauggggaacggcugcuucaagaucuaccacaagugcgacaacgcgugcaucgggagcauccgcaacggcaccuacgaccacaacguguaccgggacgaggcccugaacaaccgcuuccagaucaagggcgucgagcugaaguccggguacaaggacuggauccucuggaucagcuucgccaucagcugcuuccugcugugcguggcccuccugggcuucaucaugugggccugccagaaggggaacauccggugcaacaucugcaucuga

SEQ ID NO: 77956 - RNA, 1701 nt, Artificial Sequence
  derived and/or modified CDS sequence (opt1) from hemagglutinin__InfluenzaA__EPI578446
augaagaccaucaucgcccugagcuacauccucugccugguguucgcccagaagauccccggcaacgacaacuccaccgcgacgcugugccucgggcaccacgccgucccgaacggcaccaucgugaagaccaucaccaacgaccgcaucgaggugacgaacgccaccgagcugguccagaacagcuccaucggggagaucugcgacagcccccaccagauccuggacggcgagaacugcacccucaucgacgcccugcugggggacccccagugcgacggcuuccagaacaagaagugggaccucuucguggagcgguccaaggccuacagcaacugcuaccccuacgacgugccggacuacgcgucccugcgcagccuggucgccuccagcggcacccucgaguucaacaacgaguccuucaacuggacgggggugacccagaacggcaccagcuccgccugcauccggcgcagcuccagcuccuucuucagccggcugaacuggcugacccaccucaacuacaaguaccccgcccugaacgugacgaugcccaacaacgagcaguucgacaagcuguacaucuggggcguccaccaccccgggaccgacaaggaccagaucuucccguacgcgcaguccagcgggcgcaucaccgugagcaccaagcggucccagcaggccgugauccccaacaucggcagccgcccccggauccgcggcauccccucccggaucagcaucuacuggacgaucgucaagccgggggacauccuccugaucaacuccaccggcaaccugaucgcgccccgcggguacuucaagauccggagcggcaaguccagcaucaugcgcuccgacgcccccaucggcaagugcaagagcgagugcaucacccccaacggguccaucccgaacgacaagcccuuccagaacgugaaccggaucaccuacggcgccugcccccgcuacgugaagcacagcacgcucaagcuggccaccgggaugcggaacguccccgagaagcagacccgcggcaucuucggggccaucgccggcuucaucgagaacggcugggaggggaugguggacggcugguacggguuccggcaccagaacuccgagggccgcgggcaggccgccgaccucaagagcacccaggcggccaucgaccagaucaacggcaagcugaaccggcugaucggcaagacgaacgagaaguuccaccagaucgagaaggaguucuccgagguggaggggcgcauccaggaccuggagaaguacgucgaggacaccaagaucgaccucuggagcuacaacgccgagcugcugguggcccucgagaaccagcacaccaucgaccugaccgacuccgagaugaacaagcuguucgagaagacgaagaagcagcuccgcgagaacgccgaggacaugggcaacgggugcuucaagaucuaccacaagugcgacaacgcgugcaucggcagcauccggaacgggaccuacgaccacaacguguaccgcgacgaggcccugaacaaccgguuccagaucaagggcgucgagcugaaguccggcuacaaggacuggauccucuggaucagcuucgccaucagcugcuuccugcugugcguggcccuccugggguucaucaugugggccugccagaagggcaacauccgcugcaacaucugcaucuga

SEQ ID NO: 77957 - RNA, 1701 nt, Artificial Sequence; identical to SEQ ID NO: 76465
  derived and/or modified CDS sequence (opt1) from hemagglutinin__InfluenzaA__EPI551882

SEQ ID NO: 77958 - RNA, 1701 nt, Artificial Sequence
  derived and/or modified CDS sequence (opt1) from hemagglutinin__InfluenzaA__EPI344389
augaagaccaucaucgccuucagcugcauccugugccucaucuucgcccagaagcugcccggcuccgacaacagcauggcgacccugugccucgggcaccacgccgugccgaacggcacgcuggucaagaccaucaccgacgaccagaucgaggugaccaacgccacggagcuggugcaguccagcuccaccgggcgcaucugcaacagcccccaccagauccucgacggcaagaacugcacccugaucgacgcccugcucggggacccccacugcgacgaccugcagaacaaggagugggaccuguucgucgagcgguccaccgccuacagcaacugcuaccccuacuacgugccggacuacgcgacgcuccgcucccugguggccagcuccggcaaccuggaguucacccaggagagcuucaacuggaccggcgucgcccaggacggguccagcuacgccugccggcgcggcuccgugaacagcuucuucucccggcucaacuggcuguacaaccugaacuacaaguaccccgagcagaacgugaccaugcccaacaacgacaaguucgacaagcucuacaucuggggcguccaccaccccgggacggacaaggaccagaccaaccuguacgugcaggcgagcgggcgcgugaucgucuccaccaagcggagccagcagaccgugaucccgaacaucggcagccgccccugggugcggggcgucuccagcaucaucuccaucuacuggacgaucgugaagcccggggacauccugcucaucaacagcaccggcaaccugaucgcgccccgcggguacuucaagauccaguccggcaagagcuccaucaugcggagcgacgcccacaucgacgagugcaacuccgagugcaucaccccgaacggcagcauccccaacgacaagcccuuccagaacgugaacaagaucaccuacggggccugcccccgcuacgucaagcagaacacgcugaagcucgccaccggcaugcggaacgugccggagaagcagacccgcgggaucuucggcgccaucgccggguucaucgagaacggcugggagggcaugguggacgggugguacggcuuccggcaccagaacuccgaggggaccggccaggccgccgaccucaagagcacgcaggccgcgaucaaccagaucaccgggaagcugaaccgcgucaucaagaagaccaacgagaaguuccaccagaucgagaaggaguucuccgagguggagggccggauccaggaccucgagaaguacguggaggacaccaagaucgaccuguggagcuacaacgccgagcugcucgucgcccuggagaaccagcacacgaucgaccugaccgacuccgagaugagcaagcuguucgagcgcacccggcgccagcugcgggagaacgccgaggacaugggcaacgggugcuucaagaucuaccacaagugcgacaacgccugcaucggcuccauccgcaacgggaccuacgaccacgacaucuaccgcaacgaggcgcugaacaaccgguuccagaucaagggcgugcagcucaagagcggguacaaggacuggauccuguggaucuccuucgccaucagcugcuuccugcucugcgucgugcugcugggcuucaucaugugggccugccagaagggcaacauccgcugcaacaucugcaucuga

SEQ ID NO: 77959 - RNA, 1701 nt, Artificial Sequence
  derived and/or modified CDS sequence (opt1) from hemagglutinin__InfluenzaA__EPI348782
augaagaccaucaucgccuucagcugcauccugugccucaucuucgcccagaagcugcccggcuccgacaacagcauggcgacccugugccucgggcaccacgccgugccgaacggcacgcuggucaagaccaucaccgacgaccagaucgaggugaccaacgccacggagcuggugcaguccagcuccaccgggcgcaucugcaacagcccccaccagauccucgacggcaagaacugcacccugaucgacgcccugcucggggacccccacugcgacgaccugcagaacaaggagugggaccuguucgucgagcgguccaccgccuacagcaacugcuaccccuacuacgugccggacuacgcgacgcuccgcucccugguggccagcuccggcaaccuggaguucacccaggagagcuucaacuggaccggcgucgcccaggacggguccagcuacgccugccggcgcggcuccgugaacagcuucuucucccggcucaacuggcuguacaagcugaacuacaaguaccccgagcagaacgugaccaugcccaacaacgacaaguucgacaagcucuacaucuggggcguccaccaccccgggacggacaaggaccagaccaacaucuacgugcaggcgagcgggcgcgugaucgucuccaccaagcggagccagcagaccgugaucccgaacaucggcagccgccccugggugcggggcgucuccagcaucaucuccaucuacuggacgaucgugaagcccggggacauccugcugaucaacagcaccggcaaccucaucgcgccccgcggguacuucaagauccaguccggcaagagcuccaucaugcggagcgacgcccacaucgacgagugcaacuccgagugcaucaccccgaacggcagcauccccaacgacaagcccuuccagaacgugaacaagaucaccuacggggccugcccccgcuacgucaagcagaacacgcugaagcuggccaccggcaugcggaacgugccggagaagcagacccgcgggaucuucggcgccaucgccggguucaucgagaacggcugggagggcaugguggacgggugguacggcuuccggcaccagaacuccgaggggaccggccaggccgccgaccucaagagcacgcaggccgcgaucaaccagaucaccgggaagcugaaccgcgucaucaagaagaccaacgagaaguuccaccagaucgagaaggaguucuccgagguggagggccggauccaggaccuggagaaguacguggaggacaccaagaucgaccucuggagcuacaacgccgagcugcuggucgcccucgagaaccagcacacgaucgaccugaccgacuccgagaugagcaagcuguucgagcgcacccggcgccagcuccgggagaacgccgaggacaugggcaacgggugcuucaagaucuaccacaagugcgacaacgccugcaucggcuccauccgcaacgggaccuacgaccacgacaucuaccgcaacgaggcgcugaacaaccgguuccagaucaagggcgugcagcucaagagcggguacaaggacuggauccuguggaucuccuucgccaucagcugcuuccugcugugcgucgugcuccugggcuucaucaugugggccugccagaagggcaacauccgcugcaacaucugcaucuga

SEQ ID NO: 77960 - RNA, 1701 nt, Artificial Sequence
  derived and/or modified CDS sequence (opt1) from hemagglutinin__InfluenzaA__EPI642513
augaagaccaucaucgccuucagcugcauccugugccucaucuucgcccagaagcugcccggcuccgacaagagcauggcgacccugugccucgggcaccacgccgugccgaacggcacgcuggucaagaccaucaccgacgaccagaucgaggugaccaacgccacggagcuggugcaguccagcuccaccagccgcaucugcaacagcccccaccagauccucgacgggaagaacugcacccugaucgacgcccugcucggcgacccccacugcgacgacuuccagaacaagaagugggaccuguucgucgagcgguccaccgccuacuccaacugcuaccccuacuacgugccggacuacgcgacgcugcgcagccucaucgccuccagcgggaaccuggaguucacccaggaguccuucaacuggaccggcguggcccaggacggcagcuccuacgccugccggcgcgggagcgucaacuccuucuucagccggcugaacuggcucuacaaccugaacuacaaguaccccgagcagaacgugaccaugcccaacaacgacaaguucgacaagcuguacaucuggggcgugcaccaccccgggacggacaaggaccagaccaaccucuacguccaggcguccggccgcgugaucgugagcaccaagcggagccagcagaccgucaucccgaacaucgggucccgccccugggugcggggcgugagcuccaucaucagcaucuacuggacgaucgucaagcccggcgacauccugcugaucaacuccaccgggaaccucaucgcgccccgcggcuacuucaagauccagagcgggaaguccagcaucaugcgguccgacgcccacaucgacgagugcaacagcgagugcaucaccccgaacggcuccauccccaacgacaagcccuuccagaacgugaacaagaucaccuacggcgccugcccccgcuacgugaagcagaacacgcugaagcuggccaccgggaugcggaacgucccggagaagcagacccgcggcaucuucggggccaucgccggcuucaucgagaacgggugggagggcaugguggacggcugguacggguuccggcaccagaacagcgagggcaccgggcaggccgccgaccucaaguccacgcaggccgcgaucaaccagaucaccggcaagcugaaccgcgugaucaagaagaccaacgagaaguuccaccagaucgagaaggaguucagcgaggucgaggggcggauccaggaccuggagaaguacguggaggacaccaagaucgaccucugguccuacaacgccgagcugcugguggcccucgagaaccagcacacgaucgaccugaccgacagcgagauguccaagcuguucgagcgcacccggcgccagcuccgggagaacgccgaggacaugggcaacggcugcuucaagaucuaccacaagugcgacaacgccugcaucgggagcauccgcaacggcaccuacgaccacgacaucuaccgcaacgaggcgcugaacaaccgguuccagaucaaggggguccagcugaaguccggcuacaaggacuggauccucuggaucagcuucgccaucagcugcuuccugcugugcgugguccuccugggguucaucaugugggccugccagaagggcaacauccgcugcaacaucugcaucuga

SEQ ID NO: 77961 - RNA, 1701 nt, Artificial Sequence
  derived and/or modified CDS sequence (opt1) from hemagglutinin__InfluenzaA__EPI293965
augaagaccaucaucgccuucagcugcauccugugccucaucuucgcccagaagcugcccggcuccgacaacagcauggcgacccugugccucgggcaccacgccgugccgaacggcacgcuggucaagaccaucaccgacgaccagaucgaggugaccaacgccacggagcuggugcaguccagcuccaccgggcgcaucugcaacagcccccaccagauccucgacggcaagaacugcacccugaucgacgcccugcucggggacccccacugcgacgacuuccagaacaaggagugggaccuguucgucgagcgguccaccgccuacagcaacugcuaccccuacuacgugccggacuacgcgacgcugcgcucccucguggccagcuccggcaaccuggaguucacccaggagagcuucaacuggaccggcgucgcccaggacggguccagcuacgccugccggcgcggcuccgugaacagcuucuucucccggcugaacuggcucuacaaccugaacuacaaguaccccgagcagaacgugaccaugcccaacaacgacaaguucgacaagcuguacaucuggggcguccaccaccccgggacggacaaggaccagaccaaccucuacgugcaggcgagcgggcgcgugaucgucuccaccaagcggagccagcagaccgugaucccgaacaucggcagccgccccugggugcggggcgucuccagcaucaucuccaucuacuggacgaucgugaagcccggggacauccugcugaucaacagcaccggcaaccucaucgcgccccgcggguacuucaagauccaguccggcaagagcuccaucaugcggagcgacgcccacaucgacgagugcaacuccgagugcaucaccccgaacggcagcauccccaacgacaagcccuuccagaacgugaacaagaucaccuacggggccugcccccgcuacgucaagcagaacacgcugaagcuggccaccggcaugcggaacgugccggagaagcagacccgcgggaucuucggcgccaucgccggguucaucgagaacggcugggagggcaugguggacgggugguacggcuuccggcaccagaacuccgaggggaccggccaggccgccgaccucaagagcacgcaggccgcgaucaaccagaucaccgggaagcugaaccgcgucaucaagaagaccaacgagaaguuccaccagaucgagaaggaguucuccgagguggagggccggauccaggaccuggagaaguacguggaggacaccaagaucgaccucuggagcuacaacgccgagcugcuggucgcccucgagaaccagcacacgaucgaccugaccgacuccgagaugagcaagcuguucgagcgcacccggcgccagcuccgggagaacgccgaggacaugggcaacgggugcuucaagaucuaccacaagugcgacaacgccugcaucggcuccauccgcaacgggaccuacgaccacgacaucuaccgcaacgaggcgcugaacaaccgguuccagaucaagggcgugcagcucaagagcggguacaaggacuggauccuguggaucuccuucgccaucagcugcuuccugcugugcgucgugcuccugggcuucaucaugugggccugccagaagggcaacauccgcugcaacaucugcaucuga

SEQ ID NO: 77962 - RNA, 1701 nt, Artificial Sequence
  derived and/or modified CDS sequence (opt1) from hemagglutinin__InfluenzaA__EPI465400
augaagaccaucaucgccuucagcugcauccugugccucaucuucgcccagaagcugcccggcuccgacaacagcauggcgacccugugccucgggcaccacgccgugccgaacggcacgcuggucaagaccaucaccgacgaccagaucgaggugaccaacgccacggagcuggugcaguccagcuccaccgggcgcaucugcaacagcccccaccagauccucgacggcaagaacugcacccugaucgacgcccugcucggggacccccacugcgacgacuuccagaacaaggagugggaccuguucgucgagcgguccaccgccuacagcaacugcuaccccuacuacgugccggacuacgcgacgcugcgcucccucguggccagcuccggcaaccuggaguucacccaggagagcuucaacuggaccggcgucgcccaggacggguccagcuacgccugccggcgcggcuccgugaacagcuucuucucccggcugaacuggcucuacaaccugaacuacaaguaccccgagcagaacgugaccaugcccaacaacgacaaguucgacaagcuguacaucuggggcguccaccaccccgggacggacaaggaccagaccaagcucuacgugcaggcgagcgggcgcgugaucgucuccaccaagcggagccagcagaccgugaucccgaacaucggcagccgccccugggugcggggcgucuccagcaucaucuccaucuacuggacgaucgugaagcccggggacauccugcugaucaacagcaccggcaaccucaucgcgccccgcggguacuucaagauccaguccggcaagagcuccaucaugcggagcgacgcccacaucgacgagugcaacuccgagugcaucaccccgaacggcagcauccccaacgacaagcccuuccagaacgugaacaagaucaccuacggggccugcccccgcuacgucaagcagaacacgcugaagcuggccaccggcaugcggaacgugccggagaagcagacccgcgggaucuucggcgccaucgccggguucaucgagaacggcugggagggcaugguggacgggugguacggcuuccggcaccagaacuccgaggggaccggccaggccgccgaccucaagagcacgcaggccgcgaucaaccagaucaccgggaagcugaaccgcgucaucaagaagaccaacgagaaguuccaccagaucgagaaggaguucuccgagguggagggccggauccaggaccuggagaaguacguggaggacaccaagaucgaccucuggagcuacaacgccgagcugcuggucgcccucgagaaccagcacacgaucgaccugaccgacuccgagaugagcaagcuguucgagcgcacccggcgccagcuccgggagaacgccgaggacaugggcaacgggugcuucaagaucuaccacaagugcgacaacgccugcaucggcuccauccgcaacgggaccuacgaccacgacaucuaccgcaacgaggcgcugaacaaccgguuccagaucaagggcgugcagcucaagagcggguacaaggacuggauccuguggaucuccuucgccaucagcugcuuccugcugugcgucgugcuccugggcuucaucaugugggccugccagaagggcaacauccgcugcaacaucugcaucuga

SEQ ID NO: 77963 - RNA, 1701 nt, Artificial Sequence
  derived and/or modified CDS sequence (opt1) from hemagglutinin__InfluenzaA__EPI328898
augaagaccaucaucgccuucagcugcauccugugccucaucuucgcccagaagcugcccggcuccgacaacagcauggcgacccugugccucgggcaccacgccgugccgaacggcacgcuggucaagaccaucaccgacgaccagaucgaggugaccaacgccacggagcuggugcaguccagcuccaccgggcgcaucugcaacagcccccaccagauccucgacggcaagaacugcacccugaucgacgcccugcucggggacccccacugcgacgacuuccagaacaaggagugggaccuguucgucgagcgguccaccgccuacagcaacugcuaccccuacuacgugccggacuacgcgacgcugcgcucccucguggccagcuccggcaaccuggaguucacccaggagagcuucaacuggaccggcgucgcccaggacggguccagcuacgccugccggcgcggcuccgugaacagcuucuucucccggcugaacuggcucuacaaccugaacuacaaguaccccgagcagaacgugaccaugcccaacaacgacaaguucgacaagcuguacaucuggggcguccaccaccccgggacggacaaggaccagaccaagaucuacgugcaggcgagcgggcgcgugaucgucuccaccaagcggagccagcagaccgugaucccgaacaucggcagccgccccugggugcggggcgucuccagcaucaucuccaucuacuggacgaucgugaagcccggggacauccuccugaucaacagcaccggcaaccugaucgcgccccgcggguacuucaagauccaguccggcaagagcuccaucaugcggagcgacgcccacaucgacgagugcaacuccgagugcaucaccccgaacggcagcauccccaacgacaagcccuuccagaacgugaacaagaucaccuacggggccugcccccgcuacgucaagcagaacacgcucaagcuggccaccggcaugcggaacgugccggagaagcagacccgcgggaucuucggcgccaucgccggguucaucgagaacggcugggagggcaugguggacgggugguacggcuuccggcaccagaacuccgaggggaccggccaggccgccgaccucaagagcacgcaggccgcgaucaaccagaucaccgggaagcugaaccgcgucaucaagaagaccaacgagaaguuccaccagaucgagaaggaguucuccgagguggagggccggauccaggaccuggagaaguacguggaggacaccaagaucgaccuguggagcuacaacgccgagcuccuggucgcccuggagaaccagcacacgaucgaccucaccgacuccgagaugagcaagcuguucgagcgcacccggcgccagcugcgggagaacgccgaggacaugggcaacgggugcuucaagaucuaccacaagugcgacaacgccugcaucggcuccauccgcaacgggaccuacgaccacgacaucuaccgcaacgaggcgcucaacaaccgguuccagaucaagggcgugcagcucaagagcggguacaaggacuggauccuguggaucuccuucgccaucagcugcuuccugcugugcgucgugcugcucggcuucaucaugugggccugccagaagggcaacauccgcugcaacaucugcaucuga

SEQ ID NO: 77964 - RNA, 1701 nt, Artificial Sequence; identical to SEQ ID NO: 77963
  derived and/or modified CDS sequence (opt1) from hemagglutinin__InfluenzaA__EPI328900

SEQ ID NO: 77965 - RNA, 1701 nt, Artificial Sequence
  derived and/or modified CDS sequence (opt1) from hemagglutinin__InfluenzaA__EPI574644
augaagaccaucaucgcccugagcuacauccucugccugguguucgcccagaagcugcccggcaacgacaacuccaccgcgacgcucugccuggggcaccacgccgucccgaacggcaccaucgugaagaccaucaccaacgaccgcaucgaggugacgaacgccaccgagcugguccagaacagcuccaucggggagaucugcgacagcccccaccagauccucgacggcaagaacugcacccugaucgacgcccugcucggggacccccagugcgacggcuuccagaacaagcggugggaccuguucguggagcgcuccaaggccuacagcaacugcuaccccuacgacgugccggacuacgcgucccugcggagccucgucgccuccagcggcacccuggaguucaacgacgaguccuucaacugggccggggugacgcagaacggcaccagcuccgccugcauccgcgggagcaacuccagcuucuucucccggcugaacuggcucacccacagcaacuucaaguaccccgcgcugaacgugaccaugcccaacaacgagcaguucgacaagcuguacaucuggggcguccaccaccccgggacggacaaggaccagaucuuccucuacgcccacuccagcggccgcaucaccgugagcaccaagcggucccagcaggccgugaucccgaacaucggcagccgcccccggauccgcaacauccccucccggaucagcaucuacuggaccaucgucaagcccggggacauccugcugaucaacuccacgggcaaccucaucgccccgcgcggguacuucaagauccagagcggcaaguccagcaucaugcgguccgacgcccccaucggcaagugcaagagcgagugcaucacccccaacggguccauccccaacgacaagccguuccagaacgugaaccgcaucaccuacggcgcgugcccccgguacgugaagcagagcacccugaagcuggccacggggaugcgcaacguccccgagaagcagacccggggcaucuucggggccaucgccggcuucaucgagaacggcugggaggggaugaaggacggcugguacggguuccgccaccagaacuccgagggccgggggcaggccgcggaccucaagagcacccaggccgccaucgaccagaucaacggcaagcugaaccgccugaucggcaagaccaacgagaaguuccaccagaucgagaaggaguucuccgagguggaggggcggauccaggaccucgagaaguacguggaggacacgaagaucgaccuguggagcuacaacgccgagcugcucgucgcccuggagaaccagcacaccaucgaccugaccgacuccgagaugaacaagcuguucgagaagaccaagaagcagcuccgcgagaacgcggaggacaugggcaacgggugcuucaagaucuaccacaagugcgacaacgccugcaucggcagcauccgcaacgggacguacgaccacgacguguaccgggacgaggcccugaacaaccgcuuccagaucaagggcguggagcucaaguccggcuacaaggacuggauccuguggaucagcuucgccaucagcugcuuccugcucugcgucgcccugcugggguucaucaugugggcgugccagaagggcaacauccggugcaacaucugcaucuga

SEQ ID NO: 77966 - RNA, 1701 nt, Artificial Sequence
  derived and/or modified CDS sequence (opt1) from hemagglutinin__InfluenzaA__EPI563212
augaagaccaucaucgcccugagcuacauccucugccugguguucgcccagaagauccccggcaacgacaacaacaccgcgacgcugugccucgggcaccacgccgucccgaacggcaccaucgugaagaccaucaccaacgaccgcaucgaggugacgaacgccaccgagcugguccagaacuccagcaucggggagaucugcgacagcccccaccagauccuggacggcgagaacugcacccucaucgacgcccugcugggggacccccagugcgacggcuuccagaacaagaagugggaccucuucguggagcggagcaaggccuacuccaacugcuaccccuacgacgugccggacuacgcgagccugcgcucccuggucgccagcuccggcacccucgaguucaacaacgagagcuucaacuggacgggggugacccagaacggcaccuccagcgccugcauccggcgcuccagcuccagcuucuucucccggcugaacuggcugacccaccucaacuacaaguaccccgcccugaacgugacgaugcccaacaacgagcaguucgacaagcuguacaucuggggcguccaccaccccgggaccgacaaggaccagaucuucccguacgcgcagagcuccgggcgcaucaccgugagcaccaagcggagccagcaggccgugauccccaacaucggcucccgcccccggauccgcggcauccccagccggaucuccaucuacuggacgaucgucaagccgggggacauccuccugaucaacagcaccggcaaccugaucgcgccccgcggguacuucaagauccgguccggcaagagcuccaucaugcgcagcgacgcccccaucggcaagugcaaguccgagugcaucacccccaacgggagcaucccgaacgacaagcccuuccagaacgugaaccggaucaccuacggcgccugcccccgcuacgugaagcacuccacgcucaagcuggccaccgggaugcggaacguccccgagaagcagacccgcggcaucuucggggccaucgccggcuucaucgagaacggcugggaggggaugguggacggcugguacggguuccggcaccagaacagcgagggccgcgggcaggccgccgaccugaaguccacccaggcggccaucgaccagaucaacggcaagcucaaccggcugaucggcaagacgaacgagaaguuccaccagaucgagaaggaguucagcgagguggaggggcgcauccaggaccuggagaaguacgucgaggacaccaagaucgaccucugguccuacaacgccgagcugcugguggcccucgagaaccagcacaccaucgaccugaccgacagcgagaugaacaagcuguucgagaagacgaagaagcagcuccgcgagaacgccgaggacaugggcaacgggugcuucaagaucuaccacaagugcgacaacgcgugcaucggcuccauccggaacgggaccuacgaccacaacguguaccgcgacgaggcccugaacaaccgguuccagaucaagggcgucgagcugaaguccggcuacaaggacuggauccucuggaucuccuucgccaucagcugcuuccugcugugcguggcccuccugggguucaucaugugggccugccagaagggcaacauccgcugcaacaucugcaucuga

SEQ ID NO: 77967 - RNA, 1701 nt, Artificial Sequence; identical to SEQ ID NO: 77966
  derived and/or modified CDS sequence (opt1) from hemagglutinin__InfluenzaA__EPI553999

SEQ ID NO: 77968 - RNA, 1701 nt, Artificial Sequence
  derived and/or modified CDS sequence (opt1) from hemagglutinin__InfluenzaA__EPI551570
augaagaccaucaucgcccugagcuacauccucugccugguguucgcccagaagauccccggcaacgacaacaacaccgcgacgcugugccucgggcaccacgccgucccgaacggcaccaucgugaagaccaucaccaacgaccgcaucgaggugacgaacgccaccgagcugguccagaacuccagcaucggggagaucugcgacagcccccaccagauccuggacggcgagaacugcacccucaucgacgcccugcugggggacccccagugcgacggcuuccagaacaagaagugggaccucuucguggagcggagcaaggccuacuccaacugcuaccccuacgacgugccggacuacgcgagccugcgcucccuggucgccagcuccggcacccucgaguucaacaacgagagcuucaacuggacgggggugacccagaacggcaccuccagcgccugcauccggcgcuccagcuccagcuucuucucccggcugaacuggcugacccaccucaacuacacguaccccgcccugaacgugaccaugcccaacaacgagcaguucgacaagcuguacaucuggggcguccaccaccccgggaccgacaaggaccagaucuuccucuacgcgcagagcuccgggcgcaucaccgugagcacgaagcggagccagcaggccgugaucccgaacaucggcucccgcccccggauccgcgacauccccagccggaucuccaucuacuggaccaucgucaagcccggcgacauccugcugaucaacagcaccgggaaccucaucgccccgcgcggcuacuucaagauccgguccgggaaguccuccaucaugcgcagcgacgcccccaucggcaagugcaaguccgagugcaucacccccaacggcagcauccccaacgacaagccguuccagaacgugaaccggaucacguacggggccugcccccgcuacgugaagcacuccacccugaagcuggcgaccggcaugcggaacguccccgagaagcagacccgcgggaucuucggcgccaucgccggguucaucgagaacggcugggagggcaugguggacgggugguacggcuuccggcaccagaacagcgaggggcgcggccaggccgccgaccucaaguccacgcaggcggccaucgaccagaucaacgggaagcugaaccggcugaucggcaagaccaacgagaaguuccaccagaucgagaaggaguucagcgagguggagggccgcauccaggaccucgagaaguacgucgaggacaccaagaucgaccugugguccuacaacgccgagcugcucguggcccuggagaaccagcacaccaucgaccugacggacagcgagaugaacaagcuguucgagaagaccaagaagcagcuccgcgagaacgccgaggacauggggaacggcugcuucaagaucuaccacaagugcgacaacgcgugcaucggguccauccggaacggcaccuacgaccacaacguguaccgcgacgaggcccugaacaaccgguuccagaucaagggggucgagcucaagagcggcuacaaggacuggauccuguggaucuccuucgccaucagcugcuuccugcucugcguggcccugcugggcuucaucaugugggccugccagaaggggaacauccgcugcaacaucugcaucuga

SEQ ID NO: 77969 - RNA, 1701 nt, Artificial Sequence
  derived and/or modified CDS sequence (opt1) from hemagglutinin__InfluenzaA__EPI629738
augaagaccaucaucgcccugagcuacauccucugccugguguucgcccagaagauccccggcaacgacaacaacaccgcgacgcugugccucgggcaccacgccgucccgaacggcaccaucgugaagaccaucaccaacgaccgcaucgaggugacgaacgccaccgagcugguccagaacuccagcaucggggagaucugcgacagcccccaccagauccuggacggcgagaacugcacccucaucgacgcccugcugggggacccccagugcgacggcuuccagaacaagaagugggaccucuucguggagcggagcaaggccuacuccaacugcuaccccuacgacgugccggacuacgcgagccugcgcucccuggucgccagcuccggcacccucgaguucaacaacgagagcuucaacuggacgggggugacccagaacggcaccuccagcgccugcauccggcgcuccagcuccagcuucuucucccggcugaacuggcugacccaccucaacuacaaguaccccgcccugaacgugacgaugcccaacaacgagcaguucgacaagcuguacaucuggggcguccaccaccccgggaccgacaaggaccagaucuucccguacgcgcagagcuccgggcgcaucaucgugagcaccaagcggagccagcaggccgugauccccaacaucggcucccgcccccggauccgcgacauccccagccggaucuccaucuacuggaccaucgucaagccgggcgacauccuccugaucaacagcacggggaaccugaucgcgccccgcggcuacuucaagauccgguccgggaaguccuccaucaugcgcagcgacgcccccaucggcaagugcaaguccgagugcaucacccccaacggcagcaucccgaacgacaagcccuuccagaacgugaaccggaucaccuacggggccugcccccgcuacgugaagcacuccacccucaagcuggccacgggcaugcggaacguccccgagaagcagacccgcgggaucuucggcgccaucgccggguucaucgagaacggcugggagggcaugguggacgggugguacggcuuccggcaccagaacagcgaggggcgcggccaggccgccgaccugaaguccacccaggcggccaucgaccagaucaacgggaagcucaaccggcugaucggcaagaccaacgagaaguuccaccagaucgagaaggaguucagcgagguggagggccgcauccaggaccuggagaaguacgucgaggacacgaagaucgaccucugguccuacaacgccgagcugcugguggcccucgagaaccagcacaccaucgaccugaccgacagcgagaugaacaagcuguucgagaagaccaagaagcagcuccgcgagaacgccgaggacauggggaacggcugcuucaagaucuaccacaagugcgacaacgcgugcaucggguccauccggaacggcacguacgaccacaacguguaccgcgacgaggcccugaacaaccgguuccagaucaagggggucgagcucaagagcggcuacaaggacuggauccuguggaucuccuucgccaucagcugcuuccugcugugcguggcccuccugggcuucaucaugugggccugccagaaggggaacauccgcugcaacaucugcaucuga

SEQ ID NO: 77970 - RNA, 1701 nt, Artificial Sequence
  derived and/or modified CDS sequence (opt1) from hemagglutinin__InfluenzaA__EPI631887
augaagaccaucaucgcccugagcuacauccucugccugguguucgcccagaagauccccggcaacgacaacaacaccgcgacgcugugccucgggcaccacgccgucccgaacggcaccaucgugaagaccaucaccaacgaccgcaucgaggugacgaacgccaccgagcugguccagaacuccagcaucggggagaucugcgacagcccccaccagauccuggacggcgagaacugcacccucaucgacgcccugcugggggacccccagugcgacggcuuccagaacaagaagugggaccucuucguggagcggagcaaggccuacuccaacugcuaccccuacgacgugccggacuacgcgagccugcgcucccuggucgccagcuccggcacccucgaguucaacaacgagagcuucaacuggacgggggugacccagaacggcaccuccagcgccugcauccggcgcuccagcuccagcuucuucucccggcugaacuggcugacccaccucaacuacaaguaccccgcccugaacgugacgaugcccaacaacgagcaguucgacaagcuguacaucuggggcguccaccaccccgggaccgacaaggaccagaucuucccguacgcgcagagcuccgggcgcaucaucgugagcaccaagcggagccagcaggccgugauccccaacaucggcucccgcccccggauccgcgacagccccucccggaucagcaucuacuggaccaucgucaagccgggcgacauccuccugaucaacuccacggggaaccugaucgcgccccgcggcuacuucaagauccggagcgggaaguccagcaucaugcgcuccgacgcccccaucggcaagugcaagagcgagugcaucacccccaacggcuccaucccgaacgacaagcccuuccagaacgugaaccggaucaccuacggggccugcccccgcuacgugaagcacagcacccucaagcuggccacgggcaugcggaacguccccgagaagcagacccgcgggaucuucggcgccaucgccggguucaucgagaacggcugggagggcaugguggacgggugguacggcuuccggcaccagaacuccgaggggcgcggccaggccgccgaccugaaguccacccaggcggccaucgaccagaucaacgggaagcucaaccggcugaucggcaagaccaacgagaaguuccaccagaucgagaaggaguucuccgagguggagggccgcauccaggaccuggagaaguacgucgaggacacgaagaucgaccucuggagcuacaacgccgagcugcugguggcccucgagaaccagcacaccaucgaccugaccgacuccgagaugaacaagcuguucgagaagaccaagaagcagcuccgcgagaacgccgaggacauggggaacggcugcuucaagaucuaccacaagugcgacaacgcgugcaucgggagcauccggaacggcacguacgaccacaacguguaccgcgacgaggcccugaacaaccgguuccagaucaagggggucgagcugaaguccggcuacaaggacuggauccucuggaucagcuucgccaucagcugcuuccugcugugcguggcccuccugggcuucaucaugugggccugccagaaggggaacauccgcugcaacaucugcaucuga

SEQ ID NO: 77971 - RNA, 1701 nt, Artificial Sequence
  derived and/or modified CDS sequence (opt1) from hemagglutinin__InfluenzaA__EPI577026
augaagaccaucaucgcccugagcuacauccucugccugguguucgcccagaagauccccggcaacgacaacaacaccgcgacgcugugccucgggcaccacgccgucccgaacggcaccaucgugaagaccaucaccaacgaccgcaucgaggugacgaacgccaccgagcugguccagaacuccagcaucggggagaucugcgacagcccccaccagauccuggacggcgagaacugcacccucaucgacgcccugcugggggacccccagugcgacggcuuccagaacaagaagugggaccucuucguggagcggagcaaggccuacuccaacugcuaccccuacgacgugccggacuacgcgagccugcgcucccuggucgccagcuccggcacccucgaguucaacaacgagagcuucaacuggacgggggugacccagaacggcaccuccagcgccugcauccggcgcuccagcuccagcuucuucucccggcugaacuggcugacccaccucaacuacaaguaccccgcccugaacgugacgaugcccaacaacgagcaguucgacaagcuguacaucuggggcguccaccaccccgggaccgacaaggaccagaucuucccguacgcgcagagcuccgggcgcaucaccgugagcaccaagcggagccagcaggccgugauccccaacaucggcucccgcccccggauccgcggcauccccagccggaucuccaucuacuggacgaucgucaagccgggggacauccuccugaucaacagcaccggcaaccugaucgcgccccgcggguacuucaagauccgguccggcaagagcuccaucaugcgcagcgacgcccccaucggcaagugcaaguccgagugcaucacccccaacgggagcaucccgaacgacaagcccuuccagaacgugaaccggaucaccuacggcgccugcccccgcuacgugaagcacuccacgcucaagcuggccaccgggaugcggaacguccccgagaagcagacccgcggcaucuucggggccaucgccggcuucaucgagaacggcugggaggggaugguggacggcugguacggguuccggcaccagaacagcgagggccgcgggcaggccgccgaccugaaguccacccaggcggccaucgaccagaucaacggcaagcucaaccggcugaucggcaagacgaacgagaaguuccaccagaucgagaaggaguucagcgagguggaggggcgcauccaggaccuggagaaguacgucgaggacaccaagaucgaccucugguccuacaacgccgagcugcugguggcccucgagaaccagcacaccaucgaccugaccgacagcgagaugaacaagcuguucgagaagacgaagaagcagcuccgcgagaacgccgaggacaugggcaacgggugcuucaagaucuaccacaagugcgacaacgcgugcaucgaguccauccggaacggcaccuacgaccacaacguguaccgcgacgaggcccugaacaaccgguuccagaucaagggggucgagcugaaguccggcuacaaggacuggauccucuggaucuccuucgccaucagcugcuuccugcugugcguggcccuccugggcuucaucaugugggccugccagaaggggaacauccgcugcaacaucugcaucuga

SEQ ID NO: 77972 - RNA, 1701 nt, Artificial Sequence; identical to SEQ ID NO: 74018
  derived and/or modified CDS sequence (opt1) from hemagglutinin__InfluenzaA__EPI404927

SEQ ID NO: 77973 - RNA, 1701 nt, Artificial Sequence
  derived and/or modified CDS sequence (opt1) from hemagglutinin__InfluenzaA__EPI489319
augaagaccaucaucgcccugagcuacauccucugccugguguucgcccagaagcugcccggcaacgacaacuccaccgcgacgcucugccuggggcaccacgccgucccgaacggcaccaucgugaagaccaucaccaacgaccgcaucgaggugacgaacgccaccgagcugguccagaacagcuccaucggggagaucugcgacagcccccaccagauccucgacggcgagaacugcacccugaucgacgcccugcucggggacccccagugcgacggcuuccagaacaagaagugggaccuguucguggagcgguccaaggccuacagcaacugcuaccccuacgacgugccggacuacgcgucccugcgcagccucgucgccuccagcggcacccuggaguucaacaacgaguccuucaacugggccggggugacgcagaacggcaccagcuccgccugcaagcgggggagcaacuccagcuucuucucccgccugaacuggcucacccaccugaacuucaaguaccccgcgcugaacgugaccaugcccaacaacgagcaguucgacaagcucuacaucuggggcguccaccaccccgggacggacaaggaccagaucuucccguacgcccagagcuccggccggaucaccgugagcaccaagcgcagccagcaggccgugauccccaacaucggcucccggccccgcauccggaacauccccagccgcaucuccaucuacuggaccaucgucaagccgggggacauccugcugaucaacagcacgggcaaccucaucgcgccccggggguacuucaagauccgcuccggcaagagcuccaucaugcggagcgacgcccccaucggcaagugcaaguccgagugcaucacccccaacgggagcaucccgaacgacaagcccuuccagaacgugaaccgcaucaccuacggcgccugcccccgguacgugaagcaguccacccugaagcuggccacggggaugcgcaacguccccgagaagcagacccggggcaucuucggggccaucgccggcuucaucgagaacggcugggaggggaugguggacggcugguacggguuccgccaccagaacagcgagggccgggggcaggccgcggaccucaaguccacccaggccgccaucgaccagaucaacggcaagcugaaccgccugaucggcaagaccaacgagaaguuccaccagaucgagaaggaguucagcgagguggaggggcggauccaggaccucgagaaguacgucgaggacacgaagaucgaccugugguccuacaacgccgagcugcucguggcccuggagaaccagcacaccaucgaccugaccgacagcgagaugaacaagcuguucgagaagaccaagaagcagcuccgcgagaacgcggaggacaugggcaacgggugcuucaagaucuaccacaagugcgacaacgccugcaucggcuccauccgcaacgggacguacgaccacgacguguaccgggacgaggcccugaacaaccgcuuccagaucaagggcgucgagcucaagagcggcuacaaggacuggauccuguggaucuccuucgccaucagcugcuuccugcucugcguggcccugcugggguucaucaugugggcgugccagaagggcaacauccggugcaacaucugcaucuga

SEQ ID NO: 77974 - RNA, 1701 nt, Artificial Sequence; identical to SEQ ID NO: 76451
  derived and/or modified CDS sequence (opt1) from hemagglutinin__InfluenzaA__EPI530647

SEQ ID NO: 77975 - RNA, 1701 nt, Artificial Sequence; identical to SEQ ID NO: 76465
  derived and/or modified CDS sequence (opt1) from hemagglutinin__InfluenzaA__EPI541083

SEQ ID NO: 77976 - RNA, 1701 nt, Artificial Sequence
  derived and/or modified CDS sequence (opt1) from hemagglutinin__InfluenzaA__EPI684315
augaagaccaucaucgcccugagcuacauccucugccugguguucgcccagaagauccccggcaacgacaacuccaccgcgacgcugugccucgggcaccacgccgucccgaacggcaccaucgugaagaccaucaccaacgaccgcaucgaggugacgaacgccaccgagcugguccagaacagcuccaucggggagaucugcgacagcccccaccagauccuggacggcgagaacugcacccucaucgacgcccugcugggggacccccagugcgacggcuuccagaacaagaagugggaccucuucguggagcgguccaaggccuacagcaacugcuaccccuacgacgugccggacuacgcgucccugcgcagccuggucgccuccagcggcacccucgaguucaacaacgaguccuucaacuggacgggggugacccagaacggcaccagcuccgccugcauccggcgcagcuccagcuccuucuucagccggcugaacuggcugacccaccucaacuacaaguaccccgcccugaacgugacgaugcccaacaacgagcaguucgacaagcuguacaucuggggcguccaccaccccgggaccgacaaggaccagaucuucccguacgcgcaguccagcgggcgcaucaucgugagcaccaagcggucccagcaggccgugauccccaacaucggcagccgcccccggauccgcgacauccccucccggaucagcaucuacuggaccaucgucaagccgggcgacauccuccugaucaacuccacggggaaccugaucgcgccccgcggcuacuucaagauccggagcgggaaguccagcaucaugcgcuccgacgcccccaucggcaagugcaagagcgagugcaucacccccaacggcuccaucccgaacgacaagcccuuccagaacgugaaccggaucaccuacggggccugcccccgcuacgugaagcacagcacccucaagcuggccacgggcaugcggaacguccccgagaagcagacccgcgggaucuucggcgccaucgccggguucaucgagaacggcugggagggcaugguggacgggugguacggcuuccggcaccagaacuccgaggggcgcggccaggccgccgaccucaagagcacccaggcggccaucgaccagaucaacgggaagcugaaccggcugaucggcaagaccaacgagaaguuccaccagaucgagaaggaguucuccgagguggagggccgcauccaggaccuggagaaguacgucgaggacacgaagaucgaccucuggagcuacaacgccgagcugcugguggcccucgagaaccagcacaccaucgaccugaccgacuccgagaugaacaagcuguucgagaagaccaagaagcagcuccgcgagaacgccgaggacauggggaacggcugcuucaagaucuaccacaagugcgacaacgcgugcaucgggagcauccggaacggcacguacgaccacaacguguaccgcgacgaggcccugaacaaccgguuccagaucaagggggucgagcugaaguccggcuacaaggacuggauccucuggaucagcuucgccaucagcugcuuccugcugugcguggcccuccugggcuucaucaugugggccugccagaaggggaacauccgcugcaacaucugcaucuga

SEQ ID NO: 77977 - RNA, 1701 nt, Artificial Sequence
  derived and/or modified CDS sequence (opt1) from hemagglutinin__InfluenzaA__EPI614462
augaagaccaucaucgcccugagcuacauccucugccugguguucgcccagaagcugcccggcaacgacaacuccaccgcgacgcucugccuggggcaccacgccgucccgaacggcaccaucgugaagaccaucaccaacgaccgcaucgaggugacgaacgccaccgagcugguccagaacagcuccaucggggagaucugcgacagcccccaccagauccucgacggcgagaacugcacccugaucgacgcccugcucggggacccccagugcgacggcuuccagaacaagaagugggaccuguucguggagcgguccaaggccuacagcaacugcuaccccuacgacgugccggacuacgcgucccugcgcagccucgucgccuccagcggcacccuggaguucaacaacgaguccuucaacugggccggggugacgcagaacggcaccagcuccagcugcauccggggguccaacagcuccuucuucagccgccugaacuggcucacccaccugaacuccaaguaccccgcccugaacgugaccaugcccaacaacgagcaguucgacaagcucuacaucuggggcguccaccaccccgggacggacaaggaccagaucuuccuguacgcgcagagcagcggccggaucaccguguccacccgccggagccagcaggccgugaucccgaacaucggcucccgcccccggauccgcgacauccccagccggaucuccaucuacuggaccaucgucaagcccggggacauccugcucaucaacagcacgggcaaccugaucgccccgcgcggguacuucaagauccgguccggcaagagcuccaucaugcgcagcgacgcccccaucggcaagugcaaguccgagugcaucacccccaacgggagcauccccaacgacaagccguuccagaacgugaaccggaucaccuacggcgccugcccccgcuacgugaagcaguccacccugaagcucgcgacggggaugcggaacguccccgagcgccagacccggggcaucuucggggccaucgccggcuucaucgagaacggcugggaggggaugguggacggcugguacggguuccgccaccagaacagcgagggccgggggcaggccgccgaccugaaguccacccaggcggccaucgaccagaucaacggcaagcugaaccgccucaucggcaagaccaacgagaaguuccaccagaucgagaaggaguucagcgagguggaggggcgcauccaggaccuggagaaguacgucgaggacacgaagaucgaccugugguccuacaacgccgagcuccugguggcccuggagaaccagcacaccaucgaccucaccgacagcgagaugaacaagcuguucgagaagaccaagaagcagcugcgggagaacgccgaggacaugggcaacgggugcuucaagaucuaccacaagugcgacaacgcgugcaucggcuccauccgcaacgggacguacgaccacgacguguaccgggacgaggcccucaacaaccgcuuccagaucaagggcgucgagcucaagagcggcuacaaggacuggauccuguggaucagcuucgccaucuccugcuuccugcugugcguggcccugcucggguucaucaugugggccugccagaagggcaacauccggugcaacaucugcaucuga

SEQ ID NO: 77978 - RNA, 1701 nt, Artificial Sequence
  derived and/or modified CDS sequence (opt1) from hemagglutinin__InfluenzaA__EPI541465
augaagaccaucaucgcccugagcuacauccucugccugguguucgcccagaagcugcccggcaacgacaacuccaccgcgacgcucugccuggggcaccacgccgucccgaacggcaccaucgugaagaccaucaccaacgaccgcaucgaggugacgaacgccaccgagcugguccagaacagcuccaucggggagaucugcgacagcccccaccagauccucgacggcgagaacugcacccugaucgacgcccugcucggggacccccagugcgacggcuuccagaacaagaagugggaccuguucguggagcgguccaaggccuacagcaacugcuaccccuacgacgugccggacuacgcgucccugcgcagccucgucgccuccagcggcacccuggaguucaacaacgaguccuucaacugggccggggugacgcagaacggcaccagcuccagcugcauccggggguccaacaacagcuucuucucccgccugaacuggcucacccaccugaacagcaaguaccccgcccugaacgugaccaugcccaacaacgagcaguucgacaagcucuacaucuggggcguccaccaccccgggacggacaaggaccagaucuuccuguacgcgcaguccagcggccggaucaccgugagcacccgccggucccagcaggccgugaucccgaacaucggcagccgcccccggauccgcgggauccccucccggaucagcaucuacuggaccaucgucaagcccggcgacauccugcucaucaacuccacggggaaccugaucgccccgcgcggcuacuucaagauccggagcggcaaguccagcaucaugcgcuccgacgcccccaucgggaagugcaagagcgagugcaucacccccaacggcuccauccccaacgacaagccguuccagaacgugaaccggaucaccuacggggccugcccccgcuacgugaagcagagcacccugaagcucgcgacgggcaugcggaacguccccgagcgccagacccgggggaucuucggcgccaucgccggcuucaucgagaacgggugggagggcaugguggacgggugguacggcuuccgccaccagaacuccgaggggcggggccaggccgccgaccucaagagcacccaggcggccaucgaccagaucaacggcaagcugaaccgccugaucgggaagaccaacgagaaguuccaccagaucgagaaggaguucuccgagguggagggccgcauccaggaccuggagaaguacgucgaggacacgaagaucgaccuguggagcuacaacgccgagcuccugguggcccuggagaaccagcacaccaucgaccucaccgacuccgagaugaacaagcuguucgagaagaccaagaagcagcugcgggagaacgccgaggacauggggaacggcugcuucaagaucuaccacaagugcgacaacgcgugcaucgggagcauccgcaacggcacguacgaccacgacguguaccgggacgaggcccucaacaaccgcuuccagaucaagggcgucgagcugaaguccggguacaaggacuggauccuguggaucagcuucgccaucagcugcuuccuccugugcguggcccugcucggcuucaucaugugggccugccagaaggggaacauccggugcaacaucugcaucuga

SEQ ID NO: 77979 - RNA, 1701 nt, Artificial Sequence
  derived and/or modified CDS sequence (opt1) from hemagglutinin__InfluenzaA__EPI696967
augaagaccaucaucgcccugagcuacauccucugccugguguucgcccagaagcugcccggcaacgacaacuccaccgcgacgcucugccuggggcaccacgccgucccgaacggcaccaucgugaagaccaucaccaacgaccgcaucgaggugacgaacgccaccgagcugguccagaacagcuccaucggggagaucugcgacagcccccaccagauccucgacggcgagaacugcacccugaucgacgcccugcucggggacccccagugcgacggcuuccagaacaagaagugggaccuguucguggagcgguccaaggccuacagcaacugcuaccccuacgacgugccggacuacgcgucccugcgcagccucgucgccuccagcggcacccuggaguucaacaacgaguccuucaacugggccggggugacgcagaacggcaccagcuccagcugcauccggggguccaacagcuccuucuucagccgccugaacuggcucacccggcugaacuccaaguaccccgcccugaacgugaccaugcccaacaacgagcaguucgacaagcucuacaucuggggcguccaccaccccgagacggacaaggaccagaucuuccuguacgcgcagagcagcgggcgcaucaccguguccacccggcgcagccagcaggccgugaucccgaacaucggcucccggccccgcauccggggcauccccagccgcaucuccaucuacuggaccaucgucaagcccggggacauccugcucaucaacagcacgggcaaccugaucgccccgcggggguacuucaagauccgcuccggcaagagcuccaucaugcggagcgacgcccccaucggcaagugcaaguccgagugcaucacccccaacgggagcauccccaacgacaagccguuccagaacgugaaccgcaucaccuacggcgccugcccccgguacgugaagcaguccacccugaagcucgcgacggggaugcgcaacguccccgagcggcagacccgcggcaucuucggggccaucgccggcuucaucgagaacggcugggaggggaugguggacggcugguacggguuccggcaccagaacagcgagggccgcgggcaggccgccgaccugaaguccacccaggcggccaucgaccagaucaacggcaagcugaaccgccucaucggcaagaccaacgagaaguuccaccagaucgagaaggaguucagcgagguggaggggcggauccaggaccuggagaaguacgucgaggacacgaagaucgaccugugguccuacaacgccgagcuccugguggcccuggagaaccagcacaccaucgaccucaccgacagcgagaugaacaagcuguucgagaagaccaagaagcagcugcgcgagaacgccgaggacaugggcaacgggugcuucaagaucuaccacaagugcgacaacgcgugcaucggcuccauccggaacgggacguacgaccacgacguguaccgcgacgaggcccucaacaaccgguuccagaucaagggcgucgagcucaagagcggcuacaaggacuggauccuguggaucagcuucgccaucuccugcuuccugcugugcguggcccugcucggguucaucaugugggccugccagaagggcaacauccgcugcaacaucugcaucuga

SEQ ID NO: 77980 - RNA, 1701 nt, Artificial Sequence
  derived and/or modified CDS sequence (opt1) from hemagglutinin__InfluenzaA__EPI674597
augaagaccaucaucgcccugagcuacauccucugccugguguucgcccagaagcugcccggcaacgacaacuccaccgcgacgcucugccuggggcaccacgccgucccgaacggcaccaucgugaagaccaucaccaacgaccgcaucgaggugacgaacgccaccgagcugguccagaacagcuccaucggggagaucugcgacagcccccaccagauccucgacggcgagaacugcacccugaucgacgcccugcucggggacccccagugcgacggcuuccagaacaagaagugggaccuguucguggagcgguccaaggccuacagcaacugcuaccccuacgacgugccggacuacgcgucccugcgcagccucgucgccuccagcggcacccuggaguucaacaacgaguccuucaacugggccggggugacgcagaacggcaccagcuccagcugcauccggggguccaacaacagcuucuucucccgccugaacuggcucacccaccugaacagcaaguaccccgcccugaacgugaccaugcccaacaacgagcaguucgacaagcucuacaucuggggcguccaccaccccgugacggacaaggaccagaucuuccuguacgcgcaguccagcgggcggaucaccgugagcacccgccggucccagcaggccgucaucccgaacaucggcagccgcccccggauccgcggcauccccucccggaucagcaucuacuggaccaucgugaagcccggggacauccugcucaucaacuccacgggcaaccugaucgccccgcgcggguacuucaagauccggagcggcaaguccagcaucaugcgcuccgacgcccccaucggcaagugcaagagcgagugcaucacccccaacggguccauccccaacgacaagccguuccagaacgugaaccggaucaccuacggcgccugcccccgcuacgucaagcagagcacccugaagcucgcgacggggaugcggaacgugcccgagcgccagacccggggcaucuucggggccaucgccggcuucaucgagaacggcugggaggggaugguggacggcugguacggguuccgccaccagaacuccgagggccgggggcaggccgccgaccucaagagcacccaggcggccaucgaccagaucaacggcaagcugaaccgccugaucggcaagaccaacgagaaguuccaccagaucgagaaggaguucuccgaggucgaggggcgcauccaggaccuggagaaguacguggaggacacgaagaucgaccuguggagcuacaacgccgagcuccugguggcccuggagaaccagcacaccaucgaccucaccgacuccgagaugaacaagcuguucgagaagaccaagaagcagcugcgggagaacgccgaggacaugggcaacgggugcuucaagaucuaccacaagugcgacaacgcgugcaucggcagcauccgcaacgggacguacgaccacgacgucuaccgggacgaggcccucaacaaccgcuuccagaucaagggcguggagcugaaguccggcuacaaggacuggauccuguggaucagcuucgccaucagcugcuuccuccugugcguggcccugcucggguucaucaugugggccugccagaagggcaacauccggugcaacaucugcaucuga

SEQ ID NO: 77981 - RNA, 1701 nt, Artificial Sequence
  derived and/or modified CDS sequence (opt1) from hemagglutinin__InfluenzaA__EPI530677
augaagaccaucaucgcccugagcuacauccucugccugguguucgcccagaagcugcccggcaacgacaacuccaccgcgacgcucugccuggggcaccacgccgucccgaacggcaccaucgugaagaccaucaccaacgaccgcaucgaggugacgaacgccaccgagcugguccagaacagcuccaucggggagaucugcgacagcccccaccagauccucgacggcgagaacugcacccugaucgacgcccugcucggggacccccagugcgacggcuuccagaacaagaagugggaccuguucguggagcgguccaaggccuacagcaacugcuaccccuacgacgugccggacuacgcgucccugcgcagccucgucgccuccagcggcacccuggaguucaacaacgaguccuucaacugggccggggugacgcagaacggcaccagcuccagcugcauccggggguccaacagcuccuucuucagccgccugaacuggcucacccaccugaacuccaaguaccccgcccugaacgugaccaugcccaacaacgagcaguucgacaagcucuacaucuggggcguccaccaccccgggacggacaaggaccagaucuuccuguacgcgcagagcagcggccggaucaccguguccaccaagcgcagccagcaggccgugaucccgaacaucggcucccggccccgcauccgggacauccccagccgcaucuccaucuacuggaccaucgucaagcccggggacauccugcucaucaacagcacgggcaaccugaucgccccgcggggguacuucaagauccgcuccggcaagagcuccaucaugcggagcgacgcccccaucggcaagugcaaguccgagugcaucacccccaacgggagcauccccaacgacaagccguuccagaacgugaaccgcaucaccuacggcgccugcccccgguacgugaagcaguccacccugaagcucgcgacggggaugcgcaacguccccgagaagcagacccggggcaucuucggggccaucgccggcuucaucgagaacggcugggaggggaugguggacggcugguacggguuccgccaccagaacagcgagggccgggggcaggccgccgaccugaaguccacccaggcggccaucgaccagaucaacggcaagcugaaccgccucaucggcaagaccaacgagaaguuccaccagaucgagaaggaguucagcgagguggaggggcggauccaggaccuggagaaguacgucgaggacacgaagaucgaccugugguccuacaacgccgagcuccugguggcccuggagaaccagcacaccaucgaccucaccgacagcgagaugaacaagcuguucgagaagaccaagaagcagcugcgcgagaacgccgaggacaugggcaacgggugcuucaagaucuaccacaagugcgacaacgcgugcaucggcuccauccgcaacgggacguacgaccacgacguguaccgggacgaggcccucaacaaccgcuuccagaucaagggcgucgagcucaagagcggcuacaaggacuggauccuguggaucagcuucgccaucuccugcuuccugcugugcguggcccugcucggguucaucaugugggccugccagaagggcaacauccggugcaacaucugcaucuga

SEQ ID NO: 77982 - RNA, 1701 nt, Artificial Sequence
  derived and/or modified CDS sequence (opt1) from hemagglutinin__InfluenzaA__EPI530679
augaagaccaucaucgcccugagcuacauccucugccugguguucgcccagaagcugcccggcaacgacaacuccaccgcgacgcucugccuggggcaccacgccgucccgaacggcaccaucgugaagaccaucaccaacgaccgcaucgaggugacgaacgccaccgagcugguccagaacagcuccaucggggagaucugcgacagcccccaccagauccucgacggcgagaacugcacccugaucgacgcccugcucggggacccccagugcgacggcuuccagaacaagaagugggaccuguucguggagcgguccaaggccuacagcaacugcuaccccuacgacgugccggacuacgcgucccugcgcagccucgucgccuccagcggcacccuggaguucaacaacgaguccuucaacugggccggggugacgcagaacggcaccagcuccagcugcauccggggguccaacagcuccuucuucagccgccugaacuggcucacccaccugaacuucaaguaccccgcccugaacgugaccaugcccaacaacgagcaguucgacaagcucuacaucuggggcguccaccaccccgggacggacaaggaccagaucuuccuguacgcgcaguccagcggccggaucaccgugagcaccaagcgcucccagcaggccgugaucccgaacaucggcagccggccccgcauccgggacauccccucccgcaucagcaucuacuggaccaucgucaagcccggggacauccugcucaucaacuccacgggcaaccugaucgccccgcggggguacuucaagauccgcagcggcaaguccagcaucaugcgguccgacgcccccaucggcaagugcaagagcgagugcaucacccccaacggguccauccccaacgacaagccguuccagaacgugaaccgcaucaccuacggcgccugcccccgguacgugaagcagagcacccugaagcucgcgacggggaugcgcaacguccccgagaagcagacccggggcaucuucggggccaucgccggcuucaucgagaacggcugggaggggaugguggacggcugguacggguuccgccaccagaacuccgagggccgggggcaggccgccgaccucaagagcacccaggcggccaucgaccagaucaacggcaagcugaaccgccugaucggcaagaccaacgagaaguuccaccagaucgagaaggaguucuccgagguggaggggcggauccaggaccuggagaaguacgucgaggacacgaagaucgaccuguggagcuacaacgccgagcuccugguggcccuggagaaccagcacaccaucgaccucaccgacuccgagaugaacaagcuguucgagaagaccaagaagcagcugcgcgagaacgccgaggacaugggcaacgggugcuucaagaucuaccacaagugcgacaacgcgugcaucggcagcauccgcaacgggacguacgaccacgacguguaccgggacgaggcccucaacaaccgcuuccagaucaagggcgucgagcugaaguccggcuacaaggacuggauccuguggaucagcuucgccaucagcugcuuccuccugugcguggcccugcucggguucaucaugugggccugccagaagggcaacauccggugcaacaucugcaucuga

SEQ ID NO: 77983 - RNA, 1701 nt, Artificial Sequence; identical to SEQ ID NO: 64046
  derived and/or modified CDS sequence (opt1) from hemagglutinin__InfluenzaA__AAG01785

SEQ ID NO: 77984 - RNA, 1701 nt, Artificial Sequence; identical to SEQ ID NO: 76451
  derived and/or modified CDS sequence (opt1) from hemagglutinin__InfluenzaA__EPI814528

SEQ ID NO: 77985 - RNA, 1701 nt, Artificial Sequence
  derived and/or modified CDS sequence (opt1) from hemagglutinin__InfluenzaA__EPI674736
augaagaccaucaucgcccugagcuacauccucugccugguguucgcccagaagcugcccggcaacgacaacuccaccgcgacgcucugccuggggcaccacgccgucccgaacggcaccaucgugaagaccaucaccaacgaccgcaucgaggugacgaacgccaccgagcugguccagaacagcuccaucggggagaucugcgacagcccccaccagauccucgacggcgagaacugcacccugaucgacgcccugcucggggacccccagugcgacggcuuccagaacaagaagugggaccuguucguggagcgguccaaggccuacagcaacugcuaccccuacgacgugccggacuacgcgucccugcgcagccucgucgccuccagcggcacccuggaguucaacaacgaguccuucaacugggccggggugacgcagaacggcaccagcuccagcugccggcgcggguccaacagcuccuucuucagccggcugaacuggcucacccaccugaacuccaaguaccccgcccugaacgugaccaugcccaacaacgagcaguucgacaagcucuacaucuggggcguccaccaccccgugacggacaaggaccagaucuuccuguacgcgcagagcagcgggcgcaucaccguguccaccaagcggagccagcaggccgucaucccgaacaucggcucccgcccccggauccgcgacauccccagccggaucuccaucuacuggaccaucgugaagcccggcgacauccugcucaucaacagcacggggaaccugaucgccccgcgcggcuacuucaagauccgguccggcaagagcuccaucaugcgcagcgacgcccccaucgggaagugcaaguccgagugcaucacccccaacggcagcauccccaacgacaagccguuccagaacgugaaccggaucaccuacggggccugcccccgcuacgucaagcaguccacccugaagcucgcgacgggcaugcggaacgugcccgagcgccagacccgggggaucuucggcgccaucgccggguucaucgagaacggcugggagggcaugguggacgggugguacggcuuccgccaccagaacagcgaggggcggggccaggccgccgaccugaaguccacccaggcggccaucgaccagaucaacgggaagcugaaccgccucaucggcaagaccaacgagaaguuccaccagaucgagaaggaguucagcgaggucgagggccgcauccaggaccuggagaaguacguggaggacacgaagaucgaccugugguccuacaacgccgagcuccugguggcccuggagaaccagcacaccaucgaccucaccgacagcgagaugaacaagcuguucgagaagaccaagaagcagcugcgggagaacgccgaggacauggggaacggcugcuucaagaucuaccacaagugcgacaacgcgugcaucggguccauccgcaacggcacguacgaccacgacgucuaccgggacgaggcccucaacaaccgcuuccagaucaaggggguggagcucaagagcggcuacaaggacuggauccuguggaucagcuucgccaucuccugcuuccugcugugcguggcccugcucggcuucaucaugugggccugccagaaggggaacauccggugcaacaucugcaucuga

SEQ ID NO: 77986 - RNA, 1701 nt, Artificial Sequence; identical to SEQ ID NO: 76451
  derived and/or modified CDS sequence (opt1) from hemagglutinin__InfluenzaA__EPI614444

SEQ ID NO: 77987 - RNA, 1701 nt, Artificial Sequence
  derived and/or modified CDS sequence (opt1) from hemagglutinin__InfluenzaA__EPI551814
augaagaccaucaucgcccugagcuacauccucugccugguguucgcccagaagcugcccggcaacgacaacuccaccgcgacgcucugccuggggcaccacgccgucccgaacggcaccaucgugaagaccaucaccaacgaccgcaucgaggugacgaacgccaccgagcugguccagaacagcuccaucggggagaucugcgacagcccccaccagauccucgacggcgagaacugcacccugaucgacgcccugcucggggacccccagugcgacggcuuccagaacaagaagugggaccuguucguggagcgguccaaggccuacagcaacugcuaccccuacgacgugccggacuacgcgucccugcgcagccucgucgccuccagcggcacccuggaguucaacaacgaguccuucaacugggccggggugacgcagaacggcaccagcuccagcugccggcgcggguccaacagcuccuucuucagccggcugaacuggcucacccgccugaacuccaaguaccccgcccugaacgugaccaugcccaacaacgagcaguucgacaagcucuacaucuggggcguccaccaccccgugacggacaaggaccagaucuuccuguacgcgcagagcagcgggcggaucaccguguccaccaagcgcagccagcaggccgucaucccgaacaucggcucccggccccgcauccgggacauccccagccgcaucuccaucuacuggaccaucgugaagcccggcgacauccugcucaucaacagcacggggaaccugaucgccccgcggggcuacuucaagauccgcuccggcaagagcuccaucaugcggagcgacgcccccaucgggaagugcaaguccgagugcaucacccccaacggcagcauccccaacgacaagccguuccagaacgugaaccgcaucaccuacggggccugcccccgguacgucaagcaguccacccugaagcucgcgacgggcaugcgcaacgugcccgagcggcagacccgcgggaucuucggcgccaucgccggguucaucgagaacggcugggagggcaugguggacgggugguacggcuuccggcaccagaacagcgaggggcgcggccaggccgccgaccugaaguccacccaggcggccaucgaccagaucaacgggaagcugaaccgccucaucggcaagaccaacgagaaguuccaccagaucgagaaggaguucagcgaggucgagggccggauccaggaccuggagaaguacguggaggacacgaagaucgaccugugguccuacaacgccgagcuccugguggcccuggagaaccagcacaccaucgaccucaccgacagcgagaugaacaagcuguucgagaagaccaagaagcagcugcgcgagaacgccgaggacauggggaacggcugcuucaagaucuaccacaagugcgacaacgcgugcaucggguccauccggaacggcacguacgaccacgacgucuaccgcgacgaggcccucaacaaccgguuccagaucaaggggguggagcucaagagcggcuacaaggacuggauccuguggaucagcuucgccaucuccugcuuccugcugugcguggcccugcucggcuucaucaugugggccugccagaaggggaacauccgcugcaacaucugcaucuga

SEQ ID NO: 77988 - RNA, 1701 nt, Artificial Sequence
  derived and/or modified CDS sequence (opt1) from hemagglutinin__InfluenzaA__EPI696955
augaagaccaucaucgcccugagcuacauccucugccugguguucgcccagaagcugcccggcaacgacaacuccaccgcgacgcucugccuggggcaccacgccgucccgaacggcaccaucgugaagaccaucaccaacgaccgcaucgaggugacgaacgccaccgagcugguccagaacagcuccaucggggagaucugcgacagcccccaccagauccucgacggcgagaacugcacccugaucgacgcccugcucggggacccccagugcgacggcuuccagaacaagaagugggaccuguucguggagcgguccaaggccuacagcaacugcuaccccuacgacgugccggacuacgcgucccugcgcagccucgucgccuccagcggcacccuggaguucaacaacgaguccuucaacugggccggggugacgcagaacggcaccagcuccagcugccggcgcggguccaacagcuccuucuucagccggcugaacuggcucacccaccugaacuccaaguaccccgcccugaacgugaccaugcccaacaacgagcaguucgacaagcucuacaucuggggcguccaccaccccgugacggacaaggaccagaucuuccuguacgcgcagagcagcgggcgcaucaccguguccaccaagcggagccagcaggccgucaucccgaacaucggcuaccgcccccggauccgcgacauccccucccggaucagcaucuacuggaccaucgugaagcccggcgacauccugcucaucaacuccacggggaaccugaucgccccgcgcggcuacuucaagauccggagcgggaaguccagcaucaugcgcuccgacgcccccaucggcaagugcaagagcgagugcaucacccccaacggcuccauccccaacgacaagccguuccagaacgugaaccggaucaccuacggggccugcccccgcuacgucaagcagagcacccugaagcucgcgacgggcaugcggaacgugcccgagcgccagacccgggggaucuucggcgccaucgccggguucaucgagaacggcugggagggcaugguggacgggugguacggcuuccgccaccagaacuccgaggggcggggccaggccgccgaccucaagagcacccaggcggccaucgaccagaucaacgggaagcugaaccgccugaucggcaagaccaacgagaaguuccaccagaucgagaaggaguucuccgaggucgagggccgcauccaggaccuggagaaguacguggaggacacgaagaucgaccuguggagcuacaacgccgagcuccugguggcccuggagaaccagcacaccaucgaccucaccgacuccgagaugaacaagcuguucgagaagaccaagaagcagcugcgggagaacgccgaggacauggggaacggcugcuucaagaucuaccacaagugcgacaacgcgugcaucgggagcauccgcaacggcacguacgaccacgacgucuaccgggacgaggcccucaacaaccgcuuccagaucaaggggguggagcugaaguccggcuacaaggacuggauccuguggaucagcuucgccaucagcugcuuccuccugugcguggcccugcucggcuucaucaugugggccugccagaaggggaacauccggugcaacaucugcaucuga

SEQ ID NO: 77989 - RNA, 1701 nt, Artificial Sequence
  derived and/or modified CDS sequence (opt1) from hemagglutinin__InfluenzaA__EPI740790
augaagaccaucaucgcccugagcuacauccucugccugguguucgcccagaagcugcccggcaacgacaacuccaccgcgacgcucugccuggggcaccacgccgucccgaacggcaccaucgugaagaccaucaccaacgaccgcaucgaggugacgaacgccaccgagcugguccagaacagcuccaucggggagaucugcgacagcccccaccagauccucgacggcgagaacugcacccugaucgacgcccugcucggggacccccagugcgacggcuuccagaacaagaagugggaccuguucguggagcgguccaaggccuacagcaacugcuaccccuacgacgugccggacuacgcgucccugcgcagccucgucgccuccagcggcacccuggaguucaacaacgaguccuucaacugggccggggugacgcagaacggcaccagcuccagcugccggcgcggguccaacagcuccuucuucagccggcugaacuggcucacccaccugaacuccaaguaccccgcccugaacgugaccaugcccaacaacgagcaguucgacaagcucuacaucuggggcguccaccaccccgugacggacaaggaccagaucuuccuguacgcgcagagcagcgggcgcaucaccguguccaccaagcggagccagcaggccgucaucccgaacaucggcuuccgcccccggauccgcgacauccccucccggaucagcaucuacuggaccaucgugaagcccggcgacauccugcucaucaacuccacggggaaccugaucgccccgcgcggcuacuucaagauccggagcgggaaguccagcaucaugcgcuccgacgcccccaucggcaagugcaagagcgagugcaucacccccaacggcuccauccccaacgacaagccguuccagaacgugaaccggaucaccuacggggccugcccccgcuacgucaagcagagcacccugaagcucgcgacgggcaugcggaacgugcccgagcgccagacccgggggaucuucggcgccaucgccggguucaucgagaacggcugggagggcaugguggacgggugguacggcuuccgccaccagaacuccgaggggcggggccaggccgccgaccucaagagcacccaggcggccaucgaccagaucaacgggaagcugaaccgccugaucggcaagaccaacgagaaguuccaccagaucgagaaggaguucuccgaggucgagggccgcauccaggaccuggagaaguacguggaggacacgaagaucgaccuguggagcuacaacgccgagcuccugguggcccuggagaaccagcacaccaucgaccucaccgacuccgagaugaacaagcuguucgagaagaccaagaagcagcugcgggagaacgccgaggacauggggaacggcugcuucaagaucuaccacaagugcgacaacgcgugcaucgggagcauccgcaacggcacguacgaccacgacgucuaccgggacgaggcccucaacaaccgcuuccagaucaaggggguggagcugaaguccggcuacaaggacuggauccuguggaucagcuucgccaucagcugcuuccuccugugcguggcccugcucggcuucaucaugugggccugccagaaggggaacauccggugcaacaucugcaucuga

SEQ ID NO: 77990 - RNA, 1701 nt, Artificial Sequence; identical to SEQ ID NO: 72733
  derived and/or modified CDS sequence (opt1) from hemagglutinin__InfluenzaA__EPI377499

SEQ ID NO: 77991 - RNA, 1701 nt, Artificial Sequence
  derived and/or modified CDS sequence (opt1) from hemagglutinin__InfluenzaA__EPI391247
augaagaccaucaucgcccugagcuacauccucugccugguguucgcccagaagcugcccggcaacgacaacuccaccgcgacgcucugccuggggcaccacgccgucccgaacggcaccaucgugaagaccaucaccaacgaccgcaucgaggugacgaacgccaccgagcugguccagaacagcuccaucggggagaucugcgacagcccccaccagauccucgacggcgagaacugcacccugaucgacgcccugcucggggacccccagugcgacggcuuccagaacaagaagugggaccuguucguggagcgguccaaggccuacagcaacugcuaccccuacgacgugccggacuacgcgucccugcgcagccucgucgccuccagcggcacccuggaguucaacaacgaguccuucaacuggaacggggugacgcagaacggcaccagcuccgccugcauccggcgcagcaacaacuccuucuucagccggcugaacuggcucacccaccugaacuucaaguaccccgcccugaacgugaccaugcccaacaacgagcaguucgacaagcucuacaucuggggcguccaccaccccgugacggacaaggaccagaucuuccuguacgcgcagccguccgggcgcaucaccgugagcaccaagcggucccagcaggccgucauccccaacaucggguuccgcccccggauccgcaacauccccagccggaucagcaucuacuggaccaucgugaagccgggcgacauccugcucaucaacuccacgggcaaccugaucgcgccccgcggguacuucaagauccggagcggcaaguccagcaucaugcgcuccgacgcccccaucgggaagugcaagagcgagugcaucacccccaacggcuccaucccgaacgacaagcccuuccagaacgugaaccggaucaccuacggcgccugcccccgcuacgucaagcagagcacccugaagcucgccacggggaugcggaacgugcccgagaagcagacccgcggcaucuucggggccaucgccggcuucaucgagaacgggugggagggcaugguggacggcugguacggguuccggcaccagaacuccgagggccgcgggcaggccgccgaccucaagagcacccaggcggccaucgaccagaucaacggcaagcugaaccggcugaucgggaagaccaacgagaaguuccaccagaucgagaaggaguucuccgaggucgagggccgcauccaggaccuggagaaguacguggaggacacgaagaucgaccuguggagcuacaacgccgagcuccugguggcccuggagaaccagcacaccaucgaccucaccgacuccgagaugaacaagcuguucgagaagaccaagaagcagcugcgcgagaacgccgaggacaugggcaacgggugcuucaagaucuaccacaagugcgacaacgcgugcaucggcagcauccggaacgggacguacgaccacgacgucuaccgcgacgaggcccucaacaaccgguuccagaucaagggcguggagcugaaguccggguacaaggacuggauccuguggaucagcuucgccaucuccugcuuccuccugugcguggcccugcucggcuucaucaugugggccugccagaagggcaacauccgcugcaacaucugcaucuga

SEQ ID NO: 77992 - RNA, 1701 nt, Artificial Sequence
  derived and/or modified CDS sequence (opt1) from hemagglutinin__InfluenzaA__EPI407123
augaagaccaucaucgcccugagcuacauccucugccugguguucgcccagaagcugcccggcaacgacaacuccaccgcgacgcucugccuggggcaccacgccgucccgaacggcaccaucgugaagaccaucaccaacgaccgcaucgaggugacgaacgccaccgagcugguccagaacagcuccaucggggagaucugcgacagcccccaccagauccucgacggcgagaacugcacccugaucgacgcccugcucggggacccccagugcgacggcuuccagaacaagaagugggaccuguucguggagcgguccaaggccuacagcaacugcuaccccuacgacgugccggacuacgcgucccugcgcagccucgucgccuccagcggcacccuggaguucaacaacgaguccuucaacuggaacggggugacgcagaacggcaccagcuccgccugcauccggcgcagcaacaacuccuucuucagccggcugaacuggcucacccaccugaacuucaaguaccccgcccugaacgugaccaugcccaacaacgagcaguucgacaagcucuacaucuggggcguccaccaccccgugacggacaaggaccagaucuuccuguacgcgcagccguccgggcgcaucaccgugagcaccaagcggucccagcaggccgucauccccaacaucggguuccgcccccggauccgcaacaaccccagccggaucagcaucuacuggaccaucgugaagccgggcgacauccugcucaucaacuccacgggcaaccugaucgcgccccgcggguacuucaagauccggagcggcaaguccagcaucaugcgcuccgacgcccccaucgggaagugcaagagcgagugcaucacccccaacggcuccaucccgaacgacaagcccuuccagaacgugaaccggaucaccuacggcgccugcccccgcuacgucaagcagagcacccugaagcucgccacggggaugcggaacgugcccgagaagcagacccgcggcaucuucggggccaucgccggcuucaucgagaacgggugggagggcaugguggacggcugguacggguuccggcaccagaacuccgagggccgcgggcaggccgccgaccucaagagcacccaggcggccaucgaccagaucaacggcaagcugaaccggcugaucggggagaccaacgagaaguuccaccagaucgagaaggaguucuccgaggucgagggccgcauccaggaccuggagaaguacguggaggacacgaagaucgaccuguggagcuacaacgccgagcuccugguggcccuggagaaccagcacaccaucgaccucaccgacuccgagaugaacaagcuguucgagaagaccaagaagcagcugcgcgagaacgccgaggacaugggcaacgggugcuucaagaucuaccacaagugcgacaacgcgugcaucggcagcauccggaacgggacguacgaccacgacgucuaccgcgacgaggcccucaacaaccgguuccagaucaagggcguggagcugaaguccggguacaaggacuggauccuguggaucagcuucgccaucuccugcuuccuccugugcguggcccugcucggcuucaucaugugggccugccagaagggcaacauccgcugcaacaucugcaucuga

SEQ ID NO: 77993 - RNA, 1701 nt, Artificial Sequence
  derived and/or modified CDS sequence (opt1) from hemagglutinin__InfluenzaA__EPI407126
augaagaccaucaucgcccugagcuacauccucugccugguguucgcccagaagcugcccggcaacgacaacuccaccgcgacgcucugccuggggcaccacgccgucccgaacggcaccaucgugaagaccaucaccaacgaccgcaucgaggugacgaacgccaccgagcugguccagaacagcuccaucggggagaucugcgacagcccccaccagauccucgacggcgagaacugcacccugaucgacgcccugcucggggacccccagugcgacggcuuccagaacaagaagugggaccuguucguggagcgguccaaggccuacagcaacugcuaccccuacgacgugccggacuacgcgucccugcgcagccucgucgccuccagcggcacccuggaguucaacaacgaguccuucaacuggaacggggugacgcagaacggcaccagcuccgccugcauccggcgcagcaacaacuccuucuucagccggcugaacuggcucacccaccugaacuucaaguaccccgcccugaacgugaccaugcccaacaacgagcaguucgacaagcucuacaucuggggcguccaccaccccgugacggacaaggaccagaucuuccuguacgcgcagccguccgggcgcaucaccgugagcaccaagcggucccagcaggccgucauccccaacaucggguuccgcccccggauccgcaacaaccccagccggaucagcaucuacuggaccaucgugaagccgggcgacauccugcucaucaacuccacgggcaaccugaucgcgccccgcggguacuucaagauccggagcggcaaguccagcaucaugcgcuccgacgcccccaucgggaagugcaagagcgagugcaucacccccaacggcuccaucccgaacgacaagcccuuccagaacgugaaccggaucaccuacggcgccugcccccgcuacgucaagcagagcacccugaagcucgccacggggaugcggaacgugcccgagaagcagacccgcggcaucuucggggccaucgccggcuucaucgagaacgggugggagggcaugguggacggcugguacggguuccggcaccagaacuccgagggccgcgggcaggccgccgaccucaagagcacccaggcggccaucgaccagaucaacggcaagcugaaccggcugaucgggaagaccaacgagaaguuccaccagaucgagaaggaguucuccgaggucgagggccgcauccaggaccuggagaaguacguggaggacacgaagaucgaccuguggagcuacaacgccgagcuccugguggcccuggagaaccagcacaccaucgaccucaccgacuccgagaugaacaagcuguucgagaagaccaagaagcagcugcgcgagaacgccgaggacaugggcaacgggugcuucaagaucuaccacaagugcgacaacgcgugcaucggcagcauccggaacgggacguacgaccacgacgucuaccgcgacgaggcccucaacaaccgguuccagaucaagggcguggagcugaaguccggguacaaggacuggauccuguggaucagcuucgccaucuccugcuuccuccugugcguggcccugcucggcuucaucaugugggccugccagaagggcaacauccgcugcaacaucugcaucuga

SEQ ID NO: 77994 - RNA, 1701 nt, Artificial Sequence; identical to SEQ ID NO: 77879
  derived and/or modified CDS sequence (opt1) from hemagglutinin__InfluenzaA__EPI562037

SEQ ID NO: 77995 - RNA, 1701 nt, Artificial Sequence; identical to SEQ ID NO: 76465
  derived and/or modified CDS sequence (opt1) from hemagglutinin__InfluenzaA__EPI562034

SEQ ID NO: 77996 - RNA, 1701 nt, Artificial Sequence
  derived and/or modified CDS sequence (opt1) from hemagglutinin__InfluenzaA__EPI653140
augaagaccaucaucgcccugagcuacauccucugccugguguucgcccagaagauccccggcaacgacaacuccaccgcgacgcugugccucgggcaccacgccgucccgaacggcaccaucgugaagaccaucaccaacgaccgcaucgaggugacgaacgccaccgagcugguccagaacagcuccaucggggagaucugcgacagcccccaccagauccuggacggcgagaacugcacccucaucgacgcccugcugggggacccccagugcgacggcuuccagaacaagaagugggaccucuucguggagcgguccaaggccuacagcuccugcuaccccuacgacgugccggacuacgcgagccugcgcucccuggucgccagcuccggcacccucgaguucaacaacgagagcuucaacuggacgggggugacccagaacggcaccuccagcgccugcauccggcgcuccagcuccagcuucuucucccggcugaacuggcugacccaccucaacuacaaguaccccgcccugaacgugacgaugcccaacaacgagcaguucgacaagcuguacaucuggggcguccaccaccccgggaccgacaaggaccagaucuucccguacgcgcagagcagcgggcgcaucaccguguccaccaagcggagccagcaggccgugauccccaacaucggcucccgcccccggauccgcggcauccccagccggaucuccaucuacuggacgaucgucaagccgggggacauccuccugaucaacagcaccggcaaccugaucgcgccccgcggguacuucaagauccgguccggcaagagcuccaucaugcgcagcgacgcccccaucggcaagugcaaguccgagugcaucacccccaacgggagcaucccgaacgacaagcccuuccagaacgugaaccggaucaccuacggcgccugcccccgcuacgugaagcacuccacgcucaagcuggccaccgggaugcggaacguccccgagaagcagacccgcggcaucuucggggccaucgccggcuucaucgagaacggcugggaggggaugguggacggcugguacggguuccggcaccagaacagcgagggccgcgggcaggccgccgaccugaaguccacccaggcggccaucgaccagaucaacggcaagcucaaccggcugaucggcaagacgaacgagaaguuccaccagaucgagaaggaguucagcgagguggaggggcgcauccaggaccuggagaaguacgucgaggacaccaagaucgaccucugguccuacaacgccgagcugcugguggcccucgagaaccagcacaccaucgaccugaccgacagcgagaugaacaagcuguucgagaagacgaagaagcagcuccgcgagaacgccgaggacaugggcaacgggugcuucaagaucuaccacaagugcgacaacgcgugcaucggcuccauccggaacgggaccuacgaccacaacguguaccgcgacgaggcccugaacaaccgguuccagaucaagggcgucgagcucaagagcggcuacaaggacuggauccuguggaucagcuucgccaucuccugcuuccugcugugcguggcccuccugggguucaucaugugggccugccagaagggcaacauccgcugcaacaucugcaucuga

SEQ ID NO: 77997 - RNA, 1707 nt, Artificial Sequence
  derived and/or modified CDS sequence (opt1) from hemagglutinin__InfluenzaA__ACR48873/m
auggagaagaucgugcugcuguucgccaucgucagccuggugaaguccgaccagaucugcaucggcuaccacgccaacaacagcaccgagcaggucgacaccaucauggagaagaacgugacggugacccacgcgcaggacauccuggagaagacccacaacgggaagcucugcgaccuggacggcgugaagccccugauccuccgcgacugcuccgucgccggguggcugcugggcaacccgaugugcgacgaguucaucaacgugcccgaguggagcuacaucguggagaaggccaaccccgucaacgaccucugcuaccccggggacuucaacgacuacgaggagcugaagcaccuccucucccggaucaaccacuucgagaagauccagaucauccccaagagcuccuggagcucccacgaggccagccugggcguguccagcgccugcccguaccagggcaaguccagcuucuuccgcaacguggucuggcugaucgagaagaacuccaccuaccccacgaucaagcggagcuacaacaacaccaaccaggaggaccuccuggugcugugggggauccaccaccccaacgacgcggccgagcagaccaagcucuaccagaacccgaccacguacaucuccgugggcaccagcacccugaaccagcgccuggucccccggaucgccacccgcuccaaggugaacgggcagagcggccggauggaguucuucuggacgauccucaagcccaacgacgccaucaacuucgagagcaacgggaacuucaucgcgcccgaguacgccuacaagaucgugaagaagggcgacuccaccaucaugaaguccgagcuggaguacggcaacugcaacaccaagugccagaccccgaugggggccaucaacagcagcaugcccuuccacaacauccacccccugacgaucggcgagugccccaaguacgucaaguccaaccgccucgugcuggccaccgggcugcggaacagcccgcagcgcgagcggcgccggaagaagcgcggccucuucggcgccaucgcgggguucaucgagggcggguggcagggcaugguggacgggugguacggcuaccaccacuccaacgagcagggcagcggguacgccgccgacaaggaguccacccagaaggccaucgacggcgucaccaacaaggugaacagcaucaucgacaagaugaacacgcaguucgaggccguggggcgggaguucaacaaccuggagcgccggaucgagaaccugaacaagaagauggaggacggcuuccucgacgucuggaccuacaacgcggagcugcuggugcucauggagaacgagcgcacccuggacuuccacgacuccaacgucaagaaccuguacgacaaggugcggcuccagcugcgcgacaacgccaaggagcuggggaacggcugcuucgaguucuaccacaagugcgacaacgagugcauggagagcgugcggaacggcaccuacgacuacccccaguacuccgaggaggcccgccucaagcgcgaggagaucagcggggucaagcuggaguccaucggcaucuaccagauccugagcaucuacuccacgguggccagcucccucgcccuggcgaucaugguggccgggcugagccucuggaugugcagcaacggcucccugcagugccggaucugcaucuga

SEQ ID NO: 77998 - RNA, 1707 nt, Artificial Sequence
  derived and/or modified CDS sequence (opt1) from hemagglutinin__InfluenzaA__ACR48874/m
auggagaagaucgugcugcuguucgccaucgucagccuggugaaguccgaccagaucugcaucggcuaccacgccaacaacagcaccgagcaggucgacaccaucauggagaagaacgugacggugacccacgcgcaggacauccuggagaagacccacaacgggaagcucugcgaccuggacggcgugaagccccugauccuccgcgacugcuccgucgccggguggcugcugggcaacccgaugugcgacgaguucaucaacgugcccgaguggagcuacaucguggagaaggccaaccccgucaacgaccucugcuaccccggggacuucaacgacuacgaggagcugaagcaccuccucucccggaucaaccacuucgagaagauccagaucauccccaagagcuccuggagcucccacgaggccagccugggcguguccagcgccugcccguaccagggcaaguccagcuucuuccgcaacguggucuggcugaucaagaagaacuccaccuaccccacgaucaagcggagcuacaacaacaccaaccaggaggaccuccuggugcugugggggauccaccaccccaaggacgcggccgagcagaccaagcucuaccagaacccgaccacguacaucuccgugggcaccagcacccugaaccagcgccuggucccccggaucgccacccgcuccaaggugaacgggcagagcggccggauggaguucuucuggacgauccucaagcccaacgacgccaucaacuucgagagcaacgggaacuucaucgcgcccgaguacgccuacaagaucgugaagaagggcgacuccaccaucaugaaguccgagcuggaguacggcaacugcaacaccaagugccagaccccgaugggggccaucaacagcagcaugcccuuccacaacauccacccccugacgaucggcgagugccccaaguacgucaaguccaaccgccucgugcuggccaccgggcugcggaacagcccgcagcgcgagcggcgccggaagaagcgcggccucuucggcgccaucgcgggguucaucgagggcggguggcagggcaugguggacgggugguacggcuaccaccacuccaacgagcagggcagcggguacgccgccgacaaggaguccacccagaaggccaucgacggcgucaccaacaaggugaacagcaucaucgacaagaugaacacgcaguucgaggccguggggcgggaguucaacaaccuggagcgccggaucgagaaccugaacaagaagauggaggacggcuuccucgacgucuggaccuacaacgcggagcugcuggugcucauggagaacgagcgcacccuggacuuccacgacuccaacgucaagaaccuguacgacaaggugcggcuccagcugcgcgacaacgccaaggagcuggggaacggcugcuucgaguucuaccacaagugcgacaacgagugcauggagagcgugcggaacggcaccuacgacuacccccaguacuccgaggaggcccgccucaagcgcgaggagaucagcggggucaagcuggaguccaucggcaucuaccagauccugagcaucuacuccacgguggccagcucccucgcccuggcgaucaugguggccgggcugagccucuggaugugcagcaacggcucccugcagugccggaucugcaucuga

SEQ ID NO: 77999 - RNA, 1701 nt, Artificial Sequence; identical to SEQ ID NO: 73170
  derived and/or modified CDS sequence (opt1) from hemagglutinin__InfluenzaA__ACD47234

SEQ ID NO: 78000 - RNA, 1707 nt, Artificial Sequence
  derived and/or modified CDS sequence (opt1) from hemagglutinin__InfluenzaA__ACZ36881
auggagaagaucgugcugcuccuggccaucgucagccuggugaaguccgaccagaucugcaucggcuaccacgccaacaacagcaccgagcaggucgacaccaucauggagaagaacgugacggugacccacgcgcaggacauccucgagaagacccacaacgggaagcugugcgaccuggacggcgugaagccccucauccugcgcgacugcuccgucgccggguggcugcucggcaacccgaugugcgacgaguuccugaacgugcccgaguggagcuacaucguggagaagaucaaccccgccaacgaccugugcuaccccgggaacuucaacgacuacgaggagcucaagcaccuccugucccggaucaaccacuucgagaagauccagaucauccccaagagcuccuggagcgaccacgaggccuccagcggcgucuccagcgccugcccguaccagggccgcuccagcuucuuccggaacgugguguggcugaucaagaaggacaacgcguaccccaccaucaagcgcuccuacaacaacacgaaccaggaggaccugcugguccucugggggauccaccaccccaacgacgccgccgagcagacccggcuguaccagaacccgaccaccuacaucagcgugggcacguccacccugaaccagcgccucgugcccaagaucgccacccggagcaaggucaacgggcaguccggccgcauggaguucuucuggaccauccugaagcccaacgacgcgaucaacuucgagagcaacgggaacuucaucgcccccgagaacgccuacaagaucgugaagaagggcgacagcacgaucaugaaguccgagcuggaguacggcaacugcaacaccaagugccagaccccgaucggggccaucaacagcuccaugcccuuccacaacauccacccccucaccaucggcgagugccccaaguacgucaagagcaaccggcuggugcuggccacggggcuccgcaacuccccgcagggcgagcggcgccggcgcaagcggggccuguucggggcgaucgccggcuucaucgagggcggguggcaggggaugguggacggcugguacggcuaccaccacagcaacgagcagggguccggcuacgccgccgacaaggagagcacccagaaggccaucgacggggugaccaacaaggucaacuccaucaucgacaagaugaacacccaguucgaggcggugggccgcgaguucaacaaccuggagcggcgcaucgagaaccucaacaagaagauggaggacggguuccuggacguguggacguacaacgccgagcugcucguccugauggagaacgagcggacccuggacuuccacgacagcaacgugaagaaccucuacgacaagguccgccugcagcugcgggacaacgccaaggagcucggcaacggcugcuucgaguucuaccaccgcugcgacaacgagugcauggaguccgugcgcaacgggaccuacgacuacccccaguacagcgaggaggcccggcugaagcgcgaggagaucuccggcgugaagcuggagagcaucgggaccuaccagauccucuccaucuacagcacggucgccuccagccuggcgcuggccaucaugguggccggccucucccuguggaugugcagcaacgggagccugcagugccggaucugcaucuga

SEQ ID NO: 78001 - RNA, 1704 nt, Artificial Sequence
  derived and/or modified CDS sequence (opt1) from hemagglutinin__InfluenzaA__EPI500771
auggagaagaucgugcuccuguucgccaccaucagccuggucaaguccgaccacaucugcaucggcuaccacgccaacaacagcaccgagcaggucgacacgaucauggagaagaacgugaccgugacccacgcgcaggacauccuggagaagacccacaacgggaagcucugcgaccugaacggcgugaagccccugauccucaaggacugcuccguggccggguggcugcugggcaacccgcucugcgacgaguucacgaacguccccgaguggagcuacaucguggagaaggccaaccccgccaacgaccugugcuaccccgggaacuucaacgacuacgaggagcugaagcaccuccugucccgcaucaaccacuucgagaagauccagaucaucccgaaggacagcugguccgaccacgaggccagccugggcguguccgcggccugcagcuaccagggcaacuccagcuucuuccggaacgucguguggcucaucaagaaggacaacgccuaccccaccaucaagaagggguacaacaacaccaaccgcgaggaccugcugauccucuggggcauccaccaccccaacgacgaggccgagcagaccaagcuguaccagaaccccacgaccuacaucuccaucgggaccagcacccugaaccagcggcucgugccgaagaucgcgacgcgcuccaagaucaaccggcagagcggccgcaucgacuucuucuggaccauccugaagcccaacgacgccauccacuucgaguccaacgggaacuucaucgcccccgaguacgccuacaagaucgucaagaagggcgacagcaccaucaugcgguccgagguggaguacggcaacugcaacacccgcugccagacgcccaucggggccaucaacagcagcaugccguuccacaacauccacccccugaccaucggcgagugccccaaguacgugaaguccaacaagcucguccuggcgaccgggcugcggaacagcccccagcgcgagcggcgccggaagcgcggccucuucggcgccaucgccggguucaucgagggcggguggcagggcaugguggacgggugguacggcuaccaccacuccaacgagcagggcagcggguacgccgccgacaaggaguccacccagaaggcgaucgacggcgugacgaacaaggucaacagcaucaucgacaagaugaacacccaguucgaggccguggggcgggaguucaacaaccuggagcgccggaucgagaaccugaacaagaagauggaggacggcuuccucgacguguggaccuacaacgccgagcugcugguccucauggagaacgagcgcacccuggacuuccacgacuccaacgugaagaaccuguacgacaaggugcggcuccagcugaaggacaacgccaaggagcuggggaacggcugcuucgaguucuaccacaagugcaacaacgagugcauggagagcguccgcaacggcacguacgacuacccgcaguacuccgaggaggcccggcucaagcgcgaggagaucagcggggugaagcuggaguccaucggcaucuaccagauccugagcaucuacuccaccgucgcgagcucccucgugcuggccaucaugauggccgggcugagccucuggaugugcuccaacggcagccugcagugccgcaucugcaucuga

SEQ ID NO: 78002 - RNA, 1695 nt, Artificial Sequence
  derived and/or modified CDS sequence (opt1) from hemagglutinin__InfluenzaA__ABF93441
auggagaagaucgugcugcuccuggccaucgucagccuggugaaguccgaccagaucugcaucggcuaccacgccaacaacagcaccgagcaggucgacaccaucauggagaagaacgugacggugacccacgcgcaggacauccucgagaagacccacaacgggaagcugugcgaccuggacggcgugaagccccucauccugcgcgacugcuccgucgccggguggcugcucggcaacccgaugugcgacgaguuccugaacgugcccgaguggagcuacaucguggagaagaucaaccccgccaacgaccugugcuaccccgggaacuucaacgacuacgaggagcucaagcaccuccugucccggaucaaccacuucgagaagauccagaucauccccaagagcuccuggagcgaccacgaggccuccagcggcgucuccagcgccugcccguaccagggccgcuccagcuucuuccggaacgugguguggcugaucaagaagaacaacgcguaccccaccaucaagcgcuccuacaacaacacgaaccaggaggaccugcugguccucugggggauccaccaccccaacgacgccgccgagcagacccggcuguaccagaacccgaccaccuacaucagcgugggcacguccacccugaaccagcgccucgugcccaagaucgccacccggagcaaggucaacgggcaguccggccgcauggaguucuucuggaccauccugaagcccaacgacgcgaucaacuucgagagcaacgggaacuucaucgcccccgagaacgccuacaagaucgugaagaagggcgacagcacgaucaugaaguccgagcuggaguacggcaacugcaacaccaagugccagaccccgaucggggccaucaacagcuccaugcccuuccacaacauccacccccucaccaucggcgagugccccaaguacgucaagagcaaccggcuggugcuggccacggggcuccgcaacuccccgcagaucgagacccggggccuguucggcgcgaucgccggguucaucgagggcggguggcagggcaugguggacgggugguacggcuaccaccacagcaacgagcagggcuccggguacgccgccgacaaggagagcacccagaaggccaucgacggcgugaccaacaaggucaacuccaucaucgacaagaugaacacgcaguucgaggcgguggggcgcgaguucaacaaccuggagcggcgcaucgagaaccucaacaagaagauggaggacggcuuccuggacguguggaccuacaacgccgagcugcucguccugauggagaacgagcggacccuggacuuccacgacagcaacgugaagaaccucuacgacaagguccgccugcagcugcgggacaacgccaaggagcucgggaacggcugcuucgaguucuaccaccgcugcgacaacgagugcauggaguccgugcggaacggcaccuacgacuacccccaguacagcgaggaggcccgccugaagcgggaggagaucuccggggugaagcuggagagcaucggcacguaccagauccucuccaucuacagcaccgucgccuccagccuggcgcuggccaucaugguggccgggcucucccuguggaugugcagcaacggcagccugcagugccgcaucugcaucuga

SEQ ID NO: 78003 - RNA, 1707 nt, Artificial Sequence
  derived and/or modified CDS sequence (opt1) from hemagglutinin__InfluenzaA__AGG12577
auggagaagaucgugcugcuguucgccaucaucagccuggucaaguccgaccacaucugcaucggcuaccacgccaacaacagcaccgagcaggucgacaccaucauggagaagaacgugacggugacccacgcgcaggacauccuggagaagacccacaacgggaagcucugcgaccugaacggcgugaagccccugauccucaaggacugcuccguggccggguggcugcugggcaacccgaugugcgacgaguucaucgacguccccgaguggagcuacaucguggagaaggccaaccccgccaacgaccucugcuaccccgggaacuucaacgacuacgaggagcugaagcaccuccucucccgcaucaaccacuucgagaagauccggaucaucccgaaggacagcuggcccgaccacgaggccucccugggcgugagcgcggccugcuccuaccagggcaacagcuccuucuuccgcaacgucguguggcugcucaagaaggacaacgccuaccccaucaucaagaaguccuacaacaacaccaacaaggaggaccugcuggugcucugggggauccaccaccccaacgacgaggccgagcagacgcggcuguaccagaacccgaccaccuacgucagcaucggcaccagcacgcugaaccagcgccucgugccccggaucgcgacccgcuccaaggugaacgggcagagcggccggaucgacuucuucuggaccauccugaagcccaacgacgccaucaacuucgaguccaacgggaacuucaucgcccccgaguacgccuacaagaucgucaagaagggcgacagcaccaucaugcgcuccgagguggaguacggcaacugcagcacgcggugccagaccccgaugggggccaucaacagcuccaugcccuuccacaacauccacccccugaccaucggcgagugccccaaguacgucaagagcaacaagcucgugcuggcgaccgggcugcgcaacuccccgcagaucgagcggcgccggcgcaagcggggccucuucggcgccaucgccggguucaucgagggcggguggcagggcaugguggacgggugguacggcuaccaccacagcaacgagcagggcuccggguacgccgccgacaaggagagcacgcagaaggcgaucgacggcgugaccaacaaggucaacuccaucaucgacaagaugaacacccaguucgaggccguggggcgcgaguucaacaaccuggagcggcgcaucgagaaccugaacaagaagauggaggacggcuuccucgacguguggaccuacaacgccgagcugcugguccucauggagaacgagcggacgcuggacuuccacgacagcaacgugaagaaccuguacgacaagguccgccuccagcugcgggacaacgccaaggagcuggggaacggcugcuucgaguucuaccacaagugcgacaacgagugcauggaguccgugcgcaacggcaccuacgacuacccccaguacagcgaggaggcccgccucaagcgggaggagaucuccggggugaagcuggagagcaucggcaccuaccagauccuguccaucuacagcaccgucgcguccagccucgugcuggccaucaugguggccgggcugucccucuggaugugcagcaacggcucccugcagugccgcaucugcaucuga

SEQ ID NO: 78004 - RNA, 1707 nt, Artificial Sequence; identical to SEQ ID NO: 78003
  derived and/or modified CDS sequence (opt1) from hemagglutinin__InfluenzaA__AGC13463

SEQ ID NO: 78005 - RNA, 1707 nt, Artificial Sequence; identical to SEQ ID NO: 69867
  derived and/or modified CDS sequence (opt1) from hemagglutinin__InfluenzaA__ACI06178/m1

SEQ ID NO: 78006 - RNA, 1707 nt, Artificial Sequence
  derived and/or modified CDS sequence (opt1) from hemagglutinin__InfluenzaA__AHF20402
auggagaagaucgugcugcuguucgccaucgucagccuggugaaguccgaccagaucugcaucggcuaccacgccaacaacagcaccgagcaggucgacaccaucauggagaagaacgugacggugacccacgcgcaggacauccuggagaagacccacaacgggaagcucugcgaccuggacggcgugcgcccccugauccuccgggacugcuccgucgccggguggcugcugggcaacccgaugugcgacgaguucaucaacgugcccgaguggagcuacaucguggagaaggccaaccccgucaacgaccucugcuaccccgggguguucaacgacuacgaggagcugaagcaccuccucucccgcaucaaccacuucgagaagauccagaucaucccgaagaacagcuggcccucccacgaggccagccugggcguguccgccgcgugccccuaccagggccagagcuccuucuuccggaacgucguguggcugaucaagaagaacaacaccuaccccacgaucaagcgcagcuacaacaacaccaaccaggaggaccuccuggugaugugggggauccaccacccgaacgacgccgucgagcagaccaagcuguaccagaaccccaccacguacaucuccgugggcaccagcacccucaaccagcggcugacgccccgcaucgccacccgguccaaggugaaggggcugagcggccgcauggaguucuucuggaccauccucaagcccaacgacgccaucaacuucgaguccaacgggaacuucaucgcgccggaguacgccuacaagaucgucaagaagggcgacagcaccaucaugcgguccgagcuggaguacggcaacugcaacaccaagugccagacgcccaugggggccaucaacagcagcaugcccuuccacaacauccacccccugaccaucggcgagugcccgaaguacgugaaguccacccgccucgugcuggccaccgggcugcggaacagcccccagcgcgaggagcggcgcaagaagcggggccucuucggcgccaucgcgggguucaucgagggcggguggcagggcauggucgacgggugguacggcuaccaccacuccaacgagcagggcagcggguacgccgccgacaaggaguccacgcagaaggccaucgacggcgugaccaacaaggugaacagcaucaucgacaagaugaacacccaguucgaggccgucgggcgcgaguucaacaaccuggagcggcgcaucgagaaccugaacaagaagauggaggacggcuuccucgacguguggaccuacaacgcggagcugcugguccucauggagaacgagcggacgcuggacuuccacgacuccaacgugaagaaccuguacgacaaggugcgccuccagcugcgggacaacgccaaggagcuggggaacggcugcuucgaguucuaccacaagugcgacaacaagugcauggagagcguccgcaacggcaccuacgacuacccccaguacuccgaggaggcccgccucaagcgggaggagaucagcggggugaagcuggaguccaucggcguguaccagauccugagcaucuacuccaccgucgccagcucccucgcccuggcgaucaugguggccgggcugagccucuggaugugcuccaacggcagccugcagugccgcaucugcaucuga

SEQ ID NO: 78007 - RNA, 1707 nt, Artificial Sequence
  derived and/or modified CDS sequence (opt1) from hemagglutinin__InfluenzaA__ABQ45850
auggagaagaucgugcugcuccuggccaucgucagccuggugaaguccgaccagaucugcaucggcuaccacgccaacaacagcaccgagcaggucgacaccaucauggagaagaacgugacggugacccacgcgcaggacauccucgagaagacccacaacgggaagcugugcgaccuggacggcgugaagccccucauccugcgcgacugcuccgucgccggguggcugcucggcaacccgaugugcgacgaguuccugaacgugcccgaguggagcuacaucguggagaagaucaaccccgccaacgaccugugcuaccccgggaacuucaacgacuacgaggagcucaagcaccuccugucccggaucaaccacuucgagaagauccagaucauccccaagagcuccuggagcgaccacgaggccuccagcggcgucuccagcgccugcccguaccagggccgcuccagcuucuuccggaacgugguguggcugaucaagaagaacgacgcguaccccaccaucaagcgcuccuacaacaacacgaaccaggaggaccugcugguccucugggggauccaccaccccaacgacgccgccgagcagacccggcuguaccagaacccgaccaccuacaucagcgugggcacguccacccugaaccagcgccucgugcccaagaucgccacccggagcaaggucaacgggcaguccggccgcauggaguucuucuggaccauccugaagcccaacgacgcgaucaacuucgagagcaacgggaacuucaucgcccccgagaacgccuacaagaucgugaagaagggcgacagcacgaucaugaaguccgagcuggaguacggcaacugcaacaccaagugccagaccccgaucggggccaucaacagcuccaugcccuuccacaacauccacccccucaccaucggcgagugccccaaguacgucaagagcaaccggcuggugcuggccacggggcuccgcaacuccccgcagggcgagcggcgccggaagaagcgcggccuguucggggcgaucgccggcuucaucgagggcggguggcaggggaugguggacggcugguacggcuaccaccacagcaacgagcagggguccggcuacgccgccgacaaggagagcacccagaaggccaucgacggggugaccaacaaggucaacuccaucaucgacaagaugaacacccaguucgaggcggugggccgggaguucaacaaccuggagcgccggaucgagaaccucaacaagaagauggaggacggguuccuggacguguggacguacaacgccgagcugcucguccugauggagaacgagcgcacccuggacuuccacgacagcaacgugaagaaccucuacgacaagguccggcugcagcugcgcgacaacgccaaggagcucggcaacggcugcuucgaguucuaccaccggugcgacaacgagugcauggaguccgugcgcaacgggaccuacgacuacccccaguacagcgaggaggcccgccugaagcgggaggagaucuccggcgugaagcuggagagcaucgggaccuaccagauccucuccaucuacagcacggucgccuccagccuggcgcuggccaucaugguggccggccucucccuguggaugugcagcaacgggagccugcagugccgcaucugcaucuga

SEQ ID NO: 78008 - RNA, 1713 nt, Artificial Sequence
  derived and/or modified CDS sequence (opt1) from hemagglutinin__InfluenzaA__AKI82373
auggagaagaucgugccccugcucgccaucaucggccuggucaagagcgaccagaucugcaucggguaccacgccaacaacuccaccgagcaggucgacaccaucauggagaagaacgugacggugacccacgcgcaggacauccuggagaagacccacaacggcaagcucugcaaccuggacggggugaagccgcugauccucaaggacugcagcguggccggcuggcugcuggggaaccccaugugcgacgaguuccucaacgucuccgaguggagcuacaucguggagaaggccucccccgccaacggccugugcuaccccggcgacuucaacgacuacgaggagcugaagcaccuccugaaccgcaucacccaccugaagaagaucaagaucauccccaagagcuacugguccaaccacgaggccagcuccggggugagcgcggccugcuccuacaugggcgagcccagcuucuuccggaacgucguguggcucaucaagaagaacaacacguacccgcccaucaaggugaacuacaccaacaccaaccaggaggaccugcugguccucugggggauccaccacccgaacaacgaggccgagcagauccagaucuaccagaaccugaucacccacaucuccgugggcacgagcacccugaaccagcgccucauccccaagaucgccacccgguccaaggugaacgggcagagcggccgcauggaguucuucuggaccauccugaagcccaacgacuccaucaacuucgacagcaacggcaacuucaucgcgcccgaguacgccuacaucgucaagaagggggacuccgccaucaugaaguccgagcuggaguacggcaacugcaacacgaagugccagaccccgaugggggccaucaacagcagcaugcccuuccacaacauccacccccucaccaucggcgagugccccaaguacgucaagagcaaccggcuggugcuggccaccggccuccgcaacgcgccgcagcgggagcgcgagggcgggcggcgccggaagcgcgggcuguucggcgccaucgccggguucaucgagggcggcuggcaggggaugguggacggcugguacggguaccaccacuccaacgagcagggcagcggguacgccgccgacaaggaguccacgcagaaggcgaucgacggcaucaccaacaaggugaacagcaucaucgacaagaugaacacccaguucgaggccgugggccgggaguucaacaaccuggagcgccggaucgagaaccucaacaagaagauggaggacggguuccuggacgucuggaccuacaacgccgagcugcucgugcugauggagaacgagcgcacgcuggacuuccacgacuccaacgugaagaaccucuacgagaagguccggcugcagcugcgcgacaacgccaaggagcucggcaacgggugcuucgaguucuaccacaagugcgacaacgagugcauggagagcgugcggaacggcaccuacgacuacucccaguacagcgaggaggcccgccugucccgggaggagaucaacggggucaagcuggagagcauggugaccuaccagauccucuccaucuacagcaccguggcguccagccuggcccuggccaucauggucgccggccucucccuguggaugugcagcaacggcucccugcagugccgcaucugcaucuga

SEQ ID NO: 78009 - RNA, 1713 nt, Artificial Sequence
  derived and/or modified CDS sequence (opt1) from hemagglutinin__InfluenzaA__EPI284473
auggagaagaucgugcugcuccuggccaucaucagccuggucaaguccgaccagaucugcaucggcuaccacgccaacaacagcaccgagcaggucgacaccaucauggagaagaacgugacggugacccacgcgcaggacauccucgagaagacccacaacgggaagcugugcaaccuggacggcgugaagccccucauccugaaggacugcuccguggccggguggcugcucggcaacccgaugugcgacgaguuccugaacgucagcgagugguccuacaucguggagaaggccagccccgccaacgggcugugcuaccccggcgacuucaacgacuacgaggagcucaagcaccuccugaaccgcaucacccaccugaagaagaucaagaucauccccaaguccuacuggagcaaccacgaggccuccagcggcguguccgcggccugcagcuacaugggggagccguccuucuuccggaacgucguguggcugaucaagaagaacaacacguacccgcccaucaaggugaacuacaccaacaccaaccaggaggaccugcucguccuguggggcauccaccaccccaacaacgaggccgagcagauccagaucuaccagaaccugaucacccacaucagcguggggacguccacccucaaccagcgccugauccccaagaucgccacccggagcaaggugaacggccaguccgggcgcauggaguucuucuggaccauccugaagcccaacgacagcaucaacuucgacuccaacggcaacuucaucgcgcccgaguacgccuacaucgucaagaagggcgacagcgccaucaugaaguccgagcucgaguacgggaacugcaacacgaagugccagacccccaugggcgccaucaacagcagcaugccguuccacaacauccacccccugaccaucggggagugccccaaguacgugaaguccaaccggcuggugcucgccaccggccugcgcaacgcgccccagcgggagcgcgagggcgggcggcgccggaagcgcggccuguucggggccaucgccggcuucaucgagggcggguggcagggcauggucgacgggugguacggcuaccaccacagcaacgagcagggguccggcuacgccgccgacaaggagagcacgcagaaggcgaucgacgggaucaccaacaaggugaacuccaucaucgacaagaugaacacccaguucgaggccgugggccgggaguucaacaaccucgagcgccggaucgagaaccugaacaagaagauggaggacggcuuccuggacgucuggaccuacaacgccgagcuccuggugcugauggagaacgagcgcacgcucgacuuccacgacagcaacgugaagaaccuguacgagaagguccggcugcagcuccgcgacaacgccaaggagcuggggaacggcugcuucgaguucuaccacaagugcgacaacgagugcauggaguccgugcggaacgggaccuacgacuacagccaguacuccgaggaggcccgccugagccgggaggagaucaacggcgucaagcucgaguccauggugaccuaccagauccugagcaucuacuccaccguggcgagcucccuggcccucgccaucauggucgccgggcugagccuguggaugugcuccaacggcagccuccagugccgcaucugcaucuga

SEQ ID NO: 78010 - RNA, 1710 nt, Artificial Sequence
  derived and/or modified CDS sequence (opt1) from hemagglutinin__InfluenzaA__ACO07033
auggagaagaucgugcugcuccuggccaugaucggccuggucaagagcgaccagaucugcaucggguaccacgccaacaacuccaccgagcaggucgacaccaucauggagaagaacgugacggugacccacgcgcaggacauccucgagaagacccacaacggcaagcugugcaaccuggacggggugaagccccucauccugaaggacugcagcguggccggcuggcugcucgggaacccgaugugcgacgaguuccugaacgucuccgaguggagcuacaucguggagaaggccucccccgccaacggccugugcuaccccggcgacuucaacgacuacgaggagcucaagcaccuccugagccgcaucaaccaccugaagaagaucaagaucauccccaaguccuacuggagcaaccacgaggccuccagcgggguguccgcggccugcagcuaccugggcgagccguccuucuuccggaacgucguguggcugaucaagaagaacaacaccuacccgcccaucaaggugaacuacacgaacaccaaccaggaggaccuccugguccugugggggauccaccaccccaacgacgagaaggagcagauccgcaucuaccagaaccccaacaccagcaucuccgugggcaccagcacgcucaaccagcggcuggugcccaagaucgccacccgccccaaggucaacgggcaguccggccggauggaguucuucuggaccauccugaagcccaacgacagcaucaacuucgacuccaacggcaacuucaucgccccggaguacgcguacaagaucgccaagaagggggacagcgugaucaugaaguccgagcucgaguacggcaacugcaacaccaagugccagacgcccaugggggccaucaacagcagcaugcccuuccacaacauccacccccugaccaucggcgagugcccgaaguacgugaaguccaaccgccugguccucgccaccggccugcggaacgcgccccagcgcgagggcgggcggcgccggaagcgcgggcuguucggcgccaucgccggguucaucgagggcggcuggcaggggaugguggacggcugguacggguaccaccacagcaacgagcagggcuccggguacgccgccgacaaggagagcacccagaaggccaucgacggcaucacgaacaaggugaacuccaucaucgacaagaugaacacccaguucgagaucgucggccgggaguucaacaaccucgagcgccggaucgagaaccugaacaagaagauggaggacggguuccuggacguguggaccuacaacgcggagcuccuggugcugauggagaacgagcgcacccucgacuuccacgacagcaacgucaagaaccuguacgagaaggugcggcugcagcuccgcgacaacgccaaggagcugggcaacgggugcuucgaguucuaccacaagugcgacaacgagugcauggaguccguccggaacggcacguacgacuacccccaguacagcgaggaggcccgccugucccgggaggagaucagcggggugaagauggaguccauggugaccuaccagauccucagcaucuacuccaccgucgccagcucccuggcccuggcgaucaugguggccggccucagccuguggaugugcuccaacggcagccugcagugccgcaucugcaucuga

SEQ ID NO: 78011 - RNA, 1695 nt, Artificial Sequence
  derived and/or modified CDS sequence (opt1) from hemagglutinin__InfluenzaA__EPI174803
auggagaagaucgugcugcuccuggccaugaucggccuggucaagagcgaccagaucugcaucggguaccacgccaacaacuccaccgagcaggucgacaccaucauggagaagaacgugacggugacccacgcgcaggacauccucgagaagacccacaacggcaagcugugcaaccuggacggggugaagccccucauccugaaggacugcagcguggccggcuggcugcucgggaacccgaugugcgacgaguuccugaacgucuccgaguggagcuacaucguggagaaggccucccccgccaacggccugugcuaccccggcgacuucaacgacuacgaggagcucaagcaccuccugagccgcaucaaccaccugaagaagaucaagaucauccccaaguccuacuggagcaaccacgaggccuccagcgggguguccgcggccugcagcuaccugggcgagccguccuucuuccggaacgucguguggcugaucaagaagaacaacaccuacccgcccaucaaggugaacuacacgaacaccaaccaggaggaccuccugguccugugggggauccaccaccccaacgacgagaaggagcagauccgcaucuaccagaaccccaacaccagcaucuccgugggcaccagcacgcucaaccagcggcuggugcccaagaucgccacccgccccaaggucaacgggcaguccggccggauggaguucuucuggaccauccugaagcccaacgacagcaucaacuucgacuccaacggcaacuucaucgccccggaguacgcguacaagaucgccaagaagggggacagcgugaucaugaaguccgagcucgaguacggcaacugcaacaccaagugccagacgcccaugggggccaucaacagcagcaugcccuuccacaacauccacccccugaccaucggcgagugcccgaaguacgugaaguccaaccgccugguccucgccaccggccugcggaacgcgccccagaccgagacgcgcgggcuguucggcgccaucgccggguucaucgagggcggguggcagggcaugguggacggcugguacggguaccaccacagcaacgagcagggcuccggguacgccgccgacaaggagagcacccagaaggccaucgacggcaucaccaacaaggugaacuccaucaucgacaagaugaacacccaguucgagaucgucgggcgggaguucaacaaccucgagcgccggaucgagaaccugaacaagaagauggaggacggcuuccuggacguguggacguacaacgcggagcuccuggugcugauggagaacgagcgcacccucgacuuccacgacagcaacgucaagaaccuguacgagaaggugcggcugcagcuccgcgacaacgccaaggagcugggcaacgggugcuucgaguucuaccacaagugcgacaacgagugcauggaguccguccggaacggcaccuacgacuacccccaguacagcgaggaggcccgccugucccgggaggagaucagcggggugaagauggaguccauggugaccuaccagauccucagcaucuacuccacggucgccagcucccuggcccuggcgaucaugguggccggccucagccuguggaugugcuccaacgggagccugcagugccgcaucugcaucuga

SEQ ID NO: 78012 - RNA, 1704 nt, Artificial Sequence
  derived and/or modified CDS sequence (opt1) from hemagglutinin__InfluenzaA__AGZ62382
auggagaagaucgugcugcuguucgccgccaucagccuggucaaguccgaccacaucugcaucggcuaccacgcgaacaacagcaccaagcaggucgacaccaucauggagaagaacgugacggugacccacgcccaggacauccuggagaagacccacaacgggaagcucugcgaccugaacggcgugaagccccugauccucaaggacugcuccguggccggguggcugcugggcaacccgaugugcgacgaguucaucaacguccccgaguggagcuacaucguggagaaggccaaccccgccaacgggcucugcuaccccggcaacuucaacgacuacgaggagcugaagcaccuccucucccgcaucaaccacuucgagaagauccggaucaucccgaaggacagcugguccgaccacgaggcgagccugggcguguccgccgccugccccuaccaggggaacagcuccuucuuccgcaacgucguguggcugaucaagaaggacaacaccuaccccacgaucaagaaguccuacaacaacaccaaccaggaggaccuccugauccuguggggcauccaccaccccaacgacgaggccgagcagacccggcucuaccagaacccgaccacguacaucagcaucgggaccagcacccugaaccagcgccuggugcccaagaucgcgacccgguccaagaucaacggccagagcgggcgcaucgacuucuucuggacgauccucaagcccaacgacgccauccacuucgaguccaacggcaacuucaucgcccccgaguacgccuacaagaucgucaagaagggcgacagcaccaucaugaaguccgagguggaguacgggaacugcaacacccggugccagaccccgaucggcgccaucaacagcagcaugcccuuccacaacauccacccccugacgaucggggagugccccaaguacgugaaguccaacaagcugguccucgcgaccggccugcgcaacagcccgcagcgggagcgccggcgcaagcggggccuguucggggccaucgccggcuucaucgagggcggguggcaggggaugguggacggcugguacggcuaccaccacuccaacgagcaggggagcggcuacgccgccgacaaggaguccacccagaaggcgaucgacggggugaccaacaaggucaacagcaucaucgacaagaugaacacgcaguucgaggccgugggccgcgaguucaacaaccucgagcggcgcaucgagaaccugaacaagaagauggaggacggguuccuggacguguggaccuacaacgccgagcuccugguccugauggagaacgagcggacccucgacuuccacgacuccaacgugcgcaaccuguacgacaaggugcggcugcagcucaaggacaacgccaaggagcugggcaacggcugcuucgaguucuaccacaagugcaacaacgagugcauggagagcguccgcaacgggaccuacgacuacccccaguacuccgaggaggcccggcugcgccgcgaggagaucagcggcgugaagcucgaguccaucgggaucuaccagauccugagcaucuacuccacggucgcgagcucccuggugcucgccaucaugauggccggccugagccuguggaugugcuccaacgggagccuccagugccggaucugcaucuga

SEQ ID NO: 78013 - RNA, 1704 nt, Artificial Sequence
  derived and/or modified CDS sequence (opt1) from hemagglutinin__InfluenzaA__ABG67978/m
auggagaagaucgugcugcuccuggccaucgucagccuggugaaguccgaccagaucugcaucggcuaccacgccaacaacagcaccgagcaggucgacaccaucauggagaagaacgugacggugacccacgcgcaggacauccucgagaagacccacaacgggaagcugugcgaccuggacggcgugaagccccucauccugcgcgacugcuccgucgccggguggcugcucggcaacccgaugugcgacgaguucaucaacgugcccgaguggagcuacaucguggagaaggccaaccccgccaacgaccugugcuaccccgggaacuucaacgacuacgaggagcugaagcaccuccugucccggaucaaccacuucgagaagauccagaucauccccaagagcuccuggagcgaccacgaggccuccagcggcgucuccagcgcgugcccguaccagggcacccccuccuucuuccgcaacgugguguggcugaucaagaagaacaacacguaccccaccaucaagcggagcuacaacaacaccaaccaggaggaccuccugauccugugggggauccaccacuccaacgacgccgccgagcagaccaagcucuaccagaacccgacgaccuacaucagcgucggcaccuccacccugaaccagcgccuggugcccaagaucgccacgcggagcaaggugaacgggcaguccggccgcauggacuucuucuggaccauccucaagcccaacgacgcgaucaacuucgagagcaacgggaacuucaucgcccccgaguacgccuacaagaucgucaagaagggcgacagcgccaucaucaaguccgagguggaguacggcaacugcaacaccaagugccagaccccgaucggggccaucaacagcuccaugcccuuccacaacauccacccccugacgaucggcgagugccccaaguacgucaagagcaacaagcuggugcucgcgaccgggcugcggaacuccccgcugcgcgagcggcgccggaagcgcggccucuucggcgccaucgccggguucaucgagggcggguggcagggcaugguggacgggugguacggcuaccaccacagcaacgagcagggcuccggguacgccgccgacaaggagagcacccagaaggcgaucgacggcgugaccaacaaggucaacuccaucaucgacaagaugaacacgcaguucgaggccguggggcgggaguucaacaaccuggagcgccggaucgagaaccugaacaagaagauggaggacggcuuccucgacguguggaccuacaacgccgagcugcugguccucauggagaacgagcgcacccuggacuuccacgacagcaacgugaagaaccuguacgacaagguccggcuccagcugcgcgacaacgccaaggagcuggggaacggcugcuucgaguucuaccacaagugcgacaacgagugcauggaguccgugcggaacggcaccuacgacuacccccaguacagcgaggaggcccgccucaagcgggaggagaucuccggggugaagcuggagagcaucggcacguaccagauccuguccaucuacagcaccgucgcguccagccucgcccuggccaucaugguggccgggcugucccucuggaugugcagcaacggcagccugcagugccgcaucugcaucuga

SEQ ID NO: 78014 - RNA, 1695 nt, Artificial Sequence
  derived and/or modified CDS sequence (opt1) from hemagglutinin__InfluenzaA__EPI827075
auggagaagaucgugcuccuguucgccaccaucagccuggucaaguccgaccacaucugcaucggcuaccacgccaacaacagcaccgagcaggucgacacgaucauggagaagaacgugaccgugacccacgcgcaggacauccuggagaagacccacaacgggaagcucugcgaccugaacggcgugaagccccugauccucaaggacugcuccguggccggguggcugcugggcaacccgcucugcgacgaguucacgaacguccccgaguggagcuacaucguggagaaggccaaccccgccaacgaccugugcuaccccgggaacuucaacgacuacgaggagcugaagcaccuccugucccgcaucaaccacuucgagaagauccagaucaucccgaaggacagcugguccgaccacgaggccagccugggcguguccgcggccugcagcuaccagggcaacuccagcuucuuccggaacgucguguggcucaucaagaaggacaacgccuaccccaccaucaagaagggguacaacaacaccaaccgcgaggaccugcugauccucuggggcauccaccaccccaacgacgaggccgagcagacccggcuguaccagaaccccacgaccuacaucuccaucgggaccagcacccugaaccagcgccucgugccgaagaucgcgacgcgguccaagaucaacggccagagcgggcgcaucgacuucuucuggaccauccugaagcccaacgacgccauccacuucgaguccaacggcaacuucaucgcccccgaguacgccuacaagaucgucaagaagggcgacagcaccaucaugcgguccgagguggaguacgggaacugcaacacccgcugccagacgcccaucggcgccaucaacagcagcaugccguuccacaacauccacccccugaccaucggggagugccccaaguacgugaaguccaacaagcucguccuggcgaccggccugcggaacagcccccagcgcgagacccggggccucuucggggccaucgccggcuucaucgagggcggguggcaggggaugguggacggcugguacggcuaccaccacuccaacgagcaggggagcggcuacgccgccgacaaggaguccacgcagaaggcgaucgacggggugaccaacaaggucaacagcaucaucgacaagaugaacacccaguucgaggccgugggccgcgaguucaacaaccuggagcggcgcaucgagaaccugaacaagaagauggaggacggguuccucgacguguggaccuacaacgccgagcugcugguccucauggagaacgagcggacgcuggacuuccacgacuccaacgugaagaaccuguacgacaaggugcgccuccagcugaaggacaacgccaaggagcugggcaacggcugcuucgaguucuaccacaagugcaacaacgagugcauggagagcguccggaacgggaccuacgacuacccgcaguacuccgaggaggcccgccucaagcgggaggagaucagcggcgugaagcuggaguccaucgggaucuaccagauccugagcaucuacuccaccgucgcgagcucccucgugcuggccaucaugauggccggccugagccucuggaugugcuccaacgggagccugcagugccgcaucugcaucuga

SEQ ID NO: 78015 - RNA, 1707 nt, Artificial Sequence
  derived and/or modified CDS sequence (opt1) from hemagglutinin__InfluenzaA__ABP96850
auggagaagaucgugcugcuccuggccaucgucagccuggugaaguccgaccagaucugcaucggcuaccacgccaacaacagcaccgagcaggucgacaccaucauggagaagaacgugacggugacccacgcgcaggacauccucgagaagacccacaacgggaagcugugcgaccuggacggcgugaagccccucauccugcgcgacugcuccgucgccggguggcugcucggcaacccgaugugcgacgaguuccugaacgugcccgaguggagcuacaucguggagaagaucaaccccgccaacgaccugugcuaccccggggacuucaacgacuacgaggagcucaagcaccuccugucccggaucaaccacuucgagaagauccagaucauccccaagagcuccuggagcgacuacgaggccuccagcggcgucuccagcgccugcccguaccagggccgcuccagcuucuuccggaacgugguguggcugaucaagaagaacaacgcguaccccaccaucaagcgcuccuacaacaacacgaaccaggaggaccugcugguccucugggggauccaccaccccaacgacgccgccgagcagauccggcuguaccagaacccgaccaccuacaucagcgugggcaccuccacgcugaaccagcgccucgugcccaagaucgccacccggagcaaggucaacgggcaguccggccgcauggaguucuucuggaccauccucaagagcaacgacgcgaucaacuucgagagcaacgggaacuucaucgcccccgaguacgccuacaagaucgugaagaagggcgacuccaccaucaugaaguccgagcuggaguacggcaacugcaacacgaagugccagacccccaucggggccaucaacagcagcaugccguuccacaacauccacccccugaccaucggcgagugccccaaguacgugaaguccaaccggcugguccuggccaccgggcuccgcaacagcccccagggcgagcggcgccggcgcaagcggggccuguucggggcgaucgccggcuucaucgagggcggguggcaggggaugguggacggcugguacggcuaccaccacuccaacgagcaggggagcggcuacgccgccgacaaggaguccacgcagaaggccaucgacggggugaccaacaaggucaacagcaucaucaacaagaugaacacccaguucgaggcggugggccgcgaguucaacaaccuggagcggcgcaucgagaaccucaacaagaagauggaggacggguuccuggacguguggaccuacaacgccgagcugcucguccugauggagaacgagcggacgcuggacuuccacgacuccaacgugaagaaccucuacgacaagguccgccugcagcugcgggacaacgccaaggagcucggcaacggcugcuucgaguucuaccaccgcugcgacaacgagugcauggagagcgugcgcaacgggaccuacgacuacccgcaguacuccgaggaggcccggcugaagcgcgaggagaucagcggcgugaagcuggaguccaucgggaucuaccagauccucagcaucuacuccaccgucgccagcucccuggcgcuggccaucaugguggccggccucuuccuguggaugugcagcaacgggagccugcagugccggaucugcaucuga

SEQ ID NO: 78016 - RNA, 1692 nt, Artificial Sequence
  derived and/or modified CDS sequence (opt1) from hemagglutinin__InfluenzaA__EPI827077
auggagaagaucgugcugcuccuggccaucgucagcaucgugaaguccgaccagaucugcaucggcuaccacgccaacaacagcaccgagcaggucgacaccaucauggagaagaacgugacggugacccacgcgcaggacauccuggagaagacccacaacgggaagcucugcaaccuggacggcgugaagccccugauccuccgcgacugcuccgucgccggguggcugcugggcaacccgaugugcgacgaguuccucaacgugcccgaguggagcuacaucguggagaagaucaaccccgccaacgaccugugcuaccccgggaacuucaacgacuacgaggagcugaagcaccuccugucccggaucaaccacuucgagaagauccagaucaucccgaaggacagcugguccgaccacgaggccagcggcgucuccagcgccugccccuaccagggccgcuccagcuucuuccggaacgugguguggcugaccaagaagaacgacgcguaccccacgaucaagaaguccuacaacaacaccaaccaggaggaccuccugguccugugggggauccaccaccccaacgacgccgccgagcagacccgccucuaccagaacccgaccacguacaucagcgugggcaccuccacccugaaccagcggcuggugcccaagaucgccacccgcagcaaggucaacgggcaguccggccggauggaguucuucuggacgauccucaagagcaacgacgcgaucaacuucgaguccaacgggaacuucaucgcccccgagaacgccuacaagaucgugaagaagggcgacagcaccaucaugaaguccgagcuggaguacuccaacugcaacaccaagugccagacccccaucggcgccaucaacagcuccaugccguuccacaacauccacccccugacgaucggggagugccccaaguacgucaagagcaaccgccucgugcuggccaccggccugcggaacagcccccagcgcgagacccggggccucuucggggcgaucgccggcuucaucgagggcggguggcaggggaugguggacggcugguacggguaccaccacagcaacgagcagggcuccggcuacgccgccgacaaggagagcacccagcgcgccaucgacggggugacgaacaaggucaacuccaucaucgacaagaugaacacccaguucgaggcggugggccgggaguucaacaaccuggagcgccggaucgagaaccugaacaagaagauggaggacggguuccucgacguguggaccuacaacgccgagcugcugguccucauggagaacgagcgcacccuggacuuccacgacagcaacgugaagaaccuguacgacaagguccggcuccagcugcgcgacaacgccaaggagcugggcaacgggugcuucgaguucuaccaccggugcgacaacgagugcauggaguccgugcgcaacggcacguacgacuacccgcaguacagcgaggaggcccggcucaagcgcgaggagaucuccggcgugaagcuggagagcaucgggaccuaccagauccuguccaucuacagcaccgucgccuccagccucgcgcuggccaucaugguggccggccugucccucuggaugugcagcaacgggagccugcagugccgcaucugcaucuga

SEQ ID NO: 78017 - RNA, 1704 nt, Artificial Sequence
  derived and/or modified CDS sequence (opt1) from hemagglutinin__InfluenzaA__EPI594523
auggagaagaucauccugcuccuggccaucaucggccuggucaagagcgaccagaucugcgugggguaccacgccaacaacuccaccgagcgcguggacaccaucauggagaagaacgugacggucacccacgcgcaggacauccucgagaagacccacaacggcaagcugugcaaccugaacggggugaagccccucauccuggaggacugcagcguggccggcuggcugcucgggaacccgaugugcgacaaguuccugaacgucuccgaguggagcuacaucguggagaaggccggccccgccaacggccugugcuaccccggggacuucaacgacuacgaggagcucaagcaccuccugucccggaucaaccacuucgagaagaucgagaucauccccaagaaccacuggagcaaccacaacaccuccggcgugagcuccgccugcagcuaccuggagaacccguccuucuuccgcaacgucguguggcugacgaagaagaacaacaccuaccccaccaucaaggugaacuacaccaacgcgaaccagaaggaccugcucguccugugggggauccaccaccccaacaacgaggccgagcagaagaugaucuaccagaacagcaacacguacguguccgugggcaccagcacccugaaccagcggcucguccccaagaucgccacccgcuccaaggugaacgggcagagcggccggaucgacuucuucuggacgauccugaagccgaacgacaccaucaacuucgacuccaacggcaacuucaucgcccccaaguacgcguacaagaucgugaagaagggggacagcgccaucaugaaguccgagcugaaguacgacaacugcaacaccaagugccagacccccaucggcgccaucaacagcagcaugcccuuccacaacauccacccgcucacgaucggggagugccccaaguacgucaaguccaaccgccuggugcuggccaccggccuccggaacgcgccccagaucgagggccgccggcgcaagcgggggcuguucggcgccaucgccggguucaucgagggcggguggcagggcaugguggacggcugguacggguaccaccacagcaacgagcagggcuccggguacgccgccgacaaggagagcacccagaaggccgucgacggcaucaccaacaagaucaacuccaucaucgacaagaugaacaaccaguucgaggcgguggggcgcgaguucaacaaccuggagcggcgcaucgagaaccucaacaagaagauggaggacggcuuccuggacguguggacguacaacgccgagcugcucguccugauggagaacgagcggacccuggacuuccacgacagcaacgugaagaaccucuacgagaagguccgccugcagcugcgggacaacgccaaggagcucggcaacgggugcuucgaguucuaccacaagugcgacaacgagugcauggaguccgugaagaacggcaccuacgacuacccccaguacagcgaggaggcccgccugaaccgggaggagaucuccggggugaagcuggagagcaccgucacguaccagauccucuccaucuacagcaccguggccuccagccuggugcuggcgaucauggucgccggccucucccuguggaugugcagcaacgggucccugcagugccgcaucugcaucuga

SEQ ID NO: 78018 - RNA, 1707 nt, Artificial Sequence
  derived and/or modified CDS sequence (opt1) from hemagglutinin__InfluenzaA__AAD37782
auggagcgcaucgugcugcuccuggccaucgucagccuggugaaguccgaccagaucugcaucggcuaccacgccaacaacagcaccgagcaggucgacaccaucauggagaagaacgugacggugacccacgcgcaggacauccucgagaagacccacaacgggaagcugugcgaccugaacggcgugaagccccucauccugcgggacugcuccgucgccggguggcugcucggcaacccgaugugcgacgaguucaucaacgugcccgaguggagcuacaucguggagaaggccucccccgccaacgaccugugcuaccccggggacuucaacgacuacgaggagcugaagcaccuccugagccgcaccaaccacuucgagaagauccagaucaucccgcccuccagcugguccaaccacgacgccagcuccggcgucagcuccgcgugccccuaccacggccggagcuccuucuuccgcaacgugguguggcugaucaagaagaacagcgccuaccccacgaucaagcgguccuacaacaacaccaaccaggaggaccuccugguccugugggggauccaccacccgaacgacgccgccgagcagaccaagcucuaccagaaccccaccacguacaucagcgugggcaccuccacccugaaccagcgccuggugcccgagaucgcgacccggcccaaggucaacgggcagagcggccgcauggaguucuucuggacgauccucaagccgaacgacgccaucaacuucgagagcaacgggaacuucaucgcccccgaguacgccuacaagaucgugaagaagggcgacuccgccaucaugaaguccgagcuggaguacggcaacugcaacaccaagugccagacccccaugggggcgaucaacagcagcaugcccuuccacaacauccacccgcugaccaucggcgagugccccaaguacgugaaguccaaccggcucguccuggccacggggcugcgcaacacgccccagcgggagcgccggcgcaagaagcggggccucuucggcgccaucgccggguucaucgagggcggguggcagggcauggugaacgggugguacggcuaccaccacagcaacgagcagggcuccggguacgccgcggacaaggagagcacccagaaggccaucgacggcgugaccaacaaggucaacuccaucaucgacaagaugaacacccaguucgaggccguggggcgcgaguucaacaaccuggagcggcgcaucgagaaccugaacaagcagauggaggacggcuuccucgacguguggaccuacaacgccgagcugcugguccucauggagaacgagcggacccuggacuuccacgacagcaacgugaagcaccuguacgacaagguccgccuccagcugcgggacaacgccaaggagcuggggaacggcugcuucgaguucuaccacaagugcgacaacgagugcauggaguccgugaagaacggcaccuacgacuacccccaguacagcgaggaggcgcgccucaaccgcgaggagaucuccggggugaagcuggagagcaugggcacguaccagauccuguccaucuacagcaccgucgccuccagccucgcccuggccaucaugguggccgggcugucccucuggaugugcagcaacggcagccugcagugccggaucugcaucuga

SEQ ID NO: 78019 - RNA, 1707 nt, Artificial Sequence
  derived and/or modified CDS sequence (opt1) from hemagglutinin__InfluenzaA__AAD51927
auggagaagaucgugcugcuccuggccaucgucagccuggugaaguccgaccagaucugcaucggcuaccacgccaacaacagcaccgagcaggucgacaccaucauggagaagaacgugacggugacccacgcgcaggacauccucgagaagacccacaacgggaagcugugcgaccugaacggcgugaagccccucauccugcgcgacugcuccgucgccggguggcugcucggcaacccgaugugcgacgaguucaucaacgugcccgaguggagcuacaucguggagaaggccucccccgccaacgaccugugcuaccccggggacuucaacgacuacgaggagcugaagcaccuccugagccggaccaaccacuucgagaagauccagaucaucccgaaguccagcugguccaaccacgacgccagcuccggcgucagcuccgcgugccccuaccacggccgcagcuccuucuuccggaacgugguguggcugaucaagaagaacagcgccuaccccacgaucaagcgcuccuacaacaacaccaaccaggaggaccuccugguccugugggggauccaccaccccaacgacgccgccgagcagaccaagcucuaccagaacccgaccacguacaucagcgugggcaccuccacccugaaccagcggcuggugcccgagaucgcgacccgccccaaggucaacgggcagagcggccggauggaguucuucuggacgauccucaagcccaacgacgccaucaacuucgagagcaacgggaacuucaucgccccggaguacgccuacaagaucgugaagaagggcgacuccgccaucaugaaguccgagcuggaguacggcaacugcaacaccaagugccagacccccaugggggcgaucaacagcagcaugcccuuccacaacauccacccccugaccaucggcgagugcccgaaguacgugaaguccaaccgccucguccuggccacggggcugcggaacacgccccagcgcgagcggcgccggaagaagcgcggccucuucggcgccaucgccggguucaucgagggcggguggcagggcaugguggacgggugguacggcuaccaccacagcaacgagcagggcuccggguacgccgcggacaaggagagcacccagaaggccaucgacggcgugaccaacaaggucaacuccaucaucgacaagaugaacacccaguucgaggccguggggcgggaguucaacaaccuggagcgccggaucgagaaccugaacaagcagauggaggacggcuuccucgacguguggaccuacaacgccgagcugcugguccucauggagaacgagcgcacccuggacuuccacgacagcaacgugaagaaccuguacgacaagguccggcuccagcugcgcgacaacgccaaggagcuggggaacggcugcuucgaguucuaccacaagugcgacaacgagugcauggaguccgugaagaacggcaccuacgacuacccccaguacagcgaggaggcgcggcucaaccgcgaggagaucuccggggugaagcuggagagcaugggcacguaccagauccuguccaucuacagcaccgucgccuccagccucgcccuggccaucaugguggccgggcugucccucuggaugugcagcaacggcagccugcagugccgcaucugcaucuga

SEQ ID NO: 78020 - RNA, 1704 nt, Artificial Sequence; identical to SEQ ID NO: 71741
  derived and/or modified CDS sequence (opt1) from hemagglutinin__InfluenzaA__AEO89181

SEQ ID NO: 78021 - RNA, 1707 nt, Artificial Sequence; identical to SEQ ID NO: 73195
  derived and/or modified CDS sequence (opt1) from hemagglutinin__InfluenzaA__AFM78567

SEQ ID NO: 78022 - RNA, 1707 nt, Artificial Sequence
  derived and/or modified CDS sequence (opt1) from hemagglutinin__InfluenzaA__ACR48872
auggagaagaucgugcugcuccuggccaucgucagccuggugaaguccgaccagaucugcaucggcuaccacgccaacaacagcaccgagcaggucgacaccaucauggagaagaacgugacggugacccacgcgcaggacauccucgagaagacccacaacgggaagcugugcgaccuggacggcgugaagccccucauccugcgcgacugcuccgucgccggguggcugcucggcaacccgaugugcgacgaguucaucaacgugcccgaguggagcuacaucguggagaaggccaaccccaccaacgaccugugcuaccccggguccuucaacgacuacgaggagcugaagcaccuccugagccggaucaaccacuucgagaagauccagaucaucccgaaguccagcugguccgaccacgaggccagcuccggcgucagcuccgccugccccuaccugggcagccccuccuucuuccgcaacgugguguggcucaucaagaagaacagcacguaccccaccaucaagaaguccuacaacaacaccaaccaggaggaccugcugguccucugggggauccaccacccgaacgacgcggccgagcagaccaugcuguaccagaaccccacgaccuacaucagcaucggcaccuccacccugaaccagcggcucgugcccaagaucgccacgcgcagcaaggugaacgggcagagcggccggauggaguucuucuggaccauccugaagcccaacgacgccaucaacuucgaguccaacgggaacuucaucgcgccggaguacgccuacaagaucgucaagaagggcgacagcgccaucaugaaguccgagcuggaguacggcaacugcaacaccaagugccagacccccaugggggccaucaacagcuccaugcccuuccacaacauccacccccucacgaucggcgagugcccgaaguacgugaaguccaaccgccuggugcuggccaccgggcuccggaacagcccccagcgcgagagccggcgcaagaagcggggccuguucggcgcgaucgccggguucaucgagggcggguggcagggcauggucgacgggugguacggcuaccaccacuccaacgagcagggcagcggguacgccgccgacaaggaguccacccagaaggccaucgacggcgugaccaacaaggugaacagcaucaucgacaagaugaacacgcaguucgaggcggucgggcgcgaguucaacaaccuggagcggcgcaucgagaaccucaacaagaagauggaggacggcuuccuggacguguggaccuacaacgccgagcugcucgugcugauggagaacgagcggacccuggacuuccacgacuccaacgucaagaaccucuacgacaaggugcgccugcagcugcgggacaacgccaaggagcucgggaacggcugcuucgaguucuaccacaagugcgacaacgagugcauggagagcauccgcaacggcaccuacaacuacccccaguacuccgaggaggcccggcugaagcgcgaggagaucagcggggucaagcuggaguccaucggcacguaccagauccucagcaucuacuccaccguggccagcagccuggcgcuggccaucaugauggccgggcucucccuguggaugugcagcaacggcucccugcagugccggaucugcaucuga

SEQ ID NO: 78023 - RNA, 1707 nt, Artificial Sequence; identical to SEQ ID NO: 73195
  derived and/or modified CDS sequence (opt1) from hemagglutinin__InfluenzaA__ABW06108

SEQ ID NO: 78024 - RNA, 1707 nt, Artificial Sequence
  derived and/or modified CDS sequence (opt1) from hemagglutinin__InfluenzaA__EPI341633
auggagaagaucacccugcuccugagcaucgugucccuggucaagagcgaccagaucugcaucggcuaccacgccaacaacuccaccgagcaggucgacacgaucauggagaagaacgugaccgugacccacgcccaggacauccucgagaagacccacaacgggaagcugugcgaccuggacggcgugaagccccucauccugaaggacugcagcguggcgggguggcugcucggcaacccgaugugcgacgaguucaucaacguccccgagugguccuacaucguggagaaggccaaccccacgaacgaccugugcuaccccgggagcuucaacgacuacgaggagcugaagcaccuccugucccgcaucaaccacuucgagaagauccagaucauccccaagagcuccuggagcgaccacgaggccuccagcggcguguccagcgccugccccuaccugggcucccccagcuucuuccggaacgucguguggcucaucaagaagaacuccaccuaccccaccaucaagaagaccuacaacaacacgaaccaggaggaccugcugauccucugggggauccaccacccgaacaacggcgccgagcagaccaugcuguaccagaaccccaccaccuacaucagcaucgggacguccacccugaaccagcgccucgugcccaagaucgcgacccggagcaaggucaacggccagagcgggcgcauggaguucuucuggaccauccugaagcccaacgacgccaucaacuucgaguccaacggcaacuucaucgccccggaguacgccuacaagaucgugaagaagggcgacagcgcgaucaugaaguccgagcuggaguacgggaacugcaacacgaagugccagacccccaugggcgccaucaacagcuccaugcccuuccacaacauccaccccaucaccaucggggagugcccgaaguacgucaagagcaaccggcucgugcuggccaccggccugcgcaacuccccgcagcgggagagccgccggaagaagcgcggccucuucggggccaucgccggcuucaucgagggcggguggcaggggaugguggacggcugguacggcuaccaccacuccaacgagcaggggagcggcuacgcggccgacaaggaguccacgcagaaggccaucgacggggugaccaacaaggucaacagcaucaucgacaagaugaacacccaguucgaggccgugggccgggaguucuccaaccuggagcgccggaucgagaaccugaacaagaagauggaggacggguuccucgacguguggaccuacaacgccgagcugcugguccucauggagaacgagcgcacgcuggacuuccacgacagcaacgugaagaaccuguacgacaaggugcggcuccagcugcgcgacaacgcgaaggagcugggcaacggcugcuucgaguucuaccacaagugcgacaacgagugcauggaguccauccggaacgggaccuacaacuacccccaguacagcgaggaggcccgccucaagcgggaggagaucuccggcgucaagcuggagagcaucgggaccuaccagauccuguccaucuacagcaccguggccagcucccucgcccuggccaucaugaucgcgggccugagccucuggaugugcuccaacgggagccugcagugccgcaucugcaucuga

SEQ ID NO: 78025 - RNA, 1707 nt, Artificial Sequence
  derived and/or modified CDS sequence (opt1) from hemagglutinin__InfluenzaA__ABD95991
auggagaagaucaugcugcuccuggccaucgugagccuggucaaguccgaccagaucugcaucggcuaccacgccaacaacagcaccgagcaggucgacaccaucauggagaagaacgugacggugacccacgcgcaggacauccucgagaagacccacaacgggaagcugugcgaccuggacggcgugaagccccucauccugcgcgacugcuccguggccggguggcugcucggcaacccgaugugcgacgaguuccugaacguccccgaguggagcuacaucguggagaagaucaaccccgccaacgaccugugcuaccccgggaacuucaacgacuacgaggagcucaagcaccuccugucccggaucaaccacuucgagaagauccagaucauccccaagagcuccuggagcgaccacgaggccuccagcggcguguccagcgccugcccguaccagggccgcuccagcuucuuccggaacgucguguggcugaucaagaaggacaacgcguaccccaccaucaagcgcuccuacaacaacacgaaccaggaggaccugcuggugcucugggggauccaccaccccaacgacgccgccgagcagacccggcuguaccagaacccgaccaccuacaucagcgucggcacguccacccugaaccagcgccucgugcccaagaucgccacccggagcaaggugaacgggcaguccggccgcauggaguucuucuggaccauccugaagcccaacgacgcgaucaacuucgagagcaacgggaacuucaucgcccccgagaacgccuacaagaucgucaagaagggcgacagcacgaucaugaaguccgagcuggaguacggcaacugcaacaccaagugccagaccccgaucggggccaucaacagcuccaugcccuuccacaacauccacccccucaccaucggcgagugccccaaguacgucaagagcaaccggcuggugcuggccacggggcuccgcaacuccccgcagggcgagcggcgccggaagaagcgcggccuguucggggcgaucgccggcuucaucgagggcggguggcaggggaugguggacggcugguacggcuaccaccacagcaacgagcagggguccggcuacgccgccgacaaggagagcacccagaaggccaucgacggggugaccaacaaggugaacuccaucaucgacaagaugaacacccaguucgaggcggucggccgggaguucaacaaccuggagcgccggaucgagaaccucaacaagaagauggaggacggguuccuggacguguggacguacaacgccgagcugcucgugcugauggagaacgagcgcacccuggacuuccacgacagcaacgucaagaaccucuacgacaaggugcggcugcagcugcgcgacaacgccaaggagcucggcaacggcugcuucgaguucuaccaccggugcgacaacgagugcauggaguccguccgcaacgggaccuacgacuacccccaguacagcgaggaggcccgccugaagcgggaggagaucuccggcgugaagcuggagagcaucgggaccuaccagauccucuccaucuacagcacgguggccuccagccuggcgcuggccaucauggucgccggccucucccuguggaugugcagcaacgggagccugcagugccgcaucugcaucuga

SEQ ID NO: 78026 - RNA, 1707 nt, Artificial Sequence
  derived and/or modified CDS sequence (opt1) from hemagglutinin__InfluenzaA__AGN69453
auggagaagaucgugcugcuccuggccaucgucagccuggugaaguccgaccagaucugcaucggcuaccacgccaacaacagcaccgagcaggucgacaccaucauggagaagaacgugacggugacccacgcgcaggacauccucgagaagacccacaacgggaagcugugcgaccuggacggcgugaagccccucauccugcgcgacugcuccgucgccggguggcugcucggcaacccgaugugcgacgaguuccugaacgugcccgaguggagcuacaucguggagaagaucaaccccgccaacgaccugugcuaccccgggaacuucaacgacuacgaggagcucaagcaccuccugucccggaucaaccacuucgagaagauccagaucauccccaagagcuccuggagcgaccacgaggccuccgccggcgucagcuccgcgugcccguaccagggcaugagcuccuucuuccgcaacgugguguggcugaucaagaaggacaacgccuaccccaccaucaagcggagcuacaacaacacgaaccaggaggaccugcugguccucugggggauccaccaccccaacgacgccgccgagcagaccaagcuguaccagaacuccaccaccuacaucagcgugggcacguccacccugaaccagcgccucgugccgaagaucgcgacccggagcaaggucaacgggcaguccggccgcaucgaguucuucuggaccauccugaagcccaacgacacgaucaacuucgagagcaacgggaacuucaucgcccccgagaacgccuacaagaucgugaagaagggcgacagcaccaucaugaaguccgagcuggaguacggcaacugcaacaccaagugccagacccccaucggggccaucaacagcuccaugccguuccacaacauccacccccucacgaucggcgagugccccaaguacgucaagagcucccggcuggugcuggccaccgggcuccgcaacagcccccagggcgagcggcgccggaagaagcgcggccuguucggggcgaucgccggcuucaucgagggcggguggcaggggaugguggacggcugguacggcuaccaccacuccaacgagcaggggagcggcuacgccgccgacaaggaguccacccagaaggccaucgacggggugaccaacaaggucaacagcaucaucgacaagaugaacacgcaguucgaggcggugggccgggaguucaacaaccuggagcgccggaucgagaaccucaacaagaagauggaggacggguuccuggacguguggaccuacaacgccgagcugcucguccugauggagaacgagcgcacccuggacuuccacgacuccaacgugaagaaccucuacgacaagguccggcugcagcugcgcgacaacgccaaggagcucggcaacggcugcuucgaguucuaccaccggugcgacaacgagugcauggagagcgugcgcaacgggaccuacgacuacccgcaguacuccgaggaggcccggcugaagcgcgaggagaucagcggcgugaagcuggaguccaucgggacguaccagauccucagcaucuacuccaccgucgccagcucccuggcgcuggccaucaugguggccggccucagccuguggaugugcagcaacgggucccugcagugccgcaucugcaucuga

SEQ ID NO: 78027 - RNA, 1707 nt, Artificial Sequence
  derived and/or modified CDS sequence (opt1) from hemagglutinin__InfluenzaA__AGN69452
auggagaagaucgugcugcuccuggccaucgucagccuggugaaguccgaccagaucugcaucggcuaccacgccaacaacagcaccgagcaggucgacaccaucauggagaagaacgugacggugacccacgcgcaggacauccucgagaagacccacaacgggaagcugugcgaccuggacggcgugaagccccucauccugcgcgacugcuccgucgccggguggcugcucggcaacccgaugugcgacgaguuccugaacgugcccgaguggagcuacaucguggagaagaucaaccccgccaacgaccugugcuaccccgggaacuucaacgacuacgaggagcucaagcaccuccugucccggaucaaccacuucgagaagauccagaucauccccaagagcuccuggagcgaccacgaggccuccgccggcgucagcuccgcgugcccguaccagggccgcagcuccuucuuccggaacgugguguggcugaucaagaaggacaacgccuaccccaccaucaagcgcagcuacaacaacacgaaccaggaggaccugcugguccucugggggauccaccaccccaacgacgccgccgagcagacccggcuguaccagaacuccaccaccuacaucagcgugggcacguccacccugaaccagcgccucgugccgaagaucgcgacccggagcaaggucaacgggcaguccggccgcaucgaguucuucuggaccauccugaagcccaacgacacgaucaacuucgagagcaacgggaacuucaucgcccccgagaacgccuacaagaucgugaagaagggcgacagcaccaucaugaaguccgagcuggaguacggcaacugcaacaccaagugccagacccccaucggggccaucaacagcuccaugccguuccacaacauccacccccucacgaucggcgagugccccaaguacgucaagagcucccggcuggugcuggccaccgggcuccgcaacagcccccagggcgagcggcgccggaagaagcgcggccuguucggggcgaucgccggcuucaucgagggcggguggcaggggaugguggacggcugguacggcuaccaccacuccaacgagcaggggagcggcuacgccgccgacaaggaguccacccagaaggccaucgacggggugaccaacaaggucaacagcaucaucgacaagaugaacacgcaguucgaggcggugggccgggaguucaacaaccuggagcgccggaucgagaaccucaacaagaagauggaggacggguuccuggacguguggaccuacaacgccgagcugcucguccugauggagaacgagcgcacccuggacuuccacgacuccaacgugaagaaccucuacgacaagguccggcugcagcugcgcgacaacgccaaggagcucggcaacggcugcuucgaguucuaccaccggugcgacaacgagugcauggagagcgugcgcaacgggaccuacgacuacccgcaguacuccgaggaggcccgccugaagcgggaggagaucagcggcgugaagcuggaguccaucgggacguaccagauccucagcaucuacuccaccgucgccagcucccuggcgcuggccaucaugguggccggccucagccuguggaugugcagcaacgggucccugcagugccgcaucugcaucuga

SEQ ID NO: 78028 - RNA, 1707 nt, Artificial Sequence
  derived and/or modified CDS sequence (opt1) from hemagglutinin__InfluenzaA__ABD73284
auggagaagaucgugcugcuccuggccaucgucagccuggugaaguccgaccagaucugcaucggcuaccacgccaacaacagcaccgagcaggucgacaccaucauggagaagaacgugacggugacccacgcgcaggacauccucgagaagacccacaacgggaagcugugcgaccuggacggcgugaagccccucauccugcgcgacugcuccgucgccggguggcugcucggcaacccgaugugcgacgaguuccugaacgugcccgaguggagcuacaucguggagaagaucaaccccgccaacgaccugugcuaccccgggaacuucaacgacuacgaggagcucaagcaccuccugucccggaucaaccacuucgagaagauccagaucauccccaagagcuccuggagcgaccacgaggccuccgccggcgucagcuccgcgugcccguaccagggccgcagcuccuucuuccggaacgugguguggcugaucaagaaggacaacgccuaccccaccaucaagcgcagcuacaacaacacgaaccaggaggaccugcugguccucugggggauccaccaccccaacgacgccgccgagcagacccggcuguaccagaacccgaccaccuacaucuccgugggcacgagcacccugaaccagcgccucgugcccaagaucgcgacccgguccaaggucaacgggcagagcggccgcauggaguucuucuggaccauccugaagcccaacgacgccaucaacuucgaguccaacgggaacuucaucgcccccgagaacgccuacaagaucgugaagaagggcgacagcacgaucaugaaguccgagcuggaguacggcaacugcaacaccaagugccagaccccgaucggggccaucaacagcagcaugcccuuccacaacauccacccccucaccaucggcgagugccccaaguacgugaaguccagccggcugguccuggcgacggggcuccgcaacuccccgcagggcgagcggcgccggaagaagcgcggccuguucggggccaucgccggcuucaucgagggcggguggcaggggaugguggacggcugguacggcuaccaccacagcaacgagcagggguccggcuacgccgccgacaaggagagcacccagaaggcgaucgacggggugaccaacaaggucaacuccaucaucgacaagaugaacacccaguucgaggccgugggccgggaguucaacaaccuggagcgccggaucgagaaccucaacaagaagauggaggacggguuccuggacguguggacguacaacgccgagcugcucguccugauggagaacgagcgcacccuggacuuccacgacagcaacgugaagaaccucuacgacaagguccggcugcagcugcgcgacaacgccaaggagcucggcaacggcugcuucgaguucuaccaccggugcgacaacgagugcauggaguccgugcgcaacgggaccuacgacuacccccaguacagcgaggaggcccgccugaagcgggaggagaucuccggcgugaagcuggagagcaucgggaccuaccagauccucuccaucuacagcacggucgcguccagccuggcccuggccaucaugguggccggccucucccuguggaugugcagcaacgggagccugcagugccgcaucugcaucuga

SEQ ID NO: 78029 - RNA, 1695 nt, Artificial Sequence
  derived and/or modified CDS sequence (opt1) from hemagglutinin__InfluenzaA__ABF93440
auggagaagaucgugcugcuccuggccaucgucagccuggugaaguccgaccagaucugcaucggcuaccacgccaacaacagcaccgagcaggucgacaccaucauggagaagaacgugacggugacccacgcgcaggacauccucgagaagacccacaacgggaagcugugcgaccuggacggcgugaagccccucauccugcgcgacugcuccgucgccggguggcugcucggcaacccgaugugcgacgaguuccugaacgugcccgaguggagcuacaucguggagaagaucaaccccgccaacgaccugugcuaccccgggaacuucaacgacuacgaggagcucaagcaccuccugucccggaucaaccacuucgagaagauccagaucauccccaagagcuccuggagcgaccacgaggccuccagcggcgucuccagcgccugcccguaccagggccgcuccagcuucuuccggaacgugguguggcugaucaagaaggacaacgcguaccccaccaucaagcgcuccuacaacaacacgaaccaggaggaccugcugguccucugggggauccaccaccccaacgacgccgccgagcagacccggcuguaccagaacccgaccaccuacaucagcgugggcacguccacccugaaccagcgccucgugcccaagaucgccacccggagcaaggucaacgggcaguccggccgcauggaguucuucuggaccauccugaagcccaacgacgcgaucaacuucgagagcaacgggaacuucaucgcccccgagaacgccuacaagaucgugaagaagggcgacagcacgaucaugaaguccgagcuggaguacggcaacugcaacaccaagugccagaccccgaucggggccaucaacagcuccaugcccuuccacaacauccacccccucaccaucggcgagugccccaaguacgucaagagcaaccggcuggugcuggccacggggcuccgcaacuccccgcagaucgagacccggggccuguucggcgcgaucgccggguucaucgagggcggguggcagggcaugguggacgggugguacggcuaccaccacagcaacgagcagggcuccggguacgccgccgacaaggagagcacccagaaggccaucgacggcgugaccaacaaggucaacuccaucaucgacaagaugaacacgcaguucgaggcgguggggcgcgaguucaacaaccuggagcggcgcaucgagaaccucaacaagaagauggaggacggcuuccuggacguguggaccuacaacgccgagcugcucguccugauggagaacgagcggacccuggacuuccacgacagcaacgugaagaaccucuacgacaagguccgccugcagcugcgggacaacgccaaggagcucgggaacggcugcuucgaguucuaccaccgcugcgacaacgagugcauggaguccgugcggaacggcaccuacgacuacccccaguacagcgaggaggcccgccugaagcgggaggagaucuccggggugaagcuggagagcaucggcacguaccagauccucuccaucuacagcaccgucgccuccagccuggcgcuggccaucaugguggccgggcucucccuguggaugugcagcaacggcagccugcagugccgcaucugcaucuga

SEQ ID NO: 78030 - RNA, 1701 nt, Artificial Sequence
  derived and/or modified CDS sequence (opt1) from hemagglutinin__InfluenzaA__AKC45369
auggagaagaucgugcugcuccuggccgucgugagccuggugaaguccgaccagaucugcaucggcuaccacgccaacaacagcaccgagcaggucgacaccaucauggagaagaacgugacggugacccacgcgcaggacauccucgagaagacccacaacgggcgccugugcgaccugaacggcgucaagccccucauccugaaggacugcuccguggccggguggcugcucggcaacccgaugugcgacgaguucauccgggugcccgaguggagcuacaucgucgagcgcgccaaccccgccaacgaccugugcuaccccgggaaccugaacgacuacgaggagcucaagcaccuccugucccggaucaaccacuucgagaagacccugaucauccccaagagcuccuggccgaaccacacgagcuccggcgugagcgccgcgugccccuaccagggcacccccuccuucuuccgcaacguggucuggcugaccaagaagaacgacgccuacccgaccaucaagaugagcuacaacaacacgaaccgggaggaccugcucauccugugggggauccaccacuccaacaacgccgccgagcagaccaaccuguacaagaaccccaccaccuacgugagcgugggcacguccacccucaaccagcgccugguccccaagaucgcgacccggagccaggugaacgggcagcgcggccggauggacuucuucuggaccauccugaagcccaacgacgccauccacuucgaguccaacgggaacuucaucgccccggaguacgccuacaagaucgugaagaagggcgacagcacgaucaugaaguccgagauggaguacggccacugcaacaccaagugccagacccccaucggggccaucaacagcagcaugcccuuccacaacauccacccccucaccaucggcgagugcccgaaguacgucaaguccaacaagcuggugcuggcgacggggcuccgcaacagcccccugcgggagcgccggcgcaagcggggccuguucggcgccaucgccggguucaucgagggcggguggcagggcaugguggacgggugguacggcuaccaccacuccaacgagcagggcagcggguacgccgccgaccgcgaguccacccagaaggcgaucgacggcgucaccaacaaggugaacagcaucaucgacaagaugaacacccaguucgaggccguggggcgggaguucaacaaccucgagcgccggaucgagaaccugaacaagaagauggaggacggcuuccuggacgucuggacguacaacgccgagcuccuggugcugauggagaacgagcgcacccucgacuuccacgacuccaacgucaagaaccuguacgacaaggugcggcugcagcuccgcgacaacgccaaggagcuggggaacggcugcuucgaguucuaccacaagugcgacaacgagugcauggagagcgugcgcaacggcaccuacgacuacccccaguacuccgaggaggcccggcugaagcgcgaggagaucagcggggucaagcucgaguccaucggcaccuaccagauccugagcaucuacuccacgguggcgagcucccuggcccucgccaucaucguggccgggcugagccuguggaugugcuccaacggcagccuccagugccggaucugcaucuga

SEQ ID NO: 78031 - RNA, 1704 nt, Artificial Sequence; identical to SEQ ID NO: 76982
  derived and/or modified CDS sequence (opt1) from hemagglutinin__InfluenzaA__AJS18479

SEQ ID NO: 78032 - RNA, 1704 nt, Artificial Sequence
  derived and/or modified CDS sequence (opt1) from hemagglutinin__InfluenzaA__EPI691378
auggagaagaucgugcugcuccuggccgucgugagccuggugaaguccgaccagaucugcaucggcuaccacgccaacaacagcaccgagcaggucgacaccaucauggagaagaacgugacggugacccacgcgcaggacauccucgagaagacccacaacgggcgccugugcgaccugaacggcgucaagccccucauccugaaggacugcuccguggccggguggcugcucggcaacccgaugugcgacgaguucauccgggugcccgaguggagcuacaucgucgagcgcgccaaccccgccaacgaccugugcuaccccgggaaccugaacgacuacgaggagcucaagcaccuccugucccggaucaaccacuucgagaagacccugaucauccccaagagcuccuggccgaaccacgagacgagccugggcguguccgccgcgugccccuaccagggcgugcccagcuucuuccgcaacgucguguggcugaccaagaagaacgacgccuacccgaccaucaagauguccuacaacaacaccaaccgggaggaccuccugauccugugggggauccaccacagcaacaacgccgccgagcagacgaaccucuacaagaaccccaccaccuacguguccgucggcaccagcacgcugaaccagcgccuggugcccaagaucgcgacccggucccaggugaacgggcagcgcggccggauggacuucuucuggaccauccucaagcccaacgacgccauccacuucgagagcaacgggaacuucaucgccccggaguacgccuacaagaucgucaagaagggcgacuccaccaucaugaaguccgagauggaguacggccacugcaacacgaagugccagacccccaucggggccaucaacuccagcaugcccuuccacaacauccacccccugaccaucggcgagugcccgaaguacgucaagagcaacaagcuggugcucgcgaccgggcugcgcaacagcccccugcgggagcgccggcgcaagcggggccucuucggcgccaucgccggguucaucgagggcggguggcagggcaugguggacgggugguacggcuaccaccacagcaacgagcagggcuccggguacgccgccgaccgcgagagcacgcagaaggcgaucgacggcgugaccaacaaggugaacuccaucaucgacaagaugaacacccaguucgaggccgucgggcgggaguucaacaaccuggagcgccggaucgagaaccugaacaagaagauggaggacggcuuccucgacguguggaccuacaacgccgagcugcugguccucauggagaacgagcgcacgcuggacuuccacgacagcaacgugaagaaccuguacgacaaggugcggcuccagcugcgcgacaacgccaaggagcuggggaacggcugcuucgaguucuaccacaagugcgacaacgagugcauggaguccguccgcaacggcaccuacgacuacccccaguacagcgaggaggcccggcucaagcgcgaggagaucuccggggugaagcuggagagcaucggcaccuaccagauccuguccaucuacagcaccguggcguccagccucgcccuggccaucaucgucgccgggcugucccucuggaugugcagcaacggcucccugcagugccggaucugcaucuga

SEQ ID NO: 78033 - RNA, 1704 nt, Artificial Sequence
  derived and/or modified CDS sequence (opt1) from hemagglutinin__InfluenzaA__EPI533583
auggagaagaucgugcugcuccuggccaucgucagccuggugaagggcgaccagaucugcaucggguaccacgccaacaacuccaccgagcaggucgacaccaucauggagaagaacgugacggugacccacgcgcaggacauccucgagaagacccacaacggcaagcugugcgaccugaacggggugaagccccucauccugaaggacugcagcgucgccggcuggcugcucgggaacccgaugugcgacgaguucauccgcgugcccgagugguccuacaucguggagcgggccaaccccgccaacgaccugugcuaccccggcaaccugaacgacuacgaggagcucaagcaccuccugagccgcaucaaccacuucgagaagauccugaucaucccgaaguccagcuggaccaaccacgagacgucccugggcgucagcgccgcgugccccuaccaggggacccccuccuucuuccggaacgugguguggcugaucaagaagaacgacgccuaccccaccaucaagaucagcuacaacaacaccaaccaggaggaccuccugauccuguggggcguccaccacuccaacaacgccgccgagcagacgaaccucuacaagaacccgaccaccuacaucagcguggggaccuccacgcugaaccagcgccuggugcccaagaucgcgacccggagccaggucaacggccagcgcgggcggauggacuucuucuggaccauccucaagcccaacgacgccauccacuucgaguccaacggcaacuucaucgcccccgaguacgccuacaagaucgugaagaagggcgacagcaccaucaugaaguccgagauggaguacgggcacugcaacacgaagugccagaccccgaucggcgccaucaacagcuccaugcccuuccacaacauccacccccugaccaucggggagugccccaaguacgucaagagcaacaagcuggugcucgcgaccggccugcgcaacagcccgcugcgggagaagcgccggaagcgcggccucuucggggccaucgccggcuucaucgagggcggguggcaggggaugguggacggcugguacggcuaccaccacuccaacgagcaggggagcggcuacgccgccgacaaggaguccacgcagaaggcgaucgacggggugaccaacaaggucaacagcaucaucgacaagaugaacacccaguucgaggccgugggccgggaguucaacaaccuggagcgccggaucgagaaccugaacaagaagauggaggacggguuccucgacguguggaccuacaacgccgagcugcugguccucauggagaacgagcgcacgcuggacuuccacgacuccaacgugaagaaccuguacgacaagguccggcuccagcugcgcgacaacgccaaggagcugggcaacggcugcuucgaguucuaccacaagugcgacaacaagugcauggagagcgugcggaacgggaccuacgacuacccccaguacuccgaggaggcccgccucaagcgggaggagaucagcggcgugaagcuggaguccaucgggaccuaccagauccugagcaucuacuccaccgucgcgagcucccucgcccuggccaucaucguggccggccugagccucuggaugugcuccaacgggagccugcagugccgcaucugcaucuga

SEQ ID NO: 78034 - RNA, 1701 nt, Artificial Sequence; identical to SEQ ID NO: 76995
  derived and/or modified CDS sequence (opt1) from hemagglutinin__InfluenzaA__AKS48023

SEQ ID NO: 78035 - RNA, 1701 nt, Artificial Sequence
  derived and/or modified CDS sequence (opt1) from hemagglutinin__InfluenzaA__EPI587621
auggagaagauggugcugcuccuggccgccgucagccuggugaaguccgaccagaucugcaucggcuaccacgcgaacaacagcaccgagcaggucgacaccaucauggagaagaacgugacggugacccacgcccaggacauccucgagaagacccacaacgggcgccugugcgaccugaacggcgugaagccccucauccugaaggacugcuccgucgccggguggcugcucggcaacccgaugugcgacgaguucauccgggugcccgaguggagcuacaucguggagcgcgccaaccccgccaacgaccugugcuaccccgggaaccugaacgacuacgaggagcucaagcaccuccugucccggaucaaccacuucgagaagacccugaucauccccaagagcuccuggccgaaccacacgagcuccggcgucagcgcggccugccccuaccagggcaugcccuccuucuuccgcaacgugguguggcugaccaagaagaacgacgccuacccgaccaucaagaugagcuacaacaacaccuaccgggaggaccugcucauccugugggggauccaccacuccaacaacgccgcggagcagacgaaccuguacaagaaccccaccaccuacgucagcgugggcaccuccacgcucaaccagcgccuggagcccaagaucgccacccggagccaggugaacgggcagcgcggccggauggacuucuucuggaccauccugaagcccaacgacgccauccacuucgaguccaacgggaacuucaucgccccggaguacgccuacaagaucgucaagaagggcgacagcaccaucaugaaguccgagauggaguacggccacugcaacacgaagugccagacccccaucggggcgaucaacagcagcaugcccuuccacaacauccacccccucaccaucggcgagugcccgaaguacgugaaguccaacaagcuggugcuggccaccgggcuccgcaacagcccccugcgggagcgccggcgcaagcggggccuguucggcgccaucgccggguucaucgagggcggguggcagggcauggucgacgggugguacggcuaccaccacuccaacgagcagggcagcggguacgccgcggaccgcgaguccacgcagaaggccaucgacggcgugaccaacaaggugaacagcaucaucgacaagaugaacacccaguucgaggccgucgggcgggaguucaacaaccucgagcgccggaucgagaaccugaacaagaagauggaggacggcuuccuggacguguggaccuacaacgccgagcuccuggugcugauggagaacgagcgcacgcucgacuuccacgacuccaacgucaagaaccuguacgacaaggugcggcugcagcuccgcgacaacgccaaggagcuggggaacggcugcuucgaguucuaccacaagugcgacaacgagugcauggagagcguccgcaacggcaccuacgacuacccccaguacuccgaggaggcgcggcugaagcgcgaggagaucagcggggugaagcucgaguccaucggcaccuaccagauccugagcaucuacuccaccguggccagcucccuggcccucgccaucaucgucgccgggcugagccuguggaugugcuccaacggcagccuccagugccggaucugcaucuga

SEQ ID NO: 78036 - RNA, 1704 nt, Artificial Sequence
  derived and/or modified CDS sequence (opt1) from hemagglutinin__InfluenzaA__AJE30333
auggagaagaucgugcugcuccuggccgucaucagccuggugaaguccgaccagaucugcaucggcuaccacgccaacaacagcaccaagcaggucgacaccaucauggagaagaacgugacggugacccacgcgcaggacauccucgagaagacccacaacgggaagcugugcgaccugaacggcgugaagccccucauccugaaggacugcuccgucgccggguggcugcucggcaacccgaugugcgacgaguucauccgcgugcccgaguggagcuacaucguggagcgggccaaccccgccaacgaccugugcuaccccgggacccugaacgacuacgaggagcucaagcaccuccugucccgcaucaaccacuucgagaagacgcugaucaucccgcggagcuccuggcccaaccacgagaccagccugggcgucuccgccgcgugccccuaccagggcgccagcuccuucuuccgcaacgugguguggcugaucaagaagaacgacgccuaccccaccaucaagaucagcuacaacaacaccaaccgggaggaccuccugauccugugggggauccaccacuccaacaacgccgcggagcagacgaaccucuacaagaacccggacaccuacgucagcgugggcaccuccacccugaaccagcgccuggugcccaagaucgccacgcggagccaggucaacgggcaguccggccgcauggacuucuucuggaccauccucaagcccaacgacgccauccacuucgagagcaacgggaacuucaucgcccccgaguacgccuacaagaucgugaagaagggcgacuccaccaucaugaaguccgagauggaguacggccacugcaacaccaagugccagacgccgaucggggcgaucaacagcagcaugcccuuccacaacauccacccccugaccaucggcgagugccccaaguacgucaagagcaacaagcuggugcucgccaccgggcugcggaacuccccgcugcgcgagcggcgccggaagcgcggccucuucggcgccaucgccggguucaucgagggcggguggcagggcaugguggacgggugguacggcuaccaccacagcaacgagcagggcuccggguacgccgcggacaaggagagcacccagaaggccaucgacggcgugacgaacaaggucaacuccaucaucgacaagaugaacacccaguucgaggccguggggcgggaguucaacaaccuggagcgccggaucgagaaccugaacaagaagauggaggacggcuuccucgacguguggaccuacaacgccgagcugcugguccucauggagaacgagcgcacccuggacuuccacgacagcaacgugaagaaccuguacgacaagguccggcuccagcugcgcgacaacgccaaggagcuggggaacggcugcuucgaguucuaccacaagugcgacaacgagugcauggaguccgugcggaacggcacguacgacuaccccaaguacagcgaggaggcgauccucaagcgcgaggagaucuccggggugaagcuggagagcaucggcaccuaccagauccuguccaucuacagcaccgucgccuccagccucgcccuggccaucaucguggccgggcugucccucuggaugugcagcaacggcucccugcagugccgcaucugcaucuga

SEQ ID NO: 78037 - RNA, 1704 nt, Artificial Sequence
  derived and/or modified CDS sequence (opt1) from hemagglutinin__InfluenzaA__EPI459855
augaucgccaucguggucaucgccauccuggcgagcgccggcaaguccgacaagaucugcaucggguaccacgccaacaacagcaccacccagguggacacgcuccuggagaagaacgugaccgucacccacuccguggagcugcucgagaaccagaaggagaagcgcuucugcaagaucaugaacaaggcgccccuggaccugaaggacugcaccaucgagggcuggauccucgggaacccgaagugcgaccugcugcucggcgaccagagcugguccuacaucguggagcggcccaacgcccagaacgggaucugcuaccccggcguccugaacgagcuggaggagcucaaggccuucaucggcagcggggagcgcguggagcgguucgagauguuccccaaguccacgugggccggcguggacaccagccgcggggucaccaacgccugcccguccuacaccaucgacagcuccuucuaccggaaccugguguggaucgugaagacggacagcgccaccuaccccgucaucaagggcaccuacaacaacaccgggacgcagcccauccuguacuucuggggcgugcaccacccccucgacaccaccgugcaggacaaccuguacggcuccggggacaaguacguccgcaugggcaccgagagcaugaacuucgcgaaguccccggagaucgccgcccggcccgccgugaacgggcagcgcagccggaucgacuacuacugguccgugcugcgccccggcgagacgcucaacgucgagagcaacggcaaccugaucgcccccugguacgcguacaaguucguguccaccaacaagaagggggccguguucaagagcgaccugccgaucgagaacugcgacgcgaccugccagaccaucacgggcguccuccggaccaacaagaccuuccagaacgugagcccccuguggaucggggagugccccaaguacgugaaguccgagagccugcgccucgccaccggccugcggaacgucccccagaucgccacgcgcgggaucuucggcgccaucgccggcuucaucgagggcggguggaccgggaugaucgacggcugguacggguaccaccacgagaacucccagggcagcggcuacgccgccgaccgggaguccacccagaaggccaucgacgggaucaccaacaaggugaacagcaucaucaacaagaugaacacgcaguucgaggcggucgaccacgaguucuccaaccuggagcgccggaucggcaaccucaacaagcgcauggaggacggguuccuggacguguggaccuacaacgccgagcugcucgugcugcuggagaacgagcggacccucgaccugcacgacgccaacgucaagaaccuguacgagaaggucaagagccagcuccgcgacaacgccaacgaccugggcaacgggugcuucgaguucuggcacaagugcgacaacgagugcauggaguccgugaagaacggcaccuacgacuacccgaaguaccagaaggagagcaagcugaaccggcagggcaucgaguccgugaagcucgagaaccuggggguguaccagauccuggccaucuacagcacgguguccagcucccucguccuggugggccugaucauggcgaucgggcucuggaugugcagcaacggcuccaugcagugccgcaucugcaucuga

SEQ ID NO: 78038 - RNA, 1704 nt, Artificial Sequence; identical to SEQ ID NO: 78037
  derived and/or modified CDS sequence (opt1) from hemagglutinin__InfluenzaA__EPI459855/m1

SEQ ID NO: 78039 - RNA, 1692 nt, Artificial Sequence
  derived and/or modified CDS sequence (opt1) from hemagglutinin__InfluenzaA__ACZ36872
augaacacccagauccugguguucgcccucgucgccgugauccacaccaacgcggacaagaucugccugggccaccacgccgugagcaacgggacgaaggucaacacccugaccgagcgcggcguggagguggucaacgccaccgagacgguggagcggaccaacauccccaagaucugcuccaaggggaagcgcaccguggaccucggccagugcgggcugcugggcaccaucacgggcccgccccagugcgaccaguuccucgaguucagcgccgaccugaucaucgagcggcgcgacgggaacgacgucugcuaccccggcaaguucgugaacggggaggcccugcggcagauccuccgcaaguccggcgggaucaacaaggagaccaugggcuucaccuacagcggcauccggaccaacgggacgaccuccgcgugccgccggagcggcuccagcuucuacgccgagaugaaguggcugcuguccgacaccgacaacgccgccuucccccagaugaccaagagcuacaagaacacgcgccgggagccggcgcucaucgugugggggauccaccacuccggcagcaccaccgagcagaccaagcuguacggcuccgggaacaagcuggucacggugggcagcuccaaguaccagcagagcuucgugcccucccccgggacccgcccccaggucaacggccagagcgggcggaucgacuuccacuggcucauccuggacuccaacgacaccgugaccuucagcuucaacggcgccuucaucgccccggaccgcgccagcuuccugaagggcaaguccauggggauccagagcgacgugcaggucgacgccaacugcgagggcgagugcuaccacuccgggggcacgaucaccagcucccuccccuuccagaacaucaacagccgggcgguggggaagugcccccgcuacgugaagcaggagucccugcugcucgccaccggcaugaagaacguccccgagcugccgaagaagcggcgcaagcggggccuguucggggccaucgccggcuucaucgagaacgggugggagggccucguggacgggugguacggcuuccgccaccagaacgcccagggcgaggggaccgcggccgacuacaagagcacgcaguccgccaucgaccagaucaccggcaagcugaaccggcugaucgagaagaccaaccagcaguucgagcucaucgacaacgaguucaccgagguggagaagcagaucgggaacgucaucaacuggacgcgcgacagcaucaccgaggugugguccuacaacgccgagcugcuggucgccauggagaaccagcacaccaucgaccucgcggacagcgagaugaacaagcuguacgagcgcgugcggaagcagcugcgcgagaacgccgaggaggacggcaccggcugcuucgagaucuuccacaagugcgacgacgacugcauggccuccauccggaacaacacguacgaccacagcaaguaccgcgaggaggccaugcagaaccggauccagaucgaccccgugaagcucuccgggggcuacaaggacgucauccugugguucagcuucggggccuccugcuuccugcuccuggcgaucgccaugggccugguguucaucugcgugaagaacgggaacaugcgcugcaccaucugcaucuga

SEQ ID NO: 78040 - RNA, 1692 nt, Artificial Sequence
  derived and/or modified CDS sequence (opt1) from hemagglutinin__InfluenzaA__AGB51388
augaacacccagauccugguguucgcccucgucgccgugauccacaccaacgcggacaagaucugccugggccaccacgccgugagcaacgggacgaaggucaacacccugaccgagcgcggcguggagguggucaacgccaccgagacgguggagcggaccaacauccccaagaucugcuccaaggggaagcgcaccguggaccucggccagugcgggcugcugggcaccaucacgggcccgccccagugcgaccaguuccucgaguucagcgccgaccugaucaucgagcggcgcgacgggaacgacgucugcuaccccggcaaguucgugaacggggaggcccugcggcagauccuccgcaaguccggcgggaucaacaaggagaccaugggcuucaccuacagcggcauccggaccaacgggacgaccuccgcgugccgccggagcggcuccagcuucuacgccgagaugaaguggcugcuguccgacaccgacaacgccgccuucccccagaugaccaagagcuacaagaacacgcgccgggagccggcgcucaucgugugggggauccaccacuccggcagcaccaccgagcagaccaagcuguacggcuccgggaacaagcuggucacggugggcagcuccaaguaccagcagagcuucgugcccaaccccgagacccgcccccaggucaacgggcaguccggccggaucgacuuccacuggcucauccuggacagcaacgacaccgugaccuucuccuucaacggggccuucaucgccccggaccgcgccagcuuccugaagggcaagagcaugggcauccaguccgacgugcaggucgacgccaacugcgagggggagugcuaccacagcggcgggacgaucaccuccagccuccccuuccagaacaucaacucccgggcggugggcaagugcccccgcuacgugaagcaggagagccugcugcucgccaccgggaugaagaacguccccgagcugccgaagaagcggcgcaagcggggccuguucggcgccaucgccggguucaucgagaacggcugggaggggcucguggacggcugguacggguuccgccaccagaacgcccagggcgagggcaccgcggccgacuacaaguccacgcagagcgccaucgaccagaucaccgggaagcugaaccggcugaucgagaagaccaaccagcaguucgagcucaucgacaacgaguucaccgagguggagaagcagacgggcaacgucaucaacuggacccgcgacuccaucaccgagguguggagcuacaacgccgagcugcuggucgccauggagaaccagcacaccaucgaccucgcggacuccgagaugaacaagcuguacgagcgcgugcggaagcagcugcgcgagaacgccgaggaggacgggacgggcugcuucgagaucuuccacaagugcgacgacgacugcauggccagcauccggaacaacaccuacgaccacuccaaguaccgcgaggaggccaugcagaaccggauccagaucgaccccgugaagcucagcggcggguacaaggacgucauccugugguucuccuucggcgccagcugcuuccugcuccuggcgaucgccauggggcugguguucaucugcgugaagaacggcaacaugcgcugcaccaucugcaucuga

SEQ ID NO: 78041 - RNA, 1683 nt, Artificial Sequence; identical to SEQ ID NO: 74012
  derived and/or modified CDS sequence (opt1) from hemagglutinin__InfluenzaA__EPI439507

SEQ ID NO: 78042 - RNA, 1704 nt, Artificial Sequence
  derived and/or modified CDS sequence (opt1) from hemagglutinin__InfluenzaA__EPI164216
auggagaagaucgugcugcuccuggccaucgucagccuggugaaguccgaccagaucugcaucggcuaccacgccaacaacagcaccgagcaggucgacaccaucauggagaagaacgugacggugacccacgcgcaggacauccucgagaagacccacaacgggaagcugugcgaccuggacggcgugaagccccucauccugcgcgacugcuccgucgccggguggcugcucggcaacccgaugugcgacgaguucaucaacgugcccgaguggagcuacaucguggagaaggccaaccccgccaacgaccugugcuaccccgggaacuucaacgacuacgaggagcugaagcaccuccugucccggaucaaccacuucgagaagauccagaucauccccaagagcuccuggagcgaccacgaggccuccagcggcgucuccagcgcgugcccguaccagggcacccccuccuucuuccgcaacgugguguggcugaucaagaagaacaacacguaccccaccaucaagcggagcuacaacaacaccaaccaggaggaccuccugauccugugggggauccaccacuccaacgacgccgccgagcagaccaagcucuaccagaacccgacgaccuacaucagcgucggcaccuccacccugaaccagcgccuggugcccaagaucgccacgcggagcaaggugaacgggcaguccggccgcauggacuucuucuggaccauccucaagcccaacgacgcgaucaacuucgagagcaacgggaacuucaucgcccccgaguacgccuacaagaucgucaagaagggcgacagcgccaucgugaaguccgagguggaguacggcaacugcaacaccaagugccagaccccgaucggggccaucaacagcuccaugcccuuccacaacauccacccccugacgaucggcgagugccccaaguacgucaagagcaacaagcuggugcucgcgaccgggcugcggaacuccccgcugcgcgagcggcgccggaagcgcggccucuucggcgccaucgccggguucaucgagggcggguggcagggcaugguggacgggugguacggcuaccaccacagcaacgagcagggcuccggguacgccgccgacaaggagagcacccagaaggcgaucgacggcgucaccaacaaggugaacuccaucaucgacaagaugaacacgcaguucgaggccguggggcgggaguucaacaaccuggagcgccggaucgagaaccugaacaagaagauggaggacggcuuccucgacgucuggaccuacaacgccgagcugcuggugcucauggagaacgagcgcacccuggacuuccacgacagcaacgucaagaaccuguacgacaaggugcggcuccagcugcgcgacaacgccaaggagcuggggaacggcugcuucgaguucuaccacaagugcgacaacgagugcauggaguccgugcggaacggcaccuacgacuacccccaguacagcgaggaggcccgccucaagcgggaggagaucuccggggucaagcuggagagcaucggcacguaccagauccuguccaucuacagcaccguggcguccagccucgcccuggccaucaugguggccgggcugucccucuggaugugcagcaacggcagccugcagugccgcaucugcaucuga

SEQ ID NO: 78043 - RNA, 1683 nt, Artificial Sequence; identical to SEQ ID NO: 76375
  derived and/or modified CDS sequence (opt1) from hemagglutinin__InfluenzaA__EPI486492

SEQ ID NO: 78044 - RNA, 1683 nt, Artificial Sequence
  derived and/or modified CDS sequence (opt1) from hemagglutinin__InfluenzaA__EPI740738
augaacacccagauccugguguucgcccucaucgccaucauccccaccaacgcggacaagaucugccugggccaccacgccgucagcaacgggacgaaggugaacacccugaccgagcgcggcguggaggucgugaacgccaccgagacgguggagcggaccaacaucccgcgcaucugcuccaaggggaagcggaccgucgaccucggccagugcgggcugcugggcaccaucacgggcccgccccagugcgaccaguuccucgaguucagcgccgaccugaucaucgagcgccgggagggguccgacgugugcuaccccggcaaguucgugaacgaggaggcccugcgccagauccuccgggagagcgggggcaucgacaaggagaccaugggguucaccuacuccggcauccgcaccaacggcgucacgagcgcgugcaagcgguccgggagcuccuucuacgccgagaugaaguggcugcugagcaacaccgacaacgccgccuucccccagaugaccaaguccuacaagaacacccgcaagagccccgcgaucaucguguggggcauccaccacuccgugagcacggccgagcagaccaagcucuacggguccggcaacaagcuggucaccgugggcagcuccaacuaccagcagagcuucgugcccucccccggggcccggccgcaggucaacggccugagcgggcgcaucgacuuccacuggcucauccugaaccccaacgacaccgugacguucagcuucaacggcgccuucaucgcccccgaccgggcguccuuccugcgcggcaagagcauggggauccaguccggcgugcaggucgacgccaacugcgagggggacugcuaccacagcggcgggaccaucaucuccaaccuccccuuccagaacaucgacagccgggccgugggcaagugcccgcgcuacgugaagcagcggucccugcugcucgccaccgggaugaagaacguccccgagauccccaagggccgcggccuguucggggccaucgcgggcuucaucgagaacgggugggagggccugaucgacgggugguacggcuuccggcaccagaacgcccagggcgaggggaccgccgccgacuacaagagcacgcaguccgccaucgaccagaucaccggcaagcucaaccgccugaucgcgaagaccaaccagcaguucgagcugaucgacaacgaguucaacgagguggagaagcagaucgggaacgugaucaacuggacccgggacagcaucacggaggucugguccuacaacgccgagcuccugaucgccauggagaaccagcacaccaucgaccuggccgacagcgagauggacaagcucuacgagcgcgugaagcgccagcugcgggagaacgccgaggaggacggcaccggcugcuucgagaucuuccacaagugcgacgacgacugcauggcguccauccgcaacaacaccuacgaccaccggaaguaccgcgaggaggccaugcagaaccggauccagaucgaccccgucaagcugagcuccggguacaaggacgugauccucugguucagcuucggcgccuccugcuucauccugcuggccaucgugauggggcucgucuucaucugcgugaagaacggcaacaugcgcugcacgaucugcaucuga

SEQ ID NO: 78045 - RNA, 1683 nt, Artificial Sequence
  derived and/or modified CDS sequence (opt1) from hemagglutinin__InfluenzaA__EPI730495
augaacauccagauccugguguucgcccucaucgccaucauccccaccgacgcggacaagaucugccugggccaccacgccgucagcaacgggaccaaggugaacacgcugaccgagcgcggcguggaggucgugaacgccaccgagaccguggagcggacgaacaucccgcgcaucugcuccaaggggaagcggaccgucgaccucggccagugcgggcugcugggcaccaucaccggcccgccccagugcgaccaguuccucgaguucagcgccgaccugaucaucgagcgccgggagggguccgacgugugcuaccccggcaaguucgugaacgaggaggcccugcgccagauccuccgcaagagcgggggcaucgacaaggaggcgaugggguucacguacuccggcauccggaccaacggcgccaccagcgccugccggcgcuccgggagcuccuucuacgccgagaugaaguggcugcugagcaacaccgacaacgcggccuucccgcagaugacgaaguccuacaagaacacccgcaagagccccgccaucaucgucuggggcauccaccacuccgugagcaccgccgagcagaccaagcucuacggguccggcagcaagcuggugacggucggcuccagcaacuaccagcaguccuucgugcccagccccggggcccggccccaggugaacggccugagcgggcggaucgacuuccacuggcucauccugaaccccaacgacaccgucaccuucuccuucaacggcgcguucaucgcccccgaccgcgccagcuuccugcgggggaaguccaugggcauccagagcggcguccagguggacgccgacugcgagggggacugcuaccacuccggcgggaccaucaucagcaaccuccccuuccagaacaucgacucccgcgccgugggcaagugcccgcgguacgugaagcagcgcagccugcugcucgcgacggggaugaagaacgugcccgagauccccaagggccggggccuguucggggccaucgccggcuucaucgagaacgggugggagggccugaucgacgggugguacggcuuccgccaccagaacgcccagggcgaggggaccgccgcggacuacaaguccacccagagcgccaucgaccagaucaccggcaagcucaaccggcugaucgagaagacgaaccagcaguucgagcugaucgacaacgaguucaucgaggucgagaagcagaucgggaacgugaucaacuggacccgcgacuccaucaccgagguguggagcuacaacgccgagcuccuggucgccauggagaaccagcacaccaucgaccuggccgacuccgagauggacaagcucuacgagcgcgugaagcggcagcugcgcgagaacgcggaggaggacggcacgggcugcuucgagaucuuccacaagugcgacgacgacugcauggccagcauccggaacaacaccuacgaccacuccaaguaccgcgaggaggccaugcagaaccggauccagaucgaccccgucaagcugagcuccggguacaaggacgugauccucugguucagcuucggcgccuccugcuucauccugccggcgaucgugauggggcuggucuucaugugcgugaagaacggcaacaugcgcugcaccaucugcaucuga

SEQ ID NO: 78046 - RNA, 1683 nt, Artificial Sequence
  derived and/or modified CDS sequence (opt1) from hemagglutinin__InfluenzaA__EPI712926
augaacacccagauccugguguucgcccucaucgccaucauccccaccaacgcggacaagaucugccugggccaccacgccgucagcaacgggacgaaggugaacacccugaccgagcgcggcguggaggucgugaacgccaccgagacgguggagcggaccaacaucccgcgcaucugcuccaaggggaagcggaccgucgaccucggccagugcgggcugcugggcaccaucacgggcccgccccagugcgaccaguuccucgaguucagcgccgaccugaucaucgagcgccgggagggguccgacgugugcuaccccggcaaguucgugaacgaggaggcccugcgccagauccuccgggagagcgggggcaucgacaaggagaccaugggguucaccuacaacggcauccgcaucaacggcgucaccuccgcgugcaagcggagcggguccagcuucuacgccgagaugaaguggcugcuguccaacacggacaacgccgccuucccccagaugaccaagagcuacaagaacacccgcaagucccccgcgaucaucguguggggcauccaccacagcguguccaccgccgagcagacgaagcucuacgggagcggcaacaagcuggucaccgugggcuccagcaacuaccagcaguccuucgugcccagccccggggcccggccgcaggucaacggccuguccgggcgcaucgacuuccacuggcucauccugaaccccaacgacaccgugaccuucagcuucaacggcgccuucaucgcccccgaccgggcgagcuuccugcgcgggaaguccaucggcauccagagcggcgugcaggucgacgccaacugcgagggggacugcuaccacuccggcgggacgaucaucagcaaccuccccuuccagaacaucgacucccgggccgugggcaagugcccgcgcuacgugaagcagcggagccugcugcucgccaccgggaugaagaacguccccgagauccccaagggccgcggccuguucggggccaucgcgggcuucaucgagaacgggugggagggccugaucgacgggugguacggcuuccggcaccagaacgcccagggcgaggggaccgccgccgacuacaaguccacccagagcgccaucgaccagaucacgggcaagcucaaccgccugaucgcgaagaccaaccagcaguucgagcugaucgacaacgaguucaacgagguggagaagcagaucgggaacgugaucaacuggacccgggacuccaucaccgaggucuggagcuacaacgccgagcuccugaucgccauggagaaccagcacacgaucgaccuggccgacuccgagauggacaagcucuacgagcgcgugaagcgccagcugcgggagaacgccgaggaggacggcaccggcugcuucgagaucuuccacaagugcgacgacgacugcauggcgagcauccgcaacaacaccuacgaccaccggaaguaccgcgaggaggccaugcagaaccggauccagaucgaccccgucaagcuguccagcggguacaaggacgugauccucugguucuccuucggcgccagcugcuucauccugcuggccaucgugauggggcucgucuucaucugcgugaagaacggcaacaugcgcugcaccaucugcaucuga

SEQ ID NO: 78047 - RNA, 1683 nt, Artificial Sequence; identical to SEQ ID NO: 74012
  derived and/or modified CDS sequence (opt1) from hemagglutinin__InfluenzaA__AGL44438

SEQ ID NO: 78048 - RNA, 1683 nt, Artificial Sequence
  derived and/or modified CDS sequence (opt1) from hemagglutinin__InfluenzaA__EPI445996
auggagaccgugagccugaugaccauccuccugcuggucacgaccuccaacgccgacaagaucugcaucggccaccagagcaccaacuccaccgagacgguggacacccucaccgagaccaacgugcccgucacgcacgccaaggagcugcugcacaccgaccacaacgggaugcucugcgcgaccaaccugggccacccgcugauccucgacacgugcaacguggaggggcugaucuacggcaaccccagcugcgaccugcuccucgggggccgcgagugguccuacaucguggagcggcccagcgccgucaacgggaccugcuaccccggcaacguggagaaccuggaggagcugcgcacccuguucuccagcuccagcuccuaccagcggauccagaucuucccggacaccaucuggaacgugaccuacacgggcaccagcaaguccugcagcgacuccuucuaccgcaacaugcgguggcugacccagaagaacgggcucuaccccguccaggacgcccaguucaccaacaaccgcggcaaggacauccuguucgugugggggauccaccacccgcccacggacaccgcccagaccaaccuguacacccggacggacaccaccaccagcgugacgaccgagaaccucgaccgcaccuucaagccccugaucggcccccggccccuggucaacggccucaucgggcgcaucaacuacuacugguccgugcugaagcccggccagacccugcgggugcgcagcaacgggaaccucaucgccccgugguacggccacguccuguccggcgagagccacgggcggauccugaagacgaaccucaacagcggcaacugcguggugcagugccagaccgagaagggcgggcugaacuccacccugcccuuccacaacaucagcaaguacgcguucgggaacugccccaaguacaucggcgucaagucccucaagcuggccaucggccugcgcaacgugcccgccaagagcucccggggccucuucggggccaucgcgggguucaucgagggcggguggccgggccugguggccggcugguacggguuccagcacagcaacgaccagggcgucgggaucgccgccgaccgcguguccacccagaaggccguggacaagaucacgagcaaggucaacaacaucguggacaagaugaacaagcaguacgagaucaucgaccacgaguucuccgaggucgagacccggcugaacaugaucaacaacaagaucgacgaccagauccaggacgugugggcguacaacgccgagcuccuggugcugcucgagaaccagaagacccuggacgagcacgacgccaacgucaacaaccuguacaacaaggugaagcgcgcccucggcagcaacgcccuggaggacgggaagggcugcuucgagcuguaccacaagugcgacgaccagugcauggagaccauccggaacggcaccuacaaccgccggaaguaccaggaggagucccgccucgagcgccagaagaucgaggggaucaagcuggagagcgagggcacguacaagauccugaccaucuacuccaccguggcgagcucccugguccucgccaugggguucgccgccuuccuguucugggccaugagcaacggcuccugccggugcaacaucugcaucuga

SEQ ID NO: 78049 - RNA, 1695 nt, Artificial Sequence
  derived and/or modified CDS sequence (opt1) from hemagglutinin__InfluenzaA__EPI433309
auggagaagaucgugcugcuccuggccaucgccagccuggucaaguccgaccagaucugcaucggcuaccacgcgaacaacagcaccgagcaggucgacaccaucauggagaagaacgugacggugacccacgcccaggacauccucgagaagacccacaacgggaagcugugcgaccuggacggcgugaagccccucauccugcgcgacugcuccguggccggguggcugcucggcaacccgaugugcgacaaguucaacgacguccccgaguggagcuacaucguggagaaggccaaccccgccaacgaccugugcuaccccgggaaccugaacgacuacgaggagcucaagcaccuccugucccggaucaaccacuucgagaagauccagaccuuccccaagagcuccuggagcgaccacgaggcgucccugggcgugagcgccgccugccccuaccagggcaugcccuccuucuuccgcaacgucguguggcugaucaagaagaacaacacguaccccaccaucaagagcuccuacaacaacaccaaccaggaggaccugcucauccugugggggauccaccacagcaacgacgaggccgagcagacccggcuguaccagaacuccaacacguacaucagcgugggcaccuccacccucaaccagcgccuggucccgaagaucgcgacccggagcaaggugaacgggcaguccggccgcauggacuucuucuggacgauccugaagcccaacgacgccaucaacuucgagagcaacgggaacuucaucgcccccgaguacgccuacaagaucgugaagaagggcgacagcgccaucaugaaguccgaggucggcuacggggacugcaacaccaagugccagacccccaucggcgcgaucaacagcuccaugccguuccacaacauccacccccucaccaucggggagugccccaaguacgucaagagcaacaagcuggugcuggccacgggccuccggaacuccccgcagaucgagacccgcggccuguucggggccaucgccggcuucaucgagggcggguggcaggggaugguggacggcugguacggcuaccaccacagcaacgagcagggguccggcuacgccgcggacaaggagagcacccagaaggccaucgacggggugaccaacaaggugaacuccaucaucgacaagaugaacacgcaguucgaggccgucgagcgggaguucaacaaccuggagcgccggaucgagaaccucaacaagaagauggaggacggcuuccuggacguguggaccuacaacgccgagcugcucgugcugauggagaacgagcgcacccuggacuuccacgacagcaacgucaagaaccucuacgacaaggugcggcugcagcugcgcgacaacgccaaggagcucgggaacggcugcuucgaguucuaccacaagugcgacaacgagugcauggaguccguccggaacggcaccuacgacuacccgcaguacagcgaggaggcgcgccugaagcgggaggagaucuccggggugaagcuggagagcaucggcacguaccagauccucuccaucuacagcaccguggccuccagccuggcccuggccaucauggucgccgggcucucccuguggaugugcagcaacggcagccugcagugccgcaucugcaucuga

SEQ ID NO: 78050 - RNA, 1683 nt, Artificial Sequence
  derived and/or modified CDS sequence (opt1) from hemagglutinin__InfluenzaA__EPI470859
auggaggccaucccccugaucaccauccuccugguggucaccgccagcaacgcggacaagaucugcaucggcuaccaguccacgaacagcaccgagaccguggacacccugacggagaacaacgugccggucacccacgccaaggagcuccugcacaccgagcacaacgggaugcugugcgccaccaaccucggccgcccccugauccuggacacgugcaccaucgaggggcucaucuacggcaaccccuccugcgaccugcugcucgggggccgggaguggagcuacaucguggagcgccccuccgccgugaacggcaugugcuacccggggaacgucgagaaccuggaggagcugcggagcuucuucuccagcgccuccagcuaccagcgcauccagaucuuccccgacaccaucuggaacguguccuacagcggcaccuccaaggcgugcagcgacuccuucuaccggagcaugcgcuggcucacgcagaagaacaacgccuaccccauccaggacgcccaguacaccaacaaccgggggaaguccauccuguucauguggggcaucaaccacccgcccaccgacaccgcccagacgaaccuguacacccgcaccgacaccacgaccagcguggcgaccgaggacaucaaccggaccuucaagcccgucaucgggccccgcccccucgugaacggccugcagggccggaucgacuacuacugguccgugcugaagccggggcagacgcuccgcguccggagcaacggcaaccugaucgcccccugguacgggcacauccugagcggcgagucccacggccgcauccucaagaccgaccugaacagcggguccugcguggugcagugccagaccgagcggggcgggcugaacaccacgcuccccuuccacaacgucagcaaguacgccuucggcaacugccccaaguacgugggggugaagucccugaagcuggccgucggccuccgcaacgugccggcccggagcucccgcggccuguucggggcgaucgccggcuucaucgagggcggguggagcgggcugguggccggcugguacggcuuccagcacuccaacgaccagggggucggcaucgccgccgaccgggacagcacccagcgcgcgaucgacaagaucaccuccaaggugaacaacaucguggacaagaugaacaagcaguacgagaucaucgaccacgaguucagcgaggucgagaaccggcucaacaugaucaacaacaagaucgacgaccagauccaggacaucugggccuacaacgccgagcugcuggugcuccuggagaaccagaagacccuggacgagcacgacgccaacgucaacaaccucuacaacaaggugaagcgcgcccugggguccaacgcgauggaggacggcaaggggugcuucgagcuguaccacaagugcgacgaccagugcauggagacgauccgcaacggcaccuacaaccggcgcaaguacaaggaggagagccggcucgagcgccagaagaucgagggcgugaagcuggaguccgaggggaccuacaagauccugaccaucuacagcacggucgccuccagccucgugaucgccaugggcuucgccgccuuccuguucugggcgauguccaacgggagcugccggugcaacaucugcaucuga

SEQ ID NO: 78051 - RNA, 1683 nt, Artificial Sequence
  derived and/or modified CDS sequence (opt1) from hemagglutinin__InfluenzaA__EPI498037
auggagaccgugagccugaucaccauccuccuggucgccacgguguccaacgccgacaagaucugcaucggcuaccagagcaccaacuccaccgagaccguggacacgcugaccgagaacaacguccccgugacccacgcgaaggagcuccugcacaccgagcacaacgggaugcugugcgccacgagccucggccagccgcugauccuggacacgugcaccaucgaggggcucaucuacggcaaccccuccugcgaccugcugcucgaggggcgcgaguggagcuacaucguggagcggcccuccgccgucaacggccugugcuaccccggcaacguggagaaccuggaggagcuccgcagccuguucuccagcgcccgguccuaccagcgcauccagaucuucccggacaccaucuggaacgugagcuacaacgggaccuccaaggccugcagcggcuccuucuaccggagcaugcgcuggcugacccggaagaacggggacuaccccauccaggacguccaguacaccaacaaccagggcaagaacauccucuucaugugggggaucaaccacccgcccaccgacacgacccagcgcgaccuguacacccggaccgacacgaccaccuccguggcgaccgaggagaucaaccgcaucuucaagccccugaucggcccccggccccucgugaacggccugauggggcgcaucgacuacuacuggagcguccugaagcccggccagacgcuccggaucaaguccgacgggaaccugaucgccccgugguacggccacauccugagcggcgagagccacgggcgcauccucaagaccgaccugaagcggggcuccugcaccgugcagugccagaccgagaagggcgggcugaacacgacccuccccuuccagaacgugagcaaguacgccuucgggaacugcuccaaguacaucggcaucaagagccugaagcuggccgucggccuccgcaacgugcccucccggagcucccgcgggcuguucggcgcgaucgccggguucaucgagggcggguggagcggccugguggccggcugguacggguuccagcacuccaacgaccagggcgucgggauggccgccgaccgggacagcacccagaaggcgaucgacaagaucaccuccaaggugaacaacaucguggacaagaugaacaagcaguacgagaucaucgaccacgaguucagcgaggucgagacgcgccucaacaugaucaacaacaagaucgacgaccagauccaggacaucugggccuacaacgccgagcugcuggugcuccuggagaaccagaagacccuggacgagcacgacgccaacgugaacaaccucuacaacaaggucaagcgggcccugggcuccaacgcgguggaggacgggaagggcugcuucgagcuguaccacaagugcgacaaccagugcauggagaccauccgcaacggcaccuacaacaagcgcaaguaccaggaggagagcaagcucgagcggcagaagaucgagggggucaagcuggaguccgagggcacguacaagauccugaccaucuacagcaccguggccuccagccucgugaucgccaugggguucgccgccuuccuguucugggcgauguccaacggcagcugccgcugcaacaucugcaucuga

SEQ ID NO: 78052 - RNA, 1683 nt, Artificial Sequence
  derived and/or modified CDS sequence (opt1) from hemagglutinin__InfluenzaA__AGO17847
auggagaccaucagccugaugaccauccuccugaucacgaccgccuccaacgccgacaagaucugcaucggccaccagagcaccaacuccaccgagacgguggacacccugaccgagaccaacguccccgugacgcacgcgaaggagcuccugcagaccgagcacaacgggaugcugugcgccaccaaccucggccacccgcugauccuggacacgugcaccaucgaggggcucaucuacggcaaccccagcugcgaccugcugcucgaggggcgcgagugguccuacaucguggagcggcccagcgccgucaacgggaccugcuaccccggcaacguggagaaccuggaggagcugcgcacccucuucuccagcgccuccagcuaccagcggauccagaucuucccggacaccacguggaacgugaccuacaccgggaccucccgcagcugcuccggcagcuucuaccgguccaugcgcuggcugacgcagaaguccggguucuaccccguccaggacgccaaguacaccaacaaccggggcaagaacauccuguucgugugggggauccaccacccccacaccuacaccgaccagacgacccucuacauccgcaacgacaccaccacgagcgugaccaccgaggagcugaaccggaucuucaagcccgucaucgugccgcgccugcucgugaacggccagcagggccggaucgacuacuacuggagcguccugaagcccgggcagacccugcgcgugcgguccaacggcaaccucaucgcgcccugguacgggcacgugcugagcggcggcagccacgggcgcauccugaagacggaccucaaguccggcaacugcgucgugcagugccagaccgagaagggcggccugaacagcacccugcccuuccacaacaucuccaaguacgccuucgggaccugcccgaaguacgugaaggucaacagccucaagcuggccaucggccugcggaacgugcccgcccgcuccaaccggggccucuucggggcgaucgccggcuucaucgagggcggguggcccgggcugguggccggcugguacggcuuccagcacagcaacgaccagggggucggcauggccgccgaccgcgacuccacgcagaaggcgguggacaagaucaccagcaaggugaacaacaucgucgacaagaugaacaagcaguacgagaucaucgaccacgaguucuccgagguggagacccggcugaacaugaucaacaacaagaucgacgaccagauccaggacgucugggccuacaacgccgagcuccuggugcugcucgagaaccagaagacccuggacgagcacgacgccaacgugaacaaccuguacaacaaggucaagcgcgcccucgggagcaacgcgauggaggacggcaaggggugcuucgagcuguaccacaagugcgacgaccagugcauggagaccauccggaacggcacguacgaccgccgcaaguaccgggaggagucccgccuggagcggcagcgcaucgagggcgugaagcucgagagcgaggggaccuacaagauccugaccaucuacuccaccguggccagcucccuggucaucgccaugggcuucgccgccuuccucuucugggcgaugagcaacggguccugccggugcaacaucugcaucuga

SEQ ID NO: 78053 - RNA, 1683 nt, Artificial Sequence
  derived and/or modified CDS sequence (opt1) from hemagglutinin__InfluenzaA__ANZ03807
auggagaccgugagccugaucaccauccuccuggucgccacgguguccaacgccgacaagaucugcaucggcuaccagagcaccaacuccaccgagaccguggacacgcugaccgagaacaacguccccgugacccacgcgaaggagcuccugcacaccgagcacaacgggaugcugugcgccacgagccucggccagccgcugauccuggacacgugcaccaucgaggggcucaucuacggcaaccccuccugcgaccugagccuggaggggcgcgagugguccuacaucguggagcggcccagcgccgucaacggccucugcuaccccggcaacguggagaaccuggaggagcugcgcucccucuucagcuccgcccggagcuaccagcgcauccagaucuucccggacaccaucuggaacguguccuacgacgggaccagcaccgccugcuccggcagcuucuaccgguccaugcgcuggcugacccggaagaacggggacuaccccacccaggacgcgcaguacacgaacaaccagggcaagaacauccuguucaugugggggaucaaccacccgcccaccgacgacacccagcgcaaccucuacacccggacggacaccaccaccagcgucgccacggaggagaucaaccgcaucuucaagccccugaucggcccccggccccuggugaacggccucauggggcgcaucgacuacuacugguccgugcugaagcccggccagacccugcggaucaagagcgacgggaaccucaucgccccgugguacggccacauccugagcggcgagucccacgggcgcauccugaagaccgaccucaagcggggcagcugcaccguccagugccagacggagaagggcgggcugaacaccacccugcccuuccagaacguguccaaguacgccuucgggaacugcagcaaguacaucggcaucaagucccucaagcuggcggugggccugcgcaacguccccagccgguccagccgcggccucuucggggccaucgccggguucaucgagggcgggugguccggccugguggccggcugguacggguuccagcacagcaacgaccagggcguggggauggccgcggaccgggacuccacccagaaggccaucgacaagaucacgagcaaggucaacaacaucguggacaagaugaacaagcaguacgagaucaucgaccacgaguucuccgagguggagacccgccugaacaugaucaacaacaagaucgacgaccagauccaggacaucugggccuacaacgccgagcuccugguccugcucgagaaccagaagacccuggacgagcacgacgccaacgugaacaaccuguacaacaaggugaagcgggcgcucggcagcaacgccgucgaggacgggaagggcugcuucgagcuguaccacaagugcaacgaccagugcauggagaccauccgcaacggcacguacaaccgccggaaguaccaggaggaguccaagcuggagcgccagaagaucgagggggugaagcucgagagcgagggcaccuacaagauccugaccaucuacuccaccgucgccagcucccuggugaucgccaugggguucgccgcguuccucuucugggccaugagcaacggcagcugccggugcaacaucugcaucuga

SEQ ID NO: 78054 - RNA, 1683 nt, Artificial Sequence; identical to SEQ ID NO: 78053
  derived and/or modified CDS sequence (opt1) from hemagglutinin__InfluenzaA__EPI680526

SEQ ID NO: 78055 - RNA, 1683 nt, Artificial Sequence; identical to SEQ ID NO: 77709
  derived and/or modified CDS sequence (opt1) from hemagglutinin__InfluenzaA__ALT20080

SEQ ID NO: 78056 - RNA, 1410 nt, Artificial Sequence
  derived and/or modified CDS sequence (opt1) from neuraminidase__InfluenzaA__AAA43084
augaaccccaaccagaagaucaucaccaucggcagcgugucccugaccaucgccacggucugcuuccucaugcagaucgccauccuggcgaccaccgugacccugcacuucaagcagcacgagugcgacagcccggccuccaaccaggugaugcccugcgagcccaucaucaucgagcgcaacaucacggagaucgucuaccucaacaacaccaccaucgagaaggagaucugccccgaggugguggaguaccggaacuggagcaagccgcagugccagaucaccggguucgcccccuucuccaaggacaacagcauccgccuguccgccggcggggacaucugggucacgcgggagcccuacgugagcugcgaccccggcaagugcuaccaguucgcccuggggcagggcaccacccucgacaacaagcacuccaacggcaccauccacgaccgcaucccgcaccggacgcugcugaugaacgagcucggggugcccuuccaccugggcaccaagcaggucugcguggcguggagcuccagcuccugccacgacgggaaggccuggcugcacgugugcgucaccggcgacgaccgcaacgccaccgccagcuucaucuacgacgggcggcucguggacuccaucggcagcuggucccagaacauccugcgcacgcaggagagcgagugcgugugcaucaacgggaccugcaccgucgugaugaccgacggcuccgcgagcggccgggccgacacgcgcauccuguucaucaaggaggggaagaucgugcacaucagcccccucuccggcagcgcccagcacaucgaggagugcuccugcuacccccgguacccggacguccgcugcaucugccgggacaacuggaagggcagcaaccgccccgugaucgacaucaacauggaggacuacuccaucgacagcggguacgugugcuccggccuggucggggacacgccccggaacgacgacagcuccagcaacuccaacugccgcgaccccaacaacgagcggggcaacccgggggugaagggcugggccuucgacaacggcgacgacguguggauggggcgcaccaucaacaaggagagccgguccggcuacgagaccuucaaggucaucgggggcuggagcacccccaacuccaagagccaggugaaccgccaggucaucguggacaacaacaacugguccggguacagcggcaucuucuccguggagggcaagagcugcaucaaccggugcuucuacgucgagcugauccgcgggcgcccccaggagacccgggugugguggaccagcaacuccaucguggucuucugcggcaccagcgggacguacggcaccggguccuggcccgacggcgccaacaucaacuucaugccgaucuga

SEQ ID NO: 78057 - RNA, 1362 nt, Artificial Sequence
  derived and/or modified CDS sequence (opt1) from neuraminidase__InfluenzaA__AAA43397
augaaccccaaccagaagaucaucaccaucggcagcaucugcaugguggucgggaucaucucccugauccuccagaucggcaacaucaucagcaucuggaucucccacagcauccagaccgggaaccagaaccacacgggcaucugcaaccagggguccaucaccuacaaggugguggccggccaggacagcaccuccgucauccugaccggcaacagcucccugugcccgauccgcgggugggccauccacagcaaggacaacggcauccggaucggguccaagggcgacguguucgugauccgcgagcccuucaucagcugcucccaccucgagugccggacguucuuccugacccagggggcgcugcucaacgacaagcacagccgcggcaccuucaaggaccggucccccuaccgcgcccugaugagcugccccgucggcgaggccccgucccccuacaacagccgguucgaguccguggccuggagcgccagcgcgugccacgacggggugggcuggcugaccaucgggaucuccggccccgacgacggcgccgucgccgugcucaaguacaaccgcaucaucacggagaccaucaagagcuggcggaagaacauccugcgcacccaggaguccgagugcacgugcgugaacgggagcugcuucaccaucaugaccgacggccccuccgacgggcuggccagcuacaagaucuucaagaucgagaagggcaaggucaccaaguccaucgagcucaacgcgccgaacagccacuacgaggagugcuccugcuaccccgacaccgggaaggugaugugcgugugccgggacaacuggcacggcagcaaccgccccugggucuccuucgaccagaaccuggacuacaagaucggcuacaucugcagcgggguguucggcgacaacccccggccgaaggacgggacgggcuccugcgggcccgugagcgccgacggcgccaacggcgucaagggguucuccuacaaguacggcaacgggguguggaucggccgcaccaagagcgacuccagccggcacggguucgagaugaucugggaccccaacggcuggaccgagaccgacucccgcuucagcaugcggcaggacguggucgccaucacgaaccgcagcggcuacuccgggagcuucgugcagcaccccgagcugaccggccucgacugcaugcggccgugcuucuggguggagcugauccgcgggcugcccgaggaggacgccaucuggaccuccggcagcaucaucuccuucugcggcgucaacagcgacaccguggacugguccuggcccgacggggcggagcuccccuucacgaucgacaaguga

SEQ ID NO: 78058 - RNA, 1365 nt, Artificial Sequence
  derived and/or modified CDS sequence (opt1) from neuraminidase__InfluenzaA__AAA43412
augaaccccaaccagaagaucaucaccaucggcagcaucugccugguggucgggcucaucucccugauccugcagaucggcaacaucaucagcaucuggaucucccacagcauccagaccgggucccagaaccacacgggcaucugcaaccagaacaucaucaccuacaagaacagcaccugggugaaggacaccacguccgugauccucaccgggaacagcucccugugcccgauccgcggcugggccaucuacagcaaggacaacuccauccggaucggcagcaagggggacgucuucgugauccgcgagcccuucaucuccugcagccaccuggagugccggaccuucuuccucacccagggcgcccugcugaacgaccgccacuccaacgggacggugaaggaccggagccccuaccgcgcgcucauguccugccccgucggcgaggccccgagccccuacaacucccgguucgagagcguggccuggagcgccuccgccugccacgacgggaugggcuggcugaccaucggcaucagcgggcccgacaacggcgcgguggccguccugaaguacaacgggaucaucaccgagaccaucaaguccuggcgcaagaagauccuccggacgcaggagagcgagugcgccugcgugaacggcuccugcuucaccaucaugaccgacggccccagcgacgggcuggccuccuacaagaucuucaagaucgagaagggcaaggugaccaagagcaucgagcugaacgcgccgaacucccacuacgaggagugcagcugcuaccccgacacggggaaggucaugugcgugugccgcgacaacuggcacggcuccaaccggcccugggugagcuucgaccagaaccucgacuaccagaucggguacaucugcuccggcgucuucggcgacaacccccgcccgaaggacgggaccggcagcugcgggcccguguacguggacggcgccaacggggucaagggcuucuccuaccgguacggcaacgggguguggaucggccgcaccaagagccacuccagccggcacggguucgagaugaucugggaccccaacggcuggaccgagacggacuccaaguucagcgugcgccaggacgucguggccaugaccgacuggagcggguacuccggcagcuucgugcagcaccccgagcugaccggccuggacugcauccggccgugcuucugggucgagcucauccgcgggcggcccaaggagaagaccaucuggacguccgccagcuccaucagcuucugcggcgugaacuccgacaccgucgacuggagcuggcccgacggggccgagcugcccuucaccaucgacaaguga

SEQ ID NO: 78059 - RNA, 1410 nt, Artificial Sequence
  derived and/or modified CDS sequence (opt1) from neuraminidase__InfluenzaA__AAG01743
augaaccccaaccagaagaucaucacccugggcagcgugucccucaccaucgccacgaucugcuuccugaugcagaucgccauccuggucaccaccgugacccuccacuucaagcaguacgagugcgacuacccggcgaacaaccaggccaugcccugcgagcccaucaucaucgagcgcaacaucacggagaucguguaccugaccaacaccaccaucgagaaggaggucugccccaagcugguggaguaccggaacuggagcaagccgcagugcaagaucacgggguucgcccccuucuccaaggacaacagcauccgccucuccgccggcggggacaucugggugacccgggagcccuacgucagcugcgaccccggcaagugcuaccaguucgcccuggggcagggcaccacccuggacaacaagcacuccaacgacacgauccacgaccgcaccccgcaccggacccuccugaugaacgagcugggcgugcccuuccaccucgggacccgccaggugugcaucgcguggagcuccagcuccugccacgacggcaaggccuggcugcacgucugcgugacgggguacgacaagaacgccaccgccagcuucaucuacgacggccggcugguggacuccaucgggagcuggucccagaacauccuccgcacccaggagagcgagugcgucugcaucaacgggaccugcacgguggugaugaccgacggcuccgcgagcggccgggccgacaccaagauccuguucaucgaggagggcaagaucguccacaccagcccccuguccgggagcgcccagcacguggaggagugcuccugcuacccccgcuacccgggcgugcggugcaucugccgcgacaacuggaagggcagcaaccggcccgucguggacaucaacgugaaggacuacuccaucaacagcuccuacgucugcagcgggcucgugggcgacacgccccgcaacaacgaccgguccagcuccagcuacugccagaaccccaacaacgagaaggggacccacggcgugaaggggugggccuucgacgacggcaacgacgucuggaugggccgcaccaucuccgaggacagccgguccggguacgagaccuucaaggugaucggcggguggagcacgccgaacuccaagcugcagaucaaccgccaggucaucguggacagcgacaaccgguccggcuacagcgggaucuucuccguggagggcaagagcugcaucaaccgcugcuucuacgucgagcugauccggggccgcgagcaggagacccgcgugugguggaccagcaacuccaucguggucuucugcgggaccagcggcacguacgggaccggcuccuggcccgacggggccgacaucaacaucaugcccaucuga

SEQ ID NO: 78060 - RNA, 1410 nt, Artificial Sequence
  derived and/or modified CDS sequence (opt1) from neuraminidase__InfluenzaA__AAG01759
augaaccccaaccagaagaucaucaccaucggcagcgugucccugaccaucgccacgaugugcuuccucaugcagaucgccauccuggucaccaccgugacccugcacuucaagcaguacgagugcaacagcccgcccaacaaccaggugauccucugcgagcccacgaucaucgagcgcaacaucaccgagaucgucuaccugaccaacaccacgaucgagaaggagaucugccccaagcuggcggaguacaagaacugguccaagccgcagugcaagaucaccggguucgcccccuucagcaaggacaacuccauccggcucagcgccggcggggacaucugggugacccgcgagcccuacguguccugcgaccccgacaagugcuaccaguucgcccugggccaggggaccacgcugaacaaccggcacagcaacgacaccguccacgaccgcaccccguaccggacccuccugaugaacgagcugggcgugcccuuccaccucggcacgaagcaggucugcaucgccugguccagcuccagcugccacgacgggaaggcguggcugcacgugugcgugaccggccacgacgagaacgccaccgccuccuucaucuacgacgggcgccugguggacagcaucggcuccuggagcaagaagauccuccggacccaggaguccgagugcgucugcaucaacgggacgugcaccguggugaugaccgacggcagcgccuccggccgcgcggacaccaagauccuguucaucgaggaggggaagaucguccacaucagcccccugcucggcagcgcccagcacguggaggagugcuccugcuacccccgguacccgggggugcgcugcgucugccgggacaacuggaagggcagcaaccgccccaucguggacaucaacgugaaggacuacuccaucgucagcuccuacgugugcagcggccuggugggggacacgccccggaagaacgaccgcuccagcuccagcaacugccugaaccccaacaacgaggagggcgggcacggcgucaaggggugggccuucgacgacggcaacgacguguggaugggccggaccaucuccgagaagcuccgcagcggguacgagaccuucaaggucaucgagggcugguccaagccgaacagcaagcugcagaucaaccgccaggugaucguggaccgggggaaccgguccggcuacagcgggaucuucuccgucgagggcaagagcugcaucaaccgcugcuucuacguggagcugauccggggccgcaagcaggagaccgaggugugguggacguccaacagcaucgucguguucugcgggaccagcggcaccuacgggaccggcuccuggcccgacggggccgacaucaaccucaugcccaucuga

SEQ ID NO: 78061 - RNA, 1410 nt, Artificial Sequence
  derived and/or modified CDS sequence (opt1) from neuraminidase__InfluenzaA__AAG01777
augaaccccaaccagaagaucaucaccaucggcagcgugucccugaccaucgccacgaucugcuuccucaugcagaucgccauccuggucaccaccgugacccugcacuucaagcaguacgagugcaacagcccgcccaacaaccaggugauccucugcgagcccacgaucaucgagcgcaacaucaccgagaucgucuaccugaccaacaccacgaucgagaaggagaucugccccaagcuggcggaguacaagaacugguccaagccgcagugcaagaucaccggguucgcccccuucagcaaggacaacuccauccggcucagcgccggcggggacaucugggugacccgcgagcccuacguguccugcgaccccgacaagugcuaccaguucgcccugggccaggggaccacgcugaacaaccggcacagcaacgacaccguccacgaccgcaccccguaccggacccuccugaugaacgagcugggcgugcccuuccaccucggcacgaagcaggucugcaucgccugguccagcuccagcugccacgacgggaaggcguggcugcacgugugcgugaccggccacgacgagaacgccaccgccuccuucaucuacgacgggcgccugguggacagcaucggcuccuggagcaagaagauccuccggacccaggaguccgagugcgucugcaucaacgggacgugcaccguggugaugaccgacggcagcgccuccggccgcgcggacaccaagauccuguucaucgaggaggggaagaucguccacaucagcccccugcucggcagcgcccagcacguggaggagugcuccugcuacccccgguacccgggggugcgcugcgucugccgggacaacuggaagggcagcaaccgccccaucguggacaucaacgugaaggacuacuccaucgucagcuccuacgugugcagcggccuggugggggacacgccccggaagaacgaccgcuccagcuccagcaacugccugaaccccaacaacgaggagggcgggcacggcgucaaggggugggccuucgacgacggcaacgacguguggaugggccggaccaucuccgagaagcuccgcagcggguacgagaccuucaaggucaucgagggcugguccaagccgaacagcaagcugcagaucaaccggcccgugaucguggaccgcggggaccgguccggcuacagcgggaucuucuccgucgagggcaagagcugcaucaaccgcugcuucuacguggagcugauccggggccgcaagcaggagaccgaggugugguggacguccaacagcaucgucguguucugcgggaccagcggcaccuacgggaccggcuccuggcccgacggggccgacaucaaccucaugcccaucuga

SEQ ID NO: 78062 - RNA, 1410 nt, Artificial Sequence
  derived and/or modified CDS sequence (opt1) from neuraminidase__InfluenzaA__AAG01786
augaaccccaaccagaagaucaucaccaucggcagcgugucccugaccaucgccacgaugugcuuccucaugcagaucgccauccuggucaccaccgugacccugcacuucaagcaguacgagugcaacagcccgcccaacaaccaggugauccucugcgagcccacgaucaucgagcgcaacaucaccgagaucgucuaccugaccaacaccacgaucgagaaggagaucugccccaagcuggcggaguacaagaacugguccaagccgcagugcaagaucaccggguucgcccccuucagcaaggacaacuccauccggcucagcgccggcggggacaucugggugacccgcgagcccuacguguccugcgaccccgacaagugcuaccaguucgcccugggccaggggaccacgcugaacaaccggcacagcaacgacaccguccacgaccgcaccccguaccggacccuccugaugaacgagcugggcgugcccuuccaccucggcacgaagcaggucugcaucgccugguccagcuccagcugccacgacgggaaggcguggcugcacgugugcgugaccggccacgacgagaacgccaccgccuccuucaucuacgacgggcgccugguggacagcaucggcuccuggagcaagaagauccuccggacccaggaguccgagugcgucugcaucaacgggacgugcaccguggugaugaccgacggcagcgccuccggccgcgcggacaccaagauccuguucaucgaggaggggaagaucguccacaucagcccccugcucggcagcgcccagcacguggaggagugcuccugcuacccccgguacccgggggugcgcugcgucugccgggacaacuggaagggcagcaaccgccccaucguggacaucaacgugaaggacuacuccaucgucagcuccuacgugugcagcggccuggugggggacacgccccggaagaacgaccgcuccagcuccagcaacugccugaaccccaacaacgaggagggcgggcacggcgucaaggggugggccuucgacgacggcaacgacguguggaugggccggaccaucuccgagaagcuccgcagcggguacgagaccuucaaggucaucgagggcugguccaagccgaacagcaagcugcagaucaaccggcaggucaucguggaccgcggggaccgguccggcuacagcgggaucuucuccguggagggcaagagcugcaucaaccgcugcuucuacguggagcugauccggggccgcaagcaggagaccgaggugugguggacguccaacagcaucgucguguucugcgggaccagcggcaccuacgggaccggcuccuggcccgacggggccgacaucaaccucaugcccaucuga

SEQ ID NO: 78063 - RNA, 1410 nt, Artificial Sequence
  derived and/or modified CDS sequence (opt1) from neuraminidase__InfluenzaA__AAK71688
augaaccccaaccagaagaucaucaccaucggcagcgugucccugaccaucgccacgaugugcuuccucaugcagaucgccauccuggucaccaccgugacccugcacuucaagcaguacgagugcaacagcccgcccaacaaccaggugauccucugcgagcccacgaucaucgagcgcaacaucaccgagaucgucuaccugaccaacgcgaccaucgagaaggagaucugccccaagcuggccgaguaccggaacugguccaagccgcagugcaagaucacgggguucgcccccuucagcaaggacaacuccauccgccucagcgccggcggggacaucugggugacccgggagcccuacguguccugcgaccccgacaagugcuaccaguucgcccugggccaggggaccacccugaacaaccgccacagcaacgacacgguccacgaccggaccccguaccgcacccuccugaugaacgagcugggcgugcccuuccaccucggcaccaagcaggucugcaucgcgugguccagcuccagcugccacgacgggaaggccuggcugcacgugugcgugacgggccacgacgagaacgccaccgccuccuucaucuacgacgggcggcugguggacagcaucggcuccuggagcaagaagauccuccgcacccaggaguccgagugcgucugcaucaacgggaccugcacgguggugaugaccgacggcagcgcguccggccgggccgacaccaagauccuguucaucgaggaggggaagaucguccacaucagcccccugcucggcagcgcccagcacguggaggagugcuccugcuacccccgcuacccgggggugcggugcgucugccgcgacaacuggaagggcagcaaccggcccaucguggacaucaacgugaaggacuacuccaucgucagcuccuacgugugcagcggccuggugggggacacgccccgcaagaacgaccgguccagcuccagcaacugccugaaccccaacaacgaggagggcgggcacggcgucaaggggugggccuucgacgacggcaacgacguguggaugggccgcaccaucuccgaggagcuccggagcggguacgagaccuucaaggucaucgagggcugguccaagccgaacagcaagcugcagaucaaccgccaggugaucguggaccgcggggaccgguccggcuacagcgggaucuucuccgucgagggcaagagcugcaucaaccggugcuucuacguggagcugauccgcggccgcaagcaggagaccgaggugugguggaccuccaacagcaucgucguguucugcgggacgagcggcaccuacgggaccggcuccuggcccgacggggccgacaucaaccucaugcccaucuga

SEQ ID NO: 78064 - RNA, 1410 nt, Artificial Sequence
  derived and/or modified CDS sequence (opt1) from neuraminidase__InfluenzaA__AAN01169
augaaccccaaccagaagaucaucaccaucggcagcgugucccugaccaucgccacgaucugcuuccucaugcagaucgccauccuggucaccaccgugacccugcacuucaagcaguacgagugcaacagccucccgaacaaccaggugaugcugugcgagcccacgaucaucgagcgcaacaucaccgagaucgucuaccugaccaacaccacgaucgagaaggagaucugccccaagcucgcggaguaccggaacugguccaagccccagugcaagaucaccggguucgccccguucagcaaggacaacuccauccgccugagcgccggcggggacaucugggugacccgggagcccuacguguccugcgaccccgacaagugcuaccaguucgcccugggccaggggaccacgcucaacaaccgccacagcaacgacaccguccacgaccggacccccuaccgcacccugcugaugaacgagcucggcgugccguuccaccugggcacgaagcaggucugcaucgccugguccagcuccagcugccacgacgggaaggcguggcugcacgugugcgugaccggccacgacgagaacgccaccgccuccuucaucuacgacgggcggcucguggacagcaucggcuccuggagcaagaagauccugcgcacccaggaguccgagugcgucugcaucaacgggacgugcaccguggugaugaccgacggcagcgccuccggccgggcggacaccaagauccuguucaucgaggaggggaagaucauccacaucagccagcucagcggcuccgcccagcacgucgaggagugcagcugcuacccccgcuaccccggggugcggugcgugugccgcgacaacuggaagggcuccaaccggcccaucgucgacaucaacgugaaggacuacagcaucguguccagcuacgucugcuccggccuggugggggacacgccgcgcaagaacgacagcuccagcuccagccacugccugaaccccaacaacgaggagggcgggcacggcgugaaggggugggccuucgacgacggcaacgacgucuggaugggccggaccaucuccgagaaguuccgcagcggguacgagaccuucaaggugaucgagggcugguccaagcccaacagcaagcuccagaucaaccggcaggucaucguggaccgcgacaaccgguccggguacagcggcaucuucuccguggagggcaagagcugcaucaaccgcugcuucuacgucgagcugauccgggggcgcaagcaggagaccgaggugugguggacgagcaacuccaucguggucuucugcggcaccagcgggaccuacggcaccggguccuggcccgacggcgccgacaucaaccugaugccgaucuga

SEQ ID NO: 78065 - RNA, 1410 nt, Artificial Sequence; identical to SEQ ID NO: 78064
  derived and/or modified CDS sequence (opt1) from neuraminidase__InfluenzaA__AAN01170

SEQ ID NO: 78066 - RNA, 1410 nt, Artificial Sequence
  derived and/or modified CDS sequence (opt1) from neuraminidase__InfluenzaA__AAN01171
augaaccccaaccagaagaucaucaccaucggcagcgugucccugaccaucgccacgaucugcuuccucaugcagaucgccauccuggucaccaccgugacccugcacuucaagcaguacgagugcaacagccucccgaacaaccaggugaugcugugcgagcccacgaucaucgagcgcaacaucaccgagaucgucuaccugaccaacaccacgaucgagaaggagaucugccccaagcucgcggaguaccggaacugguccaagccccagugcaagaucaccggguucgccccguucagcaaggacaacuccauccgccugagcgccggcggggacaucugggugacccgggagcccuacguguccugcgaccccgacaagugcuaccaguucgcccugggccaggggaccacgcucaacaaccgccacagcaacgacaccguccacggccggacccccuaccgcacccugcugaugaacgagcucggcgugccguuccaccuggggacgaagcaggucugcaucgccugguccagcuccagcugccacgacggcaaggcguggcugcacgugugcgugaccgggcacgacgagaacgccaccgccuccuucaucuacgacggccggcucguggacagcaucggguccuggagcaagaagauccugcgcacccaggaguccgagugcgucugcaucaacggcacgugcaccguggugaugaccgacggcagcgccuccgggcgggcggacaccaagauccuguucaucgaggagggcaagaucauccacaucagccagcucagcggguccgcccagcacgucgaggagugcagcugcuacccccgcuaccccggcgugcggugcgugugccgcgacaacuggaagggcuccaaccggcccaucgucgacaucaacgugaaggacuacagcaucguguccagcuacgucugcuccgggcuggugggcgacacgccgcgcaagaacgacagcuccagcuccagccacugccugaaccccaacaacgaggagggcgggcacggggugaagggcugggccuucgacgacggcaacgacgucuggauggggcggaccaucuccgagaaguuccgcagcggcuacgagaccuucaaggugaucgaggggugguccaagcccaacagcaagcuccagaucaaccggcaggucaucguggaccgcgacaaccgguccggcuacagcgggaucuucuccguggagggcaagagcugcaucaaccgcugcuucuacgucgagcugauccggggccgcaagcaggagaccgaggugugguggacgagcaacuccaucguggucuucugcgggaccagcggcaccuacgggaccggcuccuggcccgacggggccgacaucaaccugaugccgaucuga

SEQ ID NO: 78067 - RNA, 1410 nt, Artificial Sequence; identical to SEQ ID NO: 78064
  derived and/or modified CDS sequence (opt1) from neuraminidase__InfluenzaA__AAN01172

SEQ ID NO: 78068 - RNA, 1410 nt, Artificial Sequence
  derived and/or modified CDS sequence (opt1) from neuraminidase__InfluenzaA__AAN01173
augaaccccaaccagaagaucaucaccaucggcagcgugucccugaccaucgccacgaucugcuuccucaugcagaucgccauccuggucaccaccgugacccugcacuucaagcaguacgagugcaacagccucccgaacaaccaggugaugcugugcgagcccacgaucaucgagcgcaacaucaccgagaucgucuaccugaccaacaccacgaucgagaaggagaugugccccaagcucgcggaguaccggaacugguccaagccccagugcaagaucaccggguucgccccguucagcaaggacaacuccauccgccugagcgccggcggggacaucugggugacccgggagcccuacguguccugcgaccccgacaagugcuaccaguucgcccugggccaggggaccacgcucaacaaccgccacagcaacgacaccguccacgaccggacccccuaccgcacccugcugaugaacgagcucggcgugccguuccaccugggcacgaagcaggucugcaucgccugguccagcuccagcugccacgacgggaaggcguggcugcacgugugcgugaccggccacgacgagaacgccaccgccuccuucaucuacgacgggcggcucguggacagcaucggcuccuggagcaagaagauccugcgcacccaggaguccgagugcgucugcaucaacgggacgugcaccguggugaugaccgacggcagcgccuccggccgggcggacaccaagauccuguucaucgaggaggggaagaucauccacaucagccagcucagcggcuccgcccagcacgucgaggagugcagcugcuacccccgcuaccccggggugcggugcgugugccgcgacaacuggaagggcuccaaccggcccaucgucgacaucaacgugaaggacuacagcaucguguccagcuacgucugcuccggccuggugggggacacgccgcgcaagaacgacagcuccagcuccagccacugccugaaccccaacaacgaggagggcgggcacggcgugaaggggugggccuucgacgacggcaacgacgucuggaugggccggaccaucuccgagaaguuccgcagcggguacgagaccuucaaggugaucgagggcugguccaagcccaacagcaagcuccagaucaaccggcaggucaucguggaccgcgacaaccgguccggguacagcggcaucuucuccguggagggcaagagcugcaucaaccgcugcuucuacgucgagcugauccgggggcgcaagcaggagaccgaggugugguggacgagcaacuccaucguggucuucugcggcaccagcgggaccuacggcaccggguccuggcccgacggcgccgacaucaaccugaugccgaucuga

SEQ ID NO: 78069 - RNA, 1410 nt, Artificial Sequence; identical to SEQ ID NO: 78064
  derived and/or modified CDS sequence (opt1) from neuraminidase__InfluenzaA__AAN01174

SEQ ID NO: 78070 - RNA, 1410 nt, Artificial Sequence; identical to SEQ ID NO: 78064
  derived and/or modified CDS sequence (opt1) from neuraminidase__InfluenzaA__AAN01175

SEQ ID NO: 78071 - RNA, 1410 nt, Artificial Sequence; identical to SEQ ID NO: 78064
  derived and/or modified CDS sequence (opt1) from neuraminidase__InfluenzaA__AAN01176

SEQ ID NO: 78072 - RNA, 1410 nt, Artificial Sequence; identical to SEQ ID NO: 78064
  derived and/or modified CDS sequence (opt1) from neuraminidase__InfluenzaA__AAN01177

SEQ ID NO: 78073 - RNA, 1410 nt, Artificial Sequence; identical to SEQ ID NO: 78064
  derived and/or modified CDS sequence (opt1) from neuraminidase__InfluenzaA__AAN01178

SEQ ID NO: 78074 - RNA, 1410 nt, Artificial Sequence; identical to SEQ ID NO: 78064
  derived and/or modified CDS sequence (opt1) from neuraminidase__InfluenzaA__AAN01179

SEQ ID NO: 78075 - RNA, 1410 nt, Artificial Sequence; identical to SEQ ID NO: 78064
  derived and/or modified CDS sequence (opt1) from neuraminidase__InfluenzaA__AAN01180

SEQ ID NO: 78076 - RNA, 1410 nt, Artificial Sequence
  derived and/or modified CDS sequence (opt1) from neuraminidase__InfluenzaA__AAN01181
augaaccccaaccagaagaucaucaccaucggcagcgugucccugaccaucgccacgaucugcuuccucaugcagaucgccauccuggucaccaccgugacccugcacuucaagcaguacgagugcaacagccucccgaacaaccaggugaugcugugcgagcccacgaucaucgagcgcaacaucaccgagaucgucuaccugaccaacaccacgaucgagaaggagaucugccccaagcucgcggaguaccggaacugguccaagccccagugcaagaucaccggguucgccccguucagcaaggacaacuccauccgccugagcgccggcggggacaucugggugacccgggagcccuacguguccugcgaccccgacaagugcuaccaguucgcccugggccaggggaccacgcucaacaaccgccacagcaacgacaccguccacgaccggacccccuaccgcacccugcugaugaacgagcucggcgugccguuccaccugggcacgaagcaggucugcaucgccugguccagcuccagcugccacgacgggaaggcguggcugcacgugugcgugaccggccacgacgagaacgccaccgccuccuucaucuacgacgggcggcucguggacagcaucggcuccuggagcaagaagauccugcgcacccaggaguccgagugcgucugcaucaacgggacgugcaccguggugaugaccgacggcagcgccuccggccgggcggacaccaagauccuguucaucgaggaggggaagaucauccacaucagccagcucagcggcuccgcccagcacgucgaggagugcagcugcuacccccgcuaccccggggugcggugcgugugccgcgacaacuggaagggcuccaaccggcccaucgucgacaucaacgugaaggacuacagcaucguguccagcuacgucugcuccggccuggugggggacacgccgcgcaagaacgacagcuccagcuccagccacugccugaaccccaacaacgaggagggcgggcacggcgugaaggggugggccuucgacgacggcaacgacgucuggaugggccggaccaucggggagaaguuccgcuccggcuacgagaccuucaaggugaucgagggguggagcaagcccaacuccaagcuccagaucaaccggcaggucaucguggaccgcgacaaccggagcggcuacuccgggaucuucagcguggagggcaaguccugcaucaaccgcugcuucuacgucgagcugauccggggccgcaagcaggagaccgaggugugguggacgagcaacagcaucguggucuucugcgggaccuccggcaccuacgggaccggcagcuggcccgacggggccgacaucaaccugaugccgaucuga

SEQ ID NO: 78077 - RNA, 1410 nt, Artificial Sequence; identical to SEQ ID NO: 78064
  derived and/or modified CDS sequence (opt1) from neuraminidase__InfluenzaA__AAN01182

SEQ ID NO: 78078 - RNA, 1410 nt, Artificial Sequence; identical to SEQ ID NO: 78064
  derived and/or modified CDS sequence (opt1) from neuraminidase__InfluenzaA__AAN01183

SEQ ID NO: 78079 - RNA, 1410 nt, Artificial Sequence; identical to SEQ ID NO: 78064
  derived and/or modified CDS sequence (opt1) from neuraminidase__InfluenzaA__AAN01184

SEQ ID NO: 78080 - RNA, 1410 nt, Artificial Sequence; identical to SEQ ID NO: 78064
  derived and/or modified CDS sequence (opt1) from neuraminidase__InfluenzaA__AAN01185

SEQ ID NO: 78081 - RNA, 1410 nt, Artificial Sequence
  derived and/or modified CDS sequence (opt1) from neuraminidase__InfluenzaA__AAN01186
augaaccccaaccagaagaucaucaccaucggcagcgugucccugaccaucgccacgaucugcuuccucaugcagaucgccauccuggucaccaccgugacccugcacuucaagcaguacgagugcaacagccucccgaacaaccaggugaugcugugcgagcccacgaucaucgagcgcaacaucaccgagaucgucuaccugaccaacaccacgaucgagaaggagaucugccccaagcucgcggaguaccggaacugguccaagccccagugcaagaucaccggguucgccccguucagcaaggacaacuccauccgccugagcgccggcggggacaucugggugacccgggagcccuacguguccugcgaccccgacaagugcuaccaguucgcccugggccaggggaccacgcucaacaaccgccacagcaacgacaccguccacgaccggacccccuaccgcacccugcugaugaacgagcucggcgugccguuccaccugggcacgaagcaggucugcaucgccugguccagcuccagcugccacgacgggaaggcguggcugcacgugugcgugaccggccacgacgagaacgccaccgccuccuucaucuacgacgggcggcucguggacagcaucggcuccuggagcaagaagauccugcgcacccaggaguccgagugcgucugcaucaacgggacgugcaccguggugaugaccgacggcagcgccuccggccgggcggacaccaagauccuguucaucgaggaggggaagaucauccacaucagccagcucagcggcuccgcccagcacgucgaggagugcagcugcuacccccgcuaccccggggugcggugcgugugccgcgacaacuggaagggcuccaaccggcccaucgucgacaucaacgugaaggacuacagcaucguguccagcuacgucugcuccggccuggugggggacacgccgcgcaagaacgacagcuccagcuccagccacugccugaaccccaacaacgaggagggcgggcacggcgugaaggggugggccuucgacgacggcaacgacgucuggaugggccggaccaucuccgagaaguuccgccucggguacgagaccuucaaggugaucgagggcuggagcaaguccaacagcaagcugcagaucaaccggcaggucaucguggaccgcgacaaccgguccggguacagcggcaucuucuccguggagggcaagagcugcaucaaccgcugcuucuacgucgagcugauccgggggcgcaagcaggagaccgaggugugguggacgagcaacuccaucguggucuucugcggcaccagcgggaccuacggcaccggguccuggcccgacggcgccgacaucaaccucaugcccaucuga

SEQ ID NO: 78082 - RNA, 1410 nt, Artificial Sequence
  derived and/or modified CDS sequence (opt1) from neuraminidase__InfluenzaA__AAN01187
augaaccccaaccagaagaucaucaccaucggcagcgugucccugaccaucgccacgaucugcuuccucaugcagaucgccauccuggucaccaccgugacccugcacuucaagcaguacgagugcgacagccucccgaacaaccaggugaugcugugcgagcccacgaucaucgagcgcaacaucaccgagaucgucuaccugaccaacaccacgaucgagaaggagaugugccccaagcucgcggaguaccggaacugguccaagccccagugcaagaucaccggguucgccccguucagcaaggacaacuccauccgccugagcgccggcggggacaucugggugacccgggagcccuacguguccugcgaccccgacaagugcuaccaguucgcccugggccaggggaccacgcucaacaaccgccacagcaacgacaccguccacgaccggacccccuaccgcacccugcugaugaacgagcucggcgugccguuccaccugggcacgaagcaggucugcaucgccugguccagcuccagcugccacgacgggaaggcguggcugcacgugugcgugaccggccacgacgagaacgccaccgccuccuucaucuacgacgggcggcucguggacagcaucggcuccuggagcaagaagauccugcgcacccaggaguccgagugcgucugcaucaacgggacgugcaccguggugaugaccgacggcagcgccuccggccgggcggacaccaagauccuguucaucgaggaggggaagaucauccacaucagccagaugagcggcuccgcccagcacgucgaggagugcagcugcuacccccgcuaccccggggugcggugcgugugccgcgacaacuggaagggcuccaaccggcccaucgucgacaucaacgugaaggacuacagcaucguguccagcuacgucugcuccggccucgugggggacacgccgcgcaagaacgacagcuccagcuccagccacugccugaaccccaacaacgaggagggcgggcacggcgugaaggggugggccuucgacgacggcaacgacgucuggaugggccggaccaucuccgagaaguuccgcagcggguacgagaccuucaaggugaucgagggcugguccaagcccaacagcaagcugcagaucaaccggcaggucaucguggaccgcgacaaccgguccggguacagcggcaucuucuccguggagggcaagagcugcaucaaccgcugcuucuacgucgagcucauccgggggcgcaagcaggagaccgaggugugguggacgagcaacuccaucguggucuucugcggcaccagcgggaccuacggcaccggguccuggcccgacggcgccgacaucaaccugaugccgaucuga

SEQ ID NO: 78083 - RNA, 1410 nt, Artificial Sequence; identical to SEQ ID NO: 78064
  derived and/or modified CDS sequence (opt1) from neuraminidase__InfluenzaA__AAN01188

SEQ ID NO: 78084 - RNA, 1410 nt, Artificial Sequence
  derived and/or modified CDS sequence (opt1) from neuraminidase__InfluenzaA__AAN64883
augaaccccaaccagaagaucaucaccaucggcagcgugucccugaccaucgccacgaucugcuuccucaugcagaucgccauccuggucaccaccgugacccugcacuucaagcaguacgagugcaacagcccgcccaacaaccaggugaugcucugcgagcccacgaucaucgagcgcaacaucaccgagaucgucuaccugaccaacaccacgaucgagaaggagaucugccccaagcuggcggaguaccggaacugguccaagccgcagugcaacaucaccggguucgcccccuucagcaaggacaacuccauccgccucagcgccggcggggacaucugggugacccgggagcccuacguguccugcgaccccgacaagugcuaccaguucgcccugggccaggggaccacgcugaacaacggccacagcaacgacaccguccacgaccgcaccccguaccggacccuccugaugaacgagcugggcgugcccuuccaccucgggacgaagcaggucugcaucgccugguccagcuccagcugccacgacggcaaggcguggcugcacgugugcgugaccggggacgacgagaacgccaccgccuccuucaucuacaacggccgccugguggacagcaucggguccuggagcaagaagauccuccggacccaggaguccgagugcgucugcaucaacggcacgugcaccguggugaugaccgacggcagcgccuccgggaaggcggacaccaagauccuguucaucgaggagggcaagaucguccacacgagccugcucagcggguccgcccagcacguggaggagugcagcugcuacccccgcuaccccggcgugcggugcgucugccgcgacaacuggaagggcuccaaccggccgaucguggacaucaacgugaaggacuacagcaucgucuccagcuacgugugcuccgggcuggugggcgacacgccccgcaagaacgacagcuccagcuccagccacugccuggaccccaacaacgaggagggcgggcacggggucaagggcugggccuucgacgacggcgacgacguguggauggggcggaccaucuccgagaagcuccgcagcggcuacgagaccuucaaggucaucgaggggugguccaagcccaacagcaagcugcagaucaaccgccaggugaucguggaccggggcaaccgguccggguacagcggcaucuucuccgucgagggcaagagcugcaucaaccgcugcuucuacguggagcugauccgggggcgcaagcaggagaccgaggugcucuggaccagcaacuccaucgucguguucugcggcaccagcgggaccuacggcacgggguccuggccggacggcgccgacaucaaccugaugcccaucuga

SEQ ID NO: 78085 - RNA, 1410 nt, Artificial Sequence
  derived and/or modified CDS sequence (opt1) from neuraminidase__InfluenzaA__AAN64884
augaaccccaaccagaagaucaucaccaucggcagcgugucccugaccaucgccacgaucugcuuccucaugcagaucgccauccuggucaccaccgugacccugcacuucaagcaguacgagugcaacagcccgcccaacaaccaggugaugcucugcgagcccacgaucaucgagcgcaacaucaccgagaucgucuaccugaccaacaccacgaucgagaaggagaucugccccaagcuggcggaguaccggaacugguccaagccgcagugcaacaucaccggguucgcccccuucagcaaggacaacuccauccgccucagcgccggcggggacaucugggugacccgggagcccuacguguccugcgaccccgacaagugcuaccaguucgcccugggccaggggaccacgcugaacaacggccacagcaacgacaccguccacgaccgcaccccguaccggacccuccugaugaacgagcugggcgugcccuuccaccucgggacgaagcaggucugcaucgccugguccagcuccagcugccacgacggcaaggcguggcugcacgugugcgugaccggggacgacgagaacgccaccgccuccuucaucuacaacggccgccugguggacagcaucggguccuggagcaagaagauccuccggacccaggaguccgagugcgucugcaucaacggcacgugcaccguggugaugaccgacggcagcgccuccgggaaggcggacaccaagauccuguucaucgaggagggcaagaucguccacacgagccugcucagcggguccgcccagcacguggaggagugcagcugcuacccccgcuaccccggcgugcggugcgucugccgcgacaacuggaagggcuccaaccggccgaucguggacaucaacgugaaggacuacagcaucgucuccagcuacgugugcuccgggcuggugggcgacacgccccgcaagaacgacagcuccagcuccagccacugccuggaccccaacaacgaggagggcgggcacggggucaagggcugggccuucgacgacggcaacgacguguggauggggcggaccaucuccgagaagcuccgcagcggcuacgagaccuucaaggucaucgaggggugguccaagcccaacagcaagcugcagaucaaccgccaggugaucguggaccggggcaaccgguccggguacagcggcaucuucuccgucgagggcaagagcugcaucaaccgcugcuucuacguggagcugauccgggggcgcaagcaggagaccgaggugcucuggaccagcaacuccaucgucguguucugcggcaccagcgggaccuacggcacgggguccuggccggacggcgccgacaucaaccugaugcccaucuga

SEQ ID NO: 78086 - RNA, 1410 nt, Artificial Sequence; identical to SEQ ID NO: 78085
  derived and/or modified CDS sequence (opt1) from neuraminidase__InfluenzaA__AAN64885

SEQ ID NO: 78087 - RNA, 1410 nt, Artificial Sequence; identical to SEQ ID NO: 78085
  derived and/or modified CDS sequence (opt1) from neuraminidase__InfluenzaA__AAN64886

SEQ ID NO: 78088 - RNA, 1410 nt, Artificial Sequence; identical to SEQ ID NO: 78085
  derived and/or modified CDS sequence (opt1) from neuraminidase__InfluenzaA__AAN64887

SEQ ID NO: 78089 - RNA, 1410 nt, Artificial Sequence
  derived and/or modified CDS sequence (opt1) from neuraminidase__InfluenzaA__AAN64888
augaaccccaaccagaagaucaucaccaucggcagcgugucccugaccaucgccacgaucugcuuccucaugcagaucgucauccuggugaccaccgugacccugcacuucaagcaguacgagugcaacagcccgcccaacaaccaggucaugcucugcgagcccacgaucaucgagcgcaacaucaccgagaucguguaccugaccaacaccacgaucgagaaggagaucugccccaagcuggccgaguaccggaacugguccaagccgcagugcaacaucaccggguucgcgcccuucagcaaggacaacuccauccgccucagcgccggcggggacaucugggugacccgggagcccuacgucuccugcgaccccgacaagugcuaccaguucgcccugggccaggggaccacgcugaacaacggccacagcaacgacaccgugcacgaccgcaccccguaccggacccuccugaugaacgagcugggcgugcccuuccaccucgggacgaagcaggucugcaucgccugguccagcuccagcugccacgacggcaaggccuggcugcacgugugcgugaccggggacgacaagaacgcgaccgccuccuucaucuacaacggccgccuggucgacagcaucggguccuggagcaagaagauccuccggacccaggaguccgagugcgugugcaucaacggcacgugcaccguggucaugaccgacggcagcgccuccgggaaggccgacaccaagauccuguucaucgaggagggcaagaucgugcacacgagccugcucagcggguccgcgcagcacguggaggagugcagcugcuacccccgcuaccccggcguccggugcgugugccgcgacaacuggaagggcuccaaccggccgaucguggacaucaacgucaaggacuacagcaucguguccagcuacgugugcuccgggcuggucggcgacacgccccgcaagaacgacagcuccagcuccagccacugccuggaccccaacaacgaggagggcgggcacggggugaagggcugggccuucgacgacggcaacgacgucuggauggggcggaccaucuccgagaagcuccgcagcggcuacgagaccuucaaggugaucgaggggugguccaagcccaacagcaagcugcagaucaaccgccaggugaucgucgaccggggcaaccgguccggguacagcggcaucuucuccguggagggcaagagcugcaucaaccgcugcuucuacguggagcugauccgggggcgcaaccaggagaccgagguccucuggaccagcaacuccaucgugguguucugcggcaccagcgggaccuacggcacgggguccuggccggacggcgccgacaucaaccugaugcccaucuga

SEQ ID NO: 78090 - RNA, 1410 nt, Artificial Sequence; identical to SEQ ID NO: 78085
  derived and/or modified CDS sequence (opt1) from neuraminidase__InfluenzaA__AAN64889

SEQ ID NO: 78091 - RNA, 1410 nt, Artificial Sequence
  derived and/or modified CDS sequence (opt1) from neuraminidase__InfluenzaA__AAN64890
augaaccccaaccagaagaucaucaccaucggcagcgugucccugaccaucgccacgaucugcuuccucaugcagaucgccauccuggucaccaccgugacccugcacuucaagcaguacgagugcaacagcccgcccaacaaccaggagaugcucugcgagcccacgaucaucgagcgcaacaucaccgagaucguguaccugaccaacaccacgaucgagaaggagaucugccccaagcuggcggaguaccggaacugguccaagccgcagugcaacaucaccggguucgcccccuucagcaaggacaacuccauccgccucagcgccggcggggacaucugggucacccgggagcccuacguguccugcgaccccgacaagugcuaccaguucgcccugggccaggggaccacgcugaacaacggccacagcaacgacaccgugcacgaccgcaccccguaccggacccuccugaugaacgagcugggcguccccuuccaccucgggacgaagcaggucugcaucgccugguccagcuccagcugccacgacggcaaggcguggcugcacgugugcgugaccggggacgacgagaacgccaccgccuccuucaucuacaacggccgccugguggacagcaucggguccuggagcaagaagauccuccggacccaggaguccgagugcgugugcaucaacggcacgugcaccgucgugaugaccgacggcagcgccuccgggaaggcggacaccaagauccuguucaucgaggagggcaagaucgugcacacgagccugcucagcggguccgcccagcacgucgaggagugcagcugcuacccccgcuaccccggcgugcggugcgugugccgcgacaacuggaagggcuccaaccggccgaucgucgacaucaacgugaaggacuacagcaucguguccagcuacgucugcuccgggcuggugggcgacacgccccgcaagaacgacagcuccagcuccagccacugccuggaccccaacaacgaggagggcgggcacggggugaagggcugggccuucgacgacggcaacgacgucuggauggggcggaccaucuccgagaagcuccgcagcggcuacgagaccuucaaggugaucgaggggugguccaagcccaacagcaagcugcagaucaaccggcaggucaucguggaccgcggcaaccgguccggguacagcggcaucuucuccguggagggcaagagcugcaucaaccgcugcuucuacgucgagcugauccgggggcgcaagcaggagaccgaggugcucuggaccagcaacuccaucguggucuucugcggcaccagcgggaccuacggcacgggguccuggccggacggcgccgacaucaaccugaugcccaucuga

SEQ ID NO: 78092 - RNA, 1410 nt, Artificial Sequence; identical to SEQ ID NO: 78085
  derived and/or modified CDS sequence (opt1) from neuraminidase__InfluenzaA__AAN64891

SEQ ID NO: 78093 - RNA, 1410 nt, Artificial Sequence
  derived and/or modified CDS sequence (opt1) from neuraminidase__InfluenzaA__AAO46212
augaaccccaaccagaagaucaucaccaucggcagcgugucccugaccaucgagacggucugcuuccucaugcagaucgccauccuggccaccaccgugacccugcacuucaagcagcacgagugcgacagcccggcguccaaccaggugaugcccugcgagcccaucaucaucgagcgcaacaucacggagaucgucuaccucaacaacaccaccaucgagaaggagaucugccccgaggugguggaguaccggaacuggagcaagccgcagugccagaucaccggguucgcccccuucuccaaggacaacagcauccgccuguccgccggcggggacaucugggucacgcgggagcccuacgugagcugcgacaccggcaagugcuaccaguucgcccuggggcagggcaccacccucgacaacaagcacuccaacggcacgauccacgaccgcaucccccaccggacccugcugaugaacgagcucggggugccguuccaccugggcaccaagcaggucugcguggccuggagcuccagcuccugccacgacgggaaggcguggcugcacgugugcgucaccggcgacgaccgcaacgccacggccagcuucaucuacgacgggcggcucguggacuccaucggcagcuggucccagaacauccugcgcacccaggagagcgagugcgugugcaucaacgggaccugcaccgucgugaugacggacggcuccgccagcggccgggcggacacccgcauccuguucaucaaggaggggaagaucgugcacaucagcccccucuccggcagcgcccagcacaucgaggagugcuccugcuacccccgguaccccgacguccgcugcaucugccgggacaacuggaagggcagcaaccgcccggugaucgacaucaacauggaggacuacuccaucgacagcuccuacgugugcagcgggcuggucggcgacacgccccggaacgacgacuccagcuccaacagcaacugccgcgaccccaacaacgagcgggggaaccccggcgugaaggggugggccuucgacaacggcgacgacguguggaugggccgcaccaucuccaaggaccugcggagcggguacgagaccuucaaggucaucggcgggugguccaccccgaacagcaagucccaggugaaccgccaggucaucguggacaacaacaacuggagcggcuacuccgggaucuucagcguggagggcaagagcugcaucaaccggugcuucuacgucgagcucauccgcggccgcccccaggagacccgggugugguggaccuccaacagcaucguggucuucugcgggacguccggcaccuacgggaccggcagcuggcccgacggggccaacaucaacuucaugcccaucuga

SEQ ID NO: 78094 - RNA, 1410 nt, Artificial Sequence
  derived and/or modified CDS sequence (opt1) from neuraminidase__InfluenzaA__AAO46213
augaaccccaaccagaagaucaucaccaucgacagcgugucccugaccaucgccacggucugcuuccucaugcagaucgccauccuggcgaccaccgugacccugcacuucaagcagcacgagugcgacagcccggccuccaaccaggugaugcccugcgagcccaucaucaucgagcgcaacaucacggagaucgucuaccucaacaacaccaccaucgagaaggagaucugccccgaggugguggaguaccggaacuggagcaagccgcagugccagaucaccggcuucgcccccuucuccaaggacaacagcauccgccuguccgccgggggcgacaucugggucacgcgggagcccuacgugagcugcgacaccgggaagugcuaccaguucgcccugggccaggggaccacccucgacaacaagcacuccaacggcacgauccacgaccgcaucccccaccggacccugcugaugaacgagcucggcgugccguuccaccuggggaccaagcaggucugcguggcguggagcuccagcuccugccacgacggcaaggccuggcugcacgugugcgucaccggggacgaccgcaacgccacggccagcuucaucuacgacggccggcucguggacuccaucgggagcuggucccagaacauccugcgcacccaggagagcgagugcgugugcaucaacgggaccugcaccgucgugaugacggacggcuccgcgagcgggcgggccgacacccgcauccuguucaucaaggagggcaagaucgugcacaucagcccccucuccgggagcgcccagcacaucgaggagugcuccugcuacccccgguaccccgacguccgcugcaucugccgggacaacuggaagggcagcaaccgcccggugaucgacaucaacauggaggacuacuccaucgacagcuccuacgugugcagcggccuggucggggacacgccccggaacgacgacuccagcuccaacagcaacugccgcgaccccaacaacgagcggggcaaccccggggugaagggcugggccuucgacaacggggacgacguguggaugggccgcaccaucuccaaggaccugcggagcggcuacgagaccuucaaggucaucgggggcugguccaccccgaacagcaagucccaggugaaccgccaggucaucguggacaacaacaacuggagcggguacuccggcaucuucagcguggagggcaagagcugcaucaaccggugcuucuacgucgagcucauccgcggccgcccccaggagacccgggugugguggaccuccaacagcaucguggucuucugcggcacguccgggaccuacggcaccgggagcuggcccgacggcgccaacaucaacuucaugcccaucuga

SEQ ID NO: 78095 - RNA, 1410 nt, Artificial Sequence
  derived and/or modified CDS sequence (opt1) from neuraminidase__InfluenzaA__AAO46214
augaaccccaaccagaagaucaucaccaucggcagcgugucccugaccaucgccacggucugcuuccucaugcagaucgccauccuggcgaccaccgugacccugcacuucaagcagcacgagugcgacagcccggccuccaaccaggugaugcccugcgagcccaucaucaucgagcgcaacaucacggagaucgucuaccucaacaacaccaccaucgagaaggagaucugccccgaggccguggaguaccggaacuggagcaagccgcagugccagaucaccggguucgcccccuucuccaaggacaacagcauccgccuguccgccggcggggacaucugggugacgcgggagcccuacgucagcugcgaccccggcaagugcuaccaguucgcgcuggggcagggcaccacccucgacaacaagcacuccaacggcaccauccacgaccgcaucccgcaccggacgcugcugaugaacgagcucggggugcccuuccaccugggcaccaagcaggucugcguggccuggagcuccagcuccugccacgacgggaaggccuggcugcacgugugcgugaccggcgacgaccgcaacgccaccgcgagcuucaucuacgacgggcggcucgucgacuccaucggcagcuggucccagaacauccugcgcacgcaggagagcgagugcgugugcaucaacggcaucugcaccguggucaugaccgacggguccgccagcggccgggccgacacccgcauccuguucaucgaggaggggaagaucgugcacaucagcccccucuccggcagcgcccagcacguggaggagugcuccugcuacccccgguacccggacguccgcugcaucugccgggacaacuggaagggcagcaaccgccccgugaucgacaucaacauggaggacuacuccaucgacagcuccuacgugugcagcgggcuggucggcgacacgccccggaacgacgaccgcuccagcaacuccaacugccgggaccccaacaacgagcgcgggaacccgggcgugaaggggugggccuucgacaacggcgacgacguguggaugggccggaccaucagcaaggaccugcgcuccggguacgagaccuucaaggucaucggcggguggagcacccccaacuccaagagccaggugaaccggcaggucaucguggacaacaacaacugguccggcuacagcgggaucuucuccguggagggcaagagcugcaucaaccgcugcuucuacgucgagcucauccgcggccggcagcaggagacgcgcgugugguggaccagcaacuccaucguggucuucugcgggaccagcggcaccuacgggacgggcuccuggcccgacggggcgaacaucaacuucaugcccaucuga

SEQ ID NO: 78096 - RNA, 1410 nt, Artificial Sequence
  derived and/or modified CDS sequence (opt1) from neuraminidase__InfluenzaA__AAO46215
augaaccccaaccagaagaucaucaccaucggcagcgugucccugaccaucgccacggucugcuuccucaugcagaucgccauccuggcgaccaccgugacccugcacuucaagcagcacgagugcgacagcccgacguccaaccaggugaugcccugcgagcccaucaucaucgagcgcaacaucaccgagaucgucuaccucaacaacaccaccaucgagaaggagaucugccccgaggugguggaguaccggaacuggagcaagccgcagugccagaucacgggguucgcccccuucuccaaggacaacagcauccgccuguccgccggcggggacaucugggucacccgggagcccuacgugagcugcgaccccggcaagugcuaccaguucgcccuggggcagggcaccacccucgacaacaagcacuccaacggcacgauccacgaccgcaucccgcaccggacccugcugaugaacgagcucggggugcccuuccaccugggcaccaagcaggucugcguggccuggagcuccagcuccugccacgacgggaaggcguggcugcacgugugcgucaccggcgacgaccgcaacgccacggccagcuucaucuacgacgggcggcucguggacuccaucggcagcuggucccagaacauccugcgcacccaggagagcgagugcgugugcaucaacgggaccugcaccgucgugaugacggacggcuccgccagcggccgggcggacacccgcauccuguucaucaaggaggggaagaucgugcacaucagcccccucuccggcagcgcccagcacaucgaggagugcuccugcuacccccgguacccggacguccgcugcaucugccgggacaacuggaagggcagcaaccgccccgugaucgacaucaacauggaggacuacuccaucgacagcuccuacgugugcagcgggcuggucggcgacacgccccggaacggggacuccagcuccaacagcaacugccgcgaccccaacaacgagcggggcaacccgggggugaagggcugggccuucgacaacggcgacgacguguggauggggcgcaccaucuccaaggagagccgguccggcuacgagaccuucaaggucaucgggggcuggagcacccccaacuccaagagccaggugaaccgccaggucaucguggacaacaacaacugguccggguacagcggcaucuucagcguggagggcaaguccugcaucaaccggugcuucuacgucgagcugauccgcgggcgcccccaggagacccgggugugguggaccagcaacuccaucguggucuucugcggcacgagcgggaccuacggcaccggguccuggcccgacggcgccaacaucaacuucaugccgaucuga

SEQ ID NO: 78097 - RNA, 1410 nt, Artificial Sequence
  derived and/or modified CDS sequence (opt1) from neuraminidase__InfluenzaA__AAO46216
augaaccccaaccagaagaucaucaccaucggcagcgugucccugaccaucgccacggucugcuuccucaugcagaucgccauccuggcgaccaccgugacccugcacuucaagcagcacgagugcgacagcccggccuccaaccaggugaugcccugcgagcccaucaucaucgagcgcaacaucacggagaucgucuaccucaacaacaccaccaucgagaaggagaucugccccgaggugguggaguaccggaacuggagcaagccgcagugccagaucaccggguucgcccccuucuccaaggacaacagcauccgccuguccgccggcggggacaucugggucacgcgggagcccuacgugagcugcgaccccuccaagugcuaccaguucgcccugggccaggggaccacccucgagaacaagcacagcaacggcaccaagcacgaccgcaucccgcaccggacgcugcugaugaacgagcucggcgugcccuuccaccuggggaccaagcaggucugcguggcgugguccagcuccagcugccacgacggcaaggccuggcugcacgugugcgucaccggggacgaccgcaacgccaccgccuccuucaucuacgagggccggcucguggacagcaucguguccuggagccagaacauccugcgcacgcaggaguccgagugcgucugcaucaacgggaccugcaccguggugaugaccgacggcagcgcgagcggccgggccgacacgcgcauccuguucaucaaggaggggaagaucguccacaucagcccccucuccggcuccgcccagcacaucgaggagugcagcugcuacccccgguacccggacgugcgcugcaucugccgggacaacuggaagggguccaaccgccccgugaucgacaucaacauggaggacuacagcaucgacuccagcuacgucugcuccggccuggugggcgacacgccccggaacgacgacagcuccagcaacuccaacugccgcgaccccaacaacgagcgggggaacccgggcgugaaggggugggccuucgacaacggcgacgacgucuggauggggcgcaccaucagcaaggacucccggagcggcuacgagaccuucaaggugaucggcgggugguccacccccaacagcaagucccaggucaaccgccaggugaucguggacagcaacaacuggagcggcuacuccgggaucuucagcgucgagggcaaguccugcaucaaccggugcuucuacguggagcugauccgcgggcgcccccaggagacccgggugugguggaccagcaacuccaucgucguguucugcggcaccagcggcacguacgggaccggcuccuggcccgacggggccaacaucaacuucaugccgaucuga

SEQ ID NO: 78098 - RNA, 1410 nt, Artificial Sequence
  derived and/or modified CDS sequence (opt1) from neuraminidase__InfluenzaA__AAO46217
augaaccccaaccagaagaucaucaccaucggcagcgugucccugaccaucgccacggucugcuuccucaugcagaucgccauccuggcgaccaccgugacccugcacuucaagcagcacgagugcgacagcccggccuccaaccaggugaugcccugcgagcccaucaucaucgagcgcaacaucacggagaucgucuaccucaacaacaccaccaucgagaaggagaucugccccgaggugguggaguaccggaacuggagcaagccgcagugccagaucaccggguucgcccccuucuccaaggacaacagcauccgccuguccgccggcggggacaucugggucacgcgggagcccuacgugagcugcgaccccuccaagugcuaccaguucgcccugggccaggggaccacccucgacaacaagcacagcaacggcaccauccacgaccgcaucccgcaccggacgcugcugaugaacgagcucggcgugcccuuccaccuggggaccaagcaggucugcguggcgugguccagcuccagcugccacgacggcaaggccuggcugcacgugugcgucaccggggacgaccgcaacgccaccgccuccuucaucuacgacggccggcucgaggacagcaucggguccuggagccagaacauccugcgcacgcaggaguccgagugcgugugcaucaacgggaccugcaccguggucaugaccgacggcagcgcgagcgggcgggccgacacgcgcauccuguucaucaaggagggcaagaucgugcacaucagcccccucuccggguccgcccagcacaucgaggagugcagcugcuacccccgguacccggacgugcgcugcaucugccgggacaacuggaagggcuccaaccgccccguccuggacaucagcauggaggacuacuccaucgacagcuccuacgugugcagcggccuggugggggacacgccccggaacgacgacuccagcuccaacagcaacugccgcgaccccaacaacgagcggggcaacccgggggucaagggcugggccuucgacaacggggacgacguguggaugggccgcaccaucuccaaggaccuccggagcggcuacgagaccuucaaggugaucgggggcugguccacccccaacagcaagucccaggucaaccgccaggugaucgucgacaacaacaacuggagcggguacagcggcaucuucuccguggagggcaagagcugcaucaaccggugcuucuacguggagcugauccgcggccgcucccaggagacccgggucugguggaccagcaacuccaucgugguguucugcggcaccagcgggacguacggcaccggguccuggcccgacggcgccaacaucaacuucaugcccaucuga

SEQ ID NO: 78099 - RNA, 1410 nt, Artificial Sequence
  derived and/or modified CDS sequence (opt1) from neuraminidase__InfluenzaA__AAO46218
augaaccccaaccagaagaucaucaccaucggcagcgugucccugaccaucgccacggucugcuuccucaugcagaucgccauccuggcgaccaccgugacccugcacuucaagcagcacgagugcgacagcccggccuccaaccaggugaugcccugcgagcccaucaucaucgagcgcaacaucacggagaucgucuaccucaacaacaccaccaucgagaaggagaucugccccgaggugguggaguaccggaacuggagcaagccgcagugccagaucaccggguucgcccccuucuccaaggacaacagcauccgccuguccgccggcggggacaucugggucacgcgggagcccuacgugagcugcgaccccggcaagugcuaccaguucgcccuggggcagggcaccacccucgacaacaagcacuccaacggcaccauccacgaccgcaucccgcaccggacgcugcugaugaacgagcucggggugcccuuccaccugggcaccaagcaggucugcguggcguggagcuccagcuccugccacgacgggaaggccuggcugcacgugugcgucaccggcgacgaccgcaacgccaccgccagcuucaucuacgacgggcggcucgaggacuccaucggcagcuggucccagaacauccugcgcacgcaggagagcgagugcgugugcaucaacgggaccugcaccguggucaugaccgacggcuccgcgagcggccgggccgacacgcgcauccuguucaucaaggaggggaagaucgugcacaucagcccccucuccggcagcgcccagcacaucgaggagugcuccugcuacccccgguacccggacgugcgcugcaucugccgggacaacuggaagggcagcaaccgccccguccuggacaucuccauggaggacuacagcaucggguccagcuacgugugcuccggccuggugggggacacgccccggaacgacgacagcuccagcaacuccaacugccgcgaccccaacaacgagcggggcaacccgggggucaagggcugggccuucgacaacggcgacgacguguggauggggcgcaccaucagcaaggaccuccgguccggcuacgagaccuucaaggugaucgggggcuggagcacccccaacuccaagagccaggucaaccgccaggugaucgucgacaacaacaacugguccggguacagcggcaucuucagcguggagggcaaguccugcaucaaccggugcuucuacguggagcugauccgcgggcgcagccaggagacccgggucugguggaccuccaacagcaucgugguguucugcggcaccuccgggacguacggcaccgggagcuggcccgacggcgccaacaucaacuucaugcccaucuga

SEQ ID NO: 78100 - RNA, 1410 nt, Artificial Sequence
  derived and/or modified CDS sequence (opt1) from neuraminidase__InfluenzaA__AAO46220
augaaccccaaccagaagaucaucaccaucggcagcgugucccugaccaucgccacggucugcuuccucaugcagaucgccauccuggcgaccaccgugacccugcacuucaagcagcacgagugcgacagcccggccuccaaccaggugaugcccugcgagcccaucaucaucgagcgcaacaucacggagaucgucuaccucaacaacaccaccaucgagaaggagaucugccccgaggccguggaguaccggaacuggagcaagccgcagugccagaucaccggguucgcccccuucuccaaggacaacagcauccgccuguccgccggcggggacaucugggugacgcgggagcccuacgucagcugcgaccccggcaagugcuaccaguucgcgcuggggcagggcaccacccucgacaacaagcacuccaacgacaccauccacgaccgcaucccgcaccggacgcugcugaugaacgagcucggcgugcccuuccaccuggggacccgccaggugugcgucgccuggagcuccagcuccugccacgacggcaaggccuggcugcacgugugcgugaccggggacgaccggaacgccaccgcgagcuucaucuacgacggccgccucgucgacuccaucgggagcuggucccagaacauccugcggacgcaggagagcgagugcgugugcaucaacggcaucugcaccguggucaugaccgacggcuccgccagcgggcgcgccgacacccggauccuguucaucgaggagggcaagaucgugcacaucagcccccucuccgggagcgcccagcacguggaggagugcuccugcuacccccgcuacccggacguccggugcaucugccgcgacaacuggaagggcagcaaccggcccgugaucgacaucaacauggaggacuacuccaucgacagcuccuacgugugcagcggccuggucggggacacgccccgcaacgacgaccgguccagcaacuccaacugccgcgaccccaacaacgagcggggcaacccgggggugaagggcugggccuucgacaacggggacgacguguggaugggccgcaccaucagcaaggaccugcgguccggcuacgagaccuucaaggucaucgggggcuggagcacccccaacuccaagagccaggugaaccgccaggucaucguggacaacaacaacugguccggguacagcggcaucuucuccguggagggcaagagcugcaucaaccgcugcuucuacgucgagcucauccgggggcgccagcaggagacgcgggugugguggaccagcaacuccaucguggucuucugcggcaccagcgggaccuacggcacgggguccuggcccgacggcgcgaacaucaacuucaugcccaucuga

SEQ ID NO: 78101 - RNA, 1410 nt, Artificial Sequence
  derived and/or modified CDS sequence (opt1) from neuraminidase__InfluenzaA__AAO46221
augaaccccaaccagaagaucaucaccaucggcagcgugucccugaccaucgccacggucugcuuccucaugcagaucgccauccuggcgaccaccgugacccugcacuucaagcagcacgagugcgacagcccggccuccaaccaggugaugcccugcgagcccaucaucaucgagcgcaacaucacggagaucgucuaccucaacaacaccaccaucgagaaggagaucugccccgaggccgccgaguaccggaacuggagcaagccgcagugccagaucaccggguucgcccccuucuccaaggacaacagcauccgccuguccgcgggcggggacaucugggugacgcgggagcccuacgugagcugcgaccccggcaagugcuaccaguucgcccuggggcagggcaccacccucgacaacaagcacuccaacgacaccauccacgaccgcaucccgcaccggacgcugcugaugaacgagcucggcguccccuuccaccuggggacccgccaggugugcguggccuggagcuccagcuccugccacgacggcaaggccuggcugcacgucugcgugaccggggacgaccggaacgcgaccgccagcuucaucuacgacggccgccucguggacuccaucgggagcuggucccagaacauccugcggacgcaggagagcgagugcgucugcaucaacggcaucugcaccguggugaugaccgacggcuccgccagcgggcgcgccgacacccggauccuguucaucgaggagggcaagaucguccacaucagcccccucuccgggagcgcccagcacguggaggagugcuccugcuacccccgcuacccggacgugcggugcaucugccgcgacaacuggaagggcagcaaccggcccgucaucgacaucaacauggaggacuacuccaucgacagcuccuacgugugcagcggccuggugggggacacgccccgcaacgacgaccgguccagcaacuccaacugccgcgaccccaacaacgagcggggcaacccgggggucaagggcugggcguucgacaacggggacgacguguggaugggccgcaccaucagcaaggaccugcgguccggcuacgagaccuucaaggugaucgggggcuggagcacccccaacuccaagagccaggucaaccgccaggugaucgucgacaacaacaacugguccggguacagcggcaucuucuccguggagggcaagagcugcaucaaccgcugcuucuacguggagcucauccgggggcgccagcaggagacgcgggucugguggaccagcaacuccaucgugguguucugcggcaccagcgggaccuacggcacgggguccuggcccgacggcgccaacaucaacuucaugcccaucuga

SEQ ID NO: 78102 - RNA, 1410 nt, Artificial Sequence
  derived and/or modified CDS sequence (opt1) from neuraminidase__InfluenzaA__AAO46223
augaaccccaaccagaagaucaucaccaucggcagcgugucccugaccaucgccacggucugcuuccucaugcagaucgccauccuggugaccaccgugacccugcacuucaagcagcacgagugcgacagcccggcguccaaccaggucaugcccugcgagcccaucaucaucgagcgcaacaucacggagaucguguaccucaacaacaccaccaucgagaaggagaucugccccgagguggucgaguaccggaacuggagcaagccgcagugccagaucaccggguucgcccccuucuccaaggacaacagcauccgccuguccgccggcggggacaucugggugacgcgggagcccuacgugagcugcgaccccggcaagugcuaccaguucgcccuggggcagggcaccacccucgacaacaagcacuccaacgacaccauccacgaccgcaucccgcaccggacgcugcugaugaacgagcucggcguccccuuccaccuggggacccgccaggugugcguggccuggagcuccagcuccugccacgacggcaaggcguggcugcacgucugcgugaccggggacgacaagaacgccaccgccagcuucaucuacgacggccggcucguggacuccaucgggagcuggucccagaacauccugcgcacgcaggagagcgagugcgucugcaucaacgggaccugcaccguggugaugaccgacggcuccgccagcgggcgggcggacacgcgcauccuguucaucgaggagggcaagaucguccacaucagcccccucuccgggagcgcccagcacguggaggagugcuccugcuacccccgguacccggacgugcgcugcaucugccgggacaacuggaagggcagcaaccgccccgucaucgacaucaacauggaggacuacuccaucgacagcuccuacgugugcagcggccuggugggggacacgccccggaacgacgaccgcuccagcaacuccaacugccgggaccccaacaacgagcgcggcaacccgggggucaagggcugggccuucgacaacggggacgacguguggaugggccggaccaucagcaaggaccugcgcuccggcuacgagaccuucaaggucaucgggggcuggagcacccccaacuccaagagccagaucaaccgccaggugaucguggacuccaacaacuggagcggguacuccggcaucuucagcgucgagggcaagagcugcaucaaccggugcuucuacguggagcucauccgcggccggaagcaggagacccgcgugugguggaccuccaacagcaucgucguguucugcggcaccuccgggacguacggcaccgggagcuggcccgacggcgccaacaucaacuucaugcccaucuga

SEQ ID NO: 78103 - RNA, 1410 nt, Artificial Sequence; identical to SEQ ID NO: 78102
  derived and/or modified CDS sequence (opt1) from neuraminidase__InfluenzaA__AAO46224

SEQ ID NO: 78104 - RNA, 1410 nt, Artificial Sequence
  derived and/or modified CDS sequence (opt1) from neuraminidase__InfluenzaA__AAO46225
augaaccccaaccagaagaucaucaccaucggcuucgugagccugaucaucgccaccgucugcuuccucaugcagaucgccauccuggcgacgaccgugacccugcacuucaagcagcacgagugcgacuccccggccagcaaccaggugaugcccugcgagcccaucaucaucgagcgcaacaucaccaagaucgucuaccucaacaacacgaccaucgagaaggagaucugccccgaggugguggaguaccggaacugguccaagccgcagugccacaucaccggguucgcccccuucagcaaggacaacuccauccgccugagcgccggcggggacaucugggucacccgggagcccuacguguccugcgaccccggcaagugcuaccaguucgcccuggggcagggcacgacccucgacaacaagcacagcaacgacaccauccacgaccgcaucccgcaccggacccugcugaugaacgagcucggcgugcccuuccaccuggggacgcgccaggucugcguggcgugguccagcuccagcugccacgacggcaaggccuggcugcacgugugcgucaccggggacgacaagaacgccaccgccuccuucaucuacgacggccggcucguggacagcaucggguccuggagccacaacauccugcgcacccaggaguccgagugcgugugcaucaacggcacgugcaccgucgugaugaccgacggcagcgcguccgggcgggccgacacccgcauccuguucaucaaggagggcaagaucgugcacaucagcccccucagcggguccgcccagcacgucgaggagugcagcugcuacccccgguacccggacgugcgcugcaucugccgggacaacuggaagggcuccaaccgccccgugaucgacaucaacauggaggacuacagcaucgacuccagcuacgucugcuccggccuggugggggacacgccccggaacaacgacggcagcuccaacagcaacugccgcgaccccaacaacgagcgggggaacccgggcgugaaggggugggccuucgacaacggcgacgacgucuggaugggccgcaccaucuccaaggaccugcggagcggguacgagaccuucaaggugaucggcgggugguccacccccaacagcaagucccaggucaaccgccaggugaucguggacaacaacaacuggagcggcuacuccgggaucuucagcgucgagggcaaguccugcaucaaccggugcuucuacguggagcucauccgcggccgccagcaggagacgcgggugugguggaccagcaacagcaucgucguguucugcgggaccuccggcaccuacgggacgggcagcuggcccgacggggccaacaucaacuucaugcccaucuga

SEQ ID NO: 78105 - RNA, 1410 nt, Artificial Sequence
  derived and/or modified CDS sequence (opt1) from neuraminidase__InfluenzaA__AAO46226
augaaccccaaccagaagaucaucaccaucggcagcgugucccugaccaucgccacggucugcuuccucaugcagaucgccauccuggugaccaccgugacccugcacuucaagcagcacgagugcgacagcccggcguccaaccaggucaugcccugcgagcccaucaucaucgagcgcaacaucacggagaucguguaccucaacaacaccaccaucgagaaggagaucugccccgagguggucgaguaccggaacuggagcaagccgcagugccagaucaccggguucgcccccuucuccaaggacaacagcauccgccuguccgccggcggggacaucugggugacgcgggagcccuacgugagcugcgaccccggcaagugcuaccaguucgcccuggggcagggcaccacccucgacaacaagcacuccaacgacaccauccacgaccgcaucccgcaccggacgcugcugaugaacgagcucggcguccccuuccaccuggggacccgccaggugugcguggccuggagcuccagcuccugccacgacggcaaggcguggcugcacgucugcgugaccggggacgacgagaacgccaccgccagcuucaucuacgacggccggcucguggacuccaucgggagcuggucccagaacauccugcgcacgcaggagagcgagugcgucugcaucaacgggaccugcaccguggugaugaccgacggcuccgccagcgggcgggcggacacgcgcauccuguucaucgaggagggcaagaucguccacaucagcccccucuccgggagcgcccagcacguggaggagugcuccugcuacccccgguacccggacgugcgcugcaucugccgggacaacuggaagggcagcaaccgccccgucaucgacaucaacauggaggacuacuccaucgacagcuccuacgugugcagcggccuggugggggacacgccccggaacgacgaccgcuccagcaacuccaacugccgggaccccaacaacgagcgcggcaacccgggggucaagggcugggccuucgacaacggggacgacguguggaugggccggaccaucagcaaggaccugcgcuccggcuacgagaccuucaaggucaucgggggcuggagcacccccaacuccaagagccagaucaaccgccaggugaucguggacuccaacaacuggagcggguacuccggcaucuucagcgucgagggcaagagcugcaucaaccggugcuucuacguggagcucauccgcggccggcagcaggagacccgcgugugguggaccuccaacagcaucgucguguucugcggcaccuccgggacguacggcaccgggagcuggcccgacggcgccaacaucaacuucaugcccaucuga

SEQ ID NO: 78106 - RNA, 1410 nt, Artificial Sequence
  derived and/or modified CDS sequence (opt1) from neuraminidase__InfluenzaA__AAO46229
augaaccccaaccagaagaucaucaccaucggcagcgugucccugaccaucgccacggucugcuuccucaugcagaucgccauccuggugaccaccgugacccugcacuucaagcagcacgagugcgacagcccggcguccaaccaggucaugcccugcgagcccaucaucaucgagcgcaacaucacggagaucauguaccucaacaacaccaccaucgagaaggagaucugccccgaggugguggaguaccggaacuggagcaagccgcagugccagaucaccggguucgcccccuucuccaaggacaacagcauccgccuguccgccggcggggacaucugggucacgcgggagcccuacgugagcugcgaccccggcaagugcuaccaguucgcccuggggcagggcaccacccucgacaacaagcacuccaacgacaccauccacgaccgcaucccgcaccggacgcugcugaugaacgagcucggcgugcccuuccaccuggggacccgccaggucugcguggccuggagcuccagcuccugccacgacggcaaggcguggcugcacgugugcgucaccggggacgacaagaacgccaccgccagcuucaucuacgacggccggcucguggacuccaucgggagcuggucccagaacauccugcgcacgcaggagagcgagugcgugugcaucaacgggaccugcaccgucgugaugaccgacggcuccgccagcgggcgggcggacacgcgcauccuguucaucgaggagggcaagaucgugcacaucagcccccucuccgggagcgcccagcacgucgaggagugcuccugcuacccccgguacccggacgugcgcugcaucugccgggacaacuggaagggcagcaaccgccccaucaucgacaucaacauggaggacuacuccaucgacagcuccuacgugugcagcggccuggucggggacacgccccggaacgacgaccgcuccagcaacuccaacugccggaaccccaacaacgagcgcggcaacccgggggugaagggcugggccuucgacaacggggacgacguguggaugggccggaccaucagcaaggaccugcgcuccggcuacgagaccuucaaggucaucgggggcuggagcacccccaacuccaagagccagaucaaccgccaggugaucgucgacuccaacaacuggagcggguacuccggcaucuucagcguggagggcaagagcugcaucaaccggugcuucuacguggagcucauccgcggccggcagcaggagacccgcgucugguggaccuccaacagcaucgugguguucugcggcaccuccgggacguacggcaccgggagcuggcccgacggcgccaacaucaacuucaugcccaucuga

SEQ ID NO: 78107 - RNA, 1410 nt, Artificial Sequence
  derived and/or modified CDS sequence (opt1) from neuraminidase__InfluenzaA__AAO46230
augaaccccaaccagaagaucaucaccaucggcagcgugucccugaccaucgccacggucugcuuccucaugcagaucgccauccuggugaccaccgugacccugcacuucaagcagcacgagugcgacagcccggcguccaaccaggucaugcccugcgagcccaucaucaucgagcgcaaccucacggagaucguguaccugaacaacaccaccaucgagaaggagaucugccccgagguggucgaguaccggaacuggagcaagccgcagugccagaucaccggguucgcccccuucuccaaggacaacagcauccgccuguccgccggcggggacaucugggugacgcgggagcccuacgugagcugcgaccccggcaagugcuaccaguucgcccucgggcagggcaccacccuggacaacaagcacuccaacgacaccauccacgaccgcaucccgcaccggacgcugcucaugaacgagcugggcguccccuuccaccuggggacccgccaggugugcguggccuggagcuccagcuccugccacgacggcaaggcguggcuccacgucugcgugaccggggacgacaagaacgccaccgccagcuucaucuacgacggccggcugguggacuccaucgggagcuggucccagaacauccugcgcacgcaggagagcgagugcgucugcaucaacgggaccugcaccguggugaugaccgacggcuccgccagcgggcgggcggacacgcgcauccucuucaucgaggagggcaagaucguccacaucagcccccuguccgggagcgcccagcacguggaggagugcuccugcuacccccgguacccggacgugcgcugcaucugccgggacaacuggaagggcagcaaccgccccgucaucgacaucaacauggaggacuacuccaucgacagcuccuacgugugcagcggccuggugggggacacgccccggaacgacgaccgcuccagcaacuccaacugccgggaccccaacaacgagcgcggcaacccgggggucaagggcugggccuucgacaacggggacgacguguggaugggccggaccaucagcaaggaccuccgcuccggcuacgagaccuucaaggucaucgggggcuggagcacccccaacuccaagagccagaucaaccgccaggugaucguggacuccaacaacuggagcggguacuccggcaucuucagcgucgagggcaagagcugcaucaaccggugcuucuacguggagcugauccgcggccggcagcaggagacccgcgugugguggaccuccaacagcaucgucguguucugcggcaccuccgggacguacggcaccgggagcuggcccgacggcgccaacaucaacuucaugcccaucuga

SEQ ID NO: 78108 - RNA, 1410 nt, Artificial Sequence
  derived and/or modified CDS sequence (opt1) from neuraminidase__InfluenzaA__AAO46231
augaaccccaaccagaagaucaucaccaucggcagcgugucccugaccaucgccacggucugcuuccucaugcagaucgccauccuggugaccaccgugacccugcacuucaagcagcacgacugcgacagcccggcguccaaccaggucaugcccugcgagcccaucaucaucgagcgcaacaucacggagaucguguaccucaacaacaccaccaucgagaaggagaucugccccaagguggucgaguaccggaacuggagcaagccgcagugccagaucaccggguucgcccccuucuccaaggacaacagcauccgccuguccgccggcggggacaucugggugacgcgggagcccuacgugagcugcgaccccgucaagugcuaccaguucgcccugggccaggggaccacccucgacaacaagcacuccaacgacaccgugcacgaccgcaucccgcaccggacgcugcugaugaacgagcucggcgugcccuuccaccugggcacccgccaggucugcaucgccuggagcuccagcuccugccacgacgggaaggcguggcugcacgugugcgugaccggcgacgacaagaacgccaccgccagcuucaucuacgacgggcggcucgucgacuccaucggcagcuggucccagaacauccugcgcacgcaggagagcgagugcgugugcaucaacgggaccugcaccguggucaugaccgacggcuccgccagcggccgggcggacacgcgcauccuguucaucgaggaggggaagaucgugcacaucagcccccucuccggcagcgcccagcacguggaggagugcuccugcuacccccgguacccggacguccgcugcaucugccgggacaacuggaaggggagcaaccgccccgugaucgacaucaacauggaggacuacuccaucgacagcuccuacgugugcagcggccuggucggcgacacgccccggaacgacgaccgcuccagcaacuccaacugccggaaccccaacaacgagcgcgggaacccgggcgugaaggggugggccuucgacaacggcgacgacgucuggauggggcggaccaucagcaaggaccugcgcuccggcuacgagaccuucaaggugaucggcggguggagcacccccaacuccaagagccagaucaaccgccaggugaucgucgacuccaacaacuggagcggcuacuccgggaucuucagcguggagggcaagagcugcaucaaccggugcuucuacguggagcucauccgcgggcggcagcaggagacccgcgucugguggaccuccaacagcaucgugguguucugcggcaccuccggcacguacgggaccggcagcuggcccgacggggccaacaucaacuucaugcccaucuga

SEQ ID NO: 78109 - RNA, 1410 nt, Artificial Sequence
  derived and/or modified CDS sequence (opt1) from neuraminidase__InfluenzaA__AAO46232
augaaccccaaccagaagaucaucaccaucggcagcgugucccugaccaucgccacggucugcuuccucaugcagaucgccauccuggugaccaccgugacccugcacuucaagcagcacgagugcgacagcccggcguccaaccaggucaugcccugcgagcccacgaucaucgagcgcaacaucaccgagaucguguaccucaacaacaccaccaucgagaaggagaucugccccaagguggucgaguaccggaacuggagcaagccgcagugccagaucacgggguucgcccccuucuccaaggacaacagcauccgccuguccgccggcggggacaucugggugacccgggagcccuacgugagcugcgaccccggcaagugcuaccaguucgcccuggggcagggcaccacccucgacaacaagcacuccaacgacacgauccacgaccgcaucccgcaccggacccugcugaugaacgagcucggcguccccuuccaccuggggacccgccaggugugcaucgccuggagcuccagcuccugccacgacggcaaggcguggcugcacgugugcgucaccggggacgacaagaacgccacggccagcuucaucuacgacggccggcucguggacuccaucgggagcuggucccagaacauccugcgcacccaggagagcgagugcgugugcaucaacgggaccugcaccgucgugaugacggacggcuccgccagcgggcgggcggacacccgcauccuguucaucgaggagggcaagaucgugcacaucagcccccucuccgggagcgcccagcacgucgaggagugcuccugcuacccccgguacccggacgugcgcugcaucugccgggacaacuggaagggcagcaaccgccccaucaucgacaucaacauggaggacuacuccaucgacagcuccuacgugugcagcggccuggucggggacacgccccggaacgacgaccgcuccagcaacuccaacugccggaaccccaacaacgagcgcggcaacccgggggugaagggcugggccuucgacaacggggacgacguguggaugggccggaccaucagcaaggaccugcgcuccggcuacgagaccuucaaggucaucgggggcuggagcacccccaacuccaagagccagaucaaccgccaggugaucgucgacuccaacaacuggagcggguacuccggcaucuucagcguggagggcaagagcugcaucaaccggugcuucuacguggagcucauccgcggccggcagcaggagacccgcgucugguggaccuccaacagcaucgugguguucugcggcacguccgggaccuacggcaccgggagcuggcccgacggcgccaacaucaacuucaugcccaucuga

SEQ ID NO: 78110 - RNA, 1410 nt, Artificial Sequence
  derived and/or modified CDS sequence (opt1) from neuraminidase__InfluenzaA__AAO46233
augaaccccaaccagaagaucaucaccaucggcagcgugucccugaccaucgccgccgucugcuuccucaugcagaucgcgauccuggugacgaccgugacccugcacuucaagcagcacgagugcgacagcccggccuccaaccaggucaugcccugcgagcccaucaucaucgagcgcaacaucaccgagaucguguaccucaacaacacgaccaucgagaaggagaucugccccaagguggucgaguaccggaacuggagcaagccgcagugccagaucaccggguucgcccccuucuccaaggacaacagcauccgccuguccgccggcggggacaucugggugacccgggagcccuacgugagcugcgaccccggcaagugcuaccaguucgcccuggggcagggcacgacccucgacaacaagcacuccaacgacaccauccacgaccgcaucccgcaccggacccugcugaugaacgagcucggcguccccuuccaccuggggacgcgccaggugugcaucgcguggagcuccagcuccugccacgacggcaaggccuggcugcacgugugcgucaccggggacgacaagaacgccaccgccagcuucaucuacgacggccggcucguggacuccaucgggagcuggucccagaacauccugcgcacccaggagagcgagugcgugugcaucaacggcacgugcaccgucgugaugaccgacggcuccgcgagcgggcgggccgacacccgcauccuguucaucgaggagggcaagaucgugcacaucagcccccucuccgggagcgcccagcacgucgaggagugcuccugcuacccccgguacccggacgugcgcugcaucugccgggacaacuggaagggcagcaaccgccccguggucgacaucaacauggaggacuacuccaucgacagcuccuacgugugcagcggccuggugggggacacgccccggaacgacgaccgcuccagcaacuccaacugccggaaccccaacaacgagcgcggcaacccgggggucaagggcugggccuucgacaacggggacgacguguggaugggccggaccaucagcaaggaccugcgcuccggcuacgagaccuucaaggucaucgggggcuggagcacccccaacuccaagagccagaucaaccgccaggugaucguggacuccaacaaccggagcggguacuccggcaucuucagcgucgaggggaagggcugcaucaaccgcugcuucuacguggagcucauccggggccgccagcaggagacgcgggugugguggaccagcaacuccaucgucguguucugcgggaccagcggcaccuacgggacgggcuccuggcccgacggggccaacaucaacuucaugcccaucuga

SEQ ID NO: 78111 - RNA, 1410 nt, Artificial Sequence
  derived and/or modified CDS sequence (opt1) from neuraminidase__InfluenzaA__AAO46235
augaaccccaaccagaagaucaucaccaucggcagcgugucccugaccaucgccacggucugcuuccucaugcagaucgccauccuggugaccaccgugacccugcacuucaagcagcacgagugcgacagcccggcguccaaccaggucaugcccugcgagcccaucaucaucgagcgcaacaucacggagaucguguaccucaacaacaccaccaucgagaaggagaucugccccaagguggucgaguaccggaacuggagcaagccgcagugccagaucaccggguucgcccccuucuccaaggacaacagcauccgccuguccgccggcggggacaucugggugacgcgggagcccuacgugagcugcgaccccggcaagugcuaccaguucgcccuggggcagggcaccacccucgacaacaagcacuccaacgacaccauccacgaccgcaucccgcaccggacgcugcugaugaacgagcucggcguccccuuccaccuggggacccgccaggugugcaucgccuggagcuccagcuccugccacgacggcaaggcguggcugcacgugugcaucaccggggacgacaagaacgccaccgccagcuucaucuacgacggccggcucgucgacuccaucgggagcuggucccagaacauccugcgcacgcaggagagcgagugcgugugcaucaacgggaccugcaccguggucaugaccgacggcuccgccagcggccgggcggacacgcgcauccuguucaucgaggagggcaagaucgugcacaucagcccccucuccgggagcgcccagcacguggaggagugcuccugcuacccccgguacccgggcguccgcugcaucugccgggacaacuggaagggcagcaaccgccccgugguggacaucaacauggaggacuacuccaucgacagcuccuacgucugcagcgggcuggugggcgacacgccccggaacgacgaccgcuccagcaacuccaacugccggaaccccaacaacgagcgcgggaaccagggcgugaaggggugggccuucgacaacggcgacgacgucuggaugggccggaccaucagcaaggaccugcgcuccggguacgagaccuucaaggugaucggcggguggagcaccccgaacuccaagagccagaucaaccggcaggucaucguggacuccgacaaccgcagcggcuacuccgggaucuucagcguggagggcaagagcugcaucaaccgcugcuucuacgucgagcucauccggggccgcaagcaggagacccgggugugguggaccuccaacagcaucguggucuucugcgggaccuccggcacguacgggaccggcagcuggcccgacggggccaacaucaacuucaugcccaucuga

SEQ ID NO: 78112 - RNA, 1410 nt, Artificial Sequence
  derived and/or modified CDS sequence (opt1) from neuraminidase__InfluenzaA__AAO46236
augaaccccaaccagaagaucaucaccaucggcagcgugucccugaccaucgccacggucugcuuccucaugcacaucgccauccuggugaccaccgugacccugcacuucaagcagcacgagugcgacagcccggcguccaaccaggucaugcccugcgagcccaucaucaucgagcgcaacaucacggagaucguguaccucaacaacaccaccaucgagaaggagaucugccccaagguggucgaguaccggaacuggagcaagccgcagugccagaucaccggguucgcccccuucuccaaggacaacagcauccgccuguccgccggcggggacaucugggugacgcgggagcccuacgugagcugcgaccccggcaagugcuaccaguucgcccuggggcagggcaccacccucgacaacaagcacuccaacgacaccauccacgaccgcaucccgcaccggacgcugcugaugaacgagcucggcguccccuuccaccuggggacccgccaggugugcaucgccuggagcuccagcuccugccacgacggcaaggcguggcugcacgugugcaucaccggggacgacaagaacgccaccgccagcuucaucuacgacggccggcucgucgacuccaucgggagcuggucccagaacauccugcgcacgcaggagagcgagugcgugugcaucaacgggaccugcaccguggucaugaccgacggcuccgccagcggccgggcggacacgcgcauccuguucaucgaggagggcaagaucgugcacaucagcccccucuccgggagcgcccagcacguggaggagugcuccugcuacccccgguacccgggcguccgcugcaucugccgggacaacuggaagggcagcaaccgccccgugguggacaucaacauggaggacuacuccaucgacagcuccuacgucugcagcgggcuggugggcgacacgccccggaacgacgaccgcuccagcaacuccaacugccggaaccccaacaacgagcgcgggaaccagggcgugaaggggugggccuucgacaacggcgacgacgucuggaugggccggaccaucagcaaggaccugcgcuccggguacgagaccuucaaggugaucggcggguggagcaccccgaacuccaagagccagaucaaccggcaggucaucguggacuccgacaaccgcagcggcuacuccgggaucuucagcguggagggcaagagcugcaucaaccgcugcuucuacgucgagcucauccggggccgcaagcaggagacccgggugugguggaccuccaacagcaucguggucuucugcgggaccuccggcacguacgggaccggcagcuggcccgacggggccaacaucaacuucaugcccaucuga

SEQ ID NO: 78113 - RNA, 1410 nt, Artificial Sequence
  derived and/or modified CDS sequence (opt1) from neuraminidase__InfluenzaA__AAO46237
augaaccccaaccagaagaucaucaccaucggcagcgugucccugaccaucgccacggucugcuuccucaugcagaucgccauccuggugaccaccgugacccugcacuucaagcagcacgagugcgacagcccggcguccaaccaggucaugcccugcgagcccaucaucaucgagcgcaacaucacggagaucguguaccucaacaacaccaccaucgagaaggagaucugccccaagaucguggaguaccggaacuggagcaagccgcagugccagaucaccggguucgcccccuucuccaaggacaacagcauccgccuguccgccggcggggacaucugggucacgcgggagcccuacgugagcugcgaccccggcaagugcuaccaguucgcccuggggcagggcaccacccucgacaacaagcacuccaacgacaccauccacgaccgcaucccgcaccggacgcugcugaugaacgagcucggcgugcccuuccaccuggggacccgccaggucugcaucgccuggagcuccagcuccugccacgacggcaaggcguggcugcacgugugcaucaccggggacgacaagaacgccaccgccagcuucaucuacgacggccggcucguggacuccaucgggagcuggucccagaacauccugcgcacgcaggagagcgagugcgucugcaucaacgggaccugcaccguggugaugaccgacggcuccgccagcggccgggcggacacgcgcauccuguucaucgaggagggcaagaucguccacaucagcccccucuccgggagcgcccagcacguggaggagugcuccugcuacccccgguacccgggcgugcgcugcaucugccgggacaacuggaagggcagcaaccgccccgucguggacaucaacauggaggacuacuccaucgacagcuccuacgugugcagcgggcuggucggcgacacgccccggaacgacgaccgcuccagcaacuccaacugccggaaccccaacaacgagcgcgggaaccagggcgugaaggggugggccuucgacaacggcgacgacguguggaugggccggaccaucagcaaggaccugcgcuccggguacgagaccuucaaggucaucggcggguggagcaccccgaacuccaagagccagaucaaccgccaggugaucgucgacuccgacaaccggagcggcuacuccgggaucuucagcguggagggcaagagcugcaucaaccgcugcuucuacguggagcucauccggggccgcaagcaggagacccgggucugguggaccuccaacagcaucgugguguucugcgggaccuccggcacguacgggaccggcagcuggcccgacggggccaacaucaacuucaugcccaucuga

SEQ ID NO: 78114 - RNA, 1410 nt, Artificial Sequence
  derived and/or modified CDS sequence (opt1) from neuraminidase__InfluenzaA__AAO46238
augaaccccaaccagaagaucaucaccaucggcagcgccucccugaccaucgccacggugugcuuccucaugcagaucgcgauccuggucaccaccgugacccugcacuucaagcagcacgagugcgacagcccggccuccaaccaggugaugcccugcgagcccaucaucaucgagcgcaacaucacggagaucgucuaccucaacaacaccaccaucgagaaggagaucugccccaagaucguggaguaccggaacuggagcaagccgcagugcaagaucaccggguucgcccccuucuccaaggacaacagcauccgccuguccgccggcggggacaucugggugacgcgggagcccuacgucagcugcgaccccggcaagugcuaccaguucgcccuggggcagggcaccacccucgacaacaagcacuccaacgacaccauccacgaccgcaucccgcaccggacgcugcugaugaacgagcucggcgugcccuuccaccuggggacccgccaggugugcaucgcguggagcuccagcuccugccacgacggcaaggccuggcugcacgucugcgugaccggggacgacaagaacgccaccgccagcuucaucuacgacggccggcucguggacuccaucgggagcuggucccagaacauccugcgcacgcaggagagcgagugcgucugcaucaacgggaccugcaccguggugaugaccgacggcuccgcgagcgggcgggccgacacgcgcauccuguucaucgaggagggcaagaucguccacaucagcccccucuccgggagcgcccagcacguggaggagugcuccugcuacccccgguacccggacgugcgcugcaucugccgggacaacuggaagggcagcaaccgccccgucguggacaucaacauggaggacuacuccaucgacagcuccuacgugugcagcggccuggucggggacacgccccggaacgacgaccgcuccagcaacuccaacugccggaaccccaacaacgagaagggcaaccagggggugaagggcugggccuucgacaacggggacgacguguggaugggccgcaccaucagcaaggaccugcgguccggcuacgagaccuucaaggucaucgggggcuggagcaccccgaacuccaagagccagaucaaccgccaggugaucgucgacuccgacaaccggagcggguacuccggcaucuucagcguggagggcaagagcugcaucaaccgcugcuucuacguggagcucauccgcggccggaagcaggagacccgcgucugguggaccuccaacagcaucgugguguucugcggcaccuccgggacguacggcaccgggagcuggcccgacggcgccaacaucaaccugaugcccaucuga

SEQ ID NO: 78115 - RNA, 1410 nt, Artificial Sequence
  derived and/or modified CDS sequence (opt1) from neuraminidase__InfluenzaA__AAO46241
augaaccccaaccagaagaucaucaccaucggcagcgugucccugaccaucgccacggucugcuuccucaugcagaucgccauccuggugaccaccgugacccugcacuucaagcagcacgagugcgacagcccggcguccaaccaggucaugcccugcgagcccaucaucaucgagcgcaacaucacggagaucguguaccucaacaacaccaccaucgagaaggagaucugccccaagguggucggguaccggaacuggagcaagccgcagugccagaucaccggcuucgcccccuucuccaaggacaacagcauccgccuguccgccgggggcgacaucugggugacgcgggagcccuacgugagcugcgaccccgggaagugcuaccaguucgcccugggccagggcaccacccucgacaacaagcacuccaacgacaccauccacgaccgcaucccgcaccggacgcugcugaugaacgagcucgggguccccuuccaccugggcacccgccaggugugcaucgccuggagcuccagcuccugccacgacgggaaggcguggcugcacgugugcaucaccggcgacgacaagaacgccaccgccagcuucaucuacgacgggcggcucgucgacuccaucggcagcuggucccagaacauccugcgcacgcaggagagcgagugcgugugcaucaacgggaccugcaccguggucaugaccgacggcuccgccagcggccgggcggacacgcgcauccuguucaucgaggaggggaagaucgugcacaucagcccccucuccggcagcgcccagcacguggaggagugcuccugcuacccccgguacccgggcguccgcugcaucugccgggacaacuggaaggggagcaaccgccccgugguggacaucaacauggaggacuacuccaucgacagcuccuacgucugcagcggccuggugggggacacgccccggaacgacgaccgcuccagcaacuccaacugccggaaccccaacaacgagcgcggcaaccagggggugaagggcugggccuucgacaacggcgacgacgucuggauggggcggaccaucagcaaggaccugcgcuccggcuacgagaccuucaaggugaucgggggcuggagcaccccgaacuccaagagccagaucaaccggcaggucaucguggacuccgacaaccgcagcggguacuccggcaucuucagcguggagggcaagagcugcaucaaccgcugcuucuacgucgagcucauccgggggcgcaagcaggagacccgggugugguggaccuccaacagcaucguggucuucugcggcaccuccgggacguacggcaccgggagcuggcccgacggcgccaacaucaacuucaugcccaucuga

SEQ ID NO: 78116 - RNA, 1410 nt, Artificial Sequence
  derived and/or modified CDS sequence (opt1) from neuraminidase__InfluenzaA__AAO46245
augaaccccaaccagaagaucaucaccaucggcagcgugucccugaccaucgccacggucugcuuccucaugcagaucgccauccuggugaccaccgugacccugcacuucaagcagcacgacugcgacagcccggcguccaaccaggucaugcccugcgagcccaucaucaucgagcgcaacaucacggagaucguguaccucaacaacaccaccaucgagaaggagaucugccccaagguggucgaguaccggaacuggagcaagccgcagugccagaucaccggguucgcccccuucuccaaggacaacagcauccgccuguccgccggcggggacaucugggugacgcgggagcccuacgugagcugcgaccccgucaagugcuaccaguucgcccugggccaggggaccacccucgacaacaagcacuccaacgacaccgugcacgaccgcaucccgcaccggacgcugcugaugaacgagcucggcgugcccuuccaccugggcacccgccaggucugcaucgccuggagcuccagcuccugccacgacgggaaggcguggcugcacgugugcaucaccggcgacgacaagaacgccaccgccagcuucaucuacgacgggcggcucguggacuccaucggcagcuggucccagaacauccugcgcacgcaggagagcgagugcgucugcaucaacgggaccugcaccguggugaugaccgacggcuccgccagcggccgggcggacacgcgcauccuguucaucgaggaggggaagaucguccacaucagcccccucgccggcuccgcccagcacguggaggagugcagcugcuacccccgguacccgggggugcgcugcaucugccgggacaacuggaagggcuccaaccgccccgucguggacaucaacauggaggacuacagcaucgacuccagcuacgugugcuccggccuggucggggacacgccccggaacgacgaccgcagcuccaacagcaacugccggaaccccaacaacgagcgcggcacccagggggugaagggcugggccuucgacaacgggaacgaccuguggaugggccggaccaucuccaaggaccuccgcagcggcuacgagaccuucaaggucaucgggggcugguccaccccgaacagcaagucccagaucaaccgccaggugaucguggacagcgacaaccgguccggguacagcggcaucuucuccgucgagggcaagagcugcaucaaccgcugcuucuacguggagcugauccgggggcgcaagcaggagacccgggugugguggaccagcaacuccaucgucguguucugcggcacgagcgggaccuacggcaccggguccuggcccgacggcgccaacaucaacuucaugcccaucuga

SEQ ID NO: 78117 - RNA, 1410 nt, Artificial Sequence
  derived and/or modified CDS sequence (opt1) from neuraminidase__InfluenzaA__AAO46246
augaaccccaaccagaagaucaucaccaucggcagcgugucccugaccaucgccacggucugcuuccucaugcagaucgccauccuggcgaccaccgugacccugcacuucaagcagcacgagugcgacagcccggccuccaaccaggugaugcccugcgagcccaucaucaucgagcgcaacaucacggagaucgucuaccucaacaacaccaucaucgagaaggagaucugccccaaggugguggaguaccggaacuggagcaagccgcagugccagaucaccggguucgcccccuucuccaaggacaacagcauccgccuguccgccggcggggacaucugggucacccgggagcccuacgugagcugcgaccccggcaagugcuaccaguucgcccuggggcagggcacgacccucgacaacaagcacuccaacgacaccauccacgaccgcaccccgcaccggacgcugcugaugaacgagcucggcgugcccuuccaccuggggacccgccaggucugcaucgcguggagcuccagcuccugccacgacggcaaggccuggcugcacgugugcaucaccggggacgacaagaacgccaccgccagcuucaucuacgacggccggcucguggacuccaucgggagcuggucccagaacauccugcgcacgcaggagagcgagugcgucugcaucaacgggaccugcaccguggugaugaccgacggcuccgcgagcggccgggccgacacgcgcauccuguucaucgaggagggcaagaucguccacaucagcccccucuccgggagcgcccagcacguggaggagugcuccugcuacccccgguacccgggcgugcgcugcaucugccgggacaacuggaagggcagcaaccgccccgucguggacaucaacauggaggacuacuccaucgacagcuccuacgugugcagcgggcuggucggcgacacgccccggaacgacgaccgcuccagcaacuccaacugccggaaccccaacaacgagcgcgggaaccagggcgugaaggggugggccuucgacaacggcgacgacguguggaugggccggaccaucagcaaggaccugcgcuccggguacgagaccuucaaggucaucggcggguggagcaccccgaacuccaagagccagaucaaccgccaggugaucgucgacuccgacaaccggagcggcuacuccgggaucuucagcguggagggcaagagcugcaucaaccgcugcuucuacguggagcucauccggggccgcaagcaggagacccgggucugguggaccuccaacagcaucgccguguucugcgggaccuccggcacguacgggaccggcagcuggcccgacggggcgaacaucaacuucaugcccaucuga

SEQ ID NO: 78118 - RNA, 1410 nt, Artificial Sequence
  derived and/or modified CDS sequence (opt1) from neuraminidase__InfluenzaA__AAO46247
augaaccccaaccagaagaucaucaccaucggcagcgugucccugaccaucgccacggucugcuuccucaugcagaucgccauccuggugaccaccgugacccugcacuucaagcagcacgagugcgacagcccggcguccaaccaggucaugcccugcgagcccaucaucaucgagcgcaacaucacggagaucguguaccucaacaacaccaccaucgagaaggagaucugccccaagguggucgaguaccggaacuggagcaagccgcagugccagaucaccggguucgcccccuucuccaaggacaacagcauccgccuguccgccggcggggacaucugggugacgcgggagcccuacgugagcugcgaccccggcaagugcuaccaguucgcccuggggcagggcaccacccucgacaacaagcacuccaacgacaccauccacgaccgcaucccgcaccggacgcugcugaugaacgagcucggcguccccuuccaccuggggacccgccaggugugcaucgccuggagcuccagcuccugccacgacggcaaggcguggcugcacgugugcaucaccggggacgacaagaacgccaccgccagcuucaucuacgacggccggcucgucgacuccaucgggagcuggucccagaacauccugcgcacgcaggagagcgagugcgugugcaucaacgggaccugcaccguggucaugaccgacggcuccgccagcggccgggcggacacgcgcauccuguucaucgaggagggcaagaucgugcacaucagcccccucuccgggagcgcccagcacguggaggagugcuccugcuacccccgguacccgggcguccgcugcaucugccgggacaacuggaagggcagcaaccgccccgugaucgacaucaacauggaggacuacuccaucgacagcuccuacgugugcagcgggcuggucggcgacacgccccggaacgacgaccgcuccagcaacuccaacugccggaaccccaacaacgagcgcgggaaccagggcgugaaggggugggccuucgacaacggcgacgacguguggaugggccggaccaucagcaaggaccugcgcuccggguacgagaccuucaaggucaucggcggguggagcaccccgaacuccaagagccagaucaaccgccaggugaucgucgacuccgacaaccggagcggcuacuccgggaucuucagcguggagggcaagagcugcaucaaccgcugcuucuacguggagcucauccggggccgcaagcaggagacccgggucugguggaccuccaacagcaucgugguguucugcgggaccuccggcacguacgggaccggcagcuggcccgacggggccaacaucaacuucaugcccaucuga

SEQ ID NO: 78119 - RNA, 1410 nt, Artificial Sequence
  derived and/or modified CDS sequence (opt1) from neuraminidase__InfluenzaA__AAO46462
augaaccccaaccagaagaucaucaccaucggcagcgugucccugaccaucgccacggucugcuuccucaugcagaucgccauccuggugaccaccgugacccugcacuucaagcaguacgagugcgacagcccggcguccaaccaggucaugcccugcgagcccaucaucaucgagcgcaacaucacggagaucguguaccucaacaacaccaccaucgagaaggagaucugccccaagguggucgaguaccggaacuggagcaagccgcagugccagaucaccggguucgcccccuucuccaaggacaacagcauccgccuguccgccggcggggacaucugggugacgcgggagcccuacgugagcugcgaccacggcaagugcuaccaguucgcccuggggcagggcaccacccucgacaacaagcacuccaacgacaccauccacgaccgcaucccccaccggacgcugcugaugaacgagcucggcgucccguuccaccuggggacccgccaggugugcaucgccuggagcuccagcuccugccacgacggcaaggcguggcugcacgugugcaucaccggggacgacaagaacgccaccgccagcuucaucuacgacggccggcucgucgacuccaucgggagcuggucccagaacauccugcgcacgcaggagagcgagugcgugugcaucaacgggaccugcaccguggucaugaccgacggcuccgccagcggccgggcggacacgcgcauccuguucaucgaggagggcaagaucgugcacaucagcccccucuccgggagcgcccagcacguggaggagugcuccugcuacccccgguaccccggcguccgcugcaucugccgggacaacuggaagggcagcaaccgcccggugguggacaucaacauggaggacuacuccaucgacagcuccuacgucugcagcgggcuggugggcgacacgccccggaacgacgaccgcuccagcaacuccaacugccggaaccccaacaacgagcgcgggaaccagggcgugaaggggugggccuucgacaacggcgacgacgucuggaugggccggaccaucagcaaggaccugcgcuccggguacgagaccuucaaggugaucggcggguggagcacccccaacuccaagagccagaucaaccggcaggucaucguggacuccgacaaccgcagcggcuacuccgggaucuucagcguggagggcaagagcugcaucaaccgcugcuucuacgucgagcucauccggggccgcaagcaggagacccgggugugguggaccuccaacagcaucguggucuucugcgggaccuccggcacguacgggaccggcagcuggccggacggggccaacaucaacuucaugcccaucuga

SEQ ID NO: 78120 - RNA, 1410 nt, Artificial Sequence; identical to SEQ ID NO: 78119
  derived and/or modified CDS sequence (opt1) from neuraminidase__InfluenzaA__AAO46463

SEQ ID NO: 78121 - RNA, 1410 nt, Artificial Sequence; identical to SEQ ID NO: 78119
  derived and/or modified CDS sequence (opt1) from neuraminidase__InfluenzaA__AAO46464

SEQ ID NO: 78122 - RNA, 1410 nt, Artificial Sequence; identical to SEQ ID NO: 78119
  derived and/or modified CDS sequence (opt1) from neuraminidase__InfluenzaA__AAO46465

SEQ ID NO: 78123 - RNA, 1410 nt, Artificial Sequence; identical to SEQ ID NO: 78119
  derived and/or modified CDS sequence (opt1) from neuraminidase__InfluenzaA__AAO46466

SEQ ID NO: 78124 - RNA, 1410 nt, Artificial Sequence
  derived and/or modified CDS sequence (opt1) from neuraminidase__InfluenzaA__AAO46467
augaaccccaaccagaagaucaucaccaucggcagcgugucccugaccaucgccacggucugcuuccucaugcagaucgccauccuggugaccaccgugacccugcacuucaagcaguacgagugcgacagcccggcguccaaccaggucaugcccugcgagcccaucaucaucgagcgcaacaucacggagaucguguaccucaacaacaccaccaucgagaaggagaucugccccaagguggucgaguaccggaacuggagcaagccgcagugccagaucaccggguucgcccccuucuccaaggacaacagcauccgccuguccgccggcggggacaucugggugacgcgggagcccuacgugagcugcgaccacggcaagugcuaccaguucgcccuggggcagggcaccacccucgacaacaagcacuccaacgacaccauccacgaccgcaucccccaccggacgcugcugaugaacgagcucggcgucccguuccaccuggggacccgccaggugugcaucgccuggagcuccagcuccugccacgacggcaaggcguggcugcacgugugcaucaccggggacgacaagaacgccaccgccagcuucaucuacgacggccggcucgucgacuccaucgggagcuggucccagaacauccugcgcacgcaggagagcgagugcgugugcaucaacgggaccugcaccguggucaugaccgacggcuccgccagcggccgggcggacacgcgcauccuguucaucgaggagggcaagaucgugcacaucagcccccucaccggguccgcccagcacguggaggagugcagcugcuacccccgguaccccggcguccgcugcaucugccgggacaacuggaagggcuccaaccgcccggugguggacaucaacauggaggacuacagcaucgacuccagcuacgucugcuccgggcuggugggcgacacgccccggaacgacgaccgcagcuccaacagcaacugccggaaccccaacaacgagcgcgggaaccagggcgugaaggggugggccuucgacaacggcgacgacgucuggaugggccggaccaucuccaaggaccugcgcagcggguacgagaccuucaaggugaucggcgggugguccacccccaacagcaagucccagaucaaccggcaggucaucguggacagcgacaaccgcuccggcuacagcgggaucuucuccguggagggcaagagcugcaucaaccgcugcuucuacgucgagcucauccggggccgcaagcaggagacccgggugugguggaccagcaacuccaucguggucuucugcgggacgagcggcaccuacgggaccggcuccuggccggacggggccaacaucaacuucaugcccaucuga

SEQ ID NO: 78125 - RNA, 1410 nt, Artificial Sequence
  derived and/or modified CDS sequence (opt1) from neuraminidase__InfluenzaA__AAO46468
augaaccccaaccagaagaucaucaccaucggcagcgugucccugaccaucgccacggucugcuuccucaugcagaucgccauccuggugaccaccgugacccugcacuucaagcaguacgagugcgacuucccggcgagcaaccaggucaugcccugcgagcccaucaucaucgagcgcaacaucacggagaucguguaccucaacaacaccaccaucgagaaggagaucugccccaagguggucgaguaccggaacugguccaagccgcagugccagaucaccggguucgcccccuucagcaaggacaacuccauccgccugagcgccggcggggacaucugggugacgcgggagcccuacguguccugcgaccacggcaagugcuaccaguucgcccuggggcagggcaccacccucgacaacaagcacagcaacgacaccauccacgaccgcaucccccaccggacgcugcugaugaacgagcucggcgucccguuccaccuggggacccgccaggugugcaucgccugguccagcuccagcugccacgacggcaaggcguggcugcacgugugcaucaccggggacgacaagaacgccaccgccuccuucaucuacgacggccggcucgucgacagcaucggguccuggagccagaacauccugcgcacgcaggaguccgagugcgugugcaucaacgggaccugcaccguggucaugaccgacggcagcgccuccggccgggcggacacgcgcauccuguucaucgaggagggcaagaucgugcacaucagcccccucagcggguccgcccagcacguggaggagugcagcugcuacccccgguaccccggcguccgcugcaucugccgggacaacuggaagggcuccaaccgcccggugguggacaucaacauggaggacuacagcaucgacuccagcuacgucugcuccgggcuggugggcgacacgccccggaacgacgaccgcagcuccaacagcaacugccggaaccccaacaacgagcgcgggaaccagggcgugaaggggugggccuucgacaacggcgacgacgucuggaugggccggaccaucuccaaggaccugcgcagcggguacgagaccuucaaggugaucggcgggugguccacccccaacagcaagucccagaucaaccggcaggucaucguggacagcgacaaccgcuccggcuacagcgggaucuucuccguggagggcaagagcugcaucaaccgcugcuucuacgucgagcucauccggggccgcaagcaggagacccgggugugguggaccagcaacuccaucguggucuucugcgggaccagcggcacguacgggaccggcuccuggccggacggggccaacaucaacuucaugcccaucuga

SEQ ID NO: 78126 - RNA, 1410 nt, Artificial Sequence; identical to SEQ ID NO: 78119
  derived and/or modified CDS sequence (opt1) from neuraminidase__InfluenzaA__AAO46469

SEQ ID NO: 78127 - RNA, 1410 nt, Artificial Sequence
  derived and/or modified CDS sequence (opt1) from neuraminidase__InfluenzaA__AAO46471
augaaccccaaccagaagaucaucaccaucggcagcgugucccugaccaucgccacggucugcuuccucaugcagaucgccauccuggugaccaccgugacccugcacuucaagcaguacgagugcgacagcccggcguccaaccaggucaugcccugcgagcccaucaucaucgagcgcaacaucacggagaucguguaccucaacaacaccaccaucgagaaggagaucugccccaagguggucgaguaccggaacuggagcaagccgcagugccagaucaccggguucgcccccuucuccaaggacaacagcauccgccuguccgccggcggggacaucugggugacgcgggagcccuacgugagcugcgaccccggcaagugcuaccaguucgcccuggggcagggcaccacccucgacaacaagcacuccaacgacaccauccacgaccgcaucccgcaccggacgcugcugaugaacgagcucggcguccccuuccaccuggggacccgccaggugugcaucgccuggagcuccagcuccugccacgacggcaaggcguggcugcacgugugcaucaccggggacgacaagaacgccaccgccagcuucaucuacgacggccggcucgucgacuccaucgggagcuggucccagaacauccugcgcacgcaggagagcgagugcgugugcaucaacgggaccugcaccguggucaugaccgacggcuccgccagcggccgggcggacacgcgcauccuguucaucgaggagggcaagaucgugcacaucagcccccucuccgggagcgcccagcacguggaggagugcuccugcuacccccgguacccgggcguccgcugcaucugccgggacaacuggaagggcagcaaccgccccgugguggacaucaacauggaggacuacuccaucgacagcuccuacgucugcagcgggcuggugggcgacacgccccggaacgacgaccgcuccagcaacuccaacugccggaaccccaacaacgagcgcgggaaccagggcgugaaggggugggccuucgacaacggcgacgacgucuggaugggccggaccaucagcaaggaccugcgcuccggguacgagaccuucaaggugaucggcggguggagcaccccgaacuccaagagccagaucaaccggcaggucaucguggacuccgacaaccgcagcggcuacuccgggaucuucagcguggagggcaagagcugcaucaaccgcugcuucuacgucgagcucauccggggccgcaagcaggagacccgggugugguggaccuccaacagcaucguggucuucugcgggaccuccggcacguacgggaccggcagcuggcccgacggggccaacaucaacuucaugcccaucuga

SEQ ID NO: 78128 - RNA, 1410 nt, Artificial Sequence
  derived and/or modified CDS sequence (opt1) from neuraminidase__InfluenzaA__AAO46472
augaaccccaaccagaagaucaucaccaucggcagcgugucccugaccaucgccacggucugcuuccucaugcagaucgccauccuggugaccaccgugacccugcacuucaagcaguacgagugcgacagcccggcguccaaccaggucaugcccugcgagcccaucacgaucgagcgcaacaucaccgagaucguguaccucaacaacaccaccaucgagaaggagaucugccccaagguggucgaguaccggaacuggagcaagccgcagugccagaucacgggguucgcccccuucuccaaggacaacagcauccgccuguccgccggcggggacaucugggugacccgggagcccuacgugagcugcgaccccggcaagugcuaccaguucgcccuggggcagggcaccacccucgacaacaagcacuccaacgacacgauccacgaccgcaucccgcaccggacccugcugaugaacgagcucggcguccccuuccaccuggggacccgccaggugugcaucgccuggagcuccagcuccugccacgacggcaaggcguggcugcacgugugcaucaccggggacgacaagaacgccacggccagcuucaucuacgacggccggcucgucgacuccaucgggagcuggucccagaacauccugcgcacccaggagagcgagugcgugugcaucaacgggaccugcaccguggucaugacggacggcuccgccagcggccgggcggacacccgcauccuguucaucgaggagggcaagaucgugcacaucagcccccucuccgggagcgcccagcacguggaggagugcuccugcuacccccgguacccgggcguccgcugcaucugccgggacaacuggaagggcagcaaccgccccgugguggacaucaacauggaggacuacuccaucgacagcuccuacgucugcagcgggcuggugggcgacacgccccggaacgacgaccgcuccagcaacuccaacugccggaaccccaacaacgagcgcgggaaccagggcgugaaggggugggccuucgacaacggcgacgacgucuggaugggccggaccaucagcaaggaccugcgcuccggguacgagaccuucaaggugaucagcggcugguccaccccgaacagcaagucccagaucaaccggcaggucaucguggacagcgacaaccgcuccggguacagcggcaucuucagcguggaggggaaguccugcaucaaccgcugcuucuacgucgagcucauccggggccgcaagcaggagacccgggugugguggaccagcaacuccaucguggucuucugcggcacgagcgggaccuacggcaccggguccuggcccgacggcgccaacaucaacuucaugcccaucuga

SEQ ID NO: 78129 - RNA, 1410 nt, Artificial Sequence; identical to SEQ ID NO: 78119
  derived and/or modified CDS sequence (opt1) from neuraminidase__InfluenzaA__AAO46473

SEQ ID NO: 78130 - RNA, 1410 nt, Artificial Sequence; identical to SEQ ID NO: 78119
  derived and/or modified CDS sequence (opt1) from neuraminidase__InfluenzaA__AAO46474

SEQ ID NO: 78131 - RNA, 1410 nt, Artificial Sequence; identical to SEQ ID NO: 78119
  derived and/or modified CDS sequence (opt1) from neuraminidase__InfluenzaA__AAO46475

SEQ ID NO: 78132 - RNA, 1410 nt, Artificial Sequence
  derived and/or modified CDS sequence (opt1) from neuraminidase__InfluenzaA__AAO46476
augaaccccaaccagaagaucaucaccaucggcagcgugucccugaccaucgccacggucugcuuccucaugcagaucgccauccuggugaccaccgugacccugcacuuccgccaguacgagugcgacagcccggcgaacaaccaggucaugcccugcgagcccacgaucaucgagcggaacaucaccgagaucguguaccucaacaacaccaccaucgagaaggagaucugccccaagcugguggaguaccgcaacugguccaagccgcagugcaagaucacgggguucgcccccuucagcaaggacaacuccauccggcugagcgccggcggggacaucugggucacccgcgagcccuacguguccugcgaccccggcaagugcuaccaguucgcccucgggcagggcaccacccuggacaacaagcacagcaacgacacgauccacgaccggaucccgcaccgcacccugcucaugaacgagcugggcgugcccuuccaccuggggacccggcaggucugcaucgccugguccagcuccagcugccacgacggcaaggcguggcuccacgugugcgugaccggggacgacaagaacgccacggccuccuucaucuacgacggccgccuggucgacagcaucggguccuggagccagaacauccugcggacccaggaguccgagugcgugugcaucaacgggaccugcaccguggucaugacggacggcagcgccuccggccgcgcggacacccggauccucuucaucgaggagggcaagaucgugcacaucagcccccugagcggguccgcccagcacguggaggagugcagcugcuacccccgcuacccgggcguccggugcaucugccgcgacaacuggaagggcuccaaccggcccgugguggacaucaacgucgaggacuacagcaucgacuccagcuacgugugcuccgggcuggugggcgacacgccccgcaacaacgaccggagcuccaacagcaacugccgcaaccccaacaacgagcgggggaaccacggcgucaaggggugggccuucgacgacggcaacgacguguggaugggccgcaccaucuccaaggaccuccggagcggguacgagaccuucaaggucaucggcgggugguccaccccgaacagcaagucccagaucaaccgccaggugaucguggacagcgacaaccgcuccggcuacagcgggaucuucuccgucgagggcaagagcugcaucaaccggugcuucuacguggagcugauccgcggccgggagcaggagacccgcgugugguggaccagcaacuccaucgucguguucugcgggacgagcggcaccuacgggaccggcuccuggcccgacggggccgacaucaaccugaugcccaucuga

SEQ ID NO: 78133 - RNA, 1410 nt, Artificial Sequence; identical to SEQ ID NO: 78119
  derived and/or modified CDS sequence (opt1) from neuraminidase__InfluenzaA__AAO46477

SEQ ID NO: 78134 - RNA, 1410 nt, Artificial Sequence
  derived and/or modified CDS sequence (opt1) from neuraminidase__InfluenzaA__AAO46478
augaaccccaaccagaagaucaucaccaucggcagcgugucccugaucaucgccaccgucugcuuccucaugcagaucgccauccuggugacgaccgugacccugcacuucaagcagcacgagugcgacagcccguccagcaaccaggucaugcccugcgagcccaucaucaucgagcgcaacaucaccgagaucguguaccucaacaacacgaccaucgagaaggagaccugccccaagcugguggaguaccggaacugguccaagccgcagugcaagaucaccggguucgcgcccuucagcaaggacaacuccauccgccugagcgccggcggggacaucugggucacgcgggagcccuacguguccugcgaccccggcaagugcuaccaguucgcccucgggcagggcaccacccuggacaacaagcacagcaacgacaccauccacgaccgcaucccgcaccggacgcugcucaugaacgagcugggcgugcccuuccaccuggggacccgccaggucugcaucgccugguccagcuccagcugccacgacggcaaggccuggcuccacgugugcgugaccggggacgacaagaacgcgaccgccuccuucaucuacgacggccggcuggucgacagcaucggguccuggagccagaacauccugcgcacgcaggaguccgagugcgugugcaucaacgggaccugcaccguggucaugaccgacggcaacgccagcgggcgggccgacacgcgcauccucuucaucgaggagggcaagaucgugcacaucagcccccuguccgggagcgcgcagcacguggaggagugcuccugcuacccccgguacccggacguccgcugcaucugccgggacaacuggaagggcagcaaccgccccaucguggacaucaacaugaaggacuacuccaucgacagcuccuacgugugcagcggccuggucggggacacgccccggaacgacgaccgcuccagcaaguccaacugccggaaccccaacaacgagcgcggcaaccacggggugaagggcugggccuucgacaacgggaacgacguguggaugggccggaccaucagcaaggaccuccgcuccggcuacgagaccuucaaggucaucgggggcuggagcaccccgaacuccaagagccagaucaaccgccaggugaucgucgacuccgacaaccggagcggguacuccggcaucuucagcguggagggcaagagcugcaucaaccgcugcuucuacguggagcugauccggggccgcgagcaggagacccgggucugguggaccuccaacagcaucgugguguucugcggcaccuccgggacguacggcaccgggagcuggcccgacggcgccaacaucaacuucaugcccaucuga

SEQ ID NO: 78135 - RNA, 1410 nt, Artificial Sequence
  derived and/or modified CDS sequence (opt1) from neuraminidase__InfluenzaA__AAO46479
augaaccccaaccagaagaucaucaccaucggcagcgugucccugaccaucgccacggucugcuuccucaugcagaucgccauccuggugaccaccgugacccugcacuucaagcaguacgagugcgacagcccggcguccaaccgcgucaugcccugcgagcccaucaucaucgagcggaacaucacggagaucguguaccucaacaacaccaccaucgagaaggagaucugccccaagguggucgaguaccgcaacuggagcaagccgcagugccagaucaccggguucgcccccuucuccaaggacaacagcauccggcuguccgccggcggggacaucugggugacgcgcgagcccuacgugagcugcgaccccggcaagugcuaccaguucgcccuggggcagggcaccacccucgacaacaagcacuccaacgacaccauccacgaccggaucccgcaccgcacgcugcugaugaacgagcucggcguccccuuccaccuggggacccgccaggugugcaucgccuggagcuccagcuccugccacgacggcaaggcguggcugcacgugugcaucaccggggacgacaagaacgccaccgccagcuucaucuacgacggccggcucgucgacuccaucgggagcuggucccagaacauccugcggacgcaggagagcgagugcgugugcaucaacgggaccugcaccguggucaugaccgacggcuccgccagcggccgcgcggacacgcggauccuguucaucgaggagggcaagaucgugcacaucagcccccucuccgggagcgcccagcacguggaggagugcuccugcuacccccgcuacccgggcguccggugcaucugccgcgacaacuggaagggcagcaaccggcccgugguggacaucaacauggaggacuacuccaucgacagcuccuacgucugcagcgggcuggugggcgacacgccccgcaacgacgaccgguccagcaacuccaacugccgcaaccccaacaacgagcgggggaaccagggcgugaaggggugggccuucgacaacggcgacgacgucuggaugggccgcaccaucagcaaggaccugcgguccggguacgagaccuucaaggugaucggcggguggagcaccccgaacuccaagagccagaucaaccgccaggucaucguggacuccggcaaccgcagcggguacuccggcaucuucagcguggagggcaagagcugcaucaaccggugcuucuacgucgagcucauccgcgggcggaagcaggagacccgcgugugguggaccuccaacagcaucguggucuucugcggcaccuccgggacguacggcaccgggagcuggcccgacggcgccaacaucaacuucaugcccaucuga

SEQ ID NO: 78136 - RNA, 1410 nt, Artificial Sequence
  derived and/or modified CDS sequence (opt1) from neuraminidase__InfluenzaA__AAO46481
augaaccccaaccagaagaucaucaccaucggcagcgugucccugaccaucgccacggucugcuuccucaugcagaucgccauccuggugaccaccgugacccugcacuucaagcaguacgagugcgacagcccggcgaacaaccaggucaugcccugcgagcccaucaucaucgagcgcaacaucacggagaucguguaccucaccaacaccaccaucgagaaggagaucugccccaagcugguggaguaccggaacugguccaagccgcagugcaagaucacgggguucgcccccuucagcaaggacaacuccauccgccugagcgccggcggggacaucugggucacccgggagcccuacguguccugcgaccccggcaagugcuaccaguucgcccucgggcagggcaccacccuggacaacaagcacagcaacgacacgauccacgaccgcaucccgcaccggacccugcucaugaacgagcugggcgugcccuuccaccuggggacccgccaggucugcaucgccugguccagcuccagcugccacgacggcaaggcguggcuccacgugugcgugaccggggacgacaagaacgccacggccuccuucaucuacgacggccggcuggucgacagcaucggguccuggagccagaacauccugcgcacccaggaguccgagugcgugugcaucaacgggaccugcaccguggucaugacggacggcagcgccuccggccgggcggacacccgcauccucuucaucgaggagggcaagaucgugcacaucagcccccugagcggguccgcccagcacguggaggagugcagcugcuacccccgguacccgggcguccgcugcaucugccgggacaacuggaagggcuccaaccgccccgugguggacaucaacgucaaggacuacagcaucgacucccgguacgugugcagcgggcuggugggcgacacgccccgcaacaacgaccgguccagcaacuccaacugccgcaaccccaacaacgagcgggggaaccacggcgucaaggggugggccuucgacgacggcaacgacguguggaugggccgcaccaucagcaaggacucccggagcggguacgagaccuucaaggucaucggcgggugguccaccccgaacagcaagucccagaucaaccgccaggugaucguggacagcgacaaccgcuccggcuacagcgggaucuucuccgucgagagcaagagcugcaucaaccggugcuucuacguggagcucauccgcggccgggagcaggagacccgcgugugguggaccuccaacagcaucgucguguucugcggcacguccgggaccuacggcaccgggagcuggcccgacggcgccgacaucaaccugaugcccaucuga

SEQ ID NO: 78137 - RNA, 1410 nt, Artificial Sequence
  derived and/or modified CDS sequence (opt1) from neuraminidase__InfluenzaA__AAO46482
augaaccccaaccagaagaucaucaccaucggcagcgugucccugaccaucgccacggucugcuuccucaugcagaucgccauccuggugaccaccgugacccugcacuucaagcaguacgagugcgacagcccggcgaacaaccaggucaugcccugcgagcccaugaucaucgagcgcaacaucacggagaucguguaccucaccaacaccaccaucgagaaggagaucugccccaagcugguggaguaccggaacugguccaagccgcagugcaagaucacgggguucgcccccuucagcaaggacaacuccauccgccugagcgccggcggggacaucugggucacccgggagcccuacguguccugcgaccccggcaagugcuaccaguucgcccucgggcagggcaccacccuggacaacaagcacagcaacgacacgauccacgaccgcaucccgcaccggacccugcucaugaacgagcugggcgugcccuuccaccuggggacccgccaggucugcaucgccugguccagcuccagcugccacgacggcaaggcguggcuccacgugugcgugaccggggacgacaagaacgccacggccuccuucaucuacgacggccggcuggucgacagcaucggguccuggagccagaacauccugcgcacccaggaguccgagugcgugugcaucaacgggaccugcaccguggucaugacggacggcagcgccuccggccgggcggacacccgcauccucuucaucgaggagggcaagaucgugcacaucagcccccugagcggguccgcccagcacguggaggagugcagcugcuacccccgguacccgggcguccgcugcaucugccgggacaacuggaagggcuccaaccgccccgugguggacaucaacgucaaggacuacagcaucgacucccgguacgugugcagcgggcuggugggcgacacgccccgcaacaacgaccgguccagcaacuccaacugccgcaaccccaacaacgacaaggggaaccacggcgucaaggggugggccuucgacgacggcaacgacguguggaugggccggaccaucagcaaggacucccgcagcggguacgagaccuucaaggucaucggcgggugguccaccccgaacagcaagucccagaucaaccgccaggugaucguggacagcgacaaccgguccggcuacagcgggaucuucuccgucgagggcaagagcugcaucaaccgcugcuucuacguggagcucauccggggccgcgagcaggagacccgggugugguggaccagcaacuccaucgucguguucugcgggacgagcggcaccuacgggaccggcuccuggcccgacggggccgacaucaaccugaugcccaucuga

SEQ ID NO: 78138 - RNA, 1410 nt, Artificial Sequence
  derived and/or modified CDS sequence (opt1) from neuraminidase__InfluenzaA__AAO46483
augaaccccaaccagaagaucaucaccaucggcagcgugucccugaccaucgccacggucugcuuccucaugcagaucgccauccuggugaccaccgugacccugcacuuccgccaguacgagugcgacagcccggcgaacaaccaggucaugcccugcgagcccaucaucaucgagcggaacaucacggagaucguguaccucaacaacaccaccaucgagaaggagaucugccccaagcugguggaguaccgcaacugguccaagccgcagugcaagaucaccggguucgcccccuucagcaaggacaacuccauccggcugagcgccggcggggacaucugggucacgcgcgagcccuacguguccugcgaccccggcaagugcuaccaguucgcccucgggcagggcaccacccuggacaacaagcacagcaacgacaccauccacgaccggaucccgcaccgcacgcugcucaugaacgagcugggcgugcccuuccaccuggggacccggcaggucugcaucgccugguccagcuccagcugccacgacggcaaggcguggcuccacgugugcgugaccggggacgacaagaacgccaccgccuccuucaucuacgacggccgccuggucgacagcaucggguccuggagccagaacauccugcggacgcaggaguccgagugcgugugcaucaacgggaccugcaccguggucaugaccgacggcagcgccuccggccgcgcggacacgcggauccucuucaucgaggagggcaagaucgugcacaucagcccccugagcggguccgcccagcacguggaggagugcagcugcuacccccgcuacccgggcguccggugcaucugccgcgacaacuggaagggcuccaaccggcccgugguggacaucaacgucgaggacuacagcaucgacuccagcuacgugugcuccgggcuggugggcgacacgccccgcaacaacgaccggagcuccaacagcaacugccgcaaccccaacaacgagcgggggaaccacggcgucaaggggugggccuucgacgacggcaacgacguguggaugggccgcaccaucuccaaggaccuccggagcggguacgagaccuucaaggucaucggcgggugguccaccccgaacagcaagucccagaucaaccgccaggugaucguggacagcgacaaccgcuccggcuacagcgggaucuucuccgucgagggcaagagcugcaucaaccggugcuucuacguggagcugauccgcggccgggagcaggagacccgcgugugguggaccagcaacuccaucgucguguucugcgggaccagcggcacguacgggaccggcuccuggcccgacggggccgacaucaaccugaugcccaucuga

SEQ ID NO: 78139 - RNA, 1410 nt, Artificial Sequence
  derived and/or modified CDS sequence (opt1) from neuraminidase__InfluenzaA__AAO46485
augaaccccaaccagaagaucaucaccaucggcagcgugucccugaccaucgccacggucugcuuccucaugcagaucgccauccuggugaccaccgugacccugcacuucaagcaguacgagugcgacagcccggcgaacaaccaggucaugcccugcgagcccaucaucaucgagcgcaacaucacggagaucguguaccucaccaacaccaccaucgagaaggagaucugccccaagcugguggaguaccggaacugguccaagccgcagugcaagaucacgggguucgcccccuucagcaaggacaacuccauccgccugagcgccggcggggacaucugggucacccgggagcccuacguguccugcgaccccggcaagugcuaccaguucgcccucgggcagggcaccacccuggacaacaagcacagcaacgacacgauccacgaccgcaucccgcaccggacccugcucaugaacgagcugggcgugcccuuccaccuggggacccgccaggucugcaucgccugguccagcuccagcugccacgacggcaaggcguggcuccacgugugcgugaccggggacgacaagaacgccacggccuccuucaucuacgacggccggcuggucgacagcaucggguccuggagccagaacauccugcgcacccaggaguccgagugcgugugcaucaacgggaccugcaccguggucaugacggacggcagcgccuccggccgggcggacacccgcauccucuucaucgaggagggcaagaucgugcacaucagcccccugagcggguccgcccagcacguggaggagugcagcugcuacccccgguacccgggcguccgcugcaucugccgggacaacuggaagggcuccaaccgccccgugguggacaucaacgucaaggacuacagcaucgacucccgguacgugugcagcgggcuggugggcgacacgccccgcaacaacgaccgguccagcaacuccaacugccgcaaccccaacaacgacaaggggaaccacggcgucaaggggugggccuucgacgacggcaacgacguguggaugggccggaccaucagcaaggacucccgcagcggguacgagaccuucaaggucaucggcgggugguccaccccgaacagcaagucccagaucaaccgccaggugaucguggacagcgacaaccgguccggcuacagcgggaucuucuccgucgagggcaagagcugcaucaaccgcugcuucuacguggagcucauccggggccgcgagcaggagacccgggugugguggaccagcaacuccaucgucguguucugcgggacgagcggcaccuacgggaccggcuccuggcccgacggggccgacaucaaccugaugcccaucuga

SEQ ID NO: 78140 - RNA, 1410 nt, Artificial Sequence
  derived and/or modified CDS sequence (opt1) from neuraminidase__InfluenzaA__AAO46486
augaaccccaaccagaagaucaucaccaucggcagcgugucccugaccaucgccacgaucugcuuccucaugcagaucgccauccuggucaccaccgugacccugcacuucaagcaguacgagugcgacagcccggcgaacaaccaggugaugcccugcgagcccaucaucaucgagcgcaacaucacggagaucgucuaccucaccaacaccaccaucgagaaggagaucugccccaagcugguggaguaccggaacugguccaagccgcagugcaagaucacgggguucgcccccuucagcaaggacaacuccauccgccugagcgccggcggggacaucugggugacccgggagcccuacgucuccugcgaccccggcaagugcuaccaguucgcccucgggcagggcaccacccuggacaacaagcacagcaacgacacgauccacgaccgcaucccgcaccggacccugcucaugaacgagcugggcgugcccuuccaccuggggacccgccaggugugcaucgccugguccagcuccagcugccacgacggcaaggcguggcuccacgucugcgugaccggggacgacaagaacgccacggccuccuucaucuacgacggccggcugguggacagcaucggguccuggagccagaacauccugcgcacccaggaguccgagugcgucugcaucaacgggaccugcaccguggugaugacggacggcagcgccuccggccgggcggacacccgcauccucuucaucgaggagggcaagaucguccacaucagcccccugagcggguccgcccagcacguggaggagugcagcugcuacccccgguacccgggcgugcgcugcaucugccgggacaacuggaagggcuccaaccgccccgucguggacaucaacgugaaggacuacagcaucgacuccagcuacgucugcuccgggcuggugggcgacacgccccggaacaacgaccgcagcuccaacagcuacugccggaaccccaacaacgagcgcgggaaccacggcgugaaggggugggccuucgacgacggcaacgacgucuggaugggccggaccaucuccaaggacagccgcuccggguacgagaccuucaaggugaucggcggguggagcaccccgaacuccaagagccagaucaaccggcaggucaucguggacuccgacaaccgcagcggcuacuccgggaucuucagcguggagggcaagagcugcaucaaccgcugcuucuacgucgagcucauccggggccgcgagcaggagacccgggugugguggaccuccaacagcaucguggucuucugcgggacguccggcaccuacgggaccggcagcuggcccgacggggccgacaucaaccugaugcccaucuga

SEQ ID NO: 78141 - RNA, 1410 nt, Artificial Sequence
  derived and/or modified CDS sequence (opt1) from neuraminidase__InfluenzaA__AAO46489
augaaccccaaccagaagaucaucaccaucggcagcgugucccugaccaucgccacgaucugcuuccucaugcagaucgccauccuggucaccaccgugacccugcacuucaagcaguacgagugcgacagcccggcgaacaaccaggugaugcccugcgagcccaucaucaucgagcgcaacaucacggagaucgucuaccucaccaacaccaccaucgagaaggagaucugccccaagcugguggaguaccggaacugguccaagccgcagugcaagaucacgggguucgcccccuucagcaaggacaacuccauccgccugagcgccggcggggacaucugggugacccgggagcccuacgucuccugcgaccccggcaagugcuaccaguucgcccucgggcagggcaccacccugaacaacaagcacagcaacgacacgauccacgaccgcaucccgcaccggacccugcucaugaacgagcugggcgugcccuuccaccuggggacccgccaggugugcaucgccugguccagcuccagcugccacgacggcaaggcguggcuccacgucugcgugaccggggacgacaagaacgccacggccuccuucaucuacgacggccggcugguggacagcaucggguccuggagccagaacauccugcgcacccaggaguccgagugcgucugcaucaacgggaccugcaccguggugaugacggacggcagcgccuccggcaaggcggacacccggauccucuucaucgaggagggcaagaucguccacaucagcccccugagcggguccgcccagcacguggaggagugcagcugcuacccccgcuacccgggcgugcggugcaucugccgcgacaacuggaagggcuccaaccggcccgucguggacaucaacgugaaggacuacagcaucgacuccagcuacgucugcuccgggcuggugggcgacacgccccgcaacaacgaccggagcuccagcuccuacugccgcaaccccaacaacgagcgggggaaccacggcgugaaggggugggccuucgacgacggcaacgacgucuggaugggccgcaccaucagcaaggacucccggagcggguacgagaccuucaaggugaucggcgggugguccaccccgaacagcaagucccagaucaaccgccaggucaucguggacagcgacaaccgguccggcuacagcgggaucuucagcguggagggcaaguccugcaucaaccgcugcuucuacgucgagcucauccgcggccgggagcaggagacccgcgugugguggaccagcaacuccaucguggucuucugcgggacgagcggcaccuacgggaccggcuccuggcccgacggggccgacaucaaccugaugcccaucuga

SEQ ID NO: 78142 - RNA, 1410 nt, Artificial Sequence
  derived and/or modified CDS sequence (opt1) from neuraminidase__InfluenzaA__AAO46491
augaaccccaaccagaagaucaucaccaucggcagcgugucccugaccaucgccacgaucugcuuccucaugcagaucgccauccuggucaccaccgugacccugcacuucaagcaguacgagugcgacagcccggcgaacaaccaggugaugcccugcgagcccaucaucaucgagcgcaacaucacggagaucgucuaccucaccaacaccaccaucgagaaggagaucugccccaagcugguggaguaccggaacugguccaagccgcagugcaagaucacgggguucgcccccuucagcaaggacaacuccauccgccugagcgccggcggggacaucugggugacccgggagcccuacgucuccugcgaccccggcaagugcuaccaguucgcccucgggcagggcaccacccuggacaacaagcacagcaacgacacgauccacgaccgcaccccgcaccggacccugcucaugaacgagcugggcgugcccuuccaccuggggacccgccaggugugcaucgccugguccagcuccagcugccacgacggcaaggcguggcuccacgucugcgugacgggguacgacaagaacgccaccgccuccuucaucuacgacggccggcugguggacagcaucggguccuggagccagaacauccugcgcacccaggaguccgagugcgucugcaucaacgggaccugcacgguggugaugaccgacggcagcgccuccggccgggcggacaccaagauccucuucaucgaggagggcaagaucguccacaucagcccccugagcggguccgcccagcacguggaggagugcagcugcuacccccgcuacccgggcgugcggugcaucugccgcgacaacuggaagggcuccaaccggcccgucguggacaucaacgugaaggacuacagcaucgacuccagcuacgucugcuccgggcuggugggcgacacgccccgcaacaacgaccggagcuccaacagcuacugccgcaaccccaacaacgagaaggggaaccacggcgugaaggggugggccuucgacgacggcaacgacgucuggaugggccggaccaucuccgaggacagccgcuccggguacgagaccuucaaggugaucggcggguggagcaccccgaacuccaagcuccagaucaaccggcaggucaucguggacagcgacaaccgcuccggcuacagcgggaucuucuccguggagggcaagagcugcaucaaccggugcuucuacgucgagcugauccgcggccgcgagcaggagacccgggugugguggacgagcaacuccaucguggucuucugcgggaccagcggcaccuacgggaccggcuccuggcccgacggggccgacaucaaccugaugcccaucuga

SEQ ID NO: 78143 - RNA, 1410 nt, Artificial Sequence; identical to SEQ ID NO: 78142
  derived and/or modified CDS sequence (opt1) from neuraminidase__InfluenzaA__AAO46492

SEQ ID NO: 78144 - RNA, 1410 nt, Artificial Sequence
  derived and/or modified CDS sequence (opt1) from neuraminidase__InfluenzaA__AAO88264
augaacaccaaccagcgcaucaucaccaucggcacggugugccugaucgucgggaucgugagccuccugcugcagaucggcaacaucgugucccucuggaucagccacuccauccagaccgggaagaagaacuacagcaagaucugcuccaagagcgucaucaccuacgagaacaacaccugggugaaccagacguacgugaacaucuccaacaucaacaucgccgacggccagggggucaacagcaucauccuggccggcaacuccagccugugccccaucuccggcugggcgaucuacagcaaggacaacuccauccggaucgggagcaagggcgacaucuucgugauccgcgagccguucaucuccugcagccaccucgagugccggaccuucuuccugacccagggggcccugcucaacgaccgccacuccaacggcaccgugaaggaccggagccccuaccgcacgcugauguccugccccaucggggaggcccccagcccguacaacagccgguucgaguccgucgccuggagcgccuccgcgugccacgacggcaugggcuggcugaccaucgggaucagcggccccgacaacggggccguggccgugcucaaguacaacggcaucaucaccgacaccaucaaguccuggcgcaacaagauccugcggacgcaggagagcgagugcgucugcaucaacggcuccugcuucaccaucaugaccgacgggcccagcaacggccaggccuccuacaagaucuucaagauggagaaggggaagaucaucaagagcguggagcuggacgcgcccaacuaccacuacgaggagugcuccugcuacccggacaccggcaagguggucugcgugugcagcgacaacuggcacgccuccaaccgccccugggugagcuucgaccagaaccucgacuaccagaucggguacaucugcuccggcgucuucggcgacaacccccggagcaacgacgggcgcggcaacugcgggcccgugcuguccaacggcgccaacggggugaagggcuucagcuuccgguacggcaacggggucuggaucggccgcacgaaguccaucagcagccgguccggguucgagaugaucugggacccgaacggcuggaccgagaccgacagcuccuucagcaucaagcaggacgugaucgcccugaccgacugguccggguacagcggcuccuucgugcagcaccccgagcucacgggcaugaacugcauccgccccugcuucugggucgagcugauccgggggcagcccaaggagagcaccaucuggaccuccggcagcuccaucagcuucugcgggguggacuccgagaccgccagcugguccuggccggacggcgcggaccugcccuucacgaucgacaaguga

SEQ ID NO: 78145 - RNA, 1410 nt, Artificial Sequence
  derived and/or modified CDS sequence (opt1) from neuraminidase__InfluenzaA__AAQ10334
augaaccccaaccagaagaucaucaccaucggcagcgugucccugaccaucgccacgaucugcuuccucaugcagaucgccauccuggucaccaccgugacccugcacuucaagcaguacgagugcaacccgccgcccaacaaccaggugaugcucugcgagcccacgaucaucgagcgcaacaucaccgagaucgucuaccugaccaacaccacgaucgagaaggagaucugccccaagcuggcggaguaccggaacuggagcaagccccagugcaagaucaccggguucgcccccuucuccaaggacaacagcauccgccucuccgccggcggggacaucugggugacccgggagcccuacgugagcugcgacccgggcaagugcuaccaguucgcccuggggcagggcaccacgcugaacaaccgccacuccaacgacaccguccacgaccggacccccuaccgcacccuccugaugaacgagcugggcgugcccuuccaccucgggacgaagcaggucugcaucgccuggagcuccagcuccugccacgacggcaaggcguggcugcacgugugcgugaccgggcacaacgagaacgccaccgccagcuucaucuacaacggccggcugguggacuccaucgggagcugguccaagaacauccuccgcacccaggagagcgagugcgucugcaucaacggcacgugcaccguggugaugaccgacggcuccgccagcgggcgggcggacaccaagauccuguucaucgaggagggcaagaucguccacaucagcccccuguccgggagcgcccagcacguggaggagugcuccugcuacccgcgcuaccccggcgugcggugcgucugccgcgacaacuggaagggcagcaaccggcccaucguggacaucaacgugaaggacuacuccaucgucagcuccuacgugugcagcgggcucgugggcgacacgccccgcaagaacgacuccagcuccagcuccuacugccugaacccgaacaacgaggagggcgggcacggggucaagggcugggccuucgacgacggcaacgacguguggauggggcggaccaucagcgagaagcugcgcuccggcuacgagaccuucaaggucaucgggggcuggagcaagcccaacuccaagcuccagaucaaccgccaggugaucguggaccgggggaaccggagcggcuacuccggcaucuucagcgucgaggggaaguccugcaucaaccgcugcuucuacguggagcugauccggggccgcaagcaggagaccgaggugugguggacgagcaacagcaucgucguguucugcgggaccuccggcaccuacgggaccggcagcuggcccgacggcgccgacaucaaccugaugcccaucuga

SEQ ID NO: 78146 - RNA, 1410 nt, Artificial Sequence; identical to SEQ ID NO: 78145
  derived and/or modified CDS sequence (opt1) from neuraminidase__InfluenzaA__AAQ10335

SEQ ID NO: 78147 - RNA, 1410 nt, Artificial Sequence
  derived and/or modified CDS sequence (opt1) from neuraminidase__InfluenzaA__AAQ10336
augaaccccaaccagaagaucaucaccaucggcagcgugucccugaccaucgccacgaucugcuuccucaugcagaucgccauccuggucaccaccgugacccugcacuucaagcaguacgagugcaacccgccgcccaacaaccaggugaugcucugcgagcccacgaucaucgagcgcaacaucaccgagaucgucuaccugaccaacaccacgaucgagaaggagaucugccccaagcuggcggaguaccggaacuggagcaagccccagugcaagaucaccggguucgcccccuucuccaaggacaacagcauccgccucuccgccggcggggacaucugggugacccgggagcccuacgugagcugcgacccgggcaagugcuaccaguucgcccuggggcagggcaccacgcugaacaaccgccacuccaacgacaccguccacgaccggacccccuaccgcacccuccugaugaacgagcugggcgugcccuuccaccucgggacgaagcaggucugcaucgccuggagcuccagcuccugccacgacggcaaggcguggcugcacgugugcgugaccgggcacaacgagaacgccaccgccagcuucaucuacaacggccggcugguggacuccaucgggagcugguccaagaacauccuccgcacccaggagagcgagugcgucugcaucaacggcacgugcaccguggugaugaccgacggcuccgccagcgggcgggcggacaccaagauccuguucaucgaggagggcaagaucguccacaucagcccccuguccgggagcgcccagcacguggaggagugcuccugcuacccgcgcuaccccggcgugcggugcgucugccgcgacaacuggaagggcagcaaccggcccaucguggacaucaacgugaaggacuacuccaucgucagcuccuacgugugcagcgggcucgugggcgacacgccccgcaagaacgacuccagcuccagcuccuacugccugaacccgaacaacgaggagggcgggcacggggucaagggcugggccuucgacgacggcaacgacguguggauggggcggaccaucagcgagaagcugcgcuccggcuacgagaccuucaaggucaucgggggcuggagcaagcccaacuccaagcuccagaucaaccgccaggugaucguggaccgggggaaccggagcggcuacuccggcaucuucagcgucgaggggaaguccugcaucaaccgcugcuucuacguggagcugauccggggccgcaagcaggagaccgaggugugguggacgagcaacagcaucgucguguucugcgggaccuccggcaccuacgggaccggcagcuggcccgacggcgccgagaucaaccugaugcccaucuga

SEQ ID NO: 78148 - RNA, 1410 nt, Artificial Sequence; identical to SEQ ID NO: 78145
  derived and/or modified CDS sequence (opt1) from neuraminidase__InfluenzaA__AAQ10337

SEQ ID NO: 78149 - RNA, 1410 nt, Artificial Sequence
  derived and/or modified CDS sequence (opt1) from neuraminidase__InfluenzaA__AAQ10339
augaaccccaaccagaagaucaucaccaucggcagcgugucccugaccaucgccacgaucugcuuccucaugcagaucgccauccuggucaccaccgugacccugcacuucaagcaguacgagugcaacagcccgcccaacaaccaggugaugcucugcgagcccacgaucaucgagcgcaacaucaccgagaucgucuaccugaccaacaccacgaucgagaaggagaucugccccaagcuggcggaguaccggaacugguccaagccgcagugcaagaucaccggguucgcccccuucagcaaggacaacuccauccgccucagcgccggcggggacaucugggugacccgggagcccuacguguccugcgaccccgacaagugcuaccaguucgcccugggccaggggaccacgcugaacaaccgccacagcaacgacaccguccacgaccggaccccguaccgcacccuccugaugaacgagcugggcgugcccuuccaccucggcacgaagcaggucugcaucgccugguccagcuccagcugccacgacgggaaggcguggcugcacgugugcgugaccggccacgacgagaacgccaccgccuccuucaucuacgacgggcggcugguggacagcaucggcuccuggagcaagaagauccuccgcacccaggaguccgagugcgucugcaucaacgggacgugcaccguggugaugaccgacggcagcgccuccggccgggcggacaccaagauccuguucaucgaggaggggaagaucguccacaucagcccccugagcggcuccgcccagcacguggaggagugcagcugcuacccccgcuacccgggggugcggugcgucugccgcgacaacuggaagggcuccaaccggcccaucguggacaucaacgugaaggacuacagcaucgucuccagcuacgugugcuccggccucgugggggacacgccccgcaagaacgacagcuccagcuccagccacugccugaaccccaacaacgaggagggcgggcacggcgucaaggggugggccuucgacgacggcaacgacguguggaugggccggaccaucuccgagacccugcgcagcggguacgagaccuucaaggucaucgagggcugguccaagccgaacagcaagcuccagaucaaccgccaggugaucguggaccgggggaaccgguccggcuacagcgggaucuucuccgucgagggcaagagcugcaucaaccgcugcuucuacguggagcugauccggggccgcaagcaggagacggaggugugguggaccagcaacuccaucgucguguucugcgggaccagcggcaccuacgggacgggcuccuggcccgacggggccgacaucaaccugaugcccaucuga

SEQ ID NO: 78150 - RNA, 1410 nt, Artificial Sequence
  derived and/or modified CDS sequence (opt1) from neuraminidase__InfluenzaA__AAQ10341
augaaccccaaccagaagaucaucaccaucggcagcgugucccugaccaucgccacgaucugcuuccucaugcagaucgccauccuggucaccaccgugacccugcacuucaagcaguacgagugcaacagcccgcccaacaaccaggugaugcucugcgagcccacgaucaucgagcgcaacaucaccgagaucgucuaccugaccaacaccacgaucgagaaggagaucugccccaagcuggcggaguaccggaacugguccaagccgcagugcaagaucaccggguucgcccccuucagcaaggacaacuccauccgccucagcgccggcggggacaucugggugacccgggagcccuacguguccugcgaccccgacaagugcuaccaguucgcccugggccaggggaccacgcugaacaaccgccacagcaacgacaccguccacgaccggaccccguaccgcacccuccugaugaacgagcugggcgugcccuuccaccucggcacgaagcaggucugcaucgccugguccagcuccagcugccacgacgggaaggcguggcugcacgugugcgugaccggccacgacgagaacgccaccgccuccuucaucuacgacgggcggcugguggacagcaucggcuccuggagcaagaagauccuccgcacccaggaguccgagugcgucugcaucaacgggacgugcaccguggugaugaccgacggcagcgccuccggccgggcggacaccaagauccuguucaucgaggaggggaagaucguccacaucagcccccugagcggcuccgcccagcacguggaggagugcagcugcuacccccgcuacccgggggugcggugcgucugccgcgacaacuggaagggcuccaaccggcccaucguggacaucaacgugaaggacuacagcaucgucuccagcuacgugugcuccggccucgugggggacacgccccgcaagaacgacagcuccagcuccagccacugccugaaccccaacaacgaggagggcgggcacggcgucaaggggugggccuucgacgacggcaacgacguguggaugggccggaccaucuccgagaagcugcgcagcggguacgagaccuucaaggucaucgagggcugguccaagccgaacagcaagcuccagaucaaccgccaggugaucguggaccgggggaaccgguccggcuacagcgggaucuucuccgucgagggcaagagcugcaucaaccgcugcuucuacguggagcugauccggggccgcaagcaggagaccgaggugugguggacgagcaacuccaucgucguguucugcgggaccagcggcaccuacgggaccggcuccuggcccgacggggccgacaucaaccugaugcccaucuga

SEQ ID NO: 78151 - RNA, 1410 nt, Artificial Sequence
  derived and/or modified CDS sequence (opt1) from neuraminidase__InfluenzaA__AAQ10343
augaaccccaaccagaagaucaucaccaucggcagcgugucccugaccaucgccacgaucugcuuccucaugcagaucgccauccuggucaccaccgugacccugcacuucaagcaguacgagugcagcuccccgcccaacaaccaggugaugcucugcgagcccacgaucaucgagcgcaacaucaccgagaucgucuaccugaccaacaccacgaucgagaaggagaucugccccaagcuggcggaguaccggaacuggagcaagccgcagugcaagaucaccggguucgcccccuucuccaaggacaacagcauccgccucuccgccggcggggacaucugggugacccgggagcccuacgugagcugcgaccccgacaagugcuaccaguucgcccugggccaggggaccacgcugaacaaccgccacuccaacgacaccguccacgaccggaccccguaccgcacccuccugaugaacgagcugggcgugcccuuccaccucggcacgaagcaggucugcaucgccuggagcuccagcuccugccacgacgggaaggcguggcugcacgugugcgugaccggccacgacgagaacgccaccgccagcuucaucuacgacgggcggcugguggacuccaucggcagcugguccaagaagauccuccgcacccaggagagcgagugcgucugcaucaacgggacgugcaccguggugaugaccgacggcuccgccagcggccgggcggacaccaagauccuguucaucgaggaggggaagaucguccacaucagcccccuguccggcagcgcccagcacguggaggagugcuccugcuacccccgcuacccgggggugcggugcgucugccgcgacaacuggaagggcagcaaccggcccaucguggacaucaacgugaaggacuacuccaucgucagcuccuacgugugcagcggccucgugggggacacgccccgcaagaacgacuccagcuccagcucccacugccugaaccccaacaacgaggagggcgggcacggcgucaaggggugggccuucgacgacggcaacgacguguggaugggccggaccaucagcgagaaguuccgcuccggguacgagaccuucaaggucaucgagggcuggagcaagccgaacuccaagcugcagaucaaccgccaggugaucguggaccgggggaaccggagcggcuacuccgggaucuucagcgucgagggcaagagcugcaucaaccgcugcuucuacguggagcucauccggggccgcaagcaggagaccgaggugugguggacguccaacagcaucgucgccuucugcgggaccuccggcaccuacgggaccggcagcuggcccgacggggccgacaucaaccugaugcccaucuga

SEQ ID NO: 78152 - RNA, 1191 nt, Artificial Sequence
  derived and/or modified CDS sequence (opt1) from neuraminidase__InfluenzaA__AAQ10344
augaaccccaaccagaagaucaucaccaucggcagcgugucccugaccaucgccaccaucugcuuccucaugcagaucgccauccuggucaccaccgugacccugcacuucaagcaguacgagugcaacagcccgcccaacaaccaggcgaugcucugcgagcccacgaucaucgagcgcaacaucaccgagaucguguaccugaccaacaccacgaucgagaaggagaucugccccaagcuggccgaguaccggaacugguccaagccgcagugcaagaucaccggguucgcccccuucagcaaggacaacuccauccgccucagcgccggcggggacaucugggucacccgggagcccuacguguccugcgaccccgacaagugcuaccaguucgcccugggccaggggaccacgcugaacaaccgccacagcaacgacaccgugcacgaccggaccccguaccgcacccuccugaugaacgagcugggcguccccuuccaccucggcacgaagcaggucugcaucgcgugguccagcuccagcugccacgacgggaaggccuggcugcacgugugcgugaccggccacgacgagaacgccaccgccuccuucaucuacgacgggcggcugguggacagcaucggcuccuggagcaagaagauccuccgcacccaggaguccgagugcgugugcaucaacgggacgugcaccgucgugaugaccgacggcagcgcguccggccgggccgacaccaagauccuguucaucgaggaggggaagaucgugcacacgagcaagcugagcggcuccgcccagcacgucgaggagugcagcugcuacccccgcuaccccggggugcggugcgugugccgcgacaacuggaagggcuccaaccggccgaucgucgacaucaacgugaaggacuacagcaucguguccagcuacgucugcuccggccucgugggggacacgccccgcaagaacgacagcuccagcuccagccacugccugaaccccaacaacgaggagggcgggcacggcgugaaggggugggccuucgacgacggcaacgacgucuggaugggccggaccaucuccgagaaguuccgcagcggguacgagaccuucaaggugaucgagggcugguccaagcccaacagcaagcugcagaucaacuccaagagcuga

SEQ ID NO: 78153 - RNA, 1416 nt, Artificial Sequence
  derived and/or modified CDS sequence (opt1) from neuraminidase__InfluenzaA__AAR11366
augaaccccaaccagaagcuguucgcccucagcggcguggccaucgcgcuguccguccugaaccuccugaucgggaucagcaacgugggccugaacgugucccuccaccugaaggagaaggggccgaagcaggaggagaaccugaccugcaccacgaucaaccagaacaacaccaccgucguggagaacaccuacgugaacaacacgaccaucaucaccaagggcaccgaccucaagacgcccagcuaccugcugcucaacaagucccugugcaacgucgagggguggguggugaucgccaaggacaacgccguccgcuucggcgagagcgagcagaucaucgugacccgggagcccuacguguccugcgaccccaccggcugcaagauguacgcccugcaccaggggaccacgauccgcaacaagcacagcaacggcaccauccacgaccggaccgccuuccgcgggcucaucuccaccccgcugggcacgccgcccaccgucagcaacuccgacuucaugugcgugggguggagcuccacgaccugccacgacggcaucgcgcggaugaccaucugcauccagggcaacaacgacaacgccaccgccaccguguacuacaaccgccggcugaccacgaccaucaagaccugggcccgcaacauccuccggacccaggagagcgagugcgucugccacaacgggacgugcgcgguggugaugaccgacggcuccgccagcucccaggccuacaccaaggucauguacuuccacaaggggcugguggugaaggaggaggagcugcgcggcagcgcccggcacaucgaggagugcuccugcuacggccacaaccagaaggugaccugcgucugccgcgacaacuggcagggggccaaccggcccaucaucgagaucgacaugaacacgcucgagcacaccagccgcuacgugugcaccggcauccugaccgacacgagccggcccggggacaaguccagcggcgacugcuccaaccccaucaccgggagccccggcgcgcccggcgucaagggguucggcuuccugaacggggacaacaccuggcucggccgcaccaucuccccgcggagccgcuccggguucgagaugcugaagauccccaacgccggcaccgaccccaacagccggaucgccgagcgccaggagaucguggacaacaacaacugguccggcuacagcggguccuucaucgacuacuggaacgacaacagcgagugcuacaaccccugcuucuacgucgagcugauccggggccgcccggaggaggccaaguacgugugguggacguccaacagccucaucgcccugugcgggucccccuuccccgugggccccgggagcuucccggacggcgcgcagauccaguacuucuccuga

SEQ ID NO: 78154 - RNA, 1350 nt, Artificial Sequence
  derived and/or modified CDS sequence (opt1) from neuraminidase__InfluenzaA__AAS89005
augaaccccaacaagaagaucaucaccaucggcagcaucugcauggugaccgggauggucucccugaugcuccagaucggcaaccugaucagcaucugggugucccacagcauccacacggggaaccagcagaaggccgagccgaucuccaacaccaacuuccugaccgagaaggccguggcgagcgucaagcucgccggcaacuccagccugugccccaucaacgggugggccguguacuccaaggacaacagcauccgcaucggcuccaagggcgacguguucgucauccgggagcccuucaucagcugcucccaccuggagugccgcaccuucuuccucacgcagggggcccugcugaacgacaagcacagcaacggcaccgugaaggaccggagcccccaccgcacccucauguccugcccggugggggaggcccccucccccuacaacagccgguucgaguccgucgcguggagcgccagcgccugccacgacggcaccuccuggcugacgaucgggaucagcggccccgacuccggcgccguggcggugcugaaguacaacgggaucaucaccgacaccaucaagagcuggcgcaacaacauccuccggacccaggaguccgagugcgccugcgucaacggcagcugcuucacggugaugaccgacgggccguccaacggccaggccagccacaagaucuucaagauggagaagggcaagguggucaaguccguggagcuggacgcccccaacuaccacuacgaggagugcagcugcuaccccgacgccggggagaucacgugcgugugccgcgacaacuggcacggcuccaaccggcccugggucagcuucaaccagaaccuggaguaccagaucggguacaucugcuccggcguguucggggacaacccgcgccccaacgacggcaccggcagcugcgggcccguguccagcaacggcgcguacggggucaagggcuucuccuucaaguacgggaacggcguguggaucggccggaccaagagcaccaacucccgcagcggguucgagaugaucugggaccccaacggcuggaucgagaccgacagcuccuucagcgugaagcaggacaucgucgccaucaccgacugguccggguacagcggcuccuucgugcagcacccggagcucacggggcuggacugcauccggcccugcuucugggucgagcugauccgcggccggcccaaggagagcaccaucuggaccuccggcagcuccaucagcuucugcggggugaacuccgacaccgugggcuggagcuggcccgacggggccgagcucccguucacgaucgacaaguga

SEQ ID NO: 78155 - RNA, 1350 nt, Artificial Sequence
  derived and/or modified CDS sequence (opt1) from neuraminidase__InfluenzaA__AAS89006
augaaccccaacaagaagaucaucaccaucggcagcaucugcauggugaccgggauggucucccugaugcuccagaucggcaaccugaucagcaucugggugucccacagcauccacacggggaaccagcacaaggccgagccgaucuccaacaccaacuuccugaccgagaaggccguggcgagcgucaagcucgccggcaacuccagccugugccccaucaacgggugggccguguacuccaaggacaacagcauccgcaucggcuccaagggcgacguguucgucauccgggagcccuucaucagcugcucccaccuggagugccgcaccuucuuccucacgcagggggcccugcugaacgacaagcacagcaacggcaccgugaaggaccggagcccccaccgcacccucauguccugcccggugggggaggcccccucccccuacaacagccgguucgaguccgucgcguggagcgccagcgccugccacgacggcaccuccuggcugacgaucgggaucagcggccccgacaacggcgccguggcggugcugaaguacaacgggaucaucaccgacaccaucaaguccuggcgcaacaacauccuccggacccaggagagcgagugcgccugcgucaacggcuccugcuucacggugaugaccgacgggccgagcaacggccaggccucccacaagaucuucaagauggagaagggcaagguggucaagagcguggagcuggacgcccccaacuaccacuacgaggagugcuccugcuaccccgacgccggggagaucacgugcgugugccgcgacaacuggcacggcagcaaccggcccugggucuccuucaaccagaaccuggaguaccagaucggguacaucugcagcggcguguucggggacaacccgcgccccaacgacggcaccggcuccugcgggcccgugagcuccaacggcgcguacggggucaagggcuucagcuucaaguacgggaacggcguguggaucggccggaccaaguccaccaacagccgcuccggguucgagaugaucugggaccccaacggcuggaccgagaccgacagcagcuucuccgugaagcaggacaucgucgccaucacggacuggagcggguacuccggcagcuucgugcagcacccggagcucaccgggcuggacugcauccggcccugcuucugggucgagcugauccgcggccggcccaaggaguccaccaucuggaccagcggcuccagcaucuccuucugcggggugaacagcgacacggugggcugguccuggcccgacggggccgagcucccguucaccaucgacaaguga

SEQ ID NO: 78156 - RNA, 1410 nt, Artificial Sequence
  derived and/or modified CDS sequence (opt1) from neuraminidase__InfluenzaA__AAT38822
augaaccccaaccagaagaucaucaccaucggcguggucaacaccacgcugagcaccaucgcccucuucaucggggugggcaaccugguguucaacaccgucauccacgagaagaucggggaccaccagaucgugacccacccgacgaucaugacccccgaggugcccaacugcuccgacaccaucaucaccuacaacaacacggucaucaacaacaucaccaccaccaucaucacggaggccgagcgccccuucaagagcccgcugccccucugccccuuccggggcuucuuccccuuccacaaggacaacgcgauccgccugggggagaacaaggacgugaucgugacccgggagccguacgucuccugcgacaacgacaacugcuggagcuucgcccuggcccagggcgcccuccugggcaccaagcacuccaacgggaccaucaaggaccgcacgcccuaccggagccugauccgcuuccccaucggcaccgcccccgugcucgggaacuacaaggagaucugcaucgcgugguccagcuccagcugcuucgacggcaaggaguggaugcacgugugcaugaccgggaacgacaacgacgccuccgcccagaucaucuacggcggccggaugaccgacagcaucaaguccuggcgcaaggacauccugcggacgcaggagagcgagugccagugcaucgacgggaccugcgucguggccgugaccgacggcccggcggccaacuccgccgaccaccgcgucuacuggauccgggaggggcgcaucaucaaguacgagaacgugcccaagaccaagauccagcaccuggaggagugcagcugcuacguggacaucgacgucuacugcaucugccgggacaacuggaagggcuccaaccgccccuggaugcggaucaacaacgagacgauccucgagaccggcuacgugugcagcaaguuccacuccgacacgccccgcccggccgaccccagcaucaugagcugcgacucccccagcaacgugaacgggggccccggggucaagggcuucggguucaaggccggcaacgacguguggcugggccggaccguguccaccagcgggcgcuccggcuucgagaucaucaaggucaccgagggguggaucaacagcccgaaccacgugaaguccaucacccagacccuggucagcaacaacgacugguccggcuacagcggguccuucaucgugaaggcgaaggacugcuuccagcccugcuucuacguggagcucauccggggccgccccaacaagaacgacgacgucagcuggacguccaacagcaucgugaccuucugcggccuggacaacgagcccggguccggcaacuggccggacgggagcaacaucggcuucaugcccaaguga

SEQ ID NO: 78157 - RNA, 1350 nt, Artificial Sequence; identical to SEQ ID NO: 78155
  derived and/or modified CDS sequence (opt1) from neuraminidase__InfluenzaA__AAV65827

SEQ ID NO: 78158 - RNA, 1410 nt, Artificial Sequence
  derived and/or modified CDS sequence (opt1) from neuraminidase__InfluenzaA__AAX11488
augaaccccaaccagaagaucaucaccaucggcagcgugucccugaccaucgccgccaucugcuuccucaugcagaucgcgauccuggucacgaccgugacccugcacuucaagcagcacgagugcaacagcccgcccaacaaccaggugaugcucugcgagcccaccaucaucgagcgcaacaucacggagaucgucuaccugaccaacaccaccaucgagaaggagaucugccccaagcuggccgaguaccggaacugguccaagccgcagugcaacaucacgggguucgcccccuucagcaaggacaacuccauccgccucagcgccggcggggacaucugggugacccgggagcccuacguguccugcgaccccgacaagugcuaccaguucgcccugggccaggggaccacccugaacaacggccacagcaacgacacgguccacgaccgcaccccguaccggacccuccugaugaacgagcugggcgugcccuuccaccucgggacccgccaggugugcaucgcgugguccagcuccagcugccacgacggcaaggccuggcugcacgucugcgugacgggggacgacaagaacgccaccgccuccuucaucuacaacggccggcugguggacagcaucggguccuggagcaagaagauccuccgcacccaggaguccgagugcgucugcaucaacgggaccugcacgguggugaugaccgacggcagcgcguccgggaaggccgacaccaagauccuguucaucgaggagggcaagaucguccacaucagcgcccugagcggguccgcccagcacguggaggagugcagcugcuacccccgguaccccggcgugcgcugcgucugccgggacaacuggaagggcuccaaccgcccgaucguggacaucaacgugaaggacuacagcaucgucuccagcuacgugugcuccgggcucgugggcgacacgccccggaagaacgacagcuucuccagcucccacugccuggaccccaacaacgaggagggcggccacggggucaagggcugggccuucgacgacggcaacgacguguggauggggcgcaccaucagcgagaagcugcgguccggcuacgagaccuucaaggucaucgagggguggagcaagcccaacuccaagcuccagaucaaccgccaggugaucguggagcggggcaaccgcagcggguacuccggcaucuucagcgucgagggcaaguccugcaucaaccggugcuucuacguggagcugauccgcgggcggaaggaggagaccgaggugugguggaccagcaacagcaucgucguguucugcggcacguccgggaccuacggcaccgggagcuggccggacggcgcggacaucaaccugaugcccaucuga

SEQ ID NO: 78159 - RNA, 1410 nt, Artificial Sequence
  derived and/or modified CDS sequence (opt1) from neuraminidase__InfluenzaA__AAX11508
augaaccccaaccagaagaucaucaccaucggcagcgugucccugaccaucgccacgaucugcuuccucaugcagaucgccauccuggucaccaccgugacccugcacuucaagcagcacgagugcaacagcccgcccaacaaccaggugaugcucugcgagcccacgaucaucgagcgcaacaucaccgagaucgucuaccugaccaacaccacgaucgagaaggagaucugccccaagcuggcggaguaccggaacugguccaagccgcagugcaacaucaccggguucgcccccuucagcaaggacaacuccauccgccucagcgccggcggggacaucugggugacccgggagcccuacguguccugcgaccccgacaagugcuaccaguucgcccugggccaggggaccacgcugaacaacggccacagcaacaacaccguccacgaccgcaccccguaccggacccuccugaugaacgagcugggcgugcccuuccaccucgggacgcgccaggugugcaucgccugguccagcuccagcugccacgacggcaaggcguggcugcacgucugcgugaccggggacgacaagaacgccaccgccuccuucaucuacaacggccggcugguggacagcaucggguccuggagcaagaagauccuccgcacccaggaguccgagugcgucugcaucaacggcacgugcaccguggugaugaccgacggcagcgccuccgggaaggcggacaccaagauccuguucaucgaggagggcaagaucguccacaucagcacgcugagcggguccgcccagcacguggaggagugcagcugcuacccccgguaccccggcgugcgcugcgucugccgggacaacuggaagggcuccaaccgcccgaucguggacaucaacgugaaggacuacagcaucgucuccagcuacgugugcuccgggcucgugggcgacacgccccggaagaacgacagcuucuccagcucccacugccuggaccccaacaacgaggagggcgggcacggggucaagggcugggccuucgacgacggcaacgacguguggauggggcgcaccaucagcgagaagcugcgguccggcuacgagaccuucaaggucaucgagggguggagcaagcccaacuccaagcuccagaucaaccgccaggugaucguggagcggggcaaccgcagcggguacuccggcaucuucagcgucgagggcaaguccugcaucaaccggugcuucuacguggagcugauccgcgggcggaaggaggagaccgaggugugguggaccagcaacagcaucgucguguucugcggcaccuccgggaccuacggcacggggagcuggccggacggcgccgacaucaaccugaugcccaucuga

SEQ ID NO: 78160 - RNA, 1410 nt, Artificial Sequence
  derived and/or modified CDS sequence (opt1) from neuraminidase__InfluenzaA__AAX11538
augaaccccaaccagaagaucaucaccaucggcagcgugucccugaccaucgccacgaucugcuuccucaugcagaucgccauccuggucaccaccgugacccugcacuucaagcagcacgagugcaacagcccgcccaacaaccaggugaugcucugcgagcccacgaucaucgagcgcaacaucaccgagaucgucuaccugaccaacaccacgaucgagaaggagaucugccccaagcuggcggaguaccggaacugguccaagccgcagugcaacaucaccggguucgcccccuucagcaaggacaacuccauccgccucagcgccggcggggacaucugggugacccgggagcccuacguguccugcgaccccgacaagugcuaccaguucgcccugggccaggggaccacgcugaacaacggccacagcaacgacaccguccacgagcgcaccccguaccggacccuccugaugaacgagcugggcgugcccuuccaccucgggacgcgccaggugugcaucgccugguccagcuccagcugccacgacggcaaggcguggcugcacgucugcgugaccggggacgacaagaacgccaccgccuccuucaucuacaacggccggcugguggacagcaucggguccuggagcaagaagauccuccgcacccaggaguccgagugcgucugcaucaacggcacgugcaccguggugaugaccgacggcagcgccuccgggaaggcggacaccaagauccuguucaucgaggagggcaagaucguccacaucagcacgcugagcggguccgcccagcacguggaggagugcagcugcuacccccgguaccccggcgugcgcugcgucugccgggacaacuggaagggcuccaaccgcccgaucguggacaucaacgugaaggacuacagcaucgucuccagcuacgugugcuccgggcucgugggcgacacgccccggaagaacgacagcuccagcuccagccacugccuggaccccaacaacgaggagggcgggcacggggucaagggcugggccuucgacgacggcaacgacguguggauggggcgcaccaucuccgagaagcugcggagcggcuacgagaccuucaaggucaucgaggggugguccaagcccaacagcaagcuccagaucaaccgccaggugaucguggagcggggcaaccgcuccggguacagcggcaucuucuccgucgagggcaagagcugcaucaaccggugcuucuacguggagcugauccgcgggcggaaggaggagaccgaggugugguggaccagcaacuccaucgucguguucugcggcaccagcgggaccuacggcacgggguccuggccggacggcgccgacaucaaccugaugcccaucuga

SEQ ID NO: 78161 - RNA, 1410 nt, Artificial Sequence
  derived and/or modified CDS sequence (opt1) from neuraminidase__InfluenzaA__AAX11548
augaaccccaaccagaagaucaucaccaucggcagcgugucccugaccaucgccacgaucugcuuccucaugcagaucgccauccuggucaccaccgugacccugcacuucaagcagcacgagugcaacagcccgcccaacaaccaggugaugcucugcgagcccacgaucaucgagcgcaacaucaccgagaucgucuaccugaccaacaccacgaucgagaaggagaucugccccaagcuggcggaguaccggaacugguccaagccgcagugcaacaucaccggguucgcccccuucagcaaggacaacuccauccgccucagcgccggcggggacaucugggugacccgggagcccuacguguccugcgaccccgacaagugcuaccaguucgcccugggccaggggaccacgcugaacaacggccacagcaacgacaccguccacgaccgcaccccguaccggacccuccugaugaacgagcugggcgugcccuuccaccucgggacgcgccaggugugcaucgccugguccagcuccagcugccacgacggcaaggcguggcugcacgucugcgugaccggggacgacaagaacgccaccgccuccuucaucuacaacggccggcugguggacagcaucggguccuggagcaagaagauccuccgcacccaggaguccgagugcgucugcaucaacggcacgugcaccguggugaugaccgacggcagcgccuccgggaaggcggacaccaagauccuguucaucgaggagggcaagaucguccacaucagcacgcugagcggguccgcccagcacguggaggagugcagcugcuacccccgguaccccggcgugcgcugcgucugccgggacaacuggaagggcuccaaccgcccgaucguggacaucaacgugaaggacuacagcaucgucuccagcuacgugugcuccgggcucgugggcgacacgccccggaagaacgacagcuccagcuccagccacugccuggaccccaacaacgaggagggcgggcacggggucaagggcugggccuucgacgacggcaacgacguguggauggggcgcaccaucuccgagaagcugcggagcggcuacgagaccuucaaggucaucgaggggugguccaagcccaacagcaagcuccagaucaaccgccaggugaucguggagcggggcaaccgcuccggguacagcggcaucuucuccgucgagggcaagagcugcaucaaccggugcuucuacguggagcugauccgcgggcggaaggaggagaccgaggugugguggaccagcaacuccaucgucguguucugcggcaccagcgggaccuacggcacgggguccuggccggacggcgccgacaucaaccugaugcccaucuga

SEQ ID NO: 78162 - RNA, 1410 nt, Artificial Sequence; identical to SEQ ID NO: 78159
  derived and/or modified CDS sequence (opt1) from neuraminidase__InfluenzaA__AAX11558

SEQ ID NO: 78163 - RNA, 1410 nt, Artificial Sequence
  derived and/or modified CDS sequence (opt1) from neuraminidase__InfluenzaA__AAX11568
augaaccccaaccagaagaucaucaccaucggcagcgugucccugaccaucgccacgaucugcuuccucaugcagaucgccauccuggucaccaccgugacccugcacuucaagcagcacgagugcuacagcccgcccaacaaccaggugaugcucugcgagcccacgaucaucgagcgcaacaucaccgagaucgucuaccugaccaacaccacgaucgagaaggagaucugccccaagcuggcggaguaccggaacugguccaagccgcagugcaacaucaccggguucgcccccuucagcaaggacaacuccauccgccucagcgccggcggggacaucugggugacccgggagcccuacguguccugcgaccccgacaagugcuaccaguucgcccugggccaggggaccacgcugaacaacggccacagcaacgacaccguccacgaccgcaccccguaccggacccuccugaugaacgagcugggcgugcccuuccaccucgggacgcgccaggugugcaucgccugguccagcuccagcugccacgacggcaaggcguggcugcacgucugcgugaccggggacgacaagaacgccaccgccuccuucaucuacaacggccggcugguggacagcaucggguccuggagcaagaagauccuccgcacccaggaguccgagugcgucugcaucaacggcacgugcaccguggugaugaccgacggcagcgccuccgggaaggcggacaccaagauccuguucaucgaggagggcaagaucguccacaucagcacgcugagcggguccgcccagcacguggaggagugcagcugcuacccccgguaccccggcgugcgcugcgucugccgggacaacuggaagggcuccaaccgcccgaucguggacaucaacgugaaggacuacagcaucgucuccagcuacgugugcuccgggcucgugggcgacacgccccggaagaacgacagcuucuccagcucccacugccuggaccccaacaacgaggagggcgggcacggggucaagggcugggccuucgacgacggcaacgacguguggauggggcgcaccaucagcgagaagcugcgguccggcuacgagaccuucaaggucaucgagggguggagcaagcccaacuccaagcuccagaucaaccgccaggugaucguggagcggggcaaccgcagcggguacuccggcaucuucagcgucgagggcaaguccugcaucaaccggugcuucuacguggagcugauccgcgggcggaaggaggagaccgaggugugguggaccagcaacagcaucgucguguucugcggcaccuccgggaccuacggcacggggagcuggccggacggcgccgacaucaaccugaugcccaucuga

SEQ ID NO: 78164 - RNA, 1410 nt, Artificial Sequence; identical to SEQ ID NO: 78159
  derived and/or modified CDS sequence (opt1) from neuraminidase__InfluenzaA__AAX11578

SEQ ID NO: 78165 - RNA, 1410 nt, Artificial Sequence
  derived and/or modified CDS sequence (opt1) from neuraminidase__InfluenzaA__AAX11588
augaaccccaaccagaagaucaucaccaucggcagcgugucccugaccaucgccgccaucugcuuccucaugcagaucgcgauccuggucacgaccgugacccugcacuucaagcagcacgagugcaacagcccgcccaacaaccaggugaugcucugcgagcccaccaucaucgagcgcaacaucacggagaucgucuaccugaccaacaccaccaucgagaaggagaucugccccaagcuggccgaguaccggaacugguccaagccgcagugcaacaucacgggguucgcccccuucagcaaggacaacuccauccgccucagcgccggcggggacaucugggugacccgggagcccuacguguccugcgaccccgacaagugcuaccaguucgcccugggccaggggaccacccugaacaacggccacagcaacgacacgguccacgaccgcaccccguaccggacccuccugaugaacgagcugggcgugcccuuccaccucgggacccgccaggugugcaucgcgugguccagcuccagcugccacgacggcaaggccuggcugcacgucugcgugacgggggacgacaagaacgccaccgccuccuucaucuacaacggccggcugguggacagcaucggguccuggagcaagaagauccuccgcacccaggaguccgagugcaucugcaucaacgggaccugcacggucgugaugaccgacggcagcgcguccgggaaggccgacaccaagauccuguucaucgaggagggcaagaucgugcacaucagcacccugagcggguccgcccagcacgucgaggagugcagcugcuacccccgguaccccggcgugcgcugcgugugccgggacaacuggaagggcuccaaccgcccgaucgucgacaucaacgugaaggacuacagcaucguguccagcuacgucugcuccgggcucgugggcgacacgccccggaagaacgacagcuucuccagcucccacugccuggaccccaacaacgaggagggcggccacggggugaagggcugggccuucgacgacggcaacgacgucuggauggggcgcaccaucagcgagaagcugcgguccggcuacgagaccuucaaggugaucgagggguggagcaagcccaacuccaagcuccagaucaaccgccaggucaucguggagcggggcaaccgcagcggguacuccggcaucuucagcguggagggcaaguccugcaucaaccggugcuucuacgucgagcugauccgcgggcggaaggagaagaccgaggugugguggacgagcaacagcaucguggucuucugcggcaccuccgggaccuacggcaccgggagcuggccggacggcgccgacaucaaccugaugcccaucuga

SEQ ID NO: 78166 - RNA, 1410 nt, Artificial Sequence; identical to SEQ ID NO: 78161
  derived and/or modified CDS sequence (opt1) from neuraminidase__InfluenzaA__AAX11598

SEQ ID NO: 78167 - RNA, 1410 nt, Artificial Sequence; identical to SEQ ID NO: 78161
  derived and/or modified CDS sequence (opt1) from neuraminidase__InfluenzaA__AAX11608
